(19) United States
(12) Patent Application Publication
(10) Pub. No.: US 2024/0182894 A1
(43) Pub. Date: Jun. 6, 2024

(54) COMPOSITIONS AND METHODS FOR MODULATING SOS GENE EXPRESSIONS

(71) Applicant: Molecular Axiom, LLC, San Diego, CA (US)

(72) Inventors: Lishan CHEN, San Diego, CA (US); Bohan JIN, San Diego, CA (US)

(21) Appl. No.: 18/287,699

(22) PCT Filed: Apr. 22, 2022
(86) PCT No.: PCT/US2022/026052

§ 371 Date: Oct. 20, 2023

Related U.S. Application Data
(60) Provisional application No. 63/178,420, filed on Apr. 22, 2021.

(51) Int. Cl. C12N 15/113; A61K 31/712; A61K 31/7125; A61P 35/00

(52) U.S. Cl. CPC C12N 15/113; A61K 31/712; A61K 31/7125; A61P 35/00; C12N 2310/11

(57) ABSTRACT

Described herein are compositions for modulating gene expressions. Also described herein are methods for using the compositions described herein for modulating gene expressions.

### CROSS-REFERENCE

[0001] This application claims the benefit of U.S. Provisional Application Ser. No. 63/178,420 filed on Apr. 22, 2021, the entirety of which is hereby incorporated by reference herein.

### SEQUENCE LISTING

[0002] The instant application contains a Sequence Listing which has been submitted electronically in ASCII format and is hereby incorporated by reference in its entirety. Said ASCII copy, created on Apr. 20, 2022, is named 60736-701_601_SL.txt and is 7,179,136 bytes in size.

### INCORPORATION BY REFERENCE

[0003] All publications, patents, and patent applications mentioned in this specification are herein incorporated by reference to the same extent as if each individual publication, patent, or patent application was specifically and individually indicated to be incorporated by reference. To the extent publications and patents or patent applications incorporated by reference contradict the disclosure contained in the specification, the specification is intended to supersede and/or take precedence over any such contradictory material.

### BACKGROUND

[0004] Certain diseases or conditions are caused by genetic mutations or deregulated signaling pathways due to over- or under-expression of one or more genes affecting the signaling pathway. To treat such diseases or conditions, one of the most sought after treatment option involves direct editing of the genetic mutations, or transcriptional/translational regulation using gene silencing tools or methods. RNA-induced gene silencing controls RNA expression of target genes in various aspects including transcription inactivation, mRNA degradation, transcriptional attenuation. Therefore, there remains a need for compositions and methods for effective editing gene expression at RNA levels.

### SUMMARY

[0005] Described herein, in some embodiments, is a composition comprising an antisense oligonucleotide capable of binding to son of sevenless 1 (SOS1) or son of sevenless 2 (SOS2) mRNA, wherein the antisense oligonucleotide comprises a sequence having at least 80%, 85%, or 90% similarity to one of the following sequences: SEQ ID NOs: 405, 406, 539, 540, 671, 732, 741, 742, 797, 976, 1076, 1077, 1083, 1086, 1198, 1224, 1279, 1360, 1370, 1507, 1508, 1516, 1519, 1601, 1609, 1811, 1836, 1843, 1844, 1868, 1939, 1942, 1943, 1944, 2465, 2473, 2490, 2498, 2600, 2606, 2688, 2701, 2703, 2908, 2974, 2984, 3007, 3016, 3034, 3078, 3104, 3279. 3305, 3308, 3386, 3615, 3673, 3677, 3680, 3682, 3687, 3765, 3821, 3879, 3880, 3949, 4134, 4156, 4173, 4177, 4178, 4182, 4183, 4222, 4466, 4687, 4692, 4736, 4781, 4935, 5118, 5144, 5384, 5394, 5435, 5449, 5455, 5457, 5459, 5780, 6060, 6061, 6532, 6611, 6621, 6625, 6627, 6803, 7368, 7471, 7516, 7589, 7865, 8087, 8201, 8207, 8208, 8331, 8617, 8651, or 8659. In some embodiments, the antisense oligonucleotide comprises a sequence having at least 80%, 85%, or 90% similarity to one of the following sequences: SEQ ID NOs: 405, 406, 539, 741, 742, 976, 1076, 1077, 1083, 1086, 1609, 1811, 1868, 1939, 1942, 1943, 1944, 2465, 2473, 2490, 2688, 2703, 2908, 2974, 2984, 3007, 3104, 3279, 3673, 3677, 3680, 3682, 3687, 3765, 4134, 4156, 4173, 4178, 4466, 4781, 4935, 5118, 5435, 5780, 6060, 6532, 6625, 6803, 7368, 7589, 7865, 8208, 8331, or 8651. Also described herein, ins some embodiments, is a composition comprising an antisense oligonucleotide capable of binding to son of sevenless 1 (SOS1) or son of sevenless 2 (SOS2) mRNA, wherein the antisense oligonucleotide comprises a sequence having at least 8 consecutive nucleotides of one of the following sequences: SEQ ID NOs: 405, 406, 539, 540, 671, 732, 741, 742, 797, 976, 1076, 1077, 1083, 1086, 1198, 1224, 1279, 1360, 1370, 1507, 1508, 1516, 1519, 1601, 1609, 1811, 1836, 1843, 1844, 1868, 1939, 1942, 1943, 1944, 2465, 2473, 2490, 2498, 2600, 2606, 2688, 2701, 2703, 2908, 2974, 2984, 3007, 3016, 3034, 3078, 3104, 3279, 3305, 3308, 3386, 3615, 3673, 3677, 3680, 3682, 3687, 3765, 3821, 3879, 3880, 3949, 4134, 4156, 4173, 4177, 4178, 4182, 4183, 4222, 4466, 4687, 4692, 4736, 4781, 4935, 5118, 5144, 5384, 5394, 5435, 5449, 5455, 5457, 5459, 5780, 6060, 6061, 6532, 6611, 6621, 6625, 6627, 6803, 7368, 7471, 7516, 7589, 7865, 8087, 8201, 8207, 8208, 8331, 8617, 8651, or 8659. In some embodiments, the antisense oligonucleotide comprises a sequence having at least 80%, 85%, or 90% similarity to one of the following sequences: SEQ ID NOs: 405, 406, 539, 741, 742, 976, 1076, 1077, 1083, 1086, 1609, 1811, 1868, 1939, 1942, 1943, 1944, 2465, 2473, 2490, 2688, 2703, 2908, 2974, 2984, 3007, 3104, 3279, 3673, 3677, 3680, 3682, 3687, 3765, 4134, 4156, 4173, 4178, 4466, 4781, 4935, 5118, 5435, 5780, 6060, 6532, 6625, 6803, 7368, 7589, 7865, 8208, 8331, or 8651. In some embodiments, the antisense oligonucleotide specifically binds to the SOS1 mRNA. In some embodiments, the antisense oligonucleotide specifically binds to the SOS2 mRNA. In some embodiments, the antisense oligonucleotide downregulates mRNA expression of SOS1 or SOS2 by at least 30%. In some embodiments, the antisense oligonucleotide downregulates mRNA expression of SOS1 and SOS2 each by at least 30%. In some embodiments, the antisense oligonucleotide comprises 12-30 nucleotides in length. In some embodiments, the antisense oligonucleotide comprises a gap segment and a wing segment. In some embodiments, the antisense oligonucleotide comprises 5′-wing segment and 3′-wing segment. In some embodiments, the each of the 5′-wing segment and 3′-wing segment is three linked nucleotides. In some embodiments, the antisense oligonucleotide comprises at least one 2′-modified nucleoside, at least one modified internucleotide linkage, or at least one inverted abasic moiety. In some embodiments, the at least one 2′ modified nucleotide: comprises 2′-O-methyl, 2′-O-methoxyethyl (2′-O-MOE), 2′-O-aminopropyl, 2′-deoxy, 2′-deoxy-2′-fluoro, 2′-O-aminopropyl (2′-O-AP), 2′-O-dimethylaminoethyl (2′-O-DMAOE), 2′-O-dimethylaminopropyl (2′-O-DMAP), 2′-O-dimethylaminoethyloxyethyl (2′-O-DMAEOE), or 2′-O—N-methylacetamido (2′-O-NMA) modified nucleotide; comprises locked nucleic acid (LNA) or constrained ethyl (cEt) sugar, ethylene nucleic acid (ENA); or comprises a combination thereof. In some embodiments, the at least one modified internucleotide linkage comprises a phosphorothioate linkage or a phosphorodithioate linkage. In some embodiments, the antisense oligonucleotide comprises a phosphorodiamidate morpholino oligomer (PMO), locked nucleic acid (LNA) or constrained ethyl (cEt) sugar. In some embodiments, the antisense oligonucleotide is conjugated with a peptide, antibody, lipid, carbohydrate or a polymer. In some embodiments, the antisense oligonucleotide is conjugated with a peptide, antibody, lipid, carbohydrate or a polymer via a linker. In some embodiments, the composition comprises a combination of an antisense oligonucleotide specifically binds to the SOS1 mRNA and an antisense oligonucleotide specifically binds to the SOS2 mRNA. In some embodiments, the composition comprises an antisense oligonucleotide capable of binding to both SOS1 mRNA and SOS2 mRNA. In some embodiments, the composition further comprises an excipient. In some embodiments, the composition comprises at least one active ingredient. In some embodiments, the composition is formulated for parenteral or nasal administration.

[0006] Described herein, in some aspects, is a method of modulating KRAS-mediated signaling pathway in a cancer cell in need of, comprising: treating the cancer cell with a composition comprising antisense oligonucleotide capable of binding to son of sevenless 1 (SOS1) or son of sevenless 2 (SOS2) mRNA, thereby reducing expression of SOS1 or SOS2 protein or mRNA in the cancer cell. In some embodiments, the cancer cell is a lung cancer cell, a pancreatic cancer cell, or a colon cancer cell. In some embodiments, the antisense oligonucleotide comprises a sequence having at least 80%, 85%, or 90% similarity to one of the following sequences: SEQ ID NOs: 405, 406, 539, 540, 671, 732, 741, 742, 797, 976, 1076, 1077, 1083, 1086, 1198, 1224, 1279, 1360, 1370, 1507, 1508, 1516, 1519, 1601, 1609, 1811, 1836, 1843, 1844, 1868, 1939, 1942, 1943, 1944, 2465, 2473, 2490, 2498, 2600, 2606, 2688, 2701, 2703, 2908, 2974, 2984, 3007, 3016, 3034, 3078, 3104, 3279, 3305, 3308, 3386, 3615, 3673, 3677, 3680, 3682, 3687, 3765, 3821, 3879, 3880, 3949, 4134, 4156, 4173, 4177, 4178, 4182, 4183, 4222, 4466, 4687, 4692, 4736, 4781, 4935, 5118, 5144, 5384, 5394, 5435, 5449, 5455, 5457, 5459, 5780, 6060, 6061, 6532, 6611, 6621, 6625, 6627, 6803, 7368, 7471, 7516, 7589, 7865, 8087, 8201, 8207, 8208, 8331, 8617, 8651, or 8659. In some embodiments, the antisense oligonucleotide comprises a sequence having at least 80%, 85%, or 90% similarity to one of the following sequences: SEQ ID NOs: 405, 406, 539, 741, 742, 976, 1076, 1077, 1083, 1086, 1609, 1811, 1868, 1939, 1942, 1943, 1944, 2465, 2473, 2490, 2688, 2703, 2908, 2974, 2984, 3007, 3104, 3279, 3673, 3677, 3680, 3682, 3687, 3765, 4134, 4156, 4173, 4178, 4466, 4781, 4935, 5118, 5435, 5780, 6060, 6532, 6625, 6803, 7368, 7589, 7865, 8208, 8331, or 8651. In some embodiments, the antisense oligonucleotide comprises a sequence having at least 8 consecutive nucleotides of one of the following sequences: SEQ ID NOs: 405, 406, 539, 540, 671, 732, 741, 742, 797, 976, 1076, 1077, 1083, 1086, 1198, 1224, 1279, 1360, 1370, 1507, 1508, 1516, 1519, 1601, 1609, 1811, 1836, 1843, 1844, 1868, 1939, 1942, 1943, 1944, 2465, 2473, 2490, 2498, 2600, 2606, 2688, 2701, 2703, 2908, 2974, 2984, 3007, 3016, 3034, 3078, 3104, 3279, 3305, 3308, 3386, 3615, 3673, 3677, 3680, 3682, 3687, 3765, 3821, 3879, 3880, 3949, 4134, 4156, 4173, 4177, 4178, 4182, 4183, 4222, 4466, 4687, 4692, 4736, 4781, 4935, 5118, 5144, 5384, 5394, 5435, 5449, 5455, 5457, 5459, 5780, 6060, 6061, 6532, 6611, 6621, 6625, 6627, 6803, 7368, 7471, 7516, 7589, 7865, 8087, 8201, 8207, 8208, 8331, 8617, 8651, or 8659. In some embodiments, the antisense oligonucleotide comprises a sequence having at least 80%, 85%, or 90% similarity to one of the following sequences: SEQ ID NOs: 405, 406, 539, 741, 742, 976, 1076, 1077, 1083, 1086, 1609, 1811, 1868, 1939, 1942, 1943, 1944, 2465, 2473, 2490, 2688, 2703, 2908, 2974, 2984, 3007, 3104, 3279, 3673, 3677, 3680, 3682, 3687, 3765, 4134, 4156, 4173, 4178, 4466, 4781, 4935, 5118, 5435, 5780, 6060, 6532, 6625, 6803, 7368, 7589, 7865, 8208, 8331, or 8651. In some embodiments, the composition comprises a combination of an antisense oligonucleotide specifically binds to SOS1 and an antisense oligonucleotide specifically binds to the SOS2 mRNA. In some embodiments, the composition comprises an antisense oligonucleotide capable of binding to both SOS1 mRNA and SOS2 mRNA. In some embodiments, the antisense oligonucleotide comprises at least one 2′-modified nucleoside, at least one modified internucleotide linkage, or at least one inverted abasic moiety. In some embodiments, the at least one 2′ modified nucleotide: comprises 2′-O-methyl, 2′-O-methoxyethyl (2′-O-MOE), 2′-O-aminopropyl, 2′-deoxy, 2′-deoxy-2′-fluoro, 2′-O-aminopropyl (2′-O-AP), 2′-O-dimethylaminoethyl (2′-O-DMAOE), 2′-O-dimethylaminopropyl (2′-O-DMAP), 2′-O-dimethylaminoethyloxyethyl (2′-O-DMAEOE), or 2′-O—N-methylacetamido (2′-O-NMA) modified nucleotide; comprises locked nucleic acid (LNA), locked nucleic acid (LNA), constrained ethyl (cEt) sugar or ethylene nucleic acid (ENA); or comprises a combination thereof. In some embodiments, the expression of SOS1 or SOS2 protein or mRNA is reduced at least 30%, at least 40%, at least 50% after the treatment. In some embodiments, the expression of SOS1 and SOS2 protein or mRNA is each reduced at least 30%, at least 40%, at least 50% after the treatment.

[0007] Described herein, in some aspects, is a method of treating a cancer in a subject in need thereof, the method comprising: administering the subject a composition of any one of claims 1-23, thereby treating the cancer in the subject. In some embodiments, the cancer is associated with an abnormality of KRAS-mediated signaling pathway. In some embodiments, the caner is a lung cancer, a pancreatic cancer, or a colon cancer. In some embodiments, the composition is administered to the subject in a dose and schedule sufficient to increase survival rate of the subject at least 5%. In some embodiments, the composition is administered to the subject in a dose and schedule sufficient to inhibit growth of the tumor.

[0008] Described herein, in some embodiments, is a composition comprising an antisense oligonucleotide capable of binding to son of sevenless 1 (SOS1) or son of sevenless 2 (SOS2) mRNA. In some embodiments, the antisense oligonucleotide specifically binds to the SOS1 mRNA. In some embodiments, the antisense oligonucleotide comprises a sequence having at least 80%, 85%, or 90% similarity to one of the following sequences: SEQ ID NOs: 1-8847 or SEQ ID NOs: 10001-18847. In some embodiments, the antisense oligonucleotide comprises a sequence having at least 80%, 85%, or 90% similarity to one of the following sequences: SEQ ID NOs: 751, 869-874, 966, 1038, 1085-1086, 1378-1379, 1937-1948, 2018-2023, 2483-2491, 2569-2575, 2805-2806, 2969-2971, 3101-3102, 3278-3280, 3510, 3554-3562, 5140-5141, 10751, 10869-10874, 10966, 11038, 11085-11086, 11378-11379, 11937-11948, 12018-12023, 12483-12491, 12569-12575, 12805-12806, 12969-12971, 13101-13102, 13278-13280, 13510, 13554-13562, or 15140-15141. In some embodiments, the antisense oligonucleotide specifically binds to the SOS2 mRNA. In some embodiments, the antisense oligonucleotide comprises a sequence having at least 80%, 85%, or 90% similarity to one of the following sequences: SEQ ID NOs: 20001-25494 or 30001-35494. In some embodiments, the antisense oligonucleotide comprises 12-30 nucleotides in length. In some embodiments, the antisense oligonucleotide comprises a gap segment and a wing segment. In some embodiments, the antisense oligonucleotide comprises 5′-wing segment and 3′-wing segment. In some embodiments, the each of the 5′-wing segment and 3′-wing segment is three linked nucleotides. In some embodiments, the antisense oligonucleotide comprises at least one 2′-modified nucleoside, at least one modified internucleotide linkage, or at least one inverted abasic moiety. In some embodiments, the at least one 2′ modified nucleotide: comprises 2′-O-methyl, 2′-O-methoxyethyl (2′-O-MOE), 2′-O-aminopropyl, 2′-deoxy, 2′-deoxy-2′-fluoro, 2′-O-aminopropyl (2′-O-AP), 2′-O-dimethylaminoethyl (2′-O-DMAOE), 2′-O-dimethylaminopropyl (2′-O-DMAP), 2′-O-dimethylaminoethyloxyethyl (2′-O-DMAEOE), or 2′-O—N-methylacetamido (2′-O-NMA) modified nucleotide; comprises locked nucleic acid (LNA) or constrained ethyl (cEt) sugar, ethylene nucleic acid (ENA); or comprises a combination thereof. In some embodiments, the at least one modified internucleotide linkage comprises a phosphorothioate linkage or a phosphorodithioate linkage. In some embodiments, the antisense oligonucleotide comprises a phosphorodiamidate morpholino oligomer (PMO), locked nucleic acid (LNA) or constrained ethyl (cEt) sugar. In some embodiments, the antisense oligonucleotide is conjugated with a peptide, antibody, lipid, carbohydrate or a polymer. In some embodiments, the antisense oligonucleotide is conjugated with a peptide, antibody, lipid, carbohydrate or a polymer via a linker. In some embodiments, the composition comprises a combination of an antisense oligonucleotide specifically binds to the SOS1 mRNA and an antisense oligonucleotide specifically binds to the SOS2 mRNA. In some embodiments, the composition comprises an antisense oligonucleotide capable of binding to both SOS1 mRNA and SOS2 mRNA. In some embodiments, the composition further comprises an excipient. In some embodiments, the composition is formulated for parenteral or nasal administration.

[0009] Described herein, in some aspects, is a method of modulating KRAS-mediated signaling pathway in a cancer cell in need of, comprising: treating the cancer cell with a composition comprising antisense oligonucleotide capable of binding to son of sevenless 1 (SOS1) or son of sevenless 2 (SOS2) mRNA, thereby reducing expression of SOS1 or SOS2 protein or mRNA in the cancer cell. In some embodiments, the cancer cell is a lung cancer cell, a pancreatic cancer cell, or a colon cancer cell. In some embodiments, the antisense oligonucleotide comprises a sequence having at least 80%, 85%, or 90% similarity to one of the following sequences: SEQ ID NOs: 1-8847 or SEQ ID NOs: 10001-18847. In some embodiments, the antisense oligonucleotide comprises a sequence having at least 80%, 85%, or 90% similarity to one of the following sequences: SEQ ID NOs: 751, 869-874, 966, 1038, 1085-1086, 1378-1379, 1937-1948, 2018-2023, 2483-2491, 2569-2575, 2805-2806, 2969-2971, 3101-3102, 3278-3280, 3510, 3554-3562, 5140-5141, 10751, 10869-10874, 10966, 11038, 11085-11086, 11378-11379, 11937-11948, 12018-12023, 12483-12491, 12569-12575, 12805-12806, 12969-12971, 13101-13102, 13278-13280, 13510, 13554-13562, or 15140-15141. In some embodiments, the antisense oligonucleotide comprises a sequence having at least 80%, 85%, or 90% similarity to one of the following sequences: SEQ ID NOs: 20001-25494 or 30001-35494. In some embodiments, the composition comprises a combination of an antisense oligonucleotide specifically binds to SOS1 and an antisense oligonucleotide specifically binds to the SOS2 mRNA. In some embodiments, the composition comprises an antisense oligonucleotide capable of binding to both SOS1 mRNA and SOS2 mRNA. In some embodiments, the antisense oligonucleotide comprises at least one 2′-modified nucleoside, at least one modified internucleotide linkage, or at least one inverted abasic moiety. In some embodiments, the at least one 2′ modified nucleotide: comprises 2′-O-methyl, 2′-O-methoxyethyl (2′-O-MOE), 2-O-aminopropyl, 2′-deoxy, 2′-deoxy-2′-fluoro, 2′-O-aminopropyl (2′-O-AP), 2′-O-dimethylaminoethyl (2′-O-DMAOE), 2′-O-dimethylaminopropyl (2′-O-DMAP), 2′-O-dimethylaminoethyloxyethyl (2′-O-DMAEOE), or 2′-O—N-methylacetamido (2′-O-NMA) modified nucleotide; comprises locked nucleic acid (LNA), locked nucleic acid (LNA), constrained ethyl (cEt) sugar or ethylene nucleic acid (ENA); or comprises a combination thereof. In some embodiments, the expression of SOS1 or SOS2 protein or mRNA is reduced at least 30%, at least 40%, at least 50% after the treatment.

[0010] Described herein, in some aspect, is a method of treating a cancer in a subject in need thereof, the method comprising: administering the subject a composition described herein, thereby treating the cancer in the subject. In some embodiments, the cancer is associated with an abnormality of KRAS-mediated signaling pathway. In some embodiments, the caner is a lung cancer, a pancreatic cancer, or a colon cancer. In some embodiments, the composition is administered to the subject in a dose and schedule sufficient to increase survival rate of the subject at least 5%. In some embodiments, the composition is administered to the subject in a dose and schedule sufficient to inhibit growth of the tumor.

### BRIEF DESCRIPTION OF THE DRAWINGS

[0011] This patent application contains at least one drawing executed in color. Copies of this patent or patent application with color drawing(s) will be provided by the Office upon request and payment of the necessary fee.

[0012] FIG. 1 illustrates an exemplary SOS1 mRNA knockdown mediated by antisense oligonucleotide described herein.

[0013] The novel features of the disclosure are set forth with particularity in the appended claims. A better understanding of the features and advantages of the present disclosure will be obtained by reference to the following detailed description that sets forth illustrative embodiments.

### DETAILED DESCRIPTION

### Overview

[0014] Described herein are compositions and methods for modulating gene or signaling pathway expressions. Also described herein are compositions and methods for treating a disease or condition by modulating the gene or signaling pathway expression associated with the disease or condition. In some embodiments, the composition comprises at least one oligonucleotide that, upon delivered into a cell, binds to an endogenous nucleic acid, which leads to the degradation of the target nucleic acid. In some embodiments, described herein is a method for utilizing the composition or the oligonucleotide described herein. In some embodiments, the methods are used to treat the disease or condition by contacting a cell with the oligonucleotide to decrease the gene or signaling pathway expression associated with the disease or condition.

[0015] In some embodiments, the oligonucleotide is an antisense oligonucleotide, where the oligonucleotide is complementary and binds to at least one endogenous nucleic acid (e.g., an mRNA). In some embodiments, the binding of the oligonucleotide to the endogenous nucleic acid leads to degradation of the endogenous nucleic acid or blocking of translation of the target protein from the endogenous nucleic acid, hence decrease of the expression of the gene encoded by the endogenous nucleic acid. For example, the binding of the oligonucleotide to the endogenous nucleic acid comprising an mRNA creates a duplex nucleic acid molecule, which can then recruit endogenous nuclease for degradation of the mRNA.

[0016] In some embodiments, the oligonucleotide comprises at least one gap segment. In some embodiments, the oligonucleotide comprises at least one wing segment. In some embodiments, the oligonucleotide comprises at least one gap segment flanked by two wing segments. For example, the oligonucleotide comprises a gap segment flanked by a 5′-wing segment and a 3′-wing segment. In some embodiments, the gap segment or the wing segment comprises at least one chemical modification.

[0017] In some embodiments, the gene modulated by the oligonucleotide is part of the signaling pathway. In some embodiments, the signaling pathway is the RTK-SOS-RAS-ERK pathway. As such, in some embodiments, the decreasing of the expression of the gene due to the binding of the oligonucleotide to the endogenous nucleic acid can further decrease a signaling pathway expression comprising the gene modulated by the oligonucleotide. In some embodiments, the decreasing gene or signaling pathway expression leads to therapeutic effects for treating the disease or condition. In some embodiments, the disease or condition is caused by increased gene or signaling pathway expression. In some embodiments, the disease or condition described herein is caused by genetic mutations associated with the gene or signaling pathway.

### Compositions

[0018] Described herein, in some embodiments, are compositions comprising at least one oligonucleotide described herein. In some embodiments, the composition comprises at least two, three, four, five, six, seven, eight, nine, ten, or more oligonucleotides. In some embodiments, the oligonucleotides comprise same or difference nucleic acid sequences. In some embodiments, the oligonucleotide described herein is an antisense oligonucleotide for targeting and bind to an endogenous nucleic acid. In some embodiments, the binding of the oligonucleotide to the endogenous nucleic acid recruits endogenous nuclease for degrading the endogenous nucleic acid. In some embodiments, the degradation of the endogenous nucleic acid decreases expression of the gene encoded by the endogenous nucleic acid. In some embodiments, the degradation of the endogenous nucleic acid can treat a disease or condition described herein.

[0019] In some embodiments, the oligonucleotide comprises a length of at least five, six, seven, eight, nine, 10, 11, 12, 13, 14, 15, 16, 17, 18, 19, 20, 21, 22, 23, 24, 25, 26, 27, 28, 29, 30, 31, 32, 33, 34, 35, 36, 37, 38, 39, 40, 45, 50, or more nucleic acid bases. In some embodiments, the oligonucleotide comprises a length of at least 10, 11, 12, 13, 14, 15, 16, 17, 18, 19, or 20 nucleic acid bases. In some embodiments, the oligonucleotide comprises 10 nucleic acid bases. In some embodiments, the oligonucleotide comprises 11 nucleic acid bases. In some embodiments, the oligonucleotide comprises 12 nucleic acid bases. In some embodiments, the oligonucleotide comprises 13 nucleic acid bases. In some embodiments, the oligonucleotide comprises 14 nucleic acid bases. In some embodiments, the oligonucleotide comprises 15 nucleic acid bases. In some embodiments, the oligonucleotide comprises 16 nucleic acid bases. In some embodiments, the oligonucleotide comprises 17 nucleic acid bases. In some embodiments, the oligonucleotide comprises 18 nucleic acid bases. In some embodiments, the oligonucleotide comprises 19 nucleic acid bases. In some embodiments, the oligonucleotide comprises 20 nucleic acid bases.

[0020] In some embodiments, the oligonucleotide comprises at least one gap segment. In some embodiments, the gap segment comprises at least one, two, three, four, five, six, seven, eight, nine, 10, 11, 12, 13, 14, 15, 16, 17, 18, 19, 20, 21, 22, 23, 24, 25, 26, 27, 28, 29, 30, 31, 32, 33, 34, 35, 36, 37, 38, 39, 40, 45, 50, or more nucleic acid bases. In some embodiments, the gap segment comprises at least one four, five, six, seven, right, nine, 10, 11, 12, 13, or 14 nucleic acid bases. In some embodiments, the gap segment comprises four nucleic acid bases. In some embodiments, the gap segment comprises five nucleic acid bases. In some embodiments, the gap segment comprises six nucleic acid bases. In some embodiments, the gap segment comprises seven nucleic acid bases. In some embodiments, the gap segment comprises eight nucleic acid bases. In some embodiments, the gap segment comprises nine nucleic acid bases. In some embodiments, the gap segment comprises 10 nucleic acid bases. In some embodiments, the gap segment comprises 11 nucleic acid bases. In some embodiments, the gap segment comprises 12 nucleic acid bases. In some embodiments, the gap segment comprises 13 nucleic acid bases. In some embodiments, the gap segment comprises 14 nucleic acid bases.

[0021] In some embodiments, the oligonucleotide comprises at least one wing segment. In some embodiments, the at least one wing segment is a 5′-end wing segment that is covalently connected to the gap segment at the 5′-end of the gap segment. In some embodiments, the at least one wing segment is a 3′-end wing segment that is covalently connected to the gap segment at the 3′-end of the gap segment. In some embodiments, the gap segment is flanked by the wing segments at both the 5′-end and the 3′-end of the gap segment. In some embodiments, the wing segment comprises at least one, two, three, four, five, six, seven, eight, nine, 10, 11, 12, or more nucleic acid bases. In some embodiments, the wing segment comprises one nucleic acid base. In some embodiments, the wing segment comprises two nucleic acid bases. In some embodiments, the wing segment comprises three nucleic acid bases. In some embodiments, the wing segment comprises four nucleic acid bases. In some embodiments, the wing segment comprises five nucleic acid bases. In some embodiments, the wing segment comprises six nucleic acid bases. In some embodiments, the wing segment comprises seven nucleic acid bases. In some embodiments, the wing segment comprises eight nucleic acid bases. In some embodiments, the wing segment comprises nine nucleic acid bases. In some embodiments, the wing segment comprises 10 nucleic acid bases.

[0022] In some embodiments, the oligonucleotide is an antisense oligonucleotide. In some embodiments, the antisense oligonucleotide binds to a target nucleic acid. In some embodiments, the target nucleic acid is an endogenous nucleic acid. In some embodiments, the target nucleic acid comprises a nuclear RNA, a cytoplasmic RNA, or a mitochondrial RNA. In some embodiments, the target RNA comprises an intergenic DNA (including, without limitation, heterochromatic DNA), a messenger RNA (mRNA), a pre-messenger RNA (pre-mRNA), a transfer RNA (tRNA), a ribosomal RNA (rRNA), a ribozyme, cDNA, a recombinant polynucleotide, a branched polynucleotide, a plasmid, a vector, an isolated DNA of a sequence, an isolated RNA of a sequence, a sgRNA, a oligonucleotide, a nucleic acid probe, a primer, an snRNA, a long non-coding RNA, a small RNA, a snoRNA, a siRNA, a miRNA, a tRNA-derived small RNA (tsRNA), an antisense RNA, an shRNA, or a small rDNA-derived RNA (srRNA). In some embodiments, the oligonucleotide comprises a nucleic acid sequence that allows the oligonucleotide to bind to target nucleic acid by base pairing such as Watson Crick base pairing. Compositions and methods provided herein can be utilized to modulate expression of a gene or signaling pathway. Modulation can refer to altering the expression of a gene or portion thereof at one of various stages, with a view to alleviate a disease or condition associated with the gene or a mutation in the gene. Modulation can be mediated at the level of transcription or post-transcriptionally. Modulating transcription can correct aberrant expression of splice variants generated by a mutation in a gene. In some cases, compositions and methods provided herein can be utilized to regulate gene translation of a target. Modulation can refer to decreasing or knocking down the expression of a gene or portion thereof by decreasing the abundance of a transcript. The decreasing the abundance of a transcript can be mediated by decreasing the processing, splicing, turnover or stability of the transcript; or by decreasing the accessibility of the transcript by translational machinery such as ribosome. In some cases, an oligonucleotide described herein can facilitate a knockdown. A knockdown can reduce the expression of a target RNA. In some cases, a knockdown can be accompanied by modulating of an mRNA. In some cases, a knockdown can occur with substantially little to no modulating of an mRNA. In some instances, a knockdown can occur by targeting an untranslated region of the target RNA, such as a 3′ UTR, a 5′ UTR or both. In some cases, a knockdown can occur by targeting a coding region of the target RNA.

[0023] In some embodiments, the oligonucleotide is an antisense oligonucleotide for targeting and binding any one of the genes or nucleic acids described herein. In some embodiments, the gene(s) being targeted and bound by the antisense oligonucleotide is SOS RAS/Rac guanine nucleotide exchange factor 1 or son of sevenless 1 (SOS1) and/or SOS RAS/Rac guanine nucleotide exchange factor 2 son of sevenless 2 (SOS2). In some embodiments, the gene(s) being targeted and bound by the antisense oligonucleotide is SOS RAS/Rac guanine nucleotide exchange factor. In some embodiments, the antisense oligonucleotide targets and binds to an mRNA of SOS1 (SEQ ID NO: 8888-8890) and/or mRNA of SOS2 (SEQ ID NO: 8891). In some embodiments, the antisense oligonucleotide targets and binds to an mRNA of SOS1, where the mRNA of SOS 1 is at least 70%, 75%, 80%, 85%, 90%, 95%, or 99% identical to SEQ ID NO: 8888-8890. In some embodiments, the antisense oligonucleotide targets and binds to an mRNA of SOS2 (SEQ ID NO: 8891). In some embodiments, the antisense oligonucleotide targets and binds to an mRNA of SOS2, where the mRNA of SOS 2 is at least 70%, 75%, 80%, 85%, 90%, 95%, or 99% identical to SEQ ID NO: 8891.

[0024] In some embodiments, the antisense oligonucleotide targets and binds to a nucleic acid fragment of an mRNA of SOS1 or SOS2, where the nucleic acid fragment comprises a nucleic acid sequence that is identical to a nucleic acid sequence between: nucleic acid position 563 to 622 of SEQ ID NO: 8888; nucleic acid position 1074 to 1133 of SEQ ID NO: 8889; nucleic acid position 1074 to 1133 of SEQ ID NO: 8890; or nucleic acid position 740 to 799 of SEQ ID NO: 8891. In some embodiments, the antisense oligonucleotide targets and binds to a nucleic acid fragment of an mRNA of SOS1 or SOS2, where the nucleic acid fragment comprises a nucleic acid sequence that is identical to a nucleic acid sequence between: nucleic acid position 569 to 588 of SEQ ID NO: 8888; nucleic acid position 1080 to 1099 of SEQ ID NO: 8889; nucleic acid position 1080 to 1099 of SEQ ID NO: 8890; or nucleic acid position 746 to 765 of SEQ ID NO: 8891. In some embodiments, the antisense oligonucleotide targets and binds to a nucleic acid fragment of an mRNA of SOS1 or SOS2, where the nucleic acid fragment comprises a nucleic acid sequence that is identical to a nucleic acid sequence between: nucleic acid position 1403 to 1462 of SEQ ID NO: 8888; nucleic acid position 1914 to 1973 of SEQ ID NO: 8889; nucleic acid position 1914 to 1973 of SEQ ID NO: 8890; or nucleic acid position 1574 to 1633 of SEQ ID NO: 8891. In some embodiments, the antisense oligonucleotide targets and binds to a nucleic acid fragment of an mRNA of SOS1 or SOS2, where the nucleic acid fragment comprises a nucleic acid sequence that is identical to a nucleic acid sequence between: nucleic acid position 1427 to 1449 of SEQ ID NO: 8888; nucleic acid position 1938 to 1960 of SEQ ID NO: 8889; nucleic acid position 1938 to 1960 of SEQ ID NO: 8890; or nucleic acid position 1598 to 1620 of SEQ ID NO: 8891. In some embodiments, the antisense oligonucleotide targets and binds to a nucleic acid fragment of an mRNA of SOS1 or SOS2, where the nucleic acid fragment comprises a nucleic acid sequence that is identical to a nucleic acid sequence between: nucleic acid position 1943 to 2062 of SEQ ID NO: 8888, nucleic acid position 2454 to 2573 of SEQ ID NO: 8889; nucleic acid position 2454 to 2573 of SEQ ID NO: 8890; or nucleic acid position 2114 to 2233 of SEQ ID NO: 8891. In some embodiments, the antisense oligonucleotide targets and binds to a nucleic acid fragment of an mRNA of SOS1 or SOS2, where the nucleic acid fragment comprises a nucleic acid sequence that is identical to a nucleic acid sequence between: nucleic acid position 1973 to 2004 of SEQ ID NO: 8888, nucleic acid position 2484 to 2515 of SEQ ID NO: 8889; nucleic acid position 2484 to 2515 of SEQ ID NO: 8890; or nucleic acid position 2144 to 2175 of SEQ ID NO: 8891. In some embodiments, the antisense oligonucleotide targets and binds to a nucleic acid fragment of an mRNA of SOS1 or SOS2, where the nucleic acid fragment comprises a nucleic acid sequence that is identical to a nucleic acid sequence between: nucleic acid position 3143 to 3202 of SEQ ID NO: 8888, nucleic acid position 3654 to 3713 of SEQ ID NO: 8889; nucleic acid position 3654 to 3713 of SEQ ID NO: 8890; or nucleic acid position 3314 to 3373 of SEQ ID NO: 8891. In some embodiments, the antisense oligonucleotide targets and binds to a nucleic acid fragment of an mRNA of SOS1 or SOS2, where the nucleic acid fragment comprises a nucleic acid sequence that is identical to a nucleic acid sequence between: nucleic acid position 3158 to 3178 of SEQ ID NO: 8888, nucleic acid position 3669 to 3689 of SEQ ID NO: 8889; nucleic acid position 3669 to 3689 of SEQ ID NO: 8890; or nucleic acid position 3328 to 3348 of SEQ ID NO: 8891. In some embodiments, the antisense oligonucleotide targeting and binding to the nucleic acid fragment between any one the nucleic acid position corresponding to any one of SEQ ID NO: 8888-8891 described herein comprises at least one wobble nucleic acid (e.g., the antisense oligonucleotide can comprise at least one mismatch with the nucleic acid fragment of the SOS1 o SOS2 mRNA). In some embodiments, the antisense oligonucleotide targeting and binding to the nucleic acid fragment between any one the nucleic acid position corresponding to any one of SEQ ID NO: 8888-8891 described herein comprises one wobble nucleic acid (e.g., the antisense oligonucleotide can comprise one mismatch with the nucleic acid fragment of the SOS1 o SOS2 mRNA). In some embodiments, the antisense oligonucleotide targeting and binding to the nucleic acid fragment between any one the nucleic acid position corresponding to any one of SEQ ID NO: 8888-8891 described herein comprises at least two wobble nucleic acids (e.g., the antisense oligonucleotide can comprise at least two mismatches with the nucleic acid fragment of the SOS1 o SOS2 mRNA). In some embodiments, the antisense oligonucleotide targeting and binding to the nucleic acid fragment between any one the nucleic acid position corresponding to any one of SEQ ID NO: 8888-8891 described herein comprises two wobble nucleic acids (e.g., the antisense oligonucleotide can comprise two mismatches with the nucleic acid fragment of the SOS1 o SOS2 mRNA). In some embodiments, the antisense oligonucleotide targeting and binding to the nucleic acid fragment between any one the nucleic acid position corresponding to any one of SEQ ID NO: 8888-8891 comprises at least five, at least six, at least seven, at least nine, at least 10, at least 11, or at least 12 consecutive nucleotides that are identical to the nucleic acid fragment. In some embodiments, the antisense oligonucleotide targeting and binding to the nucleic acid fragment between any one the nucleic acid position corresponding to any one of SEQ ID NO: 8888-8891 comprises five consecutive nucleotides that are identical to the nucleic acid fragment. In some embodiments, the antisense oligonucleotide targeting and binding to the nucleic acid fragment between any one the nucleic acid position corresponding to any one of SEQ ID NO: 8888-8891 comprises six consecutive nucleotides that are identical to the nucleic acid fragment. In some embodiments, the antisense oligonucleotide targeting and binding to the nucleic acid fragment between any one the nucleic acid position corresponding to any one of SEQ ID NO: 8888-8891 comprises seven consecutive nucleotides that are identical to the nucleic acid fragment. In some embodiments, the antisense oligonucleotide targeting and binding to the nucleic acid fragment between any one the nucleic acid position corresponding to any one of SEQ ID NO: 8888-8891 comprises eight consecutive nucleotides that are identical to the nucleic acid fragment. In some embodiments, the antisense oligonucleotide targeting and binding to the nucleic acid fragment between any one the nucleic acid position corresponding to any one of SEQ ID NO: 8888-8891 comprises nine consecutive nucleotides that are identical to the nucleic acid fragment. In some embodiments, the antisense oligonucleotide targeting and binding to the nucleic acid fragment between any one the nucleic acid position corresponding to any one of SEQ ID NO: 8888-8891 comprises 10 consecutive nucleotides that are identical to the nucleic acid fragment. In some embodiments, the antisense oligonucleotide targeting and binding to the nucleic acid fragment between any one the nucleic acid position corresponding to any one of SEQ ID NO: 8888-8891 comprises 11 consecutive nucleotides that are identical to the nucleic acid fragment. In some embodiments, the antisense oligonucleotide targeting and binding to the nucleic acid fragment between any one the nucleic acid position corresponding to any one of SEQ ID NO: 8888-8891 comprises 12 consecutive nucleotides that are identical to the nucleic acid fragment.

[0025] In some embodiments, the antisense oligonucleotide targets and binds to an mRNA of SOS1. In some embodiments, the antisense oligonucleotide comprises an nucleic acid sequence that is at least 70%, 75%, 80%, 85%, 90%, 95%, or 99% identical to any one of SEQ ID NOs: 1-8847 or SEQ ID NOs: 10001-18847. In some embodiments, the antisense oligonucleotide comprises a nucleic acid sequence comprising at least three, at least four, at least five, at least six, at least seven, at least eight, at least nine, at least 10, at least 11, at least 12, at least 13, at least 14, at least 15, or more consecutive nucleotides of a nucleic acid sequence of any one of SEQ ID NOs: 1-8847 or SEQ ID NOs: 10001-18847.

[0026] In some embodiments, the oligonucleotide comprises at least one gap segment that targets and binds to an mRNA of SOS1. In some embodiments, the at least one gap segment comprises an nucleic acid sequence that is at least 70%, 75%, 80%, 85%, 90%, 95%, or 99% identical to any one of SEQ ID NOs: 1-8847 or SEQ ID NOs: 10001-18847. In some embodiments, the at least one gap segment comprises a nucleic acid sequence comprising at least three, at least four, at least five, at least six, at least seven, at least eight, at least nine, at least 10, at least 11, at least 12, at least 13, at least 14, at least 15, or more consecutive nucleotides of a nucleic acid sequence of any one of SEQ ID NOs: 1-8847 or SEQ ID NOs: 10001-18847.

[0027] In some embodiments, the antisense oligonucleotide targets and binds to an mRNA of SOS2. In some embodiments, the antisense oligonucleotide comprises an nucleic acid sequence that is at least 70%, 75%, 80%, 85%, 90%, 95%, or 99% identical any one of SEQ ID NOs: 20001-25494 or 30001-35494. In some embodiments, the antisense oligonucleotide comprises a nucleic acid sequence comprising at least three, at least four, at least five, at least six, at least seven, at least eight, at least nine, at least 10, at least 11, at least 12, at least 13, at least 14, at least 15, or more consecutive nucleotides of a nucleic acid sequence of any one of SEQ ID NOs: 20001-25494 or 30001-35494.

[0028] In some embodiments, the oligonucleotide comprises at least one gap segment. In some embodiments, the at least one gap segment comprises an nucleic acid sequence that is at least 70%, 75%, 80%, 85%, 90%, 95%, or 99% identical to any one of SEQ ID NOs: 20001-25494 or 30001-35494. In some embodiments, the at least one gap segment comprises a nucleic acid sequence comprising at least three, at least four, at least five, at least six, at least seven, at least eight, at least nine, at least 10, at least 11, at least 12, at least 13, at least 14, at least 15, or more consecutive nucleotides of a nucleic acid sequence of any one of SEQ ID NOs: 20001-25494 or 30001-35494.

[0029] In some embodiments, the antisense oligonucleotide comprises a nucleic acid sequence that is at least 70%, 75%, 80%, 85%, 90%, 95%, or 99% identical to any one of SEQ ID NOs: 751, 869-874, 966, 1038, 1085-1086, 1378-1379, 1937-1948, 2018-2023, 2483-2491, 2569-2575, 2805-2806, 2969-2971, 3101-3102, 3278-3280, 3510, 3554-3562, 5140-5141, 10751, 10869-10874, 10966, 11038, 11085-11086, 11378-11379, 11937-11948, 12018-12023, 12483-12491, 12569-12575, 12805-12806, 12969-12971, 13101-13102, 13278-13280, 13510, 13554-13562, 15140-15141, 20535-20540, 20752, 21039, 21597-21607, 21679-21683, 22087-22088, 22143, 22145-22146, 22149-22151, 22228-22235, 22330, 22465-22466, 22629-22631, 22938-22940, 23169-23170, 23214-23222, 23301, 30535-30540, 30752, 31039, 31597-31607, 31679-31683, 32087-32088, 32143, 32145-32146, 32149-32151, 32228-32235, 32315, 32330, 32465-32466, 32629-32631, 32928-32940, 33169-33170, 33214, 33216-33222, or 33301. In some embodiments, the antisense oligonucleotide described herein can target and bind to either or both SOS1 mRNA or SOS2 mRNA. In some embodiments, the antisense oligonucleotide comprises at least one gap segment. In some embodiments, the at least one gap segment comprises a nucleic acid sequence that is at least 70%, 75%, 80%, 85%, 90%, 95%, or 99% identical to any one of SEQ ID NOs: 751, 869-874, 966, 1038, 1085-1086, 1378-1379, 1937-1948, 2018-2023, 2483-2491, 2569-2575, 2805-2806, 2969-2971, 3101-3102, 3278-3280, 3510, 3554-3562, 5140-5141, 10751, 10869-10874, 10966, 11038, 11085-11086, 11378-11379, 11937-11948, 12018-12023, 12483-12491, 12569-12575, 12805-12806, 12969-12971, 13101-13102, 13278-13280, 13510, 13554-13562, 15140-15141, 20535-20540, 20752, 21039, 21597-21607, 21679-21683, 22087-22088, 22143, 22145-22146, 22149-22151, 22228-22235, 22330, 22465-22466, 22629-22631, 22938-22940, 23169-23170, 23214-23222, 23301, 30535-30540, 30752, 31039, 31597-31607, 31679-31683, 32087-32088, 32143, 32145-32146, 32149-32151, 32228-32235, 32315, 32330, 32465-32466, 32629-32631, 32928-32940, 33169-33170, 33214, 33216-33222, or 33301.

[0030] In some embodiments, the antisense oligonucleotide targets and binds to an mRNA of SOS1 and/or SOS2. In some embodiments, the antisense oligonucleotide comprises an nucleic acid sequence that is at least 70%, 75%, 80%, 85%, 90%, 95%, or 99% identical to any one of SEQ ID NOs: 102, 103, 106, 134, 180, 184, 185, 379, 405, 406, 415, 416, 426, 481, 482, 539, 540, 542, 543, 552, 646, 647, 667, 669, 671, 675, 683, 732, 738, 741, 742, 797, 819, 835, 866, 872-874, 969, 970, 976, 1076, 1077, 1083, 1086, 1193, 1198, 1224, 1225, 1264, 1279, 1360, 1370, 1402, 1409, 1455, 1507, 1508, 1511, 1516, 1519, 1521, 1527, 1547, 1555, 1600, 1601, 1605, 1606, 1609, 1640, 1811, 1812, 1836, 1843, 1844, 1868, 1939, 1942-1944, 1947, 1975, 1976, 2087, 2089, 2107, 2111, 2113, 2115, 2261, 2459, 2463, 2465, 2468, 2470, 2473, 2490, 2491, 2498, 2501, 2550, 2600, 2606, 2632, 2680, 2687, 2688, 2701, 2703, 2761, 2762, 2815, 2908, 2919, 2974, 2984, 3007, 3013, 3016, 3034, 3078, 3097, 3103, 3104, 3187, 3188, 3279, 3305, 3308, 3385, 3386, 3388, 3561, 3564, 3570, 3572, 3607, 3610, 3615, 3673, 3677, 3680, 3682, 3687, 3719, 3765, 3818, 3821, 3879, 3880, 3888, 3942, 3944, 3947, 3949, 3954, 3956, 3992, 4055, 4097, 4134, 4156, 4158, 4166, 4173, 4177, 4178, 4182, 4183, 4222, 4231, 4466, 4687, 4691, 4692, 4736, 4781, 4784, 4916, 4935, 5118, 5144, 5157, 5162, 5384, 5394, 5435, 5449, 5455, 5457, 5459, 5532, 5548, 5764, 5770, 5774, 5776, 5780, 5784, 5875, 5920, 6011, 6054, 6056, 6060, 6061, 6349, 6357, 6418, 6524, 6532, 6611, 6617, 6621, 6625, 6627, 6636, 6799, 6801, 6803, 6807, 6818, 6849, 6850, 6852, 6854, 6936, 7062, 7124, 7229, 7236, 7241, 7363, 7368, 7408, 7413, 7471, 7516, 7531, 7589, 7865, 7868, 7875, 8056, 8087, 8201, 8207, 8208, 8247, 8248, 8293, 8294, 8331, 8363, 8567, 8617, 8618, 8651, 8659, 8661, 8708, 8713, 8780, 8781, 8788, 8810, or 8843. In some embodiments, the antisense oligonucleotide comprises a nucleic acid sequence comprising at least three, at least four, at least five, at least six, at least seven, at least eight, at least nine, at least 10, at least 11, at least 12, at least 13, at least 14, at least 15, or more consecutive nucleotides of a nucleic acid sequence of any one of SEQ ID NOs: 102, 103, 106, 134, 180, 184, 185, 379, 405, 406, 415, 416, 426, 481, 482, 539, 540, 542, 543, 552, 646, 647, 667, 669, 671, 675, 683, 732, 738, 741, 742, 797, 819, 835, 866, 872-874, 969, 970, 976, 1076, 1077, 1083, 1086, 1193, 1198, 1224, 1225, 1264, 1279, 1360, 1370, 1402, 1409, 1455, 1507, 1508, 1511, 1516, 1519, 1521, 1527, 1547, 1555, 1600, 1601, 1605, 1606, 1609, 1640, 1811, 1812, 1836, 1843, 1844, 1868, 1939, 1942-1944, 1947, 1975, 1976, 2087, 2089, 2107, 2111, 2113, 2115, 2261, 2459, 2463, 2465, 2468, 2470, 2473, 2490, 2491, 2498, 2501, 2550, 2600, 2606, 2632, 2680, 2687, 2688, 2701, 2703, 2761, 2762, 2815, 2908, 2919, 2974, 2984, 3007, 3013, 3016, 3034, 3078, 3097, 3103, 3104, 3187, 3188, 3279, 3305, 3308, 3385, 3386, 3388, 3561, 3564, 3570, 3572, 3607, 3610, 3615, 3673, 3677, 3680, 3682, 3687, 3719, 3765, 3818, 3821, 3879, 3880, 3888, 3942, 3944, 3947, 3949, 3954, 3956, 3992, 4055, 4097, 4134, 4156, 4158, 4166, 4173, 4177, 4178, 4182, 4183, 4222, 4231, 4466, 4687, 4691, 4692, 4736, 4781, 4784, 4916, 4935, 5118, 5144, 5157, 5162, 5384, 5394, 5435, 5449, 5455, 5457, 5459, 5532, 5548, 5764, 5770, 5774, 5776, 5780, 5784, 5875, 5920, 6011, 6054, 6056, 6060, 6061, 6349, 6357, 6418, 6524, 6532, 6611, 6617, 6621, 6625, 6627, 6636, 6799, 6801, 6803, 6807, 6818, 6849, 6850, 6852, 6854, 6936, 7062, 7124, 7229, 7236, 7241, 7363, 7368, 7408, 7413, 7471, 7516, 7531, 7589, 7865, 7868, 7875, 8056, 8087, 8201, 8207, 8208, 8247, 8248, 8293, 8294, 8331, 8363, 8567, 8617, 8618, 8651, 8659, 8661, 8708, 8713, 8780, 8781, 8788, 8810, or 8843.

[0031] In some embodiments, the oligonucleotide comprises at least one gap segment. In some embodiments, the at least one gap segment comprises an nucleic acid sequence that is at least 70%, 75%, 80%, 85%, 90%, 95%, or 99% identical to any one of SEQ ID NOs: 102, 103, 106, 134, 180, 184, 185, 379, 405, 406, 415, 416, 426, 481, 482, 539, 540, 542, 543, 552, 646, 647, 667, 669, 671, 675, 683, 732, 738, 741, 742, 797, 819, 835, 866, 872-874, 969, 970, 976, 1076, 1077, 1083, 1086, 1193, 1198, 1224, 1225, 1264, 1279, 1360, 1370, 1402, 1409, 1455, 1507, 1508, 1511, 1516, 1519, 1521, 1527, 1547, 1555, 1600, 1601, 1605, 1606, 1609, 1640, 1811, 1812, 1836, 1843, 1844, 1868, 1939, 1942-1944, 1947, 1975, 1976, 2087, 2089, 2107, 2111, 2113, 2115, 2261, 2459, 2463, 2465, 2468, 2470, 2473, 2490, 2491, 2498, 2501, 2550, 2600, 2606, 2632, 2680, 2687, 2688, 2701, 2703, 2761, 2762, 2815, 2908, 2919, 2974, 2984, 3007, 3013, 3016, 3034, 3078, 3097, 3103, 3104, 3187, 3188, 3279, 3305, 3308, 3385, 3386, 3388, 3561, 3564, 3570, 3572, 3607, 3610, 3615, 3673, 3677, 3680, 3682, 3687, 3719, 3765, 3818, 3821, 3879, 3880, 3888, 3942, 3944, 3947, 3949, 3954, 3956, 3992, 4055, 4097, 4134, 4156, 4158, 4166, 4173, 4177, 4178, 4182, 4183, 4222, 4231, 4466, 4687, 4691, 4692, 4736, 4781, 4784, 4916, 4935, 5118, 5144, 5157, 5162, 5384, 5394, 5435, 5449, 5455, 5457, 5459, 5532, 5548, 5764, 5770, 5774, 5776, 5780, 5784, 5875, 5920, 6011, 6054, 6056, 6060, 6061, 6349, 6357, 6418, 6524, 6532, 6611, 6617, 6621, 6625, 6627, 6636, 6799, 6801, 6803, 6807, 6818, 6849, 6850, 6852, 6854, 6936, 7062, 7124, 7229, 7236, 7241, 7363, 7368, 7408, 7413, 7471, 7516, 7531, 7589, 7865, 7868, 7875, 8056, 8087, 8201, 8207, 8208, 8247, 8248, 8293, 8294, 8331, 8363, 8567, 8617, 8618, 8651, 8659, 8661, 8708, 8713, 8780, 8781, 8788, 8810, or 8843. In some embodiments, the at least one gap segment comprises a nucleic acid sequence comprising at least three, at least four, at least five, at least six, at least seven, at least eight, at least nine, at least 10, at least 11, at least 12, at least 13, at least 14, at least 15, or more consecutive nucleotides of a nucleic acid sequence of any one of SEQ ID NOs: 102, 103, 106, 134, 180, 184, 185, 379, 405, 406, 415, 416, 426, 481, 482, 539, 540, 542, 543, 552, 646, 647, 667, 669, 671, 675, 683, 732, 738, 741, 742, 797, 819, 835, 866, 872-874, 969, 970, 976, 1076, 1077, 1083, 1086, 1193, 1198, 1224, 1225, 1264, 1279, 1360, 1370, 1402, 1409, 1455, 1507, 1508, 1511, 1516, 1519, 1521, 1527, 1547, 1555, 1600, 1601, 1605, 1606, 1609, 1640, 1811, 1812, 1836, 1843, 1844, 1868, 1939, 1942-1944, 1947, 1975, 1976, 2087, 2089, 2107, 2111, 2113, 2115, 2261, 2459, 2463, 2465, 2468, 2470, 2473, 2490, 2491, 2498, 2501, 2550, 2600, 2606, 2632, 2680, 2687, 2688, 2701, 2703, 2761, 2762, 2815, 2908, 2919, 2974, 2984, 3007, 3013, 3016, 3034, 3078, 3097, 3103, 3104, 3187, 3188, 3279, 3305, 3308, 3385, 3386, 3388, 3561, 3564, 3570, 3572, 3607, 3610, 3615, 3673, 3677, 3680, 3682, 3687, 3719, 3765, 3818, 3821, 3879, 3880, 3888, 3942, 3944, 3947, 3949, 3954, 3956, 3992, 4055, 4097, 4134, 4156, 4158, 4166, 4173, 4177, 4178, 4182, 4183, 4222, 4231, 4466, 4687, 4691, 4692, 4736, 4781, 4784, 4916, 4935, 5118, 5144, 5157, 5162, 5384, 5394, 5435, 5449, 5455, 5457, 5459, 5532, 5548, 5764, 5770, 5774, 5776, 5780, 5784, 5875, 5920, 6011, 6054, 6056, 6060, 6061, 6349, 6357, 6418, 6524, 6532, 6611, 6617, 6621, 6625, 6627, 6636, 6799, 6801, 6803, 6807, 6818, 6849, 6850, 6852, 6854, 6936, 7062, 7124, 7229, 7236, 7241, 7363, 7368, 7408, 7413, 7471, 7516, 7531, 7589, 7865, 7868, 7875, 8056, 8087, 8201, 8207, 8208, 8247, 8248, 8293, 8294, 8331, 8363, 8567, 8617, 8618, 8651, 8659, 8661, 8708, 8713, 8780, 8781, 8788, 8810, or 8843.

[0032] In some embodiments, the antisense oligonucleotide comprises a nucleic acid sequence that is at least 70%, 75%, 80%, 85%, 90%, 95%, or 99% identical to any one of SEQ ID NOs: 405, 406, 539, 540, 671, 732, 741, 742, 797, 976, 1076, 1077, 1083, 1086, 1198, 1224, 1279, 1360, 1370, 1507, 1508, 1516, 1519, 1601, 1609, 1811, 1836, 1843, 1844, 1868, 1939, 1942, 1943, 1944, 2465, 2473, 2490, 2498, 2600, 2606, 2688, 2701, 2703, 2908, 2974, 2984, 3007, 3016, 3034, 3078, 3104, 3305, 3308, 3386, 3615, 3673, 3677, 3680, 3682, 3687, 3765, 3821, 3879, 3880, 3949, 4134, 4156, 4173, 4177, 4178, 4182, 4183, 4222, 4466, 4687, 4692, 4736, 4781, 4935, 5118, 5144, 5384, 5394, 5435, 5449, 5455, 5457, 5459, 5780, 6060, 6061, 6532, 6611, 6621, 6625, 6627, 6803, 7368, 7471, 7516, 7589, 7865, 8087, 8201, 8207, 8208, 8331, 8617, 8651, or 8659. In some embodiments, the antisense oligonucleotide described herein can target and bind to either or both SOS1 mRNA or SOS2 mRNA. In some embodiments, the antisense oligonucleotide comprises at least one gap segment. In some embodiments, the at least one gap segment comprises a nucleic acid sequence that is at least 70%, 75%, 80%, 85%, 90%, 95%, or 99% identical to any one of SEQ ID NOs: 405, 406, 539, 540, 671, 732, 741, 742, 797, 976, 1076, 1077, 1083, 1086, 1198, 1224, 1279, 1360, 1370, 1507, 1508, 1516, 1519, 1601, 1609, 1811, 1836, 1843, 1844, 1868, 1939, 1942, 1943, 1944, 2465, 2473, 2490, 2498, 2600, 2606, 2688, 2701, 2703, 2908, 2974, 2984, 3007, 3016, 3034, 3078, 3104, 3305, 3308, 3386, 3615, 3673, 3677, 3680, 3682, 3687, 3765, 3821, 3879, 3880, 3949, 4134, 4156, 4173, 4177, 4178, 4182, 4183, 4222, 4466, 4687, 4692, 4736, 4781, 4935, 5118, 5144, 5384, 5394, 5435, 5449, 5455, 5457, 5459, 5780, 6060, 6061, 6532, 6611, 6621, 6625, 6627, 6803, 7368, 7471, 7516, 7589, 7865, 8087, 8201, 8207, 8208, 8331, 8617, 8651, or 8659.

[0033] In some embodiments, the antisense oligonucleotide targets and binds to an mRNA of SOS1 and/or SOS2. In some embodiments, the antisense oligonucleotide comprises an nucleic acid sequence that is at least 70%, 75%, 80%, 85%, 90%, 95%, or 99% identical to any one of SEQ ID NOs: 405, 406, 539, 540, 671, 732, 741, 742, 797, 976, 1076, 1077, 1083, 1086, 1198, 1224, 1279, 1360, 1370, 1507, 1508, 1516, 1519, 1601, 1609, 1811, 1836, 1843, 1844, 1868, 1939, 1942, 1943, 1944, 2465, 2473, 2490, 2498, 2600, 2606, 2688, 2701, 2703, 2908, 2974, 2984, 3007, 3016, 3034, 3078, 3104, 3305, 3308, 3386, 3615, 3673, 3677, 3680, 3682, 3687, 3765, 3821, 3879, 3880, 3949, 4134, 4156, 4173, 4177, 4178, 4182, 4183, 4222, 4466, 4687, 4692, 4736, 4781, 4935, 5118, 5144, 5384, 5394, 5435, 5449, 5455, 5457, 5459, 5780, 6060, 6061, 6532, 6611, 6621, 6625, 6627, 6803, 7368, 7471, 7516, 7589, 7865, 8087, 8201, 8207, 8208, 8331, 8617, 8651, or 8659. In some embodiments, the antisense oligonucleotide comprises a nucleic acid sequence comprising at least three, at least four, at least five, at least six, at least seven, at least eight, at least nine, at least 10, at least 11, at least 12, at least 13, at least 14, at least 15, or more consecutive nucleotides of a nucleic acid sequence of any one of SEQ ID NOs: 405, 406, 539, 540, 671, 732, 741, 742, 797, 976, 1076, 1077, 1083, 1086, 1198, 1224, 1279, 1360, 1370, 1507, 1508, 1516, 1519, 1601, 1609, 1811, 1836, 1843, 1844, 1868, 1939, 1942, 1943, 1944, 2465, 2473, 2490, 2498, 2600, 2606, 2688, 2701, 2703, 2908, 2974, 2984, 3007, 3016, 3034, 3078, 3104, 3305, 3308, 3386, 3615, 3673, 3677, 3680, 3682, 3687, 3765, 3821, 3879, 3880, 3949, 4134, 4156, 4173, 4177, 4178, 4182, 4183, 4222, 4466, 4687, 4692, 4736, 4781, 4935, 5118, 5144, 5384, 5394, 5435, 5449, 5455, 5457, 5459, 5780, 6060, 6061, 6532, 6611, 6621, 6625, 6627, 6803, 7368, 7471, 7516, 7589, 7865, 8087, 8201, 8207, 8208, 8331, 8617, 8651, or 8659.

[0034] In some embodiments, the oligonucleotide comprises at least one gap segment. In some embodiments, the at least one gap segment comprises an nucleic acid sequence that is at least 70%, 75%, 80%, 85%, 90%, 95%, or 99% identical to any one of SEQ ID NOs: 405, 406, 539, 540, 671, 732, 741, 742, 797, 976, 1076, 1077, 1083, 1086, 1198, 1224, 1279, 1360, 1370, 1507, 1508, 1516, 1519, 1601, 1609, 1811, 1836, 1843, 1844, 1868, 1939, 1942, 1943, 1944, 2465, 2473, 2490, 2498, 2600, 2606, 2688, 2701, 2703, 2908, 2974, 2984, 3007, 3016, 3034, 3078, 3104, 3305, 3308, 3386, 3615, 3673, 3677, 3680, 3682, 3687, 3765, 3821, 3879, 3880, 3949, 4134, 4156, 4173, 4177, 4178, 4182, 4183, 4222, 4466, 4687, 4692, 4736, 4781, 4935, 5118, 5144, 5384, 5394, 5435, 5449, 5455, 5457, 5459, 5780, 6060, 6061, 6532, 6611, 6621, 6625, 6627, 6803, 7368, 7471, 7516, 7589, 7865, 8087, 8201, 8207, 8208, 8331, 8617, 8651, or 8659. In some embodiments, the at least one gap segment comprises a nucleic acid sequence comprising at least three, at least four, at least five, at least six, at least seven, at least eight, at least nine, at least 10, at least 11, at least 12, at least 13, at least 14, at least 15, or more consecutive nucleotides of a nucleic acid sequence of any one of SEQ ID NOs: 405, 406, 539, 540, 671, 732, 741, 742, 797, 976, 1076, 1077, 1083, 1086, 1198, 1224, 1279, 1360, 1370, 1507, 1508, 1516, 1519, 1601, 1609, 1811, 1836, 1843, 1844, 1868, 1939, 1942, 1943, 1944, 2465, 2473, 2490, 2498, 2600, 2606, 2688, 2701, 2703, 2908, 2974, 2984, 3007, 3016, 3034, 3078, 3104, 3305, 3308, 3386, 3615, 3673, 3677, 3680, 3682, 3687, 3765, 3821, 3879, 3880, 3949, 4134, 4156, 4173, 4177, 4178, 4182, 4183, 4222, 4466, 4687, 4692, 4736, 4781, 4935, 5118, 5144, 5384, 5394, 5435, 5449, 5455, 5457, 5459, 5780, 6060, 6061, 6532, 6611, 6621, 6625, 6627, 6803, 7368, 7471, 7516, 7589, 7865, 8087, 8201, 8207, 8208, 8331, 8617, 8651, or 8659.

[0035] In some embodiments, the antisense oligonucleotide comprises a nucleic acid sequence that is at least 70%, 75%, 80%, 85%, 90%, 95%, or 99% identical to any one of SEQ ID NOs: 405, 406, 539, 741, 742, 976, 1076, 1077, 1083, 1086, 1609, 1811, 1868, 1939, 1942, 1943, 1944, 2465, 2473, 2490, 2688, 2703, 2908, 2974, 2984, 3007, 3104, 3673, 3677, 3680, 3682, 3687, 3765, 4134, 4156, 4173, 4178, 4466, 4781, 4935, 5118, 5435, 5780, 6060, 6532, 6625, 6803, 7368, 7589, 7865, 8208, 8331, or 8651. In some embodiments, the antisense oligonucleotide described herein can target and bind to either or both SOS1 mRNA or SOS2 mRNA. In some embodiments, the antisense oligonucleotide comprises at least one gap segment. In some embodiments, the at least one gap segment comprises a nucleic acid sequence that is at least 70%, 75%, 80%, 85%, 90%, 95%, or 99% identical to any one of SEQ ID NOs: 405, 406, 539, 741, 742, 976, 1076, 1077, 1083, 1086, 1609, 1811, 1868, 1939, 1942, 1943, 1944, 2465, 2473, 2490, 2688, 2703, 2908, 2974, 2984, 3007, 3104, 3673, 3677, 3680, 3682, 3687, 3765, 4134, 4156, 4173, 4178, 4466, 4781, 4935, 5118, 5435, 5780, 6060, 6532, 6625, 6803, 7368, 7589, 7865, 8208, 8331, or 8651.

[0036] In some embodiments, the antisense oligonucleotide targets and binds to an mRNA of SOS1 and/or SOS2. In some embodiments, the antisense oligonucleotide comprises an nucleic acid sequence that is at least 70%, 75%, 80%, 85%, 90%, 95%, or 99% identical to any one of SEQ ID NOs: 405, 406, 539, 741, 742, 976, 1076, 1077, 1083, 1086, 1609, 1811, 1868, 1939, 1942, 1943, 1944, 2465, 2473, 2490, 2688, 2703, 2908, 2974, 2984, 3007, 3104, 3673, 3677, 3680, 3682, 3687, 3765, 4134, 4156, 4173, 4178, 4466, 4781, 4935, 5118, 5435, 5780, 6060, 6532, 6625, 6803, 7368, 7589, 7865, 8208, 8331, or 8651. In some embodiments, the antisense oligonucleotide comprises a nucleic acid sequence comprising at least three, at least four, at least five, at least six, at least seven, at least eight, at least nine, at least 10, at least 11, at least 12, at least 13, at least 14, at least 15, or more consecutive nucleotides of a nucleic acid sequence of any one of SEQ ID NOs: 405, 406, 539, 741, 742, 976, 1076, 1077, 1083, 1086, 1609, 1811, 1868, 1939, 1942, 1943, 1944, 2465, 2473, 2490, 2688, 2703, 2908, 2974, 2984, 3007, 3104, 3673, 3677, 3680, 3682, 3687, 3765, 4134, 4156, 4173, 4178, 4466, 4781, 4935, 5118, 5435, 5780, 6060, 6532, 6625, 6803, 7368, 7589, 7865, 8208, 8331, or 8651.

[0037] In some embodiments, the oligonucleotide comprises at least one gap segment. In some embodiments, the at least one gap segment comprises an nucleic acid sequence that is at least 70%, 75%, 80%, 85%, 90%, 95%, or 99% identical to any one of SEQ ID NOs: 405, 406, 539, 741, 742, 976, 1076, 1077, 1083, 1086, 1609, 1811, 1868, 1939, 1942, 1943, 1944, 2465, 2473, 2490, 2688, 2703, 2908, 2974, 2984, 3007, 3104, 3673, 3677, 3680, 3682, 3687, 3765, 4134, 4156, 4173, 4178, 4466, 4781, 4935, 5118, 5435, 5780, 6060, 6532, 6625, 6803, 7368, 7589, 7865, 8208, 8331, or 8651. In some embodiments, the at least one gap segment comprises a nucleic acid sequence comprising at least three, at least four, at least five, at least six, at least seven, at least eight, at least nine, at least 10, at least 11, at least 12, at least 13, at least 14, at least 15, or more consecutive nucleotides of a nucleic acid sequence of any one of SEQ ID NOs: 405, 406, 539, 741, 742, 976, 1076, 1077, 1083, 1086, 1609, 1811, 1868, 1939, 1942, 1943, 1944, 2465, 2473, 2490, 2688, 2703, 2908, 2974, 2984, 3007, 3104, 3673, 3677, 3680, 3682, 3687, 3765, 4134, 4156, 4173, 4178, 4466, 4781, 4935, 5118, 5435, 5780, 6060, 6532, 6625, 6803, 7368, 7589, 7865, 8208, 8331, or 8651.

[0038] In some embodiments, the oligonucleotide described herein targets and binds an endogenous nucleic acid encoding a gene associated with the KRAS-RAF-MEK-ERK signaling pathway. In some embodiments, the gene associated with the KRAS-RAF-MEK-ERK signaling pathway is SOS1. In some embodiments, the gene associated with the KRAS-RAF-MEK-ERK signaling pathway is SOS2. In some embodiments, the oligonucleotide described herein modulates or affects the expression or activity of a gene in or associated with the KRAS-RAF-MEK-ERK signaling pathway. In some embodiments, the gene associated with the KRAS-RAF-MEK-ERK signaling pathway is RAS. In some embodiments, the gene associated with the KRAS-RAF-MEK-ERK signaling pathway is RAF. In some embodiments, the gene associated with the KRAS-RAF-MEK-ERK signaling pathway is MEK. In some embodiments, the gene associated with the KRAS-RAF-MEK-ERK signaling pathway is ERK.

[0039] In some embodiments, the oligonucleotide, upon binding to the endogenous nucleic acid, forms a duplex with the endogenous nucleic acid and recruits an endogenous nuclease for degrading the endogenous nucleic acid. In some embodiments, the endogenous nuclease is a deoxyribonuclease. In some embodiments, the endogenous nuclease is a ribonuclease. In some embodiments, the ribonucleases is an endoribonuclease. In some embodiments, the endoribonuclease comprises endoribonuclease or RNase A, P, H, I, III, T1, T2, U2, V1, PhyM, or V. In some embodiments, the ribonuclease is an exoribonuclease. In some embodiments, the exoribonuclease comprises RNase PH, II, R, D, or T. In some embodiments, the nuclease comprises polynucleotide phosphorylase (PNPase), oligoribonuclease, exoribonuclease I, or exoribonuclease II. In some embodiments, the ribonuclease recruited by the oligonucleotide binding to the endogenous nucleic acid is RNase H.

[0040] In some embodiments, the oligonucleotide comprises at least one, two, three, four, five, six, seven, eight, nine, 10, 11, 12, 13, 14, 15, 16, 17, 18, 19, 20, 21, 22, 23, 24, 25, 26, 27, 28, 29, 30, 31, 32, 33, 34, 35, 36, 37, 38, 39, 40, 41, 42, 43, 44, 45, 46, 47, 48, 49, 50, 51, 52, 53, 54, 55, 56, 57, 58, 59, 60, 61, 62, 63, 64, 65, 66, 67, 68, 69, 70, 71, 72, 73, 74, 75, 76, 77, 78, 79, 80, 81, 82, 83, 84, 85, 86, 87, 88, 89, 90, 91, 92, 93, 94, 95, 96, 97, 98, 99, 100, or more chemical modifications. In some embodiments, the oligonucleotide comprises at least one gap segment comprising at least one, two, three, four, five, six, seven, eight, nine, 10, 11, 12, 13, 14, 15, 16, 17, 18, 19, 20, 21, 22, 23, 24, 25, 26, 27, 28, 29, 30, 31, 32, 33, 34, 35, 36, 37, 38, 39, 40, 41, 42, 43, 44, 45, 46, 47, 48, 49, 50, 51, 52, 53, 54, 55, 56, 57, 58, 59, 60, 61, 62, 63, 64, 65, 66, 67, 68, 69, 70, 71, 72, 73, 74, 75, 76, 77, 78, 79, 80, 81, 82, 83, 84, 85, 86, 87, 88, 89, 90, 91, 92, 93, 94, 95, 96, 97, 98, 99, 100, or more chemical modifications. In some embodiments, the oligonucleotide comprises at least one wing segment comprising at least one, two, three, four, five, six, seven, eight, nine, 10, 11, 12, 13, 14, 15, 16, 17, 18, 19, 20, 21, 22, 23, 24, 25, 26, 27, 28, 29, 30, 31, 32, 33, 34, 35, 36, 37, 38, 39, 40, 41, 42, 43, 44, 45, 46, 47, 48, 49, 50, 51, 52, 53, 54, 55, 56, 57, 58, 59, 60, 61, 62, 63, 64, 65, 66, 67, 68, 69, 70, 71, 72, 73, 74, 75, 76, 77, 78, 79, 80, 81, 82, 83, 84, 85, 86, 87, 88, 89, 90, 91, 92, 93, 94, 95, 96, 97, 98, 99, 100, or more chemical modifications. In some embodiments, the oligonucleotide comprises at least one gap segment and at least one wing segment comprising at least one, two, three, four, five, six, seven, eight, nine, 10, 11, 12, 13, 14, 15, 16, 17, 18, 19, 20, 21, 22, 23, 24, 25, 26, 27, 28, 29, 30, 31, 32, 33, 34, 35, 36, 37, 38, 39, 40, 41, 42, 43, 44, 45, 46, 47, 48, 49, 50, 51, 52, 53, 54, 55, 56, 57, 58, 59, 60, 61, 62, 63, 64, 65, 66, 67, 68, 69, 70, 71, 72, 73, 74, 75, 76, 77, 78, 79, 80, 81, 82, 83, 84, 85, 86, 87, 88, 89, 90, 91, 92, 93, 94, 95, 96, 97, 98, 99, 100, or more chemical modifications.

[0041] In some embodiments, the oligonucleotide described herein binds to an endogenous nucleic acid (e.g., an mRNA) encoding SOS1, where the binding of the oligonucleotide to the SOS1 endogenous nucleic acid decreases the endogenous expression of SOS1 in a cell by at least 10%, 20%, 30%, 40%, 50%, 60%, 70%, 80%, 90%, or more compared to the endogenous expression of SOS1 not modulated by the oligonucleotide. In some embodiments, the oligonucleotide described herein binds to an endogenous nucleic acid (e.g., an mRNA) encoding SOS2, where the binding of the oligonucleotide to the SOS2 endogenous nucleic acid decreases the endogenous expression of SOS2 in a cell by at least 10%, 20%, 30%, 40%, 50%, 60%, 70%, 80%, 90%, or more compared to the endogenous expression of SOS2 not modulated by the oligonucleotide.

[0042] In some embodiments, the oligonucleotide described herein binds to an endogenous nucleic acid (e.g., an mRNA) encoding SOS1, where the binding of the oligonucleotide to the SOS1 endogenous nucleic acid decreases the endogenous expression the KRAS-RAF-MEK-ERK signaling pathway in a cell by at least 10%, 20%, 30%, 40%, 50%, 60%, 70%, 80%, 90%, or more compared to the endogenous expression of the KRAS-RAF-MEK-ERK signaling pathway not modulated by the oligonucleotide.

[0043] In some embodiments, the oligonucleotide described herein binds to an endogenous nucleic acid (e.g., an mRNA) encoding SOS2, where the binding of the oligonucleotide to the SOS2 endogenous nucleic acid decreases the endogenous expression of a gene in, or an activity of, the KRAS-RAF-MEK-ERK signaling pathway in a cell by at least 10%, 20%, 30%, 40%, 50%, 60%, 70%, 80%, 90%, or more compared to the endogenous expression of a gene in, or an activity of the KRAS-RAF-MEK-ERK signaling pathway not modulated by the oligonucleotide.

[0044] In some embodiments, the composition comprises at least two oligonucleotides, where a first oligonucleotide binds to the SOS1 endogenous nucleic acid (e.g., an SOS1 mRNA) and a second oligonucleotide binds to the SOS2 endogenous nucleic acid (e.g., an SOS2 mRNA). In some embodiments, the binding of the oligonucleotide to both SOS1 and SOS2 endogenous nucleic acids decreases the endogenous expression of a gene in, or an activity of, the KRAS-RAF-MEK-ERK signaling pathway in a cell by at least 10%, 20%, 30%, 40%, 50%, 60%, 70%, 80%, 90%, or more compared to the endogenous expression of a gene in, or an activity of the KRAS-RAF-MEK-ERK signaling pathway not modulated by the oligonucleotide. In some embodiments, the binding of the oligonucleotide to both SOS1 and SOS2 endogenous nucleic acids increases killing of cancer cell by at least 10%, 20%, 30%, 40%, 50%, 60%, 70%, 80%, 90%, or more compared to binding of an oligonucleotide to either SOS1 or SOS2 only. In some embodiments, the binding of the oligonucleotide to both SOS1 and SOS2 endogenous nucleic acids decreases cellular proliferation by at least 10%, 20%, 30%, 40%, 50%, 60%, 70%, 80%, 90%, or more compared to binding of an oligonucleotide to either SOS1 or SOS2 only.

[0045] In some embodiments, the composition is formulated for administration to a subject by appropriate administration routes, including but not limited to, intravenous, intraarterial, oral, parenteral, buccal, topical, transdermal, rectal, intramuscular, subcutaneous, intraosseous, transmucosal, inhalation, or intraperitoneal administration routes. The pharmaceutical formulations described herein include, but are not limited to, aqueous liquid dispersions, self-emulsifying dispersions, solid solutions, liposomal dispersions, aerosols, solid dosage forms, powders, immediate release formulations, controlled release formulations, fast melt formulations, tablets, capsules, pills, delayed release formulations, extended release formulations, pulsatile release formulations, multiparticulate formulations, and mixed immediate and controlled release formulations. In some embodiments, the composition is formulated into a dosage form. In some embodiments, the composition is formulated to include at least one excipient. In some embodiments, the excipient is a pharmaceutically acceptable excipient.

[0046] In some embodiments, the composition comprising the oligonucleotide described herein treats a disease or condition by decreasing the expression of the gene or the signaling pathway associated with the disease or condition. In some embodiments, the composition comprising the oligonucleotide describe herein treats the disease or condition described herein by directly decreasing the gene expression associated with disease or condition described herein. In some embodiments, the composition comprising the oligonucleotide treats the disease or condition by decreasing the gene expression as part of a signaling pathway described herein. In some embodiments, the composition comprising the oligonucleotide described herein treats a disease or condition by decreasing the endogenous SOS1 expression. In some embodiments, the composition comprising the oligonucleotide described herein treats a disease or condition by decreasing the endogenous SOS2 expression. In some embodiments, the composition comprising the oligonucleotide described herein treats a disease or condition by decreasing both endogenous SOS1 and SOS2 expressions. In some embodiments, the composition comprising the oligonucleotide described herein treats a disease or condition by decreasing the endogenous KRAS expression. In some embodiments, the composition comprising the oligonucleotide described herein treats a disease or condition by decreasing the endogenous KRAS-RAF-MEK-ERK signaling pathway expression or activity. In some embodiments, the disease or condition described herein is cancer.

### Chemical Modifications

[0047] Described herein, in some embodiments, is an oligonucleotide comprising at least one chemical modification. In some embodiments, the oligonucleotide is single-stranded. In some embodiments, the oligonucleotide is an antisense oligonucleotide. In some embodiments, the oligonucleotide comprises at least one, two, three, four, five, six, seven, eight, nine, 10, 11, 12, 13, 14, 15, 16, 17, 18, 19, 20, 21, 22, 23, 24, 25, 26, 27, 28, 29, 30, 31, 32, 33, 34, 35, 36, 37, 38, 39, 40, 41, 42, 43, 44, 45, 46, 47, 48, 49, 50 or more chemical modifications. In some embodiments, the oligonucleotide does not have an intramolecular structure feature. In some embodiments, the oligonucleotide comprises at least one gap segment comprising at least one, two, three, four, five, six, seven, eight, nine, ten, 11, 12, 13, 14, 15, or more chemically modified nucleotides. In some embodiments, the oligonucleotide comprises at least one wing segment comprising at least one, two, three, four, five, six, seven, eight, nine, ten, or more chemically modified nucleotides. In some embodiments, the oligonucleotide comprises a 5′-end wing segment comprising at least one, two, three, four, five, six, seven, eight, nine, ten, or more chemically modified nucleotides. In some embodiments, the oligonucleotide comprises a 3′-end wing segment comprising at least one, two, three, four, five, six, seven, eight, nine, ten, or more chemically modified nucleotides. In some embodiments, the at least one wing segment is covalently fused to the 5′-end of the gap segment. In some embodiments, the at least one wing segment is covalently fused to the 3′-end of the gap segment.

[0048] In some embodiments, the oligonucleotide comprises at least one, two, three, four, five, six, seven, eight, nine, ten, 11, 12, 13, 14, 15, 16, 17, 18, 19, 20 or more chemically modified nucleotides at the 5′ end of the oligonucleotide. In some embodiments, the oligonucleotide comprises at least one, two, three, four, five, six, seven, eight, nine, ten, 11, 12, 13, 14, 15, 16, 17, 18, 19, 20 or more chemically modified nucleotides at the 3′ end of the oligonucleotide. In some embodiments, the oligonucleotide comprises at least one, two, three, four, five, six, seven, eight, nine, ten, 11, 12, 13, 14, 15, 16, 17, 18, 19, 20 or more chemically modified nucleotides at both the 5′ and the 3′ end of the oligonucleotide. In some embodiments, the oligonucleotide comprises at least one chemical modification in the gap segment of the oligonucleotide. In some embodiments, the oligonucleotide comprises at least one chemical modification in the nucleotide bases adjacent the gap segment. In some embodiments, at least 10%, 20%, 30%, 40%, 50%, 60%, 70%, 80%, 90% of the bases or internucleotide linkage of the oligonucleotide comprises modifications. In some embodiments, the oligonucleotide comprises 100% modified nucleotide bases.

[0049] In some embodiments, chemical modification can occur at 3′OH, group, 5′OH group, at the backbone, at the sugar component, or at the nucleotide base. Chemical modification can include non-naturally occurring linker molecules of interstrand or intrastrand cross links. In one aspect, the chemically modified nucleic acid comprises modification of one or more of the 3′OH or 5′OH group, the backbone, the sugar component, or the nucleotide base, or addition of non-naturally occurring linker molecules. In some embodiments, chemically modified backbone comprises a backbone other than a phosphodiester backbone. In some embodiments, a modified sugar comprises a sugar other than deoxyribose (in modified DNA) or other than ribose (modified RNA). In some embodiments, a modified base comprises a base other than adenine, guanine, cytosine, thymine or uracil. In some embodiments, the oligonucleotide comprises at least one chemically modified base. In some instances, the comprises at least one, two, three, four, five, six, seven, eight, nine, 10, 15, 20, or more modified bases. In some cases, chemical modifications to the base moiety include natural and synthetic modifications of adenine, guanine, cytosine, thymine, or uracil, and purine or pyrimidine bases.

[0050] In some embodiments, the at least one chemical modification of the oligonucleotide comprises a modification of any one of or any combination of: 2′ modified nucleotide comprising 2′-O-methyl, 2′-O-methoxyethyl (2′-O-MOE), 2′-O-aminopropyl, 2′-deoxy, 2′-deoxy-2′-fluoro, 2′-O-aminopropyl (2′-O-AP), 2′-O-dimethylaminoethyl (2′-O-DMAOE), 2′-O-dimethylaminopropyl (2′-O-DMAP), 2′-O-dimethylaminoethyloxyethyl (2′-O-DMAEOE), or 2′-O—N-methylacetamido (2′-O-NMA); modification of one or both of the non-linking phosphate oxygens in the phosphodiester backbone linkage; modification of one or more of the linking phosphate oxygens in the phosphodiester backbone linkage; modification of a constituent of the ribose sugar; replacement of the phosphate moiety with “dephospho” linkers; modification or replacement of a naturally occurring nucleobase; modification of the ribose-phosphate backbone; modification of 5′ end of polynucleotide; modification of 3′ end of polynucleotide; modification of the deoxyribose phosphate backbone; substitution of the phosphate group; modification of the ribophosphate backbone; modifications to the sugar of a nucleotide; modifications to the base of a nucleotide; or stereopure of nucleotide. Non limiting examples of chemical modification to the oligonucleotide can include: modification of one or both of non-linking or linking phosphate oxygens in the phosphodiester backbone linkage (e.g., sulfur (S), selenium (Se), BR3 (wherein R can be, e.g., hydrogen, alkyl, or aryl), C (e.g., an alkyl group, an aryl group, and the like), H, NR2, wherein R can be, e.g., hydrogen, alkyl, or aryl, or wherein R can be, e.g., alkyl or aryl); replacement of the phosphate moiety with “dephospho” linkers (e.g., replacement with methyl phosphonate, hydroxylamino, siloxane, carbonate, carboxymethyl, carbamate, amide, thioether, ethylene oxide linker, sulfonate, sulfonamide, thioformacetal, formacetal, oxime, methyleneimino, methylenemethylimino, methylenehydrazo, methylenedimethylhydrazo, or methyleneoxymethylimino); modification or replacement of a naturally occurring nucleobase with nucleic acid analog; modification of deoxyribose-phosphate or ribose-phosphate backbone (e.g., modifying the ribose-phosphate backbone to incorporate phosphorothioate, phosphonothioacetate, phosphoroselenates, boranophosphates, borano phosphate esters, hydrogen phosphonates, phosphonocarboxylate, phosphoroamidates, alkyl or aryl phosphonates, phosphonoacetate, or phosphotriesters; modification of 5′ end (e.g., 5′ cap or modification of 5′ cap-OH) or 3′ end of the nucleic acid sequence (3′ tail or modification of 3′ end-OH); substitution of the phosphate group with methyl phosphonate, hydroxylamino, siloxane, carbonate, carboxymethyl, carbamate, amide, thioether, ethylene oxide linker, sulfonate, sulfonamide, thioformacetal, formacetal, oxime, methyleneimino, methylenemethylimino, methylenehydrazo, methylenedimethylhydrazo, or methyleneoxymethylimino; modification of the ribophosphate backbone to incorporate morpholino (phosphorodiamidate morpholino oligomer PMO), cyclobutyl, pyrrolidine, or peptide nucleic acid (PNA) nucleoside surrogates; modifications to the sugar of a nucleotide to incorporate locked nucleic acid (LNA), unlocked nucleic acid (UNA), ethylene nucleic acid (ENA), constrained ethyl (cEt) sugar, or bridged nucleic acid (BNA); modification of a constituent of the ribose sugar (e.g., 2′-O-methyl, 2′-O-methoxy-ethyl (2′-MOE), 2′-fluoro, 2′-aminoethyl, 2′-deoxy-2′-fuloarabinou-cleic acid, 2′-deoxy, 2′-O-methyl, 3′-phosphorothioate, 3′-phosphonoacetate (PACE), or 3′-phosphonothioacetate (thioPACE)); modification to the base of a nucleotide (of A, T, C, G, or U); and stereopure of nucleotide (e.g., S conformation of phosphorothioate or R conformation of phosphorothioate).

[0051] In some embodiments, the chemical modification of the oligonucleotide comprises at least one substitution of one or both of non-linking phosphate oxygen atoms in a phosphodiester backbone linkage of the oligonucleotide. In some embodiments, the at least one chemical modification of the oligonucleotide comprises a substitution of one or more of linking phosphate oxygen atoms in a phosphodiester backbone linkage of the oligonucleotide. A non-limiting example of a chemical modification of a phosphate oxygen atom is a sulfur atom. In some embodiments, the chemical modifications of the oligonucleotide comprises at least one chemical modification to a sugar of a nucleotide of the oligonucleotide. In some embodiments, the chemical modifications of the oligonucleotide comprises at least one chemical modification to the sugar of the nucleotide, where the chemical modification comprises at least one locked nucleic acid (LNA). In some embodiments, the chemical modifications of the oligonucleotide comprises at least one chemical modification to the sugar of the nucleotide of the oligonucleotide comprising at least one unlocked nucleic acid (UNA). In some embodiments, the chemical modifications of the oligonucleotide comprises at least one chemical modification to the sugar of the nucleotide of the oligonucleotide comprising at least one ethylene nucleic acid (ENA). In some embodiments, the chemical modifications of the oligonucleotide comprises at least one chemical modification to the sugar comprising a modification of a constituent of the sugar, where the sugar is a ribose sugar. In some embodiments, the chemical modifications of the oligonucleotide comprises at least one chemical modification to the constituent of the ribose sugar of the nucleotide of the oligonucleotide comprising a 2′-O-Methyl group. In some embodiments, the chemical modifications of the oligonucleotide comprises at least one chemical modification comprising replacement of a phosphate moiety of the oligonucleotide with a dephospho linker. In some embodiments, the chemical modifications of the oligonucleotide comprises at least one chemical modification of a phosphate backbone of the oligonucleotide. In some embodiments, the oligonucleotide comprises a phosphothioate group. In some embodiments, the chemical modifications of the oligonucleotide comprises at least one chemical modification comprising a modification to a base of a nucleotide of the oligonucleotide. In some embodiments, the chemical modifications of the oligonucleotide comprises at least one chemical modification comprising an unnatural base of a nucleotide. In some embodiments, the chemical modifications of the oligonucleotide comprises at least one chemical modification comprising a morpholino group (e.g., a phosphorodiamidate morpholino oligomer, PMO), a cyclobutyl group, pyrrolidine group, or peptide nucleic acid (PNA) nucleoside surrogate. In some embodiments, the chemical modifications of the oligonucleotide comprises at least one chemical modification comprising at least one stereopure nucleic acid. In some embodiments, the at least one chemical modification can be positioned proximal to a 5′ end of the oligonucleotide. In some embodiments, the at least one chemical modification can be positioned proximal to a 3′ end of the oligonucleotide. In some embodiments, the at least one chemical modification can be positioned proximal to both 5′ and 3′ ends of the oligonucleotide.

[0052] In some embodiments, an oligonucleotide comprises a backbone comprising a plurality of sugar and phosphate moieties covalently linked together. In some cases, a backbone of an oligonucleotide comprises a phosphodiester bond linkage between a first hydroxyl group in a phosphate group on a 5′ carbon of a deoxyribose in DNA or ribose in RNA and a second hydroxyl group on a 3′ carbon of a deoxyribose in DNA or ribose in RNA.

[0053] In some embodiments, a backbone of an oligonucleotide can lack a 5′ reducing hydroxyl, a 3′ reducing hydroxyl, or both, capable of being exposed to a solvent. In some embodiments, a backbone of an oligonucleotide can lack a 5′ reducing hydroxyl, a 3′ reducing hydroxyl, or both, capable of being exposed to nucleases. In some embodiments, a backbone of an oligonucleotide can lack a 5′ reducing hydroxyl, a 3′ reducing hydroxyl, or both, capable of being exposed to hydrolytic enzymes. In some instances, a backbone of an oligonucleotide can be represented as a polynucleotide sequence in a circular 2-dimensional format with one nucleotide after the other. In some instances, a backbone of an oligonucleotide can be represented as a polynucleotide sequence in a looped 2-dimensional format with one nucleotide after the other. In some cases, a 5′ hydroxyl, a 3′ hydroxyl, or both, are joined through a phosphorus-oxygen bond. In some cases, a 5′ hydroxyl, a 3′ hydroxyl, or both, are modified into a phosphoester with a phosphorus-containing moiety.

[0054] In some embodiments, the oligonucleotide described herein comprises at least one chemical modification. A chemical modification can be a substitution, insertion, deletion, chemical modification, physical modification, stabilization, purification, or any combination thereof. In some cases, a modification is a chemical modification. Suitable chemical modifications comprise any one of: 5′ adenylate, 5′ guanosine-triphosphate cap, 5′ N7-Methylguanosine-triphosphate cap, 5′triphosphate cap, 3′phosphate, 3′thiophosphate, 5′phosphate, 5′thiophosphate, Cis-Syn thymidine dimer, trimers, C12 spacer, C3 spacer, C6 spacer, dSpacer, PC spacer, rSpacer, Spacer 18, Spacer 9,3′-3′ modifications, 5′-5′ modifications, abasic, acridine, azobenzene, biotin, biotin BB, biotin TEG, cholesteryl TEG, desthiobiotin TEG, DNP TEG, DNP-X, DOTA, dT-Biotin, dual biotin, PC biotin, psoralen C2, psoralen C6, TINA, 3′DABCYL, black hole quencher 1, black hole quencher 2, DABCYL SE, dT-DABCYL, IRDye QC-1, QSY-21, QSY-35, QSY-7, QSY-9, carboxyl linker, thiol linkers, 2′deoxyribonucleoside analog purine, 2′deoxyribonucleoside analog pyrimidine, ribonucleoside analog, 2′-O-methyl ribonucleoside analog, sugar modified analogs, wobble/universal bases, fluorescent dye label, 2′fluoro RNA, 2′O-methyl RNA, methylphosphonate, phosphodiester DNA, phosphodiester RNA, phosphothioate DNA, phosphorothioate RNA, UNA, LNA, cEt, pseudouridine-5′-triphosphate, 5-methylcytidine-5′-triphosphate, 2-O-methyl 3phosphorothioate or any combinations thereof.

[0055] In some cases, a modification can be permanent. In other cases, a modification can be transient. In some cases, multiple modifications are made to the oligonucleotide. the oligonucleotide modification can alter physio-chemical properties of a nucleotide, such as their conformation, polarity, hydrophobicity, chemical reactivity, base-pairing interactions, or any combination thereof.

[0056] A chemical modification can also be a phosphorothioate substitute. In some cases, a natural phosphodiester bond can be susceptible to rapid degradation by cellular nucleases and; a modification of internucleotide linkage using phosphorothioate (PS) bond substitutes can be more stable towards hydrolysis by cellular degradation. A modification can increase stability in a polynucleic acid. A modification can also enhance biological activity. In some cases, a phosphorothioate enhanced RNA polynucleic acid can inhibit RNase A, RNase T1, calf serum nucleases, or any combinations thereof. These properties can allow the use of PS-RNA polynucleic acids to be used in applications where exposure to nucleases is of high probability in vivo or in vitro. For example, phosphorothioate (PS) bonds can be introduced between the last 3-5 nucleotides at the 5′-or 3′-end of a polynucleic acid which can inhibit exonuclease degradation. In some cases, phosphorothioate bonds can be added throughout an entire polynucleic acid to reduce attack by endonucleases.

[0057] In some instances, chemical modifications to enhance guide stability, synthesis, localization, intracellular retention, or lengthen half-lives may not be genetically encodable. An oligonucleotide can be circular, substantially circular, or otherwise linked in a contiguous fashion (e.g., can be arranged as a loop) and can also retain a substantially similar secondary structure as a substantially similar oligonucleotide that may not be circular or may not be a loop.

### Modification of Phosphate Backbone

[0058] In some embodiments, the chemical modification comprises modification of one or both of the non-linking phosphate oxygens in the phosphodiester backbone linkage or modification of one or more of the linking phosphate oxygens in the phosphodiester backbone linkage. As used herein, “alkyl” is meant to refer to a saturated hydrocarbon group which is straight-chained or branched. Example alkyl groups include methyl (Me), ethyl (Et), propyl (e.g., n-propyl or isopropyl), butyl (e.g., n-butyl, isobutyl, or t-butyl), or pentyl (e.g., n-pentyl, isopentyl, or neopentyl). An alkyl group can contain from 1 to about 20, from 2 to about 20, from 1 to about 12, from 1 to about 8, from 1 to about 6, from 1 to about 4, or from 1 to about 3 carbon atoms. As used herein, “aryl” refers to monocyclic or polycyclic (e.g., having 2, 3, or 4 fused rings) aromatic hydrocarbons such as, for example, phenyl, naphthyl, anthracenyl, phenanthrenyl, indanyl, or indenyl. In some embodiments, aryl groups have from 6 to about 20 carbon atoms. As used herein, “alkenyl” refers to an aliphatic group containing at least one double bond. As used herein, “alkynyl” refers to a straight or branched hydrocarbon chain containing 2-12 carbon atoms and characterized in having one or more triple bonds. Examples of alkynyl groups can include ethynyl, propargyl, or 3-hexynyl. “Arylalkyl” or “aralkyl” refers to an alkyl moiety in which an alkyl hydrogen atom is replaced by an aryl group. Aralkyl includes groups in which more than one hydrogen atom has been replaced by an aryl group. Examples of “arylalkyl” or “aralkyl” include benzyl, 2-phenylethyl, 3-phenylpropyl, 9-fluorenyl, benzhydryl, and trityl groups. “Cycloalkyl” refers to a cyclic, bicyclic, tricyclic, or polycyclic non-aromatic hydrocarbon groups having 3 to 12 carbons. Examples of cycloalkyl moieties include, but are not limited to, cyclopropyl, cyclopentyl, and cyclohexyl. “Heterocyclyl” refers to a monovalent radical of a heterocyclic ring system. Representative heterocyclyls include, without limitation, tetrahydrofuranyl, tetrahydrothienyl, pyrrolidinyl, pyrrolidonyl, piperidinyl, pyrrolinyl, piperazinyl, dioxanyl, dioxolanyl, diazepinyl, oxazepinyl, thiazepinyl, and morpholinyl. “Heteroaryl” refers to a monovalent radical of a heteroaromatic ring system. Examples of heteroaryl moieties can include imidazolyl, oxazolyl, thiazolyl, triazolyl, pyrrolyl, furanyl, indolyl, thiophenyl pyrazolyl, pyridinyl, pyrazinyl, pyridazinyl, pyrimidinyl, indolizinyl, purinyl, naphthyridinyl, quinolyl, and pteridinyl.

[0059] In some embodiments, the phosphate group of a chemically modified nucleotide can be modified by replacing one or more of the oxygens with a different substituent. In some embodiments, the chemically modified nucleotide can include replacement of an unmodified phosphate moiety with a modified phosphate as described herein. In some embodiments, the modification of the phosphate backbone can include alterations that result in either an uncharged linker or a charged linker with unsymmetrical charge distribution. Examples of modified phosphate groups can include phosphorothioate, phosphonothioacetate, phosphoroselenates, boranophosphates, boranophosphate esters, hydrogen phosphonates, phosphoroamidates, alkyl or aryl phosphonates and phosphotriesters. In some embodiments, one of the non-bridging phosphate oxygen atoms in the phosphate backbone moiety can be replaced by any of the following groups: sulfur (S), selenium (Se), BR3 (wherein R can be, e.g., hydrogen, alkyl, or aryl), C (e.g., an alkyl group, an aryl group, and the like), H, NR2 (wherein R can be, e.g., hydrogen, alkyl, or aryl), or (wherein R can be, e.g., alkyl or aryl). The phosphorous atom in an unmodified phosphate group can be achiral. However, replacement of one of the non-bridging oxygens with one of the above atoms or groups of atoms can render the phosphorous atom chiral. A phosphorous atom in a phosphate group modified in this way is a stereogenic center. The stereogenic phosphorous atom can possess either the “R” configuration (herein Rp) or the “S” configuration (herein Sp). In some cases, the oligonucleotide comprises stereopure nucleotides comprising S conformation of phosphorothioate or R conformation of phosphorothioate. In some embodiments, the chiral phosphate product is present in a diastereomeric excess of 50%, 60%, 70%, 80%, 90%, or more. In some embodiments, the chiral phosphate product is present in a diastereomeric excess of 95%. In some embodiments, the chiral phosphate product is present in a diastereomeric excess of 96%. In some embodiments, the chiral phosphate product is present in a diastereomeric excess of 97%. In some embodiments, the chiral phosphate product is present in a diastereomeric excess of 98%. In some embodiments, the chiral phosphate product is present in a diastereomeric excess of 99%. In some embodiments, both non-bridging oxygens of phosphorodithioates can be replaced by sulfur. The phosphorus center in the phosphorodithioates can be achiral which precludes the formation of oligoribonucleotide diastereomers. In some embodiments, modifications to one or both non-bridging oxygens can also include the replacement of the non-bridging oxygens with a group independently selected from S, Se, B, C, H, N, and OR (R can be, e.g., alkyl or aryl). In some embodiments, the phosphate linker can also be modified by replacement of a bridging oxygen, (i.e., the oxygen that links the phosphate to the nucleoside), with nitrogen (bridged phosphoroamidates), sulfur (bridged phosphorothioates) and carbon (bridged methylenephosphonates). The replacement can occur at either or both of the linking oxygens.

[0060] In certain embodiments, nucleic acids comprise linked nucleic acids. Nucleic acids can be linked together using any inter nucleic acid linkage. The two main classes of inter nucleic acid linking groups are defined by the presence or absence of a phosphorus atom. Representative phosphorus containing inter nucleic acid linkages include, but are not limited to, phosphodiesters, phosphotriesters, methylphosphonates, phosphoramidate, and phosphorothioates (P═S). Representative non-phosphorus containing inter nucleic acid linking groups include, but are not limited to, methylenemethylimino (—CH₂—N(CH₃)—O—CH₂—), thiodiester (—O—C(O)—S—), thionocarbamate (—O—C(O)(NH)—S—); siloxane (—O—Si(H)₂—O—); and N,N*-dimethylhydrazine (—CH₂—N(CH₃)—N(CH₃)). In certain embodiments, inter nucleic acids linkages having a chiral atom can be prepared as a racemic mixture, as separate enantiomers, e.g., alkylphosphonates and phosphorothioates. Unnatural nucleic acids can contain a single modification. Unnatural nucleic acids can contain multiple modifications within one of the moieties or between different moieties.

[0061] Backbone phosphate modifications to nucleic acid include, but are not limited to, methyl phosphonate, phosphorothioate, phosphoramidate (bridging or non-bridging), phosphotriester, phosphorodithioate, phosphodithioate, and boranophosphate, and can be used in any combination. Other non-phosphate linkages may also be used.

[0062] In some embodiments, backbone modifications (e.g., methylphosphonate, phosphorothioate, phosphoroamidate and phosphorodithioate internucleotide linkages) can confer immunomodulatory activity on the modified nucleic acid and/or enhance their stability in vivo.

[0063] In some instances, a phosphorous derivative (or modified phosphate group) is attached to the sugar or sugar analog moiety in and can be a monophosphate, diphosphate, triphosphate, alkylphosphonate, phosphorothioate, phosphorodithioate, phosphoramidate or the like.

[0064] In some cases, backbone modification comprises replacing the phosphodiester linkage with an alternative moiety such as an anionic, neutral or cationic group. Examples of such modifications include: anionic internucleoside linkage; N3′ to P5′ phosphoramidate modification; boranophosphate DNA; prooligonucleotides; neutral internucleoside linkages such as methylphosphonates; amide linked DNA; methylene(methylimino) linkages; formacetal and thioformacetal linkages; backbones containing sulfonyl groups; morpholino oligos; peptide nucleic acids (PNA); and positively charged deoxyribonucleic guanidine (DNG) oligos. A modified nucleic acid may comprise a chimeric or mixed backbone comprising one or more modifications, e.g., a combination of phosphate linkages such as a combination of phosphodiester and phosphorothioate linkages.

[0065] Substitutes for the phosphate include, for example, short chain alkyl or cycloalkyl internucleoside linkages, mixed heteroatom and alkyl or cycloalkyl internucleoside linkages, or one or more short chain heteroatomic or heterocyclic internucleoside linkages. These include those having morpholino linkages (formed in part from the sugar portion of a nucleoside); siloxane backbones; sulfide, sulfoxide and sulfone backbones; formacetyl and thioformacetyl backbones; methylene formacetyl and thioformacetyl backbones; alkene containing backbones; sulfamate backbones; methyleneimino and methylenehydrazino backbones; sulfonate and sulfonamide backbones; amide backbones; and others having mixed N, O, S and CH₂ component parts. It is also understood in a nucleotide substitute that both the sugar and the phosphate moieties of the nucleotide can be replaced, by for example an amide type linkage (aminoethylglycine) (PNA). It is also possible to link other types of molecules (conjugates) to nucleotides or nucleotide analogs to enhance for example, cellular uptake. Conjugates can be chemically linked to the nucleotide or nucleotide analogs. Such conjugates include but are not limited to lipid moieties such as a cholesterol moiety, a thioether, e.g., hexyl-S-tritylthiol, a thiocholesterol, an aliphatic chain, e.g., dodecandiol or undecyl residues, a phospholipid, e.g., di-hexadecyl-rac-glycerol or triethylammonium 1-di-O-hexadecyl-rac-glycero-S—H-phosphonate, a polyamine or a polyethylene glycol chain, or adamantane acetic acid, a palmityl moiety, or an octadecylamine or hexylamino-carbonyl-oxycholesterol moiety.

[0066] In some embodiments, the chemical modification described herein comprises modification of a phosphate backbone. In some embodiments, the oligonucleotide described herein comprises at least one chemically modified phosphate backbone. Exemplary chemically modification of the phosphate group or backbone can include replacing one or more of the oxygens with a different substituent. Furthermore, the modified nucleotide present in the oligonucleotide can include the replacement of an unmodified phosphate moiety with a modified phosphate as described herein. In some embodiments, the modification of the phosphate backbone can include alterations resulting in either an uncharged linker or a charged linker with unsymmetrical charge distribution. Exemplary modified phosphate groups can include, phosphorothioate, phosphonothioacetate, phosphoroselenates, borano phosphates, borano phosphate esters, hydrogen phosphonates, phosphoroamidates, alkyl or aryl phosphonates and phosphotriesters. In some embodiments, one of the non-bridging phosphate oxygen atoms in the phosphate backbone moiety can be replaced by any of the following groups: sulfur (S), selenium (Se), BR₃ (wherein R can be, e.g., hydrogen, alkyl, or aryl), C (e.g., an alkyl group, an aryl group, and the like), H, NR₂ (wherein R can be, e.g., hydrogen, alkyl, or aryl), or OR (wherein R can be, e.g., alkyl or aryl). The phosphorous atom in an unmodified phosphate group is achiral. However, replacement of one of the non-bridging oxygens with one of the above atoms or groups of atoms can render the phosphorous atom chiral; that is to say that a phosphorous atom in a phosphate group modified in this way is a stereogenic center. The stereogenic phosphorous atom can possess either the “R” configuration (herein Rp) or the “S” configuration (herein Sp). In such case, the chemically modified oligonucleotide can be stereopure (e.g., S or R confirmation). In some cases, the chemically modified oligonucleotide comprises stereopure phosphate modification. For example, the chemically modified oligonucleotide comprises S conformation of phosphorothioate or R conformation of phosphorothioate.

[0067] Phosphorodithioates have both non-bridging oxygens replaced by sulfur. The phosphorus center in the phosphorodithioates is achiral which precludes the formation of oligoribonucleotide diastereomers. In some embodiments, modifications to one or both non-bridging oxygens can also include the replacement of the non-bridging oxygens with a group independently selected from S, Se, B, C, H, N, and OR (R can be, e.g., alkyl or aryl).

[0068] The phosphate linker can also be modified by replacement of a bridging oxygen, (i.e., the oxygen that links the phosphate to the nucleoside), with nitrogen (bridged phosphoroamidates), sulfur (bridged phosphorothioates) and carbon (bridged methylenephosphonates). The replacement can occur at either linking oxygen or at both of the linking oxygens.

### Replacement of Phosphate Moiety

[0069] In some embodiments, at least one phosphate group of the oligonucleotide can be chemically modified. In some embodiments, the phosphate group can be replaced by non-phosphorus containing connectors. In some embodiments, the phosphate moiety can be replaced by dephospho linker. In some embodiments, the charge phosphate group can be replaced by a neutral group. In some cases, the phosphate group can be replaced by methyl phosphonate, hydroxylamino, siloxane, carbonate, carboxymethyl, carbamate, amide, thioether, ethylene oxide linker, sulfonate, sulfonamide, thioformacetal, formacetal, oxime, methyleneimino, methylenemethylimino, methylenehydrazo, methylenedimethylhydrazo and methyleneoxymethylimino. In some embodiments, nucleotide analogs described herein can also be modified at the phosphate group. Modified phosphate group can include modification at the linkage between two nucleotides with phosphorothioate, chiral phosphorothioate, phosphorodithioate, phosphotriester, aminoalkylphosphotriester, methyl and other alkyl phosphonates including 3′-alkylene phosphonate and chiral phosphonates, phosphinates, phosphoramidates (e.g., 3′-amino phosphoramidate and aminoalkylphosphoramidates), thionophosphoramidates, thionoalkylphosphonates, thionoalkylphosphotriesters, and boranophosphates. The phosphate or modified phosphate linkage between two nucleotides can be through a 3′-5′ linkage or a 2′-5′ linkage, and the linkage contains inverted polarity such as 3′-5′ to 5′-3′ or 2′-5′ to 5′-2′.

### Substitution of Phosphate Group

[0070] In some embodiments, the chemical modification described herein comprises modification by replacement of a phosphate group. In some embodiments, the oligonucleotide described herein comprises at least one chemically modification comprising a phosphate group substitution or replacement. Exemplary phosphate group replacement can include non-phosphorus containing connectors. In some embodiments, the phosphate group substitution or replacement can include replacing charged phosphate group can by a neutral moiety. Exemplary moieties which can replace the phosphate group can include methyl phosphonate, hydroxylamino, siloxane, carbonate, carboxymethyl, carbamate, amide, thioether, ethylene oxide linker, sulfonate, sulfonamide, thioformacetal, formacetal, oxime, methyleneimino, methylenemethylimino, methylenehydrazo, methylenedimethylhydrazo and methyleneoxymethylimino.

### Modification of the Ribophosphate Backbone

[0071] In some embodiments, the chemical modification described herein comprises modifying ribophosphate backbone of the oligonucleotide. In some embodiments, the oligonucleotide described herein comprises at least one chemically modified ribophosphate backbone. Exemplary chemically modified ribophosphate backbone can include scaffolds that can mimic nucleic acids can also be constructed wherein the phosphate linker and ribose sugar are replaced by nuclease resistant nucleoside or nucleotide surrogates. In some embodiments, the nucleobases can be tethered by a surrogate backbone. Examples can include morpholino such as a phosphorodiamidate morpholino oligomer (PMO), cyclobutyl, pyrrolidine and peptide nucleic acid (PNA) nucleoside surrogates.

### Modification of Sugar

[0072] In some embodiments, the chemical modification described herein comprises modification of sugar. In some embodiments, the oligonucleotide described herein comprises at least one chemically modified sugar. Exemplary chemically modified sugar can include 2′ hydroxyl group (OH) modified or replaced with a number of different “oxy” or “deoxy” substituents. In some embodiments, modifications to the 2′ hydroxyl group can enhance the stability of the nucleic acid since the hydroxyl can no longer be deprotonated to form a 2′-alkoxide ion. The 2′-alkoxide can catalyze degradation by intramolecular nucleophilic attack on the linker phosphorus atom. Examples of “oxy”-2′ hydroxyl group modifications can include alkoxy or aryloxy (OR, wherein “R” can be, e.g., alkyl, cycloalkyl, aryl, aralkyl, heteroaryl or a sugar); polyethyleneglycols (PEG), O(CH₂CH₂O)ₙCH2CH₂OR, wherein R can be, e.g., H or optionally substituted alkyl, and n can be an integer from 0 to 20 (e.g., from 0 to 4, from 0 to 8, from 0 to 10, from 0 to 16, from 1 to 4, from 1 to 8, from 1 to 10, from 1 to 16, from 1 to 20, from 2 to 4, from 2 to 8, from 2 to 10, from 2 to 16, from 2 to 20, from 4 to 8, from 4 to 10, from 4 to 16, and from 4 to 20). In some embodiments, the “oxy”-2′ hydroxyl group modification can include (LNA, in which the 2′ hydroxyl can be connected, e.g., by a Ci-6 alkylene or Cj-6 heteroalkylene bridge, to the 4′ carbon of the same ribose sugar, where exemplary bridges can include methylene, propylene, ether, or amino bridges; O-amino (wherein amino can be, e.g., NH₂; alkylamino, dialkylamino, heterocyclyl, arylamino, diarylamino, heteroarylamino, or diheteroarylamino, ethylenediamine, or polyamino) and aminoalkoxy, O(CH₂)ₙ-amino, (wherein amino can be, e.g., NH₂; alkylamino, dialkylamino, heterocyclyl, arylamino, diarylamino, heteroarylamino, or diheteroarylamino, ethylenediamine, or polyamino). In some embodiments, the “oxy”-2′ hydroxyl group modification can include the methoxyethyl group (MOE), (OCH₂CH₂OCH₃, e.g., a PEG derivative). In some cases, the deoxy modifications can include hydrogen (i.e., deoxyribose sugars, e.g., at the overhang portions of partially dsRNA); halo (e.g., bromo, chloro, fluoro, or iodo); amino (wherein amino can be, e.g., NH₂; alkylamino, dialkylamino, heterocyclyl, arylamino, diarylamino, heteroarylamino, diheteroarylamino, or amino acid); NH(CH₂CH₂NH)ₙCH2CH₂-amino (wherein amino can be, e.g., as described herein), NHC(O)R (wherein R can be, e.g., alkyl, cycloalkyl, aryl, aralkyl, heteroaryl or sugar), cyano; mercapto; alkyl-thio-alkyl; thioalkoxy; and alkyl, cycloalkyl, aryl, alkenyl and alkynyl, which can be optionally substituted with e.g., an amino as described herein. In some instances, the sugar group can also contain one or more carbons that possess the opposite stereochemical configuration than that of the corresponding carbon in ribose. Thus, a modified nucleic acid can include nucleotides containing e.g., arabinose, as the sugar. The nucleotide “monomer” can have an alpha linkage at the F position on the sugar, e.g., alpha-nucleosides. The modified nucleic acids can also include “abasic” sugars, which lack a nucleobase at C—. The abasic sugars can also be further modified at one or more of the constituent sugar atoms. The modified nucleic acids can also include one or more sugars that are in the L form, e.g., L-nucleosides. In some aspects, the oligonucleotide described herein includes the sugar group ribose, which is a 5-membered ring having an oxygen. Exemplary modified nucleosides and modified nucleotides can include replacement of the oxygen in ribose (e.g., with sulfur (S), selenium (Se), or alkylene, such as, e.g., methylene or ethylene); addition of a double bond (e.g., to replace ribose with cyclopentenyl or cyclohexenyl); ring contraction of ribose (e.g., to form a 4-membered ring of cyclobutane or oxetane); ring expansion of ribose (e.g., to form a 6- or 7-membered ring having an additional carbon or heteroatom, such as for example, anhydrohexitol, altritol, mannitol, cyclohexanyl, cyclohexenyl, and morpholino that also has a phosphoramidate backbone). In some embodiments, the modified nucleotides can include multicyclic forms (e.g., tricyclo; and “unlocked” forms, such as glycol nucleic acid (GNA) (e.g., R-GNA or S-GNA, where ribose is replaced by glycol units attached to phosphodiester bonds), threose nucleic acid. In some embodiments, the modifications to the sugar of the oligonucleotide comprises modifying the oligonucleotide to include locked nucleic acid (LNA), unlocked nucleic acid (UNA), ethylene nucleic acid (ENA), constrained ethyl (cEt) sugar, or bridged nucleic acid (BNA).

### Modification of a Constituent of the Ribose Sugar

[0073] In some embodiments, the oligonucleotide described herein comprises at least one chemical modification of a constituent of the ribose sugar. In some embodiments, the chemical modification of the constituent of the ribose sugar can include 2′-O-methyl, 2′-O-methoxyethyl (2′-O-MOE), 2′-fluoro, 2′-aminoethyl, 2′-deoxy-2′-fuloarabinou-cleic acid, 2′-deoxy, 2′-deoxy-2′-fluoro, 2′-O-methyl, 3′-phosphorothioate, 2-O-aminopropyl (2′-O-AP), 2-O-dimethylaminoethyl (2′-O-DMAOE), 2-O-dimethylaminopropyl (2′-O-DMAP), 2′-O-dimethylaminoethyloxyethyl (2′-O-DMAEOE), 2′-O—N-methylacetamido (2′-O-NMA) 3′-phosphonoacetate (PACE), or 3′-phosphonothioacetate (thioPACE). In some embodiments, the chemical modification of the constituent of the ribose sugar comprises unnatural nucleic acid. In some instances, the unnatural nucleic acids include modifications at the 5′-position and the 2′-position of the sugar ring, such as 5′-CH₂-substituted 2′-O-protected nucleosides. In some cases, unnatural nucleic acids include amide linked nucleoside dimers have been prepared for incorporation into oligonucleotides wherein the 3′ linked nucleoside in the dimer (5′ to 3′) comprises a 2′-OCH₃ and a 5′-(S)—CH₃. Unnatural nucleic acids can include 2′-substituted 5′-CH₂ (or O) modified nucleosides. Unnatural nucleic acids can include 5′-methylenephosphonate DNA and RNA monomers, and dimers. Unnatural nucleic acids can include 5′-phosphonate monomers having a 2′-substitution and other modified 5′-phosphonate monomers. Unnatural nucleic acids can include 5′-modified methylenephosphonate monomers. Unnatural nucleic acids can include analogs of 5′ or 6′-phosphonate ribonucleosides comprising a hydroxyl group at the 5′ and/or 6′-position. Unnatural nucleic acids can include 5′-phosphonate deoxyribonucleoside monomers and dimers having a 5′-phosphate group. Unnatural nucleic acids can include nucleosides having a 6′-phosphonate group wherein the 5′ or/and 6′-position is unsubstituted or substituted with a thio-tert-butyl group (SC(CH₃)₃) (and analogs thereof); a methyleneamino group (CH₂NH₂) (and analogs thereof) or a cyano group (CN) (and analogs thereof).

[0074] In some embodiments, unnatural nucleic acids also include modifications of the sugar moiety. In some cases, nucleic acids contain one or more nucleosides wherein the sugar group has been modified. Such sugar modified nucleosides may impart enhanced nuclease stability, increased binding affinity, or some other beneficial biological property. In certain embodiments, nucleic acids comprise a chemically modified ribofuranose ring moiety. Examples of chemically modified ribofuranose rings include, without limitation, addition of substituent groups (including 5′ and/or 2′ substituent groups; bridging of two ring atoms to form bicyclic nucleic acids; replacement of the ribosyl ring oxygen atom with S, N(R), or C(R₁)(R₂) (R═H, C₁-C₁₂ alkyl or a protecting group); and combinations thereof.

[0075] In some instances, the oligonucleotide described herein comprises modified sugars or sugar analogs. Thus, in addition to ribose and deoxyribose, the sugar moiety can be pentose, deoxypentose, hexose, deoxyhexose, glucose, arabinose, xylose, lyxose, or a sugar “analog” cyclopentyl group. The sugar can be in a pyranosyl or furanosyl form. The sugar moiety can be the furanoside of ribose, deoxyribose, arabinose or 2′-O-alkylribose, and the sugar can be attached to the respective heterocyclic bases either in [alpha] or [beta] anomeric configuration. Sugar modifications include, but are not limited to, 2′-alkoxy-RNA analogs, 2′-amino-RNA analogs, 2′-fluoro-DNA, and 2′-alkoxy- or amino-RNA/DNA chimeras. For example, a sugar modification may include 2′-O-methyl-uridine or 2′-O-methyl-cytidine. Sugar modifications include 2′-O-alkyl-substituted deoxyribonucleosides and 2′-O-ethyleneglycol-like ribonucleosides.

[0076] Modifications to the sugar moiety include natural modifications of the ribose and deoxy ribose as well as unnatural modifications. Sugar modifications include, but are not limited to, the following modifications at the 2′ position: OH; F; O-, S-, or N-alkyl; O-, S-, or N-alkenyl; O-, S- or N-alkynyl; or O-alkyl-O-alkyl, wherein the alkyl, alkenyl and alkynyl can be substituted or unsubstituted C₁ to C₁₀, alkyl or C₂ to C₁₀ alkenyl and alkynyl. 2′ sugar modifications also include but are not limited to —O[(CH₂)ₙO]ₘ CH₃, —O(CH₂)ₙOCH₃, —O(CH₂)ₙNH₂, —O(CH₂)ₙCH₃, —O(CH₂)ₙONH₂, and —O(CH₂)ₙON[(CH₂)ₙ CH₃)]₂, where n and m are from 1 to about 10. Other chemical modifications at the 2′ position include but are not limited to: C₁ to C₁₀ lower alkyl, substituted lower alkyl, alkaryl, aralkyl, O-alkaryl, O-aralkyl, SH, SCH₃, OCN, Cl, Br, CN, CF₃, OCF₃, SOCH₃, SO₂ CH₃, ONO₂, NO₂, N₃, NH₂, heterocycloalkyl, heterocycloalkaryl, aminoalkylamino, polyalkylamino, substituted silyl, an RNA cleaving group, a reporter group, an intercalator, a group for improving the pharmacokinetic properties of an oligonucleotide, or a group for improving the pharmacodynamic properties of an oligonucleotide, and other substituents having similar properties. Similar modifications may also be made at other positions on the sugar, particularly the 3′ position of the sugar on the 3′ terminal nucleotide or in 2′-5′ linked oligonucleotides and the 5′ position of the 5′ terminal nucleotide. Chemically modified sugars also include those that contain modifications at the bridging ring oxygen, such as CH₂ and S. Nucleotide sugar analogs can also have sugar mimetics such as cyclobutyl moieties in place of the pentofuranosyl sugar. Examples of nucleic acids having modified sugar moieties include, without limitation, nucleic acids comprising 5′-vinyl, 5′-methyl (R or S), 4′-S, 2′-F, 2′-OCH₃, and 2′-O(CH₂)₂OCH₃ substituent groups. The substituent at the 2′ position can also be selected from allyl, amino, azido, thio, O-allyl, O—(C₁-C₁₀ alkyl), OCF₃, O(CH₂)₂SCH₃, O(CH₂)₂—O—N(Rₘ)(Rₙ), and O—CH₂—C(═O)—N(Rₘ)(Rₙ), where each Rₘ and Rₙ is, independently, H or substituted or unsubstituted C₁-C₁₀ alkyl.

[0077] In certain embodiments, nucleic acids described herein include one or more bicyclic nucleic acids. In certain such embodiments, the bicyclic nucleic acid comprises a bridge between the 4′ and the 2′ ribosyl ring atoms. In certain embodiments, nucleic acids provided herein include one or more bicyclic nucleic acids wherein the bridge comprises a 4′ to 2′ bicyclic nucleic acid. Examples of such 4′ to 2′ bicyclic nucleic acids include, but are not limited to, one of the formulae: 4′-(CH₂)—O-2′ (LNA); 4′-(CH₂)—S-2′; 4′-(CH₂)₂—O-2′ (ENA); 4′-CH(CH₃)—O-2′ and 4′-CH(CH₂OCH₃)—O-2′, and analogs thereof; 4′-C(CH₃)(CH₃)—O-2′ and analogs thereof.

### Modifications on the Base of Nucleotide

[0078] In some embodiments, the chemical modification described herein comprises modification of the base of nucleotide (e.g., the nucleobase). Exemplary nucleobases can include adenine (A), thymine (T), guanine (G), cytosine (C), and uracil (U). These nucleobases can be modified or replaced to in the oligonucleotide described herein. The nucleobase of the nucleotide can be independently selected from a purine, a pyrimidine, a purine or pyrimidine analog. In some embodiments, the nucleobase can be naturally-occurring or synthetic derivatives of a base.

[0079] In some embodiments, the chemical modification described herein comprises modifying an uracil. In some embodiments, the oligonucleotide described herein comprises at least one chemically modified uracil. Exemplary chemically modified uracil can include pseudouridine, pyridin-4-one ribonucleoside, 5-aza-uridine, 6-aza-uridine, 2-thio-5-aza-uridine, 2-thio-uridine, 4-thio-uridine, 4-thio-pseudouridine, 2-thio-pseudouridine, 5-hydroxy-uridine, 5-aminoallyl-uridine, 5-halo-uridine (e.g., 5-iodo-uridine or 5-bromo-uridine), 3-methyl-uridine, 5-methoxy-uridine, uridine 5-oxyacetic acid, uridine 5-oxyacetic acid methyl ester, 5-carboxymethyl-uridine, 1-carboxymethyl-pseudouridine, 5-carboxyhydroxymethyl-uridine, 5-carboxyhydroxymethyl-uridine methyl ester, 5-methoxycarbonylmethyl-uridine, 5-methoxycarbonylmethyl-2-thio-uridine, 5-aminomethyl-2-thio-uridine, 5-methylaminomethyl-uridine, 5-methylaminomethyl-2-thio-uridine, 5-methylaminomethyl-2-seleno-uridine, 5-carbamoylmethyl-uridine, 5-carboxymethylaminomethyl-uridine, 5-carboxymethylaminomethyl-2-thio-uridine, 5-propynyl-uridine, 1-propynyl-pseudouridine, 5-taurinomethyl-uridine, 1-taurinomethyl-pseudouridine, 5-taurinomethyl-2-thio-uridine, 1-taurinomethyl-4-thio-pseudouridine, 5-methyl-uridine, 1 methyl-pseudouridine, 5-methyl-2-thio-uridine, 1-methyl-4-thio-pseudouridine, 4-thio-1-methyl-pseudouridine, 3-methyl-pseudouridine, 2-thio-1-methyl-pseudouridine, 1-methyl-1-deaza-pseudouridine, 2-thio-1-methyl-1-deaza-pseudouridine, dihydroundine, dihydropseudoundine, 5,6-dihydrouridine, 5-methyl-dihydrouridine, 2-thio-dihydrouridine, 2-thio-dihydropseudouridine, 2-methoxy-uridine, 2-methoxy-4-thio-uridine, 4-methoxy-pseudouridine, 4-methoxy-2-thio-pseudouridine, N1-methyl-pseudouridine, 3-(3-amino-3-carboxypropyl) uridine, 1-methyl-3-(3-amino-3-carboxypropy pseudouridine, 5-(isopentenylaminomethyl) uridine, 5-(isopentenylaminomethy])-2-thio-uridine, a-thio-uridine, 2′-O-methyl-uridine, 5,2′-O-dimethyl-uridine, 2′-O-methyl-pseudouridine, 2-thio-2′-O-methyl-uridine, 5-methoxycarbonylmethyl-2′-O-methyl-uridine, 5-carbamoylmethyl-2′-O-methyl-uridine, 5-carboxymethylaminomethyl-2′-O-methyl-uridine, 3,2′-O-dimethyl-uridine, 5-(isopentenylaminomethyl)-2′-O-methyl-uridine, 1-thio-uridine, deoxythymidine, 2′-F-ara-uridine, 2′-F-uridine, 2′-OH-ara-uridine, 5-(2-carbomethoxyvinyl) uridine, 5-[3-(1-E-propenylamino)uridine, pyrazolo[3,4-d]pyrimidines, xanthine, and hypoxanthine.

[0080] In some embodiments, the chemical modification described herein comprises modifying a cytosine. In some embodiments, the oligonucleotide described herein comprises at least one chemically modified cytosine. Exemplary chemically modified cytosine can include 5-aza-cytidine, 6-aza-cytidine, pseudoisocytidine, 3-methyl-cytidine, N4-acetyl-cytidine, 5-formyl-cytidine, N4-methyl-cytidine, 5-methyl-cytidine, 5-halo-cytidine, 5-hydroxymethyl-cytidine, 1-methyl-pseudoisocytidine, pyrrolo-cytidine, pyrrolo-pseudoisocytidine, 2-thio-cytidine, 2-thio-5-methyl-cytidine, 4-thio-pseudoisocytidine, 4-thio-1-methyl-pseudoisocytidine, 4-thio-1-methyl-1-deaza-pseudoisocytidine, 1-methyl-1-deaza-pseudoisocytidine, zebularine, 5-aza-zebularine, 5-methyl-zebularine, 5-aza-2-thio-zebularine, 2-thio-zebularine, 2-methoxy-cytidine, 2-methoxy-5-methyl-cytidine, 4-methoxy-pseudoisocytidine, 4-methoxy-1-methyl-pseudoisocytidine, lysidine, a-thio-cytidine, 2′-O-methyl-cytidine, 5,2′-O-dimethyl-cytidine, N4-acetyl-2′-O-methyl-cytidine, N4,2′-0-dimethyl-cytidine, 5-formyl-2′-O-methyl-cytidine, N4,N4,2′-O-trimethyl-cytidine, 1-thio-cytidine, 2′-F-ara-cytidine, 2′-F-cytidine, and 2′-OH-ara-cytidine.

[0081] In some embodiments, the chemical modification described herein comprises modifying a adenine. In some embodiments, the oligonucleotide described herein comprises at least one chemically modified adenine. Exemplary chemically modified adenine can include 2-amino-purine, 2,6-diaminopurine, 2-amino-6-halo-purine (e.g., 2-amino-6-chloro-purine), 6-halo-purine (e.g., 6-chloi-purine), 2-amino-6-methyl-purine, 8-azido-adenosine, 7-deaza-adenine, 7-deaza-8-aza-adenine, 7-deaza-2-amino-purine, 7-deaza-8-aza-2-amino-purine, 7-deaza-2,6-diaminopurine, 7-deaza-8-aza-2,6-diaminopurine, 1-methyl-adenosine, 2-methyl-adenine, N6-methyl-adenosine, 2-methylthio-N6-methyl-adenosine, N6-isopentenyl-adenosine, 2-methylthio-N6-isopentenyl-adenosine, N6-(cis-hydroxyisopentenyl) adenosine, 2-methylthio-N6-(cis-hydroxyisopentenyl) adenosine, N6-glycinylcarbamoyl-adenosine, N6-threonylcarbamoyl-adenosine, N6-methyl-N6-threonylcarbamoyl-adenosine, 2-methylthio-N6-threonylcarbamoyl-adenosine, N6, N6-dimethyl-adenosine, N6-hydroxynorvalylcarbamoyl-adenosine, 2-methylthio-N6-hydroxynorvalylcarbamoyl-adenosine, N6-acetyl-adenosine, 7-methyl-adenine, 2-methylthio-adenine, 2-methoxy-adenine, a-thio-adenosine, 2′-O-methyl-adenosine, N6, 2′-O-dimethyl-adenosine, N6-Methyl-2′-deoxyadenosine, N6, N6, 2′-O-trimethyl-adenosine, 1,2′-O-dimethyl-adenosine, 2′-O-ribosyladenosine (phosphate) (Ar(p)), 2-amino-N6-methyl-purine, 1-thio-adenosine, 8-azido-adenosine, 2′-F-ara-adenosine, 2′-F-adenosine, 2′-OH-ara-adenosine, and N6-(19-amino-pentaoxanonadecyl)-adenosine.

[0082] In some embodiments, the chemical modification described herein comprises modifying a guanine. In some embodiments, the oligonucleotide described herein comprises at least one chemically modified guanine. Exemplary chemically modified guanine can include inosine, 1-methyl-inosine, wyosine, methylwyosine, 4-demethyl-wyosine, isowyosine, wybutosine, peroxywybutosine, hydroxywybutosine, undermodified hydroxywybutosine, 7-deaza-guanosine, queuosine, epoxyqueuosine, galactosyl-queuosine, mannosyl-queuosine, 7-cyano-7-deaza-guanosine, 7-aminomethyl-7-deaza-guanosine, archaeosine, 7-deaza-8-aza-guanosine, 6-thio-guanosine, 6-thio-7-deaza-guanosine, 6-thio-7-deaza-8-aza-guanosine, 7-methyl-guanosine, 6-thio-7-methyl-guanosine, 7-methyl-inosine, 6-methoxy-guanosine, 1-methyl-guanosine, N2-methyl-guanosine, N2, N2-dimethyl-guanosine, N2, 7-dimethyl-guanosine, N2, N2, 7-dimethyl-guanosine, 8-oxo-guanosine, 7-methyl-8-oxo-guanosine, 1-meththio-guanosine, N2-methyl-6-thio-guanosine, N2,N2-dimethyl-6-thio-guanosine, a-thio-guanosine, 2′-O-methyl-guanosine, N2-methyl-2′-O-methyl-guanosine, N2,N2-dimethyl-2′-O-methyl-guanosine, 1-methyl-2′-O-methyl-guanosine, N2, 7-dimethyl-2′-O-methyl-guanosine, 2′-O-methyl-inosine, 1, 2′-O-dimethyl-inosine, 6-O-phenyl-2′-deoxyinosine, 2′-O-ribosylguanosine, 1-thio-guanosine, 6-O-methyguanosine, O⁶-Methyl-2′-deoxyguanosine, 2′-F-ara-guanosine, and 2′-F-guanosine.

[0083] In some cases, the chemical modification of the oligonucleotide can include introducing or substituting a nucleic acid analog or an unnatural nucleic acid into the oligonucleotide. In some embodiments, nucleic acid analog can be any one of the chemically modified nucleic acid described herein. all of which are expressly incorporated by reference in their entireties. The chemically modified nucleotide described herein can include a variant of guanosine, uridine, adenosine, thymidine, and cytosine, including any natively occurring or non-natively occurring guanosine, uridine, adenosine, thymidine or cytidine that has been altered chemically, for example by acetylation, methylation, hydroxylation. Exemplary chemically modified nucleotide can include 1-methyl-adenosine, 1-methyl-guanosine, 1-methyl-inosine, 2,2-dimethyl-guanosine, 2,6-diaminopurine, 2′-amino-2′-deoxyadenosine, 2′-amino-2′-deoxycytidine, 2′-amino-2′-deoxyguanosine, 2′-amino-2′-deoxyuridine, 2-amino-6-chloropurineriboside, 2-aminopurine-riboside, 2′-araadenosine, 2′-aracytidine, 2′-arauridine, 2′-azido-2′-deoxyadenosine, 2′-azido-2′-deoxycytidine, 2′-azido-2′-deoxyguanosine, 2′-azido-2′-deoxyuridine, 2-chloroadenosine, 2′-fluoro-2′-deoxyadenosine, 2′-fluoro-2′-deoxycytidine, 2′-fluoro-2′-deoxyguanosine, 2′-fluoro-2′-deoxyuridine, 2′-fluorothymidine, 2-methyl-adenosine, 2-methyl-guanosine, 2-methyl-thio-N6-isopenenyl-adenosine, 2′-O-methyl-2-aminoadenosine, 2′-O-methyl-2′-deoxyadenosine, 2′-O-methyl-2′-deoxy cytidine, 2′-O-methyl-2′-deoxyguanosine, 2,-O-methyl-2′-deoxyuridine, 2′-O-methyl-5-methyluridine, 2′-O-methylinosine, 2′-O-methylpseudouridine, 2-thiocytidine, 2-thio-cytidine, 3-methyl-cytidine, 4-acetyl-cytidine, 4-thiouridine, 5-(carboxyhydroxymethyl)-uridine, 5,6-dihydrouridine, 5-aminoallylcytidine, 5-aminoallyl-deoxyuridine, 5-bromouridine, 5-carboxymethylaminomethyl-2-thio-uracil, 5-carboxymethylamonomethyl-uracil, 5-chloro-ara-cytosine, 5-fluoro-uridine, 5-iodouridine, 5-methoxycarbonylmethyl-uridine, 5-methoxy-uridine, 5-methyl-2-thio-uridine, 6-Azacytidine, 6-azauridine, 6-chloro-7-deaza-guanosine, 6-chloropurineriboside, 6-mercapto-guanosine, 6-methyl-mercaptopurine-riboside, 7-deaza-2′-deoxy-guanosine, 7-deazaadenosine, 7-methyl-guanosine, 8-azaadenosine, 8-bromo-adenosine, 8-bromo-guanosine, 8-mercapto-guanosine, 8-oxoguanosine, benzimidazole-riboside, beta-D-mannosyl-queosine, dihydro-uridine, inosine, N1-methyladenosine, N6-([6-ami nohexyl] carbamoylmethyl)-adenosine, N6-isopentenyl-adenosine, N6-methyl-adenosine, N7-methyl-xanthosine, N-uracil-5-oxyacetic acid methyl ester, puromycin, queosine, uracil-5-oxyacetic acid, uracil-5-oxyacetic acid methyl ester, wybutoxosine, xanthosine, and xylo-adenosine. In some embodiments, the chemically modified nucleic acid as described herein comprises at least one chemically modified nucleotide selected from 2-amino-6-chloropurineriboside-5′-triphosphate, 2-aminopurine-riboside-5′-triphosphate, 2-aminoadenosine-5′-triphosphate, 2′-amino-2′-deoxycytidine-triphosphate, 2-thiocytidine-5′-triphosphate, 2-thiouridine-5′-triphosphate, 2′-fluorothymidine-5′-triphosphate, 2′-O-methyl-inosine-5′-triphosphate, 4-thiouridine-5′-triphosphate, 5-aminoallylcytidine-5′-triphosphate, 5-aminoallyluridine-5′-triphosphate, 5-bromocytidine-5′-triphosphate, 5-bromouridine-5′-triphosphate, 5-bromo-2′-deoxycytidine-5′-triphosphate, 5-bromo-2′-deoxyuridine-5′-triphosphate, 5-iodocytidine-5′-triphosphate, 5-iodo-2′-deoxycytidine-5′-triphosphate, 5-iodouridine-5′-triphosphate, 5-iodo-2′-deoxyuridine-5′-triphosphate, 5-methylcytidine-5′-triphosphate, 5-methyluridine-5′-triphosphate, 5-propynyl-2′-deoxycytidine-5′-triphosphate, 5-propynyl-2′-deoxyuridine-5′-triphosphate, 6-azacytidine-5′-triphosphate, 6-azauridine-5′-triphosphate, 6-chloropurineriboside-5′-triphosphate, 7-deazaadenosine-5′-triphosphate, 7-deazaguanosine-5′-triphosphate, 8-azaadenosine-5′-triphosphate, 8-azidoadenosine-5′-triphosphate, benzimidazole-riboside-5′-triphosphate, N1-methyladenosine-5′-triphosphate, N1-methylguanosine-5′-triphosphate, N6-methyladenosine-5′-triphosphate, 6-methylguanosine-5′-triphosphate, pseudouridine-5′-triphosphate, puromycin-5′-triphosphate, or xanthosine-5′-triphosphate. In some embodiments, the chemically modified nucleic acid as described herein comprises at least one chemically modified nucleotide selected from pyridin-4-one ribonucleoside, 5-aza-uridine, 2-thio-5-aza-uridine, 2-thiouridine, 4-thio-pseudouridine, 2-thio-pseudouridine, 5-hydroxyuridine, 3-methyluridine, 5-carboxymethyl-uridine, 1-carboxymethyl-pseudouridine, 5-propynyl-uridine, 1-propynyl-pseudouridine, 5-taurinomethyluridine, 1-tauri nomethyl-pseudouridine, 5-taurinomethyl-2-thio-uridine, 1-taurinomethyl-4-thio-uridine, 5-methyl-uridine, 1-methyl-pseudouridine, 4-thio-1-methyl-pseudouridine, 2-thio-1-methyl-pseudouridine, 1-methyl-1-deaza-pseudouridine, 2-thio-1-methyl-1-deaza-pseudouridine, dihydrouridine, dihydropseudouridine, 2-thio-dihydrouridine, 2-thio-dihydropseudouridine, 2-methoxyuridine, 2-methoxy-4-thio-uridine, 4-methoxy-pseudouridine, and 4-methoxy-2-thio-pseudouridine. In some embodiments, the artificial nucleic acid as described herein comprises at least one chemically modified nucleotide selected from 5-aza-cytidine, pseudoisocytidine, 3-methyl-cytidine, N4-acetylcytidine, 5-formylcytidine, N4-methylcytidine, 5-hydroxymethylcytidine, 1-methyl-pseudoisocytidine, pyrrolo-cytidine, pyrrolo-pseudoisocytidine, 2-thio-cytidine, 2-thio-5-methyl-cytidine, 4-thio-pseudoisocytidine, 4-thio-1-methyl-pseudoisocytidine, 4-th io-1-methyl-1-deaza-pseudoisocytidine, 1-methyl-1-deaza-pseudoisocytidine, zebularine, 5-aza-zebularine, 5-methyl-zebularine, 5-aza-2-thio-zebularine, 2-thio-zebularine, 2-methoxy-cytidine, 2-methoxy-5-methyl-cytidine, 4-methoxy-pseudoisocytidine, and 4-methoxy-1-methyl-pseudoisocytidine. In some embodiments, the chemically modified nucleic acid as described herein comprises at least one chemically modified nucleotide selected from 2-aminopurine, 2, 6-diaminopurine, 7-deaza-adenine, 7-deaza-8-aza-adenine, 7-deaza-2-aminopurine, 7-deaza-8-aza-2-aminopurine, 7-deaza-2, 6-diaminopurine, 7-deaza-8-aza-2, 6-diaminopurine, 1-methyladenosine, N6-methyladenosine, N6-isopentenyladenosine, N6-(cis-hydroxyisopentenyl)adenosine, 2-methylthio-N6-(cis-hydroxyisopentenyl) adenosine, N6-glycinylcarbamoyladenosine, N6-threonylcarbamoyladenosine, 2-methylthio-N6-threonyl carbamoyladenosine, N6,N6-dimethyladenosine, 7-methyladenine, 2-methylthio-adenine, and 2-methoxy-adenine. In other embodiments, the chemically modified nucleic acid as described herein comprises at least one chemically modified nucleotide selected from inosine, 1-methyl-inosine, wyosine, wybutosine, 7-deaza-guanosine, 7-deaza-8-aza-guanosine, 6-thio-guanosine, 6-thio-7-deaza-guanosine, 6-thio-7-deaza-8-aza-guanosine, 7-methyl-guanosine, 6-thio-7-methyl-guanosine, 7-methylinosine, 6-methoxy-guanosine, 1-methylguanosine, N2-methylguanosine, N2,N2-dimethylguanosine, 8-oxo-guanosine, 7-methyl-8-oxo-guanosine, 1-methyl-6-thio-guanosine, N2-methyl-6-thio-guanosine, and N2,N2-dimethyl-6-thio-guanosine. In certain embodiments, the chemically modified nucleic acid as described herein comprises at least one chemically modified nucleotide selected from 6-aza-cytidine, 2-thio-cytidine, alpha-thio-cytidine, pseudo-iso-cytidine, 5-aminoallyl-uridine, 5-iodo-uridine, N1-methyl-pseudouridine, 5,6-dihydrouridine, alpha-thio-uridine, 4-thio-uridine, 6-aza-uridine, 5-hydroxy-uridine, deoxy-thymidine, 5-methyl-uridine, pyrrolo-cytidine, inosine, alpha-thio-guanosine, 6-methyl-guanosine, 5-methyl-cytdine, 8-oxo-guanosine, 7-deaza-guanosine, N1-methyl-adenosine, 2-amino-6-chloro-purine, N6-methyl-2-amino-purine, pseudo-iso-cytidine, 6-chloro-purine, N6-methyl-adenosine, alpha-thio-adenosine, 8-azido-adenosine, 7-deaza-adenosine.

[0084] A modified base of a unnatural nucleic acid includes, but is not limited to, uracil-5-yl, hypoxanthin-9-yl (I), 2-aminoadenin-9-yl, 5-methylcytosine (5-me-C), 5-hydroxymethyl cytosine, xanthine, hypoxanthine, 2-aminoadenine, 6-methyl and other alkyl derivatives of adenine and guanine, 2-propyl and other alkyl derivatives of adenine and guanine, 2-thiouracil, 2-thiothymine and 2-thiocytosine, 5-halouracil and cytosine, 5-propynyl uracil and cytosine, 6-azo uracil, cytosine and thymine, 5-uracil (pseudouracil), 4-thiouracil, 8-halo, 8-amino, 8-thiol, 8-thioalkyl, 8-hydroxyl and other 8-substituted adenines and guanines, 5-halo particularly 5-bromo, 5-trifluoromethyl and other 5-substituted uracils and cytosines, 7-methylguanine and 7-methyladenine, 8-azaguanine and 8-azaadenine, 7-deazaguanine and 7-deazaadenine and 3-deazaguanine and 3-deazaadenine. Certain unnatural nucleic acids, such as 5-substituted pyrimidines, 6-azapyrimidines and N-2 substituted purines, N-6 substituted purines, 0-6 substituted purines, 2-aminopropyladenine, 5-propynyluracil, 5-propynylcytosine, 5-methylcytosine, those that increase the stability of duplex formation, universal nucleic acids, hydrophobic nucleic acids, promiscuous nucleic acids, size-expanded nucleic acids, fluorinated nucleic acids, 5-substituted pyrimidines, 6-azapyrimidines and N-2, N-6 and 0-6 substituted purines, including 2-aminopropyladenine, 5-propynyluracil and 5-propynylcytosine. 5-methylcytosine (5-me-C), 5-hydroxymethyl cytosine, xanthine, hypoxanthine, 2-aminoadenine, 6-methyl, other alkyl derivatives of adenine and guanine, 2-propyl and other alkyl derivatives of adenine and guanine, 2-thiouracil, 2-thiothymine and 2-thiocytosine, 5-halouracil, 5-halocytosine, 5-propynyl (—C≡C—CH₃) uracil, 5-propynyl cytosine, other alkynyl derivatives of pyrimidine nucleic acids, 6-azo uracil, 6-azo cytosine, 6-azo thymine, 5-uracil (pseudouracil), 4-thiouracil, 8-halo, 8-amino, 8-thiol, 8-thioalkyl, 8-hydroxyl and other 8-substituted adenines and guanines, 5-halo particularly 5-bromo, 5-trifluoromethyl, other 5-substituted uracils and cytosines, 7-methylguanine, 7-methyladenine, 2-F-adenine, 2-amino-adenine, 8-azaguanine, 8-azaadenine, 7-deazaguanine, 7-deazaadenine, 3-deazaguanine, 3-deazaadenine, tricyclic pyrimidines, phenoxazine cytidine([5,4-b][1,4]benzoxazin-2(3H)-one), phenothiazine cytidine (1H-pyrimido[5,4-b][1,4]benzothiazin-2(3H)-one), G-clamps, phenoxazine cytidine (e.g., 9-(2-aminoethoxy)-H-pyrimido[5,4-b][1,4]benzoxazin-2(3H)-one), carbazole cytidine (2H-pyrimido[4,5-b]indol-2-one), pyridoindole cytidine (H-pyrido[3′,2′:4,5]pyrrolo[2,3-d]pyrimidin-2-one), those in which the purine or pyrimidine base is replaced with other heterocycles, 7-deaza-adenine, 7-deazaguanosine, 2-aminopyridine, 2-pyridone, azacytosine, 5-bromocytosine, bromouracil, 5-chlorocytosine, chlorinated cytosine, cyclocytosine, cytosine arabinoside, 5-fluorocytosine, fluoropyrimidine, fluorouracil, 5,6-dihydrocytosine, 5-iodocytosine, hydroxyurea, iodouracil, 5-nitrocytosine, 5-bromouracil, 5-chlorouracil, 5-fluorouracil, and 5-iodouracil, 2-amino-adenine, 6-thio-guanine, 2-thio-thymine, 4-thio-thymine, 5-propynyl-uracil, 4-thio-uracil, N4-ethylcytosine, 7-deazaguanine, 7-deaza-8-azaguanine, 5-hydroxycytosine, 2′-deoxyuridine, or 2-amino-2′-deoxyadenosine.

[0085] In some cases, the at least one chemical modification comprises chemically modifying the 5′ or 3′ end such as 5′ cap or 3′ tail of the oligonucleotide. In some embodiments, the oligonucleotide comprises a chemical modification comprising 3′ nucleotides which can be stabilized against degradation, e.g., by incorporating one or more of the modified nucleotides described herein. In this embodiment, uridines can be replaced with modified uridines, e.g., 5-(2-amino) propyl uridine, and 5-bromo uridine, or with any of the modified uridines described herein; adenosines and guanosines can be replaced with modified adenosines and guanosines, e.g., with modifications at the 8-position, e.g., 8-bromo guanosine, or with any of the modified adenosines or guanosines described herein. In some embodiments, deaza nucleotides, e.g., 7-deaza-adenosine, can be incorporated into the gRNA. In some embodiments, O- and N-alkylated nucleotides, e.g., N6-methyladenosine, can be incorporated into the gRNA. In some embodiments, sugar-modified ribonucleotides can be incorporated, e.g., wherein the 2′ OH-group is replaced by a group selected from H, —OR, —R (wherein R can be, e.g., alkyl, cycloalkyl, aryl, aralkyl, heteroaryl or sugar), halo, —SH, —SR (wherein R can be, e.g., alkyl, cycloalkyl, aryl, aralkyl, heteroaryl or sugar), amino (wherein amino can be, e.g., NH₂; alkylamino, dialkylamino, heterocyclyl, arylamino, diarylamino, heteroarylamino, diheteroarylamino, or amino acid); or cyano (—CN). In some embodiments, the phosphate backbone can be modified as described herein, e.g., with a phosphothioate group. In some embodiments, the nucleotides in the overhang region of the gRNA can each independently be a modified or unmodified nucleotide including, but not limited to 2′-sugar modified, such as, 2-F 2′-O-methyl, thymidine (T), 2′-O-methoxyethyl-5-methyluridine (Teo), 2′-O-methoxyethyladenosine (Aeo), 2′-O-methoxyethyl-5-methylcytidine (m5Ceo), or any combinations thereof.

[0086] In some embodiments, the oligonucleotide comprising at least one chemical modification, upon binding to the target RNA, is more specific in recruiting the endogenous nuclease for decreasing expression the target RNA compared to an oligonucleotide sharing identical nucleic acid sequence, but without any chemical modification, with the oligonucleotide comprising at least one chemical modification. In some embodiments, the oligonucleotide comprising at least one chemical modification is at least 10%, 20%, 30%, 40%, 50%, 60%, 70%, 80%, 90%, two fold, three fold, four fold, five fold, six fold, seven fold, eight fold, nine fold, 10 fold, 20 fold, 30 fold, 40 fold, 50 fold, 100 fold, 500 fold, 1000 fold, or more specific in recruiting the endogenous nuclease for decreasing expression the target RNA compared to an oligonucleotide sharing identical nucleic acid sequence, but without any chemical modification, with the oligonucleotide comprising at least one chemical modification.

[0087] In some embodiments, the oligonucleotide comprising at least one chemical modification comprises an increased resistance towards degradation by hydrolysis compared to an oligonucleotide sharing identical nucleic acid sequence, but without any chemical modification, with the oligonucleotide comprising at least one chemical modification. In some embodiments, the oligonucleotide comprising the at least one chemical modification is at least 10%, 20%, 30%, 40%, 50%, 60%, 70%, 80%, 90%, two fold, three fold, four fold, five fold, six fold, seven fold, eight fold, nine fold, 10 fold, 20 fold, 30 fold, 40 fold, 50 fold, 100 fold, 500 fold, 1000 fold, or more resistant towards degradation by hydrolysis compared to an oligonucleotide sharing identical nucleic acid sequence, but without any chemical modification, with the oligonucleotide comprising at least one chemical modification.

[0088] In some embodiments, the oligonucleotide comprising at least one chemical modification comprises an increased resistance towards degradation by nuclease digestion compared to an oligonucleotide sharing identical nucleic acid sequence, but without any chemical modification, with the oligonucleotide comprising at least one chemical modification. In some embodiments, the oligonucleotide comprising the at least one chemical modification is at least 10%, 20%, 30%, 40%, 50%, 60%, 70%, 80%, 90%, two fold, three fold, four fold, five fold, six fold, seven fold, eight fold, nine fold, 10 fold, 20 fold, 30 fold, 40 fold, 50 fold, 100 fold, 500 fold, 1000 fold, or more resistant towards degradation by nuclease digestion compared to an oligonucleotide sharing identical nucleic acid sequence, but without any chemical modification, with the oligonucleotide comprising at least one chemical modification.

[0089] In some embodiments, the oligonucleotide comprising at least one chemical modification induces less immunogenicity compared an oligonucleotide sharing identical nucleic acid sequence, but without any chemical modification, with the oligonucleotide comprising at least one chemical modification. In some embodiments, the oligonucleotide comprising the at least chemical modification is at least 10%, 20%, 30%, 40%, 50%, 60%, 70%, 80%, 90%, two fold, three fold, four fold, five fold, six fold, seven fold, eight fold, nine fold, 10 fold, 20 fold, 30 fold, 40 fold, 50 fold, 100 fold, 500 fold, 1000 fold, or more less likely to induce immunogenicity compared to immunogenicity induced by an oligonucleotide sharing identical nucleic acid sequence, but without any chemical modification, with the oligonucleotide comprising at least one chemical modification.

[0090] In some embodiments, the oligonucleotide comprising at least one chemical modification induces less innate immune response relative to an oligonucleotide sharing identical nucleic acid sequence, but without any chemical modification, with the oligonucleotide comprising at least one chemical modification. In some embodiments, the oligonucleotide comprising the at least one chemical modification is at least 10%, 20%, 30%, 40%, 50%, 60%, 70%, 80%, 90%, two fold, three fold, four fold, five fold, six fold, seven fold, eight fold, nine fold, 10 fold, 20 fold, 30 fold, 40 fold, 50 fold, 100 fold, 500 fold, 1000 fold, or more less likely to induce innate immune response compared to innate immune response induced by an oligonucleotide sharing identical nucleic acid sequence, but without any chemical modification, with the oligonucleotide comprising at least one chemical modification.

[0091] In some embodiments, the oligonucleotide comprising at least one chemical modification, when contacted with the target RNA, is less likely to induce off-target modulating of the target RNA compared to the off-target modulating of the target RNA induced by an oligonucleotide sharing identical nucleic acid sequence, but without any chemical modification, with the oligonucleotide comprising at least one chemical modification. In some embodiments, the oligonucleotide comprising the at least one chemical modification is at least 10%, 20%, 30%, 40%, 50%, 60%, 70%, 80%, 90%, two fold, three fold, four fold, five fold, six fold, seven fold, eight fold, nine fold, 10 fold, 20 fold, 30 fold, 40 fold, 50 fold, 100 fold, 500 fold, 1000 fold, or more less likely to induce off-target modulating compared to off-target modulating induced by an oligonucleotide sharing identical nucleic acid sequence, but without any chemical modification, with the oligonucleotide comprising at least one chemical modification.

### Methods of Delivery

[0092] Described herein, in some embodiments, are methods of delivering the oligonucleotide described herein to a cell. In some embodiments, the method comprises delivering directly or indirectly an oligonucleotide to the cell. In some embodiments, the method comprises contacting the cell with the composition or the oligonucleotide described herein. In some embodiments, the method comprises expressing the composition or the oligonucleotide described herein in the cell. In some embodiments, the oligonucleotide or vector encoding the oligonucleotide can be delivered into the cell via any of the transfection methods described herein. In some embodiments, the oligonucleotide can be delivered into the cell via the use of expression vectors. In the context of an expression vector, the vector can be readily introduced into the cell described herein by any method in the art. For example, the expression vector can be transferred into the cell by physical, chemical, or biological means.

[0093] Physical methods for introducing the oligonucleotide or vector encoding the oligonucleotide into the cell can include calcium phosphate precipitation, lipofection, particle bombardment, microinjection, gene gun, electroporation, and the like. Methods for producing cells comprising vectors and/or exogenous nucleic acids are suitable for methods herein. One method for the introduction of oligonucleotide or vector encoding the oligonucleotide into a host cell is calcium phosphate transfection.

[0094] Chemical means for introducing the oligonucleotide or vector encoding the oligonucleotide into the cell can include colloidal dispersion systems, such as macromolecule complexes, nanocapsules, microspheres, beads, and lipid-based systems including oil-in-water emulsions, micelles, mixed micelles, spherical nucleic acid (SNA), liposomes, or lipid nanoparticles. An exemplary colloidal system for use as a delivery vehicle in vitro and in vivo is a liposome (e.g., an artificial membrane vesicle). Other methods of state-of-the-art targeted delivery of nucleic acids are available, such as delivery of oligonucleotide or vector encoding the oligonucleotide with targeted nanoparticles or other suitable sub-micron sized delivery system.

[0095] In the case where a non-viral delivery system is utilized, an exemplary delivery vehicle is a liposome. The use of lipid formulations is contemplated for the introduction of the oligonucleotide or vector encoding the oligonucleotide into a cell (in vitro, ex vivo or in vivo). In another aspect, the oligonucleotide or vector encoding the oligonucleotide can be associated with a lipid. The oligonucleotide or vector encoding the oligonucleotide associated with a lipid, in some embodiments, is encapsulated in the aqueous interior of a liposome, interspersed within the lipid bilayer of a liposome, attached to a liposome via a linking molecule that is associated with both the liposome and the oligonucleotide, entrapped in a liposome, complexed with a liposome, dispersed in a solution containing a lipid, mixed with a lipid, combined with a lipid, contained as a suspension in a lipid, contained or complexed with a micelle, or otherwise associated with a lipid. Lipid, lipid/DNA or lipid/expression vector associated compositions are not limited to any particular structure in solution. For example, in some embodiments, they are present in a bilayer structure, as micelles, or with a “collapsed” structure. Alternately, they are simply be interspersed in a solution, possibly forming aggregates that are not uniform in size or shape. Lipids are fatty substances which are, in some embodiments, naturally occurring or synthetic lipids. For example, lipids include the fatty droplets that naturally occur in the cytoplasm as well as the class of compounds which contain long-chain aliphatic hydrocarbons and their derivatives, such as fatty acids, alcohols, amines, amino alcohols, and aldehydes.

[0096] Lipids suitable for use are obtained from commercial sources. Stock solutions of lipids in chloroform or chloroform/methanol are often stored at about −20° C. Chloroform is used as the only solvent since it is more readily evaporated than methanol. “Liposome” is a generic term encompassing a variety of single and multilamellar lipid vehicles formed by the generation of enclosed lipid bilayers or aggregates. Liposomes are often characterized as having vesicular structures with a phospholipid bilayer membrane and an inner aqueous medium. Multilamellar liposomes have multiple lipid layers separated by aqueous medium. They form spontaneously when phospholipids are suspended in an excess of aqueous solution. The lipid components undergo self-rearrangement before the formation of closed structures and entrap water and dissolved solutes between the lipid bilayers. However, compositions that have different structures in solution than the normal vesicular structure are also encompassed. For example, the lipids, in some embodiments, assume a micellar structure or merely exist as nonuniform aggregates of lipid molecules. Also contemplated are lipofectamine-nucleic acid complexes.

[0097] In some cases, non-viral delivery method comprises lipofection, nucleofection, microinjection, biolistics, virosomes, liposomes, immunoliposomes, exosomes, polycation or lipid:cargo conjugates (or aggregates), naked polypeptide (e.g., recombinant polypeptides), naked DNA, artificial virions, and agent-enhanced uptake of polypeptide or DNA. In some embodiments, the delivery method comprises conjugating or encapsulating the compositions or the oligonucleotides described herein with at least one polymer such as natural polymer or synthetic materials. The polymer can be biocompatible or biodegradable. Non-limiting examples of suitable biocompatible, biodegradable synthetic polymers can include aliphatic polyesters, poly(amino acids), copoly(ether-esters), polyalkylenes oxalates, polyamides, poly(iminocarbonates), polyorthoesters, polyoxaesters, polyamidoesters, polyoxaesters containing amine groups, and poly(anhydrides). Such synthetic polymers can be homopolymers or copolymers (e.g., random, block, segmented, graft) of a plurality of different monomers, e.g., two or more of lactic acid, lactide, glycolic acid, glycolide, epsilon-caprolactone, trimethylene carbonate, p-dioxanone, etc. In an example, the scaffold can be comprised of a polymer comprising glycolic acid and lactic acid, such as those with a ratio of glycolic acid to lactic acid of 90/10 or 5/95. Non-limiting examples of naturally occurring biocompatible, biodegradable polymers can include glycoproteins, proteoglycans, polysaccharides, glycosamineoglycan (GAG) and fragment(s) derived from these components, elastin, laminins, decrorin, fibrinogen/fibrin, fibronectins, osteopontin, tenascins, hyaluronic acid, collagen, chondroitin sulfate, heparin, heparan sulfate, ORC, carboxymethyl cellulose, and chitin.

[0098] In some cases, the oligonucleotide or vector encoding the oligonucleotide described herein can be packaged and delivered to the cell via extracellular vesicles. The extracellular vesicles can be any membrane-bound particles. In some embodiments, the extracellular vesicles can be any membrane-bound particles secreted by at least one cell. In some instances, the extracellular vesicles can be any membrane-bound particles synthesized in vitro. In some instances, the extracellular vesicles can be any membrane-bound particles synthesized without a cell. In some cases, the extracellular vesicles can be exosomes, microvesicles, retrovirus-like particles, apoptotic bodies, apoptosomes, oncosomes, exophers, enveloped viruses, exomeres, or other very large extracellular vesicles.

[0099] In some cases, the oligonucleotide or vector encoding the oligonucleotide described herein can be administered to the subject in need thereof via the use of the transgenic cells generated by introduction of the oligonucleotide or vector encoding the oligonucleotide first into allogeneic or autologous cells. In some cases, the cell can be isolated. In some embodiments, the cell can be isolated from the subject.

[0100] In some embodiments, the oligonucleotide described herein is conjugated. In some embodiments, the oligonucleotide is conjugated to with a peptide, antibody, lipid, carbohydrate, or polymer. In some embodiments, the oligonucleotide is conjugated to with a peptide, antibody, lipid, carbohydrate, or polymer at the 5′ end of the oligonucleotide. In some embodiments, the oligonucleotide is conjugated to with a peptide, antibody, lipid, carbohydrate, or polymer at the 3′ end of the oligonucleotide. In some embodiments, the oligonucleotide is conjugated to with a peptide, antibody, lipid, carbohydrate, or polymer at any nucleic acid residue of the oligonucleotide. In some embodiments, the peptide, antibody, lipid, carbohydrate, or polymer conjugated to the oligonucleotide confers therapeutic effect. For example, the peptide, antibody, lipid, carbohydrate, or polymer conjugated to the oligonucleotide can be cytotoxic drug or drug for treating cancer. In some embodiments, the peptide, antibody, lipid, carbohydrate, or polymer conjugated to the oligonucleotide increases the efficiency of the oligonucleotide binding to the endogenous nucleic acid. In some embodiments, the peptide, antibody, lipid, carbohydrate, or polymer conjugated to the oligonucleotide confers targeting specificity of the oligonucleotide to specific types of cells (e.g., cancer cells, etc.). In some embodiments, the peptide, antibody, lipid, carbohydrate, or polymer conjugated to the oligonucleotide confers stability of the oligonucleotide in vitro, ex vivo, or in vivo. For example, the oligonucleotide can be conjugated with polyethylene glycol (PEG) or endosomolytic agent to decrease immunogenicity or degradation. In some embodiments, the peptide, antibody, lipid, carbohydrate, or polymer conjugated to the oligonucleotide to facilitate the oligonucleotide for entering cell. In some embodiments, the peptide, antibody, lipid, carbohydrate, or polymer conjugated to the oligonucleotide to facilitate and release to the oligonucleotide in the cell. In some embodiments, the peptide, antibody, lipid, carbohydrate, or polymer conjugated to the oligonucleotide comprises at least one targeting moiety for targeting the cell. Non-limiting examples of the targeting moiety comprises a signaling peptide, a chemokine, a chemokine receptor, an adhesion molecule, an antigen, or an antibody.

[0101] The linker for conjugating the oligonucleotide to the peptide, antibody, lipid, or polymer can be any linker that connects biomolecules. In some embodiments, a linker described herein is a cleavable linker or a non-cleavable linker. In some instances, the linker is a cleavable linker. In other instances, the linker is a non-cleavable linker. In some cases, the linker is a non-polymeric linker. A non-polymeric linker refers to a linker that does not contain a repeating unit of monomers generated by a polymerization process. In some embodiments, the linker comprises a peptide moiety. In some instances, the peptide moiety comprises at least 2, 3, 4, 5, or 6 more amino acid residues. In some embodiments, the linker comprises a benzoic acid group, or its derivatives thereof. In some embodiments, the linker can comprise nucleic acid linker such as DNA linker. In such case, the peptide, antibody, lipid, or polymer can be conjugated on one end of the nucleic acid linker or intercalated into the nucleic acid base pairing of the nucleic acid linker. In some embodiments, the linker can be a peptide linker. The peptide linker can be flexible (e.g., poly-glycine linker) or rigid (e.g., EAAAK repeat linker, SEQ ID NO: 35502). In some embodiments, the peptide linker can be cleaved (e.g., a disulfide bond). In some embodiments, the linker comprises polymers such PEG, polylactic acid (PLA), or polyacrylic acid (PAA).

### Methods of Treatment

[0102] Disclosed herein, in some embodiments, are methods of modulating KRAS-mediated signaling pathway in a cancer cell by treating or contacting the cancer cell with a composition comprising antisense oligonucleotide, composition, or pharmaceutical composition described herein, thereby reducing expression of SOS1 or SOS2 protein or mRNA in the cancer cell. Also disclosed herein, in some embodiments, are methods of treating a subject in need thereof by administrating a therapeutic effective amount of the oligonucleotide, composition, or pharmaceutical composition described herein to the subject. In some embodiments, the method comprises administering at least one additional active ingredient as a combination therapy for treating the disease or condition. In some embodiments, the method treats the subject by modulating gene expression or signaling pathway expression in the subject. In some embodiments, the method comprises decreasing gene expression by contacting endogenous nucleic acid (e.g., endogenous mRNA) with the oligonucleotide described herein. In some embodiments, the method comprises decreasing SOS1, SOS2, or a combination of SOS1 and SOS2 in the subject or in the cancer cell by contacting mRNA of SOS1 or SOS2 with the oligonucleotide described herein, where the binding of the oligonucleotide to the mRNA recruits endogenous nuclease for degradation of the mRNA. In some embodiments, the method comprises decreasing expression of signaling pathway such as KRAS-mediated signaling pathway. In some embodiments, the method comprises decreasing expression of a gene in or the activity of KRAS-RAF-MEK-ERK signaling pathway.

[0103] In some embodiments, the oligonucleotide, composition, or pharmaceutical composition can be administered to the subject alone (e.g., standalone treatment). In some embodiments, the oligonucleotide, composition, or pharmaceutical composition is administered in combination with an additional agent (e.g., an active ingredient described herein). In some cases, the additional agent as used herein is administered alone. The oligonucleotide, composition, or pharmaceutical composition and the additional agent can be administered together or sequentially. Non-limiting examples of the additional agent comprise N-(2-(4-(4-bis(2-chloroethyl)aminophenyl)butyryl)aminoethyl)-5-(4-amidinophenyl)-2-furanecarboxamide hydrochloride; Allyl isothiocyanate; Benzyl isothiocyanate; Phenethyl isothiocyanate; Belinostat; Berberin; Casticin; Chrysin; Bufalin; Fisetin; Fucoidan; Galic acid; Gemcitabine; Guizhi Fuling Decoction; JOTO1007; Quercetin; Rasfonin; 2,3,7,8-tetrachlorodibenzodioxin; Triptolide; 4-Hydroxybutenolide; or a combination thereof. In some embodiments, the at least one additional agent or ingredient comprises an KRAS inhibitor. In some embodiments, the at least one additional agent or ingredient comprises RAF inhibitor. In some embodiments, the at least one additional agent or ingredient comprises a MEK inhibitor. In some embodiments, the at least one additional agent or ingredient comprises an ERK inhibitor. In some embodiments, the at least one additional agent or ingredient comprises a SH2 inhibitor. The combination therapies can be administered within the same day, or can be administered one or more days, weeks, months, or years apart.

[0104] In some embodiments, the oligonucleotide, composition, or pharmaceutical composition is a first-line treatment for the disease or condition. In some embodiments, the oligonucleotide, composition, or pharmaceutical composition is a second-line, third-line, or fourth-line treatment. In some embodiments, the oligonucleotide, composition, or pharmaceutical composition comprises at least one, two, three, four, five, six, seven, eight, nine, 10, 20, 30 or more oligonucleotide. In general, method disclosed herein comprises administering the oligonucleotide, composition, or pharmaceutical composition by oral administration. However, in some instances, method comprises administering the oligonucleotide, composition, or pharmaceutical composition by intraperitoneal injection. In some instances, the method comprises administering the pharmaceutical composition in the form of an anal suppository. In some instances, the method comprises administering the oligonucleotide, composition, or pharmaceutical composition by intravenous (“i.v.”) administration. It is conceivable that one can also administer the oligonucleotide, composition, or pharmaceutical composition disclosed herein by other routes, such as subcutaneous injection, intramuscular injection, intradermal injection, transdermal injection percutaneous administration, intranasal administration, intralymphatic injection, rectal administration intragastric administration, or any other suitable parenteral administration. In some embodiments, routes for local delivery closer to site of injury or inflammation are preferred over systemic routes. Routes, dosage, time points, and duration of administrating therapeutics can be adjusted. In some embodiments, administration of therapeutics is prior to, or after, onset of either, or both, acute and chronic symptoms of the disease or condition.

[0105] Suitable dose and dosage administrated to a subject is determined by factors including, but no limited to, the particular the oligonucleotide, composition, or pharmaceutical composition, disease condition and its severity, the identity (e.g., weight, sex, age) of the subject in need of treatment, and can be determined according to the particular circumstances surrounding the case, including, e.g., the specific agent being administered, the route of administration, the condition being treated, and the subject being treated.

[0106] In some embodiments, the administration of the oligonucleotide, composition, or pharmaceutical composition described herein is hourly, once every 2 hours, 3 hours, 4 hours, 5 hours, 6 hours, 7 hours, 8 hours, 9 hours, 10 hours, 11 hours, 12 hours, 13 hours, 14 hours, 15 hours, 16 hours, 17 hours, 18 hours, 19 hours, 20 hours, 21 hours 22 hours, 23 hours, 1 day, 2 days, 3 days, 4 days, 5 days, 6 days, 7 days, 8 days, 9 days, 10 days, 11 days, 12 days, 13 days, 14 days, 15 days, 1 month, 2 months, 3 months, 4 months, 5 months, 6 months, 7 months, 8 months, 9 months, 10 months, 11 months, 1 year, 2 years, 3 years, 4 years, or 5 years, or 10 years. The effective dosage ranges can be adjusted based on subject's response to the treatment. Some routes of administration will require higher concentrations of effective amount of therapeutics than other routes.

[0107] In some embodiments, the administration of the oligonucleotide, composition, or pharmaceutical composition described herein increases survival rate of the subject by at least 1%, 2%, 3%, 4%, 5%, 6%, 7%, 8%, 9%, 10%, 15%, 20%, 30%, 40%, 50%, or more. In some embodiments, the administration of the oligonucleotide, composition, or pharmaceutical composition described herein at a dose that increases survival rate of the subject by at least 1%, 2%, 3%, 4%, 5%, 6%, 7%, 8%, 9%, 10%, 15%, 20%, 30%, 40%, 50%, or more. In some embodiments, the administration of the oligonucleotide, composition, or pharmaceutical composition described herein at a schedule that increases survival rate of the subject by at least 1%, 2%, 3%, 4%, 5%, 6%, 7%, 8%, 9%, 10%, 15%, 20%, 30%, 40%, 50%, or more. In some embodiments, the administration of the oligonucleotide, composition, or pharmaceutical composition described herein at a dose and a schedule that increase survival rate of the subject by at least 1%, 2%, 3%, 4%, 5%, 6%, 7%, 8%, 9%, 10%, 15%, 20%, 30%, 40%, 50%, or more.

[0108] In some embodiments, the administration of the oligonucleotide, composition, or pharmaceutical composition described herein inhibits growth of the tumor by at least 1%, 2%, 3%, 4%, 5%, 6%, 7%, 8%, 9%, 10%, 15%, 20%, 30%, 40%, 50%, or more. In some embodiments, the administration of the oligonucleotide, composition, or pharmaceutical composition described herein at a dose that inhibits growth of the tumor by at least 1%, 2%, 3%, 4%, 5%, 6%, 7%, 8%, 9%, 10%, 15%, 20%, 30%, 40%, 50%, or more. In some embodiments, the administration of the oligonucleotide, composition, or pharmaceutical composition described herein at a schedule that inhibits growth of the tumor by at least 1%, 2%, 3%, 4%, 5%, 6%, 7%, 8%, 9%, 10%, 15%, 20%, 30%, 40%, 50%, or more. In some embodiments, the administration of the oligonucleotide, composition, or pharmaceutical composition described herein at a dose and a schedule that inhibits growth of the tumor by at least 1%, 2%, 3%, 4%, 5%, 6%, 7%, 8%, 9%, 10%, 15%, 20%, 30%, 40%, 50%, or more.

[0109] In some embodiments, the administration of the oligonucleotide, composition, or pharmaceutical composition described herein to the subject in a dose that is sufficient to inhibit growth of the tumor. In some embodiments, the administration of the oligonucleotide, composition, or pharmaceutical composition described herein to the subject in a schedule that is sufficient to inhibit growth of the tumor. In some embodiments, the administration of the oligonucleotide, composition, or pharmaceutical composition described herein to the subject in a dose and a schedule that are sufficient to inhibit growth of the tumor.

[0110] In certain embodiments, where the subject's condition does not improve, upon the doctor's discretion the administration of the pharmaceutical composition is administered chronically, that is, for an extended period of time, including throughout the duration of the subject's life in order to ameliorate or otherwise control or limit the symptoms of the subject's disease or condition. In certain embodiments wherein a subject's status does improve, the dose of the pharmaceutical composition being administered can be temporarily reduced or temporarily suspended for a certain length of time (i.e., a “drug holiday”). In specific embodiments, the length of the drug holiday is between 2 days and 1 year, including by way of example only, 2 days, 3 days, 4 days, 5 days, 6 days, 7 days, 10 days, 12 days, 15 days, 20 days, 28 days, or more than 28 days. The dose reduction during a drug holiday is, by way of example only, by 10%-100%, including by way of example only 10%, 15%, 20%, 25%, 30%, 35%, 40%, 45%, 50%, 55%, 60%, 65%, 70%, 75%, 80%, 85%, 90%, 95%, and 100%. In certain embodiments, the dose of the pharmaceutical composition being administered can be temporarily reduced or temporarily suspended for a certain length of time (i.e., a “drug diversion”). In specific embodiments, the length of the pharmaceutical composition diversion is between 2 days and 1 year, including by way of example only, 2 days, 3 days, 4 days, 5 days, 6 days, 7 days, 10 days, 12 days, 15 days, 20 days, 28 days, or more than 28 days. The dose reduction during the pharmaceutical composition diversion is, by way of example only, by 10%-100%, including by way of example only 10%, 15%, 20%, 25%, 30%, 35%, 40%, 45%, 50%, 55%, 60%, 65%, 70%, 75%, 80%, 85%, 90%, 95%, and 100%. After a suitable length of time, the normal dosing schedule is optionally reinstated.

[0111] In some embodiments, once improvement of the subject's conditions has occurred, a maintenance dose is administered if necessary. Subsequently, in specific embodiments, the dosage or the frequency of administration, or both, is reduced, as a function of the symptoms, to a level at which the improved disease, disorder or condition is retained. In certain embodiments, however, the subject requires intermittent treatment on a long-term basis upon any recurrence of symptoms.

[0112] Toxicity and therapeutic efficacy of such therapeutic regimens are determined by standard pharmaceutical procedures in cell cultures or experimental animals, including, but not limited to, the determination of the LD50 and the ED50. The dose ratio between the toxic and therapeutic effects is the therapeutic index and it is expressed as the ratio between LD50 and ED50. In certain embodiments, the data obtained from cell culture assays and animal studies are used in formulating the therapeutically effective daily dosage range and/or the therapeutically effective unit dosage amount for use in mammals, including humans. In some embodiments, the daily dosage amount of the composition described herein lies within a range of circulating concentrations that include the ED50 with minimal toxicity. In certain embodiments, the daily dosage range and/or the unit dosage amount varies within this range depending upon the dosage form employed and the route of administration utilized.

[0113] In some embodiments, the disease or condition described herein is a cancer. In some embodiments, the cancer is associated with SOS1. In some embodiments, the cancer is associated with SOS2. In some embodiments, the cancer is associated with KRAS. In some embodiments, the cancer is associated with an abnormality of KRAS-mediated signaling pathway. In some embodiments, the cancer is a lung cancer, a pancreatic cancer, or a colon cancer. Other non-limiting examples of the cancer can include Acute Lymphoblastic Leukemia, Acute Lymphocytic Leukemia (ALL), Acute Myeloid Leukemia (AML), Adenoid Cystic Carcinoma, Adrenal Gland Cancer, Adrenocortical Carcinoma, Adult Leukemia, AIDS-Related Lymphoma, Amyloidosis, Anal Cancer, Astrocytomas, Ataxia Telangiectasia, Atypical Mole Syndrome, Atypical Teratoid/Rhabdoid Tumor, Basal Cell Carcinoma, Bile Duct Cancer, Birt Hogg Dube Syndrome, Bladder Cancer, Bone Cancer, Brain Tumor, Breast Cancer, Bronchial Tumors, Burkitt Lymphoma, Carcinoid Tumor (Gastrointestinal), Carcinoma of Unknown Primary, Cardiac (Heart) Tumors, Cervical Cancer, Cholangiocarcinoma, Chordoma, Chronic Lymphocytic Leukemia (CLL), Chronic Myelogenous Leukemia, Chronic Myeloid Leukemia, Chronic Myeloproliferative Neoplasms, Colorectal Cancer, Craniopharyngioma, Cutaneous T-Cell Lymphoma, Ductal Carcinoma, Embryonal Tumors, Endometrial Cancer, Ependymoma, Esophageal Cancer, Esthesioneuroblastoma, Ewing Sarcoma, Extracranial Germ Cell Tumor, Extragonadal Germ Cell Tumor, Eye Cancer, Fallopian Tube Cancer, Fibrous Histiocytoma of Bone, Malignant, and Osteosarcoma, Gallbladder Cancer, Gastric Cancer, Gastrointestinal Carcinoid Tumor, Gastrontestinal Stromal Tumor (GIST), Germ Cell Tumors, Gestational Trophoblastic Disease, Hairy Cell Leukemia, Head and Neck Cancer, Hepatocellular Cancer, HER2-Positive Breast Cancer, Histiocytosis, Langerhans Cell, Hodgkin's Lymphoma, Hypopharyngeal Cancer, Intraocular Melanoma, Islet Cell Tumor, Juvenile Polyposis Syndrome, Kaposi Sarcoma, Kidney Cancer, Langerhans Cell Histiocytosis, Laryngeal Cancer, Leukemia, Lip and Oral Cavity Cancer, Liver Cancer, Lobular Carcinoma, Lung Cancer (Non-Small Cell and Small Cell), Lymphoma, Malignant Fibrous Histiocytoma of Bone and Osteosarcoma, Malignant Glioma, Melanoma, Intraocular Melanoma, Meningioma, Merkel Cell Carcinoma, Mesothelioma, Malignant, Metastatic Cancer, Metastatic Squamous Neck Cancer with Occult Primary, Midline Tract Carcinoma, Multiple Endocrine Neoplasia Syndromes, Multiple Myeloma, Plasma Cell Neoplasms, Mycosis Fungoides, Myelodysplastic Syndrome (MDS), Myeloproliferative Neoplasms, Chronic, Nasal Cavity and Paranasal Sinus Cancer, Nasopharyngeal Cancer, Neuroblastoma, Neuroendocrine Tumor, Non-Hodgkin Lymphoma, Oral Cancer, Lip and Oral Cavity Cancer and Oropharyngeal Cancer, Oropharyngeal Cancer, Osteosarcoma, Ovarian Cancer, Ovarian Germ Cell Tumors, Pancreatic Cancer, Pancreatic Neuroendocrine Tumors, Papillomatosis, Paraganglioma, Paranasal Sinus and Nasal Cavity Cancer, Parathyroid Cancer, Penile Cancer, Peritoneal Cancer, Peutz-Jeghers Syndrome, Pharyngeal Cancer, Pheochromocytoma, Pituitary Tumor, Plasma Cell Neoplasm/Multiple Myeloma, Pleuropulmonary Blastoma, Polycythemia Vera, Pregnancy and Breast Cancer, Primary Central Nervous System (CNS) Lymphoma, Primary Peritoneal Cancer, Prostate Cancer, Rectal Cancer, Recurrent Cancer, Renal Cell Carcinoma, Retinoblastoma, Rhabdomyosarcoma, Salivary Gland Cancer, Sarcoma, Sezary Syndrome, Skin Cancer, Small Intestine Cancer, Soft Tissue Sarcoma, Solid tumor, Squamous Cell Carcinoma of the Skin, Squamous Neck Cancer with Occult Primary, Metastatic, Stomach Cancer, T-Cell Lymphoma, Testicular Cancer, Throat Cancer, Thymoma, Thymic Carcinoma, Thyroid Cancer, Transitional Cell Cancer of the Renal Pelvis and Ureter, Unusual Cancers of Childhood, Ureter and Renal Pelvis, Transitional Cell Cancer, Urethral Cancer, Uterine (Endometrial) Cancer, Uterine Sarcoma, Vaginal Cancer, Vascular Tumors, Vulvar Cancer, Wilms Tumor, or a combination thereof.

### Pharmaceutical Compositions

[0114] Described herein, in some embodiments, is a pharmaceutical composition comprising the oligonucleotide or the composition described herein. Pharmaceutical composition, as used herein, refers to a mixture of a pharmaceutical composition, with other chemical components (i.e. pharmaceutically acceptable inactive ingredients), such as carriers, excipients, binders, filling agents, suspending agents, flavoring agents, sweetening agents, disintegrating agents, dispersing agents, surfactants, lubricants, colorants, diluents, solubilizers, moistening agents, plasticizers, stabilizers, penetration enhancers, wetting agents, anti-foaming agents, antioxidants, preservatives, or one or more combination thereof. Optionally, the compositions include two or more pharmaceutical composition as discussed herein. In practicing the methods of treatment or use provided herein, therapeutically effective amounts of pharmaceutical compositions described herein are administered in a pharmaceutical composition to a mammal having a disease, disorder, or condition to be treated, e.g., an inflammatory disease, fibrostenotic disease, and/or fibrotic disease. In some embodiments, the mammal is a human. A therapeutically effective amount can vary widely depending on the severity of the disease, the age and relative health of the subject, the potency of the pharmaceutical composition used and other factors. The pharmaceutical compositions can be used singly or in combination with one or more pharmaceutical compositions as components of mixtures. The pharmaceutical compositions described herein comprise the oligonucleotide, the compositions, the cells contacted with the oligonucleotide or contacted with the composition comprising the oligonucleotide, or a combination thereof.

[0115] In some embodiments, the composition of the pharmaceutical composition described herein comprises at least one active ingredient. In some embodiments, the at least one active ingredient functions as a combination therapy with an oligonucleotide described herein. In some embodiments, the at least one active ingredient comprises a cancer therapeutic agent. In some embodiments, the at least one active ingredient comprises a modulator of the KRAS-mediated signaling pathway (e.g., a KRAS-RAF-MEK-ERK signaling pathway). In some embodiments, the at least one active ingredient comprises an inhibitor of the KRAS-mediated signaling pathway. In some embodiments, the at least one active ingredient comprises an inhibitor of SOS. In some embodiments, the at least one active ingredient comprises an inhibitor of SOS1. In some embodiments, the at least one active ingredient comprises an inhibitor of SOS2. In some embodiments, the at least one active ingredient comprises an inhibitor of SOS1 or SOS2. In some embodiments, the at least one active ingredient comprises an inhibitor of both SOS1 and SOS2. In some embodiments, the inhibitor of SOS comprises at least one oligonucleotide described herein. In some embodiments, the inhibitor of SOS does not comprise an oligonucleotide described herein.

[0116] The pharmaceutical formulations described herein are administered to a subject by appropriate administration routes, including but not limited to, intravenous, intraarterial, oral, parenteral, buccal, topical, transdermal, rectal, intramuscular, subcutaneous, intraosseous, transmucosal, inhalation, or intraperitoneal administration routes. The pharmaceutical formulations described herein include, but are not limited to, aqueous liquid dispersions, self-emulsifying dispersions, solid solutions, liposomal dispersions, aerosols, solid dosage forms, powders, immediate release formulations, controlled release formulations, fast melt formulations, tablets, capsules, pills, delayed release formulations, extended release formulations, pulsatile release formulations, multiparticulate formulations, and mixed immediate and controlled release formulations.

[0117] Pharmaceutical compositions including a pharmaceutical composition are manufactured in a conventional manner, such as, by way of example only, by means of conventional mixing, dissolving, granulating, dragee-making, levigating, emulsifying, encapsulating, entrapping or compression processes.

[0118] The pharmaceutical compositions may include at least a pharmaceutical composition as an active ingredient in free-acid or free-base form, or in a pharmaceutically acceptable salt form. In addition, the methods and pharmaceutical compositions described herein include the use of N-oxides (if appropriate), crystalline forms, amorphous phases, as well as active metabolites of these compounds having the same type of activity. In some embodiments, pharmaceutical compositions exist in unsolvated form or in solvated forms with pharmaceutically acceptable solvents such as water, ethanol, and the like. The solvated forms of the pharmaceutical compositions are also considered to be disclosed herein.

[0119] In some embodiments, a pharmaceutical composition exists as a tautomer. All tautomers are included within the scope of the agents presented herein. As such, it is to be understood that a pharmaceutical composition or a salt thereof may exhibit the phenomenon of tautomerism whereby two chemical compounds that are capable of facile interconversion by exchanging a hydrogen atom between two atoms, to either of which it forms a covalent bond. Since the tautomeric compounds exist in mobile equilibrium with each other they can be regarded as different isomeric forms of the same compound.

[0120] In some embodiments, a pharmaceutical composition exists as an enantiomer, diastereomer, or other steroisomeric form. The agents disclosed herein include all enantiomeric, diastereomeric, and epimeric forms as well as mixtures thereof.

[0121] In some embodiments, pharmaceutical compositions described herein can be prepared as prodrugs. A “prodrug” refers to an agent that is converted into the parent drug in vivo. Prodrugs are often useful because, in some situations, they can be easier to administer than the parent drug. They may, for instance, be bioavailable by oral administration whereas the parent is not. The prodrug may also have improved solubility in pharmaceutical compositions over the parent drug. An example, without limitation, of a prodrug would be a pharmaceutical composition described herein, which is administered as an ester (the “prodrug”) to facilitate transmittal across a cell membrane where water solubility is detrimental to mobility but which then is metabolically hydrolyzed to the carboxylic acid, the active enzyme, once inside the cell where water-solubility is beneficial. A further example of a prodrug might be a short peptide (polyaminoacid) bonded to an acid group where the peptide is metabolized to reveal the active moiety. In certain embodiments, upon in vivo administration, a prodrug is chemically converted to the biologically, pharmaceutically or therapeutically active form of the pharmaceutical composition. In certain embodiments, a prodrug is enzymatically metabolized by one or more steps or processes to the biologically, pharmaceutically or therapeutically active form of the pharmaceutical composition.

[0122] Prodrug forms of the pharmaceutical compositions, wherein the prodrug is metabolized in vivo to produce an agent as set forth herein are included within the scope of the claims. Prodrug forms of the herein described pharmaceutical compositions, wherein the prodrug is metabolized in vivo to produce an agent as set forth herein are included within the scope of the claims. In some cases, some of the pharmaceutical compositions described herein can be a prodrug for another derivative or active compound. In some embodiments described herein, hydrazones are metabolized in vivo to produce a pharmaceutical composition.

### Kits

[0123] Described herein, in some embodiments, are kits for using the oligonucleotide, the compositions, or the pharmaceutical compositions described herein. In some embodiments, the kits disclosed herein may be used to treat a disease or condition in a subject. In some embodiments, the kit comprises an assemblage of materials or components apart from the oligonucleotide, the composition, or the pharmaceutical composition. In some embodiments, the kit comprises the components for assaying and selecting for suitable oligonucleotide for treating a disease or a condition. In some embodiments, the kit comprises components for performing assays such as enzyme-linked immunosorbent assay (ELISA), single-molecular array (Simoa), PCR, or qPCR. The exact nature of the components configured in the kit depends on its intended purpose. For example, some embodiments are configured for the purpose of treating a disease or condition disclosed herein (e.g., cancer) in a subject. In some embodiments, the kit is configured particularly for the purpose of treating mammalian subjects. In some embodiments, the kit is configured particularly for the purpose of treating human subjects.

[0124] Instructions for use may be included in the kit. In some embodiments, the kit comprises instructions for administering the composition to a subject in need thereof. In some embodiments, the kit comprises instructions for further engineering the oligonucleotide. In some embodiments, the kit comprises instructions thawing or otherwise restoring biological activity of the oligonucleotide, which may have been cryopreserved or lyophilized during storage or transportation. In some embodiments, the kit comprises instructions for measuring efficacy for its intended purpose (e.g., therapeutic efficacy if used for treating a subject).

[0125] Optionally, the kit also contains other useful components, such as, diluents, buffers, pharmaceutically acceptable carriers, syringes, catheters, applicators, pipetting or measuring tools, bandaging materials or other useful paraphernalia. The materials or components assembled in the kit may be provided to the practitioner stored in any convenient and suitable ways that preserve their operability and utility. For example the oligonucleotide, the composition, or the pharmaceutical composition may be in dissolved, dehydrated, or lyophilized form. The components are typically contained in suitable packaging material(s).

[0126] Use of absolute or sequential terms, for example, “will,” “will not,” “shall,” “shall not,” “must,” “must not,” “first,” “initially,” “next,” “subsequently,” “before,” “after,” “lastly,” and “finally,” are not meant to limit scope of the present embodiments disclosed herein but as exemplary.

[0127] As used herein, the singular forms “a”, “an” and “the” are intended to include the plural forms as well, unless the context clearly indicates otherwise. Furthermore, to the extent that the terms “including”, “includes”, “having”, “has”, “with”, or variants thereof are used in either the detailed description and/or the claims, such terms are intended to be inclusive in a manner similar to the term “comprising.”

[0128] As used herein, the phrases “at least one”, “one or more”, and “and/or” are open-ended expressions that are both conjunctive and disjunctive in operation. For example, each of the expressions “at least one of A, B and C”, “at least one of A, B, or C”, “one or more of A, B, and C”, “one or more of A, B, or C” and “A, B, and/or C” means A alone, B alone, C alone, A and B together, A and C together, B and C together, or A, B and C together.

[0129] As used herein, “or” may refer to “and”, “or,” or “and/or” and may be used both exclusively and inclusively. For example, the term “A or B” may refer to “A or B”, “A but not B”, “B but not A”, and “A and B”. In some cases, context may dictate a particular meaning.

[0130] Any systems, methods, software, and platforms described herein are modular. Accordingly, terms such as “first” and “second” do not necessarily imply priority, order of importance, or order of acts.

[0131] The term “about” when referring to a number or a numerical range means that the number or numerical range referred to is an approximation within experimental variability (or within statistical experimental error), and the number or numerical range may vary from, for example, from 1% to 15% of the stated number or numerical range. In examples, the term “about” refers to ±10% of a stated number or value.

[0132] The terms “increased”, “increasing”, or “increase” are used herein to generally mean an increase by a statically significant amount. In some aspects, the terms “increased,” or “increase,” mean an increase of at least 10% as compared to a reference level, for example an increase of at least about 10%, at least about 20%, or at least about 30%, or at least about 40%, or at least about 50%, or at least about 60%, or at least about 70%, or at least about 80%, or at least about 90% or up to and including a 100% increase or any increase between 10-100% as compared to a reference level, standard, or control. Other examples of “increase” include an increase of at least 2-fold, at least 5-fold, at least 10-fold, at least 20-fold, at least 50-fold, at least 100-fold, at least 1000-fold or more as compared to a reference level.

[0133] The terms “decreased”, “decreasing”, or “decrease” are used herein generally to mean a decrease by a statistically significant amount. In some aspects, “decreased” or “decrease” means a reduction by at least 10% as compared to a reference level, for example a decrease by at least about 20%, or at least about 30%, or at least about 40%, or at least about 50%, or at least about 60%, or at least about 70%, or at least about 80%, or at least about 90% or up to and including a 100% decrease (e.g., absent level or non-detectable level as compared to a reference level), or any decrease between 10-100% as compared to a reference level. In the context of a marker or symptom, by these terms is meant a statistically significant decrease in such level. The decrease can be, for example, at least 10%, at least 20%, at least 30%, at least 40% or more, and is preferably down to a level accepted as within the range of normal for an individual without a given disease.

[0134] While preferred embodiments of the present invention have been shown and described herein, it will be obvious to those skilled in the art that such embodiments are provided by way of example only. It is not intended that the invention be limited by the specific examples provided within the specification. While the invention has been described with reference to the aforementioned specification, the descriptions and illustrations of the embodiments herein are not meant to be construed in a limiting sense. Numerous variations, changes, and substitutions will now occur to those skilled in the art without departing from the invention. Furthermore, it shall be understood that all aspects of the invention are not limited to the specific depictions, configurations or relative proportions set forth herein which depend upon a variety of conditions and variables. It should be understood that various alternatives to the embodiments of the invention described herein may be employed in practicing the invention. It is therefore contemplated that the invention shall also cover any such alternatives, modifications, variations or equivalents. It is intended that the following claims define the scope of the invention and that methods and structures within the scope of these claims and their equivalents be covered thereby.

### Embodiments

[0135] Embodiment 1. A composition comprising an antisense oligonucleotide capable of binding to son of sevenless 1 (SOS1) or son of sevenless 2 (SOS2) mRNA.

[0136] Embodiment 2. The composition of Embodiment 1, wherein the antisense oligonucleotide specifically binds to the SOS1 mRNA.

[0137] Embodiment 3. The composition of Embodiment 1 or Embodiment 2, wherein the antisense oligonucleotide comprises a sequence having at least 80%, 85%, or 90% similarity to one of the following sequences: SEQ ID NOs: 1-8847 or SEQ ID NOs: 10001-18847.

[0138] Embodiment 4. The composition of any one of Embodiments 1-3, wherein the antisense oligonucleotide comprises a sequence having at least 80%, 85%, or 90% similarity to one of the following sequences: SEQ ID NOs: 751, 869-874, 966, 1038, 1085-1086, 1378-1379, 1937-1948, 2018-2023, 2483-2491, 2569-2575, 2805-2806, 2969-2971, 3101-3102, 3278-3280, 3510, 3554-3562, 5140-5141, 10751, 10869-10874, 10966, 11038, 11085-11086,11378-11379, 11937-11948, 12018-12023, 12483-12491, 12569-12575, 12805-12806, 12969-12971, 13101-13102, 13278-13280, 13510, 13554-13562, or 15140-15141.

[0139] Embodiment 5. The composition of Embodiment 1, wherein the antisense oligonucleotide specifically binds to the SOS2 mRNA.

[0140] Embodiment 6. The composition of Embodiment 1 or Embodiment 5, wherein the antisense oligonucleotide comprises a sequence having at least 80%, 85%, or 90% similarity to one of the following sequences: SEQ ID NOs: 20001-25494 or 30001-35494.

[0141] Embodiment 7. The composition of any one of Embodiments 1-6, wherein the antisense oligonucleotide comprises 12-30 nucleotides in length.

[0142] Embodiment 8. The composition of any one of Embodiments 1-7, wherein the antisense oligonucleotide comprises a gap segment and a wing segment.

[0143] Embodiment 9. The composition of Embodiment 8, wherein the antisense oligonucleotide comprises 5′-wing segment and 3′-wing segment.

[0144] Embodiment 10. The composition of Embodiment 9, wherein the each of the 5′-wing segment and 3′-wing segment is three linked nucleotides.

[0145] Embodiment 11. The composition of any one of Embodiments 1-10, wherein the antisense oligonucleotide comprises at least one 2′-modified nucleoside, at least one modified internucleotide linkage, or at least one inverted abasic moiety.

[0146] Embodiment 12. The composition of Embodiment 11, wherein the at least one 2′ modified nucleotide: comprises 2′-O-methyl, 2′-O-methoxyethyl (2′-O-MOE), 2′-O-aminopropyl, 2′-deoxy, 2′-deoxy-2′-fluoro, 2′-O-aminopropyl (2′-O-AP), 2′-O-dimethylaminoethyl (2′-O-DMAOE), 2′-O-dimethylaminopropyl (2′-O-DMAP), 2′-O-dimethylaminoethyloxyethyl (2′-O-DMAEOE), or 2′-O—N-methylacetamido (2′-O-NMA) modified nucleotide; comprises locked nucleic acid (LNA) or constrained ethyl (cEt) sugar, ethylene nucleic acid (ENA); or comprises a combination thereof.

[0147] Embodiment 13. The composition of Embodiment 11, wherein the at least one modified internucleotide linkage comprises a phosphorothioate linkage or a phosphorodithioate linkage.

[0148] Embodiment 14. The composition of any one of Embodiments 1-13, wherein the antisense oligonucleotide comprises a phosphorodiamidate morpholino oligomer (PMO), locked nucleic acid (LNA) or constrained ethyl (cEt) sugar.

[0149] Embodiment 15. The composition of any one of Embodiments 1-14, wherein the antisense oligonucleotide is conjugated with a peptide, antibody, lipid, carbohydrate or a polymer.

[0150] Embodiment 16. The composition of Embodiment 15, wherein the antisense oligonucleotide is conjugated with a peptide, antibody, lipid, carbohydrate or a polymer via a linker.

[0151] Embodiment 17. The composition of any one of Embodiments 1-16, wherein the composition comprises a combination of an antisense oligonucleotide specifically binds to the SOS1 mRNA and an antisense oligonucleotide specifically binds to the SOS2 mRNA.

[0152] Embodiment 18. The composition of any one of Embodiments 1-17, wherein the composition comprises an antisense oligonucleotide capable of binding to both SOS1 mRNA and SOS2 mRNA.

[0153] Embodiment 19. The composition of any one of Embodiments 1-18, wherein the composition further comprises an excipient.

[0154] Embodiment 20. The composition of any one of Embodiments 1-18, wherein the composition is formulated for parenteral or nasal administration.

[0155] Embodiment 21. A method of modulating KRAS-mediated signaling pathway in a cancer cell in need of, comprising: treating the cancer cell with a composition comprising antisense oligonucleotide capable of binding to son of sevenless 1 (SOS1) or son of sevenless 2 (SOS2) mRNA, thereby reducing expression of SOS1 or SOS2 protein or mRNA in the cancer cell.

[0156] Embodiment 22. The method of Embodiment 21, wherein the cancer cell is a lung cancer cell, a pancreatic cancer cell, or a colon cancer cell.

[0157] Embodiment 23. The method of any one of Embodiments 21-22, wherein the antisense oligonucleotide comprises a sequence having at least 80%, 85%, or 90% similarity to one of the following sequences: SEQ ID NOs: 1-8847 or SEQ ID NOs: 10001-18847.

[0158] Embodiment 24. The method of any one of Embodiments 21-23, wherein the antisense oligonucleotide comprises a sequence having at least 80%, 85%, or 90% similarity to one of the following sequences: SEQ ID NOs: 751, 869-874, 966, 1038, 1085-1086, 1378-1379, 1937-1948, 2018-2023, 2483-2491, 2569-2575, 2805-2806, 2969-2971, 3101-3102, 3278-3280, 3510, 3554-3562, 5140-5141, 10751, 10869-10874, 10966, 11038, 11085-11086, 11378-11379, 11937-11948, 12018-12023, 12483-12491, 12569-12575, 12805-12806, 12969-12971, 13101-13102, 13278-13280, 13510, 13554-13562, or 15140-15141.

[0159] Embodiment 25. The method of any one of Embodiments 21-24, wherein the antisense oligonucleotide comprises a sequence having at least 80%, 85%, or 90% similarity to one of the following sequences: SEQ ID NOs: 20001-25494 or 30001-35494.

[0160] Embodiment 26. The method of any one of Embodiments 21-25, wherein the composition comprises a combination of an antisense oligonucleotide specifically binds to SOS1 and an antisense oligonucleotide specifically binds to the SOS2 mRNA.

[0161] Embodiment 27. The method of any one of Embodiments 21-26, wherein the composition comprises an antisense oligonucleotide capable of binding to both SOS1 mRNA and SOS2 mRNA.

[0162] Embodiment 28. The method of any one of Embodiments 21-27, wherein the antisense oligonucleotide comprises at least one 2′-modified nucleoside, at least one modified internucleotide linkage, or at least one inverted abasic moiety.

[0163] Embodiment 29. The method of any one of Embodiments 21-28, wherein the at least one 2′ modified nucleotide: comprises 2′-O-methyl, 2′-O-methoxyethyl (2′-O-MOE), 2′-O-aminopropyl, 2′-deoxy, 2′-deoxy-2′-fluoro, 2′-O-aminopropyl (2′-O-AP), 2′-O-dimethylaminoethyl (2′-O-DMAOE), 2′-O-dimethylaminopropyl (2′-O-DMAP), 2′-O-dimethylaminoethyloxyethyl (2′-O-DMAEOE), or 2′-O—N-methylacetamido (2′-O-NMA) modified nucleotide; comprises locked nucleic acid (LNA), locked nucleic acid (LNA), constrained ethyl (cEt) sugar or ethylene nucleic acid (ENA); or comprises a combination thereof.

[0164] Embodiment 30. The method of any one of Embodiments 21, wherein the expression of SOS1 or SOS2 protein or mRNA is reduced at least 30%, at least 40%, at least 50% after the treatment.

[0165] Embodiment 31. A method of treating a cancer in a subject in need thereof, the method comprising: administering the subject a composition of any one of Embodiments 1-20, thereby treating the cancer in the subject.

[0166] Embodiment 32. The method of Embodiment 31, wherein the cancer is associated with an abnormality of KRAS-mediated signaling pathway.

[0167] Embodiment 33. The method of Embodiment 31, wherein the caner is a lung cancer, a pancreatic cancer, or a colon cancer.

[0168] Embodiment 34. The method of Embodiment 31, wherein the composition is administered to the subject in a dose and schedule sufficient to increase survival rate of the subject at least 5%.

[0169] Embodiment 35. The method of Embodiment 31, the composition is administered to the subject in a dose and schedule sufficient to inhibit growth of the tumor.

### EXAMPLES

[0170] The following illustrative examples are representative of embodiments of the stimulation, systems, and methods described herein and are not meant to be limiting in any way.

### Example 1. Modulating Expressions of SOS

### Cell Culture Condition and In Vitro Transfection

[0171] A549 and MRC-5 cells were maintained in Dulbecco's modified Eagle's medium (DMEM), and H460, H157, H1299, and H23 were grown in RPMI-1640. The media were supplemented with 10% fetal bovine serum, 100 U/ml penicillin and 100 U/ml streptomycin (Pen-strep, or PS), and cell were incubated at 37° C. in a humidified incubator containing 5% CO₂. For antisense treatment, cells were plated at 70% confluency the previous day in 96-well plates. On the day of transfection, cells were washed once with OptiMEM medium and incubated in 80 μL OptiMEM. Transfection mixture were prepared in OptiMEM by mixing the antisense and the Lipofectamine RNAiMax transfection reagents at desired concentration, and 20 μL of the transfection mixture was added into each well, and incubated for 2 hours. At the end of the 2 hours, 10 μL of serum were added in to well, and made up the volume to 200 μL with respective culture medium for the cell line. Alternatively, media were replaced 2 hours post transfection or on the next day. The ASO treatment could also be done without transfection reagent. In this case, the ASOs were diluted with OptiMEM, and added into the cell culture in a volume less than 5% of the entire volume.

mRNA Knockdown Detection

[0172] Cells were harvested by lysis at 48 hours post transfection. The lysis and the follow up mRNA detection were conducted according to the Quantigen assay specified by the manufacturer (ThermoFisher).

[0173] The ability of ASOs to knockdown desired mRNA was assessed as follows. NCI-H358 (ATCC) cells were plated in clear, flat bottom 96-well plate at 15,000 cells per well in RPMI1640 with 10% FBS for overnight. Cells were transfected with ASO at 5 nM and 20 nM complexed with RNAiMAX according to manufacturer's instructions (Thermo Fisher). After 3 hours of transfection, transfection mixture was removed and replenished with RPM11640+10% FBS and incubated for 48 hours. The mRNA quantitation was performed using QuantiGene from Thermo Fisher according to its instructions. The results for the initial study with initial test were in FIG. 1 and sequences of A, B and C were in Table 1. In order to accommodate screening studies and normalize inter- and intra-experimental variation, sequence C was selected as the benchmark ASO in the screening process implemented in all plates and to normalize the mRNA knockdown.

TABLE 1
ASO nucleic acid sequence for
normalizing the experimental variation

| ASO# | Nucleic acid sequence | SEQ ID NO: |
|---|---|---|
| A | GCTCGAATGATCGGAA | 35503 |
| B | ATTCGACTCACCACAG | 35504 |
| C | TCGCCTATTGACTGCA | 35505 |

[0174] For screening ASO in SOS1 knockdown function, the procedure is the same, except 5 nM or 20 nM ASOs were used in the transfection conditions and two cell lines [NCI-H358 (ATCC) and MIA PaCa-2(ATCC)] were used (noted in Table 2). The mRNA knockdown data were recorded as both actual mRNA knockdown percentage and normalized with sequence C activity to facilitate comparison. The results are listed in Table 2.

TABLE 2
Normalized SOS1 mRNA knockdown

| | MIA PaCa-2 | | | | NCI-H358 | |
|---|---|---|---|---|---|---|
| | | | 20 nM | 20 nM | 20 nM | 20 nM |
| | 5 nM ASO | 5 nM ASO | ASO | ASO | ASO | ASO |
| Cell line | SOS1 | mRNA | SOS1 | mRNA | SOS1 | mRNA |
| ASO conc. | mRNA | Knockdown | mRNA | Knockdown | mRNA | Knockdown |
| SEQ ID | Knockdown | Normalized | Knockdown | Normalized | Knockdown | Normalized |
| NO: | (%) | to SEQ C | (%) | to SEQ C | (%) | to SEQ C |
| 102 | 21.9 | 102.4 | 46.6 | 64.6 | −32.5 | −43.1 |
| 103 | 16.2 | 37.7 | 68.9 | 92.5 | 30.4 | 44.0 |
| 106 | 25.3 | 58.8 | 67.3 | 90.4 | 32.6 | 47.2 |
| 134 | −6.6 | −15.2 | −9.2 | −12.4 | −20.0 | −29.0 |
| 180 | 12.6 | 29.2 | 60.9 | 81.9 | 22.6 | 32.7 |
| 184 | 8.1 | 18.8 | 60.6 | 81.4 | 30.3 | 43.9 |
| 185 | 25.7 | 96.1 | 86.7 | 114.0 | 1.0 | 2.0 |
| 379 | 6.2 | 15.8 | 17.9 | 20.7 | 9.7 | 12.8 |
| 405 | 40.0 | 102.5 | 84.8 | 98.3 | 63.3 | 83.1 |
| 406 | 37.5 | 96.0 | 80.2 | 93.0 | 53.9 | 70.7 |
| 415 | 21.9 | 56.1 | 83.5 | 96.8 | 57.8 | 76.0 |
| 416 | 27.7 | 71.0 | 83.9 | 97.3 | 52.5 | 69.0 |
| 426 | 14.4 | 67.4 | 11.0 | 15.2 | −195.0 | −258.2 |
| 481 | 30.7 | 71.3 | 68.9 | 92.6 | 59.9 | 86.8 |
| 482 | 16.0 | 37.1 | 67.1 | 90.2 | 52.7 | 76.4 |
| 539 | 26.9 | 62.4 | 77.4 | 104.0 | 65.8 | 95.3 |
| 540 | 27.1 | 62.8 | 80.7 | 108.4 | 56.8 | 82.4 |
| 542 | 13.0 | 30.3 | 63.9 | 85.9 | 41.0 | 59.5 |
| 543 | 17.0 | 63.7 | 70.3 | 92.4 | −92.4 | −175.6 |
| 552 | 35.5 | 90.9 | 81.3 | 94.3 | 66.6 | 87.5 |
| 646 | 3.0 | 7.8 | 68.9 | 79.9 | 48.4 | 63.6 |
| 647 | −3.5 | −9.0 | 45.6 | 52.9 | 27.6 | 36.2 |
| 667 | 2.8 | 7.2 | 58.4 | 67.7 | 47.7 | 62.7 |
| 669 | 8.6 | 22.1 | 81.6 | 94.7 | 65.4 | 85.9 |
| 671 | 19.6 | 73.4 | 80.4 | 105.7 | 19.3 | 36.6 |
| 675 | −9.9 | −23.0 | −5.3 | −7.1 | −29.3 | −42.5 |
| 683 | −12.1 | −28.1 | 18.9 | 25.3 | 8.2 | 11.9 |
| 732 | 33.2 | 77.1 | 88.4 | 118.8 | 69.1 | 100.2 |
| 738 | 23.5 | 54.6 | 68.8 | 92.4 | 57.9 | 83.9 |
| 741 | 40.0 | 92.9 | 81.7 | 109.8 | 66.5 | 96.4 |
| 742 | 33.3 | 124.6 | 89.9 | 118.3 | 17.3 | 32.9 |
| 797 | 21.2 | 54.2 | 91.3 | 105.9 | 78.0 | 102.4 |
| 819 | 0.3 | 0.6 | 55.5 | 64.4 | 28.9 | 37.9 |
| 835 | −17.8 | −45.5 | 46.1 | 53.4 | 50.3 | 66.1 |
| 866 | −2.1 | −5.3 | 66.5 | 77.2 | 48.4 | 63.6 |
| 872 | 13.1 | 33.4 | 84.5 | 98.0 | 55.9 | 73.4 |
| 873 | 7.1 | 26.6 | 67.6 | 89.0 | −36.3 | −69.0 |
| 874 | 8.1 | 18.8 | 55.3 | 74.3 | 32.4 | 47.0 |
| 969 | 6.1 | 14.1 | 46.1 | 62.0 | 25.7 | 37.2 |
| 970 | −14.2 | −32.9 | 40.4 | 54.3 | 17.0 | 24.6 |
| 976 | 40.7 | 94.5 | 84.2 | 113.1 | 68.1 | 98.7 |
| 1076 | 43.9 | 101.9 | 88.4 | 118.7 | 53.4 | 77.4 |
| 1077 | 40.4 | 103.3 | 95.2 | 110.4 | 84.3 | 110.7 |
| 1083 | 10.3 | 26.3 | 91.0 | 105.5 | 79.1 | 104.0 |
| 1086 | 26.8 | 68.7 | 92.8 | 107.6 | 86.5 | 113.7 |
| 1193 | −4.2 | −10.8 | 70.4 | 81.7 | 49.8 | 65.5 |
| 1198 | 22.8 | 58.4 | 87.6 | 101.6 | 67.8 | 89.0 |
| 1224 | 0.7 | 1.8 | 93.2 | 108.1 | 78.2 | 102.8 |
| 1225 | −0.2 | −0.4 | 53.0 | 71.3 | 44.7 | 64.8 |
| 1264 | 12.7 | 29.4 | 48.9 | 65.7 | 31.6 | 45.8 |
| 1279 | 45.5 | 105.6 | 89.0 | 119.5 | 58.7 | 85.1 |
| 1360 | 31.5 | 73.2 | 86.4 | 116.0 | 69.5 | 100.7 |
| 1370 | 49.4 | 114.5 | 86.1 | 115.6 | 75.3 | 109.1 |
| 1402 | 30.7 | 71.3 | 60.1 | 80.8 | 34.3 | 49.8 |
| 1409 | 53.2 | 136.2 | 36.4 | 42.2 | 67.4 | 88.5 |
| 1455 | 16.2 | 41.6 | 53.4 | 61.9 | 72.6 | 95.4 |
| 1507 | 53.2 | 136.1 | 88.2 | 102.3 | 84.3 | 110.7 |
| 1508 | 31.2 | 79.9 | 88.1 | 102.2 | 77.3 | 101.5 |
| 1511 | 0.6 | 1.5 | 67.6 | 78.4 | 51.2 | 67.2 |
| 1516 | 34.2 | 87.5 | 90.6 | 105.1 | 77.2 | 101.4 |
| 1519 | 47.9 | 111.1 | 68.4 | 91.9 | 67.6 | 98.0 |
| 1521 | 25.7 | 59.7 | 30.9 | 41.6 | 14.3 | 20.7 |
| 1527 | 40.3 | 93.6 | 81.9 | 110.0 | 63.7 | 92.4 |
| 1547 | 1.6 | 3.6 | 31.8 | 42.7 | 20.1 | 29.2 |
| 1555 | 14.2 | 33.0 | 62.3 | 83.7 | 24.0 | 34.8 |
| 1600 | 11.2 | 26.0 | 50.3 | 67.6 | 26.3 | 38.1 |
| 1601 | 46.0 | 117.8 | 87.6 | 101.6 | 74.9 | 98.3 |
| 1605 | 21.0 | 53.7 | 71.7 | 83.2 | 70.2 | 92.2 |
| 1606 | 27.6 | 70.7 | 76.9 | 89.2 | 73.7 | 96.8 |
| 1609 | 37.3 | 95.5 | 89.5 | 103.9 | 79.6 | 104.6 |
| 1640 | 15.3 | 39.1 | 68.1 | 79.0 | 49.9 | 65.6 |
| 1811 | 11.2 | 28.6 | 83.6 | 97.0 | 67.6 | 88.8 |
| 1812 | −9.3 | −21.5 | 20.2 | 27.2 | 17.9 | 25.9 |
| 1836 | 24.5 | 56.9 | 75.9 | 102.0 | 60.6 | 87.8 |
| 1843 | 10.7 | 24.8 | 79.1 | 106.2 | 43.2 | 62.6 |
| 1844 | 44.6 | 103.3 | 83.5 | 112.2 | 63.8 | 92.5 |
| 1868 | 56.6 | 131.2 | 77.0 | 103.4 | 57.7 | 83.7 |
| 1939 | 20.2 | 46.8 | 64.1 | 86.1 | 38.4 | 55.7 |
| 1942 | 11.5 | 29.4 | 78.2 | 90.8 | 68.4 | 89.8 |
| 1943 | −3.4 | −8.8 | 77.3 | 89.7 | 67.1 | 88.2 |
| 1944 | 26.7 | 68.3 | 92.4 | 107.1 | 82.8 | 108.8 |
| 1947 | −4.9 | −12.7 | 43.9 | 50.9 | 26.6 | 35.0 |
| 1975 | 47.8 | 122.4 | 91.7 | 106.3 | 79.8 | 104.8 |
| 1976 | 16.0 | 40.8 | 76.7 | 89.0 | 52.4 | 68.9 |
| 2087 | 7.5 | 17.5 | 75.4 | 101.3 | 54.3 | 78.6 |
| 2089 | −10.7 | −24.7 | 31.1 | 41.7 | 7.6 | 11.1 |
| 2107 | −13.2 | −30.6 | 22.0 | 29.5 | −0.1 | −0.2 |
| 2111 | 12.4 | 28.7 | 66.3 | 89.0 | 47.1 | 68.2 |
| 2113 | 13.3 | 30.9 | 72.2 | 97.1 | 42.9 | 62.2 |
| 2115 | 20.9 | 48.6 | 64.2 | 86.3 | 44.9 | 65.2 |
| 2261 | 14.4 | 36.8 | 76.5 | 88.8 | 57.4 | 75.4 |
| 2459 | 20.4 | 52.3 | 69.2 | 80.2 | 59.8 | 78.5 |
| 2463 | −3.7 | −9.5 | 29.4 | 34.1 | 16.3 | 21.4 |
| 2465 | 14.6 | 37.4 | 76.9 | 89.2 | 57.0 | 74.8 |
| 2468 | 5.6 | 14.4 | 59.2 | 68.6 | 41.8 | 54.9 |
| 2470 | −15.6 | −40.0 | 42.8 | 49.6 | 21.1 | 27.8 |
| 2473 | 14.0 | 52.4 | 72.3 | 95.2 | −160.3 | −304.6 |
| 2490 | 28.3 | 77.2 | 80.6 | 100.4 | 66.9 | 85.5 |
| 2491 | −2.1 | −5.8 | 12.3 | 15.3 | −1.7 | −2.2 |
| 2498 | 25.3 | 68.9 | 83.9 | 104.5 | 71.4 | 91.2 |
| 2501 | 14.3 | 39.0 | 72.0 | 89.6 | 64.5 | 82.3 |
| 2550 | 23.0 | 62.8 | 75.7 | 94.2 | 57.7 | 73.7 |
| 2600 | 21.9 | 102.1 | 77.2 | 106.9 | 43.0 | 56.9 |
| 2606 | 27.7 | 97.4 | 87.0 | 107.2 | 65.7 | 96.3 |
| 2632 | 23.6 | 82.9 | 69.7 | 85.8 | 54.6 | 80.1 |
| 2680 | 24.2 | 85.0 | 80.8 | 99.5 | 51.0 | 74.8 |
| 2687 | 28.5 | 100.0 | 75.2 | 92.6 | 60.9 | 89.4 |
| 2688 | 29.4 | 103.2 | 80.6 | 99.3 | 53.8 | 78.9 |
| 2701 | 22.8 | 106.6 | 78.1 | 108.1 | 40.9 | 54.2 |
| 2703 | 16.5 | 45.0 | 73.3 | 91.3 | 68.2 | 87.1 |
| 2761 | 3.7 | 10.1 | 56.7 | 70.6 | 54.6 | 69.8 |
| 2762 | 8.7 | 23.7 | 41.8 | 52.1 | 42.0 | 53.6 |
| 2815 | 22.1 | 60.3 | 72.8 | 90.7 | 75.6 | 96.6 |
| 2908 | 21.7 | 59.3 | 73.8 | 91.9 | 65.8 | 84.0 |
| 2919 | 23.1 | 107.6 | 64.3 | 89.1 | −4.7 | −6.2 |
| 2974 | 29.5 | 103.5 | 81.9 | 100.9 | 72.5 | 106.3 |
| 2984 | 22.1 | 77.6 | 72.5 | 89.3 | 66.7 | 97.9 |
| 3007 | 30.4 | 106.6 | 90.6 | 111.5 | 83.7 | 122.8 |
| 3013 | 18.1 | 63.5 | 63.0 | 77.6 | 51.1 | 74.9 |
| 3016 | 24.0 | 84.2 | 80.5 | 99.2 | 58.6 | 86.0 |
| 3034 | 30.9 | 144.1 | 79.2 | 109.7 | 41.3 | 54.7 |
| 3078 | 13.6 | 37.1 | 79.6 | 99.0 | 80.6 | 102.9 |
| 3097 | 7.4 | 20.2 | 28.8 | 35.8 | 37.5 | 47.8 |
| 3103 | 16.8 | 45.9 | 60.2 | 74.9 | 47.2 | 60.3 |
| 3104 | 21.4 | 58.4 | 68.3 | 85.0 | 57.6 | 73.6 |
| 3187 | 1.4 | 3.8 | 50.6 | 62.9 | 47.0 | 60.1 |
| 3188 | 16.7 | 78.0 | 5.9 | 8.1 | −58.7 | −77.8 |
| 3279 | 2.6 | 9.1 | 32.1 | 39.5 | 29.9 | 43.9 |
| 3305 | 22.0 | 77.3 | 88.0 | 108.4 | 72.7 | 106.6 |
| 3308 | 22.7 | 79.5 | 85.5 | 105.3 | 76.8 | 112.7 |
| 3385 | 19.9 | 69.7 | 72.5 | 89.3 | 65.4 | 95.9 |
| 3386 | 14.6 | 51.4 | 76.5 | 94.2 | 56.1 | 82.3 |
| 3388 | 10.0 | 27.3 | 57.9 | 72.1 | 68.3 | 87.2 |
| 3561 | 11.1 | 30.4 | 61.3 | 76.3 | 65.1 | 83.1 |
| 3564 | 6.3 | 17.3 | 15.5 | 19.3 | 30.1 | 38.4 |
| 3570 | 14.8 | 40.3 | 39.1 | 48.6 | 45.1 | 57.6 |
| 3572 | 12.3 | 33.5 | 61.7 | 76.9 | 75.8 | 96.8 |
| 3607 | 5.4 | 14.8 | 63.7 | 79.3 | 60.6 | 77.4 |
| 3610 | 9.9 | 34.9 | 26.0 | 32.1 | −20.4 | −29.9 |
| 3615 | 17.3 | 60.6 | 78.3 | 96.4 | 71.7 | 105.1 |
| 3673 | 3.4 | 11.9 | 76.9 | 94.7 | 64.5 | 94.6 |
| 3677 | 11.5 | 40.4 | 63.6 | 78.3 | 68.9 | 101.1 |
| 3680 | 24.3 | 85.2 | 73.0 | 89.9 | 68.7 | 100.8 |
| 3682 | 17.8 | 62.5 | 64.9 | 79.9 | 36.1 | 52.9 |
| 3687 | 18.5 | 50.4 | 52.5 | 65.3 | 58.3 | 74.5 |
| 3719 | 0.0 | −0.1 | 38.2 | 47.6 | 40.3 | 51.5 |
| 3765 | 24.2 | 66.2 | 57.0 | 70.9 | 54.9 | 70.1 |
| 3818 | 20.1 | 54.8 | 53.3 | 66.4 | 54.3 | 69.3 |
| 3821 | 36.8 | 100.5 | 66.7 | 83.0 | 66.2 | 84.5 |
| 3879 | 38.6 | 105.2 | 81.4 | 101.3 | 79.6 | 101.6 |
| 3880 | 25.4 | 89.3 | 78.6 | 96.8 | 71.3 | 104.6 |
| 3888 | 15.2 | 53.5 | 63.9 | 78.7 | 58.0 | 85.0 |
| 3942 | 3.0 | 10.5 | 30.1 | 37.0 | 24.9 | 36.5 |
| 3944 | 14.1 | 49.3 | 39.6 | 48.8 | 40.8 | 59.9 |
| 3947 | 26.3 | 92.3 | 63.7 | 78.5 | 54.4 | 79.7 |
| 3949 | 41.5 | 145.7 | 86.0 | 105.9 | 76.3 | 111.9 |
| 3954 | −10.3 | −28.0 | 51.1 | 63.6 | 55.5 | 70.9 |
| 3956 | −1.7 | −4.7 | 44.4 | 55.3 | 50.0 | 63.8 |
| 3992 | −3.1 | −8.5 | 2.9 | 3.6 | 8.2 | 10.5 |
| 4055 | 6.8 | 18.4 | 51.7 | 64.3 | 48.9 | 62.4 |
| 4097 | 2.1 | 5.7 | 41.4 | 51.5 | 47.4 | 60.5 |
| 4134 | 27.3 | 74.6 | 74.0 | 92.1 | 71.1 | 90.8 |
| 4156 | 24.2 | 84.9 | 85.6 | 105.5 | 67.8 | 99.4 |
| 4158 | −2.0 | −6.9 | 69.3 | 85.4 | 58.1 | 85.2 |
| 4166 | 7.0 | 24.7 | 69.6 | 85.7 | 67.3 | 98.7 |
| 4173 | 14.6 | 51.2 | 80.1 | 98.6 | 77.7 | 114.0 |
| 4177 | 29.1 | 102.1 | 73.5 | 90.5 | 63.4 | 93.1 |
| 4178 | 13.4 | 47.1 | 63.0 | 77.6 | 38.6 | 56.6 |
| 4182 | 9.8 | 26.6 | 68.7 | 85.5 | 77.1 | 98.4 |
| 4183 | 23.9 | 65.1 | 72.2 | 89.8 | 75.2 | 96.0 |
| 4222 | 8.4 | 23.0 | 63.3 | 78.7 | 61.1 | 78.1 |
| 4231 | 3.3 | 8.9 | 19.8 | 24.6 | 21.5 | 27.4 |
| 4466 | 7.6 | 20.8 | 74.4 | 92.6 | 67.3 | 86.0 |
| 4687 | 13.5 | 36.9 | 87.3 | 108.7 | 82.6 | 105.5 |
| 4691 | 1.9 | 6.8 | 64.8 | 79.8 | 33.7 | 49.5 |
| 4692 | 7.8 | 27.5 | 78.9 | 97.2 | 69.3 | 101.7 |
| 4736 | 9.6 | 33.7 | 75.3 | 92.7 | 68.4 | 100.3 |
| 4781 | 11.5 | 40.2 | 63.0 | 77.6 | 50.1 | 73.5 |
| 4784 | 13.0 | 45.5 | 60.2 | 74.1 | 54.6 | 80.1 |
| 4916 | 10.1 | 35.4 | 27.5 | 33.9 | 9.8 | 14.4 |
| 4935 | 19.6 | 53.6 | 53.4 | 66.5 | 51.9 | 66.3 |
| 5118 | 32.6 | 88.9 | 62.8 | 78.2 | 59.9 | 76.5 |
| 5144 | 12.8 | 34.9 | 75.8 | 94.4 | 68.9 | 88.0 |
| 5157 | 26.3 | 71.7 | 74.6 | 92.9 | 59.4 | 75.9 |
| 5162 | 25.1 | 68.4 | 74.0 | 92.1 | 64.5 | 82.3 |
| 5384 | 18.8 | 51.3 | 84.4 | 105.1 | 73.6 | 94.0 |
| 5394 | 10.5 | 36.8 | 86.0 | 106.0 | 57.9 | 85.0 |
| 5435 | 5.2 | 18.3 | 81.4 | 100.3 | 69.4 | 101.8 |
| 5449 | 14.0 | 49.0 | 85.7 | 105.6 | 62.7 | 92.0 |
| 5455 | 24.1 | 84.4 | 91.6 | 112.8 | 65.2 | 95.6 |
| 5457 | 27.1 | 95.3 | 84.9 | 104.6 | 72.8 | 106.8 |
| 5459 | 21.0 | 73.6 | 83.2 | 102.5 | 63.8 | 93.6 |
| 5532 | 13.8 | 64.6 | 7.3 | 10.1 | −188.0 | −248.9 |
| 5548 | 13.1 | 60.9 | 38.4 | 53.1 | 24.7 | 32.7 |
| 5764 | 17.3 | 80.9 | 38.5 | 53.3 | −2.6 | −3.4 |
| 5770 | 24.7 | 115.3 | 49.5 | 68.5 | −13.0 | −17.2 |
| 5774 | 31.6 | 147.5 | 61.3 | 84.8 | 8.7 | 11.5 |
| 5776 | 23.1 | 107.9 | 28.4 | 39.3 | −127.5 | −168.9 |
| 5780 | 10.2 | 38.2 | 84.5 | 111.1 | −11.7 | −22.3 |
| 5784 | 15.5 | 57.9 | 69.6 | 91.5 | 28.0 | 53.2 |
| 5875 | 4.2 | 15.9 | 41.2 | 54.2 | −66.2 | −125.7 |
| 5920 | 10.9 | 40.9 | 63.4 | 83.4 | −62.5 | −118.7 |
| 6011 | 6.5 | 24.1 | 26.9 | 35.4 | −82.6 | −156.9 |
| 6054 | 4.2 | −15.5 | −0.1 | −0.1 | −234.7 | −446.0 |
| 6056 | −0.9 | −3.2 | 74.2 | 97.6 | 30.4 | 57.8 |
| 6060 | 21.5 | 100.2 | 81.4 | 112.7 | 81.9 | 108.5 |
| 6061 | 23.2 | 108.2 | 74.9 | 103.8 | 67.1 | 88.8 |
| 6349 | 35.0 | 163.6 | 69.0 | 95.6 | 46.8 | 62.0 |
| 6357 | 4.8 | 22.6 | 12.1 | 16.7 | −77.8 | −103.0 |
| 6418 | 32.5 | 151.5 | 10.6 | 14.6 | −64.9 | −85.9 |
| 6524 | 1.9 | 7.2 | 67.3 | 88.6 | −80.7 | −153.3 |
| 6532 | 15.8 | 58.9 | 88.8 | 116.8 | 67.8 | 128.8 |
| 6611 | 28.9 | 108.0 | 82.8 | 108.9 | 45.8 | 87.0 |
| 6617 | 13.8 | 51.6 | 67.8 | 89.1 | −10.4 | −19.7 |
| 6621 | 22.4 | 83.7 | 72.9 | 95.9 | −2.0 | −3.9 |
| 6625 | 15.5 | 57.9 | 84.1 | 110.7 | 13.0 | 24.7 |
| 6627 | 26.7 | 100.1 | 93.6 | 123.1 | 61.5 | 116.9 |
| 6636 | 17.0 | 79.1 | 45.1 | 62.5 | 49.3 | 65.3 |
| 6799 | −2.3 | −10.7 | 35.8 | 49.5 | 7.5 | 9.9 |
| 6801 | 15.4 | 72.0 | 29.8 | 41.3 | −25.9 | −34.2 |
| 6803 | 3.8 | 17.5 | 37.2 | 51.5 | −22.9 | −30.4 |
| 6807 | 10.7 | 50.2 | 1.9 | 2.7 | −64.2 | −85.0 |
| 6818 | −2.0 | −7.4 | 10.9 | 14.4 | −357.0 | −678.2 |
| 6849 | −0.1 | −0.5 | 68.2 | 89.7 | 28.2 | 53.5 |
| 6850 | 8.9 | 33.5 | 69.6 | 91.6 | −23.0 | −43.7 |
| 6852 | 13.6 | 51.0 | 81.8 | 107.6 | 6.3 | 12.0 |
| 6854 | 5.6 | 21.0 | 9.6 | 12.7 | −164.3 | −312.2 |
| 6936 | −2.0 | −7.7 | 15.3 | 20.1 | −176.0 | −334.4 |
| 7062 | −3.8 | −17.8 | 46.9 | 64.9 | 24.1 | 32.0 |
| 7124 | 6.0 | 28.0 | 50.6 | 70.1 | 40.3 | 53.4 |
| 7229 | 11.4 | 53.1 | 66.0 | 91.3 | 34.9 | 46.2 |
| 7236 | 6.8 | 31.6 | 32.4 | 44.9 | −29.8 | −39.4 |
| 7241 | 1.0 | 4.8 | 41.2 | 57.0 | −27.2 | −36.0 |
| 7363 | 8.7 | 40.6 | −2.1 | −2.9 | −120.8 | −160.0 |
| 7368 | 32.5 | 121.5 | 80.6 | 106.1 | 75.2 | 142.9 |
| 7408 | 3.2 | 12.1 | 51.7 | 68.0 | 5.1 | 9.8 |
| 7413 | 12.2 | 45.6 | 57.6 | 75.7 | −22.2 | −42.2 |
| 7471 | 33.3 | 124.7 | 87.5 | 115.2 | −10.9 | −20.8 |
| 7516 | 32.7 | 122.2 | 76.1 | 100.1 | −20.3 | −38.6 |
| 7531 | 11.8 | 44.0 | 50.1 | 65.9 | −159.0 | −302.1 |
| 7589 | 28.6 | 133.3 | 76.2 | 105.5 | 57.8 | 76.5 |
| 7865 | 19.3 | 89.9 | 66.3 | 91.8 | 63.9 | 84.6 |
| 7868 | 11.1 | 51.7 | 55.1 | 76.4 | 33.7 | 44.6 |
| 7875 | 12.8 | 60.0 | 39.2 | 54.2 | −8.8 | −11.6 |
| 8056 | 9.6 | 44.7 | 5.7 | 7.9 | −74.3 | −98.4 |
| 8087 | 40.1 | 187.1 | 33.8 | 46.8 | 14.8 | 19.6 |
| 8201 | 27.5 | 102.8 | 77.9 | 102.5 | 45.9 | 87.2 |
| 8207 | 19.1 | 71.4 | 78.3 | 103.0 | 41.2 | 78.2 |
| 8208 | 23.7 | 88.6 | 81.7 | 107.4 | 2.4 | 4.5 |
| 8247 | 6.4 | 23.9 | 61.9 | 81.4 | −125.7 | −238.8 |
| 8248 | 6.7 | 24.9 | 60.6 | 79.7 | −106.0 | −201.3 |
| 8293 | 8.6 | 32.2 | 20.6 | 27.1 | −163.0 | −309.6 |
| 8294 | 10.8 | 50.5 | 60.7 | 84.0 | 6.4 | 8.5 |
| 8331 | 21.6 | 100.8 | 75.5 | 104.5 | 59.3 | 78.5 |
| 8363 | 15.2 | 70.9 | 30.1 | 41.6 | −11.6 | −15.3 |
| 8567 | 7.3 | 34.2 | 28.6 | 39.6 | −17.3 | −22.9 |
| 8617 | 31.1 | 145.1 | 59.9 | 82.9 | 33.3 | 44.1 |
| 8618 | 19.6 | 91.7 | 26.7 | 37.0 | −68.1 | −90.1 |
| 8651 | 36.5 | 136.6 | 77.6 | 102.1 | 57.8 | 109.8 |
| 8659 | 19.8 | 74.0 | 81.2 | 106.8 | 38.8 | 73.7 |
| 8661 | 18.8 | 70.3 | 73.8 | 97.0 | −5.3 | −10.0 |
| 8708 | 14.0 | 52.3 | 71.7 | 94.3 | −87.6 | −166.5 |
| 8713 | 22.5 | 84.3 | 68.0 | 89.5 | −68.5 | −130.2 |
| 8780 | 9.6 | 35.9 | 63.7 | 83.9 | −129.0 | −245.0 |
| 8781 | −4.0 | −18.5 | 73.7 | 102.0 | 30.2 | 40.0 |
| 8788 | 11.7 | 54.8 | 62.5 | 86.6 | 32.1 | 42.6 |
| 8810 | −5.9 | −27.4 | 15.8 | 21.9 | −55.5 | −73.6 |
| 8843 | 25.6 | 119.4 | −59.2 | −81.9 | −114.8 | −152.0 |

[0175] For screening ASO in SOS2 knockdown function, the procedure is the same, except 5 nM or 20 nM ASOs were used in the transfection conditions and two cell lines [NCI-H358 (ATCC) and MIA PaCa-2(ATCC)] were used. The mRNA knockdown data were recorded as mRNA knockdown percentage. The results are listed in Table 3.

TABLE 3
SOS2 mRNA knockdown

| | Cell line | |
|---|---|---|
| | MIA PaCa-2 | NCI-H358 |
| | ASO conc. | |
| | 20 nM ASO | 20 nM ASO |
| SEQ | SOS2 mRNA Knockdown | SOS2 mRNA Knockdown |
| ID NO | (%) | (%) |
| 405 | −18.8 | −44.4 |
| 406 | 26.2 | −13.1 |
| 539 | 17.2 | −3.4 |
| 741 | 18 | 14.9 |
| 742 | −359 | −154.2 |
| 872 | 33.1 | 9.6 |
| 873 | −101.3 | −58.1 |
| 976 | 13.4 | −5.6 |
| 1076 | 22.1 | 13.1 |
| 1077 | −64.3 | −21.9 |
| 1086 | 80.9 | 82.8 |
| 1601 | 23.1 | −0.2 |
| 1609 | 25.4 | −3 |
| 1811 | 24.8 | 5.7 |
| 1939 | 69.9 | 60.5 |
| 1942 | 77.8 | 69.6 |
| 1943 | 67.7 | 62.8 |
| 1944 | 90 | 82.4 |
| 1947 | 36 | 14.7 |
| 2490 | 80.6 | 55.7 |
| 2600 | −66.4 | −64.3 |
| 2606 | 65.6 | 37.4 |
| 2632 | 49.7 | −16.3 |
| 2703 | 8.3 | −33.3 |
| 2908 | 47.3 | 27.7 |
| 2974 | 69.9 | 47.2 |
| 2984 | 59.5 | 17.3 |
| 3007 | 62.1 | 44.7 |
| 3016 | −15 | −6.2 |
| 3104 | 51 | −13.5 |
| 3279 | 78.2 | 70.9 |
| 3305 | 47.5 | 32.4 |
| 3308 | 77.8 | 70.6 |
| 3677 | 75.1 | 63.2 |
| 3680 | 62.8 | 25 |
| 3687 | 18.4 | −25.6 |
| 3765 | 34.8 | 15 |
| 3949 | −1.1 | 15.4 |
| 4134 | 37.2 | 6.4 |
| 4156 | 66.6 | 44.4 |
| 4173 | 69.2 | 37.3 |
| 4177 | 65.3 | 32.2 |
| 4178 | −1.8 | 7.3 |
| 4183 | 37.6 | 6.9 |
| 4466 | 23.3 | 14.7 |
| 4687 | 11.9 | −21.3 |
| 4781 | 60.4 | 24.2 |
| 4935 | 22.9 | 9.5 |
| 5118 | 53.3 | 27.8 |
| 5435 | 48.3 | 9.6 |
| 5457 | 66.6 | 46.3 |
| 5459 | 5 | −19.4 |
| 5780 | −171.1 | −165.1 |
| 6060 | −150.6 | −25.8 |
| 6061 | −197.3 | −41.7 |
| 6349 | −235.6 | −66.9 |
| 6532 | −221.5 | −22.3 |
| 6611 | −125.7 | −38.9 |
| 6625 | −378.2 | −80.5 |
| 6803 | −265.8 | −56.3 |
| 7368 | −206.5 | −32.1 |
| 7589 | −63.6 | −13.9 |
| 7865 | −90.2 | −41.8 |
| 8208 | −88.5 | −124.9 |
| 8247 | −127.9 | −107.3 |
| 8331 | −58.5 | −52.4 |

### Cell Proliferation Assay

[0176] After the antisense treatment, cells were monitored at 3 or 5 days post transfection. Cell proliferation was monitored by CellTiter-Glo assay according to the protocol specified by the manufacturer (Promega).

### Inhibition of Cell Growth

[0177] The ability of ASOs to inhibit cell growth was assessed as follows. Cells (NCI-H358, MIA PaCa-2, and A375) were plated in clear 384-well plates (S-Bio, #MS-9384UZ) at 800 cells per well in RPMI1640 with 10% FBS for overnight. Cells were treated with 2.5 uM or 5 nM ASO (noted in Table 4). After 5 days, cell proliferation was determined by measuring total ATP content using the Cell Titer Glo reagent (Promega, G7570) according to manufacturer's instructions. In the experiments, three cell lines were used as cell system to test the growth inhibition; NCI-H358 and Mia Paca-2 carries KRAS mutation and served as positive control cell line, and A375 dose not carry mutation in KRAS and served as negative control cell line and would not respond to ASO treatment. The results for growth inhibition are shown in Table 4.

TABLE 4
Cell growth inhibition

| SEQ | MIA PaCa-2 | MIA PaCa-2 | NCI-H358 | A375 |
|---|---|---|---|---|
| ID NO: | 2.5 uM ASO | 5 uM ASO | 5 uM ASO | 2.5 uM ASO |
| 102 | −10.9 | −23.2 | −16.2 | 8 |
| 103 | −3 | −20.7 | −20.3 | 4.6 |
| 106 | −13 | −14.5 | 5.8 | 10.8 |
| 134 | −15.1 | −17.1 | −36.5 | 2.7 |
| 180 | 0 | −3.8 | −13.9 | 3.4 |
| 184 | −0.3 | −1.3 | 1.3 | 8.2 |
| 185 | −15.5 | −11.3 | −3.6 | 1.3 |
| 379 | −13 | −17.2 | −21.7 | 7.8 |
| 405 | 1.5 | −0.3 | 15.8 | 7.4 |
| 406 | 0.4 | −0.8 | 12.5 | 3 |
| 415 | −15.1 | 0.4 | −27.8 | 13.2 |
| 416 | −4.1 | −1.6 | 0.1 | 5.2 |
| 426 | −5.1 | −10.2 | 9.4 | 6.6 |
| 481 | −8.7 | −15.4 | 3.0 | 7.3 |
| 482 | −14 | −16.5 | 6.9 | 3.5 |
| 539 | −8.8 | −13.7 | 13.6 | 2.1 |
| 540 | 3.7 | 4.0 | −27.4 | 13 |
| 542 | −5.7 | −1.8 | −24.3 | 6.7 |
| 543 | 1.3 | −6.8 | −19.8 | 1.3 |
| 552 | −12.2 | −15.7 | −14.3 | 7.9 |
| 646 | −7.4 | −8.7 | −11.6 | 7.5 |
| 647 | −3.9 | −8.6 | −24.8 | 11 |
| 667 | −6.2 | −12.8 | −28.8 | 3.1 |
| 669 | −0.3 | −4.7 | −2.1 | 4.3 |
| 671 | −1.8 | −10.4 | −14.5 | 2.8 |
| 675 | −4.3 | −13.7 | −28.5 | 4.6 |
| 683 | 0.8 | −9.6 | −16.6 | 13.6 |
| 732 | −1.7 | −2.9 | −4.2 | 6.7 |
| 738 | −3.8 | −5.7 | −58.9 | 8.5 |
| 741 | −0.2 | 4.2 | 6.5 | 5.8 |
| 742 | −2.9 | 30.6 | 13.2 | 3.4 |
| 797 | 2.6 | −10.3 | −7.3 | 7.7 |
| 819 | −8.8 | −23.9 | 16.0 | 9 |
| 835 | 0 | −1.9 | −3.7 | 5 |
| 866 | −10.1 | −11.7 | −20.8 | 12 |
| 872 | −0.1 | 6.5 | −3.3 | 3.5 |
| 873 | −7.7 | −20.7 | −16.1 | 4.7 |
| 874 | −1.7 | −19.7 | −24.0 | 5.7 |
| 969 | −8.8 | −10.8 | −23.0 | 2.9 |
| 970 | −5.7 | −3.5 | −30.8 | 3.6 |
| 976 | 11.1 | 15.2 | 17.2 | 5.4 |
| 1076 | 14.9 | 20.0 | −2.6 | 5.3 |
| 1077 | 32.2 | 31.9 | 7.3 | 1.7 |
| 1083 | −2.8 | 0.9 | −2.2 | 8.6 |
| 1086 | 29.1 | 30.4 | 16.0 | 9.5 |
| 1193 | −5.6 | −9.5 | −12.2 | 7.3 |
| 1198 | −4.2 | −0.2 | −9.0 | 2 |
| 1224 | −2.1 | 1.3 | −24.7 | 4.1 |
| 1225 | 0.1 | −9.2 | −16.0 | 2.2 |
| 1264 | 2.4 | −7.7 | −29.4 | 2.8 |
| 1279 | −9.6 | −15.7 | 19.6 | 1 |
| 1360 | −6.5 | 0.5 | −7.5 | 4.6 |
| 1370 | 2.2 | 3.2 | −1.6 | 6.9 |
| 1402 | −0.6 | 0.1 | −11.2 | 8 |
| 1409 | −3 | 0.8 | 7.4 | 2.9 |
| 1455 | 0.7 | −4.6 | −18.9 | 12.7 |
| 1507 | −8.7 | −3.2 | 6.7 | 7.3 |
| 1508 | −0.4 | 2.1 | −0.8 | 3.8 |
| 1511 | −7.8 | −3.8 | −25.3 | 1.9 |
| 1516 | −8.7 | 1.4 | −11.1 | 5.8 |
| 1519 | 6.9 | −5.2 | 3.0 | 1.1 |
| 1521 | 3.8 | −10.2 | −10.8 | 2.8 |
| 1527 | 6.5 | −0.6 | −3.3 | 10.1 |
| 1547 | 5.8 | −3.1 | −8.8 | 9.3 |
| 1555 | 4.4 | 0.7 | −16.9 | 7.7 |
| 1600 | 1.3 | 1.7 | −10.5 | 8.3 |
| 1601 | 3.2 | 5.1 | −10.2 | 6.5 |
| 1605 | 3.1 | −17.1 | 9.9 | 5.4 |
| 1606 | 7.6 | −0.1 | −7.9 | 1.7 |
| 1609 | 11.8 | 7.6 | 13.2 | 4.5 |
| 1640 | −12.7 | −12.7 | −8.2 | 6.6 |
| 1811 | 37.9 | 46.0 | −19.0 | 7.2 |
| 1812 | −6.4 | −13.7 | −18.1 | 3.8 |
| 1836 | 6.6 | −0.2 | −7.1 | 1.7 |
| 1843 | 7 | −0.9 | 1.5 | 1.7 |
| 1844 | −1.1 | −1.3 | 1.9 | 11.8 |
| 1868 | 3.9 | 6.5 | 2.6 | 3.4 |
| 1939 | 28.3 | 33.3 | 9.7 | 0.9 |
| 1942 | 26.2 | 28.2 | 15.3 | 10.6 |
| 1943 | 3.6 | 7.1 | 1.3 | 1.8 |
| 1944 | 35.8 | 39.9 | 41.7 | 1.4 |
| 1947 | −6.2 | 1.3 | −14.0 | 7.5 |
| 1975 | −13.9 | 4.8 | −8.8 | 7.9 |
| 1976 | −16.4 | −1.5 | 1.5 | 6.8 |
| 2087 | 6.1 | 2.1 | −8.4 | 4.7 |
| 2089 | 1.2 | −11.0 | −13.2 | 3.5 |
| 2107 | 3.9 | −8.5 | −7.5 | 2.5 |
| 2111 | −6.1 | 0.8 | −2.2 | 7.6 |
| 2113 | −0.5 | −1.6 | 2.2 | 4.9 |
| 2115 | 2.7 | 7.1 | −19.4 | 4 |
| 2261 | 5.5 | 4.3 | −16.2 | 4.5 |
| 2459 | −2.7 | −1.3 | −8.1 | 8.9 |
| 2463 | 0.2 | −6.3 | −16.0 | 13.5 |
| 2465 | 11.2 | 8.9 | −9.0 | 11.8 |
| 2468 | −4.7 | −7.0 | −12.7 | 1.7 |
| 2470 | −3.2 | −1.5 | −25.1 | 7.5 |
| 2473 | 2.4 | 5.9 | 10.5 | 2.8 |
| 2490 | 14.9 | 24.5 | 23.3 | 3.3 |
| 2491 | −6.9 | −1.5 | 11.6 | 4.5 |
| 2498 | −7.5 | 3.9 | 16.6 | 8.6 |
| 2501 | 1.2 | 6.2 | 0.5 | 3.6 |
| 2550 | −1.7 | 3.6 | 11.9 | 3.9 |
| 2600 | 0.8 | 7.8 | 0.7 | 6.3 |
| 2606 | 2.2 | −0.8 | 12.5 | 4.9 |
| 2632 | 4.1 | 5.0 | 24.0 | 8.3 |
| 2680 | −8.5 | −14.6 | 18.3 | 10 |
| 2687 | −1.6 | 3.0 | 9.0 | 2.5 |
| 2688 | 8.3 | 11.0 | 3.0 | 6.3 |
| 2701 | −0.3 | 6.6 | 7.6 | 4.2 |
| 2703 | 0 | 13.5 | 11.1 | 1.7 |
| 2761 | 0.5 | −1.6 | 17.5 | 14 |
| 2762 | 5.3 | −7.3 | 3.6 | 9.9 |
| 2815 | 0.3 | 2.0 | 5.4 | 4.7 |
| 2908 | 14.3 | 23.6 | 14.6 | 1.1 |
| 2919 | −11.6 | 2.9 | 5.3 | 4.6 |
| 2974 | 16 | 18.4 | 25.1 | 4.4 |
| 2984 | 15.9 | 26.3 | 14.2 | 2.7 |
| 3007 | −0.1 | 2.5 | 12.9 | 9.1 |
| 3013 | −3 | −8.0 | 11.8 | 2.5 |
| 3016 | −3 | −4.6 | 20.7 | 1.2 |
| 3034 | 2.1 | 3.9 | 6.1 | 5 |
| 3078 | 5.2 | 11.6 | −1.9 | 1 |
| 3097 | −7.3 | −4.0 | −8.2 | 6.7 |
| 3103 | −6.1 | −2.7 | −3.1 | 15.5 |
| 3104 | 14.6 | 71.1 | −1.4 | 10.3 |
| 3187 | −3.9 | −2.6 | 12.0 | 14.3 |
| 3188 | −5.1 | 1.7 | −1.0 | 3.1 |
| 3279 | 5.3 | 20.1 | −1.6 | 7.8 |
| 3305 | −5.6 | 0.2 | 4.9 | 7.3 |
| 3308 | 0.9 | 7.0 | 9.8 | 1.9 |
| 3385 | −17.7 | −8.8 | 0.1 | 2.2 |
| 3386 | −5 | −3.0 | 7.4 | 3.3 |
| 3388 | −8.8 | 1.6 | 7.2 | 3.5 |
| 3561 | −2.1 | 2.3 | 2.9 | 2.9 |
| 3564 | −6.3 | −8.5 | −2.9 | 5.2 |
| 3570 | −7 | −4.4 | −9.5 | 16.2 |
| 3572 | 0.3 | 3.6 | 13.8 | 0.5 |
| 3607 | 2.5 | 0.4 | 7.1 | 8.2 |
| 3610 | 0.4 | −1.6 | −3.9 | 3.1 |
| 3615 | −1.2 | −7.4 | 17.5 | 3.3 |
| 3673 | −2.8 | 14.2 | −1.3 | 7.4 |
| 3677 | 39.4 | 58.4 | 16.6 | 5.9 |
| 3680 | 5.4 | 21.0 | 22.9 | 9 |
| 3682 | 2.1 | −3.8 | 9.5 | 3.6 |
| 3687 | 28.5 | 33.3 | 15.2 | 4 |
| 3719 | −1.6 | −7.5 | −6.5 | 12.3 |
| 3765 | 16.6 | 19.9 | 18.7 | 12 |
| 3818 | 1.4 | −3.6 | 1.5 | 6 |
| 3821 | −6.5 | −0.5 | 14.3 | 7.8 |
| 3879 | −2.6 | 2.5 | 15.2 | 3.6 |
| 3880 | 1.7 | 4.2 | 9.0 | 6.1 |
| 3888 | 0.5 | −6.5 | 4.2 | 4.6 |
| 3942 | −11 | −11.7 | −11.6 | 7.6 |
| 3944 | −21.8 | −9.1 | −5.2 | 7.2 |
| 3947 | −14.2 | −0.2 | −16.0 | 4.6 |
| 3949 | −11.7 | −3.0 | 25.1 | 1.5 |
| 3954 | −2 | 0.4 | 6.0 | 3.3 |
| 3956 | 3.3 | −1.8 | 4.0 | 7.2 |
| 3992 | −4.8 | −4.7 | 4.1 | 10.9 |
| 4055 | −12.9 | 2.3 | 2.6 | 10.2 |
| 4097 | −2.6 | 0.7 | 3.8 | 7.9 |
| 4134 | 10.5 | 23.8 | 16.7 | 4.4 |
| 4156 | 11.8 | 8.6 | 23.2 | 1.5 |
| 4158 | −0.5 | 0.7 | 8.9 | 2.3 |
| 4166 | −3.5 | −2.4 | −5.7 | 10.2 |
| 4173 | 18.1 | 19.0 | 19.0 | 5.1 |
| 4177 | −4.8 | 6.0 | 16.8 | 11 |
| 4178 | 8.1 | 10.8 | 10.4 | 5.4 |
| 4182 | −0.9 | −2.1 | 7.1 | 5.7 |
| 4183 | 2.9 | 5.7 | 14.9 | 7.3 |
| 4222 | 3.5 | 2.4 | 12.2 | 9.6 |
| 4231 | −13.6 | −7.1 | 6.6 | 7.5 |
| 4466 | 37.1 | 37.7 | 30.0 | 4.1 |
| 4687 | 6.5 | 9.5 | 24.0 | 9.9 |
| 4691 | −0.7 | 1.7 | −2.1 | 5.4 |
| 4692 | −1.7 | 4.4 | 8.1 | 9 |
| 4736 | −3.7 | −1.4 | 1.0 | 4.8 |
| 4781 | 13.8 | 9.0 | 6.1 | 2.2 |
| 4784 | −1.8 | 5.4 | 5.5 | 3 |
| 4916 | −2.8 | 1.0 | −1.2 | 13.7 |
| 4935 | 20.1 | 10.2 | 35.9 | 2.1 |
| 5118 | 12.8 | 20.6 | 30.0 | 12.6 |
| 5144 | 7.5 | 5.4 | 12.9 | 3.2 |
| 5157 | −4.9 | 5.0 | 6.5 | 1.4 |
| 5162 | 0.4 | −1.1 | 15.1 | 10.6 |
| 5384 | 0.5 | 2.0 | 12.4 | 14.3 |
| 5394 | 4.9 | 0.0 | 1.3 | 5.3 |
| 5435 | 10.4 | 64.1 | −4.5 | 9 |
| 5449 | 0.9 | −8.2 | 10.8 | 1.4 |
| 5455 | 0.4 | −1.0 | −1.7 | 10.1 |
| 5457 | 12.1 | 16.8 | −0.9 | 4.8 |
| 5459 | −0.4 | 6.2 | 11.3 | 5.6 |
| 5532 | −10.5 | 5.9 | 1.4 | 7.6 |
| 5548 | −14.3 | 24.5 | −1.2 | 6.1 |
| 5764 | −16 | −1.5 | −1.7 | 6.5 |
| 5770 | −18.7 | 3.9 | −3.2 | 2.6 |
| 5774 | −3.5 | 6.2 | 0.0 | 5.3 |
| 5776 | 7.2 | 3.6 | 5.5 | 5 |
| 5780 | 20.8 | 7.8 | 27.2 | 8 |
| 5784 | −15 | 10.2 | 3.1 | 4.3 |
| 5875 | −7.7 | 20.6 | −16.4 | 3.6 |
| 5920 | −9.9 | 5.4 | −3.5 | 8.2 |
| 6011 | −6.6 | 5.0 | −7.6 | 7.6 |
| 6054 | −7.9 | −1.1 | −5.8 | 6.7 |
| 6056 | −9.9 | 6.6 | −1.7 | 9.3 |
| 6060 | 1.2 | 13.5 | 8.8 | 3.4 |
| 6061 | 5.1 | −1.6 | 15.6 | 3.6 |
| 6349 | −7.1 | −7.3 | 8.3 | 2.5 |
| 6357 | −2.7 | 2.0 | 1.1 | 2.8 |
| 6418 | 3.1 | 23.6 | 1.8 | 1.1 |
| 6524 | 2.9 | 2.9 | 8.9 | 9.2 |
| 6532 | 9.3 | −0.8 | 14.5 | 7.3 |
| 6611 | −6.7 | 5.0 | 19.9 | 1.5 |
| 6617 | −2.8 | −14.6 | 15.4 | 7.7 |
| 6621 | 21.2 | 3.0 | 9.5 | 5.6 |
| 6625 | 1 | 11.0 | 13.6 | 4.8 |
| 6627 | −8 | 3.9 | 0.1 | 3.7 |
| 6636 | −12.8 | 11.6 | −9.6 | 1.5 |
| 6799 | −11 | −4.0 | −1.9 | 2.5 |
| 6801 | −11.7 | −2.7 | −4.3 | 5.5 |
| 6803 | −2.8 | 71.1 | 7.4 | 5.5 |
| 6807 | 12.9 | −2.6 | 13.3 | 1.9 |
| 6818 | −9.2 | 1.7 | −6.4 | 8.6 |
| 6849 | −7.8 | 18.4 | −3.5 | 6.2 |
| 6850 | −4.4 | 26.3 | −9.2 | 2.2 |
| 6852 | −3.2 | 2.5 | 1.9 | 3.8 |
| 6854 | −14.2 | −8.0 | −15.1 | 3.7 |
| 6936 | −5.7 | −4.6 | −5.4 | 3.7 |
| 7062 | −7.4 | 1.6 | −8.9 | 1.4 |
| 7124 | −6.8 | 2.3 | −5.7 | 5.2 |
| 7229 | 0.3 | −8.5 | 14.7 | 6.8 |
| 7236 | −4.7 | −4.4 | −15.0 | 6.7 |
| 7241 | 5.2 | 3.6 | 8.6 | 5.3 |
| 7363 | −5.8 | 0.4 | −1.1 | 4.1 |
| 7368 | 8.9 | −1.6 | 10.2 | 1.5 |
| 7408 | −18.2 | 20.1 | −14.8 | 2.5 |
| 7413 | −7.3 | 0.2 | −15.9 | 6.1 |
| 7471 | 5.2 | 7.0 | −5.4 | 5.3 |
| 7516 | −18.1 | −8.8 | 0.8 | 2.9 |
| 7531 | −0.7 | −3.0 | −12.7 | 3.3 |
| 7589 | 9.1 | 33.3 | 8.0 | 6.1 |
| 7865 | 2.7 | −7.5 | 22.0 | 2.5 |
| 7868 | −0.5 | 19.9 | −1.0 | 8.4 |
| 7875 | −3.3 | −3.6 | −4.7 | 5 |
| 8056 | 1.3 | −0.5 | 4.7 | 5.8 |
| 8087 | 0.8 | 2.5 | 12.6 | 11 |
| 8201 | −4.9 | 4.2 | −2.3 | 6.6 |
| 8207 | −20.3 | −7.4 | 17.4 | 2 |
| 8208 | −2.5 | 14.2 | 13.6 | 0.4 |
| 8247 | −7.4 | 58.4 | −6.9 | 2.2 |
| 8248 | −16 | 21.0 | −8.7 | 11 |
| 8293 | −7.8 | −3.8 | −8.0 | 3 |
| 8294 | 1.9 | 0.4 | 5.9 | 6.1 |
| 8331 | 5.8 | −1.8 | 12.2 | 5.5 |
| 8363 | 2.1 | −4.7 | −8.9 | 4.5 |
| 8567 | −13.2 | 2.3 | −0.7 | 6.7 |
| 8617 | −9.1 | 0.7 | 4.6 | 5.4 |
| 8618 | −3.9 | 23.8 | −5.4 | 7.9 |
| 8651 | 5.9 | 8.6 | −2.1 | 4.1 |
| 8659 | −16.7 | −6.5 | 5.2 | 2.4 |
| 8661 | −6.3 | −11.7 | −3.4 | 4.1 |
| 8708 | 3.7 | −9.1 | −16.1 | 5.2 |
| 8713 | −12.2 | −0.2 | 0.8 | 5.3 |
| 8780 | −1.9 | −3.0 | 12.6 | 3.4 |
| 8781 | −2 | −2.1 | 6.2 | 4.5 |
| 8788 | 4.8 | 5.7 | 4.1 | 3.5 |
| 8810 | −8.5 | 2.4 | −8.6 | 10.1 |
| 8843 | −7.7 | −7.1 | −19.9 | 7.9 |

[0178] While the foregoing disclosure has been described in some detail for purposes of clarity and understanding, it will be clear to one skilled in the art from a reading of this disclosure that various changes in form and detail can be made without departing from the true scope of the disclosure. For example, all the techniques and apparatus described above can be used in various combinations. All publications, patents, patent applications, and/or other documents cited in this application are incorporated by reference in their entirety for all purposes to the same extent as if each individual publication, patent, patent application, and/or other document were individually and separately indicated to be incorporated by reference for all purposes.

What is claimed is:

1. A composition comprising an antisense oligonucleotide capable of binding to son of sevenless 1 (SOS1) or son of sevenless 2 (SOS2) mRNA, wherein the antisense oligonucleotide comprises a sequence having at least 80%, 85%, or 90% similarity to one of the following sequences: SEQ ID NOs: 405, 406, 539, 540, 671, 732, 741, 742, 797, 976, 1076, 1077, 1083, 1086, 1198, 1224, 1279, 1360, 1370, 1507, 1508, 1516, 1519, 1601, 1609, 1811, 1836, 1843, 1844, 1868, 1939, 1942, 1943, 1944, 2465, 2473, 2490, 2498, 2600, 2606, 2688, 2701, 2703, 2908, 2974, 2984, 3007, 3016, 3034, 3078, 3104, 3279.3305, 3308, 3386, 3615, 3673, 3677, 3680, 3682, 3687, 3765, 3821, 3879, 3880, 3949, 4134, 4156, 4173, 4177, 4178, 4182, 4183, 4222, 4466, 4687, 4692, 4736, 4781, 4935, 5118, 5144, 5384, 5394, 5435, 5449, 5455, 5457, 5459, 5780, 6060, 6061, 6532, 6611, 6621, 6625, 6627, 6803, 7368, 7471, 7516, 7589, 7865, 8087, 8201, 8207, 8208, 8331, 8617, 8651, or 8659.

2. The composition of claim 1, wherein the antisense oligonucleotide comprises a sequence having at least 80%, 85%, or 90% similarity to one of the following sequences: SEQ ID NOs: 405, 406, 539, 741, 742, 976, 1076, 1077, 1083, 1086, 1609, 1811, 1868, 1939, 1942, 1943, 1944, 2465, 2473, 2490, 2688, 2703, 2908, 2974, 2984, 3007, 3104, 3279, 3673, 3677, 3680, 3682, 3687, 3765, 4134, 4156, 4173, 4178, 4466, 4781, 4935, 5118, 5435, 5780, 6060, 6532, 6625, 6803, 7368, 7589, 7865, 8208, 8331, or 8651.

3. A composition comprising an antisense oligonucleotide capable of binding to son of sevenless 1 (SOS1) or son of sevenless 2 (SOS2) mRNA, wherein the antisense oligonucleotide comprises a sequence having at least 8 consecutive nucleotides of one of the following sequences: SEQ ID NOs: 405, 406, 539, 540, 671, 732, 741, 742, 797, 976, 1076, 1077, 1083, 1086, 1198, 1224, 1279, 1360, 1370, 1507, 1508, 1516, 1519, 1601, 1609, 1811, 1836, 1843, 1844, 1868, 1939, 1942, 1943, 1944, 2465, 2473, 2490, 2498, 2600, 2606, 2688, 2701, 2703, 2908, 2974, 2984, 3007, 3016, 3034, 3078, 3104, 3279, 3305, 3308, 3386, 3615, 3673, 3677, 3680, 3682, 3687, 3765, 3821, 3879, 3880, 3949, 4134, 4156, 4173, 4177, 4178, 4182, 4183, 4222, 4466, 4687, 4692, 4736, 4781, 4935, 5118, 5144, 5384, 5394, 5435, 5449, 5455, 5457, 5459, 5780, 6060, 6061, 6532, 6611, 6621, 6625, 6627, 6803, 7368, 7471, 7516, 7589, 7865, 8087, 8201, 8207, 8208, 8331, 8617, 8651, or 8659.

4. The composition of claim 3, wherein the antisense oligonucleotide comprises a sequence having at least 80%, 85%, or 90% similarity to one of the following sequences: SEQ ID NOs: 405, 406, 539, 741, 742, 976, 1076, 1077, 1083, 1086, 1609, 1811, 1868, 1939, 1942, 1943, 1944, 2465, 2473, 2490, 2688, 2703, 2908, 2974, 2984, 3007, 3104, 3279, 3673, 3677, 3680, 3682, 3687, 3765, 4134, 4156, 4173, 4178, 4466, 4781, 4935, 5118, 5435, 5780, 6060, 6532, 6625, 6803, 7368, 7589, 7865, 8208, 8331, or 8651.

5. The composition of claim 1 or claim 3, wherein the antisense oligonucleotide specifically binds to the SOS1 mRNA.

6. The composition of claim 1 or claim 3, wherein the antisense oligonucleotide specifically binds to the SOS2 mRNA.

7. The composition of any one of claims 1-6, wherein the antisense oligonucleotide downregulates mRNA expression of SOS1 or SOS2 by at least 30%.

8. The composition of any one of claims 1-6, wherein the antisense oligonucleotide downregulates mRNA expression of SOS1 and SOS2 each by at least 30%.

9. The composition of any one of claims 1-6, wherein the antisense oligonucleotide comprises 12-30 nucleotides in length.

10. The composition of any one of claims 1-9, wherein the antisense oligonucleotide comprises a gap segment and a wing segment.

11. The composition of claim 10, wherein the antisense oligonucleotide comprises 5′-wing segment and 3′-wing segment.

12. The composition of claim 11, wherein the each of the 5′-wing segment and 3′-wing segment is three linked nucleotides.

13. The composition of any one of claims 1-12, wherein the antisense oligonucleotide comprises at least one 2′-modified nucleoside, at least one modified internucleotide linkage, or at least one inverted abasic moiety.

14. The composition of claim 13, wherein the at least one 2′ modified nucleotide: comprises 2′-O-methyl, 2′-O-methoxyethyl (2′-O-MOE), 2-O-aminopropyl, 2′-deoxy, 2′-deoxy-2′-fluoro, 2′-O-aminopropyl (2′-O-AP), 2-O-dimethylaminoethyl (2′-O-DMAOE), 2′-O-dimethylaminopropyl (2′-O-DMAP), 2′-O-dimethylaminoethyloxyethyl (2′-O-DMAEOE), or 2′-O—N-methylacetamido (2′-O-NMA) modified nucleotide; comprises locked nucleic acid (LNA) or constrained ethyl (cEt) sugar, ethylene nucleic acid (ENA); or comprises a combination thereof.

15. The composition of claim 13, wherein the at least one modified internucleotide linkage comprises a phosphorothioate linkage or a phosphorodithioate linkage.

16. The composition of any one of claims 1-13, wherein the antisense oligonucleotide comprises a phosphorodiamidate morpholino oligomer (PMO), locked nucleic acid (LNA) or constrained ethyl (cEt) sugar.

17. The composition of any one of claims 1-16, wherein the antisense oligonucleotide is conjugated with a peptide, antibody, lipid, carbohydrate or a polymer.

18. The composition of claim 17, wherein the antisense oligonucleotide is conjugated with a peptide, antibody, lipid, carbohydrate or a polymer via a linker.

19. The composition of any one of claims 1-18, wherein the composition comprises a combination of an antisense oligonucleotide specifically binds to the SOS1 mRNA and an antisense oligonucleotide specifically binds to the SOS2 mRNA.

20. The composition of any one of claims 1-19, wherein the composition comprises an antisense oligonucleotide capable of binding to both SOS1 mRNA and SOS2 mRNA.

21. The composition of any one of claims 1-20, wherein the composition further comprises an excipient.

22. The composition of any one of claims 1-21, wherein the composition comprises at least one active ingredient.

23. The composition of any one of claims 1-22, wherein the composition is formulated for parenteral or nasal administration.

24. A method of modulating KRAS-mediated signaling pathway in a cancer cell in need of, comprising:
treating the cancer cell with a composition comprising antisense oligonucleotide capable of binding to son of sevenless 1 (SOS1) or son of sevenless 2 (SOS2) mRNA, thereby reducing expression of SOS1 or SOS2 protein or mRNA in the cancer cell.

25. The method of claim 24, wherein the cancer cell is a lung cancer cell, a pancreatic cancer cell, or a colon cancer cell.

26. The method of any one of claims 24-25, wherein the antisense oligonucleotide comprises a sequence having at least 80%, 85%, or 90% similarity to one of the following sequences: SEQ ID NOs: 405, 406, 539, 540, 671, 732, 741, 742, 797, 976, 1076, 1077, 1083, 1086, 1198, 1224, 1279, 1360, 1370, 1507, 1508, 1516, 1519, 1601, 1609, 1811, 1836, 1843, 1844, 1868, 1939, 1942, 1943, 1944, 2465, 2473, 2490, 2498, 2600, 2606, 2688, 2701, 2703, 2908, 2974, 2984, 3007, 3016, 3034, 3078, 3104, 3279, 3305, 3308, 3386, 3615, 3673, 3677, 3680, 3682, 3687, 3765, 3821, 3879, 3880, 3949, 4134, 4156, 4173, 4177, 4178, 4182, 4183, 4222, 4466, 4687, 4692, 4736, 4781, 4935, 5118, 5144, 5384, 5394, 5435, 5449, 5455, 5457, 5459, 5780, 6060, 6061, 6532, 6611, 6621, 6625, 6627, 6803, 7368, 7471, 7516, 7589, 7865, 8087, 8201, 8207, 8208, 8331, 8617, 8651, or 8659.

27. The method of claim 26, wherein the antisense oligonucleotide comprises a sequence having at least 80%, 85%, or 90% similarity to one of the following sequences: SEQ ID NOs: 405, 406, 539, 741, 742, 976, 1076, 1077, 1083, 1086, 1609, 1811, 1868, 1939, 1942, 1943, 1944, 2465, 2473, 2490, 2688, 2703, 2908, 2974, 2984, 3007, 3104, 3279, 3673, 3677, 3680, 3682, 3687, 3765, 4134, 4156, 4173, 4178, 4466, 4781, 4935, 5118, 5435, 5780, 6060, 6532, 6625, 6803, 7368, 7589, 7865, 8208, 8331, or 8651.

28. The method of any one of claims 24-25, wherein the antisense oligonucleotide comprises a sequence having at least 8 consecutive nucleotides of one of the following sequences: SEQ ID NOs: 405, 406, 539, 540, 671, 732, 741, 742, 797, 976, 1076, 1077, 1083, 1086, 1198, 1224, 1279, 1360, 1370, 1507, 1508, 1516, 1519, 1601, 1609, 1811, 1836, 1843, 1844, 1868, 1939, 1942, 1943, 1944, 2465, 2473, 2490, 2498, 2600, 2606, 2688, 2701, 2703, 2908, 2974, 2984, 3007, 3016, 3034, 3078, 3104, 3279, 3305, 3308, 3386, 3615, 3673, 3677, 3680, 3682, 3687, 3765, 3821, 3879, 3880, 3949, 4134, 4156, 4173, 4177, 4178, 4182, 4183, 4222, 4466, 4687, 4692, 4736, 4781, 4935, 5118, 5144, 5384, 5394, 5435, 5449, 5455, 5457, 5459, 5780, 6060, 6061, 6532, 6611, 6621, 6625, 6627, 6803, 7368, 7471, 7516, 7589, 7865, 8087, 8201, 8207, 8208, 8331, 8617, 8651, or 8659.

29. The method of claim 28, wherein the antisense oligonucleotide comprises a sequence having at least 80%, 85%, or 90% similarity to one of the following sequences: SEQ ID NOs: 405, 406, 539, 741, 742, 976, 1076, 1077, 1083, 1086, 1609, 1811, 1868, 1939, 1942, 1943, 1944, 2465, 2473, 2490, 2688, 2703, 2908, 2974, 2984, 3007, 3104, 3279, 3673, 3677, 3680, 3682, 3687, 3765, 4134, 4156, 4173, 4178, 4466, 4781, 4935, 5118, 5435, 5780, 6060, 6532, 6625, 6803, 7368, 7589, 7865, 8208, 8331, or 8651.

30. The method of any one of claims 24-29, wherein the composition comprises a combination of an antisense oligonucleotide specifically binds to SOS1 and an antisense oligonucleotide specifically binds to the SOS2 mRNA.

31. The method of any one of claims 24-30, wherein the composition comprises an antisense oligonucleotide capable of binding to both SOS1 mRNA and SOS2 mRNA.

32. The method of any one of claims 24-31, wherein the antisense oligonucleotide comprises at least one 2′-modified nucleoside, at least one modified internucleotide linkage, or at least one inverted abasic moiety.

33. The method of any one of claims 24-32, wherein the at least one 2′ modified nucleotide: comprises 2′-O-methyl, 2′-O-methoxyethyl (2′-O-MOE), 2′-O-aminopropyl, 2′-deoxy, 2′-deoxy-2′-fluoro, 2′-O-aminopropyl (2′-O-AP), 2′-O-dimethylaminoethyl (2′-O-DMAOE), 2′-O-dimethylaminopropyl (2′-O-DMAP), 2′-O-dimethylaminoethyloxyethyl (2′-O-DMAEOE), or 2′-O—N-methylacetamido (2′-O-NMA) modified nucleotide; comprises locked nucleic acid (LNA), locked nucleic acid (LNA), constrained ethyl (cEt) sugar or ethylene nucleic acid (ENA); or comprises a combination thereof.

34. The method of any one of claims 24-33, wherein the expression of SOS1 or SOS2 protein or mRNA is reduced at least 30%, at least 40%, at least 50% after the treatment.

35. The method of any one of claims 24-33, wherein the expression of SOS1 and SOS2 protein or mRNA is each reduced at least 30%, at least 40%, at least 50% after the treatment.

36. A method of treating a cancer in a subject in need thereof, the method comprising: administering the subject a composition of any one of claims 1-23, thereby treating the cancer in the subject.

37. The method of claim 36, wherein the cancer is associated with an abnormality of KRAS-mediated signaling pathway.

38. The method of claim 37, wherein the caner is a lung cancer, a pancreatic cancer, or a colon cancer.

39. The method of claim 36, wherein the composition is administered to the subject in a dose and schedule sufficient to increase survival rate of the subject at least 5%.

40. The method of claim 36, the composition is administered to the subject in a dose and schedule sufficient to inhibit growth of the tumor.

The application's sequence listing, which the Patent Office published only in electronic form, follows.

SEQUENCE LISTING (35505 sequences)

SEQ ID NO: 1 - DNA, 14 bp, Artificial Sequence
  Description of Artificial Sequence: Synthetic oligonucleotide
acctgctcgctact

SEQ ID NO: 2 - DNA, 14 bp, Artificial Sequence
  Description of Artificial Sequence: Synthetic oligonucleotide
aacctgctcgctac

SEQ ID NO: 3 - DNA, 14 bp, Artificial Sequence
  Description of Artificial Sequence: Synthetic oligonucleotide
gaacctgctcgcta

SEQ ID NO: 4 - DNA, 14 bp, Artificial Sequence
  Description of Artificial Sequence: Synthetic oligonucleotide
tgaacctgctcgct

SEQ ID NO: 5 - DNA, 14 bp, Artificial Sequence
  Description of Artificial Sequence: Synthetic oligonucleotide
ctgaacctgctcgc

SEQ ID NO: 6 - DNA, 14 bp, Artificial Sequence
  Description of Artificial Sequence: Synthetic oligonucleotide
actgaacctgctcg

SEQ ID NO: 7 - DNA, 14 bp, Artificial Sequence
  Description of Artificial Sequence: Synthetic oligonucleotide
aactgaacctgctc

SEQ ID NO: 8 - DNA, 14 bp, Artificial Sequence
  Description of Artificial Sequence: Synthetic oligonucleotide
gaactgaacctgct

SEQ ID NO: 9 - DNA, 14 bp, Artificial Sequence
  Description of Artificial Sequence: Synthetic oligonucleotide
cgaactgaacctgc

SEQ ID NO: 10 - DNA, 14 bp, Artificial Sequence
  Description of Artificial Sequence: Synthetic oligonucleotide
gcgaactgaacctg

SEQ ID NO: 11 - DNA, 14 bp, Artificial Sequence
  Description of Artificial Sequence: Synthetic oligonucleotide
agcgaactgaacct

SEQ ID NO: 12 - skipped

SEQ ID NO: 13 - DNA, 14 bp, Artificial Sequence
  Description of Artificial Sequence: Synthetic oligonucleotide
ctagcgaactgaac

SEQ ID NO: 14 - DNA, 14 bp, Artificial Sequence
  Description of Artificial Sequence: Synthetic oligonucleotide
actagcgaactgaa

SEQ ID NO: 15 - DNA, 14 bp, Artificial Sequence
  Description of Artificial Sequence: Synthetic oligonucleotide
tactagcgaactga

SEQ ID NO: 16 - DNA, 14 bp, Artificial Sequence
  Description of Artificial Sequence: Synthetic oligonucleotide
ctactagcgaactg

SEQ ID NO: 17 - DNA, 14 bp, Artificial Sequence
  Description of Artificial Sequence: Synthetic oligonucleotide
cctactagcgaact

SEQ ID NO: 18 - DNA, 14 bp, Artificial Sequence
  Description of Artificial Sequence: Synthetic oligonucleotide
tcctactagcgaac

SEQ ID NO: 19 - DNA, 14 bp, Artificial Sequence
  Description of Artificial Sequence: Synthetic oligonucleotide
ttcctactagcgaa

SEQ ID NO: 20 - DNA, 14 bp, Artificial Sequence
  Description of Artificial Sequence: Synthetic oligonucleotide
cttcctactagcga

SEQ ID NO: 21 - DNA, 14 bp, Artificial Sequence
  Description of Artificial Sequence: Synthetic oligonucleotide
gcttcctactagcg

SEQ ID NO: 22 - DNA, 14 bp, Artificial Sequence
  Description of Artificial Sequence: Synthetic oligonucleotide
agcttcctactagc

SEQ ID NO: 23 - DNA, 14 bp, Artificial Sequence
  Description of Artificial Sequence: Synthetic oligonucleotide
gagcttcctactag

SEQ ID NO: 24 - DNA, 14 bp, Artificial Sequence
  Description of Artificial Sequence: Synthetic oligonucleotide
ggagcttcctacta

SEQ ID NO: 25 - DNA, 14 bp, Artificial Sequence
  Description of Artificial Sequence: Synthetic oligonucleotide
tggagcttcctact

SEQ ID NO: 26 - DNA, 14 bp, Artificial Sequence
  Description of Artificial Sequence: Synthetic oligonucleotide
ctggagcttcctac

SEQ ID NO: 27 - DNA, 14 bp, Artificial Sequence
  Description of Artificial Sequence: Synthetic oligonucleotide
gctggagcttccta

SEQ ID NO: 28 - DNA, 14 bp, Artificial Sequence
  Description of Artificial Sequence: Synthetic oligonucleotide
cgctggagcttcct

SEQ ID NO: 29 - DNA, 14 bp, Artificial Sequence
  Description of Artificial Sequence: Synthetic oligonucleotide
gcgctggagcttcc

SEQ ID NO: 30 - DNA, 14 bp, Artificial Sequence
  Description of Artificial Sequence: Synthetic oligonucleotide
agcgctggagcttc

SEQ ID NO: 31 - DNA, 14 bp, Artificial Sequence
  Description of Artificial Sequence: Synthetic oligonucleotide
tagcgctggagctt

SEQ ID NO: 32 - DNA, 14 bp, Artificial Sequence
  Description of Artificial Sequence: Synthetic oligonucleotide
gtagcgctggagct

SEQ ID NO: 33 - DNA, 14 bp, Artificial Sequence
  Description of Artificial Sequence: Synthetic oligonucleotide
tgtagcgctggagc

SEQ ID NO: 34 - DNA, 14 bp, Artificial Sequence
  Description of Artificial Sequence: Synthetic oligonucleotide
gtgtagcgctggag

SEQ ID NO: 35 - DNA, 14 bp, Artificial Sequence
  Description of Artificial Sequence: Synthetic oligonucleotide
ggtgtagcgctgga

SEQ ID NO: 36 - DNA, 14 bp, Artificial Sequence
  Description of Artificial Sequence: Synthetic oligonucleotide
cggtgtagcgctgg

SEQ ID NO: 37 - skipped

SEQ ID NO: 38 - DNA, 14 bp, Artificial Sequence
  Description of Artificial Sequence: Synthetic oligonucleotide
gccggtgtagcgct

SEQ ID NO: 39 - DNA, 14 bp, Artificial Sequence
  Description of Artificial Sequence: Synthetic oligonucleotide
cgccggtgtagcgc

SEQ ID NO: 40 - DNA, 14 bp, Artificial Sequence
  Description of Artificial Sequence: Synthetic oligonucleotide
ccgccggtgtagcg

SEQ ID NO: 41 - DNA, 14 bp, Artificial Sequence
  Description of Artificial Sequence: Synthetic oligonucleotide
gccgccggtgtagc

SEQ ID NO: 42 - DNA, 14 bp, Artificial Sequence
  Description of Artificial Sequence: Synthetic oligonucleotide
cgccgccggtgtag

SEQ ID NO: 43 - DNA, 14 bp, Artificial Sequence
  Description of Artificial Sequence: Synthetic oligonucleotide
ccgccgccggtgta

SEQ ID NO: 44 - DNA, 14 bp, Artificial Sequence
  Description of Artificial Sequence: Synthetic oligonucleotide
gccgccgccggtgt

SEQ ID NO: 45 - DNA, 14 bp, Artificial Sequence
  Description of Artificial Sequence: Synthetic oligonucleotide
cgccgccgccggtg

SEQ ID NO: 46 - DNA, 14 bp, Artificial Sequence
  Description of Artificial Sequence: Synthetic oligonucleotide
ccgccgccgccggt

SEQ ID NO: 47 - DNA, 14 bp, Artificial Sequence
  Description of Artificial Sequence: Synthetic oligonucleotide
accgccgccgccgg

SEQ ID NO: 48 - DNA, 14 bp, Artificial Sequence
  Description of Artificial Sequence: Synthetic oligonucleotide
caccgccgccgccg

SEQ ID NO: 49 - DNA, 14 bp, Artificial Sequence
  Description of Artificial Sequence: Synthetic oligonucleotide
ccaccgccgccgcc

SEQ ID NO: 50 - DNA, 14 bp, Artificial Sequence
  Description of Artificial Sequence: Synthetic oligonucleotide
gccaccgccgccgc

SEQ ID NO: 51 - DNA, 14 bp, Artificial Sequence
  Description of Artificial Sequence: Synthetic oligonucleotide
cgccaccgccgccg

SEQ ID NO: 52 - DNA, 14 bp, Artificial Sequence
  Description of Artificial Sequence: Synthetic oligonucleotide
ccgccaccgccgcc

SEQ ID NO: 53 - DNA, 14 bp, Artificial Sequence
  Description of Artificial Sequence: Synthetic oligonucleotide
gccgccaccgccgc

SEQ ID NO: 54 - DNA, 14 bp, Artificial Sequence
  Description of Artificial Sequence: Synthetic oligonucleotide
cgccgccaccgccg

SEQ ID NO: 55 - DNA, 14 bp, Artificial Sequence
  Description of Artificial Sequence: Synthetic oligonucleotide
ccgccgccaccgcc

SEQ ID NO: 56 - DNA, 14 bp, Artificial Sequence
  Description of Artificial Sequence: Synthetic oligonucleotide
gccgccgccaccgc

SEQ ID NO: 57 - DNA, 14 bp, Artificial Sequence
  Description of Artificial Sequence: Synthetic oligonucleotide
cgccgccgccaccg

SEQ ID NO: 58 - DNA, 14 bp, Artificial Sequence
  Description of Artificial Sequence: Synthetic oligonucleotide
ccgccgccgccacc

SEQ ID NO: 59 - DNA, 14 bp, Artificial Sequence
  Description of Artificial Sequence: Synthetic oligonucleotide
gccgccgccgccac

SEQ ID NO: 60 - DNA, 14 bp, Artificial Sequence
  Description of Artificial Sequence: Synthetic oligonucleotide
ggccgccgccgcca

SEQ ID NO: 61 - DNA, 14 bp, Artificial Sequence
  Description of Artificial Sequence: Synthetic oligonucleotide
cggccgccgccgcc

SEQ ID NO: 62 - DNA, 14 bp, Artificial Sequence
  Description of Artificial Sequence: Synthetic oligonucleotide
gcggccgccgccgc

SEQ ID NO: 63 - DNA, 14 bp, Artificial Sequence
  Description of Artificial Sequence: Synthetic oligonucleotide
cgcggccgccgccg

SEQ ID NO: 64 - DNA, 14 bp, Artificial Sequence
  Description of Artificial Sequence: Synthetic oligonucleotide
ccgcggccgccgcc

SEQ ID NO: 65 - DNA, 14 bp, Artificial Sequence
  Description of Artificial Sequence: Synthetic oligonucleotide
gccgcggccgccgc

SEQ ID NO: 66 - DNA, 14 bp, Artificial Sequence
  Description of Artificial Sequence: Synthetic oligonucleotide
cgccgcggccgccg

SEQ ID NO: 67 - DNA, 14 bp, Artificial Sequence
  Description of Artificial Sequence: Synthetic oligonucleotide
ccgccgcggccgcc

SEQ ID NO: 68 - DNA, 14 bp, Artificial Sequence
  Description of Artificial Sequence: Synthetic oligonucleotide
gccgccgcggccgc

SEQ ID NO: 69 - DNA, 14 bp, Artificial Sequence
  Description of Artificial Sequence: Synthetic oligonucleotide
tgccgccgcggccg

SEQ ID NO: 70 - DNA, 14 bp, Artificial Sequence
  Description of Artificial Sequence: Synthetic oligonucleotide
gtgccgccgcggcc

SEQ ID NO: 71 - DNA, 14 bp, Artificial Sequence
  Description of Artificial Sequence: Synthetic oligonucleotide
ggtgccgccgcggc

SEQ ID NO: 72 - DNA, 14 bp, Artificial Sequence
  Description of Artificial Sequence: Synthetic oligonucleotide
aggtgccgccgcgg

SEQ ID NO: 73 - DNA, 14 bp, Artificial Sequence
  Description of Artificial Sequence: Synthetic oligonucleotide
gaggtgccgccgcg

SEQ ID NO: 74 - DNA, 14 bp, Artificial Sequence
  Description of Artificial Sequence: Synthetic oligonucleotide
tgaggtgccgccgc

SEQ ID NO: 75 - DNA, 14 bp, Artificial Sequence
  Description of Artificial Sequence: Synthetic oligonucleotide
ctgaggtgccgccg

SEQ ID NO: 76 - DNA, 14 bp, Artificial Sequence
  Description of Artificial Sequence: Synthetic oligonucleotide
cctgaggtgccgcc

SEQ ID NO: 77 - DNA, 14 bp, Artificial Sequence
  Description of Artificial Sequence: Synthetic oligonucleotide
ccctgaggtgccgc

SEQ ID NO: 78 - DNA, 14 bp, Artificial Sequence
  Description of Artificial Sequence: Synthetic oligonucleotide
gccctgaggtgccg

SEQ ID NO: 79 - DNA, 14 bp, Artificial Sequence
  Description of Artificial Sequence: Synthetic oligonucleotide
tgccctgaggtgcc

SEQ ID NO: 80 - DNA, 14 bp, Artificial Sequence
  Description of Artificial Sequence: Synthetic oligonucleotide
ctgccctgaggtgc

SEQ ID NO: 81 - DNA, 14 bp, Artificial Sequence
  Description of Artificial Sequence: Synthetic oligonucleotide
gctgccctgaggtg

SEQ ID NO: 82 - DNA, 14 bp, Artificial Sequence
  Description of Artificial Sequence: Synthetic oligonucleotide
ggctgccctgaggt

SEQ ID NO: 83 - DNA, 14 bp, Artificial Sequence
  Description of Artificial Sequence: Synthetic oligonucleotide
tggctgccctgagg

SEQ ID NO: 84 - DNA, 14 bp, Artificial Sequence
  Description of Artificial Sequence: Synthetic oligonucleotide
ctggctgccctgag

SEQ ID NO: 85 - DNA, 14 bp, Artificial Sequence
  Description of Artificial Sequence: Synthetic oligonucleotide
tctggctgccctga

SEQ ID NO: 86 - DNA, 14 bp, Artificial Sequence
  Description of Artificial Sequence: Synthetic oligonucleotide
atctggctgccctg

SEQ ID NO: 87 - DNA, 14 bp, Artificial Sequence
  Description of Artificial Sequence: Synthetic oligonucleotide
aatctggctgccct

SEQ ID NO: 88 - DNA, 14 bp, Artificial Sequence
  Description of Artificial Sequence: Synthetic oligonucleotide
gaatctggctgccc

SEQ ID NO: 89 - DNA, 14 bp, Artificial Sequence
  Description of Artificial Sequence: Synthetic oligonucleotide
ggaatctggctgcc

SEQ ID NO: 90 - DNA, 14 bp, Artificial Sequence
  Description of Artificial Sequence: Synthetic oligonucleotide
gggaatctggctgc

SEQ ID NO: 91 - DNA, 14 bp, Artificial Sequence
  Description of Artificial Sequence: Synthetic oligonucleotide
ggggaatctggctg

SEQ ID NO: 92 - DNA, 14 bp, Artificial Sequence
  Description of Artificial Sequence: Synthetic oligonucleotide
tggggaatctggct

SEQ ID NO: 93 - DNA, 14 bp, Artificial Sequence
  Description of Artificial Sequence: Synthetic oligonucleotide
ttggggaatctggc

SEQ ID NO: 94 - DNA, 14 bp, Artificial Sequence
  Description of Artificial Sequence: Synthetic oligonucleotide
gttggggaatctgg

SEQ ID NO: 95 - DNA, 14 bp, Artificial Sequence
  Description of Artificial Sequence: Synthetic oligonucleotide
tgttggggaatctg

SEQ ID NO: 96 - DNA, 14 bp, Artificial Sequence
  Description of Artificial Sequence: Synthetic oligonucleotide
ttgttggggaatct

SEQ ID NO: 97 - DNA, 14 bp, Artificial Sequence
  Description of Artificial Sequence: Synthetic oligonucleotide
gttgttggggaatc

SEQ ID NO: 98 - DNA, 14 bp, Artificial Sequence
  Description of Artificial Sequence: Synthetic oligonucleotide
cgttgttggggaat

SEQ ID NO: 99 - DNA, 14 bp, Artificial Sequence
  Description of Artificial Sequence: Synthetic oligonucleotide
tcgttgttggggaa

SEQ ID NO: 100 - DNA, 14 bp, Artificial Sequence
  Description of Artificial Sequence: Synthetic oligonucleotide
gtcgttgttgggga

SEQ ID NO: 101 - DNA, 14 bp, Artificial Sequence
  Description of Artificial Sequence: Synthetic oligonucleotide
ggtcgttgttgggg

SEQ ID NO: 102 - DNA, 14 bp, Artificial Sequence
  Description of Artificial Sequence: Synthetic oligonucleotide
aggtcgttgttggg

SEQ ID NO: 103 - DNA, 14 bp, Artificial Sequence
  Description of Artificial Sequence: Synthetic oligonucleotide
gaggtcgttgttgg

SEQ ID NO: 104 - skipped

SEQ ID NO: 105 - DNA, 14 bp, Artificial Sequence
  Description of Artificial Sequence: Synthetic oligonucleotide
cggaggtcgttgtt

SEQ ID NO: 106 - DNA, 14 bp, Artificial Sequence
  Description of Artificial Sequence: Synthetic oligonucleotide
ccggaggtcgttgt

SEQ ID NO: 107 - skipped

SEQ ID NO: 108 - DNA, 14 bp, Artificial Sequence
  Description of Artificial Sequence: Synthetic oligonucleotide
gaccggaggtcgtt

SEQ ID NO: 109 - skipped

SEQ ID NO: 110 - DNA, 14 bp, Artificial Sequence
  Description of Artificial Sequence: Synthetic oligonucleotide
aggaccggaggtcg

SEQ ID NO: 111 - DNA, 14 bp, Artificial Sequence
  Description of Artificial Sequence: Synthetic oligonucleotide
aaggaccggaggtc

SEQ ID NO: 112 - DNA, 14 bp, Artificial Sequence
  Description of Artificial Sequence: Synthetic oligonucleotide
gaaggaccggaggt

SEQ ID NO: 113 - DNA, 14 bp, Artificial Sequence
  Description of Artificial Sequence: Synthetic oligonucleotide
ggaaggaccggagg

SEQ ID NO: 114 - DNA, 14 bp, Artificial Sequence
  Description of Artificial Sequence: Synthetic oligonucleotide
gggaaggaccggag

SEQ ID NO: 115 - DNA, 14 bp, Artificial Sequence
  Description of Artificial Sequence: Synthetic oligonucleotide
ggggaaggaccgga

SEQ ID NO: 116 - DNA, 14 bp, Artificial Sequence
  Description of Artificial Sequence: Synthetic oligonucleotide
aggggaaggaccgg

SEQ ID NO: 117 - DNA, 14 bp, Artificial Sequence
  Description of Artificial Sequence: Synthetic oligonucleotide
aaggggaaggaccg

SEQ ID NO: 118 - DNA, 14 bp, Artificial Sequence
  Description of Artificial Sequence: Synthetic oligonucleotide
gaaggggaaggacc

SEQ ID NO: 119 - DNA, 14 bp, Artificial Sequence
  Description of Artificial Sequence: Synthetic oligonucleotide
ggaaggggaaggac

SEQ ID NO: 120 - DNA, 14 bp, Artificial Sequence
  Description of Artificial Sequence: Synthetic oligonucleotide
gggaaggggaagga

SEQ ID NO: 121 - DNA, 14 bp, Artificial Sequence
  Description of Artificial Sequence: Synthetic oligonucleotide
ggggaaggggaagg

SEQ ID NO: 122 - DNA, 14 bp, Artificial Sequence
  Description of Artificial Sequence: Synthetic oligonucleotide
cggggaaggggaag

SEQ ID NO: 123 - DNA, 14 bp, Artificial Sequence
  Description of Artificial Sequence: Synthetic oligonucleotide
gcggggaaggggaa

SEQ ID NO: 124 - DNA, 14 bp, Artificial Sequence
  Description of Artificial Sequence: Synthetic oligonucleotide
cgcggggaagggga

SEQ ID NO: 125 - DNA, 14 bp, Artificial Sequence
  Description of Artificial Sequence: Synthetic oligonucleotide
tcgcggggaagggg

SEQ ID NO: 126 - DNA, 14 bp, Artificial Sequence
  Description of Artificial Sequence: Synthetic oligonucleotide
ctcgcggggaaggg

SEQ ID NO: 127 - DNA, 14 bp, Artificial Sequence
  Description of Artificial Sequence: Synthetic oligonucleotide
tctcgcggggaagg

SEQ ID NO: 128 - DNA, 14 bp, Artificial Sequence
  Description of Artificial Sequence: Synthetic oligonucleotide
gtctcgcggggaag

SEQ ID NO: 129 - DNA, 14 bp, Artificial Sequence
  Description of Artificial Sequence: Synthetic oligonucleotide
ggtctcgcggggaa

SEQ ID NO: 130 - DNA, 14 bp, Artificial Sequence
  Description of Artificial Sequence: Synthetic oligonucleotide
aggtctcgcgggga

SEQ ID NO: 131 - skipped

SEQ ID NO: 132 - DNA, 14 bp, Artificial Sequence
  Description of Artificial Sequence: Synthetic oligonucleotide
ggaggtctcgcggg

SEQ ID NO: 133 - DNA, 14 bp, Artificial Sequence
  Description of Artificial Sequence: Synthetic oligonucleotide
cggaggtctcgcgg

SEQ ID NO: 134 - DNA, 14 bp, Artificial Sequence
  Description of Artificial Sequence: Synthetic oligonucleotide
gcggaggtctcgcg

SEQ ID NO: 135 - DNA, 14 bp, Artificial Sequence
  Description of Artificial Sequence: Synthetic oligonucleotide
ggcggaggtctcgc

SEQ ID NO: 136 - DNA, 14 bp, Artificial Sequence
  Description of Artificial Sequence: Synthetic oligonucleotide
gggcggaggtctcg

SEQ ID NO: 137 - DNA, 14 bp, Artificial Sequence
  Description of Artificial Sequence: Synthetic oligonucleotide
ggggcggaggtctc

SEQ ID NO: 138 - DNA, 14 bp, Artificial Sequence
  Description of Artificial Sequence: Synthetic oligonucleotide
tggggcggaggtct

SEQ ID NO: 139 - DNA, 14 bp, Artificial Sequence
  Description of Artificial Sequence: Synthetic oligonucleotide
ctggggcggaggtc

SEQ ID NO: 140 - DNA, 14 bp, Artificial Sequence
  Description of Artificial Sequence: Synthetic oligonucleotide
gctggggcggaggt

SEQ ID NO: 141 - DNA, 14 bp, Artificial Sequence
  Description of Artificial Sequence: Synthetic oligonucleotide
agctggggcggagg

SEQ ID NO: 142 - DNA, 14 bp, Artificial Sequence
  Description of Artificial Sequence: Synthetic oligonucleotide
gagctggggcggag

SEQ ID NO: 143 - DNA, 14 bp, Artificial Sequence
  Description of Artificial Sequence: Synthetic oligonucleotide
ggagctggggcgga

SEQ ID NO: 144 - DNA, 14 bp, Artificial Sequence
  Description of Artificial Sequence: Synthetic oligonucleotide
cggagctggggcgg

SEQ ID NO: 145 - DNA, 14 bp, Artificial Sequence
  Description of Artificial Sequence: Synthetic oligonucleotide
gcggagctggggcg

SEQ ID NO: 146 - DNA, 14 bp, Artificial Sequence
  Description of Artificial Sequence: Synthetic oligonucleotide
ggcggagctggggc

SEQ ID NO: 147 - DNA, 14 bp, Artificial Sequence
  Description of Artificial Sequence: Synthetic oligonucleotide
gggcggagctgggg

SEQ ID NO: 148 - DNA, 14 bp, Artificial Sequence
  Description of Artificial Sequence: Synthetic oligonucleotide
ggggcggagctggg

SEQ ID NO: 149 - DNA, 14 bp, Artificial Sequence
  Description of Artificial Sequence: Synthetic oligonucleotide
cggggcggagctgg

SEQ ID NO: 150 - DNA, 14 bp, Artificial Sequence
  Description of Artificial Sequence: Synthetic oligonucleotide
gcggggcggagctg

SEQ ID NO: 151 - DNA, 14 bp, Artificial Sequence
  Description of Artificial Sequence: Synthetic oligonucleotide
ggcggggcggagct

SEQ ID NO: 152 - DNA, 14 bp, Artificial Sequence
  Description of Artificial Sequence: Synthetic oligonucleotide
gggcggggcggagc

SEQ ID NO: 153 - DNA, 14 bp, Artificial Sequence
  Description of Artificial Sequence: Synthetic oligonucleotide
cgggcggggcggag

SEQ ID NO: 154 - DNA, 14 bp, Artificial Sequence
  Description of Artificial Sequence: Synthetic oligonucleotide
ccgggcggggcgga

SEQ ID NO: 155 - DNA, 14 bp, Artificial Sequence
  Description of Artificial Sequence: Synthetic oligonucleotide
cccgggcggggcgg

SEQ ID NO: 156 - DNA, 14 bp, Artificial Sequence
  Description of Artificial Sequence: Synthetic oligonucleotide
ccccgggcggggcg

SEQ ID NO: 157 - DNA, 14 bp, Artificial Sequence
  Description of Artificial Sequence: Synthetic oligonucleotide
gccccgggcggggc

SEQ ID NO: 158 - DNA, 14 bp, Artificial Sequence
  Description of Artificial Sequence: Synthetic oligonucleotide
agccccgggcgggg

SEQ ID NO: 159 - DNA, 14 bp, Artificial Sequence
  Description of Artificial Sequence: Synthetic oligonucleotide
gagccccgggcggg

SEQ ID NO: 160 - DNA, 14 bp, Artificial Sequence
  Description of Artificial Sequence: Synthetic oligonucleotide
agagccccgggcgg

SEQ ID NO: 161 - DNA, 14 bp, Artificial Sequence
  Description of Artificial Sequence: Synthetic oligonucleotide
aagagccccgggcg

SEQ ID NO: 162 - DNA, 14 bp, Artificial Sequence
  Description of Artificial Sequence: Synthetic oligonucleotide
caagagccccgggc

SEQ ID NO: 163 - DNA, 14 bp, Artificial Sequence
  Description of Artificial Sequence: Synthetic oligonucleotide
gcaagagccccggg

SEQ ID NO: 164 - DNA, 14 bp, Artificial Sequence
  Description of Artificial Sequence: Synthetic oligonucleotide
cgcaagagccccgg

SEQ ID NO: 165 - DNA, 14 bp, Artificial Sequence
  Description of Artificial Sequence: Synthetic oligonucleotide
acgcaagagccccg

SEQ ID NO: 166 - DNA, 14 bp, Artificial Sequence
  Description of Artificial Sequence: Synthetic oligonucleotide
aacgcaagagcccc

SEQ ID NO: 167 - DNA, 14 bp, Artificial Sequence
  Description of Artificial Sequence: Synthetic oligonucleotide
aaacgcaagagccc

SEQ ID NO: 168 - DNA, 14 bp, Artificial Sequence
  Description of Artificial Sequence: Synthetic oligonucleotide
gaaacgcaagagcc

SEQ ID NO: 169 - DNA, 14 bp, Artificial Sequence
  Description of Artificial Sequence: Synthetic oligonucleotide
cgaaacgcaagagc

SEQ ID NO: 170-171 - skipped (2 entries)

SEQ ID NO: 172 - DNA, 14 bp, Artificial Sequence
  Description of Artificial Sequence: Synthetic oligonucleotide
ctccgaaacgcaag

SEQ ID NO: 173 - DNA, 14 bp, Artificial Sequence
  Description of Artificial Sequence: Synthetic oligonucleotide
actccgaaacgcaa

SEQ ID NO: 174 - DNA, 14 bp, Artificial Sequence
  Description of Artificial Sequence: Synthetic oligonucleotide
gactccgaaacgca

SEQ ID NO: 175 - DNA, 14 bp, Artificial Sequence
  Description of Artificial Sequence: Synthetic oligonucleotide
ggactccgaaacgc

SEQ ID NO: 176 - DNA, 14 bp, Artificial Sequence
  Description of Artificial Sequence: Synthetic oligonucleotide
gggactccgaaacg

SEQ ID NO: 177 - DNA, 14 bp, Artificial Sequence
  Description of Artificial Sequence: Synthetic oligonucleotide
tgggactccgaaac

SEQ ID NO: 178 - DNA, 14 bp, Artificial Sequence
  Description of Artificial Sequence: Synthetic oligonucleotide
ttgggactccgaaa

SEQ ID NO: 179 - DNA, 14 bp, Artificial Sequence
  Description of Artificial Sequence: Synthetic oligonucleotide
gttgggactccgaa

SEQ ID NO: 180 - DNA, 14 bp, Artificial Sequence
  Description of Artificial Sequence: Synthetic oligonucleotide
agttgggactccga

SEQ ID NO: 181 - DNA, 14 bp, Artificial Sequence
  Description of Artificial Sequence: Synthetic oligonucleotide
tagttgggactccg

SEQ ID NO: 182 - DNA, 14 bp, Artificial Sequence
  Description of Artificial Sequence: Synthetic oligonucleotide
gtagttgggactcc

SEQ ID NO: 183 - DNA, 14 bp, Artificial Sequence
  Description of Artificial Sequence: Synthetic oligonucleotide
cgtagttgggactc

SEQ ID NO: 184 - DNA, 14 bp, Artificial Sequence
  Description of Artificial Sequence: Synthetic oligonucleotide
gcgtagttgggact

SEQ ID NO: 185 - DNA, 14 bp, Artificial Sequence
  Description of Artificial Sequence: Synthetic oligonucleotide
cgcgtagttgggac

SEQ ID NO: 186 - DNA, 14 bp, Artificial Sequence
  Description of Artificial Sequence: Synthetic oligonucleotide
ccgcgtagttggga

SEQ ID NO: 187 - DNA, 14 bp, Artificial Sequence
  Description of Artificial Sequence: Synthetic oligonucleotide
tccgcgtagttggg

SEQ ID NO: 188 - DNA, 14 bp, Artificial Sequence
  Description of Artificial Sequence: Synthetic oligonucleotide
ctccgcgtagttgg

SEQ ID NO: 189 - DNA, 14 bp, Artificial Sequence
  Description of Artificial Sequence: Synthetic oligonucleotide
gctccgcgtagttg

SEQ ID NO: 190 - DNA, 14 bp, Artificial Sequence
  Description of Artificial Sequence: Synthetic oligonucleotide
cgctccgcgtagtt

SEQ ID NO: 191 - DNA, 14 bp, Artificial Sequence
  Description of Artificial Sequence: Synthetic oligonucleotide
ccgctccgcgtagt

SEQ ID NO: 192 - DNA, 14 bp, Artificial Sequence
  Description of Artificial Sequence: Synthetic oligonucleotide
cccgctccgcgtag

SEQ ID NO: 193 - DNA, 14 bp, Artificial Sequence
  Description of Artificial Sequence: Synthetic oligonucleotide
gcccgctccgcgta

SEQ ID NO: 194 - DNA, 14 bp, Artificial Sequence
  Description of Artificial Sequence: Synthetic oligonucleotide
cgcccgctccgcgt

SEQ ID NO: 195 - DNA, 14 bp, Artificial Sequence
  Description of Artificial Sequence: Synthetic oligonucleotide
gcgcccgctccgcg

SEQ ID NO: 196 - DNA, 14 bp, Artificial Sequence
  Description of Artificial Sequence: Synthetic oligonucleotide
ggcgcccgctccgc

SEQ ID NO: 197 - DNA, 14 bp, Artificial Sequence
  Description of Artificial Sequence: Synthetic oligonucleotide
cggcgcccgctccg

SEQ ID NO: 198 - DNA, 14 bp, Artificial Sequence
  Description of Artificial Sequence: Synthetic oligonucleotide
gcggcgcccgctcc

SEQ ID NO: 199 - DNA, 14 bp, Artificial Sequence
  Description of Artificial Sequence: Synthetic oligonucleotide
cgcggcgcccgctc

SEQ ID NO: 200 - DNA, 14 bp, Artificial Sequence
  Description of Artificial Sequence: Synthetic oligonucleotide
ccgcggcgcccgct

SEQ ID NO: 201 - DNA, 14 bp, Artificial Sequence
  Description of Artificial Sequence: Synthetic oligonucleotide
gccgcggcgcccgc

SEQ ID NO: 202 - DNA, 14 bp, Artificial Sequence
  Description of Artificial Sequence: Synthetic oligonucleotide
ggccgcggcgcccg

SEQ ID NO: 203 - DNA, 14 bp, Artificial Sequence
  Description of Artificial Sequence: Synthetic oligonucleotide
cggccgcggcgccc

SEQ ID NO: 204 - DNA, 14 bp, Artificial Sequence
  Description of Artificial Sequence: Synthetic oligonucleotide
ccggccgcggcgcc

SEQ ID NO: 205 - DNA, 14 bp, Artificial Sequence
  Description of Artificial Sequence: Synthetic oligonucleotide
tccggccgcggcgc

SEQ ID NO: 206 - DNA, 14 bp, Artificial Sequence
  Description of Artificial Sequence: Synthetic oligonucleotide
ctccggccgcggcg

SEQ ID NO: 207 - DNA, 14 bp, Artificial Sequence
  Description of Artificial Sequence: Synthetic oligonucleotide
gctccggccgcggc

SEQ ID NO: 208 - DNA, 14 bp, Artificial Sequence
  Description of Artificial Sequence: Synthetic oligonucleotide
cgctccggccgcgg

SEQ ID NO: 209 - DNA, 14 bp, Artificial Sequence
  Description of Artificial Sequence: Synthetic oligonucleotide
acgctccggccgcg

SEQ ID NO: 210 - DNA, 14 bp, Artificial Sequence
  Description of Artificial Sequence: Synthetic oligonucleotide
gacgctccggccgc

SEQ ID NO: 211 - DNA, 14 bp, Artificial Sequence
  Description of Artificial Sequence: Synthetic oligonucleotide
ggacgctccggccg

SEQ ID NO: 212 - DNA, 14 bp, Artificial Sequence
  Description of Artificial Sequence: Synthetic oligonucleotide
gggacgctccggcc

SEQ ID NO: 213 - DNA, 14 bp, Artificial Sequence
  Description of Artificial Sequence: Synthetic oligonucleotide
agggacgctccggc

SEQ ID NO: 214 - DNA, 14 bp, Artificial Sequence
  Description of Artificial Sequence: Synthetic oligonucleotide
gagggacgctccgg

SEQ ID NO: 215 - DNA, 14 bp, Artificial Sequence
  Description of Artificial Sequence: Synthetic oligonucleotide
ggagggacgctccg

SEQ ID NO: 216 - DNA, 14 bp, Artificial Sequence
  Description of Artificial Sequence: Synthetic oligonucleotide
tggagggacgctcc

SEQ ID NO: 217 - DNA, 14 bp, Artificial Sequence
  Description of Artificial Sequence: Synthetic oligonucleotide
gtggagggacgctc

SEQ ID NO: 218 - DNA, 14 bp, Artificial Sequence
  Description of Artificial Sequence: Synthetic oligonucleotide
tgtggagggacgct

SEQ ID NO: 219 - DNA, 14 bp, Artificial Sequence
  Description of Artificial Sequence: Synthetic oligonucleotide
gtgtggagggacgc

SEQ ID NO: 220 - DNA, 14 bp, Artificial Sequence
  Description of Artificial Sequence: Synthetic oligonucleotide
cgtgtggagggacg

SEQ ID NO: 221 - DNA, 14 bp, Artificial Sequence
  Description of Artificial Sequence: Synthetic oligonucleotide
acgtgtggagggac

SEQ ID NO: 222 - DNA, 14 bp, Artificial Sequence
  Description of Artificial Sequence: Synthetic oligonucleotide
gacgtgtggaggga

SEQ ID NO: 223 - DNA, 14 bp, Artificial Sequence
  Description of Artificial Sequence: Synthetic oligonucleotide
ggacgtgtggaggg

SEQ ID NO: 224 - DNA, 14 bp, Artificial Sequence
  Description of Artificial Sequence: Synthetic oligonucleotide
aggacgtgtggagg

SEQ ID NO: 225 - DNA, 14 bp, Artificial Sequence
  Description of Artificial Sequence: Synthetic oligonucleotide
gaggacgtgtggag

SEQ ID NO: 226 - DNA, 14 bp, Artificial Sequence
  Description of Artificial Sequence: Synthetic oligonucleotide
ggaggacgtgtgga

SEQ ID NO: 227 - DNA, 14 bp, Artificial Sequence
  Description of Artificial Sequence: Synthetic oligonucleotide
gggaggacgtgtgg

SEQ ID NO: 228 - skipped

SEQ ID NO: 229 - DNA, 14 bp, Artificial Sequence
  Description of Artificial Sequence: Synthetic oligonucleotide
gggggaggacgtgt

SEQ ID NO: 230 - DNA, 14 bp, Artificial Sequence
  Description of Artificial Sequence: Synthetic oligonucleotide
tgggggaggacgtg

SEQ ID NO: 231 - DNA, 14 bp, Artificial Sequence
  Description of Artificial Sequence: Synthetic oligonucleotide
ctgggggaggacgt

SEQ ID NO: 232 - DNA, 14 bp, Artificial Sequence
  Description of Artificial Sequence: Synthetic oligonucleotide
gctgggggaggacg

SEQ ID NO: 233 - DNA, 14 bp, Artificial Sequence
  Description of Artificial Sequence: Synthetic oligonucleotide
ggctgggggaggac

SEQ ID NO: 234 - DNA, 14 bp, Artificial Sequence
  Description of Artificial Sequence: Synthetic oligonucleotide
cggctgggggagga

SEQ ID NO: 235 - DNA, 14 bp, Artificial Sequence
  Description of Artificial Sequence: Synthetic oligonucleotide
gcggctgggggagg

SEQ ID NO: 236 - DNA, 14 bp, Artificial Sequence
  Description of Artificial Sequence: Synthetic oligonucleotide
ggcggctgggggag

SEQ ID NO: 237 - DNA, 14 bp, Artificial Sequence
  Description of Artificial Sequence: Synthetic oligonucleotide
tggcggctggggga

SEQ ID NO: 238 - DNA, 14 bp, Artificial Sequence
  Description of Artificial Sequence: Synthetic oligonucleotide
ctggcggctggggg

SEQ ID NO: 239 - DNA, 14 bp, Artificial Sequence
  Description of Artificial Sequence: Synthetic oligonucleotide
gctggcggctgggg

SEQ ID NO: 240 - DNA, 14 bp, Artificial Sequence
  Description of Artificial Sequence: Synthetic oligonucleotide
agctggcggctggg

SEQ ID NO: 241 - DNA, 14 bp, Artificial Sequence
  Description of Artificial Sequence: Synthetic oligonucleotide
gagctggcggctgg

SEQ ID NO: 242 - DNA, 14 bp, Artificial Sequence
  Description of Artificial Sequence: Synthetic oligonucleotide
ggagctggcggctg

SEQ ID NO: 243 - DNA, 14 bp, Artificial Sequence
  Description of Artificial Sequence: Synthetic oligonucleotide
cggagctggcggct

SEQ ID NO: 244 - DNA, 14 bp, Artificial Sequence
  Description of Artificial Sequence: Synthetic oligonucleotide
gcggagctggcggc

SEQ ID NO: 245 - DNA, 14 bp, Artificial Sequence
  Description of Artificial Sequence: Synthetic oligonucleotide
ggcggagctggcgg

SEQ ID NO: 246 - DNA, 14 bp, Artificial Sequence
  Description of Artificial Sequence: Synthetic oligonucleotide
cggcggagctggcg

SEQ ID NO: 247 - DNA, 14 bp, Artificial Sequence
  Description of Artificial Sequence: Synthetic oligonucleotide
gcggcggagctggc

SEQ ID NO: 248 - DNA, 14 bp, Artificial Sequence
  Description of Artificial Sequence: Synthetic oligonucleotide
cgcggcggagctgg

SEQ ID NO: 249 - DNA, 14 bp, Artificial Sequence
  Description of Artificial Sequence: Synthetic oligonucleotide
ccgcggcggagctg

SEQ ID NO: 250 - DNA, 14 bp, Artificial Sequence
  Description of Artificial Sequence: Synthetic oligonucleotide
cccgcggcggagct

SEQ ID NO: 251 - DNA, 14 bp, Artificial Sequence
  Description of Artificial Sequence: Synthetic oligonucleotide
ccccgcggcggagc

SEQ ID NO: 252 - DNA, 14 bp, Artificial Sequence
  Description of Artificial Sequence: Synthetic oligonucleotide
gccccgcggcggag

SEQ ID NO: 253 - DNA, 14 bp, Artificial Sequence
  Description of Artificial Sequence: Synthetic oligonucleotide
ggccccgcggcgga

SEQ ID NO: 254 - DNA, 14 bp, Artificial Sequence
  Description of Artificial Sequence: Synthetic oligonucleotide
tggccccgcggcgg

SEQ ID NO: 255 - DNA, 14 bp, Artificial Sequence
  Description of Artificial Sequence: Synthetic oligonucleotide
ctggccccgcggcg

SEQ ID NO: 256 - DNA, 14 bp, Artificial Sequence
  Description of Artificial Sequence: Synthetic oligonucleotide
tctggccccgcggc

SEQ ID NO: 257 - DNA, 14 bp, Artificial Sequence
  Description of Artificial Sequence: Synthetic oligonucleotide
gtctggccccgcgg

SEQ ID NO: 258 - DNA, 14 bp, Artificial Sequence
  Description of Artificial Sequence: Synthetic oligonucleotide
ggtctggccccgcg

SEQ ID NO: 259 - DNA, 14 bp, Artificial Sequence
  Description of Artificial Sequence: Synthetic oligonucleotide
cggtctggccccgc

SEQ ID NO: 260 - DNA, 14 bp, Artificial Sequence
  Description of Artificial Sequence: Synthetic oligonucleotide
ccggtctggccccg

SEQ ID NO: 261 - DNA, 14 bp, Artificial Sequence
  Description of Artificial Sequence: Synthetic oligonucleotide
cccggtctggcccc

SEQ ID NO: 262 - DNA, 14 bp, Artificial Sequence
  Description of Artificial Sequence: Synthetic oligonucleotide
gcccggtctggccc

SEQ ID NO: 263 - DNA, 14 bp, Artificial Sequence
  Description of Artificial Sequence: Synthetic oligonucleotide
ggcccggtctggcc

SEQ ID NO: 264 - DNA, 14 bp, Artificial Sequence
  Description of Artificial Sequence: Synthetic oligonucleotide
gggcccggtctggc

SEQ ID NO: 265 - DNA, 14 bp, Artificial Sequence
  Description of Artificial Sequence: Synthetic oligonucleotide
cgggcccggtctgg

SEQ ID NO: 266 - DNA, 14 bp, Artificial Sequence
  Description of Artificial Sequence: Synthetic oligonucleotide
ccgggcccggtctg

SEQ ID NO: 267 - DNA, 14 bp, Artificial Sequence
  Description of Artificial Sequence: Synthetic oligonucleotide
cccgggcccggtct

SEQ ID NO: 268 - DNA, 14 bp, Artificial Sequence
  Description of Artificial Sequence: Synthetic oligonucleotide
tcccgggcccggtc

SEQ ID NO: 269 - DNA, 14 bp, Artificial Sequence
  Description of Artificial Sequence: Synthetic oligonucleotide
ctcccgggcccggt

SEQ ID NO: 270 - DNA, 14 bp, Artificial Sequence
  Description of Artificial Sequence: Synthetic oligonucleotide
actcccgggcccgg

SEQ ID NO: 271 - DNA, 14 bp, Artificial Sequence
  Description of Artificial Sequence: Synthetic oligonucleotide
cactcccgggcccg

SEQ ID NO: 272 - DNA, 14 bp, Artificial Sequence
  Description of Artificial Sequence: Synthetic oligonucleotide
gcactcccgggccc

SEQ ID NO: 273 - DNA, 14 bp, Artificial Sequence
  Description of Artificial Sequence: Synthetic oligonucleotide
tgcactcccgggcc

SEQ ID NO: 274 - DNA, 14 bp, Artificial Sequence
  Description of Artificial Sequence: Synthetic oligonucleotide
ctgcactcccgggc

SEQ ID NO: 275 - DNA, 14 bp, Artificial Sequence
  Description of Artificial Sequence: Synthetic oligonucleotide
gctgcactcccggg

SEQ ID NO: 276 - DNA, 14 bp, Artificial Sequence
  Description of Artificial Sequence: Synthetic oligonucleotide
ggctgcactcccgg

SEQ ID NO: 277 - DNA, 14 bp, Artificial Sequence
  Description of Artificial Sequence: Synthetic oligonucleotide
gggctgcactcccg

SEQ ID NO: 278 - DNA, 14 bp, Artificial Sequence
  Description of Artificial Sequence: Synthetic oligonucleotide
ggggctgcactccc

SEQ ID NO: 279 - DNA, 14 bp, Artificial Sequence
  Description of Artificial Sequence: Synthetic oligonucleotide
cggggctgcactcc

SEQ ID NO: 280 - DNA, 14 bp, Artificial Sequence
  Description of Artificial Sequence: Synthetic oligonucleotide
ccggggctgcactc

SEQ ID NO: 281 - DNA, 14 bp, Artificial Sequence
  Description of Artificial Sequence: Synthetic oligonucleotide
gccggggctgcact

SEQ ID NO: 282 - DNA, 14 bp, Artificial Sequence
  Description of Artificial Sequence: Synthetic oligonucleotide
cgccggggctgcac

SEQ ID NO: 283 - DNA, 14 bp, Artificial Sequence
  Description of Artificial Sequence: Synthetic oligonucleotide
ccgccggggctgca

SEQ ID NO: 284 - DNA, 14 bp, Artificial Sequence
  Description of Artificial Sequence: Synthetic oligonucleotide
cccgccggggctgc

SEQ ID NO: 285 - DNA, 14 bp, Artificial Sequence
  Description of Artificial Sequence: Synthetic oligonucleotide
gcccgccggggctg

SEQ ID NO: 286 - DNA, 14 bp, Artificial Sequence
  Description of Artificial Sequence: Synthetic oligonucleotide
cgcccgccggggct

SEQ ID NO: 287 - DNA, 14 bp, Artificial Sequence
  Description of Artificial Sequence: Synthetic oligonucleotide
ccgcccgccggggc

SEQ ID NO: 288 - DNA, 14 bp, Artificial Sequence
  Description of Artificial Sequence: Synthetic oligonucleotide
cccgcccgccgggg

SEQ ID NO: 289 - DNA, 14 bp, Artificial Sequence
  Description of Artificial Sequence: Synthetic oligonucleotide
gcccgcccgccggg

SEQ ID NO: 290 - DNA, 14 bp, Artificial Sequence
  Description of Artificial Sequence: Synthetic oligonucleotide
cgcccgcccgccgg

SEQ ID NO: 291 - DNA, 14 bp, Artificial Sequence
  Description of Artificial Sequence: Synthetic oligonucleotide
ccgcccgcccgccg

SEQ ID NO: 292 - DNA, 14 bp, Artificial Sequence
  Description of Artificial Sequence: Synthetic oligonucleotide
gccgcccgcccgcc

SEQ ID NO: 293 - DNA, 14 bp, Artificial Sequence
  Description of Artificial Sequence: Synthetic oligonucleotide
cgccgcccgcccgc

SEQ ID NO: 294 - DNA, 14 bp, Artificial Sequence
  Description of Artificial Sequence: Synthetic oligonucleotide
ccgccgcccgcccg

SEQ ID NO: 295 - DNA, 14 bp, Artificial Sequence
  Description of Artificial Sequence: Synthetic oligonucleotide
gccgccgcccgccc

SEQ ID NO: 296 - DNA, 14 bp, Artificial Sequence
  Description of Artificial Sequence: Synthetic oligonucleotide
ggccgccgcccgcc

SEQ ID NO: 297 - DNA, 14 bp, Artificial Sequence
  Description of Artificial Sequence: Synthetic oligonucleotide
cggccgccgcccgc

SEQ ID NO: 298 - DNA, 14 bp, Artificial Sequence
  Description of Artificial Sequence: Synthetic oligonucleotide
gcggccgccgcccg

SEQ ID NO: 299 - DNA, 14 bp, Artificial Sequence
  Description of Artificial Sequence: Synthetic oligonucleotide
cgcggccgccgccc

SEQ ID NO: 300-301 - skipped (2 entries)

SEQ ID NO: 302 - DNA, 14 bp, Artificial Sequence
  Description of Artificial Sequence: Synthetic oligonucleotide
tgccgcggccgccg

SEQ ID NO: 303 - DNA, 14 bp, Artificial Sequence
  Description of Artificial Sequence: Synthetic oligonucleotide
ctgccgcggccgcc

SEQ ID NO: 304 - DNA, 14 bp, Artificial Sequence
  Description of Artificial Sequence: Synthetic oligonucleotide
tctgccgcggccgc

SEQ ID NO: 305 - DNA, 14 bp, Artificial Sequence
  Description of Artificial Sequence: Synthetic oligonucleotide
ctctgccgcggccg

SEQ ID NO: 306 - DNA, 14 bp, Artificial Sequence
  Description of Artificial Sequence: Synthetic oligonucleotide
cctctgccgcggcc

SEQ ID NO: 307 - DNA, 14 bp, Artificial Sequence
  Description of Artificial Sequence: Synthetic oligonucleotide
ccctctgccgcggc

SEQ ID NO: 308 - DNA, 14 bp, Artificial Sequence
  Description of Artificial Sequence: Synthetic oligonucleotide
gccctctgccgcgg

SEQ ID NO: 309 - DNA, 14 bp, Artificial Sequence
  Description of Artificial Sequence: Synthetic oligonucleotide
tgccctctgccgcg

SEQ ID NO: 310 - DNA, 14 bp, Artificial Sequence
  Description of Artificial Sequence: Synthetic oligonucleotide
ctgccctctgccgc

SEQ ID NO: 311 - DNA, 14 bp, Artificial Sequence
  Description of Artificial Sequence: Synthetic oligonucleotide
gctgccctctgccg

SEQ ID NO: 312 - DNA, 14 bp, Artificial Sequence
  Description of Artificial Sequence: Synthetic oligonucleotide
ggctgccctctgcc

SEQ ID NO: 313 - DNA, 14 bp, Artificial Sequence
  Description of Artificial Sequence: Synthetic oligonucleotide
gggctgccctctgc

SEQ ID NO: 314 - DNA, 14 bp, Artificial Sequence
  Description of Artificial Sequence: Synthetic oligonucleotide
cgggctgccctctg

SEQ ID NO: 315 - DNA, 14 bp, Artificial Sequence
  Description of Artificial Sequence: Synthetic oligonucleotide
ccgggctgccctct

SEQ ID NO: 316 - DNA, 14 bp, Artificial Sequence
  Description of Artificial Sequence: Synthetic oligonucleotide
cccgggctgccctc

SEQ ID NO: 317 - DNA, 14 bp, Artificial Sequence
  Description of Artificial Sequence: Synthetic oligonucleotide
ccccgggctgccct

SEQ ID NO: 318 - DNA, 14 bp, Artificial Sequence
  Description of Artificial Sequence: Synthetic oligonucleotide
gccccgggctgccc

SEQ ID NO: 319 - DNA, 14 bp, Artificial Sequence
  Description of Artificial Sequence: Synthetic oligonucleotide
cgccccgggctgcc

SEQ ID NO: 320 - DNA, 14 bp, Artificial Sequence
  Description of Artificial Sequence: Synthetic oligonucleotide
ccgccccgggctgc

SEQ ID NO: 321 - DNA, 14 bp, Artificial Sequence
  Description of Artificial Sequence: Synthetic oligonucleotide
gccgccccgggctg

SEQ ID NO: 322 - DNA, 14 bp, Artificial Sequence
  Description of Artificial Sequence: Synthetic oligonucleotide
cgccgccccgggct

SEQ ID NO: 323 - DNA, 14 bp, Artificial Sequence
  Description of Artificial Sequence: Synthetic oligonucleotide
gcgccgccccgggc

SEQ ID NO: 324 - DNA, 14 bp, Artificial Sequence
  Description of Artificial Sequence: Synthetic oligonucleotide
ggcgccgccccggg

SEQ ID NO: 325 - DNA, 14 bp, Artificial Sequence
  Description of Artificial Sequence: Synthetic oligonucleotide
cggcgccgccccgg

SEQ ID NO: 326 - DNA, 14 bp, Artificial Sequence
  Description of Artificial Sequence: Synthetic oligonucleotide
ccggcgccgccccg

SEQ ID NO: 327 - DNA, 14 bp, Artificial Sequence
  Description of Artificial Sequence: Synthetic oligonucleotide
gccggcgccgcccc

SEQ ID NO: 328 - DNA, 14 bp, Artificial Sequence
  Description of Artificial Sequence: Synthetic oligonucleotide
cgccggcgccgccc

SEQ ID NO: 329 - DNA, 14 bp, Artificial Sequence
  Description of Artificial Sequence: Synthetic oligonucleotide
ccgccggcgccgcc

SEQ ID NO: 330 - DNA, 14 bp, Artificial Sequence
  Description of Artificial Sequence: Synthetic oligonucleotide
cccgccggcgccgc

SEQ ID NO: 331 - DNA, 14 bp, Artificial Sequence
  Description of Artificial Sequence: Synthetic oligonucleotide
gcccgccggcgccg

SEQ ID NO: 332 - DNA, 14 bp, Artificial Sequence
  Description of Artificial Sequence: Synthetic oligonucleotide
ggcccgccggcgcc

SEQ ID NO: 333 - DNA, 14 bp, Artificial Sequence
  Description of Artificial Sequence: Synthetic oligonucleotide
cggcccgccggcgc

SEQ ID NO: 334 - DNA, 14 bp, Artificial Sequence
  Description of Artificial Sequence: Synthetic oligonucleotide
ccggcccgccggcg

SEQ ID NO: 335 - DNA, 14 bp, Artificial Sequence
  Description of Artificial Sequence: Synthetic oligonucleotide
cccggcccgccggc

SEQ ID NO: 336 - DNA, 14 bp, Artificial Sequence
  Description of Artificial Sequence: Synthetic oligonucleotide
ccccggcccgccgg

SEQ ID NO: 337 - DNA, 14 bp, Artificial Sequence
  Description of Artificial Sequence: Synthetic oligonucleotide
tccccggcccgccg

SEQ ID NO: 338 - DNA, 14 bp, Artificial Sequence
  Description of Artificial Sequence: Synthetic oligonucleotide
ctccccggcccgcc

SEQ ID NO: 339 - DNA, 14 bp, Artificial Sequence
  Description of Artificial Sequence: Synthetic oligonucleotide
cctccccggcccgc

SEQ ID NO: 340 - DNA, 14 bp, Artificial Sequence
  Description of Artificial Sequence: Synthetic oligonucleotide
ccctccccggcccg

SEQ ID NO: 341 - DNA, 14 bp, Artificial Sequence
  Description of Artificial Sequence: Synthetic oligonucleotide
cccctccccggccc

SEQ ID NO: 342 - DNA, 14 bp, Artificial Sequence
  Description of Artificial Sequence: Synthetic oligonucleotide
gcccctccccggcc

SEQ ID NO: 343 - DNA, 14 bp, Artificial Sequence
  Description of Artificial Sequence: Synthetic oligonucleotide
cgcccctccccggc

SEQ ID NO: 344 - DNA, 14 bp, Artificial Sequence
  Description of Artificial Sequence: Synthetic oligonucleotide
ccgcccctccccgg

SEQ ID NO: 345 - DNA, 14 bp, Artificial Sequence
  Description of Artificial Sequence: Synthetic oligonucleotide
cccgcccctccccg

SEQ ID NO: 346 - DNA, 14 bp, Artificial Sequence
  Description of Artificial Sequence: Synthetic oligonucleotide
ccccgcccctcccc

SEQ ID NO: 347 - DNA, 14 bp, Artificial Sequence
  Description of Artificial Sequence: Synthetic oligonucleotide
cccccgcccctccc

SEQ ID NO: 348 - DNA, 14 bp, Artificial Sequence
  Description of Artificial Sequence: Synthetic oligonucleotide
ccccccgcccctcc

SEQ ID NO: 349 - DNA, 14 bp, Artificial Sequence
  Description of Artificial Sequence: Synthetic oligonucleotide
gccccccgcccctc

SEQ ID NO: 350 - DNA, 14 bp, Artificial Sequence
  Description of Artificial Sequence: Synthetic oligonucleotide
ggccccccgcccct

SEQ ID NO: 351 - DNA, 14 bp, Artificial Sequence
  Description of Artificial Sequence: Synthetic oligonucleotide
aggccccccgcccc

SEQ ID NO: 352 - DNA, 14 bp, Artificial Sequence
  Description of Artificial Sequence: Synthetic oligonucleotide
caggccccccgccc

SEQ ID NO: 353 - DNA, 14 bp, Artificial Sequence
  Description of Artificial Sequence: Synthetic oligonucleotide
ccaggccccccgcc

SEQ ID NO: 354 - DNA, 14 bp, Artificial Sequence
  Description of Artificial Sequence: Synthetic oligonucleotide
gccaggccccccgc

SEQ ID NO: 355 - DNA, 14 bp, Artificial Sequence
  Description of Artificial Sequence: Synthetic oligonucleotide
ggccaggccccccg

SEQ ID NO: 356 - DNA, 14 bp, Artificial Sequence
  Description of Artificial Sequence: Synthetic oligonucleotide
gggccaggcccccc

SEQ ID NO: 357 - DNA, 14 bp, Artificial Sequence
  Description of Artificial Sequence: Synthetic oligonucleotide
ggggccaggccccc

SEQ ID NO: 358 - DNA, 14 bp, Artificial Sequence
  Description of Artificial Sequence: Synthetic oligonucleotide
cggggccaggcccc

SEQ ID NO: 359 - DNA, 14 bp, Artificial Sequence
  Description of Artificial Sequence: Synthetic oligonucleotide
ccggggccaggccc

SEQ ID NO: 360 - DNA, 14 bp, Artificial Sequence
  Description of Artificial Sequence: Synthetic oligonucleotide
cccggggccaggcc

SEQ ID NO: 361 - DNA, 14 bp, Artificial Sequence
  Description of Artificial Sequence: Synthetic oligonucleotide
ccccggggccaggc

SEQ ID NO: 362 - DNA, 14 bp, Artificial Sequence
  Description of Artificial Sequence: Synthetic oligonucleotide
gccccggggccagg

SEQ ID NO: 363 - DNA, 14 bp, Artificial Sequence
  Description of Artificial Sequence: Synthetic oligonucleotide
cgccccggggccag

SEQ ID NO: 364 - DNA, 14 bp, Artificial Sequence
  Description of Artificial Sequence: Synthetic oligonucleotide
ccgccccggggcca

SEQ ID NO: 365 - DNA, 14 bp, Artificial Sequence
  Description of Artificial Sequence: Synthetic oligonucleotide
accgccccggggcc

SEQ ID NO: 366 - DNA, 14 bp, Artificial Sequence
  Description of Artificial Sequence: Synthetic oligonucleotide
caccgccccggggc

SEQ ID NO: 367 - DNA, 14 bp, Artificial Sequence
  Description of Artificial Sequence: Synthetic oligonucleotide
ccaccgccccgggg

SEQ ID NO: 368 - DNA, 14 bp, Artificial Sequence
  Description of Artificial Sequence: Synthetic oligonucleotide
accaccgccccggg

SEQ ID NO: 369 - DNA, 14 bp, Artificial Sequence
  Description of Artificial Sequence: Synthetic oligonucleotide
caccaccgccccgg

SEQ ID NO: 370 - DNA, 14 bp, Artificial Sequence
  Description of Artificial Sequence: Synthetic oligonucleotide
gcaccaccgccccg

SEQ ID NO: 371 - DNA, 14 bp, Artificial Sequence
  Description of Artificial Sequence: Synthetic oligonucleotide
cgcaccaccgcccc

SEQ ID NO: 372 - DNA, 14 bp, Artificial Sequence
  Description of Artificial Sequence: Synthetic oligonucleotide
ccgcaccaccgccc

SEQ ID NO: 373 - DNA, 14 bp, Artificial Sequence
  Description of Artificial Sequence: Synthetic oligonucleotide
cccgcaccaccgcc

SEQ ID NO: 374 - DNA, 14 bp, Artificial Sequence
  Description of Artificial Sequence: Synthetic oligonucleotide
tcccgcaccaccgc

SEQ ID NO: 375 - DNA, 14 bp, Artificial Sequence
  Description of Artificial Sequence: Synthetic oligonucleotide
atcccgcaccaccg

SEQ ID NO: 376 - DNA, 14 bp, Artificial Sequence
  Description of Artificial Sequence: Synthetic oligonucleotide
catcccgcaccacc

SEQ ID NO: 377 - DNA, 14 bp, Artificial Sequence
  Description of Artificial Sequence: Synthetic oligonucleotide
gcatcccgcaccac

SEQ ID NO: 378 - DNA, 14 bp, Artificial Sequence
  Description of Artificial Sequence: Synthetic oligonucleotide
ggcatcccgcacca

SEQ ID NO: 379 - DNA, 14 bp, Artificial Sequence
  Description of Artificial Sequence: Synthetic oligonucleotide
cggcatcccgcacc

SEQ ID NO: 380 - skipped

SEQ ID NO: 381 - DNA, 14 bp, Artificial Sequence
  Description of Artificial Sequence: Synthetic oligonucleotide
ggcggcatcccgca

SEQ ID NO: 382 - DNA, 14 bp, Artificial Sequence
  Description of Artificial Sequence: Synthetic oligonucleotide
cggcggcatcccgc

SEQ ID NO: 383 - DNA, 14 bp, Artificial Sequence
  Description of Artificial Sequence: Synthetic oligonucleotide
gcggcggcatcccg

SEQ ID NO: 384 - DNA, 14 bp, Artificial Sequence
  Description of Artificial Sequence: Synthetic oligonucleotide
ggcggcggcatccc

SEQ ID NO: 385 - DNA, 14 bp, Artificial Sequence
  Description of Artificial Sequence: Synthetic oligonucleotide
aggcggcggcatcc

SEQ ID NO: 386 - DNA, 14 bp, Artificial Sequence
  Description of Artificial Sequence: Synthetic oligonucleotide
gaggcggcggcatc

SEQ ID NO: 387 - DNA, 14 bp, Artificial Sequence
  Description of Artificial Sequence: Synthetic oligonucleotide
ggaggcggcggcat

SEQ ID NO: 388 - DNA, 14 bp, Artificial Sequence
  Description of Artificial Sequence: Synthetic oligonucleotide
cggaggcggcggca

SEQ ID NO: 389 - DNA, 14 bp, Artificial Sequence
  Description of Artificial Sequence: Synthetic oligonucleotide
ccggaggcggcggc

SEQ ID NO: 390 - DNA, 14 bp, Artificial Sequence
  Description of Artificial Sequence: Synthetic oligonucleotide
cccggaggcggcgg

SEQ ID NO: 391 - DNA, 14 bp, Artificial Sequence
  Description of Artificial Sequence: Synthetic oligonucleotide
gcccggaggcggcg

SEQ ID NO: 392 - DNA, 14 bp, Artificial Sequence
  Description of Artificial Sequence: Synthetic oligonucleotide
ggcccggaggcggc

SEQ ID NO: 393 - DNA, 14 bp, Artificial Sequence
  Description of Artificial Sequence: Synthetic oligonucleotide
cggcccggaggcgg

SEQ ID NO: 394 - DNA, 14 bp, Artificial Sequence
  Description of Artificial Sequence: Synthetic oligonucleotide
gcggcccggaggcg

SEQ ID NO: 395 - DNA, 14 bp, Artificial Sequence
  Description of Artificial Sequence: Synthetic oligonucleotide
cgcggcccggaggc

SEQ ID NO: 396 - DNA, 14 bp, Artificial Sequence
  Description of Artificial Sequence: Synthetic oligonucleotide
acgcggcccggagg

SEQ ID NO: 397 - DNA, 14 bp, Artificial Sequence
  Description of Artificial Sequence: Synthetic oligonucleotide
gacgcggcccggag

SEQ ID NO: 398 - DNA, 14 bp, Artificial Sequence
  Description of Artificial Sequence: Synthetic oligonucleotide
ggacgcggcccgga

SEQ ID NO: 399 - DNA, 14 bp, Artificial Sequence
  Description of Artificial Sequence: Synthetic oligonucleotide
cggacgcggcccgg

SEQ ID NO: 400 - DNA, 14 bp, Artificial Sequence
  Description of Artificial Sequence: Synthetic oligonucleotide
acggacgcggcccg

SEQ ID NO: 401 - DNA, 14 bp, Artificial Sequence
  Description of Artificial Sequence: Synthetic oligonucleotide
aacggacgcggccc

SEQ ID NO: 402 - DNA, 14 bp, Artificial Sequence
  Description of Artificial Sequence: Synthetic oligonucleotide
gaacggacgcggcc

SEQ ID NO: 403 - DNA, 14 bp, Artificial Sequence
  Description of Artificial Sequence: Synthetic oligonucleotide
agaacggacgcggc

SEQ ID NO: 404 - DNA, 14 bp, Artificial Sequence
  Description of Artificial Sequence: Synthetic oligonucleotide
gagaacggacgcgg

SEQ ID NO: 405 - DNA, 14 bp, Artificial Sequence
  Description of Artificial Sequence: Synthetic oligonucleotide
ggagaacggacgcg

SEQ ID NO: 406 - DNA, 14 bp, Artificial Sequence
  Description of Artificial Sequence: Synthetic oligonucleotide
tggagaacggacgc

SEQ ID NO: 407 - DNA, 14 bp, Artificial Sequence
  Description of Artificial Sequence: Synthetic oligonucleotide
gtggagaacggacg

SEQ ID NO: 408 - DNA, 14 bp, Artificial Sequence
  Description of Artificial Sequence: Synthetic oligonucleotide
cgtggagaacggac

SEQ ID NO: 409 - DNA, 14 bp, Artificial Sequence
  Description of Artificial Sequence: Synthetic oligonucleotide
ccgtggagaacgga

SEQ ID NO: 410 - DNA, 14 bp, Artificial Sequence
  Description of Artificial Sequence: Synthetic oligonucleotide
gccgtggagaacgg

SEQ ID NO: 411 - DNA, 14 bp, Artificial Sequence
  Description of Artificial Sequence: Synthetic oligonucleotide
agccgtggagaacg

SEQ ID NO: 412 - DNA, 14 bp, Artificial Sequence
  Description of Artificial Sequence: Synthetic oligonucleotide
cagccgtggagaac

SEQ ID NO: 413 - DNA, 14 bp, Artificial Sequence
  Description of Artificial Sequence: Synthetic oligonucleotide
ccagccgtggagaa

SEQ ID NO: 414 - DNA, 14 bp, Artificial Sequence
  Description of Artificial Sequence: Synthetic oligonucleotide
accagccgtggaga

SEQ ID NO: 415 - DNA, 14 bp, Artificial Sequence
  Description of Artificial Sequence: Synthetic oligonucleotide
taccagccgtggag

SEQ ID NO: 416 - DNA, 14 bp, Artificial Sequence
  Description of Artificial Sequence: Synthetic oligonucleotide
gtaccagccgtgga

SEQ ID NO: 417 - DNA, 14 bp, Artificial Sequence
  Description of Artificial Sequence: Synthetic oligonucleotide
ggtaccagccgtgg

SEQ ID NO: 418 - DNA, 14 bp, Artificial Sequence
  Description of Artificial Sequence: Synthetic oligonucleotide
aggtaccagccgtg

SEQ ID NO: 419 - DNA, 14 bp, Artificial Sequence
  Description of Artificial Sequence: Synthetic oligonucleotide
caggtaccagccgt

SEQ ID NO: 420 - DNA, 14 bp, Artificial Sequence
  Description of Artificial Sequence: Synthetic oligonucleotide
acaggtaccagccg

SEQ ID NO: 421 - DNA, 14 bp, Artificial Sequence
  Description of Artificial Sequence: Synthetic oligonucleotide
cacaggtaccagcc

SEQ ID NO: 422 - DNA, 14 bp, Artificial Sequence
  Description of Artificial Sequence: Synthetic oligonucleotide
acacaggtaccagc

SEQ ID NO: 423 - DNA, 14 bp, Artificial Sequence
  Description of Artificial Sequence: Synthetic oligonucleotide
gacacaggtaccag

SEQ ID NO: 424 - DNA, 14 bp, Artificial Sequence
  Description of Artificial Sequence: Synthetic oligonucleotide
cgacacaggtacca

SEQ ID NO: 425 - DNA, 14 bp, Artificial Sequence
  Description of Artificial Sequence: Synthetic oligonucleotide
ccgacacaggtacc

SEQ ID NO: 426 - DNA, 14 bp, Artificial Sequence
  Description of Artificial Sequence: Synthetic oligonucleotide
cccgacacaggtac

SEQ ID NO: 427 - DNA, 14 bp, Artificial Sequence
  Description of Artificial Sequence: Synthetic oligonucleotide
acccgacacaggta

SEQ ID NO: 428 - DNA, 14 bp, Artificial Sequence
  Description of Artificial Sequence: Synthetic oligonucleotide
cacccgacacaggt

SEQ ID NO: 429 - DNA, 14 bp, Artificial Sequence
  Description of Artificial Sequence: Synthetic oligonucleotide
ccacccgacacagg

SEQ ID NO: 430 - DNA, 14 bp, Artificial Sequence
  Description of Artificial Sequence: Synthetic oligonucleotide
cccacccgacacag

SEQ ID NO: 431 - DNA, 14 bp, Artificial Sequence
  Description of Artificial Sequence: Synthetic oligonucleotide
acccacccgacaca

SEQ ID NO: 432 - DNA, 14 bp, Artificial Sequence
  Description of Artificial Sequence: Synthetic oligonucleotide
cacccacccgacac

SEQ ID NO: 433 - DNA, 14 bp, Artificial Sequence
  Description of Artificial Sequence: Synthetic oligonucleotide
ccacccacccgaca

SEQ ID NO: 434 - DNA, 14 bp, Artificial Sequence
  Description of Artificial Sequence: Synthetic oligonucleotide
gccacccacccgac

SEQ ID NO: 435 - DNA, 14 bp, Artificial Sequence
  Description of Artificial Sequence: Synthetic oligonucleotide
ggccacccacccga

SEQ ID NO: 436 - DNA, 14 bp, Artificial Sequence
  Description of Artificial Sequence: Synthetic oligonucleotide
tggccacccacccg

SEQ ID NO: 437 - DNA, 14 bp, Artificial Sequence
  Description of Artificial Sequence: Synthetic oligonucleotide
ctggccacccaccc

SEQ ID NO: 438 - DNA, 14 bp, Artificial Sequence
  Description of Artificial Sequence: Synthetic oligonucleotide
cctggccacccacc

SEQ ID NO: 439 - DNA, 14 bp, Artificial Sequence
  Description of Artificial Sequence: Synthetic oligonucleotide
gcctggccacccac

SEQ ID NO: 440 - DNA, 14 bp, Artificial Sequence
  Description of Artificial Sequence: Synthetic oligonucleotide
cgcctggccaccca

SEQ ID NO: 441 - DNA, 14 bp, Artificial Sequence
  Description of Artificial Sequence: Synthetic oligonucleotide
gcgcctggccaccc

SEQ ID NO: 442 - DNA, 14 bp, Artificial Sequence
  Description of Artificial Sequence: Synthetic oligonucleotide
cgcgcctggccacc

SEQ ID NO: 443 - DNA, 14 bp, Artificial Sequence
  Description of Artificial Sequence: Synthetic oligonucleotide
ccgcgcctggccac

SEQ ID NO: 444 - DNA, 14 bp, Artificial Sequence
  Description of Artificial Sequence: Synthetic oligonucleotide
cccgcgcctggcca

SEQ ID NO: 445 - DNA, 14 bp, Artificial Sequence
  Description of Artificial Sequence: Synthetic oligonucleotide
gcccgcgcctggcc

SEQ ID NO: 446 - DNA, 14 bp, Artificial Sequence
  Description of Artificial Sequence: Synthetic oligonucleotide
ggcccgcgcctggc

SEQ ID NO: 447 - DNA, 14 bp, Artificial Sequence
  Description of Artificial Sequence: Synthetic oligonucleotide
aggcccgcgcctgg

SEQ ID NO: 448 - DNA, 14 bp, Artificial Sequence
  Description of Artificial Sequence: Synthetic oligonucleotide
gaggcccgcgcctg

SEQ ID NO: 449 - DNA, 14 bp, Artificial Sequence
  Description of Artificial Sequence: Synthetic oligonucleotide
cgaggcccgcgcct

SEQ ID NO: 450 - DNA, 14 bp, Artificial Sequence
  Description of Artificial Sequence: Synthetic oligonucleotide
gcgaggcccgcgcc

SEQ ID NO: 451 - DNA, 14 bp, Artificial Sequence
  Description of Artificial Sequence: Synthetic oligonucleotide
ggcgaggcccgcgc

SEQ ID NO: 452 - DNA, 14 bp, Artificial Sequence
  Description of Artificial Sequence: Synthetic oligonucleotide
gggcgaggcccgcg

SEQ ID NO: 453 - DNA, 14 bp, Artificial Sequence
  Description of Artificial Sequence: Synthetic oligonucleotide
ggggcgaggcccgc

SEQ ID NO: 454 - DNA, 14 bp, Artificial Sequence
  Description of Artificial Sequence: Synthetic oligonucleotide
gggggcgaggcccg

SEQ ID NO: 455 - DNA, 14 bp, Artificial Sequence
  Description of Artificial Sequence: Synthetic oligonucleotide
ggggggcgaggccc

SEQ ID NO: 456 - DNA, 14 bp, Artificial Sequence
  Description of Artificial Sequence: Synthetic oligonucleotide
tggggggcgaggcc

SEQ ID NO: 457 - DNA, 14 bp, Artificial Sequence
  Description of Artificial Sequence: Synthetic oligonucleotide
ctggggggcgaggc

SEQ ID NO: 458 - DNA, 14 bp, Artificial Sequence
  Description of Artificial Sequence: Synthetic oligonucleotide
gctggggggcgagg

SEQ ID NO: 459 - DNA, 14 bp, Artificial Sequence
  Description of Artificial Sequence: Synthetic oligonucleotide
ggctggggggcgag

SEQ ID NO: 460 - DNA, 14 bp, Artificial Sequence
  Description of Artificial Sequence: Synthetic oligonucleotide
gggctggggggcga

SEQ ID NO: 461 - DNA, 14 bp, Artificial Sequence
  Description of Artificial Sequence: Synthetic oligonucleotide
ggggctggggggcg

SEQ ID NO: 462 - DNA, 14 bp, Artificial Sequence
  Description of Artificial Sequence: Synthetic oligonucleotide
gggggctggggggc

SEQ ID NO: 463 - DNA, 14 bp, Artificial Sequence
  Description of Artificial Sequence: Synthetic oligonucleotide
agggggctgggggg

SEQ ID NO: 464 - DNA, 14 bp, Artificial Sequence
  Description of Artificial Sequence: Synthetic oligonucleotide
gagggggctggggg

SEQ ID NO: 465 - DNA, 14 bp, Artificial Sequence
  Description of Artificial Sequence: Synthetic oligonucleotide
cgagggggctgggg

SEQ ID NO: 466 - DNA, 14 bp, Artificial Sequence
  Description of Artificial Sequence: Synthetic oligonucleotide
gcgagggggctggg

SEQ ID NO: 467 - DNA, 14 bp, Artificial Sequence
  Description of Artificial Sequence: Synthetic oligonucleotide
ggcgagggggctgg

SEQ ID NO: 468 - DNA, 14 bp, Artificial Sequence
  Description of Artificial Sequence: Synthetic oligonucleotide
tggcgagggggctg

SEQ ID NO: 469 - DNA, 14 bp, Artificial Sequence
  Description of Artificial Sequence: Synthetic oligonucleotide
ctggcgagggggct

SEQ ID NO: 470 - DNA, 14 bp, Artificial Sequence
  Description of Artificial Sequence: Synthetic oligonucleotide
cctggcgagggggc

SEQ ID NO: 471 - DNA, 14 bp, Artificial Sequence
  Description of Artificial Sequence: Synthetic oligonucleotide
ccctggcgaggggg

SEQ ID NO: 472 - DNA, 14 bp, Artificial Sequence
  Description of Artificial Sequence: Synthetic oligonucleotide
gccctggcgagggg

SEQ ID NO: 473 - DNA, 14 bp, Artificial Sequence
  Description of Artificial Sequence: Synthetic oligonucleotide
agccctggcgaggg

SEQ ID NO: 474 - DNA, 14 bp, Artificial Sequence
  Description of Artificial Sequence: Synthetic oligonucleotide
tagccctggcgagg

SEQ ID NO: 475 - DNA, 14 bp, Artificial Sequence
  Description of Artificial Sequence: Synthetic oligonucleotide
ctagccctggcgag

SEQ ID NO: 476 - DNA, 14 bp, Artificial Sequence
  Description of Artificial Sequence: Synthetic oligonucleotide
gctagccctggcga

SEQ ID NO: 477 - DNA, 14 bp, Artificial Sequence
  Description of Artificial Sequence: Synthetic oligonucleotide
ggctagccctggcg

SEQ ID NO: 478 - DNA, 14 bp, Artificial Sequence
  Description of Artificial Sequence: Synthetic oligonucleotide
gggctagccctggc

SEQ ID NO: 479 - DNA, 14 bp, Artificial Sequence
  Description of Artificial Sequence: Synthetic oligonucleotide
cgggctagccctgg

SEQ ID NO: 480 - DNA, 14 bp, Artificial Sequence
  Description of Artificial Sequence: Synthetic oligonucleotide
ccgggctagccctg

SEQ ID NO: 481 - DNA, 14 bp, Artificial Sequence
  Description of Artificial Sequence: Synthetic oligonucleotide
gccgggctagccct

SEQ ID NO: 482 - DNA, 14 bp, Artificial Sequence
  Description of Artificial Sequence: Synthetic oligonucleotide
agccgggctagccc

SEQ ID NO: 483 - DNA, 14 bp, Artificial Sequence
  Description of Artificial Sequence: Synthetic oligonucleotide
cagccgggctagcc

SEQ ID NO: 484 - DNA, 14 bp, Artificial Sequence
  Description of Artificial Sequence: Synthetic oligonucleotide
gcagccgggctagc

SEQ ID NO: 485 - DNA, 14 bp, Artificial Sequence
  Description of Artificial Sequence: Synthetic oligonucleotide
cgcagccgggctag

SEQ ID NO: 486 - DNA, 14 bp, Artificial Sequence
  Description of Artificial Sequence: Synthetic oligonucleotide
gcgcagccgggcta

SEQ ID NO: 487 - DNA, 14 bp, Artificial Sequence
  Description of Artificial Sequence: Synthetic oligonucleotide
cgcgcagccgggct

SEQ ID NO: 488 - DNA, 14 bp, Artificial Sequence
  Description of Artificial Sequence: Synthetic oligonucleotide
ccgcgcagccgggc

SEQ ID NO: 489 - DNA, 14 bp, Artificial Sequence
  Description of Artificial Sequence: Synthetic oligonucleotide
gccgcgcagccggg

SEQ ID NO: 490 - DNA, 14 bp, Artificial Sequence
  Description of Artificial Sequence: Synthetic oligonucleotide
cgccgcgcagccgg

SEQ ID NO: 491 - DNA, 14 bp, Artificial Sequence
  Description of Artificial Sequence: Synthetic oligonucleotide
gcgccgcgcagccg

SEQ ID NO: 492 - DNA, 14 bp, Artificial Sequence
  Description of Artificial Sequence: Synthetic oligonucleotide
ggcgccgcgcagcc

SEQ ID NO: 493 - DNA, 14 bp, Artificial Sequence
  Description of Artificial Sequence: Synthetic oligonucleotide
gggcgccgcgcagc

SEQ ID NO: 494 - DNA, 14 bp, Artificial Sequence
  Description of Artificial Sequence: Synthetic oligonucleotide
cgggcgccgcgcag

SEQ ID NO: 495 - DNA, 14 bp, Artificial Sequence
  Description of Artificial Sequence: Synthetic oligonucleotide
ccgggcgccgcgca

SEQ ID NO: 496 - DNA, 14 bp, Artificial Sequence
  Description of Artificial Sequence: Synthetic oligonucleotide
tccgggcgccgcgc

SEQ ID NO: 497 - DNA, 14 bp, Artificial Sequence
  Description of Artificial Sequence: Synthetic oligonucleotide
ctccgggcgccgcg

SEQ ID NO: 498 - DNA, 14 bp, Artificial Sequence
  Description of Artificial Sequence: Synthetic oligonucleotide
cctccgggcgccgc

SEQ ID NO: 499 - DNA, 14 bp, Artificial Sequence
  Description of Artificial Sequence: Synthetic oligonucleotide
ccctccgggcgccg

SEQ ID NO: 500 - DNA, 14 bp, Artificial Sequence
  Description of Artificial Sequence: Synthetic oligonucleotide
cccctccgggcgcc

SEQ ID NO: 501 - DNA, 14 bp, Artificial Sequence
  Description of Artificial Sequence: Synthetic oligonucleotide
ccccctccgggcgc

SEQ ID NO: 502 - DNA, 14 bp, Artificial Sequence
  Description of Artificial Sequence: Synthetic oligonucleotide
gccccctccgggcg

SEQ ID NO: 503 - DNA, 14 bp, Artificial Sequence
  Description of Artificial Sequence: Synthetic oligonucleotide
ggccccctccgggc

SEQ ID NO: 504 - DNA, 14 bp, Artificial Sequence
  Description of Artificial Sequence: Synthetic oligonucleotide
cggccccctccggg

SEQ ID NO: 505 - DNA, 14 bp, Artificial Sequence
  Description of Artificial Sequence: Synthetic oligonucleotide
ccggccccctccgg

SEQ ID NO: 506 - DNA, 14 bp, Artificial Sequence
  Description of Artificial Sequence: Synthetic oligonucleotide
cccggccccctccg

SEQ ID NO: 507 - DNA, 14 bp, Artificial Sequence
  Description of Artificial Sequence: Synthetic oligonucleotide
gcccggccccctcc

SEQ ID NO: 508 - DNA, 14 bp, Artificial Sequence
  Description of Artificial Sequence: Synthetic oligonucleotide
ggcccggccccctc

SEQ ID NO: 509 - DNA, 14 bp, Artificial Sequence
  Description of Artificial Sequence: Synthetic oligonucleotide
cggcccggccccct

SEQ ID NO: 510 - DNA, 14 bp, Artificial Sequence
  Description of Artificial Sequence: Synthetic oligonucleotide
acggcccggccccc

SEQ ID NO: 511 - DNA, 14 bp, Artificial Sequence
  Description of Artificial Sequence: Synthetic oligonucleotide
gacggcccggcccc

SEQ ID NO: 512 - DNA, 14 bp, Artificial Sequence
  Description of Artificial Sequence: Synthetic oligonucleotide
ggacggcccggccc

SEQ ID NO: 513 - DNA, 14 bp, Artificial Sequence
  Description of Artificial Sequence: Synthetic oligonucleotide
cggacggcccggcc

SEQ ID NO: 514 - DNA, 14 bp, Artificial Sequence
  Description of Artificial Sequence: Synthetic oligonucleotide
ccggacggcccggc

SEQ ID NO: 515 - DNA, 14 bp, Artificial Sequence
  Description of Artificial Sequence: Synthetic oligonucleotide
accggacggcccgg

SEQ ID NO: 516 - DNA, 14 bp, Artificial Sequence
  Description of Artificial Sequence: Synthetic oligonucleotide
caccggacggcccg

SEQ ID NO: 517 - DNA, 14 bp, Artificial Sequence
  Description of Artificial Sequence: Synthetic oligonucleotide
ccaccggacggccc

SEQ ID NO: 518 - DNA, 14 bp, Artificial Sequence
  Description of Artificial Sequence: Synthetic oligonucleotide
cccaccggacggcc

SEQ ID NO: 519 - DNA, 14 bp, Artificial Sequence
  Description of Artificial Sequence: Synthetic oligonucleotide
ccccaccggacggc

SEQ ID NO: 520 - DNA, 14 bp, Artificial Sequence
  Description of Artificial Sequence: Synthetic oligonucleotide
gccccaccggacgg

SEQ ID NO: 521 - DNA, 14 bp, Artificial Sequence
  Description of Artificial Sequence: Synthetic oligonucleotide
ggccccaccggacg

SEQ ID NO: 522 - DNA, 14 bp, Artificial Sequence
  Description of Artificial Sequence: Synthetic oligonucleotide
cggccccaccggac

SEQ ID NO: 523 - DNA, 14 bp, Artificial Sequence
  Description of Artificial Sequence: Synthetic oligonucleotide
gcggccccaccgga

SEQ ID NO: 524 - DNA, 14 bp, Artificial Sequence
  Description of Artificial Sequence: Synthetic oligonucleotide
cgcggccccaccgg

SEQ ID NO: 525 - DNA, 14 bp, Artificial Sequence
  Description of Artificial Sequence: Synthetic oligonucleotide
ccgcggccccaccg

SEQ ID NO: 526 - DNA, 14 bp, Artificial Sequence
  Description of Artificial Sequence: Synthetic oligonucleotide
gccgcggccccacc

SEQ ID NO: 527 - DNA, 14 bp, Artificial Sequence
  Description of Artificial Sequence: Synthetic oligonucleotide
ggccgcggccccac

SEQ ID NO: 528 - DNA, 14 bp, Artificial Sequence
  Description of Artificial Sequence: Synthetic oligonucleotide
gggccgcggcccca

SEQ ID NO: 529 - DNA, 14 bp, Artificial Sequence
  Description of Artificial Sequence: Synthetic oligonucleotide
agggccgcggcccc

SEQ ID NO: 530 - DNA, 14 bp, Artificial Sequence
  Description of Artificial Sequence: Synthetic oligonucleotide
cagggccgcggccc

SEQ ID NO: 531 - DNA, 14 bp, Artificial Sequence
  Description of Artificial Sequence: Synthetic oligonucleotide
acagggccgcggcc

SEQ ID NO: 532 - DNA, 14 bp, Artificial Sequence
  Description of Artificial Sequence: Synthetic oligonucleotide
aacagggccgcggc

SEQ ID NO: 533 - DNA, 14 bp, Artificial Sequence
  Description of Artificial Sequence: Synthetic oligonucleotide
gaacagggccgcgg

SEQ ID NO: 534 - DNA, 14 bp, Artificial Sequence
  Description of Artificial Sequence: Synthetic oligonucleotide
ggaacagggccgcg

SEQ ID NO: 535 - DNA, 14 bp, Artificial Sequence
  Description of Artificial Sequence: Synthetic oligonucleotide
cggaacagggccgc

SEQ ID NO: 536 - DNA, 14 bp, Artificial Sequence
  Description of Artificial Sequence: Synthetic oligonucleotide
gcggaacagggccg

SEQ ID NO: 537 - DNA, 14 bp, Artificial Sequence
  Description of Artificial Sequence: Synthetic oligonucleotide
cgcggaacagggcc

SEQ ID NO: 538 - DNA, 14 bp, Artificial Sequence
  Description of Artificial Sequence: Synthetic oligonucleotide
gcgcggaacagggc

SEQ ID NO: 539 - DNA, 14 bp, Artificial Sequence
  Description of Artificial Sequence: Synthetic oligonucleotide
agcgcggaacaggg

SEQ ID NO: 540 - DNA, 14 bp, Artificial Sequence
  Description of Artificial Sequence: Synthetic oligonucleotide
cagcgcggaacagg

SEQ ID NO: 541 - DNA, 14 bp, Artificial Sequence
  Description of Artificial Sequence: Synthetic oligonucleotide
gcagcgcggaacag

SEQ ID NO: 542 - DNA, 14 bp, Artificial Sequence
  Description of Artificial Sequence: Synthetic oligonucleotide
cgcagcgcggaaca

SEQ ID NO: 543 - DNA, 14 bp, Artificial Sequence
  Description of Artificial Sequence: Synthetic oligonucleotide
tcgcagcgcggaac

SEQ ID NO: 544 - DNA, 14 bp, Artificial Sequence
  Description of Artificial Sequence: Synthetic oligonucleotide
ctcgcagcgcggaa

SEQ ID NO: 545 - DNA, 14 bp, Artificial Sequence
  Description of Artificial Sequence: Synthetic oligonucleotide
gctcgcagcgcgga

SEQ ID NO: 546 - DNA, 14 bp, Artificial Sequence
  Description of Artificial Sequence: Synthetic oligonucleotide
agctcgcagcgcgg

SEQ ID NO: 547 - DNA, 14 bp, Artificial Sequence
  Description of Artificial Sequence: Synthetic oligonucleotide
gagctcgcagcgcg

SEQ ID NO: 548 - DNA, 14 bp, Artificial Sequence
  Description of Artificial Sequence: Synthetic oligonucleotide
cgagctcgcagcgc

SEQ ID NO: 549 - DNA, 14 bp, Artificial Sequence
  Description of Artificial Sequence: Synthetic oligonucleotide
gcgagctcgcagcg

SEQ ID NO: 550 - DNA, 14 bp, Artificial Sequence
  Description of Artificial Sequence: Synthetic oligonucleotide
ggcgagctcgcagc

SEQ ID NO: 551 - DNA, 14 bp, Artificial Sequence
  Description of Artificial Sequence: Synthetic oligonucleotide
gggcgagctcgcag

SEQ ID NO: 552 - DNA, 14 bp, Artificial Sequence
  Description of Artificial Sequence: Synthetic oligonucleotide
agggcgagctcgca

SEQ ID NO: 553 - DNA, 14 bp, Artificial Sequence
  Description of Artificial Sequence: Synthetic oligonucleotide
gagggcgagctcgc

SEQ ID NO: 554 - DNA, 14 bp, Artificial Sequence
  Description of Artificial Sequence: Synthetic oligonucleotide
agagggcgagctcg

SEQ ID NO: 555 - DNA, 14 bp, Artificial Sequence
  Description of Artificial Sequence: Synthetic oligonucleotide
gagagggcgagctc

SEQ ID NO: 556 - DNA, 14 bp, Artificial Sequence
  Description of Artificial Sequence: Synthetic oligonucleotide
cgagagggcgagct

SEQ ID NO: 557 - DNA, 14 bp, Artificial Sequence
  Description of Artificial Sequence: Synthetic oligonucleotide
gcgagagggcgagc

SEQ ID NO: 558 - DNA, 14 bp, Artificial Sequence
  Description of Artificial Sequence: Synthetic oligonucleotide
cgcgagagggcgag

SEQ ID NO: 559 - DNA, 14 bp, Artificial Sequence
  Description of Artificial Sequence: Synthetic oligonucleotide
ccgcgagagggcga

SEQ ID NO: 560 - DNA, 14 bp, Artificial Sequence
  Description of Artificial Sequence: Synthetic oligonucleotide
gccgcgagagggcg

SEQ ID NO: 561 - DNA, 14 bp, Artificial Sequence
  Description of Artificial Sequence: Synthetic oligonucleotide
agccgcgagagggc

SEQ ID NO: 562 - DNA, 14 bp, Artificial Sequence
  Description of Artificial Sequence: Synthetic oligonucleotide
gagccgcgagaggg

SEQ ID NO: 563 - DNA, 14 bp, Artificial Sequence
  Description of Artificial Sequence: Synthetic oligonucleotide
ggagccgcgagagg

SEQ ID NO: 564 - DNA, 14 bp, Artificial Sequence
  Description of Artificial Sequence: Synthetic oligonucleotide
gggagccgcgagag

SEQ ID NO: 565 - DNA, 14 bp, Artificial Sequence
  Description of Artificial Sequence: Synthetic oligonucleotide
agggagccgcgaga

SEQ ID NO: 566 - DNA, 14 bp, Artificial Sequence
  Description of Artificial Sequence: Synthetic oligonucleotide
cagggagccgcgag

SEQ ID NO: 567 - DNA, 14 bp, Artificial Sequence
  Description of Artificial Sequence: Synthetic oligonucleotide
ccagggagccgcga

SEQ ID NO: 568 - DNA, 14 bp, Artificial Sequence
  Description of Artificial Sequence: Synthetic oligonucleotide
gccagggagccgcg

SEQ ID NO: 569 - DNA, 14 bp, Artificial Sequence
  Description of Artificial Sequence: Synthetic oligonucleotide
ggccagggagccgc

SEQ ID NO: 570 - DNA, 14 bp, Artificial Sequence
  Description of Artificial Sequence: Synthetic oligonucleotide
gggccagggagccg

SEQ ID NO: 571 - DNA, 14 bp, Artificial Sequence
  Description of Artificial Sequence: Synthetic oligonucleotide
cgggccagggagcc

SEQ ID NO: 572 - DNA, 14 bp, Artificial Sequence
  Description of Artificial Sequence: Synthetic oligonucleotide
ccgggccagggagc

SEQ ID NO: 573 - DNA, 14 bp, Artificial Sequence
  Description of Artificial Sequence: Synthetic oligonucleotide
gccgggccagggag

SEQ ID NO: 574 - DNA, 14 bp, Artificial Sequence
  Description of Artificial Sequence: Synthetic oligonucleotide
ggccgggccaggga

SEQ ID NO: 575 - DNA, 14 bp, Artificial Sequence
  Description of Artificial Sequence: Synthetic oligonucleotide
cggccgggccaggg

SEQ ID NO: 576 - DNA, 14 bp, Artificial Sequence
  Description of Artificial Sequence: Synthetic oligonucleotide
gcggccgggccagg

SEQ ID NO: 577 - DNA, 14 bp, Artificial Sequence
  Description of Artificial Sequence: Synthetic oligonucleotide
ggcggccgggccag

SEQ ID NO: 578 - DNA, 14 bp, Artificial Sequence
  Description of Artificial Sequence: Synthetic oligonucleotide
cggcggccgggcca

SEQ ID NO: 579 - DNA, 14 bp, Artificial Sequence
  Description of Artificial Sequence: Synthetic oligonucleotide
gcggcggccgggcc

SEQ ID NO: 580 - DNA, 14 bp, Artificial Sequence
  Description of Artificial Sequence: Synthetic oligonucleotide
ggcggcggccgggc

SEQ ID NO: 581 - DNA, 14 bp, Artificial Sequence
  Description of Artificial Sequence: Synthetic oligonucleotide
cggcggcggccggg

SEQ ID NO: 582 - DNA, 14 bp, Artificial Sequence
  Description of Artificial Sequence: Synthetic oligonucleotide
gcggcggcggccgg

SEQ ID NO: 583 - DNA, 14 bp, Artificial Sequence
  Description of Artificial Sequence: Synthetic oligonucleotide
ggcggcggcggccg

SEQ ID NO: 584 - DNA, 14 bp, Artificial Sequence
  Description of Artificial Sequence: Synthetic oligonucleotide
gggcggcggcggcc

SEQ ID NO: 585 - DNA, 14 bp, Artificial Sequence
  Description of Artificial Sequence: Synthetic oligonucleotide
ggggcggcggcggc

SEQ ID NO: 586 - DNA, 14 bp, Artificial Sequence
  Description of Artificial Sequence: Synthetic oligonucleotide
aggggcggcggcgg

SEQ ID NO: 587 - DNA, 14 bp, Artificial Sequence
  Description of Artificial Sequence: Synthetic oligonucleotide
gaggggcggcggcg

SEQ ID NO: 588 - DNA, 14 bp, Artificial Sequence
  Description of Artificial Sequence: Synthetic oligonucleotide
agaggggcggcggc

SEQ ID NO: 589 - DNA, 14 bp, Artificial Sequence
  Description of Artificial Sequence: Synthetic oligonucleotide
gagaggggcggcgg

SEQ ID NO: 590 - DNA, 14 bp, Artificial Sequence
  Description of Artificial Sequence: Synthetic oligonucleotide
ggagaggggcggcg

SEQ ID NO: 591 - DNA, 14 bp, Artificial Sequence
  Description of Artificial Sequence: Synthetic oligonucleotide
gggagaggggcggc

SEQ ID NO: 592 - DNA, 14 bp, Artificial Sequence
  Description of Artificial Sequence: Synthetic oligonucleotide
ggggagaggggcgg

SEQ ID NO: 593 - DNA, 14 bp, Artificial Sequence
  Description of Artificial Sequence: Synthetic oligonucleotide
cggggagaggggcg

SEQ ID NO: 594 - DNA, 14 bp, Artificial Sequence
  Description of Artificial Sequence: Synthetic oligonucleotide
gcggggagaggggc

SEQ ID NO: 595 - DNA, 14 bp, Artificial Sequence
  Description of Artificial Sequence: Synthetic oligonucleotide
ggcggggagagggg

SEQ ID NO: 596 - DNA, 14 bp, Artificial Sequence
  Description of Artificial Sequence: Synthetic oligonucleotide
gggcggggagaggg

SEQ ID NO: 597 - DNA, 14 bp, Artificial Sequence
  Description of Artificial Sequence: Synthetic oligonucleotide
tgggcggggagagg

SEQ ID NO: 598 - DNA, 14 bp, Artificial Sequence
  Description of Artificial Sequence: Synthetic oligonucleotide
ctgggcggggagag

SEQ ID NO: 599 - DNA, 14 bp, Artificial Sequence
  Description of Artificial Sequence: Synthetic oligonucleotide
tctgggcggggaga

SEQ ID NO: 600 - DNA, 14 bp, Artificial Sequence
  Description of Artificial Sequence: Synthetic oligonucleotide
ctctgggcggggag

SEQ ID NO: 601 - DNA, 14 bp, Artificial Sequence
  Description of Artificial Sequence: Synthetic oligonucleotide
cctctgggcgggga

SEQ ID NO: 602 - DNA, 14 bp, Artificial Sequence
  Description of Artificial Sequence: Synthetic oligonucleotide
gcctctgggcgggg

SEQ ID NO: 603 - DNA, 14 bp, Artificial Sequence
  Description of Artificial Sequence: Synthetic oligonucleotide
cgcctctgggcggg

SEQ ID NO: 604 - DNA, 14 bp, Artificial Sequence
  Description of Artificial Sequence: Synthetic oligonucleotide
gcgcctctgggcgg

SEQ ID NO: 605 - DNA, 14 bp, Artificial Sequence
  Description of Artificial Sequence: Synthetic oligonucleotide
ggcgcctctgggcg

SEQ ID NO: 606 - DNA, 14 bp, Artificial Sequence
  Description of Artificial Sequence: Synthetic oligonucleotide
gggcgcctctgggc

SEQ ID NO: 607 - DNA, 14 bp, Artificial Sequence
  Description of Artificial Sequence: Synthetic oligonucleotide
ggggcgcctctggg

SEQ ID NO: 608 - DNA, 14 bp, Artificial Sequence
  Description of Artificial Sequence: Synthetic oligonucleotide
cggggcgcctctgg

SEQ ID NO: 609 - DNA, 14 bp, Artificial Sequence
  Description of Artificial Sequence: Synthetic oligonucleotide
ccggggcgcctctg

SEQ ID NO: 610 - DNA, 14 bp, Artificial Sequence
  Description of Artificial Sequence: Synthetic oligonucleotide
cccggggcgcctct

SEQ ID NO: 611 - DNA, 14 bp, Artificial Sequence
  Description of Artificial Sequence: Synthetic oligonucleotide
ccccggggcgcctc

SEQ ID NO: 612 - DNA, 14 bp, Artificial Sequence
  Description of Artificial Sequence: Synthetic oligonucleotide
cccccggggcgcct

SEQ ID NO: 613 - DNA, 14 bp, Artificial Sequence
  Description of Artificial Sequence: Synthetic oligonucleotide
gcccccggggcgcc

SEQ ID NO: 614 - DNA, 14 bp, Artificial Sequence
  Description of Artificial Sequence: Synthetic oligonucleotide
tgcccccggggcgc

SEQ ID NO: 615 - DNA, 14 bp, Artificial Sequence
  Description of Artificial Sequence: Synthetic oligonucleotide
gtgcccccggggcg

SEQ ID NO: 616 - DNA, 14 bp, Artificial Sequence
  Description of Artificial Sequence: Synthetic oligonucleotide
ggtgcccccggggc

SEQ ID NO: 617 - DNA, 14 bp, Artificial Sequence
  Description of Artificial Sequence: Synthetic oligonucleotide
tggtgcccccgggg

SEQ ID NO: 618 - DNA, 14 bp, Artificial Sequence
  Description of Artificial Sequence: Synthetic oligonucleotide
atggtgcccccggg

SEQ ID NO: 619 - DNA, 14 bp, Artificial Sequence
  Description of Artificial Sequence: Synthetic oligonucleotide
catggtgcccccgg

SEQ ID NO: 620 - DNA, 14 bp, Artificial Sequence
  Description of Artificial Sequence: Synthetic oligonucleotide
gcatggtgcccccg

SEQ ID NO: 621 - DNA, 14 bp, Artificial Sequence
  Description of Artificial Sequence: Synthetic oligonucleotide
tgcatggtgccccc

SEQ ID NO: 622 - DNA, 14 bp, Artificial Sequence
  Description of Artificial Sequence: Synthetic oligonucleotide
ctgcatggtgcccc

SEQ ID NO: 623 - DNA, 14 bp, Artificial Sequence
  Description of Artificial Sequence: Synthetic oligonucleotide
cctgcatggtgccc

SEQ ID NO: 624 - DNA, 14 bp, Artificial Sequence
  Description of Artificial Sequence: Synthetic oligonucleotide
gcctgcatggtgcc

SEQ ID NO: 625 - DNA, 14 bp, Artificial Sequence
  Description of Artificial Sequence: Synthetic oligonucleotide
cgcctgcatggtgc

SEQ ID NO: 626 - DNA, 14 bp, Artificial Sequence
  Description of Artificial Sequence: Synthetic oligonucleotide
gcgcctgcatggtg

SEQ ID NO: 627 - DNA, 14 bp, Artificial Sequence
  Description of Artificial Sequence: Synthetic oligonucleotide
tgcgcctgcatggt

SEQ ID NO: 628 - DNA, 14 bp, Artificial Sequence
  Description of Artificial Sequence: Synthetic oligonucleotide
ctgcgcctgcatgg

SEQ ID NO: 629 - DNA, 14 bp, Artificial Sequence
  Description of Artificial Sequence: Synthetic oligonucleotide
gctgcgcctgcatg

SEQ ID NO: 630 - DNA, 14 bp, Artificial Sequence
  Description of Artificial Sequence: Synthetic oligonucleotide
tgctgcgcctgcat

SEQ ID NO: 631 - DNA, 14 bp, Artificial Sequence
  Description of Artificial Sequence: Synthetic oligonucleotide
ctgctgcgcctgca

SEQ ID NO: 632 - DNA, 14 bp, Artificial Sequence
  Description of Artificial Sequence: Synthetic oligonucleotide
gctgctgcgcctgc

SEQ ID NO: 633 - DNA, 14 bp, Artificial Sequence
  Description of Artificial Sequence: Synthetic oligonucleotide
agctgctgcgcctg

SEQ ID NO: 634 - DNA, 14 bp, Artificial Sequence
  Description of Artificial Sequence: Synthetic oligonucleotide
cagctgctgcgcct

SEQ ID NO: 635 - DNA, 14 bp, Artificial Sequence
  Description of Artificial Sequence: Synthetic oligonucleotide
gcagctgctgcgcc

SEQ ID NO: 636 - DNA, 14 bp, Artificial Sequence
  Description of Artificial Sequence: Synthetic oligonucleotide
ggcagctgctgcgc

SEQ ID NO: 637 - DNA, 14 bp, Artificial Sequence
  Description of Artificial Sequence: Synthetic oligonucleotide
gggcagctgctgcg

SEQ ID NO: 638 - DNA, 14 bp, Artificial Sequence
  Description of Artificial Sequence: Synthetic oligonucleotide
agggcagctgctgc

SEQ ID NO: 639 - DNA, 14 bp, Artificial Sequence
  Description of Artificial Sequence: Synthetic oligonucleotide
tagggcagctgctg

SEQ ID NO: 640 - DNA, 14 bp, Artificial Sequence
  Description of Artificial Sequence: Synthetic oligonucleotide
gtagggcagctgct

SEQ ID NO: 641 - DNA, 14 bp, Artificial Sequence
  Description of Artificial Sequence: Synthetic oligonucleotide
cgtagggcagctgc

SEQ ID NO: 642 - DNA, 14 bp, Artificial Sequence
  Description of Artificial Sequence: Synthetic oligonucleotide
tcgtagggcagctg

SEQ ID NO: 643 - DNA, 14 bp, Artificial Sequence
  Description of Artificial Sequence: Synthetic oligonucleotide
ctcgtagggcagct

SEQ ID NO: 644 - DNA, 14 bp, Artificial Sequence
  Description of Artificial Sequence: Synthetic oligonucleotide
actcgtagggcagc

SEQ ID NO: 645 - DNA, 14 bp, Artificial Sequence
  Description of Artificial Sequence: Synthetic oligonucleotide
aactcgtagggcag

SEQ ID NO: 646 - DNA, 14 bp, Artificial Sequence
  Description of Artificial Sequence: Synthetic oligonucleotide
aaactcgtagggca

SEQ ID NO: 647 - DNA, 14 bp, Artificial Sequence
  Description of Artificial Sequence: Synthetic oligonucleotide
aaaactcgtagggc

SEQ ID NO: 648 - DNA, 14 bp, Artificial Sequence
  Description of Artificial Sequence: Synthetic oligonucleotide
aaaaactcgtaggg

SEQ ID NO: 649 - DNA, 14 bp, Artificial Sequence
  Description of Artificial Sequence: Synthetic oligonucleotide
gaaaaactcgtagg

SEQ ID NO: 650 - DNA, 14 bp, Artificial Sequence
  Description of Artificial Sequence: Synthetic oligonucleotide
tgaaaaactcgtag

SEQ ID NO: 651 - DNA, 14 bp, Artificial Sequence
  Description of Artificial Sequence: Synthetic oligonucleotide
ctgaaaaactcgta

SEQ ID NO: 652 - DNA, 14 bp, Artificial Sequence
  Description of Artificial Sequence: Synthetic oligonucleotide
gctgaaaaactcgt

SEQ ID NO: 653 - DNA, 14 bp, Artificial Sequence
  Description of Artificial Sequence: Synthetic oligonucleotide
cgctgaaaaactcg

SEQ ID NO: 654 - DNA, 14 bp, Artificial Sequence
  Description of Artificial Sequence: Synthetic oligonucleotide
tcgctgaaaaactc

SEQ ID NO: 655 - DNA, 14 bp, Artificial Sequence
  Description of Artificial Sequence: Synthetic oligonucleotide
ttcgctgaaaaact

SEQ ID NO: 656 - DNA, 14 bp, Artificial Sequence
  Description of Artificial Sequence: Synthetic oligonucleotide
cttcgctgaaaaac

SEQ ID NO: 657 - DNA, 14 bp, Artificial Sequence
  Description of Artificial Sequence: Synthetic oligonucleotide
tcttcgctgaaaaa

SEQ ID NO: 658 - DNA, 14 bp, Artificial Sequence
  Description of Artificial Sequence: Synthetic oligonucleotide
ctcttcgctgaaaa

SEQ ID NO: 659 - DNA, 14 bp, Artificial Sequence
  Description of Artificial Sequence: Synthetic oligonucleotide
tctcttcgctgaaa

SEQ ID NO: 660 - DNA, 14 bp, Artificial Sequence
  Description of Artificial Sequence: Synthetic oligonucleotide
ttctcttcgctgaa

SEQ ID NO: 661 - DNA, 14 bp, Artificial Sequence
  Description of Artificial Sequence: Synthetic oligonucleotide
gttctcttcgctga

SEQ ID NO: 662 - DNA, 14 bp, Artificial Sequence
  Description of Artificial Sequence: Synthetic oligonucleotide
cgttctcttcgctg

SEQ ID NO: 663 - DNA, 14 bp, Artificial Sequence
  Description of Artificial Sequence: Synthetic oligonucleotide
gcgttctcttcgct

SEQ ID NO: 664 - DNA, 14 bp, Artificial Sequence
  Description of Artificial Sequence: Synthetic oligonucleotide
cgcgttctcttcgc

SEQ ID NO: 665 - DNA, 14 bp, Artificial Sequence
  Description of Artificial Sequence: Synthetic oligonucleotide
gcgcgttctcttcg

SEQ ID NO: 666 - DNA, 14 bp, Artificial Sequence
  Description of Artificial Sequence: Synthetic oligonucleotide
ggcgcgttctcttc

SEQ ID NO: 667 - DNA, 14 bp, Artificial Sequence
  Description of Artificial Sequence: Synthetic oligonucleotide
gggcgcgttctctt

SEQ ID NO: 668 - DNA, 14 bp, Artificial Sequence
  Description of Artificial Sequence: Synthetic oligonucleotide
tgggcgcgttctct

SEQ ID NO: 669 - DNA, 14 bp, Artificial Sequence
  Description of Artificial Sequence: Synthetic oligonucleotide
ttgggcgcgttctc

SEQ ID NO: 670 - DNA, 14 bp, Artificial Sequence
  Description of Artificial Sequence: Synthetic oligonucleotide
cttgggcgcgttct

SEQ ID NO: 671 - DNA, 14 bp, Artificial Sequence
  Description of Artificial Sequence: Synthetic oligonucleotide
acttgggcgcgttc

SEQ ID NO: 672 - DNA, 14 bp, Artificial Sequence
  Description of Artificial Sequence: Synthetic oligonucleotide
cacttgggcgcgtt

SEQ ID NO: 673 - DNA, 14 bp, Artificial Sequence
  Description of Artificial Sequence: Synthetic oligonucleotide
ccacttgggcgcgt

SEQ ID NO: 674 - DNA, 14 bp, Artificial Sequence
  Description of Artificial Sequence: Synthetic oligonucleotide
gccacttgggcgcg

SEQ ID NO: 675 - DNA, 14 bp, Artificial Sequence
  Description of Artificial Sequence: Synthetic oligonucleotide
cgccacttgggcgc

SEQ ID NO: 676 - DNA, 14 bp, Artificial Sequence
  Description of Artificial Sequence: Synthetic oligonucleotide
ccgccacttgggcg

SEQ ID NO: 677 - DNA, 14 bp, Artificial Sequence
  Description of Artificial Sequence: Synthetic oligonucleotide
cccgccacttgggc

SEQ ID NO: 678 - DNA, 14 bp, Artificial Sequence
  Description of Artificial Sequence: Synthetic oligonucleotide
ccccgccacttggg

SEQ ID NO: 679 - DNA, 14 bp, Artificial Sequence
  Description of Artificial Sequence: Synthetic oligonucleotide
tccccgccacttgg

SEQ ID NO: 680 - DNA, 14 bp, Artificial Sequence
  Description of Artificial Sequence: Synthetic oligonucleotide
gtccccgccacttg

SEQ ID NO: 681 - DNA, 14 bp, Artificial Sequence
  Description of Artificial Sequence: Synthetic oligonucleotide
agtccccgccactt

SEQ ID NO: 682 - DNA, 14 bp, Artificial Sequence
  Description of Artificial Sequence: Synthetic oligonucleotide
tagtccccgccact

SEQ ID NO: 683 - DNA, 14 bp, Artificial Sequence
  Description of Artificial Sequence: Synthetic oligonucleotide
gtagtccccgccac

SEQ ID NO: 684 - DNA, 14 bp, Artificial Sequence
  Description of Artificial Sequence: Synthetic oligonucleotide
agtagtccccgcca

SEQ ID NO: 685 - DNA, 14 bp, Artificial Sequence
  Description of Artificial Sequence: Synthetic oligonucleotide
cagtagtccccgcc

SEQ ID NO: 686 - DNA, 14 bp, Artificial Sequence
  Description of Artificial Sequence: Synthetic oligonucleotide
ccagtagtccccgc

SEQ ID NO: 687 - DNA, 14 bp, Artificial Sequence
  Description of Artificial Sequence: Synthetic oligonucleotide
accagtagtccccg

SEQ ID NO: 688 - DNA, 14 bp, Artificial Sequence
  Description of Artificial Sequence: Synthetic oligonucleotide
caccagtagtcccc

SEQ ID NO: 689 - DNA, 14 bp, Artificial Sequence
  Description of Artificial Sequence: Synthetic oligonucleotide
gcaccagtagtccc

SEQ ID NO: 690 - DNA, 14 bp, Artificial Sequence
  Description of Artificial Sequence: Synthetic oligonucleotide
ggcaccagtagtcc

SEQ ID NO: 691 - DNA, 14 bp, Artificial Sequence
  Description of Artificial Sequence: Synthetic oligonucleotide
aggcaccagtagtc

SEQ ID NO: 692 - DNA, 14 bp, Artificial Sequence
  Description of Artificial Sequence: Synthetic oligonucleotide
caggcaccagtagt

SEQ ID NO: 693 - DNA, 14 bp, Artificial Sequence
  Description of Artificial Sequence: Synthetic oligonucleotide
gcaggcaccagtag

SEQ ID NO: 694 - DNA, 14 bp, Artificial Sequence
  Description of Artificial Sequence: Synthetic oligonucleotide
cgcaggcaccagta

SEQ ID NO: 695 - DNA, 14 bp, Artificial Sequence
  Description of Artificial Sequence: Synthetic oligonucleotide
gcgcaggcaccagt

SEQ ID NO: 696 - DNA, 14 bp, Artificial Sequence
  Description of Artificial Sequence: Synthetic oligonucleotide
agcgcaggcaccag

SEQ ID NO: 697 - DNA, 14 bp, Artificial Sequence
  Description of Artificial Sequence: Synthetic oligonucleotide
cagcgcaggcacca

SEQ ID NO: 698 - DNA, 14 bp, Artificial Sequence
  Description of Artificial Sequence: Synthetic oligonucleotide
tcagcgcaggcacc

SEQ ID NO: 699 - DNA, 14 bp, Artificial Sequence
  Description of Artificial Sequence: Synthetic oligonucleotide
ttcagcgcaggcac

SEQ ID NO: 700 - DNA, 14 bp, Artificial Sequence
  Description of Artificial Sequence: Synthetic oligonucleotide
tttcagcgcaggca

SEQ ID NO: 701 - DNA, 14 bp, Artificial Sequence
  Description of Artificial Sequence: Synthetic oligonucleotide
ttttcagcgcaggc

SEQ ID NO: 702 - DNA, 14 bp, Artificial Sequence
  Description of Artificial Sequence: Synthetic oligonucleotide
tttttcagcgcagg

SEQ ID NO: 703 - DNA, 14 bp, Artificial Sequence
  Description of Artificial Sequence: Synthetic oligonucleotide
ctttttcagcgcag

SEQ ID NO: 704 - DNA, 14 bp, Artificial Sequence
  Description of Artificial Sequence: Synthetic oligonucleotide
cctttttcagcgca

SEQ ID NO: 705 - DNA, 14 bp, Artificial Sequence
  Description of Artificial Sequence: Synthetic oligonucleotide
acctttttcagcgc

SEQ ID NO: 706 - DNA, 14 bp, Artificial Sequence
  Description of Artificial Sequence: Synthetic oligonucleotide
gacctttttcagcg

SEQ ID NO: 707 - DNA, 14 bp, Artificial Sequence
  Description of Artificial Sequence: Synthetic oligonucleotide
ggacctttttcagc

SEQ ID NO: 708 - DNA, 14 bp, Artificial Sequence
  Description of Artificial Sequence: Synthetic oligonucleotide
tggacctttttcag

SEQ ID NO: 709 - DNA, 14 bp, Artificial Sequence
  Description of Artificial Sequence: Synthetic oligonucleotide
ctggacctttttca

SEQ ID NO: 710 - DNA, 14 bp, Artificial Sequence
  Description of Artificial Sequence: Synthetic oligonucleotide
cctggacctttttc

SEQ ID NO: 711 - DNA, 14 bp, Artificial Sequence
  Description of Artificial Sequence: Synthetic oligonucleotide
ccctggaccttttt

SEQ ID NO: 712 - DNA, 14 bp, Artificial Sequence
  Description of Artificial Sequence: Synthetic oligonucleotide
cccctggacctttt

SEQ ID NO: 713 - DNA, 14 bp, Artificial Sequence
  Description of Artificial Sequence: Synthetic oligonucleotide
gcccctggaccttt

SEQ ID NO: 714 - DNA, 14 bp, Artificial Sequence
  Description of Artificial Sequence: Synthetic oligonucleotide
tgcccctggacctt

SEQ ID NO: 715 - DNA, 14 bp, Artificial Sequence
  Description of Artificial Sequence: Synthetic oligonucleotide
ttgcccctggacct

SEQ ID NO: 716 - DNA, 14 bp, Artificial Sequence
  Description of Artificial Sequence: Synthetic oligonucleotide
cttgcccctggacc

SEQ ID NO: 717 - DNA, 14 bp, Artificial Sequence
  Description of Artificial Sequence: Synthetic oligonucleotide
acttgcccctggac

SEQ ID NO: 718 - DNA, 14 bp, Artificial Sequence
  Description of Artificial Sequence: Synthetic oligonucleotide
aacttgcccctgga

SEQ ID NO: 719 - DNA, 14 bp, Artificial Sequence
  Description of Artificial Sequence: Synthetic oligonucleotide
gaacttgcccctgg

SEQ ID NO: 720 - DNA, 14 bp, Artificial Sequence
  Description of Artificial Sequence: Synthetic oligonucleotide
tgaacttgcccctg

SEQ ID NO: 721 - DNA, 14 bp, Artificial Sequence
  Description of Artificial Sequence: Synthetic oligonucleotide
atgaacttgcccct

SEQ ID NO: 722 - DNA, 14 bp, Artificial Sequence
  Description of Artificial Sequence: Synthetic oligonucleotide
gatgaacttgcccc

SEQ ID NO: 723 - DNA, 14 bp, Artificial Sequence
  Description of Artificial Sequence: Synthetic oligonucleotide
ggatgaacttgccc

SEQ ID NO: 724 - DNA, 14 bp, Artificial Sequence
  Description of Artificial Sequence: Synthetic oligonucleotide
aggatgaacttgcc

SEQ ID NO: 725 - DNA, 14 bp, Artificial Sequence
  Description of Artificial Sequence: Synthetic oligonucleotide
taggatgaacttgc

SEQ ID NO: 726 - DNA, 14 bp, Artificial Sequence
  Description of Artificial Sequence: Synthetic oligonucleotide
gtaggatgaacttg

SEQ ID NO: 727 - DNA, 14 bp, Artificial Sequence
  Description of Artificial Sequence: Synthetic oligonucleotide
agtaggatgaactt

SEQ ID NO: 728 - DNA, 14 bp, Artificial Sequence
  Description of Artificial Sequence: Synthetic oligonucleotide
gagtaggatgaact

SEQ ID NO: 729 - DNA, 14 bp, Artificial Sequence
  Description of Artificial Sequence: Synthetic oligonucleotide
agagtaggatgaac

SEQ ID NO: 730 - DNA, 14 bp, Artificial Sequence
  Description of Artificial Sequence: Synthetic oligonucleotide
gagagtaggatgaa

SEQ ID NO: 731 - DNA, 14 bp, Artificial Sequence
  Description of Artificial Sequence: Synthetic oligonucleotide
cgagagtaggatga

SEQ ID NO: 732 - DNA, 14 bp, Artificial Sequence
  Description of Artificial Sequence: Synthetic oligonucleotide
tcgagagtaggatg

SEQ ID NO: 733 - DNA, 14 bp, Artificial Sequence
  Description of Artificial Sequence: Synthetic oligonucleotide
ctcgagagtaggat

SEQ ID NO: 734 - DNA, 14 bp, Artificial Sequence
  Description of Artificial Sequence: Synthetic oligonucleotide
actcgagagtagga

SEQ ID NO: 735 - DNA, 14 bp, Artificial Sequence
  Description of Artificial Sequence: Synthetic oligonucleotide
gactcgagagtagg

SEQ ID NO: 736 - DNA, 14 bp, Artificial Sequence
  Description of Artificial Sequence: Synthetic oligonucleotide
agactcgagagtag

SEQ ID NO: 737 - DNA, 14 bp, Artificial Sequence
  Description of Artificial Sequence: Synthetic oligonucleotide
tagactcgagagta

SEQ ID NO: 738 - DNA, 14 bp, Artificial Sequence
  Description of Artificial Sequence: Synthetic oligonucleotide
ttagactcgagagt

SEQ ID NO: 739 - DNA, 14 bp, Artificial Sequence
  Description of Artificial Sequence: Synthetic oligonucleotide
attagactcgagag

SEQ ID NO: 740 - DNA, 14 bp, Artificial Sequence
  Description of Artificial Sequence: Synthetic oligonucleotide
cattagactcgaga

SEQ ID NO: 741 - DNA, 14 bp, Artificial Sequence
  Description of Artificial Sequence: Synthetic oligonucleotide
tcattagactcgag

SEQ ID NO: 742 - DNA, 14 bp, Artificial Sequence
  Description of Artificial Sequence: Synthetic oligonucleotide
atcattagactcga

SEQ ID NO: 743 - DNA, 14 bp, Artificial Sequence
  Description of Artificial Sequence: Synthetic oligonucleotide
catcattagactcg

SEQ ID NO: 744 - DNA, 14 bp, Artificial Sequence
  Description of Artificial Sequence: Synthetic oligonucleotide
tcatcattagactc

SEQ ID NO: 745 - DNA, 14 bp, Artificial Sequence
  Description of Artificial Sequence: Synthetic oligonucleotide
atcatcattagact

SEQ ID NO: 746 - DNA, 14 bp, Artificial Sequence
  Description of Artificial Sequence: Synthetic oligonucleotide
catcatcattagac

SEQ ID NO: 747 - DNA, 14 bp, Artificial Sequence
  Description of Artificial Sequence: Synthetic oligonucleotide
gcatcatcattaga

SEQ ID NO: 748 - DNA, 14 bp, Artificial Sequence
  Description of Artificial Sequence: Synthetic oligonucleotide
agcatcatcattag

SEQ ID NO: 749 - DNA, 14 bp, Artificial Sequence
  Description of Artificial Sequence: Synthetic oligonucleotide
gagcatcatcatta

SEQ ID NO: 750 - DNA, 14 bp, Artificial Sequence
  Description of Artificial Sequence: Synthetic oligonucleotide
agagcatcatcatt

SEQ ID NO: 751 - DNA, 14 bp, Artificial Sequence
  Description of Artificial Sequence: Synthetic oligonucleotide
tttcataatgccgg

SEQ ID NO: 752 - DNA, 14 bp, Artificial Sequence
  Description of Artificial Sequence: Synthetic oligonucleotide
gaagagcatcatca

SEQ ID NO: 753 - DNA, 14 bp, Artificial Sequence
  Description of Artificial Sequence: Synthetic oligonucleotide
tgaagagcatcatc

SEQ ID NO: 754 - DNA, 14 bp, Artificial Sequence
  Description of Artificial Sequence: Synthetic oligonucleotide
ctgaagagcatcat

SEQ ID NO: 755 - DNA, 14 bp, Artificial Sequence
  Description of Artificial Sequence: Synthetic oligonucleotide
actgaagagcatca

SEQ ID NO: 756 - DNA, 14 bp, Artificial Sequence
  Description of Artificial Sequence: Synthetic oligonucleotide
tactgaagagcatc

SEQ ID NO: 757 - DNA, 14 bp, Artificial Sequence
  Description of Artificial Sequence: Synthetic oligonucleotide
atactgaagagcat

SEQ ID NO: 758 - DNA, 14 bp, Artificial Sequence
  Description of Artificial Sequence: Synthetic oligonucleotide
catactgaagagca

SEQ ID NO: 759 - DNA, 14 bp, Artificial Sequence
  Description of Artificial Sequence: Synthetic oligonucleotide
acatactgaagagc

SEQ ID NO: 760 - DNA, 14 bp, Artificial Sequence
  Description of Artificial Sequence: Synthetic oligonucleotide
aacatactgaagag

SEQ ID NO: 761 - DNA, 14 bp, Artificial Sequence
  Description of Artificial Sequence: Synthetic oligonucleotide
caacatactgaaga

SEQ ID NO: 762 - DNA, 14 bp, Artificial Sequence
  Description of Artificial Sequence: Synthetic oligonucleotide
tcaacatactgaag

SEQ ID NO: 763 - DNA, 14 bp, Artificial Sequence
  Description of Artificial Sequence: Synthetic oligonucleotide
ttcaacatactgaa

SEQ ID NO: 764 - DNA, 14 bp, Artificial Sequence
  Description of Artificial Sequence: Synthetic oligonucleotide
cttcaacatactga

SEQ ID NO: 765 - DNA, 14 bp, Artificial Sequence
  Description of Artificial Sequence: Synthetic oligonucleotide
tcttcaacatactg

SEQ ID NO: 766 - DNA, 14 bp, Artificial Sequence
  Description of Artificial Sequence: Synthetic oligonucleotide
ttcttcaacatact

SEQ ID NO: 767 - DNA, 14 bp, Artificial Sequence
  Description of Artificial Sequence: Synthetic oligonucleotide
attcttcaacatac

SEQ ID NO: 768 - DNA, 14 bp, Artificial Sequence
  Description of Artificial Sequence: Synthetic oligonucleotide
aattcttcaacata

SEQ ID NO: 769 - DNA, 14 bp, Artificial Sequence
  Description of Artificial Sequence: Synthetic oligonucleotide
taattcttcaacat

SEQ ID NO: 770 - DNA, 14 bp, Artificial Sequence
  Description of Artificial Sequence: Synthetic oligonucleotide
ttaattcttcaaca

SEQ ID NO: 771 - DNA, 14 bp, Artificial Sequence
  Description of Artificial Sequence: Synthetic oligonucleotide
attaattcttcaac

SEQ ID NO: 772 - DNA, 14 bp, Artificial Sequence
  Description of Artificial Sequence: Synthetic oligonucleotide
aattaattcttcaa

SEQ ID NO: 773 - DNA, 14 bp, Artificial Sequence
  Description of Artificial Sequence: Synthetic oligonucleotide
aaattaattcttca

SEQ ID NO: 774 - DNA, 14 bp, Artificial Sequence
  Description of Artificial Sequence: Synthetic oligonucleotide
aaaattaattcttc

SEQ ID NO: 775 - DNA, 14 bp, Artificial Sequence
  Description of Artificial Sequence: Synthetic oligonucleotide
caaaattaattctt

SEQ ID NO: 776 - DNA, 14 bp, Artificial Sequence
  Description of Artificial Sequence: Synthetic oligonucleotide
gcaaaattaattct

SEQ ID NO: 777 - DNA, 14 bp, Artificial Sequence
  Description of Artificial Sequence: Synthetic oligonucleotide
tgcaaaattaattc

SEQ ID NO: 778 - DNA, 14 bp, Artificial Sequence
  Description of Artificial Sequence: Synthetic oligonucleotide
ttgcaaaattaatt

SEQ ID NO: 779 - DNA, 14 bp, Artificial Sequence
  Description of Artificial Sequence: Synthetic oligonucleotide
attgcaaaattaat

SEQ ID NO: 780 - DNA, 14 bp, Artificial Sequence
  Description of Artificial Sequence: Synthetic oligonucleotide
aattgcaaaattaa

SEQ ID NO: 781 - DNA, 14 bp, Artificial Sequence
  Description of Artificial Sequence: Synthetic oligonucleotide
taattgcaaaatta

SEQ ID NO: 782 - DNA, 14 bp, Artificial Sequence
  Description of Artificial Sequence: Synthetic oligonucleotide
ataattgcaaaatt

SEQ ID NO: 783 - DNA, 14 bp, Artificial Sequence
  Description of Artificial Sequence: Synthetic oligonucleotide
aataattgcaaaat

SEQ ID NO: 784 - DNA, 14 bp, Artificial Sequence
  Description of Artificial Sequence: Synthetic oligonucleotide
taataattgcaaaa

SEQ ID NO: 785 - DNA, 14 bp, Artificial Sequence
  Description of Artificial Sequence: Synthetic oligonucleotide
ttaataattgcaaa

SEQ ID NO: 786 - DNA, 14 bp, Artificial Sequence
  Description of Artificial Sequence: Synthetic oligonucleotide
tttaataattgcaa

SEQ ID NO: 787 - DNA, 14 bp, Artificial Sequence
  Description of Artificial Sequence: Synthetic oligonucleotide
atttaataattgca

SEQ ID NO: 788 - DNA, 14 bp, Artificial Sequence
  Description of Artificial Sequence: Synthetic oligonucleotide
tatttaataattgc

SEQ ID NO: 789 - DNA, 14 bp, Artificial Sequence
  Description of Artificial Sequence: Synthetic oligonucleotide
atatttaataattg

SEQ ID NO: 790 - DNA, 14 bp, Artificial Sequence
  Description of Artificial Sequence: Synthetic oligonucleotide
catatttaataatt

SEQ ID NO: 791 - DNA, 14 bp, Artificial Sequence
  Description of Artificial Sequence: Synthetic oligonucleotide
gcatatttaataat

SEQ ID NO: 792 - DNA, 14 bp, Artificial Sequence
  Description of Artificial Sequence: Synthetic oligonucleotide
agcatatttaataa

SEQ ID NO: 793 - DNA, 14 bp, Artificial Sequence
  Description of Artificial Sequence: Synthetic oligonucleotide
tagcatatttaata

SEQ ID NO: 794 - DNA, 14 bp, Artificial Sequence
  Description of Artificial Sequence: Synthetic oligonucleotide
atagcatatttaat

SEQ ID NO: 795 - DNA, 14 bp, Artificial Sequence
  Description of Artificial Sequence: Synthetic oligonucleotide
catagcatatttaa

SEQ ID NO: 796 - DNA, 14 bp, Artificial Sequence
  Description of Artificial Sequence: Synthetic oligonucleotide
gcatagcatattta

SEQ ID NO: 797 - DNA, 14 bp, Artificial Sequence
  Description of Artificial Sequence: Synthetic oligonucleotide
ggcatagcatattt

SEQ ID NO: 798 - DNA, 14 bp, Artificial Sequence
  Description of Artificial Sequence: Synthetic oligonucleotide
tggcatagcatatt

SEQ ID NO: 799 - DNA, 14 bp, Artificial Sequence
  Description of Artificial Sequence: Synthetic oligonucleotide
ttggcatagcatat

SEQ ID NO: 800 - DNA, 14 bp, Artificial Sequence
  Description of Artificial Sequence: Synthetic oligonucleotide
cttggcatagcata

SEQ ID NO: 801 - DNA, 14 bp, Artificial Sequence
  Description of Artificial Sequence: Synthetic oligonucleotide
gcttggcatagcat

SEQ ID NO: 802 - DNA, 14 bp, Artificial Sequence
  Description of Artificial Sequence: Synthetic oligonucleotide
agcttggcatagca

SEQ ID NO: 803 - DNA, 14 bp, Artificial Sequence
  Description of Artificial Sequence: Synthetic oligonucleotide
gagcttggcatagc

SEQ ID NO: 804 - DNA, 14 bp, Artificial Sequence
  Description of Artificial Sequence: Synthetic oligonucleotide
tgagcttggcatag

SEQ ID NO: 805 - DNA, 14 bp, Artificial Sequence
  Description of Artificial Sequence: Synthetic oligonucleotide
ctgagcttggcata

SEQ ID NO: 806 - DNA, 14 bp, Artificial Sequence
  Description of Artificial Sequence: Synthetic oligonucleotide
gctgagcttggcat

SEQ ID NO: 807 - DNA, 14 bp, Artificial Sequence
  Description of Artificial Sequence: Synthetic oligonucleotide
ggctgagcttggca

SEQ ID NO: 808 - DNA, 14 bp, Artificial Sequence
  Description of Artificial Sequence: Synthetic oligonucleotide
gggctgagcttggc

SEQ ID NO: 809 - DNA, 14 bp, Artificial Sequence
  Description of Artificial Sequence: Synthetic oligonucleotide
ggggctgagcttgg

SEQ ID NO: 810 - DNA, 14 bp, Artificial Sequence
  Description of Artificial Sequence: Synthetic oligonucleotide
cggggctgagcttg

SEQ ID NO: 811 - DNA, 14 bp, Artificial Sequence
  Description of Artificial Sequence: Synthetic oligonucleotide
tcggggctgagctt

SEQ ID NO: 812 - DNA, 14 bp, Artificial Sequence
  Description of Artificial Sequence: Synthetic oligonucleotide
ttcggggctgagct

SEQ ID NO: 813 - DNA, 14 bp, Artificial Sequence
  Description of Artificial Sequence: Synthetic oligonucleotide
cttcggggctgagc

SEQ ID NO: 814 - DNA, 14 bp, Artificial Sequence
  Description of Artificial Sequence: Synthetic oligonucleotide
acttcggggctgag

SEQ ID NO: 815 - DNA, 14 bp, Artificial Sequence
  Description of Artificial Sequence: Synthetic oligonucleotide
cacttcggggctga

SEQ ID NO: 816 - DNA, 14 bp, Artificial Sequence
  Description of Artificial Sequence: Synthetic oligonucleotide
gcacttcggggctg

SEQ ID NO: 817 - DNA, 14 bp, Artificial Sequence
  Description of Artificial Sequence: Synthetic oligonucleotide
agcacttcggggct

SEQ ID NO: 818 - DNA, 14 bp, Artificial Sequence
  Description of Artificial Sequence: Synthetic oligonucleotide
aagcacttcggggc

SEQ ID NO: 819 - DNA, 14 bp, Artificial Sequence
  Description of Artificial Sequence: Synthetic oligonucleotide
gaagcacttcgggg

SEQ ID NO: 820 - DNA, 14 bp, Artificial Sequence
  Description of Artificial Sequence: Synthetic oligonucleotide
tgaagcacttcggg

SEQ ID NO: 821 - DNA, 14 bp, Artificial Sequence
  Description of Artificial Sequence: Synthetic oligonucleotide
ctgaagcacttcgg

SEQ ID NO: 822 - DNA, 14 bp, Artificial Sequence
  Description of Artificial Sequence: Synthetic oligonucleotide
tctgaagcacttcg

SEQ ID NO: 823 - DNA, 14 bp, Artificial Sequence
  Description of Artificial Sequence: Synthetic oligonucleotide
atctgaagcacttc

SEQ ID NO: 824 - DNA, 14 bp, Artificial Sequence
  Description of Artificial Sequence: Synthetic oligonucleotide
catctgaagcactt

SEQ ID NO: 825 - DNA, 14 bp, Artificial Sequence
  Description of Artificial Sequence: Synthetic oligonucleotide
acatctgaagcact

SEQ ID NO: 826 - DNA, 14 bp, Artificial Sequence
  Description of Artificial Sequence: Synthetic oligonucleotide
tacatctgaagcac

SEQ ID NO: 827 - DNA, 14 bp, Artificial Sequence
  Description of Artificial Sequence: Synthetic oligonucleotide
ctacatctgaagca

SEQ ID NO: 828 - DNA, 14 bp, Artificial Sequence
  Description of Artificial Sequence: Synthetic oligonucleotide
tctacatctgaagc

SEQ ID NO: 829 - DNA, 14 bp, Artificial Sequence
  Description of Artificial Sequence: Synthetic oligonucleotide
ctctacatctgaag

SEQ ID NO: 830 - DNA, 14 bp, Artificial Sequence
  Description of Artificial Sequence: Synthetic oligonucleotide
cctctacatctgaa

SEQ ID NO: 831 - DNA, 14 bp, Artificial Sequence
  Description of Artificial Sequence: Synthetic oligonucleotide
tcctctacatctga

SEQ ID NO: 832 - DNA, 14 bp, Artificial Sequence
  Description of Artificial Sequence: Synthetic oligonucleotide
ttcctctacatctg

SEQ ID NO: 833 - DNA, 14 bp, Artificial Sequence
  Description of Artificial Sequence: Synthetic oligonucleotide
gttcctctacatct

SEQ ID NO: 834 - DNA, 14 bp, Artificial Sequence
  Description of Artificial Sequence: Synthetic oligonucleotide
cgttcctctacatc

SEQ ID NO: 835 - DNA, 14 bp, Artificial Sequence
  Description of Artificial Sequence: Synthetic oligonucleotide
acgttcctctacat

SEQ ID NO: 836 - DNA, 14 bp, Artificial Sequence
  Description of Artificial Sequence: Synthetic oligonucleotide
cacgttcctctaca

SEQ ID NO: 837 - DNA, 14 bp, Artificial Sequence
  Description of Artificial Sequence: Synthetic oligonucleotide
acacgttcctctac

SEQ ID NO: 838 - DNA, 14 bp, Artificial Sequence
  Description of Artificial Sequence: Synthetic oligonucleotide
aacacgttcctcta

SEQ ID NO: 839 - DNA, 14 bp, Artificial Sequence
  Description of Artificial Sequence: Synthetic oligonucleotide
gaacacgttcctct

SEQ ID NO: 840 - DNA, 14 bp, Artificial Sequence
  Description of Artificial Sequence: Synthetic oligonucleotide
tgaacacgttcctc

SEQ ID NO: 841 - DNA, 14 bp, Artificial Sequence
  Description of Artificial Sequence: Synthetic oligonucleotide
ttgaacacgttcct

SEQ ID NO: 842 - DNA, 14 bp, Artificial Sequence
  Description of Artificial Sequence: Synthetic oligonucleotide
tttgaacacgttcc

SEQ ID NO: 843 - DNA, 14 bp, Artificial Sequence
  Description of Artificial Sequence: Synthetic oligonucleotide
ttttgaacacgttc

SEQ ID NO: 844 - DNA, 14 bp, Artificial Sequence
  Description of Artificial Sequence: Synthetic oligonucleotide
tttttgaacacgtt

SEQ ID NO: 845 - DNA, 14 bp, Artificial Sequence
  Description of Artificial Sequence: Synthetic oligonucleotide
ttttttgaacacgt

SEQ ID NO: 846 - DNA, 14 bp, Artificial Sequence
  Description of Artificial Sequence: Synthetic oligonucleotide
cttttttgaacacg

SEQ ID NO: 847 - DNA, 14 bp, Artificial Sequence
  Description of Artificial Sequence: Synthetic oligonucleotide
acttttttgaacac

SEQ ID NO: 848 - DNA, 14 bp, Artificial Sequence
  Description of Artificial Sequence: Synthetic oligonucleotide
aacttttttgaaca

SEQ ID NO: 849 - DNA, 14 bp, Artificial Sequence
  Description of Artificial Sequence: Synthetic oligonucleotide
aaacttttttgaac

SEQ ID NO: 850 - DNA, 14 bp, Artificial Sequence
  Description of Artificial Sequence: Synthetic oligonucleotide
gaaacttttttgaa

SEQ ID NO: 851 - DNA, 14 bp, Artificial Sequence
  Description of Artificial Sequence: Synthetic oligonucleotide
ggaaacttttttga

SEQ ID NO: 852 - DNA, 14 bp, Artificial Sequence
  Description of Artificial Sequence: Synthetic oligonucleotide
gggaaacttttttg

SEQ ID NO: 853 - DNA, 14 bp, Artificial Sequence
  Description of Artificial Sequence: Synthetic oligonucleotide
agggaaactttttt

SEQ ID NO: 854 - DNA, 14 bp, Artificial Sequence
  Description of Artificial Sequence: Synthetic oligonucleotide
gagggaaacttttt

SEQ ID NO: 855 - DNA, 14 bp, Artificial Sequence
  Description of Artificial Sequence: Synthetic oligonucleotide
tgagggaaactttt

SEQ ID NO: 856 - DNA, 14 bp, Artificial Sequence
  Description of Artificial Sequence: Synthetic oligonucleotide
atgagggaaacttt

SEQ ID NO: 857 - DNA, 14 bp, Artificial Sequence
  Description of Artificial Sequence: Synthetic oligonucleotide
gatgagggaaactt

SEQ ID NO: 858 - DNA, 14 bp, Artificial Sequence
  Description of Artificial Sequence: Synthetic oligonucleotide
ggatgagggaaact

SEQ ID NO: 859 - DNA, 14 bp, Artificial Sequence
  Description of Artificial Sequence: Synthetic oligonucleotide
tggatgagggaaac

SEQ ID NO: 860 - DNA, 14 bp, Artificial Sequence
  Description of Artificial Sequence: Synthetic oligonucleotide
ttggatgagggaaa

SEQ ID NO: 861 - DNA, 14 bp, Artificial Sequence
  Description of Artificial Sequence: Synthetic oligonucleotide
attggatgagggaa

SEQ ID NO: 862 - DNA, 14 bp, Artificial Sequence
  Description of Artificial Sequence: Synthetic oligonucleotide
aattggatgaggga

SEQ ID NO: 863 - DNA, 14 bp, Artificial Sequence
  Description of Artificial Sequence: Synthetic oligonucleotide
caattggatgaggg

SEQ ID NO: 864 - DNA, 14 bp, Artificial Sequence
  Description of Artificial Sequence: Synthetic oligonucleotide
tcaattggatgagg

SEQ ID NO: 865 - DNA, 14 bp, Artificial Sequence
  Description of Artificial Sequence: Synthetic oligonucleotide
atcaattggatgag

SEQ ID NO: 866 - DNA, 14 bp, Artificial Sequence
  Description of Artificial Sequence: Synthetic oligonucleotide
tatcaattggatga

SEQ ID NO: 867 - DNA, 14 bp, Artificial Sequence
  Description of Artificial Sequence: Synthetic oligonucleotide
ttatcaattggatg

SEQ ID NO: 868 - DNA, 14 bp, Artificial Sequence
  Description of Artificial Sequence: Synthetic oligonucleotide
tttatcaattggat

SEQ ID NO: 869 - DNA, 14 bp, Artificial Sequence
  Description of Artificial Sequence: Synthetic oligonucleotide
atttatcaattgga

SEQ ID NO: 870 - DNA, 14 bp, Artificial Sequence
  Description of Artificial Sequence: Synthetic oligonucleotide
catttatcaattgg

SEQ ID NO: 871 - DNA, 14 bp, Artificial Sequence
  Description of Artificial Sequence: Synthetic oligonucleotide
ccatttatcaattg

SEQ ID NO: 872 - DNA, 14 bp, Artificial Sequence
  Description of Artificial Sequence: Synthetic oligonucleotide
cccatttatcaatt

SEQ ID NO: 873 - DNA, 14 bp, Artificial Sequence
  Description of Artificial Sequence: Synthetic oligonucleotide
gcccatttatcaat

SEQ ID NO: 874 - DNA, 14 bp, Artificial Sequence
  Description of Artificial Sequence: Synthetic oligonucleotide
tgcccatttatcaa

SEQ ID NO: 875 - DNA, 14 bp, Artificial Sequence
  Description of Artificial Sequence: Synthetic oligonucleotide
ttgcccatttatca

SEQ ID NO: 876 - DNA, 14 bp, Artificial Sequence
  Description of Artificial Sequence: Synthetic oligonucleotide
attgcccatttatc

SEQ ID NO: 877 - DNA, 14 bp, Artificial Sequence
  Description of Artificial Sequence: Synthetic oligonucleotide
tattgcccatttat

SEQ ID NO: 878 - DNA, 14 bp, Artificial Sequence
  Description of Artificial Sequence: Synthetic oligonucleotide
ctattgcccattta

SEQ ID NO: 879 - DNA, 14 bp, Artificial Sequence
  Description of Artificial Sequence: Synthetic oligonucleotide
gctattgcccattt

SEQ ID NO: 880 - DNA, 14 bp, Artificial Sequence
  Description of Artificial Sequence: Synthetic oligonucleotide
agctattgcccatt

SEQ ID NO: 881 - DNA, 14 bp, Artificial Sequence
  Description of Artificial Sequence: Synthetic oligonucleotide
cagctattgcccat

SEQ ID NO: 882 - DNA, 14 bp, Artificial Sequence
  Description of Artificial Sequence: Synthetic oligonucleotide
tcagctattgccca

SEQ ID NO: 883 - DNA, 14 bp, Artificial Sequence
  Description of Artificial Sequence: Synthetic oligonucleotide
atcagctattgccc

SEQ ID NO: 884 - DNA, 14 bp, Artificial Sequence
  Description of Artificial Sequence: Synthetic oligonucleotide
catcagctattgcc

SEQ ID NO: 885 - DNA, 14 bp, Artificial Sequence
  Description of Artificial Sequence: Synthetic oligonucleotide
gcatcagctattgc

SEQ ID NO: 886 - DNA, 14 bp, Artificial Sequence
  Description of Artificial Sequence: Synthetic oligonucleotide
ggcatcagctattg

SEQ ID NO: 887 - DNA, 14 bp, Artificial Sequence
  Description of Artificial Sequence: Synthetic oligonucleotide
gggcatcagctatt

SEQ ID NO: 888 - DNA, 14 bp, Artificial Sequence
  Description of Artificial Sequence: Synthetic oligonucleotide
tgggcatcagctat

SEQ ID NO: 889 - DNA, 14 bp, Artificial Sequence
  Description of Artificial Sequence: Synthetic oligonucleotide
ttgggcatcagcta

SEQ ID NO: 890 - DNA, 14 bp, Artificial Sequence
  Description of Artificial Sequence: Synthetic oligonucleotide
attgggcatcagct

SEQ ID NO: 891 - DNA, 14 bp, Artificial Sequence
  Description of Artificial Sequence: Synthetic oligonucleotide
gattgggcatcagc

SEQ ID NO: 892 - DNA, 14 bp, Artificial Sequence
  Description of Artificial Sequence: Synthetic oligonucleotide
tgattgggcatcag

SEQ ID NO: 893 - DNA, 14 bp, Artificial Sequence
  Description of Artificial Sequence: Synthetic oligonucleotide
ctgattgggcatca

SEQ ID NO: 894 - DNA, 14 bp, Artificial Sequence
  Description of Artificial Sequence: Synthetic oligonucleotide
gctgattgggcatc

SEQ ID NO: 895 - DNA, 14 bp, Artificial Sequence
  Description of Artificial Sequence: Synthetic oligonucleotide
agctgattgggcat

SEQ ID NO: 896 - DNA, 14 bp, Artificial Sequence
  Description of Artificial Sequence: Synthetic oligonucleotide
tagctgattgggca

SEQ ID NO: 897 - DNA, 14 bp, Artificial Sequence
  Description of Artificial Sequence: Synthetic oligonucleotide
atagctgattgggc

SEQ ID NO: 898 - DNA, 14 bp, Artificial Sequence
  Description of Artificial Sequence: Synthetic oligonucleotide
aatagctgattggg

SEQ ID NO: 899 - DNA, 14 bp, Artificial Sequence
  Description of Artificial Sequence: Synthetic oligonucleotide
caatagctgattgg

SEQ ID NO: 900 - DNA, 14 bp, Artificial Sequence
  Description of Artificial Sequence: Synthetic oligonucleotide
tcaatagctgattg

SEQ ID NO: 901 - DNA, 14 bp, Artificial Sequence
  Description of Artificial Sequence: Synthetic oligonucleotide
ttcaatagctgatt

SEQ ID NO: 902 - DNA, 14 bp, Artificial Sequence
  Description of Artificial Sequence: Synthetic oligonucleotide
tttcaatagctgat

SEQ ID NO: 903 - DNA, 14 bp, Artificial Sequence
  Description of Artificial Sequence: Synthetic oligonucleotide
ttttcaatagctga

SEQ ID NO: 904 - DNA, 14 bp, Artificial Sequence
  Description of Artificial Sequence: Synthetic oligonucleotide
cttttcaatagctg

SEQ ID NO: 905 - DNA, 14 bp, Artificial Sequence
  Description of Artificial Sequence: Synthetic oligonucleotide
tcttttcaatagct

SEQ ID NO: 906 - DNA, 14 bp, Artificial Sequence
  Description of Artificial Sequence: Synthetic oligonucleotide
ctcttttcaatagc

SEQ ID NO: 907 - DNA, 14 bp, Artificial Sequence
  Description of Artificial Sequence: Synthetic oligonucleotide
cctcttttcaatag

SEQ ID NO: 908 - DNA, 14 bp, Artificial Sequence
  Description of Artificial Sequence: Synthetic oligonucleotide
tcctcttttcaata

SEQ ID NO: 909 - DNA, 14 bp, Artificial Sequence
  Description of Artificial Sequence: Synthetic oligonucleotide
ttcctcttttcaat

SEQ ID NO: 910 - DNA, 14 bp, Artificial Sequence
  Description of Artificial Sequence: Synthetic oligonucleotide
cttcctcttttcaa

SEQ ID NO: 911 - DNA, 14 bp, Artificial Sequence
  Description of Artificial Sequence: Synthetic oligonucleotide
gcttcctcttttca

SEQ ID NO: 912 - DNA, 14 bp, Artificial Sequence
  Description of Artificial Sequence: Synthetic oligonucleotide
cgcttcctcttttc

SEQ ID NO: 913 - DNA, 14 bp, Artificial Sequence
  Description of Artificial Sequence: Synthetic oligonucleotide
tcgcttcctctttt

SEQ ID NO: 914 - DNA, 14 bp, Artificial Sequence
  Description of Artificial Sequence: Synthetic oligonucleotide
ttcgcttcctcttt

SEQ ID NO: 915 - DNA, 14 bp, Artificial Sequence
  Description of Artificial Sequence: Synthetic oligonucleotide
cttcgcttcctctt

SEQ ID NO: 916 - DNA, 14 bp, Artificial Sequence
  Description of Artificial Sequence: Synthetic oligonucleotide
tcttcgcttcctct

SEQ ID NO: 917 - DNA, 14 bp, Artificial Sequence
  Description of Artificial Sequence: Synthetic oligonucleotide
ttcttcgcttcctc

SEQ ID NO: 918 - DNA, 14 bp, Artificial Sequence
  Description of Artificial Sequence: Synthetic oligonucleotide
tttcttcgcttcct

SEQ ID NO: 919 - DNA, 14 bp, Artificial Sequence
  Description of Artificial Sequence: Synthetic oligonucleotide
gtttcttcgcttcc

SEQ ID NO: 920 - DNA, 14 bp, Artificial Sequence
  Description of Artificial Sequence: Synthetic oligonucleotide
ggtttcttcgcttc

SEQ ID NO: 921 - DNA, 14 bp, Artificial Sequence
  Description of Artificial Sequence: Synthetic oligonucleotide
gggtttcttcgctt

SEQ ID NO: 922 - DNA, 14 bp, Artificial Sequence
  Description of Artificial Sequence: Synthetic oligonucleotide
agggtttcttcgct

SEQ ID NO: 923 - DNA, 14 bp, Artificial Sequence
  Description of Artificial Sequence: Synthetic oligonucleotide
aagggtttcttcgc

SEQ ID NO: 924 - DNA, 14 bp, Artificial Sequence
  Description of Artificial Sequence: Synthetic oligonucleotide
aaagggtttcttcg

SEQ ID NO: 925 - DNA, 14 bp, Artificial Sequence
  Description of Artificial Sequence: Synthetic oligonucleotide
taaagggtttcttc

SEQ ID NO: 926 - DNA, 14 bp, Artificial Sequence
  Description of Artificial Sequence: Synthetic oligonucleotide
ataaagggtttctt

SEQ ID NO: 927 - DNA, 14 bp, Artificial Sequence
  Description of Artificial Sequence: Synthetic oligonucleotide
gataaagggtttct

SEQ ID NO: 928 - DNA, 14 bp, Artificial Sequence
  Description of Artificial Sequence: Synthetic oligonucleotide
agataaagggtttc

SEQ ID NO: 929 - DNA, 14 bp, Artificial Sequence
  Description of Artificial Sequence: Synthetic oligonucleotide
gagataaagggttt

SEQ ID NO: 930 - DNA, 14 bp, Artificial Sequence
  Description of Artificial Sequence: Synthetic oligonucleotide
agagataaagggtt

SEQ ID NO: 931 - DNA, 14 bp, Artificial Sequence
  Description of Artificial Sequence: Synthetic oligonucleotide
gagagataaagggt

SEQ ID NO: 932 - DNA, 14 bp, Artificial Sequence
  Description of Artificial Sequence: Synthetic oligonucleotide
ggagagataaaggg

SEQ ID NO: 933 - DNA, 14 bp, Artificial Sequence
  Description of Artificial Sequence: Synthetic oligonucleotide
gggagagataaagg

SEQ ID NO: 934 - DNA, 14 bp, Artificial Sequence
  Description of Artificial Sequence: Synthetic oligonucleotide
tgggagagataaag

SEQ ID NO: 935 - DNA, 14 bp, Artificial Sequence
  Description of Artificial Sequence: Synthetic oligonucleotide
ctgggagagataaa

SEQ ID NO: 936 - DNA, 14 bp, Artificial Sequence
  Description of Artificial Sequence: Synthetic oligonucleotide
actgggagagataa

SEQ ID NO: 937 - DNA, 14 bp, Artificial Sequence
  Description of Artificial Sequence: Synthetic oligonucleotide
tactgggagagata

SEQ ID NO: 938 - DNA, 14 bp, Artificial Sequence
  Description of Artificial Sequence: Synthetic oligonucleotide
ctactgggagagat

SEQ ID NO: 939 - DNA, 14 bp, Artificial Sequence
  Description of Artificial Sequence: Synthetic oligonucleotide
tctactgggagaga

SEQ ID NO: 940 - DNA, 14 bp, Artificial Sequence
  Description of Artificial Sequence: Synthetic oligonucleotide
ttctactgggagag

SEQ ID NO: 941 - DNA, 14 bp, Artificial Sequence
  Description of Artificial Sequence: Synthetic oligonucleotide
tttctactgggaga

SEQ ID NO: 942 - DNA, 14 bp, Artificial Sequence
  Description of Artificial Sequence: Synthetic oligonucleotide
ttttctactgggag

SEQ ID NO: 943 - DNA, 14 bp, Artificial Sequence
  Description of Artificial Sequence: Synthetic oligonucleotide
tttttctactggga

SEQ ID NO: 944 - DNA, 14 bp, Artificial Sequence
  Description of Artificial Sequence: Synthetic oligonucleotide
ttttttctactggg

SEQ ID NO: 945 - DNA, 14 bp, Artificial Sequence
  Description of Artificial Sequence: Synthetic oligonucleotide
attttttctactgg

SEQ ID NO: 946 - DNA, 14 bp, Artificial Sequence
  Description of Artificial Sequence: Synthetic oligonucleotide
aattttttctactg

SEQ ID NO: 947 - DNA, 14 bp, Artificial Sequence
  Description of Artificial Sequence: Synthetic oligonucleotide
gaattttttctact

SEQ ID NO: 948 - DNA, 14 bp, Artificial Sequence
  Description of Artificial Sequence: Synthetic oligonucleotide
tgaattttttctac

SEQ ID NO: 949 - DNA, 14 bp, Artificial Sequence
  Description of Artificial Sequence: Synthetic oligonucleotide
atgaattttttcta

SEQ ID NO: 950 - DNA, 14 bp, Artificial Sequence
  Description of Artificial Sequence: Synthetic oligonucleotide
gatgaattttttct

SEQ ID NO: 951 - DNA, 14 bp, Artificial Sequence
  Description of Artificial Sequence: Synthetic oligonucleotide
ggatgaattttttc

SEQ ID NO: 952 - DNA, 14 bp, Artificial Sequence
  Description of Artificial Sequence: Synthetic oligonucleotide
aggatgaatttttt

SEQ ID NO: 953 - DNA, 14 bp, Artificial Sequence
  Description of Artificial Sequence: Synthetic oligonucleotide
aaggatgaattttt

SEQ ID NO: 954 - DNA, 14 bp, Artificial Sequence
  Description of Artificial Sequence: Synthetic oligonucleotide
aaaggatgaatttt

SEQ ID NO: 955 - DNA, 14 bp, Artificial Sequence
  Description of Artificial Sequence: Synthetic oligonucleotide
taaaggatgaattt

SEQ ID NO: 956 - DNA, 14 bp, Artificial Sequence
  Description of Artificial Sequence: Synthetic oligonucleotide
ataaaggatgaatt

SEQ ID NO: 957 - DNA, 14 bp, Artificial Sequence
  Description of Artificial Sequence: Synthetic oligonucleotide
aataaaggatgaat

SEQ ID NO: 958 - DNA, 14 bp, Artificial Sequence
  Description of Artificial Sequence: Synthetic oligonucleotide
taataaaggatgaa

SEQ ID NO: 959 - DNA, 14 bp, Artificial Sequence
  Description of Artificial Sequence: Synthetic oligonucleotide
ttaataaaggatga

SEQ ID NO: 960 - DNA, 14 bp, Artificial Sequence
  Description of Artificial Sequence: Synthetic oligonucleotide
tttaataaaggatg

SEQ ID NO: 961 - DNA, 14 bp, Artificial Sequence
  Description of Artificial Sequence: Synthetic oligonucleotide
ctttaataaaggat

SEQ ID NO: 962 - DNA, 14 bp, Artificial Sequence
  Description of Artificial Sequence: Synthetic oligonucleotide
cctttaataaagga

SEQ ID NO: 963 - DNA, 14 bp, Artificial Sequence
  Description of Artificial Sequence: Synthetic oligonucleotide
tcctttaataaagg

SEQ ID NO: 964 - DNA, 14 bp, Artificial Sequence
  Description of Artificial Sequence: Synthetic oligonucleotide
ctcctttaataaag

SEQ ID NO: 965 - DNA, 14 bp, Artificial Sequence
  Description of Artificial Sequence: Synthetic oligonucleotide
cctcctttaataaa

SEQ ID NO: 966 - DNA, 14 bp, Artificial Sequence
  Description of Artificial Sequence: Synthetic oligonucleotide
acctcctttaataa

SEQ ID NO: 967 - DNA, 14 bp, Artificial Sequence
  Description of Artificial Sequence: Synthetic oligonucleotide
gacctcctttaata

SEQ ID NO: 968 - DNA, 14 bp, Artificial Sequence
  Description of Artificial Sequence: Synthetic oligonucleotide
ggacctcctttaat

SEQ ID NO: 969 - DNA, 14 bp, Artificial Sequence
  Description of Artificial Sequence: Synthetic oligonucleotide
aggacctcctttaa

SEQ ID NO: 970 - DNA, 14 bp, Artificial Sequence
  Description of Artificial Sequence: Synthetic oligonucleotide
taggacctccttta

SEQ ID NO: 971 - DNA, 14 bp, Artificial Sequence
  Description of Artificial Sequence: Synthetic oligonucleotide
ctaggacctccttt

SEQ ID NO: 972 - DNA, 14 bp, Artificial Sequence
  Description of Artificial Sequence: Synthetic oligonucleotide
cctaggacctcctt

SEQ ID NO: 973 - DNA, 14 bp, Artificial Sequence
  Description of Artificial Sequence: Synthetic oligonucleotide
acctaggacctcct

SEQ ID NO: 974 - DNA, 14 bp, Artificial Sequence
  Description of Artificial Sequence: Synthetic oligonucleotide
aacctaggacctcc

SEQ ID NO: 975 - DNA, 14 bp, Artificial Sequence
  Description of Artificial Sequence: Synthetic oligonucleotide
taacctaggacctc

SEQ ID NO: 976 - DNA, 14 bp, Artificial Sequence
  Description of Artificial Sequence: Synthetic oligonucleotide
ataacctaggacct

SEQ ID NO: 977 - DNA, 14 bp, Artificial Sequence
  Description of Artificial Sequence: Synthetic oligonucleotide
tataacctaggacc

SEQ ID NO: 978 - DNA, 14 bp, Artificial Sequence
  Description of Artificial Sequence: Synthetic oligonucleotide
ttataacctaggac

SEQ ID NO: 979 - DNA, 14 bp, Artificial Sequence
  Description of Artificial Sequence: Synthetic oligonucleotide
tttataacctagga

SEQ ID NO: 980 - DNA, 14 bp, Artificial Sequence
  Description of Artificial Sequence: Synthetic oligonucleotide
ttttataacctagg

SEQ ID NO: 981 - DNA, 14 bp, Artificial Sequence
  Description of Artificial Sequence: Synthetic oligonucleotide
attttataacctag

SEQ ID NO: 982 - DNA, 14 bp, Artificial Sequence
  Description of Artificial Sequence: Synthetic oligonucleotide
aattttataaccta

SEQ ID NO: 983 - DNA, 14 bp, Artificial Sequence
  Description of Artificial Sequence: Synthetic oligonucleotide
caattttataacct

SEQ ID NO: 984 - DNA, 14 bp, Artificial Sequence
  Description of Artificial Sequence: Synthetic oligonucleotide
tcaattttataacc

SEQ ID NO: 985 - DNA, 14 bp, Artificial Sequence
  Description of Artificial Sequence: Synthetic oligonucleotide
gtcaattttataac

SEQ ID NO: 986 - DNA, 14 bp, Artificial Sequence
  Description of Artificial Sequence: Synthetic oligonucleotide
ggtcaattttataa

SEQ ID NO: 987 - DNA, 14 bp, Artificial Sequence
  Description of Artificial Sequence: Synthetic oligonucleotide
tggtcaattttata

SEQ ID NO: 988 - DNA, 14 bp, Artificial Sequence
  Description of Artificial Sequence: Synthetic oligonucleotide
gtggtcaattttat

SEQ ID NO: 989 - DNA, 14 bp, Artificial Sequence
  Description of Artificial Sequence: Synthetic oligonucleotide
ggtggtcaatttta

SEQ ID NO: 990 - DNA, 14 bp, Artificial Sequence
  Description of Artificial Sequence: Synthetic oligonucleotide
tggtggtcaatttt

SEQ ID NO: 991 - DNA, 14 bp, Artificial Sequence
  Description of Artificial Sequence: Synthetic oligonucleotide
ctggtggtcaattt

SEQ ID NO: 992 - DNA, 14 bp, Artificial Sequence
  Description of Artificial Sequence: Synthetic oligonucleotide
cctggtggtcaatt

SEQ ID NO: 993 - DNA, 14 bp, Artificial Sequence
  Description of Artificial Sequence: Synthetic oligonucleotide
acctggtggtcaat

SEQ ID NO: 994 - DNA, 14 bp, Artificial Sequence
  Description of Artificial Sequence: Synthetic oligonucleotide
aacctggtggtcaa

SEQ ID NO: 995 - DNA, 14 bp, Artificial Sequence
  Description of Artificial Sequence: Synthetic oligonucleotide
aaacctggtggtca

SEQ ID NO: 996 - DNA, 14 bp, Artificial Sequence
  Description of Artificial Sequence: Synthetic oligonucleotide
gaaacctggtggtc

SEQ ID NO: 997 - DNA, 14 bp, Artificial Sequence
  Description of Artificial Sequence: Synthetic oligonucleotide
agaaacctggtggt

SEQ ID NO: 998 - DNA, 14 bp, Artificial Sequence
  Description of Artificial Sequence: Synthetic oligonucleotide
cagaaacctggtgg

SEQ ID NO: 999 - DNA, 14 bp, Artificial Sequence
  Description of Artificial Sequence: Synthetic oligonucleotide
acagaaacctggtg

SEQ ID NO: 1000 - DNA, 14 bp, Artificial Sequence
  Description of Artificial Sequence: Synthetic oligonucleotide
aacagaaacctggt

SEQ ID NO: 1001 - DNA, 14 bp, Artificial Sequence
  Description of Artificial Sequence: Synthetic oligonucleotide
aaacagaaacctgg

SEQ ID NO: 1002 - DNA, 14 bp, Artificial Sequence
  Description of Artificial Sequence: Synthetic oligonucleotide
taaacagaaacctg

SEQ ID NO: 1003 - DNA, 14 bp, Artificial Sequence
  Description of Artificial Sequence: Synthetic oligonucleotide
gtaaacagaaacct

SEQ ID NO: 1004 - DNA, 14 bp, Artificial Sequence
  Description of Artificial Sequence: Synthetic oligonucleotide
tgtaaacagaaacc

SEQ ID NO: 1005 - DNA, 14 bp, Artificial Sequence
  Description of Artificial Sequence: Synthetic oligonucleotide
atgtaaacagaaac

SEQ ID NO: 1006 - DNA, 14 bp, Artificial Sequence
  Description of Artificial Sequence: Synthetic oligonucleotide
tatgtaaacagaaa

SEQ ID NO: 1007 - DNA, 14 bp, Artificial Sequence
  Description of Artificial Sequence: Synthetic oligonucleotide
ctatgtaaacagaa

SEQ ID NO: 1008 - DNA, 14 bp, Artificial Sequence
  Description of Artificial Sequence: Synthetic oligonucleotide
actatgtaaacaga

SEQ ID NO: 1009 - DNA, 14 bp, Artificial Sequence
  Description of Artificial Sequence: Synthetic oligonucleotide
tactatgtaaacag

SEQ ID NO: 1010 - DNA, 14 bp, Artificial Sequence
  Description of Artificial Sequence: Synthetic oligonucleotide
ctactatgtaaaca

SEQ ID NO: 1011 - DNA, 14 bp, Artificial Sequence
  Description of Artificial Sequence: Synthetic oligonucleotide
gctactatgtaaac

SEQ ID NO: 1012 - DNA, 14 bp, Artificial Sequence
  Description of Artificial Sequence: Synthetic oligonucleotide
tgctactatgtaaa

SEQ ID NO: 1013 - DNA, 14 bp, Artificial Sequence
  Description of Artificial Sequence: Synthetic oligonucleotide
ctgctactatgtaa

SEQ ID NO: 1014 - DNA, 14 bp, Artificial Sequence
  Description of Artificial Sequence: Synthetic oligonucleotide
actgctactatgta

SEQ ID NO: 1015 - DNA, 14 bp, Artificial Sequence
  Description of Artificial Sequence: Synthetic oligonucleotide
gactgctactatgt

SEQ ID NO: 1016 - DNA, 14 bp, Artificial Sequence
  Description of Artificial Sequence: Synthetic oligonucleotide
agactgctactatg

SEQ ID NO: 1017 - DNA, 14 bp, Artificial Sequence
  Description of Artificial Sequence: Synthetic oligonucleotide
aagactgctactat

SEQ ID NO: 1018 - DNA, 14 bp, Artificial Sequence
  Description of Artificial Sequence: Synthetic oligonucleotide
taagactgctacta

SEQ ID NO: 1019 - DNA, 14 bp, Artificial Sequence
  Description of Artificial Sequence: Synthetic oligonucleotide
ctaagactgctact

SEQ ID NO: 1020 - DNA, 14 bp, Artificial Sequence
  Description of Artificial Sequence: Synthetic oligonucleotide
tctaagactgctac

SEQ ID NO: 1021 - DNA, 14 bp, Artificial Sequence
  Description of Artificial Sequence: Synthetic oligonucleotide
ttctaagactgcta

SEQ ID NO: 1022 - DNA, 14 bp, Artificial Sequence
  Description of Artificial Sequence: Synthetic oligonucleotide
attctaagactgct

SEQ ID NO: 1023 - DNA, 14 bp, Artificial Sequence
  Description of Artificial Sequence: Synthetic oligonucleotide
tattctaagactgc

SEQ ID NO: 1024 - DNA, 14 bp, Artificial Sequence
  Description of Artificial Sequence: Synthetic oligonucleotide
gtattctaagactg

SEQ ID NO: 1025 - DNA, 14 bp, Artificial Sequence
  Description of Artificial Sequence: Synthetic oligonucleotide
tgtattctaagact

SEQ ID NO: 1026 - DNA, 14 bp, Artificial Sequence
  Description of Artificial Sequence: Synthetic oligonucleotide
atgtattctaagac

SEQ ID NO: 1027 - DNA, 14 bp, Artificial Sequence
  Description of Artificial Sequence: Synthetic oligonucleotide
aatgtattctaaga

SEQ ID NO: 1028 - DNA, 14 bp, Artificial Sequence
  Description of Artificial Sequence: Synthetic oligonucleotide
aaatgtattctaag

SEQ ID NO: 1029 - DNA, 14 bp, Artificial Sequence
  Description of Artificial Sequence: Synthetic oligonucleotide
gaaatgtattctaa

SEQ ID NO: 1030 - DNA, 14 bp, Artificial Sequence
  Description of Artificial Sequence: Synthetic oligonucleotide
agaaatgtattcta

SEQ ID NO: 1031 - DNA, 14 bp, Artificial Sequence
  Description of Artificial Sequence: Synthetic oligonucleotide
cagaaatgtattct

SEQ ID NO: 1032 - DNA, 14 bp, Artificial Sequence
  Description of Artificial Sequence: Synthetic oligonucleotide
gcagaaatgtattc

SEQ ID NO: 1033 - DNA, 14 bp, Artificial Sequence
  Description of Artificial Sequence: Synthetic oligonucleotide
tgcagaaatgtatt

SEQ ID NO: 1034 - DNA, 14 bp, Artificial Sequence
  Description of Artificial Sequence: Synthetic oligonucleotide
ctgcagaaatgtat

SEQ ID NO: 1035 - DNA, 14 bp, Artificial Sequence
  Description of Artificial Sequence: Synthetic oligonucleotide
tctgcagaaatgta

SEQ ID NO: 1036 - DNA, 14 bp, Artificial Sequence
  Description of Artificial Sequence: Synthetic oligonucleotide
gtctgcagaaatgt

SEQ ID NO: 1037 - DNA, 14 bp, Artificial Sequence
  Description of Artificial Sequence: Synthetic oligonucleotide
tgtctgcagaaatg

SEQ ID NO: 1038 - DNA, 14 bp, Artificial Sequence
  Description of Artificial Sequence: Synthetic oligonucleotide
ttcatgtatatctg

SEQ ID NO: 1039 - DNA, 14 bp, Artificial Sequence
  Description of Artificial Sequence: Synthetic oligonucleotide
aatgtctgcagaaa

SEQ ID NO: 1040 - DNA, 14 bp, Artificial Sequence
  Description of Artificial Sequence: Synthetic oligonucleotide
aaatgtctgcagaa

SEQ ID NO: 1041 - DNA, 14 bp, Artificial Sequence
  Description of Artificial Sequence: Synthetic oligonucleotide
aaaatgtctgcaga

SEQ ID NO: 1042 - DNA, 14 bp, Artificial Sequence
  Description of Artificial Sequence: Synthetic oligonucleotide
taaaatgtctgcag

SEQ ID NO: 1043 - DNA, 14 bp, Artificial Sequence
  Description of Artificial Sequence: Synthetic oligonucleotide
ttaaaatgtctgca

SEQ ID NO: 1044 - DNA, 14 bp, Artificial Sequence
  Description of Artificial Sequence: Synthetic oligonucleotide
tttaaaatgtctgc

SEQ ID NO: 1045 - DNA, 14 bp, Artificial Sequence
  Description of Artificial Sequence: Synthetic oligonucleotide
ctttaaaatgtctg

SEQ ID NO: 1046 - DNA, 14 bp, Artificial Sequence
  Description of Artificial Sequence: Synthetic oligonucleotide
gctttaaaatgtct

SEQ ID NO: 1047 - DNA, 14 bp, Artificial Sequence
  Description of Artificial Sequence: Synthetic oligonucleotide
agctttaaaatgtc

SEQ ID NO: 1048 - DNA, 14 bp, Artificial Sequence
  Description of Artificial Sequence: Synthetic oligonucleotide
cagctttaaaatgt

SEQ ID NO: 1049 - DNA, 14 bp, Artificial Sequence
  Description of Artificial Sequence: Synthetic oligonucleotide
ccagctttaaaatg

SEQ ID NO: 1050 - DNA, 14 bp, Artificial Sequence
  Description of Artificial Sequence: Synthetic oligonucleotide
accagctttaaaat

SEQ ID NO: 1051 - DNA, 14 bp, Artificial Sequence
  Description of Artificial Sequence: Synthetic oligonucleotide
aaccagctttaaaa

SEQ ID NO: 1052 - DNA, 14 bp, Artificial Sequence
  Description of Artificial Sequence: Synthetic oligonucleotide
caaccagctttaaa

SEQ ID NO: 1053 - DNA, 14 bp, Artificial Sequence
  Description of Artificial Sequence: Synthetic oligonucleotide
ccaaccagctttaa

SEQ ID NO: 1054 - DNA, 14 bp, Artificial Sequence
  Description of Artificial Sequence: Synthetic oligonucleotide
cccaaccagcttta

SEQ ID NO: 1055 - DNA, 14 bp, Artificial Sequence
  Description of Artificial Sequence: Synthetic oligonucleotide
tcccaaccagcttt

SEQ ID NO: 1056 - DNA, 14 bp, Artificial Sequence
  Description of Artificial Sequence: Synthetic oligonucleotide
ttcccaaccagctt

SEQ ID NO: 1057 - DNA, 14 bp, Artificial Sequence
  Description of Artificial Sequence: Synthetic oligonucleotide
attcccaaccagct

SEQ ID NO: 1058 - DNA, 14 bp, Artificial Sequence
  Description of Artificial Sequence: Synthetic oligonucleotide
aattcccaaccagc

SEQ ID NO: 1059 - DNA, 14 bp, Artificial Sequence
  Description of Artificial Sequence: Synthetic oligonucleotide
taattcccaaccag

SEQ ID NO: 1060 - DNA, 14 bp, Artificial Sequence
  Description of Artificial Sequence: Synthetic oligonucleotide
ataattcccaacca

SEQ ID NO: 1061 - DNA, 14 bp, Artificial Sequence
  Description of Artificial Sequence: Synthetic oligonucleotide
cataattcccaacc

SEQ ID NO: 1062 - DNA, 14 bp, Artificial Sequence
  Description of Artificial Sequence: Synthetic oligonucleotide
acataattcccaac

SEQ ID NO: 1063 - DNA, 14 bp, Artificial Sequence
  Description of Artificial Sequence: Synthetic oligonucleotide
tacataattcccaa

SEQ ID NO: 1064 - DNA, 14 bp, Artificial Sequence
  Description of Artificial Sequence: Synthetic oligonucleotide
ttacataattccca

SEQ ID NO: 1065 - DNA, 14 bp, Artificial Sequence
  Description of Artificial Sequence: Synthetic oligonucleotide
cttacataattccc

SEQ ID NO: 1066 - DNA, 14 bp, Artificial Sequence
  Description of Artificial Sequence: Synthetic oligonucleotide
tcttacataattcc

SEQ ID NO: 1067 - DNA, 14 bp, Artificial Sequence
  Description of Artificial Sequence: Synthetic oligonucleotide
ttcttacataattc

SEQ ID NO: 1068 - DNA, 14 bp, Artificial Sequence
  Description of Artificial Sequence: Synthetic oligonucleotide
tttcttacataatt

SEQ ID NO: 1069 - DNA, 14 bp, Artificial Sequence
  Description of Artificial Sequence: Synthetic oligonucleotide
atttcttacataat

SEQ ID NO: 1070 - DNA, 14 bp, Artificial Sequence
  Description of Artificial Sequence: Synthetic oligonucleotide
tatttcttacataa

SEQ ID NO: 1071 - DNA, 14 bp, Artificial Sequence
  Description of Artificial Sequence: Synthetic oligonucleotide
atatttcttacata

SEQ ID NO: 1072 - DNA, 14 bp, Artificial Sequence
  Description of Artificial Sequence: Synthetic oligonucleotide
tatatttcttacat

SEQ ID NO: 1073 - DNA, 14 bp, Artificial Sequence
  Description of Artificial Sequence: Synthetic oligonucleotide
gtatatttcttaca

SEQ ID NO: 1074 - DNA, 14 bp, Artificial Sequence
  Description of Artificial Sequence: Synthetic oligonucleotide
cgtatatttcttac

SEQ ID NO: 1075 - DNA, 14 bp, Artificial Sequence
  Description of Artificial Sequence: Synthetic oligonucleotide
ccgtatatttctta

SEQ ID NO: 1076 - DNA, 14 bp, Artificial Sequence
  Description of Artificial Sequence: Synthetic oligonucleotide
gccgtatatttctt

SEQ ID NO: 1077 - DNA, 14 bp, Artificial Sequence
  Description of Artificial Sequence: Synthetic oligonucleotide
tgccgtatatttct

SEQ ID NO: 1078 - DNA, 14 bp, Artificial Sequence
  Description of Artificial Sequence: Synthetic oligonucleotide
atgccgtatatttc

SEQ ID NO: 1079 - DNA, 14 bp, Artificial Sequence
  Description of Artificial Sequence: Synthetic oligonucleotide
aatgccgtatattt

SEQ ID NO: 1080 - DNA, 14 bp, Artificial Sequence
  Description of Artificial Sequence: Synthetic oligonucleotide
taatgccgtatatt

SEQ ID NO: 1081 - DNA, 14 bp, Artificial Sequence
  Description of Artificial Sequence: Synthetic oligonucleotide
ataatgccgtatat

SEQ ID NO: 1082 - DNA, 14 bp, Artificial Sequence
  Description of Artificial Sequence: Synthetic oligonucleotide
cataatgccgtata

SEQ ID NO: 1083 - DNA, 14 bp, Artificial Sequence
  Description of Artificial Sequence: Synthetic oligonucleotide
tcataatgccgtat

SEQ ID NO: 1084 - DNA, 14 bp, Artificial Sequence
  Description of Artificial Sequence: Synthetic oligonucleotide
ttcataatgccgta

SEQ ID NO: 1085 - DNA, 14 bp, Artificial Sequence
  Description of Artificial Sequence: Synthetic oligonucleotide
tttcataatgccgt

SEQ ID NO: 1086 - DNA, 14 bp, Artificial Sequence
  Description of Artificial Sequence: Synthetic oligonucleotide
atttcataatgccg

SEQ ID NO: 1087 - DNA, 14 bp, Artificial Sequence
  Description of Artificial Sequence: Synthetic oligonucleotide
aatttcataatgcc

SEQ ID NO: 1088 - DNA, 14 bp, Artificial Sequence
  Description of Artificial Sequence: Synthetic oligonucleotide
taatttcataatgc

SEQ ID NO: 1089 - DNA, 14 bp, Artificial Sequence
  Description of Artificial Sequence: Synthetic oligonucleotide
gtaatttcataatg

SEQ ID NO: 1090 - DNA, 14 bp, Artificial Sequence
  Description of Artificial Sequence: Synthetic oligonucleotide
tgtaatttcataat

SEQ ID NO: 1091 - DNA, 14 bp, Artificial Sequence
  Description of Artificial Sequence: Synthetic oligonucleotide
ttgtaatttcataa

SEQ ID NO: 1092 - DNA, 14 bp, Artificial Sequence
  Description of Artificial Sequence: Synthetic oligonucleotide
tttgtaatttcata

SEQ ID NO: 1093 - DNA, 14 bp, Artificial Sequence
  Description of Artificial Sequence: Synthetic oligonucleotide
ttttgtaatttcat

SEQ ID NO: 1094 - DNA, 14 bp, Artificial Sequence
  Description of Artificial Sequence: Synthetic oligonucleotide
gttttgtaatttca

SEQ ID NO: 1095 - DNA, 14 bp, Artificial Sequence
  Description of Artificial Sequence: Synthetic oligonucleotide
tgttttgtaatttc

SEQ ID NO: 1096 - DNA, 14 bp, Artificial Sequence
  Description of Artificial Sequence: Synthetic oligonucleotide
ttgttttgtaattt

SEQ ID NO: 1097 - DNA, 14 bp, Artificial Sequence
  Description of Artificial Sequence: Synthetic oligonucleotide
cttgttttgtaatt

SEQ ID NO: 1098 - DNA, 14 bp, Artificial Sequence
  Description of Artificial Sequence: Synthetic oligonucleotide
tcttgttttgtaat

SEQ ID NO: 1099 - DNA, 14 bp, Artificial Sequence
  Description of Artificial Sequence: Synthetic oligonucleotide
atcttgttttgtaa

SEQ ID NO: 1100 - DNA, 14 bp, Artificial Sequence
  Description of Artificial Sequence: Synthetic oligonucleotide
tatcttgttttgta

SEQ ID NO: 1101 - DNA, 14 bp, Artificial Sequence
  Description of Artificial Sequence: Synthetic oligonucleotide
atatcttgttttgt

SEQ ID NO: 1102 - DNA, 14 bp, Artificial Sequence
  Description of Artificial Sequence: Synthetic oligonucleotide
aatatcttgttttg

SEQ ID NO: 1103 - DNA, 14 bp, Artificial Sequence
  Description of Artificial Sequence: Synthetic oligonucleotide
taatatcttgtttt

SEQ ID NO: 1104 - DNA, 14 bp, Artificial Sequence
  Description of Artificial Sequence: Synthetic oligonucleotide
ttaatatcttgttt

SEQ ID NO: 1105 - DNA, 14 bp, Artificial Sequence
  Description of Artificial Sequence: Synthetic oligonucleotide
tttaatatcttgtt

SEQ ID NO: 1106 - DNA, 14 bp, Artificial Sequence
  Description of Artificial Sequence: Synthetic oligonucleotide
ctttaatatcttgt

SEQ ID NO: 1107 - DNA, 14 bp, Artificial Sequence
  Description of Artificial Sequence: Synthetic oligonucleotide
actttaatatcttg

SEQ ID NO: 1108 - DNA, 14 bp, Artificial Sequence
  Description of Artificial Sequence: Synthetic oligonucleotide
cactttaatatctt

SEQ ID NO: 1109 - DNA, 14 bp, Artificial Sequence
  Description of Artificial Sequence: Synthetic oligonucleotide
ccactttaatatct

SEQ ID NO: 1110 - DNA, 14 bp, Artificial Sequence
  Description of Artificial Sequence: Synthetic oligonucleotide
gccactttaatatc

SEQ ID NO: 1111 - DNA, 14 bp, Artificial Sequence
  Description of Artificial Sequence: Synthetic oligonucleotide
tgccactttaatat

SEQ ID NO: 1112 - DNA, 14 bp, Artificial Sequence
  Description of Artificial Sequence: Synthetic oligonucleotide
ttgccactttaata

SEQ ID NO: 1113 - DNA, 14 bp, Artificial Sequence
  Description of Artificial Sequence: Synthetic oligonucleotide
attgccactttaat

SEQ ID NO: 1114 - DNA, 14 bp, Artificial Sequence
  Description of Artificial Sequence: Synthetic oligonucleotide
cattgccactttaa

SEQ ID NO: 1115 - DNA, 14 bp, Artificial Sequence
  Description of Artificial Sequence: Synthetic oligonucleotide
acattgccacttta

SEQ ID NO: 1116 - DNA, 14 bp, Artificial Sequence
  Description of Artificial Sequence: Synthetic oligonucleotide
cacattgccacttt

SEQ ID NO: 1117 - DNA, 14 bp, Artificial Sequence
  Description of Artificial Sequence: Synthetic oligonucleotide
acacattgccactt

SEQ ID NO: 1118 - DNA, 14 bp, Artificial Sequence
  Description of Artificial Sequence: Synthetic oligonucleotide
cacacattgccact

SEQ ID NO: 1119 - DNA, 14 bp, Artificial Sequence
  Description of Artificial Sequence: Synthetic oligonucleotide
gcacacattgccac

SEQ ID NO: 1120 - DNA, 14 bp, Artificial Sequence
  Description of Artificial Sequence: Synthetic oligonucleotide
agcacacattgcca

SEQ ID NO: 1121 - DNA, 14 bp, Artificial Sequence
  Description of Artificial Sequence: Synthetic oligonucleotide
cagcacacattgcc

SEQ ID NO: 1122 - DNA, 14 bp, Artificial Sequence
  Description of Artificial Sequence: Synthetic oligonucleotide
tcagcacacattgc

SEQ ID NO: 1123 - DNA, 14 bp, Artificial Sequence
  Description of Artificial Sequence: Synthetic oligonucleotide
gtcagcacacattg

SEQ ID NO: 1124 - DNA, 14 bp, Artificial Sequence
  Description of Artificial Sequence: Synthetic oligonucleotide
tgtcagcacacatt

SEQ ID NO: 1125 - DNA, 14 bp, Artificial Sequence
  Description of Artificial Sequence: Synthetic oligonucleotide
ttgtcagcacacat

SEQ ID NO: 1126 - DNA, 14 bp, Artificial Sequence
  Description of Artificial Sequence: Synthetic oligonucleotide
cttgtcagcacaca

SEQ ID NO: 1127 - DNA, 14 bp, Artificial Sequence
  Description of Artificial Sequence: Synthetic oligonucleotide
ccttgtcagcacac

SEQ ID NO: 1128 - DNA, 14 bp, Artificial Sequence
  Description of Artificial Sequence: Synthetic oligonucleotide
accttgtcagcaca

SEQ ID NO: 1129 - DNA, 14 bp, Artificial Sequence
  Description of Artificial Sequence: Synthetic oligonucleotide
taccttgtcagcac

SEQ ID NO: 1130 - DNA, 14 bp, Artificial Sequence
  Description of Artificial Sequence: Synthetic oligonucleotide
ataccttgtcagca

SEQ ID NO: 1131 - DNA, 14 bp, Artificial Sequence
  Description of Artificial Sequence: Synthetic oligonucleotide
aataccttgtcagc

SEQ ID NO: 1132 - DNA, 14 bp, Artificial Sequence
  Description of Artificial Sequence: Synthetic oligonucleotide
caataccttgtcag

SEQ ID NO: 1133 - DNA, 14 bp, Artificial Sequence
  Description of Artificial Sequence: Synthetic oligonucleotide
tcaataccttgtca

SEQ ID NO: 1134 - DNA, 14 bp, Artificial Sequence
  Description of Artificial Sequence: Synthetic oligonucleotide
atcaataccttgtc

SEQ ID NO: 1135 - DNA, 14 bp, Artificial Sequence
  Description of Artificial Sequence: Synthetic oligonucleotide
catcaataccttgt

SEQ ID NO: 1136 - DNA, 14 bp, Artificial Sequence
  Description of Artificial Sequence: Synthetic oligonucleotide
ccatcaataccttg

SEQ ID NO: 1137 - DNA, 14 bp, Artificial Sequence
  Description of Artificial Sequence: Synthetic oligonucleotide
tccatcaatacctt

SEQ ID NO: 1138 - DNA, 14 bp, Artificial Sequence
  Description of Artificial Sequence: Synthetic oligonucleotide
atccatcaatacct

SEQ ID NO: 1139 - DNA, 14 bp, Artificial Sequence
  Description of Artificial Sequence: Synthetic oligonucleotide
tatccatcaatacc

SEQ ID NO: 1140 - DNA, 14 bp, Artificial Sequence
  Description of Artificial Sequence: Synthetic oligonucleotide
atatccatcaatac

SEQ ID NO: 1141 - DNA, 14 bp, Artificial Sequence
  Description of Artificial Sequence: Synthetic oligonucleotide
catatccatcaata

SEQ ID NO: 1142 - DNA, 14 bp, Artificial Sequence
  Description of Artificial Sequence: Synthetic oligonucleotide
acatatccatcaat

SEQ ID NO: 1143 - DNA, 14 bp, Artificial Sequence
  Description of Artificial Sequence: Synthetic oligonucleotide
aacatatccatcaa

SEQ ID NO: 1144 - DNA, 14 bp, Artificial Sequence
  Description of Artificial Sequence: Synthetic oligonucleotide
aaacatatccatca

SEQ ID NO: 1145 - DNA, 14 bp, Artificial Sequence
  Description of Artificial Sequence: Synthetic oligonucleotide
gaaacatatccatc

SEQ ID NO: 1146 - DNA, 14 bp, Artificial Sequence
  Description of Artificial Sequence: Synthetic oligonucleotide
tgaaacatatccat

SEQ ID NO: 1147 - DNA, 14 bp, Artificial Sequence
  Description of Artificial Sequence: Synthetic oligonucleotide
atgaaacatatcca

SEQ ID NO: 1148 - DNA, 14 bp, Artificial Sequence
  Description of Artificial Sequence: Synthetic oligonucleotide
gatgaaacatatcc

SEQ ID NO: 1149 - DNA, 14 bp, Artificial Sequence
  Description of Artificial Sequence: Synthetic oligonucleotide
tgatgaaacatatc

SEQ ID NO: 1150 - DNA, 14 bp, Artificial Sequence
  Description of Artificial Sequence: Synthetic oligonucleotide
ttgatgaaacatat

SEQ ID NO: 1151 - DNA, 14 bp, Artificial Sequence
  Description of Artificial Sequence: Synthetic oligonucleotide
cttgatgaaacata

SEQ ID NO: 1152 - DNA, 14 bp, Artificial Sequence
  Description of Artificial Sequence: Synthetic oligonucleotide
tcttgatgaaacat

SEQ ID NO: 1153 - DNA, 14 bp, Artificial Sequence
  Description of Artificial Sequence: Synthetic oligonucleotide
atcttgatgaaaca

SEQ ID NO: 1154 - DNA, 14 bp, Artificial Sequence
  Description of Artificial Sequence: Synthetic oligonucleotide
catcttgatgaaac

SEQ ID NO: 1155 - DNA, 14 bp, Artificial Sequence
  Description of Artificial Sequence: Synthetic oligonucleotide
acatcttgatgaaa

SEQ ID NO: 1156 - DNA, 14 bp, Artificial Sequence
  Description of Artificial Sequence: Synthetic oligonucleotide
tacatcttgatgaa

SEQ ID NO: 1157 - DNA, 14 bp, Artificial Sequence
  Description of Artificial Sequence: Synthetic oligonucleotide
ctacatcttgatga

SEQ ID NO: 1158 - DNA, 14 bp, Artificial Sequence
  Description of Artificial Sequence: Synthetic oligonucleotide
tctacatcttgatg

SEQ ID NO: 1159 - DNA, 14 bp, Artificial Sequence
  Description of Artificial Sequence: Synthetic oligonucleotide
ttctacatcttgat

SEQ ID NO: 1160 - DNA, 14 bp, Artificial Sequence
  Description of Artificial Sequence: Synthetic oligonucleotide
cttctacatcttga

SEQ ID NO: 1161 - DNA, 14 bp, Artificial Sequence
  Description of Artificial Sequence: Synthetic oligonucleotide
tcttctacatcttg

SEQ ID NO: 1162 - DNA, 14 bp, Artificial Sequence
  Description of Artificial Sequence: Synthetic oligonucleotide
atcttctacatctt

SEQ ID NO: 1163 - DNA, 14 bp, Artificial Sequence
  Description of Artificial Sequence: Synthetic oligonucleotide
tatcttctacatct

SEQ ID NO: 1164 - DNA, 14 bp, Artificial Sequence
  Description of Artificial Sequence: Synthetic oligonucleotide
atatcttctacatc

SEQ ID NO: 1165 - DNA, 14 bp, Artificial Sequence
  Description of Artificial Sequence: Synthetic oligonucleotide
aatatcttctacat

SEQ ID NO: 1166 - DNA, 14 bp, Artificial Sequence
  Description of Artificial Sequence: Synthetic oligonucleotide
taatatcttctaca

SEQ ID NO: 1167 - DNA, 14 bp, Artificial Sequence
  Description of Artificial Sequence: Synthetic oligonucleotide
ttaatatcttctac

SEQ ID NO: 1168 - DNA, 14 bp, Artificial Sequence
  Description of Artificial Sequence: Synthetic oligonucleotide
attaatatcttcta

SEQ ID NO: 1169 - DNA, 14 bp, Artificial Sequence
  Description of Artificial Sequence: Synthetic oligonucleotide
tattaatatcttct

SEQ ID NO: 1170 - DNA, 14 bp, Artificial Sequence
  Description of Artificial Sequence: Synthetic oligonucleotide
atattaatatcttc

SEQ ID NO: 1171 - DNA, 14 bp, Artificial Sequence
  Description of Artificial Sequence: Synthetic oligonucleotide
tatattaatatctt

SEQ ID NO: 1172 - DNA, 14 bp, Artificial Sequence
  Description of Artificial Sequence: Synthetic oligonucleotide
atatattaatatct

SEQ ID NO: 1173 - DNA, 14 bp, Artificial Sequence
  Description of Artificial Sequence: Synthetic oligonucleotide
aatatattaatatc

SEQ ID NO: 1174 - DNA, 14 bp, Artificial Sequence
  Description of Artificial Sequence: Synthetic oligonucleotide
taatatattaatat

SEQ ID NO: 1175 - DNA, 14 bp, Artificial Sequence
  Description of Artificial Sequence: Synthetic oligonucleotide
ataatatattaata

SEQ ID NO: 1176 - DNA, 14 bp, Artificial Sequence
  Description of Artificial Sequence: Synthetic oligonucleotide
gataatatattaat

SEQ ID NO: 1177 - DNA, 14 bp, Artificial Sequence
  Description of Artificial Sequence: Synthetic oligonucleotide
agataatatattaa

SEQ ID NO: 1178 - DNA, 14 bp, Artificial Sequence
  Description of Artificial Sequence: Synthetic oligonucleotide
aagataatatatta

SEQ ID NO: 1179 - DNA, 14 bp, Artificial Sequence
  Description of Artificial Sequence: Synthetic oligonucleotide
aaagataatatatt

SEQ ID NO: 1180 - DNA, 14 bp, Artificial Sequence
  Description of Artificial Sequence: Synthetic oligonucleotide
taaagataatatat

SEQ ID NO: 1181 - DNA, 14 bp, Artificial Sequence
  Description of Artificial Sequence: Synthetic oligonucleotide
ttaaagataatata

SEQ ID NO: 1182 - DNA, 14 bp, Artificial Sequence
  Description of Artificial Sequence: Synthetic oligonucleotide
gttaaagataatat

SEQ ID NO: 1183 - DNA, 14 bp, Artificial Sequence
  Description of Artificial Sequence: Synthetic oligonucleotide
agttaaagataata

SEQ ID NO: 1184 - DNA, 14 bp, Artificial Sequence
  Description of Artificial Sequence: Synthetic oligonucleotide
cagttaaagataat

SEQ ID NO: 1185 - DNA, 14 bp, Artificial Sequence
  Description of Artificial Sequence: Synthetic oligonucleotide
tcagttaaagataa

SEQ ID NO: 1186 - DNA, 14 bp, Artificial Sequence
  Description of Artificial Sequence: Synthetic oligonucleotide
gtcagttaaagata

SEQ ID NO: 1187 - DNA, 14 bp, Artificial Sequence
  Description of Artificial Sequence: Synthetic oligonucleotide
cgtcagttaaagat

SEQ ID NO: 1188 - DNA, 14 bp, Artificial Sequence
  Description of Artificial Sequence: Synthetic oligonucleotide
tcgtcagttaaaga

SEQ ID NO: 1189 - DNA, 14 bp, Artificial Sequence
  Description of Artificial Sequence: Synthetic oligonucleotide
ttcgtcagttaaag

SEQ ID NO: 1190 - DNA, 14 bp, Artificial Sequence
  Description of Artificial Sequence: Synthetic oligonucleotide
cttcgtcagttaaa

SEQ ID NO: 1191 - DNA, 14 bp, Artificial Sequence
  Description of Artificial Sequence: Synthetic oligonucleotide
tcttcgtcagttaa

SEQ ID NO: 1192 - DNA, 14 bp, Artificial Sequence
  Description of Artificial Sequence: Synthetic oligonucleotide
ctcttcgtcagtta

SEQ ID NO: 1193 - DNA, 14 bp, Artificial Sequence
  Description of Artificial Sequence: Synthetic oligonucleotide
gctcttcgtcagtt

SEQ ID NO: 1194 - DNA, 14 bp, Artificial Sequence
  Description of Artificial Sequence: Synthetic oligonucleotide
ggctcttcgtcagt

SEQ ID NO: 1195 - DNA, 14 bp, Artificial Sequence
  Description of Artificial Sequence: Synthetic oligonucleotide
aggctcttcgtcag

SEQ ID NO: 1196 - DNA, 14 bp, Artificial Sequence
  Description of Artificial Sequence: Synthetic oligonucleotide
aaggctcttcgtca

SEQ ID NO: 1197 - DNA, 14 bp, Artificial Sequence
  Description of Artificial Sequence: Synthetic oligonucleotide
gaaggctcttcgtc

SEQ ID NO: 1198 - DNA, 14 bp, Artificial Sequence
  Description of Artificial Sequence: Synthetic oligonucleotide
ggaaggctcttcgt

SEQ ID NO: 1199 - DNA, 14 bp, Artificial Sequence
  Description of Artificial Sequence: Synthetic oligonucleotide
tggaaggctcttcg

SEQ ID NO: 1200 - DNA, 14 bp, Artificial Sequence
  Description of Artificial Sequence: Synthetic oligonucleotide
gtggaaggctcttc

SEQ ID NO: 1201 - DNA, 14 bp, Artificial Sequence
  Description of Artificial Sequence: Synthetic oligonucleotide
ggtggaaggctctt

SEQ ID NO: 1202 - DNA, 14 bp, Artificial Sequence
  Description of Artificial Sequence: Synthetic oligonucleotide
aggtggaaggctct

SEQ ID NO: 1203 - DNA, 14 bp, Artificial Sequence
  Description of Artificial Sequence: Synthetic oligonucleotide
gaggtggaaggctc

SEQ ID NO: 1204 - DNA, 14 bp, Artificial Sequence
  Description of Artificial Sequence: Synthetic oligonucleotide
tgaggtggaaggct

SEQ ID NO: 1205 - DNA, 14 bp, Artificial Sequence
  Description of Artificial Sequence: Synthetic oligonucleotide
ctgaggtggaaggc

SEQ ID NO: 1206 - DNA, 14 bp, Artificial Sequence
  Description of Artificial Sequence: Synthetic oligonucleotide
cctgaggtggaagg

SEQ ID NO: 1207 - DNA, 14 bp, Artificial Sequence
  Description of Artificial Sequence: Synthetic oligonucleotide
tcctgaggtggaag

SEQ ID NO: 1208 - DNA, 14 bp, Artificial Sequence
  Description of Artificial Sequence: Synthetic oligonucleotide
ctcctgaggtggaa

SEQ ID NO: 1209 - DNA, 14 bp, Artificial Sequence
  Description of Artificial Sequence: Synthetic oligonucleotide
tctcctgaggtgga

SEQ ID NO: 1210 - DNA, 14 bp, Artificial Sequence
  Description of Artificial Sequence: Synthetic oligonucleotide
ttctcctgaggtgg

SEQ ID NO: 1211 - DNA, 14 bp, Artificial Sequence
  Description of Artificial Sequence: Synthetic oligonucleotide
gttctcctgaggtg

SEQ ID NO: 1212 - DNA, 14 bp, Artificial Sequence
  Description of Artificial Sequence: Synthetic oligonucleotide
tgttctcctgaggt

SEQ ID NO: 1213 - DNA, 14 bp, Artificial Sequence
  Description of Artificial Sequence: Synthetic oligonucleotide
ttgttctcctgagg

SEQ ID NO: 1214 - DNA, 14 bp, Artificial Sequence
  Description of Artificial Sequence: Synthetic oligonucleotide
tttgttctcctgag

SEQ ID NO: 1215 - DNA, 14 bp, Artificial Sequence
  Description of Artificial Sequence: Synthetic oligonucleotide
gtttgttctcctga

SEQ ID NO: 1216 - DNA, 14 bp, Artificial Sequence
  Description of Artificial Sequence: Synthetic oligonucleotide
agtttgttctcctg

SEQ ID NO: 1217 - DNA, 14 bp, Artificial Sequence
  Description of Artificial Sequence: Synthetic oligonucleotide
aagtttgttctcct

SEQ ID NO: 1218 - DNA, 14 bp, Artificial Sequence
  Description of Artificial Sequence: Synthetic oligonucleotide
taagtttgttctcc

SEQ ID NO: 1219 - DNA, 14 bp, Artificial Sequence
  Description of Artificial Sequence: Synthetic oligonucleotide
gtaagtttgttctc

SEQ ID NO: 1220 - DNA, 14 bp, Artificial Sequence
  Description of Artificial Sequence: Synthetic oligonucleotide
agtaagtttgttct

SEQ ID NO: 1221 - DNA, 14 bp, Artificial Sequence
  Description of Artificial Sequence: Synthetic oligonucleotide
tagtaagtttgttc

SEQ ID NO: 1222 - DNA, 14 bp, Artificial Sequence
  Description of Artificial Sequence: Synthetic oligonucleotide
atagtaagtttgtt

SEQ ID NO: 1223 - DNA, 14 bp, Artificial Sequence
  Description of Artificial Sequence: Synthetic oligonucleotide
catagtaagtttgt

SEQ ID NO: 1224 - DNA, 14 bp, Artificial Sequence
  Description of Artificial Sequence: Synthetic oligonucleotide
tcatagtaagtttg

SEQ ID NO: 1225 - DNA, 14 bp, Artificial Sequence
  Description of Artificial Sequence: Synthetic oligonucleotide
atcatagtaagttt

SEQ ID NO: 1226 - DNA, 14 bp, Artificial Sequence
  Description of Artificial Sequence: Synthetic oligonucleotide
aatcatagtaagtt

SEQ ID NO: 1227 - DNA, 14 bp, Artificial Sequence
  Description of Artificial Sequence: Synthetic oligonucleotide
aaatcatagtaagt

SEQ ID NO: 1228 - DNA, 14 bp, Artificial Sequence
  Description of Artificial Sequence: Synthetic oligonucleotide
caaatcatagtaag

SEQ ID NO: 1229 - DNA, 14 bp, Artificial Sequence
  Description of Artificial Sequence: Synthetic oligonucleotide
ccaaatcatagtaa

SEQ ID NO: 1230 - DNA, 14 bp, Artificial Sequence
  Description of Artificial Sequence: Synthetic oligonucleotide
accaaatcatagta

SEQ ID NO: 1231 - DNA, 14 bp, Artificial Sequence
  Description of Artificial Sequence: Synthetic oligonucleotide
taccaaatcatagt

SEQ ID NO: 1232 - DNA, 14 bp, Artificial Sequence
  Description of Artificial Sequence: Synthetic oligonucleotide
ttaccaaatcatag

SEQ ID NO: 1233 - DNA, 14 bp, Artificial Sequence
  Description of Artificial Sequence: Synthetic oligonucleotide
tttaccaaatcata

SEQ ID NO: 1234 - DNA, 14 bp, Artificial Sequence
  Description of Artificial Sequence: Synthetic oligonucleotide
ttttaccaaatcat

SEQ ID NO: 1235 - DNA, 14 bp, Artificial Sequence
  Description of Artificial Sequence: Synthetic oligonucleotide
cttttaccaaatca

SEQ ID NO: 1236 - DNA, 14 bp, Artificial Sequence
  Description of Artificial Sequence: Synthetic oligonucleotide
gcttttaccaaatc

SEQ ID NO: 1237 - DNA, 14 bp, Artificial Sequence
  Description of Artificial Sequence: Synthetic oligonucleotide
tgcttttaccaaat

SEQ ID NO: 1238 - DNA, 14 bp, Artificial Sequence
  Description of Artificial Sequence: Synthetic oligonucleotide
atgcttttaccaaa

SEQ ID NO: 1239 - DNA, 14 bp, Artificial Sequence
  Description of Artificial Sequence: Synthetic oligonucleotide
aatgcttttaccaa

SEQ ID NO: 1240 - DNA, 14 bp, Artificial Sequence
  Description of Artificial Sequence: Synthetic oligonucleotide
aaatgcttttacca

SEQ ID NO: 1241 - DNA, 14 bp, Artificial Sequence
  Description of Artificial Sequence: Synthetic oligonucleotide
taaatgcttttacc

SEQ ID NO: 1242 - DNA, 14 bp, Artificial Sequence
  Description of Artificial Sequence: Synthetic oligonucleotide
ataaatgcttttac

SEQ ID NO: 1243 - DNA, 14 bp, Artificial Sequence
  Description of Artificial Sequence: Synthetic oligonucleotide
cataaatgctttta

SEQ ID NO: 1244 - DNA, 14 bp, Artificial Sequence
  Description of Artificial Sequence: Synthetic oligonucleotide
ccataaatgctttt

SEQ ID NO: 1245 - DNA, 14 bp, Artificial Sequence
  Description of Artificial Sequence: Synthetic oligonucleotide
gccataaatgcttt

SEQ ID NO: 1246 - DNA, 14 bp, Artificial Sequence
  Description of Artificial Sequence: Synthetic oligonucleotide
tgccataaatgctt

SEQ ID NO: 1247 - DNA, 14 bp, Artificial Sequence
  Description of Artificial Sequence: Synthetic oligonucleotide
ctgccataaatgct

SEQ ID NO: 1248 - DNA, 14 bp, Artificial Sequence
  Description of Artificial Sequence: Synthetic oligonucleotide
tctgccataaatgc

SEQ ID NO: 1249 - DNA, 14 bp, Artificial Sequence
  Description of Artificial Sequence: Synthetic oligonucleotide
ttctgccataaatg

SEQ ID NO: 1250 - DNA, 14 bp, Artificial Sequence
  Description of Artificial Sequence: Synthetic oligonucleotide
tttctgccataaat

SEQ ID NO: 1251 - DNA, 14 bp, Artificial Sequence
  Description of Artificial Sequence: Synthetic oligonucleotide
atttctgccataaa

SEQ ID NO: 1252 - DNA, 14 bp, Artificial Sequence
  Description of Artificial Sequence: Synthetic oligonucleotide
aatttctgccataa

SEQ ID NO: 1253 - DNA, 14 bp, Artificial Sequence
  Description of Artificial Sequence: Synthetic oligonucleotide
gaatttctgccata

SEQ ID NO: 1254 - DNA, 14 bp, Artificial Sequence
  Description of Artificial Sequence: Synthetic oligonucleotide
cgaatttctgccat

SEQ ID NO: 1255 - DNA, 14 bp, Artificial Sequence
  Description of Artificial Sequence: Synthetic oligonucleotide
tcgaatttctgcca

SEQ ID NO: 1256 - DNA, 14 bp, Artificial Sequence
  Description of Artificial Sequence: Synthetic oligonucleotide
gtcgaatttctgcc

SEQ ID NO: 1257 - DNA, 14 bp, Artificial Sequence
  Description of Artificial Sequence: Synthetic oligonucleotide
tgtcgaatttctgc

SEQ ID NO: 1258 - DNA, 14 bp, Artificial Sequence
  Description of Artificial Sequence: Synthetic oligonucleotide
ttgtcgaatttctg

SEQ ID NO: 1259 - DNA, 14 bp, Artificial Sequence
  Description of Artificial Sequence: Synthetic oligonucleotide
attgtcgaatttct

SEQ ID NO: 1260 - DNA, 14 bp, Artificial Sequence
  Description of Artificial Sequence: Synthetic oligonucleotide
tattgtcgaatttc

SEQ ID NO: 1261 - DNA, 14 bp, Artificial Sequence
  Description of Artificial Sequence: Synthetic oligonucleotide
atattgtcgaattt

SEQ ID NO: 1262 - DNA, 14 bp, Artificial Sequence
  Description of Artificial Sequence: Synthetic oligonucleotide
tatattgtcgaatt

SEQ ID NO: 1263 - DNA, 14 bp, Artificial Sequence
  Description of Artificial Sequence: Synthetic oligonucleotide
atatattgtcgaat

SEQ ID NO: 1264 - DNA, 14 bp, Artificial Sequence
  Description of Artificial Sequence: Synthetic oligonucleotide
tatatattgtcgaa

SEQ ID NO: 1265 - DNA, 14 bp, Artificial Sequence
  Description of Artificial Sequence: Synthetic oligonucleotide
ttatatattgtcga

SEQ ID NO: 1266 - DNA, 14 bp, Artificial Sequence
  Description of Artificial Sequence: Synthetic oligonucleotide
cttatatattgtcg

SEQ ID NO: 1267 - DNA, 14 bp, Artificial Sequence
  Description of Artificial Sequence: Synthetic oligonucleotide
ccttatatattgtc

SEQ ID NO: 1268 - DNA, 14 bp, Artificial Sequence
  Description of Artificial Sequence: Synthetic oligonucleotide
cccttatatattgt

SEQ ID NO: 1269 - DNA, 14 bp, Artificial Sequence
  Description of Artificial Sequence: Synthetic oligonucleotide
tcccttatatattg

SEQ ID NO: 1270 - DNA, 14 bp, Artificial Sequence
  Description of Artificial Sequence: Synthetic oligonucleotide
ttcccttatatatt

SEQ ID NO: 1271 - DNA, 14 bp, Artificial Sequence
  Description of Artificial Sequence: Synthetic oligonucleotide
gttcccttatatat

SEQ ID NO: 1272 - DNA, 14 bp, Artificial Sequence
  Description of Artificial Sequence: Synthetic oligonucleotide
agttcccttatata

SEQ ID NO: 1273 - DNA, 14 bp, Artificial Sequence
  Description of Artificial Sequence: Synthetic oligonucleotide
tagttcccttatat

SEQ ID NO: 1274 - DNA, 14 bp, Artificial Sequence
  Description of Artificial Sequence: Synthetic oligonucleotide
ttagttcccttata

SEQ ID NO: 1275 - DNA, 14 bp, Artificial Sequence
  Description of Artificial Sequence: Synthetic oligonucleotide
tttagttcccttat

SEQ ID NO: 1276 - DNA, 14 bp, Artificial Sequence
  Description of Artificial Sequence: Synthetic oligonucleotide
atttagttccctta

SEQ ID NO: 1277 - DNA, 14 bp, Artificial Sequence
  Description of Artificial Sequence: Synthetic oligonucleotide
gatttagttccctt

SEQ ID NO: 1278 - DNA, 14 bp, Artificial Sequence
  Description of Artificial Sequence: Synthetic oligonucleotide
agatttagttccct

SEQ ID NO: 1279 - DNA, 14 bp, Artificial Sequence
  Description of Artificial Sequence: Synthetic oligonucleotide
tagatttagttccc

SEQ ID NO: 1280 - DNA, 14 bp, Artificial Sequence
  Description of Artificial Sequence: Synthetic oligonucleotide
ttagatttagttcc

SEQ ID NO: 1281 - DNA, 14 bp, Artificial Sequence
  Description of Artificial Sequence: Synthetic oligonucleotide
attagatttagttc

SEQ ID NO: 1282 - DNA, 14 bp, Artificial Sequence
  Description of Artificial Sequence: Synthetic oligonucleotide
aattagatttagtt

SEQ ID NO: 1283 - DNA, 14 bp, Artificial Sequence
  Description of Artificial Sequence: Synthetic oligonucleotide
taattagatttagt

SEQ ID NO: 1284 - DNA, 14 bp, Artificial Sequence
  Description of Artificial Sequence: Synthetic oligonucleotide
ataattagatttag

SEQ ID NO: 1285 - DNA, 14 bp, Artificial Sequence
  Description of Artificial Sequence: Synthetic oligonucleotide
tataattagattta

SEQ ID NO: 1286 - DNA, 14 bp, Artificial Sequence
  Description of Artificial Sequence: Synthetic oligonucleotide
ttataattagattt

SEQ ID NO: 1287 - DNA, 14 bp, Artificial Sequence
  Description of Artificial Sequence: Synthetic oligonucleotide
tttataattagatt

SEQ ID NO: 1288 - DNA, 14 bp, Artificial Sequence
  Description of Artificial Sequence: Synthetic oligonucleotide
ttttataattagat

SEQ ID NO: 1289 - DNA, 14 bp, Artificial Sequence
  Description of Artificial Sequence: Synthetic oligonucleotide
cttttataattaga

SEQ ID NO: 1290 - DNA, 14 bp, Artificial Sequence
  Description of Artificial Sequence: Synthetic oligonucleotide
acttttataattag

SEQ ID NO: 1291 - DNA, 14 bp, Artificial Sequence
  Description of Artificial Sequence: Synthetic oligonucleotide
aacttttataatta

SEQ ID NO: 1292 - DNA, 14 bp, Artificial Sequence
  Description of Artificial Sequence: Synthetic oligonucleotide
aaacttttataatt

SEQ ID NO: 1293 - DNA, 14 bp, Artificial Sequence
  Description of Artificial Sequence: Synthetic oligonucleotide
aaaacttttataat

SEQ ID NO: 1294 - DNA, 14 bp, Artificial Sequence
  Description of Artificial Sequence: Synthetic oligonucleotide
aaaaacttttataa

SEQ ID NO: 1295 - DNA, 14 bp, Artificial Sequence
  Description of Artificial Sequence: Synthetic oligonucleotide
taaaaacttttata

SEQ ID NO: 1296 - DNA, 14 bp, Artificial Sequence
  Description of Artificial Sequence: Synthetic oligonucleotide
ctaaaaacttttat

SEQ ID NO: 1297 - DNA, 14 bp, Artificial Sequence
  Description of Artificial Sequence: Synthetic oligonucleotide
tctaaaaactttta

SEQ ID NO: 1298 - DNA, 14 bp, Artificial Sequence
  Description of Artificial Sequence: Synthetic oligonucleotide
ctctaaaaactttt

SEQ ID NO: 1299 - DNA, 14 bp, Artificial Sequence
  Description of Artificial Sequence: Synthetic oligonucleotide
tctctaaaaacttt

SEQ ID NO: 1300 - DNA, 14 bp, Artificial Sequence
  Description of Artificial Sequence: Synthetic oligonucleotide
ctctctaaaaactt

SEQ ID NO: 1301 - DNA, 14 bp, Artificial Sequence
  Description of Artificial Sequence: Synthetic oligonucleotide
gctctctaaaaact

SEQ ID NO: 1302 - DNA, 14 bp, Artificial Sequence
  Description of Artificial Sequence: Synthetic oligonucleotide
ggctctctaaaaac

SEQ ID NO: 1303 - DNA, 14 bp, Artificial Sequence
  Description of Artificial Sequence: Synthetic oligonucleotide
gggctctctaaaaa

SEQ ID NO: 1304 - DNA, 14 bp, Artificial Sequence
  Description of Artificial Sequence: Synthetic oligonucleotide
agggctctctaaaa

SEQ ID NO: 1305 - DNA, 14 bp, Artificial Sequence
  Description of Artificial Sequence: Synthetic oligonucleotide
aagggctctctaaa

SEQ ID NO: 1306 - DNA, 14 bp, Artificial Sequence
  Description of Artificial Sequence: Synthetic oligonucleotide
aaagggctctctaa

SEQ ID NO: 1307 - DNA, 14 bp, Artificial Sequence
  Description of Artificial Sequence: Synthetic oligonucleotide
caaagggctctcta

SEQ ID NO: 1308 - DNA, 14 bp, Artificial Sequence
  Description of Artificial Sequence: Synthetic oligonucleotide
acaaagggctctct

SEQ ID NO: 1309 - DNA, 14 bp, Artificial Sequence
  Description of Artificial Sequence: Synthetic oligonucleotide
gacaaagggctctc

SEQ ID NO: 1310 - DNA, 14 bp, Artificial Sequence
  Description of Artificial Sequence: Synthetic oligonucleotide
agacaaagggctct

SEQ ID NO: 1311 - DNA, 14 bp, Artificial Sequence
  Description of Artificial Sequence: Synthetic oligonucleotide
gagacaaagggctc

SEQ ID NO: 1312 - DNA, 14 bp, Artificial Sequence
  Description of Artificial Sequence: Synthetic oligonucleotide
ggagacaaagggct

SEQ ID NO: 1313 - DNA, 14 bp, Artificial Sequence
  Description of Artificial Sequence: Synthetic oligonucleotide
tggagacaaagggc

SEQ ID NO: 1314 - DNA, 14 bp, Artificial Sequence
  Description of Artificial Sequence: Synthetic oligonucleotide
ttggagacaaaggg

SEQ ID NO: 1315 - DNA, 14 bp, Artificial Sequence
  Description of Artificial Sequence: Synthetic oligonucleotide
attggagacaaagg

SEQ ID NO: 1316 - DNA, 14 bp, Artificial Sequence
  Description of Artificial Sequence: Synthetic oligonucleotide
aattggagacaaag

SEQ ID NO: 1317 - DNA, 14 bp, Artificial Sequence
  Description of Artificial Sequence: Synthetic oligonucleotide
gaattggagacaaa

SEQ ID NO: 1318 - DNA, 14 bp, Artificial Sequence
  Description of Artificial Sequence: Synthetic oligonucleotide
tgaattggagacaa

SEQ ID NO: 1319 - DNA, 14 bp, Artificial Sequence
  Description of Artificial Sequence: Synthetic oligonucleotide
ttgaattggagaca

SEQ ID NO: 1320 - DNA, 14 bp, Artificial Sequence
  Description of Artificial Sequence: Synthetic oligonucleotide
tttgaattggagac

SEQ ID NO: 1321 - DNA, 14 bp, Artificial Sequence
  Description of Artificial Sequence: Synthetic oligonucleotide
ttttgaattggaga

SEQ ID NO: 1322 - DNA, 14 bp, Artificial Sequence
  Description of Artificial Sequence: Synthetic oligonucleotide
attttgaattggag

SEQ ID NO: 1323 - DNA, 14 bp, Artificial Sequence
  Description of Artificial Sequence: Synthetic oligonucleotide
aattttgaattgga

SEQ ID NO: 1324 - DNA, 14 bp, Artificial Sequence
  Description of Artificial Sequence: Synthetic oligonucleotide
caattttgaattgg

SEQ ID NO: 1325 - DNA, 14 bp, Artificial Sequence
  Description of Artificial Sequence: Synthetic oligonucleotide
acaattttgaattg

SEQ ID NO: 1326 - DNA, 14 bp, Artificial Sequence
  Description of Artificial Sequence: Synthetic oligonucleotide
aacaattttgaatt

SEQ ID NO: 1327 - DNA, 14 bp, Artificial Sequence
  Description of Artificial Sequence: Synthetic oligonucleotide
aaacaattttgaat

SEQ ID NO: 1328 - DNA, 14 bp, Artificial Sequence
  Description of Artificial Sequence: Synthetic oligonucleotide
aaaacaattttgaa

SEQ ID NO: 1329 - DNA, 14 bp, Artificial Sequence
  Description of Artificial Sequence: Synthetic oligonucleotide
gaaaacaattttga

SEQ ID NO: 1330 - DNA, 14 bp, Artificial Sequence
  Description of Artificial Sequence: Synthetic oligonucleotide
tgaaaacaattttg

SEQ ID NO: 1331 - DNA, 14 bp, Artificial Sequence
  Description of Artificial Sequence: Synthetic oligonucleotide
ctgaaaacaatttt

SEQ ID NO: 1332 - DNA, 14 bp, Artificial Sequence
  Description of Artificial Sequence: Synthetic oligonucleotide
gctgaaaacaattt

SEQ ID NO: 1333 - DNA, 14 bp, Artificial Sequence
  Description of Artificial Sequence: Synthetic oligonucleotide
agctgaaaacaatt

SEQ ID NO: 1334 - DNA, 14 bp, Artificial Sequence
  Description of Artificial Sequence: Synthetic oligonucleotide
tagctgaaaacaat

SEQ ID NO: 1335 - DNA, 14 bp, Artificial Sequence
  Description of Artificial Sequence: Synthetic oligonucleotide
ttagctgaaaacaa

SEQ ID NO: 1336 - DNA, 14 bp, Artificial Sequence
  Description of Artificial Sequence: Synthetic oligonucleotide
attagctgaaaaca

SEQ ID NO: 1337 - DNA, 14 bp, Artificial Sequence
  Description of Artificial Sequence: Synthetic oligonucleotide
cattagctgaaaac

SEQ ID NO: 1338 - DNA, 14 bp, Artificial Sequence
  Description of Artificial Sequence: Synthetic oligonucleotide
tcattagctgaaaa

SEQ ID NO: 1339 - DNA, 14 bp, Artificial Sequence
  Description of Artificial Sequence: Synthetic oligonucleotide
atcattagctgaaa

SEQ ID NO: 1340 - DNA, 14 bp, Artificial Sequence
  Description of Artificial Sequence: Synthetic oligonucleotide
catcattagctgaa

SEQ ID NO: 1341 - DNA, 14 bp, Artificial Sequence
  Description of Artificial Sequence: Synthetic oligonucleotide
acatcattagctga

SEQ ID NO: 1342 - DNA, 14 bp, Artificial Sequence
  Description of Artificial Sequence: Synthetic oligonucleotide
tacatcattagctg

SEQ ID NO: 1343 - DNA, 14 bp, Artificial Sequence
  Description of Artificial Sequence: Synthetic oligonucleotide
ctacatcattagct

SEQ ID NO: 1344 - DNA, 14 bp, Artificial Sequence
  Description of Artificial Sequence: Synthetic oligonucleotide
tctacatcattagc

SEQ ID NO: 1345 - DNA, 14 bp, Artificial Sequence
  Description of Artificial Sequence: Synthetic oligonucleotide
ttctacatcattag

SEQ ID NO: 1346 - DNA, 14 bp, Artificial Sequence
  Description of Artificial Sequence: Synthetic oligonucleotide
tttctacatcatta

SEQ ID NO: 1347 - DNA, 14 bp, Artificial Sequence
  Description of Artificial Sequence: Synthetic oligonucleotide
ttttctacatcatt

SEQ ID NO: 1348 - DNA, 14 bp, Artificial Sequence
  Description of Artificial Sequence: Synthetic oligonucleotide
attttctacatcat

SEQ ID NO: 1349 - DNA, 14 bp, Artificial Sequence
  Description of Artificial Sequence: Synthetic oligonucleotide
tattttctacatca

SEQ ID NO: 1350 - DNA, 14 bp, Artificial Sequence
  Description of Artificial Sequence: Synthetic oligonucleotide
atattttctacatc

SEQ ID NO: 1351 - DNA, 14 bp, Artificial Sequence
  Description of Artificial Sequence: Synthetic oligonucleotide
tatattttctacat

SEQ ID NO: 1352 - DNA, 14 bp, Artificial Sequence
  Description of Artificial Sequence: Synthetic oligonucleotide
atatattttctaca

SEQ ID NO: 1353 - DNA, 14 bp, Artificial Sequence
  Description of Artificial Sequence: Synthetic oligonucleotide
aatatattttctac

SEQ ID NO: 1354 - DNA, 14 bp, Artificial Sequence
  Description of Artificial Sequence: Synthetic oligonucleotide
aaatatattttcta

SEQ ID NO: 1355 - DNA, 14 bp, Artificial Sequence
  Description of Artificial Sequence: Synthetic oligonucleotide
taaatatattttct

SEQ ID NO: 1356 - DNA, 14 bp, Artificial Sequence
  Description of Artificial Sequence: Synthetic oligonucleotide
ctaaatatattttc

SEQ ID NO: 1357 - DNA, 14 bp, Artificial Sequence
  Description of Artificial Sequence: Synthetic oligonucleotide
actaaatatatttt

SEQ ID NO: 1358 - DNA, 14 bp, Artificial Sequence
  Description of Artificial Sequence: Synthetic oligonucleotide
gactaaatatattt

SEQ ID NO: 1359 - DNA, 14 bp, Artificial Sequence
  Description of Artificial Sequence: Synthetic oligonucleotide
cgactaaatatatt

SEQ ID NO: 1360 - DNA, 14 bp, Artificial Sequence
  Description of Artificial Sequence: Synthetic oligonucleotide
gcgactaaatatat

SEQ ID NO: 1361 - DNA, 14 bp, Artificial Sequence
  Description of Artificial Sequence: Synthetic oligonucleotide
tgcgactaaatata

SEQ ID NO: 1362 - DNA, 14 bp, Artificial Sequence
  Description of Artificial Sequence: Synthetic oligonucleotide
atgcgactaaatat

SEQ ID NO: 1363 - DNA, 14 bp, Artificial Sequence
  Description of Artificial Sequence: Synthetic oligonucleotide
tatgcgactaaata

SEQ ID NO: 1364 - DNA, 14 bp, Artificial Sequence
  Description of Artificial Sequence: Synthetic oligonucleotide
ctatgcgactaaat

SEQ ID NO: 1365 - DNA, 14 bp, Artificial Sequence
  Description of Artificial Sequence: Synthetic oligonucleotide
actatgcgactaaa

SEQ ID NO: 1366 - DNA, 14 bp, Artificial Sequence
  Description of Artificial Sequence: Synthetic oligonucleotide
tactatgcgactaa

SEQ ID NO: 1367 - DNA, 14 bp, Artificial Sequence
  Description of Artificial Sequence: Synthetic oligonucleotide
ctactatgcgacta

SEQ ID NO: 1368 - DNA, 14 bp, Artificial Sequence
  Description of Artificial Sequence: Synthetic oligonucleotide
tctactatgcgact

SEQ ID NO: 1369 - DNA, 14 bp, Artificial Sequence
  Description of Artificial Sequence: Synthetic oligonucleotide
atctactatgcgac

SEQ ID NO: 1370 - DNA, 14 bp, Artificial Sequence
  Description of Artificial Sequence: Synthetic oligonucleotide
tatctactatgcga

SEQ ID NO: 1371 - DNA, 14 bp, Artificial Sequence
  Description of Artificial Sequence: Synthetic oligonucleotide
atatctactatgcg

SEQ ID NO: 1372 - DNA, 14 bp, Artificial Sequence
  Description of Artificial Sequence: Synthetic oligonucleotide
tatatctactatgc

SEQ ID NO: 1373 - DNA, 14 bp, Artificial Sequence
  Description of Artificial Sequence: Synthetic oligonucleotide
gtatatctactatg

SEQ ID NO: 1374 - DNA, 14 bp, Artificial Sequence
  Description of Artificial Sequence: Synthetic oligonucleotide
tgtatatctactat

SEQ ID NO: 1375 - DNA, 14 bp, Artificial Sequence
  Description of Artificial Sequence: Synthetic oligonucleotide
atgtatatctacta

SEQ ID NO: 1376 - DNA, 14 bp, Artificial Sequence
  Description of Artificial Sequence: Synthetic oligonucleotide
catgtatatctact

SEQ ID NO: 1377 - DNA, 14 bp, Artificial Sequence
  Description of Artificial Sequence: Synthetic oligonucleotide
tcatgtatatctac

SEQ ID NO: 1378 - DNA, 14 bp, Artificial Sequence
  Description of Artificial Sequence: Synthetic oligonucleotide
ttcatgtatatcta

SEQ ID NO: 1379 - DNA, 14 bp, Artificial Sequence
  Description of Artificial Sequence: Synthetic oligonucleotide
gttcatgtatatct

SEQ ID NO: 1380 - DNA, 14 bp, Artificial Sequence
  Description of Artificial Sequence: Synthetic oligonucleotide
agttcatgtatatc

SEQ ID NO: 1381 - DNA, 14 bp, Artificial Sequence
  Description of Artificial Sequence: Synthetic oligonucleotide
aagttcatgtatat

SEQ ID NO: 1382 - DNA, 14 bp, Artificial Sequence
  Description of Artificial Sequence: Synthetic oligonucleotide
taagttcatgtata

SEQ ID NO: 1383 - DNA, 14 bp, Artificial Sequence
  Description of Artificial Sequence: Synthetic oligonucleotide
ctaagttcatgtat

SEQ ID NO: 1384 - DNA, 14 bp, Artificial Sequence
  Description of Artificial Sequence: Synthetic oligonucleotide
actaagttcatgta

SEQ ID NO: 1385 - DNA, 14 bp, Artificial Sequence
  Description of Artificial Sequence: Synthetic oligonucleotide
cactaagttcatgt

SEQ ID NO: 1386 - DNA, 14 bp, Artificial Sequence
  Description of Artificial Sequence: Synthetic oligonucleotide
acactaagttcatg

SEQ ID NO: 1387 - DNA, 14 bp, Artificial Sequence
  Description of Artificial Sequence: Synthetic oligonucleotide
tacactaagttcat

SEQ ID NO: 1388 - DNA, 14 bp, Artificial Sequence
  Description of Artificial Sequence: Synthetic oligonucleotide
ttacactaagttca

SEQ ID NO: 1389 - DNA, 14 bp, Artificial Sequence
  Description of Artificial Sequence: Synthetic oligonucleotide
tttacactaagttc

SEQ ID NO: 1390 - DNA, 14 bp, Artificial Sequence
  Description of Artificial Sequence: Synthetic oligonucleotide
ctttacactaagtt

SEQ ID NO: 1391 - DNA, 14 bp, Artificial Sequence
  Description of Artificial Sequence: Synthetic oligonucleotide
actttacactaagt

SEQ ID NO: 1392 - DNA, 14 bp, Artificial Sequence
  Description of Artificial Sequence: Synthetic oligonucleotide
aactttacactaag

SEQ ID NO: 1393 - DNA, 14 bp, Artificial Sequence
  Description of Artificial Sequence: Synthetic oligonucleotide
taactttacactaa

SEQ ID NO: 1394 - DNA, 14 bp, Artificial Sequence
  Description of Artificial Sequence: Synthetic oligonucleotide
gtaactttacacta

SEQ ID NO: 1395 - DNA, 14 bp, Artificial Sequence
  Description of Artificial Sequence: Synthetic oligonucleotide
agtaactttacact

SEQ ID NO: 1396 - DNA, 14 bp, Artificial Sequence
  Description of Artificial Sequence: Synthetic oligonucleotide
cagtaactttacac

SEQ ID NO: 1397 - DNA, 14 bp, Artificial Sequence
  Description of Artificial Sequence: Synthetic oligonucleotide
ccagtaactttaca

SEQ ID NO: 1398 - DNA, 14 bp, Artificial Sequence
  Description of Artificial Sequence: Synthetic oligonucleotide
cccagtaactttac

SEQ ID NO: 1399 - DNA, 14 bp, Artificial Sequence
  Description of Artificial Sequence: Synthetic oligonucleotide
gcccagtaacttta

SEQ ID NO: 1400 - DNA, 14 bp, Artificial Sequence
  Description of Artificial Sequence: Synthetic oligonucleotide
ggcccagtaacttt

SEQ ID NO: 1401 - DNA, 14 bp, Artificial Sequence
  Description of Artificial Sequence: Synthetic oligonucleotide
tggcccagtaactt

SEQ ID NO: 1402 - DNA, 14 bp, Artificial Sequence
  Description of Artificial Sequence: Synthetic oligonucleotide
atggcccagtaact

SEQ ID NO: 1403 - DNA, 14 bp, Artificial Sequence
  Description of Artificial Sequence: Synthetic oligonucleotide
tatggcccagtaac

SEQ ID NO: 1404 - DNA, 14 bp, Artificial Sequence
  Description of Artificial Sequence: Synthetic oligonucleotide
atatggcccagtaa

SEQ ID NO: 1405 - DNA, 14 bp, Artificial Sequence
  Description of Artificial Sequence: Synthetic oligonucleotide
tatatggcccagta

SEQ ID NO: 1406 - DNA, 14 bp, Artificial Sequence
  Description of Artificial Sequence: Synthetic oligonucleotide
ctatatggcccagt

SEQ ID NO: 1407 - DNA, 14 bp, Artificial Sequence
  Description of Artificial Sequence: Synthetic oligonucleotide
tctatatggcccag

SEQ ID NO: 1408 - DNA, 14 bp, Artificial Sequence
  Description of Artificial Sequence: Synthetic oligonucleotide
ttctatatggccca

SEQ ID NO: 1409 - DNA, 14 bp, Artificial Sequence
  Description of Artificial Sequence: Synthetic oligonucleotide
cttctatatggccc

SEQ ID NO: 1410 - DNA, 14 bp, Artificial Sequence
  Description of Artificial Sequence: Synthetic oligonucleotide
tcttctatatggcc

SEQ ID NO: 1411 - DNA, 14 bp, Artificial Sequence
  Description of Artificial Sequence: Synthetic oligonucleotide
atcttctatatggc

SEQ ID NO: 1412 - DNA, 14 bp, Artificial Sequence
  Description of Artificial Sequence: Synthetic oligonucleotide
tatcttctatatgg

SEQ ID NO: 1413 - DNA, 14 bp, Artificial Sequence
  Description of Artificial Sequence: Synthetic oligonucleotide
gtatcttctatatg

SEQ ID NO: 1414 - DNA, 14 bp, Artificial Sequence
  Description of Artificial Sequence: Synthetic oligonucleotide
tgtatcttctatat

SEQ ID NO: 1415 - DNA, 14 bp, Artificial Sequence
  Description of Artificial Sequence: Synthetic oligonucleotide
ctgtatcttctata

SEQ ID NO: 1416 - DNA, 14 bp, Artificial Sequence
  Description of Artificial Sequence: Synthetic oligonucleotide
actgtatcttctat

SEQ ID NO: 1417 - DNA, 14 bp, Artificial Sequence
  Description of Artificial Sequence: Synthetic oligonucleotide
tactgtatcttcta

SEQ ID NO: 1418 - DNA, 14 bp, Artificial Sequence
  Description of Artificial Sequence: Synthetic oligonucleotide
ctactgtatcttct

SEQ ID NO: 1419 - DNA, 14 bp, Artificial Sequence
  Description of Artificial Sequence: Synthetic oligonucleotide
tctactgtatcttc

SEQ ID NO: 1420 - DNA, 14 bp, Artificial Sequence
  Description of Artificial Sequence: Synthetic oligonucleotide
ttctactgtatctt

SEQ ID NO: 1421 - DNA, 14 bp, Artificial Sequence
  Description of Artificial Sequence: Synthetic oligonucleotide
tttctactgtatct

SEQ ID NO: 1422 - DNA, 14 bp, Artificial Sequence
  Description of Artificial Sequence: Synthetic oligonucleotide
atttctactgtatc

SEQ ID NO: 1423 - DNA, 14 bp, Artificial Sequence
  Description of Artificial Sequence: Synthetic oligonucleotide
catttctactgtat

SEQ ID NO: 1424 - DNA, 14 bp, Artificial Sequence
  Description of Artificial Sequence: Synthetic oligonucleotide
tcatttctactgta

SEQ ID NO: 1425 - DNA, 14 bp, Artificial Sequence
  Description of Artificial Sequence: Synthetic oligonucleotide
gtcatttctactgt

SEQ ID NO: 1426 - DNA, 14 bp, Artificial Sequence
  Description of Artificial Sequence: Synthetic oligonucleotide
tgtcatttctactg

SEQ ID NO: 1427 - DNA, 14 bp, Artificial Sequence
  Description of Artificial Sequence: Synthetic oligonucleotide
ctgtcatttctact

SEQ ID NO: 1428 - DNA, 14 bp, Artificial Sequence
  Description of Artificial Sequence: Synthetic oligonucleotide
tctgtcatttctac

SEQ ID NO: 1429 - DNA, 14 bp, Artificial Sequence
  Description of Artificial Sequence: Synthetic oligonucleotide
atctgtcatttcta

SEQ ID NO: 1430 - DNA, 14 bp, Artificial Sequence
  Description of Artificial Sequence: Synthetic oligonucleotide
catctgtcatttct

SEQ ID NO: 1431 - DNA, 14 bp, Artificial Sequence
  Description of Artificial Sequence: Synthetic oligonucleotide
tcatctgtcatttc

SEQ ID NO: 1432 - DNA, 14 bp, Artificial Sequence
  Description of Artificial Sequence: Synthetic oligonucleotide
ttcatctgtcattt

SEQ ID NO: 1433 - DNA, 14 bp, Artificial Sequence
  Description of Artificial Sequence: Synthetic oligonucleotide
cttcatctgtcatt

SEQ ID NO: 1434 - DNA, 14 bp, Artificial Sequence
  Description of Artificial Sequence: Synthetic oligonucleotide
ccttcatctgtcat

SEQ ID NO: 1435 - DNA, 14 bp, Artificial Sequence
  Description of Artificial Sequence: Synthetic oligonucleotide
gccttcatctgtca

SEQ ID NO: 1436 - DNA, 14 bp, Artificial Sequence
  Description of Artificial Sequence: Synthetic oligonucleotide
tgccttcatctgtc

SEQ ID NO: 1437 - DNA, 14 bp, Artificial Sequence
  Description of Artificial Sequence: Synthetic oligonucleotide
ctgccttcatctgt

SEQ ID NO: 1438 - DNA, 14 bp, Artificial Sequence
  Description of Artificial Sequence: Synthetic oligonucleotide
actgccttcatctg

SEQ ID NO: 1439 - DNA, 14 bp, Artificial Sequence
  Description of Artificial Sequence: Synthetic oligonucleotide
gactgccttcatct

SEQ ID NO: 1440 - DNA, 14 bp, Artificial Sequence
  Description of Artificial Sequence: Synthetic oligonucleotide
ggactgccttcatc

SEQ ID NO: 1441 - DNA, 14 bp, Artificial Sequence
  Description of Artificial Sequence: Synthetic oligonucleotide
gggactgccttcat

SEQ ID NO: 1442 - DNA, 14 bp, Artificial Sequence
  Description of Artificial Sequence: Synthetic oligonucleotide
ggggactgccttca

SEQ ID NO: 1443 - DNA, 14 bp, Artificial Sequence
  Description of Artificial Sequence: Synthetic oligonucleotide
tggggactgccttc

SEQ ID NO: 1444 - DNA, 14 bp, Artificial Sequence
  Description of Artificial Sequence: Synthetic oligonucleotide
atggggactgcctt

SEQ ID NO: 1445 - DNA, 14 bp, Artificial Sequence
  Description of Artificial Sequence: Synthetic oligonucleotide
gatggggactgcct

SEQ ID NO: 1446 - DNA, 14 bp, Artificial Sequence
  Description of Artificial Sequence: Synthetic oligonucleotide
ggatggggactgcc

SEQ ID NO: 1447 - DNA, 14 bp, Artificial Sequence
  Description of Artificial Sequence: Synthetic oligonucleotide
tggatggggactgc

SEQ ID NO: 1448 - DNA, 14 bp, Artificial Sequence
  Description of Artificial Sequence: Synthetic oligonucleotide
gtggatggggactg

SEQ ID NO: 1449 - DNA, 14 bp, Artificial Sequence
  Description of Artificial Sequence: Synthetic oligonucleotide
agtggatggggact

SEQ ID NO: 1450 - DNA, 14 bp, Artificial Sequence
  Description of Artificial Sequence: Synthetic oligonucleotide
tagtggatggggac

SEQ ID NO: 1451 - DNA, 14 bp, Artificial Sequence
  Description of Artificial Sequence: Synthetic oligonucleotide
ctagtggatgggga

SEQ ID NO: 1452 - DNA, 14 bp, Artificial Sequence
  Description of Artificial Sequence: Synthetic oligonucleotide
actagtggatgggg

SEQ ID NO: 1453 - DNA, 14 bp, Artificial Sequence
  Description of Artificial Sequence: Synthetic oligonucleotide
tactagtggatggg

SEQ ID NO: 1454 - DNA, 14 bp, Artificial Sequence
  Description of Artificial Sequence: Synthetic oligonucleotide
ctactagtggatgg

SEQ ID NO: 1455 - DNA, 14 bp, Artificial Sequence
  Description of Artificial Sequence: Synthetic oligonucleotide
cctactagtggatg

SEQ ID NO: 1456 - DNA, 14 bp, Artificial Sequence
  Description of Artificial Sequence: Synthetic oligonucleotide
tcctactagtggat

SEQ ID NO: 1457 - DNA, 14 bp, Artificial Sequence
  Description of Artificial Sequence: Synthetic oligonucleotide
ttcctactagtgga

SEQ ID NO: 1458 - DNA, 14 bp, Artificial Sequence
  Description of Artificial Sequence: Synthetic oligonucleotide
cttcctactagtgg

SEQ ID NO: 1459 - DNA, 14 bp, Artificial Sequence
  Description of Artificial Sequence: Synthetic oligonucleotide
gcttcctactagtg

SEQ ID NO: 1460 - DNA, 14 bp, Artificial Sequence
  Description of Artificial Sequence: Synthetic oligonucleotide
agcttcctactagt

SEQ ID NO: 1461 - DNA, 14 bp, Artificial Sequence
  Description of Artificial Sequence: Synthetic oligonucleotide
cagcttcctactag

SEQ ID NO: 1462 - DNA, 14 bp, Artificial Sequence
  Description of Artificial Sequence: Synthetic oligonucleotide
gcagcttcctacta

SEQ ID NO: 1463 - DNA, 14 bp, Artificial Sequence
  Description of Artificial Sequence: Synthetic oligonucleotide
agcagcttcctact

SEQ ID NO: 1464 - DNA, 14 bp, Artificial Sequence
  Description of Artificial Sequence: Synthetic oligonucleotide
aagcagcttcctac

SEQ ID NO: 1465 - DNA, 14 bp, Artificial Sequence
  Description of Artificial Sequence: Synthetic oligonucleotide
aaagcagcttccta

SEQ ID NO: 1466 - DNA, 14 bp, Artificial Sequence
  Description of Artificial Sequence: Synthetic oligonucleotide
caaagcagcttcct

SEQ ID NO: 1467 - DNA, 14 bp, Artificial Sequence
  Description of Artificial Sequence: Synthetic oligonucleotide
tcaaagcagcttcc

SEQ ID NO: 1468 - DNA, 14 bp, Artificial Sequence
  Description of Artificial Sequence: Synthetic oligonucleotide
ttcaaagcagcttc

SEQ ID NO: 1469 - DNA, 14 bp, Artificial Sequence
  Description of Artificial Sequence: Synthetic oligonucleotide
cttcaaagcagctt

SEQ ID NO: 1470 - DNA, 14 bp, Artificial Sequence
  Description of Artificial Sequence: Synthetic oligonucleotide
tcttcaaagcagct

SEQ ID NO: 1471 - DNA, 14 bp, Artificial Sequence
  Description of Artificial Sequence: Synthetic oligonucleotide
gtcttcaaagcagc

SEQ ID NO: 1472 - DNA, 14 bp, Artificial Sequence
  Description of Artificial Sequence: Synthetic oligonucleotide
agtcttcaaagcag

SEQ ID NO: 1473 - DNA, 14 bp, Artificial Sequence
  Description of Artificial Sequence: Synthetic oligonucleotide
aagtcttcaaagca

SEQ ID NO: 1474 - DNA, 14 bp, Artificial Sequence
  Description of Artificial Sequence: Synthetic oligonucleotide
taagtcttcaaagc

SEQ ID NO: 1475 - DNA, 14 bp, Artificial Sequence
  Description of Artificial Sequence: Synthetic oligonucleotide
ctaagtcttcaaag

SEQ ID NO: 1476 - DNA, 14 bp, Artificial Sequence
  Description of Artificial Sequence: Synthetic oligonucleotide
gctaagtcttcaaa

SEQ ID NO: 1477 - DNA, 14 bp, Artificial Sequence
  Description of Artificial Sequence: Synthetic oligonucleotide
tgctaagtcttcaa

SEQ ID NO: 1478 - DNA, 14 bp, Artificial Sequence
  Description of Artificial Sequence: Synthetic oligonucleotide
ctgctaagtcttca

SEQ ID NO: 1479 - DNA, 14 bp, Artificial Sequence
  Description of Artificial Sequence: Synthetic oligonucleotide
tctgctaagtcttc

SEQ ID NO: 1480 - DNA, 14 bp, Artificial Sequence
  Description of Artificial Sequence: Synthetic oligonucleotide
ctctgctaagtctt

SEQ ID NO: 1481 - DNA, 14 bp, Artificial Sequence
  Description of Artificial Sequence: Synthetic oligonucleotide
cctctgctaagtct

SEQ ID NO: 1482 - DNA, 14 bp, Artificial Sequence
  Description of Artificial Sequence: Synthetic oligonucleotide
tcctctgctaagtc

SEQ ID NO: 1483 - DNA, 14 bp, Artificial Sequence
  Description of Artificial Sequence: Synthetic oligonucleotide
ttcctctgctaagt

SEQ ID NO: 1484 - DNA, 14 bp, Artificial Sequence
  Description of Artificial Sequence: Synthetic oligonucleotide
gttcctctgctaag

SEQ ID NO: 1485 - DNA, 14 bp, Artificial Sequence
  Description of Artificial Sequence: Synthetic oligonucleotide
agttcctctgctaa

SEQ ID NO: 1486 - DNA, 14 bp, Artificial Sequence
  Description of Artificial Sequence: Synthetic oligonucleotide
cagttcctctgcta

SEQ ID NO: 1487 - DNA, 14 bp, Artificial Sequence
  Description of Artificial Sequence: Synthetic oligonucleotide
ccagttcctctgct

SEQ ID NO: 1488 - DNA, 14 bp, Artificial Sequence
  Description of Artificial Sequence: Synthetic oligonucleotide
gccagttcctctgc

SEQ ID NO: 1489 - DNA, 14 bp, Artificial Sequence
  Description of Artificial Sequence: Synthetic oligonucleotide
tgccagttcctctg

SEQ ID NO: 1490 - DNA, 14 bp, Artificial Sequence
  Description of Artificial Sequence: Synthetic oligonucleotide
atgccagttcctct

SEQ ID NO: 1491 - DNA, 14 bp, Artificial Sequence
  Description of Artificial Sequence: Synthetic oligonucleotide
aatgccagttcctc

SEQ ID NO: 1492 - DNA, 14 bp, Artificial Sequence
  Description of Artificial Sequence: Synthetic oligonucleotide
aaatgccagttcct

SEQ ID NO: 1493 - DNA, 14 bp, Artificial Sequence
  Description of Artificial Sequence: Synthetic oligonucleotide
caaatgccagttcc

SEQ ID NO: 1494 - DNA, 14 bp, Artificial Sequence
  Description of Artificial Sequence: Synthetic oligonucleotide
tcaaatgccagttc

SEQ ID NO: 1495 - DNA, 14 bp, Artificial Sequence
  Description of Artificial Sequence: Synthetic oligonucleotide
atcaaatgccagtt

SEQ ID NO: 1496 - DNA, 14 bp, Artificial Sequence
  Description of Artificial Sequence: Synthetic oligonucleotide
gatcaaatgccagt

SEQ ID NO: 1497 - DNA, 14 bp, Artificial Sequence
  Description of Artificial Sequence: Synthetic oligonucleotide
ggatcaaatgccag

SEQ ID NO: 1498 - DNA, 14 bp, Artificial Sequence
  Description of Artificial Sequence: Synthetic oligonucleotide
tggatcaaatgcca

SEQ ID NO: 1499 - DNA, 14 bp, Artificial Sequence
  Description of Artificial Sequence: Synthetic oligonucleotide
atggatcaaatgcc

SEQ ID NO: 1500 - DNA, 14 bp, Artificial Sequence
  Description of Artificial Sequence: Synthetic oligonucleotide
tatggatcaaatgc

SEQ ID NO: 1501 - DNA, 14 bp, Artificial Sequence
  Description of Artificial Sequence: Synthetic oligonucleotide
atatggatcaaatg

SEQ ID NO: 1502 - DNA, 14 bp, Artificial Sequence
  Description of Artificial Sequence: Synthetic oligonucleotide
catatggatcaaat

SEQ ID NO: 1503 - DNA, 14 bp, Artificial Sequence
  Description of Artificial Sequence: Synthetic oligonucleotide
tcatatggatcaaa

SEQ ID NO: 1504 - DNA, 14 bp, Artificial Sequence
  Description of Artificial Sequence: Synthetic oligonucleotide
ttcatatggatcaa

SEQ ID NO: 1505 - DNA, 14 bp, Artificial Sequence
  Description of Artificial Sequence: Synthetic oligonucleotide
attcatatggatca

SEQ ID NO: 1506 - DNA, 14 bp, Artificial Sequence
  Description of Artificial Sequence: Synthetic oligonucleotide
gattcatatggatc

SEQ ID NO: 1507 - DNA, 14 bp, Artificial Sequence
  Description of Artificial Sequence: Synthetic oligonucleotide
cgattcatatggat

SEQ ID NO: 1508 - DNA, 14 bp, Artificial Sequence
  Description of Artificial Sequence: Synthetic oligonucleotide
acgattcatatgga

SEQ ID NO: 1509 - DNA, 14 bp, Artificial Sequence
  Description of Artificial Sequence: Synthetic oligonucleotide
tacgattcatatgg

SEQ ID NO: 1510 - DNA, 14 bp, Artificial Sequence
  Description of Artificial Sequence: Synthetic oligonucleotide
atacgattcatatg

SEQ ID NO: 1511 - DNA, 14 bp, Artificial Sequence
  Description of Artificial Sequence: Synthetic oligonucleotide
catacgattcatat

SEQ ID NO: 1512 - DNA, 14 bp, Artificial Sequence
  Description of Artificial Sequence: Synthetic oligonucleotide
gcatacgattcata

SEQ ID NO: 1513 - DNA, 14 bp, Artificial Sequence
  Description of Artificial Sequence: Synthetic oligonucleotide
agcatacgattcat

SEQ ID NO: 1514 - DNA, 14 bp, Artificial Sequence
  Description of Artificial Sequence: Synthetic oligonucleotide
gagcatacgattca

SEQ ID NO: 1515 - DNA, 14 bp, Artificial Sequence
  Description of Artificial Sequence: Synthetic oligonucleotide
cgagcatacgattc

SEQ ID NO: 1516 - DNA, 14 bp, Artificial Sequence
  Description of Artificial Sequence: Synthetic oligonucleotide
tcgagcatacgatt

SEQ ID NO: 1517 - DNA, 14 bp, Artificial Sequence
  Description of Artificial Sequence: Synthetic oligonucleotide
ctcgagcatacgat

SEQ ID NO: 1518 - DNA, 14 bp, Artificial Sequence
  Description of Artificial Sequence: Synthetic oligonucleotide
tctcgagcatacga

SEQ ID NO: 1519 - DNA, 14 bp, Artificial Sequence
  Description of Artificial Sequence: Synthetic oligonucleotide
atctcgagcatacg

SEQ ID NO: 1520 - DNA, 14 bp, Artificial Sequence
  Description of Artificial Sequence: Synthetic oligonucleotide
tatctcgagcatac

SEQ ID NO: 1521 - DNA, 14 bp, Artificial Sequence
  Description of Artificial Sequence: Synthetic oligonucleotide
atatctcgagcata

SEQ ID NO: 1522 - DNA, 14 bp, Artificial Sequence
  Description of Artificial Sequence: Synthetic oligonucleotide
aatatctcgagcat

SEQ ID NO: 1523 - DNA, 14 bp, Artificial Sequence
  Description of Artificial Sequence: Synthetic oligonucleotide
aaatatctcgagca

SEQ ID NO: 1524 - DNA, 14 bp, Artificial Sequence
  Description of Artificial Sequence: Synthetic oligonucleotide
aaaatatctcgagc

SEQ ID NO: 1525 - DNA, 14 bp, Artificial Sequence
  Description of Artificial Sequence: Synthetic oligonucleotide
caaaatatctcgag

SEQ ID NO: 1526 - DNA, 14 bp, Artificial Sequence
  Description of Artificial Sequence: Synthetic oligonucleotide
gcaaaatatctcga

SEQ ID NO: 1527 - DNA, 14 bp, Artificial Sequence
  Description of Artificial Sequence: Synthetic oligonucleotide
cgcaaaatatctcg

SEQ ID NO: 1528 - DNA, 14 bp, Artificial Sequence
  Description of Artificial Sequence: Synthetic oligonucleotide
tcgcaaaatatctc

SEQ ID NO: 1529 - DNA, 14 bp, Artificial Sequence
  Description of Artificial Sequence: Synthetic oligonucleotide
gtcgcaaaatatct

SEQ ID NO: 1530 - DNA, 14 bp, Artificial Sequence
  Description of Artificial Sequence: Synthetic oligonucleotide
ggtcgcaaaatatc

SEQ ID NO: 1531 - DNA, 14 bp, Artificial Sequence
  Description of Artificial Sequence: Synthetic oligonucleotide
aggtcgcaaaatat

SEQ ID NO: 1532 - DNA, 14 bp, Artificial Sequence
  Description of Artificial Sequence: Synthetic oligonucleotide
caggtcgcaaaata

SEQ ID NO: 1533 - DNA, 14 bp, Artificial Sequence
  Description of Artificial Sequence: Synthetic oligonucleotide
ccaggtcgcaaaat

SEQ ID NO: 1534 - DNA, 14 bp, Artificial Sequence
  Description of Artificial Sequence: Synthetic oligonucleotide
accaggtcgcaaaa

SEQ ID NO: 1535 - DNA, 14 bp, Artificial Sequence
  Description of Artificial Sequence: Synthetic oligonucleotide
aaccaggtcgcaaa

SEQ ID NO: 1536 - DNA, 14 bp, Artificial Sequence
  Description of Artificial Sequence: Synthetic oligonucleotide
aaaccaggtcgcaa

SEQ ID NO: 1537 - DNA, 14 bp, Artificial Sequence
  Description of Artificial Sequence: Synthetic oligonucleotide
aaaaccaggtcgca

SEQ ID NO: 1538 - DNA, 14 bp, Artificial Sequence
  Description of Artificial Sequence: Synthetic oligonucleotide
gaaaaccaggtcgc

SEQ ID NO: 1539 - DNA, 14 bp, Artificial Sequence
  Description of Artificial Sequence: Synthetic oligonucleotide
tgaaaaccaggtcg

SEQ ID NO: 1540 - DNA, 14 bp, Artificial Sequence
  Description of Artificial Sequence: Synthetic oligonucleotide
atgaaaaccaggtc

SEQ ID NO: 1541 - DNA, 14 bp, Artificial Sequence
  Description of Artificial Sequence: Synthetic oligonucleotide
catgaaaaccaggt

SEQ ID NO: 1542 - DNA, 14 bp, Artificial Sequence
  Description of Artificial Sequence: Synthetic oligonucleotide
tcatgaaaaccagg

SEQ ID NO: 1543 - DNA, 14 bp, Artificial Sequence
  Description of Artificial Sequence: Synthetic oligonucleotide
atcatgaaaaccag

SEQ ID NO: 1544 - DNA, 14 bp, Artificial Sequence
  Description of Artificial Sequence: Synthetic oligonucleotide
gatcatgaaaacca

SEQ ID NO: 1545 - DNA, 14 bp, Artificial Sequence
  Description of Artificial Sequence: Synthetic oligonucleotide
cgatcatgaaaacc

SEQ ID NO: 1546 - DNA, 14 bp, Artificial Sequence
  Description of Artificial Sequence: Synthetic oligonucleotide
acgatcatgaaaac

SEQ ID NO: 1547 - DNA, 14 bp, Artificial Sequence
  Description of Artificial Sequence: Synthetic oligonucleotide
aacgatcatgaaaa

SEQ ID NO: 1548 - DNA, 14 bp, Artificial Sequence
  Description of Artificial Sequence: Synthetic oligonucleotide
aaacgatcatgaaa

SEQ ID NO: 1549 - DNA, 14 bp, Artificial Sequence
  Description of Artificial Sequence: Synthetic oligonucleotide
gaaacgatcatgaa

SEQ ID NO: 1550 - DNA, 14 bp, Artificial Sequence
  Description of Artificial Sequence: Synthetic oligonucleotide
ggaaacgatcatga

SEQ ID NO: 1551 - DNA, 14 bp, Artificial Sequence
  Description of Artificial Sequence: Synthetic oligonucleotide
aggaaacgatcatg

SEQ ID NO: 1552 - DNA, 14 bp, Artificial Sequence
  Description of Artificial Sequence: Synthetic oligonucleotide
aaggaaacgatcat

SEQ ID NO: 1553 - DNA, 14 bp, Artificial Sequence
  Description of Artificial Sequence: Synthetic oligonucleotide
taaggaaacgatca

SEQ ID NO: 1554 - DNA, 14 bp, Artificial Sequence
  Description of Artificial Sequence: Synthetic oligonucleotide
ctaaggaaacgatc

SEQ ID NO: 1555 - DNA, 14 bp, Artificial Sequence
  Description of Artificial Sequence: Synthetic oligonucleotide
actaaggaaacgat

SEQ ID NO: 1556 - DNA, 14 bp, Artificial Sequence
  Description of Artificial Sequence: Synthetic oligonucleotide
gactaaggaaacga

SEQ ID NO: 1557 - DNA, 14 bp, Artificial Sequence
  Description of Artificial Sequence: Synthetic oligonucleotide
tgactaaggaaacg

SEQ ID NO: 1558 - DNA, 14 bp, Artificial Sequence
  Description of Artificial Sequence: Synthetic oligonucleotide
ctgactaaggaaac

SEQ ID NO: 1559 - DNA, 14 bp, Artificial Sequence
  Description of Artificial Sequence: Synthetic oligonucleotide
actgactaaggaaa

SEQ ID NO: 1560 - DNA, 14 bp, Artificial Sequence
  Description of Artificial Sequence: Synthetic oligonucleotide
aactgactaaggaa

SEQ ID NO: 1561 - DNA, 14 bp, Artificial Sequence
  Description of Artificial Sequence: Synthetic oligonucleotide
taactgactaagga

SEQ ID NO: 1562 - DNA, 14 bp, Artificial Sequence
  Description of Artificial Sequence: Synthetic oligonucleotide
ataactgactaagg

SEQ ID NO: 1563 - DNA, 14 bp, Artificial Sequence
  Description of Artificial Sequence: Synthetic oligonucleotide
gataactgactaag

SEQ ID NO: 1564 - DNA, 14 bp, Artificial Sequence
  Description of Artificial Sequence: Synthetic oligonucleotide
tgataactgactaa

SEQ ID NO: 1565 - DNA, 14 bp, Artificial Sequence
  Description of Artificial Sequence: Synthetic oligonucleotide
ttgataactgacta

SEQ ID NO: 1566 - DNA, 14 bp, Artificial Sequence
  Description of Artificial Sequence: Synthetic oligonucleotide
tttgataactgact

SEQ ID NO: 1567 - DNA, 14 bp, Artificial Sequence
  Description of Artificial Sequence: Synthetic oligonucleotide
ctttgataactgac

SEQ ID NO: 1568 - DNA, 14 bp, Artificial Sequence
  Description of Artificial Sequence: Synthetic oligonucleotide
gctttgataactga

SEQ ID NO: 1569 - DNA, 14 bp, Artificial Sequence
  Description of Artificial Sequence: Synthetic oligonucleotide
ggctttgataactg

SEQ ID NO: 1570 - DNA, 14 bp, Artificial Sequence
  Description of Artificial Sequence: Synthetic oligonucleotide
aggctttgataact

SEQ ID NO: 1571 - DNA, 14 bp, Artificial Sequence
  Description of Artificial Sequence: Synthetic oligonucleotide
caggctttgataac

SEQ ID NO: 1572 - DNA, 14 bp, Artificial Sequence
  Description of Artificial Sequence: Synthetic oligonucleotide
ccaggctttgataa

SEQ ID NO: 1573 - DNA, 14 bp, Artificial Sequence
  Description of Artificial Sequence: Synthetic oligonucleotide
cccaggctttgata

SEQ ID NO: 1574 - DNA, 14 bp, Artificial Sequence
  Description of Artificial Sequence: Synthetic oligonucleotide
ccccaggctttgat

SEQ ID NO: 1575 - DNA, 14 bp, Artificial Sequence
  Description of Artificial Sequence: Synthetic oligonucleotide
gccccaggctttga

SEQ ID NO: 1576 - DNA, 14 bp, Artificial Sequence
  Description of Artificial Sequence: Synthetic oligonucleotide
tgccccaggctttg

SEQ ID NO: 1577 - DNA, 14 bp, Artificial Sequence
  Description of Artificial Sequence: Synthetic oligonucleotide
ctgccccaggcttt

SEQ ID NO: 1578 - DNA, 14 bp, Artificial Sequence
  Description of Artificial Sequence: Synthetic oligonucleotide
gctgccccaggctt

SEQ ID NO: 1579 - DNA, 14 bp, Artificial Sequence
  Description of Artificial Sequence: Synthetic oligonucleotide
tgctgccccaggct

SEQ ID NO: 1580 - DNA, 14 bp, Artificial Sequence
  Description of Artificial Sequence: Synthetic oligonucleotide
gtgctgccccaggc

SEQ ID NO: 1581 - DNA, 14 bp, Artificial Sequence
  Description of Artificial Sequence: Synthetic oligonucleotide
agtgctgccccagg

SEQ ID NO: 1582 - DNA, 14 bp, Artificial Sequence
  Description of Artificial Sequence: Synthetic oligonucleotide
aagtgctgccccag

SEQ ID NO: 1583 - DNA, 14 bp, Artificial Sequence
  Description of Artificial Sequence: Synthetic oligonucleotide
aaagtgctgcccca

SEQ ID NO: 1584 - DNA, 14 bp, Artificial Sequence
  Description of Artificial Sequence: Synthetic oligonucleotide
taaagtgctgcccc

SEQ ID NO: 1585 - DNA, 14 bp, Artificial Sequence
  Description of Artificial Sequence: Synthetic oligonucleotide
ataaagtgctgccc

SEQ ID NO: 1586 - DNA, 14 bp, Artificial Sequence
  Description of Artificial Sequence: Synthetic oligonucleotide
aataaagtgctgcc

SEQ ID NO: 1587 - DNA, 14 bp, Artificial Sequence
  Description of Artificial Sequence: Synthetic oligonucleotide
aaataaagtgctgc

SEQ ID NO: 1588 - DNA, 14 bp, Artificial Sequence
  Description of Artificial Sequence: Synthetic oligonucleotide
caaataaagtgctg

SEQ ID NO: 1589 - DNA, 14 bp, Artificial Sequence
  Description of Artificial Sequence: Synthetic oligonucleotide
gcaaataaagtgct

SEQ ID NO: 1590 - DNA, 14 bp, Artificial Sequence
  Description of Artificial Sequence: Synthetic oligonucleotide
tgcaaataaagtgc

SEQ ID NO: 1591 - DNA, 14 bp, Artificial Sequence
  Description of Artificial Sequence: Synthetic oligonucleotide
ctgcaaataaagtg

SEQ ID NO: 1592 - DNA, 14 bp, Artificial Sequence
  Description of Artificial Sequence: Synthetic oligonucleotide
actgcaaataaagt

SEQ ID NO: 1593 - DNA, 14 bp, Artificial Sequence
  Description of Artificial Sequence: Synthetic oligonucleotide
gactgcaaataaag

SEQ ID NO: 1594 - DNA, 14 bp, Artificial Sequence
  Description of Artificial Sequence: Synthetic oligonucleotide
tgactgcaaataaa

SEQ ID NO: 1595 - DNA, 14 bp, Artificial Sequence
  Description of Artificial Sequence: Synthetic oligonucleotide
ttgactgcaaataa

SEQ ID NO: 1596 - DNA, 14 bp, Artificial Sequence
  Description of Artificial Sequence: Synthetic oligonucleotide
attgactgcaaata

SEQ ID NO: 1597 - DNA, 14 bp, Artificial Sequence
  Description of Artificial Sequence: Synthetic oligonucleotide
tattgactgcaaat

SEQ ID NO: 1598 - DNA, 14 bp, Artificial Sequence
  Description of Artificial Sequence: Synthetic oligonucleotide
ctattgactgcaaa

SEQ ID NO: 1599 - DNA, 14 bp, Artificial Sequence
  Description of Artificial Sequence: Synthetic oligonucleotide
cctattgactgcaa

SEQ ID NO: 1600 - DNA, 14 bp, Artificial Sequence
  Description of Artificial Sequence: Synthetic oligonucleotide
gcctattgactgca

SEQ ID NO: 1601 - DNA, 14 bp, Artificial Sequence
  Description of Artificial Sequence: Synthetic oligonucleotide
cgcctattgactgc

SEQ ID NO: 1602 - DNA, 14 bp, Artificial Sequence
  Description of Artificial Sequence: Synthetic oligonucleotide
tcgcctattgactg

SEQ ID NO: 1603 - DNA, 14 bp, Artificial Sequence
  Description of Artificial Sequence: Synthetic oligonucleotide
ttcgcctattgact

SEQ ID NO: 1604 - DNA, 14 bp, Artificial Sequence
  Description of Artificial Sequence: Synthetic oligonucleotide
cttcgcctattgac

SEQ ID NO: 1605 - DNA, 14 bp, Artificial Sequence
  Description of Artificial Sequence: Synthetic oligonucleotide
ccttcgcctattga

SEQ ID NO: 1606 - DNA, 14 bp, Artificial Sequence
  Description of Artificial Sequence: Synthetic oligonucleotide
accttcgcctattg

SEQ ID NO: 1607 - DNA, 14 bp, Artificial Sequence
  Description of Artificial Sequence: Synthetic oligonucleotide
aaccttcgcctatt

SEQ ID NO: 1608 - DNA, 14 bp, Artificial Sequence
  Description of Artificial Sequence: Synthetic oligonucleotide
aaaccttcgcctat

SEQ ID NO: 1609 - DNA, 14 bp, Artificial Sequence
  Description of Artificial Sequence: Synthetic oligonucleotide
gaaaccttcgccta

SEQ ID NO: 1610 - DNA, 14 bp, Artificial Sequence
  Description of Artificial Sequence: Synthetic oligonucleotide
tgaaaccttcgcct

SEQ ID NO: 1611 - DNA, 14 bp, Artificial Sequence
  Description of Artificial Sequence: Synthetic oligonucleotide
ttgaaaccttcgcc

SEQ ID NO: 1612 - DNA, 14 bp, Artificial Sequence
  Description of Artificial Sequence: Synthetic oligonucleotide
tttgaaaccttcgc

SEQ ID NO: 1613 - DNA, 14 bp, Artificial Sequence
  Description of Artificial Sequence: Synthetic oligonucleotide
ctttgaaaccttcg

SEQ ID NO: 1614 - DNA, 14 bp, Artificial Sequence
  Description of Artificial Sequence: Synthetic oligonucleotide
tctttgaaaccttc

SEQ ID NO: 1615 - DNA, 14 bp, Artificial Sequence
  Description of Artificial Sequence: Synthetic oligonucleotide
ttctttgaaacctt

SEQ ID NO: 1616 - DNA, 14 bp, Artificial Sequence
  Description of Artificial Sequence: Synthetic oligonucleotide
cttctttgaaacct

SEQ ID NO: 1617 - DNA, 14 bp, Artificial Sequence
  Description of Artificial Sequence: Synthetic oligonucleotide
gcttctttgaaacc

SEQ ID NO: 1618 - DNA, 14 bp, Artificial Sequence
  Description of Artificial Sequence: Synthetic oligonucleotide
agcttctttgaaac

SEQ ID NO: 1619 - DNA, 14 bp, Artificial Sequence
  Description of Artificial Sequence: Synthetic oligonucleotide
cagcttctttgaaa

SEQ ID NO: 1620 - DNA, 14 bp, Artificial Sequence
  Description of Artificial Sequence: Synthetic oligonucleotide
acagcttctttgaa

SEQ ID NO: 1621 - DNA, 14 bp, Artificial Sequence
  Description of Artificial Sequence: Synthetic oligonucleotide
aacagcttctttga

SEQ ID NO: 1622 - DNA, 14 bp, Artificial Sequence
  Description of Artificial Sequence: Synthetic oligonucleotide
gaacagcttctttg

SEQ ID NO: 1623 - DNA, 14 bp, Artificial Sequence
  Description of Artificial Sequence: Synthetic oligonucleotide
tgaacagcttcttt

SEQ ID NO: 1624 - DNA, 14 bp, Artificial Sequence
  Description of Artificial Sequence: Synthetic oligonucleotide
ttgaacagcttctt

SEQ ID NO: 1625 - DNA, 14 bp, Artificial Sequence
  Description of Artificial Sequence: Synthetic oligonucleotide
attgaacagcttct

SEQ ID NO: 1626 - DNA, 14 bp, Artificial Sequence
  Description of Artificial Sequence: Synthetic oligonucleotide
tattgaacagcttc

SEQ ID NO: 1627 - DNA, 14 bp, Artificial Sequence
  Description of Artificial Sequence: Synthetic oligonucleotide
atattgaacagctt

SEQ ID NO: 1628 - DNA, 14 bp, Artificial Sequence
  Description of Artificial Sequence: Synthetic oligonucleotide
catattgaacagct

SEQ ID NO: 1629 - DNA, 14 bp, Artificial Sequence
  Description of Artificial Sequence: Synthetic oligonucleotide
acatattgaacagc

SEQ ID NO: 1630 - DNA, 14 bp, Artificial Sequence
  Description of Artificial Sequence: Synthetic oligonucleotide
aacatattgaacag

SEQ ID NO: 1631 - DNA, 14 bp, Artificial Sequence
  Description of Artificial Sequence: Synthetic oligonucleotide
aaacatattgaaca

SEQ ID NO: 1632 - DNA, 14 bp, Artificial Sequence
  Description of Artificial Sequence: Synthetic oligonucleotide
aaaacatattgaac

SEQ ID NO: 1633 - DNA, 14 bp, Artificial Sequence
  Description of Artificial Sequence: Synthetic oligonucleotide
taaaacatattgaa

SEQ ID NO: 1634 - DNA, 14 bp, Artificial Sequence
  Description of Artificial Sequence: Synthetic oligonucleotide
gtaaaacatattga

SEQ ID NO: 1635 - DNA, 14 bp, Artificial Sequence
  Description of Artificial Sequence: Synthetic oligonucleotide
ggtaaaacatattg

SEQ ID NO: 1636 - DNA, 14 bp, Artificial Sequence
  Description of Artificial Sequence: Synthetic oligonucleotide
gggtaaaacatatt

SEQ ID NO: 1637 - DNA, 14 bp, Artificial Sequence
  Description of Artificial Sequence: Synthetic oligonucleotide
tgggtaaaacatat

SEQ ID NO: 1638 - DNA, 14 bp, Artificial Sequence
  Description of Artificial Sequence: Synthetic oligonucleotide
ctgggtaaaacata

SEQ ID NO: 1639 - DNA, 14 bp, Artificial Sequence
  Description of Artificial Sequence: Synthetic oligonucleotide
cctgggtaaaacat

SEQ ID NO: 1640 - DNA, 14 bp, Artificial Sequence
  Description of Artificial Sequence: Synthetic oligonucleotide
gcctgggtaaaaca

SEQ ID NO: 1641 - DNA, 14 bp, Artificial Sequence
  Description of Artificial Sequence: Synthetic oligonucleotide
agcctgggtaaaac

SEQ ID NO: 1642 - DNA, 14 bp, Artificial Sequence
  Description of Artificial Sequence: Synthetic oligonucleotide
cagcctgggtaaaa

SEQ ID NO: 1643 - DNA, 14 bp, Artificial Sequence
  Description of Artificial Sequence: Synthetic oligonucleotide
gcagcctgggtaaa

SEQ ID NO: 1644 - DNA, 14 bp, Artificial Sequence
  Description of Artificial Sequence: Synthetic oligonucleotide
agcagcctgggtaa

SEQ ID NO: 1645 - DNA, 14 bp, Artificial Sequence
  Description of Artificial Sequence: Synthetic oligonucleotide
aagcagcctgggta

SEQ ID NO: 1646 - DNA, 14 bp, Artificial Sequence
  Description of Artificial Sequence: Synthetic oligonucleotide
gaagcagcctgggt

SEQ ID NO: 1647 - DNA, 14 bp, Artificial Sequence
  Description of Artificial Sequence: Synthetic oligonucleotide
agaagcagcctggg

SEQ ID NO: 1648 - DNA, 14 bp, Artificial Sequence
  Description of Artificial Sequence: Synthetic oligonucleotide
cagaagcagcctgg

SEQ ID NO: 1649 - DNA, 14 bp, Artificial Sequence
  Description of Artificial Sequence: Synthetic oligonucleotide
ccagaagcagcctg

SEQ ID NO: 1650 - DNA, 14 bp, Artificial Sequence
  Description of Artificial Sequence: Synthetic oligonucleotide
gccagaagcagcct

SEQ ID NO: 1651 - DNA, 14 bp, Artificial Sequence
  Description of Artificial Sequence: Synthetic oligonucleotide
ggccagaagcagcc

SEQ ID NO: 1652 - DNA, 14 bp, Artificial Sequence
  Description of Artificial Sequence: Synthetic oligonucleotide
gggccagaagcagc

SEQ ID NO: 1653 - DNA, 14 bp, Artificial Sequence
  Description of Artificial Sequence: Synthetic oligonucleotide
ggggccagaagcag

SEQ ID NO: 1654 - DNA, 14 bp, Artificial Sequence
  Description of Artificial Sequence: Synthetic oligonucleotide
aggggccagaagca

SEQ ID NO: 1655 - DNA, 14 bp, Artificial Sequence
  Description of Artificial Sequence: Synthetic oligonucleotide
caggggccagaagc

SEQ ID NO: 1656 - DNA, 14 bp, Artificial Sequence
  Description of Artificial Sequence: Synthetic oligonucleotide
acaggggccagaag

SEQ ID NO: 1657 - DNA, 14 bp, Artificial Sequence
  Description of Artificial Sequence: Synthetic oligonucleotide
aacaggggccagaa

SEQ ID NO: 1658 - DNA, 14 bp, Artificial Sequence
  Description of Artificial Sequence: Synthetic oligonucleotide
aaacaggggccaga

SEQ ID NO: 1659 - DNA, 14 bp, Artificial Sequence
  Description of Artificial Sequence: Synthetic oligonucleotide
taaacaggggccag

SEQ ID NO: 1660 - DNA, 14 bp, Artificial Sequence
  Description of Artificial Sequence: Synthetic oligonucleotide
gtaaacaggggcca

SEQ ID NO: 1661 - DNA, 14 bp, Artificial Sequence
  Description of Artificial Sequence: Synthetic oligonucleotide
ggtaaacaggggcc

SEQ ID NO: 1662 - DNA, 14 bp, Artificial Sequence
  Description of Artificial Sequence: Synthetic oligonucleotide
tggtaaacaggggc

SEQ ID NO: 1663 - DNA, 14 bp, Artificial Sequence
  Description of Artificial Sequence: Synthetic oligonucleotide
gtggtaaacagggg

SEQ ID NO: 1664 - DNA, 14 bp, Artificial Sequence
  Description of Artificial Sequence: Synthetic oligonucleotide
agtggtaaacaggg

SEQ ID NO: 1665 - DNA, 14 bp, Artificial Sequence
  Description of Artificial Sequence: Synthetic oligonucleotide
cagtggtaaacagg

SEQ ID NO: 1666 - DNA, 14 bp, Artificial Sequence
  Description of Artificial Sequence: Synthetic oligonucleotide
acagtggtaaacag

SEQ ID NO: 1667 - DNA, 14 bp, Artificial Sequence
  Description of Artificial Sequence: Synthetic oligonucleotide
gacagtggtaaaca

SEQ ID NO: 1668 - DNA, 14 bp, Artificial Sequence
  Description of Artificial Sequence: Synthetic oligonucleotide
agacagtggtaaac

SEQ ID NO: 1669 - DNA, 14 bp, Artificial Sequence
  Description of Artificial Sequence: Synthetic oligonucleotide
gagacagtggtaaa

SEQ ID NO: 1670 - DNA, 14 bp, Artificial Sequence
  Description of Artificial Sequence: Synthetic oligonucleotide
ggagacagtggtaa

SEQ ID NO: 1671 - DNA, 14 bp, Artificial Sequence
  Description of Artificial Sequence: Synthetic oligonucleotide
tggagacagtggta

SEQ ID NO: 1672 - DNA, 14 bp, Artificial Sequence
  Description of Artificial Sequence: Synthetic oligonucleotide
atggagacagtggt

SEQ ID NO: 1673 - DNA, 14 bp, Artificial Sequence
  Description of Artificial Sequence: Synthetic oligonucleotide
aatggagacagtgg

SEQ ID NO: 1674 - DNA, 14 bp, Artificial Sequence
  Description of Artificial Sequence: Synthetic oligonucleotide
taatggagacagtg

SEQ ID NO: 1675 - DNA, 14 bp, Artificial Sequence
  Description of Artificial Sequence: Synthetic oligonucleotide
gtaatggagacagt

SEQ ID NO: 1676 - DNA, 14 bp, Artificial Sequence
  Description of Artificial Sequence: Synthetic oligonucleotide
agtaatggagacag

SEQ ID NO: 1677 - DNA, 14 bp, Artificial Sequence
  Description of Artificial Sequence: Synthetic oligonucleotide
aagtaatggagaca

SEQ ID NO: 1678 - DNA, 14 bp, Artificial Sequence
  Description of Artificial Sequence: Synthetic oligonucleotide
aaagtaatggagac

SEQ ID NO: 1679 - DNA, 14 bp, Artificial Sequence
  Description of Artificial Sequence: Synthetic oligonucleotide
caaagtaatggaga

SEQ ID NO: 1680 - DNA, 14 bp, Artificial Sequence
  Description of Artificial Sequence: Synthetic oligonucleotide
tcaaagtaatggag

SEQ ID NO: 1681 - DNA, 14 bp, Artificial Sequence
  Description of Artificial Sequence: Synthetic oligonucleotide
ttcaaagtaatgga

SEQ ID NO: 1682 - DNA, 14 bp, Artificial Sequence
  Description of Artificial Sequence: Synthetic oligonucleotide
gttcaaagtaatgg

SEQ ID NO: 1683 - DNA, 14 bp, Artificial Sequence
  Description of Artificial Sequence: Synthetic oligonucleotide
agttcaaagtaatg

SEQ ID NO: 1684 - DNA, 14 bp, Artificial Sequence
  Description of Artificial Sequence: Synthetic oligonucleotide
aagttcaaagtaat

SEQ ID NO: 1685 - DNA, 14 bp, Artificial Sequence
  Description of Artificial Sequence: Synthetic oligonucleotide
aaagttcaaagtaa

SEQ ID NO: 1686 - DNA, 14 bp, Artificial Sequence
  Description of Artificial Sequence: Synthetic oligonucleotide
aaaagttcaaagta

SEQ ID NO: 1687 - DNA, 14 bp, Artificial Sequence
  Description of Artificial Sequence: Synthetic oligonucleotide
caaaagttcaaagt

SEQ ID NO: 1688 - DNA, 14 bp, Artificial Sequence
  Description of Artificial Sequence: Synthetic oligonucleotide
tcaaaagttcaaag

SEQ ID NO: 1689 - DNA, 14 bp, Artificial Sequence
  Description of Artificial Sequence: Synthetic oligonucleotide
ttcaaaagttcaaa

SEQ ID NO: 1690 - DNA, 14 bp, Artificial Sequence
  Description of Artificial Sequence: Synthetic oligonucleotide
cttcaaaagttcaa

SEQ ID NO: 1691 - DNA, 14 bp, Artificial Sequence
  Description of Artificial Sequence: Synthetic oligonucleotide
gcttcaaaagttca

SEQ ID NO: 1692 - DNA, 14 bp, Artificial Sequence
  Description of Artificial Sequence: Synthetic oligonucleotide
tgcttcaaaagttc

SEQ ID NO: 1693 - DNA, 14 bp, Artificial Sequence
  Description of Artificial Sequence: Synthetic oligonucleotide
ctgcttcaaaagtt

SEQ ID NO: 1694 - DNA, 14 bp, Artificial Sequence
  Description of Artificial Sequence: Synthetic oligonucleotide
actgcttcaaaagt

SEQ ID NO: 1695 - DNA, 14 bp, Artificial Sequence
  Description of Artificial Sequence: Synthetic oligonucleotide
aactgcttcaaaag

SEQ ID NO: 1696 - DNA, 14 bp, Artificial Sequence
  Description of Artificial Sequence: Synthetic oligonucleotide
taactgcttcaaaa

SEQ ID NO: 1697 - DNA, 14 bp, Artificial Sequence
  Description of Artificial Sequence: Synthetic oligonucleotide
ctaactgcttcaaa

SEQ ID NO: 1698 - DNA, 14 bp, Artificial Sequence
  Description of Artificial Sequence: Synthetic oligonucleotide
tctaactgcttcaa

SEQ ID NO: 1699 - DNA, 14 bp, Artificial Sequence
  Description of Artificial Sequence: Synthetic oligonucleotide
ttctaactgcttca

SEQ ID NO: 1700 - DNA, 14 bp, Artificial Sequence
  Description of Artificial Sequence: Synthetic oligonucleotide
cttctaactgcttc

SEQ ID NO: 1701 - DNA, 14 bp, Artificial Sequence
  Description of Artificial Sequence: Synthetic oligonucleotide
tcttctaactgctt

SEQ ID NO: 1702 - DNA, 14 bp, Artificial Sequence
  Description of Artificial Sequence: Synthetic oligonucleotide
ttcttctaactgct

SEQ ID NO: 1703 - DNA, 14 bp, Artificial Sequence
  Description of Artificial Sequence: Synthetic oligonucleotide
tttcttctaactgc

SEQ ID NO: 1704 - DNA, 14 bp, Artificial Sequence
  Description of Artificial Sequence: Synthetic oligonucleotide
ttttcttctaactg

SEQ ID NO: 1705 - DNA, 14 bp, Artificial Sequence
  Description of Artificial Sequence: Synthetic oligonucleotide
tttttcttctaact

SEQ ID NO: 1706 - DNA, 14 bp, Artificial Sequence
  Description of Artificial Sequence: Synthetic oligonucleotide
ttttttcttctaac

SEQ ID NO: 1707 - DNA, 14 bp, Artificial Sequence
  Description of Artificial Sequence: Synthetic oligonucleotide
cttttttcttctaa

SEQ ID NO: 1708 - DNA, 14 bp, Artificial Sequence
  Description of Artificial Sequence: Synthetic oligonucleotide
acttttttcttcta

SEQ ID NO: 1709 - DNA, 14 bp, Artificial Sequence
  Description of Artificial Sequence: Synthetic oligonucleotide
cacttttttcttct

SEQ ID NO: 1710 - DNA, 14 bp, Artificial Sequence
  Description of Artificial Sequence: Synthetic oligonucleotide
tcacttttttcttc

SEQ ID NO: 1711 - DNA, 14 bp, Artificial Sequence
  Description of Artificial Sequence: Synthetic oligonucleotide
ttcacttttttctt

SEQ ID NO: 1712 - DNA, 14 bp, Artificial Sequence
  Description of Artificial Sequence: Synthetic oligonucleotide
cttcacttttttct

SEQ ID NO: 1713 - DNA, 14 bp, Artificial Sequence
  Description of Artificial Sequence: Synthetic oligonucleotide
tcttcacttttttc

SEQ ID NO: 1714 - DNA, 14 bp, Artificial Sequence
  Description of Artificial Sequence: Synthetic oligonucleotide
atcttcactttttt

SEQ ID NO: 1715 - DNA, 14 bp, Artificial Sequence
  Description of Artificial Sequence: Synthetic oligonucleotide
gatcttcacttttt

SEQ ID NO: 1716 - DNA, 14 bp, Artificial Sequence
  Description of Artificial Sequence: Synthetic oligonucleotide
tgatcttcactttt

SEQ ID NO: 1717 - DNA, 14 bp, Artificial Sequence
  Description of Artificial Sequence: Synthetic oligonucleotide
ttgatcttcacttt

SEQ ID NO: 1718 - DNA, 14 bp, Artificial Sequence
  Description of Artificial Sequence: Synthetic oligonucleotide
cttgatcttcactt

SEQ ID NO: 1719 - DNA, 14 bp, Artificial Sequence
  Description of Artificial Sequence: Synthetic oligonucleotide
tcttgatcttcact

SEQ ID NO: 1720 - DNA, 14 bp, Artificial Sequence
  Description of Artificial Sequence: Synthetic oligonucleotide
ttcttgatcttcac

SEQ ID NO: 1721 - DNA, 14 bp, Artificial Sequence
  Description of Artificial Sequence: Synthetic oligonucleotide
cttcttgatcttca

SEQ ID NO: 1722 - DNA, 14 bp, Artificial Sequence
  Description of Artificial Sequence: Synthetic oligonucleotide
tcttcttgatcttc

SEQ ID NO: 1723 - DNA, 14 bp, Artificial Sequence
  Description of Artificial Sequence: Synthetic oligonucleotide
gtcttcttgatctt

SEQ ID NO: 1724 - DNA, 14 bp, Artificial Sequence
  Description of Artificial Sequence: Synthetic oligonucleotide
tgtcttcttgatct

SEQ ID NO: 1725 - DNA, 14 bp, Artificial Sequence
  Description of Artificial Sequence: Synthetic oligonucleotide
ttgtcttcttgatc

SEQ ID NO: 1726 - DNA, 14 bp, Artificial Sequence
  Description of Artificial Sequence: Synthetic oligonucleotide
cttgtcttcttgat

SEQ ID NO: 1727 - DNA, 14 bp, Artificial Sequence
  Description of Artificial Sequence: Synthetic oligonucleotide
ccttgtcttcttga

SEQ ID NO: 1728 - DNA, 14 bp, Artificial Sequence
  Description of Artificial Sequence: Synthetic oligonucleotide
tccttgtcttcttg

SEQ ID NO: 1729 - DNA, 14 bp, Artificial Sequence
  Description of Artificial Sequence: Synthetic oligonucleotide
ttccttgtcttctt

SEQ ID NO: 1730 - DNA, 14 bp, Artificial Sequence
  Description of Artificial Sequence: Synthetic oligonucleotide
attccttgtcttct

SEQ ID NO: 1731 - DNA, 14 bp, Artificial Sequence
  Description of Artificial Sequence: Synthetic oligonucleotide
cattccttgtcttc

SEQ ID NO: 1732 - DNA, 14 bp, Artificial Sequence
  Description of Artificial Sequence: Synthetic oligonucleotide
acattccttgtctt

SEQ ID NO: 1733 - DNA, 14 bp, Artificial Sequence
  Description of Artificial Sequence: Synthetic oligonucleotide
aacattccttgtct

SEQ ID NO: 1734 - DNA, 14 bp, Artificial Sequence
  Description of Artificial Sequence: Synthetic oligonucleotide
aaacattccttgtc

SEQ ID NO: 1735 - DNA, 14 bp, Artificial Sequence
  Description of Artificial Sequence: Synthetic oligonucleotide
taaacattccttgt

SEQ ID NO: 1736 - DNA, 14 bp, Artificial Sequence
  Description of Artificial Sequence: Synthetic oligonucleotide
ttaaacattccttg

SEQ ID NO: 1737 - DNA, 14 bp, Artificial Sequence
  Description of Artificial Sequence: Synthetic oligonucleotide
tttaaacattcctt

SEQ ID NO: 1738 - DNA, 14 bp, Artificial Sequence
  Description of Artificial Sequence: Synthetic oligonucleotide
ttttaaacattcct

SEQ ID NO: 1739 - DNA, 14 bp, Artificial Sequence
  Description of Artificial Sequence: Synthetic oligonucleotide
gttttaaacattcc

SEQ ID NO: 1740 - DNA, 14 bp, Artificial Sequence
  Description of Artificial Sequence: Synthetic oligonucleotide
tgttttaaacattc

SEQ ID NO: 1741 - DNA, 14 bp, Artificial Sequence
  Description of Artificial Sequence: Synthetic oligonucleotide
ttgttttaaacatt

SEQ ID NO: 1742 - DNA, 14 bp, Artificial Sequence
  Description of Artificial Sequence: Synthetic oligonucleotide
cttgttttaaacat

SEQ ID NO: 1743 - DNA, 14 bp, Artificial Sequence
  Description of Artificial Sequence: Synthetic oligonucleotide
gcttgttttaaaca

SEQ ID NO: 1744 - DNA, 14 bp, Artificial Sequence
  Description of Artificial Sequence: Synthetic oligonucleotide
tgcttgttttaaac

SEQ ID NO: 1745 - DNA, 14 bp, Artificial Sequence
  Description of Artificial Sequence: Synthetic oligonucleotide
ttgcttgttttaaa

SEQ ID NO: 1746 - DNA, 14 bp, Artificial Sequence
  Description of Artificial Sequence: Synthetic oligonucleotide
attgcttgttttaa

SEQ ID NO: 1747 - DNA, 14 bp, Artificial Sequence
  Description of Artificial Sequence: Synthetic oligonucleotide
tattgcttgtttta

SEQ ID NO: 1748 - DNA, 14 bp, Artificial Sequence
  Description of Artificial Sequence: Synthetic oligonucleotide
ttattgcttgtttt

SEQ ID NO: 1749 - DNA, 14 bp, Artificial Sequence
  Description of Artificial Sequence: Synthetic oligonucleotide
gttattgcttgttt

SEQ ID NO: 1750 - DNA, 14 bp, Artificial Sequence
  Description of Artificial Sequence: Synthetic oligonucleotide
tgttattgcttgtt

SEQ ID NO: 1751 - DNA, 14 bp, Artificial Sequence
  Description of Artificial Sequence: Synthetic oligonucleotide
ctgttattgcttgt

SEQ ID NO: 1752 - DNA, 14 bp, Artificial Sequence
  Description of Artificial Sequence: Synthetic oligonucleotide
gctgttattgcttg

SEQ ID NO: 1753 - DNA, 14 bp, Artificial Sequence
  Description of Artificial Sequence: Synthetic oligonucleotide
agctgttattgctt

SEQ ID NO: 1754 - DNA, 14 bp, Artificial Sequence
  Description of Artificial Sequence: Synthetic oligonucleotide
aagctgttattgct

SEQ ID NO: 1755 - DNA, 14 bp, Artificial Sequence
  Description of Artificial Sequence: Synthetic oligonucleotide
aaagctgttattgc

SEQ ID NO: 1756 - DNA, 14 bp, Artificial Sequence
  Description of Artificial Sequence: Synthetic oligonucleotide
caaagctgttattg

SEQ ID NO: 1757 - DNA, 14 bp, Artificial Sequence
  Description of Artificial Sequence: Synthetic oligonucleotide
gcaaagctgttatt

SEQ ID NO: 1758 - DNA, 14 bp, Artificial Sequence
  Description of Artificial Sequence: Synthetic oligonucleotide
agcaaagctgttat

SEQ ID NO: 1759 - DNA, 14 bp, Artificial Sequence
  Description of Artificial Sequence: Synthetic oligonucleotide
aagcaaagctgtta

SEQ ID NO: 1760 - DNA, 14 bp, Artificial Sequence
  Description of Artificial Sequence: Synthetic oligonucleotide
taagcaaagctgtt

SEQ ID NO: 1761 - DNA, 14 bp, Artificial Sequence
  Description of Artificial Sequence: Synthetic oligonucleotide
ttaagcaaagctgt

SEQ ID NO: 1762 - DNA, 14 bp, Artificial Sequence
  Description of Artificial Sequence: Synthetic oligonucleotide
attaagcaaagctg

SEQ ID NO: 1763 - DNA, 14 bp, Artificial Sequence
  Description of Artificial Sequence: Synthetic oligonucleotide
cattaagcaaagct

SEQ ID NO: 1764 - DNA, 14 bp, Artificial Sequence
  Description of Artificial Sequence: Synthetic oligonucleotide
acattaagcaaagc

SEQ ID NO: 1765 - DNA, 14 bp, Artificial Sequence
  Description of Artificial Sequence: Synthetic oligonucleotide
aacattaagcaaag

SEQ ID NO: 1766 - DNA, 14 bp, Artificial Sequence
  Description of Artificial Sequence: Synthetic oligonucleotide
gaacattaagcaaa

SEQ ID NO: 1767 - DNA, 14 bp, Artificial Sequence
  Description of Artificial Sequence: Synthetic oligonucleotide
tgaacattaagcaa

SEQ ID NO: 1768 - DNA, 14 bp, Artificial Sequence
  Description of Artificial Sequence: Synthetic oligonucleotide
ctgaacattaagca

SEQ ID NO: 1769 - DNA, 14 bp, Artificial Sequence
  Description of Artificial Sequence: Synthetic oligonucleotide
tctgaacattaagc

SEQ ID NO: 1770 - DNA, 14 bp, Artificial Sequence
  Description of Artificial Sequence: Synthetic oligonucleotide
ctctgaacattaag

SEQ ID NO: 1771 - DNA, 14 bp, Artificial Sequence
  Description of Artificial Sequence: Synthetic oligonucleotide
actctgaacattaa

SEQ ID NO: 1772 - DNA, 14 bp, Artificial Sequence
  Description of Artificial Sequence: Synthetic oligonucleotide
cactctgaacatta

SEQ ID NO: 1773 - DNA, 14 bp, Artificial Sequence
  Description of Artificial Sequence: Synthetic oligonucleotide
ccactctgaacatt

SEQ ID NO: 1774 - DNA, 14 bp, Artificial Sequence
  Description of Artificial Sequence: Synthetic oligonucleotide
accactctgaacat

SEQ ID NO: 1775 - DNA, 14 bp, Artificial Sequence
  Description of Artificial Sequence: Synthetic oligonucleotide
taccactctgaaca

SEQ ID NO: 1776 - DNA, 14 bp, Artificial Sequence
  Description of Artificial Sequence: Synthetic oligonucleotide
ataccactctgaac

SEQ ID NO: 1777 - DNA, 14 bp, Artificial Sequence
  Description of Artificial Sequence: Synthetic oligonucleotide
cataccactctgaa

SEQ ID NO: 1778 - DNA, 14 bp, Artificial Sequence
  Description of Artificial Sequence: Synthetic oligonucleotide
ccataccactctga

SEQ ID NO: 1779 - DNA, 14 bp, Artificial Sequence
  Description of Artificial Sequence: Synthetic oligonucleotide
tccataccactctg

SEQ ID NO: 1780 - DNA, 14 bp, Artificial Sequence
  Description of Artificial Sequence: Synthetic oligonucleotide
ttccataccactct

SEQ ID NO: 1781 - DNA, 14 bp, Artificial Sequence
  Description of Artificial Sequence: Synthetic oligonucleotide
tttccataccactc

SEQ ID NO: 1782 - DNA, 14 bp, Artificial Sequence
  Description of Artificial Sequence: Synthetic oligonucleotide
ttttccataccact

SEQ ID NO: 1783 - DNA, 14 bp, Artificial Sequence
  Description of Artificial Sequence: Synthetic oligonucleotide
tttttccataccac

SEQ ID NO: 1784 - DNA, 14 bp, Artificial Sequence
  Description of Artificial Sequence: Synthetic oligonucleotide
ttttttccatacca

SEQ ID NO: 1785 - DNA, 14 bp, Artificial Sequence
  Description of Artificial Sequence: Synthetic oligonucleotide
attttttccatacc

SEQ ID NO: 1786 - DNA, 14 bp, Artificial Sequence
  Description of Artificial Sequence: Synthetic oligonucleotide
tattttttccatac

SEQ ID NO: 1787 - DNA, 14 bp, Artificial Sequence
  Description of Artificial Sequence: Synthetic oligonucleotide
atattttttccata

SEQ ID NO: 1788 - DNA, 14 bp, Artificial Sequence
  Description of Artificial Sequence: Synthetic oligonucleotide
catattttttccat

SEQ ID NO: 1789 - DNA, 14 bp, Artificial Sequence
  Description of Artificial Sequence: Synthetic oligonucleotide
acatattttttcca

SEQ ID NO: 1790 - DNA, 14 bp, Artificial Sequence
  Description of Artificial Sequence: Synthetic oligonucleotide
aacatattttttcc

SEQ ID NO: 1791 - DNA, 14 bp, Artificial Sequence
  Description of Artificial Sequence: Synthetic oligonucleotide
gaacatattttttc

SEQ ID NO: 1792 - DNA, 14 bp, Artificial Sequence
  Description of Artificial Sequence: Synthetic oligonucleotide
agaacatatttttt

SEQ ID NO: 1793 - DNA, 14 bp, Artificial Sequence
  Description of Artificial Sequence: Synthetic oligonucleotide
tagaacatattttt

SEQ ID NO: 1794 - DNA, 14 bp, Artificial Sequence
  Description of Artificial Sequence: Synthetic oligonucleotide
ttagaacatatttt

SEQ ID NO: 1795 - DNA, 14 bp, Artificial Sequence
  Description of Artificial Sequence: Synthetic oligonucleotide
tttagaacatattt

SEQ ID NO: 1796 - DNA, 14 bp, Artificial Sequence
  Description of Artificial Sequence: Synthetic oligonucleotide
ttttagaacatatt

SEQ ID NO: 1797 - DNA, 14 bp, Artificial Sequence
  Description of Artificial Sequence: Synthetic oligonucleotide
cttttagaacatat

SEQ ID NO: 1798 - DNA, 14 bp, Artificial Sequence
  Description of Artificial Sequence: Synthetic oligonucleotide
acttttagaacata

SEQ ID NO: 1799 - DNA, 14 bp, Artificial Sequence
  Description of Artificial Sequence: Synthetic oligonucleotide
gacttttagaacat

SEQ ID NO: 1800 - DNA, 14 bp, Artificial Sequence
  Description of Artificial Sequence: Synthetic oligonucleotide
agacttttagaaca

SEQ ID NO: 1801 - DNA, 14 bp, Artificial Sequence
  Description of Artificial Sequence: Synthetic oligonucleotide
aagacttttagaac

SEQ ID NO: 1802 - DNA, 14 bp, Artificial Sequence
  Description of Artificial Sequence: Synthetic oligonucleotide
caagacttttagaa

SEQ ID NO: 1803 - DNA, 14 bp, Artificial Sequence
  Description of Artificial Sequence: Synthetic oligonucleotide
gcaagacttttaga

SEQ ID NO: 1804 - DNA, 14 bp, Artificial Sequence
  Description of Artificial Sequence: Synthetic oligonucleotide
tgcaagacttttag

SEQ ID NO: 1805 - DNA, 14 bp, Artificial Sequence
  Description of Artificial Sequence: Synthetic oligonucleotide
ttgcaagactttta

SEQ ID NO: 1806 - DNA, 14 bp, Artificial Sequence
  Description of Artificial Sequence: Synthetic oligonucleotide
tttgcaagactttt

SEQ ID NO: 1807 - DNA, 14 bp, Artificial Sequence
  Description of Artificial Sequence: Synthetic oligonucleotide
ttttgcaagacttt

SEQ ID NO: 1808 - DNA, 14 bp, Artificial Sequence
  Description of Artificial Sequence: Synthetic oligonucleotide
gttttgcaagactt

SEQ ID NO: 1809 - DNA, 14 bp, Artificial Sequence
  Description of Artificial Sequence: Synthetic oligonucleotide
cgttttgcaagact

SEQ ID NO: 1810 - DNA, 14 bp, Artificial Sequence
  Description of Artificial Sequence: Synthetic oligonucleotide
tcgttttgcaagac

SEQ ID NO: 1811 - DNA, 14 bp, Artificial Sequence
  Description of Artificial Sequence: Synthetic oligonucleotide
ttcgttttgcaaga

SEQ ID NO: 1812 - DNA, 14 bp, Artificial Sequence
  Description of Artificial Sequence: Synthetic oligonucleotide
cttcgttttgcaag

SEQ ID NO: 1813 - DNA, 14 bp, Artificial Sequence
  Description of Artificial Sequence: Synthetic oligonucleotide
tcttcgttttgcaa

SEQ ID NO: 1814 - DNA, 14 bp, Artificial Sequence
  Description of Artificial Sequence: Synthetic oligonucleotide
gtcttcgttttgca

SEQ ID NO: 1815 - DNA, 14 bp, Artificial Sequence
  Description of Artificial Sequence: Synthetic oligonucleotide
agtcttcgttttgc

SEQ ID NO: 1816 - DNA, 14 bp, Artificial Sequence
  Description of Artificial Sequence: Synthetic oligonucleotide
cagtcttcgttttg

SEQ ID NO: 1817 - DNA, 14 bp, Artificial Sequence
  Description of Artificial Sequence: Synthetic oligonucleotide
tcagtcttcgtttt

SEQ ID NO: 1818 - DNA, 14 bp, Artificial Sequence
  Description of Artificial Sequence: Synthetic oligonucleotide
ctcagtcttcgttt

SEQ ID NO: 1819 - DNA, 14 bp, Artificial Sequence
  Description of Artificial Sequence: Synthetic oligonucleotide
actcagtcttcgtt

SEQ ID NO: 1820 - DNA, 14 bp, Artificial Sequence
  Description of Artificial Sequence: Synthetic oligonucleotide
cactcagtcttcgt

SEQ ID NO: 1821 - DNA, 14 bp, Artificial Sequence
  Description of Artificial Sequence: Synthetic oligonucleotide
tcactcagtcttcg

SEQ ID NO: 1822 - DNA, 14 bp, Artificial Sequence
  Description of Artificial Sequence: Synthetic oligonucleotide
ttcactcagtcttc

SEQ ID NO: 1823 - DNA, 14 bp, Artificial Sequence
  Description of Artificial Sequence: Synthetic oligonucleotide
attcactcagtctt

SEQ ID NO: 1824 - DNA, 14 bp, Artificial Sequence
  Description of Artificial Sequence: Synthetic oligonucleotide
gattcactcagtct

SEQ ID NO: 1825 - DNA, 14 bp, Artificial Sequence
  Description of Artificial Sequence: Synthetic oligonucleotide
agattcactcagtc

SEQ ID NO: 1826 - DNA, 14 bp, Artificial Sequence
  Description of Artificial Sequence: Synthetic oligonucleotide
cagattcactcagt

SEQ ID NO: 1827 - DNA, 14 bp, Artificial Sequence
  Description of Artificial Sequence: Synthetic oligonucleotide
gcagattcactcag

SEQ ID NO: 1828 - DNA, 14 bp, Artificial Sequence
  Description of Artificial Sequence: Synthetic oligonucleotide
tgcagattcactca

SEQ ID NO: 1829 - DNA, 14 bp, Artificial Sequence
  Description of Artificial Sequence: Synthetic oligonucleotide
atgcagattcactc

SEQ ID NO: 1830 - DNA, 14 bp, Artificial Sequence
  Description of Artificial Sequence: Synthetic oligonucleotide
catgcagattcact

SEQ ID NO: 1831 - DNA, 14 bp, Artificial Sequence
  Description of Artificial Sequence: Synthetic oligonucleotide
acatgcagattcac

SEQ ID NO: 1832 - DNA, 14 bp, Artificial Sequence
  Description of Artificial Sequence: Synthetic oligonucleotide
gacatgcagattca

SEQ ID NO: 1833 - DNA, 14 bp, Artificial Sequence
  Description of Artificial Sequence: Synthetic oligonucleotide
cgacatgcagattc

SEQ ID NO: 1834 - DNA, 14 bp, Artificial Sequence
  Description of Artificial Sequence: Synthetic oligonucleotide
ccgacatgcagatt

SEQ ID NO: 1835 - DNA, 14 bp, Artificial Sequence
  Description of Artificial Sequence: Synthetic oligonucleotide
accgacatgcagat

SEQ ID NO: 1836 - DNA, 14 bp, Artificial Sequence
  Description of Artificial Sequence: Synthetic oligonucleotide
aaccgacatgcaga

SEQ ID NO: 1837 - DNA, 14 bp, Artificial Sequence
  Description of Artificial Sequence: Synthetic oligonucleotide
aaaccgacatgcag

SEQ ID NO: 1838 - DNA, 14 bp, Artificial Sequence
  Description of Artificial Sequence: Synthetic oligonucleotide
aaaaccgacatgca

SEQ ID NO: 1839 - DNA, 14 bp, Artificial Sequence
  Description of Artificial Sequence: Synthetic oligonucleotide
taaaaccgacatgc

SEQ ID NO: 1840 - DNA, 14 bp, Artificial Sequence
  Description of Artificial Sequence: Synthetic oligonucleotide
ataaaaccgacatg

SEQ ID NO: 1841 - DNA, 14 bp, Artificial Sequence
  Description of Artificial Sequence: Synthetic oligonucleotide
tataaaaccgacat

SEQ ID NO: 1842 - DNA, 14 bp, Artificial Sequence
  Description of Artificial Sequence: Synthetic oligonucleotide
ctataaaaccgaca

SEQ ID NO: 1843 - DNA, 14 bp, Artificial Sequence
  Description of Artificial Sequence: Synthetic oligonucleotide
actataaaaccgac

SEQ ID NO: 1844 - DNA, 14 bp, Artificial Sequence
  Description of Artificial Sequence: Synthetic oligonucleotide
gactataaaaccga

SEQ ID NO: 1845 - DNA, 14 bp, Artificial Sequence
  Description of Artificial Sequence: Synthetic oligonucleotide
tgactataaaaccg

SEQ ID NO: 1846 - DNA, 14 bp, Artificial Sequence
  Description of Artificial Sequence: Synthetic oligonucleotide
ctgactataaaacc

SEQ ID NO: 1847 - DNA, 14 bp, Artificial Sequence
  Description of Artificial Sequence: Synthetic oligonucleotide
gctgactataaaac

SEQ ID NO: 1848 - DNA, 14 bp, Artificial Sequence
  Description of Artificial Sequence: Synthetic oligonucleotide
tgctgactataaaa

SEQ ID NO: 1849 - DNA, 14 bp, Artificial Sequence
  Description of Artificial Sequence: Synthetic oligonucleotide
ttgctgactataaa

SEQ ID NO: 1850 - DNA, 14 bp, Artificial Sequence
  Description of Artificial Sequence: Synthetic oligonucleotide
tttgctgactataa

SEQ ID NO: 1851 - DNA, 14 bp, Artificial Sequence
  Description of Artificial Sequence: Synthetic oligonucleotide
atttgctgactata

SEQ ID NO: 1852 - DNA, 14 bp, Artificial Sequence
  Description of Artificial Sequence: Synthetic oligonucleotide
catttgctgactat

SEQ ID NO: 1853 - DNA, 14 bp, Artificial Sequence
  Description of Artificial Sequence: Synthetic oligonucleotide
tcatttgctgacta

SEQ ID NO: 1854 - DNA, 14 bp, Artificial Sequence
  Description of Artificial Sequence: Synthetic oligonucleotide
ttcatttgctgact

SEQ ID NO: 1855 - DNA, 14 bp, Artificial Sequence
  Description of Artificial Sequence: Synthetic oligonucleotide
cttcatttgctgac

SEQ ID NO: 1856 - DNA, 14 bp, Artificial Sequence
  Description of Artificial Sequence: Synthetic oligonucleotide
ccttcatttgctga

SEQ ID NO: 1857 - DNA, 14 bp, Artificial Sequence
  Description of Artificial Sequence: Synthetic oligonucleotide
cccttcatttgctg

SEQ ID NO: 1858 - DNA, 14 bp, Artificial Sequence
  Description of Artificial Sequence: Synthetic oligonucleotide
ccccttcatttgct

SEQ ID NO: 1859 - DNA, 14 bp, Artificial Sequence
  Description of Artificial Sequence: Synthetic oligonucleotide
tccccttcatttgc

SEQ ID NO: 1860 - DNA, 14 bp, Artificial Sequence
  Description of Artificial Sequence: Synthetic oligonucleotide
ttccccttcatttg

SEQ ID NO: 1861 - DNA, 14 bp, Artificial Sequence
  Description of Artificial Sequence: Synthetic oligonucleotide
tttccccttcattt

SEQ ID NO: 1862 - DNA, 14 bp, Artificial Sequence
  Description of Artificial Sequence: Synthetic oligonucleotide
gtttccccttcatt

SEQ ID NO: 1863 - DNA, 14 bp, Artificial Sequence
  Description of Artificial Sequence: Synthetic oligonucleotide
tgtttccccttcat

SEQ ID NO: 1864 - DNA, 14 bp, Artificial Sequence
  Description of Artificial Sequence: Synthetic oligonucleotide
ttgtttccccttca

SEQ ID NO: 1865 - DNA, 14 bp, Artificial Sequence
  Description of Artificial Sequence: Synthetic oligonucleotide
gttgtttccccttc

SEQ ID NO: 1866 - DNA, 14 bp, Artificial Sequence
  Description of Artificial Sequence: Synthetic oligonucleotide
agttgtttcccctt

SEQ ID NO: 1867 - DNA, 14 bp, Artificial Sequence
  Description of Artificial Sequence: Synthetic oligonucleotide
tagttgtttcccct

SEQ ID NO: 1868 - DNA, 14 bp, Artificial Sequence
  Description of Artificial Sequence: Synthetic oligonucleotide
ctagttgtttcccc

SEQ ID NO: 1869 - DNA, 14 bp, Artificial Sequence
  Description of Artificial Sequence: Synthetic oligonucleotide
gctagttgtttccc

SEQ ID NO: 1870 - DNA, 14 bp, Artificial Sequence
  Description of Artificial Sequence: Synthetic oligonucleotide
tgctagttgtttcc

SEQ ID NO: 1871 - DNA, 14 bp, Artificial Sequence
  Description of Artificial Sequence: Synthetic oligonucleotide
ttgctagttgtttc

SEQ ID NO: 1872 - DNA, 14 bp, Artificial Sequence
  Description of Artificial Sequence: Synthetic oligonucleotide
attgctagttgttt

SEQ ID NO: 1873 - DNA, 14 bp, Artificial Sequence
  Description of Artificial Sequence: Synthetic oligonucleotide
gattgctagttgtt

SEQ ID NO: 1874 - DNA, 14 bp, Artificial Sequence
  Description of Artificial Sequence: Synthetic oligonucleotide
tgattgctagttgt

SEQ ID NO: 1875 - DNA, 14 bp, Artificial Sequence
  Description of Artificial Sequence: Synthetic oligonucleotide
ttgattgctagttg

SEQ ID NO: 1876 - DNA, 14 bp, Artificial Sequence
  Description of Artificial Sequence: Synthetic oligonucleotide
cttgattgctagtt

SEQ ID NO: 1877 - DNA, 14 bp, Artificial Sequence
  Description of Artificial Sequence: Synthetic oligonucleotide
tcttgattgctagt

SEQ ID NO: 1878 - DNA, 14 bp, Artificial Sequence
  Description of Artificial Sequence: Synthetic oligonucleotide
ttcttgattgctag

SEQ ID NO: 1879 - DNA, 14 bp, Artificial Sequence
  Description of Artificial Sequence: Synthetic oligonucleotide
cttcttgattgcta

SEQ ID NO: 1880 - DNA, 14 bp, Artificial Sequence
  Description of Artificial Sequence: Synthetic oligonucleotide
tcttcttgattgct

SEQ ID NO: 1881 - DNA, 14 bp, Artificial Sequence
  Description of Artificial Sequence: Synthetic oligonucleotide
atcttcttgattgc

SEQ ID NO: 1882 - DNA, 14 bp, Artificial Sequence
  Description of Artificial Sequence: Synthetic oligonucleotide
catcttcttgattg

SEQ ID NO: 1883 - DNA, 14 bp, Artificial Sequence
  Description of Artificial Sequence: Synthetic oligonucleotide
tcatcttcttgatt

SEQ ID NO: 1884 - DNA, 14 bp, Artificial Sequence
  Description of Artificial Sequence: Synthetic oligonucleotide
ttcatcttcttgat

SEQ ID NO: 1885 - DNA, 14 bp, Artificial Sequence
  Description of Artificial Sequence: Synthetic oligonucleotide
gttcatcttcttga

SEQ ID NO: 1886 - DNA, 14 bp, Artificial Sequence
  Description of Artificial Sequence: Synthetic oligonucleotide
cgttcatcttcttg

SEQ ID NO: 1887 - DNA, 14 bp, Artificial Sequence
  Description of Artificial Sequence: Synthetic oligonucleotide
tcgttcatcttctt

SEQ ID NO: 1888 - DNA, 14 bp, Artificial Sequence
  Description of Artificial Sequence: Synthetic oligonucleotide
ctcgttcatcttct

SEQ ID NO: 1889 - DNA, 14 bp, Artificial Sequence
  Description of Artificial Sequence: Synthetic oligonucleotide
tctcgttcatcttc

SEQ ID NO: 1890 - DNA, 14 bp, Artificial Sequence
  Description of Artificial Sequence: Synthetic oligonucleotide
atctcgttcatctt

SEQ ID NO: 1891 - DNA, 14 bp, Artificial Sequence
  Description of Artificial Sequence: Synthetic oligonucleotide
aatctcgttcatct

SEQ ID NO: 1892 - DNA, 14 bp, Artificial Sequence
  Description of Artificial Sequence: Synthetic oligonucleotide
gaatctcgttcatc

SEQ ID NO: 1893 - DNA, 14 bp, Artificial Sequence
  Description of Artificial Sequence: Synthetic oligonucleotide
tgaatctcgttcat

SEQ ID NO: 1894 - DNA, 14 bp, Artificial Sequence
  Description of Artificial Sequence: Synthetic oligonucleotide
ctgaatctcgttca

SEQ ID NO: 1895 - DNA, 14 bp, Artificial Sequence
  Description of Artificial Sequence: Synthetic oligonucleotide
tctgaatctcgttc

SEQ ID NO: 1896 - DNA, 14 bp, Artificial Sequence
  Description of Artificial Sequence: Synthetic oligonucleotide
ttctgaatctcgtt

SEQ ID NO: 1897 - DNA, 14 bp, Artificial Sequence
  Description of Artificial Sequence: Synthetic oligonucleotide
cttctgaatctcgt

SEQ ID NO: 1898 - DNA, 14 bp, Artificial Sequence
  Description of Artificial Sequence: Synthetic oligonucleotide
tcttctgaatctcg

SEQ ID NO: 1899 - DNA, 14 bp, Artificial Sequence
  Description of Artificial Sequence: Synthetic oligonucleotide
ttcttctgaatctc

SEQ ID NO: 1900 - DNA, 14 bp, Artificial Sequence
  Description of Artificial Sequence: Synthetic oligonucleotide
attcttctgaatct

SEQ ID NO: 1901 - DNA, 14 bp, Artificial Sequence
  Description of Artificial Sequence: Synthetic oligonucleotide
tattcttctgaatc

SEQ ID NO: 1902 - DNA, 14 bp, Artificial Sequence
  Description of Artificial Sequence: Synthetic oligonucleotide
atattcttctgaat

SEQ ID NO: 1903 - DNA, 14 bp, Artificial Sequence
  Description of Artificial Sequence: Synthetic oligonucleotide
aatattcttctgaa

SEQ ID NO: 1904 - DNA, 14 bp, Artificial Sequence
  Description of Artificial Sequence: Synthetic oligonucleotide
caatattcttctga

SEQ ID NO: 1905 - DNA, 14 bp, Artificial Sequence
  Description of Artificial Sequence: Synthetic oligonucleotide
tcaatattcttctg

SEQ ID NO: 1906 - DNA, 14 bp, Artificial Sequence
  Description of Artificial Sequence: Synthetic oligonucleotide
atcaatattcttct

SEQ ID NO: 1907 - DNA, 14 bp, Artificial Sequence
  Description of Artificial Sequence: Synthetic oligonucleotide
catcaatattcttc

SEQ ID NO: 1908 - DNA, 14 bp, Artificial Sequence
  Description of Artificial Sequence: Synthetic oligonucleotide
ccatcaatattctt

SEQ ID NO: 1909 - DNA, 14 bp, Artificial Sequence
  Description of Artificial Sequence: Synthetic oligonucleotide
accatcaatattct

SEQ ID NO: 1910 - DNA, 14 bp, Artificial Sequence
  Description of Artificial Sequence: Synthetic oligonucleotide
aaccatcaatattc

SEQ ID NO: 1911 - DNA, 14 bp, Artificial Sequence
  Description of Artificial Sequence: Synthetic oligonucleotide
caaccatcaatatt

SEQ ID NO: 1912 - DNA, 14 bp, Artificial Sequence
  Description of Artificial Sequence: Synthetic oligonucleotide
ccaaccatcaatat

SEQ ID NO: 1913 - DNA, 14 bp, Artificial Sequence
  Description of Artificial Sequence: Synthetic oligonucleotide
cccaaccatcaata

SEQ ID NO: 1914 - DNA, 14 bp, Artificial Sequence
  Description of Artificial Sequence: Synthetic oligonucleotide
tcccaaccatcaat

SEQ ID NO: 1915 - DNA, 14 bp, Artificial Sequence
  Description of Artificial Sequence: Synthetic oligonucleotide
ctcccaaccatcaa

SEQ ID NO: 1916 - DNA, 14 bp, Artificial Sequence
  Description of Artificial Sequence: Synthetic oligonucleotide
cctcccaaccatca

SEQ ID NO: 1917 - DNA, 14 bp, Artificial Sequence
  Description of Artificial Sequence: Synthetic oligonucleotide
ccctcccaaccatc

SEQ ID NO: 1918 - DNA, 14 bp, Artificial Sequence
  Description of Artificial Sequence: Synthetic oligonucleotide
tccctcccaaccat

SEQ ID NO: 1919 - DNA, 14 bp, Artificial Sequence
  Description of Artificial Sequence: Synthetic oligonucleotide
ttccctcccaacca

SEQ ID NO: 1920 - DNA, 14 bp, Artificial Sequence
  Description of Artificial Sequence: Synthetic oligonucleotide
tttccctcccaacc

SEQ ID NO: 1921 - DNA, 14 bp, Artificial Sequence
  Description of Artificial Sequence: Synthetic oligonucleotide
ttttccctcccaac

SEQ ID NO: 1922 - DNA, 14 bp, Artificial Sequence
  Description of Artificial Sequence: Synthetic oligonucleotide
cttttccctcccaa

SEQ ID NO: 1923 - DNA, 14 bp, Artificial Sequence
  Description of Artificial Sequence: Synthetic oligonucleotide
tcttttccctccca

SEQ ID NO: 1924 - DNA, 14 bp, Artificial Sequence
  Description of Artificial Sequence: Synthetic oligonucleotide
gtcttttccctccc

SEQ ID NO: 1925 - DNA, 14 bp, Artificial Sequence
  Description of Artificial Sequence: Synthetic oligonucleotide
tgtcttttccctcc

SEQ ID NO: 1926 - DNA, 14 bp, Artificial Sequence
  Description of Artificial Sequence: Synthetic oligonucleotide
atgtcttttccctc

SEQ ID NO: 1927 - DNA, 14 bp, Artificial Sequence
  Description of Artificial Sequence: Synthetic oligonucleotide
aatgtcttttccct

SEQ ID NO: 1928 - DNA, 14 bp, Artificial Sequence
  Description of Artificial Sequence: Synthetic oligonucleotide
caatgtcttttccc

SEQ ID NO: 1929 - DNA, 14 bp, Artificial Sequence
  Description of Artificial Sequence: Synthetic oligonucleotide
ccaatgtcttttcc

SEQ ID NO: 1930 - DNA, 14 bp, Artificial Sequence
  Description of Artificial Sequence: Synthetic oligonucleotide
tccaatgtcttttc

SEQ ID NO: 1931 - DNA, 14 bp, Artificial Sequence
  Description of Artificial Sequence: Synthetic oligonucleotide
gtccaatgtctttt

SEQ ID NO: 1932 - DNA, 14 bp, Artificial Sequence
  Description of Artificial Sequence: Synthetic oligonucleotide
tgtccaatgtcttt

SEQ ID NO: 1933 - DNA, 14 bp, Artificial Sequence
  Description of Artificial Sequence: Synthetic oligonucleotide
ctgtccaatgtctt

SEQ ID NO: 1934 - DNA, 14 bp, Artificial Sequence
  Description of Artificial Sequence: Synthetic oligonucleotide
actgtccaatgtct

SEQ ID NO: 1935 - DNA, 14 bp, Artificial Sequence
  Description of Artificial Sequence: Synthetic oligonucleotide
cactgtccaatgtc

SEQ ID NO: 1936 - DNA, 14 bp, Artificial Sequence
  Description of Artificial Sequence: Synthetic oligonucleotide
acactgtccaatgt

SEQ ID NO: 1937 - DNA, 14 bp, Artificial Sequence
  Description of Artificial Sequence: Synthetic oligonucleotide
aacactgtccaatg

SEQ ID NO: 1938 - DNA, 14 bp, Artificial Sequence
  Description of Artificial Sequence: Synthetic oligonucleotide
caacactgtccaat

SEQ ID NO: 1939 - DNA, 14 bp, Artificial Sequence
  Description of Artificial Sequence: Synthetic oligonucleotide
acaacactgtccaa

SEQ ID NO: 1940 - DNA, 14 bp, Artificial Sequence
  Description of Artificial Sequence: Synthetic oligonucleotide
tacaacactgtcca

SEQ ID NO: 1941 - DNA, 14 bp, Artificial Sequence
  Description of Artificial Sequence: Synthetic oligonucleotide
ttacaacactgtcc

SEQ ID NO: 1942 - DNA, 14 bp, Artificial Sequence
  Description of Artificial Sequence: Synthetic oligonucleotide
attacaacactgtc

SEQ ID NO: 1943 - DNA, 14 bp, Artificial Sequence
  Description of Artificial Sequence: Synthetic oligonucleotide
cattacaacactgt

SEQ ID NO: 1944 - DNA, 14 bp, Artificial Sequence
  Description of Artificial Sequence: Synthetic oligonucleotide
tcattacaacactg

SEQ ID NO: 1945 - DNA, 14 bp, Artificial Sequence
  Description of Artificial Sequence: Synthetic oligonucleotide
ttcattacaacact

SEQ ID NO: 1946 - DNA, 14 bp, Artificial Sequence
  Description of Artificial Sequence: Synthetic oligonucleotide
attcattacaacac

SEQ ID NO: 1947 - DNA, 14 bp, Artificial Sequence
  Description of Artificial Sequence: Synthetic oligonucleotide
aattcattacaaca

SEQ ID NO: 1948 - DNA, 14 bp, Artificial Sequence
  Description of Artificial Sequence: Synthetic oligonucleotide
aaattcattacaac

SEQ ID NO: 1949 - DNA, 14 bp, Artificial Sequence
  Description of Artificial Sequence: Synthetic oligonucleotide
taaattcattacaa

SEQ ID NO: 1950 - DNA, 14 bp, Artificial Sequence
  Description of Artificial Sequence: Synthetic oligonucleotide
ataaattcattaca

SEQ ID NO: 1951 - DNA, 14 bp, Artificial Sequence
  Description of Artificial Sequence: Synthetic oligonucleotide
tataaattcattac

SEQ ID NO: 1952 - DNA, 14 bp, Artificial Sequence
  Description of Artificial Sequence: Synthetic oligonucleotide
ttataaattcatta

SEQ ID NO: 1953 - DNA, 14 bp, Artificial Sequence
  Description of Artificial Sequence: Synthetic oligonucleotide
attataaattcatt

SEQ ID NO: 1954 - DNA, 14 bp, Artificial Sequence
  Description of Artificial Sequence: Synthetic oligonucleotide
cattataaattcat

SEQ ID NO: 1955 - DNA, 14 bp, Artificial Sequence
  Description of Artificial Sequence: Synthetic oligonucleotide
ccattataaattca

SEQ ID NO: 1956 - DNA, 14 bp, Artificial Sequence
  Description of Artificial Sequence: Synthetic oligonucleotide
tccattataaattc

SEQ ID NO: 1957 - DNA, 14 bp, Artificial Sequence
  Description of Artificial Sequence: Synthetic oligonucleotide
ttccattataaatt

SEQ ID NO: 1958 - DNA, 14 bp, Artificial Sequence
  Description of Artificial Sequence: Synthetic oligonucleotide
cttccattataaat

SEQ ID NO: 1959 - DNA, 14 bp, Artificial Sequence
  Description of Artificial Sequence: Synthetic oligonucleotide
ccttccattataaa

SEQ ID NO: 1960 - DNA, 14 bp, Artificial Sequence
  Description of Artificial Sequence: Synthetic oligonucleotide
tccttccattataa

SEQ ID NO: 1961 - DNA, 14 bp, Artificial Sequence
  Description of Artificial Sequence: Synthetic oligonucleotide
ttccttccattata

SEQ ID NO: 1962 - DNA, 14 bp, Artificial Sequence
  Description of Artificial Sequence: Synthetic oligonucleotide
gttccttccattat

SEQ ID NO: 1963 - DNA, 14 bp, Artificial Sequence
  Description of Artificial Sequence: Synthetic oligonucleotide
agttccttccatta

SEQ ID NO: 1964 - DNA, 14 bp, Artificial Sequence
  Description of Artificial Sequence: Synthetic oligonucleotide
gagttccttccatt

SEQ ID NO: 1965 - DNA, 14 bp, Artificial Sequence
  Description of Artificial Sequence: Synthetic oligonucleotide
agagttccttccat

SEQ ID NO: 1966 - DNA, 14 bp, Artificial Sequence
  Description of Artificial Sequence: Synthetic oligonucleotide
aagagttccttcca

SEQ ID NO: 1967 - DNA, 14 bp, Artificial Sequence
  Description of Artificial Sequence: Synthetic oligonucleotide
taagagttccttcc

SEQ ID NO: 1968 - DNA, 14 bp, Artificial Sequence
  Description of Artificial Sequence: Synthetic oligonucleotide
gtaagagttccttc

SEQ ID NO: 1969 - DNA, 14 bp, Artificial Sequence
  Description of Artificial Sequence: Synthetic oligonucleotide
tgtaagagttcctt

SEQ ID NO: 1970 - DNA, 14 bp, Artificial Sequence
  Description of Artificial Sequence: Synthetic oligonucleotide
gtgtaagagttcct

SEQ ID NO: 1971 - DNA, 14 bp, Artificial Sequence
  Description of Artificial Sequence: Synthetic oligonucleotide
cgtgtaagagttcc

SEQ ID NO: 1972 - DNA, 14 bp, Artificial Sequence
  Description of Artificial Sequence: Synthetic oligonucleotide
acgtgtaagagttc

SEQ ID NO: 1973 - DNA, 14 bp, Artificial Sequence
  Description of Artificial Sequence: Synthetic oligonucleotide
cacgtgtaagagtt

SEQ ID NO: 1974 - DNA, 14 bp, Artificial Sequence
  Description of Artificial Sequence: Synthetic oligonucleotide
acacgtgtaagagt

SEQ ID NO: 1975 - DNA, 14 bp, Artificial Sequence
  Description of Artificial Sequence: Synthetic oligonucleotide
tacacgtgtaagag

SEQ ID NO: 1976 - DNA, 14 bp, Artificial Sequence
  Description of Artificial Sequence: Synthetic oligonucleotide
ctacacgtgtaaga

SEQ ID NO: 1977 - DNA, 14 bp, Artificial Sequence
  Description of Artificial Sequence: Synthetic oligonucleotide
cctacacgtgtaag

SEQ ID NO: 1978 - DNA, 14 bp, Artificial Sequence
  Description of Artificial Sequence: Synthetic oligonucleotide
tcctacacgtgtaa

SEQ ID NO: 1979 - DNA, 14 bp, Artificial Sequence
  Description of Artificial Sequence: Synthetic oligonucleotide
ctcctacacgtgta

SEQ ID NO: 1980 - DNA, 14 bp, Artificial Sequence
  Description of Artificial Sequence: Synthetic oligonucleotide
gctcctacacgtgt

SEQ ID NO: 1981 - DNA, 14 bp, Artificial Sequence
  Description of Artificial Sequence: Synthetic oligonucleotide
ggctcctacacgtg

SEQ ID NO: 1982 - DNA, 14 bp, Artificial Sequence
  Description of Artificial Sequence: Synthetic oligonucleotide
tggctcctacacgt

SEQ ID NO: 1983 - DNA, 14 bp, Artificial Sequence
  Description of Artificial Sequence: Synthetic oligonucleotide
ttggctcctacacg

SEQ ID NO: 1984 - DNA, 14 bp, Artificial Sequence
  Description of Artificial Sequence: Synthetic oligonucleotide
tttggctcctacac

SEQ ID NO: 1985 - DNA, 14 bp, Artificial Sequence
  Description of Artificial Sequence: Synthetic oligonucleotide
gtttggctcctaca

SEQ ID NO: 1986 - DNA, 14 bp, Artificial Sequence
  Description of Artificial Sequence: Synthetic oligonucleotide
tgtttggctcctac

SEQ ID NO: 1987 - DNA, 14 bp, Artificial Sequence
  Description of Artificial Sequence: Synthetic oligonucleotide
atgtttggctccta

SEQ ID NO: 1988 - DNA, 14 bp, Artificial Sequence
  Description of Artificial Sequence: Synthetic oligonucleotide
catgtttggctcct

SEQ ID NO: 1989 - DNA, 14 bp, Artificial Sequence
  Description of Artificial Sequence: Synthetic oligonucleotide
tcatgtttggctcc

SEQ ID NO: 1990 - DNA, 14 bp, Artificial Sequence
  Description of Artificial Sequence: Synthetic oligonucleotide
ctcatgtttggctc

SEQ ID NO: 1991 - DNA, 14 bp, Artificial Sequence
  Description of Artificial Sequence: Synthetic oligonucleotide
tctcatgtttggct

SEQ ID NO: 1992 - DNA, 14 bp, Artificial Sequence
  Description of Artificial Sequence: Synthetic oligonucleotide
ctctcatgtttggc

SEQ ID NO: 1993 - DNA, 14 bp, Artificial Sequence
  Description of Artificial Sequence: Synthetic oligonucleotide
tctctcatgtttgg

SEQ ID NO: 1994 - DNA, 14 bp, Artificial Sequence
  Description of Artificial Sequence: Synthetic oligonucleotide
gtctctcatgtttg

SEQ ID NO: 1995 - DNA, 14 bp, Artificial Sequence
  Description of Artificial Sequence: Synthetic oligonucleotide
tgtctctcatgttt

SEQ ID NO: 1996 - DNA, 14 bp, Artificial Sequence
  Description of Artificial Sequence: Synthetic oligonucleotide
gtgtctctcatgtt

SEQ ID NO: 1997 - DNA, 14 bp, Artificial Sequence
  Description of Artificial Sequence: Synthetic oligonucleotide
tgtgtctctcatgt

SEQ ID NO: 1998 - DNA, 14 bp, Artificial Sequence
  Description of Artificial Sequence: Synthetic oligonucleotide
atgtgtctctcatg

SEQ ID NO: 1999 - DNA, 14 bp, Artificial Sequence
  Description of Artificial Sequence: Synthetic oligonucleotide
tatgtgtctctcat

SEQ ID NO: 2000 - DNA, 14 bp, Artificial Sequence
  Description of Artificial Sequence: Synthetic oligonucleotide
atatgtgtctctca

SEQ ID NO: 2001 - DNA, 14 bp, Artificial Sequence
  Description of Artificial Sequence: Synthetic oligonucleotide
aatatgtgtctctc

SEQ ID NO: 2002 - DNA, 14 bp, Artificial Sequence
  Description of Artificial Sequence: Synthetic oligonucleotide
aaatatgtgtctct

SEQ ID NO: 2003 - DNA, 14 bp, Artificial Sequence
  Description of Artificial Sequence: Synthetic oligonucleotide
gaaatatgtgtctc

SEQ ID NO: 2004 - DNA, 14 bp, Artificial Sequence
  Description of Artificial Sequence: Synthetic oligonucleotide
agaaatatgtgtct

SEQ ID NO: 2005 - DNA, 14 bp, Artificial Sequence
  Description of Artificial Sequence: Synthetic oligonucleotide
gagaaatatgtgtc

SEQ ID NO: 2006 - DNA, 14 bp, Artificial Sequence
  Description of Artificial Sequence: Synthetic oligonucleotide
agagaaatatgtgt

SEQ ID NO: 2007 - DNA, 14 bp, Artificial Sequence
  Description of Artificial Sequence: Synthetic oligonucleotide
aagagaaatatgtg

SEQ ID NO: 2008 - DNA, 14 bp, Artificial Sequence
  Description of Artificial Sequence: Synthetic oligonucleotide
aaagagaaatatgt

SEQ ID NO: 2009 - DNA, 14 bp, Artificial Sequence
  Description of Artificial Sequence: Synthetic oligonucleotide
caaagagaaatatg

SEQ ID NO: 2010 - DNA, 14 bp, Artificial Sequence
  Description of Artificial Sequence: Synthetic oligonucleotide
tcaaagagaaatat

SEQ ID NO: 2011 - DNA, 14 bp, Artificial Sequence
  Description of Artificial Sequence: Synthetic oligonucleotide
atcaaagagaaata

SEQ ID NO: 2012 - DNA, 14 bp, Artificial Sequence
  Description of Artificial Sequence: Synthetic oligonucleotide
catcaaagagaaat

SEQ ID NO: 2013 - DNA, 14 bp, Artificial Sequence
  Description of Artificial Sequence: Synthetic oligonucleotide
ccatcaaagagaaa

SEQ ID NO: 2014 - DNA, 14 bp, Artificial Sequence
  Description of Artificial Sequence: Synthetic oligonucleotide
gccatcaaagagaa

SEQ ID NO: 2015 - DNA, 14 bp, Artificial Sequence
  Description of Artificial Sequence: Synthetic oligonucleotide
agccatcaaagaga

SEQ ID NO: 2016 - DNA, 14 bp, Artificial Sequence
  Description of Artificial Sequence: Synthetic oligonucleotide
aagccatcaaagag

SEQ ID NO: 2017 - DNA, 14 bp, Artificial Sequence
  Description of Artificial Sequence: Synthetic oligonucleotide
taagccatcaaaga

SEQ ID NO: 2018 - DNA, 14 bp, Artificial Sequence
  Description of Artificial Sequence: Synthetic oligonucleotide
ttaagccatcaaag

SEQ ID NO: 2019 - DNA, 14 bp, Artificial Sequence
  Description of Artificial Sequence: Synthetic oligonucleotide
attaagccatcaaa

SEQ ID NO: 2020 - DNA, 14 bp, Artificial Sequence
  Description of Artificial Sequence: Synthetic oligonucleotide
cattaagccatcaa

SEQ ID NO: 2021 - DNA, 14 bp, Artificial Sequence
  Description of Artificial Sequence: Synthetic oligonucleotide
tcattaagccatca

SEQ ID NO: 2022 - DNA, 14 bp, Artificial Sequence
  Description of Artificial Sequence: Synthetic oligonucleotide
atcattaagccatc

SEQ ID NO: 2023 - DNA, 14 bp, Artificial Sequence
  Description of Artificial Sequence: Synthetic oligonucleotide
aatcattaagccat

SEQ ID NO: 2024 - DNA, 14 bp, Artificial Sequence
  Description of Artificial Sequence: Synthetic oligonucleotide
aaatcattaagcca

SEQ ID NO: 2025 - DNA, 14 bp, Artificial Sequence
  Description of Artificial Sequence: Synthetic oligonucleotide
caaatcattaagcc

SEQ ID NO: 2026 - DNA, 14 bp, Artificial Sequence
  Description of Artificial Sequence: Synthetic oligonucleotide
gcaaatcattaagc

SEQ ID NO: 2027 - DNA, 14 bp, Artificial Sequence
  Description of Artificial Sequence: Synthetic oligonucleotide
agcaaatcattaag

SEQ ID NO: 2028 - DNA, 14 bp, Artificial Sequence
  Description of Artificial Sequence: Synthetic oligonucleotide
cagcaaatcattaa

SEQ ID NO: 2029 - DNA, 14 bp, Artificial Sequence
  Description of Artificial Sequence: Synthetic oligonucleotide
acagcaaatcatta

SEQ ID NO: 2030 - DNA, 14 bp, Artificial Sequence
  Description of Artificial Sequence: Synthetic oligonucleotide
tacagcaaatcatt

SEQ ID NO: 2031 - DNA, 14 bp, Artificial Sequence
  Description of Artificial Sequence: Synthetic oligonucleotide
ttacagcaaatcat

SEQ ID NO: 2032 - DNA, 14 bp, Artificial Sequence
  Description of Artificial Sequence: Synthetic oligonucleotide
tttacagcaaatca

SEQ ID NO: 2033 - DNA, 14 bp, Artificial Sequence
  Description of Artificial Sequence: Synthetic oligonucleotide
atttacagcaaatc

SEQ ID NO: 2034 - DNA, 14 bp, Artificial Sequence
  Description of Artificial Sequence: Synthetic oligonucleotide
gatttacagcaaat

SEQ ID NO: 2035 - DNA, 14 bp, Artificial Sequence
  Description of Artificial Sequence: Synthetic oligonucleotide
tgatttacagcaaa

SEQ ID NO: 2036 - DNA, 14 bp, Artificial Sequence
  Description of Artificial Sequence: Synthetic oligonucleotide
ttgatttacagcaa

SEQ ID NO: 2037 - DNA, 14 bp, Artificial Sequence
  Description of Artificial Sequence: Synthetic oligonucleotide
tttgatttacagca

SEQ ID NO: 2038 - DNA, 14 bp, Artificial Sequence
  Description of Artificial Sequence: Synthetic oligonucleotide
atttgatttacagc

SEQ ID NO: 2039 - DNA, 14 bp, Artificial Sequence
  Description of Artificial Sequence: Synthetic oligonucleotide
gatttgatttacag

SEQ ID NO: 2040 - DNA, 14 bp, Artificial Sequence
  Description of Artificial Sequence: Synthetic oligonucleotide
tgatttgatttaca

SEQ ID NO: 2041 - DNA, 14 bp, Artificial Sequence
  Description of Artificial Sequence: Synthetic oligonucleotide
atgatttgatttac

SEQ ID NO: 2042 - DNA, 14 bp, Artificial Sequence
  Description of Artificial Sequence: Synthetic oligonucleotide
catgatttgattta

SEQ ID NO: 2043 - DNA, 14 bp, Artificial Sequence
  Description of Artificial Sequence: Synthetic oligonucleotide
ccatgatttgattt

SEQ ID NO: 2044 - DNA, 14 bp, Artificial Sequence
  Description of Artificial Sequence: Synthetic oligonucleotide
cccatgatttgatt

SEQ ID NO: 2045 - DNA, 14 bp, Artificial Sequence
  Description of Artificial Sequence: Synthetic oligonucleotide
gcccatgatttgat

SEQ ID NO: 2046 - DNA, 14 bp, Artificial Sequence
  Description of Artificial Sequence: Synthetic oligonucleotide
tgcccatgatttga

SEQ ID NO: 2047 - DNA, 14 bp, Artificial Sequence
  Description of Artificial Sequence: Synthetic oligonucleotide
ctgcccatgatttg

SEQ ID NO: 2048 - DNA, 14 bp, Artificial Sequence
  Description of Artificial Sequence: Synthetic oligonucleotide
gctgcccatgattt

SEQ ID NO: 2049 - DNA, 14 bp, Artificial Sequence
  Description of Artificial Sequence: Synthetic oligonucleotide
ggctgcccatgatt

SEQ ID NO: 2050 - DNA, 14 bp, Artificial Sequence
  Description of Artificial Sequence: Synthetic oligonucleotide
tggctgcccatgat

SEQ ID NO: 2051 - DNA, 14 bp, Artificial Sequence
  Description of Artificial Sequence: Synthetic oligonucleotide
ttggctgcccatga

SEQ ID NO: 2052 - DNA, 14 bp, Artificial Sequence
  Description of Artificial Sequence: Synthetic oligonucleotide
cttggctgcccatg

SEQ ID NO: 2053 - DNA, 14 bp, Artificial Sequence
  Description of Artificial Sequence: Synthetic oligonucleotide
tcttggctgcccat

SEQ ID NO: 2054 - DNA, 14 bp, Artificial Sequence
  Description of Artificial Sequence: Synthetic oligonucleotide
gtcttggctgccca

SEQ ID NO: 2055 - DNA, 14 bp, Artificial Sequence
  Description of Artificial Sequence: Synthetic oligonucleotide
agtcttggctgccc

SEQ ID NO: 2056 - DNA, 14 bp, Artificial Sequence
  Description of Artificial Sequence: Synthetic oligonucleotide
aagtcttggctgcc

SEQ ID NO: 2057 - DNA, 14 bp, Artificial Sequence
  Description of Artificial Sequence: Synthetic oligonucleotide
gaagtcttggctgc

SEQ ID NO: 2058 - DNA, 14 bp, Artificial Sequence
  Description of Artificial Sequence: Synthetic oligonucleotide
ggaagtcttggctg

SEQ ID NO: 2059 - DNA, 14 bp, Artificial Sequence
  Description of Artificial Sequence: Synthetic oligonucleotide
aggaagtcttggct

SEQ ID NO: 2060 - DNA, 14 bp, Artificial Sequence
  Description of Artificial Sequence: Synthetic oligonucleotide
caggaagtcttggc

SEQ ID NO: 2061 - DNA, 14 bp, Artificial Sequence
  Description of Artificial Sequence: Synthetic oligonucleotide
ccaggaagtcttgg

SEQ ID NO: 2062 - DNA, 14 bp, Artificial Sequence
  Description of Artificial Sequence: Synthetic oligonucleotide
accaggaagtcttg

SEQ ID NO: 2063 - DNA, 14 bp, Artificial Sequence
  Description of Artificial Sequence: Synthetic oligonucleotide
caccaggaagtctt

SEQ ID NO: 2064 - DNA, 14 bp, Artificial Sequence
  Description of Artificial Sequence: Synthetic oligonucleotide
gcaccaggaagtct

SEQ ID NO: 2065 - DNA, 14 bp, Artificial Sequence
  Description of Artificial Sequence: Synthetic oligonucleotide
agcaccaggaagtc

SEQ ID NO: 2066 - DNA, 14 bp, Artificial Sequence
  Description of Artificial Sequence: Synthetic oligonucleotide
tagcaccaggaagt

SEQ ID NO: 2067 - DNA, 14 bp, Artificial Sequence
  Description of Artificial Sequence: Synthetic oligonucleotide
ctagcaccaggaag

SEQ ID NO: 2068 - DNA, 14 bp, Artificial Sequence
  Description of Artificial Sequence: Synthetic oligonucleotide
gctagcaccaggaa

SEQ ID NO: 2069 - DNA, 14 bp, Artificial Sequence
  Description of Artificial Sequence: Synthetic oligonucleotide
tgctagcaccagga

SEQ ID NO: 2070 - DNA, 14 bp, Artificial Sequence
  Description of Artificial Sequence: Synthetic oligonucleotide
ttgctagcaccagg

SEQ ID NO: 2071 - DNA, 14 bp, Artificial Sequence
  Description of Artificial Sequence: Synthetic oligonucleotide
attgctagcaccag

SEQ ID NO: 2072 - DNA, 14 bp, Artificial Sequence
  Description of Artificial Sequence: Synthetic oligonucleotide
cattgctagcacca

SEQ ID NO: 2073 - DNA, 14 bp, Artificial Sequence
  Description of Artificial Sequence: Synthetic oligonucleotide
gcattgctagcacc

SEQ ID NO: 2074 - DNA, 14 bp, Artificial Sequence
  Description of Artificial Sequence: Synthetic oligonucleotide
tgcattgctagcac

SEQ ID NO: 2075 - DNA, 14 bp, Artificial Sequence
  Description of Artificial Sequence: Synthetic oligonucleotide
ctgcattgctagca

SEQ ID NO: 2076 - DNA, 14 bp, Artificial Sequence
  Description of Artificial Sequence: Synthetic oligonucleotide
tctgcattgctagc

SEQ ID NO: 2077 - DNA, 14 bp, Artificial Sequence
  Description of Artificial Sequence: Synthetic oligonucleotide
ttctgcattgctag

SEQ ID NO: 2078 - DNA, 14 bp, Artificial Sequence
  Description of Artificial Sequence: Synthetic oligonucleotide
attctgcattgcta

SEQ ID NO: 2079 - DNA, 14 bp, Artificial Sequence
  Description of Artificial Sequence: Synthetic oligonucleotide
tattctgcattgct

SEQ ID NO: 2080 - DNA, 14 bp, Artificial Sequence
  Description of Artificial Sequence: Synthetic oligonucleotide
atattctgcattgc

SEQ ID NO: 2081 - DNA, 14 bp, Artificial Sequence
  Description of Artificial Sequence: Synthetic oligonucleotide
gatattctgcattg

SEQ ID NO: 2082 - DNA, 14 bp, Artificial Sequence
  Description of Artificial Sequence: Synthetic oligonucleotide
cgatattctgcatt

SEQ ID NO: 2083 - DNA, 14 bp, Artificial Sequence
  Description of Artificial Sequence: Synthetic oligonucleotide
acgatattctgcat

SEQ ID NO: 2084 - DNA, 14 bp, Artificial Sequence
  Description of Artificial Sequence: Synthetic oligonucleotide
gacgatattctgca

SEQ ID NO: 2085 - DNA, 14 bp, Artificial Sequence
  Description of Artificial Sequence: Synthetic oligonucleotide
agacgatattctgc

SEQ ID NO: 2086 - DNA, 14 bp, Artificial Sequence
  Description of Artificial Sequence: Synthetic oligonucleotide
aagacgatattctg

SEQ ID NO: 2087 - DNA, 14 bp, Artificial Sequence
  Description of Artificial Sequence: Synthetic oligonucleotide
taagacgatattct

SEQ ID NO: 2088 - DNA, 14 bp, Artificial Sequence
  Description of Artificial Sequence: Synthetic oligonucleotide
ttaagacgatattc

SEQ ID NO: 2089 - DNA, 14 bp, Artificial Sequence
  Description of Artificial Sequence: Synthetic oligonucleotide
tttaagacgatatt

SEQ ID NO: 2090 - DNA, 14 bp, Artificial Sequence
  Description of Artificial Sequence: Synthetic oligonucleotide
ctttaagacgatat

SEQ ID NO: 2091 - DNA, 14 bp, Artificial Sequence
  Description of Artificial Sequence: Synthetic oligonucleotide
tctttaagacgata

SEQ ID NO: 2092 - DNA, 14 bp, Artificial Sequence
  Description of Artificial Sequence: Synthetic oligonucleotide
ttctttaagacgat

SEQ ID NO: 2093 - DNA, 14 bp, Artificial Sequence
  Description of Artificial Sequence: Synthetic oligonucleotide
tttctttaagacga

SEQ ID NO: 2094 - DNA, 14 bp, Artificial Sequence
  Description of Artificial Sequence: Synthetic oligonucleotide
ttttctttaagacg

SEQ ID NO: 2095 - DNA, 14 bp, Artificial Sequence
  Description of Artificial Sequence: Synthetic oligonucleotide
cttttctttaagac

SEQ ID NO: 2096 - DNA, 14 bp, Artificial Sequence
  Description of Artificial Sequence: Synthetic oligonucleotide
acttttctttaaga

SEQ ID NO: 2097 - DNA, 14 bp, Artificial Sequence
  Description of Artificial Sequence: Synthetic oligonucleotide
aacttttctttaag

SEQ ID NO: 2098 - DNA, 14 bp, Artificial Sequence
  Description of Artificial Sequence: Synthetic oligonucleotide
aaacttttctttaa

SEQ ID NO: 2099 - DNA, 14 bp, Artificial Sequence
  Description of Artificial Sequence: Synthetic oligonucleotide
aaaacttttcttta

SEQ ID NO: 2100 - DNA, 14 bp, Artificial Sequence
  Description of Artificial Sequence: Synthetic oligonucleotide
aaaaacttttcttt

SEQ ID NO: 2101 - DNA, 14 bp, Artificial Sequence
  Description of Artificial Sequence: Synthetic oligonucleotide
aaaaaacttttctt

SEQ ID NO: 2102 - DNA, 14 bp, Artificial Sequence
  Description of Artificial Sequence: Synthetic oligonucleotide
taaaaaacttttct

SEQ ID NO: 2103 - DNA, 14 bp, Artificial Sequence
  Description of Artificial Sequence: Synthetic oligonucleotide
ataaaaaacttttc

SEQ ID NO: 2104 - DNA, 14 bp, Artificial Sequence
  Description of Artificial Sequence: Synthetic oligonucleotide
cataaaaaactttt

SEQ ID NO: 2105 - DNA, 14 bp, Artificial Sequence
  Description of Artificial Sequence: Synthetic oligonucleotide
gcataaaaaacttt

SEQ ID NO: 2106 - DNA, 14 bp, Artificial Sequence
  Description of Artificial Sequence: Synthetic oligonucleotide
cgcataaaaaactt

SEQ ID NO: 2107 - DNA, 14 bp, Artificial Sequence
  Description of Artificial Sequence: Synthetic oligonucleotide
tcgcataaaaaact

SEQ ID NO: 2108 - DNA, 14 bp, Artificial Sequence
  Description of Artificial Sequence: Synthetic oligonucleotide
ttcgcataaaaaac

SEQ ID NO: 2109 - DNA, 14 bp, Artificial Sequence
  Description of Artificial Sequence: Synthetic oligonucleotide
tttcgcataaaaaa

SEQ ID NO: 2110 - DNA, 14 bp, Artificial Sequence
  Description of Artificial Sequence: Synthetic oligonucleotide
ctttcgcataaaaa

SEQ ID NO: 2111 - DNA, 14 bp, Artificial Sequence
  Description of Artificial Sequence: Synthetic oligonucleotide
cctttcgcataaaa

SEQ ID NO: 2112 - DNA, 14 bp, Artificial Sequence
  Description of Artificial Sequence: Synthetic oligonucleotide
acctttcgcataaa

SEQ ID NO: 2113 - DNA, 14 bp, Artificial Sequence
  Description of Artificial Sequence: Synthetic oligonucleotide
tacctttcgcataa

SEQ ID NO: 2114 - DNA, 14 bp, Artificial Sequence
  Description of Artificial Sequence: Synthetic oligonucleotide
gtacctttcgcata

SEQ ID NO: 2115 - DNA, 14 bp, Artificial Sequence
  Description of Artificial Sequence: Synthetic oligonucleotide
tgtacctttcgcat

SEQ ID NO: 2116 - DNA, 14 bp, Artificial Sequence
  Description of Artificial Sequence: Synthetic oligonucleotide
ttgtacctttcgca

SEQ ID NO: 2117 - DNA, 14 bp, Artificial Sequence
  Description of Artificial Sequence: Synthetic oligonucleotide
tttgtacctttcgc

SEQ ID NO: 2118 - DNA, 14 bp, Artificial Sequence
  Description of Artificial Sequence: Synthetic oligonucleotide
atttgtacctttcg

SEQ ID NO: 2119 - DNA, 14 bp, Artificial Sequence
  Description of Artificial Sequence: Synthetic oligonucleotide
aatttgtacctttc

SEQ ID NO: 2120 - DNA, 14 bp, Artificial Sequence
  Description of Artificial Sequence: Synthetic oligonucleotide
taatttgtaccttt

SEQ ID NO: 2121 - DNA, 14 bp, Artificial Sequence
  Description of Artificial Sequence: Synthetic oligonucleotide
ttaatttgtacctt

SEQ ID NO: 2122 - DNA, 14 bp, Artificial Sequence
  Description of Artificial Sequence: Synthetic oligonucleotide
attaatttgtacct

SEQ ID NO: 2123 - DNA, 14 bp, Artificial Sequence
  Description of Artificial Sequence: Synthetic oligonucleotide
cattaatttgtacc

SEQ ID NO: 2124 - DNA, 14 bp, Artificial Sequence
  Description of Artificial Sequence: Synthetic oligonucleotide
tcattaatttgtac

SEQ ID NO: 2125 - DNA, 14 bp, Artificial Sequence
  Description of Artificial Sequence: Synthetic oligonucleotide
atcattaatttgta

SEQ ID NO: 2126 - DNA, 14 bp, Artificial Sequence
  Description of Artificial Sequence: Synthetic oligonucleotide
tatcattaatttgt

SEQ ID NO: 2127 - DNA, 14 bp, Artificial Sequence
  Description of Artificial Sequence: Synthetic oligonucleotide
ttatcattaatttg

SEQ ID NO: 2128 - DNA, 14 bp, Artificial Sequence
  Description of Artificial Sequence: Synthetic oligonucleotide
tttatcattaattt

SEQ ID NO: 2129 - DNA, 14 bp, Artificial Sequence
  Description of Artificial Sequence: Synthetic oligonucleotide
ctttatcattaatt

SEQ ID NO: 2130 - DNA, 14 bp, Artificial Sequence
  Description of Artificial Sequence: Synthetic oligonucleotide
tctttatcattaat

SEQ ID NO: 2131 - DNA, 14 bp, Artificial Sequence
  Description of Artificial Sequence: Synthetic oligonucleotide
atctttatcattaa

SEQ ID NO: 2132 - DNA, 14 bp, Artificial Sequence
  Description of Artificial Sequence: Synthetic oligonucleotide
catctttatcatta

SEQ ID NO: 2133 - DNA, 14 bp, Artificial Sequence
  Description of Artificial Sequence: Synthetic oligonucleotide
tcatctttatcatt

SEQ ID NO: 2134 - DNA, 14 bp, Artificial Sequence
  Description of Artificial Sequence: Synthetic oligonucleotide
gtcatctttatcat

SEQ ID NO: 2135 - DNA, 14 bp, Artificial Sequence
  Description of Artificial Sequence: Synthetic oligonucleotide
tgtcatctttatca

SEQ ID NO: 2136 - DNA, 14 bp, Artificial Sequence
  Description of Artificial Sequence: Synthetic oligonucleotide
gtgtcatctttatc

SEQ ID NO: 2137 - DNA, 14 bp, Artificial Sequence
  Description of Artificial Sequence: Synthetic oligonucleotide
ggtgtcatctttat

SEQ ID NO: 2138 - DNA, 14 bp, Artificial Sequence
  Description of Artificial Sequence: Synthetic oligonucleotide
tggtgtcatcttta

SEQ ID NO: 2139 - DNA, 14 bp, Artificial Sequence
  Description of Artificial Sequence: Synthetic oligonucleotide
ttggtgtcatcttt

SEQ ID NO: 2140 - DNA, 14 bp, Artificial Sequence
  Description of Artificial Sequence: Synthetic oligonucleotide
attggtgtcatctt

SEQ ID NO: 2141 - DNA, 14 bp, Artificial Sequence
  Description of Artificial Sequence: Synthetic oligonucleotide
cattggtgtcatct

SEQ ID NO: 2142 - DNA, 14 bp, Artificial Sequence
  Description of Artificial Sequence: Synthetic oligonucleotide
tcattggtgtcatc

SEQ ID NO: 2143 - DNA, 14 bp, Artificial Sequence
  Description of Artificial Sequence: Synthetic oligonucleotide
ttcattggtgtcat

SEQ ID NO: 2144 - DNA, 14 bp, Artificial Sequence
  Description of Artificial Sequence: Synthetic oligonucleotide
attcattggtgtca

SEQ ID NO: 2145 - DNA, 14 bp, Artificial Sequence
  Description of Artificial Sequence: Synthetic oligonucleotide
tattcattggtgtc

SEQ ID NO: 2146 - DNA, 14 bp, Artificial Sequence
  Description of Artificial Sequence: Synthetic oligonucleotide
gtattcattggtgt

SEQ ID NO: 2147 - DNA, 14 bp, Artificial Sequence
  Description of Artificial Sequence: Synthetic oligonucleotide
tgtattcattggtg

SEQ ID NO: 2148 - DNA, 14 bp, Artificial Sequence
  Description of Artificial Sequence: Synthetic oligonucleotide
ttgtattcattggt

SEQ ID NO: 2149 - DNA, 14 bp, Artificial Sequence
  Description of Artificial Sequence: Synthetic oligonucleotide
cttgtattcattgg

SEQ ID NO: 2150 - DNA, 14 bp, Artificial Sequence
  Description of Artificial Sequence: Synthetic oligonucleotide
gcttgtattcattg

SEQ ID NO: 2151 - DNA, 14 bp, Artificial Sequence
  Description of Artificial Sequence: Synthetic oligonucleotide
tgcttgtattcatt

SEQ ID NO: 2152 - DNA, 14 bp, Artificial Sequence
  Description of Artificial Sequence: Synthetic oligonucleotide
atgcttgtattcat

SEQ ID NO: 2153 - DNA, 14 bp, Artificial Sequence
  Description of Artificial Sequence: Synthetic oligonucleotide
catgcttgtattca

SEQ ID NO: 2154 - DNA, 14 bp, Artificial Sequence
  Description of Artificial Sequence: Synthetic oligonucleotide
gcatgcttgtattc

SEQ ID NO: 2155 - DNA, 14 bp, Artificial Sequence
  Description of Artificial Sequence: Synthetic oligonucleotide
agcatgcttgtatt

SEQ ID NO: 2156 - DNA, 14 bp, Artificial Sequence
  Description of Artificial Sequence: Synthetic oligonucleotide
aagcatgcttgtat

SEQ ID NO: 2157 - DNA, 14 bp, Artificial Sequence
  Description of Artificial Sequence: Synthetic oligonucleotide
aaagcatgcttgta

SEQ ID NO: 2158 - DNA, 14 bp, Artificial Sequence
  Description of Artificial Sequence: Synthetic oligonucleotide
aaaagcatgcttgt

SEQ ID NO: 2159 - DNA, 14 bp, Artificial Sequence
  Description of Artificial Sequence: Synthetic oligonucleotide
caaaagcatgcttg

SEQ ID NO: 2160 - DNA, 14 bp, Artificial Sequence
  Description of Artificial Sequence: Synthetic oligonucleotide
tcaaaagcatgctt

SEQ ID NO: 2161 - DNA, 14 bp, Artificial Sequence
  Description of Artificial Sequence: Synthetic oligonucleotide
ttcaaaagcatgct

SEQ ID NO: 2162 - DNA, 14 bp, Artificial Sequence
  Description of Artificial Sequence: Synthetic oligonucleotide
tttcaaaagcatgc

SEQ ID NO: 2163 - DNA, 14 bp, Artificial Sequence
  Description of Artificial Sequence: Synthetic oligonucleotide
atttcaaaagcatg

SEQ ID NO: 2164 - DNA, 14 bp, Artificial Sequence
  Description of Artificial Sequence: Synthetic oligonucleotide
tatttcaaaagcat

SEQ ID NO: 2165 - DNA, 14 bp, Artificial Sequence
  Description of Artificial Sequence: Synthetic oligonucleotide
ttatttcaaaagca

SEQ ID NO: 2166 - DNA, 14 bp, Artificial Sequence
  Description of Artificial Sequence: Synthetic oligonucleotide
attatttcaaaagc

SEQ ID NO: 2167 - DNA, 14 bp, Artificial Sequence
  Description of Artificial Sequence: Synthetic oligonucleotide
aattatttcaaaag

SEQ ID NO: 2168 - DNA, 14 bp, Artificial Sequence
  Description of Artificial Sequence: Synthetic oligonucleotide
aaattatttcaaaa

SEQ ID NO: 2169 - DNA, 14 bp, Artificial Sequence
  Description of Artificial Sequence: Synthetic oligonucleotide
aaaattatttcaaa

SEQ ID NO: 2170 - DNA, 14 bp, Artificial Sequence
  Description of Artificial Sequence: Synthetic oligonucleotide
taaaattatttcaa

SEQ ID NO: 2171 - DNA, 14 bp, Artificial Sequence
  Description of Artificial Sequence: Synthetic oligonucleotide
ttaaaattatttca

SEQ ID NO: 2172 - DNA, 14 bp, Artificial Sequence
  Description of Artificial Sequence: Synthetic oligonucleotide
tttaaaattatttc

SEQ ID NO: 2173 - DNA, 14 bp, Artificial Sequence
  Description of Artificial Sequence: Synthetic oligonucleotide
ttttaaaattattt

SEQ ID NO: 2174 - DNA, 14 bp, Artificial Sequence
  Description of Artificial Sequence: Synthetic oligonucleotide
cttttaaaattatt

SEQ ID NO: 2175 - DNA, 14 bp, Artificial Sequence
  Description of Artificial Sequence: Synthetic oligonucleotide
tcttttaaaattat

SEQ ID NO: 2176 - DNA, 14 bp, Artificial Sequence
  Description of Artificial Sequence: Synthetic oligonucleotide
atcttttaaaatta

SEQ ID NO: 2177 - DNA, 14 bp, Artificial Sequence
  Description of Artificial Sequence: Synthetic oligonucleotide
catcttttaaaatt

SEQ ID NO: 2178 - DNA, 14 bp, Artificial Sequence
  Description of Artificial Sequence: Synthetic oligonucleotide
tcatcttttaaaat

SEQ ID NO: 2179 - DNA, 14 bp, Artificial Sequence
  Description of Artificial Sequence: Synthetic oligonucleotide
ttcatcttttaaaa

SEQ ID NO: 2180 - DNA, 14 bp, Artificial Sequence
  Description of Artificial Sequence: Synthetic oligonucleotide
tttcatcttttaaa

SEQ ID NO: 2181 - DNA, 14 bp, Artificial Sequence
  Description of Artificial Sequence: Synthetic oligonucleotide
ttttcatcttttaa

SEQ ID NO: 2182 - DNA, 14 bp, Artificial Sequence
  Description of Artificial Sequence: Synthetic oligonucleotide
attttcatctttta

SEQ ID NO: 2183 - DNA, 14 bp, Artificial Sequence
  Description of Artificial Sequence: Synthetic oligonucleotide
tattttcatctttt

SEQ ID NO: 2184 - DNA, 14 bp, Artificial Sequence
  Description of Artificial Sequence: Synthetic oligonucleotide
ctattttcatcttt

SEQ ID NO: 2185 - DNA, 14 bp, Artificial Sequence
  Description of Artificial Sequence: Synthetic oligonucleotide
actattttcatctt

SEQ ID NO: 2186 - DNA, 14 bp, Artificial Sequence
  Description of Artificial Sequence: Synthetic oligonucleotide
cactattttcatct

SEQ ID NO: 2187 - DNA, 14 bp, Artificial Sequence
  Description of Artificial Sequence: Synthetic oligonucleotide
acactattttcatc

SEQ ID NO: 2188 - DNA, 14 bp, Artificial Sequence
  Description of Artificial Sequence: Synthetic oligonucleotide
aacactattttcat

SEQ ID NO: 2189 - DNA, 14 bp, Artificial Sequence
  Description of Artificial Sequence: Synthetic oligonucleotide
taacactattttca

SEQ ID NO: 2190 - DNA, 14 bp, Artificial Sequence
  Description of Artificial Sequence: Synthetic oligonucleotide
ataacactattttc

SEQ ID NO: 2191 - DNA, 14 bp, Artificial Sequence
  Description of Artificial Sequence: Synthetic oligonucleotide
tataacactatttt

SEQ ID NO: 2192 - DNA, 14 bp, Artificial Sequence
  Description of Artificial Sequence: Synthetic oligonucleotide
atataacactattt

SEQ ID NO: 2193 - DNA, 14 bp, Artificial Sequence
  Description of Artificial Sequence: Synthetic oligonucleotide
aatataacactatt

SEQ ID NO: 2194 - DNA, 14 bp, Artificial Sequence
  Description of Artificial Sequence: Synthetic oligonucleotide
aaatataacactat

SEQ ID NO: 2195 - DNA, 14 bp, Artificial Sequence
  Description of Artificial Sequence: Synthetic oligonucleotide
aaaatataacacta

SEQ ID NO: 2196 - DNA, 14 bp, Artificial Sequence
  Description of Artificial Sequence: Synthetic oligonucleotide
gaaaatataacact

SEQ ID NO: 2197 - DNA, 14 bp, Artificial Sequence
  Description of Artificial Sequence: Synthetic oligonucleotide
agaaaatataacac

SEQ ID NO: 2198 - DNA, 14 bp, Artificial Sequence
  Description of Artificial Sequence: Synthetic oligonucleotide
cagaaaatataaca

SEQ ID NO: 2199 - DNA, 14 bp, Artificial Sequence
  Description of Artificial Sequence: Synthetic oligonucleotide
gcagaaaatataac

SEQ ID NO: 2200 - DNA, 14 bp, Artificial Sequence
  Description of Artificial Sequence: Synthetic oligonucleotide
ggcagaaaatataa

SEQ ID NO: 2201 - DNA, 14 bp, Artificial Sequence
  Description of Artificial Sequence: Synthetic oligonucleotide
tggcagaaaatata

SEQ ID NO: 2202 - DNA, 14 bp, Artificial Sequence
  Description of Artificial Sequence: Synthetic oligonucleotide
ttggcagaaaatat

SEQ ID NO: 2203 - DNA, 14 bp, Artificial Sequence
  Description of Artificial Sequence: Synthetic oligonucleotide
cttggcagaaaata

SEQ ID NO: 2204 - DNA, 14 bp, Artificial Sequence
  Description of Artificial Sequence: Synthetic oligonucleotide
acttggcagaaaat

SEQ ID NO: 2205 - DNA, 14 bp, Artificial Sequence
  Description of Artificial Sequence: Synthetic oligonucleotide
gacttggcagaaaa

SEQ ID NO: 2206 - DNA, 14 bp, Artificial Sequence
  Description of Artificial Sequence: Synthetic oligonucleotide
tgacttggcagaaa

SEQ ID NO: 2207 - DNA, 14 bp, Artificial Sequence
  Description of Artificial Sequence: Synthetic oligonucleotide
ctgacttggcagaa

SEQ ID NO: 2208 - DNA, 14 bp, Artificial Sequence
  Description of Artificial Sequence: Synthetic oligonucleotide
gctgacttggcaga

SEQ ID NO: 2209 - DNA, 14 bp, Artificial Sequence
  Description of Artificial Sequence: Synthetic oligonucleotide
agctgacttggcag

SEQ ID NO: 2210 - DNA, 14 bp, Artificial Sequence
  Description of Artificial Sequence: Synthetic oligonucleotide
cagctgacttggca

SEQ ID NO: 2211 - DNA, 14 bp, Artificial Sequence
  Description of Artificial Sequence: Synthetic oligonucleotide
tcagctgacttggc

SEQ ID NO: 2212 - DNA, 14 bp, Artificial Sequence
  Description of Artificial Sequence: Synthetic oligonucleotide
ttcagctgacttgg

SEQ ID NO: 2213 - DNA, 14 bp, Artificial Sequence
  Description of Artificial Sequence: Synthetic oligonucleotide
cttcagctgacttg

SEQ ID NO: 2214 - DNA, 14 bp, Artificial Sequence
  Description of Artificial Sequence: Synthetic oligonucleotide
tcttcagctgactt

SEQ ID NO: 2215 - DNA, 14 bp, Artificial Sequence
  Description of Artificial Sequence: Synthetic oligonucleotide
ctcttcagctgact

SEQ ID NO: 2216 - DNA, 14 bp, Artificial Sequence
  Description of Artificial Sequence: Synthetic oligonucleotide
tctcttcagctgac

SEQ ID NO: 2217 - DNA, 14 bp, Artificial Sequence
  Description of Artificial Sequence: Synthetic oligonucleotide
ttctcttcagctga

SEQ ID NO: 2218 - DNA, 14 bp, Artificial Sequence
  Description of Artificial Sequence: Synthetic oligonucleotide
tttctcttcagctg

SEQ ID NO: 2219 - DNA, 14 bp, Artificial Sequence
  Description of Artificial Sequence: Synthetic oligonucleotide
ttttctcttcagct

SEQ ID NO: 2220 - DNA, 14 bp, Artificial Sequence
  Description of Artificial Sequence: Synthetic oligonucleotide
tttttctcttcagc

SEQ ID NO: 2221 - DNA, 14 bp, Artificial Sequence
  Description of Artificial Sequence: Synthetic oligonucleotide
gtttttctcttcag

SEQ ID NO: 2222 - DNA, 14 bp, Artificial Sequence
  Description of Artificial Sequence: Synthetic oligonucleotide
tgtttttctcttca

SEQ ID NO: 2223 - DNA, 14 bp, Artificial Sequence
  Description of Artificial Sequence: Synthetic oligonucleotide
ttgtttttctcttc

SEQ ID NO: 2224 - DNA, 14 bp, Artificial Sequence
  Description of Artificial Sequence: Synthetic oligonucleotide
attgtttttctctt

SEQ ID NO: 2225 - DNA, 14 bp, Artificial Sequence
  Description of Artificial Sequence: Synthetic oligonucleotide
aattgtttttctct

SEQ ID NO: 2226 - DNA, 14 bp, Artificial Sequence
  Description of Artificial Sequence: Synthetic oligonucleotide
caattgtttttctc

SEQ ID NO: 2227 - DNA, 14 bp, Artificial Sequence
  Description of Artificial Sequence: Synthetic oligonucleotide
ccaattgtttttct

SEQ ID NO: 2228 - DNA, 14 bp, Artificial Sequence
  Description of Artificial Sequence: Synthetic oligonucleotide
tccaattgtttttc

SEQ ID NO: 2229 - DNA, 14 bp, Artificial Sequence
  Description of Artificial Sequence: Synthetic oligonucleotide
atccaattgttttt

SEQ ID NO: 2230 - DNA, 14 bp, Artificial Sequence
  Description of Artificial Sequence: Synthetic oligonucleotide
catccaattgtttt

SEQ ID NO: 2231 - DNA, 14 bp, Artificial Sequence
  Description of Artificial Sequence: Synthetic oligonucleotide
ccatccaattgttt

SEQ ID NO: 2232 - DNA, 14 bp, Artificial Sequence
  Description of Artificial Sequence: Synthetic oligonucleotide
gccatccaattgtt

SEQ ID NO: 2233 - DNA, 14 bp, Artificial Sequence
  Description of Artificial Sequence: Synthetic oligonucleotide
tgccatccaattgt

SEQ ID NO: 2234 - DNA, 14 bp, Artificial Sequence
  Description of Artificial Sequence: Synthetic oligonucleotide
ctgccatccaattg

SEQ ID NO: 2235 - DNA, 14 bp, Artificial Sequence
  Description of Artificial Sequence: Synthetic oligonucleotide
gctgccatccaatt

SEQ ID NO: 2236 - DNA, 14 bp, Artificial Sequence
  Description of Artificial Sequence: Synthetic oligonucleotide
tgctgccatccaat

SEQ ID NO: 2237 - DNA, 14 bp, Artificial Sequence
  Description of Artificial Sequence: Synthetic oligonucleotide
atgctgccatccaa

SEQ ID NO: 2238 - DNA, 14 bp, Artificial Sequence
  Description of Artificial Sequence: Synthetic oligonucleotide
aatgctgccatcca

SEQ ID NO: 2239 - DNA, 14 bp, Artificial Sequence
  Description of Artificial Sequence: Synthetic oligonucleotide
caatgctgccatcc

SEQ ID NO: 2240 - DNA, 14 bp, Artificial Sequence
  Description of Artificial Sequence: Synthetic oligonucleotide
tcaatgctgccatc

SEQ ID NO: 2241 - DNA, 14 bp, Artificial Sequence
  Description of Artificial Sequence: Synthetic oligonucleotide
atcaatgctgccat

SEQ ID NO: 2242 - DNA, 14 bp, Artificial Sequence
  Description of Artificial Sequence: Synthetic oligonucleotide
tatcaatgctgcca

SEQ ID NO: 2243 - DNA, 14 bp, Artificial Sequence
  Description of Artificial Sequence: Synthetic oligonucleotide
atatcaatgctgcc

SEQ ID NO: 2244 - DNA, 14 bp, Artificial Sequence
  Description of Artificial Sequence: Synthetic oligonucleotide
gatatcaatgctgc

SEQ ID NO: 2245 - DNA, 14 bp, Artificial Sequence
  Description of Artificial Sequence: Synthetic oligonucleotide
agatatcaatgctg

SEQ ID NO: 2246 - DNA, 14 bp, Artificial Sequence
  Description of Artificial Sequence: Synthetic oligonucleotide
aagatatcaatgct

SEQ ID NO: 2247 - DNA, 14 bp, Artificial Sequence
  Description of Artificial Sequence: Synthetic oligonucleotide
aaagatatcaatgc

SEQ ID NO: 2248 - DNA, 14 bp, Artificial Sequence
  Description of Artificial Sequence: Synthetic oligonucleotide
taaagatatcaatg

SEQ ID NO: 2249 - DNA, 14 bp, Artificial Sequence
  Description of Artificial Sequence: Synthetic oligonucleotide
gtaaagatatcaat

SEQ ID NO: 2250 - DNA, 14 bp, Artificial Sequence
  Description of Artificial Sequence: Synthetic oligonucleotide
tgtaaagatatcaa

SEQ ID NO: 2251 - DNA, 14 bp, Artificial Sequence
  Description of Artificial Sequence: Synthetic oligonucleotide
ctgtaaagatatca

SEQ ID NO: 2252 - DNA, 14 bp, Artificial Sequence
  Description of Artificial Sequence: Synthetic oligonucleotide
actgtaaagatatc

SEQ ID NO: 2253 - DNA, 14 bp, Artificial Sequence
  Description of Artificial Sequence: Synthetic oligonucleotide
tactgtaaagatat

SEQ ID NO: 2254 - DNA, 14 bp, Artificial Sequence
  Description of Artificial Sequence: Synthetic oligonucleotide
gtactgtaaagata

SEQ ID NO: 2255 - DNA, 14 bp, Artificial Sequence
  Description of Artificial Sequence: Synthetic oligonucleotide
ggtactgtaaagat

SEQ ID NO: 2256 - DNA, 14 bp, Artificial Sequence
  Description of Artificial Sequence: Synthetic oligonucleotide
cggtactgtaaaga

SEQ ID NO: 2257 - DNA, 14 bp, Artificial Sequence
  Description of Artificial Sequence: Synthetic oligonucleotide
ccggtactgtaaag

SEQ ID NO: 2258 - DNA, 14 bp, Artificial Sequence
  Description of Artificial Sequence: Synthetic oligonucleotide
tccggtactgtaaa

SEQ ID NO: 2259 - DNA, 14 bp, Artificial Sequence
  Description of Artificial Sequence: Synthetic oligonucleotide
ctccggtactgtaa

SEQ ID NO: 2260 - DNA, 14 bp, Artificial Sequence
  Description of Artificial Sequence: Synthetic oligonucleotide
actccggtactgta

SEQ ID NO: 2261 - DNA, 14 bp, Artificial Sequence
  Description of Artificial Sequence: Synthetic oligonucleotide
tactccggtactgt

SEQ ID NO: 2262 - DNA, 14 bp, Artificial Sequence
  Description of Artificial Sequence: Synthetic oligonucleotide
gtactccggtactg

SEQ ID NO: 2263 - DNA, 14 bp, Artificial Sequence
  Description of Artificial Sequence: Synthetic oligonucleotide
tgtactccggtact

SEQ ID NO: 2264 - DNA, 14 bp, Artificial Sequence
  Description of Artificial Sequence: Synthetic oligonucleotide
gtgtactccggtac

SEQ ID NO: 2265 - DNA, 14 bp, Artificial Sequence
  Description of Artificial Sequence: Synthetic oligonucleotide
agtgtactccggta

SEQ ID NO: 2266 - DNA, 14 bp, Artificial Sequence
  Description of Artificial Sequence: Synthetic oligonucleotide
cagtgtactccggt

SEQ ID NO: 2267 - DNA, 14 bp, Artificial Sequence
  Description of Artificial Sequence: Synthetic oligonucleotide
ccagtgtactccgg

SEQ ID NO: 2268 - DNA, 14 bp, Artificial Sequence
  Description of Artificial Sequence: Synthetic oligonucleotide
tccagtgtactccg

SEQ ID NO: 2269 - DNA, 14 bp, Artificial Sequence
  Description of Artificial Sequence: Synthetic oligonucleotide
ttccagtgtactcc

SEQ ID NO: 2270 - DNA, 14 bp, Artificial Sequence
  Description of Artificial Sequence: Synthetic oligonucleotide
tttccagtgtactc

SEQ ID NO: 2271 - DNA, 14 bp, Artificial Sequence
  Description of Artificial Sequence: Synthetic oligonucleotide
ctttccagtgtact

SEQ ID NO: 2272 - DNA, 14 bp, Artificial Sequence
  Description of Artificial Sequence: Synthetic oligonucleotide
cctttccagtgtac

SEQ ID NO: 2273 - DNA, 14 bp, Artificial Sequence
  Description of Artificial Sequence: Synthetic oligonucleotide
tcctttccagtgta

SEQ ID NO: 2274 - DNA, 14 bp, Artificial Sequence
  Description of Artificial Sequence: Synthetic oligonucleotide
atcctttccagtgt

SEQ ID NO: 2275 - DNA, 14 bp, Artificial Sequence
  Description of Artificial Sequence: Synthetic oligonucleotide
catcctttccagtg

SEQ ID NO: 2276 - DNA, 14 bp, Artificial Sequence
  Description of Artificial Sequence: Synthetic oligonucleotide
gcatcctttccagt

SEQ ID NO: 2277 - DNA, 14 bp, Artificial Sequence
  Description of Artificial Sequence: Synthetic oligonucleotide
agcatcctttccag

SEQ ID NO: 2278 - DNA, 14 bp, Artificial Sequence
  Description of Artificial Sequence: Synthetic oligonucleotide
aagcatcctttcca

SEQ ID NO: 2279 - DNA, 14 bp, Artificial Sequence
  Description of Artificial Sequence: Synthetic oligonucleotide
caagcatcctttcc

SEQ ID NO: 2280 - DNA, 14 bp, Artificial Sequence
  Description of Artificial Sequence: Synthetic oligonucleotide
tcaagcatcctttc

SEQ ID NO: 2281 - DNA, 14 bp, Artificial Sequence
  Description of Artificial Sequence: Synthetic oligonucleotide
atcaagcatccttt

SEQ ID NO: 2282 - DNA, 14 bp, Artificial Sequence
  Description of Artificial Sequence: Synthetic oligonucleotide
catcaagcatcctt

SEQ ID NO: 2283 - DNA, 14 bp, Artificial Sequence
  Description of Artificial Sequence: Synthetic oligonucleotide
acatcaagcatcct

SEQ ID NO: 2284 - DNA, 14 bp, Artificial Sequence
  Description of Artificial Sequence: Synthetic oligonucleotide
tacatcaagcatcc

SEQ ID NO: 2285 - DNA, 14 bp, Artificial Sequence
  Description of Artificial Sequence: Synthetic oligonucleotide
ttacatcaagcatc

SEQ ID NO: 2286 - DNA, 14 bp, Artificial Sequence
  Description of Artificial Sequence: Synthetic oligonucleotide
gttacatcaagcat

SEQ ID NO: 2287 - DNA, 14 bp, Artificial Sequence
  Description of Artificial Sequence: Synthetic oligonucleotide
tgttacatcaagca

SEQ ID NO: 2288 - DNA, 14 bp, Artificial Sequence
  Description of Artificial Sequence: Synthetic oligonucleotide
ttgttacatcaagc

SEQ ID NO: 2289 - DNA, 14 bp, Artificial Sequence
  Description of Artificial Sequence: Synthetic oligonucleotide
attgttacatcaag

SEQ ID NO: 2290 - DNA, 14 bp, Artificial Sequence
  Description of Artificial Sequence: Synthetic oligonucleotide
cattgttacatcaa

SEQ ID NO: 2291 - DNA, 14 bp, Artificial Sequence
  Description of Artificial Sequence: Synthetic oligonucleotide
gcattgttacatca

SEQ ID NO: 2292 - DNA, 14 bp, Artificial Sequence
  Description of Artificial Sequence: Synthetic oligonucleotide
agcattgttacatc

SEQ ID NO: 2293 - DNA, 14 bp, Artificial Sequence
  Description of Artificial Sequence: Synthetic oligonucleotide
tagcattgttacat

SEQ ID NO: 2294 - DNA, 14 bp, Artificial Sequence
  Description of Artificial Sequence: Synthetic oligonucleotide
gtagcattgttaca

SEQ ID NO: 2295 - DNA, 14 bp, Artificial Sequence
  Description of Artificial Sequence: Synthetic oligonucleotide
tgtagcattgttac

SEQ ID NO: 2296 - DNA, 14 bp, Artificial Sequence
  Description of Artificial Sequence: Synthetic oligonucleotide
ctgtagcattgtta

SEQ ID NO: 2297 - DNA, 14 bp, Artificial Sequence
  Description of Artificial Sequence: Synthetic oligonucleotide
cctgtagcattgtt

SEQ ID NO: 2298 - DNA, 14 bp, Artificial Sequence
  Description of Artificial Sequence: Synthetic oligonucleotide
tcctgtagcattgt

SEQ ID NO: 2299 - DNA, 14 bp, Artificial Sequence
  Description of Artificial Sequence: Synthetic oligonucleotide
ttcctgtagcattg

SEQ ID NO: 2300 - DNA, 14 bp, Artificial Sequence
  Description of Artificial Sequence: Synthetic oligonucleotide
cttcctgtagcatt

SEQ ID NO: 2301 - DNA, 14 bp, Artificial Sequence
  Description of Artificial Sequence: Synthetic oligonucleotide
tcttcctgtagcat

SEQ ID NO: 2302 - DNA, 14 bp, Artificial Sequence
  Description of Artificial Sequence: Synthetic oligonucleotide
ctcttcctgtagca

SEQ ID NO: 2303 - DNA, 14 bp, Artificial Sequence
  Description of Artificial Sequence: Synthetic oligonucleotide
tctcttcctgtagc

SEQ ID NO: 2304 - DNA, 14 bp, Artificial Sequence
  Description of Artificial Sequence: Synthetic oligonucleotide
ttctcttcctgtag

SEQ ID NO: 2305 - DNA, 14 bp, Artificial Sequence
  Description of Artificial Sequence: Synthetic oligonucleotide
tttctcttcctgta

SEQ ID NO: 2306 - DNA, 14 bp, Artificial Sequence
  Description of Artificial Sequence: Synthetic oligonucleotide
ctttctcttcctgt

SEQ ID NO: 2307 - DNA, 14 bp, Artificial Sequence
  Description of Artificial Sequence: Synthetic oligonucleotide
tctttctcttcctg

SEQ ID NO: 2308 - DNA, 14 bp, Artificial Sequence
  Description of Artificial Sequence: Synthetic oligonucleotide
ctctttctcttcct

SEQ ID NO: 2309 - DNA, 14 bp, Artificial Sequence
  Description of Artificial Sequence: Synthetic oligonucleotide
cctctttctcttcc

SEQ ID NO: 2310 - DNA, 14 bp, Artificial Sequence
  Description of Artificial Sequence: Synthetic oligonucleotide
tcctctttctcttc

SEQ ID NO: 2311 - DNA, 14 bp, Artificial Sequence
  Description of Artificial Sequence: Synthetic oligonucleotide
ctcctctttctctt

SEQ ID NO: 2312 - DNA, 14 bp, Artificial Sequence
  Description of Artificial Sequence: Synthetic oligonucleotide
gctcctctttctct

SEQ ID NO: 2313 - DNA, 14 bp, Artificial Sequence
  Description of Artificial Sequence: Synthetic oligonucleotide
tgctcctctttctc

SEQ ID NO: 2314 - DNA, 14 bp, Artificial Sequence
  Description of Artificial Sequence: Synthetic oligonucleotide
ctgctcctctttct

SEQ ID NO: 2315 - DNA, 14 bp, Artificial Sequence
  Description of Artificial Sequence: Synthetic oligonucleotide
tctgctcctctttc

SEQ ID NO: 2316 - DNA, 14 bp, Artificial Sequence
  Description of Artificial Sequence: Synthetic oligonucleotide
atctgctcctcttt

SEQ ID NO: 2317 - DNA, 14 bp, Artificial Sequence
  Description of Artificial Sequence: Synthetic oligonucleotide
catctgctcctctt

SEQ ID NO: 2318 - DNA, 14 bp, Artificial Sequence
  Description of Artificial Sequence: Synthetic oligonucleotide
tcatctgctcctct

SEQ ID NO: 2319 - DNA, 14 bp, Artificial Sequence
  Description of Artificial Sequence: Synthetic oligonucleotide
ctcatctgctcctc

SEQ ID NO: 2320 - DNA, 14 bp, Artificial Sequence
  Description of Artificial Sequence: Synthetic oligonucleotide
cctcatctgctcct

SEQ ID NO: 2321 - DNA, 14 bp, Artificial Sequence
  Description of Artificial Sequence: Synthetic oligonucleotide
gcctcatctgctcc

SEQ ID NO: 2322 - DNA, 14 bp, Artificial Sequence
  Description of Artificial Sequence: Synthetic oligonucleotide
agcctcatctgctc

SEQ ID NO: 2323 - DNA, 14 bp, Artificial Sequence
  Description of Artificial Sequence: Synthetic oligonucleotide
cagcctcatctgct

SEQ ID NO: 2324 - DNA, 14 bp, Artificial Sequence
  Description of Artificial Sequence: Synthetic oligonucleotide
gcagcctcatctgc

SEQ ID NO: 2325 - DNA, 14 bp, Artificial Sequence
  Description of Artificial Sequence: Synthetic oligonucleotide
ggcagcctcatctg

SEQ ID NO: 2326 - DNA, 14 bp, Artificial Sequence
  Description of Artificial Sequence: Synthetic oligonucleotide
aggcagcctcatct

SEQ ID NO: 2327 - DNA, 14 bp, Artificial Sequence
  Description of Artificial Sequence: Synthetic oligonucleotide
taggcagcctcatc

SEQ ID NO: 2328 - DNA, 14 bp, Artificial Sequence
  Description of Artificial Sequence: Synthetic oligonucleotide
ctaggcagcctcat

SEQ ID NO: 2329 - DNA, 14 bp, Artificial Sequence
  Description of Artificial Sequence: Synthetic oligonucleotide
actaggcagcctca

SEQ ID NO: 2330 - DNA, 14 bp, Artificial Sequence
  Description of Artificial Sequence: Synthetic oligonucleotide
cactaggcagcctc

SEQ ID NO: 2331 - DNA, 14 bp, Artificial Sequence
  Description of Artificial Sequence: Synthetic oligonucleotide
gcactaggcagcct

SEQ ID NO: 2332 - DNA, 14 bp, Artificial Sequence
  Description of Artificial Sequence: Synthetic oligonucleotide
agcactaggcagcc

SEQ ID NO: 2333 - DNA, 14 bp, Artificial Sequence
  Description of Artificial Sequence: Synthetic oligonucleotide
cagcactaggcagc

SEQ ID NO: 2334 - DNA, 14 bp, Artificial Sequence
  Description of Artificial Sequence: Synthetic oligonucleotide
tcagcactaggcag

SEQ ID NO: 2335 - DNA, 14 bp, Artificial Sequence
  Description of Artificial Sequence: Synthetic oligonucleotide
atcagcactaggca

SEQ ID NO: 2336 - DNA, 14 bp, Artificial Sequence
  Description of Artificial Sequence: Synthetic oligonucleotide
catcagcactaggc

SEQ ID NO: 2337 - DNA, 14 bp, Artificial Sequence
  Description of Artificial Sequence: Synthetic oligonucleotide
acatcagcactagg

SEQ ID NO: 2338 - DNA, 14 bp, Artificial Sequence
  Description of Artificial Sequence: Synthetic oligonucleotide
aacatcagcactag

SEQ ID NO: 2339 - DNA, 14 bp, Artificial Sequence
  Description of Artificial Sequence: Synthetic oligonucleotide
aaacatcagcacta

SEQ ID NO: 2340 - DNA, 14 bp, Artificial Sequence
  Description of Artificial Sequence: Synthetic oligonucleotide
taaacatcagcact

SEQ ID NO: 2341 - DNA, 14 bp, Artificial Sequence
  Description of Artificial Sequence: Synthetic oligonucleotide
ataaacatcagcac

SEQ ID NO: 2342 - DNA, 14 bp, Artificial Sequence
  Description of Artificial Sequence: Synthetic oligonucleotide
tataaacatcagca

SEQ ID NO: 2343 - DNA, 14 bp, Artificial Sequence
  Description of Artificial Sequence: Synthetic oligonucleotide
ctataaacatcagc

SEQ ID NO: 2344 - DNA, 14 bp, Artificial Sequence
  Description of Artificial Sequence: Synthetic oligonucleotide
tctataaacatcag

SEQ ID NO: 2345 - DNA, 14 bp, Artificial Sequence
  Description of Artificial Sequence: Synthetic oligonucleotide
atctataaacatca

SEQ ID NO: 2346 - DNA, 14 bp, Artificial Sequence
  Description of Artificial Sequence: Synthetic oligonucleotide
aatctataaacatc

SEQ ID NO: 2347 - DNA, 14 bp, Artificial Sequence
  Description of Artificial Sequence: Synthetic oligonucleotide
aaatctataaacat

SEQ ID NO: 2348 - DNA, 14 bp, Artificial Sequence
  Description of Artificial Sequence: Synthetic oligonucleotide
caaatctataaaca

SEQ ID NO: 2349 - DNA, 14 bp, Artificial Sequence
  Description of Artificial Sequence: Synthetic oligonucleotide
gcaaatctataaac

SEQ ID NO: 2350 - DNA, 14 bp, Artificial Sequence
  Description of Artificial Sequence: Synthetic oligonucleotide
tgcaaatctataaa

SEQ ID NO: 2351 - DNA, 14 bp, Artificial Sequence
  Description of Artificial Sequence: Synthetic oligonucleotide
ctgcaaatctataa

SEQ ID NO: 2352 - DNA, 14 bp, Artificial Sequence
  Description of Artificial Sequence: Synthetic oligonucleotide
tctgcaaatctata

SEQ ID NO: 2353 - DNA, 14 bp, Artificial Sequence
  Description of Artificial Sequence: Synthetic oligonucleotide
ctctgcaaatctat

SEQ ID NO: 2354 - DNA, 14 bp, Artificial Sequence
  Description of Artificial Sequence: Synthetic oligonucleotide
gctctgcaaatcta

SEQ ID NO: 2355 - DNA, 14 bp, Artificial Sequence
  Description of Artificial Sequence: Synthetic oligonucleotide
ggctctgcaaatct

SEQ ID NO: 2356 - DNA, 14 bp, Artificial Sequence
  Description of Artificial Sequence: Synthetic oligonucleotide
aggctctgcaaatc

SEQ ID NO: 2357 - DNA, 14 bp, Artificial Sequence
  Description of Artificial Sequence: Synthetic oligonucleotide
caggctctgcaaat

SEQ ID NO: 2358 - DNA, 14 bp, Artificial Sequence
  Description of Artificial Sequence: Synthetic oligonucleotide
tcaggctctgcaaa

SEQ ID NO: 2359 - DNA, 14 bp, Artificial Sequence
  Description of Artificial Sequence: Synthetic oligonucleotide
gtcaggctctgcaa

SEQ ID NO: 2360 - DNA, 14 bp, Artificial Sequence
  Description of Artificial Sequence: Synthetic oligonucleotide
agtcaggctctgca

SEQ ID NO: 2361 - DNA, 14 bp, Artificial Sequence
  Description of Artificial Sequence: Synthetic oligonucleotide
gagtcaggctctgc

SEQ ID NO: 2362 - DNA, 14 bp, Artificial Sequence
  Description of Artificial Sequence: Synthetic oligonucleotide
agagtcaggctctg

SEQ ID NO: 2363 - DNA, 14 bp, Artificial Sequence
  Description of Artificial Sequence: Synthetic oligonucleotide
cagagtcaggctct

SEQ ID NO: 2364 - DNA, 14 bp, Artificial Sequence
  Description of Artificial Sequence: Synthetic oligonucleotide
tcagagtcaggctc

SEQ ID NO: 2365 - DNA, 14 bp, Artificial Sequence
  Description of Artificial Sequence: Synthetic oligonucleotide
ttcagagtcaggct

SEQ ID NO: 2366 - DNA, 14 bp, Artificial Sequence
  Description of Artificial Sequence: Synthetic oligonucleotide
cttcagagtcaggc

SEQ ID NO: 2367 - DNA, 14 bp, Artificial Sequence
  Description of Artificial Sequence: Synthetic oligonucleotide
tcttcagagtcagg

SEQ ID NO: 2368 - DNA, 14 bp, Artificial Sequence
  Description of Artificial Sequence: Synthetic oligonucleotide
ctcttcagagtcag

SEQ ID NO: 2369 - DNA, 14 bp, Artificial Sequence
  Description of Artificial Sequence: Synthetic oligonucleotide
tctcttcagagtca

SEQ ID NO: 2370 - DNA, 14 bp, Artificial Sequence
  Description of Artificial Sequence: Synthetic oligonucleotide
ttctcttcagagtc

SEQ ID NO: 2371 - DNA, 14 bp, Artificial Sequence
  Description of Artificial Sequence: Synthetic oligonucleotide
attctcttcagagt

SEQ ID NO: 2372 - DNA, 14 bp, Artificial Sequence
  Description of Artificial Sequence: Synthetic oligonucleotide
tattctcttcagag

SEQ ID NO: 2373 - DNA, 14 bp, Artificial Sequence
  Description of Artificial Sequence: Synthetic oligonucleotide
atattctcttcaga

SEQ ID NO: 2374 - DNA, 14 bp, Artificial Sequence
  Description of Artificial Sequence: Synthetic oligonucleotide
aatattctcttcag

SEQ ID NO: 2375 - DNA, 14 bp, Artificial Sequence
  Description of Artificial Sequence: Synthetic oligonucleotide
taatattctcttca

SEQ ID NO: 2376 - DNA, 14 bp, Artificial Sequence
  Description of Artificial Sequence: Synthetic oligonucleotide
ataatattctcttc

SEQ ID NO: 2377 - DNA, 14 bp, Artificial Sequence
  Description of Artificial Sequence: Synthetic oligonucleotide
tataatattctctt

SEQ ID NO: 2378 - DNA, 14 bp, Artificial Sequence
  Description of Artificial Sequence: Synthetic oligonucleotide
atataatattctct

SEQ ID NO: 2379 - DNA, 14 bp, Artificial Sequence
  Description of Artificial Sequence: Synthetic oligonucleotide
aatataatattctc

SEQ ID NO: 2380 - DNA, 14 bp, Artificial Sequence
  Description of Artificial Sequence: Synthetic oligonucleotide
aaatataatattct

SEQ ID NO: 2381 - DNA, 14 bp, Artificial Sequence
  Description of Artificial Sequence: Synthetic oligonucleotide
caaatataatattc

SEQ ID NO: 2382 - DNA, 14 bp, Artificial Sequence
  Description of Artificial Sequence: Synthetic oligonucleotide
tcaaatataatatt

SEQ ID NO: 2383 - DNA, 14 bp, Artificial Sequence
  Description of Artificial Sequence: Synthetic oligonucleotide
ttcaaatataatat

SEQ ID NO: 2384 - DNA, 14 bp, Artificial Sequence
  Description of Artificial Sequence: Synthetic oligonucleotide
cttcaaatataata

SEQ ID NO: 2385 - DNA, 14 bp, Artificial Sequence
  Description of Artificial Sequence: Synthetic oligonucleotide
tcttcaaatataat

SEQ ID NO: 2386 - DNA, 14 bp, Artificial Sequence
  Description of Artificial Sequence: Synthetic oligonucleotide
ctcttcaaatataa

SEQ ID NO: 2387 - DNA, 14 bp, Artificial Sequence
  Description of Artificial Sequence: Synthetic oligonucleotide
tctcttcaaatata

SEQ ID NO: 2388 - DNA, 14 bp, Artificial Sequence
  Description of Artificial Sequence: Synthetic oligonucleotide
ttctcttcaaatat

SEQ ID NO: 2389 - DNA, 14 bp, Artificial Sequence
  Description of Artificial Sequence: Synthetic oligonucleotide
gttctcttcaaata

SEQ ID NO: 2390 - DNA, 14 bp, Artificial Sequence
  Description of Artificial Sequence: Synthetic oligonucleotide
tgttctcttcaaat

SEQ ID NO: 2391 - DNA, 14 bp, Artificial Sequence
  Description of Artificial Sequence: Synthetic oligonucleotide
atgttctcttcaaa

SEQ ID NO: 2392 - DNA, 14 bp, Artificial Sequence
  Description of Artificial Sequence: Synthetic oligonucleotide
catgttctcttcaa

SEQ ID NO: 2393 - DNA, 14 bp, Artificial Sequence
  Description of Artificial Sequence: Synthetic oligonucleotide
gcatgttctcttca

SEQ ID NO: 2394 - DNA, 14 bp, Artificial Sequence
  Description of Artificial Sequence: Synthetic oligonucleotide
tgcatgttctcttc

SEQ ID NO: 2395 - DNA, 14 bp, Artificial Sequence
  Description of Artificial Sequence: Synthetic oligonucleotide
ctgcatgttctctt

SEQ ID NO: 2396 - DNA, 14 bp, Artificial Sequence
  Description of Artificial Sequence: Synthetic oligonucleotide
gctgcatgttctct

SEQ ID NO: 2397 - DNA, 14 bp, Artificial Sequence
  Description of Artificial Sequence: Synthetic oligonucleotide
ggctgcatgttctc

SEQ ID NO: 2398 - DNA, 14 bp, Artificial Sequence
  Description of Artificial Sequence: Synthetic oligonucleotide
gggctgcatgttct

SEQ ID NO: 2399 - DNA, 14 bp, Artificial Sequence
  Description of Artificial Sequence: Synthetic oligonucleotide
tgggctgcatgttc

SEQ ID NO: 2400 - DNA, 14 bp, Artificial Sequence
  Description of Artificial Sequence: Synthetic oligonucleotide
ttgggctgcatgtt

SEQ ID NO: 2401 - DNA, 14 bp, Artificial Sequence
  Description of Artificial Sequence: Synthetic oligonucleotide
cttgggctgcatgt

SEQ ID NO: 2402 - DNA, 14 bp, Artificial Sequence
  Description of Artificial Sequence: Synthetic oligonucleotide
ccttgggctgcatg

SEQ ID NO: 2403 - DNA, 14 bp, Artificial Sequence
  Description of Artificial Sequence: Synthetic oligonucleotide
gccttgggctgcat

SEQ ID NO: 2404 - DNA, 14 bp, Artificial Sequence
  Description of Artificial Sequence: Synthetic oligonucleotide
agccttgggctgca

SEQ ID NO: 2405 - DNA, 14 bp, Artificial Sequence
  Description of Artificial Sequence: Synthetic oligonucleotide
cagccttgggctgc

SEQ ID NO: 2406 - DNA, 14 bp, Artificial Sequence
  Description of Artificial Sequence: Synthetic oligonucleotide
ccagccttgggctg

SEQ ID NO: 2407 - DNA, 14 bp, Artificial Sequence
  Description of Artificial Sequence: Synthetic oligonucleotide
tccagccttgggct

SEQ ID NO: 2408 - DNA, 14 bp, Artificial Sequence
  Description of Artificial Sequence: Synthetic oligonucleotide
ttccagccttgggc

SEQ ID NO: 2409 - DNA, 14 bp, Artificial Sequence
  Description of Artificial Sequence: Synthetic oligonucleotide
attccagccttggg

SEQ ID NO: 2410 - DNA, 14 bp, Artificial Sequence
  Description of Artificial Sequence: Synthetic oligonucleotide
aattccagccttgg

SEQ ID NO: 2411 - DNA, 14 bp, Artificial Sequence
  Description of Artificial Sequence: Synthetic oligonucleotide
gaattccagccttg

SEQ ID NO: 2412 - DNA, 14 bp, Artificial Sequence
  Description of Artificial Sequence: Synthetic oligonucleotide
ggaattccagcctt

SEQ ID NO: 2413 - DNA, 14 bp, Artificial Sequence
  Description of Artificial Sequence: Synthetic oligonucleotide
tggaattccagcct

SEQ ID NO: 2414 - DNA, 14 bp, Artificial Sequence
  Description of Artificial Sequence: Synthetic oligonucleotide
ttggaattccagcc

SEQ ID NO: 2415 - DNA, 14 bp, Artificial Sequence
  Description of Artificial Sequence: Synthetic oligonucleotide
attggaattccagc

SEQ ID NO: 2416 - DNA, 14 bp, Artificial Sequence
  Description of Artificial Sequence: Synthetic oligonucleotide
aattggaattccag

SEQ ID NO: 2417 - DNA, 14 bp, Artificial Sequence
  Description of Artificial Sequence: Synthetic oligonucleotide
taattggaattcca

SEQ ID NO: 2418 - DNA, 14 bp, Artificial Sequence
  Description of Artificial Sequence: Synthetic oligonucleotide
ataattggaattcc

SEQ ID NO: 2419 - DNA, 14 bp, Artificial Sequence
  Description of Artificial Sequence: Synthetic oligonucleotide
gataattggaattc

SEQ ID NO: 2420 - DNA, 14 bp, Artificial Sequence
  Description of Artificial Sequence: Synthetic oligonucleotide
tgataattggaatt

SEQ ID NO: 2421 - DNA, 14 bp, Artificial Sequence
  Description of Artificial Sequence: Synthetic oligonucleotide
ttgataattggaat

SEQ ID NO: 2422 - DNA, 14 bp, Artificial Sequence
  Description of Artificial Sequence: Synthetic oligonucleotide
tttgataattggaa

SEQ ID NO: 2423 - DNA, 14 bp, Artificial Sequence
  Description of Artificial Sequence: Synthetic oligonucleotide
ctttgataattgga

SEQ ID NO: 2424 - DNA, 14 bp, Artificial Sequence
  Description of Artificial Sequence: Synthetic oligonucleotide
gctttgataattgg

SEQ ID NO: 2425 - DNA, 14 bp, Artificial Sequence
  Description of Artificial Sequence: Synthetic oligonucleotide
tgctttgataattg

SEQ ID NO: 2426 - DNA, 14 bp, Artificial Sequence
  Description of Artificial Sequence: Synthetic oligonucleotide
ctgctttgataatt

SEQ ID NO: 2427 - DNA, 14 bp, Artificial Sequence
  Description of Artificial Sequence: Synthetic oligonucleotide
cctgctttgataat

SEQ ID NO: 2428 - DNA, 14 bp, Artificial Sequence
  Description of Artificial Sequence: Synthetic oligonucleotide
tcctgctttgataa

SEQ ID NO: 2429 - DNA, 14 bp, Artificial Sequence
  Description of Artificial Sequence: Synthetic oligonucleotide
ttcctgctttgata

SEQ ID NO: 2430 - DNA, 14 bp, Artificial Sequence
  Description of Artificial Sequence: Synthetic oligonucleotide
gttcctgctttgat

SEQ ID NO: 2431 - DNA, 14 bp, Artificial Sequence
  Description of Artificial Sequence: Synthetic oligonucleotide
agttcctgctttga

SEQ ID NO: 2432 - DNA, 14 bp, Artificial Sequence
  Description of Artificial Sequence: Synthetic oligonucleotide
cagttcctgctttg

SEQ ID NO: 2433 - DNA, 14 bp, Artificial Sequence
  Description of Artificial Sequence: Synthetic oligonucleotide
acagttcctgcttt

SEQ ID NO: 2434 - DNA, 14 bp, Artificial Sequence
  Description of Artificial Sequence: Synthetic oligonucleotide
aacagttcctgctt

SEQ ID NO: 2435 - DNA, 14 bp, Artificial Sequence
  Description of Artificial Sequence: Synthetic oligonucleotide
taacagttcctgct

SEQ ID NO: 2436 - DNA, 14 bp, Artificial Sequence
  Description of Artificial Sequence: Synthetic oligonucleotide
ataacagttcctgc

SEQ ID NO: 2437 - DNA, 14 bp, Artificial Sequence
  Description of Artificial Sequence: Synthetic oligonucleotide
aataacagttcctg

SEQ ID NO: 2438 - DNA, 14 bp, Artificial Sequence
  Description of Artificial Sequence: Synthetic oligonucleotide
taataacagttcct

SEQ ID NO: 2439 - DNA, 14 bp, Artificial Sequence
  Description of Artificial Sequence: Synthetic oligonucleotide
ttaataacagttcc

SEQ ID NO: 2440 - DNA, 14 bp, Artificial Sequence
  Description of Artificial Sequence: Synthetic oligonucleotide
tttaataacagttc

SEQ ID NO: 2441 - DNA, 14 bp, Artificial Sequence
  Description of Artificial Sequence: Synthetic oligonucleotide
gtttaataacagtt

SEQ ID NO: 2442 - DNA, 14 bp, Artificial Sequence
  Description of Artificial Sequence: Synthetic oligonucleotide
agtttaataacagt

SEQ ID NO: 2443 - DNA, 14 bp, Artificial Sequence
  Description of Artificial Sequence: Synthetic oligonucleotide
aagtttaataacag

SEQ ID NO: 2444 - DNA, 14 bp, Artificial Sequence
  Description of Artificial Sequence: Synthetic oligonucleotide
taagtttaataaca

SEQ ID NO: 2445 - DNA, 14 bp, Artificial Sequence
  Description of Artificial Sequence: Synthetic oligonucleotide
ataagtttaataac

SEQ ID NO: 2446 - DNA, 14 bp, Artificial Sequence
  Description of Artificial Sequence: Synthetic oligonucleotide
tataagtttaataa

SEQ ID NO: 2447 - DNA, 14 bp, Artificial Sequence
  Description of Artificial Sequence: Synthetic oligonucleotide
ctataagtttaata

SEQ ID NO: 2448 - DNA, 14 bp, Artificial Sequence
  Description of Artificial Sequence: Synthetic oligonucleotide
tctataagtttaat

SEQ ID NO: 2449 - DNA, 14 bp, Artificial Sequence
  Description of Artificial Sequence: Synthetic oligonucleotide
ctctataagtttaa

SEQ ID NO: 2450 - DNA, 14 bp, Artificial Sequence
  Description of Artificial Sequence: Synthetic oligonucleotide
tctctataagttta

SEQ ID NO: 2451 - DNA, 14 bp, Artificial Sequence
  Description of Artificial Sequence: Synthetic oligonucleotide
ctctctataagttt

SEQ ID NO: 2452 - DNA, 14 bp, Artificial Sequence
  Description of Artificial Sequence: Synthetic oligonucleotide
cctctctataagtt

SEQ ID NO: 2453 - DNA, 14 bp, Artificial Sequence
  Description of Artificial Sequence: Synthetic oligonucleotide
gcctctctataagt

SEQ ID NO: 2454 - DNA, 14 bp, Artificial Sequence
  Description of Artificial Sequence: Synthetic oligonucleotide
agcctctctataag

SEQ ID NO: 2455 - DNA, 14 bp, Artificial Sequence
  Description of Artificial Sequence: Synthetic oligonucleotide
aagcctctctataa

SEQ ID NO: 2456 - DNA, 14 bp, Artificial Sequence
  Description of Artificial Sequence: Synthetic oligonucleotide
taagcctctctata

SEQ ID NO: 2457 - DNA, 14 bp, Artificial Sequence
  Description of Artificial Sequence: Synthetic oligonucleotide
gtaagcctctctat

SEQ ID NO: 2458 - DNA, 14 bp, Artificial Sequence
  Description of Artificial Sequence: Synthetic oligonucleotide
cgtaagcctctcta

SEQ ID NO: 2459 - DNA, 14 bp, Artificial Sequence
  Description of Artificial Sequence: Synthetic oligonucleotide
acgtaagcctctct

SEQ ID NO: 2460 - DNA, 14 bp, Artificial Sequence
  Description of Artificial Sequence: Synthetic oligonucleotide
tacgtaagcctctc

SEQ ID NO: 2461 - DNA, 14 bp, Artificial Sequence
  Description of Artificial Sequence: Synthetic oligonucleotide
gtacgtaagcctct

SEQ ID NO: 2462 - DNA, 14 bp, Artificial Sequence
  Description of Artificial Sequence: Synthetic oligonucleotide
ggtacgtaagcctc

SEQ ID NO: 2463 - DNA, 14 bp, Artificial Sequence
  Description of Artificial Sequence: Synthetic oligonucleotide
tggtacgtaagcct

SEQ ID NO: 2464 - DNA, 14 bp, Artificial Sequence
  Description of Artificial Sequence: Synthetic oligonucleotide
atggtacgtaagcc

SEQ ID NO: 2465 - DNA, 14 bp, Artificial Sequence
  Description of Artificial Sequence: Synthetic oligonucleotide
tatggtacgtaagc

SEQ ID NO: 2466 - DNA, 14 bp, Artificial Sequence
  Description of Artificial Sequence: Synthetic oligonucleotide
atatggtacgtaag

SEQ ID NO: 2467 - DNA, 14 bp, Artificial Sequence
  Description of Artificial Sequence: Synthetic oligonucleotide
catatggtacgtaa

SEQ ID NO: 2468 - DNA, 14 bp, Artificial Sequence
  Description of Artificial Sequence: Synthetic oligonucleotide
acatatggtacgta

SEQ ID NO: 2469 - DNA, 14 bp, Artificial Sequence
  Description of Artificial Sequence: Synthetic oligonucleotide
tacatatggtacgt

SEQ ID NO: 2470 - DNA, 14 bp, Artificial Sequence
  Description of Artificial Sequence: Synthetic oligonucleotide
gtacatatggtacg

SEQ ID NO: 2471 - DNA, 14 bp, Artificial Sequence
  Description of Artificial Sequence: Synthetic oligonucleotide
cgtacatatggtac

SEQ ID NO: 2472 - DNA, 14 bp, Artificial Sequence
  Description of Artificial Sequence: Synthetic oligonucleotide
gcgtacatatggta

SEQ ID NO: 2473 - DNA, 14 bp, Artificial Sequence
  Description of Artificial Sequence: Synthetic oligonucleotide
tgcgtacatatggt

SEQ ID NO: 2474 - DNA, 14 bp, Artificial Sequence
  Description of Artificial Sequence: Synthetic oligonucleotide
ctgcgtacatatgg

SEQ ID NO: 2475 - DNA, 14 bp, Artificial Sequence
  Description of Artificial Sequence: Synthetic oligonucleotide
tctgcgtacatatg

SEQ ID NO: 2476 - DNA, 14 bp, Artificial Sequence
  Description of Artificial Sequence: Synthetic oligonucleotide
atctgcgtacatat

SEQ ID NO: 2477 - DNA, 14 bp, Artificial Sequence
  Description of Artificial Sequence: Synthetic oligonucleotide
gatctgcgtacata

SEQ ID NO: 2478 - DNA, 14 bp, Artificial Sequence
  Description of Artificial Sequence: Synthetic oligonucleotide
ggatctgcgtacat

SEQ ID NO: 2479 - DNA, 14 bp, Artificial Sequence
  Description of Artificial Sequence: Synthetic oligonucleotide
gggatctgcgtaca

SEQ ID NO: 2480 - DNA, 14 bp, Artificial Sequence
  Description of Artificial Sequence: Synthetic oligonucleotide
tgggatctgcgtac

SEQ ID NO: 2481 - DNA, 14 bp, Artificial Sequence
  Description of Artificial Sequence: Synthetic oligonucleotide
ttgggatctgcgta

SEQ ID NO: 2482 - DNA, 14 bp, Artificial Sequence
  Description of Artificial Sequence: Synthetic oligonucleotide
attgggatctgcgt

SEQ ID NO: 2483 - DNA, 14 bp, Artificial Sequence
  Description of Artificial Sequence: Synthetic oligonucleotide
aattgggatctgcg

SEQ ID NO: 2484 - DNA, 14 bp, Artificial Sequence
  Description of Artificial Sequence: Synthetic oligonucleotide
aaattgggatctgc

SEQ ID NO: 2485 - DNA, 14 bp, Artificial Sequence
  Description of Artificial Sequence: Synthetic oligonucleotide
aaaattgggatctg

SEQ ID NO: 2486 - DNA, 14 bp, Artificial Sequence
  Description of Artificial Sequence: Synthetic oligonucleotide
caaaattgggatct

SEQ ID NO: 2487 - DNA, 14 bp, Artificial Sequence
  Description of Artificial Sequence: Synthetic oligonucleotide
acaaaattgggatc

SEQ ID NO: 2488 - DNA, 14 bp, Artificial Sequence
  Description of Artificial Sequence: Synthetic oligonucleotide
aacaaaattgggat

SEQ ID NO: 2489 - DNA, 14 bp, Artificial Sequence
  Description of Artificial Sequence: Synthetic oligonucleotide
gaacaaaattggga

SEQ ID NO: 2490 - DNA, 14 bp, Artificial Sequence
  Description of Artificial Sequence: Synthetic oligonucleotide
cgaacaaaattggg

SEQ ID NO: 2491 - DNA, 14 bp, Artificial Sequence
  Description of Artificial Sequence: Synthetic oligonucleotide
ccgaacaaaattgg

SEQ ID NO: 2492 - DNA, 14 bp, Artificial Sequence
  Description of Artificial Sequence: Synthetic oligonucleotide
tccgaacaaaattg

SEQ ID NO: 2493 - DNA, 14 bp, Artificial Sequence
  Description of Artificial Sequence: Synthetic oligonucleotide
gtccgaacaaaatt

SEQ ID NO: 2494 - DNA, 14 bp, Artificial Sequence
  Description of Artificial Sequence: Synthetic oligonucleotide
tgtccgaacaaaat

SEQ ID NO: 2495 - DNA, 14 bp, Artificial Sequence
  Description of Artificial Sequence: Synthetic oligonucleotide
atgtccgaacaaaa

SEQ ID NO: 2496 - DNA, 14 bp, Artificial Sequence
  Description of Artificial Sequence: Synthetic oligonucleotide
aatgtccgaacaaa

SEQ ID NO: 2497 - DNA, 14 bp, Artificial Sequence
  Description of Artificial Sequence: Synthetic oligonucleotide
aaatgtccgaacaa

SEQ ID NO: 2498 - DNA, 14 bp, Artificial Sequence
  Description of Artificial Sequence: Synthetic oligonucleotide
gaaatgtccgaaca

SEQ ID NO: 2499 - DNA, 14 bp, Artificial Sequence
  Description of Artificial Sequence: Synthetic oligonucleotide
agaaatgtccgaac

SEQ ID NO: 2500 - DNA, 14 bp, Artificial Sequence
  Description of Artificial Sequence: Synthetic oligonucleotide
aagaaatgtccgaa

SEQ ID NO: 2501 - DNA, 14 bp, Artificial Sequence
  Description of Artificial Sequence: Synthetic oligonucleotide
taagaaatgtccga

SEQ ID NO: 2502 - DNA, 14 bp, Artificial Sequence
  Description of Artificial Sequence: Synthetic oligonucleotide
gtaagaaatgtccg

SEQ ID NO: 2503 - DNA, 14 bp, Artificial Sequence
  Description of Artificial Sequence: Synthetic oligonucleotide
tgtaagaaatgtcc

SEQ ID NO: 2504 - DNA, 14 bp, Artificial Sequence
  Description of Artificial Sequence: Synthetic oligonucleotide
ttgtaagaaatgtc

SEQ ID NO: 2505 - DNA, 14 bp, Artificial Sequence
  Description of Artificial Sequence: Synthetic oligonucleotide
gttgtaagaaatgt

SEQ ID NO: 2506 - DNA, 14 bp, Artificial Sequence
  Description of Artificial Sequence: Synthetic oligonucleotide
tgttgtaagaaatg

SEQ ID NO: 2507 - DNA, 14 bp, Artificial Sequence
  Description of Artificial Sequence: Synthetic oligonucleotide
atgttgtaagaaat

SEQ ID NO: 2508 - DNA, 14 bp, Artificial Sequence
  Description of Artificial Sequence: Synthetic oligonucleotide
tatgttgtaagaaa

SEQ ID NO: 2509 - DNA, 14 bp, Artificial Sequence
  Description of Artificial Sequence: Synthetic oligonucleotide
gtatgttgtaagaa

SEQ ID NO: 2510 - DNA, 14 bp, Artificial Sequence
  Description of Artificial Sequence: Synthetic oligonucleotide
tgtatgttgtaaga

SEQ ID NO: 2511 - DNA, 14 bp, Artificial Sequence
  Description of Artificial Sequence: Synthetic oligonucleotide
ctgtatgttgtaag

SEQ ID NO: 2512 - DNA, 14 bp, Artificial Sequence
  Description of Artificial Sequence: Synthetic oligonucleotide
tctgtatgttgtaa

SEQ ID NO: 2513 - DNA, 14 bp, Artificial Sequence
  Description of Artificial Sequence: Synthetic oligonucleotide
atctgtatgttgta

SEQ ID NO: 2514 - DNA, 14 bp, Artificial Sequence
  Description of Artificial Sequence: Synthetic oligonucleotide
gatctgtatgttgt

SEQ ID NO: 2515 - DNA, 14 bp, Artificial Sequence
  Description of Artificial Sequence: Synthetic oligonucleotide
ggatctgtatgttg

SEQ ID NO: 2516 - DNA, 14 bp, Artificial Sequence
  Description of Artificial Sequence: Synthetic oligonucleotide
aggatctgtatgtt

SEQ ID NO: 2517 - DNA, 14 bp, Artificial Sequence
  Description of Artificial Sequence: Synthetic oligonucleotide
aaggatctgtatgt

SEQ ID NO: 2518 - DNA, 14 bp, Artificial Sequence
  Description of Artificial Sequence: Synthetic oligonucleotide
aaaggatctgtatg

SEQ ID NO: 2519 - DNA, 14 bp, Artificial Sequence
  Description of Artificial Sequence: Synthetic oligonucleotide
aaaaggatctgtat

SEQ ID NO: 2520 - DNA, 14 bp, Artificial Sequence
  Description of Artificial Sequence: Synthetic oligonucleotide
caaaaggatctgta

SEQ ID NO: 2521 - DNA, 14 bp, Artificial Sequence
  Description of Artificial Sequence: Synthetic oligonucleotide
gcaaaaggatctgt

SEQ ID NO: 2522 - DNA, 14 bp, Artificial Sequence
  Description of Artificial Sequence: Synthetic oligonucleotide
tgcaaaaggatctg

SEQ ID NO: 2523 - DNA, 14 bp, Artificial Sequence
  Description of Artificial Sequence: Synthetic oligonucleotide
ttgcaaaaggatct

SEQ ID NO: 2524 - DNA, 14 bp, Artificial Sequence
  Description of Artificial Sequence: Synthetic oligonucleotide
tttgcaaaaggatc

SEQ ID NO: 2525 - DNA, 14 bp, Artificial Sequence
  Description of Artificial Sequence: Synthetic oligonucleotide
gtttgcaaaaggat

SEQ ID NO: 2526 - DNA, 14 bp, Artificial Sequence
  Description of Artificial Sequence: Synthetic oligonucleotide
ggtttgcaaaagga

SEQ ID NO: 2527 - DNA, 14 bp, Artificial Sequence
  Description of Artificial Sequence: Synthetic oligonucleotide
aggtttgcaaaagg

SEQ ID NO: 2528 - DNA, 14 bp, Artificial Sequence
  Description of Artificial Sequence: Synthetic oligonucleotide
gaggtttgcaaaag

SEQ ID NO: 2529 - DNA, 14 bp, Artificial Sequence
  Description of Artificial Sequence: Synthetic oligonucleotide
tgaggtttgcaaaa

SEQ ID NO: 2530 - DNA, 14 bp, Artificial Sequence
  Description of Artificial Sequence: Synthetic oligonucleotide
ttgaggtttgcaaa

SEQ ID NO: 2531 - DNA, 14 bp, Artificial Sequence
  Description of Artificial Sequence: Synthetic oligonucleotide
cttgaggtttgcaa

SEQ ID NO: 2532 - DNA, 14 bp, Artificial Sequence
  Description of Artificial Sequence: Synthetic oligonucleotide
tcttgaggtttgca

SEQ ID NO: 2533 - DNA, 14 bp, Artificial Sequence
  Description of Artificial Sequence: Synthetic oligonucleotide
ttcttgaggtttgc

SEQ ID NO: 2534 - DNA, 14 bp, Artificial Sequence
  Description of Artificial Sequence: Synthetic oligonucleotide
gttcttgaggtttg

SEQ ID NO: 2535 - DNA, 14 bp, Artificial Sequence
  Description of Artificial Sequence: Synthetic oligonucleotide
agttcttgaggttt

SEQ ID NO: 2536 - DNA, 14 bp, Artificial Sequence
  Description of Artificial Sequence: Synthetic oligonucleotide
tagttcttgaggtt

SEQ ID NO: 2537 - DNA, 14 bp, Artificial Sequence
  Description of Artificial Sequence: Synthetic oligonucleotide
gtagttcttgaggt

SEQ ID NO: 2538 - DNA, 14 bp, Artificial Sequence
  Description of Artificial Sequence: Synthetic oligonucleotide
agtagttcttgagg

SEQ ID NO: 2539 - DNA, 14 bp, Artificial Sequence
  Description of Artificial Sequence: Synthetic oligonucleotide
cagtagttcttgag

SEQ ID NO: 2540 - DNA, 14 bp, Artificial Sequence
  Description of Artificial Sequence: Synthetic oligonucleotide
tcagtagttcttga

SEQ ID NO: 2541 - DNA, 14 bp, Artificial Sequence
  Description of Artificial Sequence: Synthetic oligonucleotide
ctcagtagttcttg

SEQ ID NO: 2542 - DNA, 14 bp, Artificial Sequence
  Description of Artificial Sequence: Synthetic oligonucleotide
actcagtagttctt

SEQ ID NO: 2543 - DNA, 14 bp, Artificial Sequence
  Description of Artificial Sequence: Synthetic oligonucleotide
gactcagtagttct

SEQ ID NO: 2544 - DNA, 14 bp, Artificial Sequence
  Description of Artificial Sequence: Synthetic oligonucleotide
agactcagtagttc

SEQ ID NO: 2545 - DNA, 14 bp, Artificial Sequence
  Description of Artificial Sequence: Synthetic oligonucleotide
aagactcagtagtt

SEQ ID NO: 2546 - DNA, 14 bp, Artificial Sequence
  Description of Artificial Sequence: Synthetic oligonucleotide
taagactcagtagt

SEQ ID NO: 2547 - DNA, 14 bp, Artificial Sequence
  Description of Artificial Sequence: Synthetic oligonucleotide
ataagactcagtag

SEQ ID NO: 2548 - DNA, 14 bp, Artificial Sequence
  Description of Artificial Sequence: Synthetic oligonucleotide
tataagactcagta

SEQ ID NO: 2549 - DNA, 14 bp, Artificial Sequence
  Description of Artificial Sequence: Synthetic oligonucleotide
ttataagactcagt

SEQ ID NO: 2550 - DNA, 14 bp, Artificial Sequence
  Description of Artificial Sequence: Synthetic oligonucleotide
attataagactcag

SEQ ID NO: 2551 - DNA, 14 bp, Artificial Sequence
  Description of Artificial Sequence: Synthetic oligonucleotide
tattataagactca

SEQ ID NO: 2552 - DNA, 14 bp, Artificial Sequence
  Description of Artificial Sequence: Synthetic oligonucleotide
ctattataagactc

SEQ ID NO: 2553 - DNA, 14 bp, Artificial Sequence
  Description of Artificial Sequence: Synthetic oligonucleotide
tctattataagact

SEQ ID NO: 2554 - DNA, 14 bp, Artificial Sequence
  Description of Artificial Sequence: Synthetic oligonucleotide
ttctattataagac

SEQ ID NO: 2555 - DNA, 14 bp, Artificial Sequence
  Description of Artificial Sequence: Synthetic oligonucleotide
tttctattataaga

SEQ ID NO: 2556 - DNA, 14 bp, Artificial Sequence
  Description of Artificial Sequence: Synthetic oligonucleotide
ctttctattataag

SEQ ID NO: 2557 - DNA, 14 bp, Artificial Sequence
  Description of Artificial Sequence: Synthetic oligonucleotide
cctttctattataa

SEQ ID NO: 2558 - DNA, 14 bp, Artificial Sequence
  Description of Artificial Sequence: Synthetic oligonucleotide
acctttctattata

SEQ ID NO: 2559 - DNA, 14 bp, Artificial Sequence
  Description of Artificial Sequence: Synthetic oligonucleotide
aacctttctattat

SEQ ID NO: 2560 - DNA, 14 bp, Artificial Sequence
  Description of Artificial Sequence: Synthetic oligonucleotide
aaacctttctatta

SEQ ID NO: 2561 - DNA, 14 bp, Artificial Sequence
  Description of Artificial Sequence: Synthetic oligonucleotide
caaacctttctatt

SEQ ID NO: 2562 - DNA, 14 bp, Artificial Sequence
  Description of Artificial Sequence: Synthetic oligonucleotide
tcaaacctttctat

SEQ ID NO: 2563 - DNA, 14 bp, Artificial Sequence
  Description of Artificial Sequence: Synthetic oligonucleotide
ttcaaacctttcta

SEQ ID NO: 2564 - DNA, 14 bp, Artificial Sequence
  Description of Artificial Sequence: Synthetic oligonucleotide
tttcaaacctttct

SEQ ID NO: 2565 - DNA, 14 bp, Artificial Sequence
  Description of Artificial Sequence: Synthetic oligonucleotide
atttcaaacctttc

SEQ ID NO: 2566 - DNA, 14 bp, Artificial Sequence
  Description of Artificial Sequence: Synthetic oligonucleotide
aatttcaaaccttt

SEQ ID NO: 2567 - DNA, 14 bp, Artificial Sequence
  Description of Artificial Sequence: Synthetic oligonucleotide
gaatttcaaacctt

SEQ ID NO: 2568 - DNA, 14 bp, Artificial Sequence
  Description of Artificial Sequence: Synthetic oligonucleotide
ggaatttcaaacct

SEQ ID NO: 2569 - DNA, 14 bp, Artificial Sequence
  Description of Artificial Sequence: Synthetic oligonucleotide
tggaatttcaaacc

SEQ ID NO: 2570 - DNA, 14 bp, Artificial Sequence
  Description of Artificial Sequence: Synthetic oligonucleotide
ctggaatttcaaac

SEQ ID NO: 2571 - DNA, 14 bp, Artificial Sequence
  Description of Artificial Sequence: Synthetic oligonucleotide
tctggaatttcaaa

SEQ ID NO: 2572 - DNA, 14 bp, Artificial Sequence
  Description of Artificial Sequence: Synthetic oligonucleotide
ctctggaatttcaa

SEQ ID NO: 2573 - DNA, 14 bp, Artificial Sequence
  Description of Artificial Sequence: Synthetic oligonucleotide
gctctggaatttca

SEQ ID NO: 2574 - DNA, 14 bp, Artificial Sequence
  Description of Artificial Sequence: Synthetic oligonucleotide
ggctctggaatttc

SEQ ID NO: 2575 - DNA, 14 bp, Artificial Sequence
  Description of Artificial Sequence: Synthetic oligonucleotide
aggctctggaattt

SEQ ID NO: 2576 - DNA, 14 bp, Artificial Sequence
  Description of Artificial Sequence: Synthetic oligonucleotide
caggctctggaatt

SEQ ID NO: 2577 - DNA, 14 bp, Artificial Sequence
  Description of Artificial Sequence: Synthetic oligonucleotide
tcaggctctggaat

SEQ ID NO: 2578 - DNA, 14 bp, Artificial Sequence
  Description of Artificial Sequence: Synthetic oligonucleotide
ctcaggctctggaa

SEQ ID NO: 2579 - DNA, 14 bp, Artificial Sequence
  Description of Artificial Sequence: Synthetic oligonucleotide
gctcaggctctgga

SEQ ID NO: 2580 - DNA, 14 bp, Artificial Sequence
  Description of Artificial Sequence: Synthetic oligonucleotide
ggctcaggctctgg

SEQ ID NO: 2581 - DNA, 14 bp, Artificial Sequence
  Description of Artificial Sequence: Synthetic oligonucleotide
tggctcaggctctg

SEQ ID NO: 2582 - DNA, 14 bp, Artificial Sequence
  Description of Artificial Sequence: Synthetic oligonucleotide
ttggctcaggctct

SEQ ID NO: 2583 - DNA, 14 bp, Artificial Sequence
  Description of Artificial Sequence: Synthetic oligonucleotide
gttggctcaggctc

SEQ ID NO: 2584 - DNA, 14 bp, Artificial Sequence
  Description of Artificial Sequence: Synthetic oligonucleotide
tgttggctcaggct

SEQ ID NO: 2585 - DNA, 14 bp, Artificial Sequence
  Description of Artificial Sequence: Synthetic oligonucleotide
ctgttggctcaggc

SEQ ID NO: 2586 - DNA, 14 bp, Artificial Sequence
  Description of Artificial Sequence: Synthetic oligonucleotide
tctgttggctcagg

SEQ ID NO: 2587 - DNA, 14 bp, Artificial Sequence
  Description of Artificial Sequence: Synthetic oligonucleotide
ttctgttggctcag

SEQ ID NO: 2588 - DNA, 14 bp, Artificial Sequence
  Description of Artificial Sequence: Synthetic oligonucleotide
cttctgttggctca

SEQ ID NO: 2589 - DNA, 14 bp, Artificial Sequence
  Description of Artificial Sequence: Synthetic oligonucleotide
gcttctgttggctc

SEQ ID NO: 2590 - DNA, 14 bp, Artificial Sequence
  Description of Artificial Sequence: Synthetic oligonucleotide
agcttctgttggct

SEQ ID NO: 2591 - DNA, 14 bp, Artificial Sequence
  Description of Artificial Sequence: Synthetic oligonucleotide
cagcttctgttggc

SEQ ID NO: 2592 - DNA, 14 bp, Artificial Sequence
  Description of Artificial Sequence: Synthetic oligonucleotide
tcagcttctgttgg

SEQ ID NO: 2593 - DNA, 14 bp, Artificial Sequence
  Description of Artificial Sequence: Synthetic oligonucleotide
atcagcttctgttg

SEQ ID NO: 2594 - DNA, 14 bp, Artificial Sequence
  Description of Artificial Sequence: Synthetic oligonucleotide
gatcagcttctgtt

SEQ ID NO: 2595 - DNA, 14 bp, Artificial Sequence
  Description of Artificial Sequence: Synthetic oligonucleotide
cgatcagcttctgt

SEQ ID NO: 2596 - DNA, 14 bp, Artificial Sequence
  Description of Artificial Sequence: Synthetic oligonucleotide
gcgatcagcttctg

SEQ ID NO: 2597 - DNA, 14 bp, Artificial Sequence
  Description of Artificial Sequence: Synthetic oligonucleotide
tgcgatcagcttct

SEQ ID NO: 2598 - DNA, 14 bp, Artificial Sequence
  Description of Artificial Sequence: Synthetic oligonucleotide
atgcgatcagcttc

SEQ ID NO: 2599 - DNA, 14 bp, Artificial Sequence
  Description of Artificial Sequence: Synthetic oligonucleotide
tatgcgatcagctt

SEQ ID NO: 2600 - DNA, 14 bp, Artificial Sequence
  Description of Artificial Sequence: Synthetic oligonucleotide
ctatgcgatcagct

SEQ ID NO: 2601 - DNA, 14 bp, Artificial Sequence
  Description of Artificial Sequence: Synthetic oligonucleotide
gctatgcgatcagc

SEQ ID NO: 2602 - DNA, 14 bp, Artificial Sequence
  Description of Artificial Sequence: Synthetic oligonucleotide
agctatgcgatcag

SEQ ID NO: 2603 - DNA, 14 bp, Artificial Sequence
  Description of Artificial Sequence: Synthetic oligonucleotide
tagctatgcgatca

SEQ ID NO: 2604 - DNA, 14 bp, Artificial Sequence
  Description of Artificial Sequence: Synthetic oligonucleotide
atagctatgcgatc

SEQ ID NO: 2605 - DNA, 14 bp, Artificial Sequence
  Description of Artificial Sequence: Synthetic oligonucleotide
tatagctatgcgat

SEQ ID NO: 2606 - DNA, 14 bp, Artificial Sequence
  Description of Artificial Sequence: Synthetic oligonucleotide
ctatagctatgcga

SEQ ID NO: 2607 - DNA, 14 bp, Artificial Sequence
  Description of Artificial Sequence: Synthetic oligonucleotide
tctatagctatgcg

SEQ ID NO: 2608 - DNA, 14 bp, Artificial Sequence
  Description of Artificial Sequence: Synthetic oligonucleotide
ctctatagctatgc

SEQ ID NO: 2609 - DNA, 14 bp, Artificial Sequence
  Description of Artificial Sequence: Synthetic oligonucleotide
tctctatagctatg

SEQ ID NO: 2610 - DNA, 14 bp, Artificial Sequence
  Description of Artificial Sequence: Synthetic oligonucleotide
ttctctatagctat

SEQ ID NO: 2611 - DNA, 14 bp, Artificial Sequence
  Description of Artificial Sequence: Synthetic oligonucleotide
attctctatagcta

SEQ ID NO: 2612 - DNA, 14 bp, Artificial Sequence
  Description of Artificial Sequence: Synthetic oligonucleotide
cattctctatagct

SEQ ID NO: 2613 - DNA, 14 bp, Artificial Sequence
  Description of Artificial Sequence: Synthetic oligonucleotide
ccattctctatagc

SEQ ID NO: 2614 - DNA, 14 bp, Artificial Sequence
  Description of Artificial Sequence: Synthetic oligonucleotide
tccattctctatag

SEQ ID NO: 2615 - DNA, 14 bp, Artificial Sequence
  Description of Artificial Sequence: Synthetic oligonucleotide
ctccattctctata

SEQ ID NO: 2616 - DNA, 14 bp, Artificial Sequence
  Description of Artificial Sequence: Synthetic oligonucleotide
tctccattctctat

SEQ ID NO: 2617 - DNA, 14 bp, Artificial Sequence
  Description of Artificial Sequence: Synthetic oligonucleotide
atctccattctcta

SEQ ID NO: 2618 - DNA, 14 bp, Artificial Sequence
  Description of Artificial Sequence: Synthetic oligonucleotide
gatctccattctct

SEQ ID NO: 2619 - DNA, 14 bp, Artificial Sequence
  Description of Artificial Sequence: Synthetic oligonucleotide
tgatctccattctc

SEQ ID NO: 2620 - DNA, 14 bp, Artificial Sequence
  Description of Artificial Sequence: Synthetic oligonucleotide
ttgatctccattct

SEQ ID NO: 2621 - DNA, 14 bp, Artificial Sequence
  Description of Artificial Sequence: Synthetic oligonucleotide
gttgatctccattc

SEQ ID NO: 2622 - DNA, 14 bp, Artificial Sequence
  Description of Artificial Sequence: Synthetic oligonucleotide
ggttgatctccatt

SEQ ID NO: 2623 - DNA, 14 bp, Artificial Sequence
  Description of Artificial Sequence: Synthetic oligonucleotide
gggttgatctccat

SEQ ID NO: 2624 - DNA, 14 bp, Artificial Sequence
  Description of Artificial Sequence: Synthetic oligonucleotide
agggttgatctcca

SEQ ID NO: 2625 - DNA, 14 bp, Artificial Sequence
  Description of Artificial Sequence: Synthetic oligonucleotide
aagggttgatctcc

SEQ ID NO: 2626 - DNA, 14 bp, Artificial Sequence
  Description of Artificial Sequence: Synthetic oligonucleotide
caagggttgatctc

SEQ ID NO: 2627 - DNA, 14 bp, Artificial Sequence
  Description of Artificial Sequence: Synthetic oligonucleotide
tcaagggttgatct

SEQ ID NO: 2628 - DNA, 14 bp, Artificial Sequence
  Description of Artificial Sequence: Synthetic oligonucleotide
ctcaagggttgatc

SEQ ID NO: 2629 - DNA, 14 bp, Artificial Sequence
  Description of Artificial Sequence: Synthetic oligonucleotide
actcaagggttgat

SEQ ID NO: 2630 - DNA, 14 bp, Artificial Sequence
  Description of Artificial Sequence: Synthetic oligonucleotide
cactcaagggttga

SEQ ID NO: 2631 - DNA, 14 bp, Artificial Sequence
  Description of Artificial Sequence: Synthetic oligonucleotide
gcactcaagggttg

SEQ ID NO: 2632 - DNA, 14 bp, Artificial Sequence
  Description of Artificial Sequence: Synthetic oligonucleotide
tgcactcaagggtt

SEQ ID NO: 2633 - DNA, 14 bp, Artificial Sequence
  Description of Artificial Sequence: Synthetic oligonucleotide
ctgcactcaagggt

SEQ ID NO: 2634 - DNA, 14 bp, Artificial Sequence
  Description of Artificial Sequence: Synthetic oligonucleotide
tctgcactcaaggg

SEQ ID NO: 2635 - DNA, 14 bp, Artificial Sequence
  Description of Artificial Sequence: Synthetic oligonucleotide
ttctgcactcaagg

SEQ ID NO: 2636 - DNA, 14 bp, Artificial Sequence
  Description of Artificial Sequence: Synthetic oligonucleotide
gttctgcactcaag

SEQ ID NO: 2637 - DNA, 14 bp, Artificial Sequence
  Description of Artificial Sequence: Synthetic oligonucleotide
agttctgcactcaa

SEQ ID NO: 2638 - DNA, 14 bp, Artificial Sequence
  Description of Artificial Sequence: Synthetic oligonucleotide
cagttctgcactca

SEQ ID NO: 2639 - DNA, 14 bp, Artificial Sequence
  Description of Artificial Sequence: Synthetic oligonucleotide
tcagttctgcactc

SEQ ID NO: 2640 - DNA, 14 bp, Artificial Sequence
  Description of Artificial Sequence: Synthetic oligonucleotide
ttcagttctgcact

SEQ ID NO: 2641 - DNA, 14 bp, Artificial Sequence
  Description of Artificial Sequence: Synthetic oligonucleotide
tttcagttctgcac

SEQ ID NO: 2642 - DNA, 14 bp, Artificial Sequence
  Description of Artificial Sequence: Synthetic oligonucleotide
ttttcagttctgca

SEQ ID NO: 2643 - DNA, 14 bp, Artificial Sequence
  Description of Artificial Sequence: Synthetic oligonucleotide
cttttcagttctgc

SEQ ID NO: 2644 - DNA, 14 bp, Artificial Sequence
  Description of Artificial Sequence: Synthetic oligonucleotide
tcttttcagttctg

SEQ ID NO: 2645 - DNA, 14 bp, Artificial Sequence
  Description of Artificial Sequence: Synthetic oligonucleotide
atcttttcagttct

SEQ ID NO: 2646 - DNA, 14 bp, Artificial Sequence
  Description of Artificial Sequence: Synthetic oligonucleotide
aatcttttcagttc

SEQ ID NO: 2647 - DNA, 14 bp, Artificial Sequence
  Description of Artificial Sequence: Synthetic oligonucleotide
aaatcttttcagtt

SEQ ID NO: 2648 - DNA, 14 bp, Artificial Sequence
  Description of Artificial Sequence: Synthetic oligonucleotide
taaatcttttcagt

SEQ ID NO: 2649 - DNA, 14 bp, Artificial Sequence
  Description of Artificial Sequence: Synthetic oligonucleotide
ctaaatcttttcag

SEQ ID NO: 2650 - DNA, 14 bp, Artificial Sequence
  Description of Artificial Sequence: Synthetic oligonucleotide
tctaaatcttttca

SEQ ID NO: 2651 - DNA, 14 bp, Artificial Sequence
  Description of Artificial Sequence: Synthetic oligonucleotide
ttctaaatcttttc

SEQ ID NO: 2652 - DNA, 14 bp, Artificial Sequence
  Description of Artificial Sequence: Synthetic oligonucleotide
tttctaaatctttt

SEQ ID NO: 2653 - DNA, 14 bp, Artificial Sequence
  Description of Artificial Sequence: Synthetic oligonucleotide
ttttctaaatcttt

SEQ ID NO: 2654 - DNA, 14 bp, Artificial Sequence
  Description of Artificial Sequence: Synthetic oligonucleotide
cttttctaaatctt

SEQ ID NO: 2655 - DNA, 14 bp, Artificial Sequence
  Description of Artificial Sequence: Synthetic oligonucleotide
tcttttctaaatct

SEQ ID NO: 2656 - DNA, 14 bp, Artificial Sequence
  Description of Artificial Sequence: Synthetic oligonucleotide
ttcttttctaaatc

SEQ ID NO: 2657 - DNA, 14 bp, Artificial Sequence
  Description of Artificial Sequence: Synthetic oligonucleotide
attcttttctaaat

SEQ ID NO: 2658 - DNA, 14 bp, Artificial Sequence
  Description of Artificial Sequence: Synthetic oligonucleotide
tattcttttctaaa

SEQ ID NO: 2659 - DNA, 14 bp, Artificial Sequence
  Description of Artificial Sequence: Synthetic oligonucleotide
atattcttttctaa

SEQ ID NO: 2660 - DNA, 14 bp, Artificial Sequence
  Description of Artificial Sequence: Synthetic oligonucleotide
tatattcttttcta

SEQ ID NO: 2661 - DNA, 14 bp, Artificial Sequence
  Description of Artificial Sequence: Synthetic oligonucleotide
atatattcttttct

SEQ ID NO: 2662 - DNA, 14 bp, Artificial Sequence
  Description of Artificial Sequence: Synthetic oligonucleotide
tatatattcttttc

SEQ ID NO: 2663 - DNA, 14 bp, Artificial Sequence
  Description of Artificial Sequence: Synthetic oligonucleotide
gtatatattctttt

SEQ ID NO: 2664 - DNA, 14 bp, Artificial Sequence
  Description of Artificial Sequence: Synthetic oligonucleotide
tgtatatattcttt

SEQ ID NO: 2665 - DNA, 14 bp, Artificial Sequence
  Description of Artificial Sequence: Synthetic oligonucleotide
ctgtatatattctt

SEQ ID NO: 2666 - DNA, 14 bp, Artificial Sequence
  Description of Artificial Sequence: Synthetic oligonucleotide
gctgtatatattct

SEQ ID NO: 2667 - DNA, 14 bp, Artificial Sequence
  Description of Artificial Sequence: Synthetic oligonucleotide
ggctgtatatattc

SEQ ID NO: 2668 - DNA, 14 bp, Artificial Sequence
  Description of Artificial Sequence: Synthetic oligonucleotide
aggctgtatatatt

SEQ ID NO: 2669 - DNA, 14 bp, Artificial Sequence
  Description of Artificial Sequence: Synthetic oligonucleotide
caggctgtatatat

SEQ ID NO: 2670 - DNA, 14 bp, Artificial Sequence
  Description of Artificial Sequence: Synthetic oligonucleotide
acaggctgtatata

SEQ ID NO: 2671 - DNA, 14 bp, Artificial Sequence
  Description of Artificial Sequence: Synthetic oligonucleotide
cacaggctgtatat

SEQ ID NO: 2672 - DNA, 14 bp, Artificial Sequence
  Description of Artificial Sequence: Synthetic oligonucleotide
gcacaggctgtata

SEQ ID NO: 2673 - DNA, 14 bp, Artificial Sequence
  Description of Artificial Sequence: Synthetic oligonucleotide
tgcacaggctgtat

SEQ ID NO: 2674 - DNA, 14 bp, Artificial Sequence
  Description of Artificial Sequence: Synthetic oligonucleotide
ttgcacaggctgta

SEQ ID NO: 2675 - DNA, 14 bp, Artificial Sequence
  Description of Artificial Sequence: Synthetic oligonucleotide
gttgcacaggctgt

SEQ ID NO: 2676 - DNA, 14 bp, Artificial Sequence
  Description of Artificial Sequence: Synthetic oligonucleotide
agttgcacaggctg

SEQ ID NO: 2677 - DNA, 14 bp, Artificial Sequence
  Description of Artificial Sequence: Synthetic oligonucleotide
cagttgcacaggct

SEQ ID NO: 2678 - DNA, 14 bp, Artificial Sequence
  Description of Artificial Sequence: Synthetic oligonucleotide
gcagttgcacaggc

SEQ ID NO: 2679 - DNA, 14 bp, Artificial Sequence
  Description of Artificial Sequence: Synthetic oligonucleotide
cgcagttgcacagg

SEQ ID NO: 2680 - DNA, 14 bp, Artificial Sequence
  Description of Artificial Sequence: Synthetic oligonucleotide
tcgcagttgcacag

SEQ ID NO: 2681 - DNA, 14 bp, Artificial Sequence
  Description of Artificial Sequence: Synthetic oligonucleotide
ctcgcagttgcaca

SEQ ID NO: 2682 - DNA, 14 bp, Artificial Sequence
  Description of Artificial Sequence: Synthetic oligonucleotide
actcgcagttgcac

SEQ ID NO: 2683 - DNA, 14 bp, Artificial Sequence
  Description of Artificial Sequence: Synthetic oligonucleotide
tactcgcagttgca

SEQ ID NO: 2684 - DNA, 14 bp, Artificial Sequence
  Description of Artificial Sequence: Synthetic oligonucleotide
atactcgcagttgc

SEQ ID NO: 2685 - DNA, 14 bp, Artificial Sequence
  Description of Artificial Sequence: Synthetic oligonucleotide
aatactcgcagttg

SEQ ID NO: 2686 - DNA, 14 bp, Artificial Sequence
  Description of Artificial Sequence: Synthetic oligonucleotide
taatactcgcagtt

SEQ ID NO: 2687 - DNA, 14 bp, Artificial Sequence
  Description of Artificial Sequence: Synthetic oligonucleotide
ttaatactcgcagt

SEQ ID NO: 2688 - DNA, 14 bp, Artificial Sequence
  Description of Artificial Sequence: Synthetic oligonucleotide
tttaatactcgcag

SEQ ID NO: 2689 - DNA, 14 bp, Artificial Sequence
  Description of Artificial Sequence: Synthetic oligonucleotide
atttaatactcgca

SEQ ID NO: 2690 - DNA, 14 bp, Artificial Sequence
  Description of Artificial Sequence: Synthetic oligonucleotide
catttaatactcgc

SEQ ID NO: 2691 - DNA, 14 bp, Artificial Sequence
  Description of Artificial Sequence: Synthetic oligonucleotide
acatttaatactcg

SEQ ID NO: 2692 - DNA, 14 bp, Artificial Sequence
  Description of Artificial Sequence: Synthetic oligonucleotide
tacatttaatactc

SEQ ID NO: 2693 - DNA, 14 bp, Artificial Sequence
  Description of Artificial Sequence: Synthetic oligonucleotide
atacatttaatact

SEQ ID NO: 2694 - DNA, 14 bp, Artificial Sequence
  Description of Artificial Sequence: Synthetic oligonucleotide
catacatttaatac

SEQ ID NO: 2695 - DNA, 14 bp, Artificial Sequence
  Description of Artificial Sequence: Synthetic oligonucleotide
acatacatttaata

SEQ ID NO: 2696 - DNA, 14 bp, Artificial Sequence
  Description of Artificial Sequence: Synthetic oligonucleotide
gacatacatttaat

SEQ ID NO: 2697 - DNA, 14 bp, Artificial Sequence
  Description of Artificial Sequence: Synthetic oligonucleotide
cgacatacatttaa

SEQ ID NO: 2698 - DNA, 14 bp, Artificial Sequence
  Description of Artificial Sequence: Synthetic oligonucleotide
ccgacatacattta

SEQ ID NO: 2699 - DNA, 14 bp, Artificial Sequence
  Description of Artificial Sequence: Synthetic oligonucleotide
gccgacatacattt

SEQ ID NO: 2700 - DNA, 14 bp, Artificial Sequence
  Description of Artificial Sequence: Synthetic oligonucleotide
tgccgacatacatt

SEQ ID NO: 2701 - DNA, 14 bp, Artificial Sequence
  Description of Artificial Sequence: Synthetic oligonucleotide
gtgccgacatacat

SEQ ID NO: 2702 - DNA, 14 bp, Artificial Sequence
  Description of Artificial Sequence: Synthetic oligonucleotide
agtgccgacataca

SEQ ID NO: 2703 - DNA, 14 bp, Artificial Sequence
  Description of Artificial Sequence: Synthetic oligonucleotide
cagtgccgacatac

SEQ ID NO: 2704 - DNA, 14 bp, Artificial Sequence
  Description of Artificial Sequence: Synthetic oligonucleotide
ccagtgccgacata

SEQ ID NO: 2705 - DNA, 14 bp, Artificial Sequence
  Description of Artificial Sequence: Synthetic oligonucleotide
cccagtgccgacat

SEQ ID NO: 2706 - DNA, 14 bp, Artificial Sequence
  Description of Artificial Sequence: Synthetic oligonucleotide
acccagtgccgaca

SEQ ID NO: 2707 - DNA, 14 bp, Artificial Sequence
  Description of Artificial Sequence: Synthetic oligonucleotide
tacccagtgccgac

SEQ ID NO: 2708 - DNA, 14 bp, Artificial Sequence
  Description of Artificial Sequence: Synthetic oligonucleotide
ctacccagtgccga

SEQ ID NO: 2709 - DNA, 14 bp, Artificial Sequence
  Description of Artificial Sequence: Synthetic oligonucleotide
tctacccagtgccg

SEQ ID NO: 2710 - DNA, 14 bp, Artificial Sequence
  Description of Artificial Sequence: Synthetic oligonucleotide
ctctacccagtgcc

SEQ ID NO: 2711 - DNA, 14 bp, Artificial Sequence
  Description of Artificial Sequence: Synthetic oligonucleotide
gctctacccagtgc

SEQ ID NO: 2712 - DNA, 14 bp, Artificial Sequence
  Description of Artificial Sequence: Synthetic oligonucleotide
tgctctacccagtg

SEQ ID NO: 2713 - DNA, 14 bp, Artificial Sequence
  Description of Artificial Sequence: Synthetic oligonucleotide
gtgctctacccagt

SEQ ID NO: 2714 - DNA, 14 bp, Artificial Sequence
  Description of Artificial Sequence: Synthetic oligonucleotide
ggtgctctacccag

SEQ ID NO: 2715 - DNA, 14 bp, Artificial Sequence
  Description of Artificial Sequence: Synthetic oligonucleotide
tggtgctctaccca

SEQ ID NO: 2716 - DNA, 14 bp, Artificial Sequence
  Description of Artificial Sequence: Synthetic oligonucleotide
gtggtgctctaccc

SEQ ID NO: 2717 - DNA, 14 bp, Artificial Sequence
  Description of Artificial Sequence: Synthetic oligonucleotide
agtggtgctctacc

SEQ ID NO: 2718 - DNA, 14 bp, Artificial Sequence
  Description of Artificial Sequence: Synthetic oligonucleotide
aagtggtgctctac

SEQ ID NO: 2719 - DNA, 14 bp, Artificial Sequence
  Description of Artificial Sequence: Synthetic oligonucleotide
gaagtggtgctcta

SEQ ID NO: 2720 - DNA, 14 bp, Artificial Sequence
  Description of Artificial Sequence: Synthetic oligonucleotide
agaagtggtgctct

SEQ ID NO: 2721 - DNA, 14 bp, Artificial Sequence
  Description of Artificial Sequence: Synthetic oligonucleotide
tagaagtggtgctc

SEQ ID NO: 2722 - DNA, 14 bp, Artificial Sequence
  Description of Artificial Sequence: Synthetic oligonucleotide
atagaagtggtgct

SEQ ID NO: 2723 - DNA, 14 bp, Artificial Sequence
  Description of Artificial Sequence: Synthetic oligonucleotide
catagaagtggtgc

SEQ ID NO: 2724 - DNA, 14 bp, Artificial Sequence
  Description of Artificial Sequence: Synthetic oligonucleotide
tcatagaagtggtg

SEQ ID NO: 2725 - DNA, 14 bp, Artificial Sequence
  Description of Artificial Sequence: Synthetic oligonucleotide
atcatagaagtggt

SEQ ID NO: 2726 - DNA, 14 bp, Artificial Sequence
  Description of Artificial Sequence: Synthetic oligonucleotide
aatcatagaagtgg

SEQ ID NO: 2727 - DNA, 14 bp, Artificial Sequence
  Description of Artificial Sequence: Synthetic oligonucleotide
aaatcatagaagtg

SEQ ID NO: 2728 - DNA, 14 bp, Artificial Sequence
  Description of Artificial Sequence: Synthetic oligonucleotide
aaaatcatagaagt

SEQ ID NO: 2729 - DNA, 14 bp, Artificial Sequence
  Description of Artificial Sequence: Synthetic oligonucleotide
caaaatcatagaag

SEQ ID NO: 2730 - DNA, 14 bp, Artificial Sequence
  Description of Artificial Sequence: Synthetic oligonucleotide
tcaaaatcatagaa

SEQ ID NO: 2731 - DNA, 14 bp, Artificial Sequence
  Description of Artificial Sequence: Synthetic oligonucleotide
ttcaaaatcataga

SEQ ID NO: 2732 - DNA, 14 bp, Artificial Sequence
  Description of Artificial Sequence: Synthetic oligonucleotide
tttcaaaatcatag

SEQ ID NO: 2733 - DNA, 14 bp, Artificial Sequence
  Description of Artificial Sequence: Synthetic oligonucleotide
ctttcaaaatcata

SEQ ID NO: 2734 - DNA, 14 bp, Artificial Sequence
  Description of Artificial Sequence: Synthetic oligonucleotide
tctttcaaaatcat

SEQ ID NO: 2735 - DNA, 14 bp, Artificial Sequence
  Description of Artificial Sequence: Synthetic oligonucleotide
ctctttcaaaatca

SEQ ID NO: 2736 - DNA, 14 bp, Artificial Sequence
  Description of Artificial Sequence: Synthetic oligonucleotide
tctctttcaaaatc

SEQ ID NO: 2737 - DNA, 14 bp, Artificial Sequence
  Description of Artificial Sequence: Synthetic oligonucleotide
atctctttcaaaat

SEQ ID NO: 2738 - DNA, 14 bp, Artificial Sequence
  Description of Artificial Sequence: Synthetic oligonucleotide
catctctttcaaaa

SEQ ID NO: 2739 - DNA, 14 bp, Artificial Sequence
  Description of Artificial Sequence: Synthetic oligonucleotide
gcatctctttcaaa

SEQ ID NO: 2740 - DNA, 14 bp, Artificial Sequence
  Description of Artificial Sequence: Synthetic oligonucleotide
tgcatctctttcaa

SEQ ID NO: 2741 - DNA, 14 bp, Artificial Sequence
  Description of Artificial Sequence: Synthetic oligonucleotide
atgcatctctttca

SEQ ID NO: 2742 - DNA, 14 bp, Artificial Sequence
  Description of Artificial Sequence: Synthetic oligonucleotide
tatgcatctctttc

SEQ ID NO: 2743 - DNA, 14 bp, Artificial Sequence
  Description of Artificial Sequence: Synthetic oligonucleotide
atatgcatctcttt

SEQ ID NO: 2744 - DNA, 14 bp, Artificial Sequence
  Description of Artificial Sequence: Synthetic oligonucleotide
gatatgcatctctt

SEQ ID NO: 2745 - DNA, 14 bp, Artificial Sequence
  Description of Artificial Sequence: Synthetic oligonucleotide
agatatgcatctct

SEQ ID NO: 2746 - DNA, 14 bp, Artificial Sequence
  Description of Artificial Sequence: Synthetic oligonucleotide
aagatatgcatctc

SEQ ID NO: 2747 - DNA, 14 bp, Artificial Sequence
  Description of Artificial Sequence: Synthetic oligonucleotide
aaagatatgcatct

SEQ ID NO: 2748 - DNA, 14 bp, Artificial Sequence
  Description of Artificial Sequence: Synthetic oligonucleotide
aaaagatatgcatc

SEQ ID NO: 2749 - DNA, 14 bp, Artificial Sequence
  Description of Artificial Sequence: Synthetic oligonucleotide
caaaagatatgcat

SEQ ID NO: 2750 - DNA, 14 bp, Artificial Sequence
  Description of Artificial Sequence: Synthetic oligonucleotide
gcaaaagatatgca

SEQ ID NO: 2751 - DNA, 14 bp, Artificial Sequence
  Description of Artificial Sequence: Synthetic oligonucleotide
tgcaaaagatatgc

SEQ ID NO: 2752 - DNA, 14 bp, Artificial Sequence
  Description of Artificial Sequence: Synthetic oligonucleotide
ttgcaaaagatatg

SEQ ID NO: 2753 - DNA, 14 bp, Artificial Sequence
  Description of Artificial Sequence: Synthetic oligonucleotide
gttgcaaaagatat

SEQ ID NO: 2754 - DNA, 14 bp, Artificial Sequence
  Description of Artificial Sequence: Synthetic oligonucleotide
cgttgcaaaagata

SEQ ID NO: 2755 - DNA, 14 bp, Artificial Sequence
  Description of Artificial Sequence: Synthetic oligonucleotide
tcgttgcaaaagat

SEQ ID NO: 2756 - DNA, 14 bp, Artificial Sequence
  Description of Artificial Sequence: Synthetic oligonucleotide
ttcgttgcaaaaga

SEQ ID NO: 2757 - DNA, 14 bp, Artificial Sequence
  Description of Artificial Sequence: Synthetic oligonucleotide
attcgttgcaaaag

SEQ ID NO: 2758 - DNA, 14 bp, Artificial Sequence
  Description of Artificial Sequence: Synthetic oligonucleotide
cattcgttgcaaaa

SEQ ID NO: 2759 - DNA, 14 bp, Artificial Sequence
  Description of Artificial Sequence: Synthetic oligonucleotide
ccattcgttgcaaa

SEQ ID NO: 2760 - DNA, 14 bp, Artificial Sequence
  Description of Artificial Sequence: Synthetic oligonucleotide
tccattcgttgcaa

SEQ ID NO: 2761 - DNA, 14 bp, Artificial Sequence
  Description of Artificial Sequence: Synthetic oligonucleotide
ttccattcgttgca

SEQ ID NO: 2762 - DNA, 14 bp, Artificial Sequence
  Description of Artificial Sequence: Synthetic oligonucleotide
cttccattcgttgc

SEQ ID NO: 2763 - DNA, 14 bp, Artificial Sequence
  Description of Artificial Sequence: Synthetic oligonucleotide
tcttccattcgttg

SEQ ID NO: 2764 - DNA, 14 bp, Artificial Sequence
  Description of Artificial Sequence: Synthetic oligonucleotide
ttcttccattcgtt

SEQ ID NO: 2765 - DNA, 14 bp, Artificial Sequence
  Description of Artificial Sequence: Synthetic oligonucleotide
attcttccattcgt

SEQ ID NO: 2766 - DNA, 14 bp, Artificial Sequence
  Description of Artificial Sequence: Synthetic oligonucleotide
aattcttccattcg

SEQ ID NO: 2767 - DNA, 14 bp, Artificial Sequence
  Description of Artificial Sequence: Synthetic oligonucleotide
aaattcttccattc

SEQ ID NO: 2768 - DNA, 14 bp, Artificial Sequence
  Description of Artificial Sequence: Synthetic oligonucleotide
taaattcttccatt

SEQ ID NO: 2769 - DNA, 14 bp, Artificial Sequence
  Description of Artificial Sequence: Synthetic oligonucleotide
ataaattcttccat

SEQ ID NO: 2770 - DNA, 14 bp, Artificial Sequence
  Description of Artificial Sequence: Synthetic oligonucleotide
aataaattcttcca

SEQ ID NO: 2771 - DNA, 14 bp, Artificial Sequence
  Description of Artificial Sequence: Synthetic oligonucleotide
caataaattcttcc

SEQ ID NO: 2772 - DNA, 14 bp, Artificial Sequence
  Description of Artificial Sequence: Synthetic oligonucleotide
ccaataaattcttc

SEQ ID NO: 2773 - DNA, 14 bp, Artificial Sequence
  Description of Artificial Sequence: Synthetic oligonucleotide
tccaataaattctt

SEQ ID NO: 2774 - DNA, 14 bp, Artificial Sequence
  Description of Artificial Sequence: Synthetic oligonucleotide
ttccaataaattct

SEQ ID NO: 2775 - DNA, 14 bp, Artificial Sequence
  Description of Artificial Sequence: Synthetic oligonucleotide
gttccaataaattc

SEQ ID NO: 2776 - DNA, 14 bp, Artificial Sequence
  Description of Artificial Sequence: Synthetic oligonucleotide
tgttccaataaatt

SEQ ID NO: 2777 - DNA, 14 bp, Artificial Sequence
  Description of Artificial Sequence: Synthetic oligonucleotide
ctgttccaataaat

SEQ ID NO: 2778 - DNA, 14 bp, Artificial Sequence
  Description of Artificial Sequence: Synthetic oligonucleotide
actgttccaataaa

SEQ ID NO: 2779 - DNA, 14 bp, Artificial Sequence
  Description of Artificial Sequence: Synthetic oligonucleotide
tactgttccaataa

SEQ ID NO: 2780 - DNA, 14 bp, Artificial Sequence
  Description of Artificial Sequence: Synthetic oligonucleotide
ttactgttccaata

SEQ ID NO: 2781 - DNA, 14 bp, Artificial Sequence
  Description of Artificial Sequence: Synthetic oligonucleotide
cttactgttccaat

SEQ ID NO: 2782 - DNA, 14 bp, Artificial Sequence
  Description of Artificial Sequence: Synthetic oligonucleotide
tcttactgttccaa

SEQ ID NO: 2783 - DNA, 14 bp, Artificial Sequence
  Description of Artificial Sequence: Synthetic oligonucleotide
ctcttactgttcca

SEQ ID NO: 2784 - DNA, 14 bp, Artificial Sequence
  Description of Artificial Sequence: Synthetic oligonucleotide
cctcttactgttcc

SEQ ID NO: 2785 - DNA, 14 bp, Artificial Sequence
  Description of Artificial Sequence: Synthetic oligonucleotide
acctcttactgttc

SEQ ID NO: 2786 - DNA, 14 bp, Artificial Sequence
  Description of Artificial Sequence: Synthetic oligonucleotide
tacctcttactgtt

SEQ ID NO: 2787 - DNA, 14 bp, Artificial Sequence
  Description of Artificial Sequence: Synthetic oligonucleotide
ttacctcttactgt

SEQ ID NO: 2788 - DNA, 14 bp, Artificial Sequence
  Description of Artificial Sequence: Synthetic oligonucleotide
tttacctcttactg

SEQ ID NO: 2789 - DNA, 14 bp, Artificial Sequence
  Description of Artificial Sequence: Synthetic oligonucleotide
ctttacctcttact

SEQ ID NO: 2790 - DNA, 14 bp, Artificial Sequence
  Description of Artificial Sequence: Synthetic oligonucleotide
gctttacctcttac

SEQ ID NO: 2791 - DNA, 14 bp, Artificial Sequence
  Description of Artificial Sequence: Synthetic oligonucleotide
tgctttacctctta

SEQ ID NO: 2792 - DNA, 14 bp, Artificial Sequence
  Description of Artificial Sequence: Synthetic oligonucleotide
ttgctttacctctt

SEQ ID NO: 2793 - DNA, 14 bp, Artificial Sequence
  Description of Artificial Sequence: Synthetic oligonucleotide
attgctttacctct

SEQ ID NO: 2794 - DNA, 14 bp, Artificial Sequence
  Description of Artificial Sequence: Synthetic oligonucleotide
cattgctttacctc

SEQ ID NO: 2795 - DNA, 14 bp, Artificial Sequence
  Description of Artificial Sequence: Synthetic oligonucleotide
tcattgctttacct

SEQ ID NO: 2796 - DNA, 14 bp, Artificial Sequence
  Description of Artificial Sequence: Synthetic oligonucleotide
ttcattgctttacc

SEQ ID NO: 2797 - DNA, 14 bp, Artificial Sequence
  Description of Artificial Sequence: Synthetic oligonucleotide
tttcattgctttac

SEQ ID NO: 2798 - DNA, 14 bp, Artificial Sequence
  Description of Artificial Sequence: Synthetic oligonucleotide
ttttcattgcttta

SEQ ID NO: 2799 - DNA, 14 bp, Artificial Sequence
  Description of Artificial Sequence: Synthetic oligonucleotide
tttttcattgcttt

SEQ ID NO: 2800 - DNA, 14 bp, Artificial Sequence
  Description of Artificial Sequence: Synthetic oligonucleotide
ttttttcattgctt

SEQ ID NO: 2801 - DNA, 14 bp, Artificial Sequence
  Description of Artificial Sequence: Synthetic oligonucleotide
attttttcattgct

SEQ ID NO: 2802 - DNA, 14 bp, Artificial Sequence
  Description of Artificial Sequence: Synthetic oligonucleotide
cattttttcattgc

SEQ ID NO: 2803 - DNA, 14 bp, Artificial Sequence
  Description of Artificial Sequence: Synthetic oligonucleotide
ccattttttcattg

SEQ ID NO: 2804 - DNA, 14 bp, Artificial Sequence
  Description of Artificial Sequence: Synthetic oligonucleotide
cccattttttcatt

SEQ ID NO: 2805 - DNA, 14 bp, Artificial Sequence
  Description of Artificial Sequence: Synthetic oligonucleotide
acccattttttcat

SEQ ID NO: 2806 - DNA, 14 bp, Artificial Sequence
  Description of Artificial Sequence: Synthetic oligonucleotide
aacccattttttca

SEQ ID NO: 2807 - DNA, 14 bp, Artificial Sequence
  Description of Artificial Sequence: Synthetic oligonucleotide
caacccattttttc

SEQ ID NO: 2808 - DNA, 14 bp, Artificial Sequence
  Description of Artificial Sequence: Synthetic oligonucleotide
tcaacccatttttt

SEQ ID NO: 2809 - DNA, 14 bp, Artificial Sequence
  Description of Artificial Sequence: Synthetic oligonucleotide
ttcaacccattttt

SEQ ID NO: 2810 - DNA, 14 bp, Artificial Sequence
  Description of Artificial Sequence: Synthetic oligonucleotide
attcaacccatttt

SEQ ID NO: 2811 - DNA, 14 bp, Artificial Sequence
  Description of Artificial Sequence: Synthetic oligonucleotide
gattcaacccattt

SEQ ID NO: 2812 - DNA, 14 bp, Artificial Sequence
  Description of Artificial Sequence: Synthetic oligonucleotide
ggattcaacccatt

SEQ ID NO: 2813 - DNA, 14 bp, Artificial Sequence
  Description of Artificial Sequence: Synthetic oligonucleotide
tggattcaacccat

SEQ ID NO: 2814 - DNA, 14 bp, Artificial Sequence
  Description of Artificial Sequence: Synthetic oligonucleotide
atggattcaaccca

SEQ ID NO: 2815 - DNA, 14 bp, Artificial Sequence
  Description of Artificial Sequence: Synthetic oligonucleotide
gatggattcaaccc

SEQ ID NO: 2816 - DNA, 14 bp, Artificial Sequence
  Description of Artificial Sequence: Synthetic oligonucleotide
tgatggattcaacc

SEQ ID NO: 2817 - DNA, 14 bp, Artificial Sequence
  Description of Artificial Sequence: Synthetic oligonucleotide
gtgatggattcaac

SEQ ID NO: 2818 - DNA, 14 bp, Artificial Sequence
  Description of Artificial Sequence: Synthetic oligonucleotide
agtgatggattcaa

SEQ ID NO: 2819 - DNA, 14 bp, Artificial Sequence
  Description of Artificial Sequence: Synthetic oligonucleotide
tagtgatggattca

SEQ ID NO: 2820 - DNA, 14 bp, Artificial Sequence
  Description of Artificial Sequence: Synthetic oligonucleotide
ttagtgatggattc

SEQ ID NO: 2821 - DNA, 14 bp, Artificial Sequence
  Description of Artificial Sequence: Synthetic oligonucleotide
tttagtgatggatt

SEQ ID NO: 2822 - DNA, 14 bp, Artificial Sequence
  Description of Artificial Sequence: Synthetic oligonucleotide
ttttagtgatggat

SEQ ID NO: 2823 - DNA, 14 bp, Artificial Sequence
  Description of Artificial Sequence: Synthetic oligonucleotide
attttagtgatgga

SEQ ID NO: 2824 - DNA, 14 bp, Artificial Sequence
  Description of Artificial Sequence: Synthetic oligonucleotide
tattttagtgatgg

SEQ ID NO: 2825 - DNA, 14 bp, Artificial Sequence
  Description of Artificial Sequence: Synthetic oligonucleotide
ttattttagtgatg

SEQ ID NO: 2826 - DNA, 14 bp, Artificial Sequence
  Description of Artificial Sequence: Synthetic oligonucleotide
attattttagtgat

SEQ ID NO: 2827 - DNA, 14 bp, Artificial Sequence
  Description of Artificial Sequence: Synthetic oligonucleotide
gattattttagtga

SEQ ID NO: 2828 - DNA, 14 bp, Artificial Sequence
  Description of Artificial Sequence: Synthetic oligonucleotide
ggattattttagtg

SEQ ID NO: 2829 - DNA, 14 bp, Artificial Sequence
  Description of Artificial Sequence: Synthetic oligonucleotide
tggattattttagt

SEQ ID NO: 2830 - DNA, 14 bp, Artificial Sequence
  Description of Artificial Sequence: Synthetic oligonucleotide
ttggattattttag

SEQ ID NO: 2831 - DNA, 14 bp, Artificial Sequence
  Description of Artificial Sequence: Synthetic oligonucleotide
tttggattatttta

SEQ ID NO: 2832 - DNA, 14 bp, Artificial Sequence
  Description of Artificial Sequence: Synthetic oligonucleotide
ctttggattatttt

SEQ ID NO: 2833 - DNA, 14 bp, Artificial Sequence
  Description of Artificial Sequence: Synthetic oligonucleotide
cctttggattattt

SEQ ID NO: 2834 - DNA, 14 bp, Artificial Sequence
  Description of Artificial Sequence: Synthetic oligonucleotide
tcctttggattatt

SEQ ID NO: 2835 - DNA, 14 bp, Artificial Sequence
  Description of Artificial Sequence: Synthetic oligonucleotide
ttcctttggattat

SEQ ID NO: 2836 - DNA, 14 bp, Artificial Sequence
  Description of Artificial Sequence: Synthetic oligonucleotide
tttcctttggatta

SEQ ID NO: 2837 - DNA, 14 bp, Artificial Sequence
  Description of Artificial Sequence: Synthetic oligonucleotide
ttttcctttggatt

SEQ ID NO: 2838 - DNA, 14 bp, Artificial Sequence
  Description of Artificial Sequence: Synthetic oligonucleotide
tttttcctttggat

SEQ ID NO: 2839 - DNA, 14 bp, Artificial Sequence
  Description of Artificial Sequence: Synthetic oligonucleotide
ttttttcctttgga

SEQ ID NO: 2840 - DNA, 14 bp, Artificial Sequence
  Description of Artificial Sequence: Synthetic oligonucleotide
tttttttcctttgg

SEQ ID NO: 2841 - DNA, 14 bp, Artificial Sequence
  Description of Artificial Sequence: Synthetic oligonucleotide
atttttttcctttg

SEQ ID NO: 2842 - DNA, 14 bp, Artificial Sequence
  Description of Artificial Sequence: Synthetic oligonucleotide
aatttttttccttt

SEQ ID NO: 2843 - DNA, 14 bp, Artificial Sequence
  Description of Artificial Sequence: Synthetic oligonucleotide
caatttttttcctt

SEQ ID NO: 2844 - DNA, 14 bp, Artificial Sequence
  Description of Artificial Sequence: Synthetic oligonucleotide
gcaatttttttcct

SEQ ID NO: 2845 - DNA, 14 bp, Artificial Sequence
  Description of Artificial Sequence: Synthetic oligonucleotide
tgcaatttttttcc

SEQ ID NO: 2846 - DNA, 14 bp, Artificial Sequence
  Description of Artificial Sequence: Synthetic oligonucleotide
ttgcaatttttttc

SEQ ID NO: 2847 - DNA, 14 bp, Artificial Sequence
  Description of Artificial Sequence: Synthetic oligonucleotide
cttgcaattttttt

SEQ ID NO: 2848 - DNA, 14 bp, Artificial Sequence
  Description of Artificial Sequence: Synthetic oligonucleotide
tcttgcaatttttt

SEQ ID NO: 2849 - DNA, 14 bp, Artificial Sequence
  Description of Artificial Sequence: Synthetic oligonucleotide
ctcttgcaattttt

SEQ ID NO: 2850 - DNA, 14 bp, Artificial Sequence
  Description of Artificial Sequence: Synthetic oligonucleotide
tctcttgcaatttt

SEQ ID NO: 2851 - DNA, 14 bp, Artificial Sequence
  Description of Artificial Sequence: Synthetic oligonucleotide
gtctcttgcaattt

SEQ ID NO: 2852 - DNA, 14 bp, Artificial Sequence
  Description of Artificial Sequence: Synthetic oligonucleotide
tgtctcttgcaatt

SEQ ID NO: 2853 - DNA, 14 bp, Artificial Sequence
  Description of Artificial Sequence: Synthetic oligonucleotide
ttgtctcttgcaat

SEQ ID NO: 2854 - DNA, 14 bp, Artificial Sequence
  Description of Artificial Sequence: Synthetic oligonucleotide
attgtctcttgcaa

SEQ ID NO: 2855 - DNA, 14 bp, Artificial Sequence
  Description of Artificial Sequence: Synthetic oligonucleotide
cattgtctcttgca

SEQ ID NO: 2856 - DNA, 14 bp, Artificial Sequence
  Description of Artificial Sequence: Synthetic oligonucleotide
ccattgtctcttgc

SEQ ID NO: 2857 - DNA, 14 bp, Artificial Sequence
  Description of Artificial Sequence: Synthetic oligonucleotide
tccattgtctcttg

SEQ ID NO: 2858 - DNA, 14 bp, Artificial Sequence
  Description of Artificial Sequence: Synthetic oligonucleotide
gtccattgtctctt

SEQ ID NO: 2859 - DNA, 14 bp, Artificial Sequence
  Description of Artificial Sequence: Synthetic oligonucleotide
ggtccattgtctct

SEQ ID NO: 2860 - DNA, 14 bp, Artificial Sequence
  Description of Artificial Sequence: Synthetic oligonucleotide
tggtccattgtctc

SEQ ID NO: 2861 - DNA, 14 bp, Artificial Sequence
  Description of Artificial Sequence: Synthetic oligonucleotide
ctggtccattgtct

SEQ ID NO: 2862 - DNA, 14 bp, Artificial Sequence
  Description of Artificial Sequence: Synthetic oligonucleotide
cctggtccattgtc

SEQ ID NO: 2863 - DNA, 14 bp, Artificial Sequence
  Description of Artificial Sequence: Synthetic oligonucleotide
acctggtccattgt

SEQ ID NO: 2864 - DNA, 14 bp, Artificial Sequence
  Description of Artificial Sequence: Synthetic oligonucleotide
gacctggtccattg

SEQ ID NO: 2865 - DNA, 14 bp, Artificial Sequence
  Description of Artificial Sequence: Synthetic oligonucleotide
tgacctggtccatt

SEQ ID NO: 2866 - DNA, 14 bp, Artificial Sequence
  Description of Artificial Sequence: Synthetic oligonucleotide
atgacctggtccat

SEQ ID NO: 2867 - DNA, 14 bp, Artificial Sequence
  Description of Artificial Sequence: Synthetic oligonucleotide
tatgacctggtcca

SEQ ID NO: 2868 - DNA, 14 bp, Artificial Sequence
  Description of Artificial Sequence: Synthetic oligonucleotide
ttatgacctggtcc

SEQ ID NO: 2869 - DNA, 14 bp, Artificial Sequence
  Description of Artificial Sequence: Synthetic oligonucleotide
attatgacctggtc

SEQ ID NO: 2870 - DNA, 14 bp, Artificial Sequence
  Description of Artificial Sequence: Synthetic oligonucleotide
tattatgacctggt

SEQ ID NO: 2871 - DNA, 14 bp, Artificial Sequence
  Description of Artificial Sequence: Synthetic oligonucleotide
atattatgacctgg

SEQ ID NO: 2872 - DNA, 14 bp, Artificial Sequence
  Description of Artificial Sequence: Synthetic oligonucleotide
aatattatgacctg

SEQ ID NO: 2873 - DNA, 14 bp, Artificial Sequence
  Description of Artificial Sequence: Synthetic oligonucleotide
taatattatgacct

SEQ ID NO: 2874 - DNA, 14 bp, Artificial Sequence
  Description of Artificial Sequence: Synthetic oligonucleotide
gtaatattatgacc

SEQ ID NO: 2875 - DNA, 14 bp, Artificial Sequence
  Description of Artificial Sequence: Synthetic oligonucleotide
tgtaatattatgac

SEQ ID NO: 2876 - DNA, 14 bp, Artificial Sequence
  Description of Artificial Sequence: Synthetic oligonucleotide
atgtaatattatga

SEQ ID NO: 2877 - DNA, 14 bp, Artificial Sequence
  Description of Artificial Sequence: Synthetic oligonucleotide
aatgtaatattatg

SEQ ID NO: 2878 - DNA, 14 bp, Artificial Sequence
  Description of Artificial Sequence: Synthetic oligonucleotide
aaatgtaatattat

SEQ ID NO: 2879 - DNA, 14 bp, Artificial Sequence
  Description of Artificial Sequence: Synthetic oligonucleotide
gaaatgtaatatta

SEQ ID NO: 2880 - DNA, 14 bp, Artificial Sequence
  Description of Artificial Sequence: Synthetic oligonucleotide
tgaaatgtaatatt

SEQ ID NO: 2881 - DNA, 14 bp, Artificial Sequence
  Description of Artificial Sequence: Synthetic oligonucleotide
ctgaaatgtaatat

SEQ ID NO: 2882 - DNA, 14 bp, Artificial Sequence
  Description of Artificial Sequence: Synthetic oligonucleotide
tctgaaatgtaata

SEQ ID NO: 2883 - DNA, 14 bp, Artificial Sequence
  Description of Artificial Sequence: Synthetic oligonucleotide
ctctgaaatgtaat

SEQ ID NO: 2884 - DNA, 14 bp, Artificial Sequence
  Description of Artificial Sequence: Synthetic oligonucleotide
actctgaaatgtaa

SEQ ID NO: 2885 - DNA, 14 bp, Artificial Sequence
  Description of Artificial Sequence: Synthetic oligonucleotide
aactctgaaatgta

SEQ ID NO: 2886 - DNA, 14 bp, Artificial Sequence
  Description of Artificial Sequence: Synthetic oligonucleotide
gaactctgaaatgt

SEQ ID NO: 2887 - DNA, 14 bp, Artificial Sequence
  Description of Artificial Sequence: Synthetic oligonucleotide
tgaactctgaaatg

SEQ ID NO: 2888 - DNA, 14 bp, Artificial Sequence
  Description of Artificial Sequence: Synthetic oligonucleotide
gtgaactctgaaat

SEQ ID NO: 2889 - DNA, 14 bp, Artificial Sequence
  Description of Artificial Sequence: Synthetic oligonucleotide
ggtgaactctgaaa

SEQ ID NO: 2890 - DNA, 14 bp, Artificial Sequence
  Description of Artificial Sequence: Synthetic oligonucleotide
aggtgaactctgaa

SEQ ID NO: 2891 - DNA, 14 bp, Artificial Sequence
  Description of Artificial Sequence: Synthetic oligonucleotide
gaggtgaactctga

SEQ ID NO: 2892 - DNA, 14 bp, Artificial Sequence
  Description of Artificial Sequence: Synthetic oligonucleotide
ggaggtgaactctg

SEQ ID NO: 2893 - DNA, 14 bp, Artificial Sequence
  Description of Artificial Sequence: Synthetic oligonucleotide
gggaggtgaactct

SEQ ID NO: 2894 - DNA, 14 bp, Artificial Sequence
  Description of Artificial Sequence: Synthetic oligonucleotide
tgggaggtgaactc

SEQ ID NO: 2895 - DNA, 14 bp, Artificial Sequence
  Description of Artificial Sequence: Synthetic oligonucleotide
gtgggaggtgaact

SEQ ID NO: 2896 - DNA, 14 bp, Artificial Sequence
  Description of Artificial Sequence: Synthetic oligonucleotide
tgtgggaggtgaac

SEQ ID NO: 2897 - DNA, 14 bp, Artificial Sequence
  Description of Artificial Sequence: Synthetic oligonucleotide
ctgtgggaggtgaa

SEQ ID NO: 2898 - DNA, 14 bp, Artificial Sequence
  Description of Artificial Sequence: Synthetic oligonucleotide
actgtgggaggtga

SEQ ID NO: 2899 - DNA, 14 bp, Artificial Sequence
  Description of Artificial Sequence: Synthetic oligonucleotide
aactgtgggaggtg

SEQ ID NO: 2900 - DNA, 14 bp, Artificial Sequence
  Description of Artificial Sequence: Synthetic oligonucleotide
caactgtgggaggt

SEQ ID NO: 2901 - DNA, 14 bp, Artificial Sequence
  Description of Artificial Sequence: Synthetic oligonucleotide
tcaactgtgggagg

SEQ ID NO: 2902 - DNA, 14 bp, Artificial Sequence
  Description of Artificial Sequence: Synthetic oligonucleotide
ctcaactgtgggag

SEQ ID NO: 2903 - DNA, 14 bp, Artificial Sequence
  Description of Artificial Sequence: Synthetic oligonucleotide
actcaactgtggga

SEQ ID NO: 2904 - DNA, 14 bp, Artificial Sequence
  Description of Artificial Sequence: Synthetic oligonucleotide
cactcaactgtggg

SEQ ID NO: 2905 - DNA, 14 bp, Artificial Sequence
  Description of Artificial Sequence: Synthetic oligonucleotide
ccactcaactgtgg

SEQ ID NO: 2906 - DNA, 14 bp, Artificial Sequence
  Description of Artificial Sequence: Synthetic oligonucleotide
gccactcaactgtg

SEQ ID NO: 2907 - DNA, 14 bp, Artificial Sequence
  Description of Artificial Sequence: Synthetic oligonucleotide
tgccactcaactgt

SEQ ID NO: 2908 - DNA, 14 bp, Artificial Sequence
  Description of Artificial Sequence: Synthetic oligonucleotide
atgccactcaactg

SEQ ID NO: 2909 - DNA, 14 bp, Artificial Sequence
  Description of Artificial Sequence: Synthetic oligonucleotide
tatgccactcaact

SEQ ID NO: 2910 - DNA, 14 bp, Artificial Sequence
  Description of Artificial Sequence: Synthetic oligonucleotide
atatgccactcaac

SEQ ID NO: 2911 - DNA, 14 bp, Artificial Sequence
  Description of Artificial Sequence: Synthetic oligonucleotide
tatatgccactcaa

SEQ ID NO: 2912 - DNA, 14 bp, Artificial Sequence
  Description of Artificial Sequence: Synthetic oligonucleotide
ttatatgccactca

SEQ ID NO: 2913 - DNA, 14 bp, Artificial Sequence
  Description of Artificial Sequence: Synthetic oligonucleotide
cttatatgccactc

SEQ ID NO: 2914 - DNA, 14 bp, Artificial Sequence
  Description of Artificial Sequence: Synthetic oligonucleotide
gcttatatgccact

SEQ ID NO: 2915 - DNA, 14 bp, Artificial Sequence
  Description of Artificial Sequence: Synthetic oligonucleotide
tgcttatatgccac

SEQ ID NO: 2916 - DNA, 14 bp, Artificial Sequence
  Description of Artificial Sequence: Synthetic oligonucleotide
ctgcttatatgcca

SEQ ID NO: 2917 - DNA, 14 bp, Artificial Sequence
  Description of Artificial Sequence: Synthetic oligonucleotide
tctgcttatatgcc

SEQ ID NO: 2918 - DNA, 14 bp, Artificial Sequence
  Description of Artificial Sequence: Synthetic oligonucleotide
gtctgcttatatgc

SEQ ID NO: 2919 - DNA, 14 bp, Artificial Sequence
  Description of Artificial Sequence: Synthetic oligonucleotide
ggtctgcttatatg

SEQ ID NO: 2920 - DNA, 14 bp, Artificial Sequence
  Description of Artificial Sequence: Synthetic oligonucleotide
aggtctgcttatat

SEQ ID NO: 2921 - DNA, 14 bp, Artificial Sequence
  Description of Artificial Sequence: Synthetic oligonucleotide
caggtctgcttata

SEQ ID NO: 2922 - DNA, 14 bp, Artificial Sequence
  Description of Artificial Sequence: Synthetic oligonucleotide
ccaggtctgcttat

SEQ ID NO: 2923 - DNA, 14 bp, Artificial Sequence
  Description of Artificial Sequence: Synthetic oligonucleotide
cccaggtctgctta

SEQ ID NO: 2924 - DNA, 14 bp, Artificial Sequence
  Description of Artificial Sequence: Synthetic oligonucleotide
gcccaggtctgctt

SEQ ID NO: 2925 - DNA, 14 bp, Artificial Sequence
  Description of Artificial Sequence: Synthetic oligonucleotide
tgcccaggtctgct

SEQ ID NO: 2926 - DNA, 14 bp, Artificial Sequence
  Description of Artificial Sequence: Synthetic oligonucleotide
gtgcccaggtctgc

SEQ ID NO: 2927 - DNA, 14 bp, Artificial Sequence
  Description of Artificial Sequence: Synthetic oligonucleotide
tgtgcccaggtctg

SEQ ID NO: 2928 - DNA, 14 bp, Artificial Sequence
  Description of Artificial Sequence: Synthetic oligonucleotide
atgtgcccaggtct

SEQ ID NO: 2929 - DNA, 14 bp, Artificial Sequence
  Description of Artificial Sequence: Synthetic oligonucleotide
tatgtgcccaggtc

SEQ ID NO: 2930 - DNA, 14 bp, Artificial Sequence
  Description of Artificial Sequence: Synthetic oligonucleotide
ctatgtgcccaggt

SEQ ID NO: 2931 - DNA, 14 bp, Artificial Sequence
  Description of Artificial Sequence: Synthetic oligonucleotide
tctatgtgcccagg

SEQ ID NO: 2932 - DNA, 14 bp, Artificial Sequence
  Description of Artificial Sequence: Synthetic oligonucleotide
ctctatgtgcccag

SEQ ID NO: 2933 - DNA, 14 bp, Artificial Sequence
  Description of Artificial Sequence: Synthetic oligonucleotide
tctctatgtgccca

SEQ ID NO: 2934 - DNA, 14 bp, Artificial Sequence
  Description of Artificial Sequence: Synthetic oligonucleotide
gtctctatgtgccc

SEQ ID NO: 2935 - DNA, 14 bp, Artificial Sequence
  Description of Artificial Sequence: Synthetic oligonucleotide
agtctctatgtgcc

SEQ ID NO: 2936 - DNA, 14 bp, Artificial Sequence
  Description of Artificial Sequence: Synthetic oligonucleotide
aagtctctatgtgc

SEQ ID NO: 2937 - DNA, 14 bp, Artificial Sequence
  Description of Artificial Sequence: Synthetic oligonucleotide
aaagtctctatgtg

SEQ ID NO: 2938 - DNA, 14 bp, Artificial Sequence
  Description of Artificial Sequence: Synthetic oligonucleotide
aaaagtctctatgt

SEQ ID NO: 2939 - DNA, 14 bp, Artificial Sequence
  Description of Artificial Sequence: Synthetic oligonucleotide
caaaagtctctatg

SEQ ID NO: 2940 - DNA, 14 bp, Artificial Sequence
  Description of Artificial Sequence: Synthetic oligonucleotide
tcaaaagtctctat

SEQ ID NO: 2941 - DNA, 14 bp, Artificial Sequence
  Description of Artificial Sequence: Synthetic oligonucleotide
gtcaaaagtctcta

SEQ ID NO: 2942 - DNA, 14 bp, Artificial Sequence
  Description of Artificial Sequence: Synthetic oligonucleotide
ggtcaaaagtctct

SEQ ID NO: 2943 - DNA, 14 bp, Artificial Sequence
  Description of Artificial Sequence: Synthetic oligonucleotide
aggtcaaaagtctc

SEQ ID NO: 2944 - DNA, 14 bp, Artificial Sequence
  Description of Artificial Sequence: Synthetic oligonucleotide
caggtcaaaagtct

SEQ ID NO: 2945 - DNA, 14 bp, Artificial Sequence
  Description of Artificial Sequence: Synthetic oligonucleotide
gcaggtcaaaagtc

SEQ ID NO: 2946 - DNA, 14 bp, Artificial Sequence
  Description of Artificial Sequence: Synthetic oligonucleotide
agcaggtcaaaagt

SEQ ID NO: 2947 - DNA, 14 bp, Artificial Sequence
  Description of Artificial Sequence: Synthetic oligonucleotide
gagcaggtcaaaag

SEQ ID NO: 2948 - DNA, 14 bp, Artificial Sequence
  Description of Artificial Sequence: Synthetic oligonucleotide
tgagcaggtcaaaa

SEQ ID NO: 2949 - DNA, 14 bp, Artificial Sequence
  Description of Artificial Sequence: Synthetic oligonucleotide
gtgagcaggtcaaa

SEQ ID NO: 2950 - DNA, 14 bp, Artificial Sequence
  Description of Artificial Sequence: Synthetic oligonucleotide
ggtgagcaggtcaa

SEQ ID NO: 2951 - DNA, 14 bp, Artificial Sequence
  Description of Artificial Sequence: Synthetic oligonucleotide
aggtgagcaggtca

SEQ ID NO: 2952 - DNA, 14 bp, Artificial Sequence
  Description of Artificial Sequence: Synthetic oligonucleotide
aaggtgagcaggtc

SEQ ID NO: 2953 - DNA, 14 bp, Artificial Sequence
  Description of Artificial Sequence: Synthetic oligonucleotide
taaggtgagcaggt

SEQ ID NO: 2954 - DNA, 14 bp, Artificial Sequence
  Description of Artificial Sequence: Synthetic oligonucleotide
gtaaggtgagcagg

SEQ ID NO: 2955 - DNA, 14 bp, Artificial Sequence
  Description of Artificial Sequence: Synthetic oligonucleotide
tgtaaggtgagcag

SEQ ID NO: 2956 - DNA, 14 bp, Artificial Sequence
  Description of Artificial Sequence: Synthetic oligonucleotide
gtgtaaggtgagca

SEQ ID NO: 2957 - DNA, 14 bp, Artificial Sequence
  Description of Artificial Sequence: Synthetic oligonucleotide
ggtgtaaggtgagc

SEQ ID NO: 2958 - DNA, 14 bp, Artificial Sequence
  Description of Artificial Sequence: Synthetic oligonucleotide
gggtgtaaggtgag

SEQ ID NO: 2959 - DNA, 14 bp, Artificial Sequence
  Description of Artificial Sequence: Synthetic oligonucleotide
tgggtgtaaggtga

SEQ ID NO: 2960 - DNA, 14 bp, Artificial Sequence
  Description of Artificial Sequence: Synthetic oligonucleotide
ttgggtgtaaggtg

SEQ ID NO: 2961 - DNA, 14 bp, Artificial Sequence
  Description of Artificial Sequence: Synthetic oligonucleotide
attgggtgtaaggt

SEQ ID NO: 2962 - DNA, 14 bp, Artificial Sequence
  Description of Artificial Sequence: Synthetic oligonucleotide
tattgggtgtaagg

SEQ ID NO: 2963 - DNA, 14 bp, Artificial Sequence
  Description of Artificial Sequence: Synthetic oligonucleotide
ctattgggtgtaag

SEQ ID NO: 2964 - DNA, 14 bp, Artificial Sequence
  Description of Artificial Sequence: Synthetic oligonucleotide
tctattgggtgtaa

SEQ ID NO: 2965 - DNA, 14 bp, Artificial Sequence
  Description of Artificial Sequence: Synthetic oligonucleotide
ttctattgggtgta

SEQ ID NO: 2966 - DNA, 14 bp, Artificial Sequence
  Description of Artificial Sequence: Synthetic oligonucleotide
tttctattgggtgt

SEQ ID NO: 2967 - DNA, 14 bp, Artificial Sequence
  Description of Artificial Sequence: Synthetic oligonucleotide
atttctattgggtg

SEQ ID NO: 2968 - DNA, 14 bp, Artificial Sequence
  Description of Artificial Sequence: Synthetic oligonucleotide
aatttctattgggt

SEQ ID NO: 2969 - DNA, 14 bp, Artificial Sequence
  Description of Artificial Sequence: Synthetic oligonucleotide
caatttctattggg

SEQ ID NO: 2970 - DNA, 14 bp, Artificial Sequence
  Description of Artificial Sequence: Synthetic oligonucleotide
gcaatttctattgg

SEQ ID NO: 2971 - DNA, 14 bp, Artificial Sequence
  Description of Artificial Sequence: Synthetic oligonucleotide
agcaatttctattg

SEQ ID NO: 2972 - DNA, 14 bp, Artificial Sequence
  Description of Artificial Sequence: Synthetic oligonucleotide
gagcaatttctatt

SEQ ID NO: 2973 - DNA, 14 bp, Artificial Sequence
  Description of Artificial Sequence: Synthetic oligonucleotide
cgagcaatttctat

SEQ ID NO: 2974 - DNA, 14 bp, Artificial Sequence
  Description of Artificial Sequence: Synthetic oligonucleotide
tcgagcaatttcta

SEQ ID NO: 2975 - DNA, 14 bp, Artificial Sequence
  Description of Artificial Sequence: Synthetic oligonucleotide
gtcgagcaatttct

SEQ ID NO: 2976 - DNA, 14 bp, Artificial Sequence
  Description of Artificial Sequence: Synthetic oligonucleotide
tgtcgagcaatttc

SEQ ID NO: 2977 - DNA, 14 bp, Artificial Sequence
  Description of Artificial Sequence: Synthetic oligonucleotide
ttgtcgagcaattt

SEQ ID NO: 2978 - DNA, 14 bp, Artificial Sequence
  Description of Artificial Sequence: Synthetic oligonucleotide
gttgtcgagcaatt

SEQ ID NO: 2979 - DNA, 14 bp, Artificial Sequence
  Description of Artificial Sequence: Synthetic oligonucleotide
agttgtcgagcaat

SEQ ID NO: 2980 - DNA, 14 bp, Artificial Sequence
  Description of Artificial Sequence: Synthetic oligonucleotide
gagttgtcgagcaa

SEQ ID NO: 2981 - DNA, 14 bp, Artificial Sequence
  Description of Artificial Sequence: Synthetic oligonucleotide
tgagttgtcgagca

SEQ ID NO: 2982 - DNA, 14 bp, Artificial Sequence
  Description of Artificial Sequence: Synthetic oligonucleotide
gtgagttgtcgagc

SEQ ID NO: 2983 - DNA, 14 bp, Artificial Sequence
  Description of Artificial Sequence: Synthetic oligonucleotide
agtgagttgtcgag

SEQ ID NO: 2984 - DNA, 14 bp, Artificial Sequence
  Description of Artificial Sequence: Synthetic oligonucleotide
aagtgagttgtcga

SEQ ID NO: 2985 - DNA, 14 bp, Artificial Sequence
  Description of Artificial Sequence: Synthetic oligonucleotide
aaagtgagttgtcg

SEQ ID NO: 2986 - DNA, 14 bp, Artificial Sequence
  Description of Artificial Sequence: Synthetic oligonucleotide
taaagtgagttgtc

SEQ ID NO: 2987 - DNA, 14 bp, Artificial Sequence
  Description of Artificial Sequence: Synthetic oligonucleotide
gtaaagtgagttgt

SEQ ID NO: 2988 - DNA, 14 bp, Artificial Sequence
  Description of Artificial Sequence: Synthetic oligonucleotide
agtaaagtgagttg

SEQ ID NO: 2989 - DNA, 14 bp, Artificial Sequence
  Description of Artificial Sequence: Synthetic oligonucleotide
aagtaaagtgagtt

SEQ ID NO: 2990 - DNA, 14 bp, Artificial Sequence
  Description of Artificial Sequence: Synthetic oligonucleotide
caagtaaagtgagt

SEQ ID NO: 2991 - DNA, 14 bp, Artificial Sequence
  Description of Artificial Sequence: Synthetic oligonucleotide
tcaagtaaagtgag

SEQ ID NO: 2992 - DNA, 14 bp, Artificial Sequence
  Description of Artificial Sequence: Synthetic oligonucleotide
ttcaagtaaagtga

SEQ ID NO: 2993 - DNA, 14 bp, Artificial Sequence
  Description of Artificial Sequence: Synthetic oligonucleotide
attcaagtaaagtg

SEQ ID NO: 2994 - DNA, 14 bp, Artificial Sequence
  Description of Artificial Sequence: Synthetic oligonucleotide
gattcaagtaaagt

SEQ ID NO: 2995 - DNA, 14 bp, Artificial Sequence
  Description of Artificial Sequence: Synthetic oligonucleotide
tgattcaagtaaag

SEQ ID NO: 2996 - DNA, 14 bp, Artificial Sequence
  Description of Artificial Sequence: Synthetic oligonucleotide
ctgattcaagtaaa

SEQ ID NO: 2997 - DNA, 14 bp, Artificial Sequence
  Description of Artificial Sequence: Synthetic oligonucleotide
tctgattcaagtaa

SEQ ID NO: 2998 - DNA, 14 bp, Artificial Sequence
  Description of Artificial Sequence: Synthetic oligonucleotide
atctgattcaagta

SEQ ID NO: 2999 - DNA, 14 bp, Artificial Sequence
  Description of Artificial Sequence: Synthetic oligonucleotide
gatctgattcaagt

SEQ ID NO: 3000 - DNA, 14 bp, Artificial Sequence
  Description of Artificial Sequence: Synthetic oligonucleotide
agatctgattcaag

SEQ ID NO: 3001 - DNA, 14 bp, Artificial Sequence
  Description of Artificial Sequence: Synthetic oligonucleotide
tagatctgattcaa

SEQ ID NO: 3002 - DNA, 14 bp, Artificial Sequence
  Description of Artificial Sequence: Synthetic oligonucleotide
atagatctgattca

SEQ ID NO: 3003 - DNA, 14 bp, Artificial Sequence
  Description of Artificial Sequence: Synthetic oligonucleotide
tatagatctgattc

SEQ ID NO: 3004 - DNA, 14 bp, Artificial Sequence
  Description of Artificial Sequence: Synthetic oligonucleotide
gtatagatctgatt

SEQ ID NO: 3005 - DNA, 14 bp, Artificial Sequence
  Description of Artificial Sequence: Synthetic oligonucleotide
ggtatagatctgat

SEQ ID NO: 3006 - DNA, 14 bp, Artificial Sequence
  Description of Artificial Sequence: Synthetic oligonucleotide
cggtatagatctga

SEQ ID NO: 3007 - DNA, 14 bp, Artificial Sequence
  Description of Artificial Sequence: Synthetic oligonucleotide
tcggtatagatctg

SEQ ID NO: 3008 - DNA, 14 bp, Artificial Sequence
  Description of Artificial Sequence: Synthetic oligonucleotide
ctcggtatagatct

SEQ ID NO: 3009 - DNA, 14 bp, Artificial Sequence
  Description of Artificial Sequence: Synthetic oligonucleotide
gctcggtatagatc

SEQ ID NO: 3010 - DNA, 14 bp, Artificial Sequence
  Description of Artificial Sequence: Synthetic oligonucleotide
agctcggtatagat

SEQ ID NO: 3011 - DNA, 14 bp, Artificial Sequence
  Description of Artificial Sequence: Synthetic oligonucleotide
cagctcggtataga

SEQ ID NO: 3012 - DNA, 14 bp, Artificial Sequence
  Description of Artificial Sequence: Synthetic oligonucleotide
acagctcggtatag

SEQ ID NO: 3013 - DNA, 14 bp, Artificial Sequence
  Description of Artificial Sequence: Synthetic oligonucleotide
tacagctcggtata

SEQ ID NO: 3014 - DNA, 14 bp, Artificial Sequence
  Description of Artificial Sequence: Synthetic oligonucleotide
gtacagctcggtat

SEQ ID NO: 3015 - DNA, 14 bp, Artificial Sequence
  Description of Artificial Sequence: Synthetic oligonucleotide
tgtacagctcggta

SEQ ID NO: 3016 - DNA, 14 bp, Artificial Sequence
  Description of Artificial Sequence: Synthetic oligonucleotide
ctgtacagctcggt

SEQ ID NO: 3017 - DNA, 14 bp, Artificial Sequence
  Description of Artificial Sequence: Synthetic oligonucleotide
gctgtacagctcgg

SEQ ID NO: 3018 - DNA, 14 bp, Artificial Sequence
  Description of Artificial Sequence: Synthetic oligonucleotide
ggctgtacagctcg

SEQ ID NO: 3019 - DNA, 14 bp, Artificial Sequence
  Description of Artificial Sequence: Synthetic oligonucleotide
tggctgtacagctc

SEQ ID NO: 3020 - DNA, 14 bp, Artificial Sequence
  Description of Artificial Sequence: Synthetic oligonucleotide
atggctgtacagct

SEQ ID NO: 3021 - DNA, 14 bp, Artificial Sequence
  Description of Artificial Sequence: Synthetic oligonucleotide
gatggctgtacagc

SEQ ID NO: 3022 - DNA, 14 bp, Artificial Sequence
  Description of Artificial Sequence: Synthetic oligonucleotide
tgatggctgtacag

SEQ ID NO: 3023 - DNA, 14 bp, Artificial Sequence
  Description of Artificial Sequence: Synthetic oligonucleotide
ctgatggctgtaca

SEQ ID NO: 3024 - DNA, 14 bp, Artificial Sequence
  Description of Artificial Sequence: Synthetic oligonucleotide
tctgatggctgtac

SEQ ID NO: 3025 - DNA, 14 bp, Artificial Sequence
  Description of Artificial Sequence: Synthetic oligonucleotide
ttctgatggctgta

SEQ ID NO: 3026 - DNA, 14 bp, Artificial Sequence
  Description of Artificial Sequence: Synthetic oligonucleotide
attctgatggctgt

SEQ ID NO: 3027 - DNA, 14 bp, Artificial Sequence
  Description of Artificial Sequence: Synthetic oligonucleotide
aattctgatggctg

SEQ ID NO: 3028 - DNA, 14 bp, Artificial Sequence
  Description of Artificial Sequence: Synthetic oligonucleotide
taattctgatggct

SEQ ID NO: 3029 - DNA, 14 bp, Artificial Sequence
  Description of Artificial Sequence: Synthetic oligonucleotide
ctaattctgatggc

SEQ ID NO: 3030 - DNA, 14 bp, Artificial Sequence
  Description of Artificial Sequence: Synthetic oligonucleotide
actaattctgatgg

SEQ ID NO: 3031 - DNA, 14 bp, Artificial Sequence
  Description of Artificial Sequence: Synthetic oligonucleotide
aactaattctgatg

SEQ ID NO: 3032 - DNA, 14 bp, Artificial Sequence
  Description of Artificial Sequence: Synthetic oligonucleotide
caactaattctgat

SEQ ID NO: 3033 - DNA, 14 bp, Artificial Sequence
  Description of Artificial Sequence: Synthetic oligonucleotide
ccaactaattctga

SEQ ID NO: 3034 - DNA, 14 bp, Artificial Sequence
  Description of Artificial Sequence: Synthetic oligonucleotide
tccaactaattctg

SEQ ID NO: 3035 - DNA, 14 bp, Artificial Sequence
  Description of Artificial Sequence: Synthetic oligonucleotide
ttccaactaattct

SEQ ID NO: 3036 - DNA, 14 bp, Artificial Sequence
  Description of Artificial Sequence: Synthetic oligonucleotide
cttccaactaattc

SEQ ID NO: 3037 - DNA, 14 bp, Artificial Sequence
  Description of Artificial Sequence: Synthetic oligonucleotide
acttccaactaatt

SEQ ID NO: 3038 - DNA, 14 bp, Artificial Sequence
  Description of Artificial Sequence: Synthetic oligonucleotide
cacttccaactaat

SEQ ID NO: 3039 - DNA, 14 bp, Artificial Sequence
  Description of Artificial Sequence: Synthetic oligonucleotide
acacttccaactaa

SEQ ID NO: 3040 - DNA, 14 bp, Artificial Sequence
  Description of Artificial Sequence: Synthetic oligonucleotide
cacacttccaacta

SEQ ID NO: 3041 - DNA, 14 bp, Artificial Sequence
  Description of Artificial Sequence: Synthetic oligonucleotide
acacacttccaact

SEQ ID NO: 3042 - DNA, 14 bp, Artificial Sequence
  Description of Artificial Sequence: Synthetic oligonucleotide
cacacacttccaac

SEQ ID NO: 3043 - DNA, 14 bp, Artificial Sequence
  Description of Artificial Sequence: Synthetic oligonucleotide
ccacacacttccaa

SEQ ID NO: 3044 - DNA, 14 bp, Artificial Sequence
  Description of Artificial Sequence: Synthetic oligonucleotide
tccacacacttcca

SEQ ID NO: 3045 - DNA, 14 bp, Artificial Sequence
  Description of Artificial Sequence: Synthetic oligonucleotide
gtccacacacttcc

SEQ ID NO: 3046 - DNA, 14 bp, Artificial Sequence
  Description of Artificial Sequence: Synthetic oligonucleotide
tgtccacacacttc

SEQ ID NO: 3047 - DNA, 14 bp, Artificial Sequence
  Description of Artificial Sequence: Synthetic oligonucleotide
ttgtccacacactt

SEQ ID NO: 3048 - DNA, 14 bp, Artificial Sequence
  Description of Artificial Sequence: Synthetic oligonucleotide
tttgtccacacact

SEQ ID NO: 3049 - DNA, 14 bp, Artificial Sequence
  Description of Artificial Sequence: Synthetic oligonucleotide
ttttgtccacacac

SEQ ID NO: 3050 - DNA, 14 bp, Artificial Sequence
  Description of Artificial Sequence: Synthetic oligonucleotide
cttttgtccacaca

SEQ ID NO: 3051 - DNA, 14 bp, Artificial Sequence
  Description of Artificial Sequence: Synthetic oligonucleotide
tcttttgtccacac

SEQ ID NO: 3052 - DNA, 14 bp, Artificial Sequence
  Description of Artificial Sequence: Synthetic oligonucleotide
ttcttttgtccaca

SEQ ID NO: 3053 - DNA, 14 bp, Artificial Sequence
  Description of Artificial Sequence: Synthetic oligonucleotide
cttcttttgtccac

SEQ ID NO: 3054 - DNA, 14 bp, Artificial Sequence
  Description of Artificial Sequence: Synthetic oligonucleotide
tcttcttttgtcca

SEQ ID NO: 3055 - DNA, 14 bp, Artificial Sequence
  Description of Artificial Sequence: Synthetic oligonucleotide
gtcttcttttgtcc

SEQ ID NO: 3056 - DNA, 14 bp, Artificial Sequence
  Description of Artificial Sequence: Synthetic oligonucleotide
tgtcttcttttgtc

SEQ ID NO: 3057 - DNA, 14 bp, Artificial Sequence
  Description of Artificial Sequence: Synthetic oligonucleotide
ttgtcttcttttgt

SEQ ID NO: 3058 - DNA, 14 bp, Artificial Sequence
  Description of Artificial Sequence: Synthetic oligonucleotide
tttgtcttcttttg

SEQ ID NO: 3059 - DNA, 14 bp, Artificial Sequence
  Description of Artificial Sequence: Synthetic oligonucleotide
ctttgtcttctttt

SEQ ID NO: 3060 - DNA, 14 bp, Artificial Sequence
  Description of Artificial Sequence: Synthetic oligonucleotide
tctttgtcttcttt

SEQ ID NO: 3061 - DNA, 14 bp, Artificial Sequence
  Description of Artificial Sequence: Synthetic oligonucleotide
ttctttgtcttctt

SEQ ID NO: 3062 - DNA, 14 bp, Artificial Sequence
  Description of Artificial Sequence: Synthetic oligonucleotide
tttctttgtcttct

SEQ ID NO: 3063 - DNA, 14 bp, Artificial Sequence
  Description of Artificial Sequence: Synthetic oligonucleotide
atttctttgtcttc

SEQ ID NO: 3064 - DNA, 14 bp, Artificial Sequence
  Description of Artificial Sequence: Synthetic oligonucleotide
aatttctttgtctt

SEQ ID NO: 3065 - DNA, 14 bp, Artificial Sequence
  Description of Artificial Sequence: Synthetic oligonucleotide
taatttctttgtct

SEQ ID NO: 3066 - DNA, 14 bp, Artificial Sequence
  Description of Artificial Sequence: Synthetic oligonucleotide
ttaatttctttgtc

SEQ ID NO: 3067 - DNA, 14 bp, Artificial Sequence
  Description of Artificial Sequence: Synthetic oligonucleotide
gttaatttctttgt

SEQ ID NO: 3068 - DNA, 14 bp, Artificial Sequence
  Description of Artificial Sequence: Synthetic oligonucleotide
agttaatttctttg

SEQ ID NO: 3069 - DNA, 14 bp, Artificial Sequence
  Description of Artificial Sequence: Synthetic oligonucleotide
gagttaatttcttt

SEQ ID NO: 3070 - DNA, 14 bp, Artificial Sequence
  Description of Artificial Sequence: Synthetic oligonucleotide
agagttaatttctt

SEQ ID NO: 3071 - DNA, 14 bp, Artificial Sequence
  Description of Artificial Sequence: Synthetic oligonucleotide
gagagttaatttct

SEQ ID NO: 3072 - DNA, 14 bp, Artificial Sequence
  Description of Artificial Sequence: Synthetic oligonucleotide
ggagagttaatttc

SEQ ID NO: 3073 - DNA, 14 bp, Artificial Sequence
  Description of Artificial Sequence: Synthetic oligonucleotide
aggagagttaattt

SEQ ID NO: 3074 - DNA, 14 bp, Artificial Sequence
  Description of Artificial Sequence: Synthetic oligonucleotide
taggagagttaatt

SEQ ID NO: 3075 - DNA, 14 bp, Artificial Sequence
  Description of Artificial Sequence: Synthetic oligonucleotide
ttaggagagttaat

SEQ ID NO: 3076 - DNA, 14 bp, Artificial Sequence
  Description of Artificial Sequence: Synthetic oligonucleotide
attaggagagttaa

SEQ ID NO: 3077 - DNA, 14 bp, Artificial Sequence
  Description of Artificial Sequence: Synthetic oligonucleotide
gattaggagagtta

SEQ ID NO: 3078 - DNA, 14 bp, Artificial Sequence
  Description of Artificial Sequence: Synthetic oligonucleotide
agattaggagagtt

SEQ ID NO: 3079 - DNA, 14 bp, Artificial Sequence
  Description of Artificial Sequence: Synthetic oligonucleotide
aagattaggagagt

SEQ ID NO: 3080 - DNA, 14 bp, Artificial Sequence
  Description of Artificial Sequence: Synthetic oligonucleotide
gaagattaggagag

SEQ ID NO: 3081 - DNA, 14 bp, Artificial Sequence
  Description of Artificial Sequence: Synthetic oligonucleotide
agaagattaggaga

SEQ ID NO: 3082 - DNA, 14 bp, Artificial Sequence
  Description of Artificial Sequence: Synthetic oligonucleotide
cagaagattaggag

SEQ ID NO: 3083 - DNA, 14 bp, Artificial Sequence
  Description of Artificial Sequence: Synthetic oligonucleotide
tcagaagattagga

SEQ ID NO: 3084 - DNA, 14 bp, Artificial Sequence
  Description of Artificial Sequence: Synthetic oligonucleotide
ttcagaagattagg

SEQ ID NO: 3085 - DNA, 14 bp, Artificial Sequence
  Description of Artificial Sequence: Synthetic oligonucleotide
tttcagaagattag

SEQ ID NO: 3086 - DNA, 14 bp, Artificial Sequence
  Description of Artificial Sequence: Synthetic oligonucleotide
ttttcagaagatta

SEQ ID NO: 3087 - DNA, 14 bp, Artificial Sequence
  Description of Artificial Sequence: Synthetic oligonucleotide
attttcagaagatt

SEQ ID NO: 3088 - DNA, 14 bp, Artificial Sequence
  Description of Artificial Sequence: Synthetic oligonucleotide
cattttcagaagat

SEQ ID NO: 3089 - DNA, 14 bp, Artificial Sequence
  Description of Artificial Sequence: Synthetic oligonucleotide
tcattttcagaaga

SEQ ID NO: 3090 - DNA, 14 bp, Artificial Sequence
  Description of Artificial Sequence: Synthetic oligonucleotide
atcattttcagaag

SEQ ID NO: 3091 - DNA, 14 bp, Artificial Sequence
  Description of Artificial Sequence: Synthetic oligonucleotide
aatcattttcagaa

SEQ ID NO: 3092 - DNA, 14 bp, Artificial Sequence
  Description of Artificial Sequence: Synthetic oligonucleotide
gaatcattttcaga

SEQ ID NO: 3093 - DNA, 14 bp, Artificial Sequence
  Description of Artificial Sequence: Synthetic oligonucleotide
cgaatcattttcag

SEQ ID NO: 3094 - DNA, 14 bp, Artificial Sequence
  Description of Artificial Sequence: Synthetic oligonucleotide
tcgaatcattttca

SEQ ID NO: 3095 - DNA, 14 bp, Artificial Sequence
  Description of Artificial Sequence: Synthetic oligonucleotide
gtcgaatcattttc

SEQ ID NO: 3096 - DNA, 14 bp, Artificial Sequence
  Description of Artificial Sequence: Synthetic oligonucleotide
tgtcgaatcatttt

SEQ ID NO: 3097 - DNA, 14 bp, Artificial Sequence
  Description of Artificial Sequence: Synthetic oligonucleotide
atgtcgaatcattt

SEQ ID NO: 3098 - DNA, 14 bp, Artificial Sequence
  Description of Artificial Sequence: Synthetic oligonucleotide
tatgtcgaatcatt

SEQ ID NO: 3099 - DNA, 14 bp, Artificial Sequence
  Description of Artificial Sequence: Synthetic oligonucleotide
gtatgtcgaatcat

SEQ ID NO: 3100 - DNA, 14 bp, Artificial Sequence
  Description of Artificial Sequence: Synthetic oligonucleotide
ggtatgtcgaatca

SEQ ID NO: 3101 - DNA, 14 bp, Artificial Sequence
  Description of Artificial Sequence: Synthetic oligonucleotide
tggtatgtcgaatc

SEQ ID NO: 3102 - DNA, 14 bp, Artificial Sequence
  Description of Artificial Sequence: Synthetic oligonucleotide
gtggtatgtcgaat

SEQ ID NO: 3103 - DNA, 14 bp, Artificial Sequence
  Description of Artificial Sequence: Synthetic oligonucleotide
ggtggtatgtcgaa

SEQ ID NO: 3104 - DNA, 14 bp, Artificial Sequence
  Description of Artificial Sequence: Synthetic oligonucleotide
tggtggtatgtcga

SEQ ID NO: 3105 - DNA, 14 bp, Artificial Sequence
  Description of Artificial Sequence: Synthetic oligonucleotide
ttggtggtatgtcg

SEQ ID NO: 3106 - DNA, 14 bp, Artificial Sequence
  Description of Artificial Sequence: Synthetic oligonucleotide
gttggtggtatgtc

SEQ ID NO: 3107 - DNA, 14 bp, Artificial Sequence
  Description of Artificial Sequence: Synthetic oligonucleotide
ggttggtggtatgt

SEQ ID NO: 3108 - DNA, 14 bp, Artificial Sequence
  Description of Artificial Sequence: Synthetic oligonucleotide
aggttggtggtatg

SEQ ID NO: 3109 - DNA, 14 bp, Artificial Sequence
  Description of Artificial Sequence: Synthetic oligonucleotide
gaggttggtggtat

SEQ ID NO: 3110 - DNA, 14 bp, Artificial Sequence
  Description of Artificial Sequence: Synthetic oligonucleotide
tgaggttggtggta

SEQ ID NO: 3111 - DNA, 14 bp, Artificial Sequence
  Description of Artificial Sequence: Synthetic oligonucleotide
gtgaggttggtggt

SEQ ID NO: 3112 - DNA, 14 bp, Artificial Sequence
  Description of Artificial Sequence: Synthetic oligonucleotide
agtgaggttggtgg

SEQ ID NO: 3113 - DNA, 14 bp, Artificial Sequence
  Description of Artificial Sequence: Synthetic oligonucleotide
gagtgaggttggtg

SEQ ID NO: 3114 - DNA, 14 bp, Artificial Sequence
  Description of Artificial Sequence: Synthetic oligonucleotide
agagtgaggttggt

SEQ ID NO: 3115 - DNA, 14 bp, Artificial Sequence
  Description of Artificial Sequence: Synthetic oligonucleotide
cagagtgaggttgg

SEQ ID NO: 3116 - DNA, 14 bp, Artificial Sequence
  Description of Artificial Sequence: Synthetic oligonucleotide
acagagtgaggttg

SEQ ID NO: 3117 - DNA, 14 bp, Artificial Sequence
  Description of Artificial Sequence: Synthetic oligonucleotide
cacagagtgaggtt

SEQ ID NO: 3118 - DNA, 14 bp, Artificial Sequence
  Description of Artificial Sequence: Synthetic oligonucleotide
ccacagagtgaggt

SEQ ID NO: 3119 - DNA, 14 bp, Artificial Sequence
  Description of Artificial Sequence: Synthetic oligonucleotide
accacagagtgagg

SEQ ID NO: 3120 - DNA, 14 bp, Artificial Sequence
  Description of Artificial Sequence: Synthetic oligonucleotide
aaccacagagtgag

SEQ ID NO: 3121 - DNA, 14 bp, Artificial Sequence
  Description of Artificial Sequence: Synthetic oligonucleotide
aaaccacagagtga

SEQ ID NO: 3122 - DNA, 14 bp, Artificial Sequence
  Description of Artificial Sequence: Synthetic oligonucleotide
caaaccacagagtg

SEQ ID NO: 3123 - DNA, 14 bp, Artificial Sequence
  Description of Artificial Sequence: Synthetic oligonucleotide
tcaaaccacagagt

SEQ ID NO: 3124 - DNA, 14 bp, Artificial Sequence
  Description of Artificial Sequence: Synthetic oligonucleotide
ctcaaaccacagag

SEQ ID NO: 3125 - DNA, 14 bp, Artificial Sequence
  Description of Artificial Sequence: Synthetic oligonucleotide
tctcaaaccacaga

SEQ ID NO: 3126 - DNA, 14 bp, Artificial Sequence
  Description of Artificial Sequence: Synthetic oligonucleotide
ttctcaaaccacag

SEQ ID NO: 3127 - DNA, 14 bp, Artificial Sequence
  Description of Artificial Sequence: Synthetic oligonucleotide
tttctcaaaccaca

SEQ ID NO: 3128 - DNA, 14 bp, Artificial Sequence
  Description of Artificial Sequence: Synthetic oligonucleotide
atttctcaaaccac

SEQ ID NO: 3129 - DNA, 14 bp, Artificial Sequence
  Description of Artificial Sequence: Synthetic oligonucleotide
catttctcaaacca

SEQ ID NO: 3130 - DNA, 14 bp, Artificial Sequence
  Description of Artificial Sequence: Synthetic oligonucleotide
acatttctcaaacc

SEQ ID NO: 3131 - DNA, 14 bp, Artificial Sequence
  Description of Artificial Sequence: Synthetic oligonucleotide
tacatttctcaaac

SEQ ID NO: 3132 - DNA, 14 bp, Artificial Sequence
  Description of Artificial Sequence: Synthetic oligonucleotide
atacatttctcaaa

SEQ ID NO: 3133 - DNA, 14 bp, Artificial Sequence
  Description of Artificial Sequence: Synthetic oligonucleotide
aatacatttctcaa

SEQ ID NO: 3134 - DNA, 14 bp, Artificial Sequence
  Description of Artificial Sequence: Synthetic oligonucleotide
caatacatttctca

SEQ ID NO: 3135 - DNA, 14 bp, Artificial Sequence
  Description of Artificial Sequence: Synthetic oligonucleotide
acaatacatttctc

SEQ ID NO: 3136 - DNA, 14 bp, Artificial Sequence
  Description of Artificial Sequence: Synthetic oligonucleotide
tacaatacatttct

SEQ ID NO: 3137 - DNA, 14 bp, Artificial Sequence
  Description of Artificial Sequence: Synthetic oligonucleotide
ctacaatacatttc

SEQ ID NO: 3138 - DNA, 14 bp, Artificial Sequence
  Description of Artificial Sequence: Synthetic oligonucleotide
tctacaatacattt

SEQ ID NO: 3139 - DNA, 14 bp, Artificial Sequence
  Description of Artificial Sequence: Synthetic oligonucleotide
ttctacaatacatt

SEQ ID NO: 3140 - DNA, 14 bp, Artificial Sequence
  Description of Artificial Sequence: Synthetic oligonucleotide
tttctacaatacat

SEQ ID NO: 3141 - DNA, 14 bp, Artificial Sequence
  Description of Artificial Sequence: Synthetic oligonucleotide
gtttctacaataca

SEQ ID NO: 3142 - DNA, 14 bp, Artificial Sequence
  Description of Artificial Sequence: Synthetic oligonucleotide
agtttctacaatac

SEQ ID NO: 3143 - DNA, 14 bp, Artificial Sequence
  Description of Artificial Sequence: Synthetic oligonucleotide
cagtttctacaata

SEQ ID NO: 3144 - DNA, 14 bp, Artificial Sequence
  Description of Artificial Sequence: Synthetic oligonucleotide
tcagtttctacaat

SEQ ID NO: 3145 - DNA, 14 bp, Artificial Sequence
  Description of Artificial Sequence: Synthetic oligonucleotide
ttcagtttctacaa

SEQ ID NO: 3146 - DNA, 14 bp, Artificial Sequence
  Description of Artificial Sequence: Synthetic oligonucleotide
tttcagtttctaca

SEQ ID NO: 3147 - DNA, 14 bp, Artificial Sequence
  Description of Artificial Sequence: Synthetic oligonucleotide
ttttcagtttctac

SEQ ID NO: 3148 - DNA, 14 bp, Artificial Sequence
  Description of Artificial Sequence: Synthetic oligonucleotide
attttcagtttcta

SEQ ID NO: 3149 - DNA, 14 bp, Artificial Sequence
  Description of Artificial Sequence: Synthetic oligonucleotide
aattttcagtttct

SEQ ID NO: 3150 - DNA, 14 bp, Artificial Sequence
  Description of Artificial Sequence: Synthetic oligonucleotide
aaattttcagtttc

SEQ ID NO: 3151 - DNA, 14 bp, Artificial Sequence
  Description of Artificial Sequence: Synthetic oligonucleotide
taaattttcagttt

SEQ ID NO: 3152 - DNA, 14 bp, Artificial Sequence
  Description of Artificial Sequence: Synthetic oligonucleotide
ctaaattttcagtt

SEQ ID NO: 3153 - DNA, 14 bp, Artificial Sequence
  Description of Artificial Sequence: Synthetic oligonucleotide
tctaaattttcagt

SEQ ID NO: 3154 - DNA, 14 bp, Artificial Sequence
  Description of Artificial Sequence: Synthetic oligonucleotide
ttctaaattttcag

SEQ ID NO: 3155 - DNA, 14 bp, Artificial Sequence
  Description of Artificial Sequence: Synthetic oligonucleotide
cttctaaattttca

SEQ ID NO: 3156 - DNA, 14 bp, Artificial Sequence
  Description of Artificial Sequence: Synthetic oligonucleotide
tcttctaaattttc

SEQ ID NO: 3157 - DNA, 14 bp, Artificial Sequence
  Description of Artificial Sequence: Synthetic oligonucleotide
ttcttctaaatttt

SEQ ID NO: 3158 - DNA, 14 bp, Artificial Sequence
  Description of Artificial Sequence: Synthetic oligonucleotide
tttcttctaaattt

SEQ ID NO: 3159 - DNA, 14 bp, Artificial Sequence
  Description of Artificial Sequence: Synthetic oligonucleotide
ctttcttctaaatt

SEQ ID NO: 3160 - DNA, 14 bp, Artificial Sequence
  Description of Artificial Sequence: Synthetic oligonucleotide
tctttcttctaaat

SEQ ID NO: 3161 - DNA, 14 bp, Artificial Sequence
  Description of Artificial Sequence: Synthetic oligonucleotide
ctctttcttctaaa

SEQ ID NO: 3162 - DNA, 14 bp, Artificial Sequence
  Description of Artificial Sequence: Synthetic oligonucleotide
actctttcttctaa

SEQ ID NO: 3163 - DNA, 14 bp, Artificial Sequence
  Description of Artificial Sequence: Synthetic oligonucleotide
tactctttcttcta

SEQ ID NO: 3164 - DNA, 14 bp, Artificial Sequence
  Description of Artificial Sequence: Synthetic oligonucleotide
ctactctttcttct

SEQ ID NO: 3165 - DNA, 14 bp, Artificial Sequence
  Description of Artificial Sequence: Synthetic oligonucleotide
gctactctttcttc

SEQ ID NO: 3166 - DNA, 14 bp, Artificial Sequence
  Description of Artificial Sequence: Synthetic oligonucleotide
agctactctttctt

SEQ ID NO: 3167 - DNA, 14 bp, Artificial Sequence
  Description of Artificial Sequence: Synthetic oligonucleotide
cagctactctttct

SEQ ID NO: 3168 - DNA, 14 bp, Artificial Sequence
  Description of Artificial Sequence: Synthetic oligonucleotide
acagctactctttc

SEQ ID NO: 3169 - DNA, 14 bp, Artificial Sequence
  Description of Artificial Sequence: Synthetic oligonucleotide
cacagctactcttt

SEQ ID NO: 3170 - DNA, 14 bp, Artificial Sequence
  Description of Artificial Sequence: Synthetic oligonucleotide
ccacagctactctt

SEQ ID NO: 3171 - DNA, 14 bp, Artificial Sequence
  Description of Artificial Sequence: Synthetic oligonucleotide
accacagctactct

SEQ ID NO: 3172 - DNA, 14 bp, Artificial Sequence
  Description of Artificial Sequence: Synthetic oligonucleotide
caccacagctactc

SEQ ID NO: 3173 - DNA, 14 bp, Artificial Sequence
  Description of Artificial Sequence: Synthetic oligonucleotide
tcaccacagctact

SEQ ID NO: 3174 - DNA, 14 bp, Artificial Sequence
  Description of Artificial Sequence: Synthetic oligonucleotide
ctcaccacagctac

SEQ ID NO: 3175 - DNA, 14 bp, Artificial Sequence
  Description of Artificial Sequence: Synthetic oligonucleotide
actcaccacagcta

SEQ ID NO: 3176 - DNA, 14 bp, Artificial Sequence
  Description of Artificial Sequence: Synthetic oligonucleotide
gactcaccacagct

SEQ ID NO: 3177 - DNA, 14 bp, Artificial Sequence
  Description of Artificial Sequence: Synthetic oligonucleotide
cgactcaccacagc

SEQ ID NO: 3178 - DNA, 14 bp, Artificial Sequence
  Description of Artificial Sequence: Synthetic oligonucleotide
tcgactcaccacag

SEQ ID NO: 3179 - DNA, 14 bp, Artificial Sequence
  Description of Artificial Sequence: Synthetic oligonucleotide
ttcgactcaccaca

SEQ ID NO: 3180 - DNA, 14 bp, Artificial Sequence
  Description of Artificial Sequence: Synthetic oligonucleotide
attcgactcaccac

SEQ ID NO: 3181 - DNA, 14 bp, Artificial Sequence
  Description of Artificial Sequence: Synthetic oligonucleotide
aattcgactcacca

SEQ ID NO: 3182 - DNA, 14 bp, Artificial Sequence
  Description of Artificial Sequence: Synthetic oligonucleotide
taattcgactcacc

SEQ ID NO: 3183 - DNA, 14 bp, Artificial Sequence
  Description of Artificial Sequence: Synthetic oligonucleotide
ataattcgactcac

SEQ ID NO: 3184 - DNA, 14 bp, Artificial Sequence
  Description of Artificial Sequence: Synthetic oligonucleotide
aataattcgactca

SEQ ID NO: 3185 - DNA, 14 bp, Artificial Sequence
  Description of Artificial Sequence: Synthetic oligonucleotide
caataattcgactc

SEQ ID NO: 3186 - DNA, 14 bp, Artificial Sequence
  Description of Artificial Sequence: Synthetic oligonucleotide
tcaataattcgact

SEQ ID NO: 3187 - DNA, 14 bp, Artificial Sequence
  Description of Artificial Sequence: Synthetic oligonucleotide
ctcaataattcgac

SEQ ID NO: 3188 - DNA, 14 bp, Artificial Sequence
  Description of Artificial Sequence: Synthetic oligonucleotide
tctcaataattcga

SEQ ID NO: 3189 - DNA, 14 bp, Artificial Sequence
  Description of Artificial Sequence: Synthetic oligonucleotide
atctcaataattcg

SEQ ID NO: 3190 - DNA, 14 bp, Artificial Sequence
  Description of Artificial Sequence: Synthetic oligonucleotide
aatctcaataattc

SEQ ID NO: 3191 - DNA, 14 bp, Artificial Sequence
  Description of Artificial Sequence: Synthetic oligonucleotide
gaatctcaataatt

SEQ ID NO: 3192 - DNA, 14 bp, Artificial Sequence
  Description of Artificial Sequence: Synthetic oligonucleotide
agaatctcaataat

SEQ ID NO: 3193 - DNA, 14 bp, Artificial Sequence
  Description of Artificial Sequence: Synthetic oligonucleotide
tagaatctcaataa

SEQ ID NO: 3194 - DNA, 14 bp, Artificial Sequence
  Description of Artificial Sequence: Synthetic oligonucleotide
gtagaatctcaata

SEQ ID NO: 3195 - DNA, 14 bp, Artificial Sequence
  Description of Artificial Sequence: Synthetic oligonucleotide
tgtagaatctcaat

SEQ ID NO: 3196 - DNA, 14 bp, Artificial Sequence
  Description of Artificial Sequence: Synthetic oligonucleotide
ttgtagaatctcaa

SEQ ID NO: 3197 - DNA, 14 bp, Artificial Sequence
  Description of Artificial Sequence: Synthetic oligonucleotide
cttgtagaatctca

SEQ ID NO: 3198 - DNA, 14 bp, Artificial Sequence
  Description of Artificial Sequence: Synthetic oligonucleotide
acttgtagaatctc

SEQ ID NO: 3199 - DNA, 14 bp, Artificial Sequence
  Description of Artificial Sequence: Synthetic oligonucleotide
gacttgtagaatct

SEQ ID NO: 3200 - DNA, 14 bp, Artificial Sequence
  Description of Artificial Sequence: Synthetic oligonucleotide
agacttgtagaatc

SEQ ID NO: 3201 - DNA, 14 bp, Artificial Sequence
  Description of Artificial Sequence: Synthetic oligonucleotide
aagacttgtagaat

SEQ ID NO: 3202 - DNA, 14 bp, Artificial Sequence
  Description of Artificial Sequence: Synthetic oligonucleotide
aaagacttgtagaa

SEQ ID NO: 3203 - DNA, 14 bp, Artificial Sequence
  Description of Artificial Sequence: Synthetic oligonucleotide
gaaagacttgtaga

SEQ ID NO: 3204 - DNA, 14 bp, Artificial Sequence
  Description of Artificial Sequence: Synthetic oligonucleotide
tgaaagacttgtag

SEQ ID NO: 3205 - DNA, 14 bp, Artificial Sequence
  Description of Artificial Sequence: Synthetic oligonucleotide
ttgaaagacttgta

SEQ ID NO: 3206 - DNA, 14 bp, Artificial Sequence
  Description of Artificial Sequence: Synthetic oligonucleotide
cttgaaagacttgt

SEQ ID NO: 3207 - DNA, 14 bp, Artificial Sequence
  Description of Artificial Sequence: Synthetic oligonucleotide
tcttgaaagacttg

SEQ ID NO: 3208 - DNA, 14 bp, Artificial Sequence
  Description of Artificial Sequence: Synthetic oligonucleotide
ctcttgaaagactt

SEQ ID NO: 3209 - DNA, 14 bp, Artificial Sequence
  Description of Artificial Sequence: Synthetic oligonucleotide
actcttgaaagact

SEQ ID NO: 3210 - DNA, 14 bp, Artificial Sequence
  Description of Artificial Sequence: Synthetic oligonucleotide
aactcttgaaagac

SEQ ID NO: 3211 - DNA, 14 bp, Artificial Sequence
  Description of Artificial Sequence: Synthetic oligonucleotide
caactcttgaaaga

SEQ ID NO: 3212 - DNA, 14 bp, Artificial Sequence
  Description of Artificial Sequence: Synthetic oligonucleotide
tcaactcttgaaag

SEQ ID NO: 3213 - DNA, 14 bp, Artificial Sequence
  Description of Artificial Sequence: Synthetic oligonucleotide
ttcaactcttgaaa

SEQ ID NO: 3214 - DNA, 14 bp, Artificial Sequence
  Description of Artificial Sequence: Synthetic oligonucleotide
gttcaactcttgaa

SEQ ID NO: 3215 - DNA, 14 bp, Artificial Sequence
  Description of Artificial Sequence: Synthetic oligonucleotide
tgttcaactcttga

SEQ ID NO: 3216 - DNA, 14 bp, Artificial Sequence
  Description of Artificial Sequence: Synthetic oligonucleotide
ttgttcaactcttg

SEQ ID NO: 3217 - DNA, 14 bp, Artificial Sequence
  Description of Artificial Sequence: Synthetic oligonucleotide
gttgttcaactctt

SEQ ID NO: 3218 - DNA, 14 bp, Artificial Sequence
  Description of Artificial Sequence: Synthetic oligonucleotide
agttgttcaactct

SEQ ID NO: 3219 - DNA, 14 bp, Artificial Sequence
  Description of Artificial Sequence: Synthetic oligonucleotide
aagttgttcaactc

SEQ ID NO: 3220 - DNA, 14 bp, Artificial Sequence
  Description of Artificial Sequence: Synthetic oligonucleotide
aaagttgttcaact

SEQ ID NO: 3221 - DNA, 14 bp, Artificial Sequence
  Description of Artificial Sequence: Synthetic oligonucleotide
taaagttgttcaac

SEQ ID NO: 3222 - DNA, 14 bp, Artificial Sequence
  Description of Artificial Sequence: Synthetic oligonucleotide
ttaaagttgttcaa

SEQ ID NO: 3223 - DNA, 14 bp, Artificial Sequence
  Description of Artificial Sequence: Synthetic oligonucleotide
attaaagttgttca

SEQ ID NO: 3224 - DNA, 14 bp, Artificial Sequence
  Description of Artificial Sequence: Synthetic oligonucleotide
cattaaagttgttc

SEQ ID NO: 3225 - DNA, 14 bp, Artificial Sequence
  Description of Artificial Sequence: Synthetic oligonucleotide
ccattaaagttgtt

SEQ ID NO: 3226 - DNA, 14 bp, Artificial Sequence
  Description of Artificial Sequence: Synthetic oligonucleotide
accattaaagttgt

SEQ ID NO: 3227 - DNA, 14 bp, Artificial Sequence
  Description of Artificial Sequence: Synthetic oligonucleotide
caccattaaagttg

SEQ ID NO: 3228 - DNA, 14 bp, Artificial Sequence
  Description of Artificial Sequence: Synthetic oligonucleotide
acaccattaaagtt

SEQ ID NO: 3229 - DNA, 14 bp, Artificial Sequence
  Description of Artificial Sequence: Synthetic oligonucleotide
gacaccattaaagt

SEQ ID NO: 3230 - DNA, 14 bp, Artificial Sequence
  Description of Artificial Sequence: Synthetic oligonucleotide
ggacaccattaaag

SEQ ID NO: 3231 - DNA, 14 bp, Artificial Sequence
  Description of Artificial Sequence: Synthetic oligonucleotide
aggacaccattaaa

SEQ ID NO: 3232 - DNA, 14 bp, Artificial Sequence
  Description of Artificial Sequence: Synthetic oligonucleotide
aaggacaccattaa

SEQ ID NO: 3233 - DNA, 14 bp, Artificial Sequence
  Description of Artificial Sequence: Synthetic oligonucleotide
caaggacaccatta

SEQ ID NO: 3234 - DNA, 14 bp, Artificial Sequence
  Description of Artificial Sequence: Synthetic oligonucleotide
tcaaggacaccatt

SEQ ID NO: 3235 - DNA, 14 bp, Artificial Sequence
  Description of Artificial Sequence: Synthetic oligonucleotide
ctcaaggacaccat

SEQ ID NO: 3236 - DNA, 14 bp, Artificial Sequence
  Description of Artificial Sequence: Synthetic oligonucleotide
cctcaaggacacca

SEQ ID NO: 3237 - DNA, 14 bp, Artificial Sequence
  Description of Artificial Sequence: Synthetic oligonucleotide
acctcaaggacacc

SEQ ID NO: 3238 - DNA, 14 bp, Artificial Sequence
  Description of Artificial Sequence: Synthetic oligonucleotide
aacctcaaggacac

SEQ ID NO: 3239 - DNA, 14 bp, Artificial Sequence
  Description of Artificial Sequence: Synthetic oligonucleotide
caacctcaaggaca

SEQ ID NO: 3240 - DNA, 14 bp, Artificial Sequence
  Description of Artificial Sequence: Synthetic oligonucleotide
acaacctcaaggac

SEQ ID NO: 3241 - DNA, 14 bp, Artificial Sequence
  Description of Artificial Sequence: Synthetic oligonucleotide
gacaacctcaagga

SEQ ID NO: 3242 - DNA, 14 bp, Artificial Sequence
  Description of Artificial Sequence: Synthetic oligonucleotide
tgacaacctcaagg

SEQ ID NO: 3243 - DNA, 14 bp, Artificial Sequence
  Description of Artificial Sequence: Synthetic oligonucleotide
ctgacaacctcaag

SEQ ID NO: 3244 - DNA, 14 bp, Artificial Sequence
  Description of Artificial Sequence: Synthetic oligonucleotide
actgacaacctcaa

SEQ ID NO: 3245 - DNA, 14 bp, Artificial Sequence
  Description of Artificial Sequence: Synthetic oligonucleotide
cactgacaacctca

SEQ ID NO: 3246 - DNA, 14 bp, Artificial Sequence
  Description of Artificial Sequence: Synthetic oligonucleotide
gcactgacaacctc

SEQ ID NO: 3247 - DNA, 14 bp, Artificial Sequence
  Description of Artificial Sequence: Synthetic oligonucleotide
agcactgacaacct

SEQ ID NO: 3248 - DNA, 14 bp, Artificial Sequence
  Description of Artificial Sequence: Synthetic oligonucleotide
tagcactgacaacc

SEQ ID NO: 3249 - DNA, 14 bp, Artificial Sequence
  Description of Artificial Sequence: Synthetic oligonucleotide
atagcactgacaac

SEQ ID NO: 3250 - DNA, 14 bp, Artificial Sequence
  Description of Artificial Sequence: Synthetic oligonucleotide
catagcactgacaa

SEQ ID NO: 3251 - DNA, 14 bp, Artificial Sequence
  Description of Artificial Sequence: Synthetic oligonucleotide
tcatagcactgaca

SEQ ID NO: 3252 - DNA, 14 bp, Artificial Sequence
  Description of Artificial Sequence: Synthetic oligonucleotide
ttcatagcactgac

SEQ ID NO: 3253 - DNA, 14 bp, Artificial Sequence
  Description of Artificial Sequence: Synthetic oligonucleotide
attcatagcactga

SEQ ID NO: 3254 - DNA, 14 bp, Artificial Sequence
  Description of Artificial Sequence: Synthetic oligonucleotide
aattcatagcactg

SEQ ID NO: 3255 - DNA, 14 bp, Artificial Sequence
  Description of Artificial Sequence: Synthetic oligonucleotide
gaattcatagcact

SEQ ID NO: 3256 - DNA, 14 bp, Artificial Sequence
  Description of Artificial Sequence: Synthetic oligonucleotide
tgaattcatagcac

SEQ ID NO: 3257 - DNA, 14 bp, Artificial Sequence
  Description of Artificial Sequence: Synthetic oligonucleotide
atgaattcatagca

SEQ ID NO: 3258 - DNA, 14 bp, Artificial Sequence
  Description of Artificial Sequence: Synthetic oligonucleotide
gatgaattcatagc

SEQ ID NO: 3259 - DNA, 14 bp, Artificial Sequence
  Description of Artificial Sequence: Synthetic oligonucleotide
tgatgaattcatag

SEQ ID NO: 3260 - DNA, 14 bp, Artificial Sequence
  Description of Artificial Sequence: Synthetic oligonucleotide
gtgatgaattcata

SEQ ID NO: 3261 - DNA, 14 bp, Artificial Sequence
  Description of Artificial Sequence: Synthetic oligonucleotide
ggtgatgaattcat

SEQ ID NO: 3262 - DNA, 14 bp, Artificial Sequence
  Description of Artificial Sequence: Synthetic oligonucleotide
aggtgatgaattca

SEQ ID NO: 3263 - DNA, 14 bp, Artificial Sequence
  Description of Artificial Sequence: Synthetic oligonucleotide
caggtgatgaattc

SEQ ID NO: 3264 - DNA, 14 bp, Artificial Sequence
  Description of Artificial Sequence: Synthetic oligonucleotide
acaggtgatgaatt

SEQ ID NO: 3265 - DNA, 14 bp, Artificial Sequence
  Description of Artificial Sequence: Synthetic oligonucleotide
aacaggtgatgaat

SEQ ID NO: 3266 - DNA, 14 bp, Artificial Sequence
  Description of Artificial Sequence: Synthetic oligonucleotide
aaacaggtgatgaa

SEQ ID NO: 3267 - DNA, 14 bp, Artificial Sequence
  Description of Artificial Sequence: Synthetic oligonucleotide
taaacaggtgatga

SEQ ID NO: 3268 - DNA, 14 bp, Artificial Sequence
  Description of Artificial Sequence: Synthetic oligonucleotide
gtaaacaggtgatg

SEQ ID NO: 3269 - DNA, 14 bp, Artificial Sequence
  Description of Artificial Sequence: Synthetic oligonucleotide
tgtaaacaggtgat

SEQ ID NO: 3270 - DNA, 14 bp, Artificial Sequence
  Description of Artificial Sequence: Synthetic oligonucleotide
ctgtaaacaggtga

SEQ ID NO: 3271 - DNA, 14 bp, Artificial Sequence
  Description of Artificial Sequence: Synthetic oligonucleotide
tctgtaaacaggtg

SEQ ID NO: 3272 - DNA, 14 bp, Artificial Sequence
  Description of Artificial Sequence: Synthetic oligonucleotide
gtctgtaaacaggt

SEQ ID NO: 3273 - DNA, 14 bp, Artificial Sequence
  Description of Artificial Sequence: Synthetic oligonucleotide
agtctgtaaacagg

SEQ ID NO: 3274 - DNA, 14 bp, Artificial Sequence
  Description of Artificial Sequence: Synthetic oligonucleotide
tagtctgtaaacag

SEQ ID NO: 3275 - DNA, 14 bp, Artificial Sequence
  Description of Artificial Sequence: Synthetic oligonucleotide
ctagtctgtaaaca

SEQ ID NO: 3276 - DNA, 14 bp, Artificial Sequence
  Description of Artificial Sequence: Synthetic oligonucleotide
tctagtctgtaaac

SEQ ID NO: 3277 - DNA, 14 bp, Artificial Sequence
  Description of Artificial Sequence: Synthetic oligonucleotide
gtctagtctgtaaa

SEQ ID NO: 3278 - DNA, 14 bp, Artificial Sequence
  Description of Artificial Sequence: Synthetic oligonucleotide
ggtctagtctgtaa

SEQ ID NO: 3279 - DNA, 14 bp, Artificial Sequence
  Description of Artificial Sequence: Synthetic oligonucleotide
tggtctagtctgta

SEQ ID NO: 3280 - DNA, 14 bp, Artificial Sequence
  Description of Artificial Sequence: Synthetic oligonucleotide
gtggtctagtctgt

SEQ ID NO: 3281 - DNA, 14 bp, Artificial Sequence
  Description of Artificial Sequence: Synthetic oligonucleotide
tgtggtctagtctg

SEQ ID NO: 3282 - DNA, 14 bp, Artificial Sequence
  Description of Artificial Sequence: Synthetic oligonucleotide
gtgtggtctagtct

SEQ ID NO: 3283 - DNA, 14 bp, Artificial Sequence
  Description of Artificial Sequence: Synthetic oligonucleotide
tgtgtggtctagtc

SEQ ID NO: 3284 - DNA, 14 bp, Artificial Sequence
  Description of Artificial Sequence: Synthetic oligonucleotide
atgtgtggtctagt

SEQ ID NO: 3285 - DNA, 14 bp, Artificial Sequence
  Description of Artificial Sequence: Synthetic oligonucleotide
aatgtgtggtctag

SEQ ID NO: 3286 - DNA, 14 bp, Artificial Sequence
  Description of Artificial Sequence: Synthetic oligonucleotide
aaatgtgtggtcta

SEQ ID NO: 3287 - DNA, 14 bp, Artificial Sequence
  Description of Artificial Sequence: Synthetic oligonucleotide
caaatgtgtggtct

SEQ ID NO: 3288 - DNA, 14 bp, Artificial Sequence
  Description of Artificial Sequence: Synthetic oligonucleotide
tcaaatgtgtggtc

SEQ ID NO: 3289 - DNA, 14 bp, Artificial Sequence
  Description of Artificial Sequence: Synthetic oligonucleotide
ctcaaatgtgtggt

SEQ ID NO: 3290 - DNA, 14 bp, Artificial Sequence
  Description of Artificial Sequence: Synthetic oligonucleotide
gctcaaatgtgtgg

SEQ ID NO: 3291 - DNA, 14 bp, Artificial Sequence
  Description of Artificial Sequence: Synthetic oligonucleotide
tgctcaaatgtgtg

SEQ ID NO: 3292 - DNA, 14 bp, Artificial Sequence
  Description of Artificial Sequence: Synthetic oligonucleotide
ttgctcaaatgtgt

SEQ ID NO: 3293 - DNA, 14 bp, Artificial Sequence
  Description of Artificial Sequence: Synthetic oligonucleotide
tttgctcaaatgtg

SEQ ID NO: 3294 - DNA, 14 bp, Artificial Sequence
  Description of Artificial Sequence: Synthetic oligonucleotide
atttgctcaaatgt

SEQ ID NO: 3295 - DNA, 14 bp, Artificial Sequence
  Description of Artificial Sequence: Synthetic oligonucleotide
tatttgctcaaatg

SEQ ID NO: 3296 - DNA, 14 bp, Artificial Sequence
  Description of Artificial Sequence: Synthetic oligonucleotide
gtatttgctcaaat

SEQ ID NO: 3297 - DNA, 14 bp, Artificial Sequence
  Description of Artificial Sequence: Synthetic oligonucleotide
ggtatttgctcaaa

SEQ ID NO: 3298 - DNA, 14 bp, Artificial Sequence
  Description of Artificial Sequence: Synthetic oligonucleotide
tggtatttgctcaa

SEQ ID NO: 3299 - DNA, 14 bp, Artificial Sequence
  Description of Artificial Sequence: Synthetic oligonucleotide
ttggtatttgctca

SEQ ID NO: 3300 - DNA, 14 bp, Artificial Sequence
  Description of Artificial Sequence: Synthetic oligonucleotide
cttggtatttgctc

SEQ ID NO: 3301 - DNA, 14 bp, Artificial Sequence
  Description of Artificial Sequence: Synthetic oligonucleotide
acttggtatttgct

SEQ ID NO: 3302 - DNA, 14 bp, Artificial Sequence
  Description of Artificial Sequence: Synthetic oligonucleotide
gacttggtatttgc

SEQ ID NO: 3303 - DNA, 14 bp, Artificial Sequence
  Description of Artificial Sequence: Synthetic oligonucleotide
cgacttggtatttg

SEQ ID NO: 3304 - DNA, 14 bp, Artificial Sequence
  Description of Artificial Sequence: Synthetic oligonucleotide
gcgacttggtattt

SEQ ID NO: 3305 - DNA, 14 bp, Artificial Sequence
  Description of Artificial Sequence: Synthetic oligonucleotide
ggcgacttggtatt

SEQ ID NO: 3306 - DNA, 14 bp, Artificial Sequence
  Description of Artificial Sequence: Synthetic oligonucleotide
tggcgacttggtat

SEQ ID NO: 3307 - DNA, 14 bp, Artificial Sequence
  Description of Artificial Sequence: Synthetic oligonucleotide
ctggcgacttggta

SEQ ID NO: 3308 - DNA, 14 bp, Artificial Sequence
  Description of Artificial Sequence: Synthetic oligonucleotide
tctggcgacttggt

SEQ ID NO: 3309 - DNA, 14 bp, Artificial Sequence
  Description of Artificial Sequence: Synthetic oligonucleotide
ttctggcgacttgg

SEQ ID NO: 3310 - DNA, 14 bp, Artificial Sequence
  Description of Artificial Sequence: Synthetic oligonucleotide
cttctggcgacttg

SEQ ID NO: 3311 - DNA, 14 bp, Artificial Sequence
  Description of Artificial Sequence: Synthetic oligonucleotide
tcttctggcgactt

SEQ ID NO: 3312 - DNA, 14 bp, Artificial Sequence
  Description of Artificial Sequence: Synthetic oligonucleotide
ttcttctggcgact

SEQ ID NO: 3313 - DNA, 14 bp, Artificial Sequence
  Description of Artificial Sequence: Synthetic oligonucleotide
tttcttctggcgac

SEQ ID NO: 3314 - DNA, 14 bp, Artificial Sequence
  Description of Artificial Sequence: Synthetic oligonucleotide
ttttcttctggcga

SEQ ID NO: 3315 - DNA, 14 bp, Artificial Sequence
  Description of Artificial Sequence: Synthetic oligonucleotide
attttcttctggcg

SEQ ID NO: 3316 - DNA, 14 bp, Artificial Sequence
  Description of Artificial Sequence: Synthetic oligonucleotide
aattttcttctggc

SEQ ID NO: 3317 - DNA, 14 bp, Artificial Sequence
  Description of Artificial Sequence: Synthetic oligonucleotide
aaattttcttctgg

SEQ ID NO: 3318 - DNA, 14 bp, Artificial Sequence
  Description of Artificial Sequence: Synthetic oligonucleotide
aaaattttcttctg

SEQ ID NO: 3319 - DNA, 14 bp, Artificial Sequence
  Description of Artificial Sequence: Synthetic oligonucleotide
taaaattttcttct

SEQ ID NO: 3320 - DNA, 14 bp, Artificial Sequence
  Description of Artificial Sequence: Synthetic oligonucleotide
ctaaaattttcttc

SEQ ID NO: 3321 - DNA, 14 bp, Artificial Sequence
  Description of Artificial Sequence: Synthetic oligonucleotide
tctaaaattttctt

SEQ ID NO: 3322 - DNA, 14 bp, Artificial Sequence
  Description of Artificial Sequence: Synthetic oligonucleotide
ttctaaaattttct

SEQ ID NO: 3323 - DNA, 14 bp, Artificial Sequence
  Description of Artificial Sequence: Synthetic oligonucleotide
cttctaaaattttc

SEQ ID NO: 3324 - DNA, 14 bp, Artificial Sequence
  Description of Artificial Sequence: Synthetic oligonucleotide
tcttctaaaatttt

SEQ ID NO: 3325 - DNA, 14 bp, Artificial Sequence
  Description of Artificial Sequence: Synthetic oligonucleotide
ttcttctaaaattt

SEQ ID NO: 3326 - DNA, 14 bp, Artificial Sequence
  Description of Artificial Sequence: Synthetic oligonucleotide
cttcttctaaaatt

SEQ ID NO: 3327 - DNA, 14 bp, Artificial Sequence
  Description of Artificial Sequence: Synthetic oligonucleotide
gcttcttctaaaat

SEQ ID NO: 3328 - DNA, 14 bp, Artificial Sequence
  Description of Artificial Sequence: Synthetic oligonucleotide
agcttcttctaaaa

SEQ ID NO: 3329 - DNA, 14 bp, Artificial Sequence
  Description of Artificial Sequence: Synthetic oligonucleotide
gagcttcttctaaa

SEQ ID NO: 3330 - DNA, 14 bp, Artificial Sequence
  Description of Artificial Sequence: Synthetic oligonucleotide
tgagcttcttctaa

SEQ ID NO: 3331 - DNA, 14 bp, Artificial Sequence
  Description of Artificial Sequence: Synthetic oligonucleotide
atgagcttcttcta

SEQ ID NO: 3332 - DNA, 14 bp, Artificial Sequence
  Description of Artificial Sequence: Synthetic oligonucleotide
catgagcttcttct

SEQ ID NO: 3333 - DNA, 14 bp, Artificial Sequence
  Description of Artificial Sequence: Synthetic oligonucleotide
tcatgagcttcttc

SEQ ID NO: 3334 - DNA, 14 bp, Artificial Sequence
  Description of Artificial Sequence: Synthetic oligonucleotide
ttcatgagcttctt

SEQ ID NO: 3335 - DNA, 14 bp, Artificial Sequence
  Description of Artificial Sequence: Synthetic oligonucleotide
attcatgagcttct

SEQ ID NO: 3336 - DNA, 14 bp, Artificial Sequence
  Description of Artificial Sequence: Synthetic oligonucleotide
aattcatgagcttc

SEQ ID NO: 3337 - DNA, 14 bp, Artificial Sequence
  Description of Artificial Sequence: Synthetic oligonucleotide
caattcatgagctt

SEQ ID NO: 3338 - DNA, 14 bp, Artificial Sequence
  Description of Artificial Sequence: Synthetic oligonucleotide
tcaattcatgagct

SEQ ID NO: 3339 - DNA, 14 bp, Artificial Sequence
  Description of Artificial Sequence: Synthetic oligonucleotide
ctcaattcatgagc

SEQ ID NO: 3340 - DNA, 14 bp, Artificial Sequence
  Description of Artificial Sequence: Synthetic oligonucleotide
actcaattcatgag

SEQ ID NO: 3341 - DNA, 14 bp, Artificial Sequence
  Description of Artificial Sequence: Synthetic oligonucleotide
cactcaattcatga

SEQ ID NO: 3342 - DNA, 14 bp, Artificial Sequence
  Description of Artificial Sequence: Synthetic oligonucleotide
tcactcaattcatg

SEQ ID NO: 3343 - DNA, 14 bp, Artificial Sequence
  Description of Artificial Sequence: Synthetic oligonucleotide
ttcactcaattcat

SEQ ID NO: 3344 - DNA, 14 bp, Artificial Sequence
  Description of Artificial Sequence: Synthetic oligonucleotide
cttcactcaattca

SEQ ID NO: 3345 - DNA, 14 bp, Artificial Sequence
  Description of Artificial Sequence: Synthetic oligonucleotide
tcttcactcaattc

SEQ ID NO: 3346 - DNA, 14 bp, Artificial Sequence
  Description of Artificial Sequence: Synthetic oligonucleotide
atcttcactcaatt

SEQ ID NO: 3347 - DNA, 14 bp, Artificial Sequence
  Description of Artificial Sequence: Synthetic oligonucleotide
gatcttcactcaat

SEQ ID NO: 3348 - DNA, 14 bp, Artificial Sequence
  Description of Artificial Sequence: Synthetic oligonucleotide
tgatcttcactcaa

SEQ ID NO: 3349 - DNA, 14 bp, Artificial Sequence
  Description of Artificial Sequence: Synthetic oligonucleotide
gtgatcttcactca

SEQ ID NO: 3350 - DNA, 14 bp, Artificial Sequence
  Description of Artificial Sequence: Synthetic oligonucleotide
agtgatcttcactc

SEQ ID NO: 3351 - DNA, 14 bp, Artificial Sequence
  Description of Artificial Sequence: Synthetic oligonucleotide
tagtgatcttcact

SEQ ID NO: 3352 - DNA, 14 bp, Artificial Sequence
  Description of Artificial Sequence: Synthetic oligonucleotide
atagtgatcttcac

SEQ ID NO: 3353 - DNA, 14 bp, Artificial Sequence
  Description of Artificial Sequence: Synthetic oligonucleotide
tatagtgatcttca

SEQ ID NO: 3354 - DNA, 14 bp, Artificial Sequence
  Description of Artificial Sequence: Synthetic oligonucleotide
ttatagtgatcttc

SEQ ID NO: 3355 - DNA, 14 bp, Artificial Sequence
  Description of Artificial Sequence: Synthetic oligonucleotide
cttatagtgatctt

SEQ ID NO: 3356 - DNA, 14 bp, Artificial Sequence
  Description of Artificial Sequence: Synthetic oligonucleotide
tcttatagtgatct

SEQ ID NO: 3357 - DNA, 14 bp, Artificial Sequence
  Description of Artificial Sequence: Synthetic oligonucleotide
ttcttatagtgatc

SEQ ID NO: 3358 - DNA, 14 bp, Artificial Sequence
  Description of Artificial Sequence: Synthetic oligonucleotide
tttcttatagtgat

SEQ ID NO: 3359 - DNA, 14 bp, Artificial Sequence
  Description of Artificial Sequence: Synthetic oligonucleotide
atttcttatagtga

SEQ ID NO: 3360 - DNA, 14 bp, Artificial Sequence
  Description of Artificial Sequence: Synthetic oligonucleotide
tatttcttatagtg

SEQ ID NO: 3361 - DNA, 14 bp, Artificial Sequence
  Description of Artificial Sequence: Synthetic oligonucleotide
atatttcttatagt

SEQ ID NO: 3362 - DNA, 14 bp, Artificial Sequence
  Description of Artificial Sequence: Synthetic oligonucleotide
aatatttcttatag

SEQ ID NO: 3363 - DNA, 14 bp, Artificial Sequence
  Description of Artificial Sequence: Synthetic oligonucleotide
aaatatttcttata

SEQ ID NO: 3364 - DNA, 14 bp, Artificial Sequence
  Description of Artificial Sequence: Synthetic oligonucleotide
caaatatttcttat

SEQ ID NO: 3365 - DNA, 14 bp, Artificial Sequence
  Description of Artificial Sequence: Synthetic oligonucleotide
ccaaatatttctta

SEQ ID NO: 3366 - DNA, 14 bp, Artificial Sequence
  Description of Artificial Sequence: Synthetic oligonucleotide
gccaaatatttctt

SEQ ID NO: 3367 - DNA, 14 bp, Artificial Sequence
  Description of Artificial Sequence: Synthetic oligonucleotide
tgccaaatatttct

SEQ ID NO: 3368 - DNA, 14 bp, Artificial Sequence
  Description of Artificial Sequence: Synthetic oligonucleotide
ttgccaaatatttc

SEQ ID NO: 3369 - DNA, 14 bp, Artificial Sequence
  Description of Artificial Sequence: Synthetic oligonucleotide
tttgccaaatattt

SEQ ID NO: 3370 - DNA, 14 bp, Artificial Sequence
  Description of Artificial Sequence: Synthetic oligonucleotide
ttttgccaaatatt

SEQ ID NO: 3371 - DNA, 14 bp, Artificial Sequence
  Description of Artificial Sequence: Synthetic oligonucleotide
gttttgccaaatat

SEQ ID NO: 3372 - DNA, 14 bp, Artificial Sequence
  Description of Artificial Sequence: Synthetic oligonucleotide
agttttgccaaata

SEQ ID NO: 3373 - DNA, 14 bp, Artificial Sequence
  Description of Artificial Sequence: Synthetic oligonucleotide
gagttttgccaaat

SEQ ID NO: 3374 - DNA, 14 bp, Artificial Sequence
  Description of Artificial Sequence: Synthetic oligonucleotide
tgagttttgccaaa

SEQ ID NO: 3375 - DNA, 14 bp, Artificial Sequence
  Description of Artificial Sequence: Synthetic oligonucleotide
ctgagttttgccaa

SEQ ID NO: 3376 - DNA, 14 bp, Artificial Sequence
  Description of Artificial Sequence: Synthetic oligonucleotide
cctgagttttgcca

SEQ ID NO: 3377 - DNA, 14 bp, Artificial Sequence
  Description of Artificial Sequence: Synthetic oligonucleotide
acctgagttttgcc

SEQ ID NO: 3378 - DNA, 14 bp, Artificial Sequence
  Description of Artificial Sequence: Synthetic oligonucleotide
gacctgagttttgc

SEQ ID NO: 3379 - DNA, 14 bp, Artificial Sequence
  Description of Artificial Sequence: Synthetic oligonucleotide
agacctgagttttg

SEQ ID NO: 3380 - DNA, 14 bp, Artificial Sequence
  Description of Artificial Sequence: Synthetic oligonucleotide
tagacctgagtttt

SEQ ID NO: 3381 - DNA, 14 bp, Artificial Sequence
  Description of Artificial Sequence: Synthetic oligonucleotide
atagacctgagttt

SEQ ID NO: 3382 - DNA, 14 bp, Artificial Sequence
  Description of Artificial Sequence: Synthetic oligonucleotide
aatagacctgagtt

SEQ ID NO: 3383 - DNA, 14 bp, Artificial Sequence
  Description of Artificial Sequence: Synthetic oligonucleotide
taatagacctgagt

SEQ ID NO: 3384 - DNA, 14 bp, Artificial Sequence
  Description of Artificial Sequence: Synthetic oligonucleotide
ttaatagacctgag

SEQ ID NO: 3385 - DNA, 14 bp, Artificial Sequence
  Description of Artificial Sequence: Synthetic oligonucleotide
attaatagacctga

SEQ ID NO: 3386 - DNA, 14 bp, Artificial Sequence
  Description of Artificial Sequence: Synthetic oligonucleotide
gattaatagacctg

SEQ ID NO: 3387 - DNA, 14 bp, Artificial Sequence
  Description of Artificial Sequence: Synthetic oligonucleotide
ggattaatagacct

SEQ ID NO: 3388 - DNA, 14 bp, Artificial Sequence
  Description of Artificial Sequence: Synthetic oligonucleotide
tggattaatagacc

SEQ ID NO: 3389 - DNA, 14 bp, Artificial Sequence
  Description of Artificial Sequence: Synthetic oligonucleotide
gtggattaatagac

SEQ ID NO: 3390 - DNA, 14 bp, Artificial Sequence
  Description of Artificial Sequence: Synthetic oligonucleotide
ggtggattaataga

SEQ ID NO: 3391 - DNA, 14 bp, Artificial Sequence
  Description of Artificial Sequence: Synthetic oligonucleotide
tggtggattaatag

SEQ ID NO: 3392 - DNA, 14 bp, Artificial Sequence
  Description of Artificial Sequence: Synthetic oligonucleotide
atggtggattaata

SEQ ID NO: 3393 - DNA, 14 bp, Artificial Sequence
  Description of Artificial Sequence: Synthetic oligonucleotide
catggtggattaat

SEQ ID NO: 3394 - DNA, 14 bp, Artificial Sequence
  Description of Artificial Sequence: Synthetic oligonucleotide
acatggtggattaa

SEQ ID NO: 3395 - DNA, 14 bp, Artificial Sequence
  Description of Artificial Sequence: Synthetic oligonucleotide
cacatggtggatta

SEQ ID NO: 3396 - DNA, 14 bp, Artificial Sequence
  Description of Artificial Sequence: Synthetic oligonucleotide
acacatggtggatt

SEQ ID NO: 3397 - DNA, 14 bp, Artificial Sequence
  Description of Artificial Sequence: Synthetic oligonucleotide
cacacatggtggat

SEQ ID NO: 3398 - DNA, 14 bp, Artificial Sequence
  Description of Artificial Sequence: Synthetic oligonucleotide
gcacacatggtgga

SEQ ID NO: 3399 - DNA, 14 bp, Artificial Sequence
  Description of Artificial Sequence: Synthetic oligonucleotide
ggcacacatggtgg

SEQ ID NO: 3400 - DNA, 14 bp, Artificial Sequence
  Description of Artificial Sequence: Synthetic oligonucleotide
aggcacacatggtg

SEQ ID NO: 3401 - DNA, 14 bp, Artificial Sequence
  Description of Artificial Sequence: Synthetic oligonucleotide
aaggcacacatggt

SEQ ID NO: 3402 - DNA, 14 bp, Artificial Sequence
  Description of Artificial Sequence: Synthetic oligonucleotide
aaaggcacacatgg

SEQ ID NO: 3403 - DNA, 14 bp, Artificial Sequence
  Description of Artificial Sequence: Synthetic oligonucleotide
gaaaggcacacatg

SEQ ID NO: 3404 - DNA, 14 bp, Artificial Sequence
  Description of Artificial Sequence: Synthetic oligonucleotide
agaaaggcacacat

SEQ ID NO: 3405 - DNA, 14 bp, Artificial Sequence
  Description of Artificial Sequence: Synthetic oligonucleotide
aagaaaggcacaca

SEQ ID NO: 3406 - DNA, 14 bp, Artificial Sequence
  Description of Artificial Sequence: Synthetic oligonucleotide
aaagaaaggcacac

SEQ ID NO: 3407 - DNA, 14 bp, Artificial Sequence
  Description of Artificial Sequence: Synthetic oligonucleotide
caaagaaaggcaca

SEQ ID NO: 3408 - DNA, 14 bp, Artificial Sequence
  Description of Artificial Sequence: Synthetic oligonucleotide
ccaaagaaaggcac

SEQ ID NO: 3409 - DNA, 14 bp, Artificial Sequence
  Description of Artificial Sequence: Synthetic oligonucleotide
tccaaagaaaggca

SEQ ID NO: 3410 - DNA, 14 bp, Artificial Sequence
  Description of Artificial Sequence: Synthetic oligonucleotide
ttccaaagaaaggc

SEQ ID NO: 3411 - DNA, 14 bp, Artificial Sequence
  Description of Artificial Sequence: Synthetic oligonucleotide
attccaaagaaagg

SEQ ID NO: 3412 - DNA, 14 bp, Artificial Sequence
  Description of Artificial Sequence: Synthetic oligonucleotide
aattccaaagaaag

SEQ ID NO: 3413 - DNA, 14 bp, Artificial Sequence
  Description of Artificial Sequence: Synthetic oligonucleotide
aaattccaaagaaa

SEQ ID NO: 3414 - DNA, 14 bp, Artificial Sequence
  Description of Artificial Sequence: Synthetic oligonucleotide
taaattccaaagaa

SEQ ID NO: 3415 - DNA, 14 bp, Artificial Sequence
  Description of Artificial Sequence: Synthetic oligonucleotide
ataaattccaaaga

SEQ ID NO: 3416 - DNA, 14 bp, Artificial Sequence
  Description of Artificial Sequence: Synthetic oligonucleotide
gataaattccaaag

SEQ ID NO: 3417 - DNA, 14 bp, Artificial Sequence
  Description of Artificial Sequence: Synthetic oligonucleotide
agataaattccaaa

SEQ ID NO: 3418 - DNA, 14 bp, Artificial Sequence
  Description of Artificial Sequence: Synthetic oligonucleotide
gagataaattccaa

SEQ ID NO: 3419 - DNA, 14 bp, Artificial Sequence
  Description of Artificial Sequence: Synthetic oligonucleotide
tgagataaattcca

SEQ ID NO: 3420 - DNA, 14 bp, Artificial Sequence
  Description of Artificial Sequence: Synthetic oligonucleotide
gtgagataaattcc

SEQ ID NO: 3421 - DNA, 14 bp, Artificial Sequence
  Description of Artificial Sequence: Synthetic oligonucleotide
agtgagataaattc

SEQ ID NO: 3422 - DNA, 14 bp, Artificial Sequence
  Description of Artificial Sequence: Synthetic oligonucleotide
tagtgagataaatt

SEQ ID NO: 3423 - DNA, 14 bp, Artificial Sequence
  Description of Artificial Sequence: Synthetic oligonucleotide
ttagtgagataaat

SEQ ID NO: 3424 - DNA, 14 bp, Artificial Sequence
  Description of Artificial Sequence: Synthetic oligonucleotide
attagtgagataaa

SEQ ID NO: 3425 - DNA, 14 bp, Artificial Sequence
  Description of Artificial Sequence: Synthetic oligonucleotide
tattagtgagataa

SEQ ID NO: 3426 - DNA, 14 bp, Artificial Sequence
  Description of Artificial Sequence: Synthetic oligonucleotide
atattagtgagata

SEQ ID NO: 3427 - DNA, 14 bp, Artificial Sequence
  Description of Artificial Sequence: Synthetic oligonucleotide
gatattagtgagat

SEQ ID NO: 3428 - DNA, 14 bp, Artificial Sequence
  Description of Artificial Sequence: Synthetic oligonucleotide
agatattagtgaga

SEQ ID NO: 3429 - DNA, 14 bp, Artificial Sequence
  Description of Artificial Sequence: Synthetic oligonucleotide
aagatattagtgag

SEQ ID NO: 3430 - DNA, 14 bp, Artificial Sequence
  Description of Artificial Sequence: Synthetic oligonucleotide
caagatattagtga

SEQ ID NO: 3431 - DNA, 14 bp, Artificial Sequence
  Description of Artificial Sequence: Synthetic oligonucleotide
tcaagatattagtg

SEQ ID NO: 3432 - DNA, 14 bp, Artificial Sequence
  Description of Artificial Sequence: Synthetic oligonucleotide
ttcaagatattagt

SEQ ID NO: 3433 - DNA, 14 bp, Artificial Sequence
  Description of Artificial Sequence: Synthetic oligonucleotide
tttcaagatattag

SEQ ID NO: 3434 - DNA, 14 bp, Artificial Sequence
  Description of Artificial Sequence: Synthetic oligonucleotide
ttttcaagatatta

SEQ ID NO: 3435 - DNA, 14 bp, Artificial Sequence
  Description of Artificial Sequence: Synthetic oligonucleotide
gttttcaagatatt

SEQ ID NO: 3436 - DNA, 14 bp, Artificial Sequence
  Description of Artificial Sequence: Synthetic oligonucleotide
tgttttcaagatat

SEQ ID NO: 3437 - DNA, 14 bp, Artificial Sequence
  Description of Artificial Sequence: Synthetic oligonucleotide
ctgttttcaagata

SEQ ID NO: 3438 - DNA, 14 bp, Artificial Sequence
  Description of Artificial Sequence: Synthetic oligonucleotide
tctgttttcaagat

SEQ ID NO: 3439 - DNA, 14 bp, Artificial Sequence
  Description of Artificial Sequence: Synthetic oligonucleotide
ttctgttttcaaga

SEQ ID NO: 3440 - DNA, 14 bp, Artificial Sequence
  Description of Artificial Sequence: Synthetic oligonucleotide
cttctgttttcaag

SEQ ID NO: 3441 - DNA, 14 bp, Artificial Sequence
  Description of Artificial Sequence: Synthetic oligonucleotide
tcttctgttttcaa

SEQ ID NO: 3442 - DNA, 14 bp, Artificial Sequence
  Description of Artificial Sequence: Synthetic oligonucleotide
ttcttctgttttca

SEQ ID NO: 3443 - DNA, 14 bp, Artificial Sequence
  Description of Artificial Sequence: Synthetic oligonucleotide
cttcttctgttttc

SEQ ID NO: 3444 - DNA, 14 bp, Artificial Sequence
  Description of Artificial Sequence: Synthetic oligonucleotide
ccttcttctgtttt

SEQ ID NO: 3445 - DNA, 14 bp, Artificial Sequence
  Description of Artificial Sequence: Synthetic oligonucleotide
gccttcttctgttt

SEQ ID NO: 3446 - DNA, 14 bp, Artificial Sequence
  Description of Artificial Sequence: Synthetic oligonucleotide
tgccttcttctgtt

SEQ ID NO: 3447 - DNA, 14 bp, Artificial Sequence
  Description of Artificial Sequence: Synthetic oligonucleotide
ttgccttcttctgt

SEQ ID NO: 3448 - DNA, 14 bp, Artificial Sequence
  Description of Artificial Sequence: Synthetic oligonucleotide
gttgccttcttctg

SEQ ID NO: 3449 - DNA, 14 bp, Artificial Sequence
  Description of Artificial Sequence: Synthetic oligonucleotide
ggttgccttcttct

SEQ ID NO: 3450 - DNA, 14 bp, Artificial Sequence
  Description of Artificial Sequence: Synthetic oligonucleotide
gggttgccttcttc

SEQ ID NO: 3451 - DNA, 14 bp, Artificial Sequence
  Description of Artificial Sequence: Synthetic oligonucleotide
agggttgccttctt

SEQ ID NO: 3452 - DNA, 14 bp, Artificial Sequence
  Description of Artificial Sequence: Synthetic oligonucleotide
cagggttgccttct

SEQ ID NO: 3453 - DNA, 14 bp, Artificial Sequence
  Description of Artificial Sequence: Synthetic oligonucleotide
tcagggttgccttc

SEQ ID NO: 3454 - DNA, 14 bp, Artificial Sequence
  Description of Artificial Sequence: Synthetic oligonucleotide
ctcagggttgcctt

SEQ ID NO: 3455 - DNA, 14 bp, Artificial Sequence
  Description of Artificial Sequence: Synthetic oligonucleotide
cctcagggttgcct

SEQ ID NO: 3456 - DNA, 14 bp, Artificial Sequence
  Description of Artificial Sequence: Synthetic oligonucleotide
acctcagggttgcc

SEQ ID NO: 3457 - DNA, 14 bp, Artificial Sequence
  Description of Artificial Sequence: Synthetic oligonucleotide
gacctcagggttgc

SEQ ID NO: 3458 - DNA, 14 bp, Artificial Sequence
  Description of Artificial Sequence: Synthetic oligonucleotide
ggacctcagggttg

SEQ ID NO: 3459 - DNA, 14 bp, Artificial Sequence
  Description of Artificial Sequence: Synthetic oligonucleotide
aggacctcagggtt

SEQ ID NO: 3460 - DNA, 14 bp, Artificial Sequence
  Description of Artificial Sequence: Synthetic oligonucleotide
taggacctcagggt

SEQ ID NO: 3461 - DNA, 14 bp, Artificial Sequence
  Description of Artificial Sequence: Synthetic oligonucleotide
ttaggacctcaggg

SEQ ID NO: 3462 - DNA, 14 bp, Artificial Sequence
  Description of Artificial Sequence: Synthetic oligonucleotide
tttaggacctcagg

SEQ ID NO: 3463 - DNA, 14 bp, Artificial Sequence
  Description of Artificial Sequence: Synthetic oligonucleotide
ttttaggacctcag

SEQ ID NO: 3464 - DNA, 14 bp, Artificial Sequence
  Description of Artificial Sequence: Synthetic oligonucleotide
tttttaggacctca

SEQ ID NO: 3465 - DNA, 14 bp, Artificial Sequence
  Description of Artificial Sequence: Synthetic oligonucleotide
ctttttaggacctc

SEQ ID NO: 3466 - DNA, 14 bp, Artificial Sequence
  Description of Artificial Sequence: Synthetic oligonucleotide
tctttttaggacct

SEQ ID NO: 3467 - DNA, 14 bp, Artificial Sequence
  Description of Artificial Sequence: Synthetic oligonucleotide
gtctttttaggacc

SEQ ID NO: 3468 - DNA, 14 bp, Artificial Sequence
  Description of Artificial Sequence: Synthetic oligonucleotide
tgtctttttaggac

SEQ ID NO: 3469 - DNA, 14 bp, Artificial Sequence
  Description of Artificial Sequence: Synthetic oligonucleotide
atgtctttttagga

SEQ ID NO: 3470 - DNA, 14 bp, Artificial Sequence
  Description of Artificial Sequence: Synthetic oligonucleotide
catgtctttttagg

SEQ ID NO: 3471 - DNA, 14 bp, Artificial Sequence
  Description of Artificial Sequence: Synthetic oligonucleotide
ccatgtctttttag

SEQ ID NO: 3472 - DNA, 14 bp, Artificial Sequence
  Description of Artificial Sequence: Synthetic oligonucleotide
tccatgtcttttta

SEQ ID NO: 3473 - DNA, 14 bp, Artificial Sequence
  Description of Artificial Sequence: Synthetic oligonucleotide
ttccatgtcttttt

SEQ ID NO: 3474 - DNA, 14 bp, Artificial Sequence
  Description of Artificial Sequence: Synthetic oligonucleotide
tttccatgtctttt

SEQ ID NO: 3475 - DNA, 14 bp, Artificial Sequence
  Description of Artificial Sequence: Synthetic oligonucleotide
ttttccatgtcttt

SEQ ID NO: 3476 - DNA, 14 bp, Artificial Sequence
  Description of Artificial Sequence: Synthetic oligonucleotide
cttttccatgtctt

SEQ ID NO: 3477 - DNA, 14 bp, Artificial Sequence
  Description of Artificial Sequence: Synthetic oligonucleotide
tcttttccatgtct

SEQ ID NO: 3478 - DNA, 14 bp, Artificial Sequence
  Description of Artificial Sequence: Synthetic oligonucleotide
ctcttttccatgtc

SEQ ID NO: 3479 - DNA, 14 bp, Artificial Sequence
  Description of Artificial Sequence: Synthetic oligonucleotide
gctcttttccatgt

SEQ ID NO: 3480 - DNA, 14 bp, Artificial Sequence
  Description of Artificial Sequence: Synthetic oligonucleotide
agctcttttccatg

SEQ ID NO: 3481 - DNA, 14 bp, Artificial Sequence
  Description of Artificial Sequence: Synthetic oligonucleotide
aagctcttttccat

SEQ ID NO: 3482 - DNA, 14 bp, Artificial Sequence
  Description of Artificial Sequence: Synthetic oligonucleotide
taagctcttttcca

SEQ ID NO: 3483 - DNA, 14 bp, Artificial Sequence
  Description of Artificial Sequence: Synthetic oligonucleotide
ataagctcttttcc

SEQ ID NO: 3484 - DNA, 14 bp, Artificial Sequence
  Description of Artificial Sequence: Synthetic oligonucleotide
tataagctcttttc

SEQ ID NO: 3485 - DNA, 14 bp, Artificial Sequence
  Description of Artificial Sequence: Synthetic oligonucleotide
ttataagctctttt

SEQ ID NO: 3486 - DNA, 14 bp, Artificial Sequence
  Description of Artificial Sequence: Synthetic oligonucleotide
tttataagctcttt

SEQ ID NO: 3487 - DNA, 14 bp, Artificial Sequence
  Description of Artificial Sequence: Synthetic oligonucleotide
gtttataagctctt

SEQ ID NO: 3488 - DNA, 14 bp, Artificial Sequence
  Description of Artificial Sequence: Synthetic oligonucleotide
agtttataagctct

SEQ ID NO: 3489 - DNA, 14 bp, Artificial Sequence
  Description of Artificial Sequence: Synthetic oligonucleotide
aagtttataagctc

SEQ ID NO: 3490 - DNA, 14 bp, Artificial Sequence
  Description of Artificial Sequence: Synthetic oligonucleotide
aaagtttataagct

SEQ ID NO: 3491 - DNA, 14 bp, Artificial Sequence
  Description of Artificial Sequence: Synthetic oligonucleotide
taaagtttataagc

SEQ ID NO: 3492 - DNA, 14 bp, Artificial Sequence
  Description of Artificial Sequence: Synthetic oligonucleotide
ctaaagtttataag

SEQ ID NO: 3493 - DNA, 14 bp, Artificial Sequence
  Description of Artificial Sequence: Synthetic oligonucleotide
gctaaagtttataa

SEQ ID NO: 3494 - DNA, 14 bp, Artificial Sequence
  Description of Artificial Sequence: Synthetic oligonucleotide
tgctaaagtttata

SEQ ID NO: 3495 - DNA, 14 bp, Artificial Sequence
  Description of Artificial Sequence: Synthetic oligonucleotide
ttgctaaagtttat

SEQ ID NO: 3496 - DNA, 14 bp, Artificial Sequence
  Description of Artificial Sequence: Synthetic oligonucleotide
tttgctaaagttta

SEQ ID NO: 3497 - DNA, 14 bp, Artificial Sequence
  Description of Artificial Sequence: Synthetic oligonucleotide
ttttgctaaagttt

SEQ ID NO: 3498 - DNA, 14 bp, Artificial Sequence
  Description of Artificial Sequence: Synthetic oligonucleotide
cttttgctaaagtt

SEQ ID NO: 3499 - DNA, 14 bp, Artificial Sequence
  Description of Artificial Sequence: Synthetic oligonucleotide
ccttttgctaaagt

SEQ ID NO: 3500 - DNA, 14 bp, Artificial Sequence
  Description of Artificial Sequence: Synthetic oligonucleotide
tccttttgctaaag

SEQ ID NO: 3501 - DNA, 14 bp, Artificial Sequence
  Description of Artificial Sequence: Synthetic oligonucleotide
ctccttttgctaaa

SEQ ID NO: 3502 - DNA, 14 bp, Artificial Sequence
  Description of Artificial Sequence: Synthetic oligonucleotide
cctccttttgctaa

SEQ ID NO: 3503 - DNA, 14 bp, Artificial Sequence
  Description of Artificial Sequence: Synthetic oligonucleotide
tcctccttttgcta

SEQ ID NO: 3504 - DNA, 14 bp, Artificial Sequence
  Description of Artificial Sequence: Synthetic oligonucleotide
ttcctccttttgct

SEQ ID NO: 3505 - DNA, 14 bp, Artificial Sequence
  Description of Artificial Sequence: Synthetic oligonucleotide
tttcctccttttgc

SEQ ID NO: 3506 - DNA, 14 bp, Artificial Sequence
  Description of Artificial Sequence: Synthetic oligonucleotide
ctttcctccttttg

SEQ ID NO: 3507 - DNA, 14 bp, Artificial Sequence
  Description of Artificial Sequence: Synthetic oligonucleotide
actttcctcctttt

SEQ ID NO: 3508 - DNA, 14 bp, Artificial Sequence
  Description of Artificial Sequence: Synthetic oligonucleotide
tactttcctccttt

SEQ ID NO: 3509 - DNA, 14 bp, Artificial Sequence
  Description of Artificial Sequence: Synthetic oligonucleotide
ctactttcctcctt

SEQ ID NO: 3510 - DNA, 14 bp, Artificial Sequence
  Description of Artificial Sequence: Synthetic oligonucleotide
gctactttcctcct

SEQ ID NO: 3511 - DNA, 14 bp, Artificial Sequence
  Description of Artificial Sequence: Synthetic oligonucleotide
tgctactttcctcc

SEQ ID NO: 3512 - DNA, 14 bp, Artificial Sequence
  Description of Artificial Sequence: Synthetic oligonucleotide
ctgctactttcctc

SEQ ID NO: 3513 - DNA, 14 bp, Artificial Sequence
  Description of Artificial Sequence: Synthetic oligonucleotide
tctgctactttcct

SEQ ID NO: 3514 - DNA, 14 bp, Artificial Sequence
  Description of Artificial Sequence: Synthetic oligonucleotide
ttctgctactttcc

SEQ ID NO: 3515 - DNA, 14 bp, Artificial Sequence
  Description of Artificial Sequence: Synthetic oligonucleotide
tttctgctactttc

SEQ ID NO: 3516 - DNA, 14 bp, Artificial Sequence
  Description of Artificial Sequence: Synthetic oligonucleotide
atttctgctacttt

SEQ ID NO: 3517 - DNA, 14 bp, Artificial Sequence
  Description of Artificial Sequence: Synthetic oligonucleotide
tatttctgctactt

SEQ ID NO: 3518 - DNA, 14 bp, Artificial Sequence
  Description of Artificial Sequence: Synthetic oligonucleotide
ttatttctgctact

SEQ ID NO: 3519 - DNA, 14 bp, Artificial Sequence
  Description of Artificial Sequence: Synthetic oligonucleotide
gttatttctgctac

SEQ ID NO: 3520 - DNA, 14 bp, Artificial Sequence
  Description of Artificial Sequence: Synthetic oligonucleotide
tgttatttctgcta

SEQ ID NO: 3521 - DNA, 14 bp, Artificial Sequence
  Description of Artificial Sequence: Synthetic oligonucleotide
ctgttatttctgct

SEQ ID NO: 3522 - DNA, 14 bp, Artificial Sequence
  Description of Artificial Sequence: Synthetic oligonucleotide
cctgttatttctgc

SEQ ID NO: 3523 - DNA, 14 bp, Artificial Sequence
  Description of Artificial Sequence: Synthetic oligonucleotide
tcctgttatttctg

SEQ ID NO: 3524 - DNA, 14 bp, Artificial Sequence
  Description of Artificial Sequence: Synthetic oligonucleotide
ctcctgttatttct

SEQ ID NO: 3525 - DNA, 14 bp, Artificial Sequence
  Description of Artificial Sequence: Synthetic oligonucleotide
tctcctgttatttc

SEQ ID NO: 3526 - DNA, 14 bp, Artificial Sequence
  Description of Artificial Sequence: Synthetic oligonucleotide
ctctcctgttattt

SEQ ID NO: 3527 - DNA, 14 bp, Artificial Sequence
  Description of Artificial Sequence: Synthetic oligonucleotide
tctctcctgttatt

SEQ ID NO: 3528 - DNA, 14 bp, Artificial Sequence
  Description of Artificial Sequence: Synthetic oligonucleotide
atctctcctgttat

SEQ ID NO: 3529 - DNA, 14 bp, Artificial Sequence
  Description of Artificial Sequence: Synthetic oligonucleotide
gatctctcctgtta

SEQ ID NO: 3530 - DNA, 14 bp, Artificial Sequence
  Description of Artificial Sequence: Synthetic oligonucleotide
ggatctctcctgtt

SEQ ID NO: 3531 - DNA, 14 bp, Artificial Sequence
  Description of Artificial Sequence: Synthetic oligonucleotide
tggatctctcctgt

SEQ ID NO: 3532 - DNA, 14 bp, Artificial Sequence
  Description of Artificial Sequence: Synthetic oligonucleotide
ctggatctctcctg

SEQ ID NO: 3533 - DNA, 14 bp, Artificial Sequence
  Description of Artificial Sequence: Synthetic oligonucleotide
gctggatctctcct

SEQ ID NO: 3534 - DNA, 14 bp, Artificial Sequence
  Description of Artificial Sequence: Synthetic oligonucleotide
tgctggatctctcc

SEQ ID NO: 3535 - DNA, 14 bp, Artificial Sequence
  Description of Artificial Sequence: Synthetic oligonucleotide
ctgctggatctctc

SEQ ID NO: 3536 - DNA, 14 bp, Artificial Sequence
  Description of Artificial Sequence: Synthetic oligonucleotide
actgctggatctct

SEQ ID NO: 3537 - DNA, 14 bp, Artificial Sequence
  Description of Artificial Sequence: Synthetic oligonucleotide
tactgctggatctc

SEQ ID NO: 3538 - DNA, 14 bp, Artificial Sequence
  Description of Artificial Sequence: Synthetic oligonucleotide
gtactgctggatct

SEQ ID NO: 3539 - DNA, 14 bp, Artificial Sequence
  Description of Artificial Sequence: Synthetic oligonucleotide
ggtactgctggatc

SEQ ID NO: 3540 - DNA, 14 bp, Artificial Sequence
  Description of Artificial Sequence: Synthetic oligonucleotide
tggtactgctggat

SEQ ID NO: 3541 - DNA, 14 bp, Artificial Sequence
  Description of Artificial Sequence: Synthetic oligonucleotide
ttggtactgctgga

SEQ ID NO: 3542 - DNA, 14 bp, Artificial Sequence
  Description of Artificial Sequence: Synthetic oligonucleotide
tttggtactgctgg

SEQ ID NO: 3543 - DNA, 14 bp, Artificial Sequence
  Description of Artificial Sequence: Synthetic oligonucleotide
ttttggtactgctg

SEQ ID NO: 3544 - DNA, 14 bp, Artificial Sequence
  Description of Artificial Sequence: Synthetic oligonucleotide
attttggtactgct

SEQ ID NO: 3545 - DNA, 14 bp, Artificial Sequence
  Description of Artificial Sequence: Synthetic oligonucleotide
gattttggtactgc

SEQ ID NO: 3546 - DNA, 14 bp, Artificial Sequence
  Description of Artificial Sequence: Synthetic oligonucleotide
tgattttggtactg

SEQ ID NO: 3547 - DNA, 14 bp, Artificial Sequence
  Description of Artificial Sequence: Synthetic oligonucleotide
ctgattttggtact

SEQ ID NO: 3548 - DNA, 14 bp, Artificial Sequence
  Description of Artificial Sequence: Synthetic oligonucleotide
gctgattttggtac

SEQ ID NO: 3549 - DNA, 14 bp, Artificial Sequence
  Description of Artificial Sequence: Synthetic oligonucleotide
ggctgattttggta

SEQ ID NO: 3550 - DNA, 14 bp, Artificial Sequence
  Description of Artificial Sequence: Synthetic oligonucleotide
aggctgattttggt

SEQ ID NO: 3551 - DNA, 14 bp, Artificial Sequence
  Description of Artificial Sequence: Synthetic oligonucleotide
aaggctgattttgg

SEQ ID NO: 3552 - DNA, 14 bp, Artificial Sequence
  Description of Artificial Sequence: Synthetic oligonucleotide
taaggctgattttg

SEQ ID NO: 3553 - DNA, 14 bp, Artificial Sequence
  Description of Artificial Sequence: Synthetic oligonucleotide
gtaaggctgatttt

SEQ ID NO: 3554 - DNA, 14 bp, Artificial Sequence
  Description of Artificial Sequence: Synthetic oligonucleotide
agtaaggctgattt

SEQ ID NO: 3555 - DNA, 14 bp, Artificial Sequence
  Description of Artificial Sequence: Synthetic oligonucleotide
cagtaaggctgatt

SEQ ID NO: 3556 - DNA, 14 bp, Artificial Sequence
  Description of Artificial Sequence: Synthetic oligonucleotide
acagtaaggctgat

SEQ ID NO: 3557 - DNA, 14 bp, Artificial Sequence
  Description of Artificial Sequence: Synthetic oligonucleotide
aacagtaaggctga

SEQ ID NO: 3558 - DNA, 14 bp, Artificial Sequence
  Description of Artificial Sequence: Synthetic oligonucleotide
aaacagtaaggctg

SEQ ID NO: 3559 - DNA, 14 bp, Artificial Sequence
  Description of Artificial Sequence: Synthetic oligonucleotide
taaacagtaaggct

SEQ ID NO: 3560 - DNA, 14 bp, Artificial Sequence
  Description of Artificial Sequence: Synthetic oligonucleotide
gtaaacagtaaggc

SEQ ID NO: 3561 - DNA, 14 bp, Artificial Sequence
  Description of Artificial Sequence: Synthetic oligonucleotide
cgtaaacagtaagg

SEQ ID NO: 3562 - DNA, 14 bp, Artificial Sequence
  Description of Artificial Sequence: Synthetic oligonucleotide
tcgtaaacagtaag

SEQ ID NO: 3563 - DNA, 14 bp, Artificial Sequence
  Description of Artificial Sequence: Synthetic oligonucleotide
ctcgtaaacagtaa

SEQ ID NO: 3564 - DNA, 14 bp, Artificial Sequence
  Description of Artificial Sequence: Synthetic oligonucleotide
actcgtaaacagta

SEQ ID NO: 3565 - DNA, 14 bp, Artificial Sequence
  Description of Artificial Sequence: Synthetic oligonucleotide
tactcgtaaacagt

SEQ ID NO: 3566 - DNA, 14 bp, Artificial Sequence
  Description of Artificial Sequence: Synthetic oligonucleotide
ctactcgtaaacag

SEQ ID NO: 3567 - DNA, 14 bp, Artificial Sequence
  Description of Artificial Sequence: Synthetic oligonucleotide
tctactcgtaaaca

SEQ ID NO: 3568 - DNA, 14 bp, Artificial Sequence
  Description of Artificial Sequence: Synthetic oligonucleotide
ttctactcgtaaac

SEQ ID NO: 3569 - DNA, 14 bp, Artificial Sequence
  Description of Artificial Sequence: Synthetic oligonucleotide
attctactcgtaaa

SEQ ID NO: 3570 - DNA, 14 bp, Artificial Sequence
  Description of Artificial Sequence: Synthetic oligonucleotide
gattctactcgtaa

SEQ ID NO: 3571 - DNA, 14 bp, Artificial Sequence
  Description of Artificial Sequence: Synthetic oligonucleotide
tgattctactcgta

SEQ ID NO: 3572 - DNA, 14 bp, Artificial Sequence
  Description of Artificial Sequence: Synthetic oligonucleotide
ctgattctactcgt

SEQ ID NO: 3573 - DNA, 14 bp, Artificial Sequence
  Description of Artificial Sequence: Synthetic oligonucleotide
tctgattctactcg

SEQ ID NO: 3574 - DNA, 14 bp, Artificial Sequence
  Description of Artificial Sequence: Synthetic oligonucleotide
atctgattctactc

SEQ ID NO: 3575 - DNA, 14 bp, Artificial Sequence
  Description of Artificial Sequence: Synthetic oligonucleotide
tatctgattctact

SEQ ID NO: 3576 - DNA, 14 bp, Artificial Sequence
  Description of Artificial Sequence: Synthetic oligonucleotide
atatctgattctac

SEQ ID NO: 3577 - DNA, 14 bp, Artificial Sequence
  Description of Artificial Sequence: Synthetic oligonucleotide
gatatctgattcta

SEQ ID NO: 3578 - DNA, 14 bp, Artificial Sequence
  Description of Artificial Sequence: Synthetic oligonucleotide
tgatatctgattct

SEQ ID NO: 3579 - DNA, 14 bp, Artificial Sequence
  Description of Artificial Sequence: Synthetic oligonucleotide
ttgatatctgattc

SEQ ID NO: 3580 - DNA, 14 bp, Artificial Sequence
  Description of Artificial Sequence: Synthetic oligonucleotide
tttgatatctgatt

SEQ ID NO: 3581 - DNA, 14 bp, Artificial Sequence
  Description of Artificial Sequence: Synthetic oligonucleotide
ttttgatatctgat

SEQ ID NO: 3582 - DNA, 14 bp, Artificial Sequence
  Description of Artificial Sequence: Synthetic oligonucleotide
cttttgatatctga

SEQ ID NO: 3583 - DNA, 14 bp, Artificial Sequence
  Description of Artificial Sequence: Synthetic oligonucleotide
ccttttgatatctg

SEQ ID NO: 3584 - DNA, 14 bp, Artificial Sequence
  Description of Artificial Sequence: Synthetic oligonucleotide
accttttgatatct

SEQ ID NO: 3585 - DNA, 14 bp, Artificial Sequence
  Description of Artificial Sequence: Synthetic oligonucleotide
aaccttttgatatc

SEQ ID NO: 3586 - DNA, 14 bp, Artificial Sequence
  Description of Artificial Sequence: Synthetic oligonucleotide
gaaccttttgatat

SEQ ID NO: 3587 - DNA, 14 bp, Artificial Sequence
  Description of Artificial Sequence: Synthetic oligonucleotide
agaaccttttgata

SEQ ID NO: 3588 - DNA, 14 bp, Artificial Sequence
  Description of Artificial Sequence: Synthetic oligonucleotide
aagaaccttttgat

SEQ ID NO: 3589 - DNA, 14 bp, Artificial Sequence
  Description of Artificial Sequence: Synthetic oligonucleotide
aaagaaccttttga

SEQ ID NO: 3590 - DNA, 14 bp, Artificial Sequence
  Description of Artificial Sequence: Synthetic oligonucleotide
caaagaaccttttg

SEQ ID NO: 3591 - DNA, 14 bp, Artificial Sequence
  Description of Artificial Sequence: Synthetic oligonucleotide
tcaaagaacctttt

SEQ ID NO: 3592 - DNA, 14 bp, Artificial Sequence
  Description of Artificial Sequence: Synthetic oligonucleotide
ttcaaagaaccttt

SEQ ID NO: 3593 - DNA, 14 bp, Artificial Sequence
  Description of Artificial Sequence: Synthetic oligonucleotide
tttcaaagaacctt

SEQ ID NO: 3594 - DNA, 14 bp, Artificial Sequence
  Description of Artificial Sequence: Synthetic oligonucleotide
ttttcaaagaacct

SEQ ID NO: 3595 - DNA, 14 bp, Artificial Sequence
  Description of Artificial Sequence: Synthetic oligonucleotide
gttttcaaagaacc

SEQ ID NO: 3596 - DNA, 14 bp, Artificial Sequence
  Description of Artificial Sequence: Synthetic oligonucleotide
agttttcaaagaac

SEQ ID NO: 3597 - DNA, 14 bp, Artificial Sequence
  Description of Artificial Sequence: Synthetic oligonucleotide
aagttttcaaagaa

SEQ ID NO: 3598 - DNA, 14 bp, Artificial Sequence
  Description of Artificial Sequence: Synthetic oligonucleotide
caagttttcaaaga

SEQ ID NO: 3599 - DNA, 14 bp, Artificial Sequence
  Description of Artificial Sequence: Synthetic oligonucleotide
tcaagttttcaaag

SEQ ID NO: 3600 - DNA, 14 bp, Artificial Sequence
  Description of Artificial Sequence: Synthetic oligonucleotide
ttcaagttttcaaa

SEQ ID NO: 3601 - DNA, 14 bp, Artificial Sequence
  Description of Artificial Sequence: Synthetic oligonucleotide
attcaagttttcaa

SEQ ID NO: 3602 - DNA, 14 bp, Artificial Sequence
  Description of Artificial Sequence: Synthetic oligonucleotide
gattcaagttttca

SEQ ID NO: 3603 - DNA, 14 bp, Artificial Sequence
  Description of Artificial Sequence: Synthetic oligonucleotide
ggattcaagttttc

SEQ ID NO: 3604 - DNA, 14 bp, Artificial Sequence
  Description of Artificial Sequence: Synthetic oligonucleotide
cggattcaagtttt

SEQ ID NO: 3605 - DNA, 14 bp, Artificial Sequence
  Description of Artificial Sequence: Synthetic oligonucleotide
tcggattcaagttt

SEQ ID NO: 3606 - DNA, 14 bp, Artificial Sequence
  Description of Artificial Sequence: Synthetic oligonucleotide
atcggattcaagtt

SEQ ID NO: 3607 - DNA, 14 bp, Artificial Sequence
  Description of Artificial Sequence: Synthetic oligonucleotide
catcggattcaagt

SEQ ID NO: 3608 - DNA, 14 bp, Artificial Sequence
  Description of Artificial Sequence: Synthetic oligonucleotide
ccatcggattcaag

SEQ ID NO: 3609 - DNA, 14 bp, Artificial Sequence
  Description of Artificial Sequence: Synthetic oligonucleotide
cccatcggattcaa

SEQ ID NO: 3610 - DNA, 14 bp, Artificial Sequence
  Description of Artificial Sequence: Synthetic oligonucleotide
tcccatcggattca

SEQ ID NO: 3611 - DNA, 14 bp, Artificial Sequence
  Description of Artificial Sequence: Synthetic oligonucleotide
ttcccatcggattc

SEQ ID NO: 3612 - DNA, 14 bp, Artificial Sequence
  Description of Artificial Sequence: Synthetic oligonucleotide
tttcccatcggatt

SEQ ID NO: 3613 - DNA, 14 bp, Artificial Sequence
  Description of Artificial Sequence: Synthetic oligonucleotide
atttcccatcggat

SEQ ID NO: 3614 - DNA, 14 bp, Artificial Sequence
  Description of Artificial Sequence: Synthetic oligonucleotide
tatttcccatcgga

SEQ ID NO: 3615 - DNA, 14 bp, Artificial Sequence
  Description of Artificial Sequence: Synthetic oligonucleotide
ctatttcccatcgg

SEQ ID NO: 3616 - DNA, 14 bp, Artificial Sequence
  Description of Artificial Sequence: Synthetic oligonucleotide
gctatttcccatcg

SEQ ID NO: 3617 - DNA, 14 bp, Artificial Sequence
  Description of Artificial Sequence: Synthetic oligonucleotide
tgctatttcccatc

SEQ ID NO: 3618 - DNA, 14 bp, Artificial Sequence
  Description of Artificial Sequence: Synthetic oligonucleotide
atgctatttcccat

SEQ ID NO: 3619 - DNA, 14 bp, Artificial Sequence
  Description of Artificial Sequence: Synthetic oligonucleotide
catgctatttccca

SEQ ID NO: 3620 - DNA, 14 bp, Artificial Sequence
  Description of Artificial Sequence: Synthetic oligonucleotide
ccatgctatttccc

SEQ ID NO: 3621 - DNA, 14 bp, Artificial Sequence
  Description of Artificial Sequence: Synthetic oligonucleotide
tccatgctatttcc

SEQ ID NO: 3622 - DNA, 14 bp, Artificial Sequence
  Description of Artificial Sequence: Synthetic oligonucleotide
ctccatgctatttc

SEQ ID NO: 3623 - DNA, 14 bp, Artificial Sequence
  Description of Artificial Sequence: Synthetic oligonucleotide
tctccatgctattt

SEQ ID NO: 3624 - DNA, 14 bp, Artificial Sequence
  Description of Artificial Sequence: Synthetic oligonucleotide
ttctccatgctatt

SEQ ID NO: 3625 - DNA, 14 bp, Artificial Sequence
  Description of Artificial Sequence: Synthetic oligonucleotide
cttctccatgctat

SEQ ID NO: 3626 - DNA, 14 bp, Artificial Sequence
  Description of Artificial Sequence: Synthetic oligonucleotide
ccttctccatgcta

SEQ ID NO: 3627 - DNA, 14 bp, Artificial Sequence
  Description of Artificial Sequence: Synthetic oligonucleotide
tccttctccatgct

SEQ ID NO: 3628 - DNA, 14 bp, Artificial Sequence
  Description of Artificial Sequence: Synthetic oligonucleotide
ttccttctccatgc

SEQ ID NO: 3629 - DNA, 14 bp, Artificial Sequence
  Description of Artificial Sequence: Synthetic oligonucleotide
attccttctccatg

SEQ ID NO: 3630 - DNA, 14 bp, Artificial Sequence
  Description of Artificial Sequence: Synthetic oligonucleotide
aattccttctccat

SEQ ID NO: 3631 - DNA, 14 bp, Artificial Sequence
  Description of Artificial Sequence: Synthetic oligonucleotide
aaattccttctcca

SEQ ID NO: 3632 - DNA, 14 bp, Artificial Sequence
  Description of Artificial Sequence: Synthetic oligonucleotide
taaattccttctcc

SEQ ID NO: 3633 - DNA, 14 bp, Artificial Sequence
  Description of Artificial Sequence: Synthetic oligonucleotide
gtaaattccttctc

SEQ ID NO: 3634 - DNA, 14 bp, Artificial Sequence
  Description of Artificial Sequence: Synthetic oligonucleotide
tgtaaattccttct

SEQ ID NO: 3635 - DNA, 14 bp, Artificial Sequence
  Description of Artificial Sequence: Synthetic oligonucleotide
ctgtaaattccttc

SEQ ID NO: 3636 - DNA, 14 bp, Artificial Sequence
  Description of Artificial Sequence: Synthetic oligonucleotide
tctgtaaattcctt

SEQ ID NO: 3637 - DNA, 14 bp, Artificial Sequence
  Description of Artificial Sequence: Synthetic oligonucleotide
atctgtaaattcct

SEQ ID NO: 3638 - DNA, 14 bp, Artificial Sequence
  Description of Artificial Sequence: Synthetic oligonucleotide
aatctgtaaattcc

SEQ ID NO: 3639 - DNA, 14 bp, Artificial Sequence
  Description of Artificial Sequence: Synthetic oligonucleotide
taatctgtaaattc

SEQ ID NO: 3640 - DNA, 14 bp, Artificial Sequence
  Description of Artificial Sequence: Synthetic oligonucleotide
ataatctgtaaatt

SEQ ID NO: 3641 - DNA, 14 bp, Artificial Sequence
  Description of Artificial Sequence: Synthetic oligonucleotide
gataatctgtaaat

SEQ ID NO: 3642 - DNA, 14 bp, Artificial Sequence
  Description of Artificial Sequence: Synthetic oligonucleotide
agataatctgtaaa

SEQ ID NO: 3643 - DNA, 14 bp, Artificial Sequence
  Description of Artificial Sequence: Synthetic oligonucleotide
aagataatctgtaa

SEQ ID NO: 3644 - DNA, 14 bp, Artificial Sequence
  Description of Artificial Sequence: Synthetic oligonucleotide
aaagataatctgta

SEQ ID NO: 3645 - DNA, 14 bp, Artificial Sequence
  Description of Artificial Sequence: Synthetic oligonucleotide
aaaagataatctgt

SEQ ID NO: 3646 - DNA, 14 bp, Artificial Sequence
  Description of Artificial Sequence: Synthetic oligonucleotide
gaaaagataatctg

SEQ ID NO: 3647 - DNA, 14 bp, Artificial Sequence
  Description of Artificial Sequence: Synthetic oligonucleotide
tgaaaagataatct

SEQ ID NO: 3648 - DNA, 14 bp, Artificial Sequence
  Description of Artificial Sequence: Synthetic oligonucleotide
ttgaaaagataatc

SEQ ID NO: 3649 - DNA, 14 bp, Artificial Sequence
  Description of Artificial Sequence: Synthetic oligonucleotide
gttgaaaagataat

SEQ ID NO: 3650 - DNA, 14 bp, Artificial Sequence
  Description of Artificial Sequence: Synthetic oligonucleotide
tgttgaaaagataa

SEQ ID NO: 3651 - DNA, 14 bp, Artificial Sequence
  Description of Artificial Sequence: Synthetic oligonucleotide
ttgttgaaaagata

SEQ ID NO: 3652 - DNA, 14 bp, Artificial Sequence
  Description of Artificial Sequence: Synthetic oligonucleotide
tttgttgaaaagat

SEQ ID NO: 3653 - DNA, 14 bp, Artificial Sequence
  Description of Artificial Sequence: Synthetic oligonucleotide
atttgttgaaaaga

SEQ ID NO: 3654 - DNA, 14 bp, Artificial Sequence
  Description of Artificial Sequence: Synthetic oligonucleotide
gatttgttgaaaag

SEQ ID NO: 3655 - DNA, 14 bp, Artificial Sequence
  Description of Artificial Sequence: Synthetic oligonucleotide
ggatttgttgaaaa

SEQ ID NO: 3656 - DNA, 14 bp, Artificial Sequence
  Description of Artificial Sequence: Synthetic oligonucleotide
gggatttgttgaaa

SEQ ID NO: 3657 - DNA, 14 bp, Artificial Sequence
  Description of Artificial Sequence: Synthetic oligonucleotide
agggatttgttgaa

SEQ ID NO: 3658 - DNA, 14 bp, Artificial Sequence
  Description of Artificial Sequence: Synthetic oligonucleotide
tagggatttgttga

SEQ ID NO: 3659 - DNA, 14 bp, Artificial Sequence
  Description of Artificial Sequence: Synthetic oligonucleotide
ctagggatttgttg

SEQ ID NO: 3660 - DNA, 14 bp, Artificial Sequence
  Description of Artificial Sequence: Synthetic oligonucleotide
tctagggatttgtt

SEQ ID NO: 3661 - DNA, 14 bp, Artificial Sequence
  Description of Artificial Sequence: Synthetic oligonucleotide
ttctagggatttgt

SEQ ID NO: 3662 - DNA, 14 bp, Artificial Sequence
  Description of Artificial Sequence: Synthetic oligonucleotide
tttctagggatttg

SEQ ID NO: 3663 - DNA, 14 bp, Artificial Sequence
  Description of Artificial Sequence: Synthetic oligonucleotide
atttctagggattt

SEQ ID NO: 3664 - DNA, 14 bp, Artificial Sequence
  Description of Artificial Sequence: Synthetic oligonucleotide
tatttctagggatt

SEQ ID NO: 3665 - DNA, 14 bp, Artificial Sequence
  Description of Artificial Sequence: Synthetic oligonucleotide
ctatttctagggat

SEQ ID NO: 3666 - DNA, 14 bp, Artificial Sequence
  Description of Artificial Sequence: Synthetic oligonucleotide
tctatttctaggga

SEQ ID NO: 3667 - DNA, 14 bp, Artificial Sequence
  Description of Artificial Sequence: Synthetic oligonucleotide
ttctatttctaggg

SEQ ID NO: 3668 - DNA, 14 bp, Artificial Sequence
  Description of Artificial Sequence: Synthetic oligonucleotide
gttctatttctagg

SEQ ID NO: 3669 - DNA, 14 bp, Artificial Sequence
  Description of Artificial Sequence: Synthetic oligonucleotide
ggttctatttctag

SEQ ID NO: 3670 - DNA, 14 bp, Artificial Sequence
  Description of Artificial Sequence: Synthetic oligonucleotide
tggttctatttcta

SEQ ID NO: 3671 - DNA, 14 bp, Artificial Sequence
  Description of Artificial Sequence: Synthetic oligonucleotide
gtggttctatttct

SEQ ID NO: 3672 - DNA, 14 bp, Artificial Sequence
  Description of Artificial Sequence: Synthetic oligonucleotide
cgtggttctatttc

SEQ ID NO: 3673 - DNA, 14 bp, Artificial Sequence
  Description of Artificial Sequence: Synthetic oligonucleotide
tcgtggttctattt

SEQ ID NO: 3674 - DNA, 14 bp, Artificial Sequence
  Description of Artificial Sequence: Synthetic oligonucleotide
ttcgtggttctatt

SEQ ID NO: 3675 - DNA, 14 bp, Artificial Sequence
  Description of Artificial Sequence: Synthetic oligonucleotide
tttcgtggttctat

SEQ ID NO: 3676 - DNA, 14 bp, Artificial Sequence
  Description of Artificial Sequence: Synthetic oligonucleotide
gtttcgtggttcta

SEQ ID NO: 3677 - DNA, 14 bp, Artificial Sequence
  Description of Artificial Sequence: Synthetic oligonucleotide
ggtttcgtggttct

SEQ ID NO: 3678 - DNA, 14 bp, Artificial Sequence
  Description of Artificial Sequence: Synthetic oligonucleotide
gggtttcgtggttc

SEQ ID NO: 3679 - DNA, 14 bp, Artificial Sequence
  Description of Artificial Sequence: Synthetic oligonucleotide
agggtttcgtggtt

SEQ ID NO: 3680 - DNA, 14 bp, Artificial Sequence
  Description of Artificial Sequence: Synthetic oligonucleotide
tagggtttcgtggt

SEQ ID NO: 3681 - DNA, 14 bp, Artificial Sequence
  Description of Artificial Sequence: Synthetic oligonucleotide
ttagggtttcgtgg

SEQ ID NO: 3682 - DNA, 14 bp, Artificial Sequence
  Description of Artificial Sequence: Synthetic oligonucleotide
cttagggtttcgtg

SEQ ID NO: 3683 - DNA, 14 bp, Artificial Sequence
  Description of Artificial Sequence: Synthetic oligonucleotide
gcttagggtttcgt

SEQ ID NO: 3684 - DNA, 14 bp, Artificial Sequence
  Description of Artificial Sequence: Synthetic oligonucleotide
ggcttagggtttcg

SEQ ID NO: 3685 - DNA, 14 bp, Artificial Sequence
  Description of Artificial Sequence: Synthetic oligonucleotide
aggcttagggtttc

SEQ ID NO: 3686 - DNA, 14 bp, Artificial Sequence
  Description of Artificial Sequence: Synthetic oligonucleotide
gaggcttagggttt

SEQ ID NO: 3687 - DNA, 14 bp, Artificial Sequence
  Description of Artificial Sequence: Synthetic oligonucleotide
agaggcttagggtt

SEQ ID NO: 3688 - DNA, 14 bp, Artificial Sequence
  Description of Artificial Sequence: Synthetic oligonucleotide
gagaggcttagggt

SEQ ID NO: 3689 - DNA, 14 bp, Artificial Sequence
  Description of Artificial Sequence: Synthetic oligonucleotide
ggagaggcttaggg

SEQ ID NO: 3690 - DNA, 14 bp, Artificial Sequence
  Description of Artificial Sequence: Synthetic oligonucleotide
gggagaggcttagg

SEQ ID NO: 3691 - DNA, 14 bp, Artificial Sequence
  Description of Artificial Sequence: Synthetic oligonucleotide
tgggagaggcttag

SEQ ID NO: 3692 - DNA, 14 bp, Artificial Sequence
  Description of Artificial Sequence: Synthetic oligonucleotide
ttgggagaggctta

SEQ ID NO: 3693 - DNA, 14 bp, Artificial Sequence
  Description of Artificial Sequence: Synthetic oligonucleotide
cttgggagaggctt

SEQ ID NO: 3694 - DNA, 14 bp, Artificial Sequence
  Description of Artificial Sequence: Synthetic oligonucleotide
tcttgggagaggct

SEQ ID NO: 3695 - DNA, 14 bp, Artificial Sequence
  Description of Artificial Sequence: Synthetic oligonucleotide
atcttgggagaggc

SEQ ID NO: 3696 - DNA, 14 bp, Artificial Sequence
  Description of Artificial Sequence: Synthetic oligonucleotide
aatcttgggagagg

SEQ ID NO: 3697 - DNA, 14 bp, Artificial Sequence
  Description of Artificial Sequence: Synthetic oligonucleotide
aaatcttgggagag

SEQ ID NO: 3698 - DNA, 14 bp, Artificial Sequence
  Description of Artificial Sequence: Synthetic oligonucleotide
gaaatcttgggaga

SEQ ID NO: 3699 - DNA, 14 bp, Artificial Sequence
  Description of Artificial Sequence: Synthetic oligonucleotide
ggaaatcttgggag

SEQ ID NO: 3700 - DNA, 14 bp, Artificial Sequence
  Description of Artificial Sequence: Synthetic oligonucleotide
tggaaatcttggga

SEQ ID NO: 3701 - DNA, 14 bp, Artificial Sequence
  Description of Artificial Sequence: Synthetic oligonucleotide
ttggaaatcttggg

SEQ ID NO: 3702 - DNA, 14 bp, Artificial Sequence
  Description of Artificial Sequence: Synthetic oligonucleotide
tttggaaatcttgg

SEQ ID NO: 3703 - DNA, 14 bp, Artificial Sequence
  Description of Artificial Sequence: Synthetic oligonucleotide
ttttggaaatcttg

SEQ ID NO: 3704 - DNA, 14 bp, Artificial Sequence
  Description of Artificial Sequence: Synthetic oligonucleotide
tttttggaaatctt

SEQ ID NO: 3705 - DNA, 14 bp, Artificial Sequence
  Description of Artificial Sequence: Synthetic oligonucleotide
ttttttggaaatct

SEQ ID NO: 3706 - DNA, 14 bp, Artificial Sequence
  Description of Artificial Sequence: Synthetic oligonucleotide
tttttttggaaatc

SEQ ID NO: 3707 - DNA, 14 bp, Artificial Sequence
  Description of Artificial Sequence: Synthetic oligonucleotide
atttttttggaaat

SEQ ID NO: 3708 - DNA, 14 bp, Artificial Sequence
  Description of Artificial Sequence: Synthetic oligonucleotide
tatttttttggaaa

SEQ ID NO: 3709 - DNA, 14 bp, Artificial Sequence
  Description of Artificial Sequence: Synthetic oligonucleotide
atatttttttggaa

SEQ ID NO: 3710 - DNA, 14 bp, Artificial Sequence
  Description of Artificial Sequence: Synthetic oligonucleotide
tatatttttttgga

SEQ ID NO: 3711 - DNA, 14 bp, Artificial Sequence
  Description of Artificial Sequence: Synthetic oligonucleotide
ctatatttttttgg

SEQ ID NO: 3712 - DNA, 14 bp, Artificial Sequence
  Description of Artificial Sequence: Synthetic oligonucleotide
gctatatttttttg

SEQ ID NO: 3713 - DNA, 14 bp, Artificial Sequence
  Description of Artificial Sequence: Synthetic oligonucleotide
agctatattttttt

SEQ ID NO: 3714 - DNA, 14 bp, Artificial Sequence
  Description of Artificial Sequence: Synthetic oligonucleotide
tagctatatttttt

SEQ ID NO: 3715 - DNA, 14 bp, Artificial Sequence
  Description of Artificial Sequence: Synthetic oligonucleotide
atagctatattttt

SEQ ID NO: 3716 - DNA, 14 bp, Artificial Sequence
  Description of Artificial Sequence: Synthetic oligonucleotide
gatagctatatttt

SEQ ID NO: 3717 - DNA, 14 bp, Artificial Sequence
  Description of Artificial Sequence: Synthetic oligonucleotide
ggatagctatattt

SEQ ID NO: 3718 - DNA, 14 bp, Artificial Sequence
  Description of Artificial Sequence: Synthetic oligonucleotide
gggatagctatatt

SEQ ID NO: 3719 - DNA, 14 bp, Artificial Sequence
  Description of Artificial Sequence: Synthetic oligonucleotide
ggggatagctatat

SEQ ID NO: 3720 - DNA, 14 bp, Artificial Sequence
  Description of Artificial Sequence: Synthetic oligonucleotide
aggggatagctata

SEQ ID NO: 3721 - DNA, 14 bp, Artificial Sequence
  Description of Artificial Sequence: Synthetic oligonucleotide
taggggatagctat

SEQ ID NO: 3722 - DNA, 14 bp, Artificial Sequence
  Description of Artificial Sequence: Synthetic oligonucleotide
ttaggggatagcta

SEQ ID NO: 3723 - DNA, 14 bp, Artificial Sequence
  Description of Artificial Sequence: Synthetic oligonucleotide
tttaggggatagct

SEQ ID NO: 3724 - DNA, 14 bp, Artificial Sequence
  Description of Artificial Sequence: Synthetic oligonucleotide
ttttaggggatagc

SEQ ID NO: 3725 - DNA, 14 bp, Artificial Sequence
  Description of Artificial Sequence: Synthetic oligonucleotide
attttaggggatag

SEQ ID NO: 3726 - DNA, 14 bp, Artificial Sequence
  Description of Artificial Sequence: Synthetic oligonucleotide
gattttaggggata

SEQ ID NO: 3727 - DNA, 14 bp, Artificial Sequence
  Description of Artificial Sequence: Synthetic oligonucleotide
agattttaggggat

SEQ ID NO: 3728 - DNA, 14 bp, Artificial Sequence
  Description of Artificial Sequence: Synthetic oligonucleotide
gagattttagggga

SEQ ID NO: 3729 - DNA, 14 bp, Artificial Sequence
  Description of Artificial Sequence: Synthetic oligonucleotide
ggagattttagggg

SEQ ID NO: 3730 - DNA, 14 bp, Artificial Sequence
  Description of Artificial Sequence: Synthetic oligonucleotide
aggagattttaggg

SEQ ID NO: 3731 - DNA, 14 bp, Artificial Sequence
  Description of Artificial Sequence: Synthetic oligonucleotide
caggagattttagg

SEQ ID NO: 3732 - DNA, 14 bp, Artificial Sequence
  Description of Artificial Sequence: Synthetic oligonucleotide
ccaggagattttag

SEQ ID NO: 3733 - DNA, 14 bp, Artificial Sequence
  Description of Artificial Sequence: Synthetic oligonucleotide
accaggagatttta

SEQ ID NO: 3734 - DNA, 14 bp, Artificial Sequence
  Description of Artificial Sequence: Synthetic oligonucleotide
caccaggagatttt

SEQ ID NO: 3735 - DNA, 14 bp, Artificial Sequence
  Description of Artificial Sequence: Synthetic oligonucleotide
acaccaggagattt

SEQ ID NO: 3736 - DNA, 14 bp, Artificial Sequence
  Description of Artificial Sequence: Synthetic oligonucleotide
aacaccaggagatt

SEQ ID NO: 3737 - DNA, 14 bp, Artificial Sequence
  Description of Artificial Sequence: Synthetic oligonucleotide
gaacaccaggagat

SEQ ID NO: 3738 - DNA, 14 bp, Artificial Sequence
  Description of Artificial Sequence: Synthetic oligonucleotide
cgaacaccaggaga

SEQ ID NO: 3739 - DNA, 14 bp, Artificial Sequence
  Description of Artificial Sequence: Synthetic oligonucleotide
acgaacaccaggag

SEQ ID NO: 3740 - DNA, 14 bp, Artificial Sequence
  Description of Artificial Sequence: Synthetic oligonucleotide
gacgaacaccagga

SEQ ID NO: 3741 - DNA, 14 bp, Artificial Sequence
  Description of Artificial Sequence: Synthetic oligonucleotide
ggacgaacaccagg

SEQ ID NO: 3742 - DNA, 14 bp, Artificial Sequence
  Description of Artificial Sequence: Synthetic oligonucleotide
tggacgaacaccag

SEQ ID NO: 3743 - DNA, 14 bp, Artificial Sequence
  Description of Artificial Sequence: Synthetic oligonucleotide
atggacgaacacca

SEQ ID NO: 3744 - DNA, 14 bp, Artificial Sequence
  Description of Artificial Sequence: Synthetic oligonucleotide
gatggacgaacacc

SEQ ID NO: 3745 - DNA, 14 bp, Artificial Sequence
  Description of Artificial Sequence: Synthetic oligonucleotide
tgatggacgaacac

SEQ ID NO: 3746 - DNA, 14 bp, Artificial Sequence
  Description of Artificial Sequence: Synthetic oligonucleotide
ttgatggacgaaca

SEQ ID NO: 3747 - DNA, 14 bp, Artificial Sequence
  Description of Artificial Sequence: Synthetic oligonucleotide
tttgatggacgaac

SEQ ID NO: 3748 - DNA, 14 bp, Artificial Sequence
  Description of Artificial Sequence: Synthetic oligonucleotide
gtttgatggacgaa

SEQ ID NO: 3749 - DNA, 14 bp, Artificial Sequence
  Description of Artificial Sequence: Synthetic oligonucleotide
ggtttgatggacga

SEQ ID NO: 3750 - DNA, 14 bp, Artificial Sequence
  Description of Artificial Sequence: Synthetic oligonucleotide
gggtttgatggacg

SEQ ID NO: 3751 - DNA, 14 bp, Artificial Sequence
  Description of Artificial Sequence: Synthetic oligonucleotide
tgggtttgatggac

SEQ ID NO: 3752 - DNA, 14 bp, Artificial Sequence
  Description of Artificial Sequence: Synthetic oligonucleotide
ttgggtttgatgga

SEQ ID NO: 3753 - DNA, 14 bp, Artificial Sequence
  Description of Artificial Sequence: Synthetic oligonucleotide
cttgggtttgatgg

SEQ ID NO: 3754 - DNA, 14 bp, Artificial Sequence
  Description of Artificial Sequence: Synthetic oligonucleotide
tcttgggtttgatg

SEQ ID NO: 3755 - DNA, 14 bp, Artificial Sequence
  Description of Artificial Sequence: Synthetic oligonucleotide
gtcttgggtttgat

SEQ ID NO: 3756 - DNA, 14 bp, Artificial Sequence
  Description of Artificial Sequence: Synthetic oligonucleotide
ggtcttgggtttga

SEQ ID NO: 3757 - DNA, 14 bp, Artificial Sequence
  Description of Artificial Sequence: Synthetic oligonucleotide
tggtcttgggtttg

SEQ ID NO: 3758 - DNA, 14 bp, Artificial Sequence
  Description of Artificial Sequence: Synthetic oligonucleotide
ctggtcttgggttt

SEQ ID NO: 3759 - DNA, 14 bp, Artificial Sequence
  Description of Artificial Sequence: Synthetic oligonucleotide
cctggtcttgggtt

SEQ ID NO: 3760 - DNA, 14 bp, Artificial Sequence
  Description of Artificial Sequence: Synthetic oligonucleotide
acctggtcttgggt

SEQ ID NO: 3761 - DNA, 14 bp, Artificial Sequence
  Description of Artificial Sequence: Synthetic oligonucleotide
tacctggtcttggg

SEQ ID NO: 3762 - DNA, 14 bp, Artificial Sequence
  Description of Artificial Sequence: Synthetic oligonucleotide
gtacctggtcttgg

SEQ ID NO: 3763 - DNA, 14 bp, Artificial Sequence
  Description of Artificial Sequence: Synthetic oligonucleotide
ggtacctggtcttg

SEQ ID NO: 3764 - DNA, 14 bp, Artificial Sequence
  Description of Artificial Sequence: Synthetic oligonucleotide
tggtacctggtctt

SEQ ID NO: 3765 - DNA, 14 bp, Artificial Sequence
  Description of Artificial Sequence: Synthetic oligonucleotide
atggtacctggtct

SEQ ID NO: 3766 - DNA, 14 bp, Artificial Sequence
  Description of Artificial Sequence: Synthetic oligonucleotide
catggtacctggtc

SEQ ID NO: 3767 - DNA, 14 bp, Artificial Sequence
  Description of Artificial Sequence: Synthetic oligonucleotide
tcatggtacctggt

SEQ ID NO: 3768 - DNA, 14 bp, Artificial Sequence
  Description of Artificial Sequence: Synthetic oligonucleotide
ctcatggtacctgg

SEQ ID NO: 3769 - DNA, 14 bp, Artificial Sequence
  Description of Artificial Sequence: Synthetic oligonucleotide
cctcatggtacctg

SEQ ID NO: 3770 - DNA, 14 bp, Artificial Sequence
  Description of Artificial Sequence: Synthetic oligonucleotide
gcctcatggtacct

SEQ ID NO: 3771 - DNA, 14 bp, Artificial Sequence
  Description of Artificial Sequence: Synthetic oligonucleotide
tgcctcatggtacc

SEQ ID NO: 3772 - DNA, 14 bp, Artificial Sequence
  Description of Artificial Sequence: Synthetic oligonucleotide
atgcctcatggtac

SEQ ID NO: 3773 - DNA, 14 bp, Artificial Sequence
  Description of Artificial Sequence: Synthetic oligonucleotide
gatgcctcatggta

SEQ ID NO: 3774 - DNA, 14 bp, Artificial Sequence
  Description of Artificial Sequence: Synthetic oligonucleotide
ggatgcctcatggt

SEQ ID NO: 3775 - DNA, 14 bp, Artificial Sequence
  Description of Artificial Sequence: Synthetic oligonucleotide
gggatgcctcatgg

SEQ ID NO: 3776 - DNA, 14 bp, Artificial Sequence
  Description of Artificial Sequence: Synthetic oligonucleotide
tgggatgcctcatg

SEQ ID NO: 3777 - DNA, 14 bp, Artificial Sequence
  Description of Artificial Sequence: Synthetic oligonucleotide
gtgggatgcctcat

SEQ ID NO: 3778 - DNA, 14 bp, Artificial Sequence
  Description of Artificial Sequence: Synthetic oligonucleotide
tgtgggatgcctca

SEQ ID NO: 3779 - DNA, 14 bp, Artificial Sequence
  Description of Artificial Sequence: Synthetic oligonucleotide
gtgtgggatgcctc

SEQ ID NO: 3780 - DNA, 14 bp, Artificial Sequence
  Description of Artificial Sequence: Synthetic oligonucleotide
ggtgtgggatgcct

SEQ ID NO: 3781 - DNA, 14 bp, Artificial Sequence
  Description of Artificial Sequence: Synthetic oligonucleotide
aggtgtgggatgcc

SEQ ID NO: 3782 - DNA, 14 bp, Artificial Sequence
  Description of Artificial Sequence: Synthetic oligonucleotide
gaggtgtgggatgc

SEQ ID NO: 3783 - DNA, 14 bp, Artificial Sequence
  Description of Artificial Sequence: Synthetic oligonucleotide
agaggtgtgggatg

SEQ ID NO: 3784 - DNA, 14 bp, Artificial Sequence
  Description of Artificial Sequence: Synthetic oligonucleotide
cagaggtgtgggat

SEQ ID NO: 3785 - DNA, 14 bp, Artificial Sequence
  Description of Artificial Sequence: Synthetic oligonucleotide
gcagaggtgtggga

SEQ ID NO: 3786 - DNA, 14 bp, Artificial Sequence
  Description of Artificial Sequence: Synthetic oligonucleotide
tgcagaggtgtggg

SEQ ID NO: 3787 - DNA, 14 bp, Artificial Sequence
  Description of Artificial Sequence: Synthetic oligonucleotide
ctgcagaggtgtgg

SEQ ID NO: 3788 - DNA, 14 bp, Artificial Sequence
  Description of Artificial Sequence: Synthetic oligonucleotide
gctgcagaggtgtg

SEQ ID NO: 3789 - DNA, 14 bp, Artificial Sequence
  Description of Artificial Sequence: Synthetic oligonucleotide
tgctgcagaggtgt

SEQ ID NO: 3790 - DNA, 14 bp, Artificial Sequence
  Description of Artificial Sequence: Synthetic oligonucleotide
ctgctgcagaggtg

SEQ ID NO: 3791 - DNA, 14 bp, Artificial Sequence
  Description of Artificial Sequence: Synthetic oligonucleotide
cctgctgcagaggt

SEQ ID NO: 3792 - DNA, 14 bp, Artificial Sequence
  Description of Artificial Sequence: Synthetic oligonucleotide
tcctgctgcagagg

SEQ ID NO: 3793 - DNA, 14 bp, Artificial Sequence
  Description of Artificial Sequence: Synthetic oligonucleotide
ctcctgctgcagag

SEQ ID NO: 3794 - DNA, 14 bp, Artificial Sequence
  Description of Artificial Sequence: Synthetic oligonucleotide
gctcctgctgcaga

SEQ ID NO: 3795 - DNA, 14 bp, Artificial Sequence
  Description of Artificial Sequence: Synthetic oligonucleotide
ggctcctgctgcag

SEQ ID NO: 3796 - DNA, 14 bp, Artificial Sequence
  Description of Artificial Sequence: Synthetic oligonucleotide
tggctcctgctgca

SEQ ID NO: 3797 - DNA, 14 bp, Artificial Sequence
  Description of Artificial Sequence: Synthetic oligonucleotide
ttggctcctgctgc

SEQ ID NO: 3798 - DNA, 14 bp, Artificial Sequence
  Description of Artificial Sequence: Synthetic oligonucleotide
cttggctcctgctg

SEQ ID NO: 3799 - DNA, 14 bp, Artificial Sequence
  Description of Artificial Sequence: Synthetic oligonucleotide
ccttggctcctgct

SEQ ID NO: 3800 - DNA, 14 bp, Artificial Sequence
  Description of Artificial Sequence: Synthetic oligonucleotide
tccttggctcctgc

SEQ ID NO: 3801 - DNA, 14 bp, Artificial Sequence
  Description of Artificial Sequence: Synthetic oligonucleotide
ttccttggctcctg

SEQ ID NO: 3802 - DNA, 14 bp, Artificial Sequence
  Description of Artificial Sequence: Synthetic oligonucleotide
tttccttggctcct

SEQ ID NO: 3803 - DNA, 14 bp, Artificial Sequence
  Description of Artificial Sequence: Synthetic oligonucleotide
ttttccttggctcc

SEQ ID NO: 3804 - DNA, 14 bp, Artificial Sequence
  Description of Artificial Sequence: Synthetic oligonucleotide
attttccttggctc

SEQ ID NO: 3805 - DNA, 14 bp, Artificial Sequence
  Description of Artificial Sequence: Synthetic oligonucleotide
aattttccttggct

SEQ ID NO: 3806 - DNA, 14 bp, Artificial Sequence
  Description of Artificial Sequence: Synthetic oligonucleotide
taattttccttggc

SEQ ID NO: 3807 - DNA, 14 bp, Artificial Sequence
  Description of Artificial Sequence: Synthetic oligonucleotide
ctaattttccttgg

SEQ ID NO: 3808 - DNA, 14 bp, Artificial Sequence
  Description of Artificial Sequence: Synthetic oligonucleotide
actaattttccttg

SEQ ID NO: 3809 - DNA, 14 bp, Artificial Sequence
  Description of Artificial Sequence: Synthetic oligonucleotide
aactaattttcctt

SEQ ID NO: 3810 - DNA, 14 bp, Artificial Sequence
  Description of Artificial Sequence: Synthetic oligonucleotide
taactaattttcct

SEQ ID NO: 3811 - DNA, 14 bp, Artificial Sequence
  Description of Artificial Sequence: Synthetic oligonucleotide
ataactaattttcc

SEQ ID NO: 3812 - DNA, 14 bp, Artificial Sequence
  Description of Artificial Sequence: Synthetic oligonucleotide
tataactaattttc

SEQ ID NO: 3813 - DNA, 14 bp, Artificial Sequence
  Description of Artificial Sequence: Synthetic oligonucleotide
ctataactaatttt

SEQ ID NO: 3814 - DNA, 14 bp, Artificial Sequence
  Description of Artificial Sequence: Synthetic oligonucleotide
actataactaattt

SEQ ID NO: 3815 - DNA, 14 bp, Artificial Sequence
  Description of Artificial Sequence: Synthetic oligonucleotide
tactataactaatt

SEQ ID NO: 3816 - DNA, 14 bp, Artificial Sequence
  Description of Artificial Sequence: Synthetic oligonucleotide
ctactataactaat

SEQ ID NO: 3817 - DNA, 14 bp, Artificial Sequence
  Description of Artificial Sequence: Synthetic oligonucleotide
cctactataactaa

SEQ ID NO: 3818 - DNA, 14 bp, Artificial Sequence
  Description of Artificial Sequence: Synthetic oligonucleotide
tcctactataacta

SEQ ID NO: 3819 - DNA, 14 bp, Artificial Sequence
  Description of Artificial Sequence: Synthetic oligonucleotide
atcctactataact

SEQ ID NO: 3820 - DNA, 14 bp, Artificial Sequence
  Description of Artificial Sequence: Synthetic oligonucleotide
gatcctactataac

SEQ ID NO: 3821 - DNA, 14 bp, Artificial Sequence
  Description of Artificial Sequence: Synthetic oligonucleotide
ggatcctactataa

SEQ ID NO: 3822 - DNA, 14 bp, Artificial Sequence
  Description of Artificial Sequence: Synthetic oligonucleotide
gggatcctactata

SEQ ID NO: 3823 - DNA, 14 bp, Artificial Sequence
  Description of Artificial Sequence: Synthetic oligonucleotide
agggatcctactat

SEQ ID NO: 3824 - DNA, 14 bp, Artificial Sequence
  Description of Artificial Sequence: Synthetic oligonucleotide
cagggatcctacta

SEQ ID NO: 3825 - DNA, 14 bp, Artificial Sequence
  Description of Artificial Sequence: Synthetic oligonucleotide
tcagggatcctact

SEQ ID NO: 3826 - DNA, 14 bp, Artificial Sequence
  Description of Artificial Sequence: Synthetic oligonucleotide
ttcagggatcctac

SEQ ID NO: 3827 - DNA, 14 bp, Artificial Sequence
  Description of Artificial Sequence: Synthetic oligonucleotide
tttcagggatccta

SEQ ID NO: 3828 - DNA, 14 bp, Artificial Sequence
  Description of Artificial Sequence: Synthetic oligonucleotide
ctttcagggatcct

SEQ ID NO: 3829 - DNA, 14 bp, Artificial Sequence
  Description of Artificial Sequence: Synthetic oligonucleotide
actttcagggatcc

SEQ ID NO: 3830 - DNA, 14 bp, Artificial Sequence
  Description of Artificial Sequence: Synthetic oligonucleotide
cactttcagggatc

SEQ ID NO: 3831 - DNA, 14 bp, Artificial Sequence
  Description of Artificial Sequence: Synthetic oligonucleotide
tcactttcagggat

SEQ ID NO: 3832 - DNA, 14 bp, Artificial Sequence
  Description of Artificial Sequence: Synthetic oligonucleotide
ttcactttcaggga

SEQ ID NO: 3833 - DNA, 14 bp, Artificial Sequence
  Description of Artificial Sequence: Synthetic oligonucleotide
tttcactttcaggg

SEQ ID NO: 3834 - DNA, 14 bp, Artificial Sequence
  Description of Artificial Sequence: Synthetic oligonucleotide
gtttcactttcagg

SEQ ID NO: 3835 - DNA, 14 bp, Artificial Sequence
  Description of Artificial Sequence: Synthetic oligonucleotide
tgtttcactttcag

SEQ ID NO: 3836 - DNA, 14 bp, Artificial Sequence
  Description of Artificial Sequence: Synthetic oligonucleotide
ctgtttcactttca

SEQ ID NO: 3837 - DNA, 14 bp, Artificial Sequence
  Description of Artificial Sequence: Synthetic oligonucleotide
tctgtttcactttc

SEQ ID NO: 3838 - DNA, 14 bp, Artificial Sequence
  Description of Artificial Sequence: Synthetic oligonucleotide
ttctgtttcacttt

SEQ ID NO: 3839 - DNA, 14 bp, Artificial Sequence
  Description of Artificial Sequence: Synthetic oligonucleotide
tttctgtttcactt

SEQ ID NO: 3840 - DNA, 14 bp, Artificial Sequence
  Description of Artificial Sequence: Synthetic oligonucleotide
ctttctgtttcact

SEQ ID NO: 3841 - DNA, 14 bp, Artificial Sequence
  Description of Artificial Sequence: Synthetic oligonucleotide
actttctgtttcac

SEQ ID NO: 3842 - DNA, 14 bp, Artificial Sequence
  Description of Artificial Sequence: Synthetic oligonucleotide
tactttctgtttca

SEQ ID NO: 3843 - DNA, 14 bp, Artificial Sequence
  Description of Artificial Sequence: Synthetic oligonucleotide
gtactttctgtttc

SEQ ID NO: 3844 - DNA, 14 bp, Artificial Sequence
  Description of Artificial Sequence: Synthetic oligonucleotide
tgtactttctgttt

SEQ ID NO: 3845 - DNA, 14 bp, Artificial Sequence
  Description of Artificial Sequence: Synthetic oligonucleotide
ctgtactttctgtt

SEQ ID NO: 3846 - DNA, 14 bp, Artificial Sequence
  Description of Artificial Sequence: Synthetic oligonucleotide
gctgtactttctgt

SEQ ID NO: 3847 - DNA, 14 bp, Artificial Sequence
  Description of Artificial Sequence: Synthetic oligonucleotide
tgctgtactttctg

SEQ ID NO: 3848 - DNA, 14 bp, Artificial Sequence
  Description of Artificial Sequence: Synthetic oligonucleotide
atgctgtactttct

SEQ ID NO: 3849 - DNA, 14 bp, Artificial Sequence
  Description of Artificial Sequence: Synthetic oligonucleotide
gatgctgtactttc

SEQ ID NO: 3850 - DNA, 14 bp, Artificial Sequence
  Description of Artificial Sequence: Synthetic oligonucleotide
agatgctgtacttt

SEQ ID NO: 3851 - DNA, 14 bp, Artificial Sequence
  Description of Artificial Sequence: Synthetic oligonucleotide
cagatgctgtactt

SEQ ID NO: 3852 - DNA, 14 bp, Artificial Sequence
  Description of Artificial Sequence: Synthetic oligonucleotide
gcagatgctgtact

SEQ ID NO: 3853 - DNA, 14 bp, Artificial Sequence
  Description of Artificial Sequence: Synthetic oligonucleotide
tgcagatgctgtac

SEQ ID NO: 3854 - DNA, 14 bp, Artificial Sequence
  Description of Artificial Sequence: Synthetic oligonucleotide
gtgcagatgctgta

SEQ ID NO: 3855 - DNA, 14 bp, Artificial Sequence
  Description of Artificial Sequence: Synthetic oligonucleotide
ggtgcagatgctgt

SEQ ID NO: 3856 - DNA, 14 bp, Artificial Sequence
  Description of Artificial Sequence: Synthetic oligonucleotide
tggtgcagatgctg

SEQ ID NO: 3857 - DNA, 14 bp, Artificial Sequence
  Description of Artificial Sequence: Synthetic oligonucleotide
ttggtgcagatgct

SEQ ID NO: 3858 - DNA, 14 bp, Artificial Sequence
  Description of Artificial Sequence: Synthetic oligonucleotide
tttggtgcagatgc

SEQ ID NO: 3859 - DNA, 14 bp, Artificial Sequence
  Description of Artificial Sequence: Synthetic oligonucleotide
atttggtgcagatg

SEQ ID NO: 3860 - DNA, 14 bp, Artificial Sequence
  Description of Artificial Sequence: Synthetic oligonucleotide
aatttggtgcagat

SEQ ID NO: 3861 - DNA, 14 bp, Artificial Sequence
  Description of Artificial Sequence: Synthetic oligonucleotide
gaatttggtgcaga

SEQ ID NO: 3862 - DNA, 14 bp, Artificial Sequence
  Description of Artificial Sequence: Synthetic oligonucleotide
agaatttggtgcag

SEQ ID NO: 3863 - DNA, 14 bp, Artificial Sequence
  Description of Artificial Sequence: Synthetic oligonucleotide
gagaatttggtgca

SEQ ID NO: 3864 - DNA, 14 bp, Artificial Sequence
  Description of Artificial Sequence: Synthetic oligonucleotide
ggagaatttggtgc

SEQ ID NO: 3865 - DNA, 14 bp, Artificial Sequence
  Description of Artificial Sequence: Synthetic oligonucleotide
tggagaatttggtg

SEQ ID NO: 3866 - DNA, 14 bp, Artificial Sequence
  Description of Artificial Sequence: Synthetic oligonucleotide
ttggagaatttggt

SEQ ID NO: 3867 - DNA, 14 bp, Artificial Sequence
  Description of Artificial Sequence: Synthetic oligonucleotide
cttggagaatttgg

SEQ ID NO: 3868 - DNA, 14 bp, Artificial Sequence
  Description of Artificial Sequence: Synthetic oligonucleotide
tcttggagaatttg

SEQ ID NO: 3869 - DNA, 14 bp, Artificial Sequence
  Description of Artificial Sequence: Synthetic oligonucleotide
ttcttggagaattt

SEQ ID NO: 3870 - DNA, 14 bp, Artificial Sequence
  Description of Artificial Sequence: Synthetic oligonucleotide
gttcttggagaatt

SEQ ID NO: 3871 - DNA, 14 bp, Artificial Sequence
  Description of Artificial Sequence: Synthetic oligonucleotide
tgttcttggagaat

SEQ ID NO: 3872 - DNA, 14 bp, Artificial Sequence
  Description of Artificial Sequence: Synthetic oligonucleotide
gtgttcttggagaa

SEQ ID NO: 3873 - DNA, 14 bp, Artificial Sequence
  Description of Artificial Sequence: Synthetic oligonucleotide
ggtgttcttggaga

SEQ ID NO: 3874 - DNA, 14 bp, Artificial Sequence
  Description of Artificial Sequence: Synthetic oligonucleotide
cggtgttcttggag

SEQ ID NO: 3875 - DNA, 14 bp, Artificial Sequence
  Description of Artificial Sequence: Synthetic oligonucleotide
acggtgttcttgga

SEQ ID NO: 3876 - DNA, 14 bp, Artificial Sequence
  Description of Artificial Sequence: Synthetic oligonucleotide
aacggtgttcttgg

SEQ ID NO: 3877 - DNA, 14 bp, Artificial Sequence
  Description of Artificial Sequence: Synthetic oligonucleotide
taacggtgttcttg

SEQ ID NO: 3878 - DNA, 14 bp, Artificial Sequence
  Description of Artificial Sequence: Synthetic oligonucleotide
ttaacggtgttctt

SEQ ID NO: 3879 - DNA, 14 bp, Artificial Sequence
  Description of Artificial Sequence: Synthetic oligonucleotide
gttaacggtgttct

SEQ ID NO: 3880 - DNA, 14 bp, Artificial Sequence
  Description of Artificial Sequence: Synthetic oligonucleotide
tgttaacggtgttc

SEQ ID NO: 3881 - DNA, 14 bp, Artificial Sequence
  Description of Artificial Sequence: Synthetic oligonucleotide
gtgttaacggtgtt

SEQ ID NO: 3882 - DNA, 14 bp, Artificial Sequence
  Description of Artificial Sequence: Synthetic oligonucleotide
ggtgttaacggtgt

SEQ ID NO: 3883 - DNA, 14 bp, Artificial Sequence
  Description of Artificial Sequence: Synthetic oligonucleotide
aggtgttaacggtg

SEQ ID NO: 3884 - DNA, 14 bp, Artificial Sequence
  Description of Artificial Sequence: Synthetic oligonucleotide
gaggtgttaacggt

SEQ ID NO: 3885 - DNA, 14 bp, Artificial Sequence
  Description of Artificial Sequence: Synthetic oligonucleotide
ggaggtgttaacgg

SEQ ID NO: 3886 - DNA, 14 bp, Artificial Sequence
  Description of Artificial Sequence: Synthetic oligonucleotide
cggaggtgttaacg

SEQ ID NO: 3887 - DNA, 14 bp, Artificial Sequence
  Description of Artificial Sequence: Synthetic oligonucleotide
gcggaggtgttaac

SEQ ID NO: 3888 - DNA, 14 bp, Artificial Sequence
  Description of Artificial Sequence: Synthetic oligonucleotide
ggcggaggtgttaa

SEQ ID NO: 3889 - DNA, 14 bp, Artificial Sequence
  Description of Artificial Sequence: Synthetic oligonucleotide
aggcggaggtgtta

SEQ ID NO: 3890 - DNA, 14 bp, Artificial Sequence
  Description of Artificial Sequence: Synthetic oligonucleotide
caggcggaggtgtt

SEQ ID NO: 3891 - DNA, 14 bp, Artificial Sequence
  Description of Artificial Sequence: Synthetic oligonucleotide
gcaggcggaggtgt

SEQ ID NO: 3892 - DNA, 14 bp, Artificial Sequence
  Description of Artificial Sequence: Synthetic oligonucleotide
agcaggcggaggtg

SEQ ID NO: 3893 - DNA, 14 bp, Artificial Sequence
  Description of Artificial Sequence: Synthetic oligonucleotide
aagcaggcggaggt

SEQ ID NO: 3894 - DNA, 14 bp, Artificial Sequence
  Description of Artificial Sequence: Synthetic oligonucleotide
gaagcaggcggagg

SEQ ID NO: 3895 - DNA, 14 bp, Artificial Sequence
  Description of Artificial Sequence: Synthetic oligonucleotide
agaagcaggcggag

SEQ ID NO: 3896 - DNA, 14 bp, Artificial Sequence
  Description of Artificial Sequence: Synthetic oligonucleotide
cagaagcaggcgga

SEQ ID NO: 3897 - DNA, 14 bp, Artificial Sequence
  Description of Artificial Sequence: Synthetic oligonucleotide
ccagaagcaggcgg

SEQ ID NO: 3898 - DNA, 14 bp, Artificial Sequence
  Description of Artificial Sequence: Synthetic oligonucleotide
accagaagcaggcg

SEQ ID NO: 3899 - DNA, 14 bp, Artificial Sequence
  Description of Artificial Sequence: Synthetic oligonucleotide
caccagaagcaggc

SEQ ID NO: 3900 - DNA, 14 bp, Artificial Sequence
  Description of Artificial Sequence: Synthetic oligonucleotide
gcaccagaagcagg

SEQ ID NO: 3901 - DNA, 14 bp, Artificial Sequence
  Description of Artificial Sequence: Synthetic oligonucleotide
agcaccagaagcag

SEQ ID NO: 3902 - DNA, 14 bp, Artificial Sequence
  Description of Artificial Sequence: Synthetic oligonucleotide
aagcaccagaagca

SEQ ID NO: 3903 - DNA, 14 bp, Artificial Sequence
  Description of Artificial Sequence: Synthetic oligonucleotide
gaagcaccagaagc

SEQ ID NO: 3904 - DNA, 14 bp, Artificial Sequence
  Description of Artificial Sequence: Synthetic oligonucleotide
ggaagcaccagaag

SEQ ID NO: 3905 - DNA, 14 bp, Artificial Sequence
  Description of Artificial Sequence: Synthetic oligonucleotide
tggaagcaccagaa

SEQ ID NO: 3906 - DNA, 14 bp, Artificial Sequence
  Description of Artificial Sequence: Synthetic oligonucleotide
ctggaagcaccaga

SEQ ID NO: 3907 - DNA, 14 bp, Artificial Sequence
  Description of Artificial Sequence: Synthetic oligonucleotide
actggaagcaccag

SEQ ID NO: 3908 - DNA, 14 bp, Artificial Sequence
  Description of Artificial Sequence: Synthetic oligonucleotide
tactggaagcacca

SEQ ID NO: 3909 - DNA, 14 bp, Artificial Sequence
  Description of Artificial Sequence: Synthetic oligonucleotide
gtactggaagcacc

SEQ ID NO: 3910 - DNA, 14 bp, Artificial Sequence
  Description of Artificial Sequence: Synthetic oligonucleotide
ggtactggaagcac

SEQ ID NO: 3911 - DNA, 14 bp, Artificial Sequence
  Description of Artificial Sequence: Synthetic oligonucleotide
tggtactggaagca

SEQ ID NO: 3912 - DNA, 14 bp, Artificial Sequence
  Description of Artificial Sequence: Synthetic oligonucleotide
gtggtactggaagc

SEQ ID NO: 3913 - DNA, 14 bp, Artificial Sequence
  Description of Artificial Sequence: Synthetic oligonucleotide
tgtggtactggaag

SEQ ID NO: 3914 - DNA, 14 bp, Artificial Sequence
  Description of Artificial Sequence: Synthetic oligonucleotide
ctgtggtactggaa

SEQ ID NO: 3915 - DNA, 14 bp, Artificial Sequence
  Description of Artificial Sequence: Synthetic oligonucleotide
tctgtggtactgga

SEQ ID NO: 3916 - DNA, 14 bp, Artificial Sequence
  Description of Artificial Sequence: Synthetic oligonucleotide
atctgtggtactgg

SEQ ID NO: 3917 - DNA, 14 bp, Artificial Sequence
  Description of Artificial Sequence: Synthetic oligonucleotide
catctgtggtactg

SEQ ID NO: 3918 - DNA, 14 bp, Artificial Sequence
  Description of Artificial Sequence: Synthetic oligonucleotide
acatctgtggtact

SEQ ID NO: 3919 - DNA, 14 bp, Artificial Sequence
  Description of Artificial Sequence: Synthetic oligonucleotide
aacatctgtggtac

SEQ ID NO: 3920 - DNA, 14 bp, Artificial Sequence
  Description of Artificial Sequence: Synthetic oligonucleotide
aaacatctgtggta

SEQ ID NO: 3921 - DNA, 14 bp, Artificial Sequence
  Description of Artificial Sequence: Synthetic oligonucleotide
caaacatctgtggt

SEQ ID NO: 3922 - DNA, 14 bp, Artificial Sequence
  Description of Artificial Sequence: Synthetic oligonucleotide
gcaaacatctgtgg

SEQ ID NO: 3923 - DNA, 14 bp, Artificial Sequence
  Description of Artificial Sequence: Synthetic oligonucleotide
tgcaaacatctgtg

SEQ ID NO: 3924 - DNA, 14 bp, Artificial Sequence
  Description of Artificial Sequence: Synthetic oligonucleotide
ctgcaaacatctgt

SEQ ID NO: 3925 - DNA, 14 bp, Artificial Sequence
  Description of Artificial Sequence: Synthetic oligonucleotide
actgcaaacatctg

SEQ ID NO: 3926 - DNA, 14 bp, Artificial Sequence
  Description of Artificial Sequence: Synthetic oligonucleotide
cactgcaaacatct

SEQ ID NO: 3927 - DNA, 14 bp, Artificial Sequence
  Description of Artificial Sequence: Synthetic oligonucleotide
acactgcaaacatc

SEQ ID NO: 3928 - DNA, 14 bp, Artificial Sequence
  Description of Artificial Sequence: Synthetic oligonucleotide
tacactgcaaacat

SEQ ID NO: 3929 - DNA, 14 bp, Artificial Sequence
  Description of Artificial Sequence: Synthetic oligonucleotide
atacactgcaaaca

SEQ ID NO: 3930 - DNA, 14 bp, Artificial Sequence
  Description of Artificial Sequence: Synthetic oligonucleotide
aatacactgcaaac

SEQ ID NO: 3931 - DNA, 14 bp, Artificial Sequence
  Description of Artificial Sequence: Synthetic oligonucleotide
aaatacactgcaaa

SEQ ID NO: 3932 - DNA, 14 bp, Artificial Sequence
  Description of Artificial Sequence: Synthetic oligonucleotide
caaatacactgcaa

SEQ ID NO: 3933 - DNA, 14 bp, Artificial Sequence
  Description of Artificial Sequence: Synthetic oligonucleotide
tcaaatacactgca

SEQ ID NO: 3934 - DNA, 14 bp, Artificial Sequence
  Description of Artificial Sequence: Synthetic oligonucleotide
atcaaatacactgc

SEQ ID NO: 3935 - DNA, 14 bp, Artificial Sequence
  Description of Artificial Sequence: Synthetic oligonucleotide
aatcaaatacactg

SEQ ID NO: 3936 - DNA, 14 bp, Artificial Sequence
  Description of Artificial Sequence: Synthetic oligonucleotide
gaatcaaatacact

SEQ ID NO: 3937 - DNA, 14 bp, Artificial Sequence
  Description of Artificial Sequence: Synthetic oligonucleotide
ggaatcaaatacac

SEQ ID NO: 3938 - DNA, 14 bp, Artificial Sequence
  Description of Artificial Sequence: Synthetic oligonucleotide
cggaatcaaataca

SEQ ID NO: 3939 - DNA, 14 bp, Artificial Sequence
  Description of Artificial Sequence: Synthetic oligonucleotide
tcggaatcaaatac

SEQ ID NO: 3940 - DNA, 14 bp, Artificial Sequence
  Description of Artificial Sequence: Synthetic oligonucleotide
atcggaatcaaata

SEQ ID NO: 3941 - DNA, 14 bp, Artificial Sequence
  Description of Artificial Sequence: Synthetic oligonucleotide
gatcggaatcaaat

SEQ ID NO: 3942 - DNA, 14 bp, Artificial Sequence
  Description of Artificial Sequence: Synthetic oligonucleotide
tgatcggaatcaaa

SEQ ID NO: 3943 - DNA, 14 bp, Artificial Sequence
  Description of Artificial Sequence: Synthetic oligonucleotide
atgatcggaatcaa

SEQ ID NO: 3944 - DNA, 14 bp, Artificial Sequence
  Description of Artificial Sequence: Synthetic oligonucleotide
aatgatcggaatca

SEQ ID NO: 3945 - DNA, 14 bp, Artificial Sequence
  Description of Artificial Sequence: Synthetic oligonucleotide
gaatgatcggaatc

SEQ ID NO: 3946 - DNA, 14 bp, Artificial Sequence
  Description of Artificial Sequence: Synthetic oligonucleotide
cgaatgatcggaat

SEQ ID NO: 3947 - DNA, 14 bp, Artificial Sequence
  Description of Artificial Sequence: Synthetic oligonucleotide
tcgaatgatcggaa

SEQ ID NO: 3948 - DNA, 14 bp, Artificial Sequence
  Description of Artificial Sequence: Synthetic oligonucleotide
ctcgaatgatcgga

SEQ ID NO: 3949 - DNA, 14 bp, Artificial Sequence
  Description of Artificial Sequence: Synthetic oligonucleotide
gctcgaatgatcgg

SEQ ID NO: 3950 - DNA, 14 bp, Artificial Sequence
  Description of Artificial Sequence: Synthetic oligonucleotide
ggctcgaatgatcg

SEQ ID NO: 3951 - DNA, 14 bp, Artificial Sequence
  Description of Artificial Sequence: Synthetic oligonucleotide
gggctcgaatgatc

SEQ ID NO: 3952 - DNA, 14 bp, Artificial Sequence
  Description of Artificial Sequence: Synthetic oligonucleotide
agggctcgaatgat

SEQ ID NO: 3953 - DNA, 14 bp, Artificial Sequence
  Description of Artificial Sequence: Synthetic oligonucleotide
aagggctcgaatga

SEQ ID NO: 3954 - DNA, 14 bp, Artificial Sequence
  Description of Artificial Sequence: Synthetic oligonucleotide
aaagggctcgaatg

SEQ ID NO: 3955 - DNA, 14 bp, Artificial Sequence
  Description of Artificial Sequence: Synthetic oligonucleotide
aaaagggctcgaat

SEQ ID NO: 3956 - DNA, 14 bp, Artificial Sequence
  Description of Artificial Sequence: Synthetic oligonucleotide
gaaaagggctcgaa

SEQ ID NO: 3957 - DNA, 14 bp, Artificial Sequence
  Description of Artificial Sequence: Synthetic oligonucleotide
tgaaaagggctcga

SEQ ID NO: 3958 - DNA, 14 bp, Artificial Sequence
  Description of Artificial Sequence: Synthetic oligonucleotide
gtgaaaagggctcg

SEQ ID NO: 3959 - DNA, 14 bp, Artificial Sequence
  Description of Artificial Sequence: Synthetic oligonucleotide
agtgaaaagggctc

SEQ ID NO: 3960 - DNA, 14 bp, Artificial Sequence
  Description of Artificial Sequence: Synthetic oligonucleotide
gagtgaaaagggct

SEQ ID NO: 3961 - DNA, 14 bp, Artificial Sequence
  Description of Artificial Sequence: Synthetic oligonucleotide
tgagtgaaaagggc

SEQ ID NO: 3962 - DNA, 14 bp, Artificial Sequence
  Description of Artificial Sequence: Synthetic oligonucleotide
ttgagtgaaaaggg

SEQ ID NO: 3963 - DNA, 14 bp, Artificial Sequence
  Description of Artificial Sequence: Synthetic oligonucleotide
cttgagtgaaaagg

SEQ ID NO: 3964 - DNA, 14 bp, Artificial Sequence
  Description of Artificial Sequence: Synthetic oligonucleotide
tcttgagtgaaaag

SEQ ID NO: 3965 - DNA, 14 bp, Artificial Sequence
  Description of Artificial Sequence: Synthetic oligonucleotide
atcttgagtgaaaa

SEQ ID NO: 3966 - DNA, 14 bp, Artificial Sequence
  Description of Artificial Sequence: Synthetic oligonucleotide
gatcttgagtgaaa

SEQ ID NO: 3967 - DNA, 14 bp, Artificial Sequence
  Description of Artificial Sequence: Synthetic oligonucleotide
agatcttgagtgaa

SEQ ID NO: 3968 - DNA, 14 bp, Artificial Sequence
  Description of Artificial Sequence: Synthetic oligonucleotide
cagatcttgagtga

SEQ ID NO: 3969 - DNA, 14 bp, Artificial Sequence
  Description of Artificial Sequence: Synthetic oligonucleotide
gcagatcttgagtg

SEQ ID NO: 3970 - DNA, 14 bp, Artificial Sequence
  Description of Artificial Sequence: Synthetic oligonucleotide
agcagatcttgagt

SEQ ID NO: 3971 - DNA, 14 bp, Artificial Sequence
  Description of Artificial Sequence: Synthetic oligonucleotide
aagcagatcttgag

SEQ ID NO: 3972 - DNA, 14 bp, Artificial Sequence
  Description of Artificial Sequence: Synthetic oligonucleotide
gaagcagatcttga

SEQ ID NO: 3973 - DNA, 14 bp, Artificial Sequence
  Description of Artificial Sequence: Synthetic oligonucleotide
agaagcagatcttg

SEQ ID NO: 3974 - DNA, 14 bp, Artificial Sequence
  Description of Artificial Sequence: Synthetic oligonucleotide
cagaagcagatctt

SEQ ID NO: 3975 - DNA, 14 bp, Artificial Sequence
  Description of Artificial Sequence: Synthetic oligonucleotide
acagaagcagatct

SEQ ID NO: 3976 - DNA, 14 bp, Artificial Sequence
  Description of Artificial Sequence: Synthetic oligonucleotide
tacagaagcagatc

SEQ ID NO: 3977 - DNA, 14 bp, Artificial Sequence
  Description of Artificial Sequence: Synthetic oligonucleotide
atacagaagcagat

SEQ ID NO: 3978 - DNA, 14 bp, Artificial Sequence
  Description of Artificial Sequence: Synthetic oligonucleotide
gatacagaagcaga

SEQ ID NO: 3979 - DNA, 14 bp, Artificial Sequence
  Description of Artificial Sequence: Synthetic oligonucleotide
tgatacagaagcag

SEQ ID NO: 3980 - DNA, 14 bp, Artificial Sequence
  Description of Artificial Sequence: Synthetic oligonucleotide
atgatacagaagca

SEQ ID NO: 3981 - DNA, 14 bp, Artificial Sequence
  Description of Artificial Sequence: Synthetic oligonucleotide
gatgatacagaagc

SEQ ID NO: 3982 - DNA, 14 bp, Artificial Sequence
  Description of Artificial Sequence: Synthetic oligonucleotide
agatgatacagaag

SEQ ID NO: 3983 - DNA, 14 bp, Artificial Sequence
  Description of Artificial Sequence: Synthetic oligonucleotide
tagatgatacagaa

SEQ ID NO: 3984 - DNA, 14 bp, Artificial Sequence
  Description of Artificial Sequence: Synthetic oligonucleotide
atagatgatacaga

SEQ ID NO: 3985 - DNA, 14 bp, Artificial Sequence
  Description of Artificial Sequence: Synthetic oligonucleotide
tatagatgatacag

SEQ ID NO: 3986 - DNA, 14 bp, Artificial Sequence
  Description of Artificial Sequence: Synthetic oligonucleotide
ttatagatgataca

SEQ ID NO: 3987 - DNA, 14 bp, Artificial Sequence
  Description of Artificial Sequence: Synthetic oligonucleotide
cttatagatgatac

SEQ ID NO: 3988 - DNA, 14 bp, Artificial Sequence
  Description of Artificial Sequence: Synthetic oligonucleotide
acttatagatgata

SEQ ID NO: 3989 - DNA, 14 bp, Artificial Sequence
  Description of Artificial Sequence: Synthetic oligonucleotide
aacttatagatgat

SEQ ID NO: 3990 - DNA, 14 bp, Artificial Sequence
  Description of Artificial Sequence: Synthetic oligonucleotide
aaacttatagatga

SEQ ID NO: 3991 - DNA, 14 bp, Artificial Sequence
  Description of Artificial Sequence: Synthetic oligonucleotide
taaacttatagatg

SEQ ID NO: 3992 - DNA, 14 bp, Artificial Sequence
  Description of Artificial Sequence: Synthetic oligonucleotide
ttaaacttatagat

SEQ ID NO: 3993 - DNA, 14 bp, Artificial Sequence
  Description of Artificial Sequence: Synthetic oligonucleotide
gttaaacttataga

SEQ ID NO: 3994 - DNA, 14 bp, Artificial Sequence
  Description of Artificial Sequence: Synthetic oligonucleotide
ggttaaacttatag

SEQ ID NO: 3995 - DNA, 14 bp, Artificial Sequence
  Description of Artificial Sequence: Synthetic oligonucleotide
tggttaaacttata

SEQ ID NO: 3996 - DNA, 14 bp, Artificial Sequence
  Description of Artificial Sequence: Synthetic oligonucleotide
ttggttaaacttat

SEQ ID NO: 3997 - DNA, 14 bp, Artificial Sequence
  Description of Artificial Sequence: Synthetic oligonucleotide
tttggttaaactta

SEQ ID NO: 3998 - DNA, 14 bp, Artificial Sequence
  Description of Artificial Sequence: Synthetic oligonucleotide
ctttggttaaactt

SEQ ID NO: 3999 - DNA, 14 bp, Artificial Sequence
  Description of Artificial Sequence: Synthetic oligonucleotide
cctttggttaaact

SEQ ID NO: 4000 - DNA, 14 bp, Artificial Sequence
  Description of Artificial Sequence: Synthetic oligonucleotide
gcctttggttaaac

SEQ ID NO: 4001 - DNA, 14 bp, Artificial Sequence
  Description of Artificial Sequence: Synthetic oligonucleotide
tgcctttggttaaa

SEQ ID NO: 4002 - DNA, 14 bp, Artificial Sequence
  Description of Artificial Sequence: Synthetic oligonucleotide
gtgcctttggttaa

SEQ ID NO: 4003 - DNA, 14 bp, Artificial Sequence
  Description of Artificial Sequence: Synthetic oligonucleotide
agtgcctttggtta

SEQ ID NO: 4004 - DNA, 14 bp, Artificial Sequence
  Description of Artificial Sequence: Synthetic oligonucleotide
cagtgcctttggtt

SEQ ID NO: 4005 - DNA, 14 bp, Artificial Sequence
  Description of Artificial Sequence: Synthetic oligonucleotide
tcagtgcctttggt

SEQ ID NO: 4006 - DNA, 14 bp, Artificial Sequence
  Description of Artificial Sequence: Synthetic oligonucleotide
atcagtgcctttgg

SEQ ID NO: 4007 - DNA, 14 bp, Artificial Sequence
  Description of Artificial Sequence: Synthetic oligonucleotide
catcagtgcctttg

SEQ ID NO: 4008 - DNA, 14 bp, Artificial Sequence
  Description of Artificial Sequence: Synthetic oligonucleotide
tcatcagtgccttt

SEQ ID NO: 4009 - DNA, 14 bp, Artificial Sequence
  Description of Artificial Sequence: Synthetic oligonucleotide
ttcatcagtgcctt

SEQ ID NO: 4010 - DNA, 14 bp, Artificial Sequence
  Description of Artificial Sequence: Synthetic oligonucleotide
cttcatcagtgcct

SEQ ID NO: 4011 - DNA, 14 bp, Artificial Sequence
  Description of Artificial Sequence: Synthetic oligonucleotide
acttcatcagtgcc

SEQ ID NO: 4012 - DNA, 14 bp, Artificial Sequence
  Description of Artificial Sequence: Synthetic oligonucleotide
cacttcatcagtgc

SEQ ID NO: 4013 - DNA, 14 bp, Artificial Sequence
  Description of Artificial Sequence: Synthetic oligonucleotide
gcacttcatcagtg

SEQ ID NO: 4014 - DNA, 14 bp, Artificial Sequence
  Description of Artificial Sequence: Synthetic oligonucleotide
ggcacttcatcagt

SEQ ID NO: 4015 - DNA, 14 bp, Artificial Sequence
  Description of Artificial Sequence: Synthetic oligonucleotide
aggcacttcatcag

SEQ ID NO: 4016 - DNA, 14 bp, Artificial Sequence
  Description of Artificial Sequence: Synthetic oligonucleotide
caggcacttcatca

SEQ ID NO: 4017 - DNA, 14 bp, Artificial Sequence
  Description of Artificial Sequence: Synthetic oligonucleotide
acaggcacttcatc

SEQ ID NO: 4018 - DNA, 14 bp, Artificial Sequence
  Description of Artificial Sequence: Synthetic oligonucleotide
gacaggcacttcat

SEQ ID NO: 4019 - DNA, 14 bp, Artificial Sequence
  Description of Artificial Sequence: Synthetic oligonucleotide
ggacaggcacttca

SEQ ID NO: 4020 - DNA, 14 bp, Artificial Sequence
  Description of Artificial Sequence: Synthetic oligonucleotide
gggacaggcacttc

SEQ ID NO: 4021 - DNA, 14 bp, Artificial Sequence
  Description of Artificial Sequence: Synthetic oligonucleotide
agggacaggcactt

SEQ ID NO: 4022 - DNA, 14 bp, Artificial Sequence
  Description of Artificial Sequence: Synthetic oligonucleotide
gagggacaggcact

SEQ ID NO: 4023 - DNA, 14 bp, Artificial Sequence
  Description of Artificial Sequence: Synthetic oligonucleotide
ggagggacaggcac

SEQ ID NO: 4024 - DNA, 14 bp, Artificial Sequence
  Description of Artificial Sequence: Synthetic oligonucleotide
aggagggacaggca

SEQ ID NO: 4025 - DNA, 14 bp, Artificial Sequence
  Description of Artificial Sequence: Synthetic oligonucleotide
gaggagggacaggc

SEQ ID NO: 4026 - DNA, 14 bp, Artificial Sequence
  Description of Artificial Sequence: Synthetic oligonucleotide
ggaggagggacagg

SEQ ID NO: 4027 - DNA, 14 bp, Artificial Sequence
  Description of Artificial Sequence: Synthetic oligonucleotide
aggaggagggacag

SEQ ID NO: 4028 - DNA, 14 bp, Artificial Sequence
  Description of Artificial Sequence: Synthetic oligonucleotide
caggaggagggaca

SEQ ID NO: 4029 - DNA, 14 bp, Artificial Sequence
  Description of Artificial Sequence: Synthetic oligonucleotide
acaggaggagggac

SEQ ID NO: 4030 - DNA, 14 bp, Artificial Sequence
  Description of Artificial Sequence: Synthetic oligonucleotide
aacaggaggaggga

SEQ ID NO: 4031 - DNA, 14 bp, Artificial Sequence
  Description of Artificial Sequence: Synthetic oligonucleotide
gaacaggaggaggg

SEQ ID NO: 4032 - DNA, 14 bp, Artificial Sequence
  Description of Artificial Sequence: Synthetic oligonucleotide
ggaacaggaggagg

SEQ ID NO: 4033 - DNA, 14 bp, Artificial Sequence
  Description of Artificial Sequence: Synthetic oligonucleotide
aggaacaggaggag

SEQ ID NO: 4034 - DNA, 14 bp, Artificial Sequence
  Description of Artificial Sequence: Synthetic oligonucleotide
gaggaacaggagga

SEQ ID NO: 4035 - DNA, 14 bp, Artificial Sequence
  Description of Artificial Sequence: Synthetic oligonucleotide
ggaggaacaggagg

SEQ ID NO: 4036 - DNA, 14 bp, Artificial Sequence
  Description of Artificial Sequence: Synthetic oligonucleotide
tggaggaacaggag

SEQ ID NO: 4037 - DNA, 14 bp, Artificial Sequence
  Description of Artificial Sequence: Synthetic oligonucleotide
gtggaggaacagga

SEQ ID NO: 4038 - DNA, 14 bp, Artificial Sequence
  Description of Artificial Sequence: Synthetic oligonucleotide
cgtggaggaacagg

SEQ ID NO: 4039 - DNA, 14 bp, Artificial Sequence
  Description of Artificial Sequence: Synthetic oligonucleotide
tcgtggaggaacag

SEQ ID NO: 4040 - DNA, 14 bp, Artificial Sequence
  Description of Artificial Sequence: Synthetic oligonucleotide
ttcgtggaggaaca

SEQ ID NO: 4041 - DNA, 14 bp, Artificial Sequence
  Description of Artificial Sequence: Synthetic oligonucleotide
cttcgtggaggaac

SEQ ID NO: 4042 - DNA, 14 bp, Artificial Sequence
  Description of Artificial Sequence: Synthetic oligonucleotide
tcttcgtggaggaa

SEQ ID NO: 4043 - DNA, 14 bp, Artificial Sequence
  Description of Artificial Sequence: Synthetic oligonucleotide
gtcttcgtggagga

SEQ ID NO: 4044 - DNA, 14 bp, Artificial Sequence
  Description of Artificial Sequence: Synthetic oligonucleotide
cgtcttcgtggagg

SEQ ID NO: 4045 - DNA, 14 bp, Artificial Sequence
  Description of Artificial Sequence: Synthetic oligonucleotide
tcgtcttcgtggag

SEQ ID NO: 4046 - DNA, 14 bp, Artificial Sequence
  Description of Artificial Sequence: Synthetic oligonucleotide
gtcgtcttcgtgga

SEQ ID NO: 4047 - DNA, 14 bp, Artificial Sequence
  Description of Artificial Sequence: Synthetic oligonucleotide
ggtcgtcttcgtgg

SEQ ID NO: 4048 - DNA, 14 bp, Artificial Sequence
  Description of Artificial Sequence: Synthetic oligonucleotide
tggtcgtcttcgtg

SEQ ID NO: 4049 - DNA, 14 bp, Artificial Sequence
  Description of Artificial Sequence: Synthetic oligonucleotide
ctggtcgtcttcgt

SEQ ID NO: 4050 - DNA, 14 bp, Artificial Sequence
  Description of Artificial Sequence: Synthetic oligonucleotide
tctggtcgtcttcg

SEQ ID NO: 4051 - DNA, 14 bp, Artificial Sequence
  Description of Artificial Sequence: Synthetic oligonucleotide
ttctggtcgtcttc

SEQ ID NO: 4052 - DNA, 14 bp, Artificial Sequence
  Description of Artificial Sequence: Synthetic oligonucleotide
attctggtcgtctt

SEQ ID NO: 4053 - DNA, 14 bp, Artificial Sequence
  Description of Artificial Sequence: Synthetic oligonucleotide
gattctggtcgtct

SEQ ID NO: 4054 - DNA, 14 bp, Artificial Sequence
  Description of Artificial Sequence: Synthetic oligonucleotide
agattctggtcgtc

SEQ ID NO: 4055 - DNA, 14 bp, Artificial Sequence
  Description of Artificial Sequence: Synthetic oligonucleotide
cagattctggtcgt

SEQ ID NO: 4056 - DNA, 14 bp, Artificial Sequence
  Description of Artificial Sequence: Synthetic oligonucleotide
gcagattctggtcg

SEQ ID NO: 4057 - DNA, 14 bp, Artificial Sequence
  Description of Artificial Sequence: Synthetic oligonucleotide
ggcagattctggtc

SEQ ID NO: 4058 - DNA, 14 bp, Artificial Sequence
  Description of Artificial Sequence: Synthetic oligonucleotide
gggcagattctggt

SEQ ID NO: 4059 - DNA, 14 bp, Artificial Sequence
  Description of Artificial Sequence: Synthetic oligonucleotide
ggggcagattctgg

SEQ ID NO: 4060 - DNA, 14 bp, Artificial Sequence
  Description of Artificial Sequence: Synthetic oligonucleotide
tggggcagattctg

SEQ ID NO: 4061 - DNA, 14 bp, Artificial Sequence
  Description of Artificial Sequence: Synthetic oligonucleotide
ctggggcagattct

SEQ ID NO: 4062 - DNA, 14 bp, Artificial Sequence
  Description of Artificial Sequence: Synthetic oligonucleotide
gctggggcagattc

SEQ ID NO: 4063 - DNA, 14 bp, Artificial Sequence
  Description of Artificial Sequence: Synthetic oligonucleotide
tgctggggcagatt

SEQ ID NO: 4064 - DNA, 14 bp, Artificial Sequence
  Description of Artificial Sequence: Synthetic oligonucleotide
ctgctggggcagat

SEQ ID NO: 4065 - DNA, 14 bp, Artificial Sequence
  Description of Artificial Sequence: Synthetic oligonucleotide
tctgctggggcaga

SEQ ID NO: 4066 - DNA, 14 bp, Artificial Sequence
  Description of Artificial Sequence: Synthetic oligonucleotide
ttctgctggggcag

SEQ ID NO: 4067 - DNA, 14 bp, Artificial Sequence
  Description of Artificial Sequence: Synthetic oligonucleotide
attctgctggggca

SEQ ID NO: 4068 - DNA, 14 bp, Artificial Sequence
  Description of Artificial Sequence: Synthetic oligonucleotide
gattctgctggggc

SEQ ID NO: 4069 - DNA, 14 bp, Artificial Sequence
  Description of Artificial Sequence: Synthetic oligonucleotide
agattctgctgggg

SEQ ID NO: 4070 - DNA, 14 bp, Artificial Sequence
  Description of Artificial Sequence: Synthetic oligonucleotide
aagattctgctggg

SEQ ID NO: 4071 - DNA, 14 bp, Artificial Sequence
  Description of Artificial Sequence: Synthetic oligonucleotide
gaagattctgctgg

SEQ ID NO: 4072 - DNA, 14 bp, Artificial Sequence
  Description of Artificial Sequence: Synthetic oligonucleotide
tgaagattctgctg

SEQ ID NO: 4073 - DNA, 14 bp, Artificial Sequence
  Description of Artificial Sequence: Synthetic oligonucleotide
gtgaagattctgct

SEQ ID NO: 4074 - DNA, 14 bp, Artificial Sequence
  Description of Artificial Sequence: Synthetic oligonucleotide
ggtgaagattctgc

SEQ ID NO: 4075 - DNA, 14 bp, Artificial Sequence
  Description of Artificial Sequence: Synthetic oligonucleotide
tggtgaagattctg

SEQ ID NO: 4076 - DNA, 14 bp, Artificial Sequence
  Description of Artificial Sequence: Synthetic oligonucleotide
atggtgaagattct

SEQ ID NO: 4077 - DNA, 14 bp, Artificial Sequence
  Description of Artificial Sequence: Synthetic oligonucleotide
gatggtgaagattc

SEQ ID NO: 4078 - DNA, 14 bp, Artificial Sequence
  Description of Artificial Sequence: Synthetic oligonucleotide
agatggtgaagatt

SEQ ID NO: 4079 - DNA, 14 bp, Artificial Sequence
  Description of Artificial Sequence: Synthetic oligonucleotide
tagatggtgaagat

SEQ ID NO: 4080 - DNA, 14 bp, Artificial Sequence
  Description of Artificial Sequence: Synthetic oligonucleotide
ttagatggtgaaga

SEQ ID NO: 4081 - DNA, 14 bp, Artificial Sequence
  Description of Artificial Sequence: Synthetic oligonucleotide
cttagatggtgaag

SEQ ID NO: 4082 - DNA, 14 bp, Artificial Sequence
  Description of Artificial Sequence: Synthetic oligonucleotide
tcttagatggtgaa

SEQ ID NO: 4083 - DNA, 14 bp, Artificial Sequence
  Description of Artificial Sequence: Synthetic oligonucleotide
atcttagatggtga

SEQ ID NO: 4084 - DNA, 14 bp, Artificial Sequence
  Description of Artificial Sequence: Synthetic oligonucleotide
aatcttagatggtg

SEQ ID NO: 4085 - DNA, 14 bp, Artificial Sequence
  Description of Artificial Sequence: Synthetic oligonucleotide
taatcttagatggt

SEQ ID NO: 4086 - DNA, 14 bp, Artificial Sequence
  Description of Artificial Sequence: Synthetic oligonucleotide
ataatcttagatgg

SEQ ID NO: 4087 - DNA, 14 bp, Artificial Sequence
  Description of Artificial Sequence: Synthetic oligonucleotide
cataatcttagatg

SEQ ID NO: 4088 - DNA, 14 bp, Artificial Sequence
  Description of Artificial Sequence: Synthetic oligonucleotide
acataatcttagat

SEQ ID NO: 4089 - DNA, 14 bp, Artificial Sequence
  Description of Artificial Sequence: Synthetic oligonucleotide
gacataatcttaga

SEQ ID NO: 4090 - DNA, 14 bp, Artificial Sequence
  Description of Artificial Sequence: Synthetic oligonucleotide
agacataatcttag

SEQ ID NO: 4091 - DNA, 14 bp, Artificial Sequence
  Description of Artificial Sequence: Synthetic oligonucleotide
tagacataatctta

SEQ ID NO: 4092 - DNA, 14 bp, Artificial Sequence
  Description of Artificial Sequence: Synthetic oligonucleotide
ttagacataatctt

SEQ ID NO: 4093 - DNA, 14 bp, Artificial Sequence
  Description of Artificial Sequence: Synthetic oligonucleotide
cttagacataatct

SEQ ID NO: 4094 - DNA, 14 bp, Artificial Sequence
  Description of Artificial Sequence: Synthetic oligonucleotide
gcttagacataatc

SEQ ID NO: 4095 - DNA, 14 bp, Artificial Sequence
  Description of Artificial Sequence: Synthetic oligonucleotide
tgcttagacataat

SEQ ID NO: 4096 - DNA, 14 bp, Artificial Sequence
  Description of Artificial Sequence: Synthetic oligonucleotide
atgcttagacataa

SEQ ID NO: 4097 - DNA, 14 bp, Artificial Sequence
  Description of Artificial Sequence: Synthetic oligonucleotide
aatgcttagacata

SEQ ID NO: 4098 - DNA, 14 bp, Artificial Sequence
  Description of Artificial Sequence: Synthetic oligonucleotide
aaatgcttagacat

SEQ ID NO: 4099 - DNA, 14 bp, Artificial Sequence
  Description of Artificial Sequence: Synthetic oligonucleotide
caaatgcttagaca

SEQ ID NO: 4100 - DNA, 14 bp, Artificial Sequence
  Description of Artificial Sequence: Synthetic oligonucleotide
ccaaatgcttagac

SEQ ID NO: 4101 - DNA, 14 bp, Artificial Sequence
  Description of Artificial Sequence: Synthetic oligonucleotide
tccaaatgcttaga

SEQ ID NO: 4102 - DNA, 14 bp, Artificial Sequence
  Description of Artificial Sequence: Synthetic oligonucleotide
gtccaaatgcttag

SEQ ID NO: 4103 - DNA, 14 bp, Artificial Sequence
  Description of Artificial Sequence: Synthetic oligonucleotide
tgtccaaatgctta

SEQ ID NO: 4104 - DNA, 14 bp, Artificial Sequence
  Description of Artificial Sequence: Synthetic oligonucleotide
ctgtccaaatgctt

SEQ ID NO: 4105 - DNA, 14 bp, Artificial Sequence
  Description of Artificial Sequence: Synthetic oligonucleotide
actgtccaaatgct

SEQ ID NO: 4106 - DNA, 14 bp, Artificial Sequence
  Description of Artificial Sequence: Synthetic oligonucleotide
gactgtccaaatgc

SEQ ID NO: 4107 - DNA, 14 bp, Artificial Sequence
  Description of Artificial Sequence: Synthetic oligonucleotide
ggactgtccaaatg

SEQ ID NO: 4108 - DNA, 14 bp, Artificial Sequence
  Description of Artificial Sequence: Synthetic oligonucleotide
gggactgtccaaat

SEQ ID NO: 4109 - DNA, 14 bp, Artificial Sequence
  Description of Artificial Sequence: Synthetic oligonucleotide
ggggactgtccaaa

SEQ ID NO: 4110 - DNA, 14 bp, Artificial Sequence
  Description of Artificial Sequence: Synthetic oligonucleotide
gggggactgtccaa

SEQ ID NO: 4111 - DNA, 14 bp, Artificial Sequence
  Description of Artificial Sequence: Synthetic oligonucleotide
tgggggactgtcca

SEQ ID NO: 4112 - DNA, 14 bp, Artificial Sequence
  Description of Artificial Sequence: Synthetic oligonucleotide
ctgggggactgtcc

SEQ ID NO: 4113 - DNA, 14 bp, Artificial Sequence
  Description of Artificial Sequence: Synthetic oligonucleotide
gctgggggactgtc

SEQ ID NO: 4114 - DNA, 14 bp, Artificial Sequence
  Description of Artificial Sequence: Synthetic oligonucleotide
ggctgggggactgt

SEQ ID NO: 4115 - DNA, 14 bp, Artificial Sequence
  Description of Artificial Sequence: Synthetic oligonucleotide
tggctgggggactg

SEQ ID NO: 4116 - DNA, 14 bp, Artificial Sequence
  Description of Artificial Sequence: Synthetic oligonucleotide
atggctgggggact

SEQ ID NO: 4117 - DNA, 14 bp, Artificial Sequence
  Description of Artificial Sequence: Synthetic oligonucleotide
aatggctgggggac

SEQ ID NO: 4118 - DNA, 14 bp, Artificial Sequence
  Description of Artificial Sequence: Synthetic oligonucleotide
gaatggctggggga

SEQ ID NO: 4119 - DNA, 14 bp, Artificial Sequence
  Description of Artificial Sequence: Synthetic oligonucleotide
ggaatggctggggg

SEQ ID NO: 4120 - DNA, 14 bp, Artificial Sequence
  Description of Artificial Sequence: Synthetic oligonucleotide
aggaatggctgggg

SEQ ID NO: 4121 - DNA, 14 bp, Artificial Sequence
  Description of Artificial Sequence: Synthetic oligonucleotide
gaggaatggctggg

SEQ ID NO: 4122 - DNA, 14 bp, Artificial Sequence
  Description of Artificial Sequence: Synthetic oligonucleotide
ggaggaatggctgg

SEQ ID NO: 4123 - DNA, 14 bp, Artificial Sequence
  Description of Artificial Sequence: Synthetic oligonucleotide
aggaggaatggctg

SEQ ID NO: 4124 - DNA, 14 bp, Artificial Sequence
  Description of Artificial Sequence: Synthetic oligonucleotide
taggaggaatggct

SEQ ID NO: 4125 - DNA, 14 bp, Artificial Sequence
  Description of Artificial Sequence: Synthetic oligonucleotide
ctaggaggaatggc

SEQ ID NO: 4126 - DNA, 14 bp, Artificial Sequence
  Description of Artificial Sequence: Synthetic oligonucleotide
cctaggaggaatgg

SEQ ID NO: 4127 - DNA, 14 bp, Artificial Sequence
  Description of Artificial Sequence: Synthetic oligonucleotide
gcctaggaggaatg

SEQ ID NO: 4128 - DNA, 14 bp, Artificial Sequence
  Description of Artificial Sequence: Synthetic oligonucleotide
tgcctaggaggaat

SEQ ID NO: 4129 - DNA, 14 bp, Artificial Sequence
  Description of Artificial Sequence: Synthetic oligonucleotide
ttgcctaggaggaa

SEQ ID NO: 4130 - DNA, 14 bp, Artificial Sequence
  Description of Artificial Sequence: Synthetic oligonucleotide
gttgcctaggagga

SEQ ID NO: 4131 - DNA, 14 bp, Artificial Sequence
  Description of Artificial Sequence: Synthetic oligonucleotide
ggttgcctaggagg

SEQ ID NO: 4132 - DNA, 14 bp, Artificial Sequence
  Description of Artificial Sequence: Synthetic oligonucleotide
gggttgcctaggag

SEQ ID NO: 4133 - DNA, 14 bp, Artificial Sequence
  Description of Artificial Sequence: Synthetic oligonucleotide
tgggttgcctagga

SEQ ID NO: 4134 - DNA, 14 bp, Artificial Sequence
  Description of Artificial Sequence: Synthetic oligonucleotide
gtgggttgcctagg

SEQ ID NO: 4135 - DNA, 14 bp, Artificial Sequence
  Description of Artificial Sequence: Synthetic oligonucleotide
tgtgggttgcctag

SEQ ID NO: 4136 - DNA, 14 bp, Artificial Sequence
  Description of Artificial Sequence: Synthetic oligonucleotide
atgtgggttgccta

SEQ ID NO: 4137 - DNA, 14 bp, Artificial Sequence
  Description of Artificial Sequence: Synthetic oligonucleotide
gatgtgggttgcct

SEQ ID NO: 4138 - DNA, 14 bp, Artificial Sequence
  Description of Artificial Sequence: Synthetic oligonucleotide
tgatgtgggttgcc

SEQ ID NO: 4139 - DNA, 14 bp, Artificial Sequence
  Description of Artificial Sequence: Synthetic oligonucleotide
ttgatgtgggttgc

SEQ ID NO: 4140 - DNA, 14 bp, Artificial Sequence
  Description of Artificial Sequence: Synthetic oligonucleotide
tttgatgtgggttg

SEQ ID NO: 4141 - DNA, 14 bp, Artificial Sequence
  Description of Artificial Sequence: Synthetic oligonucleotide
ttttgatgtgggtt

SEQ ID NO: 4142 - DNA, 14 bp, Artificial Sequence
  Description of Artificial Sequence: Synthetic oligonucleotide
cttttgatgtgggt

SEQ ID NO: 4143 - DNA, 14 bp, Artificial Sequence
  Description of Artificial Sequence: Synthetic oligonucleotide
gcttttgatgtggg

SEQ ID NO: 4144 - DNA, 14 bp, Artificial Sequence
  Description of Artificial Sequence: Synthetic oligonucleotide
ggcttttgatgtgg

SEQ ID NO: 4145 - DNA, 14 bp, Artificial Sequence
  Description of Artificial Sequence: Synthetic oligonucleotide
aggcttttgatgtg

SEQ ID NO: 4146 - DNA, 14 bp, Artificial Sequence
  Description of Artificial Sequence: Synthetic oligonucleotide
taggcttttgatgt

SEQ ID NO: 4147 - DNA, 14 bp, Artificial Sequence
  Description of Artificial Sequence: Synthetic oligonucleotide
ataggcttttgatg

SEQ ID NO: 4148 - DNA, 14 bp, Artificial Sequence
  Description of Artificial Sequence: Synthetic oligonucleotide
aataggcttttgat

SEQ ID NO: 4149 - DNA, 14 bp, Artificial Sequence
  Description of Artificial Sequence: Synthetic oligonucleotide
gaataggcttttga

SEQ ID NO: 4150 - DNA, 14 bp, Artificial Sequence
  Description of Artificial Sequence: Synthetic oligonucleotide
tgaataggcttttg

SEQ ID NO: 4151 - DNA, 14 bp, Artificial Sequence
  Description of Artificial Sequence: Synthetic oligonucleotide
gtgaataggctttt

SEQ ID NO: 4152 - DNA, 14 bp, Artificial Sequence
  Description of Artificial Sequence: Synthetic oligonucleotide
ggtgaataggcttt

SEQ ID NO: 4153 - DNA, 14 bp, Artificial Sequence
  Description of Artificial Sequence: Synthetic oligonucleotide
tggtgaataggctt

SEQ ID NO: 4154 - DNA, 14 bp, Artificial Sequence
  Description of Artificial Sequence: Synthetic oligonucleotide
gtggtgaataggct

SEQ ID NO: 4155 - DNA, 14 bp, Artificial Sequence
  Description of Artificial Sequence: Synthetic oligonucleotide
cgtggtgaataggc

SEQ ID NO: 4156 - DNA, 14 bp, Artificial Sequence
  Description of Artificial Sequence: Synthetic oligonucleotide
tcgtggtgaatagg

SEQ ID NO: 4157 - DNA, 14 bp, Artificial Sequence
  Description of Artificial Sequence: Synthetic oligonucleotide
atcgtggtgaatag

SEQ ID NO: 4158 - DNA, 14 bp, Artificial Sequence
  Description of Artificial Sequence: Synthetic oligonucleotide
tatcgtggtgaata

SEQ ID NO: 4159 - DNA, 14 bp, Artificial Sequence
  Description of Artificial Sequence: Synthetic oligonucleotide
atatcgtggtgaat

SEQ ID NO: 4160 - DNA, 14 bp, Artificial Sequence
  Description of Artificial Sequence: Synthetic oligonucleotide
aatatcgtggtgaa

SEQ ID NO: 4161 - DNA, 14 bp, Artificial Sequence
  Description of Artificial Sequence: Synthetic oligonucleotide
gaatatcgtggtga

SEQ ID NO: 4162 - DNA, 14 bp, Artificial Sequence
  Description of Artificial Sequence: Synthetic oligonucleotide
tgaatatcgtggtg

SEQ ID NO: 4163 - DNA, 14 bp, Artificial Sequence
  Description of Artificial Sequence: Synthetic oligonucleotide
ttgaatatcgtggt

SEQ ID NO: 4164 - DNA, 14 bp, Artificial Sequence
  Description of Artificial Sequence: Synthetic oligonucleotide
attgaatatcgtgg

SEQ ID NO: 4165 - DNA, 14 bp, Artificial Sequence
  Description of Artificial Sequence: Synthetic oligonucleotide
tattgaatatcgtg

SEQ ID NO: 4166 - DNA, 14 bp, Artificial Sequence
  Description of Artificial Sequence: Synthetic oligonucleotide
atattgaatatcgt

SEQ ID NO: 4167 - DNA, 14 bp, Artificial Sequence
  Description of Artificial Sequence: Synthetic oligonucleotide
gatattgaatatcg

SEQ ID NO: 4168 - DNA, 14 bp, Artificial Sequence
  Description of Artificial Sequence: Synthetic oligonucleotide
tgatattgaatatc

SEQ ID NO: 4169 - DNA, 14 bp, Artificial Sequence
  Description of Artificial Sequence: Synthetic oligonucleotide
ctgatattgaatat

SEQ ID NO: 4170 - DNA, 14 bp, Artificial Sequence
  Description of Artificial Sequence: Synthetic oligonucleotide
tctgatattgaata

SEQ ID NO: 4171 - DNA, 14 bp, Artificial Sequence
  Description of Artificial Sequence: Synthetic oligonucleotide
gtctgatattgaat

SEQ ID NO: 4172 - DNA, 14 bp, Artificial Sequence
  Description of Artificial Sequence: Synthetic oligonucleotide
ggtctgatattgaa

SEQ ID NO: 4173 - DNA, 14 bp, Artificial Sequence
  Description of Artificial Sequence: Synthetic oligonucleotide
cggtctgatattga

SEQ ID NO: 4174 - DNA, 14 bp, Artificial Sequence
  Description of Artificial Sequence: Synthetic oligonucleotide
ccggtctgatattg

SEQ ID NO: 4175 - DNA, 14 bp, Artificial Sequence
  Description of Artificial Sequence: Synthetic oligonucleotide
tccggtctgatatt

SEQ ID NO: 4176 - DNA, 14 bp, Artificial Sequence
  Description of Artificial Sequence: Synthetic oligonucleotide
gtccggtctgatat

SEQ ID NO: 4177 - DNA, 14 bp, Artificial Sequence
  Description of Artificial Sequence: Synthetic oligonucleotide
ggtccggtctgata

SEQ ID NO: 4178 - DNA, 14 bp, Artificial Sequence
  Description of Artificial Sequence: Synthetic oligonucleotide
aggtccggtctgat

SEQ ID NO: 4179 - DNA, 14 bp, Artificial Sequence
  Description of Artificial Sequence: Synthetic oligonucleotide
gaggtccggtctga

SEQ ID NO: 4180 - DNA, 14 bp, Artificial Sequence
  Description of Artificial Sequence: Synthetic oligonucleotide
agaggtccggtctg

SEQ ID NO: 4181 - DNA, 14 bp, Artificial Sequence
  Description of Artificial Sequence: Synthetic oligonucleotide
tagaggtccggtct

SEQ ID NO: 4182 - DNA, 14 bp, Artificial Sequence
  Description of Artificial Sequence: Synthetic oligonucleotide
atagaggtccggtc

SEQ ID NO: 4183 - DNA, 14 bp, Artificial Sequence
  Description of Artificial Sequence: Synthetic oligonucleotide
gatagaggtccggt

SEQ ID NO: 4184 - DNA, 14 bp, Artificial Sequence
  Description of Artificial Sequence: Synthetic oligonucleotide
agatagaggtccgg

SEQ ID NO: 4185 - DNA, 14 bp, Artificial Sequence
  Description of Artificial Sequence: Synthetic oligonucleotide
gagatagaggtccg

SEQ ID NO: 4186 - DNA, 14 bp, Artificial Sequence
  Description of Artificial Sequence: Synthetic oligonucleotide
tgagatagaggtcc

SEQ ID NO: 4187 - DNA, 14 bp, Artificial Sequence
  Description of Artificial Sequence: Synthetic oligonucleotide
ctgagatagaggtc

SEQ ID NO: 4188 - DNA, 14 bp, Artificial Sequence
  Description of Artificial Sequence: Synthetic oligonucleotide
tctgagatagaggt

SEQ ID NO: 4189 - DNA, 14 bp, Artificial Sequence
  Description of Artificial Sequence: Synthetic oligonucleotide
gtctgagatagagg

SEQ ID NO: 4190 - DNA, 14 bp, Artificial Sequence
  Description of Artificial Sequence: Synthetic oligonucleotide
ggtctgagatagag

SEQ ID NO: 4191 - DNA, 14 bp, Artificial Sequence
  Description of Artificial Sequence: Synthetic oligonucleotide
gggtctgagataga

SEQ ID NO: 4192 - DNA, 14 bp, Artificial Sequence
  Description of Artificial Sequence: Synthetic oligonucleotide
agggtctgagatag

SEQ ID NO: 4193 - DNA, 14 bp, Artificial Sequence
  Description of Artificial Sequence: Synthetic oligonucleotide
gagggtctgagata

SEQ ID NO: 4194 - DNA, 14 bp, Artificial Sequence
  Description of Artificial Sequence: Synthetic oligonucleotide
ggagggtctgagat

SEQ ID NO: 4195 - DNA, 14 bp, Artificial Sequence
  Description of Artificial Sequence: Synthetic oligonucleotide
aggagggtctgaga

SEQ ID NO: 4196 - DNA, 14 bp, Artificial Sequence
  Description of Artificial Sequence: Synthetic oligonucleotide
caggagggtctgag

SEQ ID NO: 4197 - DNA, 14 bp, Artificial Sequence
  Description of Artificial Sequence: Synthetic oligonucleotide
tcaggagggtctga

SEQ ID NO: 4198 - DNA, 14 bp, Artificial Sequence
  Description of Artificial Sequence: Synthetic oligonucleotide
ttcaggagggtctg

SEQ ID NO: 4199 - DNA, 14 bp, Artificial Sequence
  Description of Artificial Sequence: Synthetic oligonucleotide
tttcaggagggtct

SEQ ID NO: 4200 - DNA, 14 bp, Artificial Sequence
  Description of Artificial Sequence: Synthetic oligonucleotide
ctttcaggagggtc

SEQ ID NO: 4201 - DNA, 14 bp, Artificial Sequence
  Description of Artificial Sequence: Synthetic oligonucleotide
gctttcaggagggt

SEQ ID NO: 4202 - DNA, 14 bp, Artificial Sequence
  Description of Artificial Sequence: Synthetic oligonucleotide
ggctttcaggaggg

SEQ ID NO: 4203 - DNA, 14 bp, Artificial Sequence
  Description of Artificial Sequence: Synthetic oligonucleotide
gggctttcaggagg

SEQ ID NO: 4204 - DNA, 14 bp, Artificial Sequence
  Description of Artificial Sequence: Synthetic oligonucleotide
agggctttcaggag

SEQ ID NO: 4205 - DNA, 14 bp, Artificial Sequence
  Description of Artificial Sequence: Synthetic oligonucleotide
gagggctttcagga

SEQ ID NO: 4206 - DNA, 14 bp, Artificial Sequence
  Description of Artificial Sequence: Synthetic oligonucleotide
ggagggctttcagg

SEQ ID NO: 4207 - DNA, 14 bp, Artificial Sequence
  Description of Artificial Sequence: Synthetic oligonucleotide
gggagggctttcag

SEQ ID NO: 4208 - DNA, 14 bp, Artificial Sequence
  Description of Artificial Sequence: Synthetic oligonucleotide
agggagggctttca

SEQ ID NO: 4209 - DNA, 14 bp, Artificial Sequence
  Description of Artificial Sequence: Synthetic oligonucleotide
aagggagggctttc

SEQ ID NO: 4210 - DNA, 14 bp, Artificial Sequence
  Description of Artificial Sequence: Synthetic oligonucleotide
taagggagggcttt

SEQ ID NO: 4211 - DNA, 14 bp, Artificial Sequence
  Description of Artificial Sequence: Synthetic oligonucleotide
ataagggagggctt

SEQ ID NO: 4212 - DNA, 14 bp, Artificial Sequence
  Description of Artificial Sequence: Synthetic oligonucleotide
aataagggagggct

SEQ ID NO: 4213 - DNA, 14 bp, Artificial Sequence
  Description of Artificial Sequence: Synthetic oligonucleotide
taataagggagggc

SEQ ID NO: 4214 - DNA, 14 bp, Artificial Sequence
  Description of Artificial Sequence: Synthetic oligonucleotide
gtaataagggaggg

SEQ ID NO: 4215 - DNA, 14 bp, Artificial Sequence
  Description of Artificial Sequence: Synthetic oligonucleotide
ggtaataagggagg

SEQ ID NO: 4216 - DNA, 14 bp, Artificial Sequence
  Description of Artificial Sequence: Synthetic oligonucleotide
tggtaataagggag

SEQ ID NO: 4217 - DNA, 14 bp, Artificial Sequence
  Description of Artificial Sequence: Synthetic oligonucleotide
gtggtaataaggga

SEQ ID NO: 4218 - DNA, 14 bp, Artificial Sequence
  Description of Artificial Sequence: Synthetic oligonucleotide
ggtggtaataaggg

SEQ ID NO: 4219 - DNA, 14 bp, Artificial Sequence
  Description of Artificial Sequence: Synthetic oligonucleotide
tggtggtaataagg

SEQ ID NO: 4220 - DNA, 14 bp, Artificial Sequence
  Description of Artificial Sequence: Synthetic oligonucleotide
gtggtggtaataag

SEQ ID NO: 4221 - DNA, 14 bp, Artificial Sequence
  Description of Artificial Sequence: Synthetic oligonucleotide
cgtggtggtaataa

SEQ ID NO: 4222 - DNA, 14 bp, Artificial Sequence
  Description of Artificial Sequence: Synthetic oligonucleotide
tcgtggtggtaata

SEQ ID NO: 4223 - DNA, 14 bp, Artificial Sequence
  Description of Artificial Sequence: Synthetic oligonucleotide
ctcgtggtggtaat

SEQ ID NO: 4224 - DNA, 14 bp, Artificial Sequence
  Description of Artificial Sequence: Synthetic oligonucleotide
tctcgtggtggtaa

SEQ ID NO: 4225 - DNA, 14 bp, Artificial Sequence
  Description of Artificial Sequence: Synthetic oligonucleotide
ttctcgtggtggta

SEQ ID NO: 4226 - DNA, 14 bp, Artificial Sequence
  Description of Artificial Sequence: Synthetic oligonucleotide
gttctcgtggtggt

SEQ ID NO: 4227 - DNA, 14 bp, Artificial Sequence
  Description of Artificial Sequence: Synthetic oligonucleotide
ggttctcgtggtgg

SEQ ID NO: 4228 - DNA, 14 bp, Artificial Sequence
  Description of Artificial Sequence: Synthetic oligonucleotide
aggttctcgtggtg

SEQ ID NO: 4229 - DNA, 14 bp, Artificial Sequence
  Description of Artificial Sequence: Synthetic oligonucleotide
caggttctcgtggt

SEQ ID NO: 4230 - DNA, 14 bp, Artificial Sequence
  Description of Artificial Sequence: Synthetic oligonucleotide
acaggttctcgtgg

SEQ ID NO: 4231 - DNA, 14 bp, Artificial Sequence
  Description of Artificial Sequence: Synthetic oligonucleotide
cacaggttctcgtg

SEQ ID NO: 4232 - DNA, 14 bp, Artificial Sequence
  Description of Artificial Sequence: Synthetic oligonucleotide
tcacaggttctcgt

SEQ ID NO: 4233 - DNA, 14 bp, Artificial Sequence
  Description of Artificial Sequence: Synthetic oligonucleotide
ctcacaggttctcg

SEQ ID NO: 4234 - DNA, 14 bp, Artificial Sequence
  Description of Artificial Sequence: Synthetic oligonucleotide
cctcacaggttctc

SEQ ID NO: 4235 - DNA, 14 bp, Artificial Sequence
  Description of Artificial Sequence: Synthetic oligonucleotide
tcctcacaggttct

SEQ ID NO: 4236 - DNA, 14 bp, Artificial Sequence
  Description of Artificial Sequence: Synthetic oligonucleotide
gtcctcacaggttc

SEQ ID NO: 4237 - DNA, 14 bp, Artificial Sequence
  Description of Artificial Sequence: Synthetic oligonucleotide
tgtcctcacaggtt

SEQ ID NO: 4238 - DNA, 14 bp, Artificial Sequence
  Description of Artificial Sequence: Synthetic oligonucleotide
gtgtcctcacaggt

SEQ ID NO: 4239 - DNA, 14 bp, Artificial Sequence
  Description of Artificial Sequence: Synthetic oligonucleotide
ggtgtcctcacagg

SEQ ID NO: 4240 - DNA, 14 bp, Artificial Sequence
  Description of Artificial Sequence: Synthetic oligonucleotide
aggtgtcctcacag

SEQ ID NO: 4241 - DNA, 14 bp, Artificial Sequence
  Description of Artificial Sequence: Synthetic oligonucleotide
caggtgtcctcaca

SEQ ID NO: 4242 - DNA, 14 bp, Artificial Sequence
  Description of Artificial Sequence: Synthetic oligonucleotide
tcaggtgtcctcac

SEQ ID NO: 4243 - DNA, 14 bp, Artificial Sequence
  Description of Artificial Sequence: Synthetic oligonucleotide
atcaggtgtcctca

SEQ ID NO: 4244 - DNA, 14 bp, Artificial Sequence
  Description of Artificial Sequence: Synthetic oligonucleotide
catcaggtgtcctc

SEQ ID NO: 4245 - DNA, 14 bp, Artificial Sequence
  Description of Artificial Sequence: Synthetic oligonucleotide
acatcaggtgtcct

SEQ ID NO: 4246 - DNA, 14 bp, Artificial Sequence
  Description of Artificial Sequence: Synthetic oligonucleotide
aacatcaggtgtcc

SEQ ID NO: 4247 - DNA, 14 bp, Artificial Sequence
  Description of Artificial Sequence: Synthetic oligonucleotide
aaacatcaggtgtc

SEQ ID NO: 4248 - DNA, 14 bp, Artificial Sequence
  Description of Artificial Sequence: Synthetic oligonucleotide
aaaacatcaggtgt

SEQ ID NO: 4249 - DNA, 14 bp, Artificial Sequence
  Description of Artificial Sequence: Synthetic oligonucleotide
gaaaacatcaggtg

SEQ ID NO: 4250 - DNA, 14 bp, Artificial Sequence
  Description of Artificial Sequence: Synthetic oligonucleotide
agaaaacatcaggt

SEQ ID NO: 4251 - DNA, 14 bp, Artificial Sequence
  Description of Artificial Sequence: Synthetic oligonucleotide
gagaaaacatcagg

SEQ ID NO: 4252 - DNA, 14 bp, Artificial Sequence
  Description of Artificial Sequence: Synthetic oligonucleotide
tgagaaaacatcag

SEQ ID NO: 4253 - DNA, 14 bp, Artificial Sequence
  Description of Artificial Sequence: Synthetic oligonucleotide
ttgagaaaacatca

SEQ ID NO: 4254 - DNA, 14 bp, Artificial Sequence
  Description of Artificial Sequence: Synthetic oligonucleotide
cttgagaaaacatc

SEQ ID NO: 4255 - DNA, 14 bp, Artificial Sequence
  Description of Artificial Sequence: Synthetic oligonucleotide
gcttgagaaaacat

SEQ ID NO: 4256 - DNA, 14 bp, Artificial Sequence
  Description of Artificial Sequence: Synthetic oligonucleotide
agcttgagaaaaca

SEQ ID NO: 4257 - DNA, 14 bp, Artificial Sequence
  Description of Artificial Sequence: Synthetic oligonucleotide
gagcttgagaaaac

SEQ ID NO: 4258 - DNA, 14 bp, Artificial Sequence
  Description of Artificial Sequence: Synthetic oligonucleotide
tgagcttgagaaaa

SEQ ID NO: 4259 - DNA, 14 bp, Artificial Sequence
  Description of Artificial Sequence: Synthetic oligonucleotide
gtgagcttgagaaa

SEQ ID NO: 4260 - DNA, 14 bp, Artificial Sequence
  Description of Artificial Sequence: Synthetic oligonucleotide
ggtgagcttgagaa

SEQ ID NO: 4261 - DNA, 14 bp, Artificial Sequence
  Description of Artificial Sequence: Synthetic oligonucleotide
tggtgagcttgaga

SEQ ID NO: 4262 - DNA, 14 bp, Artificial Sequence
  Description of Artificial Sequence: Synthetic oligonucleotide
gtggtgagcttgag

SEQ ID NO: 4263 - DNA, 14 bp, Artificial Sequence
  Description of Artificial Sequence: Synthetic oligonucleotide
agtggtgagcttga

SEQ ID NO: 4264 - DNA, 14 bp, Artificial Sequence
  Description of Artificial Sequence: Synthetic oligonucleotide
tagtggtgagcttg

SEQ ID NO: 4265 - DNA, 14 bp, Artificial Sequence
  Description of Artificial Sequence: Synthetic oligonucleotide
gtagtggtgagctt

SEQ ID NO: 4266 - DNA, 14 bp, Artificial Sequence
  Description of Artificial Sequence: Synthetic oligonucleotide
tgtagtggtgagct

SEQ ID NO: 4267 - DNA, 14 bp, Artificial Sequence
  Description of Artificial Sequence: Synthetic oligonucleotide
atgtagtggtgagc

SEQ ID NO: 4268 - DNA, 14 bp, Artificial Sequence
  Description of Artificial Sequence: Synthetic oligonucleotide
gatgtagtggtgag

SEQ ID NO: 4269 - DNA, 14 bp, Artificial Sequence
  Description of Artificial Sequence: Synthetic oligonucleotide
agatgtagtggtga

SEQ ID NO: 4270 - DNA, 14 bp, Artificial Sequence
  Description of Artificial Sequence: Synthetic oligonucleotide
gagatgtagtggtg

SEQ ID NO: 4271 - DNA, 14 bp, Artificial Sequence
  Description of Artificial Sequence: Synthetic oligonucleotide
ggagatgtagtggt

SEQ ID NO: 4272 - DNA, 14 bp, Artificial Sequence
  Description of Artificial Sequence: Synthetic oligonucleotide
tggagatgtagtgg

SEQ ID NO: 4273 - DNA, 14 bp, Artificial Sequence
  Description of Artificial Sequence: Synthetic oligonucleotide
ttggagatgtagtg

SEQ ID NO: 4274 - DNA, 14 bp, Artificial Sequence
  Description of Artificial Sequence: Synthetic oligonucleotide
gttggagatgtagt

SEQ ID NO: 4275 - DNA, 14 bp, Artificial Sequence
  Description of Artificial Sequence: Synthetic oligonucleotide
ggttggagatgtag

SEQ ID NO: 4276 - DNA, 14 bp, Artificial Sequence
  Description of Artificial Sequence: Synthetic oligonucleotide
aggttggagatgta

SEQ ID NO: 4277 - DNA, 14 bp, Artificial Sequence
  Description of Artificial Sequence: Synthetic oligonucleotide
gaggttggagatgt

SEQ ID NO: 4278 - DNA, 14 bp, Artificial Sequence
  Description of Artificial Sequence: Synthetic oligonucleotide
ggaggttggagatg

SEQ ID NO: 4279 - DNA, 14 bp, Artificial Sequence
  Description of Artificial Sequence: Synthetic oligonucleotide
gggaggttggagat

SEQ ID NO: 4280 - DNA, 14 bp, Artificial Sequence
  Description of Artificial Sequence: Synthetic oligonucleotide
ggggaggttggaga

SEQ ID NO: 4281 - DNA, 14 bp, Artificial Sequence
  Description of Artificial Sequence: Synthetic oligonucleotide
gggggaggttggag

SEQ ID NO: 4282 - DNA, 14 bp, Artificial Sequence
  Description of Artificial Sequence: Synthetic oligonucleotide
agggggaggttgga

SEQ ID NO: 4283 - DNA, 14 bp, Artificial Sequence
  Description of Artificial Sequence: Synthetic oligonucleotide
aagggggaggttgg

SEQ ID NO: 4284 - DNA, 14 bp, Artificial Sequence
  Description of Artificial Sequence: Synthetic oligonucleotide
aaagggggaggttg

SEQ ID NO: 4285 - DNA, 14 bp, Artificial Sequence
  Description of Artificial Sequence: Synthetic oligonucleotide
caaagggggaggtt

SEQ ID NO: 4286 - DNA, 14 bp, Artificial Sequence
  Description of Artificial Sequence: Synthetic oligonucleotide
ccaaagggggaggt

SEQ ID NO: 4287 - DNA, 14 bp, Artificial Sequence
  Description of Artificial Sequence: Synthetic oligonucleotide
cccaaagggggagg

SEQ ID NO: 4288 - DNA, 14 bp, Artificial Sequence
  Description of Artificial Sequence: Synthetic oligonucleotide
gcccaaagggggag

SEQ ID NO: 4289 - DNA, 14 bp, Artificial Sequence
  Description of Artificial Sequence: Synthetic oligonucleotide
tgcccaaaggggga

SEQ ID NO: 4290 - DNA, 14 bp, Artificial Sequence
  Description of Artificial Sequence: Synthetic oligonucleotide
ttgcccaaaggggg

SEQ ID NO: 4291 - DNA, 14 bp, Artificial Sequence
  Description of Artificial Sequence: Synthetic oligonucleotide
tttgcccaaagggg

SEQ ID NO: 4292 - DNA, 14 bp, Artificial Sequence
  Description of Artificial Sequence: Synthetic oligonucleotide
ttttgcccaaaggg

SEQ ID NO: 4293 - DNA, 14 bp, Artificial Sequence
  Description of Artificial Sequence: Synthetic oligonucleotide
tttttgcccaaagg

SEQ ID NO: 4294 - DNA, 14 bp, Artificial Sequence
  Description of Artificial Sequence: Synthetic oligonucleotide
ttttttgcccaaag

SEQ ID NO: 4295 - DNA, 14 bp, Artificial Sequence
  Description of Artificial Sequence: Synthetic oligonucleotide
tttttttgcccaaa

SEQ ID NO: 4296 - DNA, 14 bp, Artificial Sequence
  Description of Artificial Sequence: Synthetic oligonucleotide
ctttttttgcccaa

SEQ ID NO: 4297 - DNA, 14 bp, Artificial Sequence
  Description of Artificial Sequence: Synthetic oligonucleotide
actttttttgccca

SEQ ID NO: 4298 - DNA, 14 bp, Artificial Sequence
  Description of Artificial Sequence: Synthetic oligonucleotide
cactttttttgccc

SEQ ID NO: 4299 - DNA, 14 bp, Artificial Sequence
  Description of Artificial Sequence: Synthetic oligonucleotide
tcactttttttgcc

SEQ ID NO: 4300 - DNA, 14 bp, Artificial Sequence
  Description of Artificial Sequence: Synthetic oligonucleotide
gtcactttttttgc

SEQ ID NO: 4301 - DNA, 14 bp, Artificial Sequence
  Description of Artificial Sequence: Synthetic oligonucleotide
ggtcactttttttg

SEQ ID NO: 4302 - DNA, 14 bp, Artificial Sequence
  Description of Artificial Sequence: Synthetic oligonucleotide
tggtcacttttttt

SEQ ID NO: 4303 - DNA, 14 bp, Artificial Sequence
  Description of Artificial Sequence: Synthetic oligonucleotide
atggtcactttttt

SEQ ID NO: 4304 - DNA, 14 bp, Artificial Sequence
  Description of Artificial Sequence: Synthetic oligonucleotide
catggtcacttttt

SEQ ID NO: 4305 - DNA, 14 bp, Artificial Sequence
  Description of Artificial Sequence: Synthetic oligonucleotide
ccatggtcactttt

SEQ ID NO: 4306 - DNA, 14 bp, Artificial Sequence
  Description of Artificial Sequence: Synthetic oligonucleotide
gccatggtcacttt

SEQ ID NO: 4307 - DNA, 14 bp, Artificial Sequence
  Description of Artificial Sequence: Synthetic oligonucleotide
tgccatggtcactt

SEQ ID NO: 4308 - DNA, 14 bp, Artificial Sequence
  Description of Artificial Sequence: Synthetic oligonucleotide
ttgccatggtcact

SEQ ID NO: 4309 - DNA, 14 bp, Artificial Sequence
  Description of Artificial Sequence: Synthetic oligonucleotide
attgccatggtcac

SEQ ID NO: 4310 - DNA, 14 bp, Artificial Sequence
  Description of Artificial Sequence: Synthetic oligonucleotide
cattgccatggtca

SEQ ID NO: 4311 - DNA, 14 bp, Artificial Sequence
  Description of Artificial Sequence: Synthetic oligonucleotide
gcattgccatggtc

SEQ ID NO: 4312 - DNA, 14 bp, Artificial Sequence
  Description of Artificial Sequence: Synthetic oligonucleotide
ggcattgccatggt

SEQ ID NO: 4313 - DNA, 14 bp, Artificial Sequence
  Description of Artificial Sequence: Synthetic oligonucleotide
aggcattgccatgg

SEQ ID NO: 4314 - DNA, 14 bp, Artificial Sequence
  Description of Artificial Sequence: Synthetic oligonucleotide
aaggcattgccatg

SEQ ID NO: 4315 - DNA, 14 bp, Artificial Sequence
  Description of Artificial Sequence: Synthetic oligonucleotide
gaaggcattgccat

SEQ ID NO: 4316 - DNA, 14 bp, Artificial Sequence
  Description of Artificial Sequence: Synthetic oligonucleotide
agaaggcattgcca

SEQ ID NO: 4317 - DNA, 14 bp, Artificial Sequence
  Description of Artificial Sequence: Synthetic oligonucleotide
aagaaggcattgcc

SEQ ID NO: 4318 - DNA, 14 bp, Artificial Sequence
  Description of Artificial Sequence: Synthetic oligonucleotide
gaagaaggcattgc

SEQ ID NO: 4319 - DNA, 14 bp, Artificial Sequence
  Description of Artificial Sequence: Synthetic oligonucleotide
ggaagaaggcattg

SEQ ID NO: 4320 - DNA, 14 bp, Artificial Sequence
  Description of Artificial Sequence: Synthetic oligonucleotide
gggaagaaggcatt

SEQ ID NO: 4321 - DNA, 14 bp, Artificial Sequence
  Description of Artificial Sequence: Synthetic oligonucleotide
tgggaagaaggcat

SEQ ID NO: 4322 - DNA, 14 bp, Artificial Sequence
  Description of Artificial Sequence: Synthetic oligonucleotide
ttgggaagaaggca

SEQ ID NO: 4323 - DNA, 14 bp, Artificial Sequence
  Description of Artificial Sequence: Synthetic oligonucleotide
tttgggaagaaggc

SEQ ID NO: 4324 - DNA, 14 bp, Artificial Sequence
  Description of Artificial Sequence: Synthetic oligonucleotide
gtttgggaagaagg

SEQ ID NO: 4325 - DNA, 14 bp, Artificial Sequence
  Description of Artificial Sequence: Synthetic oligonucleotide
tgtttgggaagaag

SEQ ID NO: 4326 - DNA, 14 bp, Artificial Sequence
  Description of Artificial Sequence: Synthetic oligonucleotide
ctgtttgggaagaa

SEQ ID NO: 4327 - DNA, 14 bp, Artificial Sequence
  Description of Artificial Sequence: Synthetic oligonucleotide
gctgtttgggaaga

SEQ ID NO: 4328 - DNA, 14 bp, Artificial Sequence
  Description of Artificial Sequence: Synthetic oligonucleotide
ggctgtttgggaag

SEQ ID NO: 4329 - DNA, 14 bp, Artificial Sequence
  Description of Artificial Sequence: Synthetic oligonucleotide
gggctgtttgggaa

SEQ ID NO: 4330 - DNA, 14 bp, Artificial Sequence
  Description of Artificial Sequence: Synthetic oligonucleotide
agggctgtttggga

SEQ ID NO: 4331 - DNA, 14 bp, Artificial Sequence
  Description of Artificial Sequence: Synthetic oligonucleotide
aagggctgtttggg

SEQ ID NO: 4332 - DNA, 14 bp, Artificial Sequence
  Description of Artificial Sequence: Synthetic oligonucleotide
gaagggctgtttgg

SEQ ID NO: 4333 - DNA, 14 bp, Artificial Sequence
  Description of Artificial Sequence: Synthetic oligonucleotide
ggaagggctgtttg

SEQ ID NO: 4334 - DNA, 14 bp, Artificial Sequence
  Description of Artificial Sequence: Synthetic oligonucleotide
gggaagggctgttt

SEQ ID NO: 4335 - DNA, 14 bp, Artificial Sequence
  Description of Artificial Sequence: Synthetic oligonucleotide
ggggaagggctgtt

SEQ ID NO: 4336 - DNA, 14 bp, Artificial Sequence
  Description of Artificial Sequence: Synthetic oligonucleotide
gggggaagggctgt

SEQ ID NO: 4337 - DNA, 14 bp, Artificial Sequence
  Description of Artificial Sequence: Synthetic oligonucleotide
agggggaagggctg

SEQ ID NO: 4338 - DNA, 14 bp, Artificial Sequence
  Description of Artificial Sequence: Synthetic oligonucleotide
aagggggaagggct

SEQ ID NO: 4339 - DNA, 14 bp, Artificial Sequence
  Description of Artificial Sequence: Synthetic oligonucleotide
aaagggggaagggc

SEQ ID NO: 4340 - DNA, 14 bp, Artificial Sequence
  Description of Artificial Sequence: Synthetic oligonucleotide
taaagggggaaggg

SEQ ID NO: 4341 - DNA, 14 bp, Artificial Sequence
  Description of Artificial Sequence: Synthetic oligonucleotide
gtaaagggggaagg

SEQ ID NO: 4342 - DNA, 14 bp, Artificial Sequence
  Description of Artificial Sequence: Synthetic oligonucleotide
tgtaaagggggaag

SEQ ID NO: 4343 - DNA, 14 bp, Artificial Sequence
  Description of Artificial Sequence: Synthetic oligonucleotide
gtgtaaagggggaa

SEQ ID NO: 4344 - DNA, 14 bp, Artificial Sequence
  Description of Artificial Sequence: Synthetic oligonucleotide
ggtgtaaaggggga

SEQ ID NO: 4345 - DNA, 14 bp, Artificial Sequence
  Description of Artificial Sequence: Synthetic oligonucleotide
tggtgtaaaggggg

SEQ ID NO: 4346 - DNA, 14 bp, Artificial Sequence
  Description of Artificial Sequence: Synthetic oligonucleotide
gtggtgtaaagggg

SEQ ID NO: 4347 - DNA, 14 bp, Artificial Sequence
  Description of Artificial Sequence: Synthetic oligonucleotide
ggtggtgtaaaggg

SEQ ID NO: 4348 - DNA, 14 bp, Artificial Sequence
  Description of Artificial Sequence: Synthetic oligonucleotide
aggtggtgtaaagg

SEQ ID NO: 4349 - DNA, 14 bp, Artificial Sequence
  Description of Artificial Sequence: Synthetic oligonucleotide
gaggtggtgtaaag

SEQ ID NO: 4350 - DNA, 14 bp, Artificial Sequence
  Description of Artificial Sequence: Synthetic oligonucleotide
ggaggtggtgtaaa

SEQ ID NO: 4351 - DNA, 14 bp, Artificial Sequence
  Description of Artificial Sequence: Synthetic oligonucleotide
aggaggtggtgtaa

SEQ ID NO: 4352 - DNA, 14 bp, Artificial Sequence
  Description of Artificial Sequence: Synthetic oligonucleotide
gaggaggtggtgta

SEQ ID NO: 4353 - DNA, 14 bp, Artificial Sequence
  Description of Artificial Sequence: Synthetic oligonucleotide
ggaggaggtggtgt

SEQ ID NO: 4354 - DNA, 14 bp, Artificial Sequence
  Description of Artificial Sequence: Synthetic oligonucleotide
aggaggaggtggtg

SEQ ID NO: 4355 - DNA, 14 bp, Artificial Sequence
  Description of Artificial Sequence: Synthetic oligonucleotide
gaggaggaggtggt

SEQ ID NO: 4356 - DNA, 14 bp, Artificial Sequence
  Description of Artificial Sequence: Synthetic oligonucleotide
tgaggaggaggtgg

SEQ ID NO: 4357 - DNA, 14 bp, Artificial Sequence
  Description of Artificial Sequence: Synthetic oligonucleotide
ttgaggaggaggtg

SEQ ID NO: 4358 - DNA, 14 bp, Artificial Sequence
  Description of Artificial Sequence: Synthetic oligonucleotide
tttgaggaggaggt

SEQ ID NO: 4359 - DNA, 14 bp, Artificial Sequence
  Description of Artificial Sequence: Synthetic oligonucleotide
gtttgaggaggagg

SEQ ID NO: 4360 - DNA, 14 bp, Artificial Sequence
  Description of Artificial Sequence: Synthetic oligonucleotide
tgtttgaggaggag

SEQ ID NO: 4361 - DNA, 14 bp, Artificial Sequence
  Description of Artificial Sequence: Synthetic oligonucleotide
gtgtttgaggagga

SEQ ID NO: 4362 - DNA, 14 bp, Artificial Sequence
  Description of Artificial Sequence: Synthetic oligonucleotide
ggtgtttgaggagg

SEQ ID NO: 4363 - DNA, 14 bp, Artificial Sequence
  Description of Artificial Sequence: Synthetic oligonucleotide
aggtgtttgaggag

SEQ ID NO: 4364 - DNA, 14 bp, Artificial Sequence
  Description of Artificial Sequence: Synthetic oligonucleotide
aaggtgtttgagga

SEQ ID NO: 4365 - DNA, 14 bp, Artificial Sequence
  Description of Artificial Sequence: Synthetic oligonucleotide
gaaggtgtttgagg

SEQ ID NO: 4366 - DNA, 14 bp, Artificial Sequence
  Description of Artificial Sequence: Synthetic oligonucleotide
agaaggtgtttgag

SEQ ID NO: 4367 - DNA, 14 bp, Artificial Sequence
  Description of Artificial Sequence: Synthetic oligonucleotide
gagaaggtgtttga

SEQ ID NO: 4368 - DNA, 14 bp, Artificial Sequence
  Description of Artificial Sequence: Synthetic oligonucleotide
ggagaaggtgtttg

SEQ ID NO: 4369 - DNA, 14 bp, Artificial Sequence
  Description of Artificial Sequence: Synthetic oligonucleotide
aggagaaggtgttt

SEQ ID NO: 4370 - DNA, 14 bp, Artificial Sequence
  Description of Artificial Sequence: Synthetic oligonucleotide
gaggagaaggtgtt

SEQ ID NO: 4371 - DNA, 14 bp, Artificial Sequence
  Description of Artificial Sequence: Synthetic oligonucleotide
tgaggagaaggtgt

SEQ ID NO: 4372 - DNA, 14 bp, Artificial Sequence
  Description of Artificial Sequence: Synthetic oligonucleotide
gtgaggagaaggtg

SEQ ID NO: 4373 - DNA, 14 bp, Artificial Sequence
  Description of Artificial Sequence: Synthetic oligonucleotide
cgtgaggagaaggt

SEQ ID NO: 4374 - DNA, 14 bp, Artificial Sequence
  Description of Artificial Sequence: Synthetic oligonucleotide
ccgtgaggagaagg

SEQ ID NO: 4375 - DNA, 14 bp, Artificial Sequence
  Description of Artificial Sequence: Synthetic oligonucleotide
gccgtgaggagaag

SEQ ID NO: 4376 - DNA, 14 bp, Artificial Sequence
  Description of Artificial Sequence: Synthetic oligonucleotide
tgccgtgaggagaa

SEQ ID NO: 4377 - DNA, 14 bp, Artificial Sequence
  Description of Artificial Sequence: Synthetic oligonucleotide
gtgccgtgaggaga

SEQ ID NO: 4378 - DNA, 14 bp, Artificial Sequence
  Description of Artificial Sequence: Synthetic oligonucleotide
tgtgccgtgaggag

SEQ ID NO: 4379 - DNA, 14 bp, Artificial Sequence
  Description of Artificial Sequence: Synthetic oligonucleotide
ttgtgccgtgagga

SEQ ID NO: 4380 - DNA, 14 bp, Artificial Sequence
  Description of Artificial Sequence: Synthetic oligonucleotide
cttgtgccgtgagg

SEQ ID NO: 4381 - DNA, 14 bp, Artificial Sequence
  Description of Artificial Sequence: Synthetic oligonucleotide
tcttgtgccgtgag

SEQ ID NO: 4382 - DNA, 14 bp, Artificial Sequence
  Description of Artificial Sequence: Synthetic oligonucleotide
ttcttgtgccgtga

SEQ ID NO: 4383 - DNA, 14 bp, Artificial Sequence
  Description of Artificial Sequence: Synthetic oligonucleotide
cttcttgtgccgtg

SEQ ID NO: 4384 - DNA, 14 bp, Artificial Sequence
  Description of Artificial Sequence: Synthetic oligonucleotide
ccttcttgtgccgt

SEQ ID NO: 4385 - DNA, 14 bp, Artificial Sequence
  Description of Artificial Sequence: Synthetic oligonucleotide
gccttcttgtgccg

SEQ ID NO: 4386 - DNA, 14 bp, Artificial Sequence
  Description of Artificial Sequence: Synthetic oligonucleotide
tgccttcttgtgcc

SEQ ID NO: 4387 - DNA, 14 bp, Artificial Sequence
  Description of Artificial Sequence: Synthetic oligonucleotide
atgccttcttgtgc

SEQ ID NO: 4388 - DNA, 14 bp, Artificial Sequence
  Description of Artificial Sequence: Synthetic oligonucleotide
gatgccttcttgtg

SEQ ID NO: 4389 - DNA, 14 bp, Artificial Sequence
  Description of Artificial Sequence: Synthetic oligonucleotide
agatgccttcttgt

SEQ ID NO: 4390 - DNA, 14 bp, Artificial Sequence
  Description of Artificial Sequence: Synthetic oligonucleotide
cagatgccttcttg

SEQ ID NO: 4391 - DNA, 14 bp, Artificial Sequence
  Description of Artificial Sequence: Synthetic oligonucleotide
gcagatgccttctt

SEQ ID NO: 4392 - DNA, 14 bp, Artificial Sequence
  Description of Artificial Sequence: Synthetic oligonucleotide
ggcagatgccttct

SEQ ID NO: 4393 - DNA, 14 bp, Artificial Sequence
  Description of Artificial Sequence: Synthetic oligonucleotide
tggcagatgccttc

SEQ ID NO: 4394 - DNA, 14 bp, Artificial Sequence
  Description of Artificial Sequence: Synthetic oligonucleotide
atggcagatgcctt

SEQ ID NO: 4395 - DNA, 14 bp, Artificial Sequence
  Description of Artificial Sequence: Synthetic oligonucleotide
gatggcagatgcct

SEQ ID NO: 4396 - DNA, 14 bp, Artificial Sequence
  Description of Artificial Sequence: Synthetic oligonucleotide
tgatggcagatgcc

SEQ ID NO: 4397 - DNA, 14 bp, Artificial Sequence
  Description of Artificial Sequence: Synthetic oligonucleotide
gtgatggcagatgc

SEQ ID NO: 4398 - DNA, 14 bp, Artificial Sequence
  Description of Artificial Sequence: Synthetic oligonucleotide
ggtgatggcagatg

SEQ ID NO: 4399 - DNA, 14 bp, Artificial Sequence
  Description of Artificial Sequence: Synthetic oligonucleotide
tggtgatggcagat

SEQ ID NO: 4400 - DNA, 14 bp, Artificial Sequence
  Description of Artificial Sequence: Synthetic oligonucleotide
gtggtgatggcaga

SEQ ID NO: 4401 - DNA, 14 bp, Artificial Sequence
  Description of Artificial Sequence: Synthetic oligonucleotide
ggtggtgatggcag

SEQ ID NO: 4402 - DNA, 14 bp, Artificial Sequence
  Description of Artificial Sequence: Synthetic oligonucleotide
tggtggtgatggca

SEQ ID NO: 4403 - DNA, 14 bp, Artificial Sequence
  Description of Artificial Sequence: Synthetic oligonucleotide
atggtggtgatggc

SEQ ID NO: 4404 - DNA, 14 bp, Artificial Sequence
  Description of Artificial Sequence: Synthetic oligonucleotide
aatggtggtgatgg

SEQ ID NO: 4405 - DNA, 14 bp, Artificial Sequence
  Description of Artificial Sequence: Synthetic oligonucleotide
caatggtggtgatg

SEQ ID NO: 4406 - DNA, 14 bp, Artificial Sequence
  Description of Artificial Sequence: Synthetic oligonucleotide
tcaatggtggtgat

SEQ ID NO: 4407 - DNA, 14 bp, Artificial Sequence
  Description of Artificial Sequence: Synthetic oligonucleotide
gtcaatggtggtga

SEQ ID NO: 4408 - DNA, 14 bp, Artificial Sequence
  Description of Artificial Sequence: Synthetic oligonucleotide
tgtcaatggtggtg

SEQ ID NO: 4409 - DNA, 14 bp, Artificial Sequence
  Description of Artificial Sequence: Synthetic oligonucleotide
gtgtcaatggtggt

SEQ ID NO: 4410 - DNA, 14 bp, Artificial Sequence
  Description of Artificial Sequence: Synthetic oligonucleotide
tgtgtcaatggtgg

SEQ ID NO: 4411 - DNA, 14 bp, Artificial Sequence
  Description of Artificial Sequence: Synthetic oligonucleotide
ttgtgtcaatggtg

SEQ ID NO: 4412 - DNA, 14 bp, Artificial Sequence
  Description of Artificial Sequence: Synthetic oligonucleotide
cttgtgtcaatggt

SEQ ID NO: 4413 - DNA, 14 bp, Artificial Sequence
  Description of Artificial Sequence: Synthetic oligonucleotide
tcttgtgtcaatgg

SEQ ID NO: 4414 - DNA, 14 bp, Artificial Sequence
  Description of Artificial Sequence: Synthetic oligonucleotide
ttcttgtgtcaatg

SEQ ID NO: 4415 - DNA, 14 bp, Artificial Sequence
  Description of Artificial Sequence: Synthetic oligonucleotide
cttcttgtgtcaat

SEQ ID NO: 4416 - DNA, 14 bp, Artificial Sequence
  Description of Artificial Sequence: Synthetic oligonucleotide
acttcttgtgtcaa

SEQ ID NO: 4417 - DNA, 14 bp, Artificial Sequence
  Description of Artificial Sequence: Synthetic oligonucleotide
cacttcttgtgtca

SEQ ID NO: 4418 - DNA, 14 bp, Artificial Sequence
  Description of Artificial Sequence: Synthetic oligonucleotide
ccacttcttgtgtc

SEQ ID NO: 4419 - DNA, 14 bp, Artificial Sequence
  Description of Artificial Sequence: Synthetic oligonucleotide
tccacttcttgtgt

SEQ ID NO: 4420 - DNA, 14 bp, Artificial Sequence
  Description of Artificial Sequence: Synthetic oligonucleotide
gtccacttcttgtg

SEQ ID NO: 4421 - DNA, 14 bp, Artificial Sequence
  Description of Artificial Sequence: Synthetic oligonucleotide
ggtccacttcttgt

SEQ ID NO: 4422 - DNA, 14 bp, Artificial Sequence
  Description of Artificial Sequence: Synthetic oligonucleotide
aggtccacttcttg

SEQ ID NO: 4423 - DNA, 14 bp, Artificial Sequence
  Description of Artificial Sequence: Synthetic oligonucleotide
aaggtccacttctt

SEQ ID NO: 4424 - DNA, 14 bp, Artificial Sequence
  Description of Artificial Sequence: Synthetic oligonucleotide
gaaggtccacttct

SEQ ID NO: 4425 - DNA, 14 bp, Artificial Sequence
  Description of Artificial Sequence: Synthetic oligonucleotide
tgaaggtccacttc

SEQ ID NO: 4426 - DNA, 14 bp, Artificial Sequence
  Description of Artificial Sequence: Synthetic oligonucleotide
atgaaggtccactt

SEQ ID NO: 4427 - DNA, 14 bp, Artificial Sequence
  Description of Artificial Sequence: Synthetic oligonucleotide
aatgaaggtccact

SEQ ID NO: 4428 - DNA, 14 bp, Artificial Sequence
  Description of Artificial Sequence: Synthetic oligonucleotide
gaatgaaggtccac

SEQ ID NO: 4429 - DNA, 14 bp, Artificial Sequence
  Description of Artificial Sequence: Synthetic oligonucleotide
ggaatgaaggtcca

SEQ ID NO: 4430 - DNA, 14 bp, Artificial Sequence
  Description of Artificial Sequence: Synthetic oligonucleotide
tggaatgaaggtcc

SEQ ID NO: 4431 - DNA, 14 bp, Artificial Sequence
  Description of Artificial Sequence: Synthetic oligonucleotide
atggaatgaaggtc

SEQ ID NO: 4432 - DNA, 14 bp, Artificial Sequence
  Description of Artificial Sequence: Synthetic oligonucleotide
aatggaatgaaggt

SEQ ID NO: 4433 - DNA, 14 bp, Artificial Sequence
  Description of Artificial Sequence: Synthetic oligonucleotide
caatggaatgaagg

SEQ ID NO: 4434 - DNA, 14 bp, Artificial Sequence
  Description of Artificial Sequence: Synthetic oligonucleotide
gcaatggaatgaag

SEQ ID NO: 4435 - DNA, 14 bp, Artificial Sequence
  Description of Artificial Sequence: Synthetic oligonucleotide
agcaatggaatgaa

SEQ ID NO: 4436 - DNA, 14 bp, Artificial Sequence
  Description of Artificial Sequence: Synthetic oligonucleotide
cagcaatggaatga

SEQ ID NO: 4437 - DNA, 14 bp, Artificial Sequence
  Description of Artificial Sequence: Synthetic oligonucleotide
ccagcaatggaatg

SEQ ID NO: 4438 - DNA, 14 bp, Artificial Sequence
  Description of Artificial Sequence: Synthetic oligonucleotide
cccagcaatggaat

SEQ ID NO: 4439 - DNA, 14 bp, Artificial Sequence
  Description of Artificial Sequence: Synthetic oligonucleotide
gcccagcaatggaa

SEQ ID NO: 4440 - DNA, 14 bp, Artificial Sequence
  Description of Artificial Sequence: Synthetic oligonucleotide
ggcccagcaatgga

SEQ ID NO: 4441 - DNA, 14 bp, Artificial Sequence
  Description of Artificial Sequence: Synthetic oligonucleotide
cggcccagcaatgg

SEQ ID NO: 4442 - DNA, 14 bp, Artificial Sequence
  Description of Artificial Sequence: Synthetic oligonucleotide
gcggcccagcaatg

SEQ ID NO: 4443 - DNA, 14 bp, Artificial Sequence
  Description of Artificial Sequence: Synthetic oligonucleotide
ggcggcccagcaat

SEQ ID NO: 4444 - DNA, 14 bp, Artificial Sequence
  Description of Artificial Sequence: Synthetic oligonucleotide
aggcggcccagcaa

SEQ ID NO: 4445 - DNA, 14 bp, Artificial Sequence
  Description of Artificial Sequence: Synthetic oligonucleotide
caggcggcccagca

SEQ ID NO: 4446 - DNA, 14 bp, Artificial Sequence
  Description of Artificial Sequence: Synthetic oligonucleotide
acaggcggcccagc

SEQ ID NO: 4447 - DNA, 14 bp, Artificial Sequence
  Description of Artificial Sequence: Synthetic oligonucleotide
aacaggcggcccag

SEQ ID NO: 4448 - DNA, 14 bp, Artificial Sequence
  Description of Artificial Sequence: Synthetic oligonucleotide
gaacaggcggccca

SEQ ID NO: 4449 - DNA, 14 bp, Artificial Sequence
  Description of Artificial Sequence: Synthetic oligonucleotide
ggaacaggcggccc

SEQ ID NO: 4450 - DNA, 14 bp, Artificial Sequence
  Description of Artificial Sequence: Synthetic oligonucleotide
aggaacaggcggcc

SEQ ID NO: 4451 - DNA, 14 bp, Artificial Sequence
  Description of Artificial Sequence: Synthetic oligonucleotide
gaggaacaggcggc

SEQ ID NO: 4452 - DNA, 14 bp, Artificial Sequence
  Description of Artificial Sequence: Synthetic oligonucleotide
ggaggaacaggcgg

SEQ ID NO: 4453 - DNA, 14 bp, Artificial Sequence
  Description of Artificial Sequence: Synthetic oligonucleotide
tggaggaacaggcg

SEQ ID NO: 4454 - DNA, 14 bp, Artificial Sequence
  Description of Artificial Sequence: Synthetic oligonucleotide
gtggaggaacaggc

SEQ ID NO: 4455-4456 - skipped (2 entries)

SEQ ID NO: 4457 - DNA, 14 bp, Artificial Sequence
  Description of Artificial Sequence: Synthetic oligonucleotide
gtcgtggaggaaca

SEQ ID NO: 4458 - DNA, 14 bp, Artificial Sequence
  Description of Artificial Sequence: Synthetic oligonucleotide
tgtcgtggaggaac

SEQ ID NO: 4459 - DNA, 14 bp, Artificial Sequence
  Description of Artificial Sequence: Synthetic oligonucleotide
ttgtcgtggaggaa

SEQ ID NO: 4460 - DNA, 14 bp, Artificial Sequence
  Description of Artificial Sequence: Synthetic oligonucleotide
tttgtcgtggagga

SEQ ID NO: 4461 - DNA, 14 bp, Artificial Sequence
  Description of Artificial Sequence: Synthetic oligonucleotide
ctttgtcgtggagg

SEQ ID NO: 4462 - DNA, 14 bp, Artificial Sequence
  Description of Artificial Sequence: Synthetic oligonucleotide
gctttgtcgtggag

SEQ ID NO: 4463 - DNA, 14 bp, Artificial Sequence
  Description of Artificial Sequence: Synthetic oligonucleotide
tgctttgtcgtgga

SEQ ID NO: 4464 - DNA, 14 bp, Artificial Sequence
  Description of Artificial Sequence: Synthetic oligonucleotide
gtgctttgtcgtgg

SEQ ID NO: 4465 - DNA, 14 bp, Artificial Sequence
  Description of Artificial Sequence: Synthetic oligonucleotide
agtgctttgtcgtg

SEQ ID NO: 4466 - DNA, 14 bp, Artificial Sequence
  Description of Artificial Sequence: Synthetic oligonucleotide
aagtgctttgtcgt

SEQ ID NO: 4467 - DNA, 14 bp, Artificial Sequence
  Description of Artificial Sequence: Synthetic oligonucleotide
gaagtgctttgtcg

SEQ ID NO: 4468 - DNA, 14 bp, Artificial Sequence
  Description of Artificial Sequence: Synthetic oligonucleotide
agaagtgctttgtc

SEQ ID NO: 4469 - DNA, 14 bp, Artificial Sequence
  Description of Artificial Sequence: Synthetic oligonucleotide
gagaagtgctttgt

SEQ ID NO: 4470 - DNA, 14 bp, Artificial Sequence
  Description of Artificial Sequence: Synthetic oligonucleotide
tgagaagtgctttg

SEQ ID NO: 4471 - DNA, 14 bp, Artificial Sequence
  Description of Artificial Sequence: Synthetic oligonucleotide
ttgagaagtgcttt

SEQ ID NO: 4472 - DNA, 14 bp, Artificial Sequence
  Description of Artificial Sequence: Synthetic oligonucleotide
gttgagaagtgctt

SEQ ID NO: 4473 - DNA, 14 bp, Artificial Sequence
  Description of Artificial Sequence: Synthetic oligonucleotide
tgttgagaagtgct

SEQ ID NO: 4474 - DNA, 14 bp, Artificial Sequence
  Description of Artificial Sequence: Synthetic oligonucleotide
atgttgagaagtgc

SEQ ID NO: 4475 - DNA, 14 bp, Artificial Sequence
  Description of Artificial Sequence: Synthetic oligonucleotide
tatgttgagaagtg

SEQ ID NO: 4476 - DNA, 14 bp, Artificial Sequence
  Description of Artificial Sequence: Synthetic oligonucleotide
atatgttgagaagt

SEQ ID NO: 4477 - DNA, 14 bp, Artificial Sequence
  Description of Artificial Sequence: Synthetic oligonucleotide
gatatgttgagaag

SEQ ID NO: 4478 - DNA, 14 bp, Artificial Sequence
  Description of Artificial Sequence: Synthetic oligonucleotide
ggatatgttgagaa

SEQ ID NO: 4479 - DNA, 14 bp, Artificial Sequence
  Description of Artificial Sequence: Synthetic oligonucleotide
gggatatgttgaga

SEQ ID NO: 4480 - DNA, 14 bp, Artificial Sequence
  Description of Artificial Sequence: Synthetic oligonucleotide
agggatatgttgag

SEQ ID NO: 4481 - DNA, 14 bp, Artificial Sequence
  Description of Artificial Sequence: Synthetic oligonucleotide
tagggatatgttga

SEQ ID NO: 4482 - DNA, 14 bp, Artificial Sequence
  Description of Artificial Sequence: Synthetic oligonucleotide
ttagggatatgttg

SEQ ID NO: 4483 - DNA, 14 bp, Artificial Sequence
  Description of Artificial Sequence: Synthetic oligonucleotide
tttagggatatgtt

SEQ ID NO: 4484 - DNA, 14 bp, Artificial Sequence
  Description of Artificial Sequence: Synthetic oligonucleotide
gtttagggatatgt

SEQ ID NO: 4485 - DNA, 14 bp, Artificial Sequence
  Description of Artificial Sequence: Synthetic oligonucleotide
agtttagggatatg

SEQ ID NO: 4486 - DNA, 14 bp, Artificial Sequence
  Description of Artificial Sequence: Synthetic oligonucleotide
gagtttagggatat

SEQ ID NO: 4487 - DNA, 14 bp, Artificial Sequence
  Description of Artificial Sequence: Synthetic oligonucleotide
ggagtttagggata

SEQ ID NO: 4488 - DNA, 14 bp, Artificial Sequence
  Description of Artificial Sequence: Synthetic oligonucleotide
gggagtttagggat

SEQ ID NO: 4489 - DNA, 14 bp, Artificial Sequence
  Description of Artificial Sequence: Synthetic oligonucleotide
agggagtttaggga

SEQ ID NO: 4490 - DNA, 14 bp, Artificial Sequence
  Description of Artificial Sequence: Synthetic oligonucleotide
gagggagtttaggg

SEQ ID NO: 4491 - DNA, 14 bp, Artificial Sequence
  Description of Artificial Sequence: Synthetic oligonucleotide
ggagggagtttagg

SEQ ID NO: 4492 - DNA, 14 bp, Artificial Sequence
  Description of Artificial Sequence: Synthetic oligonucleotide
tggagggagtttag

SEQ ID NO: 4493 - DNA, 14 bp, Artificial Sequence
  Description of Artificial Sequence: Synthetic oligonucleotide
ttggagggagttta

SEQ ID NO: 4494 - DNA, 14 bp, Artificial Sequence
  Description of Artificial Sequence: Synthetic oligonucleotide
tttggagggagttt

SEQ ID NO: 4495 - DNA, 14 bp, Artificial Sequence
  Description of Artificial Sequence: Synthetic oligonucleotide
ttttggagggagtt

SEQ ID NO: 4496 - DNA, 14 bp, Artificial Sequence
  Description of Artificial Sequence: Synthetic oligonucleotide
tttttggagggagt

SEQ ID NO: 4497 - DNA, 14 bp, Artificial Sequence
  Description of Artificial Sequence: Synthetic oligonucleotide
gtttttggagggag

SEQ ID NO: 4498 - DNA, 14 bp, Artificial Sequence
  Description of Artificial Sequence: Synthetic oligonucleotide
agtttttggaggga

SEQ ID NO: 4499 - DNA, 14 bp, Artificial Sequence
  Description of Artificial Sequence: Synthetic oligonucleotide
aagtttttggaggg

SEQ ID NO: 4500 - DNA, 14 bp, Artificial Sequence
  Description of Artificial Sequence: Synthetic oligonucleotide
taagtttttggagg

SEQ ID NO: 4501 - DNA, 14 bp, Artificial Sequence
  Description of Artificial Sequence: Synthetic oligonucleotide
gtaagtttttggag

SEQ ID NO: 4502 - DNA, 14 bp, Artificial Sequence
  Description of Artificial Sequence: Synthetic oligonucleotide
tgtaagtttttgga

SEQ ID NO: 4503 - DNA, 14 bp, Artificial Sequence
  Description of Artificial Sequence: Synthetic oligonucleotide
ttgtaagtttttgg

SEQ ID NO: 4504 - DNA, 14 bp, Artificial Sequence
  Description of Artificial Sequence: Synthetic oligonucleotide
tttgtaagtttttg

SEQ ID NO: 4505 - DNA, 14 bp, Artificial Sequence
  Description of Artificial Sequence: Synthetic oligonucleotide
ttttgtaagttttt

SEQ ID NO: 4506 - DNA, 14 bp, Artificial Sequence
  Description of Artificial Sequence: Synthetic oligonucleotide
cttttgtaagtttt

SEQ ID NO: 4507 - DNA, 14 bp, Artificial Sequence
  Description of Artificial Sequence: Synthetic oligonucleotide
ccttttgtaagttt

SEQ ID NO: 4508 - DNA, 14 bp, Artificial Sequence
  Description of Artificial Sequence: Synthetic oligonucleotide
cccttttgtaagtt

SEQ ID NO: 4509 - DNA, 14 bp, Artificial Sequence
  Description of Artificial Sequence: Synthetic oligonucleotide
tcccttttgtaagt

SEQ ID NO: 4510 - DNA, 14 bp, Artificial Sequence
  Description of Artificial Sequence: Synthetic oligonucleotide
ctcccttttgtaag

SEQ ID NO: 4511 - DNA, 14 bp, Artificial Sequence
  Description of Artificial Sequence: Synthetic oligonucleotide
gctcccttttgtaa

SEQ ID NO: 4512 - DNA, 14 bp, Artificial Sequence
  Description of Artificial Sequence: Synthetic oligonucleotide
tgctcccttttgta

SEQ ID NO: 4513 - DNA, 14 bp, Artificial Sequence
  Description of Artificial Sequence: Synthetic oligonucleotide
gtgctcccttttgt

SEQ ID NO: 4514 - DNA, 14 bp, Artificial Sequence
  Description of Artificial Sequence: Synthetic oligonucleotide
tgtgctcccttttg

SEQ ID NO: 4515 - DNA, 14 bp, Artificial Sequence
  Description of Artificial Sequence: Synthetic oligonucleotide
gtgtgctccctttt

SEQ ID NO: 4516 - DNA, 14 bp, Artificial Sequence
  Description of Artificial Sequence: Synthetic oligonucleotide
tgtgtgctcccttt

SEQ ID NO: 4517 - DNA, 14 bp, Artificial Sequence
  Description of Artificial Sequence: Synthetic oligonucleotide
gtgtgtgctccctt

SEQ ID NO: 4518 - DNA, 14 bp, Artificial Sequence
  Description of Artificial Sequence: Synthetic oligonucleotide
tgtgtgtgctccct

SEQ ID NO: 4519 - DNA, 14 bp, Artificial Sequence
  Description of Artificial Sequence: Synthetic oligonucleotide
gtgtgtgtgctccc

SEQ ID NO: 4520 - DNA, 14 bp, Artificial Sequence
  Description of Artificial Sequence: Synthetic oligonucleotide
ggtgtgtgtgctcc

SEQ ID NO: 4521 - DNA, 14 bp, Artificial Sequence
  Description of Artificial Sequence: Synthetic oligonucleotide
gggtgtgtgtgctc

SEQ ID NO: 4522 - DNA, 14 bp, Artificial Sequence
  Description of Artificial Sequence: Synthetic oligonucleotide
tgggtgtgtgtgct

SEQ ID NO: 4523 - DNA, 14 bp, Artificial Sequence
  Description of Artificial Sequence: Synthetic oligonucleotide
atgggtgtgtgtgc

SEQ ID NO: 4524 - DNA, 14 bp, Artificial Sequence
  Description of Artificial Sequence: Synthetic oligonucleotide
gatgggtgtgtgtg

SEQ ID NO: 4525 - DNA, 14 bp, Artificial Sequence
  Description of Artificial Sequence: Synthetic oligonucleotide
ggatgggtgtgtgt

SEQ ID NO: 4526 - DNA, 14 bp, Artificial Sequence
  Description of Artificial Sequence: Synthetic oligonucleotide
tggatgggtgtgtg

SEQ ID NO: 4527 - DNA, 14 bp, Artificial Sequence
  Description of Artificial Sequence: Synthetic oligonucleotide
atggatgggtgtgt

SEQ ID NO: 4528 - DNA, 14 bp, Artificial Sequence
  Description of Artificial Sequence: Synthetic oligonucleotide
catggatgggtgtg

SEQ ID NO: 4529 - DNA, 14 bp, Artificial Sequence
  Description of Artificial Sequence: Synthetic oligonucleotide
gcatggatgggtgt

SEQ ID NO: 4530 - DNA, 14 bp, Artificial Sequence
  Description of Artificial Sequence: Synthetic oligonucleotide
tgcatggatgggtg

SEQ ID NO: 4531 - DNA, 14 bp, Artificial Sequence
  Description of Artificial Sequence: Synthetic oligonucleotide
gtgcatggatgggt

SEQ ID NO: 4532 - DNA, 14 bp, Artificial Sequence
  Description of Artificial Sequence: Synthetic oligonucleotide
tgtgcatggatggg

SEQ ID NO: 4533 - DNA, 14 bp, Artificial Sequence
  Description of Artificial Sequence: Synthetic oligonucleotide
ctgtgcatggatgg

SEQ ID NO: 4534 - DNA, 14 bp, Artificial Sequence
  Description of Artificial Sequence: Synthetic oligonucleotide
tctgtgcatggatg

SEQ ID NO: 4535 - DNA, 14 bp, Artificial Sequence
  Description of Artificial Sequence: Synthetic oligonucleotide
ctctgtgcatggat

SEQ ID NO: 4536 - DNA, 14 bp, Artificial Sequence
  Description of Artificial Sequence: Synthetic oligonucleotide
tctctgtgcatgga

SEQ ID NO: 4537 - DNA, 14 bp, Artificial Sequence
  Description of Artificial Sequence: Synthetic oligonucleotide
atctctgtgcatgg

SEQ ID NO: 4538 - DNA, 14 bp, Artificial Sequence
  Description of Artificial Sequence: Synthetic oligonucleotide
catctctgtgcatg

SEQ ID NO: 4539 - DNA, 14 bp, Artificial Sequence
  Description of Artificial Sequence: Synthetic oligonucleotide
ccatctctgtgcat

SEQ ID NO: 4540 - DNA, 14 bp, Artificial Sequence
  Description of Artificial Sequence: Synthetic oligonucleotide
tccatctctgtgca

SEQ ID NO: 4541 - DNA, 14 bp, Artificial Sequence
  Description of Artificial Sequence: Synthetic oligonucleotide
gtccatctctgtgc

SEQ ID NO: 4542 - DNA, 14 bp, Artificial Sequence
  Description of Artificial Sequence: Synthetic oligonucleotide
ggtccatctctgtg

SEQ ID NO: 4543 - DNA, 14 bp, Artificial Sequence
  Description of Artificial Sequence: Synthetic oligonucleotide
tggtccatctctgt

SEQ ID NO: 4544 - DNA, 14 bp, Artificial Sequence
  Description of Artificial Sequence: Synthetic oligonucleotide
gtggtccatctctg

SEQ ID NO: 4545 - DNA, 14 bp, Artificial Sequence
  Description of Artificial Sequence: Synthetic oligonucleotide
ggtggtccatctct

SEQ ID NO: 4546 - DNA, 14 bp, Artificial Sequence
  Description of Artificial Sequence: Synthetic oligonucleotide
tggtggtccatctc

SEQ ID NO: 4547 - DNA, 14 bp, Artificial Sequence
  Description of Artificial Sequence: Synthetic oligonucleotide
gtggtggtccatct

SEQ ID NO: 4548 - DNA, 14 bp, Artificial Sequence
  Description of Artificial Sequence: Synthetic oligonucleotide
agtggtggtccatc

SEQ ID NO: 4549 - DNA, 14 bp, Artificial Sequence
  Description of Artificial Sequence: Synthetic oligonucleotide
cagtggtggtccat

SEQ ID NO: 4550 - DNA, 14 bp, Artificial Sequence
  Description of Artificial Sequence: Synthetic oligonucleotide
acagtggtggtcca

SEQ ID NO: 4551 - DNA, 14 bp, Artificial Sequence
  Description of Artificial Sequence: Synthetic oligonucleotide
aacagtggtggtcc

SEQ ID NO: 4552 - DNA, 14 bp, Artificial Sequence
  Description of Artificial Sequence: Synthetic oligonucleotide
caacagtggtggtc

SEQ ID NO: 4553 - DNA, 14 bp, Artificial Sequence
  Description of Artificial Sequence: Synthetic oligonucleotide
ccaacagtggtggt

SEQ ID NO: 4554 - DNA, 14 bp, Artificial Sequence
  Description of Artificial Sequence: Synthetic oligonucleotide
tccaacagtggtgg

SEQ ID NO: 4555 - DNA, 14 bp, Artificial Sequence
  Description of Artificial Sequence: Synthetic oligonucleotide
ctccaacagtggtg

SEQ ID NO: 4556 - DNA, 14 bp, Artificial Sequence
  Description of Artificial Sequence: Synthetic oligonucleotide
tctccaacagtggt

SEQ ID NO: 4557 - DNA, 14 bp, Artificial Sequence
  Description of Artificial Sequence: Synthetic oligonucleotide
ttctccaacagtgg

SEQ ID NO: 4558 - DNA, 14 bp, Artificial Sequence
  Description of Artificial Sequence: Synthetic oligonucleotide
attctccaacagtg

SEQ ID NO: 4559 - DNA, 14 bp, Artificial Sequence
  Description of Artificial Sequence: Synthetic oligonucleotide
cattctccaacagt

SEQ ID NO: 4560 - DNA, 14 bp, Artificial Sequence
  Description of Artificial Sequence: Synthetic oligonucleotide
gcattctccaacag

SEQ ID NO: 4561 - DNA, 14 bp, Artificial Sequence
  Description of Artificial Sequence: Synthetic oligonucleotide
ggcattctccaaca

SEQ ID NO: 4562 - DNA, 14 bp, Artificial Sequence
  Description of Artificial Sequence: Synthetic oligonucleotide
gggcattctccaac

SEQ ID NO: 4563 - DNA, 14 bp, Artificial Sequence
  Description of Artificial Sequence: Synthetic oligonucleotide
tgggcattctccaa

SEQ ID NO: 4564 - DNA, 14 bp, Artificial Sequence
  Description of Artificial Sequence: Synthetic oligonucleotide
atgggcattctcca

SEQ ID NO: 4565 - DNA, 14 bp, Artificial Sequence
  Description of Artificial Sequence: Synthetic oligonucleotide
aatgggcattctcc

SEQ ID NO: 4566 - DNA, 14 bp, Artificial Sequence
  Description of Artificial Sequence: Synthetic oligonucleotide
gaatgggcattctc

SEQ ID NO: 4567 - DNA, 14 bp, Artificial Sequence
  Description of Artificial Sequence: Synthetic oligonucleotide
agaatgggcattct

SEQ ID NO: 4568 - DNA, 14 bp, Artificial Sequence
  Description of Artificial Sequence: Synthetic oligonucleotide
aagaatgggcattc

SEQ ID NO: 4569 - DNA, 14 bp, Artificial Sequence
  Description of Artificial Sequence: Synthetic oligonucleotide
gaagaatgggcatt

SEQ ID NO: 4570 - DNA, 14 bp, Artificial Sequence
  Description of Artificial Sequence: Synthetic oligonucleotide
ggaagaatgggcat

SEQ ID NO: 4571 - DNA, 14 bp, Artificial Sequence
  Description of Artificial Sequence: Synthetic oligonucleotide
aggaagaatgggca

SEQ ID NO: 4572 - DNA, 14 bp, Artificial Sequence
  Description of Artificial Sequence: Synthetic oligonucleotide
caggaagaatgggc

SEQ ID NO: 4573 - DNA, 14 bp, Artificial Sequence
  Description of Artificial Sequence: Synthetic oligonucleotide
tcaggaagaatggg

SEQ ID NO: 4574 - DNA, 14 bp, Artificial Sequence
  Description of Artificial Sequence: Synthetic oligonucleotide
ctcaggaagaatgg

SEQ ID NO: 4575 - DNA, 14 bp, Artificial Sequence
  Description of Artificial Sequence: Synthetic oligonucleotide
actcaggaagaatg

SEQ ID NO: 4576 - DNA, 14 bp, Artificial Sequence
  Description of Artificial Sequence: Synthetic oligonucleotide
aactcaggaagaat

SEQ ID NO: 4577 - DNA, 14 bp, Artificial Sequence
  Description of Artificial Sequence: Synthetic oligonucleotide
gaactcaggaagaa

SEQ ID NO: 4578 - DNA, 14 bp, Artificial Sequence
  Description of Artificial Sequence: Synthetic oligonucleotide
ggaactcaggaaga

SEQ ID NO: 4579 - DNA, 14 bp, Artificial Sequence
  Description of Artificial Sequence: Synthetic oligonucleotide
aggaactcaggaag

SEQ ID NO: 4580 - DNA, 14 bp, Artificial Sequence
  Description of Artificial Sequence: Synthetic oligonucleotide
gaggaactcaggaa

SEQ ID NO: 4581 - DNA, 14 bp, Artificial Sequence
  Description of Artificial Sequence: Synthetic oligonucleotide
agaggaactcagga

SEQ ID NO: 4582 - DNA, 14 bp, Artificial Sequence
  Description of Artificial Sequence: Synthetic oligonucleotide
cagaggaactcagg

SEQ ID NO: 4583 - DNA, 14 bp, Artificial Sequence
  Description of Artificial Sequence: Synthetic oligonucleotide
acagaggaactcag

SEQ ID NO: 4584 - DNA, 14 bp, Artificial Sequence
  Description of Artificial Sequence: Synthetic oligonucleotide
tacagaggaactca

SEQ ID NO: 4585 - DNA, 14 bp, Artificial Sequence
  Description of Artificial Sequence: Synthetic oligonucleotide
gtacagaggaactc

SEQ ID NO: 4586 - DNA, 14 bp, Artificial Sequence
  Description of Artificial Sequence: Synthetic oligonucleotide
agtacagaggaact

SEQ ID NO: 4587 - DNA, 14 bp, Artificial Sequence
  Description of Artificial Sequence: Synthetic oligonucleotide
cagtacagaggaac

SEQ ID NO: 4588 - DNA, 14 bp, Artificial Sequence
  Description of Artificial Sequence: Synthetic oligonucleotide
ccagtacagaggaa

SEQ ID NO: 4589 - DNA, 14 bp, Artificial Sequence
  Description of Artificial Sequence: Synthetic oligonucleotide
cccagtacagagga

SEQ ID NO: 4590 - DNA, 14 bp, Artificial Sequence
  Description of Artificial Sequence: Synthetic oligonucleotide
tcccagtacagagg

SEQ ID NO: 4591 - DNA, 14 bp, Artificial Sequence
  Description of Artificial Sequence: Synthetic oligonucleotide
atcccagtacagag

SEQ ID NO: 4592 - DNA, 14 bp, Artificial Sequence
  Description of Artificial Sequence: Synthetic oligonucleotide
catcccagtacaga

SEQ ID NO: 4593 - DNA, 14 bp, Artificial Sequence
  Description of Artificial Sequence: Synthetic oligonucleotide
acatcccagtacag

SEQ ID NO: 4594 - DNA, 14 bp, Artificial Sequence
  Description of Artificial Sequence: Synthetic oligonucleotide
tacatcccagtaca

SEQ ID NO: 4595 - DNA, 14 bp, Artificial Sequence
  Description of Artificial Sequence: Synthetic oligonucleotide
atacatcccagtac

SEQ ID NO: 4596 - DNA, 14 bp, Artificial Sequence
  Description of Artificial Sequence: Synthetic oligonucleotide
tatacatcccagta

SEQ ID NO: 4597 - DNA, 14 bp, Artificial Sequence
  Description of Artificial Sequence: Synthetic oligonucleotide
atatacatcccagt

SEQ ID NO: 4598 - DNA, 14 bp, Artificial Sequence
  Description of Artificial Sequence: Synthetic oligonucleotide
aatatacatcccag

SEQ ID NO: 4599 - DNA, 14 bp, Artificial Sequence
  Description of Artificial Sequence: Synthetic oligonucleotide
aaatatacatccca

SEQ ID NO: 4600 - DNA, 14 bp, Artificial Sequence
  Description of Artificial Sequence: Synthetic oligonucleotide
aaaatatacatccc

SEQ ID NO: 4601 - DNA, 14 bp, Artificial Sequence
  Description of Artificial Sequence: Synthetic oligonucleotide
gaaaatatacatcc

SEQ ID NO: 4602 - DNA, 14 bp, Artificial Sequence
  Description of Artificial Sequence: Synthetic oligonucleotide
ggaaaatatacatc

SEQ ID NO: 4603 - DNA, 14 bp, Artificial Sequence
  Description of Artificial Sequence: Synthetic oligonucleotide
aggaaaatatacat

SEQ ID NO: 4604 - DNA, 14 bp, Artificial Sequence
  Description of Artificial Sequence: Synthetic oligonucleotide
taggaaaatataca

SEQ ID NO: 4605 - DNA, 14 bp, Artificial Sequence
  Description of Artificial Sequence: Synthetic oligonucleotide
ctaggaaaatatac

SEQ ID NO: 4606 - DNA, 14 bp, Artificial Sequence
  Description of Artificial Sequence: Synthetic oligonucleotide
gctaggaaaatata

SEQ ID NO: 4607 - DNA, 14 bp, Artificial Sequence
  Description of Artificial Sequence: Synthetic oligonucleotide
ggctaggaaaatat

SEQ ID NO: 4608 - DNA, 14 bp, Artificial Sequence
  Description of Artificial Sequence: Synthetic oligonucleotide
gggctaggaaaata

SEQ ID NO: 4609 - DNA, 14 bp, Artificial Sequence
  Description of Artificial Sequence: Synthetic oligonucleotide
ggggctaggaaaat

SEQ ID NO: 4610 - DNA, 14 bp, Artificial Sequence
  Description of Artificial Sequence: Synthetic oligonucleotide
tggggctaggaaaa

SEQ ID NO: 4611 - DNA, 14 bp, Artificial Sequence
  Description of Artificial Sequence: Synthetic oligonucleotide
ttggggctaggaaa

SEQ ID NO: 4612 - DNA, 14 bp, Artificial Sequence
  Description of Artificial Sequence: Synthetic oligonucleotide
tttggggctaggaa

SEQ ID NO: 4613 - DNA, 14 bp, Artificial Sequence
  Description of Artificial Sequence: Synthetic oligonucleotide
atttggggctagga

SEQ ID NO: 4614 - DNA, 14 bp, Artificial Sequence
  Description of Artificial Sequence: Synthetic oligonucleotide
gatttggggctagg

SEQ ID NO: 4615 - DNA, 14 bp, Artificial Sequence
  Description of Artificial Sequence: Synthetic oligonucleotide
ggatttggggctag

SEQ ID NO: 4616 - DNA, 14 bp, Artificial Sequence
  Description of Artificial Sequence: Synthetic oligonucleotide
tggatttggggcta

SEQ ID NO: 4617 - DNA, 14 bp, Artificial Sequence
  Description of Artificial Sequence: Synthetic oligonucleotide
atggatttggggct

SEQ ID NO: 4618 - DNA, 14 bp, Artificial Sequence
  Description of Artificial Sequence: Synthetic oligonucleotide
aatggatttggggc

SEQ ID NO: 4619 - DNA, 14 bp, Artificial Sequence
  Description of Artificial Sequence: Synthetic oligonucleotide
caatggatttgggg

SEQ ID NO: 4620 - DNA, 14 bp, Artificial Sequence
  Description of Artificial Sequence: Synthetic oligonucleotide
gcaatggatttggg

SEQ ID NO: 4621 - DNA, 14 bp, Artificial Sequence
  Description of Artificial Sequence: Synthetic oligonucleotide
agcaatggatttgg

SEQ ID NO: 4622 - DNA, 14 bp, Artificial Sequence
  Description of Artificial Sequence: Synthetic oligonucleotide
cagcaatggatttg

SEQ ID NO: 4623 - DNA, 14 bp, Artificial Sequence
  Description of Artificial Sequence: Synthetic oligonucleotide
ccagcaatggattt

SEQ ID NO: 4624 - DNA, 14 bp, Artificial Sequence
  Description of Artificial Sequence: Synthetic oligonucleotide
gccagcaatggatt

SEQ ID NO: 4625 - DNA, 14 bp, Artificial Sequence
  Description of Artificial Sequence: Synthetic oligonucleotide
tgccagcaatggat

SEQ ID NO: 4626 - DNA, 14 bp, Artificial Sequence
  Description of Artificial Sequence: Synthetic oligonucleotide
ttgccagcaatgga

SEQ ID NO: 4627 - DNA, 14 bp, Artificial Sequence
  Description of Artificial Sequence: Synthetic oligonucleotide
attgccagcaatgg

SEQ ID NO: 4628 - DNA, 14 bp, Artificial Sequence
  Description of Artificial Sequence: Synthetic oligonucleotide
cattgccagcaatg

SEQ ID NO: 4629 - DNA, 14 bp, Artificial Sequence
  Description of Artificial Sequence: Synthetic oligonucleotide
ccattgccagcaat

SEQ ID NO: 4630 - DNA, 14 bp, Artificial Sequence
  Description of Artificial Sequence: Synthetic oligonucleotide
tccattgccagcaa

SEQ ID NO: 4631 - DNA, 14 bp, Artificial Sequence
  Description of Artificial Sequence: Synthetic oligonucleotide
atccattgccagca

SEQ ID NO: 4632 - DNA, 14 bp, Artificial Sequence
  Description of Artificial Sequence: Synthetic oligonucleotide
catccattgccagc

SEQ ID NO: 4633 - DNA, 14 bp, Artificial Sequence
  Description of Artificial Sequence: Synthetic oligonucleotide
gcatccattgccag

SEQ ID NO: 4634 - DNA, 14 bp, Artificial Sequence
  Description of Artificial Sequence: Synthetic oligonucleotide
tgcatccattgcca

SEQ ID NO: 4635 - DNA, 14 bp, Artificial Sequence
  Description of Artificial Sequence: Synthetic oligonucleotide
gtgcatccattgcc

SEQ ID NO: 4636 - DNA, 14 bp, Artificial Sequence
  Description of Artificial Sequence: Synthetic oligonucleotide
agtgcatccattgc

SEQ ID NO: 4637 - DNA, 14 bp, Artificial Sequence
  Description of Artificial Sequence: Synthetic oligonucleotide
cagtgcatccattg

SEQ ID NO: 4638 - DNA, 14 bp, Artificial Sequence
  Description of Artificial Sequence: Synthetic oligonucleotide
tcagtgcatccatt

SEQ ID NO: 4639 - DNA, 14 bp, Artificial Sequence
  Description of Artificial Sequence: Synthetic oligonucleotide
ttcagtgcatccat

SEQ ID NO: 4640 - DNA, 14 bp, Artificial Sequence
  Description of Artificial Sequence: Synthetic oligonucleotide
attcagtgcatcca

SEQ ID NO: 4641 - DNA, 14 bp, Artificial Sequence
  Description of Artificial Sequence: Synthetic oligonucleotide
cattcagtgcatcc

SEQ ID NO: 4642 - DNA, 14 bp, Artificial Sequence
  Description of Artificial Sequence: Synthetic oligonucleotide
acattcagtgcatc

SEQ ID NO: 4643 - DNA, 14 bp, Artificial Sequence
  Description of Artificial Sequence: Synthetic oligonucleotide
cacattcagtgcat

SEQ ID NO: 4644 - DNA, 14 bp, Artificial Sequence
  Description of Artificial Sequence: Synthetic oligonucleotide
gcacattcagtgca

SEQ ID NO: 4645 - DNA, 14 bp, Artificial Sequence
  Description of Artificial Sequence: Synthetic oligonucleotide
ggcacattcagtgc

SEQ ID NO: 4646 - DNA, 14 bp, Artificial Sequence
  Description of Artificial Sequence: Synthetic oligonucleotide
tggcacattcagtg

SEQ ID NO: 4647 - DNA, 14 bp, Artificial Sequence
  Description of Artificial Sequence: Synthetic oligonucleotide
ctggcacattcagt

SEQ ID NO: 4648 - DNA, 14 bp, Artificial Sequence
  Description of Artificial Sequence: Synthetic oligonucleotide
gctggcacattcag

SEQ ID NO: 4649 - DNA, 14 bp, Artificial Sequence
  Description of Artificial Sequence: Synthetic oligonucleotide
tgctggcacattca

SEQ ID NO: 4650 - DNA, 14 bp, Artificial Sequence
  Description of Artificial Sequence: Synthetic oligonucleotide
gtgctggcacattc

SEQ ID NO: 4651 - DNA, 14 bp, Artificial Sequence
  Description of Artificial Sequence: Synthetic oligonucleotide
agtgctggcacatt

SEQ ID NO: 4652 - DNA, 14 bp, Artificial Sequence
  Description of Artificial Sequence: Synthetic oligonucleotide
cagtgctggcacat

SEQ ID NO: 4653 - DNA, 14 bp, Artificial Sequence
  Description of Artificial Sequence: Synthetic oligonucleotide
tcagtgctggcaca

SEQ ID NO: 4654 - DNA, 14 bp, Artificial Sequence
  Description of Artificial Sequence: Synthetic oligonucleotide
ctcagtgctggcac

SEQ ID NO: 4655 - DNA, 14 bp, Artificial Sequence
  Description of Artificial Sequence: Synthetic oligonucleotide
cctcagtgctggca

SEQ ID NO: 4656 - DNA, 14 bp, Artificial Sequence
  Description of Artificial Sequence: Synthetic oligonucleotide
tcctcagtgctggc

SEQ ID NO: 4657 - DNA, 14 bp, Artificial Sequence
  Description of Artificial Sequence: Synthetic oligonucleotide
ctcctcagtgctgg

SEQ ID NO: 4658 - DNA, 14 bp, Artificial Sequence
  Description of Artificial Sequence: Synthetic oligonucleotide
actcctcagtgctg

SEQ ID NO: 4659 - DNA, 14 bp, Artificial Sequence
  Description of Artificial Sequence: Synthetic oligonucleotide
aactcctcagtgct

SEQ ID NO: 4660 - DNA, 14 bp, Artificial Sequence
  Description of Artificial Sequence: Synthetic oligonucleotide
taactcctcagtgc

SEQ ID NO: 4661 - DNA, 14 bp, Artificial Sequence
  Description of Artificial Sequence: Synthetic oligonucleotide
ttaactcctcagtg

SEQ ID NO: 4662 - DNA, 14 bp, Artificial Sequence
  Description of Artificial Sequence: Synthetic oligonucleotide
tttaactcctcagt

SEQ ID NO: 4663 - DNA, 14 bp, Artificial Sequence
  Description of Artificial Sequence: Synthetic oligonucleotide
ttttaactcctcag

SEQ ID NO: 4664 - DNA, 14 bp, Artificial Sequence
  Description of Artificial Sequence: Synthetic oligonucleotide
attttaactcctca

SEQ ID NO: 4665 - DNA, 14 bp, Artificial Sequence
  Description of Artificial Sequence: Synthetic oligonucleotide
cattttaactcctc

SEQ ID NO: 4666 - DNA, 14 bp, Artificial Sequence
  Description of Artificial Sequence: Synthetic oligonucleotide
tcattttaactcct

SEQ ID NO: 4667 - DNA, 14 bp, Artificial Sequence
  Description of Artificial Sequence: Synthetic oligonucleotide
ctcattttaactcc

SEQ ID NO: 4668 - DNA, 14 bp, Artificial Sequence
  Description of Artificial Sequence: Synthetic oligonucleotide
tctcattttaactc

SEQ ID NO: 4669 - DNA, 14 bp, Artificial Sequence
  Description of Artificial Sequence: Synthetic oligonucleotide
ttctcattttaact

SEQ ID NO: 4670 - DNA, 14 bp, Artificial Sequence
  Description of Artificial Sequence: Synthetic oligonucleotide
gttctcattttaac

SEQ ID NO: 4671 - DNA, 14 bp, Artificial Sequence
  Description of Artificial Sequence: Synthetic oligonucleotide
agttctcattttaa

SEQ ID NO: 4672 - DNA, 14 bp, Artificial Sequence
  Description of Artificial Sequence: Synthetic oligonucleotide
gagttctcatttta

SEQ ID NO: 4673 - DNA, 14 bp, Artificial Sequence
  Description of Artificial Sequence: Synthetic oligonucleotide
ggagttctcatttt

SEQ ID NO: 4674 - DNA, 14 bp, Artificial Sequence
  Description of Artificial Sequence: Synthetic oligonucleotide
tggagttctcattt

SEQ ID NO: 4675 - DNA, 14 bp, Artificial Sequence
  Description of Artificial Sequence: Synthetic oligonucleotide
ttggagttctcatt

SEQ ID NO: 4676 - DNA, 14 bp, Artificial Sequence
  Description of Artificial Sequence: Synthetic oligonucleotide
tttggagttctcat

SEQ ID NO: 4677 - DNA, 14 bp, Artificial Sequence
  Description of Artificial Sequence: Synthetic oligonucleotide
gtttggagttctca

SEQ ID NO: 4678 - DNA, 14 bp, Artificial Sequence
  Description of Artificial Sequence: Synthetic oligonucleotide
tgtttggagttctc

SEQ ID NO: 4679 - DNA, 14 bp, Artificial Sequence
  Description of Artificial Sequence: Synthetic oligonucleotide
gtgtttggagttct

SEQ ID NO: 4680 - DNA, 14 bp, Artificial Sequence
  Description of Artificial Sequence: Synthetic oligonucleotide
agtgtttggagttc

SEQ ID NO: 4681 - DNA, 14 bp, Artificial Sequence
  Description of Artificial Sequence: Synthetic oligonucleotide
tagtgtttggagtt

SEQ ID NO: 4682 - DNA, 14 bp, Artificial Sequence
  Description of Artificial Sequence: Synthetic oligonucleotide
ttagtgtttggagt

SEQ ID NO: 4683 - DNA, 14 bp, Artificial Sequence
  Description of Artificial Sequence: Synthetic oligonucleotide
gttagtgtttggag

SEQ ID NO: 4684 - DNA, 14 bp, Artificial Sequence
  Description of Artificial Sequence: Synthetic oligonucleotide
cgttagtgtttgga

SEQ ID NO: 4685 - DNA, 14 bp, Artificial Sequence
  Description of Artificial Sequence: Synthetic oligonucleotide
tcgttagtgtttgg

SEQ ID NO: 4686 - DNA, 14 bp, Artificial Sequence
  Description of Artificial Sequence: Synthetic oligonucleotide
gtcgttagtgtttg

SEQ ID NO: 4687 - DNA, 14 bp, Artificial Sequence
  Description of Artificial Sequence: Synthetic oligonucleotide
agtcgttagtgttt

SEQ ID NO: 4688 - DNA, 14 bp, Artificial Sequence
  Description of Artificial Sequence: Synthetic oligonucleotide
gagtcgttagtgtt

SEQ ID NO: 4689 - DNA, 14 bp, Artificial Sequence
  Description of Artificial Sequence: Synthetic oligonucleotide
agagtcgttagtgt

SEQ ID NO: 4690 - DNA, 14 bp, Artificial Sequence
  Description of Artificial Sequence: Synthetic oligonucleotide
aagagtcgttagtg

SEQ ID NO: 4691 - DNA, 14 bp, Artificial Sequence
  Description of Artificial Sequence: Synthetic oligonucleotide
gaagagtcgttagt

SEQ ID NO: 4692 - DNA, 14 bp, Artificial Sequence
  Description of Artificial Sequence: Synthetic oligonucleotide
agaagagtcgttag

SEQ ID NO: 4693 - DNA, 14 bp, Artificial Sequence
  Description of Artificial Sequence: Synthetic oligonucleotide
aagaagagtcgtta

SEQ ID NO: 4694 - DNA, 14 bp, Artificial Sequence
  Description of Artificial Sequence: Synthetic oligonucleotide
gaagaagagtcgtt

SEQ ID NO: 4695 - DNA, 14 bp, Artificial Sequence
  Description of Artificial Sequence: Synthetic oligonucleotide
tgaagaagagtcgt

SEQ ID NO: 4696 - DNA, 14 bp, Artificial Sequence
  Description of Artificial Sequence: Synthetic oligonucleotide
ttgaagaagagtcg

SEQ ID NO: 4697 - DNA, 14 bp, Artificial Sequence
  Description of Artificial Sequence: Synthetic oligonucleotide
cttgaagaagagtc

SEQ ID NO: 4698 - DNA, 14 bp, Artificial Sequence
  Description of Artificial Sequence: Synthetic oligonucleotide
tcttgaagaagagt

SEQ ID NO: 4699 - DNA, 14 bp, Artificial Sequence
  Description of Artificial Sequence: Synthetic oligonucleotide
atcttgaagaagag

SEQ ID NO: 4700 - DNA, 14 bp, Artificial Sequence
  Description of Artificial Sequence: Synthetic oligonucleotide
catcttgaagaaga

SEQ ID NO: 4701 - DNA, 14 bp, Artificial Sequence
  Description of Artificial Sequence: Synthetic oligonucleotide
gcatcttgaagaag

SEQ ID NO: 4702 - DNA, 14 bp, Artificial Sequence
  Description of Artificial Sequence: Synthetic oligonucleotide
tgcatcttgaagaa

SEQ ID NO: 4703 - DNA, 14 bp, Artificial Sequence
  Description of Artificial Sequence: Synthetic oligonucleotide
ctgcatcttgaaga

SEQ ID NO: 4704 - DNA, 14 bp, Artificial Sequence
  Description of Artificial Sequence: Synthetic oligonucleotide
actgcatcttgaag

SEQ ID NO: 4705 - DNA, 14 bp, Artificial Sequence
  Description of Artificial Sequence: Synthetic oligonucleotide
tactgcatcttgaa

SEQ ID NO: 4706 - DNA, 14 bp, Artificial Sequence
  Description of Artificial Sequence: Synthetic oligonucleotide
atactgcatcttga

SEQ ID NO: 4707 - DNA, 14 bp, Artificial Sequence
  Description of Artificial Sequence: Synthetic oligonucleotide
tatactgcatcttg

SEQ ID NO: 4708 - DNA, 14 bp, Artificial Sequence
  Description of Artificial Sequence: Synthetic oligonucleotide
ttatactgcatctt

SEQ ID NO: 4709 - DNA, 14 bp, Artificial Sequence
  Description of Artificial Sequence: Synthetic oligonucleotide
cttatactgcatct

SEQ ID NO: 4710 - DNA, 14 bp, Artificial Sequence
  Description of Artificial Sequence: Synthetic oligonucleotide
tcttatactgcatc

SEQ ID NO: 4711 - DNA, 14 bp, Artificial Sequence
  Description of Artificial Sequence: Synthetic oligonucleotide
gtcttatactgcat

SEQ ID NO: 4712 - DNA, 14 bp, Artificial Sequence
  Description of Artificial Sequence: Synthetic oligonucleotide
tgtcttatactgca

SEQ ID NO: 4713 - DNA, 14 bp, Artificial Sequence
  Description of Artificial Sequence: Synthetic oligonucleotide
ttgtcttatactgc

SEQ ID NO: 4714 - DNA, 14 bp, Artificial Sequence
  Description of Artificial Sequence: Synthetic oligonucleotide
attgtcttatactg

SEQ ID NO: 4715 - DNA, 14 bp, Artificial Sequence
  Description of Artificial Sequence: Synthetic oligonucleotide
cattgtcttatact

SEQ ID NO: 4716 - DNA, 14 bp, Artificial Sequence
  Description of Artificial Sequence: Synthetic oligonucleotide
tcattgtcttatac

SEQ ID NO: 4717 - DNA, 14 bp, Artificial Sequence
  Description of Artificial Sequence: Synthetic oligonucleotide
ttcattgtcttata

SEQ ID NO: 4718 - DNA, 14 bp, Artificial Sequence
  Description of Artificial Sequence: Synthetic oligonucleotide
attcattgtcttat

SEQ ID NO: 4719 - DNA, 14 bp, Artificial Sequence
  Description of Artificial Sequence: Synthetic oligonucleotide
aattcattgtctta

SEQ ID NO: 4720 - DNA, 14 bp, Artificial Sequence
  Description of Artificial Sequence: Synthetic oligonucleotide
aaattcattgtctt

SEQ ID NO: 4721 - DNA, 14 bp, Artificial Sequence
  Description of Artificial Sequence: Synthetic oligonucleotide
aaaattcattgtct

SEQ ID NO: 4722 - DNA, 14 bp, Artificial Sequence
  Description of Artificial Sequence: Synthetic oligonucleotide
taaaattcattgtc

SEQ ID NO: 4723 - DNA, 14 bp, Artificial Sequence
  Description of Artificial Sequence: Synthetic oligonucleotide
ttaaaattcattgt

SEQ ID NO: 4724 - DNA, 14 bp, Artificial Sequence
  Description of Artificial Sequence: Synthetic oligonucleotide
gttaaaattcattg

SEQ ID NO: 4725 - DNA, 14 bp, Artificial Sequence
  Description of Artificial Sequence: Synthetic oligonucleotide
ggttaaaattcatt

SEQ ID NO: 4726 - DNA, 14 bp, Artificial Sequence
  Description of Artificial Sequence: Synthetic oligonucleotide
aggttaaaattcat

SEQ ID NO: 4727 - DNA, 14 bp, Artificial Sequence
  Description of Artificial Sequence: Synthetic oligonucleotide
taggttaaaattca

SEQ ID NO: 4728 - DNA, 14 bp, Artificial Sequence
  Description of Artificial Sequence: Synthetic oligonucleotide
ctaggttaaaattc

SEQ ID NO: 4729 - DNA, 14 bp, Artificial Sequence
  Description of Artificial Sequence: Synthetic oligonucleotide
tctaggttaaaatt

SEQ ID NO: 4730 - DNA, 14 bp, Artificial Sequence
  Description of Artificial Sequence: Synthetic oligonucleotide
atctaggttaaaat

SEQ ID NO: 4731 - DNA, 14 bp, Artificial Sequence
  Description of Artificial Sequence: Synthetic oligonucleotide
catctaggttaaaa

SEQ ID NO: 4732 - DNA, 14 bp, Artificial Sequence
  Description of Artificial Sequence: Synthetic oligonucleotide
acatctaggttaaa

SEQ ID NO: 4733 - DNA, 14 bp, Artificial Sequence
  Description of Artificial Sequence: Synthetic oligonucleotide
tacatctaggttaa

SEQ ID NO: 4734 - DNA, 14 bp, Artificial Sequence
  Description of Artificial Sequence: Synthetic oligonucleotide
ttacatctaggtta

SEQ ID NO: 4735 - DNA, 14 bp, Artificial Sequence
  Description of Artificial Sequence: Synthetic oligonucleotide
attacatctaggtt

SEQ ID NO: 4736 - DNA, 14 bp, Artificial Sequence
  Description of Artificial Sequence: Synthetic oligonucleotide
aattacatctaggt

SEQ ID NO: 4737 - DNA, 14 bp, Artificial Sequence
  Description of Artificial Sequence: Synthetic oligonucleotide
taattacatctagg

SEQ ID NO: 4738 - DNA, 14 bp, Artificial Sequence
  Description of Artificial Sequence: Synthetic oligonucleotide
ataattacatctag

SEQ ID NO: 4739 - DNA, 14 bp, Artificial Sequence
  Description of Artificial Sequence: Synthetic oligonucleotide
tataattacatcta

SEQ ID NO: 4740 - DNA, 14 bp, Artificial Sequence
  Description of Artificial Sequence: Synthetic oligonucleotide
gtataattacatct

SEQ ID NO: 4741 - DNA, 14 bp, Artificial Sequence
  Description of Artificial Sequence: Synthetic oligonucleotide
tgtataattacatc

SEQ ID NO: 4742 - DNA, 14 bp, Artificial Sequence
  Description of Artificial Sequence: Synthetic oligonucleotide
ttgtataattacat

SEQ ID NO: 4743 - DNA, 14 bp, Artificial Sequence
  Description of Artificial Sequence: Synthetic oligonucleotide
attgtataattaca

SEQ ID NO: 4744 - DNA, 14 bp, Artificial Sequence
  Description of Artificial Sequence: Synthetic oligonucleotide
cattgtataattac

SEQ ID NO: 4745 - DNA, 14 bp, Artificial Sequence
  Description of Artificial Sequence: Synthetic oligonucleotide
ccattgtataatta

SEQ ID NO: 4746 - DNA, 14 bp, Artificial Sequence
  Description of Artificial Sequence: Synthetic oligonucleotide
tccattgtataatt

SEQ ID NO: 4747 - DNA, 14 bp, Artificial Sequence
  Description of Artificial Sequence: Synthetic oligonucleotide
ttccattgtataat

SEQ ID NO: 4748 - DNA, 14 bp, Artificial Sequence
  Description of Artificial Sequence: Synthetic oligonucleotide
tttccattgtataa

SEQ ID NO: 4749 - DNA, 14 bp, Artificial Sequence
  Description of Artificial Sequence: Synthetic oligonucleotide
atttccattgtata

SEQ ID NO: 4750 - DNA, 14 bp, Artificial Sequence
  Description of Artificial Sequence: Synthetic oligonucleotide
catttccattgtat

SEQ ID NO: 4751 - DNA, 14 bp, Artificial Sequence
  Description of Artificial Sequence: Synthetic oligonucleotide
ccatttccattgta

SEQ ID NO: 4752 - DNA, 14 bp, Artificial Sequence
  Description of Artificial Sequence: Synthetic oligonucleotide
accatttccattgt

SEQ ID NO: 4753 - DNA, 14 bp, Artificial Sequence
  Description of Artificial Sequence: Synthetic oligonucleotide
taccatttccattg

SEQ ID NO: 4754 - DNA, 14 bp, Artificial Sequence
  Description of Artificial Sequence: Synthetic oligonucleotide
ataccatttccatt

SEQ ID NO: 4755 - DNA, 14 bp, Artificial Sequence
  Description of Artificial Sequence: Synthetic oligonucleotide
aataccatttccat

SEQ ID NO: 4756 - DNA, 14 bp, Artificial Sequence
  Description of Artificial Sequence: Synthetic oligonucleotide
gaataccatttcca

SEQ ID NO: 4757 - DNA, 14 bp, Artificial Sequence
  Description of Artificial Sequence: Synthetic oligonucleotide
ggaataccatttcc

SEQ ID NO: 4758 - DNA, 14 bp, Artificial Sequence
  Description of Artificial Sequence: Synthetic oligonucleotide
tggaataccatttc

SEQ ID NO: 4759 - DNA, 14 bp, Artificial Sequence
  Description of Artificial Sequence: Synthetic oligonucleotide
ctggaataccattt

SEQ ID NO: 4760 - DNA, 14 bp, Artificial Sequence
  Description of Artificial Sequence: Synthetic oligonucleotide
actggaataccatt

SEQ ID NO: 4761 - DNA, 14 bp, Artificial Sequence
  Description of Artificial Sequence: Synthetic oligonucleotide
aactggaataccat

SEQ ID NO: 4762 - DNA, 14 bp, Artificial Sequence
  Description of Artificial Sequence: Synthetic oligonucleotide
aaactggaatacca

SEQ ID NO: 4763 - DNA, 14 bp, Artificial Sequence
  Description of Artificial Sequence: Synthetic oligonucleotide
taaactggaatacc

SEQ ID NO: 4764 - DNA, 14 bp, Artificial Sequence
  Description of Artificial Sequence: Synthetic oligonucleotide
ctaaactggaatac

SEQ ID NO: 4765 - DNA, 14 bp, Artificial Sequence
  Description of Artificial Sequence: Synthetic oligonucleotide
tctaaactggaata

SEQ ID NO: 4766 - DNA, 14 bp, Artificial Sequence
  Description of Artificial Sequence: Synthetic oligonucleotide
ttctaaactggaat

SEQ ID NO: 4767 - DNA, 14 bp, Artificial Sequence
  Description of Artificial Sequence: Synthetic oligonucleotide
attctaaactggaa

SEQ ID NO: 4768 - DNA, 14 bp, Artificial Sequence
  Description of Artificial Sequence: Synthetic oligonucleotide
tattctaaactgga

SEQ ID NO: 4769 - DNA, 14 bp, Artificial Sequence
  Description of Artificial Sequence: Synthetic oligonucleotide
atattctaaactgg

SEQ ID NO: 4770 - DNA, 14 bp, Artificial Sequence
  Description of Artificial Sequence: Synthetic oligonucleotide
catattctaaactg

SEQ ID NO: 4771 - DNA, 14 bp, Artificial Sequence
  Description of Artificial Sequence: Synthetic oligonucleotide
ccatattctaaact

SEQ ID NO: 4772 - DNA, 14 bp, Artificial Sequence
  Description of Artificial Sequence: Synthetic oligonucleotide
tccatattctaaac

SEQ ID NO: 4773 - DNA, 14 bp, Artificial Sequence
  Description of Artificial Sequence: Synthetic oligonucleotide
ttccatattctaaa

SEQ ID NO: 4774 - DNA, 14 bp, Artificial Sequence
  Description of Artificial Sequence: Synthetic oligonucleotide
tttccatattctaa

SEQ ID NO: 4775 - DNA, 14 bp, Artificial Sequence
  Description of Artificial Sequence: Synthetic oligonucleotide
ctttccatattcta

SEQ ID NO: 4776 - DNA, 14 bp, Artificial Sequence
  Description of Artificial Sequence: Synthetic oligonucleotide
tctttccatattct

SEQ ID NO: 4777 - DNA, 14 bp, Artificial Sequence
  Description of Artificial Sequence: Synthetic oligonucleotide
gtctttccatattc

SEQ ID NO: 4778 - DNA, 14 bp, Artificial Sequence
  Description of Artificial Sequence: Synthetic oligonucleotide
ggtctttccatatt

SEQ ID NO: 4779 - DNA, 14 bp, Artificial Sequence
  Description of Artificial Sequence: Synthetic oligonucleotide
cggtctttccatat

SEQ ID NO: 4780 - DNA, 14 bp, Artificial Sequence
  Description of Artificial Sequence: Synthetic oligonucleotide
tcggtctttccata

SEQ ID NO: 4781 - DNA, 14 bp, Artificial Sequence
  Description of Artificial Sequence: Synthetic oligonucleotide
gtcggtctttccat

SEQ ID NO: 4782 - DNA, 14 bp, Artificial Sequence
  Description of Artificial Sequence: Synthetic oligonucleotide
ggtcggtctttcca

SEQ ID NO: 4783 - DNA, 14 bp, Artificial Sequence
  Description of Artificial Sequence: Synthetic oligonucleotide
aggtcggtctttcc

SEQ ID NO: 4784 - DNA, 14 bp, Artificial Sequence
  Description of Artificial Sequence: Synthetic oligonucleotide
taggtcggtctttc

SEQ ID NO: 4785 - DNA, 14 bp, Artificial Sequence
  Description of Artificial Sequence: Synthetic oligonucleotide
ctaggtcggtcttt

SEQ ID NO: 4786 - DNA, 14 bp, Artificial Sequence
  Description of Artificial Sequence: Synthetic oligonucleotide
tctaggtcggtctt

SEQ ID NO: 4787 - DNA, 14 bp, Artificial Sequence
  Description of Artificial Sequence: Synthetic oligonucleotide
ctctaggtcggtct

SEQ ID NO: 4788 - DNA, 14 bp, Artificial Sequence
  Description of Artificial Sequence: Synthetic oligonucleotide
cctctaggtcggtc

SEQ ID NO: 4789 - DNA, 14 bp, Artificial Sequence
  Description of Artificial Sequence: Synthetic oligonucleotide
tcctctaggtcggt

SEQ ID NO: 4790 - DNA, 14 bp, Artificial Sequence
  Description of Artificial Sequence: Synthetic oligonucleotide
ttcctctaggtcgg

SEQ ID NO: 4791 - DNA, 14 bp, Artificial Sequence
  Description of Artificial Sequence: Synthetic oligonucleotide
attcctctaggtcg

SEQ ID NO: 4792 - DNA, 14 bp, Artificial Sequence
  Description of Artificial Sequence: Synthetic oligonucleotide
aattcctctaggtc

SEQ ID NO: 4793 - DNA, 14 bp, Artificial Sequence
  Description of Artificial Sequence: Synthetic oligonucleotide
caattcctctaggt

SEQ ID NO: 4794 - DNA, 14 bp, Artificial Sequence
  Description of Artificial Sequence: Synthetic oligonucleotide
ccaattcctctagg

SEQ ID NO: 4795 - DNA, 14 bp, Artificial Sequence
  Description of Artificial Sequence: Synthetic oligonucleotide
tccaattcctctag

SEQ ID NO: 4796 - DNA, 14 bp, Artificial Sequence
  Description of Artificial Sequence: Synthetic oligonucleotide
gtccaattcctcta

SEQ ID NO: 4797 - DNA, 14 bp, Artificial Sequence
  Description of Artificial Sequence: Synthetic oligonucleotide
tgtccaattcctct

SEQ ID NO: 4798 - DNA, 14 bp, Artificial Sequence
  Description of Artificial Sequence: Synthetic oligonucleotide
ttgtccaattcctc

SEQ ID NO: 4799 - DNA, 14 bp, Artificial Sequence
  Description of Artificial Sequence: Synthetic oligonucleotide
gttgtccaattcct

SEQ ID NO: 4800 - DNA, 14 bp, Artificial Sequence
  Description of Artificial Sequence: Synthetic oligonucleotide
agttgtccaattcc

SEQ ID NO: 4801 - DNA, 14 bp, Artificial Sequence
  Description of Artificial Sequence: Synthetic oligonucleotide
cagttgtccaattc

SEQ ID NO: 4802 - DNA, 14 bp, Artificial Sequence
  Description of Artificial Sequence: Synthetic oligonucleotide
tcagttgtccaatt

SEQ ID NO: 4803 - DNA, 14 bp, Artificial Sequence
  Description of Artificial Sequence: Synthetic oligonucleotide
atcagttgtccaat

SEQ ID NO: 4804 - DNA, 14 bp, Artificial Sequence
  Description of Artificial Sequence: Synthetic oligonucleotide
aatcagttgtccaa

SEQ ID NO: 4805 - DNA, 14 bp, Artificial Sequence
  Description of Artificial Sequence: Synthetic oligonucleotide
caatcagttgtcca

SEQ ID NO: 4806 - DNA, 14 bp, Artificial Sequence
  Description of Artificial Sequence: Synthetic oligonucleotide
gcaatcagttgtcc

SEQ ID NO: 4807 - DNA, 14 bp, Artificial Sequence
  Description of Artificial Sequence: Synthetic oligonucleotide
tgcaatcagttgtc

SEQ ID NO: 4808 - DNA, 14 bp, Artificial Sequence
  Description of Artificial Sequence: Synthetic oligonucleotide
gtgcaatcagttgt

SEQ ID NO: 4809 - DNA, 14 bp, Artificial Sequence
  Description of Artificial Sequence: Synthetic oligonucleotide
ggtgcaatcagttg

SEQ ID NO: 4810 - DNA, 14 bp, Artificial Sequence
  Description of Artificial Sequence: Synthetic oligonucleotide
aggtgcaatcagtt

SEQ ID NO: 4811 - DNA, 14 bp, Artificial Sequence
  Description of Artificial Sequence: Synthetic oligonucleotide
caggtgcaatcagt

SEQ ID NO: 4812 - DNA, 14 bp, Artificial Sequence
  Description of Artificial Sequence: Synthetic oligonucleotide
tcaggtgcaatcag

SEQ ID NO: 4813 - DNA, 14 bp, Artificial Sequence
  Description of Artificial Sequence: Synthetic oligonucleotide
ttcaggtgcaatca

SEQ ID NO: 4814 - DNA, 14 bp, Artificial Sequence
  Description of Artificial Sequence: Synthetic oligonucleotide
tttcaggtgcaatc

SEQ ID NO: 4815 - DNA, 14 bp, Artificial Sequence
  Description of Artificial Sequence: Synthetic oligonucleotide
ttttcaggtgcaat

SEQ ID NO: 4816 - DNA, 14 bp, Artificial Sequence
  Description of Artificial Sequence: Synthetic oligonucleotide
attttcaggtgcaa

SEQ ID NO: 4817 - DNA, 14 bp, Artificial Sequence
  Description of Artificial Sequence: Synthetic oligonucleotide
gattttcaggtgca

SEQ ID NO: 4818 - DNA, 14 bp, Artificial Sequence
  Description of Artificial Sequence: Synthetic oligonucleotide
tgattttcaggtgc

SEQ ID NO: 4819 - DNA, 14 bp, Artificial Sequence
  Description of Artificial Sequence: Synthetic oligonucleotide
atgattttcaggtg

SEQ ID NO: 4820 - DNA, 14 bp, Artificial Sequence
  Description of Artificial Sequence: Synthetic oligonucleotide
tatgattttcaggt

SEQ ID NO: 4821 - DNA, 14 bp, Artificial Sequence
  Description of Artificial Sequence: Synthetic oligonucleotide
ttatgattttcagg

SEQ ID NO: 4822 - DNA, 14 bp, Artificial Sequence
  Description of Artificial Sequence: Synthetic oligonucleotide
tttatgattttcag

SEQ ID NO: 4823 - DNA, 14 bp, Artificial Sequence
  Description of Artificial Sequence: Synthetic oligonucleotide
ctttatgattttca

SEQ ID NO: 4824 - DNA, 14 bp, Artificial Sequence
  Description of Artificial Sequence: Synthetic oligonucleotide
cctttatgattttc

SEQ ID NO: 4825 - DNA, 14 bp, Artificial Sequence
  Description of Artificial Sequence: Synthetic oligonucleotide
ccctttatgatttt

SEQ ID NO: 4826 - DNA, 14 bp, Artificial Sequence
  Description of Artificial Sequence: Synthetic oligonucleotide
tccctttatgattt

SEQ ID NO: 4827 - DNA, 14 bp, Artificial Sequence
  Description of Artificial Sequence: Synthetic oligonucleotide
gtccctttatgatt

SEQ ID NO: 4828 - DNA, 14 bp, Artificial Sequence
  Description of Artificial Sequence: Synthetic oligonucleotide
agtccctttatgat

SEQ ID NO: 4829 - DNA, 14 bp, Artificial Sequence
  Description of Artificial Sequence: Synthetic oligonucleotide
aagtccctttatga

SEQ ID NO: 4830 - DNA, 14 bp, Artificial Sequence
  Description of Artificial Sequence: Synthetic oligonucleotide
aaagtccctttatg

SEQ ID NO: 4831 - DNA, 14 bp, Artificial Sequence
  Description of Artificial Sequence: Synthetic oligonucleotide
aaaagtccctttat

SEQ ID NO: 4832 - DNA, 14 bp, Artificial Sequence
  Description of Artificial Sequence: Synthetic oligonucleotide
aaaaagtcccttta

SEQ ID NO: 4833 - DNA, 14 bp, Artificial Sequence
  Description of Artificial Sequence: Synthetic oligonucleotide
gaaaaagtcccttt

SEQ ID NO: 4834 - DNA, 14 bp, Artificial Sequence
  Description of Artificial Sequence: Synthetic oligonucleotide
agaaaaagtccctt

SEQ ID NO: 4835 - DNA, 14 bp, Artificial Sequence
  Description of Artificial Sequence: Synthetic oligonucleotide
cagaaaaagtccct

SEQ ID NO: 4836 - DNA, 14 bp, Artificial Sequence
  Description of Artificial Sequence: Synthetic oligonucleotide
ccagaaaaagtccc

SEQ ID NO: 4837 - DNA, 14 bp, Artificial Sequence
  Description of Artificial Sequence: Synthetic oligonucleotide
gccagaaaaagtcc

SEQ ID NO: 4838 - DNA, 14 bp, Artificial Sequence
  Description of Artificial Sequence: Synthetic oligonucleotide
ggccagaaaaagtc

SEQ ID NO: 4839 - DNA, 14 bp, Artificial Sequence
  Description of Artificial Sequence: Synthetic oligonucleotide
tggccagaaaaagt

SEQ ID NO: 4840 - DNA, 14 bp, Artificial Sequence
  Description of Artificial Sequence: Synthetic oligonucleotide
ttggccagaaaaag

SEQ ID NO: 4841 - DNA, 14 bp, Artificial Sequence
  Description of Artificial Sequence: Synthetic oligonucleotide
attggccagaaaaa

SEQ ID NO: 4842 - DNA, 14 bp, Artificial Sequence
  Description of Artificial Sequence: Synthetic oligonucleotide
tattggccagaaaa

SEQ ID NO: 4843 - DNA, 14 bp, Artificial Sequence
  Description of Artificial Sequence: Synthetic oligonucleotide
ctattggccagaaa

SEQ ID NO: 4844 - DNA, 14 bp, Artificial Sequence
  Description of Artificial Sequence: Synthetic oligonucleotide
cctattggccagaa

SEQ ID NO: 4845 - DNA, 14 bp, Artificial Sequence
  Description of Artificial Sequence: Synthetic oligonucleotide
gcctattggccaga

SEQ ID NO: 4846 - DNA, 14 bp, Artificial Sequence
  Description of Artificial Sequence: Synthetic oligonucleotide
tgcctattggccag

SEQ ID NO: 4847 - DNA, 14 bp, Artificial Sequence
  Description of Artificial Sequence: Synthetic oligonucleotide
ctgcctattggcca

SEQ ID NO: 4848 - DNA, 14 bp, Artificial Sequence
  Description of Artificial Sequence: Synthetic oligonucleotide
cctgcctattggcc

SEQ ID NO: 4849 - DNA, 14 bp, Artificial Sequence
  Description of Artificial Sequence: Synthetic oligonucleotide
tcctgcctattggc

SEQ ID NO: 4850 - DNA, 14 bp, Artificial Sequence
  Description of Artificial Sequence: Synthetic oligonucleotide
ctcctgcctattgg

SEQ ID NO: 4851 - DNA, 14 bp, Artificial Sequence
  Description of Artificial Sequence: Synthetic oligonucleotide
actcctgcctattg

SEQ ID NO: 4852 - DNA, 14 bp, Artificial Sequence
  Description of Artificial Sequence: Synthetic oligonucleotide
gactcctgcctatt

SEQ ID NO: 4853 - DNA, 14 bp, Artificial Sequence
  Description of Artificial Sequence: Synthetic oligonucleotide
ggactcctgcctat

SEQ ID NO: 4854 - DNA, 14 bp, Artificial Sequence
  Description of Artificial Sequence: Synthetic oligonucleotide
aggactcctgccta

SEQ ID NO: 4855 - DNA, 14 bp, Artificial Sequence
  Description of Artificial Sequence: Synthetic oligonucleotide
gaggactcctgcct

SEQ ID NO: 4856 - DNA, 14 bp, Artificial Sequence
  Description of Artificial Sequence: Synthetic oligonucleotide
agaggactcctgcc

SEQ ID NO: 4857 - DNA, 14 bp, Artificial Sequence
  Description of Artificial Sequence: Synthetic oligonucleotide
aagaggactcctgc

SEQ ID NO: 4858 - DNA, 14 bp, Artificial Sequence
  Description of Artificial Sequence: Synthetic oligonucleotide
aaagaggactcctg

SEQ ID NO: 4859 - DNA, 14 bp, Artificial Sequence
  Description of Artificial Sequence: Synthetic oligonucleotide
aaaagaggactcct

SEQ ID NO: 4860 - DNA, 14 bp, Artificial Sequence
  Description of Artificial Sequence: Synthetic oligonucleotide
aaaaagaggactcc

SEQ ID NO: 4861 - DNA, 14 bp, Artificial Sequence
  Description of Artificial Sequence: Synthetic oligonucleotide
caaaaagaggactc

SEQ ID NO: 4862 - DNA, 14 bp, Artificial Sequence
  Description of Artificial Sequence: Synthetic oligonucleotide
acaaaaagaggact

SEQ ID NO: 4863 - DNA, 14 bp, Artificial Sequence
  Description of Artificial Sequence: Synthetic oligonucleotide
cacaaaaagaggac

SEQ ID NO: 4864 - DNA, 14 bp, Artificial Sequence
  Description of Artificial Sequence: Synthetic oligonucleotide
tcacaaaaagagga

SEQ ID NO: 4865 - DNA, 14 bp, Artificial Sequence
  Description of Artificial Sequence: Synthetic oligonucleotide
ttcacaaaaagagg

SEQ ID NO: 4866 - DNA, 14 bp, Artificial Sequence
  Description of Artificial Sequence: Synthetic oligonucleotide
cttcacaaaaagag

SEQ ID NO: 4867 - DNA, 14 bp, Artificial Sequence
  Description of Artificial Sequence: Synthetic oligonucleotide
acttcacaaaaaga

SEQ ID NO: 4868 - DNA, 14 bp, Artificial Sequence
  Description of Artificial Sequence: Synthetic oligonucleotide
cacttcacaaaaag

SEQ ID NO: 4869 - DNA, 14 bp, Artificial Sequence
  Description of Artificial Sequence: Synthetic oligonucleotide
tcacttcacaaaaa

SEQ ID NO: 4870 - DNA, 14 bp, Artificial Sequence
  Description of Artificial Sequence: Synthetic oligonucleotide
atcacttcacaaaa

SEQ ID NO: 4871 - DNA, 14 bp, Artificial Sequence
  Description of Artificial Sequence: Synthetic oligonucleotide
gatcacttcacaaa

SEQ ID NO: 4872 - DNA, 14 bp, Artificial Sequence
  Description of Artificial Sequence: Synthetic oligonucleotide
agatcacttcacaa

SEQ ID NO: 4873 - DNA, 14 bp, Artificial Sequence
  Description of Artificial Sequence: Synthetic oligonucleotide
aagatcacttcaca

SEQ ID NO: 4874 - DNA, 14 bp, Artificial Sequence
  Description of Artificial Sequence: Synthetic oligonucleotide
aaagatcacttcac

SEQ ID NO: 4875 - DNA, 14 bp, Artificial Sequence
  Description of Artificial Sequence: Synthetic oligonucleotide
aaaagatcacttca

SEQ ID NO: 4876 - DNA, 14 bp, Artificial Sequence
  Description of Artificial Sequence: Synthetic oligonucleotide
caaaagatcacttc

SEQ ID NO: 4877 - DNA, 14 bp, Artificial Sequence
  Description of Artificial Sequence: Synthetic oligonucleotide
acaaaagatcactt

SEQ ID NO: 4878 - DNA, 14 bp, Artificial Sequence
  Description of Artificial Sequence: Synthetic oligonucleotide
cacaaaagatcact

SEQ ID NO: 4879 - DNA, 14 bp, Artificial Sequence
  Description of Artificial Sequence: Synthetic oligonucleotide
tcacaaaagatcac

SEQ ID NO: 4880 - DNA, 14 bp, Artificial Sequence
  Description of Artificial Sequence: Synthetic oligonucleotide
ttcacaaaagatca

SEQ ID NO: 4881 - DNA, 14 bp, Artificial Sequence
  Description of Artificial Sequence: Synthetic oligonucleotide
cttcacaaaagatc

SEQ ID NO: 4882 - DNA, 14 bp, Artificial Sequence
  Description of Artificial Sequence: Synthetic oligonucleotide
acttcacaaaagat

SEQ ID NO: 4883 - DNA, 14 bp, Artificial Sequence
  Description of Artificial Sequence: Synthetic oligonucleotide
cacttcacaaaaga

SEQ ID NO: 4884 - DNA, 14 bp, Artificial Sequence
  Description of Artificial Sequence: Synthetic oligonucleotide
tcacttcacaaaag

SEQ ID NO: 4885-4886 - skipped (2 entries)

SEQ ID NO: 4887 - DNA, 14 bp, Artificial Sequence
  Description of Artificial Sequence: Synthetic oligonucleotide
tgatcacttcacaa

SEQ ID NO: 4888 - DNA, 14 bp, Artificial Sequence
  Description of Artificial Sequence: Synthetic oligonucleotide
atgatcacttcaca

SEQ ID NO: 4889 - DNA, 14 bp, Artificial Sequence
  Description of Artificial Sequence: Synthetic oligonucleotide
aatgatcacttcac

SEQ ID NO: 4890 - DNA, 14 bp, Artificial Sequence
  Description of Artificial Sequence: Synthetic oligonucleotide
taatgatcacttca

SEQ ID NO: 4891 - DNA, 14 bp, Artificial Sequence
  Description of Artificial Sequence: Synthetic oligonucleotide
ttaatgatcacttc

SEQ ID NO: 4892 - DNA, 14 bp, Artificial Sequence
  Description of Artificial Sequence: Synthetic oligonucleotide
tttaatgatcactt

SEQ ID NO: 4893 - DNA, 14 bp, Artificial Sequence
  Description of Artificial Sequence: Synthetic oligonucleotide
ctttaatgatcact

SEQ ID NO: 4894 - DNA, 14 bp, Artificial Sequence
  Description of Artificial Sequence: Synthetic oligonucleotide
cctttaatgatcac

SEQ ID NO: 4895 - DNA, 14 bp, Artificial Sequence
  Description of Artificial Sequence: Synthetic oligonucleotide
ccctttaatgatca

SEQ ID NO: 4896 - DNA, 14 bp, Artificial Sequence
  Description of Artificial Sequence: Synthetic oligonucleotide
tccctttaatgatc

SEQ ID NO: 4897 - DNA, 14 bp, Artificial Sequence
  Description of Artificial Sequence: Synthetic oligonucleotide
atccctttaatgat

SEQ ID NO: 4898 - DNA, 14 bp, Artificial Sequence
  Description of Artificial Sequence: Synthetic oligonucleotide
catccctttaatga

SEQ ID NO: 4899 - DNA, 14 bp, Artificial Sequence
  Description of Artificial Sequence: Synthetic oligonucleotide
ccatccctttaatg

SEQ ID NO: 4900 - DNA, 14 bp, Artificial Sequence
  Description of Artificial Sequence: Synthetic oligonucleotide
tccatccctttaat

SEQ ID NO: 4901 - DNA, 14 bp, Artificial Sequence
  Description of Artificial Sequence: Synthetic oligonucleotide
ttccatccctttaa

SEQ ID NO: 4902 - DNA, 14 bp, Artificial Sequence
  Description of Artificial Sequence: Synthetic oligonucleotide
tttccatcccttta

SEQ ID NO: 4903 - DNA, 14 bp, Artificial Sequence
  Description of Artificial Sequence: Synthetic oligonucleotide
ttttccatcccttt

SEQ ID NO: 4904 - DNA, 14 bp, Artificial Sequence
  Description of Artificial Sequence: Synthetic oligonucleotide
gttttccatccctt

SEQ ID NO: 4905 - DNA, 14 bp, Artificial Sequence
  Description of Artificial Sequence: Synthetic oligonucleotide
tgttttccatccct

SEQ ID NO: 4906 - DNA, 14 bp, Artificial Sequence
  Description of Artificial Sequence: Synthetic oligonucleotide
gtgttttccatccc

SEQ ID NO: 4907 - DNA, 14 bp, Artificial Sequence
  Description of Artificial Sequence: Synthetic oligonucleotide
tgtgttttccatcc

SEQ ID NO: 4908 - DNA, 14 bp, Artificial Sequence
  Description of Artificial Sequence: Synthetic oligonucleotide
ctgtgttttccatc

SEQ ID NO: 4909 - DNA, 14 bp, Artificial Sequence
  Description of Artificial Sequence: Synthetic oligonucleotide
actgtgttttccat

SEQ ID NO: 4910 - DNA, 14 bp, Artificial Sequence
  Description of Artificial Sequence: Synthetic oligonucleotide
gactgtgttttcca

SEQ ID NO: 4911 - DNA, 14 bp, Artificial Sequence
  Description of Artificial Sequence: Synthetic oligonucleotide
agactgtgttttcc

SEQ ID NO: 4912 - DNA, 14 bp, Artificial Sequence
  Description of Artificial Sequence: Synthetic oligonucleotide
tagactgtgttttc

SEQ ID NO: 4913 - DNA, 14 bp, Artificial Sequence
  Description of Artificial Sequence: Synthetic oligonucleotide
ctagactgtgtttt

SEQ ID NO: 4914 - DNA, 14 bp, Artificial Sequence
  Description of Artificial Sequence: Synthetic oligonucleotide
actagactgtgttt

SEQ ID NO: 4915 - DNA, 14 bp, Artificial Sequence
  Description of Artificial Sequence: Synthetic oligonucleotide
cactagactgtgtt

SEQ ID NO: 4916 - DNA, 14 bp, Artificial Sequence
  Description of Artificial Sequence: Synthetic oligonucleotide
acactagactgtgt

SEQ ID NO: 4917 - DNA, 14 bp, Artificial Sequence
  Description of Artificial Sequence: Synthetic oligonucleotide
gacactagactgtg

SEQ ID NO: 4918 - DNA, 14 bp, Artificial Sequence
  Description of Artificial Sequence: Synthetic oligonucleotide
ggacactagactgt

SEQ ID NO: 4919 - DNA, 14 bp, Artificial Sequence
  Description of Artificial Sequence: Synthetic oligonucleotide
tggacactagactg

SEQ ID NO: 4920 - DNA, 14 bp, Artificial Sequence
  Description of Artificial Sequence: Synthetic oligonucleotide
ctggacactagact

SEQ ID NO: 4921 - DNA, 14 bp, Artificial Sequence
  Description of Artificial Sequence: Synthetic oligonucleotide
gctggacactagac

SEQ ID NO: 4922 - DNA, 14 bp, Artificial Sequence
  Description of Artificial Sequence: Synthetic oligonucleotide
tgctggacactaga

SEQ ID NO: 4923 - DNA, 14 bp, Artificial Sequence
  Description of Artificial Sequence: Synthetic oligonucleotide
ctgctggacactag

SEQ ID NO: 4924 - DNA, 14 bp, Artificial Sequence
  Description of Artificial Sequence: Synthetic oligonucleotide
cctgctggacacta

SEQ ID NO: 4925 - DNA, 14 bp, Artificial Sequence
  Description of Artificial Sequence: Synthetic oligonucleotide
gcctgctggacact

SEQ ID NO: 4926 - DNA, 14 bp, Artificial Sequence
  Description of Artificial Sequence: Synthetic oligonucleotide
ggcctgctggacac

SEQ ID NO: 4927 - DNA, 14 bp, Artificial Sequence
  Description of Artificial Sequence: Synthetic oligonucleotide
gggcctgctggaca

SEQ ID NO: 4928 - DNA, 14 bp, Artificial Sequence
  Description of Artificial Sequence: Synthetic oligonucleotide
tgggcctgctggac

SEQ ID NO: 4929 - DNA, 14 bp, Artificial Sequence
  Description of Artificial Sequence: Synthetic oligonucleotide
gtgggcctgctgga

SEQ ID NO: 4930 - DNA, 14 bp, Artificial Sequence
  Description of Artificial Sequence: Synthetic oligonucleotide
tgtgggcctgctgg

SEQ ID NO: 4931 - DNA, 14 bp, Artificial Sequence
  Description of Artificial Sequence: Synthetic oligonucleotide
atgtgggcctgctg

SEQ ID NO: 4932 - DNA, 14 bp, Artificial Sequence
  Description of Artificial Sequence: Synthetic oligonucleotide
catgtgggcctgct

SEQ ID NO: 4933 - DNA, 14 bp, Artificial Sequence
  Description of Artificial Sequence: Synthetic oligonucleotide
tcatgtgggcctgc

SEQ ID NO: 4934 - DNA, 14 bp, Artificial Sequence
  Description of Artificial Sequence: Synthetic oligonucleotide
gtcatgtgggcctg

SEQ ID NO: 4935 - DNA, 14 bp, Artificial Sequence
  Description of Artificial Sequence: Synthetic oligonucleotide
tgtcatgtgggcct

SEQ ID NO: 4936 - DNA, 14 bp, Artificial Sequence
  Description of Artificial Sequence: Synthetic oligonucleotide
ctgtcatgtgggcc

SEQ ID NO: 4937 - DNA, 14 bp, Artificial Sequence
  Description of Artificial Sequence: Synthetic oligonucleotide
actgtcatgtgggc

SEQ ID NO: 4938 - DNA, 14 bp, Artificial Sequence
  Description of Artificial Sequence: Synthetic oligonucleotide
aactgtcatgtggg

SEQ ID NO: 4939 - DNA, 14 bp, Artificial Sequence
  Description of Artificial Sequence: Synthetic oligonucleotide
aaactgtcatgtgg

SEQ ID NO: 4940 - DNA, 14 bp, Artificial Sequence
  Description of Artificial Sequence: Synthetic oligonucleotide
aaaactgtcatgtg

SEQ ID NO: 4941 - DNA, 14 bp, Artificial Sequence
  Description of Artificial Sequence: Synthetic oligonucleotide
aaaaactgtcatgt

SEQ ID NO: 4942 - DNA, 14 bp, Artificial Sequence
  Description of Artificial Sequence: Synthetic oligonucleotide
caaaaactgtcatg

SEQ ID NO: 4943 - DNA, 14 bp, Artificial Sequence
  Description of Artificial Sequence: Synthetic oligonucleotide
acaaaaactgtcat

SEQ ID NO: 4944 - DNA, 14 bp, Artificial Sequence
  Description of Artificial Sequence: Synthetic oligonucleotide
tacaaaaactgtca

SEQ ID NO: 4945 - DNA, 14 bp, Artificial Sequence
  Description of Artificial Sequence: Synthetic oligonucleotide
ttacaaaaactgtc

SEQ ID NO: 4946 - DNA, 14 bp, Artificial Sequence
  Description of Artificial Sequence: Synthetic oligonucleotide
attacaaaaactgt

SEQ ID NO: 4947 - DNA, 14 bp, Artificial Sequence
  Description of Artificial Sequence: Synthetic oligonucleotide
aattacaaaaactg

SEQ ID NO: 4948 - DNA, 14 bp, Artificial Sequence
  Description of Artificial Sequence: Synthetic oligonucleotide
gaattacaaaaact

SEQ ID NO: 4949 - DNA, 14 bp, Artificial Sequence
  Description of Artificial Sequence: Synthetic oligonucleotide
tgaattacaaaaac

SEQ ID NO: 4950 - DNA, 14 bp, Artificial Sequence
  Description of Artificial Sequence: Synthetic oligonucleotide
ttgaattacaaaaa

SEQ ID NO: 4951 - DNA, 14 bp, Artificial Sequence
  Description of Artificial Sequence: Synthetic oligonucleotide
tttgaattacaaaa

SEQ ID NO: 4952 - DNA, 14 bp, Artificial Sequence
  Description of Artificial Sequence: Synthetic oligonucleotide
atttgaattacaaa

SEQ ID NO: 4953 - DNA, 14 bp, Artificial Sequence
  Description of Artificial Sequence: Synthetic oligonucleotide
aatttgaattacaa

SEQ ID NO: 4954 - DNA, 14 bp, Artificial Sequence
  Description of Artificial Sequence: Synthetic oligonucleotide
taatttgaattaca

SEQ ID NO: 4955 - DNA, 14 bp, Artificial Sequence
  Description of Artificial Sequence: Synthetic oligonucleotide
ataatttgaattac

SEQ ID NO: 4956 - DNA, 14 bp, Artificial Sequence
  Description of Artificial Sequence: Synthetic oligonucleotide
cataatttgaatta

SEQ ID NO: 4957 - DNA, 14 bp, Artificial Sequence
  Description of Artificial Sequence: Synthetic oligonucleotide
gcataatttgaatt

SEQ ID NO: 4958 - DNA, 14 bp, Artificial Sequence
  Description of Artificial Sequence: Synthetic oligonucleotide
tgcataatttgaat

SEQ ID NO: 4959 - DNA, 14 bp, Artificial Sequence
  Description of Artificial Sequence: Synthetic oligonucleotide
gtgcataatttgaa

SEQ ID NO: 4960 - DNA, 14 bp, Artificial Sequence
  Description of Artificial Sequence: Synthetic oligonucleotide
agtgcataatttga

SEQ ID NO: 4961 - DNA, 14 bp, Artificial Sequence
  Description of Artificial Sequence: Synthetic oligonucleotide
aagtgcataatttg

SEQ ID NO: 4962 - DNA, 14 bp, Artificial Sequence
  Description of Artificial Sequence: Synthetic oligonucleotide
aaagtgcataattt

SEQ ID NO: 4963 - DNA, 14 bp, Artificial Sequence
  Description of Artificial Sequence: Synthetic oligonucleotide
aaaagtgcataatt

SEQ ID NO: 4964 - DNA, 14 bp, Artificial Sequence
  Description of Artificial Sequence: Synthetic oligonucleotide
taaaagtgcataat

SEQ ID NO: 4965 - DNA, 14 bp, Artificial Sequence
  Description of Artificial Sequence: Synthetic oligonucleotide
ttaaaagtgcataa

SEQ ID NO: 4966 - DNA, 14 bp, Artificial Sequence
  Description of Artificial Sequence: Synthetic oligonucleotide
tttaaaagtgcata

SEQ ID NO: 4967 - DNA, 14 bp, Artificial Sequence
  Description of Artificial Sequence: Synthetic oligonucleotide
ttttaaaagtgcat

SEQ ID NO: 4968 - DNA, 14 bp, Artificial Sequence
  Description of Artificial Sequence: Synthetic oligonucleotide
tttttaaaagtgca

SEQ ID NO: 4969 - DNA, 14 bp, Artificial Sequence
  Description of Artificial Sequence: Synthetic oligonucleotide
ttttttaaaagtgc

SEQ ID NO: 4970 - DNA, 14 bp, Artificial Sequence
  Description of Artificial Sequence: Synthetic oligonucleotide
tttttttaaaagtg

SEQ ID NO: 4971 - DNA, 14 bp, Artificial Sequence
  Description of Artificial Sequence: Synthetic oligonucleotide
ttttttttaaaagt

SEQ ID NO: 4972 - DNA, 14 bp, Artificial Sequence
  Description of Artificial Sequence: Synthetic oligonucleotide
tttttttttaaaag

SEQ ID NO: 4973 - DNA, 14 bp, Artificial Sequence
  Description of Artificial Sequence: Synthetic oligonucleotide
ttttttttttaaaa

SEQ ID NO: 4974 - DNA, 14 bp, Artificial Sequence
  Description of Artificial Sequence: Synthetic oligonucleotide
tttttttttttaaa

SEQ ID NO: 4975 - DNA, 14 bp, Artificial Sequence
  Description of Artificial Sequence: Synthetic oligonucleotide
gtttttttttttaa

SEQ ID NO: 4976 - DNA, 14 bp, Artificial Sequence
  Description of Artificial Sequence: Synthetic oligonucleotide
agttttttttttta

SEQ ID NO: 4977 - DNA, 14 bp, Artificial Sequence
  Description of Artificial Sequence: Synthetic oligonucleotide
aagttttttttttt

SEQ ID NO: 4978 - DNA, 14 bp, Artificial Sequence
  Description of Artificial Sequence: Synthetic oligonucleotide
taagtttttttttt

SEQ ID NO: 4979 - DNA, 14 bp, Artificial Sequence
  Description of Artificial Sequence: Synthetic oligonucleotide
ttaagttttttttt

SEQ ID NO: 4980 - DNA, 14 bp, Artificial Sequence
  Description of Artificial Sequence: Synthetic oligonucleotide
tttaagtttttttt

SEQ ID NO: 4981 - DNA, 14 bp, Artificial Sequence
  Description of Artificial Sequence: Synthetic oligonucleotide
gtttaagttttttt

SEQ ID NO: 4982 - DNA, 14 bp, Artificial Sequence
  Description of Artificial Sequence: Synthetic oligonucleotide
tgtttaagtttttt

SEQ ID NO: 4983 - DNA, 14 bp, Artificial Sequence
  Description of Artificial Sequence: Synthetic oligonucleotide
ctgtttaagttttt

SEQ ID NO: 4984 - DNA, 14 bp, Artificial Sequence
  Description of Artificial Sequence: Synthetic oligonucleotide
cctgtttaagtttt

SEQ ID NO: 4985 - DNA, 14 bp, Artificial Sequence
  Description of Artificial Sequence: Synthetic oligonucleotide
ccctgtttaagttt

SEQ ID NO: 4986 - DNA, 14 bp, Artificial Sequence
  Description of Artificial Sequence: Synthetic oligonucleotide
tccctgtttaagtt

SEQ ID NO: 4987 - DNA, 14 bp, Artificial Sequence
  Description of Artificial Sequence: Synthetic oligonucleotide
atccctgtttaagt

SEQ ID NO: 4988 - DNA, 14 bp, Artificial Sequence
  Description of Artificial Sequence: Synthetic oligonucleotide
gatccctgtttaag

SEQ ID NO: 4989 - DNA, 14 bp, Artificial Sequence
  Description of Artificial Sequence: Synthetic oligonucleotide
agatccctgtttaa

SEQ ID NO: 4990 - DNA, 14 bp, Artificial Sequence
  Description of Artificial Sequence: Synthetic oligonucleotide
aagatccctgttta

SEQ ID NO: 4991 - DNA, 14 bp, Artificial Sequence
  Description of Artificial Sequence: Synthetic oligonucleotide
taagatccctgttt

SEQ ID NO: 4992 - DNA, 14 bp, Artificial Sequence
  Description of Artificial Sequence: Synthetic oligonucleotide
ttaagatccctgtt

SEQ ID NO: 4993 - DNA, 14 bp, Artificial Sequence
  Description of Artificial Sequence: Synthetic oligonucleotide
attaagatccctgt

SEQ ID NO: 4994 - DNA, 14 bp, Artificial Sequence
  Description of Artificial Sequence: Synthetic oligonucleotide
tattaagatccctg

SEQ ID NO: 4995 - DNA, 14 bp, Artificial Sequence
  Description of Artificial Sequence: Synthetic oligonucleotide
atattaagatccct

SEQ ID NO: 4996 - DNA, 14 bp, Artificial Sequence
  Description of Artificial Sequence: Synthetic oligonucleotide
gatattaagatccc

SEQ ID NO: 4997 - DNA, 14 bp, Artificial Sequence
  Description of Artificial Sequence: Synthetic oligonucleotide
agatattaagatcc

SEQ ID NO: 4998 - DNA, 14 bp, Artificial Sequence
  Description of Artificial Sequence: Synthetic oligonucleotide
aagatattaagatc

SEQ ID NO: 4999 - DNA, 14 bp, Artificial Sequence
  Description of Artificial Sequence: Synthetic oligonucleotide
gaagatattaagat

SEQ ID NO: 5000 - DNA, 14 bp, Artificial Sequence
  Description of Artificial Sequence: Synthetic oligonucleotide
ggaagatattaaga

SEQ ID NO: 5001 - DNA, 14 bp, Artificial Sequence
  Description of Artificial Sequence: Synthetic oligonucleotide
aggaagatattaag

SEQ ID NO: 5002 - DNA, 14 bp, Artificial Sequence
  Description of Artificial Sequence: Synthetic oligonucleotide
aaggaagatattaa

SEQ ID NO: 5003 - DNA, 14 bp, Artificial Sequence
  Description of Artificial Sequence: Synthetic oligonucleotide
aaaggaagatatta

SEQ ID NO: 5004 - DNA, 14 bp, Artificial Sequence
  Description of Artificial Sequence: Synthetic oligonucleotide
caaaggaagatatt

SEQ ID NO: 5005 - DNA, 14 bp, Artificial Sequence
  Description of Artificial Sequence: Synthetic oligonucleotide
acaaaggaagatat

SEQ ID NO: 5006 - DNA, 14 bp, Artificial Sequence
  Description of Artificial Sequence: Synthetic oligonucleotide
aacaaaggaagata

SEQ ID NO: 5007 - DNA, 14 bp, Artificial Sequence
  Description of Artificial Sequence: Synthetic oligonucleotide
aaacaaaggaagat

SEQ ID NO: 5008 - DNA, 14 bp, Artificial Sequence
  Description of Artificial Sequence: Synthetic oligonucleotide
aaaacaaaggaaga

SEQ ID NO: 5009 - DNA, 14 bp, Artificial Sequence
  Description of Artificial Sequence: Synthetic oligonucleotide
gaaaacaaaggaag

SEQ ID NO: 5010 - DNA, 14 bp, Artificial Sequence
  Description of Artificial Sequence: Synthetic oligonucleotide
ggaaaacaaaggaa

SEQ ID NO: 5011 - DNA, 14 bp, Artificial Sequence
  Description of Artificial Sequence: Synthetic oligonucleotide
aggaaaacaaagga

SEQ ID NO: 5012 - DNA, 14 bp, Artificial Sequence
  Description of Artificial Sequence: Synthetic oligonucleotide
aaggaaaacaaagg

SEQ ID NO: 5013 - DNA, 14 bp, Artificial Sequence
  Description of Artificial Sequence: Synthetic oligonucleotide
aaaggaaaacaaag

SEQ ID NO: 5014 - DNA, 14 bp, Artificial Sequence
  Description of Artificial Sequence: Synthetic oligonucleotide
caaaggaaaacaaa

SEQ ID NO: 5015 - DNA, 14 bp, Artificial Sequence
  Description of Artificial Sequence: Synthetic oligonucleotide
gcaaaggaaaacaa

SEQ ID NO: 5016 - DNA, 14 bp, Artificial Sequence
  Description of Artificial Sequence: Synthetic oligonucleotide
agcaaaggaaaaca

SEQ ID NO: 5017 - DNA, 14 bp, Artificial Sequence
  Description of Artificial Sequence: Synthetic oligonucleotide
aagcaaaggaaaac

SEQ ID NO: 5018 - DNA, 14 bp, Artificial Sequence
  Description of Artificial Sequence: Synthetic oligonucleotide
aaagcaaaggaaaa

SEQ ID NO: 5019 - DNA, 14 bp, Artificial Sequence
  Description of Artificial Sequence: Synthetic oligonucleotide
taaagcaaaggaaa

SEQ ID NO: 5020 - DNA, 14 bp, Artificial Sequence
  Description of Artificial Sequence: Synthetic oligonucleotide
gtaaagcaaaggaa

SEQ ID NO: 5021 - DNA, 14 bp, Artificial Sequence
  Description of Artificial Sequence: Synthetic oligonucleotide
agtaaagcaaagga

SEQ ID NO: 5022 - DNA, 14 bp, Artificial Sequence
  Description of Artificial Sequence: Synthetic oligonucleotide
gagtaaagcaaagg

SEQ ID NO: 5023 - DNA, 14 bp, Artificial Sequence
  Description of Artificial Sequence: Synthetic oligonucleotide
agagtaaagcaaag

SEQ ID NO: 5024 - DNA, 14 bp, Artificial Sequence
  Description of Artificial Sequence: Synthetic oligonucleotide
aagagtaaagcaaa

SEQ ID NO: 5025 - DNA, 14 bp, Artificial Sequence
  Description of Artificial Sequence: Synthetic oligonucleotide
gaagagtaaagcaa

SEQ ID NO: 5026 - DNA, 14 bp, Artificial Sequence
  Description of Artificial Sequence: Synthetic oligonucleotide
agaagagtaaagca

SEQ ID NO: 5027 - DNA, 14 bp, Artificial Sequence
  Description of Artificial Sequence: Synthetic oligonucleotide
tagaagagtaaagc

SEQ ID NO: 5028 - DNA, 14 bp, Artificial Sequence
  Description of Artificial Sequence: Synthetic oligonucleotide
gtagaagagtaaag

SEQ ID NO: 5029 - DNA, 14 bp, Artificial Sequence
  Description of Artificial Sequence: Synthetic oligonucleotide
agtagaagagtaaa

SEQ ID NO: 5030 - DNA, 14 bp, Artificial Sequence
  Description of Artificial Sequence: Synthetic oligonucleotide
aagtagaagagtaa

SEQ ID NO: 5031 - DNA, 14 bp, Artificial Sequence
  Description of Artificial Sequence: Synthetic oligonucleotide
aaagtagaagagta

SEQ ID NO: 5032 - DNA, 14 bp, Artificial Sequence
  Description of Artificial Sequence: Synthetic oligonucleotide
taaagtagaagagt

SEQ ID NO: 5033 - DNA, 14 bp, Artificial Sequence
  Description of Artificial Sequence: Synthetic oligonucleotide
ctaaagtagaagag

SEQ ID NO: 5034 - DNA, 14 bp, Artificial Sequence
  Description of Artificial Sequence: Synthetic oligonucleotide
tctaaagtagaaga

SEQ ID NO: 5035 - DNA, 14 bp, Artificial Sequence
  Description of Artificial Sequence: Synthetic oligonucleotide
ttctaaagtagaag

SEQ ID NO: 5036 - DNA, 14 bp, Artificial Sequence
  Description of Artificial Sequence: Synthetic oligonucleotide
attctaaagtagaa

SEQ ID NO: 5037 - DNA, 14 bp, Artificial Sequence
  Description of Artificial Sequence: Synthetic oligonucleotide
tattctaaagtaga

SEQ ID NO: 5038 - DNA, 14 bp, Artificial Sequence
  Description of Artificial Sequence: Synthetic oligonucleotide
atattctaaagtag

SEQ ID NO: 5039 - DNA, 14 bp, Artificial Sequence
  Description of Artificial Sequence: Synthetic oligonucleotide
aatattctaaagta

SEQ ID NO: 5040 - DNA, 14 bp, Artificial Sequence
  Description of Artificial Sequence: Synthetic oligonucleotide
aaatattctaaagt

SEQ ID NO: 5041 - DNA, 14 bp, Artificial Sequence
  Description of Artificial Sequence: Synthetic oligonucleotide
aaaatattctaaag

SEQ ID NO: 5042 - DNA, 14 bp, Artificial Sequence
  Description of Artificial Sequence: Synthetic oligonucleotide
gaaaatattctaaa

SEQ ID NO: 5043 - DNA, 14 bp, Artificial Sequence
  Description of Artificial Sequence: Synthetic oligonucleotide
agaaaatattctaa

SEQ ID NO: 5044 - DNA, 14 bp, Artificial Sequence
  Description of Artificial Sequence: Synthetic oligonucleotide
aagaaaatattcta

SEQ ID NO: 5045 - DNA, 14 bp, Artificial Sequence
  Description of Artificial Sequence: Synthetic oligonucleotide
taagaaaatattct

SEQ ID NO: 5046 - DNA, 14 bp, Artificial Sequence
  Description of Artificial Sequence: Synthetic oligonucleotide
ttaagaaaatattc

SEQ ID NO: 5047 - DNA, 14 bp, Artificial Sequence
  Description of Artificial Sequence: Synthetic oligonucleotide
tttaagaaaatatt

SEQ ID NO: 5048 - DNA, 14 bp, Artificial Sequence
  Description of Artificial Sequence: Synthetic oligonucleotide
ttttaagaaaatat

SEQ ID NO: 5049 - DNA, 14 bp, Artificial Sequence
  Description of Artificial Sequence: Synthetic oligonucleotide
tttttaagaaaata

SEQ ID NO: 5050 - DNA, 14 bp, Artificial Sequence
  Description of Artificial Sequence: Synthetic oligonucleotide
atttttaagaaaat

SEQ ID NO: 5051 - DNA, 14 bp, Artificial Sequence
  Description of Artificial Sequence: Synthetic oligonucleotide
gatttttaagaaaa

SEQ ID NO: 5052 - DNA, 14 bp, Artificial Sequence
  Description of Artificial Sequence: Synthetic oligonucleotide
tgatttttaagaaa

SEQ ID NO: 5053 - DNA, 14 bp, Artificial Sequence
  Description of Artificial Sequence: Synthetic oligonucleotide
gtgatttttaagaa

SEQ ID NO: 5054 - DNA, 14 bp, Artificial Sequence
  Description of Artificial Sequence: Synthetic oligonucleotide
agtgatttttaaga

SEQ ID NO: 5055 - DNA, 14 bp, Artificial Sequence
  Description of Artificial Sequence: Synthetic oligonucleotide
gagtgatttttaag

SEQ ID NO: 5056 - DNA, 14 bp, Artificial Sequence
  Description of Artificial Sequence: Synthetic oligonucleotide
tgagtgatttttaa

SEQ ID NO: 5057 - DNA, 14 bp, Artificial Sequence
  Description of Artificial Sequence: Synthetic oligonucleotide
ttgagtgattttta

SEQ ID NO: 5058 - DNA, 14 bp, Artificial Sequence
  Description of Artificial Sequence: Synthetic oligonucleotide
tttgagtgattttt

SEQ ID NO: 5059 - DNA, 14 bp, Artificial Sequence
  Description of Artificial Sequence: Synthetic oligonucleotide
ctttgagtgatttt

SEQ ID NO: 5060 - DNA, 14 bp, Artificial Sequence
  Description of Artificial Sequence: Synthetic oligonucleotide
cctttgagtgattt

SEQ ID NO: 5061 - DNA, 14 bp, Artificial Sequence
  Description of Artificial Sequence: Synthetic oligonucleotide
tcctttgagtgatt

SEQ ID NO: 5062 - DNA, 14 bp, Artificial Sequence
  Description of Artificial Sequence: Synthetic oligonucleotide
gtcctttgagtgat

SEQ ID NO: 5063 - DNA, 14 bp, Artificial Sequence
  Description of Artificial Sequence: Synthetic oligonucleotide
agtcctttgagtga

SEQ ID NO: 5064 - DNA, 14 bp, Artificial Sequence
  Description of Artificial Sequence: Synthetic oligonucleotide
cagtcctttgagtg

SEQ ID NO: 5065 - DNA, 14 bp, Artificial Sequence
  Description of Artificial Sequence: Synthetic oligonucleotide
acagtcctttgagt

SEQ ID NO: 5066 - DNA, 14 bp, Artificial Sequence
  Description of Artificial Sequence: Synthetic oligonucleotide
cacagtcctttgag

SEQ ID NO: 5067 - DNA, 14 bp, Artificial Sequence
  Description of Artificial Sequence: Synthetic oligonucleotide
tcacagtcctttga

SEQ ID NO: 5068 - DNA, 14 bp, Artificial Sequence
  Description of Artificial Sequence: Synthetic oligonucleotide
ctcacagtcctttg

SEQ ID NO: 5069 - DNA, 14 bp, Artificial Sequence
  Description of Artificial Sequence: Synthetic oligonucleotide
cctcacagtccttt

SEQ ID NO: 5070 - DNA, 14 bp, Artificial Sequence
  Description of Artificial Sequence: Synthetic oligonucleotide
tcctcacagtcctt

SEQ ID NO: 5071 - DNA, 14 bp, Artificial Sequence
  Description of Artificial Sequence: Synthetic oligonucleotide
ttcctcacagtcct

SEQ ID NO: 5072 - DNA, 14 bp, Artificial Sequence
  Description of Artificial Sequence: Synthetic oligonucleotide
tttcctcacagtcc

SEQ ID NO: 5073 - DNA, 14 bp, Artificial Sequence
  Description of Artificial Sequence: Synthetic oligonucleotide
ctttcctcacagtc

SEQ ID NO: 5074 - DNA, 14 bp, Artificial Sequence
  Description of Artificial Sequence: Synthetic oligonucleotide
cctttcctcacagt

SEQ ID NO: 5075 - DNA, 14 bp, Artificial Sequence
  Description of Artificial Sequence: Synthetic oligonucleotide
gcctttcctcacag

SEQ ID NO: 5076 - DNA, 14 bp, Artificial Sequence
  Description of Artificial Sequence: Synthetic oligonucleotide
agcctttcctcaca

SEQ ID NO: 5077 - DNA, 14 bp, Artificial Sequence
  Description of Artificial Sequence: Synthetic oligonucleotide
cagcctttcctcac

SEQ ID NO: 5078 - DNA, 14 bp, Artificial Sequence
  Description of Artificial Sequence: Synthetic oligonucleotide
acagcctttcctca

SEQ ID NO: 5079 - DNA, 14 bp, Artificial Sequence
  Description of Artificial Sequence: Synthetic oligonucleotide
cacagcctttcctc

SEQ ID NO: 5080 - DNA, 14 bp, Artificial Sequence
  Description of Artificial Sequence: Synthetic oligonucleotide
ccacagcctttcct

SEQ ID NO: 5081 - DNA, 14 bp, Artificial Sequence
  Description of Artificial Sequence: Synthetic oligonucleotide
accacagcctttcc

SEQ ID NO: 5082 - DNA, 14 bp, Artificial Sequence
  Description of Artificial Sequence: Synthetic oligonucleotide
taccacagcctttc

SEQ ID NO: 5083 - DNA, 14 bp, Artificial Sequence
  Description of Artificial Sequence: Synthetic oligonucleotide
gtaccacagccttt

SEQ ID NO: 5084 - DNA, 14 bp, Artificial Sequence
  Description of Artificial Sequence: Synthetic oligonucleotide
ggtaccacagcctt

SEQ ID NO: 5085 - DNA, 14 bp, Artificial Sequence
  Description of Artificial Sequence: Synthetic oligonucleotide
aggtaccacagcct

SEQ ID NO: 5086 - DNA, 14 bp, Artificial Sequence
  Description of Artificial Sequence: Synthetic oligonucleotide
caggtaccacagcc

SEQ ID NO: 5087 - DNA, 14 bp, Artificial Sequence
  Description of Artificial Sequence: Synthetic oligonucleotide
tcaggtaccacagc

SEQ ID NO: 5088 - DNA, 14 bp, Artificial Sequence
  Description of Artificial Sequence: Synthetic oligonucleotide
gtcaggtaccacag

SEQ ID NO: 5089 - DNA, 14 bp, Artificial Sequence
  Description of Artificial Sequence: Synthetic oligonucleotide
ggtcaggtaccaca

SEQ ID NO: 5090 - DNA, 14 bp, Artificial Sequence
  Description of Artificial Sequence: Synthetic oligonucleotide
aggtcaggtaccac

SEQ ID NO: 5091 - DNA, 14 bp, Artificial Sequence
  Description of Artificial Sequence: Synthetic oligonucleotide
aaggtcaggtacca

SEQ ID NO: 5092 - DNA, 14 bp, Artificial Sequence
  Description of Artificial Sequence: Synthetic oligonucleotide
caaggtcaggtacc

SEQ ID NO: 5093 - DNA, 14 bp, Artificial Sequence
  Description of Artificial Sequence: Synthetic oligonucleotide
acaaggtcaggtac

SEQ ID NO: 5094 - DNA, 14 bp, Artificial Sequence
  Description of Artificial Sequence: Synthetic oligonucleotide
aacaaggtcaggta

SEQ ID NO: 5095 - DNA, 14 bp, Artificial Sequence
  Description of Artificial Sequence: Synthetic oligonucleotide
caacaaggtcaggt

SEQ ID NO: 5096 - DNA, 14 bp, Artificial Sequence
  Description of Artificial Sequence: Synthetic oligonucleotide
tcaacaaggtcagg

SEQ ID NO: 5097 - DNA, 14 bp, Artificial Sequence
  Description of Artificial Sequence: Synthetic oligonucleotide
ttcaacaaggtcag

SEQ ID NO: 5098 - DNA, 14 bp, Artificial Sequence
  Description of Artificial Sequence: Synthetic oligonucleotide
tttcaacaaggtca

SEQ ID NO: 5099 - DNA, 14 bp, Artificial Sequence
  Description of Artificial Sequence: Synthetic oligonucleotide
atttcaacaaggtc

SEQ ID NO: 5100 - DNA, 14 bp, Artificial Sequence
  Description of Artificial Sequence: Synthetic oligonucleotide
gatttcaacaaggt

SEQ ID NO: 5101 - DNA, 14 bp, Artificial Sequence
  Description of Artificial Sequence: Synthetic oligonucleotide
tgatttcaacaagg

SEQ ID NO: 5102 - DNA, 14 bp, Artificial Sequence
  Description of Artificial Sequence: Synthetic oligonucleotide
ttgatttcaacaag

SEQ ID NO: 5103 - DNA, 14 bp, Artificial Sequence
  Description of Artificial Sequence: Synthetic oligonucleotide
cttgatttcaacaa

SEQ ID NO: 5104 - DNA, 14 bp, Artificial Sequence
  Description of Artificial Sequence: Synthetic oligonucleotide
ccttgatttcaaca

SEQ ID NO: 5105 - DNA, 14 bp, Artificial Sequence
  Description of Artificial Sequence: Synthetic oligonucleotide
gccttgatttcaac

SEQ ID NO: 5106 - DNA, 14 bp, Artificial Sequence
  Description of Artificial Sequence: Synthetic oligonucleotide
ggccttgatttcaa

SEQ ID NO: 5107 - DNA, 14 bp, Artificial Sequence
  Description of Artificial Sequence: Synthetic oligonucleotide
gggccttgatttca

SEQ ID NO: 5108 - DNA, 14 bp, Artificial Sequence
  Description of Artificial Sequence: Synthetic oligonucleotide
cgggccttgatttc

SEQ ID NO: 5109 - DNA, 14 bp, Artificial Sequence
  Description of Artificial Sequence: Synthetic oligonucleotide
ccgggccttgattt

SEQ ID NO: 5110 - DNA, 14 bp, Artificial Sequence
  Description of Artificial Sequence: Synthetic oligonucleotide
gccgggccttgatt

SEQ ID NO: 5111 - DNA, 14 bp, Artificial Sequence
  Description of Artificial Sequence: Synthetic oligonucleotide
tgccgggccttgat

SEQ ID NO: 5112 - DNA, 14 bp, Artificial Sequence
  Description of Artificial Sequence: Synthetic oligonucleotide
gtgccgggccttga

SEQ ID NO: 5113 - DNA, 14 bp, Artificial Sequence
  Description of Artificial Sequence: Synthetic oligonucleotide
agtgccgggccttg

SEQ ID NO: 5114 - DNA, 14 bp, Artificial Sequence
  Description of Artificial Sequence: Synthetic oligonucleotide
cagtgccgggcctt

SEQ ID NO: 5115 - DNA, 14 bp, Artificial Sequence
  Description of Artificial Sequence: Synthetic oligonucleotide
acagtgccgggcct

SEQ ID NO: 5116 - DNA, 14 bp, Artificial Sequence
  Description of Artificial Sequence: Synthetic oligonucleotide
tacagtgccgggcc

SEQ ID NO: 5117 - DNA, 14 bp, Artificial Sequence
  Description of Artificial Sequence: Synthetic oligonucleotide
gtacagtgccgggc

SEQ ID NO: 5118 - DNA, 14 bp, Artificial Sequence
  Description of Artificial Sequence: Synthetic oligonucleotide
agtacagtgccggg

SEQ ID NO: 5119 - DNA, 14 bp, Artificial Sequence
  Description of Artificial Sequence: Synthetic oligonucleotide
tagtacagtgccgg

SEQ ID NO: 5120 - DNA, 14 bp, Artificial Sequence
  Description of Artificial Sequence: Synthetic oligonucleotide
gtagtacagtgccg

SEQ ID NO: 5121 - DNA, 14 bp, Artificial Sequence
  Description of Artificial Sequence: Synthetic oligonucleotide
tgtagtacagtgcc

SEQ ID NO: 5122 - DNA, 14 bp, Artificial Sequence
  Description of Artificial Sequence: Synthetic oligonucleotide
ctgtagtacagtgc

SEQ ID NO: 5123 - DNA, 14 bp, Artificial Sequence
  Description of Artificial Sequence: Synthetic oligonucleotide
cctgtagtacagtg

SEQ ID NO: 5124 - DNA, 14 bp, Artificial Sequence
  Description of Artificial Sequence: Synthetic oligonucleotide
gcctgtagtacagt

SEQ ID NO: 5125 - DNA, 14 bp, Artificial Sequence
  Description of Artificial Sequence: Synthetic oligonucleotide
ggcctgtagtacag

SEQ ID NO: 5126 - DNA, 14 bp, Artificial Sequence
  Description of Artificial Sequence: Synthetic oligonucleotide
aggcctgtagtaca

SEQ ID NO: 5127 - DNA, 14 bp, Artificial Sequence
  Description of Artificial Sequence: Synthetic oligonucleotide
caggcctgtagtac

SEQ ID NO: 5128 - DNA, 14 bp, Artificial Sequence
  Description of Artificial Sequence: Synthetic oligonucleotide
acaggcctgtagta

SEQ ID NO: 5129 - DNA, 14 bp, Artificial Sequence
  Description of Artificial Sequence: Synthetic oligonucleotide
aacaggcctgtagt

SEQ ID NO: 5130 - DNA, 14 bp, Artificial Sequence
  Description of Artificial Sequence: Synthetic oligonucleotide
aaacaggcctgtag

SEQ ID NO: 5131 - DNA, 14 bp, Artificial Sequence
  Description of Artificial Sequence: Synthetic oligonucleotide
taaacaggcctgta

SEQ ID NO: 5132 - DNA, 14 bp, Artificial Sequence
  Description of Artificial Sequence: Synthetic oligonucleotide
gtaaacaggcctgt

SEQ ID NO: 5133 - DNA, 14 bp, Artificial Sequence
  Description of Artificial Sequence: Synthetic oligonucleotide
tgtaaacaggcctg

SEQ ID NO: 5134 - DNA, 14 bp, Artificial Sequence
  Description of Artificial Sequence: Synthetic oligonucleotide
ctgtaaacaggcct

SEQ ID NO: 5135 - DNA, 14 bp, Artificial Sequence
  Description of Artificial Sequence: Synthetic oligonucleotide
tctgtaaacaggcc

SEQ ID NO: 5136 - DNA, 14 bp, Artificial Sequence
  Description of Artificial Sequence: Synthetic oligonucleotide
atctgtaaacaggc

SEQ ID NO: 5137 - DNA, 14 bp, Artificial Sequence
  Description of Artificial Sequence: Synthetic oligonucleotide
aatctgtaaacagg

SEQ ID NO: 5138 - DNA, 14 bp, Artificial Sequence
  Description of Artificial Sequence: Synthetic oligonucleotide
taatctgtaaacag

SEQ ID NO: 5139 - DNA, 14 bp, Artificial Sequence
  Description of Artificial Sequence: Synthetic oligonucleotide
ataatctgtaaaca

SEQ ID NO: 5140 - DNA, 14 bp, Artificial Sequence
  Description of Artificial Sequence: Synthetic oligonucleotide
aataatctgtaaac

SEQ ID NO: 5141 - DNA, 14 bp, Artificial Sequence
  Description of Artificial Sequence: Synthetic oligonucleotide
taataatctgtaaa

SEQ ID NO: 5142 - DNA, 14 bp, Artificial Sequence
  Description of Artificial Sequence: Synthetic oligonucleotide
gtaataatctgtaa

SEQ ID NO: 5143 - DNA, 14 bp, Artificial Sequence
  Description of Artificial Sequence: Synthetic oligonucleotide
cgtaataatctgta

SEQ ID NO: 5144 - DNA, 14 bp, Artificial Sequence
  Description of Artificial Sequence: Synthetic oligonucleotide
ccgtaataatctgt

SEQ ID NO: 5145 - DNA, 14 bp, Artificial Sequence
  Description of Artificial Sequence: Synthetic oligonucleotide
accgtaataatctg

SEQ ID NO: 5146 - DNA, 14 bp, Artificial Sequence
  Description of Artificial Sequence: Synthetic oligonucleotide
caccgtaataatct

SEQ ID NO: 5147 - DNA, 14 bp, Artificial Sequence
  Description of Artificial Sequence: Synthetic oligonucleotide
tcaccgtaataatc

SEQ ID NO: 5148 - DNA, 14 bp, Artificial Sequence
  Description of Artificial Sequence: Synthetic oligonucleotide
ttcaccgtaataat

SEQ ID NO: 5149 - DNA, 14 bp, Artificial Sequence
  Description of Artificial Sequence: Synthetic oligonucleotide
gttcaccgtaataa

SEQ ID NO: 5150 - DNA, 14 bp, Artificial Sequence
  Description of Artificial Sequence: Synthetic oligonucleotide
agttcaccgtaata

SEQ ID NO: 5151 - DNA, 14 bp, Artificial Sequence
  Description of Artificial Sequence: Synthetic oligonucleotide
cagttcaccgtaat

SEQ ID NO: 5152 - DNA, 14 bp, Artificial Sequence
  Description of Artificial Sequence: Synthetic oligonucleotide
tcagttcaccgtaa

SEQ ID NO: 5153 - DNA, 14 bp, Artificial Sequence
  Description of Artificial Sequence: Synthetic oligonucleotide
ttcagttcaccgta

SEQ ID NO: 5154 - DNA, 14 bp, Artificial Sequence
  Description of Artificial Sequence: Synthetic oligonucleotide
attcagttcaccgt

SEQ ID NO: 5155 - DNA, 14 bp, Artificial Sequence
  Description of Artificial Sequence: Synthetic oligonucleotide
cattcagttcaccg

SEQ ID NO: 5156 - DNA, 14 bp, Artificial Sequence
  Description of Artificial Sequence: Synthetic oligonucleotide
ccattcagttcacc

SEQ ID NO: 5157 - DNA, 14 bp, Artificial Sequence
  Description of Artificial Sequence: Synthetic oligonucleotide
cccattcagttcac

SEQ ID NO: 5158 - DNA, 14 bp, Artificial Sequence
  Description of Artificial Sequence: Synthetic oligonucleotide
acccattcagttca

SEQ ID NO: 5159 - DNA, 14 bp, Artificial Sequence
  Description of Artificial Sequence: Synthetic oligonucleotide
tacccattcagttc

SEQ ID NO: 5160 - DNA, 14 bp, Artificial Sequence
  Description of Artificial Sequence: Synthetic oligonucleotide
gtacccattcagtt

SEQ ID NO: 5161 - DNA, 14 bp, Artificial Sequence
  Description of Artificial Sequence: Synthetic oligonucleotide
ggtacccattcagt

SEQ ID NO: 5162 - DNA, 14 bp, Artificial Sequence
  Description of Artificial Sequence: Synthetic oligonucleotide
cggtacccattcag

SEQ ID NO: 5163 - DNA, 14 bp, Artificial Sequence
  Description of Artificial Sequence: Synthetic oligonucleotide
tcggtacccattca

SEQ ID NO: 5164 - DNA, 14 bp, Artificial Sequence
  Description of Artificial Sequence: Synthetic oligonucleotide
ctcggtacccattc

SEQ ID NO: 5165 - DNA, 14 bp, Artificial Sequence
  Description of Artificial Sequence: Synthetic oligonucleotide
cctcggtacccatt

SEQ ID NO: 5166 - DNA, 14 bp, Artificial Sequence
  Description of Artificial Sequence: Synthetic oligonucleotide
gcctcggtacccat

SEQ ID NO: 5167 - DNA, 14 bp, Artificial Sequence
  Description of Artificial Sequence: Synthetic oligonucleotide
agcctcggtaccca

SEQ ID NO: 5168 - DNA, 14 bp, Artificial Sequence
  Description of Artificial Sequence: Synthetic oligonucleotide
aagcctcggtaccc

SEQ ID NO: 5169 - DNA, 14 bp, Artificial Sequence
  Description of Artificial Sequence: Synthetic oligonucleotide
gaagcctcggtacc

SEQ ID NO: 5170 - DNA, 14 bp, Artificial Sequence
  Description of Artificial Sequence: Synthetic oligonucleotide
tgaagcctcggtac

SEQ ID NO: 5171 - DNA, 14 bp, Artificial Sequence
  Description of Artificial Sequence: Synthetic oligonucleotide
gtgaagcctcggta

SEQ ID NO: 5172 - DNA, 14 bp, Artificial Sequence
  Description of Artificial Sequence: Synthetic oligonucleotide
ggtgaagcctcggt

SEQ ID NO: 5173 - DNA, 14 bp, Artificial Sequence
  Description of Artificial Sequence: Synthetic oligonucleotide
tggtgaagcctcgg

SEQ ID NO: 5174 - DNA, 14 bp, Artificial Sequence
  Description of Artificial Sequence: Synthetic oligonucleotide
ttggtgaagcctcg

SEQ ID NO: 5175 - DNA, 14 bp, Artificial Sequence
  Description of Artificial Sequence: Synthetic oligonucleotide
tttggtgaagcctc

SEQ ID NO: 5176 - DNA, 14 bp, Artificial Sequence
  Description of Artificial Sequence: Synthetic oligonucleotide
ctttggtgaagcct

SEQ ID NO: 5177 - DNA, 14 bp, Artificial Sequence
  Description of Artificial Sequence: Synthetic oligonucleotide
tctttggtgaagcc

SEQ ID NO: 5178 - DNA, 14 bp, Artificial Sequence
  Description of Artificial Sequence: Synthetic oligonucleotide
ctctttggtgaagc

SEQ ID NO: 5179 - DNA, 14 bp, Artificial Sequence
  Description of Artificial Sequence: Synthetic oligonucleotide
cctctttggtgaag

SEQ ID NO: 5180 - DNA, 14 bp, Artificial Sequence
  Description of Artificial Sequence: Synthetic oligonucleotide
acctctttggtgaa

SEQ ID NO: 5181 - DNA, 14 bp, Artificial Sequence
  Description of Artificial Sequence: Synthetic oligonucleotide
tacctctttggtga

SEQ ID NO: 5182 - DNA, 14 bp, Artificial Sequence
  Description of Artificial Sequence: Synthetic oligonucleotide
gtacctctttggtg

SEQ ID NO: 5183 - DNA, 14 bp, Artificial Sequence
  Description of Artificial Sequence: Synthetic oligonucleotide
agtacctctttggt

SEQ ID NO: 5184 - DNA, 14 bp, Artificial Sequence
  Description of Artificial Sequence: Synthetic oligonucleotide
aagtacctctttgg

SEQ ID NO: 5185 - DNA, 14 bp, Artificial Sequence
  Description of Artificial Sequence: Synthetic oligonucleotide
aaagtacctctttg

SEQ ID NO: 5186 - DNA, 14 bp, Artificial Sequence
  Description of Artificial Sequence: Synthetic oligonucleotide
aaaagtacctcttt

SEQ ID NO: 5187 - DNA, 14 bp, Artificial Sequence
  Description of Artificial Sequence: Synthetic oligonucleotide
aaaaagtacctctt

SEQ ID NO: 5188 - DNA, 14 bp, Artificial Sequence
  Description of Artificial Sequence: Synthetic oligonucleotide
aaaaaagtacctct

SEQ ID NO: 5189 - DNA, 14 bp, Artificial Sequence
  Description of Artificial Sequence: Synthetic oligonucleotide
caaaaaagtacctc

SEQ ID NO: 5190 - DNA, 14 bp, Artificial Sequence
  Description of Artificial Sequence: Synthetic oligonucleotide
acaaaaaagtacct

SEQ ID NO: 5191 - DNA, 14 bp, Artificial Sequence
  Description of Artificial Sequence: Synthetic oligonucleotide
aacaaaaaagtacc

SEQ ID NO: 5192 - DNA, 14 bp, Artificial Sequence
  Description of Artificial Sequence: Synthetic oligonucleotide
caacaaaaaagtac

SEQ ID NO: 5193 - DNA, 14 bp, Artificial Sequence
  Description of Artificial Sequence: Synthetic oligonucleotide
acaacaaaaaagta

SEQ ID NO: 5194 - DNA, 14 bp, Artificial Sequence
  Description of Artificial Sequence: Synthetic oligonucleotide
aacaacaaaaaagt

SEQ ID NO: 5195 - DNA, 14 bp, Artificial Sequence
  Description of Artificial Sequence: Synthetic oligonucleotide
caacaacaaaaaag

SEQ ID NO: 5196 - DNA, 14 bp, Artificial Sequence
  Description of Artificial Sequence: Synthetic oligonucleotide
acaacaacaaaaaa

SEQ ID NO: 5197 - DNA, 14 bp, Artificial Sequence
  Description of Artificial Sequence: Synthetic oligonucleotide
aacaacaacaaaaa

SEQ ID NO: 5198 - DNA, 14 bp, Artificial Sequence
  Description of Artificial Sequence: Synthetic oligonucleotide
caacaacaacaaaa

SEQ ID NO: 5199 - DNA, 14 bp, Artificial Sequence
  Description of Artificial Sequence: Synthetic oligonucleotide
acaacaacaacaaa

SEQ ID NO: 5200 - DNA, 14 bp, Artificial Sequence
  Description of Artificial Sequence: Synthetic oligonucleotide
aacaacaacaacaa

SEQ ID NO: 5201 - DNA, 14 bp, Artificial Sequence
  Description of Artificial Sequence: Synthetic oligonucleotide
caacaacaacaaca

SEQ ID NO: 5202 - DNA, 14 bp, Artificial Sequence
  Description of Artificial Sequence: Synthetic oligonucleotide
acaacaacaacaac

SEQ ID NO: 5203 - skipped

SEQ ID NO: 5204 - DNA, 14 bp, Artificial Sequence
  Description of Artificial Sequence: Synthetic oligonucleotide
aaacaacaacaaca

SEQ ID NO: 5205 - DNA, 14 bp, Artificial Sequence
  Description of Artificial Sequence: Synthetic oligonucleotide
aaaacaacaacaac

SEQ ID NO: 5206 - DNA, 14 bp, Artificial Sequence
  Description of Artificial Sequence: Synthetic oligonucleotide
taaaacaacaacaa

SEQ ID NO: 5207 - DNA, 14 bp, Artificial Sequence
  Description of Artificial Sequence: Synthetic oligonucleotide
ctaaaacaacaaca

SEQ ID NO: 5208 - DNA, 14 bp, Artificial Sequence
  Description of Artificial Sequence: Synthetic oligonucleotide
cctaaaacaacaac

SEQ ID NO: 5209 - DNA, 14 bp, Artificial Sequence
  Description of Artificial Sequence: Synthetic oligonucleotide
tcctaaaacaacaa

SEQ ID NO: 5210 - DNA, 14 bp, Artificial Sequence
  Description of Artificial Sequence: Synthetic oligonucleotide
ttcctaaaacaaca

SEQ ID NO: 5211 - DNA, 14 bp, Artificial Sequence
  Description of Artificial Sequence: Synthetic oligonucleotide
attcctaaaacaac

SEQ ID NO: 5212 - DNA, 14 bp, Artificial Sequence
  Description of Artificial Sequence: Synthetic oligonucleotide
tattcctaaaacaa

SEQ ID NO: 5213 - DNA, 14 bp, Artificial Sequence
  Description of Artificial Sequence: Synthetic oligonucleotide
ttattcctaaaaca

SEQ ID NO: 5214 - DNA, 14 bp, Artificial Sequence
  Description of Artificial Sequence: Synthetic oligonucleotide
attattcctaaaac

SEQ ID NO: 5215 - DNA, 14 bp, Artificial Sequence
  Description of Artificial Sequence: Synthetic oligonucleotide
aattattcctaaaa

SEQ ID NO: 5216 - DNA, 14 bp, Artificial Sequence
  Description of Artificial Sequence: Synthetic oligonucleotide
caattattcctaaa

SEQ ID NO: 5217 - DNA, 14 bp, Artificial Sequence
  Description of Artificial Sequence: Synthetic oligonucleotide
acaattattcctaa

SEQ ID NO: 5218 - DNA, 14 bp, Artificial Sequence
  Description of Artificial Sequence: Synthetic oligonucleotide
tacaattattccta

SEQ ID NO: 5219 - DNA, 14 bp, Artificial Sequence
  Description of Artificial Sequence: Synthetic oligonucleotide
gtacaattattcct

SEQ ID NO: 5220 - DNA, 14 bp, Artificial Sequence
  Description of Artificial Sequence: Synthetic oligonucleotide
ggtacaattattcc

SEQ ID NO: 5221 - DNA, 14 bp, Artificial Sequence
  Description of Artificial Sequence: Synthetic oligonucleotide
tggtacaattattc

SEQ ID NO: 5222 - DNA, 14 bp, Artificial Sequence
  Description of Artificial Sequence: Synthetic oligonucleotide
ttggtacaattatt

SEQ ID NO: 5223 - DNA, 14 bp, Artificial Sequence
  Description of Artificial Sequence: Synthetic oligonucleotide
attggtacaattat

SEQ ID NO: 5224 - DNA, 14 bp, Artificial Sequence
  Description of Artificial Sequence: Synthetic oligonucleotide
aattggtacaatta

SEQ ID NO: 5225 - DNA, 14 bp, Artificial Sequence
  Description of Artificial Sequence: Synthetic oligonucleotide
aaattggtacaatt

SEQ ID NO: 5226 - DNA, 14 bp, Artificial Sequence
  Description of Artificial Sequence: Synthetic oligonucleotide
aaaattggtacaat

SEQ ID NO: 5227 - DNA, 14 bp, Artificial Sequence
  Description of Artificial Sequence: Synthetic oligonucleotide
taaaattggtacaa

SEQ ID NO: 5228 - DNA, 14 bp, Artificial Sequence
  Description of Artificial Sequence: Synthetic oligonucleotide
ttaaaattggtaca

SEQ ID NO: 5229 - DNA, 14 bp, Artificial Sequence
  Description of Artificial Sequence: Synthetic oligonucleotide
cttaaaattggtac

SEQ ID NO: 5230 - DNA, 14 bp, Artificial Sequence
  Description of Artificial Sequence: Synthetic oligonucleotide
tcttaaaattggta

SEQ ID NO: 5231 - DNA, 14 bp, Artificial Sequence
  Description of Artificial Sequence: Synthetic oligonucleotide
ctcttaaaattggt

SEQ ID NO: 5232 - DNA, 14 bp, Artificial Sequence
  Description of Artificial Sequence: Synthetic oligonucleotide
gctcttaaaattgg

SEQ ID NO: 5233 - DNA, 14 bp, Artificial Sequence
  Description of Artificial Sequence: Synthetic oligonucleotide
tgctcttaaaattg

SEQ ID NO: 5234 - DNA, 14 bp, Artificial Sequence
  Description of Artificial Sequence: Synthetic oligonucleotide
atgctcttaaaatt

SEQ ID NO: 5235 - DNA, 14 bp, Artificial Sequence
  Description of Artificial Sequence: Synthetic oligonucleotide
aatgctcttaaaat

SEQ ID NO: 5236 - DNA, 14 bp, Artificial Sequence
  Description of Artificial Sequence: Synthetic oligonucleotide
gaatgctcttaaaa

SEQ ID NO: 5237 - DNA, 14 bp, Artificial Sequence
  Description of Artificial Sequence: Synthetic oligonucleotide
ggaatgctcttaaa

SEQ ID NO: 5238 - DNA, 14 bp, Artificial Sequence
  Description of Artificial Sequence: Synthetic oligonucleotide
gggaatgctcttaa

SEQ ID NO: 5239 - DNA, 14 bp, Artificial Sequence
  Description of Artificial Sequence: Synthetic oligonucleotide
ggggaatgctctta

SEQ ID NO: 5240 - DNA, 14 bp, Artificial Sequence
  Description of Artificial Sequence: Synthetic oligonucleotide
gggggaatgctctt

SEQ ID NO: 5241 - DNA, 14 bp, Artificial Sequence
  Description of Artificial Sequence: Synthetic oligonucleotide
ggggggaatgctct

SEQ ID NO: 5242 - DNA, 14 bp, Artificial Sequence
  Description of Artificial Sequence: Synthetic oligonucleotide
tggggggaatgctc

SEQ ID NO: 5243 - DNA, 14 bp, Artificial Sequence
  Description of Artificial Sequence: Synthetic oligonucleotide
gtggggggaatgct

SEQ ID NO: 5244 - DNA, 14 bp, Artificial Sequence
  Description of Artificial Sequence: Synthetic oligonucleotide
ggtggggggaatgc

SEQ ID NO: 5245 - DNA, 14 bp, Artificial Sequence
  Description of Artificial Sequence: Synthetic oligonucleotide
aggtggggggaatg

SEQ ID NO: 5246 - DNA, 14 bp, Artificial Sequence
  Description of Artificial Sequence: Synthetic oligonucleotide
caggtggggggaat

SEQ ID NO: 5247 - DNA, 14 bp, Artificial Sequence
  Description of Artificial Sequence: Synthetic oligonucleotide
acaggtggggggaa

SEQ ID NO: 5248 - DNA, 14 bp, Artificial Sequence
  Description of Artificial Sequence: Synthetic oligonucleotide
gacaggtgggggga

SEQ ID NO: 5249 - DNA, 14 bp, Artificial Sequence
  Description of Artificial Sequence: Synthetic oligonucleotide
ggacaggtgggggg

SEQ ID NO: 5250 - DNA, 14 bp, Artificial Sequence
  Description of Artificial Sequence: Synthetic oligonucleotide
gggacaggtggggg

SEQ ID NO: 5251 - DNA, 14 bp, Artificial Sequence
  Description of Artificial Sequence: Synthetic oligonucleotide
ggggacaggtgggg

SEQ ID NO: 5252 - DNA, 14 bp, Artificial Sequence
  Description of Artificial Sequence: Synthetic oligonucleotide
tggggacaggtggg

SEQ ID NO: 5253 - DNA, 14 bp, Artificial Sequence
  Description of Artificial Sequence: Synthetic oligonucleotide
gtggggacaggtgg

SEQ ID NO: 5254 - DNA, 14 bp, Artificial Sequence
  Description of Artificial Sequence: Synthetic oligonucleotide
tgtggggacaggtg

SEQ ID NO: 5255 - DNA, 14 bp, Artificial Sequence
  Description of Artificial Sequence: Synthetic oligonucleotide
gtgtggggacaggt

SEQ ID NO: 5256 - DNA, 14 bp, Artificial Sequence
  Description of Artificial Sequence: Synthetic oligonucleotide
tgtgtggggacagg

SEQ ID NO: 5257 - DNA, 14 bp, Artificial Sequence
  Description of Artificial Sequence: Synthetic oligonucleotide
gtgtgtggggacag

SEQ ID NO: 5258 - DNA, 14 bp, Artificial Sequence
  Description of Artificial Sequence: Synthetic oligonucleotide
ggtgtgtggggaca

SEQ ID NO: 5259 - DNA, 14 bp, Artificial Sequence
  Description of Artificial Sequence: Synthetic oligonucleotide
gggtgtgtggggac

SEQ ID NO: 5260 - DNA, 14 bp, Artificial Sequence
  Description of Artificial Sequence: Synthetic oligonucleotide
tgggtgtgtgggga

SEQ ID NO: 5261 - DNA, 14 bp, Artificial Sequence
  Description of Artificial Sequence: Synthetic oligonucleotide
ttgggtgtgtgggg

SEQ ID NO: 5262 - DNA, 14 bp, Artificial Sequence
  Description of Artificial Sequence: Synthetic oligonucleotide
tttgggtgtgtggg

SEQ ID NO: 5263 - DNA, 14 bp, Artificial Sequence
  Description of Artificial Sequence: Synthetic oligonucleotide
gtttgggtgtgtgg

SEQ ID NO: 5264 - DNA, 14 bp, Artificial Sequence
  Description of Artificial Sequence: Synthetic oligonucleotide
tgtttgggtgtgtg

SEQ ID NO: 5265 - DNA, 14 bp, Artificial Sequence
  Description of Artificial Sequence: Synthetic oligonucleotide
ttgtttgggtgtgt

SEQ ID NO: 5266 - DNA, 14 bp, Artificial Sequence
  Description of Artificial Sequence: Synthetic oligonucleotide
tttgtttgggtgtg

SEQ ID NO: 5267 - DNA, 14 bp, Artificial Sequence
  Description of Artificial Sequence: Synthetic oligonucleotide
ttttgtttgggtgt

SEQ ID NO: 5268 - DNA, 14 bp, Artificial Sequence
  Description of Artificial Sequence: Synthetic oligonucleotide
attttgtttgggtg

SEQ ID NO: 5269 - DNA, 14 bp, Artificial Sequence
  Description of Artificial Sequence: Synthetic oligonucleotide
cattttgtttgggt

SEQ ID NO: 5270 - DNA, 14 bp, Artificial Sequence
  Description of Artificial Sequence: Synthetic oligonucleotide
acattttgtttggg

SEQ ID NO: 5271 - DNA, 14 bp, Artificial Sequence
  Description of Artificial Sequence: Synthetic oligonucleotide
cacattttgtttgg

SEQ ID NO: 5272 - DNA, 14 bp, Artificial Sequence
  Description of Artificial Sequence: Synthetic oligonucleotide
ccacattttgtttg

SEQ ID NO: 5273 - DNA, 14 bp, Artificial Sequence
  Description of Artificial Sequence: Synthetic oligonucleotide
accacattttgttt

SEQ ID NO: 5274 - DNA, 14 bp, Artificial Sequence
  Description of Artificial Sequence: Synthetic oligonucleotide
caccacattttgtt

SEQ ID NO: 5275 - DNA, 14 bp, Artificial Sequence
  Description of Artificial Sequence: Synthetic oligonucleotide
ccaccacattttgt

SEQ ID NO: 5276 - DNA, 14 bp, Artificial Sequence
  Description of Artificial Sequence: Synthetic oligonucleotide
accaccacattttg

SEQ ID NO: 5277 - DNA, 14 bp, Artificial Sequence
  Description of Artificial Sequence: Synthetic oligonucleotide
caccaccacatttt

SEQ ID NO: 5278 - DNA, 14 bp, Artificial Sequence
  Description of Artificial Sequence: Synthetic oligonucleotide
acaccaccacattt

SEQ ID NO: 5279 - DNA, 14 bp, Artificial Sequence
  Description of Artificial Sequence: Synthetic oligonucleotide
aacaccaccacatt

SEQ ID NO: 5280 - DNA, 14 bp, Artificial Sequence
  Description of Artificial Sequence: Synthetic oligonucleotide
caacaccaccacat

SEQ ID NO: 5281 - DNA, 14 bp, Artificial Sequence
  Description of Artificial Sequence: Synthetic oligonucleotide
gcaacaccaccaca

SEQ ID NO: 5282 - DNA, 14 bp, Artificial Sequence
  Description of Artificial Sequence: Synthetic oligonucleotide
ggcaacaccaccac

SEQ ID NO: 5283 - DNA, 14 bp, Artificial Sequence
  Description of Artificial Sequence: Synthetic oligonucleotide
aggcaacaccacca

SEQ ID NO: 5284 - DNA, 14 bp, Artificial Sequence
  Description of Artificial Sequence: Synthetic oligonucleotide
aaggcaacaccacc

SEQ ID NO: 5285 - DNA, 14 bp, Artificial Sequence
  Description of Artificial Sequence: Synthetic oligonucleotide
gaaggcaacaccac

SEQ ID NO: 5286 - DNA, 14 bp, Artificial Sequence
  Description of Artificial Sequence: Synthetic oligonucleotide
tgaaggcaacacca

SEQ ID NO: 5287 - DNA, 14 bp, Artificial Sequence
  Description of Artificial Sequence: Synthetic oligonucleotide
ttgaaggcaacacc

SEQ ID NO: 5288 - DNA, 14 bp, Artificial Sequence
  Description of Artificial Sequence: Synthetic oligonucleotide
tttgaaggcaacac

SEQ ID NO: 5289 - DNA, 14 bp, Artificial Sequence
  Description of Artificial Sequence: Synthetic oligonucleotide
ttttgaaggcaaca

SEQ ID NO: 5290 - DNA, 14 bp, Artificial Sequence
  Description of Artificial Sequence: Synthetic oligonucleotide
tttttgaaggcaac

SEQ ID NO: 5291 - DNA, 14 bp, Artificial Sequence
  Description of Artificial Sequence: Synthetic oligonucleotide
ttttttgaaggcaa

SEQ ID NO: 5292 - DNA, 14 bp, Artificial Sequence
  Description of Artificial Sequence: Synthetic oligonucleotide
cttttttgaaggca

SEQ ID NO: 5293 - DNA, 14 bp, Artificial Sequence
  Description of Artificial Sequence: Synthetic oligonucleotide
tcttttttgaaggc

SEQ ID NO: 5294 - DNA, 14 bp, Artificial Sequence
  Description of Artificial Sequence: Synthetic oligonucleotide
ctcttttttgaagg

SEQ ID NO: 5295 - DNA, 14 bp, Artificial Sequence
  Description of Artificial Sequence: Synthetic oligonucleotide
tctcttttttgaag

SEQ ID NO: 5296 - DNA, 14 bp, Artificial Sequence
  Description of Artificial Sequence: Synthetic oligonucleotide
ttctcttttttgaa

SEQ ID NO: 5297 - DNA, 14 bp, Artificial Sequence
  Description of Artificial Sequence: Synthetic oligonucleotide
cttctcttttttga

SEQ ID NO: 5298 - DNA, 14 bp, Artificial Sequence
  Description of Artificial Sequence: Synthetic oligonucleotide
acttctcttttttg

SEQ ID NO: 5299 - DNA, 14 bp, Artificial Sequence
  Description of Artificial Sequence: Synthetic oligonucleotide
aacttctctttttt

SEQ ID NO: 5300 - DNA, 14 bp, Artificial Sequence
  Description of Artificial Sequence: Synthetic oligonucleotide
aaacttctcttttt

SEQ ID NO: 5301 - DNA, 14 bp, Artificial Sequence
  Description of Artificial Sequence: Synthetic oligonucleotide
aaaacttctctttt

SEQ ID NO: 5302 - DNA, 14 bp, Artificial Sequence
  Description of Artificial Sequence: Synthetic oligonucleotide
caaaacttctcttt

SEQ ID NO: 5303 - DNA, 14 bp, Artificial Sequence
  Description of Artificial Sequence: Synthetic oligonucleotide
acaaaacttctctt

SEQ ID NO: 5304 - DNA, 14 bp, Artificial Sequence
  Description of Artificial Sequence: Synthetic oligonucleotide
cacaaaacttctct

SEQ ID NO: 5305 - DNA, 14 bp, Artificial Sequence
  Description of Artificial Sequence: Synthetic oligonucleotide
acacaaaacttctc

SEQ ID NO: 5306 - DNA, 14 bp, Artificial Sequence
  Description of Artificial Sequence: Synthetic oligonucleotide
gacacaaaacttct

SEQ ID NO: 5307 - DNA, 14 bp, Artificial Sequence
  Description of Artificial Sequence: Synthetic oligonucleotide
tgacacaaaacttc

SEQ ID NO: 5308 - DNA, 14 bp, Artificial Sequence
  Description of Artificial Sequence: Synthetic oligonucleotide
atgacacaaaactt

SEQ ID NO: 5309 - DNA, 14 bp, Artificial Sequence
  Description of Artificial Sequence: Synthetic oligonucleotide
aatgacacaaaact

SEQ ID NO: 5310 - DNA, 14 bp, Artificial Sequence
  Description of Artificial Sequence: Synthetic oligonucleotide
taatgacacaaaac

SEQ ID NO: 5311 - DNA, 14 bp, Artificial Sequence
  Description of Artificial Sequence: Synthetic oligonucleotide
ttaatgacacaaaa

SEQ ID NO: 5312 - DNA, 14 bp, Artificial Sequence
  Description of Artificial Sequence: Synthetic oligonucleotide
gttaatgacacaaa

SEQ ID NO: 5313 - DNA, 14 bp, Artificial Sequence
  Description of Artificial Sequence: Synthetic oligonucleotide
tgttaatgacacaa

SEQ ID NO: 5314 - DNA, 14 bp, Artificial Sequence
  Description of Artificial Sequence: Synthetic oligonucleotide
atgttaatgacaca

SEQ ID NO: 5315 - DNA, 14 bp, Artificial Sequence
  Description of Artificial Sequence: Synthetic oligonucleotide
catgttaatgacac

SEQ ID NO: 5316 - DNA, 14 bp, Artificial Sequence
  Description of Artificial Sequence: Synthetic oligonucleotide
tcatgttaatgaca

SEQ ID NO: 5317 - DNA, 14 bp, Artificial Sequence
  Description of Artificial Sequence: Synthetic oligonucleotide
gtcatgttaatgac

SEQ ID NO: 5318 - DNA, 14 bp, Artificial Sequence
  Description of Artificial Sequence: Synthetic oligonucleotide
tgtcatgttaatga

SEQ ID NO: 5319 - DNA, 14 bp, Artificial Sequence
  Description of Artificial Sequence: Synthetic oligonucleotide
ctgtcatgttaatg

SEQ ID NO: 5320 - DNA, 14 bp, Artificial Sequence
  Description of Artificial Sequence: Synthetic oligonucleotide
tctgtcatgttaat

SEQ ID NO: 5321 - DNA, 14 bp, Artificial Sequence
  Description of Artificial Sequence: Synthetic oligonucleotide
ttctgtcatgttaa

SEQ ID NO: 5322 - DNA, 14 bp, Artificial Sequence
  Description of Artificial Sequence: Synthetic oligonucleotide
cttctgtcatgtta

SEQ ID NO: 5323 - DNA, 14 bp, Artificial Sequence
  Description of Artificial Sequence: Synthetic oligonucleotide
tcttctgtcatgtt

SEQ ID NO: 5324 - DNA, 14 bp, Artificial Sequence
  Description of Artificial Sequence: Synthetic oligonucleotide
ttcttctgtcatgt

SEQ ID NO: 5325 - DNA, 14 bp, Artificial Sequence
  Description of Artificial Sequence: Synthetic oligonucleotide
gttcttctgtcatg

SEQ ID NO: 5326 - DNA, 14 bp, Artificial Sequence
  Description of Artificial Sequence: Synthetic oligonucleotide
agttcttctgtcat

SEQ ID NO: 5327 - DNA, 14 bp, Artificial Sequence
  Description of Artificial Sequence: Synthetic oligonucleotide
aagttcttctgtca

SEQ ID NO: 5328 - DNA, 14 bp, Artificial Sequence
  Description of Artificial Sequence: Synthetic oligonucleotide
aaagttcttctgtc

SEQ ID NO: 5329 - DNA, 14 bp, Artificial Sequence
  Description of Artificial Sequence: Synthetic oligonucleotide
aaaagttcttctgt

SEQ ID NO: 5330 - DNA, 14 bp, Artificial Sequence
  Description of Artificial Sequence: Synthetic oligonucleotide
aaaaagttcttctg

SEQ ID NO: 5331 - DNA, 14 bp, Artificial Sequence
  Description of Artificial Sequence: Synthetic oligonucleotide
taaaaagttcttct

SEQ ID NO: 5332 - DNA, 14 bp, Artificial Sequence
  Description of Artificial Sequence: Synthetic oligonucleotide
ttaaaaagttcttc

SEQ ID NO: 5333 - DNA, 14 bp, Artificial Sequence
  Description of Artificial Sequence: Synthetic oligonucleotide
tttaaaaagttctt

SEQ ID NO: 5334 - DNA, 14 bp, Artificial Sequence
  Description of Artificial Sequence: Synthetic oligonucleotide
ttttaaaaagttct

SEQ ID NO: 5335 - DNA, 14 bp, Artificial Sequence
  Description of Artificial Sequence: Synthetic oligonucleotide
tttttaaaaagttc

SEQ ID NO: 5336 - DNA, 14 bp, Artificial Sequence
  Description of Artificial Sequence: Synthetic oligonucleotide
ttttttaaaaagtt

SEQ ID NO: 5337 - DNA, 14 bp, Artificial Sequence
  Description of Artificial Sequence: Synthetic oligonucleotide
tttttttaaaaagt

SEQ ID NO: 5338 - DNA, 14 bp, Artificial Sequence
  Description of Artificial Sequence: Synthetic oligonucleotide
ttttttttaaaaag

SEQ ID NO: 5339 - DNA, 14 bp, Artificial Sequence
  Description of Artificial Sequence: Synthetic oligonucleotide
tttttttttaaaaa

SEQ ID NO: 5340 - DNA, 14 bp, Artificial Sequence
  Description of Artificial Sequence: Synthetic oligonucleotide
atttttttttaaaa

SEQ ID NO: 5341 - DNA, 14 bp, Artificial Sequence
  Description of Artificial Sequence: Synthetic oligonucleotide
tatttttttttaaa

SEQ ID NO: 5342 - DNA, 14 bp, Artificial Sequence
  Description of Artificial Sequence: Synthetic oligonucleotide
ttatttttttttaa

SEQ ID NO: 5343 - DNA, 14 bp, Artificial Sequence
  Description of Artificial Sequence: Synthetic oligonucleotide
gttattttttttta

SEQ ID NO: 5344 - DNA, 14 bp, Artificial Sequence
  Description of Artificial Sequence: Synthetic oligonucleotide
agttattttttttt

SEQ ID NO: 5345 - DNA, 14 bp, Artificial Sequence
  Description of Artificial Sequence: Synthetic oligonucleotide
cagttatttttttt

SEQ ID NO: 5346 - DNA, 14 bp, Artificial Sequence
  Description of Artificial Sequence: Synthetic oligonucleotide
acagttattttttt

SEQ ID NO: 5347 - DNA, 14 bp, Artificial Sequence
  Description of Artificial Sequence: Synthetic oligonucleotide
gacagttatttttt

SEQ ID NO: 5348 - DNA, 14 bp, Artificial Sequence
  Description of Artificial Sequence: Synthetic oligonucleotide
tgacagttattttt

SEQ ID NO: 5349 - DNA, 14 bp, Artificial Sequence
  Description of Artificial Sequence: Synthetic oligonucleotide
ttgacagttatttt

SEQ ID NO: 5350 - DNA, 14 bp, Artificial Sequence
  Description of Artificial Sequence: Synthetic oligonucleotide
gttgacagttattt

SEQ ID NO: 5351 - DNA, 14 bp, Artificial Sequence
  Description of Artificial Sequence: Synthetic oligonucleotide
agttgacagttatt

SEQ ID NO: 5352 - DNA, 14 bp, Artificial Sequence
  Description of Artificial Sequence: Synthetic oligonucleotide
tagttgacagttat

SEQ ID NO: 5353 - DNA, 14 bp, Artificial Sequence
  Description of Artificial Sequence: Synthetic oligonucleotide
atagttgacagtta

SEQ ID NO: 5354 - DNA, 14 bp, Artificial Sequence
  Description of Artificial Sequence: Synthetic oligonucleotide
aatagttgacagtt

SEQ ID NO: 5355 - DNA, 14 bp, Artificial Sequence
  Description of Artificial Sequence: Synthetic oligonucleotide
gaatagttgacagt

SEQ ID NO: 5356 - DNA, 14 bp, Artificial Sequence
  Description of Artificial Sequence: Synthetic oligonucleotide
agaatagttgacag

SEQ ID NO: 5357 - DNA, 14 bp, Artificial Sequence
  Description of Artificial Sequence: Synthetic oligonucleotide
tagaatagttgaca

SEQ ID NO: 5358 - DNA, 14 bp, Artificial Sequence
  Description of Artificial Sequence: Synthetic oligonucleotide
atagaatagttgac

SEQ ID NO: 5359 - DNA, 14 bp, Artificial Sequence
  Description of Artificial Sequence: Synthetic oligonucleotide
aatagaatagttga

SEQ ID NO: 5360 - DNA, 14 bp, Artificial Sequence
  Description of Artificial Sequence: Synthetic oligonucleotide
aaatagaatagttg

SEQ ID NO: 5361 - DNA, 14 bp, Artificial Sequence
  Description of Artificial Sequence: Synthetic oligonucleotide
caaatagaatagtt

SEQ ID NO: 5362 - DNA, 14 bp, Artificial Sequence
  Description of Artificial Sequence: Synthetic oligonucleotide
gcaaatagaatagt

SEQ ID NO: 5363 - DNA, 14 bp, Artificial Sequence
  Description of Artificial Sequence: Synthetic oligonucleotide
tgcaaatagaatag

SEQ ID NO: 5364 - DNA, 14 bp, Artificial Sequence
  Description of Artificial Sequence: Synthetic oligonucleotide
atgcaaatagaata

SEQ ID NO: 5365 - DNA, 14 bp, Artificial Sequence
  Description of Artificial Sequence: Synthetic oligonucleotide
aatgcaaatagaat

SEQ ID NO: 5366 - DNA, 14 bp, Artificial Sequence
  Description of Artificial Sequence: Synthetic oligonucleotide
aaatgcaaatagaa

SEQ ID NO: 5367 - DNA, 14 bp, Artificial Sequence
  Description of Artificial Sequence: Synthetic oligonucleotide
taaatgcaaataga

SEQ ID NO: 5368 - DNA, 14 bp, Artificial Sequence
  Description of Artificial Sequence: Synthetic oligonucleotide
ctaaatgcaaatag

SEQ ID NO: 5369 - DNA, 14 bp, Artificial Sequence
  Description of Artificial Sequence: Synthetic oligonucleotide
cctaaatgcaaata

SEQ ID NO: 5370 - DNA, 14 bp, Artificial Sequence
  Description of Artificial Sequence: Synthetic oligonucleotide
tcctaaatgcaaat

SEQ ID NO: 5371 - DNA, 14 bp, Artificial Sequence
  Description of Artificial Sequence: Synthetic oligonucleotide
ctcctaaatgcaaa

SEQ ID NO: 5372 - DNA, 14 bp, Artificial Sequence
  Description of Artificial Sequence: Synthetic oligonucleotide
tctcctaaatgcaa

SEQ ID NO: 5373 - DNA, 14 bp, Artificial Sequence
  Description of Artificial Sequence: Synthetic oligonucleotide
gtctcctaaatgca

SEQ ID NO: 5374 - DNA, 14 bp, Artificial Sequence
  Description of Artificial Sequence: Synthetic oligonucleotide
agtctcctaaatgc

SEQ ID NO: 5375 - DNA, 14 bp, Artificial Sequence
  Description of Artificial Sequence: Synthetic oligonucleotide
cagtctcctaaatg

SEQ ID NO: 5376 - DNA, 14 bp, Artificial Sequence
  Description of Artificial Sequence: Synthetic oligonucleotide
acagtctcctaaat

SEQ ID NO: 5377 - DNA, 14 bp, Artificial Sequence
  Description of Artificial Sequence: Synthetic oligonucleotide
aacagtctcctaaa

SEQ ID NO: 5378 - DNA, 14 bp, Artificial Sequence
  Description of Artificial Sequence: Synthetic oligonucleotide
gaacagtctcctaa

SEQ ID NO: 5379 - DNA, 14 bp, Artificial Sequence
  Description of Artificial Sequence: Synthetic oligonucleotide
tgaacagtctccta

SEQ ID NO: 5380 - DNA, 14 bp, Artificial Sequence
  Description of Artificial Sequence: Synthetic oligonucleotide
atgaacagtctcct

SEQ ID NO: 5381 - DNA, 14 bp, Artificial Sequence
  Description of Artificial Sequence: Synthetic oligonucleotide
gatgaacagtctcc

SEQ ID NO: 5382 - DNA, 14 bp, Artificial Sequence
  Description of Artificial Sequence: Synthetic oligonucleotide
agatgaacagtctc

SEQ ID NO: 5383 - DNA, 14 bp, Artificial Sequence
  Description of Artificial Sequence: Synthetic oligonucleotide
tagatgaacagtct

SEQ ID NO: 5384 - DNA, 14 bp, Artificial Sequence
  Description of Artificial Sequence: Synthetic oligonucleotide
atagatgaacagtc

SEQ ID NO: 5385 - DNA, 14 bp, Artificial Sequence
  Description of Artificial Sequence: Synthetic oligonucleotide
catagatgaacagt

SEQ ID NO: 5386 - DNA, 14 bp, Artificial Sequence
  Description of Artificial Sequence: Synthetic oligonucleotide
gcatagatgaacag

SEQ ID NO: 5387 - DNA, 14 bp, Artificial Sequence
  Description of Artificial Sequence: Synthetic oligonucleotide
agcatagatgaaca

SEQ ID NO: 5388 - DNA, 14 bp, Artificial Sequence
  Description of Artificial Sequence: Synthetic oligonucleotide
tagcatagatgaac

SEQ ID NO: 5389 - DNA, 14 bp, Artificial Sequence
  Description of Artificial Sequence: Synthetic oligonucleotide
ctagcatagatgaa

SEQ ID NO: 5390 - DNA, 14 bp, Artificial Sequence
  Description of Artificial Sequence: Synthetic oligonucleotide
tctagcatagatga

SEQ ID NO: 5391 - DNA, 14 bp, Artificial Sequence
  Description of Artificial Sequence: Synthetic oligonucleotide
atctagcatagatg

SEQ ID NO: 5392 - DNA, 14 bp, Artificial Sequence
  Description of Artificial Sequence: Synthetic oligonucleotide
aatctagcatagat

SEQ ID NO: 5393 - DNA, 14 bp, Artificial Sequence
  Description of Artificial Sequence: Synthetic oligonucleotide
caatctagcataga

SEQ ID NO: 5394 - DNA, 14 bp, Artificial Sequence
  Description of Artificial Sequence: Synthetic oligonucleotide
acaatctagcatag

SEQ ID NO: 5395 - DNA, 14 bp, Artificial Sequence
  Description of Artificial Sequence: Synthetic oligonucleotide
gacaatctagcata

SEQ ID NO: 5396 - DNA, 14 bp, Artificial Sequence
  Description of Artificial Sequence: Synthetic oligonucleotide
tgacaatctagcat

SEQ ID NO: 5397 - DNA, 14 bp, Artificial Sequence
  Description of Artificial Sequence: Synthetic oligonucleotide
atgacaatctagca

SEQ ID NO: 5398 - DNA, 14 bp, Artificial Sequence
  Description of Artificial Sequence: Synthetic oligonucleotide
aatgacaatctagc

SEQ ID NO: 5399 - DNA, 14 bp, Artificial Sequence
  Description of Artificial Sequence: Synthetic oligonucleotide
aaatgacaatctag

SEQ ID NO: 5400 - DNA, 14 bp, Artificial Sequence
  Description of Artificial Sequence: Synthetic oligonucleotide
aaaatgacaatcta

SEQ ID NO: 5401 - DNA, 14 bp, Artificial Sequence
  Description of Artificial Sequence: Synthetic oligonucleotide
gaaaatgacaatct

SEQ ID NO: 5402 - DNA, 14 bp, Artificial Sequence
  Description of Artificial Sequence: Synthetic oligonucleotide
ggaaaatgacaatc

SEQ ID NO: 5403 - DNA, 14 bp, Artificial Sequence
  Description of Artificial Sequence: Synthetic oligonucleotide
gggaaaatgacaat

SEQ ID NO: 5404 - DNA, 14 bp, Artificial Sequence
  Description of Artificial Sequence: Synthetic oligonucleotide
agggaaaatgacaa

SEQ ID NO: 5405 - DNA, 14 bp, Artificial Sequence
  Description of Artificial Sequence: Synthetic oligonucleotide
gagggaaaatgaca

SEQ ID NO: 5406 - DNA, 14 bp, Artificial Sequence
  Description of Artificial Sequence: Synthetic oligonucleotide
ggagggaaaatgac

SEQ ID NO: 5407 - DNA, 14 bp, Artificial Sequence
  Description of Artificial Sequence: Synthetic oligonucleotide
aggagggaaaatga

SEQ ID NO: 5408 - DNA, 14 bp, Artificial Sequence
  Description of Artificial Sequence: Synthetic oligonucleotide
aaggagggaaaatg

SEQ ID NO: 5409 - DNA, 14 bp, Artificial Sequence
  Description of Artificial Sequence: Synthetic oligonucleotide
gaaggagggaaaat

SEQ ID NO: 5410 - DNA, 14 bp, Artificial Sequence
  Description of Artificial Sequence: Synthetic oligonucleotide
agaaggagggaaaa

SEQ ID NO: 5411 - DNA, 14 bp, Artificial Sequence
  Description of Artificial Sequence: Synthetic oligonucleotide
gagaaggagggaaa

SEQ ID NO: 5412 - DNA, 14 bp, Artificial Sequence
  Description of Artificial Sequence: Synthetic oligonucleotide
ggagaaggagggaa

SEQ ID NO: 5413 - DNA, 14 bp, Artificial Sequence
  Description of Artificial Sequence: Synthetic oligonucleotide
gggagaaggaggga

SEQ ID NO: 5414 - DNA, 14 bp, Artificial Sequence
  Description of Artificial Sequence: Synthetic oligonucleotide
tgggagaaggaggg

SEQ ID NO: 5415 - DNA, 14 bp, Artificial Sequence
  Description of Artificial Sequence: Synthetic oligonucleotide
gtgggagaaggagg

SEQ ID NO: 5416 - DNA, 14 bp, Artificial Sequence
  Description of Artificial Sequence: Synthetic oligonucleotide
tgtgggagaaggag

SEQ ID NO: 5417 - DNA, 14 bp, Artificial Sequence
  Description of Artificial Sequence: Synthetic oligonucleotide
ctgtgggagaagga

SEQ ID NO: 5418 - DNA, 14 bp, Artificial Sequence
  Description of Artificial Sequence: Synthetic oligonucleotide
tctgtgggagaagg

SEQ ID NO: 5419 - DNA, 14 bp, Artificial Sequence
  Description of Artificial Sequence: Synthetic oligonucleotide
ttctgtgggagaag

SEQ ID NO: 5420 - DNA, 14 bp, Artificial Sequence
  Description of Artificial Sequence: Synthetic oligonucleotide
cttctgtgggagaa

SEQ ID NO: 5421 - DNA, 14 bp, Artificial Sequence
  Description of Artificial Sequence: Synthetic oligonucleotide
acttctgtgggaga

SEQ ID NO: 5422 - DNA, 14 bp, Artificial Sequence
  Description of Artificial Sequence: Synthetic oligonucleotide
aacttctgtgggag

SEQ ID NO: 5423 - DNA, 14 bp, Artificial Sequence
  Description of Artificial Sequence: Synthetic oligonucleotide
aaacttctgtggga

SEQ ID NO: 5424 - DNA, 14 bp, Artificial Sequence
  Description of Artificial Sequence: Synthetic oligonucleotide
taaacttctgtggg

SEQ ID NO: 5425 - DNA, 14 bp, Artificial Sequence
  Description of Artificial Sequence: Synthetic oligonucleotide
gtaaacttctgtgg

SEQ ID NO: 5426 - DNA, 14 bp, Artificial Sequence
  Description of Artificial Sequence: Synthetic oligonucleotide
agtaaacttctgtg

SEQ ID NO: 5427 - DNA, 14 bp, Artificial Sequence
  Description of Artificial Sequence: Synthetic oligonucleotide
cagtaaacttctgt

SEQ ID NO: 5428 - DNA, 14 bp, Artificial Sequence
  Description of Artificial Sequence: Synthetic oligonucleotide
ccagtaaacttctg

SEQ ID NO: 5429 - DNA, 14 bp, Artificial Sequence
  Description of Artificial Sequence: Synthetic oligonucleotide
accagtaaacttct

SEQ ID NO: 5430 - DNA, 14 bp, Artificial Sequence
  Description of Artificial Sequence: Synthetic oligonucleotide
taccagtaaacttc

SEQ ID NO: 5431 - DNA, 14 bp, Artificial Sequence
  Description of Artificial Sequence: Synthetic oligonucleotide
ctaccagtaaactt

SEQ ID NO: 5432 - DNA, 14 bp, Artificial Sequence
  Description of Artificial Sequence: Synthetic oligonucleotide
actaccagtaaact

SEQ ID NO: 5433 - DNA, 14 bp, Artificial Sequence
  Description of Artificial Sequence: Synthetic oligonucleotide
gactaccagtaaac

SEQ ID NO: 5434 - DNA, 14 bp, Artificial Sequence
  Description of Artificial Sequence: Synthetic oligonucleotide
ggactaccagtaaa

SEQ ID NO: 5435 - DNA, 14 bp, Artificial Sequence
  Description of Artificial Sequence: Synthetic oligonucleotide
tggactaccagtaa

SEQ ID NO: 5436 - DNA, 14 bp, Artificial Sequence
  Description of Artificial Sequence: Synthetic oligonucleotide
atggactaccagta

SEQ ID NO: 5437 - DNA, 14 bp, Artificial Sequence
  Description of Artificial Sequence: Synthetic oligonucleotide
catggactaccagt

SEQ ID NO: 5438 - DNA, 14 bp, Artificial Sequence
  Description of Artificial Sequence: Synthetic oligonucleotide
acatggactaccag

SEQ ID NO: 5439 - DNA, 14 bp, Artificial Sequence
  Description of Artificial Sequence: Synthetic oligonucleotide
gacatggactacca

SEQ ID NO: 5440 - DNA, 14 bp, Artificial Sequence
  Description of Artificial Sequence: Synthetic oligonucleotide
tgacatggactacc

SEQ ID NO: 5441 - DNA, 14 bp, Artificial Sequence
  Description of Artificial Sequence: Synthetic oligonucleotide
atgacatggactac

SEQ ID NO: 5442 - DNA, 14 bp, Artificial Sequence
  Description of Artificial Sequence: Synthetic oligonucleotide
catgacatggacta

SEQ ID NO: 5443 - DNA, 14 bp, Artificial Sequence
  Description of Artificial Sequence: Synthetic oligonucleotide
ccatgacatggact

SEQ ID NO: 5444 - DNA, 14 bp, Artificial Sequence
  Description of Artificial Sequence: Synthetic oligonucleotide
gccatgacatggac

SEQ ID NO: 5445 - DNA, 14 bp, Artificial Sequence
  Description of Artificial Sequence: Synthetic oligonucleotide
agccatgacatgga

SEQ ID NO: 5446 - DNA, 14 bp, Artificial Sequence
  Description of Artificial Sequence: Synthetic oligonucleotide
gagccatgacatgg

SEQ ID NO: 5447 - DNA, 14 bp, Artificial Sequence
  Description of Artificial Sequence: Synthetic oligonucleotide
cgagccatgacatg

SEQ ID NO: 5448 - DNA, 14 bp, Artificial Sequence
  Description of Artificial Sequence: Synthetic oligonucleotide
acgagccatgacat

SEQ ID NO: 5449 - DNA, 14 bp, Artificial Sequence
  Description of Artificial Sequence: Synthetic oligonucleotide
tacgagccatgaca

SEQ ID NO: 5450 - DNA, 14 bp, Artificial Sequence
  Description of Artificial Sequence: Synthetic oligonucleotide
ctacgagccatgac

SEQ ID NO: 5451 - DNA, 14 bp, Artificial Sequence
  Description of Artificial Sequence: Synthetic oligonucleotide
gctacgagccatga

SEQ ID NO: 5452 - DNA, 14 bp, Artificial Sequence
  Description of Artificial Sequence: Synthetic oligonucleotide
agctacgagccatg

SEQ ID NO: 5453 - DNA, 14 bp, Artificial Sequence
  Description of Artificial Sequence: Synthetic oligonucleotide
tagctacgagccat

SEQ ID NO: 5454 - DNA, 14 bp, Artificial Sequence
  Description of Artificial Sequence: Synthetic oligonucleotide
atagctacgagcca

SEQ ID NO: 5455 - DNA, 14 bp, Artificial Sequence
  Description of Artificial Sequence: Synthetic oligonucleotide
gatagctacgagcc

SEQ ID NO: 5456 - DNA, 14 bp, Artificial Sequence
  Description of Artificial Sequence: Synthetic oligonucleotide
ggatagctacgagc

SEQ ID NO: 5457 - DNA, 14 bp, Artificial Sequence
  Description of Artificial Sequence: Synthetic oligonucleotide
gggatagctacgag

SEQ ID NO: 5458 - DNA, 14 bp, Artificial Sequence
  Description of Artificial Sequence: Synthetic oligonucleotide
agggatagctacga

SEQ ID NO: 5459 - DNA, 14 bp, Artificial Sequence
  Description of Artificial Sequence: Synthetic oligonucleotide
gagggatagctacg

SEQ ID NO: 5460 - DNA, 14 bp, Artificial Sequence
  Description of Artificial Sequence: Synthetic oligonucleotide
agagggatagctac

SEQ ID NO: 5461 - DNA, 14 bp, Artificial Sequence
  Description of Artificial Sequence: Synthetic oligonucleotide
tagagggatagcta

SEQ ID NO: 5462 - DNA, 14 bp, Artificial Sequence
  Description of Artificial Sequence: Synthetic oligonucleotide
ttagagggatagct

SEQ ID NO: 5463 - DNA, 14 bp, Artificial Sequence
  Description of Artificial Sequence: Synthetic oligonucleotide
gttagagggatagc

SEQ ID NO: 5464 - DNA, 14 bp, Artificial Sequence
  Description of Artificial Sequence: Synthetic oligonucleotide
ggttagagggatag

SEQ ID NO: 5465 - DNA, 14 bp, Artificial Sequence
  Description of Artificial Sequence: Synthetic oligonucleotide
tggttagagggata

SEQ ID NO: 5466 - DNA, 14 bp, Artificial Sequence
  Description of Artificial Sequence: Synthetic oligonucleotide
atggttagagggat

SEQ ID NO: 5467 - DNA, 14 bp, Artificial Sequence
  Description of Artificial Sequence: Synthetic oligonucleotide
tatggttagaggga

SEQ ID NO: 5468 - DNA, 14 bp, Artificial Sequence
  Description of Artificial Sequence: Synthetic oligonucleotide
gtatggttagaggg

SEQ ID NO: 5469 - DNA, 14 bp, Artificial Sequence
  Description of Artificial Sequence: Synthetic oligonucleotide
ggtatggttagagg

SEQ ID NO: 5470 - DNA, 14 bp, Artificial Sequence
  Description of Artificial Sequence: Synthetic oligonucleotide
tggtatggttagag

SEQ ID NO: 5471 - DNA, 14 bp, Artificial Sequence
  Description of Artificial Sequence: Synthetic oligonucleotide
atggtatggttaga

SEQ ID NO: 5472 - DNA, 14 bp, Artificial Sequence
  Description of Artificial Sequence: Synthetic oligonucleotide
catggtatggttag

SEQ ID NO: 5473 - DNA, 14 bp, Artificial Sequence
  Description of Artificial Sequence: Synthetic oligonucleotide
ccatggtatggtta

SEQ ID NO: 5474 - DNA, 14 bp, Artificial Sequence
  Description of Artificial Sequence: Synthetic oligonucleotide
tccatggtatggtt

SEQ ID NO: 5475 - DNA, 14 bp, Artificial Sequence
  Description of Artificial Sequence: Synthetic oligonucleotide
ttccatggtatggt

SEQ ID NO: 5476 - DNA, 14 bp, Artificial Sequence
  Description of Artificial Sequence: Synthetic oligonucleotide
tttccatggtatgg

SEQ ID NO: 5477 - DNA, 14 bp, Artificial Sequence
  Description of Artificial Sequence: Synthetic oligonucleotide
atttccatggtatg

SEQ ID NO: 5478 - DNA, 14 bp, Artificial Sequence
  Description of Artificial Sequence: Synthetic oligonucleotide
catttccatggtat

SEQ ID NO: 5479 - DNA, 14 bp, Artificial Sequence
  Description of Artificial Sequence: Synthetic oligonucleotide
gcatttccatggta

SEQ ID NO: 5480 - DNA, 14 bp, Artificial Sequence
  Description of Artificial Sequence: Synthetic oligonucleotide
tgcatttccatggt

SEQ ID NO: 5481 - DNA, 14 bp, Artificial Sequence
  Description of Artificial Sequence: Synthetic oligonucleotide
ctgcatttccatgg

SEQ ID NO: 5482 - DNA, 14 bp, Artificial Sequence
  Description of Artificial Sequence: Synthetic oligonucleotide
cctgcatttccatg

SEQ ID NO: 5483 - DNA, 14 bp, Artificial Sequence
  Description of Artificial Sequence: Synthetic oligonucleotide
gcctgcatttccat

SEQ ID NO: 5484 - DNA, 14 bp, Artificial Sequence
  Description of Artificial Sequence: Synthetic oligonucleotide
tgcctgcatttcca

SEQ ID NO: 5485 - DNA, 14 bp, Artificial Sequence
  Description of Artificial Sequence: Synthetic oligonucleotide
gtgcctgcatttcc

SEQ ID NO: 5486 - DNA, 14 bp, Artificial Sequence
  Description of Artificial Sequence: Synthetic oligonucleotide
ggtgcctgcatttc

SEQ ID NO: 5487 - DNA, 14 bp, Artificial Sequence
  Description of Artificial Sequence: Synthetic oligonucleotide
gggtgcctgcattt

SEQ ID NO: 5488 - DNA, 14 bp, Artificial Sequence
  Description of Artificial Sequence: Synthetic oligonucleotide
tgggtgcctgcatt

SEQ ID NO: 5489 - DNA, 14 bp, Artificial Sequence
  Description of Artificial Sequence: Synthetic oligonucleotide
ttgggtgcctgcat

SEQ ID NO: 5490 - DNA, 14 bp, Artificial Sequence
  Description of Artificial Sequence: Synthetic oligonucleotide
attgggtgcctgca

SEQ ID NO: 5491 - DNA, 14 bp, Artificial Sequence
  Description of Artificial Sequence: Synthetic oligonucleotide
cattgggtgcctgc

SEQ ID NO: 5492 - DNA, 14 bp, Artificial Sequence
  Description of Artificial Sequence: Synthetic oligonucleotide
acattgggtgcctg

SEQ ID NO: 5493 - DNA, 14 bp, Artificial Sequence
  Description of Artificial Sequence: Synthetic oligonucleotide
cacattgggtgcct

SEQ ID NO: 5494 - DNA, 14 bp, Artificial Sequence
  Description of Artificial Sequence: Synthetic oligonucleotide
tcacattgggtgcc

SEQ ID NO: 5495 - DNA, 14 bp, Artificial Sequence
  Description of Artificial Sequence: Synthetic oligonucleotide
ttcacattgggtgc

SEQ ID NO: 5496 - DNA, 14 bp, Artificial Sequence
  Description of Artificial Sequence: Synthetic oligonucleotide
tttcacattgggtg

SEQ ID NO: 5497 - DNA, 14 bp, Artificial Sequence
  Description of Artificial Sequence: Synthetic oligonucleotide
ttttcacattgggt

SEQ ID NO: 5498 - DNA, 14 bp, Artificial Sequence
  Description of Artificial Sequence: Synthetic oligonucleotide
cttttcacattggg

SEQ ID NO: 5499 - DNA, 14 bp, Artificial Sequence
  Description of Artificial Sequence: Synthetic oligonucleotide
ccttttcacattgg

SEQ ID NO: 5500 - DNA, 14 bp, Artificial Sequence
  Description of Artificial Sequence: Synthetic oligonucleotide
tccttttcacattg

SEQ ID NO: 5501 - DNA, 14 bp, Artificial Sequence
  Description of Artificial Sequence: Synthetic oligonucleotide
ctccttttcacatt

SEQ ID NO: 5502 - DNA, 14 bp, Artificial Sequence
  Description of Artificial Sequence: Synthetic oligonucleotide
gctccttttcacat

SEQ ID NO: 5503 - DNA, 14 bp, Artificial Sequence
  Description of Artificial Sequence: Synthetic oligonucleotide
tgctccttttcaca

SEQ ID NO: 5504 - DNA, 14 bp, Artificial Sequence
  Description of Artificial Sequence: Synthetic oligonucleotide
gtgctccttttcac

SEQ ID NO: 5505 - DNA, 14 bp, Artificial Sequence
  Description of Artificial Sequence: Synthetic oligonucleotide
agtgctccttttca

SEQ ID NO: 5506 - DNA, 14 bp, Artificial Sequence
  Description of Artificial Sequence: Synthetic oligonucleotide
aagtgctccttttc

SEQ ID NO: 5507 - DNA, 14 bp, Artificial Sequence
  Description of Artificial Sequence: Synthetic oligonucleotide
caagtgctcctttt

SEQ ID NO: 5508 - DNA, 14 bp, Artificial Sequence
  Description of Artificial Sequence: Synthetic oligonucleotide
gcaagtgctccttt

SEQ ID NO: 5509 - DNA, 14 bp, Artificial Sequence
  Description of Artificial Sequence: Synthetic oligonucleotide
agcaagtgctcctt

SEQ ID NO: 5510 - DNA, 14 bp, Artificial Sequence
  Description of Artificial Sequence: Synthetic oligonucleotide
cagcaagtgctcct

SEQ ID NO: 5511 - DNA, 14 bp, Artificial Sequence
  Description of Artificial Sequence: Synthetic oligonucleotide
ccagcaagtgctcc

SEQ ID NO: 5512 - DNA, 14 bp, Artificial Sequence
  Description of Artificial Sequence: Synthetic oligonucleotide
cccagcaagtgctc

SEQ ID NO: 5513 - DNA, 14 bp, Artificial Sequence
  Description of Artificial Sequence: Synthetic oligonucleotide
gcccagcaagtgct

SEQ ID NO: 5514 - DNA, 14 bp, Artificial Sequence
  Description of Artificial Sequence: Synthetic oligonucleotide
tgcccagcaagtgc

SEQ ID NO: 5515 - DNA, 14 bp, Artificial Sequence
  Description of Artificial Sequence: Synthetic oligonucleotide
atgcccagcaagtg

SEQ ID NO: 5516 - DNA, 14 bp, Artificial Sequence
  Description of Artificial Sequence: Synthetic oligonucleotide
gatgcccagcaagt

SEQ ID NO: 5517 - DNA, 14 bp, Artificial Sequence
  Description of Artificial Sequence: Synthetic oligonucleotide
tgatgcccagcaag

SEQ ID NO: 5518 - DNA, 14 bp, Artificial Sequence
  Description of Artificial Sequence: Synthetic oligonucleotide
gtgatgcccagcaa

SEQ ID NO: 5519 - DNA, 14 bp, Artificial Sequence
  Description of Artificial Sequence: Synthetic oligonucleotide
agtgatgcccagca

SEQ ID NO: 5520 - DNA, 14 bp, Artificial Sequence
  Description of Artificial Sequence: Synthetic oligonucleotide
cagtgatgcccagc

SEQ ID NO: 5521 - DNA, 14 bp, Artificial Sequence
  Description of Artificial Sequence: Synthetic oligonucleotide
tcagtgatgcccag

SEQ ID NO: 5522 - DNA, 14 bp, Artificial Sequence
  Description of Artificial Sequence: Synthetic oligonucleotide
gtcagtgatgccca

SEQ ID NO: 5523 - DNA, 14 bp, Artificial Sequence
  Description of Artificial Sequence: Synthetic oligonucleotide
tgtcagtgatgccc

SEQ ID NO: 5524 - DNA, 14 bp, Artificial Sequence
  Description of Artificial Sequence: Synthetic oligonucleotide
gtgtcagtgatgcc

SEQ ID NO: 5525 - DNA, 14 bp, Artificial Sequence
  Description of Artificial Sequence: Synthetic oligonucleotide
ggtgtcagtgatgc

SEQ ID NO: 5526 - DNA, 14 bp, Artificial Sequence
  Description of Artificial Sequence: Synthetic oligonucleotide
cggtgtcagtgatg

SEQ ID NO: 5527 - DNA, 14 bp, Artificial Sequence
  Description of Artificial Sequence: Synthetic oligonucleotide
gcggtgtcagtgat

SEQ ID NO: 5528 - DNA, 14 bp, Artificial Sequence
  Description of Artificial Sequence: Synthetic oligonucleotide
agcggtgtcagtga

SEQ ID NO: 5529 - DNA, 14 bp, Artificial Sequence
  Description of Artificial Sequence: Synthetic oligonucleotide
gagcggtgtcagtg

SEQ ID NO: 5530 - DNA, 14 bp, Artificial Sequence
  Description of Artificial Sequence: Synthetic oligonucleotide
tgagcggtgtcagt

SEQ ID NO: 5531 - DNA, 14 bp, Artificial Sequence
  Description of Artificial Sequence: Synthetic oligonucleotide
atgagcggtgtcag

SEQ ID NO: 5532 - DNA, 14 bp, Artificial Sequence
  Description of Artificial Sequence: Synthetic oligonucleotide
catgagcggtgtca

SEQ ID NO: 5533 - DNA, 14 bp, Artificial Sequence
  Description of Artificial Sequence: Synthetic oligonucleotide
acatgagcggtgtc

SEQ ID NO: 5534 - DNA, 14 bp, Artificial Sequence
  Description of Artificial Sequence: Synthetic oligonucleotide
aacatgagcggtgt

SEQ ID NO: 5535 - DNA, 14 bp, Artificial Sequence
  Description of Artificial Sequence: Synthetic oligonucleotide
aaacatgagcggtg

SEQ ID NO: 5536 - DNA, 14 bp, Artificial Sequence
  Description of Artificial Sequence: Synthetic oligonucleotide
aaaacatgagcggt

SEQ ID NO: 5537 - DNA, 14 bp, Artificial Sequence
  Description of Artificial Sequence: Synthetic oligonucleotide
taaaacatgagcgg

SEQ ID NO: 5538 - DNA, 14 bp, Artificial Sequence
  Description of Artificial Sequence: Synthetic oligonucleotide
gtaaaacatgagcg

SEQ ID NO: 5539 - DNA, 14 bp, Artificial Sequence
  Description of Artificial Sequence: Synthetic oligonucleotide
tgtaaaacatgagc

SEQ ID NO: 5540 - DNA, 14 bp, Artificial Sequence
  Description of Artificial Sequence: Synthetic oligonucleotide
gtgtaaaacatgag

SEQ ID NO: 5541 - DNA, 14 bp, Artificial Sequence
  Description of Artificial Sequence: Synthetic oligonucleotide
tgtgtaaaacatga

SEQ ID NO: 5542 - DNA, 14 bp, Artificial Sequence
  Description of Artificial Sequence: Synthetic oligonucleotide
atgtgtaaaacatg

SEQ ID NO: 5543 - DNA, 14 bp, Artificial Sequence
  Description of Artificial Sequence: Synthetic oligonucleotide
tatgtgtaaaacat

SEQ ID NO: 5544 - DNA, 14 bp, Artificial Sequence
  Description of Artificial Sequence: Synthetic oligonucleotide
ctatgtgtaaaaca

SEQ ID NO: 5545 - DNA, 14 bp, Artificial Sequence
  Description of Artificial Sequence: Synthetic oligonucleotide
actatgtgtaaaac

SEQ ID NO: 5546 - DNA, 14 bp, Artificial Sequence
  Description of Artificial Sequence: Synthetic oligonucleotide
aactatgtgtaaaa

SEQ ID NO: 5547 - DNA, 14 bp, Artificial Sequence
  Description of Artificial Sequence: Synthetic oligonucleotide
caactatgtgtaaa

SEQ ID NO: 5548 - DNA, 14 bp, Artificial Sequence
  Description of Artificial Sequence: Synthetic oligonucleotide
tcaactatgtgtaa

SEQ ID NO: 5549 - DNA, 14 bp, Artificial Sequence
  Description of Artificial Sequence: Synthetic oligonucleotide
ctcaactatgtgta

SEQ ID NO: 5550 - DNA, 14 bp, Artificial Sequence
  Description of Artificial Sequence: Synthetic oligonucleotide
actcaactatgtgt

SEQ ID NO: 5551 - DNA, 14 bp, Artificial Sequence
  Description of Artificial Sequence: Synthetic oligonucleotide
tactcaactatgtg

SEQ ID NO: 5552 - DNA, 14 bp, Artificial Sequence
  Description of Artificial Sequence: Synthetic oligonucleotide
ttactcaactatgt

SEQ ID NO: 5553 - DNA, 14 bp, Artificial Sequence
  Description of Artificial Sequence: Synthetic oligonucleotide
attactcaactatg

SEQ ID NO: 5554 - DNA, 14 bp, Artificial Sequence
  Description of Artificial Sequence: Synthetic oligonucleotide
gattactcaactat

SEQ ID NO: 5555 - DNA, 14 bp, Artificial Sequence
  Description of Artificial Sequence: Synthetic oligonucleotide
tgattactcaacta

SEQ ID NO: 5556 - DNA, 14 bp, Artificial Sequence
  Description of Artificial Sequence: Synthetic oligonucleotide
ctgattactcaact

SEQ ID NO: 5557 - DNA, 14 bp, Artificial Sequence
  Description of Artificial Sequence: Synthetic oligonucleotide
gctgattactcaac

SEQ ID NO: 5558 - DNA, 14 bp, Artificial Sequence
  Description of Artificial Sequence: Synthetic oligonucleotide
tgctgattactcaa

SEQ ID NO: 5559 - DNA, 14 bp, Artificial Sequence
  Description of Artificial Sequence: Synthetic oligonucleotide
atgctgattactca

SEQ ID NO: 5560 - DNA, 14 bp, Artificial Sequence
  Description of Artificial Sequence: Synthetic oligonucleotide
tatgctgattactc

SEQ ID NO: 5561 - DNA, 14 bp, Artificial Sequence
  Description of Artificial Sequence: Synthetic oligonucleotide
atatgctgattact

SEQ ID NO: 5562 - DNA, 14 bp, Artificial Sequence
  Description of Artificial Sequence: Synthetic oligonucleotide
gatatgctgattac

SEQ ID NO: 5563 - DNA, 14 bp, Artificial Sequence
  Description of Artificial Sequence: Synthetic oligonucleotide
agatatgctgatta

SEQ ID NO: 5564 - DNA, 14 bp, Artificial Sequence
  Description of Artificial Sequence: Synthetic oligonucleotide
tagatatgctgatt

SEQ ID NO: 5565 - DNA, 14 bp, Artificial Sequence
  Description of Artificial Sequence: Synthetic oligonucleotide
ctagatatgctgat

SEQ ID NO: 5566 - DNA, 14 bp, Artificial Sequence
  Description of Artificial Sequence: Synthetic oligonucleotide
tctagatatgctga

SEQ ID NO: 5567 - DNA, 14 bp, Artificial Sequence
  Description of Artificial Sequence: Synthetic oligonucleotide
ttctagatatgctg

SEQ ID NO: 5568 - DNA, 14 bp, Artificial Sequence
  Description of Artificial Sequence: Synthetic oligonucleotide
attctagatatgct

SEQ ID NO: 5569 - DNA, 14 bp, Artificial Sequence
  Description of Artificial Sequence: Synthetic oligonucleotide
aattctagatatgc

SEQ ID NO: 5570 - DNA, 14 bp, Artificial Sequence
  Description of Artificial Sequence: Synthetic oligonucleotide
taattctagatatg

SEQ ID NO: 5571 - DNA, 14 bp, Artificial Sequence
  Description of Artificial Sequence: Synthetic oligonucleotide
ataattctagatat

SEQ ID NO: 5572 - DNA, 14 bp, Artificial Sequence
  Description of Artificial Sequence: Synthetic oligonucleotide
gataattctagata

SEQ ID NO: 5573 - DNA, 14 bp, Artificial Sequence
  Description of Artificial Sequence: Synthetic oligonucleotide
agataattctagat

SEQ ID NO: 5574 - DNA, 14 bp, Artificial Sequence
  Description of Artificial Sequence: Synthetic oligonucleotide
aagataattctaga

SEQ ID NO: 5575 - DNA, 14 bp, Artificial Sequence
  Description of Artificial Sequence: Synthetic oligonucleotide
caagataattctag

SEQ ID NO: 5576 - DNA, 14 bp, Artificial Sequence
  Description of Artificial Sequence: Synthetic oligonucleotide
gcaagataattcta

SEQ ID NO: 5577 - DNA, 14 bp, Artificial Sequence
  Description of Artificial Sequence: Synthetic oligonucleotide
tgcaagataattct

SEQ ID NO: 5578 - DNA, 14 bp, Artificial Sequence
  Description of Artificial Sequence: Synthetic oligonucleotide
atgcaagataattc

SEQ ID NO: 5579 - DNA, 14 bp, Artificial Sequence
  Description of Artificial Sequence: Synthetic oligonucleotide
aatgcaagataatt

SEQ ID NO: 5580 - DNA, 14 bp, Artificial Sequence
  Description of Artificial Sequence: Synthetic oligonucleotide
caatgcaagataat

SEQ ID NO: 5581 - DNA, 14 bp, Artificial Sequence
  Description of Artificial Sequence: Synthetic oligonucleotide
gcaatgcaagataa

SEQ ID NO: 5582 - DNA, 14 bp, Artificial Sequence
  Description of Artificial Sequence: Synthetic oligonucleotide
ggcaatgcaagata

SEQ ID NO: 5583 - DNA, 14 bp, Artificial Sequence
  Description of Artificial Sequence: Synthetic oligonucleotide
aggcaatgcaagat

SEQ ID NO: 5584 - DNA, 14 bp, Artificial Sequence
  Description of Artificial Sequence: Synthetic oligonucleotide
taggcaatgcaaga

SEQ ID NO: 5585 - DNA, 14 bp, Artificial Sequence
  Description of Artificial Sequence: Synthetic oligonucleotide
ttaggcaatgcaag

SEQ ID NO: 5586 - DNA, 14 bp, Artificial Sequence
  Description of Artificial Sequence: Synthetic oligonucleotide
tttaggcaatgcaa

SEQ ID NO: 5587 - DNA, 14 bp, Artificial Sequence
  Description of Artificial Sequence: Synthetic oligonucleotide
atttaggcaatgca

SEQ ID NO: 5588 - DNA, 14 bp, Artificial Sequence
  Description of Artificial Sequence: Synthetic oligonucleotide
gatttaggcaatgc

SEQ ID NO: 5589 - DNA, 14 bp, Artificial Sequence
  Description of Artificial Sequence: Synthetic oligonucleotide
tgatttaggcaatg

SEQ ID NO: 5590 - DNA, 14 bp, Artificial Sequence
  Description of Artificial Sequence: Synthetic oligonucleotide
atgatttaggcaat

SEQ ID NO: 5591 - DNA, 14 bp, Artificial Sequence
  Description of Artificial Sequence: Synthetic oligonucleotide
tatgatttaggcaa

SEQ ID NO: 5592 - DNA, 14 bp, Artificial Sequence
  Description of Artificial Sequence: Synthetic oligonucleotide
atatgatttaggca

SEQ ID NO: 5593 - DNA, 14 bp, Artificial Sequence
  Description of Artificial Sequence: Synthetic oligonucleotide
catatgatttaggc

SEQ ID NO: 5594 - DNA, 14 bp, Artificial Sequence
  Description of Artificial Sequence: Synthetic oligonucleotide
acatatgatttagg

SEQ ID NO: 5595 - DNA, 14 bp, Artificial Sequence
  Description of Artificial Sequence: Synthetic oligonucleotide
tacatatgatttag

SEQ ID NO: 5596 - DNA, 14 bp, Artificial Sequence
  Description of Artificial Sequence: Synthetic oligonucleotide
atacatatgattta

SEQ ID NO: 5597 - DNA, 14 bp, Artificial Sequence
  Description of Artificial Sequence: Synthetic oligonucleotide
tatacatatgattt

SEQ ID NO: 5598 - DNA, 14 bp, Artificial Sequence
  Description of Artificial Sequence: Synthetic oligonucleotide
atatacatatgatt

SEQ ID NO: 5599 - DNA, 14 bp, Artificial Sequence
  Description of Artificial Sequence: Synthetic oligonucleotide
tatatacatatgat

SEQ ID NO: 5600 - DNA, 14 bp, Artificial Sequence
  Description of Artificial Sequence: Synthetic oligonucleotide
ctatatacatatga

SEQ ID NO: 5601 - DNA, 14 bp, Artificial Sequence
  Description of Artificial Sequence: Synthetic oligonucleotide
actatatacatatg

SEQ ID NO: 5602 - DNA, 14 bp, Artificial Sequence
  Description of Artificial Sequence: Synthetic oligonucleotide
cactatatacatat

SEQ ID NO: 5603 - DNA, 14 bp, Artificial Sequence
  Description of Artificial Sequence: Synthetic oligonucleotide
tcactatatacata

SEQ ID NO: 5604 - DNA, 14 bp, Artificial Sequence
  Description of Artificial Sequence: Synthetic oligonucleotide
ttcactatatacat

SEQ ID NO: 5605 - DNA, 14 bp, Artificial Sequence
  Description of Artificial Sequence: Synthetic oligonucleotide
attcactatataca

SEQ ID NO: 5606 - DNA, 14 bp, Artificial Sequence
  Description of Artificial Sequence: Synthetic oligonucleotide
cattcactatatac

SEQ ID NO: 5607 - DNA, 14 bp, Artificial Sequence
  Description of Artificial Sequence: Synthetic oligonucleotide
acattcactatata

SEQ ID NO: 5608 - DNA, 14 bp, Artificial Sequence
  Description of Artificial Sequence: Synthetic oligonucleotide
aacattcactatat

SEQ ID NO: 5609 - DNA, 14 bp, Artificial Sequence
  Description of Artificial Sequence: Synthetic oligonucleotide
taacattcactata

SEQ ID NO: 5610 - DNA, 14 bp, Artificial Sequence
  Description of Artificial Sequence: Synthetic oligonucleotide
ataacattcactat

SEQ ID NO: 5611 - DNA, 14 bp, Artificial Sequence
  Description of Artificial Sequence: Synthetic oligonucleotide
tataacattcacta

SEQ ID NO: 5612 - DNA, 14 bp, Artificial Sequence
  Description of Artificial Sequence: Synthetic oligonucleotide
atataacattcact

SEQ ID NO: 5613 - DNA, 14 bp, Artificial Sequence
  Description of Artificial Sequence: Synthetic oligonucleotide
tatataacattcac

SEQ ID NO: 5614 - DNA, 14 bp, Artificial Sequence
  Description of Artificial Sequence: Synthetic oligonucleotide
ttatataacattca

SEQ ID NO: 5615 - DNA, 14 bp, Artificial Sequence
  Description of Artificial Sequence: Synthetic oligonucleotide
attatataacattc

SEQ ID NO: 5616 - DNA, 14 bp, Artificial Sequence
  Description of Artificial Sequence: Synthetic oligonucleotide
tattatataacatt

SEQ ID NO: 5617 - DNA, 14 bp, Artificial Sequence
  Description of Artificial Sequence: Synthetic oligonucleotide
atattatataacat

SEQ ID NO: 5618 - DNA, 14 bp, Artificial Sequence
  Description of Artificial Sequence: Synthetic oligonucleotide
tatattatataaca

SEQ ID NO: 5619 - DNA, 14 bp, Artificial Sequence
  Description of Artificial Sequence: Synthetic oligonucleotide
gtatattatataac

SEQ ID NO: 5620 - DNA, 14 bp, Artificial Sequence
  Description of Artificial Sequence: Synthetic oligonucleotide
ggtatattatataa

SEQ ID NO: 5621 - DNA, 14 bp, Artificial Sequence
  Description of Artificial Sequence: Synthetic oligonucleotide
aggtatattatata

SEQ ID NO: 5622 - DNA, 14 bp, Artificial Sequence
  Description of Artificial Sequence: Synthetic oligonucleotide
caggtatattatat

SEQ ID NO: 5623 - DNA, 14 bp, Artificial Sequence
  Description of Artificial Sequence: Synthetic oligonucleotide
ccaggtatattata

SEQ ID NO: 5624 - DNA, 14 bp, Artificial Sequence
  Description of Artificial Sequence: Synthetic oligonucleotide
gccaggtatattat

SEQ ID NO: 5625 - DNA, 14 bp, Artificial Sequence
  Description of Artificial Sequence: Synthetic oligonucleotide
tgccaggtatatta

SEQ ID NO: 5626 - DNA, 14 bp, Artificial Sequence
  Description of Artificial Sequence: Synthetic oligonucleotide
ctgccaggtatatt

SEQ ID NO: 5627 - DNA, 14 bp, Artificial Sequence
  Description of Artificial Sequence: Synthetic oligonucleotide
cctgccaggtatat

SEQ ID NO: 5628 - DNA, 14 bp, Artificial Sequence
  Description of Artificial Sequence: Synthetic oligonucleotide
acctgccaggtata

SEQ ID NO: 5629 - DNA, 14 bp, Artificial Sequence
  Description of Artificial Sequence: Synthetic oligonucleotide
gacctgccaggtat

SEQ ID NO: 5630 - DNA, 14 bp, Artificial Sequence
  Description of Artificial Sequence: Synthetic oligonucleotide
agacctgccaggta

SEQ ID NO: 5631 - DNA, 14 bp, Artificial Sequence
  Description of Artificial Sequence: Synthetic oligonucleotide
cagacctgccaggt

SEQ ID NO: 5632 - DNA, 14 bp, Artificial Sequence
  Description of Artificial Sequence: Synthetic oligonucleotide
acagacctgccagg

SEQ ID NO: 5633 - DNA, 14 bp, Artificial Sequence
  Description of Artificial Sequence: Synthetic oligonucleotide
aacagacctgccag

SEQ ID NO: 5634 - DNA, 14 bp, Artificial Sequence
  Description of Artificial Sequence: Synthetic oligonucleotide
aaacagacctgcca

SEQ ID NO: 5635 - DNA, 14 bp, Artificial Sequence
  Description of Artificial Sequence: Synthetic oligonucleotide
aaaacagacctgcc

SEQ ID NO: 5636 - DNA, 14 bp, Artificial Sequence
  Description of Artificial Sequence: Synthetic oligonucleotide
taaaacagacctgc

SEQ ID NO: 5637 - DNA, 14 bp, Artificial Sequence
  Description of Artificial Sequence: Synthetic oligonucleotide
ttaaaacagacctg

SEQ ID NO: 5638 - DNA, 14 bp, Artificial Sequence
  Description of Artificial Sequence: Synthetic oligonucleotide
attaaaacagacct

SEQ ID NO: 5639 - DNA, 14 bp, Artificial Sequence
  Description of Artificial Sequence: Synthetic oligonucleotide
aattaaaacagacc

SEQ ID NO: 5640 - DNA, 14 bp, Artificial Sequence
  Description of Artificial Sequence: Synthetic oligonucleotide
aaattaaaacagac

SEQ ID NO: 5641 - DNA, 14 bp, Artificial Sequence
  Description of Artificial Sequence: Synthetic oligonucleotide
taaattaaaacaga

SEQ ID NO: 5642 - DNA, 14 bp, Artificial Sequence
  Description of Artificial Sequence: Synthetic oligonucleotide
ttaaattaaaacag

SEQ ID NO: 5643 - DNA, 14 bp, Artificial Sequence
  Description of Artificial Sequence: Synthetic oligonucleotide
attaaattaaaaca

SEQ ID NO: 5644 - DNA, 14 bp, Artificial Sequence
  Description of Artificial Sequence: Synthetic oligonucleotide
aattaaattaaaac

SEQ ID NO: 5645 - DNA, 14 bp, Artificial Sequence
  Description of Artificial Sequence: Synthetic oligonucleotide
caattaaattaaaa

SEQ ID NO: 5646 - DNA, 14 bp, Artificial Sequence
  Description of Artificial Sequence: Synthetic oligonucleotide
tcaattaaattaaa

SEQ ID NO: 5647 - DNA, 14 bp, Artificial Sequence
  Description of Artificial Sequence: Synthetic oligonucleotide
ttcaattaaattaa

SEQ ID NO: 5648 - DNA, 14 bp, Artificial Sequence
  Description of Artificial Sequence: Synthetic oligonucleotide
attcaattaaatta

SEQ ID NO: 5649 - DNA, 14 bp, Artificial Sequence
  Description of Artificial Sequence: Synthetic oligonucleotide
tattcaattaaatt

SEQ ID NO: 5650 - DNA, 14 bp, Artificial Sequence
  Description of Artificial Sequence: Synthetic oligonucleotide
ttattcaattaaat

SEQ ID NO: 5651 - DNA, 14 bp, Artificial Sequence
  Description of Artificial Sequence: Synthetic oligonucleotide
tttattcaattaaa

SEQ ID NO: 5652 - DNA, 14 bp, Artificial Sequence
  Description of Artificial Sequence: Synthetic oligonucleotide
ctttattcaattaa

SEQ ID NO: 5653 - DNA, 14 bp, Artificial Sequence
  Description of Artificial Sequence: Synthetic oligonucleotide
tctttattcaatta

SEQ ID NO: 5654 - DNA, 14 bp, Artificial Sequence
  Description of Artificial Sequence: Synthetic oligonucleotide
atctttattcaatt

SEQ ID NO: 5655 - DNA, 14 bp, Artificial Sequence
  Description of Artificial Sequence: Synthetic oligonucleotide
tatctttattcaat

SEQ ID NO: 5656 - DNA, 14 bp, Artificial Sequence
  Description of Artificial Sequence: Synthetic oligonucleotide
gtatctttattcaa

SEQ ID NO: 5657 - DNA, 14 bp, Artificial Sequence
  Description of Artificial Sequence: Synthetic oligonucleotide
tgtatctttattca

SEQ ID NO: 5658 - DNA, 14 bp, Artificial Sequence
  Description of Artificial Sequence: Synthetic oligonucleotide
ttgtatctttattc

SEQ ID NO: 5659 - DNA, 14 bp, Artificial Sequence
  Description of Artificial Sequence: Synthetic oligonucleotide
tttgtatctttatt

SEQ ID NO: 5660 - DNA, 14 bp, Artificial Sequence
  Description of Artificial Sequence: Synthetic oligonucleotide
atttgtatctttat

SEQ ID NO: 5661 - DNA, 14 bp, Artificial Sequence
  Description of Artificial Sequence: Synthetic oligonucleotide
tatttgtatcttta

SEQ ID NO: 5662 - DNA, 14 bp, Artificial Sequence
  Description of Artificial Sequence: Synthetic oligonucleotide
gtatttgtatcttt

SEQ ID NO: 5663 - DNA, 14 bp, Artificial Sequence
  Description of Artificial Sequence: Synthetic oligonucleotide
agtatttgtatctt

SEQ ID NO: 5664 - DNA, 14 bp, Artificial Sequence
  Description of Artificial Sequence: Synthetic oligonucleotide
aagtatttgtatct

SEQ ID NO: 5665 - DNA, 14 bp, Artificial Sequence
  Description of Artificial Sequence: Synthetic oligonucleotide
aaagtatttgtatc

SEQ ID NO: 5666 - DNA, 14 bp, Artificial Sequence
  Description of Artificial Sequence: Synthetic oligonucleotide
caaagtatttgtat

SEQ ID NO: 5667 - DNA, 14 bp, Artificial Sequence
  Description of Artificial Sequence: Synthetic oligonucleotide
acaaagtatttgta

SEQ ID NO: 5668 - DNA, 14 bp, Artificial Sequence
  Description of Artificial Sequence: Synthetic oligonucleotide
aacaaagtatttgt

SEQ ID NO: 5669 - DNA, 14 bp, Artificial Sequence
  Description of Artificial Sequence: Synthetic oligonucleotide
aaacaaagtatttg

SEQ ID NO: 5670 - DNA, 14 bp, Artificial Sequence
  Description of Artificial Sequence: Synthetic oligonucleotide
caaacaaagtattt

SEQ ID NO: 5671 - DNA, 14 bp, Artificial Sequence
  Description of Artificial Sequence: Synthetic oligonucleotide
ccaaacaaagtatt

SEQ ID NO: 5672 - DNA, 14 bp, Artificial Sequence
  Description of Artificial Sequence: Synthetic oligonucleotide
gccaaacaaagtat

SEQ ID NO: 5673 - DNA, 14 bp, Artificial Sequence
  Description of Artificial Sequence: Synthetic oligonucleotide
agccaaacaaagta

SEQ ID NO: 5674 - DNA, 14 bp, Artificial Sequence
  Description of Artificial Sequence: Synthetic oligonucleotide
cagccaaacaaagt

SEQ ID NO: 5675 - DNA, 14 bp, Artificial Sequence
  Description of Artificial Sequence: Synthetic oligonucleotide
ccagccaaacaaag

SEQ ID NO: 5676 - DNA, 14 bp, Artificial Sequence
  Description of Artificial Sequence: Synthetic oligonucleotide
gccagccaaacaaa

SEQ ID NO: 5677 - DNA, 14 bp, Artificial Sequence
  Description of Artificial Sequence: Synthetic oligonucleotide
tgccagccaaacaa

SEQ ID NO: 5678 - DNA, 14 bp, Artificial Sequence
  Description of Artificial Sequence: Synthetic oligonucleotide
atgccagccaaaca

SEQ ID NO: 5679 - DNA, 14 bp, Artificial Sequence
  Description of Artificial Sequence: Synthetic oligonucleotide
tatgccagccaaac

SEQ ID NO: 5680 - DNA, 14 bp, Artificial Sequence
  Description of Artificial Sequence: Synthetic oligonucleotide
atatgccagccaaa

SEQ ID NO: 5681 - DNA, 14 bp, Artificial Sequence
  Description of Artificial Sequence: Synthetic oligonucleotide
tatatgccagccaa

SEQ ID NO: 5682 - DNA, 14 bp, Artificial Sequence
  Description of Artificial Sequence: Synthetic oligonucleotide
atatatgccagcca

SEQ ID NO: 5683 - DNA, 14 bp, Artificial Sequence
  Description of Artificial Sequence: Synthetic oligonucleotide
aatatatgccagcc

SEQ ID NO: 5684 - DNA, 14 bp, Artificial Sequence
  Description of Artificial Sequence: Synthetic oligonucleotide
taatatatgccagc

SEQ ID NO: 5685 - DNA, 14 bp, Artificial Sequence
  Description of Artificial Sequence: Synthetic oligonucleotide
ttaatatatgccag

SEQ ID NO: 5686 - DNA, 14 bp, Artificial Sequence
  Description of Artificial Sequence: Synthetic oligonucleotide
tttaatatatgcca

SEQ ID NO: 5687 - DNA, 14 bp, Artificial Sequence
  Description of Artificial Sequence: Synthetic oligonucleotide
atttaatatatgcc

SEQ ID NO: 5688 - DNA, 14 bp, Artificial Sequence
  Description of Artificial Sequence: Synthetic oligonucleotide
aatttaatatatgc

SEQ ID NO: 5689 - DNA, 14 bp, Artificial Sequence
  Description of Artificial Sequence: Synthetic oligonucleotide
taatttaatatatg

SEQ ID NO: 5690 - DNA, 14 bp, Artificial Sequence
  Description of Artificial Sequence: Synthetic oligonucleotide
ataatttaatatat

SEQ ID NO: 5691 - DNA, 14 bp, Artificial Sequence
  Description of Artificial Sequence: Synthetic oligonucleotide
aataatttaatata

SEQ ID NO: 5692 - DNA, 14 bp, Artificial Sequence
  Description of Artificial Sequence: Synthetic oligonucleotide
taataatttaatat

SEQ ID NO: 5693 - DNA, 14 bp, Artificial Sequence
  Description of Artificial Sequence: Synthetic oligonucleotide
ataataatttaata

SEQ ID NO: 5694 - DNA, 14 bp, Artificial Sequence
  Description of Artificial Sequence: Synthetic oligonucleotide
tataataatttaat

SEQ ID NO: 5695 - DNA, 14 bp, Artificial Sequence
  Description of Artificial Sequence: Synthetic oligonucleotide
atataataatttaa

SEQ ID NO: 5696 - DNA, 14 bp, Artificial Sequence
  Description of Artificial Sequence: Synthetic oligonucleotide
catataataattta

SEQ ID NO: 5697 - DNA, 14 bp, Artificial Sequence
  Description of Artificial Sequence: Synthetic oligonucleotide
tcatataataattt

SEQ ID NO: 5698 - DNA, 14 bp, Artificial Sequence
  Description of Artificial Sequence: Synthetic oligonucleotide
ttcatataataatt

SEQ ID NO: 5699 - DNA, 14 bp, Artificial Sequence
  Description of Artificial Sequence: Synthetic oligonucleotide
cttcatataataat

SEQ ID NO: 5700 - DNA, 14 bp, Artificial Sequence
  Description of Artificial Sequence: Synthetic oligonucleotide
tcttcatataataa

SEQ ID NO: 5701 - DNA, 14 bp, Artificial Sequence
  Description of Artificial Sequence: Synthetic oligonucleotide
ttcttcatataata

SEQ ID NO: 5702 - DNA, 14 bp, Artificial Sequence
  Description of Artificial Sequence: Synthetic oligonucleotide
tttcttcatataat

SEQ ID NO: 5703 - DNA, 14 bp, Artificial Sequence
  Description of Artificial Sequence: Synthetic oligonucleotide
ttttcttcatataa

SEQ ID NO: 5704 - DNA, 14 bp, Artificial Sequence
  Description of Artificial Sequence: Synthetic oligonucleotide
attttcttcatata

SEQ ID NO: 5705 - DNA, 14 bp, Artificial Sequence
  Description of Artificial Sequence: Synthetic oligonucleotide
cattttcttcatat

SEQ ID NO: 5706 - DNA, 14 bp, Artificial Sequence
  Description of Artificial Sequence: Synthetic oligonucleotide
ccattttcttcata

SEQ ID NO: 5707 - DNA, 14 bp, Artificial Sequence
  Description of Artificial Sequence: Synthetic oligonucleotide
accattttcttcat

SEQ ID NO: 5708 - DNA, 14 bp, Artificial Sequence
  Description of Artificial Sequence: Synthetic oligonucleotide
aaccattttcttca

SEQ ID NO: 5709 - DNA, 14 bp, Artificial Sequence
  Description of Artificial Sequence: Synthetic oligonucleotide
caaccattttcttc

SEQ ID NO: 5710 - DNA, 14 bp, Artificial Sequence
  Description of Artificial Sequence: Synthetic oligonucleotide
tcaaccattttctt

SEQ ID NO: 5711 - DNA, 14 bp, Artificial Sequence
  Description of Artificial Sequence: Synthetic oligonucleotide
atcaaccattttct

SEQ ID NO: 5712 - DNA, 14 bp, Artificial Sequence
  Description of Artificial Sequence: Synthetic oligonucleotide
aatcaaccattttc

SEQ ID NO: 5713 - DNA, 14 bp, Artificial Sequence
  Description of Artificial Sequence: Synthetic oligonucleotide
gaatcaaccatttt

SEQ ID NO: 5714 - DNA, 14 bp, Artificial Sequence
  Description of Artificial Sequence: Synthetic oligonucleotide
agaatcaaccattt

SEQ ID NO: 5715 - DNA, 14 bp, Artificial Sequence
  Description of Artificial Sequence: Synthetic oligonucleotide
aagaatcaaccatt

SEQ ID NO: 5716 - DNA, 14 bp, Artificial Sequence
  Description of Artificial Sequence: Synthetic oligonucleotide
taagaatcaaccat

SEQ ID NO: 5717 - DNA, 14 bp, Artificial Sequence
  Description of Artificial Sequence: Synthetic oligonucleotide
ataagaatcaacca

SEQ ID NO: 5718 - DNA, 14 bp, Artificial Sequence
  Description of Artificial Sequence: Synthetic oligonucleotide
aataagaatcaacc

SEQ ID NO: 5719 - DNA, 14 bp, Artificial Sequence
  Description of Artificial Sequence: Synthetic oligonucleotide
aaataagaatcaac

SEQ ID NO: 5720 - DNA, 14 bp, Artificial Sequence
  Description of Artificial Sequence: Synthetic oligonucleotide
gaaataagaatcaa

SEQ ID NO: 5721 - DNA, 14 bp, Artificial Sequence
  Description of Artificial Sequence: Synthetic oligonucleotide
agaaataagaatca

SEQ ID NO: 5722 - DNA, 14 bp, Artificial Sequence
  Description of Artificial Sequence: Synthetic oligonucleotide
aagaaataagaatc

SEQ ID NO: 5723 - DNA, 14 bp, Artificial Sequence
  Description of Artificial Sequence: Synthetic oligonucleotide
aaagaaataagaat

SEQ ID NO: 5724 - DNA, 14 bp, Artificial Sequence
  Description of Artificial Sequence: Synthetic oligonucleotide
aaaagaaataagaa

SEQ ID NO: 5725 - DNA, 14 bp, Artificial Sequence
  Description of Artificial Sequence: Synthetic oligonucleotide
taaaagaaataaga

SEQ ID NO: 5726 - DNA, 14 bp, Artificial Sequence
  Description of Artificial Sequence: Synthetic oligonucleotide
ctaaaagaaataag

SEQ ID NO: 5727 - DNA, 14 bp, Artificial Sequence
  Description of Artificial Sequence: Synthetic oligonucleotide
actaaaagaaataa

SEQ ID NO: 5728 - DNA, 14 bp, Artificial Sequence
  Description of Artificial Sequence: Synthetic oligonucleotide
aactaaaagaaata

SEQ ID NO: 5729 - DNA, 14 bp, Artificial Sequence
  Description of Artificial Sequence: Synthetic oligonucleotide
caactaaaagaaat

SEQ ID NO: 5730 - DNA, 14 bp, Artificial Sequence
  Description of Artificial Sequence: Synthetic oligonucleotide
tcaactaaaagaaa

SEQ ID NO: 5731 - DNA, 14 bp, Artificial Sequence
  Description of Artificial Sequence: Synthetic oligonucleotide
ttcaactaaaagaa

SEQ ID NO: 5732 - DNA, 14 bp, Artificial Sequence
  Description of Artificial Sequence: Synthetic oligonucleotide
tttcaactaaaaga

SEQ ID NO: 5733 - DNA, 14 bp, Artificial Sequence
  Description of Artificial Sequence: Synthetic oligonucleotide
ttttcaactaaaag

SEQ ID NO: 5734 - DNA, 14 bp, Artificial Sequence
  Description of Artificial Sequence: Synthetic oligonucleotide
tttttcaactaaaa

SEQ ID NO: 5735 - DNA, 14 bp, Artificial Sequence
  Description of Artificial Sequence: Synthetic oligonucleotide
gtttttcaactaaa

SEQ ID NO: 5736 - DNA, 14 bp, Artificial Sequence
  Description of Artificial Sequence: Synthetic oligonucleotide
tgtttttcaactaa

SEQ ID NO: 5737 - DNA, 14 bp, Artificial Sequence
  Description of Artificial Sequence: Synthetic oligonucleotide
gtgtttttcaacta

SEQ ID NO: 5738 - DNA, 14 bp, Artificial Sequence
  Description of Artificial Sequence: Synthetic oligonucleotide
tgtgtttttcaact

SEQ ID NO: 5739 - DNA, 14 bp, Artificial Sequence
  Description of Artificial Sequence: Synthetic oligonucleotide
gtgtgtttttcaac

SEQ ID NO: 5740 - DNA, 14 bp, Artificial Sequence
  Description of Artificial Sequence: Synthetic oligonucleotide
tgtgtgtttttcaa

SEQ ID NO: 5741 - DNA, 14 bp, Artificial Sequence
  Description of Artificial Sequence: Synthetic oligonucleotide
ttgtgtgtttttca

SEQ ID NO: 5742 - DNA, 14 bp, Artificial Sequence
  Description of Artificial Sequence: Synthetic oligonucleotide
tttgtgtgtttttc

SEQ ID NO: 5743 - DNA, 14 bp, Artificial Sequence
  Description of Artificial Sequence: Synthetic oligonucleotide
ttttgtgtgttttt

SEQ ID NO: 5744 - DNA, 14 bp, Artificial Sequence
  Description of Artificial Sequence: Synthetic oligonucleotide
tttttgtgtgtttt

SEQ ID NO: 5745 - DNA, 14 bp, Artificial Sequence
  Description of Artificial Sequence: Synthetic oligonucleotide
gtttttgtgtgttt

SEQ ID NO: 5746 - DNA, 14 bp, Artificial Sequence
  Description of Artificial Sequence: Synthetic oligonucleotide
tgtttttgtgtgtt

SEQ ID NO: 5747 - DNA, 14 bp, Artificial Sequence
  Description of Artificial Sequence: Synthetic oligonucleotide
gtgtttttgtgtgt

SEQ ID NO: 5748 - DNA, 14 bp, Artificial Sequence
  Description of Artificial Sequence: Synthetic oligonucleotide
agtgtttttgtgtg

SEQ ID NO: 5749 - DNA, 14 bp, Artificial Sequence
  Description of Artificial Sequence: Synthetic oligonucleotide
tagtgtttttgtgt

SEQ ID NO: 5750 - DNA, 14 bp, Artificial Sequence
  Description of Artificial Sequence: Synthetic oligonucleotide
ttagtgtttttgtg

SEQ ID NO: 5751 - DNA, 14 bp, Artificial Sequence
  Description of Artificial Sequence: Synthetic oligonucleotide
tttagtgtttttgt

SEQ ID NO: 5752 - DNA, 14 bp, Artificial Sequence
  Description of Artificial Sequence: Synthetic oligonucleotide
gtttagtgtttttg

SEQ ID NO: 5753 - DNA, 14 bp, Artificial Sequence
  Description of Artificial Sequence: Synthetic oligonucleotide
tgtttagtgttttt

SEQ ID NO: 5754 - DNA, 14 bp, Artificial Sequence
  Description of Artificial Sequence: Synthetic oligonucleotide
atgtttagtgtttt

SEQ ID NO: 5755 - DNA, 14 bp, Artificial Sequence
  Description of Artificial Sequence: Synthetic oligonucleotide
tatgtttagtgttt

SEQ ID NO: 5756 - DNA, 14 bp, Artificial Sequence
  Description of Artificial Sequence: Synthetic oligonucleotide
ttatgtttagtgtt

SEQ ID NO: 5757 - DNA, 14 bp, Artificial Sequence
  Description of Artificial Sequence: Synthetic oligonucleotide
tttatgtttagtgt

SEQ ID NO: 5758 - DNA, 14 bp, Artificial Sequence
  Description of Artificial Sequence: Synthetic oligonucleotide
ttttatgtttagtg

SEQ ID NO: 5759 - DNA, 14 bp, Artificial Sequence
  Description of Artificial Sequence: Synthetic oligonucleotide
cttttatgtttagt

SEQ ID NO: 5760 - DNA, 14 bp, Artificial Sequence
  Description of Artificial Sequence: Synthetic oligonucleotide
gcttttatgtttag

SEQ ID NO: 5761 - DNA, 14 bp, Artificial Sequence
  Description of Artificial Sequence: Synthetic oligonucleotide
tgcttttatgttta

SEQ ID NO: 5762 - DNA, 14 bp, Artificial Sequence
  Description of Artificial Sequence: Synthetic oligonucleotide
gtgcttttatgttt

SEQ ID NO: 5763 - DNA, 14 bp, Artificial Sequence
  Description of Artificial Sequence: Synthetic oligonucleotide
cgtgcttttatgtt

SEQ ID NO: 5764 - DNA, 14 bp, Artificial Sequence
  Description of Artificial Sequence: Synthetic oligonucleotide
acgtgcttttatgt

SEQ ID NO: 5765 - DNA, 14 bp, Artificial Sequence
  Description of Artificial Sequence: Synthetic oligonucleotide
aacgtgcttttatg

SEQ ID NO: 5766 - DNA, 14 bp, Artificial Sequence
  Description of Artificial Sequence: Synthetic oligonucleotide
aaacgtgcttttat

SEQ ID NO: 5767 - DNA, 14 bp, Artificial Sequence
  Description of Artificial Sequence: Synthetic oligonucleotide
aaaacgtgctttta

SEQ ID NO: 5768 - DNA, 14 bp, Artificial Sequence
  Description of Artificial Sequence: Synthetic oligonucleotide
caaaacgtgctttt

SEQ ID NO: 5769 - DNA, 14 bp, Artificial Sequence
  Description of Artificial Sequence: Synthetic oligonucleotide
acaaaacgtgcttt

SEQ ID NO: 5770 - DNA, 14 bp, Artificial Sequence
  Description of Artificial Sequence: Synthetic oligonucleotide
cacaaaacgtgctt

SEQ ID NO: 5771 - DNA, 14 bp, Artificial Sequence
  Description of Artificial Sequence: Synthetic oligonucleotide
ccacaaaacgtgct

SEQ ID NO: 5772 - DNA, 14 bp, Artificial Sequence
  Description of Artificial Sequence: Synthetic oligonucleotide
accacaaaacgtgc

SEQ ID NO: 5773 - DNA, 14 bp, Artificial Sequence
  Description of Artificial Sequence: Synthetic oligonucleotide
taccacaaaacgtg

SEQ ID NO: 5774 - DNA, 14 bp, Artificial Sequence
  Description of Artificial Sequence: Synthetic oligonucleotide
gtaccacaaaacgt

SEQ ID NO: 5775 - DNA, 14 bp, Artificial Sequence
  Description of Artificial Sequence: Synthetic oligonucleotide
cgtaccacaaaacg

SEQ ID NO: 5776 - DNA, 14 bp, Artificial Sequence
  Description of Artificial Sequence: Synthetic oligonucleotide
gcgtaccacaaaac

SEQ ID NO: 5777 - DNA, 14 bp, Artificial Sequence
  Description of Artificial Sequence: Synthetic oligonucleotide
ggcgtaccacaaaa

SEQ ID NO: 5778 - DNA, 14 bp, Artificial Sequence
  Description of Artificial Sequence: Synthetic oligonucleotide
aggcgtaccacaaa

SEQ ID NO: 5779 - DNA, 14 bp, Artificial Sequence
  Description of Artificial Sequence: Synthetic oligonucleotide
aaggcgtaccacaa

SEQ ID NO: 5780 - DNA, 14 bp, Artificial Sequence
  Description of Artificial Sequence: Synthetic oligonucleotide
caaggcgtaccaca

SEQ ID NO: 5781 - DNA, 14 bp, Artificial Sequence
  Description of Artificial Sequence: Synthetic oligonucleotide
ccaaggcgtaccac

SEQ ID NO: 5782 - DNA, 14 bp, Artificial Sequence
  Description of Artificial Sequence: Synthetic oligonucleotide
accaaggcgtacca

SEQ ID NO: 5783 - DNA, 14 bp, Artificial Sequence
  Description of Artificial Sequence: Synthetic oligonucleotide
aaccaaggcgtacc

SEQ ID NO: 5784 - DNA, 14 bp, Artificial Sequence
  Description of Artificial Sequence: Synthetic oligonucleotide
aaaccaaggcgtac

SEQ ID NO: 5785 - DNA, 14 bp, Artificial Sequence
  Description of Artificial Sequence: Synthetic oligonucleotide
gaaaccaaggcgta

SEQ ID NO: 5786 - DNA, 14 bp, Artificial Sequence
  Description of Artificial Sequence: Synthetic oligonucleotide
agaaaccaaggcgt

SEQ ID NO: 5787 - DNA, 14 bp, Artificial Sequence
  Description of Artificial Sequence: Synthetic oligonucleotide
tagaaaccaaggcg

SEQ ID NO: 5788 - DNA, 14 bp, Artificial Sequence
  Description of Artificial Sequence: Synthetic oligonucleotide
ctagaaaccaaggc

SEQ ID NO: 5789 - DNA, 14 bp, Artificial Sequence
  Description of Artificial Sequence: Synthetic oligonucleotide
actagaaaccaagg

SEQ ID NO: 5790 - DNA, 14 bp, Artificial Sequence
  Description of Artificial Sequence: Synthetic oligonucleotide
aactagaaaccaag

SEQ ID NO: 5791 - DNA, 14 bp, Artificial Sequence
  Description of Artificial Sequence: Synthetic oligonucleotide
gaactagaaaccaa

SEQ ID NO: 5792 - DNA, 14 bp, Artificial Sequence
  Description of Artificial Sequence: Synthetic oligonucleotide
agaactagaaacca

SEQ ID NO: 5793 - DNA, 14 bp, Artificial Sequence
  Description of Artificial Sequence: Synthetic oligonucleotide
cagaactagaaacc

SEQ ID NO: 5794 - DNA, 14 bp, Artificial Sequence
  Description of Artificial Sequence: Synthetic oligonucleotide
ccagaactagaaac

SEQ ID NO: 5795 - DNA, 14 bp, Artificial Sequence
  Description of Artificial Sequence: Synthetic oligonucleotide
tccagaactagaaa

SEQ ID NO: 5796 - DNA, 14 bp, Artificial Sequence
  Description of Artificial Sequence: Synthetic oligonucleotide
atccagaactagaa

SEQ ID NO: 5797 - DNA, 14 bp, Artificial Sequence
  Description of Artificial Sequence: Synthetic oligonucleotide
tatccagaactaga

SEQ ID NO: 5798 - DNA, 14 bp, Artificial Sequence
  Description of Artificial Sequence: Synthetic oligonucleotide
atatccagaactag

SEQ ID NO: 5799 - DNA, 14 bp, Artificial Sequence
  Description of Artificial Sequence: Synthetic oligonucleotide
tatatccagaacta

SEQ ID NO: 5800 - DNA, 14 bp, Artificial Sequence
  Description of Artificial Sequence: Synthetic oligonucleotide
atatatccagaact

SEQ ID NO: 5801 - DNA, 14 bp, Artificial Sequence
  Description of Artificial Sequence: Synthetic oligonucleotide
catatatccagaac

SEQ ID NO: 5802 - DNA, 14 bp, Artificial Sequence
  Description of Artificial Sequence: Synthetic oligonucleotide
acatatatccagaa

SEQ ID NO: 5803 - DNA, 14 bp, Artificial Sequence
  Description of Artificial Sequence: Synthetic oligonucleotide
tacatatatccaga

SEQ ID NO: 5804 - DNA, 14 bp, Artificial Sequence
  Description of Artificial Sequence: Synthetic oligonucleotide
atacatatatccag

SEQ ID NO: 5805 - DNA, 14 bp, Artificial Sequence
  Description of Artificial Sequence: Synthetic oligonucleotide
aatacatatatcca

SEQ ID NO: 5806 - DNA, 14 bp, Artificial Sequence
  Description of Artificial Sequence: Synthetic oligonucleotide
taatacatatatcc

SEQ ID NO: 5807 - DNA, 14 bp, Artificial Sequence
  Description of Artificial Sequence: Synthetic oligonucleotide
ttaatacatatatc

SEQ ID NO: 5808 - DNA, 14 bp, Artificial Sequence
  Description of Artificial Sequence: Synthetic oligonucleotide
attaatacatatat

SEQ ID NO: 5809 - DNA, 14 bp, Artificial Sequence
  Description of Artificial Sequence: Synthetic oligonucleotide
gattaatacatata

SEQ ID NO: 5810 - DNA, 14 bp, Artificial Sequence
  Description of Artificial Sequence: Synthetic oligonucleotide
agattaatacatat

SEQ ID NO: 5811 - DNA, 14 bp, Artificial Sequence
  Description of Artificial Sequence: Synthetic oligonucleotide
aagattaatacata

SEQ ID NO: 5812 - DNA, 14 bp, Artificial Sequence
  Description of Artificial Sequence: Synthetic oligonucleotide
taagattaatacat

SEQ ID NO: 5813 - DNA, 14 bp, Artificial Sequence
  Description of Artificial Sequence: Synthetic oligonucleotide
ttaagattaataca

SEQ ID NO: 5814 - DNA, 14 bp, Artificial Sequence
  Description of Artificial Sequence: Synthetic oligonucleotide
tttaagattaatac

SEQ ID NO: 5815 - DNA, 14 bp, Artificial Sequence
  Description of Artificial Sequence: Synthetic oligonucleotide
ctttaagattaata

SEQ ID NO: 5816 - DNA, 14 bp, Artificial Sequence
  Description of Artificial Sequence: Synthetic oligonucleotide
tctttaagattaat

SEQ ID NO: 5817 - DNA, 14 bp, Artificial Sequence
  Description of Artificial Sequence: Synthetic oligonucleotide
ttctttaagattaa

SEQ ID NO: 5818 - DNA, 14 bp, Artificial Sequence
  Description of Artificial Sequence: Synthetic oligonucleotide
attctttaagatta

SEQ ID NO: 5819 - DNA, 14 bp, Artificial Sequence
  Description of Artificial Sequence: Synthetic oligonucleotide
cattctttaagatt

SEQ ID NO: 5820 - DNA, 14 bp, Artificial Sequence
  Description of Artificial Sequence: Synthetic oligonucleotide
tcattctttaagat

SEQ ID NO: 5821 - DNA, 14 bp, Artificial Sequence
  Description of Artificial Sequence: Synthetic oligonucleotide
atcattctttaaga

SEQ ID NO: 5822 - DNA, 14 bp, Artificial Sequence
  Description of Artificial Sequence: Synthetic oligonucleotide
gatcattctttaag

SEQ ID NO: 5823 - DNA, 14 bp, Artificial Sequence
  Description of Artificial Sequence: Synthetic oligonucleotide
agatcattctttaa

SEQ ID NO: 5824 - DNA, 14 bp, Artificial Sequence
  Description of Artificial Sequence: Synthetic oligonucleotide
tagatcattcttta

SEQ ID NO: 5825 - DNA, 14 bp, Artificial Sequence
  Description of Artificial Sequence: Synthetic oligonucleotide
ttagatcattcttt

SEQ ID NO: 5826 - DNA, 14 bp, Artificial Sequence
  Description of Artificial Sequence: Synthetic oligonucleotide
tttagatcattctt

SEQ ID NO: 5827 - DNA, 14 bp, Artificial Sequence
  Description of Artificial Sequence: Synthetic oligonucleotide
ctttagatcattct

SEQ ID NO: 5828 - DNA, 14 bp, Artificial Sequence
  Description of Artificial Sequence: Synthetic oligonucleotide
actttagatcattc

SEQ ID NO: 5829 - DNA, 14 bp, Artificial Sequence
  Description of Artificial Sequence: Synthetic oligonucleotide
gactttagatcatt

SEQ ID NO: 5830 - DNA, 14 bp, Artificial Sequence
  Description of Artificial Sequence: Synthetic oligonucleotide
tgactttagatcat

SEQ ID NO: 5831 - DNA, 14 bp, Artificial Sequence
  Description of Artificial Sequence: Synthetic oligonucleotide
gtgactttagatca

SEQ ID NO: 5832 - DNA, 14 bp, Artificial Sequence
  Description of Artificial Sequence: Synthetic oligonucleotide
tgtgactttagatc

SEQ ID NO: 5833 - DNA, 14 bp, Artificial Sequence
  Description of Artificial Sequence: Synthetic oligonucleotide
ctgtgactttagat

SEQ ID NO: 5834 - DNA, 14 bp, Artificial Sequence
  Description of Artificial Sequence: Synthetic oligonucleotide
gctgtgactttaga

SEQ ID NO: 5835 - DNA, 14 bp, Artificial Sequence
  Description of Artificial Sequence: Synthetic oligonucleotide
agctgtgactttag

SEQ ID NO: 5836 - DNA, 14 bp, Artificial Sequence
  Description of Artificial Sequence: Synthetic oligonucleotide
aagctgtgacttta

SEQ ID NO: 5837 - DNA, 14 bp, Artificial Sequence
  Description of Artificial Sequence: Synthetic oligonucleotide
caagctgtgacttt

SEQ ID NO: 5838 - DNA, 14 bp, Artificial Sequence
  Description of Artificial Sequence: Synthetic oligonucleotide
ccaagctgtgactt

SEQ ID NO: 5839 - DNA, 14 bp, Artificial Sequence
  Description of Artificial Sequence: Synthetic oligonucleotide
gccaagctgtgact

SEQ ID NO: 5840 - DNA, 14 bp, Artificial Sequence
  Description of Artificial Sequence: Synthetic oligonucleotide
tgccaagctgtgac

SEQ ID NO: 5841 - DNA, 14 bp, Artificial Sequence
  Description of Artificial Sequence: Synthetic oligonucleotide
atgccaagctgtga

SEQ ID NO: 5842 - DNA, 14 bp, Artificial Sequence
  Description of Artificial Sequence: Synthetic oligonucleotide
tatgccaagctgtg

SEQ ID NO: 5843 - DNA, 14 bp, Artificial Sequence
  Description of Artificial Sequence: Synthetic oligonucleotide
atatgccaagctgt

SEQ ID NO: 5844 - DNA, 14 bp, Artificial Sequence
  Description of Artificial Sequence: Synthetic oligonucleotide
tatatgccaagctg

SEQ ID NO: 5845 - DNA, 14 bp, Artificial Sequence
  Description of Artificial Sequence: Synthetic oligonucleotide
ctatatgccaagct

SEQ ID NO: 5846 - DNA, 14 bp, Artificial Sequence
  Description of Artificial Sequence: Synthetic oligonucleotide
cctatatgccaagc

SEQ ID NO: 5847 - DNA, 14 bp, Artificial Sequence
  Description of Artificial Sequence: Synthetic oligonucleotide
tcctatatgccaag

SEQ ID NO: 5848 - DNA, 14 bp, Artificial Sequence
  Description of Artificial Sequence: Synthetic oligonucleotide
ttcctatatgccaa

SEQ ID NO: 5849 - DNA, 14 bp, Artificial Sequence
  Description of Artificial Sequence: Synthetic oligonucleotide
cttcctatatgcca

SEQ ID NO: 5850 - DNA, 14 bp, Artificial Sequence
  Description of Artificial Sequence: Synthetic oligonucleotide
tcttcctatatgcc

SEQ ID NO: 5851 - DNA, 14 bp, Artificial Sequence
  Description of Artificial Sequence: Synthetic oligonucleotide
atcttcctatatgc

SEQ ID NO: 5852 - DNA, 14 bp, Artificial Sequence
  Description of Artificial Sequence: Synthetic oligonucleotide
tatcttcctatatg

SEQ ID NO: 5853 - DNA, 14 bp, Artificial Sequence
  Description of Artificial Sequence: Synthetic oligonucleotide
gtatcttcctatat

SEQ ID NO: 5854 - DNA, 14 bp, Artificial Sequence
  Description of Artificial Sequence: Synthetic oligonucleotide
agtatcttcctata

SEQ ID NO: 5855 - DNA, 14 bp, Artificial Sequence
  Description of Artificial Sequence: Synthetic oligonucleotide
aagtatcttcctat

SEQ ID NO: 5856 - DNA, 14 bp, Artificial Sequence
  Description of Artificial Sequence: Synthetic oligonucleotide
caagtatcttccta

SEQ ID NO: 5857 - DNA, 14 bp, Artificial Sequence
  Description of Artificial Sequence: Synthetic oligonucleotide
ccaagtatcttcct

SEQ ID NO: 5858 - DNA, 14 bp, Artificial Sequence
  Description of Artificial Sequence: Synthetic oligonucleotide
accaagtatcttcc

SEQ ID NO: 5859 - DNA, 14 bp, Artificial Sequence
  Description of Artificial Sequence: Synthetic oligonucleotide
aaccaagtatcttc

SEQ ID NO: 5860 - DNA, 14 bp, Artificial Sequence
  Description of Artificial Sequence: Synthetic oligonucleotide
taaccaagtatctt

SEQ ID NO: 5861 - DNA, 14 bp, Artificial Sequence
  Description of Artificial Sequence: Synthetic oligonucleotide
ctaaccaagtatct

SEQ ID NO: 5862 - DNA, 14 bp, Artificial Sequence
  Description of Artificial Sequence: Synthetic oligonucleotide
tctaaccaagtatc

SEQ ID NO: 5863 - DNA, 14 bp, Artificial Sequence
  Description of Artificial Sequence: Synthetic oligonucleotide
ttctaaccaagtat

SEQ ID NO: 5864 - DNA, 14 bp, Artificial Sequence
  Description of Artificial Sequence: Synthetic oligonucleotide
attctaaccaagta

SEQ ID NO: 5865 - DNA, 14 bp, Artificial Sequence
  Description of Artificial Sequence: Synthetic oligonucleotide
tattctaaccaagt

SEQ ID NO: 5866 - DNA, 14 bp, Artificial Sequence
  Description of Artificial Sequence: Synthetic oligonucleotide
ctattctaaccaag

SEQ ID NO: 5867 - DNA, 14 bp, Artificial Sequence
  Description of Artificial Sequence: Synthetic oligonucleotide
cctattctaaccaa

SEQ ID NO: 5868 - DNA, 14 bp, Artificial Sequence
  Description of Artificial Sequence: Synthetic oligonucleotide
tcctattctaacca

SEQ ID NO: 5869 - DNA, 14 bp, Artificial Sequence
  Description of Artificial Sequence: Synthetic oligonucleotide
atcctattctaacc

SEQ ID NO: 5870 - DNA, 14 bp, Artificial Sequence
  Description of Artificial Sequence: Synthetic oligonucleotide
catcctattctaac

SEQ ID NO: 5871 - DNA, 14 bp, Artificial Sequence
  Description of Artificial Sequence: Synthetic oligonucleotide
ccatcctattctaa

SEQ ID NO: 5872 - DNA, 14 bp, Artificial Sequence
  Description of Artificial Sequence: Synthetic oligonucleotide
cccatcctattcta

SEQ ID NO: 5873 - DNA, 14 bp, Artificial Sequence
  Description of Artificial Sequence: Synthetic oligonucleotide
acccatcctattct

SEQ ID NO: 5874 - DNA, 14 bp, Artificial Sequence
  Description of Artificial Sequence: Synthetic oligonucleotide
tacccatcctattc

SEQ ID NO: 5875 - DNA, 14 bp, Artificial Sequence
  Description of Artificial Sequence: Synthetic oligonucleotide
atacccatcctatt

SEQ ID NO: 5876 - DNA, 14 bp, Artificial Sequence
  Description of Artificial Sequence: Synthetic oligonucleotide
gatacccatcctat

SEQ ID NO: 5877 - DNA, 14 bp, Artificial Sequence
  Description of Artificial Sequence: Synthetic oligonucleotide
agatacccatccta

SEQ ID NO: 5878 - DNA, 14 bp, Artificial Sequence
  Description of Artificial Sequence: Synthetic oligonucleotide
aagatacccatcct

SEQ ID NO: 5879 - DNA, 14 bp, Artificial Sequence
  Description of Artificial Sequence: Synthetic oligonucleotide
aaagatacccatcc

SEQ ID NO: 5880 - DNA, 14 bp, Artificial Sequence
  Description of Artificial Sequence: Synthetic oligonucleotide
aaaagatacccatc

SEQ ID NO: 5881 - DNA, 14 bp, Artificial Sequence
  Description of Artificial Sequence: Synthetic oligonucleotide
taaaagatacccat

SEQ ID NO: 5882 - DNA, 14 bp, Artificial Sequence
  Description of Artificial Sequence: Synthetic oligonucleotide
ttaaaagataccca

SEQ ID NO: 5883 - DNA, 14 bp, Artificial Sequence
  Description of Artificial Sequence: Synthetic oligonucleotide
cttaaaagataccc

SEQ ID NO: 5884 - DNA, 14 bp, Artificial Sequence
  Description of Artificial Sequence: Synthetic oligonucleotide
gcttaaaagatacc

SEQ ID NO: 5885 - DNA, 14 bp, Artificial Sequence
  Description of Artificial Sequence: Synthetic oligonucleotide
tgcttaaaagatac

SEQ ID NO: 5886 - DNA, 14 bp, Artificial Sequence
  Description of Artificial Sequence: Synthetic oligonucleotide
ctgcttaaaagata

SEQ ID NO: 5887 - DNA, 14 bp, Artificial Sequence
  Description of Artificial Sequence: Synthetic oligonucleotide
tctgcttaaaagat

SEQ ID NO: 5888 - DNA, 14 bp, Artificial Sequence
  Description of Artificial Sequence: Synthetic oligonucleotide
ttctgcttaaaaga

SEQ ID NO: 5889 - DNA, 14 bp, Artificial Sequence
  Description of Artificial Sequence: Synthetic oligonucleotide
gttctgcttaaaag

SEQ ID NO: 5890 - DNA, 14 bp, Artificial Sequence
  Description of Artificial Sequence: Synthetic oligonucleotide
agttctgcttaaaa

SEQ ID NO: 5891 - DNA, 14 bp, Artificial Sequence
  Description of Artificial Sequence: Synthetic oligonucleotide
aagttctgcttaaa

SEQ ID NO: 5892 - DNA, 14 bp, Artificial Sequence
  Description of Artificial Sequence: Synthetic oligonucleotide
aaagttctgcttaa

SEQ ID NO: 5893 - DNA, 14 bp, Artificial Sequence
  Description of Artificial Sequence: Synthetic oligonucleotide
caaagttctgctta

SEQ ID NO: 5894 - DNA, 14 bp, Artificial Sequence
  Description of Artificial Sequence: Synthetic oligonucleotide
acaaagttctgctt

SEQ ID NO: 5895 - DNA, 14 bp, Artificial Sequence
  Description of Artificial Sequence: Synthetic oligonucleotide
tacaaagttctgct

SEQ ID NO: 5896 - DNA, 14 bp, Artificial Sequence
  Description of Artificial Sequence: Synthetic oligonucleotide
ttacaaagttctgc

SEQ ID NO: 5897 - DNA, 14 bp, Artificial Sequence
  Description of Artificial Sequence: Synthetic oligonucleotide
cttacaaagttctg

SEQ ID NO: 5898 - DNA, 14 bp, Artificial Sequence
  Description of Artificial Sequence: Synthetic oligonucleotide
acttacaaagttct

SEQ ID NO: 5899 - DNA, 14 bp, Artificial Sequence
  Description of Artificial Sequence: Synthetic oligonucleotide
tacttacaaagttc

SEQ ID NO: 5900 - DNA, 14 bp, Artificial Sequence
  Description of Artificial Sequence: Synthetic oligonucleotide
ttacttacaaagtt

SEQ ID NO: 5901 - DNA, 14 bp, Artificial Sequence
  Description of Artificial Sequence: Synthetic oligonucleotide
cttacttacaaagt

SEQ ID NO: 5902 - DNA, 14 bp, Artificial Sequence
  Description of Artificial Sequence: Synthetic oligonucleotide
acttacttacaaag

SEQ ID NO: 5903 - DNA, 14 bp, Artificial Sequence
  Description of Artificial Sequence: Synthetic oligonucleotide
aacttacttacaaa

SEQ ID NO: 5904 - DNA, 14 bp, Artificial Sequence
  Description of Artificial Sequence: Synthetic oligonucleotide
aaacttacttacaa

SEQ ID NO: 5905 - DNA, 14 bp, Artificial Sequence
  Description of Artificial Sequence: Synthetic oligonucleotide
aaaacttacttaca

SEQ ID NO: 5906 - DNA, 14 bp, Artificial Sequence
  Description of Artificial Sequence: Synthetic oligonucleotide
taaaacttacttac

SEQ ID NO: 5907 - DNA, 14 bp, Artificial Sequence
  Description of Artificial Sequence: Synthetic oligonucleotide
ttaaaacttactta

SEQ ID NO: 5908 - DNA, 14 bp, Artificial Sequence
  Description of Artificial Sequence: Synthetic oligonucleotide
cttaaaacttactt

SEQ ID NO: 5909 - DNA, 14 bp, Artificial Sequence
  Description of Artificial Sequence: Synthetic oligonucleotide
acttaaaacttact

SEQ ID NO: 5910 - DNA, 14 bp, Artificial Sequence
  Description of Artificial Sequence: Synthetic oligonucleotide
aacttaaaacttac

SEQ ID NO: 5911 - DNA, 14 bp, Artificial Sequence
  Description of Artificial Sequence: Synthetic oligonucleotide
gaacttaaaactta

SEQ ID NO: 5912 - DNA, 14 bp, Artificial Sequence
  Description of Artificial Sequence: Synthetic oligonucleotide
ggaacttaaaactt

SEQ ID NO: 5913 - DNA, 14 bp, Artificial Sequence
  Description of Artificial Sequence: Synthetic oligonucleotide
aggaacttaaaact

SEQ ID NO: 5914 - DNA, 14 bp, Artificial Sequence
  Description of Artificial Sequence: Synthetic oligonucleotide
taggaacttaaaac

SEQ ID NO: 5915 - DNA, 14 bp, Artificial Sequence
  Description of Artificial Sequence: Synthetic oligonucleotide
ttaggaacttaaaa

SEQ ID NO: 5916 - DNA, 14 bp, Artificial Sequence
  Description of Artificial Sequence: Synthetic oligonucleotide
cttaggaacttaaa

SEQ ID NO: 5917 - DNA, 14 bp, Artificial Sequence
  Description of Artificial Sequence: Synthetic oligonucleotide
gcttaggaacttaa

SEQ ID NO: 5918 - DNA, 14 bp, Artificial Sequence
  Description of Artificial Sequence: Synthetic oligonucleotide
tgcttaggaactta

SEQ ID NO: 5919 - DNA, 14 bp, Artificial Sequence
  Description of Artificial Sequence: Synthetic oligonucleotide
ttgcttaggaactt

SEQ ID NO: 5920 - DNA, 14 bp, Artificial Sequence
  Description of Artificial Sequence: Synthetic oligonucleotide
gttgcttaggaact

SEQ ID NO: 5921 - DNA, 14 bp, Artificial Sequence
  Description of Artificial Sequence: Synthetic oligonucleotide
tgttgcttaggaac

SEQ ID NO: 5922 - DNA, 14 bp, Artificial Sequence
  Description of Artificial Sequence: Synthetic oligonucleotide
ttgttgcttaggaa

SEQ ID NO: 5923 - DNA, 14 bp, Artificial Sequence
  Description of Artificial Sequence: Synthetic oligonucleotide
cttgttgcttagga

SEQ ID NO: 5924 - DNA, 14 bp, Artificial Sequence
  Description of Artificial Sequence: Synthetic oligonucleotide
acttgttgcttagg

SEQ ID NO: 5925 - DNA, 14 bp, Artificial Sequence
  Description of Artificial Sequence: Synthetic oligonucleotide
tacttgttgcttag

SEQ ID NO: 5926 - DNA, 14 bp, Artificial Sequence
  Description of Artificial Sequence: Synthetic oligonucleotide
atacttgttgctta

SEQ ID NO: 5927 - DNA, 14 bp, Artificial Sequence
  Description of Artificial Sequence: Synthetic oligonucleotide
tatacttgttgctt

SEQ ID NO: 5928 - DNA, 14 bp, Artificial Sequence
  Description of Artificial Sequence: Synthetic oligonucleotide
gtatacttgttgct

SEQ ID NO: 5929 - DNA, 14 bp, Artificial Sequence
  Description of Artificial Sequence: Synthetic oligonucleotide
tgtatacttgttgc

SEQ ID NO: 5930 - DNA, 14 bp, Artificial Sequence
  Description of Artificial Sequence: Synthetic oligonucleotide
ctgtatacttgttg

SEQ ID NO: 5931 - DNA, 14 bp, Artificial Sequence
  Description of Artificial Sequence: Synthetic oligonucleotide
actgtatacttgtt

SEQ ID NO: 5932 - DNA, 14 bp, Artificial Sequence
  Description of Artificial Sequence: Synthetic oligonucleotide
aactgtatacttgt

SEQ ID NO: 5933 - DNA, 14 bp, Artificial Sequence
  Description of Artificial Sequence: Synthetic oligonucleotide
aaactgtatacttg

SEQ ID NO: 5934 - DNA, 14 bp, Artificial Sequence
  Description of Artificial Sequence: Synthetic oligonucleotide
caaactgtatactt

SEQ ID NO: 5935 - DNA, 14 bp, Artificial Sequence
  Description of Artificial Sequence: Synthetic oligonucleotide
acaaactgtatact

SEQ ID NO: 5936 - DNA, 14 bp, Artificial Sequence
  Description of Artificial Sequence: Synthetic oligonucleotide
aacaaactgtatac

SEQ ID NO: 5937 - DNA, 14 bp, Artificial Sequence
  Description of Artificial Sequence: Synthetic oligonucleotide
taacaaactgtata

SEQ ID NO: 5938 - DNA, 14 bp, Artificial Sequence
  Description of Artificial Sequence: Synthetic oligonucleotide
ttaacaaactgtat

SEQ ID NO: 5939 - DNA, 14 bp, Artificial Sequence
  Description of Artificial Sequence: Synthetic oligonucleotide
cttaacaaactgta

SEQ ID NO: 5940 - DNA, 14 bp, Artificial Sequence
  Description of Artificial Sequence: Synthetic oligonucleotide
ccttaacaaactgt

SEQ ID NO: 5941 - DNA, 14 bp, Artificial Sequence
  Description of Artificial Sequence: Synthetic oligonucleotide
accttaacaaactg

SEQ ID NO: 5942 - DNA, 14 bp, Artificial Sequence
  Description of Artificial Sequence: Synthetic oligonucleotide
aaccttaacaaact

SEQ ID NO: 5943 - DNA, 14 bp, Artificial Sequence
  Description of Artificial Sequence: Synthetic oligonucleotide
aaaccttaacaaac

SEQ ID NO: 5944 - DNA, 14 bp, Artificial Sequence
  Description of Artificial Sequence: Synthetic oligonucleotide
taaaccttaacaaa

SEQ ID NO: 5945 - DNA, 14 bp, Artificial Sequence
  Description of Artificial Sequence: Synthetic oligonucleotide
ataaaccttaacaa

SEQ ID NO: 5946 - DNA, 14 bp, Artificial Sequence
  Description of Artificial Sequence: Synthetic oligonucleotide
tataaaccttaaca

SEQ ID NO: 5947 - DNA, 14 bp, Artificial Sequence
  Description of Artificial Sequence: Synthetic oligonucleotide
atataaaccttaac

SEQ ID NO: 5948 - DNA, 14 bp, Artificial Sequence
  Description of Artificial Sequence: Synthetic oligonucleotide
aatataaaccttaa

SEQ ID NO: 5949 - DNA, 14 bp, Artificial Sequence
  Description of Artificial Sequence: Synthetic oligonucleotide
caatataaacctta

SEQ ID NO: 5950 - DNA, 14 bp, Artificial Sequence
  Description of Artificial Sequence: Synthetic oligonucleotide
tcaatataaacctt

SEQ ID NO: 5951 - DNA, 14 bp, Artificial Sequence
  Description of Artificial Sequence: Synthetic oligonucleotide
ttcaatataaacct

SEQ ID NO: 5952 - DNA, 14 bp, Artificial Sequence
  Description of Artificial Sequence: Synthetic oligonucleotide
gttcaatataaacc

SEQ ID NO: 5953 - DNA, 14 bp, Artificial Sequence
  Description of Artificial Sequence: Synthetic oligonucleotide
tgttcaatataaac

SEQ ID NO: 5954 - DNA, 14 bp, Artificial Sequence
  Description of Artificial Sequence: Synthetic oligonucleotide
atgttcaatataaa

SEQ ID NO: 5955 - DNA, 14 bp, Artificial Sequence
  Description of Artificial Sequence: Synthetic oligonucleotide
aatgttcaatataa

SEQ ID NO: 5956 - DNA, 14 bp, Artificial Sequence
  Description of Artificial Sequence: Synthetic oligonucleotide
gaatgttcaatata

SEQ ID NO: 5957 - DNA, 14 bp, Artificial Sequence
  Description of Artificial Sequence: Synthetic oligonucleotide
agaatgttcaatat

SEQ ID NO: 5958 - DNA, 14 bp, Artificial Sequence
  Description of Artificial Sequence: Synthetic oligonucleotide
tagaatgttcaata

SEQ ID NO: 5959 - DNA, 14 bp, Artificial Sequence
  Description of Artificial Sequence: Synthetic oligonucleotide
gtagaatgttcaat

SEQ ID NO: 5960 - DNA, 14 bp, Artificial Sequence
  Description of Artificial Sequence: Synthetic oligonucleotide
ggtagaatgttcaa

SEQ ID NO: 5961 - DNA, 14 bp, Artificial Sequence
  Description of Artificial Sequence: Synthetic oligonucleotide
aggtagaatgttca

SEQ ID NO: 5962 - DNA, 14 bp, Artificial Sequence
  Description of Artificial Sequence: Synthetic oligonucleotide
aaggtagaatgttc

SEQ ID NO: 5963 - DNA, 14 bp, Artificial Sequence
  Description of Artificial Sequence: Synthetic oligonucleotide
caaggtagaatgtt

SEQ ID NO: 5964 - DNA, 14 bp, Artificial Sequence
  Description of Artificial Sequence: Synthetic oligonucleotide
gcaaggtagaatgt

SEQ ID NO: 5965 - DNA, 14 bp, Artificial Sequence
  Description of Artificial Sequence: Synthetic oligonucleotide
agcaaggtagaatg

SEQ ID NO: 5966 - DNA, 14 bp, Artificial Sequence
  Description of Artificial Sequence: Synthetic oligonucleotide
aagcaaggtagaat

SEQ ID NO: 5967 - DNA, 14 bp, Artificial Sequence
  Description of Artificial Sequence: Synthetic oligonucleotide
caagcaaggtagaa

SEQ ID NO: 5968 - DNA, 14 bp, Artificial Sequence
  Description of Artificial Sequence: Synthetic oligonucleotide
tcaagcaaggtaga

SEQ ID NO: 5969 - DNA, 14 bp, Artificial Sequence
  Description of Artificial Sequence: Synthetic oligonucleotide
ctcaagcaaggtag

SEQ ID NO: 5970 - DNA, 14 bp, Artificial Sequence
  Description of Artificial Sequence: Synthetic oligonucleotide
cctcaagcaaggta

SEQ ID NO: 5971 - DNA, 14 bp, Artificial Sequence
  Description of Artificial Sequence: Synthetic oligonucleotide
acctcaagcaaggt

SEQ ID NO: 5972 - DNA, 14 bp, Artificial Sequence
  Description of Artificial Sequence: Synthetic oligonucleotide
aacctcaagcaagg

SEQ ID NO: 5973 - DNA, 14 bp, Artificial Sequence
  Description of Artificial Sequence: Synthetic oligonucleotide
aaacctcaagcaag

SEQ ID NO: 5974 - DNA, 14 bp, Artificial Sequence
  Description of Artificial Sequence: Synthetic oligonucleotide
aaaacctcaagcaa

SEQ ID NO: 5975 - DNA, 14 bp, Artificial Sequence
  Description of Artificial Sequence: Synthetic oligonucleotide
gaaaacctcaagca

SEQ ID NO: 5976 - DNA, 14 bp, Artificial Sequence
  Description of Artificial Sequence: Synthetic oligonucleotide
agaaaacctcaagc

SEQ ID NO: 5977 - DNA, 14 bp, Artificial Sequence
  Description of Artificial Sequence: Synthetic oligonucleotide
cagaaaacctcaag

SEQ ID NO: 5978 - DNA, 14 bp, Artificial Sequence
  Description of Artificial Sequence: Synthetic oligonucleotide
gcagaaaacctcaa

SEQ ID NO: 5979 - DNA, 14 bp, Artificial Sequence
  Description of Artificial Sequence: Synthetic oligonucleotide
agcagaaaacctca

SEQ ID NO: 5980 - DNA, 14 bp, Artificial Sequence
  Description of Artificial Sequence: Synthetic oligonucleotide
aagcagaaaacctc

SEQ ID NO: 5981 - DNA, 14 bp, Artificial Sequence
  Description of Artificial Sequence: Synthetic oligonucleotide
aaagcagaaaacct

SEQ ID NO: 5982 - DNA, 14 bp, Artificial Sequence
  Description of Artificial Sequence: Synthetic oligonucleotide
taaagcagaaaacc

SEQ ID NO: 5983 - DNA, 14 bp, Artificial Sequence
  Description of Artificial Sequence: Synthetic oligonucleotide
ataaagcagaaaac

SEQ ID NO: 5984 - DNA, 14 bp, Artificial Sequence
  Description of Artificial Sequence: Synthetic oligonucleotide
gataaagcagaaaa

SEQ ID NO: 5985 - DNA, 14 bp, Artificial Sequence
  Description of Artificial Sequence: Synthetic oligonucleotide
tgataaagcagaaa

SEQ ID NO: 5986 - DNA, 14 bp, Artificial Sequence
  Description of Artificial Sequence: Synthetic oligonucleotide
ttgataaagcagaa

SEQ ID NO: 5987 - DNA, 14 bp, Artificial Sequence
  Description of Artificial Sequence: Synthetic oligonucleotide
tttgataaagcaga

SEQ ID NO: 5988 - DNA, 14 bp, Artificial Sequence
  Description of Artificial Sequence: Synthetic oligonucleotide
ttttgataaagcag

SEQ ID NO: 5989 - DNA, 14 bp, Artificial Sequence
  Description of Artificial Sequence: Synthetic oligonucleotide
gttttgataaagca

SEQ ID NO: 5990 - DNA, 14 bp, Artificial Sequence
  Description of Artificial Sequence: Synthetic oligonucleotide
agttttgataaagc

SEQ ID NO: 5991 - DNA, 14 bp, Artificial Sequence
  Description of Artificial Sequence: Synthetic oligonucleotide
tagttttgataaag

SEQ ID NO: 5992 - DNA, 14 bp, Artificial Sequence
  Description of Artificial Sequence: Synthetic oligonucleotide
atagttttgataaa

SEQ ID NO: 5993 - DNA, 14 bp, Artificial Sequence
  Description of Artificial Sequence: Synthetic oligonucleotide
aatagttttgataa

SEQ ID NO: 5994 - DNA, 14 bp, Artificial Sequence
  Description of Artificial Sequence: Synthetic oligonucleotide
gaatagttttgata

SEQ ID NO: 5995 - DNA, 14 bp, Artificial Sequence
  Description of Artificial Sequence: Synthetic oligonucleotide
tgaatagttttgat

SEQ ID NO: 5996 - DNA, 14 bp, Artificial Sequence
  Description of Artificial Sequence: Synthetic oligonucleotide
atgaatagttttga

SEQ ID NO: 5997 - DNA, 14 bp, Artificial Sequence
  Description of Artificial Sequence: Synthetic oligonucleotide
tatgaatagttttg

SEQ ID NO: 5998 - DNA, 14 bp, Artificial Sequence
  Description of Artificial Sequence: Synthetic oligonucleotide
ttatgaatagtttt

SEQ ID NO: 5999 - DNA, 14 bp, Artificial Sequence
  Description of Artificial Sequence: Synthetic oligonucleotide
attatgaatagttt

SEQ ID NO: 6000 - DNA, 14 bp, Artificial Sequence
  Description of Artificial Sequence: Synthetic oligonucleotide
tattatgaatagtt

SEQ ID NO: 6001 - DNA, 14 bp, Artificial Sequence
  Description of Artificial Sequence: Synthetic oligonucleotide
ctattatgaatagt

SEQ ID NO: 6002 - DNA, 14 bp, Artificial Sequence
  Description of Artificial Sequence: Synthetic oligonucleotide
tctattatgaatag

SEQ ID NO: 6003 - DNA, 14 bp, Artificial Sequence
  Description of Artificial Sequence: Synthetic oligonucleotide
ttctattatgaata

SEQ ID NO: 6004 - DNA, 14 bp, Artificial Sequence
  Description of Artificial Sequence: Synthetic oligonucleotide
gttctattatgaat

SEQ ID NO: 6005 - DNA, 14 bp, Artificial Sequence
  Description of Artificial Sequence: Synthetic oligonucleotide
tgttctattatgaa

SEQ ID NO: 6006 - DNA, 14 bp, Artificial Sequence
  Description of Artificial Sequence: Synthetic oligonucleotide
atgttctattatga

SEQ ID NO: 6007 - DNA, 14 bp, Artificial Sequence
  Description of Artificial Sequence: Synthetic oligonucleotide
gatgttctattatg

SEQ ID NO: 6008 - DNA, 14 bp, Artificial Sequence
  Description of Artificial Sequence: Synthetic oligonucleotide
agatgttctattat

SEQ ID NO: 6009 - DNA, 14 bp, Artificial Sequence
  Description of Artificial Sequence: Synthetic oligonucleotide
tagatgttctatta

SEQ ID NO: 6010 - DNA, 14 bp, Artificial Sequence
  Description of Artificial Sequence: Synthetic oligonucleotide
gtagatgttctatt

SEQ ID NO: 6011 - DNA, 14 bp, Artificial Sequence
  Description of Artificial Sequence: Synthetic oligonucleotide
ggtagatgttctat

SEQ ID NO: 6012 - DNA, 14 bp, Artificial Sequence
  Description of Artificial Sequence: Synthetic oligonucleotide
aggtagatgttcta

SEQ ID NO: 6013 - DNA, 14 bp, Artificial Sequence
  Description of Artificial Sequence: Synthetic oligonucleotide
caggtagatgttct

SEQ ID NO: 6014 - DNA, 14 bp, Artificial Sequence
  Description of Artificial Sequence: Synthetic oligonucleotide
gcaggtagatgttc

SEQ ID NO: 6015 - DNA, 14 bp, Artificial Sequence
  Description of Artificial Sequence: Synthetic oligonucleotide
tgcaggtagatgtt

SEQ ID NO: 6016 - DNA, 14 bp, Artificial Sequence
  Description of Artificial Sequence: Synthetic oligonucleotide
atgcaggtagatgt

SEQ ID NO: 6017 - DNA, 14 bp, Artificial Sequence
  Description of Artificial Sequence: Synthetic oligonucleotide
gatgcaggtagatg

SEQ ID NO: 6018 - DNA, 14 bp, Artificial Sequence
  Description of Artificial Sequence: Synthetic oligonucleotide
tgatgcaggtagat

SEQ ID NO: 6019 - DNA, 14 bp, Artificial Sequence
  Description of Artificial Sequence: Synthetic oligonucleotide
atgatgcaggtaga

SEQ ID NO: 6020 - DNA, 14 bp, Artificial Sequence
  Description of Artificial Sequence: Synthetic oligonucleotide
aatgatgcaggtag

SEQ ID NO: 6021 - DNA, 14 bp, Artificial Sequence
  Description of Artificial Sequence: Synthetic oligonucleotide
taatgatgcaggta

SEQ ID NO: 6022 - DNA, 14 bp, Artificial Sequence
  Description of Artificial Sequence: Synthetic oligonucleotide
gtaatgatgcaggt

SEQ ID NO: 6023 - DNA, 14 bp, Artificial Sequence
  Description of Artificial Sequence: Synthetic oligonucleotide
agtaatgatgcagg

SEQ ID NO: 6024 - DNA, 14 bp, Artificial Sequence
  Description of Artificial Sequence: Synthetic oligonucleotide
tagtaatgatgcag

SEQ ID NO: 6025 - DNA, 14 bp, Artificial Sequence
  Description of Artificial Sequence: Synthetic oligonucleotide
atagtaatgatgca

SEQ ID NO: 6026 - DNA, 14 bp, Artificial Sequence
  Description of Artificial Sequence: Synthetic oligonucleotide
gatagtaatgatgc

SEQ ID NO: 6027 - DNA, 14 bp, Artificial Sequence
  Description of Artificial Sequence: Synthetic oligonucleotide
tgatagtaatgatg

SEQ ID NO: 6028 - DNA, 14 bp, Artificial Sequence
  Description of Artificial Sequence: Synthetic oligonucleotide
atgatagtaatgat

SEQ ID NO: 6029 - DNA, 14 bp, Artificial Sequence
  Description of Artificial Sequence: Synthetic oligonucleotide
tatgatagtaatga

SEQ ID NO: 6030 - DNA, 14 bp, Artificial Sequence
  Description of Artificial Sequence: Synthetic oligonucleotide
ttatgatagtaatg

SEQ ID NO: 6031 - DNA, 14 bp, Artificial Sequence
  Description of Artificial Sequence: Synthetic oligonucleotide
attatgatagtaat

SEQ ID NO: 6032 - DNA, 14 bp, Artificial Sequence
  Description of Artificial Sequence: Synthetic oligonucleotide
tattatgatagtaa

SEQ ID NO: 6033 - DNA, 14 bp, Artificial Sequence
  Description of Artificial Sequence: Synthetic oligonucleotide
atattatgatagta

SEQ ID NO: 6034 - DNA, 14 bp, Artificial Sequence
  Description of Artificial Sequence: Synthetic oligonucleotide
catattatgatagt

SEQ ID NO: 6035 - DNA, 14 bp, Artificial Sequence
  Description of Artificial Sequence: Synthetic oligonucleotide
ccatattatgatag

SEQ ID NO: 6036 - DNA, 14 bp, Artificial Sequence
  Description of Artificial Sequence: Synthetic oligonucleotide
tccatattatgata

SEQ ID NO: 6037 - DNA, 14 bp, Artificial Sequence
  Description of Artificial Sequence: Synthetic oligonucleotide
atccatattatgat

SEQ ID NO: 6038 - DNA, 14 bp, Artificial Sequence
  Description of Artificial Sequence: Synthetic oligonucleotide
aatccatattatga

SEQ ID NO: 6039 - DNA, 14 bp, Artificial Sequence
  Description of Artificial Sequence: Synthetic oligonucleotide
taatccatattatg

SEQ ID NO: 6040 - DNA, 14 bp, Artificial Sequence
  Description of Artificial Sequence: Synthetic oligonucleotide
ataatccatattat

SEQ ID NO: 6041 - DNA, 14 bp, Artificial Sequence
  Description of Artificial Sequence: Synthetic oligonucleotide
aataatccatatta

SEQ ID NO: 6042 - DNA, 14 bp, Artificial Sequence
  Description of Artificial Sequence: Synthetic oligonucleotide
gaataatccatatt

SEQ ID NO: 6043 - DNA, 14 bp, Artificial Sequence
  Description of Artificial Sequence: Synthetic oligonucleotide
tgaataatccatat

SEQ ID NO: 6044 - DNA, 14 bp, Artificial Sequence
  Description of Artificial Sequence: Synthetic oligonucleotide
atgaataatccata

SEQ ID NO: 6045 - DNA, 14 bp, Artificial Sequence
  Description of Artificial Sequence: Synthetic oligonucleotide
tatgaataatccat

SEQ ID NO: 6046 - DNA, 14 bp, Artificial Sequence
  Description of Artificial Sequence: Synthetic oligonucleotide
ttatgaataatcca

SEQ ID NO: 6047 - DNA, 14 bp, Artificial Sequence
  Description of Artificial Sequence: Synthetic oligonucleotide
tttatgaataatcc

SEQ ID NO: 6048 - DNA, 14 bp, Artificial Sequence
  Description of Artificial Sequence: Synthetic oligonucleotide
ctttatgaataatc

SEQ ID NO: 6049 - DNA, 14 bp, Artificial Sequence
  Description of Artificial Sequence: Synthetic oligonucleotide
gctttatgaataat

SEQ ID NO: 6050 - DNA, 14 bp, Artificial Sequence
  Description of Artificial Sequence: Synthetic oligonucleotide
cgctttatgaataa

SEQ ID NO: 6051 - DNA, 14 bp, Artificial Sequence
  Description of Artificial Sequence: Synthetic oligonucleotide
acgctttatgaata

SEQ ID NO: 6052 - DNA, 14 bp, Artificial Sequence
  Description of Artificial Sequence: Synthetic oligonucleotide
tacgctttatgaat

SEQ ID NO: 6053 - DNA, 14 bp, Artificial Sequence
  Description of Artificial Sequence: Synthetic oligonucleotide
atacgctttatgaa

SEQ ID NO: 6054 - DNA, 14 bp, Artificial Sequence
  Description of Artificial Sequence: Synthetic oligonucleotide
catacgctttatga

SEQ ID NO: 6055 - DNA, 14 bp, Artificial Sequence
  Description of Artificial Sequence: Synthetic oligonucleotide
acatacgctttatg

SEQ ID NO: 6056 - DNA, 14 bp, Artificial Sequence
  Description of Artificial Sequence: Synthetic oligonucleotide
tacatacgctttat

SEQ ID NO: 6057 - DNA, 14 bp, Artificial Sequence
  Description of Artificial Sequence: Synthetic oligonucleotide
gtacatacgcttta

SEQ ID NO: 6058 - DNA, 14 bp, Artificial Sequence
  Description of Artificial Sequence: Synthetic oligonucleotide
agtacatacgcttt

SEQ ID NO: 6059 - DNA, 14 bp, Artificial Sequence
  Description of Artificial Sequence: Synthetic oligonucleotide
cagtacatacgctt

SEQ ID NO: 6060 - DNA, 14 bp, Artificial Sequence
  Description of Artificial Sequence: Synthetic oligonucleotide
acagtacatacgct

SEQ ID NO: 6061 - DNA, 14 bp, Artificial Sequence
  Description of Artificial Sequence: Synthetic oligonucleotide
aacagtacatacgc

SEQ ID NO: 6062 - DNA, 14 bp, Artificial Sequence
  Description of Artificial Sequence: Synthetic oligonucleotide
gaacagtacatacg

SEQ ID NO: 6063 - DNA, 14 bp, Artificial Sequence
  Description of Artificial Sequence: Synthetic oligonucleotide
agaacagtacatac

SEQ ID NO: 6064 - DNA, 14 bp, Artificial Sequence
  Description of Artificial Sequence: Synthetic oligonucleotide
aagaacagtacata

SEQ ID NO: 6065 - DNA, 14 bp, Artificial Sequence
  Description of Artificial Sequence: Synthetic oligonucleotide
gaagaacagtacat

SEQ ID NO: 6066 - DNA, 14 bp, Artificial Sequence
  Description of Artificial Sequence: Synthetic oligonucleotide
agaagaacagtaca

SEQ ID NO: 6067 - DNA, 14 bp, Artificial Sequence
  Description of Artificial Sequence: Synthetic oligonucleotide
cagaagaacagtac

SEQ ID NO: 6068 - DNA, 14 bp, Artificial Sequence
  Description of Artificial Sequence: Synthetic oligonucleotide
tcagaagaacagta

SEQ ID NO: 6069 - DNA, 14 bp, Artificial Sequence
  Description of Artificial Sequence: Synthetic oligonucleotide
ctcagaagaacagt

SEQ ID NO: 6070 - DNA, 14 bp, Artificial Sequence
  Description of Artificial Sequence: Synthetic oligonucleotide
actcagaagaacag

SEQ ID NO: 6071 - DNA, 14 bp, Artificial Sequence
  Description of Artificial Sequence: Synthetic oligonucleotide
gactcagaagaaca

SEQ ID NO: 6072 - DNA, 14 bp, Artificial Sequence
  Description of Artificial Sequence: Synthetic oligonucleotide
agactcagaagaac

SEQ ID NO: 6073 - DNA, 14 bp, Artificial Sequence
  Description of Artificial Sequence: Synthetic oligonucleotide
tagactcagaagaa

SEQ ID NO: 6074 - DNA, 14 bp, Artificial Sequence
  Description of Artificial Sequence: Synthetic oligonucleotide
ttagactcagaaga

SEQ ID NO: 6075 - DNA, 14 bp, Artificial Sequence
  Description of Artificial Sequence: Synthetic oligonucleotide
gttagactcagaag

SEQ ID NO: 6076 - DNA, 14 bp, Artificial Sequence
  Description of Artificial Sequence: Synthetic oligonucleotide
tgttagactcagaa

SEQ ID NO: 6077 - DNA, 14 bp, Artificial Sequence
  Description of Artificial Sequence: Synthetic oligonucleotide
ttgttagactcaga

SEQ ID NO: 6078 - DNA, 14 bp, Artificial Sequence
  Description of Artificial Sequence: Synthetic oligonucleotide
tttgttagactcag

SEQ ID NO: 6079 - DNA, 14 bp, Artificial Sequence
  Description of Artificial Sequence: Synthetic oligonucleotide
atttgttagactca

SEQ ID NO: 6080 - DNA, 14 bp, Artificial Sequence
  Description of Artificial Sequence: Synthetic oligonucleotide
tatttgttagactc

SEQ ID NO: 6081 - DNA, 14 bp, Artificial Sequence
  Description of Artificial Sequence: Synthetic oligonucleotide
gtatttgttagact

SEQ ID NO: 6082 - DNA, 14 bp, Artificial Sequence
  Description of Artificial Sequence: Synthetic oligonucleotide
agtatttgttagac

SEQ ID NO: 6083 - DNA, 14 bp, Artificial Sequence
  Description of Artificial Sequence: Synthetic oligonucleotide
cagtatttgttaga

SEQ ID NO: 6084 - DNA, 14 bp, Artificial Sequence
  Description of Artificial Sequence: Synthetic oligonucleotide
acagtatttgttag

SEQ ID NO: 6085 - DNA, 14 bp, Artificial Sequence
  Description of Artificial Sequence: Synthetic oligonucleotide
cacagtatttgtta

SEQ ID NO: 6086 - DNA, 14 bp, Artificial Sequence
  Description of Artificial Sequence: Synthetic oligonucleotide
tcacagtatttgtt

SEQ ID NO: 6087 - DNA, 14 bp, Artificial Sequence
  Description of Artificial Sequence: Synthetic oligonucleotide
gtcacagtatttgt

SEQ ID NO: 6088 - DNA, 14 bp, Artificial Sequence
  Description of Artificial Sequence: Synthetic oligonucleotide
agtcacagtatttg

SEQ ID NO: 6089 - DNA, 14 bp, Artificial Sequence
  Description of Artificial Sequence: Synthetic oligonucleotide
cagtcacagtattt

SEQ ID NO: 6090 - DNA, 14 bp, Artificial Sequence
  Description of Artificial Sequence: Synthetic oligonucleotide
tcagtcacagtatt

SEQ ID NO: 6091 - DNA, 14 bp, Artificial Sequence
  Description of Artificial Sequence: Synthetic oligonucleotide
ttcagtcacagtat

SEQ ID NO: 6092 - DNA, 14 bp, Artificial Sequence
  Description of Artificial Sequence: Synthetic oligonucleotide
tttcagtcacagta

SEQ ID NO: 6093 - DNA, 14 bp, Artificial Sequence
  Description of Artificial Sequence: Synthetic oligonucleotide
atttcagtcacagt

SEQ ID NO: 6094 - DNA, 14 bp, Artificial Sequence
  Description of Artificial Sequence: Synthetic oligonucleotide
catttcagtcacag

SEQ ID NO: 6095 - DNA, 14 bp, Artificial Sequence
  Description of Artificial Sequence: Synthetic oligonucleotide
gcatttcagtcaca

SEQ ID NO: 6096 - DNA, 14 bp, Artificial Sequence
  Description of Artificial Sequence: Synthetic oligonucleotide
tgcatttcagtcac

SEQ ID NO: 6097 - DNA, 14 bp, Artificial Sequence
  Description of Artificial Sequence: Synthetic oligonucleotide
atgcatttcagtca

SEQ ID NO: 6098 - DNA, 14 bp, Artificial Sequence
  Description of Artificial Sequence: Synthetic oligonucleotide
catgcatttcagtc

SEQ ID NO: 6099 - DNA, 14 bp, Artificial Sequence
  Description of Artificial Sequence: Synthetic oligonucleotide
gcatgcatttcagt

SEQ ID NO: 6100 - DNA, 14 bp, Artificial Sequence
  Description of Artificial Sequence: Synthetic oligonucleotide
tgcatgcatttcag

SEQ ID NO: 6101 - DNA, 14 bp, Artificial Sequence
  Description of Artificial Sequence: Synthetic oligonucleotide
gtgcatgcatttca

SEQ ID NO: 6102 - DNA, 14 bp, Artificial Sequence
  Description of Artificial Sequence: Synthetic oligonucleotide
ggtgcatgcatttc

SEQ ID NO: 6103 - DNA, 14 bp, Artificial Sequence
  Description of Artificial Sequence: Synthetic oligonucleotide
aggtgcatgcattt

SEQ ID NO: 6104 - DNA, 14 bp, Artificial Sequence
  Description of Artificial Sequence: Synthetic oligonucleotide
aaggtgcatgcatt

SEQ ID NO: 6105 - DNA, 14 bp, Artificial Sequence
  Description of Artificial Sequence: Synthetic oligonucleotide
caaggtgcatgcat

SEQ ID NO: 6106 - DNA, 14 bp, Artificial Sequence
  Description of Artificial Sequence: Synthetic oligonucleotide
acaaggtgcatgca

SEQ ID NO: 6107 - DNA, 14 bp, Artificial Sequence
  Description of Artificial Sequence: Synthetic oligonucleotide
aacaaggtgcatgc

SEQ ID NO: 6108 - DNA, 14 bp, Artificial Sequence
  Description of Artificial Sequence: Synthetic oligonucleotide
caacaaggtgcatg

SEQ ID NO: 6109 - DNA, 14 bp, Artificial Sequence
  Description of Artificial Sequence: Synthetic oligonucleotide
tcaacaaggtgcat

SEQ ID NO: 6110 - DNA, 14 bp, Artificial Sequence
  Description of Artificial Sequence: Synthetic oligonucleotide
ttcaacaaggtgca

SEQ ID NO: 6111 - DNA, 14 bp, Artificial Sequence
  Description of Artificial Sequence: Synthetic oligonucleotide
cttcaacaaggtgc

SEQ ID NO: 6112 - DNA, 14 bp, Artificial Sequence
  Description of Artificial Sequence: Synthetic oligonucleotide
tcttcaacaaggtg

SEQ ID NO: 6113 - DNA, 14 bp, Artificial Sequence
  Description of Artificial Sequence: Synthetic oligonucleotide
ctcttcaacaaggt

SEQ ID NO: 6114 - DNA, 14 bp, Artificial Sequence
  Description of Artificial Sequence: Synthetic oligonucleotide
tctcttcaacaagg

SEQ ID NO: 6115 - DNA, 14 bp, Artificial Sequence
  Description of Artificial Sequence: Synthetic oligonucleotide
ttctcttcaacaag

SEQ ID NO: 6116 - DNA, 14 bp, Artificial Sequence
  Description of Artificial Sequence: Synthetic oligonucleotide
tttctcttcaacaa

SEQ ID NO: 6117 - DNA, 14 bp, Artificial Sequence
  Description of Artificial Sequence: Synthetic oligonucleotide
ttttctcttcaaca

SEQ ID NO: 6118 - DNA, 14 bp, Artificial Sequence
  Description of Artificial Sequence: Synthetic oligonucleotide
gttttctcttcaac

SEQ ID NO: 6119 - DNA, 14 bp, Artificial Sequence
  Description of Artificial Sequence: Synthetic oligonucleotide
tgttttctcttcaa

SEQ ID NO: 6120 - DNA, 14 bp, Artificial Sequence
  Description of Artificial Sequence: Synthetic oligonucleotide
atgttttctcttca

SEQ ID NO: 6121 - DNA, 14 bp, Artificial Sequence
  Description of Artificial Sequence: Synthetic oligonucleotide
aatgttttctcttc

SEQ ID NO: 6122 - DNA, 14 bp, Artificial Sequence
  Description of Artificial Sequence: Synthetic oligonucleotide
aaatgttttctctt

SEQ ID NO: 6123 - DNA, 14 bp, Artificial Sequence
  Description of Artificial Sequence: Synthetic oligonucleotide
aaaatgttttctct

SEQ ID NO: 6124 - DNA, 14 bp, Artificial Sequence
  Description of Artificial Sequence: Synthetic oligonucleotide
taaaatgttttctc

SEQ ID NO: 6125 - DNA, 14 bp, Artificial Sequence
  Description of Artificial Sequence: Synthetic oligonucleotide
ataaaatgttttct

SEQ ID NO: 6126 - DNA, 14 bp, Artificial Sequence
  Description of Artificial Sequence: Synthetic oligonucleotide
aataaaatgttttc

SEQ ID NO: 6127 - DNA, 14 bp, Artificial Sequence
  Description of Artificial Sequence: Synthetic oligonucleotide
taataaaatgtttt

SEQ ID NO: 6128 - DNA, 14 bp, Artificial Sequence
  Description of Artificial Sequence: Synthetic oligonucleotide
ttaataaaatgttt

SEQ ID NO: 6129 - DNA, 14 bp, Artificial Sequence
  Description of Artificial Sequence: Synthetic oligonucleotide
attaataaaatgtt

SEQ ID NO: 6130 - DNA, 14 bp, Artificial Sequence
  Description of Artificial Sequence: Synthetic oligonucleotide
gattaataaaatgt

SEQ ID NO: 6131 - DNA, 14 bp, Artificial Sequence
  Description of Artificial Sequence: Synthetic oligonucleotide
agattaataaaatg

SEQ ID NO: 6132 - DNA, 14 bp, Artificial Sequence
  Description of Artificial Sequence: Synthetic oligonucleotide
gagattaataaaat

SEQ ID NO: 6133 - DNA, 14 bp, Artificial Sequence
  Description of Artificial Sequence: Synthetic oligonucleotide
ggagattaataaaa

SEQ ID NO: 6134 - DNA, 14 bp, Artificial Sequence
  Description of Artificial Sequence: Synthetic oligonucleotide
tggagattaataaa

SEQ ID NO: 6135 - DNA, 14 bp, Artificial Sequence
  Description of Artificial Sequence: Synthetic oligonucleotide
gtggagattaataa

SEQ ID NO: 6136 - DNA, 14 bp, Artificial Sequence
  Description of Artificial Sequence: Synthetic oligonucleotide
agtggagattaata

SEQ ID NO: 6137 - DNA, 14 bp, Artificial Sequence
  Description of Artificial Sequence: Synthetic oligonucleotide
tagtggagattaat

SEQ ID NO: 6138 - DNA, 14 bp, Artificial Sequence
  Description of Artificial Sequence: Synthetic oligonucleotide
atagtggagattaa

SEQ ID NO: 6139 - DNA, 14 bp, Artificial Sequence
  Description of Artificial Sequence: Synthetic oligonucleotide
tatagtggagatta

SEQ ID NO: 6140 - DNA, 14 bp, Artificial Sequence
  Description of Artificial Sequence: Synthetic oligonucleotide
ttatagtggagatt

SEQ ID NO: 6141 - DNA, 14 bp, Artificial Sequence
  Description of Artificial Sequence: Synthetic oligonucleotide
attatagtggagat

SEQ ID NO: 6142 - DNA, 14 bp, Artificial Sequence
  Description of Artificial Sequence: Synthetic oligonucleotide
cattatagtggaga

SEQ ID NO: 6143 - DNA, 14 bp, Artificial Sequence
  Description of Artificial Sequence: Synthetic oligonucleotide
acattatagtggag

SEQ ID NO: 6144 - DNA, 14 bp, Artificial Sequence
  Description of Artificial Sequence: Synthetic oligonucleotide
gacattatagtgga

SEQ ID NO: 6145 - DNA, 14 bp, Artificial Sequence
  Description of Artificial Sequence: Synthetic oligonucleotide
agacattatagtgg

SEQ ID NO: 6146 - DNA, 14 bp, Artificial Sequence
  Description of Artificial Sequence: Synthetic oligonucleotide
cagacattatagtg

SEQ ID NO: 6147 - DNA, 14 bp, Artificial Sequence
  Description of Artificial Sequence: Synthetic oligonucleotide
acagacattatagt

SEQ ID NO: 6148 - DNA, 14 bp, Artificial Sequence
  Description of Artificial Sequence: Synthetic oligonucleotide
cacagacattatag

SEQ ID NO: 6149 - DNA, 14 bp, Artificial Sequence
  Description of Artificial Sequence: Synthetic oligonucleotide
tcacagacattata

SEQ ID NO: 6150 - DNA, 14 bp, Artificial Sequence
  Description of Artificial Sequence: Synthetic oligonucleotide
ttcacagacattat

SEQ ID NO: 6151 - DNA, 14 bp, Artificial Sequence
  Description of Artificial Sequence: Synthetic oligonucleotide
tttcacagacatta

SEQ ID NO: 6152 - DNA, 14 bp, Artificial Sequence
  Description of Artificial Sequence: Synthetic oligonucleotide
atttcacagacatt

SEQ ID NO: 6153 - DNA, 14 bp, Artificial Sequence
  Description of Artificial Sequence: Synthetic oligonucleotide
catttcacagacat

SEQ ID NO: 6154 - DNA, 14 bp, Artificial Sequence
  Description of Artificial Sequence: Synthetic oligonucleotide
acatttcacagaca

SEQ ID NO: 6155 - DNA, 14 bp, Artificial Sequence
  Description of Artificial Sequence: Synthetic oligonucleotide
cacatttcacagac

SEQ ID NO: 6156 - DNA, 14 bp, Artificial Sequence
  Description of Artificial Sequence: Synthetic oligonucleotide
gcacatttcacaga

SEQ ID NO: 6157 - DNA, 14 bp, Artificial Sequence
  Description of Artificial Sequence: Synthetic oligonucleotide
tgcacatttcacag

SEQ ID NO: 6158 - DNA, 14 bp, Artificial Sequence
  Description of Artificial Sequence: Synthetic oligonucleotide
ctgcacatttcaca

SEQ ID NO: 6159 - DNA, 14 bp, Artificial Sequence
  Description of Artificial Sequence: Synthetic oligonucleotide
actgcacatttcac

SEQ ID NO: 6160 - DNA, 14 bp, Artificial Sequence
  Description of Artificial Sequence: Synthetic oligonucleotide
tactgcacatttca

SEQ ID NO: 6161 - DNA, 14 bp, Artificial Sequence
  Description of Artificial Sequence: Synthetic oligonucleotide
atactgcacatttc

SEQ ID NO: 6162 - DNA, 14 bp, Artificial Sequence
  Description of Artificial Sequence: Synthetic oligonucleotide
aatactgcacattt

SEQ ID NO: 6163 - DNA, 14 bp, Artificial Sequence
  Description of Artificial Sequence: Synthetic oligonucleotide
gaatactgcacatt

SEQ ID NO: 6164 - DNA, 14 bp, Artificial Sequence
  Description of Artificial Sequence: Synthetic oligonucleotide
ggaatactgcacat

SEQ ID NO: 6165 - DNA, 14 bp, Artificial Sequence
  Description of Artificial Sequence: Synthetic oligonucleotide
tggaatactgcaca

SEQ ID NO: 6166 - DNA, 14 bp, Artificial Sequence
  Description of Artificial Sequence: Synthetic oligonucleotide
atggaatactgcac

SEQ ID NO: 6167 - DNA, 14 bp, Artificial Sequence
  Description of Artificial Sequence: Synthetic oligonucleotide
gatggaatactgca

SEQ ID NO: 6168 - DNA, 14 bp, Artificial Sequence
  Description of Artificial Sequence: Synthetic oligonucleotide
ggatggaatactgc

SEQ ID NO: 6169 - DNA, 14 bp, Artificial Sequence
  Description of Artificial Sequence: Synthetic oligonucleotide
aggatggaatactg

SEQ ID NO: 6170 - DNA, 14 bp, Artificial Sequence
  Description of Artificial Sequence: Synthetic oligonucleotide
aaggatggaatact

SEQ ID NO: 6171 - DNA, 14 bp, Artificial Sequence
  Description of Artificial Sequence: Synthetic oligonucleotide
taaggatggaatac

SEQ ID NO: 6172 - DNA, 14 bp, Artificial Sequence
  Description of Artificial Sequence: Synthetic oligonucleotide
ctaaggatggaata

SEQ ID NO: 6173 - DNA, 14 bp, Artificial Sequence
  Description of Artificial Sequence: Synthetic oligonucleotide
tctaaggatggaat

SEQ ID NO: 6174 - DNA, 14 bp, Artificial Sequence
  Description of Artificial Sequence: Synthetic oligonucleotide
ctctaaggatggaa

SEQ ID NO: 6175 - DNA, 14 bp, Artificial Sequence
  Description of Artificial Sequence: Synthetic oligonucleotide
tctctaaggatgga

SEQ ID NO: 6176 - DNA, 14 bp, Artificial Sequence
  Description of Artificial Sequence: Synthetic oligonucleotide
ctctctaaggatgg

SEQ ID NO: 6177 - DNA, 14 bp, Artificial Sequence
  Description of Artificial Sequence: Synthetic oligonucleotide
actctctaaggatg

SEQ ID NO: 6178 - DNA, 14 bp, Artificial Sequence
  Description of Artificial Sequence: Synthetic oligonucleotide
aactctctaaggat

SEQ ID NO: 6179 - DNA, 14 bp, Artificial Sequence
  Description of Artificial Sequence: Synthetic oligonucleotide
aaactctctaagga

SEQ ID NO: 6180 - DNA, 14 bp, Artificial Sequence
  Description of Artificial Sequence: Synthetic oligonucleotide
taaactctctaagg

SEQ ID NO: 6181 - DNA, 14 bp, Artificial Sequence
  Description of Artificial Sequence: Synthetic oligonucleotide
ataaactctctaag

SEQ ID NO: 6182 - DNA, 14 bp, Artificial Sequence
  Description of Artificial Sequence: Synthetic oligonucleotide
gataaactctctaa

SEQ ID NO: 6183 - DNA, 14 bp, Artificial Sequence
  Description of Artificial Sequence: Synthetic oligonucleotide
agataaactctcta

SEQ ID NO: 6184 - DNA, 14 bp, Artificial Sequence
  Description of Artificial Sequence: Synthetic oligonucleotide
cagataaactctct

SEQ ID NO: 6185 - DNA, 14 bp, Artificial Sequence
  Description of Artificial Sequence: Synthetic oligonucleotide
ccagataaactctc

SEQ ID NO: 6186 - DNA, 14 bp, Artificial Sequence
  Description of Artificial Sequence: Synthetic oligonucleotide
accagataaactct

SEQ ID NO: 6187 - DNA, 14 bp, Artificial Sequence
  Description of Artificial Sequence: Synthetic oligonucleotide
aaccagataaactc

SEQ ID NO: 6188 - DNA, 14 bp, Artificial Sequence
  Description of Artificial Sequence: Synthetic oligonucleotide
gaaccagataaact

SEQ ID NO: 6189 - DNA, 14 bp, Artificial Sequence
  Description of Artificial Sequence: Synthetic oligonucleotide
tgaaccagataaac

SEQ ID NO: 6190 - DNA, 14 bp, Artificial Sequence
  Description of Artificial Sequence: Synthetic oligonucleotide
atgaaccagataaa

SEQ ID NO: 6191 - DNA, 14 bp, Artificial Sequence
  Description of Artificial Sequence: Synthetic oligonucleotide
gatgaaccagataa

SEQ ID NO: 6192 - DNA, 14 bp, Artificial Sequence
  Description of Artificial Sequence: Synthetic oligonucleotide
tgatgaaccagata

SEQ ID NO: 6193 - DNA, 14 bp, Artificial Sequence
  Description of Artificial Sequence: Synthetic oligonucleotide
ctgatgaaccagat

SEQ ID NO: 6194 - DNA, 14 bp, Artificial Sequence
  Description of Artificial Sequence: Synthetic oligonucleotide
gctgatgaaccaga

SEQ ID NO: 6195 - DNA, 14 bp, Artificial Sequence
  Description of Artificial Sequence: Synthetic oligonucleotide
tgctgatgaaccag

SEQ ID NO: 6196 - DNA, 14 bp, Artificial Sequence
  Description of Artificial Sequence: Synthetic oligonucleotide
atgctgatgaacca

SEQ ID NO: 6197 - DNA, 14 bp, Artificial Sequence
  Description of Artificial Sequence: Synthetic oligonucleotide
gatgctgatgaacc

SEQ ID NO: 6198 - DNA, 14 bp, Artificial Sequence
  Description of Artificial Sequence: Synthetic oligonucleotide
agatgctgatgaac

SEQ ID NO: 6199 - DNA, 14 bp, Artificial Sequence
  Description of Artificial Sequence: Synthetic oligonucleotide
cagatgctgatgaa

SEQ ID NO: 6200 - DNA, 14 bp, Artificial Sequence
  Description of Artificial Sequence: Synthetic oligonucleotide
gcagatgctgatga

SEQ ID NO: 6201 - DNA, 14 bp, Artificial Sequence
  Description of Artificial Sequence: Synthetic oligonucleotide
tgcagatgctgatg

SEQ ID NO: 6202 - DNA, 14 bp, Artificial Sequence
  Description of Artificial Sequence: Synthetic oligonucleotide
atgcagatgctgat

SEQ ID NO: 6203 - DNA, 14 bp, Artificial Sequence
  Description of Artificial Sequence: Synthetic oligonucleotide
catgcagatgctga

SEQ ID NO: 6204 - DNA, 14 bp, Artificial Sequence
  Description of Artificial Sequence: Synthetic oligonucleotide
acatgcagatgctg

SEQ ID NO: 6205 - DNA, 14 bp, Artificial Sequence
  Description of Artificial Sequence: Synthetic oligonucleotide
tacatgcagatgct

SEQ ID NO: 6206 - DNA, 14 bp, Artificial Sequence
  Description of Artificial Sequence: Synthetic oligonucleotide
atacatgcagatgc

SEQ ID NO: 6207 - DNA, 14 bp, Artificial Sequence
  Description of Artificial Sequence: Synthetic oligonucleotide
gatacatgcagatg

SEQ ID NO: 6208 - DNA, 14 bp, Artificial Sequence
  Description of Artificial Sequence: Synthetic oligonucleotide
ggatacatgcagat

SEQ ID NO: 6209 - DNA, 14 bp, Artificial Sequence
  Description of Artificial Sequence: Synthetic oligonucleotide
aggatacatgcaga

SEQ ID NO: 6210 - DNA, 14 bp, Artificial Sequence
  Description of Artificial Sequence: Synthetic oligonucleotide
gaggatacatgcag

SEQ ID NO: 6211 - DNA, 14 bp, Artificial Sequence
  Description of Artificial Sequence: Synthetic oligonucleotide
agaggatacatgca

SEQ ID NO: 6212 - DNA, 14 bp, Artificial Sequence
  Description of Artificial Sequence: Synthetic oligonucleotide
cagaggatacatgc

SEQ ID NO: 6213 - DNA, 14 bp, Artificial Sequence
  Description of Artificial Sequence: Synthetic oligonucleotide
tcagaggatacatg

SEQ ID NO: 6214 - DNA, 14 bp, Artificial Sequence
  Description of Artificial Sequence: Synthetic oligonucleotide
ttcagaggatacat

SEQ ID NO: 6215 - DNA, 14 bp, Artificial Sequence
  Description of Artificial Sequence: Synthetic oligonucleotide
attcagaggataca

SEQ ID NO: 6216 - DNA, 14 bp, Artificial Sequence
  Description of Artificial Sequence: Synthetic oligonucleotide
tattcagaggatac

SEQ ID NO: 6217 - DNA, 14 bp, Artificial Sequence
  Description of Artificial Sequence: Synthetic oligonucleotide
ttattcagaggata

SEQ ID NO: 6218 - DNA, 14 bp, Artificial Sequence
  Description of Artificial Sequence: Synthetic oligonucleotide
attattcagaggat

SEQ ID NO: 6219 - DNA, 14 bp, Artificial Sequence
  Description of Artificial Sequence: Synthetic oligonucleotide
cattattcagagga

SEQ ID NO: 6220 - DNA, 14 bp, Artificial Sequence
  Description of Artificial Sequence: Synthetic oligonucleotide
tcattattcagagg

SEQ ID NO: 6221 - DNA, 14 bp, Artificial Sequence
  Description of Artificial Sequence: Synthetic oligonucleotide
ttcattattcagag

SEQ ID NO: 6222 - DNA, 14 bp, Artificial Sequence
  Description of Artificial Sequence: Synthetic oligonucleotide
cttcattattcaga

SEQ ID NO: 6223 - DNA, 14 bp, Artificial Sequence
  Description of Artificial Sequence: Synthetic oligonucleotide
gcttcattattcag

SEQ ID NO: 6224 - DNA, 14 bp, Artificial Sequence
  Description of Artificial Sequence: Synthetic oligonucleotide
tgcttcattattca

SEQ ID NO: 6225 - DNA, 14 bp, Artificial Sequence
  Description of Artificial Sequence: Synthetic oligonucleotide
ttgcttcattattc

SEQ ID NO: 6226 - DNA, 14 bp, Artificial Sequence
  Description of Artificial Sequence: Synthetic oligonucleotide
gttgcttcattatt

SEQ ID NO: 6227 - DNA, 14 bp, Artificial Sequence
  Description of Artificial Sequence: Synthetic oligonucleotide
tgttgcttcattat

SEQ ID NO: 6228 - DNA, 14 bp, Artificial Sequence
  Description of Artificial Sequence: Synthetic oligonucleotide
atgttgcttcatta

SEQ ID NO: 6229 - DNA, 14 bp, Artificial Sequence
  Description of Artificial Sequence: Synthetic oligonucleotide
aatgttgcttcatt

SEQ ID NO: 6230 - DNA, 14 bp, Artificial Sequence
  Description of Artificial Sequence: Synthetic oligonucleotide
aaatgttgcttcat

SEQ ID NO: 6231 - DNA, 14 bp, Artificial Sequence
  Description of Artificial Sequence: Synthetic oligonucleotide
gaaatgttgcttca

SEQ ID NO: 6232 - DNA, 14 bp, Artificial Sequence
  Description of Artificial Sequence: Synthetic oligonucleotide
tgaaatgttgcttc

SEQ ID NO: 6233 - DNA, 14 bp, Artificial Sequence
  Description of Artificial Sequence: Synthetic oligonucleotide
ctgaaatgttgctt

SEQ ID NO: 6234 - DNA, 14 bp, Artificial Sequence
  Description of Artificial Sequence: Synthetic oligonucleotide
gctgaaatgttgct

SEQ ID NO: 6235 - DNA, 14 bp, Artificial Sequence
  Description of Artificial Sequence: Synthetic oligonucleotide
tgctgaaatgttgc

SEQ ID NO: 6236 - DNA, 14 bp, Artificial Sequence
  Description of Artificial Sequence: Synthetic oligonucleotide
ttgctgaaatgttg

SEQ ID NO: 6237 - DNA, 14 bp, Artificial Sequence
  Description of Artificial Sequence: Synthetic oligonucleotide
attgctgaaatgtt

SEQ ID NO: 6238 - DNA, 14 bp, Artificial Sequence
  Description of Artificial Sequence: Synthetic oligonucleotide
aattgctgaaatgt

SEQ ID NO: 6239 - DNA, 14 bp, Artificial Sequence
  Description of Artificial Sequence: Synthetic oligonucleotide
gaattgctgaaatg

SEQ ID NO: 6240 - DNA, 14 bp, Artificial Sequence
  Description of Artificial Sequence: Synthetic oligonucleotide
agaattgctgaaat

SEQ ID NO: 6241 - DNA, 14 bp, Artificial Sequence
  Description of Artificial Sequence: Synthetic oligonucleotide
cagaattgctgaaa

SEQ ID NO: 6242 - DNA, 14 bp, Artificial Sequence
  Description of Artificial Sequence: Synthetic oligonucleotide
acagaattgctgaa

SEQ ID NO: 6243 - DNA, 14 bp, Artificial Sequence
  Description of Artificial Sequence: Synthetic oligonucleotide
aacagaattgctga

SEQ ID NO: 6244 - DNA, 14 bp, Artificial Sequence
  Description of Artificial Sequence: Synthetic oligonucleotide
taacagaattgctg

SEQ ID NO: 6245 - DNA, 14 bp, Artificial Sequence
  Description of Artificial Sequence: Synthetic oligonucleotide
ttaacagaattgct

SEQ ID NO: 6246 - DNA, 14 bp, Artificial Sequence
  Description of Artificial Sequence: Synthetic oligonucleotide
gttaacagaattgc

SEQ ID NO: 6247 - DNA, 14 bp, Artificial Sequence
  Description of Artificial Sequence: Synthetic oligonucleotide
ggttaacagaattg

SEQ ID NO: 6248 - DNA, 14 bp, Artificial Sequence
  Description of Artificial Sequence: Synthetic oligonucleotide
tggttaacagaatt

SEQ ID NO: 6249 - DNA, 14 bp, Artificial Sequence
  Description of Artificial Sequence: Synthetic oligonucleotide
gtggttaacagaat

SEQ ID NO: 6250 - DNA, 14 bp, Artificial Sequence
  Description of Artificial Sequence: Synthetic oligonucleotide
tgtggttaacagaa

SEQ ID NO: 6251 - DNA, 14 bp, Artificial Sequence
  Description of Artificial Sequence: Synthetic oligonucleotide
gtgtggttaacaga

SEQ ID NO: 6252 - DNA, 14 bp, Artificial Sequence
  Description of Artificial Sequence: Synthetic oligonucleotide
ggtgtggttaacag

SEQ ID NO: 6253 - DNA, 14 bp, Artificial Sequence
  Description of Artificial Sequence: Synthetic oligonucleotide
tggtgtggttaaca

SEQ ID NO: 6254 - DNA, 14 bp, Artificial Sequence
  Description of Artificial Sequence: Synthetic oligonucleotide
atggtgtggttaac

SEQ ID NO: 6255 - DNA, 14 bp, Artificial Sequence
  Description of Artificial Sequence: Synthetic oligonucleotide
aatggtgtggttaa

SEQ ID NO: 6256 - DNA, 14 bp, Artificial Sequence
  Description of Artificial Sequence: Synthetic oligonucleotide
taatggtgtggtta

SEQ ID NO: 6257 - DNA, 14 bp, Artificial Sequence
  Description of Artificial Sequence: Synthetic oligonucleotide
ctaatggtgtggtt

SEQ ID NO: 6258 - DNA, 14 bp, Artificial Sequence
  Description of Artificial Sequence: Synthetic oligonucleotide
tctaatggtgtggt

SEQ ID NO: 6259 - DNA, 14 bp, Artificial Sequence
  Description of Artificial Sequence: Synthetic oligonucleotide
ctctaatggtgtgg

SEQ ID NO: 6260 - DNA, 14 bp, Artificial Sequence
  Description of Artificial Sequence: Synthetic oligonucleotide
tctctaatggtgtg

SEQ ID NO: 6261 - DNA, 14 bp, Artificial Sequence
  Description of Artificial Sequence: Synthetic oligonucleotide
gtctctaatggtgt

SEQ ID NO: 6262 - DNA, 14 bp, Artificial Sequence
  Description of Artificial Sequence: Synthetic oligonucleotide
tgtctctaatggtg

SEQ ID NO: 6263 - DNA, 14 bp, Artificial Sequence
  Description of Artificial Sequence: Synthetic oligonucleotide
atgtctctaatggt

SEQ ID NO: 6264 - DNA, 14 bp, Artificial Sequence
  Description of Artificial Sequence: Synthetic oligonucleotide
aatgtctctaatgg

SEQ ID NO: 6265 - DNA, 14 bp, Artificial Sequence
  Description of Artificial Sequence: Synthetic oligonucleotide
aaatgtctctaatg

SEQ ID NO: 6266 - DNA, 14 bp, Artificial Sequence
  Description of Artificial Sequence: Synthetic oligonucleotide
aaaatgtctctaat

SEQ ID NO: 6267 - DNA, 14 bp, Artificial Sequence
  Description of Artificial Sequence: Synthetic oligonucleotide
aaaaatgtctctaa

SEQ ID NO: 6268 - DNA, 14 bp, Artificial Sequence
  Description of Artificial Sequence: Synthetic oligonucleotide
taaaaatgtctcta

SEQ ID NO: 6269 - DNA, 14 bp, Artificial Sequence
  Description of Artificial Sequence: Synthetic oligonucleotide
ctaaaaatgtctct

SEQ ID NO: 6270 - DNA, 14 bp, Artificial Sequence
  Description of Artificial Sequence: Synthetic oligonucleotide
tctaaaaatgtctc

SEQ ID NO: 6271 - DNA, 14 bp, Artificial Sequence
  Description of Artificial Sequence: Synthetic oligonucleotide
ttctaaaaatgtct

SEQ ID NO: 6272 - DNA, 14 bp, Artificial Sequence
  Description of Artificial Sequence: Synthetic oligonucleotide
cttctaaaaatgtc

SEQ ID NO: 6273 - DNA, 14 bp, Artificial Sequence
  Description of Artificial Sequence: Synthetic oligonucleotide
acttctaaaaatgt

SEQ ID NO: 6274 - DNA, 14 bp, Artificial Sequence
  Description of Artificial Sequence: Synthetic oligonucleotide
cacttctaaaaatg

SEQ ID NO: 6275 - DNA, 14 bp, Artificial Sequence
  Description of Artificial Sequence: Synthetic oligonucleotide
gcacttctaaaaat

SEQ ID NO: 6276 - DNA, 14 bp, Artificial Sequence
  Description of Artificial Sequence: Synthetic oligonucleotide
agcacttctaaaaa

SEQ ID NO: 6277 - DNA, 14 bp, Artificial Sequence
  Description of Artificial Sequence: Synthetic oligonucleotide
cagcacttctaaaa

SEQ ID NO: 6278 - DNA, 14 bp, Artificial Sequence
  Description of Artificial Sequence: Synthetic oligonucleotide
gcagcacttctaaa

SEQ ID NO: 6279 - DNA, 14 bp, Artificial Sequence
  Description of Artificial Sequence: Synthetic oligonucleotide
tgcagcacttctaa

SEQ ID NO: 6280 - DNA, 14 bp, Artificial Sequence
  Description of Artificial Sequence: Synthetic oligonucleotide
ttgcagcacttcta

SEQ ID NO: 6281 - DNA, 14 bp, Artificial Sequence
  Description of Artificial Sequence: Synthetic oligonucleotide
gttgcagcacttct

SEQ ID NO: 6282 - DNA, 14 bp, Artificial Sequence
  Description of Artificial Sequence: Synthetic oligonucleotide
tgttgcagcacttc

SEQ ID NO: 6283 - DNA, 14 bp, Artificial Sequence
  Description of Artificial Sequence: Synthetic oligonucleotide
atgttgcagcactt

SEQ ID NO: 6284 - DNA, 14 bp, Artificial Sequence
  Description of Artificial Sequence: Synthetic oligonucleotide
catgttgcagcact

SEQ ID NO: 6285 - DNA, 14 bp, Artificial Sequence
  Description of Artificial Sequence: Synthetic oligonucleotide
ccatgttgcagcac

SEQ ID NO: 6286 - DNA, 14 bp, Artificial Sequence
  Description of Artificial Sequence: Synthetic oligonucleotide
accatgttgcagca

SEQ ID NO: 6287 - DNA, 14 bp, Artificial Sequence
  Description of Artificial Sequence: Synthetic oligonucleotide
caccatgttgcagc

SEQ ID NO: 6288 - DNA, 14 bp, Artificial Sequence
  Description of Artificial Sequence: Synthetic oligonucleotide
ccaccatgttgcag

SEQ ID NO: 6289 - DNA, 14 bp, Artificial Sequence
  Description of Artificial Sequence: Synthetic oligonucleotide
cccaccatgttgca

SEQ ID NO: 6290 - DNA, 14 bp, Artificial Sequence
  Description of Artificial Sequence: Synthetic oligonucleotide
tcccaccatgttgc

SEQ ID NO: 6291 - DNA, 14 bp, Artificial Sequence
  Description of Artificial Sequence: Synthetic oligonucleotide
ttcccaccatgttg

SEQ ID NO: 6292 - DNA, 14 bp, Artificial Sequence
  Description of Artificial Sequence: Synthetic oligonucleotide
gttcccaccatgtt

SEQ ID NO: 6293 - DNA, 14 bp, Artificial Sequence
  Description of Artificial Sequence: Synthetic oligonucleotide
ggttcccaccatgt

SEQ ID NO: 6294 - DNA, 14 bp, Artificial Sequence
  Description of Artificial Sequence: Synthetic oligonucleotide
aggttcccaccatg

SEQ ID NO: 6295 - DNA, 14 bp, Artificial Sequence
  Description of Artificial Sequence: Synthetic oligonucleotide
taggttcccaccat

SEQ ID NO: 6296 - DNA, 14 bp, Artificial Sequence
  Description of Artificial Sequence: Synthetic oligonucleotide
ctaggttcccacca

SEQ ID NO: 6297 - DNA, 14 bp, Artificial Sequence
  Description of Artificial Sequence: Synthetic oligonucleotide
actaggttcccacc

SEQ ID NO: 6298 - DNA, 14 bp, Artificial Sequence
  Description of Artificial Sequence: Synthetic oligonucleotide
tactaggttcccac

SEQ ID NO: 6299 - DNA, 14 bp, Artificial Sequence
  Description of Artificial Sequence: Synthetic oligonucleotide
gtactaggttccca

SEQ ID NO: 6300 - DNA, 14 bp, Artificial Sequence
  Description of Artificial Sequence: Synthetic oligonucleotide
agtactaggttccc

SEQ ID NO: 6301 - DNA, 14 bp, Artificial Sequence
  Description of Artificial Sequence: Synthetic oligonucleotide
aagtactaggttcc

SEQ ID NO: 6302 - DNA, 14 bp, Artificial Sequence
  Description of Artificial Sequence: Synthetic oligonucleotide
aaagtactaggttc

SEQ ID NO: 6303 - DNA, 14 bp, Artificial Sequence
  Description of Artificial Sequence: Synthetic oligonucleotide
taaagtactaggtt

SEQ ID NO: 6304 - DNA, 14 bp, Artificial Sequence
  Description of Artificial Sequence: Synthetic oligonucleotide
ttaaagtactaggt

SEQ ID NO: 6305 - DNA, 14 bp, Artificial Sequence
  Description of Artificial Sequence: Synthetic oligonucleotide
attaaagtactagg

SEQ ID NO: 6306 - DNA, 14 bp, Artificial Sequence
  Description of Artificial Sequence: Synthetic oligonucleotide
tattaaagtactag

SEQ ID NO: 6307 - DNA, 14 bp, Artificial Sequence
  Description of Artificial Sequence: Synthetic oligonucleotide
ttattaaagtacta

SEQ ID NO: 6308 - DNA, 14 bp, Artificial Sequence
  Description of Artificial Sequence: Synthetic oligonucleotide
attattaaagtact

SEQ ID NO: 6309 - DNA, 14 bp, Artificial Sequence
  Description of Artificial Sequence: Synthetic oligonucleotide
aattattaaagtac

SEQ ID NO: 6310 - DNA, 14 bp, Artificial Sequence
  Description of Artificial Sequence: Synthetic oligonucleotide
aaattattaaagta

SEQ ID NO: 6311 - DNA, 14 bp, Artificial Sequence
  Description of Artificial Sequence: Synthetic oligonucleotide
gaaattattaaagt

SEQ ID NO: 6312 - DNA, 14 bp, Artificial Sequence
  Description of Artificial Sequence: Synthetic oligonucleotide
ggaaattattaaag

SEQ ID NO: 6313 - DNA, 14 bp, Artificial Sequence
  Description of Artificial Sequence: Synthetic oligonucleotide
aggaaattattaaa

SEQ ID NO: 6314 - DNA, 14 bp, Artificial Sequence
  Description of Artificial Sequence: Synthetic oligonucleotide
taggaaattattaa

SEQ ID NO: 6315 - DNA, 14 bp, Artificial Sequence
  Description of Artificial Sequence: Synthetic oligonucleotide
ataggaaattatta

SEQ ID NO: 6316 - DNA, 14 bp, Artificial Sequence
  Description of Artificial Sequence: Synthetic oligonucleotide
cataggaaattatt

SEQ ID NO: 6317 - DNA, 14 bp, Artificial Sequence
  Description of Artificial Sequence: Synthetic oligonucleotide
tcataggaaattat

SEQ ID NO: 6318 - DNA, 14 bp, Artificial Sequence
  Description of Artificial Sequence: Synthetic oligonucleotide
atcataggaaatta

SEQ ID NO: 6319 - DNA, 14 bp, Artificial Sequence
  Description of Artificial Sequence: Synthetic oligonucleotide
tatcataggaaatt

SEQ ID NO: 6320 - DNA, 14 bp, Artificial Sequence
  Description of Artificial Sequence: Synthetic oligonucleotide
atatcataggaaat

SEQ ID NO: 6321 - DNA, 14 bp, Artificial Sequence
  Description of Artificial Sequence: Synthetic oligonucleotide
aatatcataggaaa

SEQ ID NO: 6322 - DNA, 14 bp, Artificial Sequence
  Description of Artificial Sequence: Synthetic oligonucleotide
aaatatcataggaa

SEQ ID NO: 6323 - DNA, 14 bp, Artificial Sequence
  Description of Artificial Sequence: Synthetic oligonucleotide
taaatatcatagga

SEQ ID NO: 6324 - DNA, 14 bp, Artificial Sequence
  Description of Artificial Sequence: Synthetic oligonucleotide
ataaatatcatagg

SEQ ID NO: 6325 - DNA, 14 bp, Artificial Sequence
  Description of Artificial Sequence: Synthetic oligonucleotide
aataaatatcatag

SEQ ID NO: 6326 - DNA, 14 bp, Artificial Sequence
  Description of Artificial Sequence: Synthetic oligonucleotide
taataaatatcata

SEQ ID NO: 6327 - DNA, 14 bp, Artificial Sequence
  Description of Artificial Sequence: Synthetic oligonucleotide
ctaataaatatcat

SEQ ID NO: 6328 - DNA, 14 bp, Artificial Sequence
  Description of Artificial Sequence: Synthetic oligonucleotide
tctaataaatatca

SEQ ID NO: 6329 - DNA, 14 bp, Artificial Sequence
  Description of Artificial Sequence: Synthetic oligonucleotide
ctctaataaatatc

SEQ ID NO: 6330 - DNA, 14 bp, Artificial Sequence
  Description of Artificial Sequence: Synthetic oligonucleotide
gctctaataaatat

SEQ ID NO: 6331 - DNA, 14 bp, Artificial Sequence
  Description of Artificial Sequence: Synthetic oligonucleotide
tgctctaataaata

SEQ ID NO: 6332 - DNA, 14 bp, Artificial Sequence
  Description of Artificial Sequence: Synthetic oligonucleotide
atgctctaataaat

SEQ ID NO: 6333 - DNA, 14 bp, Artificial Sequence
  Description of Artificial Sequence: Synthetic oligonucleotide
tatgctctaataaa

SEQ ID NO: 6334 - DNA, 14 bp, Artificial Sequence
  Description of Artificial Sequence: Synthetic oligonucleotide
ttatgctctaataa

SEQ ID NO: 6335 - DNA, 14 bp, Artificial Sequence
  Description of Artificial Sequence: Synthetic oligonucleotide
tttatgctctaata

SEQ ID NO: 6336 - DNA, 14 bp, Artificial Sequence
  Description of Artificial Sequence: Synthetic oligonucleotide
ttttatgctctaat

SEQ ID NO: 6337 - DNA, 14 bp, Artificial Sequence
  Description of Artificial Sequence: Synthetic oligonucleotide
attttatgctctaa

SEQ ID NO: 6338 - DNA, 14 bp, Artificial Sequence
  Description of Artificial Sequence: Synthetic oligonucleotide
cattttatgctcta

SEQ ID NO: 6339 - DNA, 14 bp, Artificial Sequence
  Description of Artificial Sequence: Synthetic oligonucleotide
acattttatgctct

SEQ ID NO: 6340 - DNA, 14 bp, Artificial Sequence
  Description of Artificial Sequence: Synthetic oligonucleotide
tacattttatgctc

SEQ ID NO: 6341 - DNA, 14 bp, Artificial Sequence
  Description of Artificial Sequence: Synthetic oligonucleotide
gtacattttatgct

SEQ ID NO: 6342 - DNA, 14 bp, Artificial Sequence
  Description of Artificial Sequence: Synthetic oligonucleotide
tgtacattttatgc

SEQ ID NO: 6343 - DNA, 14 bp, Artificial Sequence
  Description of Artificial Sequence: Synthetic oligonucleotide
atgtacattttatg

SEQ ID NO: 6344 - DNA, 14 bp, Artificial Sequence
  Description of Artificial Sequence: Synthetic oligonucleotide
gatgtacattttat

SEQ ID NO: 6345 - DNA, 14 bp, Artificial Sequence
  Description of Artificial Sequence: Synthetic oligonucleotide
tgatgtacatttta

SEQ ID NO: 6346 - DNA, 14 bp, Artificial Sequence
  Description of Artificial Sequence: Synthetic oligonucleotide
gtgatgtacatttt

SEQ ID NO: 6347 - DNA, 14 bp, Artificial Sequence
  Description of Artificial Sequence: Synthetic oligonucleotide
cgtgatgtacattt

SEQ ID NO: 6348 - DNA, 14 bp, Artificial Sequence
  Description of Artificial Sequence: Synthetic oligonucleotide
tcgtgatgtacatt

SEQ ID NO: 6349 - DNA, 14 bp, Artificial Sequence
  Description of Artificial Sequence: Synthetic oligonucleotide
atcgtgatgtacat

SEQ ID NO: 6350 - DNA, 14 bp, Artificial Sequence
  Description of Artificial Sequence: Synthetic oligonucleotide
tatcgtgatgtaca

SEQ ID NO: 6351 - DNA, 14 bp, Artificial Sequence
  Description of Artificial Sequence: Synthetic oligonucleotide
ctatcgtgatgtac

SEQ ID NO: 6352 - DNA, 14 bp, Artificial Sequence
  Description of Artificial Sequence: Synthetic oligonucleotide
actatcgtgatgta

SEQ ID NO: 6353 - DNA, 14 bp, Artificial Sequence
  Description of Artificial Sequence: Synthetic oligonucleotide
tactatcgtgatgt

SEQ ID NO: 6354 - DNA, 14 bp, Artificial Sequence
  Description of Artificial Sequence: Synthetic oligonucleotide
gtactatcgtgatg

SEQ ID NO: 6355 - DNA, 14 bp, Artificial Sequence
  Description of Artificial Sequence: Synthetic oligonucleotide
tgtactatcgtgat

SEQ ID NO: 6356 - DNA, 14 bp, Artificial Sequence
  Description of Artificial Sequence: Synthetic oligonucleotide
ctgtactatcgtga

SEQ ID NO: 6357 - DNA, 14 bp, Artificial Sequence
  Description of Artificial Sequence: Synthetic oligonucleotide
actgtactatcgtg

SEQ ID NO: 6358 - DNA, 14 bp, Artificial Sequence
  Description of Artificial Sequence: Synthetic oligonucleotide
tactgtactatcgt

SEQ ID NO: 6359 - DNA, 14 bp, Artificial Sequence
  Description of Artificial Sequence: Synthetic oligonucleotide
atactgtactatcg

SEQ ID NO: 6360 - DNA, 14 bp, Artificial Sequence
  Description of Artificial Sequence: Synthetic oligonucleotide
catactgtactatc

SEQ ID NO: 6361 - DNA, 14 bp, Artificial Sequence
  Description of Artificial Sequence: Synthetic oligonucleotide
acatactgtactat

SEQ ID NO: 6362 - DNA, 14 bp, Artificial Sequence
  Description of Artificial Sequence: Synthetic oligonucleotide
tacatactgtacta

SEQ ID NO: 6363 - DNA, 14 bp, Artificial Sequence
  Description of Artificial Sequence: Synthetic oligonucleotide
ctacatactgtact

SEQ ID NO: 6364 - DNA, 14 bp, Artificial Sequence
  Description of Artificial Sequence: Synthetic oligonucleotide
actacatactgtac

SEQ ID NO: 6365 - DNA, 14 bp, Artificial Sequence
  Description of Artificial Sequence: Synthetic oligonucleotide
gactacatactgta

SEQ ID NO: 6366 - DNA, 14 bp, Artificial Sequence
  Description of Artificial Sequence: Synthetic oligonucleotide
ggactacatactgt

SEQ ID NO: 6367 - DNA, 14 bp, Artificial Sequence
  Description of Artificial Sequence: Synthetic oligonucleotide
aggactacatactg

SEQ ID NO: 6368 - DNA, 14 bp, Artificial Sequence
  Description of Artificial Sequence: Synthetic oligonucleotide
aaggactacatact

SEQ ID NO: 6369 - DNA, 14 bp, Artificial Sequence
  Description of Artificial Sequence: Synthetic oligonucleotide
aaaggactacatac

SEQ ID NO: 6370 - DNA, 14 bp, Artificial Sequence
  Description of Artificial Sequence: Synthetic oligonucleotide
taaaggactacata

SEQ ID NO: 6371 - DNA, 14 bp, Artificial Sequence
  Description of Artificial Sequence: Synthetic oligonucleotide
ttaaaggactacat

SEQ ID NO: 6372 - DNA, 14 bp, Artificial Sequence
  Description of Artificial Sequence: Synthetic oligonucleotide
cttaaaggactaca

SEQ ID NO: 6373 - DNA, 14 bp, Artificial Sequence
  Description of Artificial Sequence: Synthetic oligonucleotide
tcttaaaggactac

SEQ ID NO: 6374 - DNA, 14 bp, Artificial Sequence
  Description of Artificial Sequence: Synthetic oligonucleotide
gtcttaaaggacta

SEQ ID NO: 6375 - DNA, 14 bp, Artificial Sequence
  Description of Artificial Sequence: Synthetic oligonucleotide
ggtcttaaaggact

SEQ ID NO: 6376 - DNA, 14 bp, Artificial Sequence
  Description of Artificial Sequence: Synthetic oligonucleotide
tggtcttaaaggac

SEQ ID NO: 6377 - DNA, 14 bp, Artificial Sequence
  Description of Artificial Sequence: Synthetic oligonucleotide
ctggtcttaaagga

SEQ ID NO: 6378 - DNA, 14 bp, Artificial Sequence
  Description of Artificial Sequence: Synthetic oligonucleotide
tctggtcttaaagg

SEQ ID NO: 6379 - DNA, 14 bp, Artificial Sequence
  Description of Artificial Sequence: Synthetic oligonucleotide
ttctggtcttaaag

SEQ ID NO: 6380 - DNA, 14 bp, Artificial Sequence
  Description of Artificial Sequence: Synthetic oligonucleotide
cttctggtcttaaa

SEQ ID NO: 6381 - DNA, 14 bp, Artificial Sequence
  Description of Artificial Sequence: Synthetic oligonucleotide
ccttctggtcttaa

SEQ ID NO: 6382 - DNA, 14 bp, Artificial Sequence
  Description of Artificial Sequence: Synthetic oligonucleotide
accttctggtctta

SEQ ID NO: 6383 - DNA, 14 bp, Artificial Sequence
  Description of Artificial Sequence: Synthetic oligonucleotide
taccttctggtctt

SEQ ID NO: 6384 - DNA, 14 bp, Artificial Sequence
  Description of Artificial Sequence: Synthetic oligonucleotide
ataccttctggtct

SEQ ID NO: 6385 - DNA, 14 bp, Artificial Sequence
  Description of Artificial Sequence: Synthetic oligonucleotide
cataccttctggtc

SEQ ID NO: 6386 - DNA, 14 bp, Artificial Sequence
  Description of Artificial Sequence: Synthetic oligonucleotide
acataccttctggt

SEQ ID NO: 6387 - DNA, 14 bp, Artificial Sequence
  Description of Artificial Sequence: Synthetic oligonucleotide
aacataccttctgg

SEQ ID NO: 6388 - DNA, 14 bp, Artificial Sequence
  Description of Artificial Sequence: Synthetic oligonucleotide
taacataccttctg

SEQ ID NO: 6389 - DNA, 14 bp, Artificial Sequence
  Description of Artificial Sequence: Synthetic oligonucleotide
ttaacataccttct

SEQ ID NO: 6390 - DNA, 14 bp, Artificial Sequence
  Description of Artificial Sequence: Synthetic oligonucleotide
gttaacataccttc

SEQ ID NO: 6391 - DNA, 14 bp, Artificial Sequence
  Description of Artificial Sequence: Synthetic oligonucleotide
agttaacatacctt

SEQ ID NO: 6392 - DNA, 14 bp, Artificial Sequence
  Description of Artificial Sequence: Synthetic oligonucleotide
cagttaacatacct

SEQ ID NO: 6393 - DNA, 14 bp, Artificial Sequence
  Description of Artificial Sequence: Synthetic oligonucleotide
gcagttaacatacc

SEQ ID NO: 6394 - DNA, 14 bp, Artificial Sequence
  Description of Artificial Sequence: Synthetic oligonucleotide
tgcagttaacatac

SEQ ID NO: 6395 - DNA, 14 bp, Artificial Sequence
  Description of Artificial Sequence: Synthetic oligonucleotide
gtgcagttaacata

SEQ ID NO: 6396 - DNA, 14 bp, Artificial Sequence
  Description of Artificial Sequence: Synthetic oligonucleotide
ggtgcagttaacat

SEQ ID NO: 6397 - DNA, 14 bp, Artificial Sequence
  Description of Artificial Sequence: Synthetic oligonucleotide
tggtgcagttaaca

SEQ ID NO: 6398 - DNA, 14 bp, Artificial Sequence
  Description of Artificial Sequence: Synthetic oligonucleotide
atggtgcagttaac

SEQ ID NO: 6399 - DNA, 14 bp, Artificial Sequence
  Description of Artificial Sequence: Synthetic oligonucleotide
gatggtgcagttaa

SEQ ID NO: 6400 - DNA, 14 bp, Artificial Sequence
  Description of Artificial Sequence: Synthetic oligonucleotide
tgatggtgcagtta

SEQ ID NO: 6401 - DNA, 14 bp, Artificial Sequence
  Description of Artificial Sequence: Synthetic oligonucleotide
atgatggtgcagtt

SEQ ID NO: 6402 - DNA, 14 bp, Artificial Sequence
  Description of Artificial Sequence: Synthetic oligonucleotide
aatgatggtgcagt

SEQ ID NO: 6403 - DNA, 14 bp, Artificial Sequence
  Description of Artificial Sequence: Synthetic oligonucleotide
taatgatggtgcag

SEQ ID NO: 6404 - DNA, 14 bp, Artificial Sequence
  Description of Artificial Sequence: Synthetic oligonucleotide
ttaatgatggtgca

SEQ ID NO: 6405 - DNA, 14 bp, Artificial Sequence
  Description of Artificial Sequence: Synthetic oligonucleotide
cttaatgatggtgc

SEQ ID NO: 6406 - DNA, 14 bp, Artificial Sequence
  Description of Artificial Sequence: Synthetic oligonucleotide
gcttaatgatggtg

SEQ ID NO: 6407 - DNA, 14 bp, Artificial Sequence
  Description of Artificial Sequence: Synthetic oligonucleotide
tgcttaatgatggt

SEQ ID NO: 6408 - DNA, 14 bp, Artificial Sequence
  Description of Artificial Sequence: Synthetic oligonucleotide
ctgcttaatgatgg

SEQ ID NO: 6409 - DNA, 14 bp, Artificial Sequence
  Description of Artificial Sequence: Synthetic oligonucleotide
actgcttaatgatg

SEQ ID NO: 6410 - DNA, 14 bp, Artificial Sequence
  Description of Artificial Sequence: Synthetic oligonucleotide
gactgcttaatgat

SEQ ID NO: 6411 - DNA, 14 bp, Artificial Sequence
  Description of Artificial Sequence: Synthetic oligonucleotide
agactgcttaatga

SEQ ID NO: 6412 - DNA, 14 bp, Artificial Sequence
  Description of Artificial Sequence: Synthetic oligonucleotide
tagactgcttaatg

SEQ ID NO: 6413 - DNA, 14 bp, Artificial Sequence
  Description of Artificial Sequence: Synthetic oligonucleotide
atagactgcttaat

SEQ ID NO: 6414 - DNA, 14 bp, Artificial Sequence
  Description of Artificial Sequence: Synthetic oligonucleotide
gatagactgcttaa

SEQ ID NO: 6415 - DNA, 14 bp, Artificial Sequence
  Description of Artificial Sequence: Synthetic oligonucleotide
ggatagactgctta

SEQ ID NO: 6416 - DNA, 14 bp, Artificial Sequence
  Description of Artificial Sequence: Synthetic oligonucleotide
aggatagactgctt

SEQ ID NO: 6417 - DNA, 14 bp, Artificial Sequence
  Description of Artificial Sequence: Synthetic oligonucleotide
taggatagactgct

SEQ ID NO: 6418 - DNA, 14 bp, Artificial Sequence
  Description of Artificial Sequence: Synthetic oligonucleotide
ataggatagactgc

SEQ ID NO: 6419 - DNA, 14 bp, Artificial Sequence
  Description of Artificial Sequence: Synthetic oligonucleotide
aataggatagactg

SEQ ID NO: 6420 - DNA, 14 bp, Artificial Sequence
  Description of Artificial Sequence: Synthetic oligonucleotide
aaataggatagact

SEQ ID NO: 6421 - DNA, 14 bp, Artificial Sequence
  Description of Artificial Sequence: Synthetic oligonucleotide
aaaataggatagac

SEQ ID NO: 6422 - DNA, 14 bp, Artificial Sequence
  Description of Artificial Sequence: Synthetic oligonucleotide
gaaaataggataga

SEQ ID NO: 6423 - DNA, 14 bp, Artificial Sequence
  Description of Artificial Sequence: Synthetic oligonucleotide
agaaaataggatag

SEQ ID NO: 6424 - DNA, 14 bp, Artificial Sequence
  Description of Artificial Sequence: Synthetic oligonucleotide
aagaaaataggata

SEQ ID NO: 6425 - DNA, 14 bp, Artificial Sequence
  Description of Artificial Sequence: Synthetic oligonucleotide
taagaaaataggat

SEQ ID NO: 6426 - DNA, 14 bp, Artificial Sequence
  Description of Artificial Sequence: Synthetic oligonucleotide
ataagaaaatagga

SEQ ID NO: 6427 - DNA, 14 bp, Artificial Sequence
  Description of Artificial Sequence: Synthetic oligonucleotide
aataagaaaatagg

SEQ ID NO: 6428 - DNA, 14 bp, Artificial Sequence
  Description of Artificial Sequence: Synthetic oligonucleotide
aaataagaaaatag

SEQ ID NO: 6429 - DNA, 14 bp, Artificial Sequence
  Description of Artificial Sequence: Synthetic oligonucleotide
taaataagaaaata

SEQ ID NO: 6430 - DNA, 14 bp, Artificial Sequence
  Description of Artificial Sequence: Synthetic oligonucleotide
ataaataagaaaat

SEQ ID NO: 6431 - DNA, 14 bp, Artificial Sequence
  Description of Artificial Sequence: Synthetic oligonucleotide
aataaataagaaaa

SEQ ID NO: 6432 - DNA, 14 bp, Artificial Sequence
  Description of Artificial Sequence: Synthetic oligonucleotide
aaataaataagaaa

SEQ ID NO: 6433 - DNA, 14 bp, Artificial Sequence
  Description of Artificial Sequence: Synthetic oligonucleotide
caaataaataagaa

SEQ ID NO: 6434 - DNA, 14 bp, Artificial Sequence
  Description of Artificial Sequence: Synthetic oligonucleotide
acaaataaataaga

SEQ ID NO: 6435 - DNA, 14 bp, Artificial Sequence
  Description of Artificial Sequence: Synthetic oligonucleotide
aacaaataaataag

SEQ ID NO: 6436 - DNA, 14 bp, Artificial Sequence
  Description of Artificial Sequence: Synthetic oligonucleotide
taacaaataaataa

SEQ ID NO: 6437 - DNA, 14 bp, Artificial Sequence
  Description of Artificial Sequence: Synthetic oligonucleotide
ctaacaaataaata

SEQ ID NO: 6438 - DNA, 14 bp, Artificial Sequence
  Description of Artificial Sequence: Synthetic oligonucleotide
tctaacaaataaat

SEQ ID NO: 6439 - DNA, 14 bp, Artificial Sequence
  Description of Artificial Sequence: Synthetic oligonucleotide
ttctaacaaataaa

SEQ ID NO: 6440 - DNA, 14 bp, Artificial Sequence
  Description of Artificial Sequence: Synthetic oligonucleotide
attctaacaaataa

SEQ ID NO: 6441 - DNA, 14 bp, Artificial Sequence
  Description of Artificial Sequence: Synthetic oligonucleotide
aattctaacaaata

SEQ ID NO: 6442 - DNA, 14 bp, Artificial Sequence
  Description of Artificial Sequence: Synthetic oligonucleotide
caattctaacaaat

SEQ ID NO: 6443 - DNA, 14 bp, Artificial Sequence
  Description of Artificial Sequence: Synthetic oligonucleotide
tcaattctaacaaa

SEQ ID NO: 6444 - DNA, 14 bp, Artificial Sequence
  Description of Artificial Sequence: Synthetic oligonucleotide
ttcaattctaacaa

SEQ ID NO: 6445 - DNA, 14 bp, Artificial Sequence
  Description of Artificial Sequence: Synthetic oligonucleotide
attcaattctaaca

SEQ ID NO: 6446 - DNA, 14 bp, Artificial Sequence
  Description of Artificial Sequence: Synthetic oligonucleotide
gattcaattctaac

SEQ ID NO: 6447 - DNA, 14 bp, Artificial Sequence
  Description of Artificial Sequence: Synthetic oligonucleotide
ggattcaattctaa

SEQ ID NO: 6448 - DNA, 14 bp, Artificial Sequence
  Description of Artificial Sequence: Synthetic oligonucleotide
aggattcaattcta

SEQ ID NO: 6449 - DNA, 14 bp, Artificial Sequence
  Description of Artificial Sequence: Synthetic oligonucleotide
aaggattcaattct

SEQ ID NO: 6450 - DNA, 14 bp, Artificial Sequence
  Description of Artificial Sequence: Synthetic oligonucleotide
aaaggattcaattc

SEQ ID NO: 6451 - DNA, 14 bp, Artificial Sequence
  Description of Artificial Sequence: Synthetic oligonucleotide
gaaaggattcaatt

SEQ ID NO: 6452 - DNA, 14 bp, Artificial Sequence
  Description of Artificial Sequence: Synthetic oligonucleotide
agaaaggattcaat

SEQ ID NO: 6453 - DNA, 14 bp, Artificial Sequence
  Description of Artificial Sequence: Synthetic oligonucleotide
gagaaaggattcaa

SEQ ID NO: 6454 - DNA, 14 bp, Artificial Sequence
  Description of Artificial Sequence: Synthetic oligonucleotide
tgagaaaggattca

SEQ ID NO: 6455 - DNA, 14 bp, Artificial Sequence
  Description of Artificial Sequence: Synthetic oligonucleotide
ttgagaaaggattc

SEQ ID NO: 6456 - DNA, 14 bp, Artificial Sequence
  Description of Artificial Sequence: Synthetic oligonucleotide
attgagaaaggatt

SEQ ID NO: 6457 - DNA, 14 bp, Artificial Sequence
  Description of Artificial Sequence: Synthetic oligonucleotide
tattgagaaaggat

SEQ ID NO: 6458 - DNA, 14 bp, Artificial Sequence
  Description of Artificial Sequence: Synthetic oligonucleotide
atattgagaaagga

SEQ ID NO: 6459 - DNA, 14 bp, Artificial Sequence
  Description of Artificial Sequence: Synthetic oligonucleotide
gatattgagaaagg

SEQ ID NO: 6460 - DNA, 14 bp, Artificial Sequence
  Description of Artificial Sequence: Synthetic oligonucleotide
agatattgagaaag

SEQ ID NO: 6461 - DNA, 14 bp, Artificial Sequence
  Description of Artificial Sequence: Synthetic oligonucleotide
cagatattgagaaa

SEQ ID NO: 6462 - DNA, 14 bp, Artificial Sequence
  Description of Artificial Sequence: Synthetic oligonucleotide
acagatattgagaa

SEQ ID NO: 6463 - DNA, 14 bp, Artificial Sequence
  Description of Artificial Sequence: Synthetic oligonucleotide
tacagatattgaga

SEQ ID NO: 6464 - DNA, 14 bp, Artificial Sequence
  Description of Artificial Sequence: Synthetic oligonucleotide
gtacagatattgag

SEQ ID NO: 6465 - DNA, 14 bp, Artificial Sequence
  Description of Artificial Sequence: Synthetic oligonucleotide
ggtacagatattga

SEQ ID NO: 6466 - DNA, 14 bp, Artificial Sequence
  Description of Artificial Sequence: Synthetic oligonucleotide
tggtacagatattg

SEQ ID NO: 6467 - DNA, 14 bp, Artificial Sequence
  Description of Artificial Sequence: Synthetic oligonucleotide
atggtacagatatt

SEQ ID NO: 6468 - DNA, 14 bp, Artificial Sequence
  Description of Artificial Sequence: Synthetic oligonucleotide
aatggtacagatat

SEQ ID NO: 6469 - DNA, 14 bp, Artificial Sequence
  Description of Artificial Sequence: Synthetic oligonucleotide
gaatggtacagata

SEQ ID NO: 6470 - DNA, 14 bp, Artificial Sequence
  Description of Artificial Sequence: Synthetic oligonucleotide
ggaatggtacagat

SEQ ID NO: 6471 - DNA, 14 bp, Artificial Sequence
  Description of Artificial Sequence: Synthetic oligonucleotide
aggaatggtacaga

SEQ ID NO: 6472 - DNA, 14 bp, Artificial Sequence
  Description of Artificial Sequence: Synthetic oligonucleotide
taggaatggtacag

SEQ ID NO: 6473 - DNA, 14 bp, Artificial Sequence
  Description of Artificial Sequence: Synthetic oligonucleotide
ataggaatggtaca

SEQ ID NO: 6474 - DNA, 14 bp, Artificial Sequence
  Description of Artificial Sequence: Synthetic oligonucleotide
cataggaatggtac

SEQ ID NO: 6475 - DNA, 14 bp, Artificial Sequence
  Description of Artificial Sequence: Synthetic oligonucleotide
tcataggaatggta

SEQ ID NO: 6476 - DNA, 14 bp, Artificial Sequence
  Description of Artificial Sequence: Synthetic oligonucleotide
atcataggaatggt

SEQ ID NO: 6477 - DNA, 14 bp, Artificial Sequence
  Description of Artificial Sequence: Synthetic oligonucleotide
catcataggaatgg

SEQ ID NO: 6478 - DNA, 14 bp, Artificial Sequence
  Description of Artificial Sequence: Synthetic oligonucleotide
ccatcataggaatg

SEQ ID NO: 6479 - DNA, 14 bp, Artificial Sequence
  Description of Artificial Sequence: Synthetic oligonucleotide
accatcataggaat

SEQ ID NO: 6480 - DNA, 14 bp, Artificial Sequence
  Description of Artificial Sequence: Synthetic oligonucleotide
taccatcataggaa

SEQ ID NO: 6481 - DNA, 14 bp, Artificial Sequence
  Description of Artificial Sequence: Synthetic oligonucleotide
ctaccatcatagga

SEQ ID NO: 6482 - DNA, 14 bp, Artificial Sequence
  Description of Artificial Sequence: Synthetic oligonucleotide
gctaccatcatagg

SEQ ID NO: 6483 - DNA, 14 bp, Artificial Sequence
  Description of Artificial Sequence: Synthetic oligonucleotide
ggctaccatcatag

SEQ ID NO: 6484 - DNA, 14 bp, Artificial Sequence
  Description of Artificial Sequence: Synthetic oligonucleotide
tggctaccatcata

SEQ ID NO: 6485 - DNA, 14 bp, Artificial Sequence
  Description of Artificial Sequence: Synthetic oligonucleotide
atggctaccatcat

SEQ ID NO: 6486 - DNA, 14 bp, Artificial Sequence
  Description of Artificial Sequence: Synthetic oligonucleotide
aatggctaccatca

SEQ ID NO: 6487 - DNA, 14 bp, Artificial Sequence
  Description of Artificial Sequence: Synthetic oligonucleotide
gaatggctaccatc

SEQ ID NO: 6488 - DNA, 14 bp, Artificial Sequence
  Description of Artificial Sequence: Synthetic oligonucleotide
agaatggctaccat

SEQ ID NO: 6489 - DNA, 14 bp, Artificial Sequence
  Description of Artificial Sequence: Synthetic oligonucleotide
aagaatggctacca

SEQ ID NO: 6490 - DNA, 14 bp, Artificial Sequence
  Description of Artificial Sequence: Synthetic oligonucleotide
gaagaatggctacc

SEQ ID NO: 6491 - DNA, 14 bp, Artificial Sequence
  Description of Artificial Sequence: Synthetic oligonucleotide
agaagaatggctac

SEQ ID NO: 6492 - DNA, 14 bp, Artificial Sequence
  Description of Artificial Sequence: Synthetic oligonucleotide
gagaagaatggcta

SEQ ID NO: 6493 - DNA, 14 bp, Artificial Sequence
  Description of Artificial Sequence: Synthetic oligonucleotide
agagaagaatggct

SEQ ID NO: 6494 - DNA, 14 bp, Artificial Sequence
  Description of Artificial Sequence: Synthetic oligonucleotide
aagagaagaatggc

SEQ ID NO: 6495 - DNA, 14 bp, Artificial Sequence
  Description of Artificial Sequence: Synthetic oligonucleotide
aaagagaagaatgg

SEQ ID NO: 6496 - DNA, 14 bp, Artificial Sequence
  Description of Artificial Sequence: Synthetic oligonucleotide
taaagagaagaatg

SEQ ID NO: 6497 - DNA, 14 bp, Artificial Sequence
  Description of Artificial Sequence: Synthetic oligonucleotide
ataaagagaagaat

SEQ ID NO: 6498 - DNA, 14 bp, Artificial Sequence
  Description of Artificial Sequence: Synthetic oligonucleotide
tataaagagaagaa

SEQ ID NO: 6499 - DNA, 14 bp, Artificial Sequence
  Description of Artificial Sequence: Synthetic oligonucleotide
ttataaagagaaga

SEQ ID NO: 6500 - DNA, 14 bp, Artificial Sequence
  Description of Artificial Sequence: Synthetic oligonucleotide
tttataaagagaag

SEQ ID NO: 6501 - DNA, 14 bp, Artificial Sequence
  Description of Artificial Sequence: Synthetic oligonucleotide
ttttataaagagaa

SEQ ID NO: 6502 - DNA, 14 bp, Artificial Sequence
  Description of Artificial Sequence: Synthetic oligonucleotide
attttataaagaga

SEQ ID NO: 6503 - DNA, 14 bp, Artificial Sequence
  Description of Artificial Sequence: Synthetic oligonucleotide
tattttataaagag

SEQ ID NO: 6504 - DNA, 14 bp, Artificial Sequence
  Description of Artificial Sequence: Synthetic oligonucleotide
atattttataaaga

SEQ ID NO: 6505 - DNA, 14 bp, Artificial Sequence
  Description of Artificial Sequence: Synthetic oligonucleotide
aatattttataaag

SEQ ID NO: 6506 - DNA, 14 bp, Artificial Sequence
  Description of Artificial Sequence: Synthetic oligonucleotide
aaatattttataaa

SEQ ID NO: 6507 - DNA, 14 bp, Artificial Sequence
  Description of Artificial Sequence: Synthetic oligonucleotide
gaaatattttataa

SEQ ID NO: 6508 - DNA, 14 bp, Artificial Sequence
  Description of Artificial Sequence: Synthetic oligonucleotide
ggaaatattttata

SEQ ID NO: 6509 - DNA, 14 bp, Artificial Sequence
  Description of Artificial Sequence: Synthetic oligonucleotide
aggaaatattttat

SEQ ID NO: 6510 - DNA, 14 bp, Artificial Sequence
  Description of Artificial Sequence: Synthetic oligonucleotide
gaggaaatatttta

SEQ ID NO: 6511 - DNA, 14 bp, Artificial Sequence
  Description of Artificial Sequence: Synthetic oligonucleotide
agaggaaatatttt

SEQ ID NO: 6512 - DNA, 14 bp, Artificial Sequence
  Description of Artificial Sequence: Synthetic oligonucleotide
aagaggaaatattt

SEQ ID NO: 6513 - DNA, 14 bp, Artificial Sequence
  Description of Artificial Sequence: Synthetic oligonucleotide
aaagaggaaatatt

SEQ ID NO: 6514 - DNA, 14 bp, Artificial Sequence
  Description of Artificial Sequence: Synthetic oligonucleotide
caaagaggaaatat

SEQ ID NO: 6515 - DNA, 14 bp, Artificial Sequence
  Description of Artificial Sequence: Synthetic oligonucleotide
tcaaagaggaaata

SEQ ID NO: 6516 - DNA, 14 bp, Artificial Sequence
  Description of Artificial Sequence: Synthetic oligonucleotide
ttcaaagaggaaat

SEQ ID NO: 6517 - DNA, 14 bp, Artificial Sequence
  Description of Artificial Sequence: Synthetic oligonucleotide
tttcaaagaggaaa

SEQ ID NO: 6518 - DNA, 14 bp, Artificial Sequence
  Description of Artificial Sequence: Synthetic oligonucleotide
ttttcaaagaggaa

SEQ ID NO: 6519 - DNA, 14 bp, Artificial Sequence
  Description of Artificial Sequence: Synthetic oligonucleotide
cttttcaaagagga

SEQ ID NO: 6520 - DNA, 14 bp, Artificial Sequence
  Description of Artificial Sequence: Synthetic oligonucleotide
gcttttcaaagagg

SEQ ID NO: 6521 - DNA, 14 bp, Artificial Sequence
  Description of Artificial Sequence: Synthetic oligonucleotide
cgcttttcaaagag

SEQ ID NO: 6522 - DNA, 14 bp, Artificial Sequence
  Description of Artificial Sequence: Synthetic oligonucleotide
acgcttttcaaaga

SEQ ID NO: 6523 - DNA, 14 bp, Artificial Sequence
  Description of Artificial Sequence: Synthetic oligonucleotide
gacgcttttcaaag

SEQ ID NO: 6524 - DNA, 14 bp, Artificial Sequence
  Description of Artificial Sequence: Synthetic oligonucleotide
ggacgcttttcaaa

SEQ ID NO: 6525 - DNA, 14 bp, Artificial Sequence
  Description of Artificial Sequence: Synthetic oligonucleotide
aggacgcttttcaa

SEQ ID NO: 6526 - DNA, 14 bp, Artificial Sequence
  Description of Artificial Sequence: Synthetic oligonucleotide
taggacgcttttca

SEQ ID NO: 6527 - DNA, 14 bp, Artificial Sequence
  Description of Artificial Sequence: Synthetic oligonucleotide
ttaggacgcttttc

SEQ ID NO: 6528 - DNA, 14 bp, Artificial Sequence
  Description of Artificial Sequence: Synthetic oligonucleotide
tttaggacgctttt

SEQ ID NO: 6529 - DNA, 14 bp, Artificial Sequence
  Description of Artificial Sequence: Synthetic oligonucleotide
ttttaggacgcttt

SEQ ID NO: 6530 - DNA, 14 bp, Artificial Sequence
  Description of Artificial Sequence: Synthetic oligonucleotide
gttttaggacgctt

SEQ ID NO: 6531 - DNA, 14 bp, Artificial Sequence
  Description of Artificial Sequence: Synthetic oligonucleotide
tgttttaggacgct

SEQ ID NO: 6532 - DNA, 14 bp, Artificial Sequence
  Description of Artificial Sequence: Synthetic oligonucleotide
atgttttaggacgc

SEQ ID NO: 6533 - DNA, 14 bp, Artificial Sequence
  Description of Artificial Sequence: Synthetic oligonucleotide
aatgttttaggacg

SEQ ID NO: 6534 - DNA, 14 bp, Artificial Sequence
  Description of Artificial Sequence: Synthetic oligonucleotide
taatgttttaggac

SEQ ID NO: 6535 - DNA, 14 bp, Artificial Sequence
  Description of Artificial Sequence: Synthetic oligonucleotide
ttaatgttttagga

SEQ ID NO: 6536 - DNA, 14 bp, Artificial Sequence
  Description of Artificial Sequence: Synthetic oligonucleotide
attaatgttttagg

SEQ ID NO: 6537 - DNA, 14 bp, Artificial Sequence
  Description of Artificial Sequence: Synthetic oligonucleotide
aattaatgttttag

SEQ ID NO: 6538 - DNA, 14 bp, Artificial Sequence
  Description of Artificial Sequence: Synthetic oligonucleotide
aaattaatgtttta

SEQ ID NO: 6539 - DNA, 14 bp, Artificial Sequence
  Description of Artificial Sequence: Synthetic oligonucleotide
gaaattaatgtttt

SEQ ID NO: 6540 - DNA, 14 bp, Artificial Sequence
  Description of Artificial Sequence: Synthetic oligonucleotide
tgaaattaatgttt

SEQ ID NO: 6541 - DNA, 14 bp, Artificial Sequence
  Description of Artificial Sequence: Synthetic oligonucleotide
ttgaaattaatgtt

SEQ ID NO: 6542 - DNA, 14 bp, Artificial Sequence
  Description of Artificial Sequence: Synthetic oligonucleotide
tttgaaattaatgt

SEQ ID NO: 6543 - DNA, 14 bp, Artificial Sequence
  Description of Artificial Sequence: Synthetic oligonucleotide
atttgaaattaatg

SEQ ID NO: 6544 - DNA, 14 bp, Artificial Sequence
  Description of Artificial Sequence: Synthetic oligonucleotide
gatttgaaattaat

SEQ ID NO: 6545 - DNA, 14 bp, Artificial Sequence
  Description of Artificial Sequence: Synthetic oligonucleotide
ggatttgaaattaa

SEQ ID NO: 6546 - DNA, 14 bp, Artificial Sequence
  Description of Artificial Sequence: Synthetic oligonucleotide
gggatttgaaatta

SEQ ID NO: 6547 - DNA, 14 bp, Artificial Sequence
  Description of Artificial Sequence: Synthetic oligonucleotide
ggggatttgaaatt

SEQ ID NO: 6548 - DNA, 14 bp, Artificial Sequence
  Description of Artificial Sequence: Synthetic oligonucleotide
aggggatttgaaat

SEQ ID NO: 6549 - DNA, 14 bp, Artificial Sequence
  Description of Artificial Sequence: Synthetic oligonucleotide
gaggggatttgaaa

SEQ ID NO: 6550 - DNA, 14 bp, Artificial Sequence
  Description of Artificial Sequence: Synthetic oligonucleotide
agaggggatttgaa

SEQ ID NO: 6551 - DNA, 14 bp, Artificial Sequence
  Description of Artificial Sequence: Synthetic oligonucleotide
aagaggggatttga

SEQ ID NO: 6552 - DNA, 14 bp, Artificial Sequence
  Description of Artificial Sequence: Synthetic oligonucleotide
caagaggggatttg

SEQ ID NO: 6553 - DNA, 14 bp, Artificial Sequence
  Description of Artificial Sequence: Synthetic oligonucleotide
ccaagaggggattt

SEQ ID NO: 6554 - DNA, 14 bp, Artificial Sequence
  Description of Artificial Sequence: Synthetic oligonucleotide
tccaagaggggatt

SEQ ID NO: 6555 - DNA, 14 bp, Artificial Sequence
  Description of Artificial Sequence: Synthetic oligonucleotide
atccaagaggggat

SEQ ID NO: 6556 - DNA, 14 bp, Artificial Sequence
  Description of Artificial Sequence: Synthetic oligonucleotide
catccaagagggga

SEQ ID NO: 6557 - DNA, 14 bp, Artificial Sequence
  Description of Artificial Sequence: Synthetic oligonucleotide
gcatccaagagggg

SEQ ID NO: 6558 - DNA, 14 bp, Artificial Sequence
  Description of Artificial Sequence: Synthetic oligonucleotide
tgcatccaagaggg

SEQ ID NO: 6559 - DNA, 14 bp, Artificial Sequence
  Description of Artificial Sequence: Synthetic oligonucleotide
ttgcatccaagagg

SEQ ID NO: 6560 - DNA, 14 bp, Artificial Sequence
  Description of Artificial Sequence: Synthetic oligonucleotide
tttgcatccaagag

SEQ ID NO: 6561 - DNA, 14 bp, Artificial Sequence
  Description of Artificial Sequence: Synthetic oligonucleotide
ctttgcatccaaga

SEQ ID NO: 6562 - DNA, 14 bp, Artificial Sequence
  Description of Artificial Sequence: Synthetic oligonucleotide
actttgcatccaag

SEQ ID NO: 6563 - DNA, 14 bp, Artificial Sequence
  Description of Artificial Sequence: Synthetic oligonucleotide
cactttgcatccaa

SEQ ID NO: 6564 - DNA, 14 bp, Artificial Sequence
  Description of Artificial Sequence: Synthetic oligonucleotide
acactttgcatcca

SEQ ID NO: 6565 - DNA, 14 bp, Artificial Sequence
  Description of Artificial Sequence: Synthetic oligonucleotide
gacactttgcatcc

SEQ ID NO: 6566 - DNA, 14 bp, Artificial Sequence
  Description of Artificial Sequence: Synthetic oligonucleotide
ggacactttgcatc

SEQ ID NO: 6567 - DNA, 14 bp, Artificial Sequence
  Description of Artificial Sequence: Synthetic oligonucleotide
gggacactttgcat

SEQ ID NO: 6568 - DNA, 14 bp, Artificial Sequence
  Description of Artificial Sequence: Synthetic oligonucleotide
agggacactttgca

SEQ ID NO: 6569 - DNA, 14 bp, Artificial Sequence
  Description of Artificial Sequence: Synthetic oligonucleotide
tagggacactttgc

SEQ ID NO: 6570 - DNA, 14 bp, Artificial Sequence
  Description of Artificial Sequence: Synthetic oligonucleotide
ttagggacactttg

SEQ ID NO: 6571 - DNA, 14 bp, Artificial Sequence
  Description of Artificial Sequence: Synthetic oligonucleotide
cttagggacacttt

SEQ ID NO: 6572 - DNA, 14 bp, Artificial Sequence
  Description of Artificial Sequence: Synthetic oligonucleotide
tcttagggacactt

SEQ ID NO: 6573 - DNA, 14 bp, Artificial Sequence
  Description of Artificial Sequence: Synthetic oligonucleotide
gtcttagggacact

SEQ ID NO: 6574 - DNA, 14 bp, Artificial Sequence
  Description of Artificial Sequence: Synthetic oligonucleotide
ggtcttagggacac

SEQ ID NO: 6575 - DNA, 14 bp, Artificial Sequence
  Description of Artificial Sequence: Synthetic oligonucleotide
tggtcttagggaca

SEQ ID NO: 6576 - DNA, 14 bp, Artificial Sequence
  Description of Artificial Sequence: Synthetic oligonucleotide
atggtcttagggac

SEQ ID NO: 6577 - DNA, 14 bp, Artificial Sequence
  Description of Artificial Sequence: Synthetic oligonucleotide
gatggtcttaggga

SEQ ID NO: 6578 - DNA, 14 bp, Artificial Sequence
  Description of Artificial Sequence: Synthetic oligonucleotide
ggatggtcttaggg

SEQ ID NO: 6579 - DNA, 14 bp, Artificial Sequence
  Description of Artificial Sequence: Synthetic oligonucleotide
tggatggtcttagg

SEQ ID NO: 6580 - DNA, 14 bp, Artificial Sequence
  Description of Artificial Sequence: Synthetic oligonucleotide
atggatggtcttag

SEQ ID NO: 6581 - DNA, 14 bp, Artificial Sequence
  Description of Artificial Sequence: Synthetic oligonucleotide
aatggatggtctta

SEQ ID NO: 6582 - DNA, 14 bp, Artificial Sequence
  Description of Artificial Sequence: Synthetic oligonucleotide
gaatggatggtctt

SEQ ID NO: 6583 - DNA, 14 bp, Artificial Sequence
  Description of Artificial Sequence: Synthetic oligonucleotide
tgaatggatggtct

SEQ ID NO: 6584 - DNA, 14 bp, Artificial Sequence
  Description of Artificial Sequence: Synthetic oligonucleotide
ttgaatggatggtc

SEQ ID NO: 6585 - DNA, 14 bp, Artificial Sequence
  Description of Artificial Sequence: Synthetic oligonucleotide
gttgaatggatggt

SEQ ID NO: 6586 - DNA, 14 bp, Artificial Sequence
  Description of Artificial Sequence: Synthetic oligonucleotide
tgttgaatggatgg

SEQ ID NO: 6587 - DNA, 14 bp, Artificial Sequence
  Description of Artificial Sequence: Synthetic oligonucleotide
ctgttgaatggatg

SEQ ID NO: 6588 - DNA, 14 bp, Artificial Sequence
  Description of Artificial Sequence: Synthetic oligonucleotide
actgttgaatggat

SEQ ID NO: 6589 - DNA, 14 bp, Artificial Sequence
  Description of Artificial Sequence: Synthetic oligonucleotide
tactgttgaatgga

SEQ ID NO: 6590 - DNA, 14 bp, Artificial Sequence
  Description of Artificial Sequence: Synthetic oligonucleotide
atactgttgaatgg

SEQ ID NO: 6591 - DNA, 14 bp, Artificial Sequence
  Description of Artificial Sequence: Synthetic oligonucleotide
aatactgttgaatg

SEQ ID NO: 6592 - DNA, 14 bp, Artificial Sequence
  Description of Artificial Sequence: Synthetic oligonucleotide
aaatactgttgaat

SEQ ID NO: 6593 - DNA, 14 bp, Artificial Sequence
  Description of Artificial Sequence: Synthetic oligonucleotide
taaatactgttgaa

SEQ ID NO: 6594 - DNA, 14 bp, Artificial Sequence
  Description of Artificial Sequence: Synthetic oligonucleotide
ataaatactgttga

SEQ ID NO: 6595 - DNA, 14 bp, Artificial Sequence
  Description of Artificial Sequence: Synthetic oligonucleotide
cataaatactgttg

SEQ ID NO: 6596 - DNA, 14 bp, Artificial Sequence
  Description of Artificial Sequence: Synthetic oligonucleotide
acataaatactgtt

SEQ ID NO: 6597 - DNA, 14 bp, Artificial Sequence
  Description of Artificial Sequence: Synthetic oligonucleotide
cacataaatactgt

SEQ ID NO: 6598 - DNA, 14 bp, Artificial Sequence
  Description of Artificial Sequence: Synthetic oligonucleotide
tcacataaatactg

SEQ ID NO: 6599 - DNA, 14 bp, Artificial Sequence
  Description of Artificial Sequence: Synthetic oligonucleotide
ctcacataaatact

SEQ ID NO: 6600 - DNA, 14 bp, Artificial Sequence
  Description of Artificial Sequence: Synthetic oligonucleotide
gctcacataaatac

SEQ ID NO: 6601 - DNA, 14 bp, Artificial Sequence
  Description of Artificial Sequence: Synthetic oligonucleotide
ggctcacataaata

SEQ ID NO: 6602 - DNA, 14 bp, Artificial Sequence
  Description of Artificial Sequence: Synthetic oligonucleotide
tggctcacataaat

SEQ ID NO: 6603 - DNA, 14 bp, Artificial Sequence
  Description of Artificial Sequence: Synthetic oligonucleotide
ttggctcacataaa

SEQ ID NO: 6604 - DNA, 14 bp, Artificial Sequence
  Description of Artificial Sequence: Synthetic oligonucleotide
gttggctcacataa

SEQ ID NO: 6605 - DNA, 14 bp, Artificial Sequence
  Description of Artificial Sequence: Synthetic oligonucleotide
agttggctcacata

SEQ ID NO: 6606 - DNA, 14 bp, Artificial Sequence
  Description of Artificial Sequence: Synthetic oligonucleotide
aagttggctcacat

SEQ ID NO: 6607 - DNA, 14 bp, Artificial Sequence
  Description of Artificial Sequence: Synthetic oligonucleotide
taagttggctcaca

SEQ ID NO: 6608 - DNA, 14 bp, Artificial Sequence
  Description of Artificial Sequence: Synthetic oligonucleotide
gtaagttggctcac

SEQ ID NO: 6609 - DNA, 14 bp, Artificial Sequence
  Description of Artificial Sequence: Synthetic oligonucleotide
agtaagttggctca

SEQ ID NO: 6610 - DNA, 14 bp, Artificial Sequence
  Description of Artificial Sequence: Synthetic oligonucleotide
tagtaagttggctc

SEQ ID NO: 6611 - DNA, 14 bp, Artificial Sequence
  Description of Artificial Sequence: Synthetic oligonucleotide
ctagtaagttggct

SEQ ID NO: 6612 - DNA, 14 bp, Artificial Sequence
  Description of Artificial Sequence: Synthetic oligonucleotide
tctagtaagttggc

SEQ ID NO: 6613 - DNA, 14 bp, Artificial Sequence
  Description of Artificial Sequence: Synthetic oligonucleotide
ctctagtaagttgg

SEQ ID NO: 6614 - DNA, 14 bp, Artificial Sequence
  Description of Artificial Sequence: Synthetic oligonucleotide
gctctagtaagttg

SEQ ID NO: 6615 - DNA, 14 bp, Artificial Sequence
  Description of Artificial Sequence: Synthetic oligonucleotide
ggctctagtaagtt

SEQ ID NO: 6616 - DNA, 14 bp, Artificial Sequence
  Description of Artificial Sequence: Synthetic oligonucleotide
cggctctagtaagt

SEQ ID NO: 6617 - DNA, 14 bp, Artificial Sequence
  Description of Artificial Sequence: Synthetic oligonucleotide
gcggctctagtaag

SEQ ID NO: 6618 - DNA, 14 bp, Artificial Sequence
  Description of Artificial Sequence: Synthetic oligonucleotide
agcggctctagtaa

SEQ ID NO: 6619 - DNA, 14 bp, Artificial Sequence
  Description of Artificial Sequence: Synthetic oligonucleotide
tagcggctctagta

SEQ ID NO: 6620 - DNA, 14 bp, Artificial Sequence
  Description of Artificial Sequence: Synthetic oligonucleotide
gtagcggctctagt

SEQ ID NO: 6621 - DNA, 14 bp, Artificial Sequence
  Description of Artificial Sequence: Synthetic oligonucleotide
tgtagcggctctag

SEQ ID NO: 6622 - DNA, 14 bp, Artificial Sequence
  Description of Artificial Sequence: Synthetic oligonucleotide
ttgtagcggctcta

SEQ ID NO: 6623 - DNA, 14 bp, Artificial Sequence
  Description of Artificial Sequence: Synthetic oligonucleotide
gttgtagcggctct

SEQ ID NO: 6624 - DNA, 14 bp, Artificial Sequence
  Description of Artificial Sequence: Synthetic oligonucleotide
agttgtagcggctc

SEQ ID NO: 6625 - DNA, 14 bp, Artificial Sequence
  Description of Artificial Sequence: Synthetic oligonucleotide
tagttgtagcggct

SEQ ID NO: 6626 - DNA, 14 bp, Artificial Sequence
  Description of Artificial Sequence: Synthetic oligonucleotide
ttagttgtagcggc

SEQ ID NO: 6627 - DNA, 14 bp, Artificial Sequence
  Description of Artificial Sequence: Synthetic oligonucleotide
attagttgtagcgg

SEQ ID NO: 6628 - DNA, 14 bp, Artificial Sequence
  Description of Artificial Sequence: Synthetic oligonucleotide
gattagttgtagcg

SEQ ID NO: 6629 - DNA, 14 bp, Artificial Sequence
  Description of Artificial Sequence: Synthetic oligonucleotide
tgattagttgtagc

SEQ ID NO: 6630 - DNA, 14 bp, Artificial Sequence
  Description of Artificial Sequence: Synthetic oligonucleotide
atgattagttgtag

SEQ ID NO: 6631 - DNA, 14 bp, Artificial Sequence
  Description of Artificial Sequence: Synthetic oligonucleotide
catgattagttgta

SEQ ID NO: 6632 - DNA, 14 bp, Artificial Sequence
  Description of Artificial Sequence: Synthetic oligonucleotide
tcatgattagttgt

SEQ ID NO: 6633 - DNA, 14 bp, Artificial Sequence
  Description of Artificial Sequence: Synthetic oligonucleotide
atcatgattagttg

SEQ ID NO: 6634 - DNA, 14 bp, Artificial Sequence
  Description of Artificial Sequence: Synthetic oligonucleotide
tatcatgattagtt

SEQ ID NO: 6635 - DNA, 14 bp, Artificial Sequence
  Description of Artificial Sequence: Synthetic oligonucleotide
ctatcatgattagt

SEQ ID NO: 6636 - DNA, 14 bp, Artificial Sequence
  Description of Artificial Sequence: Synthetic oligonucleotide
tctatcatgattag

SEQ ID NO: 6637 - DNA, 14 bp, Artificial Sequence
  Description of Artificial Sequence: Synthetic oligonucleotide
gtctatcatgatta

SEQ ID NO: 6638 - DNA, 14 bp, Artificial Sequence
  Description of Artificial Sequence: Synthetic oligonucleotide
tgtctatcatgatt

SEQ ID NO: 6639 - DNA, 14 bp, Artificial Sequence
  Description of Artificial Sequence: Synthetic oligonucleotide
ctgtctatcatgat

SEQ ID NO: 6640 - DNA, 14 bp, Artificial Sequence
  Description of Artificial Sequence: Synthetic oligonucleotide
actgtctatcatga

SEQ ID NO: 6641 - DNA, 14 bp, Artificial Sequence
  Description of Artificial Sequence: Synthetic oligonucleotide
gactgtctatcatg

SEQ ID NO: 6642 - DNA, 14 bp, Artificial Sequence
  Description of Artificial Sequence: Synthetic oligonucleotide
ggactgtctatcat

SEQ ID NO: 6643 - DNA, 14 bp, Artificial Sequence
  Description of Artificial Sequence: Synthetic oligonucleotide
tggactgtctatca

SEQ ID NO: 6644 - DNA, 14 bp, Artificial Sequence
  Description of Artificial Sequence: Synthetic oligonucleotide
ctggactgtctatc

SEQ ID NO: 6645 - DNA, 14 bp, Artificial Sequence
  Description of Artificial Sequence: Synthetic oligonucleotide
tctggactgtctat

SEQ ID NO: 6646 - DNA, 14 bp, Artificial Sequence
  Description of Artificial Sequence: Synthetic oligonucleotide
ttctggactgtcta

SEQ ID NO: 6647 - DNA, 14 bp, Artificial Sequence
  Description of Artificial Sequence: Synthetic oligonucleotide
attctggactgtct

SEQ ID NO: 6648 - DNA, 14 bp, Artificial Sequence
  Description of Artificial Sequence: Synthetic oligonucleotide
gattctggactgtc

SEQ ID NO: 6649 - DNA, 14 bp, Artificial Sequence
  Description of Artificial Sequence: Synthetic oligonucleotide
agattctggactgt

SEQ ID NO: 6650 - DNA, 14 bp, Artificial Sequence
  Description of Artificial Sequence: Synthetic oligonucleotide
gagattctggactg

SEQ ID NO: 6651 - DNA, 14 bp, Artificial Sequence
  Description of Artificial Sequence: Synthetic oligonucleotide
ggagattctggact

SEQ ID NO: 6652 - DNA, 14 bp, Artificial Sequence
  Description of Artificial Sequence: Synthetic oligonucleotide
gggagattctggac

SEQ ID NO: 6653 - DNA, 14 bp, Artificial Sequence
  Description of Artificial Sequence: Synthetic oligonucleotide
agggagattctgga

SEQ ID NO: 6654 - DNA, 14 bp, Artificial Sequence
  Description of Artificial Sequence: Synthetic oligonucleotide
cagggagattctgg

SEQ ID NO: 6655 - DNA, 14 bp, Artificial Sequence
  Description of Artificial Sequence: Synthetic oligonucleotide
ccagggagattctg

SEQ ID NO: 6656 - DNA, 14 bp, Artificial Sequence
  Description of Artificial Sequence: Synthetic oligonucleotide
tccagggagattct

SEQ ID NO: 6657 - DNA, 14 bp, Artificial Sequence
  Description of Artificial Sequence: Synthetic oligonucleotide
gtccagggagattc

SEQ ID NO: 6658 - DNA, 14 bp, Artificial Sequence
  Description of Artificial Sequence: Synthetic oligonucleotide
agtccagggagatt

SEQ ID NO: 6659 - DNA, 14 bp, Artificial Sequence
  Description of Artificial Sequence: Synthetic oligonucleotide
aagtccagggagat

SEQ ID NO: 6660 - DNA, 14 bp, Artificial Sequence
  Description of Artificial Sequence: Synthetic oligonucleotide
aaagtccagggaga

SEQ ID NO: 6661 - DNA, 14 bp, Artificial Sequence
  Description of Artificial Sequence: Synthetic oligonucleotide
taaagtccagggag

SEQ ID NO: 6662 - DNA, 14 bp, Artificial Sequence
  Description of Artificial Sequence: Synthetic oligonucleotide
ataaagtccaggga

SEQ ID NO: 6663 - DNA, 14 bp, Artificial Sequence
  Description of Artificial Sequence: Synthetic oligonucleotide
tataaagtccaggg

SEQ ID NO: 6664 - DNA, 14 bp, Artificial Sequence
  Description of Artificial Sequence: Synthetic oligonucleotide
gtataaagtccagg

SEQ ID NO: 6665 - DNA, 14 bp, Artificial Sequence
  Description of Artificial Sequence: Synthetic oligonucleotide
agtataaagtccag

SEQ ID NO: 6666 - DNA, 14 bp, Artificial Sequence
  Description of Artificial Sequence: Synthetic oligonucleotide
cagtataaagtcca

SEQ ID NO: 6667 - DNA, 14 bp, Artificial Sequence
  Description of Artificial Sequence: Synthetic oligonucleotide
ccagtataaagtcc

SEQ ID NO: 6668 - DNA, 14 bp, Artificial Sequence
  Description of Artificial Sequence: Synthetic oligonucleotide
cccagtataaagtc

SEQ ID NO: 6669 - DNA, 14 bp, Artificial Sequence
  Description of Artificial Sequence: Synthetic oligonucleotide
gcccagtataaagt

SEQ ID NO: 6670 - DNA, 14 bp, Artificial Sequence
  Description of Artificial Sequence: Synthetic oligonucleotide
ggcccagtataaag

SEQ ID NO: 6671 - DNA, 14 bp, Artificial Sequence
  Description of Artificial Sequence: Synthetic oligonucleotide
tggcccagtataaa

SEQ ID NO: 6672 - DNA, 14 bp, Artificial Sequence
  Description of Artificial Sequence: Synthetic oligonucleotide
ctggcccagtataa

SEQ ID NO: 6673 - DNA, 14 bp, Artificial Sequence
  Description of Artificial Sequence: Synthetic oligonucleotide
gctggcccagtata

SEQ ID NO: 6674 - DNA, 14 bp, Artificial Sequence
  Description of Artificial Sequence: Synthetic oligonucleotide
ggctggcccagtat

SEQ ID NO: 6675 - DNA, 14 bp, Artificial Sequence
  Description of Artificial Sequence: Synthetic oligonucleotide
aggctggcccagta

SEQ ID NO: 6676 - DNA, 14 bp, Artificial Sequence
  Description of Artificial Sequence: Synthetic oligonucleotide
gaggctggcccagt

SEQ ID NO: 6677 - DNA, 14 bp, Artificial Sequence
  Description of Artificial Sequence: Synthetic oligonucleotide
tgaggctggcccag

SEQ ID NO: 6678 - DNA, 14 bp, Artificial Sequence
  Description of Artificial Sequence: Synthetic oligonucleotide
atgaggctggccca

SEQ ID NO: 6679 - DNA, 14 bp, Artificial Sequence
  Description of Artificial Sequence: Synthetic oligonucleotide
aatgaggctggccc

SEQ ID NO: 6680 - DNA, 14 bp, Artificial Sequence
  Description of Artificial Sequence: Synthetic oligonucleotide
caatgaggctggcc

SEQ ID NO: 6681 - DNA, 14 bp, Artificial Sequence
  Description of Artificial Sequence: Synthetic oligonucleotide
acaatgaggctggc

SEQ ID NO: 6682 - DNA, 14 bp, Artificial Sequence
  Description of Artificial Sequence: Synthetic oligonucleotide
gacaatgaggctgg

SEQ ID NO: 6683 - DNA, 14 bp, Artificial Sequence
  Description of Artificial Sequence: Synthetic oligonucleotide
ggacaatgaggctg

SEQ ID NO: 6684 - DNA, 14 bp, Artificial Sequence
  Description of Artificial Sequence: Synthetic oligonucleotide
gggacaatgaggct

SEQ ID NO: 6685 - DNA, 14 bp, Artificial Sequence
  Description of Artificial Sequence: Synthetic oligonucleotide
agggacaatgaggc

SEQ ID NO: 6686 - DNA, 14 bp, Artificial Sequence
  Description of Artificial Sequence: Synthetic oligonucleotide
tagggacaatgagg

SEQ ID NO: 6687 - DNA, 14 bp, Artificial Sequence
  Description of Artificial Sequence: Synthetic oligonucleotide
ttagggacaatgag

SEQ ID NO: 6688 - DNA, 14 bp, Artificial Sequence
  Description of Artificial Sequence: Synthetic oligonucleotide
cttagggacaatga

SEQ ID NO: 6689 - DNA, 14 bp, Artificial Sequence
  Description of Artificial Sequence: Synthetic oligonucleotide
tcttagggacaatg

SEQ ID NO: 6690 - DNA, 14 bp, Artificial Sequence
  Description of Artificial Sequence: Synthetic oligonucleotide
atcttagggacaat

SEQ ID NO: 6691 - DNA, 14 bp, Artificial Sequence
  Description of Artificial Sequence: Synthetic oligonucleotide
aatcttagggacaa

SEQ ID NO: 6692 - DNA, 14 bp, Artificial Sequence
  Description of Artificial Sequence: Synthetic oligonucleotide
aaatcttagggaca

SEQ ID NO: 6693 - DNA, 14 bp, Artificial Sequence
  Description of Artificial Sequence: Synthetic oligonucleotide
gaaatcttagggac

SEQ ID NO: 6694 - DNA, 14 bp, Artificial Sequence
  Description of Artificial Sequence: Synthetic oligonucleotide
agaaatcttaggga

SEQ ID NO: 6695 - DNA, 14 bp, Artificial Sequence
  Description of Artificial Sequence: Synthetic oligonucleotide
gagaaatcttaggg

SEQ ID NO: 6696 - DNA, 14 bp, Artificial Sequence
  Description of Artificial Sequence: Synthetic oligonucleotide
agagaaatcttagg

SEQ ID NO: 6697 - DNA, 14 bp, Artificial Sequence
  Description of Artificial Sequence: Synthetic oligonucleotide
aagagaaatcttag

SEQ ID NO: 6698 - DNA, 14 bp, Artificial Sequence
  Description of Artificial Sequence: Synthetic oligonucleotide
aaagagaaatctta

SEQ ID NO: 6699 - DNA, 14 bp, Artificial Sequence
  Description of Artificial Sequence: Synthetic oligonucleotide
aaaagagaaatctt

SEQ ID NO: 6700 - DNA, 14 bp, Artificial Sequence
  Description of Artificial Sequence: Synthetic oligonucleotide
aaaaagagaaatct

SEQ ID NO: 6701 - DNA, 14 bp, Artificial Sequence
  Description of Artificial Sequence: Synthetic oligonucleotide
taaaaagagaaatc

SEQ ID NO: 6702 - DNA, 14 bp, Artificial Sequence
  Description of Artificial Sequence: Synthetic oligonucleotide
ataaaaagagaaat

SEQ ID NO: 6703 - DNA, 14 bp, Artificial Sequence
  Description of Artificial Sequence: Synthetic oligonucleotide
cataaaaagagaaa

SEQ ID NO: 6704 - DNA, 14 bp, Artificial Sequence
  Description of Artificial Sequence: Synthetic oligonucleotide
acataaaaagagaa

SEQ ID NO: 6705 - DNA, 14 bp, Artificial Sequence
  Description of Artificial Sequence: Synthetic oligonucleotide
gacataaaaagaga

SEQ ID NO: 6706 - DNA, 14 bp, Artificial Sequence
  Description of Artificial Sequence: Synthetic oligonucleotide
agacataaaaagag

SEQ ID NO: 6707 - DNA, 14 bp, Artificial Sequence
  Description of Artificial Sequence: Synthetic oligonucleotide
gagacataaaaaga

SEQ ID NO: 6708 - DNA, 14 bp, Artificial Sequence
  Description of Artificial Sequence: Synthetic oligonucleotide
tgagacataaaaag

SEQ ID NO: 6709 - DNA, 14 bp, Artificial Sequence
  Description of Artificial Sequence: Synthetic oligonucleotide
atgagacataaaaa

SEQ ID NO: 6710 - DNA, 14 bp, Artificial Sequence
  Description of Artificial Sequence: Synthetic oligonucleotide
catgagacataaaa

SEQ ID NO: 6711 - DNA, 14 bp, Artificial Sequence
  Description of Artificial Sequence: Synthetic oligonucleotide
ccatgagacataaa

SEQ ID NO: 6712 - DNA, 14 bp, Artificial Sequence
  Description of Artificial Sequence: Synthetic oligonucleotide
tccatgagacataa

SEQ ID NO: 6713 - DNA, 14 bp, Artificial Sequence
  Description of Artificial Sequence: Synthetic oligonucleotide
atccatgagacata

SEQ ID NO: 6714 - DNA, 14 bp, Artificial Sequence
  Description of Artificial Sequence: Synthetic oligonucleotide
aatccatgagacat

SEQ ID NO: 6715 - DNA, 14 bp, Artificial Sequence
  Description of Artificial Sequence: Synthetic oligonucleotide
taatccatgagaca

SEQ ID NO: 6716 - DNA, 14 bp, Artificial Sequence
  Description of Artificial Sequence: Synthetic oligonucleotide
gtaatccatgagac

SEQ ID NO: 6717 - DNA, 14 bp, Artificial Sequence
  Description of Artificial Sequence: Synthetic oligonucleotide
agtaatccatgaga

SEQ ID NO: 6718 - DNA, 14 bp, Artificial Sequence
  Description of Artificial Sequence: Synthetic oligonucleotide
aagtaatccatgag

SEQ ID NO: 6719 - DNA, 14 bp, Artificial Sequence
  Description of Artificial Sequence: Synthetic oligonucleotide
gaagtaatccatga

SEQ ID NO: 6720 - DNA, 14 bp, Artificial Sequence
  Description of Artificial Sequence: Synthetic oligonucleotide
agaagtaatccatg

SEQ ID NO: 6721 - DNA, 14 bp, Artificial Sequence
  Description of Artificial Sequence: Synthetic oligonucleotide
gagaagtaatccat

SEQ ID NO: 6722 - DNA, 14 bp, Artificial Sequence
  Description of Artificial Sequence: Synthetic oligonucleotide
agagaagtaatcca

SEQ ID NO: 6723 - DNA, 14 bp, Artificial Sequence
  Description of Artificial Sequence: Synthetic oligonucleotide
aagagaagtaatcc

SEQ ID NO: 6724 - DNA, 14 bp, Artificial Sequence
  Description of Artificial Sequence: Synthetic oligonucleotide
aaagagaagtaatc

SEQ ID NO: 6725 - DNA, 14 bp, Artificial Sequence
  Description of Artificial Sequence: Synthetic oligonucleotide
aaaagagaagtaat

SEQ ID NO: 6726 - DNA, 14 bp, Artificial Sequence
  Description of Artificial Sequence: Synthetic oligonucleotide
aaaaagagaagtaa

SEQ ID NO: 6727 - DNA, 14 bp, Artificial Sequence
  Description of Artificial Sequence: Synthetic oligonucleotide
taaaaagagaagta

SEQ ID NO: 6728 - DNA, 14 bp, Artificial Sequence
  Description of Artificial Sequence: Synthetic oligonucleotide
ttaaaaagagaagt

SEQ ID NO: 6729 - DNA, 14 bp, Artificial Sequence
  Description of Artificial Sequence: Synthetic oligonucleotide
attaaaaagagaag

SEQ ID NO: 6730 - DNA, 14 bp, Artificial Sequence
  Description of Artificial Sequence: Synthetic oligonucleotide
aattaaaaagagaa

SEQ ID NO: 6731 - DNA, 14 bp, Artificial Sequence
  Description of Artificial Sequence: Synthetic oligonucleotide
caattaaaaagaga

SEQ ID NO: 6732 - DNA, 14 bp, Artificial Sequence
  Description of Artificial Sequence: Synthetic oligonucleotide
gcaattaaaaagag

SEQ ID NO: 6733 - DNA, 14 bp, Artificial Sequence
  Description of Artificial Sequence: Synthetic oligonucleotide
ggcaattaaaaaga

SEQ ID NO: 6734 - DNA, 14 bp, Artificial Sequence
  Description of Artificial Sequence: Synthetic oligonucleotide
gggcaattaaaaag

SEQ ID NO: 6735 - DNA, 14 bp, Artificial Sequence
  Description of Artificial Sequence: Synthetic oligonucleotide
ggggcaattaaaaa

SEQ ID NO: 6736 - DNA, 14 bp, Artificial Sequence
  Description of Artificial Sequence: Synthetic oligonucleotide
tggggcaattaaaa

SEQ ID NO: 6737 - DNA, 14 bp, Artificial Sequence
  Description of Artificial Sequence: Synthetic oligonucleotide
ctggggcaattaaa

SEQ ID NO: 6738 - DNA, 14 bp, Artificial Sequence
  Description of Artificial Sequence: Synthetic oligonucleotide
cctggggcaattaa

SEQ ID NO: 6739 - DNA, 14 bp, Artificial Sequence
  Description of Artificial Sequence: Synthetic oligonucleotide
gcctggggcaatta

SEQ ID NO: 6740 - DNA, 14 bp, Artificial Sequence
  Description of Artificial Sequence: Synthetic oligonucleotide
tgcctggggcaatt

SEQ ID NO: 6741 - DNA, 14 bp, Artificial Sequence
  Description of Artificial Sequence: Synthetic oligonucleotide
gtgcctggggcaat

SEQ ID NO: 6742 - DNA, 14 bp, Artificial Sequence
  Description of Artificial Sequence: Synthetic oligonucleotide
tgtgcctggggcaa

SEQ ID NO: 6743 - DNA, 14 bp, Artificial Sequence
  Description of Artificial Sequence: Synthetic oligonucleotide
atgtgcctggggca

SEQ ID NO: 6744 - DNA, 14 bp, Artificial Sequence
  Description of Artificial Sequence: Synthetic oligonucleotide
aatgtgcctggggc

SEQ ID NO: 6745 - DNA, 14 bp, Artificial Sequence
  Description of Artificial Sequence: Synthetic oligonucleotide
gaatgtgcctgggg

SEQ ID NO: 6746 - DNA, 14 bp, Artificial Sequence
  Description of Artificial Sequence: Synthetic oligonucleotide
ggaatgtgcctggg

SEQ ID NO: 6747 - DNA, 14 bp, Artificial Sequence
  Description of Artificial Sequence: Synthetic oligonucleotide
tggaatgtgcctgg

SEQ ID NO: 6748 - DNA, 14 bp, Artificial Sequence
  Description of Artificial Sequence: Synthetic oligonucleotide
ttggaatgtgcctg

SEQ ID NO: 6749 - DNA, 14 bp, Artificial Sequence
  Description of Artificial Sequence: Synthetic oligonucleotide
tttggaatgtgcct

SEQ ID NO: 6750 - DNA, 14 bp, Artificial Sequence
  Description of Artificial Sequence: Synthetic oligonucleotide
atttggaatgtgcc

SEQ ID NO: 6751 - DNA, 14 bp, Artificial Sequence
  Description of Artificial Sequence: Synthetic oligonucleotide
catttggaatgtgc

SEQ ID NO: 6752 - DNA, 14 bp, Artificial Sequence
  Description of Artificial Sequence: Synthetic oligonucleotide
tcatttggaatgtg

SEQ ID NO: 6753 - DNA, 14 bp, Artificial Sequence
  Description of Artificial Sequence: Synthetic oligonucleotide
ctcatttggaatgt

SEQ ID NO: 6754 - DNA, 14 bp, Artificial Sequence
  Description of Artificial Sequence: Synthetic oligonucleotide
tctcatttggaatg

SEQ ID NO: 6755 - DNA, 14 bp, Artificial Sequence
  Description of Artificial Sequence: Synthetic oligonucleotide
ttctcatttggaat

SEQ ID NO: 6756 - DNA, 14 bp, Artificial Sequence
  Description of Artificial Sequence: Synthetic oligonucleotide
gttctcatttggaa

SEQ ID NO: 6757 - DNA, 14 bp, Artificial Sequence
  Description of Artificial Sequence: Synthetic oligonucleotide
ggttctcatttgga

SEQ ID NO: 6758 - DNA, 14 bp, Artificial Sequence
  Description of Artificial Sequence: Synthetic oligonucleotide
aggttctcatttgg

SEQ ID NO: 6759 - DNA, 14 bp, Artificial Sequence
  Description of Artificial Sequence: Synthetic oligonucleotide
caggttctcatttg

SEQ ID NO: 6760 - DNA, 14 bp, Artificial Sequence
  Description of Artificial Sequence: Synthetic oligonucleotide
ccaggttctcattt

SEQ ID NO: 6761 - DNA, 14 bp, Artificial Sequence
  Description of Artificial Sequence: Synthetic oligonucleotide
accaggttctcatt

SEQ ID NO: 6762 - DNA, 14 bp, Artificial Sequence
  Description of Artificial Sequence: Synthetic oligonucleotide
taccaggttctcat

SEQ ID NO: 6763 - DNA, 14 bp, Artificial Sequence
  Description of Artificial Sequence: Synthetic oligonucleotide
ttaccaggttctca

SEQ ID NO: 6764 - DNA, 14 bp, Artificial Sequence
  Description of Artificial Sequence: Synthetic oligonucleotide
tttaccaggttctc

SEQ ID NO: 6765 - DNA, 14 bp, Artificial Sequence
  Description of Artificial Sequence: Synthetic oligonucleotide
ttttaccaggttct

SEQ ID NO: 6766 - DNA, 14 bp, Artificial Sequence
  Description of Artificial Sequence: Synthetic oligonucleotide
cttttaccaggttc

SEQ ID NO: 6767 - DNA, 14 bp, Artificial Sequence
  Description of Artificial Sequence: Synthetic oligonucleotide
acttttaccaggtt

SEQ ID NO: 6768 - DNA, 14 bp, Artificial Sequence
  Description of Artificial Sequence: Synthetic oligonucleotide
gacttttaccaggt

SEQ ID NO: 6769 - DNA, 14 bp, Artificial Sequence
  Description of Artificial Sequence: Synthetic oligonucleotide
tgacttttaccagg

SEQ ID NO: 6770 - DNA, 14 bp, Artificial Sequence
  Description of Artificial Sequence: Synthetic oligonucleotide
gtgacttttaccag

SEQ ID NO: 6771 - DNA, 14 bp, Artificial Sequence
  Description of Artificial Sequence: Synthetic oligonucleotide
tgtgacttttacca

SEQ ID NO: 6772 - DNA, 14 bp, Artificial Sequence
  Description of Artificial Sequence: Synthetic oligonucleotide
atgtgacttttacc

SEQ ID NO: 6773 - DNA, 14 bp, Artificial Sequence
  Description of Artificial Sequence: Synthetic oligonucleotide
aatgtgacttttac

SEQ ID NO: 6774 - DNA, 14 bp, Artificial Sequence
  Description of Artificial Sequence: Synthetic oligonucleotide
caatgtgactttta

SEQ ID NO: 6775 - DNA, 14 bp, Artificial Sequence
  Description of Artificial Sequence: Synthetic oligonucleotide
ccaatgtgactttt

SEQ ID NO: 6776 - DNA, 14 bp, Artificial Sequence
  Description of Artificial Sequence: Synthetic oligonucleotide
tccaatgtgacttt

SEQ ID NO: 6777 - DNA, 14 bp, Artificial Sequence
  Description of Artificial Sequence: Synthetic oligonucleotide
gtccaatgtgactt

SEQ ID NO: 6778 - DNA, 14 bp, Artificial Sequence
  Description of Artificial Sequence: Synthetic oligonucleotide
ggtccaatgtgact

SEQ ID NO: 6779 - DNA, 14 bp, Artificial Sequence
  Description of Artificial Sequence: Synthetic oligonucleotide
gggtccaatgtgac

SEQ ID NO: 6780 - DNA, 14 bp, Artificial Sequence
  Description of Artificial Sequence: Synthetic oligonucleotide
ggggtccaatgtga

SEQ ID NO: 6781 - DNA, 14 bp, Artificial Sequence
  Description of Artificial Sequence: Synthetic oligonucleotide
gggggtccaatgtg

SEQ ID NO: 6782 - DNA, 14 bp, Artificial Sequence
  Description of Artificial Sequence: Synthetic oligonucleotide
agggggtccaatgt

SEQ ID NO: 6783 - DNA, 14 bp, Artificial Sequence
  Description of Artificial Sequence: Synthetic oligonucleotide
aagggggtccaatg

SEQ ID NO: 6784 - DNA, 14 bp, Artificial Sequence
  Description of Artificial Sequence: Synthetic oligonucleotide
gaagggggtccaat

SEQ ID NO: 6785 - DNA, 14 bp, Artificial Sequence
  Description of Artificial Sequence: Synthetic oligonucleotide
tgaagggggtccaa

SEQ ID NO: 6786 - DNA, 14 bp, Artificial Sequence
  Description of Artificial Sequence: Synthetic oligonucleotide
ctgaagggggtcca

SEQ ID NO: 6787 - DNA, 14 bp, Artificial Sequence
  Description of Artificial Sequence: Synthetic oligonucleotide
actgaagggggtcc

SEQ ID NO: 6788 - DNA, 14 bp, Artificial Sequence
  Description of Artificial Sequence: Synthetic oligonucleotide
tactgaagggggtc

SEQ ID NO: 6789 - DNA, 14 bp, Artificial Sequence
  Description of Artificial Sequence: Synthetic oligonucleotide
atactgaagggggt

SEQ ID NO: 6790 - DNA, 14 bp, Artificial Sequence
  Description of Artificial Sequence: Synthetic oligonucleotide
catactgaaggggg

SEQ ID NO: 6791 - DNA, 14 bp, Artificial Sequence
  Description of Artificial Sequence: Synthetic oligonucleotide
acatactgaagggg

SEQ ID NO: 6792 - DNA, 14 bp, Artificial Sequence
  Description of Artificial Sequence: Synthetic oligonucleotide
gacatactgaaggg

SEQ ID NO: 6793 - DNA, 14 bp, Artificial Sequence
  Description of Artificial Sequence: Synthetic oligonucleotide
agacatactgaagg

SEQ ID NO: 6794 - DNA, 14 bp, Artificial Sequence
  Description of Artificial Sequence: Synthetic oligonucleotide
aagacatactgaag

SEQ ID NO: 6795 - DNA, 14 bp, Artificial Sequence
  Description of Artificial Sequence: Synthetic oligonucleotide
gaagacatactgaa

SEQ ID NO: 6796 - DNA, 14 bp, Artificial Sequence
  Description of Artificial Sequence: Synthetic oligonucleotide
cgaagacatactga

SEQ ID NO: 6797 - DNA, 14 bp, Artificial Sequence
  Description of Artificial Sequence: Synthetic oligonucleotide
ccgaagacatactg

SEQ ID NO: 6798 - DNA, 14 bp, Artificial Sequence
  Description of Artificial Sequence: Synthetic oligonucleotide
gccgaagacatact

SEQ ID NO: 6799 - DNA, 14 bp, Artificial Sequence
  Description of Artificial Sequence: Synthetic oligonucleotide
agccgaagacatac

SEQ ID NO: 6800 - DNA, 14 bp, Artificial Sequence
  Description of Artificial Sequence: Synthetic oligonucleotide
tagccgaagacata

SEQ ID NO: 6801 - DNA, 14 bp, Artificial Sequence
  Description of Artificial Sequence: Synthetic oligonucleotide
ttagccgaagacat

SEQ ID NO: 6802 - DNA, 14 bp, Artificial Sequence
  Description of Artificial Sequence: Synthetic oligonucleotide
attagccgaagaca

SEQ ID NO: 6803 - DNA, 14 bp, Artificial Sequence
  Description of Artificial Sequence: Synthetic oligonucleotide
cattagccgaagac

SEQ ID NO: 6804 - DNA, 14 bp, Artificial Sequence
  Description of Artificial Sequence: Synthetic oligonucleotide
acattagccgaaga

SEQ ID NO: 6805 - DNA, 14 bp, Artificial Sequence
  Description of Artificial Sequence: Synthetic oligonucleotide
cacattagccgaag

SEQ ID NO: 6806 - DNA, 14 bp, Artificial Sequence
  Description of Artificial Sequence: Synthetic oligonucleotide
acacattagccgaa

SEQ ID NO: 6807 - DNA, 14 bp, Artificial Sequence
  Description of Artificial Sequence: Synthetic oligonucleotide
aacacattagccga

SEQ ID NO: 6808 - DNA, 14 bp, Artificial Sequence
  Description of Artificial Sequence: Synthetic oligonucleotide
taacacattagccg

SEQ ID NO: 6809 - DNA, 14 bp, Artificial Sequence
  Description of Artificial Sequence: Synthetic oligonucleotide
ctaacacattagcc

SEQ ID NO: 6810 - DNA, 14 bp, Artificial Sequence
  Description of Artificial Sequence: Synthetic oligonucleotide
gctaacacattagc

SEQ ID NO: 6811 - DNA, 14 bp, Artificial Sequence
  Description of Artificial Sequence: Synthetic oligonucleotide
ggctaacacattag

SEQ ID NO: 6812 - DNA, 14 bp, Artificial Sequence
  Description of Artificial Sequence: Synthetic oligonucleotide
aggctaacacatta

SEQ ID NO: 6813 - DNA, 14 bp, Artificial Sequence
  Description of Artificial Sequence: Synthetic oligonucleotide
aaggctaacacatt

SEQ ID NO: 6814 - DNA, 14 bp, Artificial Sequence
  Description of Artificial Sequence: Synthetic oligonucleotide
gaaggctaacacat

SEQ ID NO: 6815 - DNA, 14 bp, Artificial Sequence
  Description of Artificial Sequence: Synthetic oligonucleotide
tgaaggctaacaca

SEQ ID NO: 6816 - DNA, 14 bp, Artificial Sequence
  Description of Artificial Sequence: Synthetic oligonucleotide
ttgaaggctaacac

SEQ ID NO: 6817 - DNA, 14 bp, Artificial Sequence
  Description of Artificial Sequence: Synthetic oligonucleotide
attgaaggctaaca

SEQ ID NO: 6818 - DNA, 14 bp, Artificial Sequence
  Description of Artificial Sequence: Synthetic oligonucleotide
tattgaaggctaac

SEQ ID NO: 6819 - DNA, 14 bp, Artificial Sequence
  Description of Artificial Sequence: Synthetic oligonucleotide
ttattgaaggctaa

SEQ ID NO: 6820 - DNA, 14 bp, Artificial Sequence
  Description of Artificial Sequence: Synthetic oligonucleotide
cttattgaaggcta

SEQ ID NO: 6821 - DNA, 14 bp, Artificial Sequence
  Description of Artificial Sequence: Synthetic oligonucleotide
ccttattgaaggct

SEQ ID NO: 6822 - DNA, 14 bp, Artificial Sequence
  Description of Artificial Sequence: Synthetic oligonucleotide
accttattgaaggc

SEQ ID NO: 6823 - DNA, 14 bp, Artificial Sequence
  Description of Artificial Sequence: Synthetic oligonucleotide
caccttattgaagg

SEQ ID NO: 6824 - DNA, 14 bp, Artificial Sequence
  Description of Artificial Sequence: Synthetic oligonucleotide
tcaccttattgaag

SEQ ID NO: 6825 - DNA, 14 bp, Artificial Sequence
  Description of Artificial Sequence: Synthetic oligonucleotide
atcaccttattgaa

SEQ ID NO: 6826 - DNA, 14 bp, Artificial Sequence
  Description of Artificial Sequence: Synthetic oligonucleotide
tatcaccttattga

SEQ ID NO: 6827 - DNA, 14 bp, Artificial Sequence
  Description of Artificial Sequence: Synthetic oligonucleotide
ttatcaccttattg

SEQ ID NO: 6828 - DNA, 14 bp, Artificial Sequence
  Description of Artificial Sequence: Synthetic oligonucleotide
gttatcaccttatt

SEQ ID NO: 6829 - DNA, 14 bp, Artificial Sequence
  Description of Artificial Sequence: Synthetic oligonucleotide
ggttatcaccttat

SEQ ID NO: 6830 - DNA, 14 bp, Artificial Sequence
  Description of Artificial Sequence: Synthetic oligonucleotide
gggttatcacctta

SEQ ID NO: 6831 - DNA, 14 bp, Artificial Sequence
  Description of Artificial Sequence: Synthetic oligonucleotide
ggggttatcacctt

SEQ ID NO: 6832 - DNA, 14 bp, Artificial Sequence
  Description of Artificial Sequence: Synthetic oligonucleotide
aggggttatcacct

SEQ ID NO: 6833 - DNA, 14 bp, Artificial Sequence
  Description of Artificial Sequence: Synthetic oligonucleotide
aaggggttatcacc

SEQ ID NO: 6834 - DNA, 14 bp, Artificial Sequence
  Description of Artificial Sequence: Synthetic oligonucleotide
aaaggggttatcac

SEQ ID NO: 6835 - DNA, 14 bp, Artificial Sequence
  Description of Artificial Sequence: Synthetic oligonucleotide
aaaaggggttatca

SEQ ID NO: 6836 - DNA, 14 bp, Artificial Sequence
  Description of Artificial Sequence: Synthetic oligonucleotide
gaaaaggggttatc

SEQ ID NO: 6837 - DNA, 14 bp, Artificial Sequence
  Description of Artificial Sequence: Synthetic oligonucleotide
tgaaaaggggttat

SEQ ID NO: 6838 - DNA, 14 bp, Artificial Sequence
  Description of Artificial Sequence: Synthetic oligonucleotide
ttgaaaaggggtta

SEQ ID NO: 6839 - DNA, 14 bp, Artificial Sequence
  Description of Artificial Sequence: Synthetic oligonucleotide
gttgaaaaggggtt

SEQ ID NO: 6840 - DNA, 14 bp, Artificial Sequence
  Description of Artificial Sequence: Synthetic oligonucleotide
ggttgaaaaggggt

SEQ ID NO: 6841 - DNA, 14 bp, Artificial Sequence
  Description of Artificial Sequence: Synthetic oligonucleotide
aggttgaaaagggg

SEQ ID NO: 6842 - DNA, 14 bp, Artificial Sequence
  Description of Artificial Sequence: Synthetic oligonucleotide
taggttgaaaaggg

SEQ ID NO: 6843 - DNA, 14 bp, Artificial Sequence
  Description of Artificial Sequence: Synthetic oligonucleotide
ataggttgaaaagg

SEQ ID NO: 6844 - DNA, 14 bp, Artificial Sequence
  Description of Artificial Sequence: Synthetic oligonucleotide
gataggttgaaaag

SEQ ID NO: 6845 - DNA, 14 bp, Artificial Sequence
  Description of Artificial Sequence: Synthetic oligonucleotide
agataggttgaaaa

SEQ ID NO: 6846 - DNA, 14 bp, Artificial Sequence
  Description of Artificial Sequence: Synthetic oligonucleotide
tagataggttgaaa

SEQ ID NO: 6847 - DNA, 14 bp, Artificial Sequence
  Description of Artificial Sequence: Synthetic oligonucleotide
ctagataggttgaa

SEQ ID NO: 6848 - DNA, 14 bp, Artificial Sequence
  Description of Artificial Sequence: Synthetic oligonucleotide
actagataggttga

SEQ ID NO: 6849 - DNA, 14 bp, Artificial Sequence
  Description of Artificial Sequence: Synthetic oligonucleotide
gactagataggttg

SEQ ID NO: 6850 - DNA, 14 bp, Artificial Sequence
  Description of Artificial Sequence: Synthetic oligonucleotide
agactagataggtt

SEQ ID NO: 6851 - DNA, 14 bp, Artificial Sequence
  Description of Artificial Sequence: Synthetic oligonucleotide
tagactagataggt

SEQ ID NO: 6852 - DNA, 14 bp, Artificial Sequence
  Description of Artificial Sequence: Synthetic oligonucleotide
atagactagatagg

SEQ ID NO: 6853 - DNA, 14 bp, Artificial Sequence
  Description of Artificial Sequence: Synthetic oligonucleotide
tatagactagatag

SEQ ID NO: 6854 - DNA, 14 bp, Artificial Sequence
  Description of Artificial Sequence: Synthetic oligonucleotide
ttatagactagata

SEQ ID NO: 6855 - DNA, 14 bp, Artificial Sequence
  Description of Artificial Sequence: Synthetic oligonucleotide
tttatagactagat

SEQ ID NO: 6856 - DNA, 14 bp, Artificial Sequence
  Description of Artificial Sequence: Synthetic oligonucleotide
ctttatagactaga

SEQ ID NO: 6857 - DNA, 14 bp, Artificial Sequence
  Description of Artificial Sequence: Synthetic oligonucleotide
tctttatagactag

SEQ ID NO: 6858 - DNA, 14 bp, Artificial Sequence
  Description of Artificial Sequence: Synthetic oligonucleotide
ctctttatagacta

SEQ ID NO: 6859 - DNA, 14 bp, Artificial Sequence
  Description of Artificial Sequence: Synthetic oligonucleotide
cctctttatagact

SEQ ID NO: 6860 - DNA, 14 bp, Artificial Sequence
  Description of Artificial Sequence: Synthetic oligonucleotide
tcctctttatagac

SEQ ID NO: 6861 - DNA, 14 bp, Artificial Sequence
  Description of Artificial Sequence: Synthetic oligonucleotide
ttcctctttataga

SEQ ID NO: 6862 - DNA, 14 bp, Artificial Sequence
  Description of Artificial Sequence: Synthetic oligonucleotide
tttcctctttatag

SEQ ID NO: 6863 - DNA, 14 bp, Artificial Sequence
  Description of Artificial Sequence: Synthetic oligonucleotide
ttttcctctttata

SEQ ID NO: 6864 - DNA, 14 bp, Artificial Sequence
  Description of Artificial Sequence: Synthetic oligonucleotide
tttttcctctttat

SEQ ID NO: 6865 - DNA, 14 bp, Artificial Sequence
  Description of Artificial Sequence: Synthetic oligonucleotide
atttttcctcttta

SEQ ID NO: 6866 - DNA, 14 bp, Artificial Sequence
  Description of Artificial Sequence: Synthetic oligonucleotide
aatttttcctcttt

SEQ ID NO: 6867 - DNA, 14 bp, Artificial Sequence
  Description of Artificial Sequence: Synthetic oligonucleotide
gaatttttcctctt

SEQ ID NO: 6868 - DNA, 14 bp, Artificial Sequence
  Description of Artificial Sequence: Synthetic oligonucleotide
tgaatttttcctct

SEQ ID NO: 6869 - DNA, 14 bp, Artificial Sequence
  Description of Artificial Sequence: Synthetic oligonucleotide
ctgaatttttcctc

SEQ ID NO: 6870 - DNA, 14 bp, Artificial Sequence
  Description of Artificial Sequence: Synthetic oligonucleotide
tctgaatttttcct

SEQ ID NO: 6871 - DNA, 14 bp, Artificial Sequence
  Description of Artificial Sequence: Synthetic oligonucleotide
atctgaatttttcc

SEQ ID NO: 6872 - DNA, 14 bp, Artificial Sequence
  Description of Artificial Sequence: Synthetic oligonucleotide
aatctgaatttttc

SEQ ID NO: 6873 - DNA, 14 bp, Artificial Sequence
  Description of Artificial Sequence: Synthetic oligonucleotide
aaatctgaattttt

SEQ ID NO: 6874 - DNA, 14 bp, Artificial Sequence
  Description of Artificial Sequence: Synthetic oligonucleotide
caaatctgaatttt

SEQ ID NO: 6875 - DNA, 14 bp, Artificial Sequence
  Description of Artificial Sequence: Synthetic oligonucleotide
ccaaatctgaattt

SEQ ID NO: 6876 - DNA, 14 bp, Artificial Sequence
  Description of Artificial Sequence: Synthetic oligonucleotide
tccaaatctgaatt

SEQ ID NO: 6877 - DNA, 14 bp, Artificial Sequence
  Description of Artificial Sequence: Synthetic oligonucleotide
ctccaaatctgaat

SEQ ID NO: 6878 - DNA, 14 bp, Artificial Sequence
  Description of Artificial Sequence: Synthetic oligonucleotide
actccaaatctgaa

SEQ ID NO: 6879 - DNA, 14 bp, Artificial Sequence
  Description of Artificial Sequence: Synthetic oligonucleotide
aactccaaatctga

SEQ ID NO: 6880 - DNA, 14 bp, Artificial Sequence
  Description of Artificial Sequence: Synthetic oligonucleotide
gaactccaaatctg

SEQ ID NO: 6881 - DNA, 14 bp, Artificial Sequence
  Description of Artificial Sequence: Synthetic oligonucleotide
agaactccaaatct

SEQ ID NO: 6882 - DNA, 14 bp, Artificial Sequence
  Description of Artificial Sequence: Synthetic oligonucleotide
tagaactccaaatc

SEQ ID NO: 6883 - DNA, 14 bp, Artificial Sequence
  Description of Artificial Sequence: Synthetic oligonucleotide
ttagaactccaaat

SEQ ID NO: 6884 - DNA, 14 bp, Artificial Sequence
  Description of Artificial Sequence: Synthetic oligonucleotide
attagaactccaaa

SEQ ID NO: 6885 - DNA, 14 bp, Artificial Sequence
  Description of Artificial Sequence: Synthetic oligonucleotide
gattagaactccaa

SEQ ID NO: 6886 - DNA, 14 bp, Artificial Sequence
  Description of Artificial Sequence: Synthetic oligonucleotide
ggattagaactcca

SEQ ID NO: 6887 - DNA, 14 bp, Artificial Sequence
  Description of Artificial Sequence: Synthetic oligonucleotide
aggattagaactcc

SEQ ID NO: 6888 - DNA, 14 bp, Artificial Sequence
  Description of Artificial Sequence: Synthetic oligonucleotide
taggattagaactc

SEQ ID NO: 6889 - DNA, 14 bp, Artificial Sequence
  Description of Artificial Sequence: Synthetic oligonucleotide
ataggattagaact

SEQ ID NO: 6890 - DNA, 14 bp, Artificial Sequence
  Description of Artificial Sequence: Synthetic oligonucleotide
aataggattagaac

SEQ ID NO: 6891 - DNA, 14 bp, Artificial Sequence
  Description of Artificial Sequence: Synthetic oligonucleotide
aaataggattagaa

SEQ ID NO: 6892 - DNA, 14 bp, Artificial Sequence
  Description of Artificial Sequence: Synthetic oligonucleotide
gaaataggattaga

SEQ ID NO: 6893 - DNA, 14 bp, Artificial Sequence
  Description of Artificial Sequence: Synthetic oligonucleotide
agaaataggattag

SEQ ID NO: 6894 - DNA, 14 bp, Artificial Sequence
  Description of Artificial Sequence: Synthetic oligonucleotide
gagaaataggatta

SEQ ID NO: 6895 - DNA, 14 bp, Artificial Sequence
  Description of Artificial Sequence: Synthetic oligonucleotide
ggagaaataggatt

SEQ ID NO: 6896 - DNA, 14 bp, Artificial Sequence
  Description of Artificial Sequence: Synthetic oligonucleotide
gggagaaataggat

SEQ ID NO: 6897 - DNA, 14 bp, Artificial Sequence
  Description of Artificial Sequence: Synthetic oligonucleotide
tgggagaaatagga

SEQ ID NO: 6898 - DNA, 14 bp, Artificial Sequence
  Description of Artificial Sequence: Synthetic oligonucleotide
ttgggagaaatagg

SEQ ID NO: 6899 - DNA, 14 bp, Artificial Sequence
  Description of Artificial Sequence: Synthetic oligonucleotide
tttgggagaaatag

SEQ ID NO: 6900 - DNA, 14 bp, Artificial Sequence
  Description of Artificial Sequence: Synthetic oligonucleotide
ctttgggagaaata

SEQ ID NO: 6901 - DNA, 14 bp, Artificial Sequence
  Description of Artificial Sequence: Synthetic oligonucleotide
cctttgggagaaat

SEQ ID NO: 6902 - DNA, 14 bp, Artificial Sequence
  Description of Artificial Sequence: Synthetic oligonucleotide
ccctttgggagaaa

SEQ ID NO: 6903 - DNA, 14 bp, Artificial Sequence
  Description of Artificial Sequence: Synthetic oligonucleotide
tccctttgggagaa

SEQ ID NO: 6904 - DNA, 14 bp, Artificial Sequence
  Description of Artificial Sequence: Synthetic oligonucleotide
ttccctttgggaga

SEQ ID NO: 6905 - DNA, 14 bp, Artificial Sequence
  Description of Artificial Sequence: Synthetic oligonucleotide
gttccctttgggag

SEQ ID NO: 6906 - DNA, 14 bp, Artificial Sequence
  Description of Artificial Sequence: Synthetic oligonucleotide
agttccctttggga

SEQ ID NO: 6907 - DNA, 14 bp, Artificial Sequence
  Description of Artificial Sequence: Synthetic oligonucleotide
tagttccctttggg

SEQ ID NO: 6908 - DNA, 14 bp, Artificial Sequence
  Description of Artificial Sequence: Synthetic oligonucleotide
atagttccctttgg

SEQ ID NO: 6909 - DNA, 14 bp, Artificial Sequence
  Description of Artificial Sequence: Synthetic oligonucleotide
aatagttccctttg

SEQ ID NO: 6910 - DNA, 14 bp, Artificial Sequence
  Description of Artificial Sequence: Synthetic oligonucleotide
gaatagttcccttt

SEQ ID NO: 6911 - DNA, 14 bp, Artificial Sequence
  Description of Artificial Sequence: Synthetic oligonucleotide
agaatagttccctt

SEQ ID NO: 6912 - DNA, 14 bp, Artificial Sequence
  Description of Artificial Sequence: Synthetic oligonucleotide
aagaatagttccct

SEQ ID NO: 6913 - DNA, 14 bp, Artificial Sequence
  Description of Artificial Sequence: Synthetic oligonucleotide
gaagaatagttccc

SEQ ID NO: 6914 - DNA, 14 bp, Artificial Sequence
  Description of Artificial Sequence: Synthetic oligonucleotide
agaagaatagttcc

SEQ ID NO: 6915 - DNA, 14 bp, Artificial Sequence
  Description of Artificial Sequence: Synthetic oligonucleotide
tagaagaatagttc

SEQ ID NO: 6916 - DNA, 14 bp, Artificial Sequence
  Description of Artificial Sequence: Synthetic oligonucleotide
gtagaagaatagtt

SEQ ID NO: 6917 - DNA, 14 bp, Artificial Sequence
  Description of Artificial Sequence: Synthetic oligonucleotide
ggtagaagaatagt

SEQ ID NO: 6918 - DNA, 14 bp, Artificial Sequence
  Description of Artificial Sequence: Synthetic oligonucleotide
gggtagaagaatag

SEQ ID NO: 6919 - DNA, 14 bp, Artificial Sequence
  Description of Artificial Sequence: Synthetic oligonucleotide
ggggtagaagaata

SEQ ID NO: 6920 - DNA, 14 bp, Artificial Sequence
  Description of Artificial Sequence: Synthetic oligonucleotide
tggggtagaagaat

SEQ ID NO: 6921 - DNA, 14 bp, Artificial Sequence
  Description of Artificial Sequence: Synthetic oligonucleotide
atggggtagaagaa

SEQ ID NO: 6922 - DNA, 14 bp, Artificial Sequence
  Description of Artificial Sequence: Synthetic oligonucleotide
catggggtagaaga

SEQ ID NO: 6923 - DNA, 14 bp, Artificial Sequence
  Description of Artificial Sequence: Synthetic oligonucleotide
ccatggggtagaag

SEQ ID NO: 6924 - DNA, 14 bp, Artificial Sequence
  Description of Artificial Sequence: Synthetic oligonucleotide
accatggggtagaa

SEQ ID NO: 6925 - DNA, 14 bp, Artificial Sequence
  Description of Artificial Sequence: Synthetic oligonucleotide
aaccatggggtaga

SEQ ID NO: 6926 - DNA, 14 bp, Artificial Sequence
  Description of Artificial Sequence: Synthetic oligonucleotide
gaaccatggggtag

SEQ ID NO: 6927 - DNA, 14 bp, Artificial Sequence
  Description of Artificial Sequence: Synthetic oligonucleotide
agaaccatggggta

SEQ ID NO: 6928 - DNA, 14 bp, Artificial Sequence
  Description of Artificial Sequence: Synthetic oligonucleotide
tagaaccatggggt

SEQ ID NO: 6929 - DNA, 14 bp, Artificial Sequence
  Description of Artificial Sequence: Synthetic oligonucleotide
ctagaaccatgggg

SEQ ID NO: 6930 - DNA, 14 bp, Artificial Sequence
  Description of Artificial Sequence: Synthetic oligonucleotide
cctagaaccatggg

SEQ ID NO: 6931 - DNA, 14 bp, Artificial Sequence
  Description of Artificial Sequence: Synthetic oligonucleotide
tcctagaaccatgg

SEQ ID NO: 6932 - DNA, 14 bp, Artificial Sequence
  Description of Artificial Sequence: Synthetic oligonucleotide
ctcctagaaccatg

SEQ ID NO: 6933 - DNA, 14 bp, Artificial Sequence
  Description of Artificial Sequence: Synthetic oligonucleotide
tctcctagaaccat

SEQ ID NO: 6934 - DNA, 14 bp, Artificial Sequence
  Description of Artificial Sequence: Synthetic oligonucleotide
gtctcctagaacca

SEQ ID NO: 6935 - DNA, 14 bp, Artificial Sequence
  Description of Artificial Sequence: Synthetic oligonucleotide
ggtctcctagaacc

SEQ ID NO: 6936 - DNA, 14 bp, Artificial Sequence
  Description of Artificial Sequence: Synthetic oligonucleotide
tggtctcctagaac

SEQ ID NO: 6937 - DNA, 14 bp, Artificial Sequence
  Description of Artificial Sequence: Synthetic oligonucleotide
gtggtctcctagaa

SEQ ID NO: 6938 - DNA, 14 bp, Artificial Sequence
  Description of Artificial Sequence: Synthetic oligonucleotide
agtggtctcctaga

SEQ ID NO: 6939 - DNA, 14 bp, Artificial Sequence
  Description of Artificial Sequence: Synthetic oligonucleotide
aagtggtctcctag

SEQ ID NO: 6940 - DNA, 14 bp, Artificial Sequence
  Description of Artificial Sequence: Synthetic oligonucleotide
gaagtggtctccta

SEQ ID NO: 6941 - DNA, 14 bp, Artificial Sequence
  Description of Artificial Sequence: Synthetic oligonucleotide
tgaagtggtctcct

SEQ ID NO: 6942 - DNA, 14 bp, Artificial Sequence
  Description of Artificial Sequence: Synthetic oligonucleotide
gtgaagtggtctcc

SEQ ID NO: 6943 - DNA, 14 bp, Artificial Sequence
  Description of Artificial Sequence: Synthetic oligonucleotide
agtgaagtggtctc

SEQ ID NO: 6944 - DNA, 14 bp, Artificial Sequence
  Description of Artificial Sequence: Synthetic oligonucleotide
cagtgaagtggtct

SEQ ID NO: 6945 - DNA, 14 bp, Artificial Sequence
  Description of Artificial Sequence: Synthetic oligonucleotide
acagtgaagtggtc

SEQ ID NO: 6946 - DNA, 14 bp, Artificial Sequence
  Description of Artificial Sequence: Synthetic oligonucleotide
cacagtgaagtggt

SEQ ID NO: 6947 - DNA, 14 bp, Artificial Sequence
  Description of Artificial Sequence: Synthetic oligonucleotide
gcacagtgaagtgg

SEQ ID NO: 6948 - DNA, 14 bp, Artificial Sequence
  Description of Artificial Sequence: Synthetic oligonucleotide
tgcacagtgaagtg

SEQ ID NO: 6949 - DNA, 14 bp, Artificial Sequence
  Description of Artificial Sequence: Synthetic oligonucleotide
ttgcacagtgaagt

SEQ ID NO: 6950 - DNA, 14 bp, Artificial Sequence
  Description of Artificial Sequence: Synthetic oligonucleotide
gttgcacagtgaag

SEQ ID NO: 6951 - DNA, 14 bp, Artificial Sequence
  Description of Artificial Sequence: Synthetic oligonucleotide
tgttgcacagtgaa

SEQ ID NO: 6952 - DNA, 14 bp, Artificial Sequence
  Description of Artificial Sequence: Synthetic oligonucleotide
ctgttgcacagtga

SEQ ID NO: 6953 - DNA, 14 bp, Artificial Sequence
  Description of Artificial Sequence: Synthetic oligonucleotide
actgttgcacagtg

SEQ ID NO: 6954 - DNA, 14 bp, Artificial Sequence
  Description of Artificial Sequence: Synthetic oligonucleotide
aactgttgcacagt

SEQ ID NO: 6955 - DNA, 14 bp, Artificial Sequence
  Description of Artificial Sequence: Synthetic oligonucleotide
aaactgttgcacag

SEQ ID NO: 6956 - DNA, 14 bp, Artificial Sequence
  Description of Artificial Sequence: Synthetic oligonucleotide
aaaactgttgcaca

SEQ ID NO: 6957 - DNA, 14 bp, Artificial Sequence
  Description of Artificial Sequence: Synthetic oligonucleotide
taaaactgttgcac

SEQ ID NO: 6958 - DNA, 14 bp, Artificial Sequence
  Description of Artificial Sequence: Synthetic oligonucleotide
gtaaaactgttgca

SEQ ID NO: 6959 - DNA, 14 bp, Artificial Sequence
  Description of Artificial Sequence: Synthetic oligonucleotide
tgtaaaactgttgc

SEQ ID NO: 6960 - DNA, 14 bp, Artificial Sequence
  Description of Artificial Sequence: Synthetic oligonucleotide
atgtaaaactgttg

SEQ ID NO: 6961 - DNA, 14 bp, Artificial Sequence
  Description of Artificial Sequence: Synthetic oligonucleotide
catgtaaaactgtt

SEQ ID NO: 6962 - DNA, 14 bp, Artificial Sequence
  Description of Artificial Sequence: Synthetic oligonucleotide
gcatgtaaaactgt

SEQ ID NO: 6963 - DNA, 14 bp, Artificial Sequence
  Description of Artificial Sequence: Synthetic oligonucleotide
tgcatgtaaaactg

SEQ ID NO: 6964 - DNA, 14 bp, Artificial Sequence
  Description of Artificial Sequence: Synthetic oligonucleotide
atgcatgtaaaact

SEQ ID NO: 6965 - DNA, 14 bp, Artificial Sequence
  Description of Artificial Sequence: Synthetic oligonucleotide
aatgcatgtaaaac

SEQ ID NO: 6966 - DNA, 14 bp, Artificial Sequence
  Description of Artificial Sequence: Synthetic oligonucleotide
caatgcatgtaaaa

SEQ ID NO: 6967 - DNA, 14 bp, Artificial Sequence
  Description of Artificial Sequence: Synthetic oligonucleotide
acaatgcatgtaaa

SEQ ID NO: 6968 - DNA, 14 bp, Artificial Sequence
  Description of Artificial Sequence: Synthetic oligonucleotide
cacaatgcatgtaa

SEQ ID NO: 6969 - DNA, 14 bp, Artificial Sequence
  Description of Artificial Sequence: Synthetic oligonucleotide
ccacaatgcatgta

SEQ ID NO: 6970 - DNA, 14 bp, Artificial Sequence
  Description of Artificial Sequence: Synthetic oligonucleotide
tccacaatgcatgt

SEQ ID NO: 6971 - DNA, 14 bp, Artificial Sequence
  Description of Artificial Sequence: Synthetic oligonucleotide
atccacaatgcatg

SEQ ID NO: 6972 - DNA, 14 bp, Artificial Sequence
  Description of Artificial Sequence: Synthetic oligonucleotide
catccacaatgcat

SEQ ID NO: 6973 - DNA, 14 bp, Artificial Sequence
  Description of Artificial Sequence: Synthetic oligonucleotide
ccatccacaatgca

SEQ ID NO: 6974 - DNA, 14 bp, Artificial Sequence
  Description of Artificial Sequence: Synthetic oligonucleotide
tccatccacaatgc

SEQ ID NO: 6975 - DNA, 14 bp, Artificial Sequence
  Description of Artificial Sequence: Synthetic oligonucleotide
ctccatccacaatg

SEQ ID NO: 6976 - DNA, 14 bp, Artificial Sequence
  Description of Artificial Sequence: Synthetic oligonucleotide
cctccatccacaat

SEQ ID NO: 6977 - DNA, 14 bp, Artificial Sequence
  Description of Artificial Sequence: Synthetic oligonucleotide
tcctccatccacaa

SEQ ID NO: 6978 - DNA, 14 bp, Artificial Sequence
  Description of Artificial Sequence: Synthetic oligonucleotide
atcctccatccaca

SEQ ID NO: 6979 - DNA, 14 bp, Artificial Sequence
  Description of Artificial Sequence: Synthetic oligonucleotide
tatcctccatccac

SEQ ID NO: 6980 - DNA, 14 bp, Artificial Sequence
  Description of Artificial Sequence: Synthetic oligonucleotide
atatcctccatcca

SEQ ID NO: 6981 - DNA, 14 bp, Artificial Sequence
  Description of Artificial Sequence: Synthetic oligonucleotide
aatatcctccatcc

SEQ ID NO: 6982 - DNA, 14 bp, Artificial Sequence
  Description of Artificial Sequence: Synthetic oligonucleotide
aaatatcctccatc

SEQ ID NO: 6983 - DNA, 14 bp, Artificial Sequence
  Description of Artificial Sequence: Synthetic oligonucleotide
aaaatatcctccat

SEQ ID NO: 6984 - DNA, 14 bp, Artificial Sequence
  Description of Artificial Sequence: Synthetic oligonucleotide
aaaaatatcctcca

SEQ ID NO: 6985 - DNA, 14 bp, Artificial Sequence
  Description of Artificial Sequence: Synthetic oligonucleotide
taaaaatatcctcc

SEQ ID NO: 6986 - DNA, 14 bp, Artificial Sequence
  Description of Artificial Sequence: Synthetic oligonucleotide
ataaaaatatcctc

SEQ ID NO: 6987 - DNA, 14 bp, Artificial Sequence
  Description of Artificial Sequence: Synthetic oligonucleotide
aataaaaatatcct

SEQ ID NO: 6988 - DNA, 14 bp, Artificial Sequence
  Description of Artificial Sequence: Synthetic oligonucleotide
gaataaaaatatcc

SEQ ID NO: 6989 - DNA, 14 bp, Artificial Sequence
  Description of Artificial Sequence: Synthetic oligonucleotide
agaataaaaatatc

SEQ ID NO: 6990 - DNA, 14 bp, Artificial Sequence
  Description of Artificial Sequence: Synthetic oligonucleotide
cagaataaaaatat

SEQ ID NO: 6991 - DNA, 14 bp, Artificial Sequence
  Description of Artificial Sequence: Synthetic oligonucleotide
tcagaataaaaata

SEQ ID NO: 6992 - DNA, 14 bp, Artificial Sequence
  Description of Artificial Sequence: Synthetic oligonucleotide
ttcagaataaaaat

SEQ ID NO: 6993 - DNA, 14 bp, Artificial Sequence
  Description of Artificial Sequence: Synthetic oligonucleotide
gttcagaataaaaa

SEQ ID NO: 6994 - DNA, 14 bp, Artificial Sequence
  Description of Artificial Sequence: Synthetic oligonucleotide
agttcagaataaaa

SEQ ID NO: 6995 - DNA, 14 bp, Artificial Sequence
  Description of Artificial Sequence: Synthetic oligonucleotide
cagttcagaataaa

SEQ ID NO: 6996 - DNA, 14 bp, Artificial Sequence
  Description of Artificial Sequence: Synthetic oligonucleotide
acagttcagaataa

SEQ ID NO: 6997 - DNA, 14 bp, Artificial Sequence
  Description of Artificial Sequence: Synthetic oligonucleotide
aacagttcagaata

SEQ ID NO: 6998 - DNA, 14 bp, Artificial Sequence
  Description of Artificial Sequence: Synthetic oligonucleotide
taacagttcagaat

SEQ ID NO: 6999 - DNA, 14 bp, Artificial Sequence
  Description of Artificial Sequence: Synthetic oligonucleotide
gtaacagttcagaa

SEQ ID NO: 7000 - DNA, 14 bp, Artificial Sequence
  Description of Artificial Sequence: Synthetic oligonucleotide
tgtaacagttcaga

SEQ ID NO: 7001 - DNA, 14 bp, Artificial Sequence
  Description of Artificial Sequence: Synthetic oligonucleotide
atgtaacagttcag

SEQ ID NO: 7002 - DNA, 14 bp, Artificial Sequence
  Description of Artificial Sequence: Synthetic oligonucleotide
aatgtaacagttca

SEQ ID NO: 7003 - DNA, 14 bp, Artificial Sequence
  Description of Artificial Sequence: Synthetic oligonucleotide
aaatgtaacagttc

SEQ ID NO: 7004 - DNA, 14 bp, Artificial Sequence
  Description of Artificial Sequence: Synthetic oligonucleotide
taaatgtaacagtt

SEQ ID NO: 7005 - DNA, 14 bp, Artificial Sequence
  Description of Artificial Sequence: Synthetic oligonucleotide
ctaaatgtaacagt

SEQ ID NO: 7006 - DNA, 14 bp, Artificial Sequence
  Description of Artificial Sequence: Synthetic oligonucleotide
cctaaatgtaacag

SEQ ID NO: 7007 - DNA, 14 bp, Artificial Sequence
  Description of Artificial Sequence: Synthetic oligonucleotide
acctaaatgtaaca

SEQ ID NO: 7008 - DNA, 14 bp, Artificial Sequence
  Description of Artificial Sequence: Synthetic oligonucleotide
tacctaaatgtaac

SEQ ID NO: 7009 - DNA, 14 bp, Artificial Sequence
  Description of Artificial Sequence: Synthetic oligonucleotide
ttacctaaatgtaa

SEQ ID NO: 7010 - DNA, 14 bp, Artificial Sequence
  Description of Artificial Sequence: Synthetic oligonucleotide
tttacctaaatgta

SEQ ID NO: 7011 - DNA, 14 bp, Artificial Sequence
  Description of Artificial Sequence: Synthetic oligonucleotide
ttttacctaaatgt

SEQ ID NO: 7012 - DNA, 14 bp, Artificial Sequence
  Description of Artificial Sequence: Synthetic oligonucleotide
tttttacctaaatg

SEQ ID NO: 7013 - DNA, 14 bp, Artificial Sequence
  Description of Artificial Sequence: Synthetic oligonucleotide
atttttacctaaat

SEQ ID NO: 7014 - DNA, 14 bp, Artificial Sequence
  Description of Artificial Sequence: Synthetic oligonucleotide
tatttttacctaaa

SEQ ID NO: 7015 - DNA, 14 bp, Artificial Sequence
  Description of Artificial Sequence: Synthetic oligonucleotide
atatttttacctaa

SEQ ID NO: 7016 - DNA, 14 bp, Artificial Sequence
  Description of Artificial Sequence: Synthetic oligonucleotide
aatatttttaccta

SEQ ID NO: 7017 - DNA, 14 bp, Artificial Sequence
  Description of Artificial Sequence: Synthetic oligonucleotide
aaatatttttacct

SEQ ID NO: 7018 - DNA, 14 bp, Artificial Sequence
  Description of Artificial Sequence: Synthetic oligonucleotide
aaaatatttttacc

SEQ ID NO: 7019 - DNA, 14 bp, Artificial Sequence
  Description of Artificial Sequence: Synthetic oligonucleotide
gaaaatatttttac

SEQ ID NO: 7020 - DNA, 14 bp, Artificial Sequence
  Description of Artificial Sequence: Synthetic oligonucleotide
agaaaatattttta

SEQ ID NO: 7021 - DNA, 14 bp, Artificial Sequence
  Description of Artificial Sequence: Synthetic oligonucleotide
cagaaaatattttt

SEQ ID NO: 7022 - DNA, 14 bp, Artificial Sequence
  Description of Artificial Sequence: Synthetic oligonucleotide
gcagaaaatatttt

SEQ ID NO: 7023 - DNA, 14 bp, Artificial Sequence
  Description of Artificial Sequence: Synthetic oligonucleotide
tgcagaaaatattt

SEQ ID NO: 7024 - DNA, 14 bp, Artificial Sequence
  Description of Artificial Sequence: Synthetic oligonucleotide
ctgcagaaaatatt

SEQ ID NO: 7025 - DNA, 14 bp, Artificial Sequence
  Description of Artificial Sequence: Synthetic oligonucleotide
actgcagaaaatat

SEQ ID NO: 7026 - DNA, 14 bp, Artificial Sequence
  Description of Artificial Sequence: Synthetic oligonucleotide
cactgcagaaaata

SEQ ID NO: 7027 - DNA, 14 bp, Artificial Sequence
  Description of Artificial Sequence: Synthetic oligonucleotide
ccactgcagaaaat

SEQ ID NO: 7028 - DNA, 14 bp, Artificial Sequence
  Description of Artificial Sequence: Synthetic oligonucleotide
accactgcagaaaa

SEQ ID NO: 7029 - DNA, 14 bp, Artificial Sequence
  Description of Artificial Sequence: Synthetic oligonucleotide
taccactgcagaaa

SEQ ID NO: 7030 - DNA, 14 bp, Artificial Sequence
  Description of Artificial Sequence: Synthetic oligonucleotide
ttaccactgcagaa

SEQ ID NO: 7031 - DNA, 14 bp, Artificial Sequence
  Description of Artificial Sequence: Synthetic oligonucleotide
gttaccactgcaga

SEQ ID NO: 7032 - DNA, 14 bp, Artificial Sequence
  Description of Artificial Sequence: Synthetic oligonucleotide
agttaccactgcag

SEQ ID NO: 7033 - DNA, 14 bp, Artificial Sequence
  Description of Artificial Sequence: Synthetic oligonucleotide
cagttaccactgca

SEQ ID NO: 7034 - DNA, 14 bp, Artificial Sequence
  Description of Artificial Sequence: Synthetic oligonucleotide
tcagttaccactgc

SEQ ID NO: 7035 - DNA, 14 bp, Artificial Sequence
  Description of Artificial Sequence: Synthetic oligonucleotide
atcagttaccactg

SEQ ID NO: 7036 - DNA, 14 bp, Artificial Sequence
  Description of Artificial Sequence: Synthetic oligonucleotide
aatcagttaccact

SEQ ID NO: 7037 - DNA, 14 bp, Artificial Sequence
  Description of Artificial Sequence: Synthetic oligonucleotide
taatcagttaccac

SEQ ID NO: 7038 - DNA, 14 bp, Artificial Sequence
  Description of Artificial Sequence: Synthetic oligonucleotide
ctaatcagttacca

SEQ ID NO: 7039 - DNA, 14 bp, Artificial Sequence
  Description of Artificial Sequence: Synthetic oligonucleotide
tctaatcagttacc

SEQ ID NO: 7040 - DNA, 14 bp, Artificial Sequence
  Description of Artificial Sequence: Synthetic oligonucleotide
ttctaatcagttac

SEQ ID NO: 7041 - DNA, 14 bp, Artificial Sequence
  Description of Artificial Sequence: Synthetic oligonucleotide
tttctaatcagtta

SEQ ID NO: 7042 - DNA, 14 bp, Artificial Sequence
  Description of Artificial Sequence: Synthetic oligonucleotide
ttttctaatcagtt

SEQ ID NO: 7043 - DNA, 14 bp, Artificial Sequence
  Description of Artificial Sequence: Synthetic oligonucleotide
tttttctaatcagt

SEQ ID NO: 7044 - DNA, 14 bp, Artificial Sequence
  Description of Artificial Sequence: Synthetic oligonucleotide
atttttctaatcag

SEQ ID NO: 7045 - DNA, 14 bp, Artificial Sequence
  Description of Artificial Sequence: Synthetic oligonucleotide
catttttctaatca

SEQ ID NO: 7046 - DNA, 14 bp, Artificial Sequence
  Description of Artificial Sequence: Synthetic oligonucleotide
gcatttttctaatc

SEQ ID NO: 7047 - DNA, 14 bp, Artificial Sequence
  Description of Artificial Sequence: Synthetic oligonucleotide
ggcatttttctaat

SEQ ID NO: 7048 - DNA, 14 bp, Artificial Sequence
  Description of Artificial Sequence: Synthetic oligonucleotide
tggcatttttctaa

SEQ ID NO: 7049 - DNA, 14 bp, Artificial Sequence
  Description of Artificial Sequence: Synthetic oligonucleotide
ttggcatttttcta

SEQ ID NO: 7050 - DNA, 14 bp, Artificial Sequence
  Description of Artificial Sequence: Synthetic oligonucleotide
attggcatttttct

SEQ ID NO: 7051 - DNA, 14 bp, Artificial Sequence
  Description of Artificial Sequence: Synthetic oligonucleotide
aattggcatttttc

SEQ ID NO: 7052 - DNA, 14 bp, Artificial Sequence
  Description of Artificial Sequence: Synthetic oligonucleotide
caattggcattttt

SEQ ID NO: 7053 - DNA, 14 bp, Artificial Sequence
  Description of Artificial Sequence: Synthetic oligonucleotide
ccaattggcatttt

SEQ ID NO: 7054 - DNA, 14 bp, Artificial Sequence
  Description of Artificial Sequence: Synthetic oligonucleotide
tccaattggcattt

SEQ ID NO: 7055 - DNA, 14 bp, Artificial Sequence
  Description of Artificial Sequence: Synthetic oligonucleotide
atccaattggcatt

SEQ ID NO: 7056 - DNA, 14 bp, Artificial Sequence
  Description of Artificial Sequence: Synthetic oligonucleotide
catccaattggcat

SEQ ID NO: 7057 - DNA, 14 bp, Artificial Sequence
  Description of Artificial Sequence: Synthetic oligonucleotide
gcatccaattggca

SEQ ID NO: 7058 - DNA, 14 bp, Artificial Sequence
  Description of Artificial Sequence: Synthetic oligonucleotide
ggcatccaattggc

SEQ ID NO: 7059 - DNA, 14 bp, Artificial Sequence
  Description of Artificial Sequence: Synthetic oligonucleotide
gggcatccaattgg

SEQ ID NO: 7060 - DNA, 14 bp, Artificial Sequence
  Description of Artificial Sequence: Synthetic oligonucleotide
agggcatccaattg

SEQ ID NO: 7061 - DNA, 14 bp, Artificial Sequence
  Description of Artificial Sequence: Synthetic oligonucleotide
aagggcatccaatt

SEQ ID NO: 7062 - DNA, 14 bp, Artificial Sequence
  Description of Artificial Sequence: Synthetic oligonucleotide
taagggcatccaat

SEQ ID NO: 7063 - DNA, 14 bp, Artificial Sequence
  Description of Artificial Sequence: Synthetic oligonucleotide
ctaagggcatccaa

SEQ ID NO: 7064 - DNA, 14 bp, Artificial Sequence
  Description of Artificial Sequence: Synthetic oligonucleotide
cctaagggcatcca

SEQ ID NO: 7065 - DNA, 14 bp, Artificial Sequence
  Description of Artificial Sequence: Synthetic oligonucleotide
acctaagggcatcc

SEQ ID NO: 7066 - DNA, 14 bp, Artificial Sequence
  Description of Artificial Sequence: Synthetic oligonucleotide
cacctaagggcatc

SEQ ID NO: 7067 - DNA, 14 bp, Artificial Sequence
  Description of Artificial Sequence: Synthetic oligonucleotide
ccacctaagggcat

SEQ ID NO: 7068 - DNA, 14 bp, Artificial Sequence
  Description of Artificial Sequence: Synthetic oligonucleotide
tccacctaagggca

SEQ ID NO: 7069 - DNA, 14 bp, Artificial Sequence
  Description of Artificial Sequence: Synthetic oligonucleotide
ctccacctaagggc

SEQ ID NO: 7070 - DNA, 14 bp, Artificial Sequence
  Description of Artificial Sequence: Synthetic oligonucleotide
cctccacctaaggg

SEQ ID NO: 7071 - DNA, 14 bp, Artificial Sequence
  Description of Artificial Sequence: Synthetic oligonucleotide
acctccacctaagg

SEQ ID NO: 7072 - DNA, 14 bp, Artificial Sequence
  Description of Artificial Sequence: Synthetic oligonucleotide
cacctccacctaag

SEQ ID NO: 7073 - DNA, 14 bp, Artificial Sequence
  Description of Artificial Sequence: Synthetic oligonucleotide
tcacctccacctaa

SEQ ID NO: 7074 - DNA, 14 bp, Artificial Sequence
  Description of Artificial Sequence: Synthetic oligonucleotide
ctcacctccaccta

SEQ ID NO: 7075 - DNA, 14 bp, Artificial Sequence
  Description of Artificial Sequence: Synthetic oligonucleotide
tctcacctccacct

SEQ ID NO: 7076 - DNA, 14 bp, Artificial Sequence
  Description of Artificial Sequence: Synthetic oligonucleotide
ttctcacctccacc

SEQ ID NO: 7077 - DNA, 14 bp, Artificial Sequence
  Description of Artificial Sequence: Synthetic oligonucleotide
tttctcacctccac

SEQ ID NO: 7078 - DNA, 14 bp, Artificial Sequence
  Description of Artificial Sequence: Synthetic oligonucleotide
ttttctcacctcca

SEQ ID NO: 7079 - DNA, 14 bp, Artificial Sequence
  Description of Artificial Sequence: Synthetic oligonucleotide
attttctcacctcc

SEQ ID NO: 7080 - DNA, 14 bp, Artificial Sequence
  Description of Artificial Sequence: Synthetic oligonucleotide
cattttctcacctc

SEQ ID NO: 7081 - DNA, 14 bp, Artificial Sequence
  Description of Artificial Sequence: Synthetic oligonucleotide
ccattttctcacct

SEQ ID NO: 7082 - DNA, 14 bp, Artificial Sequence
  Description of Artificial Sequence: Synthetic oligonucleotide
gccattttctcacc

SEQ ID NO: 7083 - DNA, 14 bp, Artificial Sequence
  Description of Artificial Sequence: Synthetic oligonucleotide
tgccattttctcac

SEQ ID NO: 7084 - DNA, 14 bp, Artificial Sequence
  Description of Artificial Sequence: Synthetic oligonucleotide
atgccattttctca

SEQ ID NO: 7085 - DNA, 14 bp, Artificial Sequence
  Description of Artificial Sequence: Synthetic oligonucleotide
gatgccattttctc

SEQ ID NO: 7086 - DNA, 14 bp, Artificial Sequence
  Description of Artificial Sequence: Synthetic oligonucleotide
ggatgccattttct

SEQ ID NO: 7087 - DNA, 14 bp, Artificial Sequence
  Description of Artificial Sequence: Synthetic oligonucleotide
aggatgccattttc

SEQ ID NO: 7088 - DNA, 14 bp, Artificial Sequence
  Description of Artificial Sequence: Synthetic oligonucleotide
aaggatgccatttt

SEQ ID NO: 7089 - DNA, 14 bp, Artificial Sequence
  Description of Artificial Sequence: Synthetic oligonucleotide
caaggatgccattt

SEQ ID NO: 7090 - DNA, 14 bp, Artificial Sequence
  Description of Artificial Sequence: Synthetic oligonucleotide
gcaaggatgccatt

SEQ ID NO: 7091 - DNA, 14 bp, Artificial Sequence
  Description of Artificial Sequence: Synthetic oligonucleotide
ggcaaggatgccat

SEQ ID NO: 7092 - DNA, 14 bp, Artificial Sequence
  Description of Artificial Sequence: Synthetic oligonucleotide
aggcaaggatgcca

SEQ ID NO: 7093 - DNA, 14 bp, Artificial Sequence
  Description of Artificial Sequence: Synthetic oligonucleotide
aaggcaaggatgcc

SEQ ID NO: 7094 - DNA, 14 bp, Artificial Sequence
  Description of Artificial Sequence: Synthetic oligonucleotide
gaaggcaaggatgc

SEQ ID NO: 7095 - DNA, 14 bp, Artificial Sequence
  Description of Artificial Sequence: Synthetic oligonucleotide
agaaggcaaggatg

SEQ ID NO: 7096 - DNA, 14 bp, Artificial Sequence
  Description of Artificial Sequence: Synthetic oligonucleotide
aagaaggcaaggat

SEQ ID NO: 7097 - DNA, 14 bp, Artificial Sequence
  Description of Artificial Sequence: Synthetic oligonucleotide
gaagaaggcaagga

SEQ ID NO: 7098 - DNA, 14 bp, Artificial Sequence
  Description of Artificial Sequence: Synthetic oligonucleotide
agaagaaggcaagg

SEQ ID NO: 7099 - DNA, 14 bp, Artificial Sequence
  Description of Artificial Sequence: Synthetic oligonucleotide
gagaagaaggcaag

SEQ ID NO: 7100 - DNA, 14 bp, Artificial Sequence
  Description of Artificial Sequence: Synthetic oligonucleotide
tgagaagaaggcaa

SEQ ID NO: 7101 - DNA, 14 bp, Artificial Sequence
  Description of Artificial Sequence: Synthetic oligonucleotide
ttgagaagaaggca

SEQ ID NO: 7102 - DNA, 14 bp, Artificial Sequence
  Description of Artificial Sequence: Synthetic oligonucleotide
attgagaagaaggc

SEQ ID NO: 7103 - DNA, 14 bp, Artificial Sequence
  Description of Artificial Sequence: Synthetic oligonucleotide
tattgagaagaagg

SEQ ID NO: 7104 - DNA, 14 bp, Artificial Sequence
  Description of Artificial Sequence: Synthetic oligonucleotide
atattgagaagaag

SEQ ID NO: 7105 - DNA, 14 bp, Artificial Sequence
  Description of Artificial Sequence: Synthetic oligonucleotide
catattgagaagaa

SEQ ID NO: 7106 - DNA, 14 bp, Artificial Sequence
  Description of Artificial Sequence: Synthetic oligonucleotide
tcatattgagaaga

SEQ ID NO: 7107 - DNA, 14 bp, Artificial Sequence
  Description of Artificial Sequence: Synthetic oligonucleotide
ttcatattgagaag

SEQ ID NO: 7108 - DNA, 14 bp, Artificial Sequence
  Description of Artificial Sequence: Synthetic oligonucleotide
tttcatattgagaa

SEQ ID NO: 7109 - DNA, 14 bp, Artificial Sequence
  Description of Artificial Sequence: Synthetic oligonucleotide
gtttcatattgaga

SEQ ID NO: 7110 - DNA, 14 bp, Artificial Sequence
  Description of Artificial Sequence: Synthetic oligonucleotide
tgtttcatattgag

SEQ ID NO: 7111 - DNA, 14 bp, Artificial Sequence
  Description of Artificial Sequence: Synthetic oligonucleotide
atgtttcatattga

SEQ ID NO: 7112 - DNA, 14 bp, Artificial Sequence
  Description of Artificial Sequence: Synthetic oligonucleotide
aatgtttcatattg

SEQ ID NO: 7113 - DNA, 14 bp, Artificial Sequence
  Description of Artificial Sequence: Synthetic oligonucleotide
taatgtttcatatt

SEQ ID NO: 7114 - DNA, 14 bp, Artificial Sequence
  Description of Artificial Sequence: Synthetic oligonucleotide
ttaatgtttcatat

SEQ ID NO: 7115 - DNA, 14 bp, Artificial Sequence
  Description of Artificial Sequence: Synthetic oligonucleotide
gttaatgtttcata

SEQ ID NO: 7116 - DNA, 14 bp, Artificial Sequence
  Description of Artificial Sequence: Synthetic oligonucleotide
agttaatgtttcat

SEQ ID NO: 7117 - DNA, 14 bp, Artificial Sequence
  Description of Artificial Sequence: Synthetic oligonucleotide
tagttaatgtttca

SEQ ID NO: 7118 - DNA, 14 bp, Artificial Sequence
  Description of Artificial Sequence: Synthetic oligonucleotide
ctagttaatgtttc

SEQ ID NO: 7119 - DNA, 14 bp, Artificial Sequence
  Description of Artificial Sequence: Synthetic oligonucleotide
actagttaatgttt

SEQ ID NO: 7120 - DNA, 14 bp, Artificial Sequence
  Description of Artificial Sequence: Synthetic oligonucleotide
aactagttaatgtt

SEQ ID NO: 7121 - DNA, 14 bp, Artificial Sequence
  Description of Artificial Sequence: Synthetic oligonucleotide
caactagttaatgt

SEQ ID NO: 7122 - DNA, 14 bp, Artificial Sequence
  Description of Artificial Sequence: Synthetic oligonucleotide
tcaactagttaatg

SEQ ID NO: 7123 - DNA, 14 bp, Artificial Sequence
  Description of Artificial Sequence: Synthetic oligonucleotide
gtcaactagttaat

SEQ ID NO: 7124 - DNA, 14 bp, Artificial Sequence
  Description of Artificial Sequence: Synthetic oligonucleotide
tgtcaactagttaa

SEQ ID NO: 7125 - DNA, 14 bp, Artificial Sequence
  Description of Artificial Sequence: Synthetic oligonucleotide
ttgtcaactagtta

SEQ ID NO: 7126 - DNA, 14 bp, Artificial Sequence
  Description of Artificial Sequence: Synthetic oligonucleotide
tttgtcaactagtt

SEQ ID NO: 7127 - DNA, 14 bp, Artificial Sequence
  Description of Artificial Sequence: Synthetic oligonucleotide
atttgtcaactagt

SEQ ID NO: 7128 - DNA, 14 bp, Artificial Sequence
  Description of Artificial Sequence: Synthetic oligonucleotide
aatttgtcaactag

SEQ ID NO: 7129 - DNA, 14 bp, Artificial Sequence
  Description of Artificial Sequence: Synthetic oligonucleotide
aaatttgtcaacta

SEQ ID NO: 7130 - DNA, 14 bp, Artificial Sequence
  Description of Artificial Sequence: Synthetic oligonucleotide
taaatttgtcaact

SEQ ID NO: 7131 - DNA, 14 bp, Artificial Sequence
  Description of Artificial Sequence: Synthetic oligonucleotide
ataaatttgtcaac

SEQ ID NO: 7132 - DNA, 14 bp, Artificial Sequence
  Description of Artificial Sequence: Synthetic oligonucleotide
gataaatttgtcaa

SEQ ID NO: 7133 - DNA, 14 bp, Artificial Sequence
  Description of Artificial Sequence: Synthetic oligonucleotide
ggataaatttgtca

SEQ ID NO: 7134 - DNA, 14 bp, Artificial Sequence
  Description of Artificial Sequence: Synthetic oligonucleotide
aggataaatttgtc

SEQ ID NO: 7135 - DNA, 14 bp, Artificial Sequence
  Description of Artificial Sequence: Synthetic oligonucleotide
aaggataaatttgt

SEQ ID NO: 7136 - DNA, 14 bp, Artificial Sequence
  Description of Artificial Sequence: Synthetic oligonucleotide
caaggataaatttg

SEQ ID NO: 7137 - DNA, 14 bp, Artificial Sequence
  Description of Artificial Sequence: Synthetic oligonucleotide
acaaggataaattt

SEQ ID NO: 7138 - DNA, 14 bp, Artificial Sequence
  Description of Artificial Sequence: Synthetic oligonucleotide
tacaaggataaatt

SEQ ID NO: 7139 - DNA, 14 bp, Artificial Sequence
  Description of Artificial Sequence: Synthetic oligonucleotide
ctacaaggataaat

SEQ ID NO: 7140 - DNA, 14 bp, Artificial Sequence
  Description of Artificial Sequence: Synthetic oligonucleotide
actacaaggataaa

SEQ ID NO: 7141 - DNA, 14 bp, Artificial Sequence
  Description of Artificial Sequence: Synthetic oligonucleotide
tactacaaggataa

SEQ ID NO: 7142 - DNA, 14 bp, Artificial Sequence
  Description of Artificial Sequence: Synthetic oligonucleotide
ttactacaaggata

SEQ ID NO: 7143 - DNA, 14 bp, Artificial Sequence
  Description of Artificial Sequence: Synthetic oligonucleotide
attactacaaggat

SEQ ID NO: 7144 - DNA, 14 bp, Artificial Sequence
  Description of Artificial Sequence: Synthetic oligonucleotide
cattactacaagga

SEQ ID NO: 7145 - DNA, 14 bp, Artificial Sequence
  Description of Artificial Sequence: Synthetic oligonucleotide
tcattactacaagg

SEQ ID NO: 7146 - DNA, 14 bp, Artificial Sequence
  Description of Artificial Sequence: Synthetic oligonucleotide
ttcattactacaag

SEQ ID NO: 7147 - DNA, 14 bp, Artificial Sequence
  Description of Artificial Sequence: Synthetic oligonucleotide
tttcattactacaa

SEQ ID NO: 7148 - DNA, 14 bp, Artificial Sequence
  Description of Artificial Sequence: Synthetic oligonucleotide
ttttcattactaca

SEQ ID NO: 7149 - DNA, 14 bp, Artificial Sequence
  Description of Artificial Sequence: Synthetic oligonucleotide
attttcattactac

SEQ ID NO: 7150 - DNA, 14 bp, Artificial Sequence
  Description of Artificial Sequence: Synthetic oligonucleotide
gattttcattacta

SEQ ID NO: 7151 - DNA, 14 bp, Artificial Sequence
  Description of Artificial Sequence: Synthetic oligonucleotide
agattttcattact

SEQ ID NO: 7152 - DNA, 14 bp, Artificial Sequence
  Description of Artificial Sequence: Synthetic oligonucleotide
tagattttcattac

SEQ ID NO: 7153 - DNA, 14 bp, Artificial Sequence
  Description of Artificial Sequence: Synthetic oligonucleotide
atagattttcatta

SEQ ID NO: 7154 - DNA, 14 bp, Artificial Sequence
  Description of Artificial Sequence: Synthetic oligonucleotide
aatagattttcatt

SEQ ID NO: 7155 - DNA, 14 bp, Artificial Sequence
  Description of Artificial Sequence: Synthetic oligonucleotide
aaatagattttcat

SEQ ID NO: 7156 - DNA, 14 bp, Artificial Sequence
  Description of Artificial Sequence: Synthetic oligonucleotide
taaatagattttca

SEQ ID NO: 7157 - DNA, 14 bp, Artificial Sequence
  Description of Artificial Sequence: Synthetic oligonucleotide
ttaaatagattttc

SEQ ID NO: 7158 - DNA, 14 bp, Artificial Sequence
  Description of Artificial Sequence: Synthetic oligonucleotide
attaaatagatttt

SEQ ID NO: 7159 - DNA, 14 bp, Artificial Sequence
  Description of Artificial Sequence: Synthetic oligonucleotide
gattaaatagattt

SEQ ID NO: 7160 - DNA, 14 bp, Artificial Sequence
  Description of Artificial Sequence: Synthetic oligonucleotide
tgattaaatagatt

SEQ ID NO: 7161 - DNA, 14 bp, Artificial Sequence
  Description of Artificial Sequence: Synthetic oligonucleotide
ctgattaaatagat

SEQ ID NO: 7162 - DNA, 14 bp, Artificial Sequence
  Description of Artificial Sequence: Synthetic oligonucleotide
cctgattaaataga

SEQ ID NO: 7163 - DNA, 14 bp, Artificial Sequence
  Description of Artificial Sequence: Synthetic oligonucleotide
ccctgattaaatag

SEQ ID NO: 7164 - DNA, 14 bp, Artificial Sequence
  Description of Artificial Sequence: Synthetic oligonucleotide
tccctgattaaata

SEQ ID NO: 7165 - DNA, 14 bp, Artificial Sequence
  Description of Artificial Sequence: Synthetic oligonucleotide
gtccctgattaaat

SEQ ID NO: 7166 - DNA, 14 bp, Artificial Sequence
  Description of Artificial Sequence: Synthetic oligonucleotide
ggtccctgattaaa

SEQ ID NO: 7167 - DNA, 14 bp, Artificial Sequence
  Description of Artificial Sequence: Synthetic oligonucleotide
tggtccctgattaa

SEQ ID NO: 7168 - DNA, 14 bp, Artificial Sequence
  Description of Artificial Sequence: Synthetic oligonucleotide
ctggtccctgatta

SEQ ID NO: 7169 - DNA, 14 bp, Artificial Sequence
  Description of Artificial Sequence: Synthetic oligonucleotide
tctggtccctgatt

SEQ ID NO: 7170 - DNA, 14 bp, Artificial Sequence
  Description of Artificial Sequence: Synthetic oligonucleotide
ttctggtccctgat

SEQ ID NO: 7171 - DNA, 14 bp, Artificial Sequence
  Description of Artificial Sequence: Synthetic oligonucleotide
tttctggtccctga

SEQ ID NO: 7172 - DNA, 14 bp, Artificial Sequence
  Description of Artificial Sequence: Synthetic oligonucleotide
atttctggtccctg

SEQ ID NO: 7173 - DNA, 14 bp, Artificial Sequence
  Description of Artificial Sequence: Synthetic oligonucleotide
catttctggtccct

SEQ ID NO: 7174 - DNA, 14 bp, Artificial Sequence
  Description of Artificial Sequence: Synthetic oligonucleotide
ccatttctggtccc

SEQ ID NO: 7175 - DNA, 14 bp, Artificial Sequence
  Description of Artificial Sequence: Synthetic oligonucleotide
gccatttctggtcc

SEQ ID NO: 7176 - DNA, 14 bp, Artificial Sequence
  Description of Artificial Sequence: Synthetic oligonucleotide
agccatttctggtc

SEQ ID NO: 7177 - DNA, 14 bp, Artificial Sequence
  Description of Artificial Sequence: Synthetic oligonucleotide
cagccatttctggt

SEQ ID NO: 7178 - DNA, 14 bp, Artificial Sequence
  Description of Artificial Sequence: Synthetic oligonucleotide
tcagccatttctgg

SEQ ID NO: 7179 - DNA, 14 bp, Artificial Sequence
  Description of Artificial Sequence: Synthetic oligonucleotide
ctcagccatttctg

SEQ ID NO: 7180 - DNA, 14 bp, Artificial Sequence
  Description of Artificial Sequence: Synthetic oligonucleotide
cctcagccatttct

SEQ ID NO: 7181 - DNA, 14 bp, Artificial Sequence
  Description of Artificial Sequence: Synthetic oligonucleotide
tcctcagccatttc

SEQ ID NO: 7182 - DNA, 14 bp, Artificial Sequence
  Description of Artificial Sequence: Synthetic oligonucleotide
ctcctcagccattt

SEQ ID NO: 7183 - DNA, 14 bp, Artificial Sequence
  Description of Artificial Sequence: Synthetic oligonucleotide
tctcctcagccatt

SEQ ID NO: 7184 - DNA, 14 bp, Artificial Sequence
  Description of Artificial Sequence: Synthetic oligonucleotide
atctcctcagccat

SEQ ID NO: 7185 - DNA, 14 bp, Artificial Sequence
  Description of Artificial Sequence: Synthetic oligonucleotide
tatctcctcagcca

SEQ ID NO: 7186 - DNA, 14 bp, Artificial Sequence
  Description of Artificial Sequence: Synthetic oligonucleotide
ttatctcctcagcc

SEQ ID NO: 7187 - DNA, 14 bp, Artificial Sequence
  Description of Artificial Sequence: Synthetic oligonucleotide
tttatctcctcagc

SEQ ID NO: 7188 - DNA, 14 bp, Artificial Sequence
  Description of Artificial Sequence: Synthetic oligonucleotide
atttatctcctcag

SEQ ID NO: 7189 - DNA, 14 bp, Artificial Sequence
  Description of Artificial Sequence: Synthetic oligonucleotide
catttatctcctca

SEQ ID NO: 7190 - DNA, 14 bp, Artificial Sequence
  Description of Artificial Sequence: Synthetic oligonucleotide
gcatttatctcctc

SEQ ID NO: 7191 - DNA, 14 bp, Artificial Sequence
  Description of Artificial Sequence: Synthetic oligonucleotide
tgcatttatctcct

SEQ ID NO: 7192 - DNA, 14 bp, Artificial Sequence
  Description of Artificial Sequence: Synthetic oligonucleotide
atgcatttatctcc

SEQ ID NO: 7193 - DNA, 14 bp, Artificial Sequence
  Description of Artificial Sequence: Synthetic oligonucleotide
gatgcatttatctc

SEQ ID NO: 7194 - DNA, 14 bp, Artificial Sequence
  Description of Artificial Sequence: Synthetic oligonucleotide
tgatgcatttatct

SEQ ID NO: 7195 - DNA, 14 bp, Artificial Sequence
  Description of Artificial Sequence: Synthetic oligonucleotide
atgatgcatttatc

SEQ ID NO: 7196 - DNA, 14 bp, Artificial Sequence
  Description of Artificial Sequence: Synthetic oligonucleotide
aatgatgcatttat

SEQ ID NO: 7197 - DNA, 14 bp, Artificial Sequence
  Description of Artificial Sequence: Synthetic oligonucleotide
taatgatgcattta

SEQ ID NO: 7198 - DNA, 14 bp, Artificial Sequence
  Description of Artificial Sequence: Synthetic oligonucleotide
gtaatgatgcattt

SEQ ID NO: 7199 - DNA, 14 bp, Artificial Sequence
  Description of Artificial Sequence: Synthetic oligonucleotide
tgtaatgatgcatt

SEQ ID NO: 7200 - DNA, 14 bp, Artificial Sequence
  Description of Artificial Sequence: Synthetic oligonucleotide
ttgtaatgatgcat

SEQ ID NO: 7201 - DNA, 14 bp, Artificial Sequence
  Description of Artificial Sequence: Synthetic oligonucleotide
tttgtaatgatgca

SEQ ID NO: 7202 - DNA, 14 bp, Artificial Sequence
  Description of Artificial Sequence: Synthetic oligonucleotide
ttttgtaatgatgc

SEQ ID NO: 7203 - DNA, 14 bp, Artificial Sequence
  Description of Artificial Sequence: Synthetic oligonucleotide
attttgtaatgatg

SEQ ID NO: 7204 - DNA, 14 bp, Artificial Sequence
  Description of Artificial Sequence: Synthetic oligonucleotide
aattttgtaatgat

SEQ ID NO: 7205 - DNA, 14 bp, Artificial Sequence
  Description of Artificial Sequence: Synthetic oligonucleotide
gaattttgtaatga

SEQ ID NO: 7206 - DNA, 14 bp, Artificial Sequence
  Description of Artificial Sequence: Synthetic oligonucleotide
agaattttgtaatg

SEQ ID NO: 7207 - DNA, 14 bp, Artificial Sequence
  Description of Artificial Sequence: Synthetic oligonucleotide
cagaattttgtaat

SEQ ID NO: 7208 - DNA, 14 bp, Artificial Sequence
  Description of Artificial Sequence: Synthetic oligonucleotide
gcagaattttgtaa

SEQ ID NO: 7209 - DNA, 14 bp, Artificial Sequence
  Description of Artificial Sequence: Synthetic oligonucleotide
agcagaattttgta

SEQ ID NO: 7210 - DNA, 14 bp, Artificial Sequence
  Description of Artificial Sequence: Synthetic oligonucleotide
aagcagaattttgt

SEQ ID NO: 7211 - DNA, 14 bp, Artificial Sequence
  Description of Artificial Sequence: Synthetic oligonucleotide
aaagcagaattttg

SEQ ID NO: 7212 - DNA, 14 bp, Artificial Sequence
  Description of Artificial Sequence: Synthetic oligonucleotide
aaaagcagaatttt

SEQ ID NO: 7213 - DNA, 14 bp, Artificial Sequence
  Description of Artificial Sequence: Synthetic oligonucleotide
caaaagcagaattt

SEQ ID NO: 7214 - DNA, 14 bp, Artificial Sequence
  Description of Artificial Sequence: Synthetic oligonucleotide
tcaaaagcagaatt

SEQ ID NO: 7215 - DNA, 14 bp, Artificial Sequence
  Description of Artificial Sequence: Synthetic oligonucleotide
ttcaaaagcagaat

SEQ ID NO: 7216 - DNA, 14 bp, Artificial Sequence
  Description of Artificial Sequence: Synthetic oligonucleotide
attcaaaagcagaa

SEQ ID NO: 7217 - DNA, 14 bp, Artificial Sequence
  Description of Artificial Sequence: Synthetic oligonucleotide
gattcaaaagcaga

SEQ ID NO: 7218 - DNA, 14 bp, Artificial Sequence
  Description of Artificial Sequence: Synthetic oligonucleotide
ggattcaaaagcag

SEQ ID NO: 7219 - DNA, 14 bp, Artificial Sequence
  Description of Artificial Sequence: Synthetic oligonucleotide
aggattcaaaagca

SEQ ID NO: 7220 - DNA, 14 bp, Artificial Sequence
  Description of Artificial Sequence: Synthetic oligonucleotide
caggattcaaaagc

SEQ ID NO: 7221 - DNA, 14 bp, Artificial Sequence
  Description of Artificial Sequence: Synthetic oligonucleotide
ccaggattcaaaag

SEQ ID NO: 7222 - DNA, 14 bp, Artificial Sequence
  Description of Artificial Sequence: Synthetic oligonucleotide
tccaggattcaaaa

SEQ ID NO: 7223 - DNA, 14 bp, Artificial Sequence
  Description of Artificial Sequence: Synthetic oligonucleotide
gtccaggattcaaa

SEQ ID NO: 7224 - DNA, 14 bp, Artificial Sequence
  Description of Artificial Sequence: Synthetic oligonucleotide
tgtccaggattcaa

SEQ ID NO: 7225 - DNA, 14 bp, Artificial Sequence
  Description of Artificial Sequence: Synthetic oligonucleotide
atgtccaggattca

SEQ ID NO: 7226 - DNA, 14 bp, Artificial Sequence
  Description of Artificial Sequence: Synthetic oligonucleotide
aatgtccaggattc

SEQ ID NO: 7227 - DNA, 14 bp, Artificial Sequence
  Description of Artificial Sequence: Synthetic oligonucleotide
taatgtccaggatt

SEQ ID NO: 7228 - DNA, 14 bp, Artificial Sequence
  Description of Artificial Sequence: Synthetic oligonucleotide
gtaatgtccaggat

SEQ ID NO: 7229 - DNA, 14 bp, Artificial Sequence
  Description of Artificial Sequence: Synthetic oligonucleotide
tgtaatgtccagga

SEQ ID NO: 7230 - DNA, 14 bp, Artificial Sequence
  Description of Artificial Sequence: Synthetic oligonucleotide
ttgtaatgtccagg

SEQ ID NO: 7231 - DNA, 14 bp, Artificial Sequence
  Description of Artificial Sequence: Synthetic oligonucleotide
cttgtaatgtccag

SEQ ID NO: 7232 - DNA, 14 bp, Artificial Sequence
  Description of Artificial Sequence: Synthetic oligonucleotide
ccttgtaatgtcca

SEQ ID NO: 7233 - DNA, 14 bp, Artificial Sequence
  Description of Artificial Sequence: Synthetic oligonucleotide
cccttgtaatgtcc

SEQ ID NO: 7234 - DNA, 14 bp, Artificial Sequence
  Description of Artificial Sequence: Synthetic oligonucleotide
ccccttgtaatgtc

SEQ ID NO: 7235 - DNA, 14 bp, Artificial Sequence
  Description of Artificial Sequence: Synthetic oligonucleotide
cccccttgtaatgt

SEQ ID NO: 7236 - DNA, 14 bp, Artificial Sequence
  Description of Artificial Sequence: Synthetic oligonucleotide
acccccttgtaatg

SEQ ID NO: 7237 - DNA, 14 bp, Artificial Sequence
  Description of Artificial Sequence: Synthetic oligonucleotide
tacccccttgtaat

SEQ ID NO: 7238 - DNA, 14 bp, Artificial Sequence
  Description of Artificial Sequence: Synthetic oligonucleotide
ttacccccttgtaa

SEQ ID NO: 7239 - DNA, 14 bp, Artificial Sequence
  Description of Artificial Sequence: Synthetic oligonucleotide
tttacccccttgta

SEQ ID NO: 7240 - DNA, 14 bp, Artificial Sequence
  Description of Artificial Sequence: Synthetic oligonucleotide
atttacccccttgt

SEQ ID NO: 7241 - DNA, 14 bp, Artificial Sequence
  Description of Artificial Sequence: Synthetic oligonucleotide
catttacccccttg

SEQ ID NO: 7242 - DNA, 14 bp, Artificial Sequence
  Description of Artificial Sequence: Synthetic oligonucleotide
gcatttaccccctt

SEQ ID NO: 7243 - DNA, 14 bp, Artificial Sequence
  Description of Artificial Sequence: Synthetic oligonucleotide
tgcatttaccccct

SEQ ID NO: 7244 - DNA, 14 bp, Artificial Sequence
  Description of Artificial Sequence: Synthetic oligonucleotide
ctgcatttaccccc

SEQ ID NO: 7245 - DNA, 14 bp, Artificial Sequence
  Description of Artificial Sequence: Synthetic oligonucleotide
gctgcatttacccc

SEQ ID NO: 7246 - DNA, 14 bp, Artificial Sequence
  Description of Artificial Sequence: Synthetic oligonucleotide
tgctgcatttaccc

SEQ ID NO: 7247 - DNA, 14 bp, Artificial Sequence
  Description of Artificial Sequence: Synthetic oligonucleotide
atgctgcatttacc

SEQ ID NO: 7248 - DNA, 14 bp, Artificial Sequence
  Description of Artificial Sequence: Synthetic oligonucleotide
catgctgcatttac

SEQ ID NO: 7249 - DNA, 14 bp, Artificial Sequence
  Description of Artificial Sequence: Synthetic oligonucleotide
tcatgctgcattta

SEQ ID NO: 7250 - DNA, 14 bp, Artificial Sequence
  Description of Artificial Sequence: Synthetic oligonucleotide
gtcatgctgcattt

SEQ ID NO: 7251 - DNA, 14 bp, Artificial Sequence
  Description of Artificial Sequence: Synthetic oligonucleotide
agtcatgctgcatt

SEQ ID NO: 7252 - DNA, 14 bp, Artificial Sequence
  Description of Artificial Sequence: Synthetic oligonucleotide
aagtcatgctgcat

SEQ ID NO: 7253 - DNA, 14 bp, Artificial Sequence
  Description of Artificial Sequence: Synthetic oligonucleotide
aaagtcatgctgca

SEQ ID NO: 7254 - DNA, 14 bp, Artificial Sequence
  Description of Artificial Sequence: Synthetic oligonucleotide
aaaagtcatgctgc

SEQ ID NO: 7255 - DNA, 14 bp, Artificial Sequence
  Description of Artificial Sequence: Synthetic oligonucleotide
aaaaagtcatgctg

SEQ ID NO: 7256 - DNA, 14 bp, Artificial Sequence
  Description of Artificial Sequence: Synthetic oligonucleotide
caaaaagtcatgct

SEQ ID NO: 7257 - DNA, 14 bp, Artificial Sequence
  Description of Artificial Sequence: Synthetic oligonucleotide
acaaaaagtcatgc

SEQ ID NO: 7258 - DNA, 14 bp, Artificial Sequence
  Description of Artificial Sequence: Synthetic oligonucleotide
aacaaaaagtcatg

SEQ ID NO: 7259 - DNA, 14 bp, Artificial Sequence
  Description of Artificial Sequence: Synthetic oligonucleotide
taacaaaaagtcat

SEQ ID NO: 7260 - DNA, 14 bp, Artificial Sequence
  Description of Artificial Sequence: Synthetic oligonucleotide
ttaacaaaaagtca

SEQ ID NO: 7261 - DNA, 14 bp, Artificial Sequence
  Description of Artificial Sequence: Synthetic oligonucleotide
gttaacaaaaagtc

SEQ ID NO: 7262 - DNA, 14 bp, Artificial Sequence
  Description of Artificial Sequence: Synthetic oligonucleotide
ggttaacaaaaagt

SEQ ID NO: 7263 - DNA, 14 bp, Artificial Sequence
  Description of Artificial Sequence: Synthetic oligonucleotide
tggttaacaaaaag

SEQ ID NO: 7264 - DNA, 14 bp, Artificial Sequence
  Description of Artificial Sequence: Synthetic oligonucleotide
gtggttaacaaaaa

SEQ ID NO: 7265 - DNA, 14 bp, Artificial Sequence
  Description of Artificial Sequence: Synthetic oligonucleotide
tgtggttaacaaaa

SEQ ID NO: 7266 - DNA, 14 bp, Artificial Sequence
  Description of Artificial Sequence: Synthetic oligonucleotide
atgtggttaacaaa

SEQ ID NO: 7267 - DNA, 14 bp, Artificial Sequence
  Description of Artificial Sequence: Synthetic oligonucleotide
aatgtggttaacaa

SEQ ID NO: 7268 - DNA, 14 bp, Artificial Sequence
  Description of Artificial Sequence: Synthetic oligonucleotide
gaatgtggttaaca

SEQ ID NO: 7269 - DNA, 14 bp, Artificial Sequence
  Description of Artificial Sequence: Synthetic oligonucleotide
ggaatgtggttaac

SEQ ID NO: 7270 - DNA, 14 bp, Artificial Sequence
  Description of Artificial Sequence: Synthetic oligonucleotide
tggaatgtggttaa

SEQ ID NO: 7271 - DNA, 14 bp, Artificial Sequence
  Description of Artificial Sequence: Synthetic oligonucleotide
ttggaatgtggtta

SEQ ID NO: 7272 - DNA, 14 bp, Artificial Sequence
  Description of Artificial Sequence: Synthetic oligonucleotide
tttggaatgtggtt

SEQ ID NO: 7273 - DNA, 14 bp, Artificial Sequence
  Description of Artificial Sequence: Synthetic oligonucleotide
ttttggaatgtggt

SEQ ID NO: 7274 - DNA, 14 bp, Artificial Sequence
  Description of Artificial Sequence: Synthetic oligonucleotide
attttggaatgtgg

SEQ ID NO: 7275 - DNA, 14 bp, Artificial Sequence
  Description of Artificial Sequence: Synthetic oligonucleotide
cattttggaatgtg

SEQ ID NO: 7276 - DNA, 14 bp, Artificial Sequence
  Description of Artificial Sequence: Synthetic oligonucleotide
acattttggaatgt

SEQ ID NO: 7277 - DNA, 14 bp, Artificial Sequence
  Description of Artificial Sequence: Synthetic oligonucleotide
cacattttggaatg

SEQ ID NO: 7278 - DNA, 14 bp, Artificial Sequence
  Description of Artificial Sequence: Synthetic oligonucleotide
ccacattttggaat

SEQ ID NO: 7279 - DNA, 14 bp, Artificial Sequence
  Description of Artificial Sequence: Synthetic oligonucleotide
tccacattttggaa

SEQ ID NO: 7280 - DNA, 14 bp, Artificial Sequence
  Description of Artificial Sequence: Synthetic oligonucleotide
ttccacattttgga

SEQ ID NO: 7281 - DNA, 14 bp, Artificial Sequence
  Description of Artificial Sequence: Synthetic oligonucleotide
gttccacattttgg

SEQ ID NO: 7282 - DNA, 14 bp, Artificial Sequence
  Description of Artificial Sequence: Synthetic oligonucleotide
tgttccacattttg

SEQ ID NO: 7283 - DNA, 14 bp, Artificial Sequence
  Description of Artificial Sequence: Synthetic oligonucleotide
atgttccacatttt

SEQ ID NO: 7284 - DNA, 14 bp, Artificial Sequence
  Description of Artificial Sequence: Synthetic oligonucleotide
aatgttccacattt

SEQ ID NO: 7285 - DNA, 14 bp, Artificial Sequence
  Description of Artificial Sequence: Synthetic oligonucleotide
aaatgttccacatt

SEQ ID NO: 7286 - DNA, 14 bp, Artificial Sequence
  Description of Artificial Sequence: Synthetic oligonucleotide
gaaatgttccacat

SEQ ID NO: 7287 - DNA, 14 bp, Artificial Sequence
  Description of Artificial Sequence: Synthetic oligonucleotide
agaaatgttccaca

SEQ ID NO: 7288 - DNA, 14 bp, Artificial Sequence
  Description of Artificial Sequence: Synthetic oligonucleotide
aagaaatgttccac

SEQ ID NO: 7289 - DNA, 14 bp, Artificial Sequence
  Description of Artificial Sequence: Synthetic oligonucleotide
aaagaaatgttcca

SEQ ID NO: 7290 - DNA, 14 bp, Artificial Sequence
  Description of Artificial Sequence: Synthetic oligonucleotide
aaaagaaatgttcc

SEQ ID NO: 7291 - DNA, 14 bp, Artificial Sequence
  Description of Artificial Sequence: Synthetic oligonucleotide
taaaagaaatgttc

SEQ ID NO: 7292 - DNA, 14 bp, Artificial Sequence
  Description of Artificial Sequence: Synthetic oligonucleotide
ctaaaagaaatgtt

SEQ ID NO: 7293 - DNA, 14 bp, Artificial Sequence
  Description of Artificial Sequence: Synthetic oligonucleotide
tctaaaagaaatgt

SEQ ID NO: 7294 - DNA, 14 bp, Artificial Sequence
  Description of Artificial Sequence: Synthetic oligonucleotide
ttctaaaagaaatg

SEQ ID NO: 7295 - DNA, 14 bp, Artificial Sequence
  Description of Artificial Sequence: Synthetic oligonucleotide
tttctaaaagaaat

SEQ ID NO: 7296 - DNA, 14 bp, Artificial Sequence
  Description of Artificial Sequence: Synthetic oligonucleotide
atttctaaaagaaa

SEQ ID NO: 7297 - DNA, 14 bp, Artificial Sequence
  Description of Artificial Sequence: Synthetic oligonucleotide
catttctaaaagaa

SEQ ID NO: 7298 - DNA, 14 bp, Artificial Sequence
  Description of Artificial Sequence: Synthetic oligonucleotide
tcatttctaaaaga

SEQ ID NO: 7299 - DNA, 14 bp, Artificial Sequence
  Description of Artificial Sequence: Synthetic oligonucleotide
ttcatttctaaaag

SEQ ID NO: 7300 - DNA, 14 bp, Artificial Sequence
  Description of Artificial Sequence: Synthetic oligonucleotide
tttcatttctaaaa

SEQ ID NO: 7301 - DNA, 14 bp, Artificial Sequence
  Description of Artificial Sequence: Synthetic oligonucleotide
ttttcatttctaaa

SEQ ID NO: 7302 - DNA, 14 bp, Artificial Sequence
  Description of Artificial Sequence: Synthetic oligonucleotide
attttcatttctaa

SEQ ID NO: 7303 - DNA, 14 bp, Artificial Sequence
  Description of Artificial Sequence: Synthetic oligonucleotide
tattttcatttcta

SEQ ID NO: 7304 - DNA, 14 bp, Artificial Sequence
  Description of Artificial Sequence: Synthetic oligonucleotide
atattttcatttct

SEQ ID NO: 7305 - DNA, 14 bp, Artificial Sequence
  Description of Artificial Sequence: Synthetic oligonucleotide
aatattttcatttc

SEQ ID NO: 7306 - DNA, 14 bp, Artificial Sequence
  Description of Artificial Sequence: Synthetic oligonucleotide
aaatattttcattt

SEQ ID NO: 7307 - DNA, 14 bp, Artificial Sequence
  Description of Artificial Sequence: Synthetic oligonucleotide
gaaatattttcatt

SEQ ID NO: 7308 - DNA, 14 bp, Artificial Sequence
  Description of Artificial Sequence: Synthetic oligonucleotide
tgaaatattttcat

SEQ ID NO: 7309 - DNA, 14 bp, Artificial Sequence
  Description of Artificial Sequence: Synthetic oligonucleotide
ttgaaatattttca

SEQ ID NO: 7310 - DNA, 14 bp, Artificial Sequence
  Description of Artificial Sequence: Synthetic oligonucleotide
cttgaaatattttc

SEQ ID NO: 7311 - DNA, 14 bp, Artificial Sequence
  Description of Artificial Sequence: Synthetic oligonucleotide
ccttgaaatatttt

SEQ ID NO: 7312 - DNA, 14 bp, Artificial Sequence
  Description of Artificial Sequence: Synthetic oligonucleotide
gccttgaaatattt

SEQ ID NO: 7313 - DNA, 14 bp, Artificial Sequence
  Description of Artificial Sequence: Synthetic oligonucleotide
agccttgaaatatt

SEQ ID NO: 7314 - DNA, 14 bp, Artificial Sequence
  Description of Artificial Sequence: Synthetic oligonucleotide
cagccttgaaatat

SEQ ID NO: 7315 - DNA, 14 bp, Artificial Sequence
  Description of Artificial Sequence: Synthetic oligonucleotide
tcagccttgaaata

SEQ ID NO: 7316 - DNA, 14 bp, Artificial Sequence
  Description of Artificial Sequence: Synthetic oligonucleotide
atcagccttgaaat

SEQ ID NO: 7317 - DNA, 14 bp, Artificial Sequence
  Description of Artificial Sequence: Synthetic oligonucleotide
catcagccttgaaa

SEQ ID NO: 7318 - DNA, 14 bp, Artificial Sequence
  Description of Artificial Sequence: Synthetic oligonucleotide
acatcagccttgaa

SEQ ID NO: 7319 - DNA, 14 bp, Artificial Sequence
  Description of Artificial Sequence: Synthetic oligonucleotide
tacatcagccttga

SEQ ID NO: 7320 - DNA, 14 bp, Artificial Sequence
  Description of Artificial Sequence: Synthetic oligonucleotide
atacatcagccttg

SEQ ID NO: 7321 - DNA, 14 bp, Artificial Sequence
  Description of Artificial Sequence: Synthetic oligonucleotide
aatacatcagcctt

SEQ ID NO: 7322 - DNA, 14 bp, Artificial Sequence
  Description of Artificial Sequence: Synthetic oligonucleotide
aaatacatcagcct

SEQ ID NO: 7323 - DNA, 14 bp, Artificial Sequence
  Description of Artificial Sequence: Synthetic oligonucleotide
aaaatacatcagcc

SEQ ID NO: 7324 - DNA, 14 bp, Artificial Sequence
  Description of Artificial Sequence: Synthetic oligonucleotide
taaaatacatcagc

SEQ ID NO: 7325 - DNA, 14 bp, Artificial Sequence
  Description of Artificial Sequence: Synthetic oligonucleotide
ttaaaatacatcag

SEQ ID NO: 7326 - DNA, 14 bp, Artificial Sequence
  Description of Artificial Sequence: Synthetic oligonucleotide
cttaaaatacatca

SEQ ID NO: 7327 - DNA, 14 bp, Artificial Sequence
  Description of Artificial Sequence: Synthetic oligonucleotide
tcttaaaatacatc

SEQ ID NO: 7328 - DNA, 14 bp, Artificial Sequence
  Description of Artificial Sequence: Synthetic oligonucleotide
gtcttaaaatacat

SEQ ID NO: 7329 - DNA, 14 bp, Artificial Sequence
  Description of Artificial Sequence: Synthetic oligonucleotide
agtcttaaaataca

SEQ ID NO: 7330 - DNA, 14 bp, Artificial Sequence
  Description of Artificial Sequence: Synthetic oligonucleotide
tagtcttaaaatac

SEQ ID NO: 7331 - DNA, 14 bp, Artificial Sequence
  Description of Artificial Sequence: Synthetic oligonucleotide
gtagtcttaaaata

SEQ ID NO: 7332 - DNA, 14 bp, Artificial Sequence
  Description of Artificial Sequence: Synthetic oligonucleotide
tgtagtcttaaaat

SEQ ID NO: 7333 - DNA, 14 bp, Artificial Sequence
  Description of Artificial Sequence: Synthetic oligonucleotide
gtgtagtcttaaaa

SEQ ID NO: 7334 - DNA, 14 bp, Artificial Sequence
  Description of Artificial Sequence: Synthetic oligonucleotide
tgtgtagtcttaaa

SEQ ID NO: 7335 - DNA, 14 bp, Artificial Sequence
  Description of Artificial Sequence: Synthetic oligonucleotide
atgtgtagtcttaa

SEQ ID NO: 7336 - DNA, 14 bp, Artificial Sequence
  Description of Artificial Sequence: Synthetic oligonucleotide
aatgtgtagtctta

SEQ ID NO: 7337 - DNA, 14 bp, Artificial Sequence
  Description of Artificial Sequence: Synthetic oligonucleotide
taatgtgtagtctt

SEQ ID NO: 7338 - DNA, 14 bp, Artificial Sequence
  Description of Artificial Sequence: Synthetic oligonucleotide
ataatgtgtagtct

SEQ ID NO: 7339 - DNA, 14 bp, Artificial Sequence
  Description of Artificial Sequence: Synthetic oligonucleotide
gataatgtgtagtc

SEQ ID NO: 7340 - DNA, 14 bp, Artificial Sequence
  Description of Artificial Sequence: Synthetic oligonucleotide
tgataatgtgtagt

SEQ ID NO: 7341 - DNA, 14 bp, Artificial Sequence
  Description of Artificial Sequence: Synthetic oligonucleotide
ctgataatgtgtag

SEQ ID NO: 7342 - DNA, 14 bp, Artificial Sequence
  Description of Artificial Sequence: Synthetic oligonucleotide
cctgataatgtgta

SEQ ID NO: 7343 - DNA, 14 bp, Artificial Sequence
  Description of Artificial Sequence: Synthetic oligonucleotide
tcctgataatgtgt

SEQ ID NO: 7344 - DNA, 14 bp, Artificial Sequence
  Description of Artificial Sequence: Synthetic oligonucleotide
ttcctgataatgtg

SEQ ID NO: 7345 - DNA, 14 bp, Artificial Sequence
  Description of Artificial Sequence: Synthetic oligonucleotide
tttcctgataatgt

SEQ ID NO: 7346 - DNA, 14 bp, Artificial Sequence
  Description of Artificial Sequence: Synthetic oligonucleotide
gtttcctgataatg

SEQ ID NO: 7347 - DNA, 14 bp, Artificial Sequence
  Description of Artificial Sequence: Synthetic oligonucleotide
tgtttcctgataat

SEQ ID NO: 7348 - DNA, 14 bp, Artificial Sequence
  Description of Artificial Sequence: Synthetic oligonucleotide
atgtttcctgataa

SEQ ID NO: 7349 - DNA, 14 bp, Artificial Sequence
  Description of Artificial Sequence: Synthetic oligonucleotide
tatgtttcctgata

SEQ ID NO: 7350 - DNA, 14 bp, Artificial Sequence
  Description of Artificial Sequence: Synthetic oligonucleotide
gtatgtttcctgat

SEQ ID NO: 7351 - DNA, 14 bp, Artificial Sequence
  Description of Artificial Sequence: Synthetic oligonucleotide
tgtatgtttcctga

SEQ ID NO: 7352 - DNA, 14 bp, Artificial Sequence
  Description of Artificial Sequence: Synthetic oligonucleotide
atgtatgtttcctg

SEQ ID NO: 7353 - DNA, 14 bp, Artificial Sequence
  Description of Artificial Sequence: Synthetic oligonucleotide
aatgtatgtttcct

SEQ ID NO: 7354 - DNA, 14 bp, Artificial Sequence
  Description of Artificial Sequence: Synthetic oligonucleotide
caatgtatgtttcc

SEQ ID NO: 7355 - DNA, 14 bp, Artificial Sequence
  Description of Artificial Sequence: Synthetic oligonucleotide
tcaatgtatgtttc

SEQ ID NO: 7356 - DNA, 14 bp, Artificial Sequence
  Description of Artificial Sequence: Synthetic oligonucleotide
ctcaatgtatgttt

SEQ ID NO: 7357 - DNA, 14 bp, Artificial Sequence
  Description of Artificial Sequence: Synthetic oligonucleotide
tctcaatgtatgtt

SEQ ID NO: 7358 - DNA, 14 bp, Artificial Sequence
  Description of Artificial Sequence: Synthetic oligonucleotide
ctctcaatgtatgt

SEQ ID NO: 7359 - DNA, 14 bp, Artificial Sequence
  Description of Artificial Sequence: Synthetic oligonucleotide
actctcaatgtatg

SEQ ID NO: 7360 - DNA, 14 bp, Artificial Sequence
  Description of Artificial Sequence: Synthetic oligonucleotide
aactctcaatgtat

SEQ ID NO: 7361 - DNA, 14 bp, Artificial Sequence
  Description of Artificial Sequence: Synthetic oligonucleotide
gaactctcaatgta

SEQ ID NO: 7362 - DNA, 14 bp, Artificial Sequence
  Description of Artificial Sequence: Synthetic oligonucleotide
cgaactctcaatgt

SEQ ID NO: 7363 - DNA, 14 bp, Artificial Sequence
  Description of Artificial Sequence: Synthetic oligonucleotide
gcgaactctcaatg

SEQ ID NO: 7364 - DNA, 14 bp, Artificial Sequence
  Description of Artificial Sequence: Synthetic oligonucleotide
agcgaactctcaat

SEQ ID NO: 7365 - DNA, 14 bp, Artificial Sequence
  Description of Artificial Sequence: Synthetic oligonucleotide
aagcgaactctcaa

SEQ ID NO: 7366 - DNA, 14 bp, Artificial Sequence
  Description of Artificial Sequence: Synthetic oligonucleotide
taagcgaactctca

SEQ ID NO: 7367 - DNA, 14 bp, Artificial Sequence
  Description of Artificial Sequence: Synthetic oligonucleotide
ttaagcgaactctc

SEQ ID NO: 7368 - DNA, 14 bp, Artificial Sequence
  Description of Artificial Sequence: Synthetic oligonucleotide
attaagcgaactct

SEQ ID NO: 7369 - DNA, 14 bp, Artificial Sequence
  Description of Artificial Sequence: Synthetic oligonucleotide
aattaagcgaactc

SEQ ID NO: 7370 - DNA, 14 bp, Artificial Sequence
  Description of Artificial Sequence: Synthetic oligonucleotide
taattaagcgaact

SEQ ID NO: 7371 - DNA, 14 bp, Artificial Sequence
  Description of Artificial Sequence: Synthetic oligonucleotide
ttaattaagcgaac

SEQ ID NO: 7372 - DNA, 14 bp, Artificial Sequence
  Description of Artificial Sequence: Synthetic oligonucleotide
tttaattaagcgaa

SEQ ID NO: 7373 - DNA, 14 bp, Artificial Sequence
  Description of Artificial Sequence: Synthetic oligonucleotide
ctttaattaagcga

SEQ ID NO: 7374 - DNA, 14 bp, Artificial Sequence
  Description of Artificial Sequence: Synthetic oligonucleotide
cctttaattaagcg

SEQ ID NO: 7375 - DNA, 14 bp, Artificial Sequence
  Description of Artificial Sequence: Synthetic oligonucleotide
acctttaattaagc

SEQ ID NO: 7376 - DNA, 14 bp, Artificial Sequence
  Description of Artificial Sequence: Synthetic oligonucleotide
aacctttaattaag

SEQ ID NO: 7377 - DNA, 14 bp, Artificial Sequence
  Description of Artificial Sequence: Synthetic oligonucleotide
caacctttaattaa

SEQ ID NO: 7378 - DNA, 14 bp, Artificial Sequence
  Description of Artificial Sequence: Synthetic oligonucleotide
acaacctttaatta

SEQ ID NO: 7379 - DNA, 14 bp, Artificial Sequence
  Description of Artificial Sequence: Synthetic oligonucleotide
aacaacctttaatt

SEQ ID NO: 7380 - DNA, 14 bp, Artificial Sequence
  Description of Artificial Sequence: Synthetic oligonucleotide
caacaacctttaat

SEQ ID NO: 7381 - DNA, 14 bp, Artificial Sequence
  Description of Artificial Sequence: Synthetic oligonucleotide
ccaacaacctttaa

SEQ ID NO: 7382 - DNA, 14 bp, Artificial Sequence
  Description of Artificial Sequence: Synthetic oligonucleotide
cccaacaaccttta

SEQ ID NO: 7383 - DNA, 14 bp, Artificial Sequence
  Description of Artificial Sequence: Synthetic oligonucleotide
gcccaacaaccttt

SEQ ID NO: 7384 - DNA, 14 bp, Artificial Sequence
  Description of Artificial Sequence: Synthetic oligonucleotide
tgcccaacaacctt

SEQ ID NO: 7385 - DNA, 14 bp, Artificial Sequence
  Description of Artificial Sequence: Synthetic oligonucleotide
atgcccaacaacct

SEQ ID NO: 7386 - DNA, 14 bp, Artificial Sequence
  Description of Artificial Sequence: Synthetic oligonucleotide
gatgcccaacaacc

SEQ ID NO: 7387 - DNA, 14 bp, Artificial Sequence
  Description of Artificial Sequence: Synthetic oligonucleotide
tgatgcccaacaac

SEQ ID NO: 7388 - DNA, 14 bp, Artificial Sequence
  Description of Artificial Sequence: Synthetic oligonucleotide
ttgatgcccaacaa

SEQ ID NO: 7389 - DNA, 14 bp, Artificial Sequence
  Description of Artificial Sequence: Synthetic oligonucleotide
tttgatgcccaaca

SEQ ID NO: 7390 - DNA, 14 bp, Artificial Sequence
  Description of Artificial Sequence: Synthetic oligonucleotide
atttgatgcccaac

SEQ ID NO: 7391 - DNA, 14 bp, Artificial Sequence
  Description of Artificial Sequence: Synthetic oligonucleotide
aatttgatgcccaa

SEQ ID NO: 7392 - DNA, 14 bp, Artificial Sequence
  Description of Artificial Sequence: Synthetic oligonucleotide
taatttgatgccca

SEQ ID NO: 7393 - DNA, 14 bp, Artificial Sequence
  Description of Artificial Sequence: Synthetic oligonucleotide
ataatttgatgccc

SEQ ID NO: 7394 - DNA, 14 bp, Artificial Sequence
  Description of Artificial Sequence: Synthetic oligonucleotide
cataatttgatgcc

SEQ ID NO: 7395 - DNA, 14 bp, Artificial Sequence
  Description of Artificial Sequence: Synthetic oligonucleotide
acataatttgatgc

SEQ ID NO: 7396 - DNA, 14 bp, Artificial Sequence
  Description of Artificial Sequence: Synthetic oligonucleotide
aacataatttgatg

SEQ ID NO: 7397 - DNA, 14 bp, Artificial Sequence
  Description of Artificial Sequence: Synthetic oligonucleotide
aaacataatttgat

SEQ ID NO: 7398 - DNA, 14 bp, Artificial Sequence
  Description of Artificial Sequence: Synthetic oligonucleotide
taaacataatttga

SEQ ID NO: 7399 - DNA, 14 bp, Artificial Sequence
  Description of Artificial Sequence: Synthetic oligonucleotide
ctaaacataatttg

SEQ ID NO: 7400 - DNA, 14 bp, Artificial Sequence
  Description of Artificial Sequence: Synthetic oligonucleotide
actaaacataattt

SEQ ID NO: 7401 - DNA, 14 bp, Artificial Sequence
  Description of Artificial Sequence: Synthetic oligonucleotide
tactaaacataatt

SEQ ID NO: 7402 - DNA, 14 bp, Artificial Sequence
  Description of Artificial Sequence: Synthetic oligonucleotide
ctactaaacataat

SEQ ID NO: 7403 - DNA, 14 bp, Artificial Sequence
  Description of Artificial Sequence: Synthetic oligonucleotide
cctactaaacataa

SEQ ID NO: 7404 - DNA, 14 bp, Artificial Sequence
  Description of Artificial Sequence: Synthetic oligonucleotide
acctactaaacata

SEQ ID NO: 7405 - DNA, 14 bp, Artificial Sequence
  Description of Artificial Sequence: Synthetic oligonucleotide
aacctactaaacat

SEQ ID NO: 7406 - DNA, 14 bp, Artificial Sequence
  Description of Artificial Sequence: Synthetic oligonucleotide
taacctactaaaca

SEQ ID NO: 7407 - DNA, 14 bp, Artificial Sequence
  Description of Artificial Sequence: Synthetic oligonucleotide
gtaacctactaaac

SEQ ID NO: 7408 - DNA, 14 bp, Artificial Sequence
  Description of Artificial Sequence: Synthetic oligonucleotide
agtaacctactaaa

SEQ ID NO: 7409 - DNA, 14 bp, Artificial Sequence
  Description of Artificial Sequence: Synthetic oligonucleotide
tagtaacctactaa

SEQ ID NO: 7410 - DNA, 14 bp, Artificial Sequence
  Description of Artificial Sequence: Synthetic oligonucleotide
atagtaacctacta

SEQ ID NO: 7411 - DNA, 14 bp, Artificial Sequence
  Description of Artificial Sequence: Synthetic oligonucleotide
aatagtaacctact

SEQ ID NO: 7412 - DNA, 14 bp, Artificial Sequence
  Description of Artificial Sequence: Synthetic oligonucleotide
gaatagtaacctac

SEQ ID NO: 7413 - DNA, 14 bp, Artificial Sequence
  Description of Artificial Sequence: Synthetic oligonucleotide
agaatagtaaccta

SEQ ID NO: 7414 - DNA, 14 bp, Artificial Sequence
  Description of Artificial Sequence: Synthetic oligonucleotide
gagaatagtaacct

SEQ ID NO: 7415 - DNA, 14 bp, Artificial Sequence
  Description of Artificial Sequence: Synthetic oligonucleotide
agagaatagtaacc

SEQ ID NO: 7416 - DNA, 14 bp, Artificial Sequence
  Description of Artificial Sequence: Synthetic oligonucleotide
tagagaatagtaac

SEQ ID NO: 7417 - DNA, 14 bp, Artificial Sequence
  Description of Artificial Sequence: Synthetic oligonucleotide
ttagagaatagtaa

SEQ ID NO: 7418 - DNA, 14 bp, Artificial Sequence
  Description of Artificial Sequence: Synthetic oligonucleotide
gttagagaatagta

SEQ ID NO: 7419 - DNA, 14 bp, Artificial Sequence
  Description of Artificial Sequence: Synthetic oligonucleotide
tgttagagaatagt

SEQ ID NO: 7420 - DNA, 14 bp, Artificial Sequence
  Description of Artificial Sequence: Synthetic oligonucleotide
ttgttagagaatag

SEQ ID NO: 7421 - DNA, 14 bp, Artificial Sequence
  Description of Artificial Sequence: Synthetic oligonucleotide
gttgttagagaata

SEQ ID NO: 7422 - DNA, 14 bp, Artificial Sequence
  Description of Artificial Sequence: Synthetic oligonucleotide
agttgttagagaat

SEQ ID NO: 7423 - DNA, 14 bp, Artificial Sequence
  Description of Artificial Sequence: Synthetic oligonucleotide
gagttgttagagaa

SEQ ID NO: 7424 - DNA, 14 bp, Artificial Sequence
  Description of Artificial Sequence: Synthetic oligonucleotide
tgagttgttagaga

SEQ ID NO: 7425 - DNA, 14 bp, Artificial Sequence
  Description of Artificial Sequence: Synthetic oligonucleotide
ttgagttgttagag

SEQ ID NO: 7426 - DNA, 14 bp, Artificial Sequence
  Description of Artificial Sequence: Synthetic oligonucleotide
cttgagttgttaga

SEQ ID NO: 7427 - DNA, 14 bp, Artificial Sequence
  Description of Artificial Sequence: Synthetic oligonucleotide
ccttgagttgttag

SEQ ID NO: 7428 - DNA, 14 bp, Artificial Sequence
  Description of Artificial Sequence: Synthetic oligonucleotide
tccttgagttgtta

SEQ ID NO: 7429 - DNA, 14 bp, Artificial Sequence
  Description of Artificial Sequence: Synthetic oligonucleotide
atccttgagttgtt

SEQ ID NO: 7430 - DNA, 14 bp, Artificial Sequence
  Description of Artificial Sequence: Synthetic oligonucleotide
catccttgagttgt

SEQ ID NO: 7431 - DNA, 14 bp, Artificial Sequence
  Description of Artificial Sequence: Synthetic oligonucleotide
gcatccttgagttg

SEQ ID NO: 7432 - DNA, 14 bp, Artificial Sequence
  Description of Artificial Sequence: Synthetic oligonucleotide
agcatccttgagtt

SEQ ID NO: 7433 - DNA, 14 bp, Artificial Sequence
  Description of Artificial Sequence: Synthetic oligonucleotide
aagcatccttgagt

SEQ ID NO: 7434 - DNA, 14 bp, Artificial Sequence
  Description of Artificial Sequence: Synthetic oligonucleotide
aaagcatccttgag

SEQ ID NO: 7435 - DNA, 14 bp, Artificial Sequence
  Description of Artificial Sequence: Synthetic oligonucleotide
taaagcatccttga

SEQ ID NO: 7436 - DNA, 14 bp, Artificial Sequence
  Description of Artificial Sequence: Synthetic oligonucleotide
ttaaagcatccttg

SEQ ID NO: 7437 - DNA, 14 bp, Artificial Sequence
  Description of Artificial Sequence: Synthetic oligonucleotide
attaaagcatcctt

SEQ ID NO: 7438 - DNA, 14 bp, Artificial Sequence
  Description of Artificial Sequence: Synthetic oligonucleotide
cattaaagcatcct

SEQ ID NO: 7439 - DNA, 14 bp, Artificial Sequence
  Description of Artificial Sequence: Synthetic oligonucleotide
ccattaaagcatcc

SEQ ID NO: 7440 - DNA, 14 bp, Artificial Sequence
  Description of Artificial Sequence: Synthetic oligonucleotide
tccattaaagcatc

SEQ ID NO: 7441 - DNA, 14 bp, Artificial Sequence
  Description of Artificial Sequence: Synthetic oligonucleotide
atccattaaagcat

SEQ ID NO: 7442 - DNA, 14 bp, Artificial Sequence
  Description of Artificial Sequence: Synthetic oligonucleotide
gatccattaaagca

SEQ ID NO: 7443 - DNA, 14 bp, Artificial Sequence
  Description of Artificial Sequence: Synthetic oligonucleotide
agatccattaaagc

SEQ ID NO: 7444 - DNA, 14 bp, Artificial Sequence
  Description of Artificial Sequence: Synthetic oligonucleotide
cagatccattaaag

SEQ ID NO: 7445 - DNA, 14 bp, Artificial Sequence
  Description of Artificial Sequence: Synthetic oligonucleotide
tcagatccattaaa

SEQ ID NO: 7446 - DNA, 14 bp, Artificial Sequence
  Description of Artificial Sequence: Synthetic oligonucleotide
ttcagatccattaa

SEQ ID NO: 7447 - DNA, 14 bp, Artificial Sequence
  Description of Artificial Sequence: Synthetic oligonucleotide
attcagatccatta

SEQ ID NO: 7448 - DNA, 14 bp, Artificial Sequence
  Description of Artificial Sequence: Synthetic oligonucleotide
aattcagatccatt

SEQ ID NO: 7449 - DNA, 14 bp, Artificial Sequence
  Description of Artificial Sequence: Synthetic oligonucleotide
aaattcagatccat

SEQ ID NO: 7450 - DNA, 14 bp, Artificial Sequence
  Description of Artificial Sequence: Synthetic oligonucleotide
caaattcagatcca

SEQ ID NO: 7451 - DNA, 14 bp, Artificial Sequence
  Description of Artificial Sequence: Synthetic oligonucleotide
tcaaattcagatcc

SEQ ID NO: 7452 - DNA, 14 bp, Artificial Sequence
  Description of Artificial Sequence: Synthetic oligonucleotide
gtcaaattcagatc

SEQ ID NO: 7453 - DNA, 14 bp, Artificial Sequence
  Description of Artificial Sequence: Synthetic oligonucleotide
tgtcaaattcagat

SEQ ID NO: 7454 - DNA, 14 bp, Artificial Sequence
  Description of Artificial Sequence: Synthetic oligonucleotide
ttgtcaaattcaga

SEQ ID NO: 7455 - DNA, 14 bp, Artificial Sequence
  Description of Artificial Sequence: Synthetic oligonucleotide
tttgtcaaattcag

SEQ ID NO: 7456 - DNA, 14 bp, Artificial Sequence
  Description of Artificial Sequence: Synthetic oligonucleotide
ctttgtcaaattca

SEQ ID NO: 7457 - DNA, 14 bp, Artificial Sequence
  Description of Artificial Sequence: Synthetic oligonucleotide
tctttgtcaaattc

SEQ ID NO: 7458 - DNA, 14 bp, Artificial Sequence
  Description of Artificial Sequence: Synthetic oligonucleotide
ctctttgtcaaatt

SEQ ID NO: 7459 - DNA, 14 bp, Artificial Sequence
  Description of Artificial Sequence: Synthetic oligonucleotide
gctctttgtcaaat

SEQ ID NO: 7460 - DNA, 14 bp, Artificial Sequence
  Description of Artificial Sequence: Synthetic oligonucleotide
tgctctttgtcaaa

SEQ ID NO: 7461 - DNA, 14 bp, Artificial Sequence
  Description of Artificial Sequence: Synthetic oligonucleotide
atgctctttgtcaa

SEQ ID NO: 7462 - DNA, 14 bp, Artificial Sequence
  Description of Artificial Sequence: Synthetic oligonucleotide
catgctctttgtca

SEQ ID NO: 7463 - DNA, 14 bp, Artificial Sequence
  Description of Artificial Sequence: Synthetic oligonucleotide
gcatgctctttgtc

SEQ ID NO: 7464 - DNA, 14 bp, Artificial Sequence
  Description of Artificial Sequence: Synthetic oligonucleotide
ggcatgctctttgt

SEQ ID NO: 7465 - DNA, 14 bp, Artificial Sequence
  Description of Artificial Sequence: Synthetic oligonucleotide
tggcatgctctttg

SEQ ID NO: 7466 - DNA, 14 bp, Artificial Sequence
  Description of Artificial Sequence: Synthetic oligonucleotide
gtggcatgctcttt

SEQ ID NO: 7467 - DNA, 14 bp, Artificial Sequence
  Description of Artificial Sequence: Synthetic oligonucleotide
tgtggcatgctctt

SEQ ID NO: 7468 - DNA, 14 bp, Artificial Sequence
  Description of Artificial Sequence: Synthetic oligonucleotide
gtgtggcatgctct

SEQ ID NO: 7469 - DNA, 14 bp, Artificial Sequence
  Description of Artificial Sequence: Synthetic oligonucleotide
agtgtggcatgctc

SEQ ID NO: 7470 - DNA, 14 bp, Artificial Sequence
  Description of Artificial Sequence: Synthetic oligonucleotide
tagtgtggcatgct

SEQ ID NO: 7471 - DNA, 14 bp, Artificial Sequence
  Description of Artificial Sequence: Synthetic oligonucleotide
ttagtgtggcatgc

SEQ ID NO: 7472 - DNA, 14 bp, Artificial Sequence
  Description of Artificial Sequence: Synthetic oligonucleotide
attagtgtggcatg

SEQ ID NO: 7473 - DNA, 14 bp, Artificial Sequence
  Description of Artificial Sequence: Synthetic oligonucleotide
tattagtgtggcat

SEQ ID NO: 7474 - DNA, 14 bp, Artificial Sequence
  Description of Artificial Sequence: Synthetic oligonucleotide
gtattagtgtggca

SEQ ID NO: 7475 - DNA, 14 bp, Artificial Sequence
  Description of Artificial Sequence: Synthetic oligonucleotide
agtattagtgtggc

SEQ ID NO: 7476 - DNA, 14 bp, Artificial Sequence
  Description of Artificial Sequence: Synthetic oligonucleotide
tagtattagtgtgg

SEQ ID NO: 7477 - DNA, 14 bp, Artificial Sequence
  Description of Artificial Sequence: Synthetic oligonucleotide
gtagtattagtgtg

SEQ ID NO: 7478 - DNA, 14 bp, Artificial Sequence
  Description of Artificial Sequence: Synthetic oligonucleotide
tgtagtattagtgt

SEQ ID NO: 7479 - DNA, 14 bp, Artificial Sequence
  Description of Artificial Sequence: Synthetic oligonucleotide
ctgtagtattagtg

SEQ ID NO: 7480 - DNA, 14 bp, Artificial Sequence
  Description of Artificial Sequence: Synthetic oligonucleotide
actgtagtattagt

SEQ ID NO: 7481 - DNA, 14 bp, Artificial Sequence
  Description of Artificial Sequence: Synthetic oligonucleotide
gactgtagtattag

SEQ ID NO: 7482 - DNA, 14 bp, Artificial Sequence
  Description of Artificial Sequence: Synthetic oligonucleotide
tgactgtagtatta

SEQ ID NO: 7483 - DNA, 14 bp, Artificial Sequence
  Description of Artificial Sequence: Synthetic oligonucleotide
ttgactgtagtatt

SEQ ID NO: 7484 - DNA, 14 bp, Artificial Sequence
  Description of Artificial Sequence: Synthetic oligonucleotide
gttgactgtagtat

SEQ ID NO: 7485 - DNA, 14 bp, Artificial Sequence
  Description of Artificial Sequence: Synthetic oligonucleotide
tgttgactgtagta

SEQ ID NO: 7486 - DNA, 14 bp, Artificial Sequence
  Description of Artificial Sequence: Synthetic oligonucleotide
ttgttgactgtagt

SEQ ID NO: 7487 - DNA, 14 bp, Artificial Sequence
  Description of Artificial Sequence: Synthetic oligonucleotide
gttgttgactgtag

SEQ ID NO: 7488 - DNA, 14 bp, Artificial Sequence
  Description of Artificial Sequence: Synthetic oligonucleotide
tgttgttgactgta

SEQ ID NO: 7489 - DNA, 14 bp, Artificial Sequence
  Description of Artificial Sequence: Synthetic oligonucleotide
ctgttgttgactgt

SEQ ID NO: 7490 - DNA, 14 bp, Artificial Sequence
  Description of Artificial Sequence: Synthetic oligonucleotide
gctgttgttgactg

SEQ ID NO: 7491 - DNA, 14 bp, Artificial Sequence
  Description of Artificial Sequence: Synthetic oligonucleotide
ggctgttgttgact

SEQ ID NO: 7492 - DNA, 14 bp, Artificial Sequence
  Description of Artificial Sequence: Synthetic oligonucleotide
gggctgttgttgac

SEQ ID NO: 7493 - DNA, 14 bp, Artificial Sequence
  Description of Artificial Sequence: Synthetic oligonucleotide
tgggctgttgttga

SEQ ID NO: 7494 - DNA, 14 bp, Artificial Sequence
  Description of Artificial Sequence: Synthetic oligonucleotide
ctgggctgttgttg

SEQ ID NO: 7495 - DNA, 14 bp, Artificial Sequence
  Description of Artificial Sequence: Synthetic oligonucleotide
tctgggctgttgtt

SEQ ID NO: 7496 - DNA, 14 bp, Artificial Sequence
  Description of Artificial Sequence: Synthetic oligonucleotide
ctctgggctgttgt

SEQ ID NO: 7497 - DNA, 14 bp, Artificial Sequence
  Description of Artificial Sequence: Synthetic oligonucleotide
tctctgggctgttg

SEQ ID NO: 7498 - DNA, 14 bp, Artificial Sequence
  Description of Artificial Sequence: Synthetic oligonucleotide
ttctctgggctgtt

SEQ ID NO: 7499 - DNA, 14 bp, Artificial Sequence
  Description of Artificial Sequence: Synthetic oligonucleotide
gttctctgggctgt

SEQ ID NO: 7500 - DNA, 14 bp, Artificial Sequence
  Description of Artificial Sequence: Synthetic oligonucleotide
tgttctctgggctg

SEQ ID NO: 7501 - DNA, 14 bp, Artificial Sequence
  Description of Artificial Sequence: Synthetic oligonucleotide
ttgttctctgggct

SEQ ID NO: 7502 - DNA, 14 bp, Artificial Sequence
  Description of Artificial Sequence: Synthetic oligonucleotide
attgttctctgggc

SEQ ID NO: 7503 - DNA, 14 bp, Artificial Sequence
  Description of Artificial Sequence: Synthetic oligonucleotide
aattgttctctggg

SEQ ID NO: 7504 - DNA, 14 bp, Artificial Sequence
  Description of Artificial Sequence: Synthetic oligonucleotide
taattgttctctgg

SEQ ID NO: 7505 - DNA, 14 bp, Artificial Sequence
  Description of Artificial Sequence: Synthetic oligonucleotide
gtaattgttctctg

SEQ ID NO: 7506 - DNA, 14 bp, Artificial Sequence
  Description of Artificial Sequence: Synthetic oligonucleotide
agtaattgttctct

SEQ ID NO: 7507 - DNA, 14 bp, Artificial Sequence
  Description of Artificial Sequence: Synthetic oligonucleotide
tagtaattgttctc

SEQ ID NO: 7508 - DNA, 14 bp, Artificial Sequence
  Description of Artificial Sequence: Synthetic oligonucleotide
atagtaattgttct

SEQ ID NO: 7509 - DNA, 14 bp, Artificial Sequence
  Description of Artificial Sequence: Synthetic oligonucleotide
catagtaattgttc

SEQ ID NO: 7510 - DNA, 14 bp, Artificial Sequence
  Description of Artificial Sequence: Synthetic oligonucleotide
acatagtaattgtt

SEQ ID NO: 7511 - DNA, 14 bp, Artificial Sequence
  Description of Artificial Sequence: Synthetic oligonucleotide
gacatagtaattgt

SEQ ID NO: 7512 - DNA, 14 bp, Artificial Sequence
  Description of Artificial Sequence: Synthetic oligonucleotide
tgacatagtaattg

SEQ ID NO: 7513 - DNA, 14 bp, Artificial Sequence
  Description of Artificial Sequence: Synthetic oligonucleotide
ctgacatagtaatt

SEQ ID NO: 7514 - DNA, 14 bp, Artificial Sequence
  Description of Artificial Sequence: Synthetic oligonucleotide
gctgacatagtaat

SEQ ID NO: 7515 - DNA, 14 bp, Artificial Sequence
  Description of Artificial Sequence: Synthetic oligonucleotide
agctgacatagtaa

SEQ ID NO: 7516 - DNA, 14 bp, Artificial Sequence
  Description of Artificial Sequence: Synthetic oligonucleotide
cagctgacatagta

SEQ ID NO: 7517 - DNA, 14 bp, Artificial Sequence
  Description of Artificial Sequence: Synthetic oligonucleotide
ccagctgacatagt

SEQ ID NO: 7518 - DNA, 14 bp, Artificial Sequence
  Description of Artificial Sequence: Synthetic oligonucleotide
tccagctgacatag

SEQ ID NO: 7519 - DNA, 14 bp, Artificial Sequence
  Description of Artificial Sequence: Synthetic oligonucleotide
ctccagctgacata

SEQ ID NO: 7520 - DNA, 14 bp, Artificial Sequence
  Description of Artificial Sequence: Synthetic oligonucleotide
cctccagctgacat

SEQ ID NO: 7521 - DNA, 14 bp, Artificial Sequence
  Description of Artificial Sequence: Synthetic oligonucleotide
gcctccagctgaca

SEQ ID NO: 7522 - DNA, 14 bp, Artificial Sequence
  Description of Artificial Sequence: Synthetic oligonucleotide
agcctccagctgac

SEQ ID NO: 7523 - DNA, 14 bp, Artificial Sequence
  Description of Artificial Sequence: Synthetic oligonucleotide
tagcctccagctga

SEQ ID NO: 7524 - DNA, 14 bp, Artificial Sequence
  Description of Artificial Sequence: Synthetic oligonucleotide
atagcctccagctg

SEQ ID NO: 7525 - DNA, 14 bp, Artificial Sequence
  Description of Artificial Sequence: Synthetic oligonucleotide
tatagcctccagct

SEQ ID NO: 7526 - DNA, 14 bp, Artificial Sequence
  Description of Artificial Sequence: Synthetic oligonucleotide
atatagcctccagc

SEQ ID NO: 7527 - DNA, 14 bp, Artificial Sequence
  Description of Artificial Sequence: Synthetic oligonucleotide
aatatagcctccag

SEQ ID NO: 7528 - DNA, 14 bp, Artificial Sequence
  Description of Artificial Sequence: Synthetic oligonucleotide
taatatagcctcca

SEQ ID NO: 7529 - DNA, 14 bp, Artificial Sequence
  Description of Artificial Sequence: Synthetic oligonucleotide
ataatatagcctcc

SEQ ID NO: 7530 - DNA, 14 bp, Artificial Sequence
  Description of Artificial Sequence: Synthetic oligonucleotide
cataatatagcctc

SEQ ID NO: 7531 - DNA, 14 bp, Artificial Sequence
  Description of Artificial Sequence: Synthetic oligonucleotide
tcataatatagcct

SEQ ID NO: 7532 - DNA, 14 bp, Artificial Sequence
  Description of Artificial Sequence: Synthetic oligonucleotide
atcataatatagcc

SEQ ID NO: 7533 - DNA, 14 bp, Artificial Sequence
  Description of Artificial Sequence: Synthetic oligonucleotide
aatcataatatagc

SEQ ID NO: 7534 - DNA, 14 bp, Artificial Sequence
  Description of Artificial Sequence: Synthetic oligonucleotide
gaatcataatatag

SEQ ID NO: 7535 - DNA, 14 bp, Artificial Sequence
  Description of Artificial Sequence: Synthetic oligonucleotide
agaatcataatata

SEQ ID NO: 7536 - DNA, 14 bp, Artificial Sequence
  Description of Artificial Sequence: Synthetic oligonucleotide
tagaatcataatat

SEQ ID NO: 7537 - DNA, 14 bp, Artificial Sequence
  Description of Artificial Sequence: Synthetic oligonucleotide
ttagaatcataata

SEQ ID NO: 7538 - DNA, 14 bp, Artificial Sequence
  Description of Artificial Sequence: Synthetic oligonucleotide
tttagaatcataat

SEQ ID NO: 7539 - DNA, 14 bp, Artificial Sequence
  Description of Artificial Sequence: Synthetic oligonucleotide
atttagaatcataa

SEQ ID NO: 7540 - DNA, 14 bp, Artificial Sequence
  Description of Artificial Sequence: Synthetic oligonucleotide
aatttagaatcata

SEQ ID NO: 7541 - DNA, 14 bp, Artificial Sequence
  Description of Artificial Sequence: Synthetic oligonucleotide
gaatttagaatcat

SEQ ID NO: 7542 - DNA, 14 bp, Artificial Sequence
  Description of Artificial Sequence: Synthetic oligonucleotide
agaatttagaatca

SEQ ID NO: 7543 - DNA, 14 bp, Artificial Sequence
  Description of Artificial Sequence: Synthetic oligonucleotide
aagaatttagaatc

SEQ ID NO: 7544 - DNA, 14 bp, Artificial Sequence
  Description of Artificial Sequence: Synthetic oligonucleotide
taagaatttagaat

SEQ ID NO: 7545 - DNA, 14 bp, Artificial Sequence
  Description of Artificial Sequence: Synthetic oligonucleotide
ttaagaatttagaa

SEQ ID NO: 7546 - DNA, 14 bp, Artificial Sequence
  Description of Artificial Sequence: Synthetic oligonucleotide
tttaagaatttaga

SEQ ID NO: 7547 - DNA, 14 bp, Artificial Sequence
  Description of Artificial Sequence: Synthetic oligonucleotide
ctttaagaatttag

SEQ ID NO: 7548 - DNA, 14 bp, Artificial Sequence
  Description of Artificial Sequence: Synthetic oligonucleotide
cctttaagaattta

SEQ ID NO: 7549 - DNA, 14 bp, Artificial Sequence
  Description of Artificial Sequence: Synthetic oligonucleotide
acctttaagaattt

SEQ ID NO: 7550 - DNA, 14 bp, Artificial Sequence
  Description of Artificial Sequence: Synthetic oligonucleotide
aacctttaagaatt

SEQ ID NO: 7551 - DNA, 14 bp, Artificial Sequence
  Description of Artificial Sequence: Synthetic oligonucleotide
aaacctttaagaat

SEQ ID NO: 7552 - DNA, 14 bp, Artificial Sequence
  Description of Artificial Sequence: Synthetic oligonucleotide
aaaacctttaagaa

SEQ ID NO: 7553 - DNA, 14 bp, Artificial Sequence
  Description of Artificial Sequence: Synthetic oligonucleotide
aaaaacctttaaga

SEQ ID NO: 7554 - DNA, 14 bp, Artificial Sequence
  Description of Artificial Sequence: Synthetic oligonucleotide
aaaaaacctttaag

SEQ ID NO: 7555 - DNA, 14 bp, Artificial Sequence
  Description of Artificial Sequence: Synthetic oligonucleotide
aaaaaaacctttaa

SEQ ID NO: 7556 - DNA, 14 bp, Artificial Sequence
  Description of Artificial Sequence: Synthetic oligonucleotide
gaaaaaaaccttta

SEQ ID NO: 7557 - DNA, 14 bp, Artificial Sequence
  Description of Artificial Sequence: Synthetic oligonucleotide
ggaaaaaaaccttt

SEQ ID NO: 7558 - DNA, 14 bp, Artificial Sequence
  Description of Artificial Sequence: Synthetic oligonucleotide
gggaaaaaaacctt

SEQ ID NO: 7559 - DNA, 14 bp, Artificial Sequence
  Description of Artificial Sequence: Synthetic oligonucleotide
agggaaaaaaacct

SEQ ID NO: 7560 - DNA, 14 bp, Artificial Sequence
  Description of Artificial Sequence: Synthetic oligonucleotide
gagggaaaaaaacc

SEQ ID NO: 7561 - DNA, 14 bp, Artificial Sequence
  Description of Artificial Sequence: Synthetic oligonucleotide
ggagggaaaaaaac

SEQ ID NO: 7562 - DNA, 14 bp, Artificial Sequence
  Description of Artificial Sequence: Synthetic oligonucleotide
tggagggaaaaaaa

SEQ ID NO: 7563 - DNA, 14 bp, Artificial Sequence
  Description of Artificial Sequence: Synthetic oligonucleotide
atggagggaaaaaa

SEQ ID NO: 7564 - DNA, 14 bp, Artificial Sequence
  Description of Artificial Sequence: Synthetic oligonucleotide
tatggagggaaaaa

SEQ ID NO: 7565 - DNA, 14 bp, Artificial Sequence
  Description of Artificial Sequence: Synthetic oligonucleotide
ttatggagggaaaa

SEQ ID NO: 7566 - DNA, 14 bp, Artificial Sequence
  Description of Artificial Sequence: Synthetic oligonucleotide
tttatggagggaaa

SEQ ID NO: 7567 - DNA, 14 bp, Artificial Sequence
  Description of Artificial Sequence: Synthetic oligonucleotide
atttatggagggaa

SEQ ID NO: 7568 - DNA, 14 bp, Artificial Sequence
  Description of Artificial Sequence: Synthetic oligonucleotide
gatttatggaggga

SEQ ID NO: 7569 - DNA, 14 bp, Artificial Sequence
  Description of Artificial Sequence: Synthetic oligonucleotide
tgatttatggaggg

SEQ ID NO: 7570 - DNA, 14 bp, Artificial Sequence
  Description of Artificial Sequence: Synthetic oligonucleotide
ttgatttatggagg

SEQ ID NO: 7571 - DNA, 14 bp, Artificial Sequence
  Description of Artificial Sequence: Synthetic oligonucleotide
tttgatttatggag

SEQ ID NO: 7572 - DNA, 14 bp, Artificial Sequence
  Description of Artificial Sequence: Synthetic oligonucleotide
ttttgatttatgga

SEQ ID NO: 7573 - DNA, 14 bp, Artificial Sequence
  Description of Artificial Sequence: Synthetic oligonucleotide
tttttgatttatgg

SEQ ID NO: 7574 - DNA, 14 bp, Artificial Sequence
  Description of Artificial Sequence: Synthetic oligonucleotide
atttttgatttatg

SEQ ID NO: 7575 - DNA, 14 bp, Artificial Sequence
  Description of Artificial Sequence: Synthetic oligonucleotide
aatttttgatttat

SEQ ID NO: 7576 - DNA, 14 bp, Artificial Sequence
  Description of Artificial Sequence: Synthetic oligonucleotide
taatttttgattta

SEQ ID NO: 7577 - DNA, 14 bp, Artificial Sequence
  Description of Artificial Sequence: Synthetic oligonucleotide
gtaatttttgattt

SEQ ID NO: 7578 - DNA, 14 bp, Artificial Sequence
  Description of Artificial Sequence: Synthetic oligonucleotide
ggtaatttttgatt

SEQ ID NO: 7579 - DNA, 14 bp, Artificial Sequence
  Description of Artificial Sequence: Synthetic oligonucleotide
aggtaatttttgat

SEQ ID NO: 7580 - DNA, 14 bp, Artificial Sequence
  Description of Artificial Sequence: Synthetic oligonucleotide
aaggtaatttttga

SEQ ID NO: 7581 - DNA, 14 bp, Artificial Sequence
  Description of Artificial Sequence: Synthetic oligonucleotide
taaggtaatttttg

SEQ ID NO: 7582 - DNA, 14 bp, Artificial Sequence
  Description of Artificial Sequence: Synthetic oligonucleotide
ataaggtaattttt

SEQ ID NO: 7583 - DNA, 14 bp, Artificial Sequence
  Description of Artificial Sequence: Synthetic oligonucleotide
cataaggtaatttt

SEQ ID NO: 7584 - DNA, 14 bp, Artificial Sequence
  Description of Artificial Sequence: Synthetic oligonucleotide
acataaggtaattt

SEQ ID NO: 7585 - DNA, 14 bp, Artificial Sequence
  Description of Artificial Sequence: Synthetic oligonucleotide
tacataaggtaatt

SEQ ID NO: 7586 - DNA, 14 bp, Artificial Sequence
  Description of Artificial Sequence: Synthetic oligonucleotide
ttacataaggtaat

SEQ ID NO: 7587 - DNA, 14 bp, Artificial Sequence
  Description of Artificial Sequence: Synthetic oligonucleotide
tttacataaggtaa

SEQ ID NO: 7588 - DNA, 14 bp, Artificial Sequence
  Description of Artificial Sequence: Synthetic oligonucleotide
gtttacataaggta

SEQ ID NO: 7589 - DNA, 14 bp, Artificial Sequence
  Description of Artificial Sequence: Synthetic oligonucleotide
ggtttacataaggt

SEQ ID NO: 7590 - DNA, 14 bp, Artificial Sequence
  Description of Artificial Sequence: Synthetic oligonucleotide
tggtttacataagg

SEQ ID NO: 7591 - DNA, 14 bp, Artificial Sequence
  Description of Artificial Sequence: Synthetic oligonucleotide
ttggtttacataag

SEQ ID NO: 7592 - DNA, 14 bp, Artificial Sequence
  Description of Artificial Sequence: Synthetic oligonucleotide
tttggtttacataa

SEQ ID NO: 7593 - DNA, 14 bp, Artificial Sequence
  Description of Artificial Sequence: Synthetic oligonucleotide
ttttggtttacata

SEQ ID NO: 7594 - DNA, 14 bp, Artificial Sequence
  Description of Artificial Sequence: Synthetic oligonucleotide
tttttggtttacat

SEQ ID NO: 7595 - DNA, 14 bp, Artificial Sequence
  Description of Artificial Sequence: Synthetic oligonucleotide
atttttggtttaca

SEQ ID NO: 7596 - DNA, 14 bp, Artificial Sequence
  Description of Artificial Sequence: Synthetic oligonucleotide
aatttttggtttac

SEQ ID NO: 7597 - DNA, 14 bp, Artificial Sequence
  Description of Artificial Sequence: Synthetic oligonucleotide
taatttttggttta

SEQ ID NO: 7598 - DNA, 14 bp, Artificial Sequence
  Description of Artificial Sequence: Synthetic oligonucleotide
ctaatttttggttt

SEQ ID NO: 7599 - DNA, 14 bp, Artificial Sequence
  Description of Artificial Sequence: Synthetic oligonucleotide
actaatttttggtt

SEQ ID NO: 7600 - DNA, 14 bp, Artificial Sequence
  Description of Artificial Sequence: Synthetic oligonucleotide
aactaatttttggt

SEQ ID NO: 7601 - DNA, 14 bp, Artificial Sequence
  Description of Artificial Sequence: Synthetic oligonucleotide
caactaatttttgg

SEQ ID NO: 7602 - DNA, 14 bp, Artificial Sequence
  Description of Artificial Sequence: Synthetic oligonucleotide
ccaactaatttttg

SEQ ID NO: 7603 - DNA, 14 bp, Artificial Sequence
  Description of Artificial Sequence: Synthetic oligonucleotide
accaactaattttt

SEQ ID NO: 7604 - DNA, 14 bp, Artificial Sequence
  Description of Artificial Sequence: Synthetic oligonucleotide
taccaactaatttt

SEQ ID NO: 7605 - DNA, 14 bp, Artificial Sequence
  Description of Artificial Sequence: Synthetic oligonucleotide
ataccaactaattt

SEQ ID NO: 7606 - DNA, 14 bp, Artificial Sequence
  Description of Artificial Sequence: Synthetic oligonucleotide
aataccaactaatt

SEQ ID NO: 7607 - DNA, 14 bp, Artificial Sequence
  Description of Artificial Sequence: Synthetic oligonucleotide
aaataccaactaat

SEQ ID NO: 7608 - DNA, 14 bp, Artificial Sequence
  Description of Artificial Sequence: Synthetic oligonucleotide
taaataccaactaa

SEQ ID NO: 7609 - DNA, 14 bp, Artificial Sequence
  Description of Artificial Sequence: Synthetic oligonucleotide
ataaataccaacta

SEQ ID NO: 7610 - DNA, 14 bp, Artificial Sequence
  Description of Artificial Sequence: Synthetic oligonucleotide
cataaataccaact

SEQ ID NO: 7611 - DNA, 14 bp, Artificial Sequence
  Description of Artificial Sequence: Synthetic oligonucleotide
ccataaataccaac

SEQ ID NO: 7612 - DNA, 14 bp, Artificial Sequence
  Description of Artificial Sequence: Synthetic oligonucleotide
accataaataccaa

SEQ ID NO: 7613 - DNA, 14 bp, Artificial Sequence
  Description of Artificial Sequence: Synthetic oligonucleotide
gaccataaatacca

SEQ ID NO: 7614 - DNA, 14 bp, Artificial Sequence
  Description of Artificial Sequence: Synthetic oligonucleotide
tgaccataaatacc

SEQ ID NO: 7615 - DNA, 14 bp, Artificial Sequence
  Description of Artificial Sequence: Synthetic oligonucleotide
atgaccataaatac

SEQ ID NO: 7616 - DNA, 14 bp, Artificial Sequence
  Description of Artificial Sequence: Synthetic oligonucleotide
catgaccataaata

SEQ ID NO: 7617 - DNA, 14 bp, Artificial Sequence
  Description of Artificial Sequence: Synthetic oligonucleotide
tcatgaccataaat

SEQ ID NO: 7618 - DNA, 14 bp, Artificial Sequence
  Description of Artificial Sequence: Synthetic oligonucleotide
atcatgaccataaa

SEQ ID NO: 7619 - DNA, 14 bp, Artificial Sequence
  Description of Artificial Sequence: Synthetic oligonucleotide
gatcatgaccataa

SEQ ID NO: 7620 - DNA, 14 bp, Artificial Sequence
  Description of Artificial Sequence: Synthetic oligonucleotide
agatcatgaccata

SEQ ID NO: 7621 - DNA, 14 bp, Artificial Sequence
  Description of Artificial Sequence: Synthetic oligonucleotide
aagatcatgaccat

SEQ ID NO: 7622 - DNA, 14 bp, Artificial Sequence
  Description of Artificial Sequence: Synthetic oligonucleotide
taagatcatgacca

SEQ ID NO: 7623 - DNA, 14 bp, Artificial Sequence
  Description of Artificial Sequence: Synthetic oligonucleotide
ttaagatcatgacc

SEQ ID NO: 7624 - DNA, 14 bp, Artificial Sequence
  Description of Artificial Sequence: Synthetic oligonucleotide
attaagatcatgac

SEQ ID NO: 7625 - DNA, 14 bp, Artificial Sequence
  Description of Artificial Sequence: Synthetic oligonucleotide
aattaagatcatga

SEQ ID NO: 7626 - DNA, 14 bp, Artificial Sequence
  Description of Artificial Sequence: Synthetic oligonucleotide
gaattaagatcatg

SEQ ID NO: 7627 - DNA, 14 bp, Artificial Sequence
  Description of Artificial Sequence: Synthetic oligonucleotide
agaattaagatcat

SEQ ID NO: 7628 - DNA, 14 bp, Artificial Sequence
  Description of Artificial Sequence: Synthetic oligonucleotide
gagaattaagatca

SEQ ID NO: 7629 - DNA, 14 bp, Artificial Sequence
  Description of Artificial Sequence: Synthetic oligonucleotide
tgagaattaagatc

SEQ ID NO: 7630 - DNA, 14 bp, Artificial Sequence
  Description of Artificial Sequence: Synthetic oligonucleotide
ttgagaattaagat

SEQ ID NO: 7631 - DNA, 14 bp, Artificial Sequence
  Description of Artificial Sequence: Synthetic oligonucleotide
cttgagaattaaga

SEQ ID NO: 7632 - DNA, 14 bp, Artificial Sequence
  Description of Artificial Sequence: Synthetic oligonucleotide
acttgagaattaag

SEQ ID NO: 7633 - DNA, 14 bp, Artificial Sequence
  Description of Artificial Sequence: Synthetic oligonucleotide
aacttgagaattaa

SEQ ID NO: 7634 - DNA, 14 bp, Artificial Sequence
  Description of Artificial Sequence: Synthetic oligonucleotide
aaacttgagaatta

SEQ ID NO: 7635 - DNA, 14 bp, Artificial Sequence
  Description of Artificial Sequence: Synthetic oligonucleotide
taaacttgagaatt

SEQ ID NO: 7636 - DNA, 14 bp, Artificial Sequence
  Description of Artificial Sequence: Synthetic oligonucleotide
ctaaacttgagaat

SEQ ID NO: 7637 - DNA, 14 bp, Artificial Sequence
  Description of Artificial Sequence: Synthetic oligonucleotide
gctaaacttgagaa

SEQ ID NO: 7638 - DNA, 14 bp, Artificial Sequence
  Description of Artificial Sequence: Synthetic oligonucleotide
agctaaacttgaga

SEQ ID NO: 7639 - DNA, 14 bp, Artificial Sequence
  Description of Artificial Sequence: Synthetic oligonucleotide
aagctaaacttgag

SEQ ID NO: 7640 - DNA, 14 bp, Artificial Sequence
  Description of Artificial Sequence: Synthetic oligonucleotide
taagctaaacttga

SEQ ID NO: 7641 - DNA, 14 bp, Artificial Sequence
  Description of Artificial Sequence: Synthetic oligonucleotide
ttaagctaaacttg

SEQ ID NO: 7642 - DNA, 14 bp, Artificial Sequence
  Description of Artificial Sequence: Synthetic oligonucleotide
attaagctaaactt

SEQ ID NO: 7643 - DNA, 14 bp, Artificial Sequence
  Description of Artificial Sequence: Synthetic oligonucleotide
gattaagctaaact

SEQ ID NO: 7644 - DNA, 14 bp, Artificial Sequence
  Description of Artificial Sequence: Synthetic oligonucleotide
agattaagctaaac

SEQ ID NO: 7645 - DNA, 14 bp, Artificial Sequence
  Description of Artificial Sequence: Synthetic oligonucleotide
aagattaagctaaa

SEQ ID NO: 7646 - DNA, 14 bp, Artificial Sequence
  Description of Artificial Sequence: Synthetic oligonucleotide
caagattaagctaa

SEQ ID NO: 7647 - DNA, 14 bp, Artificial Sequence
  Description of Artificial Sequence: Synthetic oligonucleotide
acaagattaagcta

SEQ ID NO: 7648 - DNA, 14 bp, Artificial Sequence
  Description of Artificial Sequence: Synthetic oligonucleotide
tacaagattaagct

SEQ ID NO: 7649 - DNA, 14 bp, Artificial Sequence
  Description of Artificial Sequence: Synthetic oligonucleotide
atacaagattaagc

SEQ ID NO: 7650 - DNA, 14 bp, Artificial Sequence
  Description of Artificial Sequence: Synthetic oligonucleotide
aatacaagattaag

SEQ ID NO: 7651 - DNA, 14 bp, Artificial Sequence
  Description of Artificial Sequence: Synthetic oligonucleotide
aaatacaagattaa

SEQ ID NO: 7652 - DNA, 14 bp, Artificial Sequence
  Description of Artificial Sequence: Synthetic oligonucleotide
gaaatacaagatta

SEQ ID NO: 7653 - DNA, 14 bp, Artificial Sequence
  Description of Artificial Sequence: Synthetic oligonucleotide
tgaaatacaagatt

SEQ ID NO: 7654 - DNA, 14 bp, Artificial Sequence
  Description of Artificial Sequence: Synthetic oligonucleotide
atgaaatacaagat

SEQ ID NO: 7655 - DNA, 14 bp, Artificial Sequence
  Description of Artificial Sequence: Synthetic oligonucleotide
aatgaaatacaaga

SEQ ID NO: 7656 - DNA, 14 bp, Artificial Sequence
  Description of Artificial Sequence: Synthetic oligonucleotide
caatgaaatacaag

SEQ ID NO: 7657 - DNA, 14 bp, Artificial Sequence
  Description of Artificial Sequence: Synthetic oligonucleotide
acaatgaaatacaa

SEQ ID NO: 7658 - DNA, 14 bp, Artificial Sequence
  Description of Artificial Sequence: Synthetic oligonucleotide
aacaatgaaataca

SEQ ID NO: 7659 - DNA, 14 bp, Artificial Sequence
  Description of Artificial Sequence: Synthetic oligonucleotide
aaacaatgaaatac

SEQ ID NO: 7660 - DNA, 14 bp, Artificial Sequence
  Description of Artificial Sequence: Synthetic oligonucleotide
caaacaatgaaata

SEQ ID NO: 7661 - DNA, 14 bp, Artificial Sequence
  Description of Artificial Sequence: Synthetic oligonucleotide
acaaacaatgaaat

SEQ ID NO: 7662 - DNA, 14 bp, Artificial Sequence
  Description of Artificial Sequence: Synthetic oligonucleotide
gacaaacaatgaaa

SEQ ID NO: 7663 - DNA, 14 bp, Artificial Sequence
  Description of Artificial Sequence: Synthetic oligonucleotide
agacaaacaatgaa

SEQ ID NO: 7664 - DNA, 14 bp, Artificial Sequence
  Description of Artificial Sequence: Synthetic oligonucleotide
aagacaaacaatga

SEQ ID NO: 7665 - DNA, 14 bp, Artificial Sequence
  Description of Artificial Sequence: Synthetic oligonucleotide
gaagacaaacaatg

SEQ ID NO: 7666 - DNA, 14 bp, Artificial Sequence
  Description of Artificial Sequence: Synthetic oligonucleotide
agaagacaaacaat

SEQ ID NO: 7667 - DNA, 14 bp, Artificial Sequence
  Description of Artificial Sequence: Synthetic oligonucleotide
tagaagacaaacaa

SEQ ID NO: 7668 - DNA, 14 bp, Artificial Sequence
  Description of Artificial Sequence: Synthetic oligonucleotide
ttagaagacaaaca

SEQ ID NO: 7669 - DNA, 14 bp, Artificial Sequence
  Description of Artificial Sequence: Synthetic oligonucleotide
attagaagacaaac

SEQ ID NO: 7670 - DNA, 14 bp, Artificial Sequence
  Description of Artificial Sequence: Synthetic oligonucleotide
tattagaagacaaa

SEQ ID NO: 7671 - DNA, 14 bp, Artificial Sequence
  Description of Artificial Sequence: Synthetic oligonucleotide
atattagaagacaa

SEQ ID NO: 7672 - DNA, 14 bp, Artificial Sequence
  Description of Artificial Sequence: Synthetic oligonucleotide
catattagaagaca

SEQ ID NO: 7673 - DNA, 14 bp, Artificial Sequence
  Description of Artificial Sequence: Synthetic oligonucleotide
tcatattagaagac

SEQ ID NO: 7674 - DNA, 14 bp, Artificial Sequence
  Description of Artificial Sequence: Synthetic oligonucleotide
gtcatattagaaga

SEQ ID NO: 7675 - DNA, 14 bp, Artificial Sequence
  Description of Artificial Sequence: Synthetic oligonucleotide
tgtcatattagaag

SEQ ID NO: 7676 - DNA, 14 bp, Artificial Sequence
  Description of Artificial Sequence: Synthetic oligonucleotide
ctgtcatattagaa

SEQ ID NO: 7677 - DNA, 14 bp, Artificial Sequence
  Description of Artificial Sequence: Synthetic oligonucleotide
gctgtcatattaga

SEQ ID NO: 7678 - DNA, 14 bp, Artificial Sequence
  Description of Artificial Sequence: Synthetic oligonucleotide
agctgtcatattag

SEQ ID NO: 7679 - DNA, 14 bp, Artificial Sequence
  Description of Artificial Sequence: Synthetic oligonucleotide
aagctgtcatatta

SEQ ID NO: 7680 - DNA, 14 bp, Artificial Sequence
  Description of Artificial Sequence: Synthetic oligonucleotide
taagctgtcatatt

SEQ ID NO: 7681 - DNA, 14 bp, Artificial Sequence
  Description of Artificial Sequence: Synthetic oligonucleotide
ttaagctgtcatat

SEQ ID NO: 7682 - DNA, 14 bp, Artificial Sequence
  Description of Artificial Sequence: Synthetic oligonucleotide
tttaagctgtcata

SEQ ID NO: 7683 - DNA, 14 bp, Artificial Sequence
  Description of Artificial Sequence: Synthetic oligonucleotide
atttaagctgtcat

SEQ ID NO: 7684 - DNA, 14 bp, Artificial Sequence
  Description of Artificial Sequence: Synthetic oligonucleotide
aatttaagctgtca

SEQ ID NO: 7685 - DNA, 14 bp, Artificial Sequence
  Description of Artificial Sequence: Synthetic oligonucleotide
gaatttaagctgtc

SEQ ID NO: 7686 - DNA, 14 bp, Artificial Sequence
  Description of Artificial Sequence: Synthetic oligonucleotide
tgaatttaagctgt

SEQ ID NO: 7687 - DNA, 14 bp, Artificial Sequence
  Description of Artificial Sequence: Synthetic oligonucleotide
ctgaatttaagctg

SEQ ID NO: 7688 - DNA, 14 bp, Artificial Sequence
  Description of Artificial Sequence: Synthetic oligonucleotide
tctgaatttaagct

SEQ ID NO: 7689 - DNA, 14 bp, Artificial Sequence
  Description of Artificial Sequence: Synthetic oligonucleotide
atctgaatttaagc

SEQ ID NO: 7690 - DNA, 14 bp, Artificial Sequence
  Description of Artificial Sequence: Synthetic oligonucleotide
aatctgaatttaag

SEQ ID NO: 7691 - DNA, 14 bp, Artificial Sequence
  Description of Artificial Sequence: Synthetic oligonucleotide
aaatctgaatttaa

SEQ ID NO: 7692 - DNA, 14 bp, Artificial Sequence
  Description of Artificial Sequence: Synthetic oligonucleotide
aaaatctgaattta

SEQ ID NO: 7693 - DNA, 14 bp, Artificial Sequence
  Description of Artificial Sequence: Synthetic oligonucleotide
aaaaatctgaattt

SEQ ID NO: 7694 - DNA, 14 bp, Artificial Sequence
  Description of Artificial Sequence: Synthetic oligonucleotide
taaaaatctgaatt

SEQ ID NO: 7695 - DNA, 14 bp, Artificial Sequence
  Description of Artificial Sequence: Synthetic oligonucleotide
ttaaaaatctgaat

SEQ ID NO: 7696 - DNA, 14 bp, Artificial Sequence
  Description of Artificial Sequence: Synthetic oligonucleotide
cttaaaaatctgaa

SEQ ID NO: 7697 - DNA, 14 bp, Artificial Sequence
  Description of Artificial Sequence: Synthetic oligonucleotide
acttaaaaatctga

SEQ ID NO: 7698 - DNA, 14 bp, Artificial Sequence
  Description of Artificial Sequence: Synthetic oligonucleotide
cacttaaaaatctg

SEQ ID NO: 7699 - DNA, 14 bp, Artificial Sequence
  Description of Artificial Sequence: Synthetic oligonucleotide
tcacttaaaaatct

SEQ ID NO: 7700 - DNA, 14 bp, Artificial Sequence
  Description of Artificial Sequence: Synthetic oligonucleotide
gtcacttaaaaatc

SEQ ID NO: 7701 - DNA, 14 bp, Artificial Sequence
  Description of Artificial Sequence: Synthetic oligonucleotide
agtcacttaaaaat

SEQ ID NO: 7702 - DNA, 14 bp, Artificial Sequence
  Description of Artificial Sequence: Synthetic oligonucleotide
gagtcacttaaaaa

SEQ ID NO: 7703 - DNA, 14 bp, Artificial Sequence
  Description of Artificial Sequence: Synthetic oligonucleotide
tgagtcacttaaaa

SEQ ID NO: 7704 - DNA, 14 bp, Artificial Sequence
  Description of Artificial Sequence: Synthetic oligonucleotide
ctgagtcacttaaa

SEQ ID NO: 7705 - DNA, 14 bp, Artificial Sequence
  Description of Artificial Sequence: Synthetic oligonucleotide
gctgagtcacttaa

SEQ ID NO: 7706 - DNA, 14 bp, Artificial Sequence
  Description of Artificial Sequence: Synthetic oligonucleotide
tgctgagtcactta

SEQ ID NO: 7707 - DNA, 14 bp, Artificial Sequence
  Description of Artificial Sequence: Synthetic oligonucleotide
ttgctgagtcactt

SEQ ID NO: 7708 - DNA, 14 bp, Artificial Sequence
  Description of Artificial Sequence: Synthetic oligonucleotide
tttgctgagtcact

SEQ ID NO: 7709 - DNA, 14 bp, Artificial Sequence
  Description of Artificial Sequence: Synthetic oligonucleotide
ttttgctgagtcac

SEQ ID NO: 7710 - DNA, 14 bp, Artificial Sequence
  Description of Artificial Sequence: Synthetic oligonucleotide
attttgctgagtca

SEQ ID NO: 7711 - DNA, 14 bp, Artificial Sequence
  Description of Artificial Sequence: Synthetic oligonucleotide
tattttgctgagtc

SEQ ID NO: 7712 - DNA, 14 bp, Artificial Sequence
  Description of Artificial Sequence: Synthetic oligonucleotide
ctattttgctgagt

SEQ ID NO: 7713 - DNA, 14 bp, Artificial Sequence
  Description of Artificial Sequence: Synthetic oligonucleotide
cctattttgctgag

SEQ ID NO: 7714 - DNA, 14 bp, Artificial Sequence
  Description of Artificial Sequence: Synthetic oligonucleotide
tcctattttgctga

SEQ ID NO: 7715 - DNA, 14 bp, Artificial Sequence
  Description of Artificial Sequence: Synthetic oligonucleotide
ctcctattttgctg

SEQ ID NO: 7716 - DNA, 14 bp, Artificial Sequence
  Description of Artificial Sequence: Synthetic oligonucleotide
cctcctattttgct

SEQ ID NO: 7717 - DNA, 14 bp, Artificial Sequence
  Description of Artificial Sequence: Synthetic oligonucleotide
tcctcctattttgc

SEQ ID NO: 7718 - DNA, 14 bp, Artificial Sequence
  Description of Artificial Sequence: Synthetic oligonucleotide
ctcctcctattttg

SEQ ID NO: 7719 - DNA, 14 bp, Artificial Sequence
  Description of Artificial Sequence: Synthetic oligonucleotide
actcctcctatttt

SEQ ID NO: 7720 - DNA, 14 bp, Artificial Sequence
  Description of Artificial Sequence: Synthetic oligonucleotide
cactcctcctattt

SEQ ID NO: 7721 - DNA, 14 bp, Artificial Sequence
  Description of Artificial Sequence: Synthetic oligonucleotide
acactcctcctatt

SEQ ID NO: 7722 - DNA, 14 bp, Artificial Sequence
  Description of Artificial Sequence: Synthetic oligonucleotide
gacactcctcctat

SEQ ID NO: 7723 - DNA, 14 bp, Artificial Sequence
  Description of Artificial Sequence: Synthetic oligonucleotide
ggacactcctccta

SEQ ID NO: 7724 - DNA, 14 bp, Artificial Sequence
  Description of Artificial Sequence: Synthetic oligonucleotide
gggacactcctcct

SEQ ID NO: 7725 - DNA, 14 bp, Artificial Sequence
  Description of Artificial Sequence: Synthetic oligonucleotide
tgggacactcctcc

SEQ ID NO: 7726 - DNA, 14 bp, Artificial Sequence
  Description of Artificial Sequence: Synthetic oligonucleotide
ttgggacactcctc

SEQ ID NO: 7727 - DNA, 14 bp, Artificial Sequence
  Description of Artificial Sequence: Synthetic oligonucleotide
attgggacactcct

SEQ ID NO: 7728 - DNA, 14 bp, Artificial Sequence
  Description of Artificial Sequence: Synthetic oligonucleotide
aattgggacactcc

SEQ ID NO: 7729 - DNA, 14 bp, Artificial Sequence
  Description of Artificial Sequence: Synthetic oligonucleotide
aaattgggacactc

SEQ ID NO: 7730 - DNA, 14 bp, Artificial Sequence
  Description of Artificial Sequence: Synthetic oligonucleotide
taaattgggacact

SEQ ID NO: 7731 - DNA, 14 bp, Artificial Sequence
  Description of Artificial Sequence: Synthetic oligonucleotide
ataaattgggacac

SEQ ID NO: 7732 - DNA, 14 bp, Artificial Sequence
  Description of Artificial Sequence: Synthetic oligonucleotide
aataaattgggaca

SEQ ID NO: 7733 - DNA, 14 bp, Artificial Sequence
  Description of Artificial Sequence: Synthetic oligonucleotide
taataaattgggac

SEQ ID NO: 7734 - DNA, 14 bp, Artificial Sequence
  Description of Artificial Sequence: Synthetic oligonucleotide
ctaataaattggga

SEQ ID NO: 7735 - DNA, 14 bp, Artificial Sequence
  Description of Artificial Sequence: Synthetic oligonucleotide
actaataaattggg

SEQ ID NO: 7736 - DNA, 14 bp, Artificial Sequence
  Description of Artificial Sequence: Synthetic oligonucleotide
cactaataaattgg

SEQ ID NO: 7737 - DNA, 14 bp, Artificial Sequence
  Description of Artificial Sequence: Synthetic oligonucleotide
acactaataaattg

SEQ ID NO: 7738 - DNA, 14 bp, Artificial Sequence
  Description of Artificial Sequence: Synthetic oligonucleotide
aacactaataaatt

SEQ ID NO: 7739 - DNA, 14 bp, Artificial Sequence
  Description of Artificial Sequence: Synthetic oligonucleotide
caacactaataaat

SEQ ID NO: 7740 - DNA, 14 bp, Artificial Sequence
  Description of Artificial Sequence: Synthetic oligonucleotide
acaacactaataaa

SEQ ID NO: 7741 - DNA, 14 bp, Artificial Sequence
  Description of Artificial Sequence: Synthetic oligonucleotide
tacaacactaataa

SEQ ID NO: 7742 - DNA, 14 bp, Artificial Sequence
  Description of Artificial Sequence: Synthetic oligonucleotide
gtacaacactaata

SEQ ID NO: 7743 - DNA, 14 bp, Artificial Sequence
  Description of Artificial Sequence: Synthetic oligonucleotide
tgtacaacactaat

SEQ ID NO: 7744 - DNA, 14 bp, Artificial Sequence
  Description of Artificial Sequence: Synthetic oligonucleotide
atgtacaacactaa

SEQ ID NO: 7745 - DNA, 14 bp, Artificial Sequence
  Description of Artificial Sequence: Synthetic oligonucleotide
tatgtacaacacta

SEQ ID NO: 7746 - DNA, 14 bp, Artificial Sequence
  Description of Artificial Sequence: Synthetic oligonucleotide
atatgtacaacact

SEQ ID NO: 7747 - DNA, 14 bp, Artificial Sequence
  Description of Artificial Sequence: Synthetic oligonucleotide
aatatgtacaacac

SEQ ID NO: 7748 - DNA, 14 bp, Artificial Sequence
  Description of Artificial Sequence: Synthetic oligonucleotide
caatatgtacaaca

SEQ ID NO: 7749 - DNA, 14 bp, Artificial Sequence
  Description of Artificial Sequence: Synthetic oligonucleotide
tcaatatgtacaac

SEQ ID NO: 7750 - DNA, 14 bp, Artificial Sequence
  Description of Artificial Sequence: Synthetic oligonucleotide
ttcaatatgtacaa

SEQ ID NO: 7751 - DNA, 14 bp, Artificial Sequence
  Description of Artificial Sequence: Synthetic oligonucleotide
cttcaatatgtaca

SEQ ID NO: 7752 - DNA, 14 bp, Artificial Sequence
  Description of Artificial Sequence: Synthetic oligonucleotide
tcttcaatatgtac

SEQ ID NO: 7753 - DNA, 14 bp, Artificial Sequence
  Description of Artificial Sequence: Synthetic oligonucleotide
ttcttcaatatgta

SEQ ID NO: 7754 - DNA, 14 bp, Artificial Sequence
  Description of Artificial Sequence: Synthetic oligonucleotide
tttcttcaatatgt

SEQ ID NO: 7755 - DNA, 14 bp, Artificial Sequence
  Description of Artificial Sequence: Synthetic oligonucleotide
ttttcttcaatatg

SEQ ID NO: 7756 - DNA, 14 bp, Artificial Sequence
  Description of Artificial Sequence: Synthetic oligonucleotide
gttttcttcaatat

SEQ ID NO: 7757 - DNA, 14 bp, Artificial Sequence
  Description of Artificial Sequence: Synthetic oligonucleotide
ggttttcttcaata

SEQ ID NO: 7758 - DNA, 14 bp, Artificial Sequence
  Description of Artificial Sequence: Synthetic oligonucleotide
aggttttcttcaat

SEQ ID NO: 7759 - DNA, 14 bp, Artificial Sequence
  Description of Artificial Sequence: Synthetic oligonucleotide
aaggttttcttcaa

SEQ ID NO: 7760 - DNA, 14 bp, Artificial Sequence
  Description of Artificial Sequence: Synthetic oligonucleotide
aaaggttttcttca

SEQ ID NO: 7761 - DNA, 14 bp, Artificial Sequence
  Description of Artificial Sequence: Synthetic oligonucleotide
aaaaggttttcttc

SEQ ID NO: 7762 - DNA, 14 bp, Artificial Sequence
  Description of Artificial Sequence: Synthetic oligonucleotide
aaaaaggttttctt

SEQ ID NO: 7763 - DNA, 14 bp, Artificial Sequence
  Description of Artificial Sequence: Synthetic oligonucleotide
caaaaaggttttct

SEQ ID NO: 7764 - DNA, 14 bp, Artificial Sequence
  Description of Artificial Sequence: Synthetic oligonucleotide
acaaaaaggttttc

SEQ ID NO: 7765 - DNA, 14 bp, Artificial Sequence
  Description of Artificial Sequence: Synthetic oligonucleotide
aacaaaaaggtttt

SEQ ID NO: 7766 - DNA, 14 bp, Artificial Sequence
  Description of Artificial Sequence: Synthetic oligonucleotide
gaacaaaaaggttt

SEQ ID NO: 7767 - DNA, 14 bp, Artificial Sequence
  Description of Artificial Sequence: Synthetic oligonucleotide
ggaacaaaaaggtt

SEQ ID NO: 7768 - DNA, 14 bp, Artificial Sequence
  Description of Artificial Sequence: Synthetic oligonucleotide
aggaacaaaaaggt

SEQ ID NO: 7769 - DNA, 14 bp, Artificial Sequence
  Description of Artificial Sequence: Synthetic oligonucleotide
aaggaacaaaaagg

SEQ ID NO: 7770 - DNA, 14 bp, Artificial Sequence
  Description of Artificial Sequence: Synthetic oligonucleotide
gaaggaacaaaaag

SEQ ID NO: 7771 - DNA, 14 bp, Artificial Sequence
  Description of Artificial Sequence: Synthetic oligonucleotide
tgaaggaacaaaaa

SEQ ID NO: 7772 - DNA, 14 bp, Artificial Sequence
  Description of Artificial Sequence: Synthetic oligonucleotide
ctgaaggaacaaaa

SEQ ID NO: 7773 - DNA, 14 bp, Artificial Sequence
  Description of Artificial Sequence: Synthetic oligonucleotide
tctgaaggaacaaa

SEQ ID NO: 7774 - DNA, 14 bp, Artificial Sequence
  Description of Artificial Sequence: Synthetic oligonucleotide
atctgaaggaacaa

SEQ ID NO: 7775 - DNA, 14 bp, Artificial Sequence
  Description of Artificial Sequence: Synthetic oligonucleotide
aatctgaaggaaca

SEQ ID NO: 7776 - DNA, 14 bp, Artificial Sequence
  Description of Artificial Sequence: Synthetic oligonucleotide
aaatctgaaggaac

SEQ ID NO: 7777 - DNA, 14 bp, Artificial Sequence
  Description of Artificial Sequence: Synthetic oligonucleotide
taaatctgaaggaa

SEQ ID NO: 7778 - DNA, 14 bp, Artificial Sequence
  Description of Artificial Sequence: Synthetic oligonucleotide
ctaaatctgaagga

SEQ ID NO: 7779 - DNA, 14 bp, Artificial Sequence
  Description of Artificial Sequence: Synthetic oligonucleotide
tctaaatctgaagg

SEQ ID NO: 7780 - DNA, 14 bp, Artificial Sequence
  Description of Artificial Sequence: Synthetic oligonucleotide
ttctaaatctgaag

SEQ ID NO: 7781 - DNA, 14 bp, Artificial Sequence
  Description of Artificial Sequence: Synthetic oligonucleotide
tttctaaatctgaa

SEQ ID NO: 7782 - DNA, 14 bp, Artificial Sequence
  Description of Artificial Sequence: Synthetic oligonucleotide
ctttctaaatctga

SEQ ID NO: 7783 - DNA, 14 bp, Artificial Sequence
  Description of Artificial Sequence: Synthetic oligonucleotide
tctttctaaatctg

SEQ ID NO: 7784 - DNA, 14 bp, Artificial Sequence
  Description of Artificial Sequence: Synthetic oligonucleotide
ttctttctaaatct

SEQ ID NO: 7785 - DNA, 14 bp, Artificial Sequence
  Description of Artificial Sequence: Synthetic oligonucleotide
tttctttctaaatc

SEQ ID NO: 7786 - DNA, 14 bp, Artificial Sequence
  Description of Artificial Sequence: Synthetic oligonucleotide
gtttctttctaaat

SEQ ID NO: 7787 - DNA, 14 bp, Artificial Sequence
  Description of Artificial Sequence: Synthetic oligonucleotide
tgtttctttctaaa

SEQ ID NO: 7788 - DNA, 14 bp, Artificial Sequence
  Description of Artificial Sequence: Synthetic oligonucleotide
ctgtttctttctaa

SEQ ID NO: 7789 - DNA, 14 bp, Artificial Sequence
  Description of Artificial Sequence: Synthetic oligonucleotide
actgtttctttcta

SEQ ID NO: 7790 - DNA, 14 bp, Artificial Sequence
  Description of Artificial Sequence: Synthetic oligonucleotide
aactgtttctttct

SEQ ID NO: 7791 - DNA, 14 bp, Artificial Sequence
  Description of Artificial Sequence: Synthetic oligonucleotide
aaactgtttctttc

SEQ ID NO: 7792 - DNA, 14 bp, Artificial Sequence
  Description of Artificial Sequence: Synthetic oligonucleotide
taaactgtttcttt

SEQ ID NO: 7793 - DNA, 14 bp, Artificial Sequence
  Description of Artificial Sequence: Synthetic oligonucleotide
ttaaactgtttctt

SEQ ID NO: 7794 - DNA, 14 bp, Artificial Sequence
  Description of Artificial Sequence: Synthetic oligonucleotide
gttaaactgtttct

SEQ ID NO: 7795 - DNA, 14 bp, Artificial Sequence
  Description of Artificial Sequence: Synthetic oligonucleotide
ggttaaactgtttc

SEQ ID NO: 7796 - DNA, 14 bp, Artificial Sequence
  Description of Artificial Sequence: Synthetic oligonucleotide
tggttaaactgttt

SEQ ID NO: 7797 - DNA, 14 bp, Artificial Sequence
  Description of Artificial Sequence: Synthetic oligonucleotide
atggttaaactgtt

SEQ ID NO: 7798 - DNA, 14 bp, Artificial Sequence
  Description of Artificial Sequence: Synthetic oligonucleotide
aatggttaaactgt

SEQ ID NO: 7799 - DNA, 14 bp, Artificial Sequence
  Description of Artificial Sequence: Synthetic oligonucleotide
aaatggttaaactg

SEQ ID NO: 7800 - DNA, 14 bp, Artificial Sequence
  Description of Artificial Sequence: Synthetic oligonucleotide
taaatggttaaact

SEQ ID NO: 7801 - DNA, 14 bp, Artificial Sequence
  Description of Artificial Sequence: Synthetic oligonucleotide
ataaatggttaaac

SEQ ID NO: 7802 - DNA, 14 bp, Artificial Sequence
  Description of Artificial Sequence: Synthetic oligonucleotide
aataaatggttaaa

SEQ ID NO: 7803 - DNA, 14 bp, Artificial Sequence
  Description of Artificial Sequence: Synthetic oligonucleotide
aaataaatggttaa

SEQ ID NO: 7804 - DNA, 14 bp, Artificial Sequence
  Description of Artificial Sequence: Synthetic oligonucleotide
gaaataaatggtta

SEQ ID NO: 7805 - DNA, 14 bp, Artificial Sequence
  Description of Artificial Sequence: Synthetic oligonucleotide
agaaataaatggtt

SEQ ID NO: 7806 - DNA, 14 bp, Artificial Sequence
  Description of Artificial Sequence: Synthetic oligonucleotide
aagaaataaatggt

SEQ ID NO: 7807 - DNA, 14 bp, Artificial Sequence
  Description of Artificial Sequence: Synthetic oligonucleotide
caagaaataaatgg

SEQ ID NO: 7808 - DNA, 14 bp, Artificial Sequence
  Description of Artificial Sequence: Synthetic oligonucleotide
ccaagaaataaatg

SEQ ID NO: 7809 - DNA, 14 bp, Artificial Sequence
  Description of Artificial Sequence: Synthetic oligonucleotide
accaagaaataaat

SEQ ID NO: 7810 - DNA, 14 bp, Artificial Sequence
  Description of Artificial Sequence: Synthetic oligonucleotide
taccaagaaataaa

SEQ ID NO: 7811 - DNA, 14 bp, Artificial Sequence
  Description of Artificial Sequence: Synthetic oligonucleotide
ataccaagaaataa

SEQ ID NO: 7812 - DNA, 14 bp, Artificial Sequence
  Description of Artificial Sequence: Synthetic oligonucleotide
aataccaagaaata

SEQ ID NO: 7813 - DNA, 14 bp, Artificial Sequence
  Description of Artificial Sequence: Synthetic oligonucleotide
gaataccaagaaat

SEQ ID NO: 7814 - DNA, 14 bp, Artificial Sequence
  Description of Artificial Sequence: Synthetic oligonucleotide
agaataccaagaaa

SEQ ID NO: 7815 - DNA, 14 bp, Artificial Sequence
  Description of Artificial Sequence: Synthetic oligonucleotide
cagaataccaagaa

SEQ ID NO: 7816 - DNA, 14 bp, Artificial Sequence
  Description of Artificial Sequence: Synthetic oligonucleotide
gcagaataccaaga

SEQ ID NO: 7817 - DNA, 14 bp, Artificial Sequence
  Description of Artificial Sequence: Synthetic oligonucleotide
agcagaataccaag

SEQ ID NO: 7818 - DNA, 14 bp, Artificial Sequence
  Description of Artificial Sequence: Synthetic oligonucleotide
cagcagaataccaa

SEQ ID NO: 7819 - DNA, 14 bp, Artificial Sequence
  Description of Artificial Sequence: Synthetic oligonucleotide
gcagcagaatacca

SEQ ID NO: 7820 - DNA, 14 bp, Artificial Sequence
  Description of Artificial Sequence: Synthetic oligonucleotide
agcagcagaatacc

SEQ ID NO: 7821 - DNA, 14 bp, Artificial Sequence
  Description of Artificial Sequence: Synthetic oligonucleotide
cagcagcagaatac

SEQ ID NO: 7822 - DNA, 14 bp, Artificial Sequence
  Description of Artificial Sequence: Synthetic oligonucleotide
acagcagcagaata

SEQ ID NO: 7823 - DNA, 14 bp, Artificial Sequence
  Description of Artificial Sequence: Synthetic oligonucleotide
cacagcagcagaat

SEQ ID NO: 7824 - DNA, 14 bp, Artificial Sequence
  Description of Artificial Sequence: Synthetic oligonucleotide
tcacagcagcagaa

SEQ ID NO: 7825 - DNA, 14 bp, Artificial Sequence
  Description of Artificial Sequence: Synthetic oligonucleotide
ttcacagcagcaga

SEQ ID NO: 7826 - DNA, 14 bp, Artificial Sequence
  Description of Artificial Sequence: Synthetic oligonucleotide
attcacagcagcag

SEQ ID NO: 7827 - DNA, 14 bp, Artificial Sequence
  Description of Artificial Sequence: Synthetic oligonucleotide
tattcacagcagca

SEQ ID NO: 7828 - DNA, 14 bp, Artificial Sequence
  Description of Artificial Sequence: Synthetic oligonucleotide
ctattcacagcagc

SEQ ID NO: 7829 - DNA, 14 bp, Artificial Sequence
  Description of Artificial Sequence: Synthetic oligonucleotide
cctattcacagcag

SEQ ID NO: 7830 - DNA, 14 bp, Artificial Sequence
  Description of Artificial Sequence: Synthetic oligonucleotide
acctattcacagca

SEQ ID NO: 7831 - DNA, 14 bp, Artificial Sequence
  Description of Artificial Sequence: Synthetic oligonucleotide
aacctattcacagc

SEQ ID NO: 7832 - DNA, 14 bp, Artificial Sequence
  Description of Artificial Sequence: Synthetic oligonucleotide
aaacctattcacag

SEQ ID NO: 7833 - DNA, 14 bp, Artificial Sequence
  Description of Artificial Sequence: Synthetic oligonucleotide
taaacctattcaca

SEQ ID NO: 7834 - DNA, 14 bp, Artificial Sequence
  Description of Artificial Sequence: Synthetic oligonucleotide
gtaaacctattcac

SEQ ID NO: 7835 - DNA, 14 bp, Artificial Sequence
  Description of Artificial Sequence: Synthetic oligonucleotide
agtaaacctattca

SEQ ID NO: 7836 - DNA, 14 bp, Artificial Sequence
  Description of Artificial Sequence: Synthetic oligonucleotide
aagtaaacctattc

SEQ ID NO: 7837 - DNA, 14 bp, Artificial Sequence
  Description of Artificial Sequence: Synthetic oligonucleotide
taagtaaacctatt

SEQ ID NO: 7838 - DNA, 14 bp, Artificial Sequence
  Description of Artificial Sequence: Synthetic oligonucleotide
ataagtaaacctat

SEQ ID NO: 7839 - DNA, 14 bp, Artificial Sequence
  Description of Artificial Sequence: Synthetic oligonucleotide
aataagtaaaccta

SEQ ID NO: 7840 - DNA, 14 bp, Artificial Sequence
  Description of Artificial Sequence: Synthetic oligonucleotide
gaataagtaaacct

SEQ ID NO: 7841 - DNA, 14 bp, Artificial Sequence
  Description of Artificial Sequence: Synthetic oligonucleotide
agaataagtaaacc

SEQ ID NO: 7842 - DNA, 14 bp, Artificial Sequence
  Description of Artificial Sequence: Synthetic oligonucleotide
aagaataagtaaac

SEQ ID NO: 7843 - DNA, 14 bp, Artificial Sequence
  Description of Artificial Sequence: Synthetic oligonucleotide
aaagaataagtaaa

SEQ ID NO: 7844 - DNA, 14 bp, Artificial Sequence
  Description of Artificial Sequence: Synthetic oligonucleotide
aaaagaataagtaa

SEQ ID NO: 7845 - DNA, 14 bp, Artificial Sequence
  Description of Artificial Sequence: Synthetic oligonucleotide
taaaagaataagta

SEQ ID NO: 7846 - DNA, 14 bp, Artificial Sequence
  Description of Artificial Sequence: Synthetic oligonucleotide
ttaaaagaataagt

SEQ ID NO: 7847 - DNA, 14 bp, Artificial Sequence
  Description of Artificial Sequence: Synthetic oligonucleotide
gttaaaagaataag

SEQ ID NO: 7848 - DNA, 14 bp, Artificial Sequence
  Description of Artificial Sequence: Synthetic oligonucleotide
tgttaaaagaataa

SEQ ID NO: 7849 - DNA, 14 bp, Artificial Sequence
  Description of Artificial Sequence: Synthetic oligonucleotide
atgttaaaagaata

SEQ ID NO: 7850 - DNA, 14 bp, Artificial Sequence
  Description of Artificial Sequence: Synthetic oligonucleotide
tatgttaaaagaat

SEQ ID NO: 7851 - DNA, 14 bp, Artificial Sequence
  Description of Artificial Sequence: Synthetic oligonucleotide
atatgttaaaagaa

SEQ ID NO: 7852 - DNA, 14 bp, Artificial Sequence
  Description of Artificial Sequence: Synthetic oligonucleotide
tatatgttaaaaga

SEQ ID NO: 7853 - DNA, 14 bp, Artificial Sequence
  Description of Artificial Sequence: Synthetic oligonucleotide
atatatgttaaaag

SEQ ID NO: 7854 - DNA, 14 bp, Artificial Sequence
  Description of Artificial Sequence: Synthetic oligonucleotide
aatatatgttaaaa

SEQ ID NO: 7855 - DNA, 14 bp, Artificial Sequence
  Description of Artificial Sequence: Synthetic oligonucleotide
caatatatgttaaa

SEQ ID NO: 7856 - DNA, 14 bp, Artificial Sequence
  Description of Artificial Sequence: Synthetic oligonucleotide
acaatatatgttaa

SEQ ID NO: 7857 - DNA, 14 bp, Artificial Sequence
  Description of Artificial Sequence: Synthetic oligonucleotide
cacaatatatgtta

SEQ ID NO: 7858 - DNA, 14 bp, Artificial Sequence
  Description of Artificial Sequence: Synthetic oligonucleotide
acacaatatatgtt

SEQ ID NO: 7859 - DNA, 14 bp, Artificial Sequence
  Description of Artificial Sequence: Synthetic oligonucleotide
cacacaatatatgt

SEQ ID NO: 7860 - DNA, 14 bp, Artificial Sequence
  Description of Artificial Sequence: Synthetic oligonucleotide
tcacacaatatatg

SEQ ID NO: 7861 - DNA, 14 bp, Artificial Sequence
  Description of Artificial Sequence: Synthetic oligonucleotide
gtcacacaatatat

SEQ ID NO: 7862 - DNA, 14 bp, Artificial Sequence
  Description of Artificial Sequence: Synthetic oligonucleotide
agtcacacaatata

SEQ ID NO: 7863 - DNA, 14 bp, Artificial Sequence
  Description of Artificial Sequence: Synthetic oligonucleotide
tagtcacacaatat

SEQ ID NO: 7864 - DNA, 14 bp, Artificial Sequence
  Description of Artificial Sequence: Synthetic oligonucleotide
gtagtcacacaata

SEQ ID NO: 7865 - DNA, 14 bp, Artificial Sequence
  Description of Artificial Sequence: Synthetic oligonucleotide
cgtagtcacacaat

SEQ ID NO: 7866 - DNA, 14 bp, Artificial Sequence
  Description of Artificial Sequence: Synthetic oligonucleotide
gcgtagtcacacaa

SEQ ID NO: 7867 - DNA, 14 bp, Artificial Sequence
  Description of Artificial Sequence: Synthetic oligonucleotide
tgcgtagtcacaca

SEQ ID NO: 7868 - DNA, 14 bp, Artificial Sequence
  Description of Artificial Sequence: Synthetic oligonucleotide
ttgcgtagtcacac

SEQ ID NO: 7869 - DNA, 14 bp, Artificial Sequence
  Description of Artificial Sequence: Synthetic oligonucleotide
cttgcgtagtcaca

SEQ ID NO: 7870 - DNA, 14 bp, Artificial Sequence
  Description of Artificial Sequence: Synthetic oligonucleotide
acttgcgtagtcac

SEQ ID NO: 7871 - DNA, 14 bp, Artificial Sequence
  Description of Artificial Sequence: Synthetic oligonucleotide
tacttgcgtagtca

SEQ ID NO: 7872 - DNA, 14 bp, Artificial Sequence
  Description of Artificial Sequence: Synthetic oligonucleotide
atacttgcgtagtc

SEQ ID NO: 7873 - DNA, 14 bp, Artificial Sequence
  Description of Artificial Sequence: Synthetic oligonucleotide
tatacttgcgtagt

SEQ ID NO: 7874 - DNA, 14 bp, Artificial Sequence
  Description of Artificial Sequence: Synthetic oligonucleotide
ctatacttgcgtag

SEQ ID NO: 7875 - DNA, 14 bp, Artificial Sequence
  Description of Artificial Sequence: Synthetic oligonucleotide
cctatacttgcgta

SEQ ID NO: 7876 - DNA, 14 bp, Artificial Sequence
  Description of Artificial Sequence: Synthetic oligonucleotide
acctatacttgcgt

SEQ ID NO: 7877 - DNA, 14 bp, Artificial Sequence
  Description of Artificial Sequence: Synthetic oligonucleotide
gacctatacttgcg

SEQ ID NO: 7878 - DNA, 14 bp, Artificial Sequence
  Description of Artificial Sequence: Synthetic oligonucleotide
ggacctatacttgc

SEQ ID NO: 7879 - DNA, 14 bp, Artificial Sequence
  Description of Artificial Sequence: Synthetic oligonucleotide
aggacctatacttg

SEQ ID NO: 7880 - DNA, 14 bp, Artificial Sequence
  Description of Artificial Sequence: Synthetic oligonucleotide
caggacctatactt

SEQ ID NO: 7881 - DNA, 14 bp, Artificial Sequence
  Description of Artificial Sequence: Synthetic oligonucleotide
acaggacctatact

SEQ ID NO: 7882 - DNA, 14 bp, Artificial Sequence
  Description of Artificial Sequence: Synthetic oligonucleotide
aacaggacctatac

SEQ ID NO: 7883 - DNA, 14 bp, Artificial Sequence
  Description of Artificial Sequence: Synthetic oligonucleotide
caacaggacctata

SEQ ID NO: 7884 - DNA, 14 bp, Artificial Sequence
  Description of Artificial Sequence: Synthetic oligonucleotide
acaacaggacctat

SEQ ID NO: 7885 - DNA, 14 bp, Artificial Sequence
  Description of Artificial Sequence: Synthetic oligonucleotide
tacaacaggaccta

SEQ ID NO: 7886 - DNA, 14 bp, Artificial Sequence
  Description of Artificial Sequence: Synthetic oligonucleotide
atacaacaggacct

SEQ ID NO: 7887 - DNA, 14 bp, Artificial Sequence
  Description of Artificial Sequence: Synthetic oligonucleotide
aatacaacaggacc

SEQ ID NO: 7888 - DNA, 14 bp, Artificial Sequence
  Description of Artificial Sequence: Synthetic oligonucleotide
caatacaacaggac

SEQ ID NO: 7889 - DNA, 14 bp, Artificial Sequence
  Description of Artificial Sequence: Synthetic oligonucleotide
gcaatacaacagga

SEQ ID NO: 7890 - DNA, 14 bp, Artificial Sequence
  Description of Artificial Sequence: Synthetic oligonucleotide
tgcaatacaacagg

SEQ ID NO: 7891 - DNA, 14 bp, Artificial Sequence
  Description of Artificial Sequence: Synthetic oligonucleotide
atgcaatacaacag

SEQ ID NO: 7892 - DNA, 14 bp, Artificial Sequence
  Description of Artificial Sequence: Synthetic oligonucleotide
aatgcaatacaaca

SEQ ID NO: 7893 - DNA, 14 bp, Artificial Sequence
  Description of Artificial Sequence: Synthetic oligonucleotide
taatgcaatacaac

SEQ ID NO: 7894 - DNA, 14 bp, Artificial Sequence
  Description of Artificial Sequence: Synthetic oligonucleotide
ttaatgcaatacaa

SEQ ID NO: 7895 - DNA, 14 bp, Artificial Sequence
  Description of Artificial Sequence: Synthetic oligonucleotide
attaatgcaataca

SEQ ID NO: 7896 - DNA, 14 bp, Artificial Sequence
  Description of Artificial Sequence: Synthetic oligonucleotide
gattaatgcaatac

SEQ ID NO: 7897 - DNA, 14 bp, Artificial Sequence
  Description of Artificial Sequence: Synthetic oligonucleotide
agattaatgcaata

SEQ ID NO: 7898 - DNA, 14 bp, Artificial Sequence
  Description of Artificial Sequence: Synthetic oligonucleotide
aagattaatgcaat

SEQ ID NO: 7899 - DNA, 14 bp, Artificial Sequence
  Description of Artificial Sequence: Synthetic oligonucleotide
aaagattaatgcaa

SEQ ID NO: 7900 - DNA, 14 bp, Artificial Sequence
  Description of Artificial Sequence: Synthetic oligonucleotide
taaagattaatgca

SEQ ID NO: 7901 - DNA, 14 bp, Artificial Sequence
  Description of Artificial Sequence: Synthetic oligonucleotide
gtaaagattaatgc

SEQ ID NO: 7902 - DNA, 14 bp, Artificial Sequence
  Description of Artificial Sequence: Synthetic oligonucleotide
ggtaaagattaatg

SEQ ID NO: 7903 - DNA, 14 bp, Artificial Sequence
  Description of Artificial Sequence: Synthetic oligonucleotide
tggtaaagattaat

SEQ ID NO: 7904 - DNA, 14 bp, Artificial Sequence
  Description of Artificial Sequence: Synthetic oligonucleotide
ctggtaaagattaa

SEQ ID NO: 7905 - DNA, 14 bp, Artificial Sequence
  Description of Artificial Sequence: Synthetic oligonucleotide
actggtaaagatta

SEQ ID NO: 7906 - DNA, 14 bp, Artificial Sequence
  Description of Artificial Sequence: Synthetic oligonucleotide
tactggtaaagatt

SEQ ID NO: 7907 - DNA, 14 bp, Artificial Sequence
  Description of Artificial Sequence: Synthetic oligonucleotide
ttactggtaaagat

SEQ ID NO: 7908 - DNA, 14 bp, Artificial Sequence
  Description of Artificial Sequence: Synthetic oligonucleotide
gttactggtaaaga

SEQ ID NO: 7909 - DNA, 14 bp, Artificial Sequence
  Description of Artificial Sequence: Synthetic oligonucleotide
agttactggtaaag

SEQ ID NO: 7910 - DNA, 14 bp, Artificial Sequence
  Description of Artificial Sequence: Synthetic oligonucleotide
tagttactggtaaa

SEQ ID NO: 7911 - DNA, 14 bp, Artificial Sequence
  Description of Artificial Sequence: Synthetic oligonucleotide
ttagttactggtaa

SEQ ID NO: 7912 - DNA, 14 bp, Artificial Sequence
  Description of Artificial Sequence: Synthetic oligonucleotide
tttagttactggta

SEQ ID NO: 7913 - DNA, 14 bp, Artificial Sequence
  Description of Artificial Sequence: Synthetic oligonucleotide
gtttagttactggt

SEQ ID NO: 7914 - DNA, 14 bp, Artificial Sequence
  Description of Artificial Sequence: Synthetic oligonucleotide
tgtttagttactgg

SEQ ID NO: 7915 - DNA, 14 bp, Artificial Sequence
  Description of Artificial Sequence: Synthetic oligonucleotide
atgtttagttactg

SEQ ID NO: 7916 - DNA, 14 bp, Artificial Sequence
  Description of Artificial Sequence: Synthetic oligonucleotide
gatgtttagttact

SEQ ID NO: 7917 - DNA, 14 bp, Artificial Sequence
  Description of Artificial Sequence: Synthetic oligonucleotide
tgatgtttagttac

SEQ ID NO: 7918 - DNA, 14 bp, Artificial Sequence
  Description of Artificial Sequence: Synthetic oligonucleotide
gtgatgtttagtta

SEQ ID NO: 7919 - DNA, 14 bp, Artificial Sequence
  Description of Artificial Sequence: Synthetic oligonucleotide
tgtgatgtttagtt

SEQ ID NO: 7920 - DNA, 14 bp, Artificial Sequence
  Description of Artificial Sequence: Synthetic oligonucleotide
ttgtgatgtttagt

SEQ ID NO: 7921 - DNA, 14 bp, Artificial Sequence
  Description of Artificial Sequence: Synthetic oligonucleotide
cttgtgatgtttag

SEQ ID NO: 7922 - DNA, 14 bp, Artificial Sequence
  Description of Artificial Sequence: Synthetic oligonucleotide
ccttgtgatgttta

SEQ ID NO: 7923 - DNA, 14 bp, Artificial Sequence
  Description of Artificial Sequence: Synthetic oligonucleotide
accttgtgatgttt

SEQ ID NO: 7924 - DNA, 14 bp, Artificial Sequence
  Description of Artificial Sequence: Synthetic oligonucleotide
aaccttgtgatgtt

SEQ ID NO: 7925 - DNA, 14 bp, Artificial Sequence
  Description of Artificial Sequence: Synthetic oligonucleotide
taaccttgtgatgt

SEQ ID NO: 7926 - DNA, 14 bp, Artificial Sequence
  Description of Artificial Sequence: Synthetic oligonucleotide
ttaaccttgtgatg

SEQ ID NO: 7927 - DNA, 14 bp, Artificial Sequence
  Description of Artificial Sequence: Synthetic oligonucleotide
attaaccttgtgat

SEQ ID NO: 7928 - DNA, 14 bp, Artificial Sequence
  Description of Artificial Sequence: Synthetic oligonucleotide
tattaaccttgtga

SEQ ID NO: 7929 - DNA, 14 bp, Artificial Sequence
  Description of Artificial Sequence: Synthetic oligonucleotide
atattaaccttgtg

SEQ ID NO: 7930 - DNA, 14 bp, Artificial Sequence
  Description of Artificial Sequence: Synthetic oligonucleotide
aatattaaccttgt

SEQ ID NO: 7931 - DNA, 14 bp, Artificial Sequence
  Description of Artificial Sequence: Synthetic oligonucleotide
caatattaaccttg

SEQ ID NO: 7932 - DNA, 14 bp, Artificial Sequence
  Description of Artificial Sequence: Synthetic oligonucleotide
ccaatattaacctt

SEQ ID NO: 7933 - DNA, 14 bp, Artificial Sequence
  Description of Artificial Sequence: Synthetic oligonucleotide
accaatattaacct

SEQ ID NO: 7934 - DNA, 14 bp, Artificial Sequence
  Description of Artificial Sequence: Synthetic oligonucleotide
aaccaatattaacc

SEQ ID NO: 7935 - DNA, 14 bp, Artificial Sequence
  Description of Artificial Sequence: Synthetic oligonucleotide
aaaccaatattaac

SEQ ID NO: 7936 - DNA, 14 bp, Artificial Sequence
  Description of Artificial Sequence: Synthetic oligonucleotide
caaaccaatattaa

SEQ ID NO: 7937 - DNA, 14 bp, Artificial Sequence
  Description of Artificial Sequence: Synthetic oligonucleotide
ccaaaccaatatta

SEQ ID NO: 7938 - DNA, 14 bp, Artificial Sequence
  Description of Artificial Sequence: Synthetic oligonucleotide
gccaaaccaatatt

SEQ ID NO: 7939 - DNA, 14 bp, Artificial Sequence
  Description of Artificial Sequence: Synthetic oligonucleotide
agccaaaccaatat

SEQ ID NO: 7940 - DNA, 14 bp, Artificial Sequence
  Description of Artificial Sequence: Synthetic oligonucleotide
cagccaaaccaata

SEQ ID NO: 7941 - DNA, 14 bp, Artificial Sequence
  Description of Artificial Sequence: Synthetic oligonucleotide
tcagccaaaccaat

SEQ ID NO: 7942 - DNA, 14 bp, Artificial Sequence
  Description of Artificial Sequence: Synthetic oligonucleotide
ttcagccaaaccaa

SEQ ID NO: 7943 - DNA, 14 bp, Artificial Sequence
  Description of Artificial Sequence: Synthetic oligonucleotide
tttcagccaaacca

SEQ ID NO: 7944 - DNA, 14 bp, Artificial Sequence
  Description of Artificial Sequence: Synthetic oligonucleotide
ctttcagccaaacc

SEQ ID NO: 7945 - DNA, 14 bp, Artificial Sequence
  Description of Artificial Sequence: Synthetic oligonucleotide
tctttcagccaaac

SEQ ID NO: 7946 - DNA, 14 bp, Artificial Sequence
  Description of Artificial Sequence: Synthetic oligonucleotide
ttctttcagccaaa

SEQ ID NO: 7947 - DNA, 14 bp, Artificial Sequence
  Description of Artificial Sequence: Synthetic oligonucleotide
attctttcagccaa

SEQ ID NO: 7948 - DNA, 14 bp, Artificial Sequence
  Description of Artificial Sequence: Synthetic oligonucleotide
aattctttcagcca

SEQ ID NO: 7949 - DNA, 14 bp, Artificial Sequence
  Description of Artificial Sequence: Synthetic oligonucleotide
taattctttcagcc

SEQ ID NO: 7950 - DNA, 14 bp, Artificial Sequence
  Description of Artificial Sequence: Synthetic oligonucleotide
ataattctttcagc

SEQ ID NO: 7951 - DNA, 14 bp, Artificial Sequence
  Description of Artificial Sequence: Synthetic oligonucleotide
cataattctttcag

SEQ ID NO: 7952 - DNA, 14 bp, Artificial Sequence
  Description of Artificial Sequence: Synthetic oligonucleotide
gcataattctttca

SEQ ID NO: 7953 - DNA, 14 bp, Artificial Sequence
  Description of Artificial Sequence: Synthetic oligonucleotide
tgcataattctttc

SEQ ID NO: 7954 - DNA, 14 bp, Artificial Sequence
  Description of Artificial Sequence: Synthetic oligonucleotide
ctgcataattcttt

SEQ ID NO: 7955 - DNA, 14 bp, Artificial Sequence
  Description of Artificial Sequence: Synthetic oligonucleotide
actgcataattctt

SEQ ID NO: 7956 - DNA, 14 bp, Artificial Sequence
  Description of Artificial Sequence: Synthetic oligonucleotide
tactgcataattct

SEQ ID NO: 7957 - DNA, 14 bp, Artificial Sequence
  Description of Artificial Sequence: Synthetic oligonucleotide
ttactgcataattc

SEQ ID NO: 7958 - DNA, 14 bp, Artificial Sequence
  Description of Artificial Sequence: Synthetic oligonucleotide
tttactgcataatt

SEQ ID NO: 7959 - DNA, 14 bp, Artificial Sequence
  Description of Artificial Sequence: Synthetic oligonucleotide
ctttactgcataat

SEQ ID NO: 7960 - DNA, 14 bp, Artificial Sequence
  Description of Artificial Sequence: Synthetic oligonucleotide
actttactgcataa

SEQ ID NO: 7961 - DNA, 14 bp, Artificial Sequence
  Description of Artificial Sequence: Synthetic oligonucleotide
aactttactgcata

SEQ ID NO: 7962 - DNA, 14 bp, Artificial Sequence
  Description of Artificial Sequence: Synthetic oligonucleotide
taactttactgcat

SEQ ID NO: 7963 - DNA, 14 bp, Artificial Sequence
  Description of Artificial Sequence: Synthetic oligonucleotide
ataactttactgca

SEQ ID NO: 7964 - DNA, 14 bp, Artificial Sequence
  Description of Artificial Sequence: Synthetic oligonucleotide
aataactttactgc

SEQ ID NO: 7965 - DNA, 14 bp, Artificial Sequence
  Description of Artificial Sequence: Synthetic oligonucleotide
aaataactttactg

SEQ ID NO: 7966 - DNA, 14 bp, Artificial Sequence
  Description of Artificial Sequence: Synthetic oligonucleotide
taaataactttact

SEQ ID NO: 7967 - DNA, 14 bp, Artificial Sequence
  Description of Artificial Sequence: Synthetic oligonucleotide
ataaataactttac

SEQ ID NO: 7968 - DNA, 14 bp, Artificial Sequence
  Description of Artificial Sequence: Synthetic oligonucleotide
tataaataacttta

SEQ ID NO: 7969 - DNA, 14 bp, Artificial Sequence
  Description of Artificial Sequence: Synthetic oligonucleotide
ttataaataacttt

SEQ ID NO: 7970 - DNA, 14 bp, Artificial Sequence
  Description of Artificial Sequence: Synthetic oligonucleotide
cttataaataactt

SEQ ID NO: 7971 - DNA, 14 bp, Artificial Sequence
  Description of Artificial Sequence: Synthetic oligonucleotide
ccttataaataact

SEQ ID NO: 7972 - DNA, 14 bp, Artificial Sequence
  Description of Artificial Sequence: Synthetic oligonucleotide
cccttataaataac

SEQ ID NO: 7973 - DNA, 14 bp, Artificial Sequence
  Description of Artificial Sequence: Synthetic oligonucleotide
tcccttataaataa

SEQ ID NO: 7974 - DNA, 14 bp, Artificial Sequence
  Description of Artificial Sequence: Synthetic oligonucleotide
ttcccttataaata

SEQ ID NO: 7975 - DNA, 14 bp, Artificial Sequence
  Description of Artificial Sequence: Synthetic oligonucleotide
gttcccttataaat

SEQ ID NO: 7976 - DNA, 14 bp, Artificial Sequence
  Description of Artificial Sequence: Synthetic oligonucleotide
tgttcccttataaa

SEQ ID NO: 7977 - DNA, 14 bp, Artificial Sequence
  Description of Artificial Sequence: Synthetic oligonucleotide
atgttcccttataa

SEQ ID NO: 7978 - DNA, 14 bp, Artificial Sequence
  Description of Artificial Sequence: Synthetic oligonucleotide
catgttcccttata

SEQ ID NO: 7979 - DNA, 14 bp, Artificial Sequence
  Description of Artificial Sequence: Synthetic oligonucleotide
tcatgttcccttat

SEQ ID NO: 7980 - DNA, 14 bp, Artificial Sequence
  Description of Artificial Sequence: Synthetic oligonucleotide
atcatgttccctta

SEQ ID NO: 7981 - DNA, 14 bp, Artificial Sequence
  Description of Artificial Sequence: Synthetic oligonucleotide
catcatgttccctt

SEQ ID NO: 7982 - DNA, 14 bp, Artificial Sequence
  Description of Artificial Sequence: Synthetic oligonucleotide
tcatcatgttccct

SEQ ID NO: 7983 - DNA, 14 bp, Artificial Sequence
  Description of Artificial Sequence: Synthetic oligonucleotide
gtcatcatgttccc

SEQ ID NO: 7984 - DNA, 14 bp, Artificial Sequence
  Description of Artificial Sequence: Synthetic oligonucleotide
agtcatcatgttcc

SEQ ID NO: 7985 - DNA, 14 bp, Artificial Sequence
  Description of Artificial Sequence: Synthetic oligonucleotide
aagtcatcatgttc

SEQ ID NO: 7986 - DNA, 14 bp, Artificial Sequence
  Description of Artificial Sequence: Synthetic oligonucleotide
aaagtcatcatgtt

SEQ ID NO: 7987 - DNA, 14 bp, Artificial Sequence
  Description of Artificial Sequence: Synthetic oligonucleotide
taaagtcatcatgt

SEQ ID NO: 7988 - DNA, 14 bp, Artificial Sequence
  Description of Artificial Sequence: Synthetic oligonucleotide
ataaagtcatcatg

SEQ ID NO: 7989 - DNA, 14 bp, Artificial Sequence
  Description of Artificial Sequence: Synthetic oligonucleotide
aataaagtcatcat

SEQ ID NO: 7990 - DNA, 14 bp, Artificial Sequence
  Description of Artificial Sequence: Synthetic oligonucleotide
gaataaagtcatca

SEQ ID NO: 7991 - DNA, 14 bp, Artificial Sequence
  Description of Artificial Sequence: Synthetic oligonucleotide
tgaataaagtcatc

SEQ ID NO: 7992 - DNA, 14 bp, Artificial Sequence
  Description of Artificial Sequence: Synthetic oligonucleotide
ttgaataaagtcat

SEQ ID NO: 7993 - DNA, 14 bp, Artificial Sequence
  Description of Artificial Sequence: Synthetic oligonucleotide
attgaataaagtca

SEQ ID NO: 7994 - DNA, 14 bp, Artificial Sequence
  Description of Artificial Sequence: Synthetic oligonucleotide
tattgaataaagtc

SEQ ID NO: 7995 - DNA, 14 bp, Artificial Sequence
  Description of Artificial Sequence: Synthetic oligonucleotide
atattgaataaagt

SEQ ID NO: 7996 - DNA, 14 bp, Artificial Sequence
  Description of Artificial Sequence: Synthetic oligonucleotide
aatattgaataaag

SEQ ID NO: 7997 - DNA, 14 bp, Artificial Sequence
  Description of Artificial Sequence: Synthetic oligonucleotide
aaatattgaataaa

SEQ ID NO: 7998 - DNA, 14 bp, Artificial Sequence
  Description of Artificial Sequence: Synthetic oligonucleotide
aaaatattgaataa

SEQ ID NO: 7999 - DNA, 14 bp, Artificial Sequence
  Description of Artificial Sequence: Synthetic oligonucleotide
aaaaatattgaata

SEQ ID NO: 8000 - DNA, 14 bp, Artificial Sequence
  Description of Artificial Sequence: Synthetic oligonucleotide
gaaaaatattgaat

SEQ ID NO: 8001 - DNA, 14 bp, Artificial Sequence
  Description of Artificial Sequence: Synthetic oligonucleotide
agaaaaatattgaa

SEQ ID NO: 8002 - DNA, 14 bp, Artificial Sequence
  Description of Artificial Sequence: Synthetic oligonucleotide
aagaaaaatattga

SEQ ID NO: 8003 - DNA, 14 bp, Artificial Sequence
  Description of Artificial Sequence: Synthetic oligonucleotide
gaagaaaaatattg

SEQ ID NO: 8004 - DNA, 14 bp, Artificial Sequence
  Description of Artificial Sequence: Synthetic oligonucleotide
agaagaaaaatatt

SEQ ID NO: 8005 - DNA, 14 bp, Artificial Sequence
  Description of Artificial Sequence: Synthetic oligonucleotide
aagaagaaaaatat

SEQ ID NO: 8006 - DNA, 14 bp, Artificial Sequence
  Description of Artificial Sequence: Synthetic oligonucleotide
aaagaagaaaaata

SEQ ID NO: 8007 - DNA, 14 bp, Artificial Sequence
  Description of Artificial Sequence: Synthetic oligonucleotide
caaagaagaaaaat

SEQ ID NO: 8008 - DNA, 14 bp, Artificial Sequence
  Description of Artificial Sequence: Synthetic oligonucleotide
tcaaagaagaaaaa

SEQ ID NO: 8009 - DNA, 14 bp, Artificial Sequence
  Description of Artificial Sequence: Synthetic oligonucleotide
ttcaaagaagaaaa

SEQ ID NO: 8010 - DNA, 14 bp, Artificial Sequence
  Description of Artificial Sequence: Synthetic oligonucleotide
tttcaaagaagaaa

SEQ ID NO: 8011 - DNA, 14 bp, Artificial Sequence
  Description of Artificial Sequence: Synthetic oligonucleotide
gtttcaaagaagaa

SEQ ID NO: 8012 - DNA, 14 bp, Artificial Sequence
  Description of Artificial Sequence: Synthetic oligonucleotide
tgtttcaaagaaga

SEQ ID NO: 8013 - DNA, 14 bp, Artificial Sequence
  Description of Artificial Sequence: Synthetic oligonucleotide
atgtttcaaagaag

SEQ ID NO: 8014 - DNA, 14 bp, Artificial Sequence
  Description of Artificial Sequence: Synthetic oligonucleotide
gatgtttcaaagaa

SEQ ID NO: 8015 - DNA, 14 bp, Artificial Sequence
  Description of Artificial Sequence: Synthetic oligonucleotide
agatgtttcaaaga

SEQ ID NO: 8016 - DNA, 14 bp, Artificial Sequence
  Description of Artificial Sequence: Synthetic oligonucleotide
gagatgtttcaaag

SEQ ID NO: 8017 - DNA, 14 bp, Artificial Sequence
  Description of Artificial Sequence: Synthetic oligonucleotide
tgagatgtttcaaa

SEQ ID NO: 8018 - DNA, 14 bp, Artificial Sequence
  Description of Artificial Sequence: Synthetic oligonucleotide
atgagatgtttcaa

SEQ ID NO: 8019 - DNA, 14 bp, Artificial Sequence
  Description of Artificial Sequence: Synthetic oligonucleotide
aatgagatgtttca

SEQ ID NO: 8020 - DNA, 14 bp, Artificial Sequence
  Description of Artificial Sequence: Synthetic oligonucleotide
taatgagatgtttc

SEQ ID NO: 8021 - DNA, 14 bp, Artificial Sequence
  Description of Artificial Sequence: Synthetic oligonucleotide
gtaatgagatgttt

SEQ ID NO: 8022 - DNA, 14 bp, Artificial Sequence
  Description of Artificial Sequence: Synthetic oligonucleotide
agtaatgagatgtt

SEQ ID NO: 8023 - DNA, 14 bp, Artificial Sequence
  Description of Artificial Sequence: Synthetic oligonucleotide
tagtaatgagatgt

SEQ ID NO: 8024 - DNA, 14 bp, Artificial Sequence
  Description of Artificial Sequence: Synthetic oligonucleotide
ttagtaatgagatg

SEQ ID NO: 8025 - DNA, 14 bp, Artificial Sequence
  Description of Artificial Sequence: Synthetic oligonucleotide
gttagtaatgagat

SEQ ID NO: 8026 - DNA, 14 bp, Artificial Sequence
  Description of Artificial Sequence: Synthetic oligonucleotide
agttagtaatgaga

SEQ ID NO: 8027 - DNA, 14 bp, Artificial Sequence
  Description of Artificial Sequence: Synthetic oligonucleotide
aagttagtaatgag

SEQ ID NO: 8028 - DNA, 14 bp, Artificial Sequence
  Description of Artificial Sequence: Synthetic oligonucleotide
aaagttagtaatga

SEQ ID NO: 8029 - DNA, 14 bp, Artificial Sequence
  Description of Artificial Sequence: Synthetic oligonucleotide
aaaagttagtaatg

SEQ ID NO: 8030 - DNA, 14 bp, Artificial Sequence
  Description of Artificial Sequence: Synthetic oligonucleotide
taaaagttagtaat

SEQ ID NO: 8031 - DNA, 14 bp, Artificial Sequence
  Description of Artificial Sequence: Synthetic oligonucleotide
ttaaaagttagtaa

SEQ ID NO: 8032 - DNA, 14 bp, Artificial Sequence
  Description of Artificial Sequence: Synthetic oligonucleotide
cttaaaagttagta

SEQ ID NO: 8033 - DNA, 14 bp, Artificial Sequence
  Description of Artificial Sequence: Synthetic oligonucleotide
tcttaaaagttagt

SEQ ID NO: 8034 - DNA, 14 bp, Artificial Sequence
  Description of Artificial Sequence: Synthetic oligonucleotide
atcttaaaagttag

SEQ ID NO: 8035 - DNA, 14 bp, Artificial Sequence
  Description of Artificial Sequence: Synthetic oligonucleotide
aatcttaaaagtta

SEQ ID NO: 8036 - DNA, 14 bp, Artificial Sequence
  Description of Artificial Sequence: Synthetic oligonucleotide
taatcttaaaagtt

SEQ ID NO: 8037 - DNA, 14 bp, Artificial Sequence
  Description of Artificial Sequence: Synthetic oligonucleotide
ataatcttaaaagt

SEQ ID NO: 8038 - DNA, 14 bp, Artificial Sequence
  Description of Artificial Sequence: Synthetic oligonucleotide
aataatcttaaaag

SEQ ID NO: 8039 - DNA, 14 bp, Artificial Sequence
  Description of Artificial Sequence: Synthetic oligonucleotide
aaataatcttaaaa

SEQ ID NO: 8040 - DNA, 14 bp, Artificial Sequence
  Description of Artificial Sequence: Synthetic oligonucleotide
gaaataatcttaaa

SEQ ID NO: 8041 - DNA, 14 bp, Artificial Sequence
  Description of Artificial Sequence: Synthetic oligonucleotide
tgaaataatcttaa

SEQ ID NO: 8042 - DNA, 14 bp, Artificial Sequence
  Description of Artificial Sequence: Synthetic oligonucleotide
atgaaataatctta

SEQ ID NO: 8043 - DNA, 14 bp, Artificial Sequence
  Description of Artificial Sequence: Synthetic oligonucleotide
tatgaaataatctt

SEQ ID NO: 8044 - DNA, 14 bp, Artificial Sequence
  Description of Artificial Sequence: Synthetic oligonucleotide
ttatgaaataatct

SEQ ID NO: 8045 - DNA, 14 bp, Artificial Sequence
  Description of Artificial Sequence: Synthetic oligonucleotide
attatgaaataatc

SEQ ID NO: 8046 - DNA, 14 bp, Artificial Sequence
  Description of Artificial Sequence: Synthetic oligonucleotide
gattatgaaataat

SEQ ID NO: 8047 - DNA, 14 bp, Artificial Sequence
  Description of Artificial Sequence: Synthetic oligonucleotide
ggattatgaaataa

SEQ ID NO: 8048 - DNA, 14 bp, Artificial Sequence
  Description of Artificial Sequence: Synthetic oligonucleotide
gggattatgaaata

SEQ ID NO: 8049 - DNA, 14 bp, Artificial Sequence
  Description of Artificial Sequence: Synthetic oligonucleotide
agggattatgaaat

SEQ ID NO: 8050 - DNA, 14 bp, Artificial Sequence
  Description of Artificial Sequence: Synthetic oligonucleotide
aagggattatgaaa

SEQ ID NO: 8051 - DNA, 14 bp, Artificial Sequence
  Description of Artificial Sequence: Synthetic oligonucleotide
taagggattatgaa

SEQ ID NO: 8052 - DNA, 14 bp, Artificial Sequence
  Description of Artificial Sequence: Synthetic oligonucleotide
ataagggattatga

SEQ ID NO: 8053 - DNA, 14 bp, Artificial Sequence
  Description of Artificial Sequence: Synthetic oligonucleotide
tataagggattatg

SEQ ID NO: 8054 - DNA, 14 bp, Artificial Sequence
  Description of Artificial Sequence: Synthetic oligonucleotide
gtataagggattat

SEQ ID NO: 8055 - DNA, 14 bp, Artificial Sequence
  Description of Artificial Sequence: Synthetic oligonucleotide
tgtataagggatta

SEQ ID NO: 8056 - DNA, 14 bp, Artificial Sequence
  Description of Artificial Sequence: Synthetic oligonucleotide
atgtataagggatt

SEQ ID NO: 8057 - DNA, 14 bp, Artificial Sequence
  Description of Artificial Sequence: Synthetic oligonucleotide
catgtataagggat

SEQ ID NO: 8058 - DNA, 14 bp, Artificial Sequence
  Description of Artificial Sequence: Synthetic oligonucleotide
tcatgtataaggga

SEQ ID NO: 8059 - DNA, 14 bp, Artificial Sequence
  Description of Artificial Sequence: Synthetic oligonucleotide
ctcatgtataaggg

SEQ ID NO: 8060 - DNA, 14 bp, Artificial Sequence
  Description of Artificial Sequence: Synthetic oligonucleotide
gctcatgtataagg

SEQ ID NO: 8061 - DNA, 14 bp, Artificial Sequence
  Description of Artificial Sequence: Synthetic oligonucleotide
ggctcatgtataag

SEQ ID NO: 8062 - DNA, 14 bp, Artificial Sequence
  Description of Artificial Sequence: Synthetic oligonucleotide
tggctcatgtataa

SEQ ID NO: 8063 - DNA, 14 bp, Artificial Sequence
  Description of Artificial Sequence: Synthetic oligonucleotide
ttggctcatgtata

SEQ ID NO: 8064 - DNA, 14 bp, Artificial Sequence
  Description of Artificial Sequence: Synthetic oligonucleotide
attggctcatgtat

SEQ ID NO: 8065 - DNA, 14 bp, Artificial Sequence
  Description of Artificial Sequence: Synthetic oligonucleotide
cattggctcatgta

SEQ ID NO: 8066 - DNA, 14 bp, Artificial Sequence
  Description of Artificial Sequence: Synthetic oligonucleotide
tcattggctcatgt

SEQ ID NO: 8067 - DNA, 14 bp, Artificial Sequence
  Description of Artificial Sequence: Synthetic oligonucleotide
ttcattggctcatg

SEQ ID NO: 8068 - DNA, 14 bp, Artificial Sequence
  Description of Artificial Sequence: Synthetic oligonucleotide
tttcattggctcat

SEQ ID NO: 8069 - DNA, 14 bp, Artificial Sequence
  Description of Artificial Sequence: Synthetic oligonucleotide
atttcattggctca

SEQ ID NO: 8070 - DNA, 14 bp, Artificial Sequence
  Description of Artificial Sequence: Synthetic oligonucleotide
tatttcattggctc

SEQ ID NO: 8071 - DNA, 14 bp, Artificial Sequence
  Description of Artificial Sequence: Synthetic oligonucleotide
atatttcattggct

SEQ ID NO: 8072 - DNA, 14 bp, Artificial Sequence
  Description of Artificial Sequence: Synthetic oligonucleotide
aatatttcattggc

SEQ ID NO: 8073 - DNA, 14 bp, Artificial Sequence
  Description of Artificial Sequence: Synthetic oligonucleotide
aaatatttcattgg

SEQ ID NO: 8074 - DNA, 14 bp, Artificial Sequence
  Description of Artificial Sequence: Synthetic oligonucleotide
aaaatatttcattg

SEQ ID NO: 8075 - DNA, 14 bp, Artificial Sequence
  Description of Artificial Sequence: Synthetic oligonucleotide
caaaatatttcatt

SEQ ID NO: 8076 - DNA, 14 bp, Artificial Sequence
  Description of Artificial Sequence: Synthetic oligonucleotide
tcaaaatatttcat

SEQ ID NO: 8077 - DNA, 14 bp, Artificial Sequence
  Description of Artificial Sequence: Synthetic oligonucleotide
ctcaaaatatttca

SEQ ID NO: 8078 - DNA, 14 bp, Artificial Sequence
  Description of Artificial Sequence: Synthetic oligonucleotide
gctcaaaatatttc

SEQ ID NO: 8079 - DNA, 14 bp, Artificial Sequence
  Description of Artificial Sequence: Synthetic oligonucleotide
agctcaaaatattt

SEQ ID NO: 8080 - DNA, 14 bp, Artificial Sequence
  Description of Artificial Sequence: Synthetic oligonucleotide
gagctcaaaatatt

SEQ ID NO: 8081 - DNA, 14 bp, Artificial Sequence
  Description of Artificial Sequence: Synthetic oligonucleotide
agagctcaaaatat

SEQ ID NO: 8082 - DNA, 14 bp, Artificial Sequence
  Description of Artificial Sequence: Synthetic oligonucleotide
tagagctcaaaata

SEQ ID NO: 8083 - DNA, 14 bp, Artificial Sequence
  Description of Artificial Sequence: Synthetic oligonucleotide
gtagagctcaaaat

SEQ ID NO: 8084 - DNA, 14 bp, Artificial Sequence
  Description of Artificial Sequence: Synthetic oligonucleotide
agtagagctcaaaa

SEQ ID NO: 8085 - DNA, 14 bp, Artificial Sequence
  Description of Artificial Sequence: Synthetic oligonucleotide
aagtagagctcaaa

SEQ ID NO: 8086 - DNA, 14 bp, Artificial Sequence
  Description of Artificial Sequence: Synthetic oligonucleotide
taagtagagctcaa

SEQ ID NO: 8087 - DNA, 14 bp, Artificial Sequence
  Description of Artificial Sequence: Synthetic oligonucleotide
ttaagtagagctca

SEQ ID NO: 8088 - DNA, 14 bp, Artificial Sequence
  Description of Artificial Sequence: Synthetic oligonucleotide
cttaagtagagctc

SEQ ID NO: 8089 - DNA, 14 bp, Artificial Sequence
  Description of Artificial Sequence: Synthetic oligonucleotide
tcttaagtagagct

SEQ ID NO: 8090 - DNA, 14 bp, Artificial Sequence
  Description of Artificial Sequence: Synthetic oligonucleotide
ttcttaagtagagc

SEQ ID NO: 8091 - DNA, 14 bp, Artificial Sequence
  Description of Artificial Sequence: Synthetic oligonucleotide
cttcttaagtagag

SEQ ID NO: 8092 - DNA, 14 bp, Artificial Sequence
  Description of Artificial Sequence: Synthetic oligonucleotide
gcttcttaagtaga

SEQ ID NO: 8093 - DNA, 14 bp, Artificial Sequence
  Description of Artificial Sequence: Synthetic oligonucleotide
tgcttcttaagtag

SEQ ID NO: 8094 - DNA, 14 bp, Artificial Sequence
  Description of Artificial Sequence: Synthetic oligonucleotide
atgcttcttaagta

SEQ ID NO: 8095 - DNA, 14 bp, Artificial Sequence
  Description of Artificial Sequence: Synthetic oligonucleotide
catgcttcttaagt

SEQ ID NO: 8096 - DNA, 14 bp, Artificial Sequence
  Description of Artificial Sequence: Synthetic oligonucleotide
tcatgcttcttaag

SEQ ID NO: 8097 - DNA, 14 bp, Artificial Sequence
  Description of Artificial Sequence: Synthetic oligonucleotide
ttcatgcttcttaa

SEQ ID NO: 8098 - DNA, 14 bp, Artificial Sequence
  Description of Artificial Sequence: Synthetic oligonucleotide
cttcatgcttctta

SEQ ID NO: 8099 - DNA, 14 bp, Artificial Sequence
  Description of Artificial Sequence: Synthetic oligonucleotide
acttcatgcttctt

SEQ ID NO: 8100 - DNA, 14 bp, Artificial Sequence
  Description of Artificial Sequence: Synthetic oligonucleotide
gacttcatgcttct

SEQ ID NO: 8101 - DNA, 14 bp, Artificial Sequence
  Description of Artificial Sequence: Synthetic oligonucleotide
agacttcatgcttc

SEQ ID NO: 8102 - DNA, 14 bp, Artificial Sequence
  Description of Artificial Sequence: Synthetic oligonucleotide
tagacttcatgctt

SEQ ID NO: 8103 - DNA, 14 bp, Artificial Sequence
  Description of Artificial Sequence: Synthetic oligonucleotide
atagacttcatgct

SEQ ID NO: 8104 - DNA, 14 bp, Artificial Sequence
  Description of Artificial Sequence: Synthetic oligonucleotide
tatagacttcatgc

SEQ ID NO: 8105 - DNA, 14 bp, Artificial Sequence
  Description of Artificial Sequence: Synthetic oligonucleotide
atatagacttcatg

SEQ ID NO: 8106 - DNA, 14 bp, Artificial Sequence
  Description of Artificial Sequence: Synthetic oligonucleotide
aatatagacttcat

SEQ ID NO: 8107 - DNA, 14 bp, Artificial Sequence
  Description of Artificial Sequence: Synthetic oligonucleotide
taatatagacttca

SEQ ID NO: 8108 - DNA, 14 bp, Artificial Sequence
  Description of Artificial Sequence: Synthetic oligonucleotide
ataatatagacttc

SEQ ID NO: 8109 - DNA, 14 bp, Artificial Sequence
  Description of Artificial Sequence: Synthetic oligonucleotide
tataatatagactt

SEQ ID NO: 8110 - DNA, 14 bp, Artificial Sequence
  Description of Artificial Sequence: Synthetic oligonucleotide
ttataatatagact

SEQ ID NO: 8111 - DNA, 14 bp, Artificial Sequence
  Description of Artificial Sequence: Synthetic oligonucleotide
tttataatatagac

SEQ ID NO: 8112 - DNA, 14 bp, Artificial Sequence
  Description of Artificial Sequence: Synthetic oligonucleotide
atttataatataga

SEQ ID NO: 8113 - DNA, 14 bp, Artificial Sequence
  Description of Artificial Sequence: Synthetic oligonucleotide
gatttataatatag

SEQ ID NO: 8114 - DNA, 14 bp, Artificial Sequence
  Description of Artificial Sequence: Synthetic oligonucleotide
agatttataatata

SEQ ID NO: 8115 - DNA, 14 bp, Artificial Sequence
  Description of Artificial Sequence: Synthetic oligonucleotide
tagatttataatat

SEQ ID NO: 8116 - DNA, 14 bp, Artificial Sequence
  Description of Artificial Sequence: Synthetic oligonucleotide
ttagatttataata

SEQ ID NO: 8117 - DNA, 14 bp, Artificial Sequence
  Description of Artificial Sequence: Synthetic oligonucleotide
tttagatttataat

SEQ ID NO: 8118 - DNA, 14 bp, Artificial Sequence
  Description of Artificial Sequence: Synthetic oligonucleotide
gtttagatttataa

SEQ ID NO: 8119 - DNA, 14 bp, Artificial Sequence
  Description of Artificial Sequence: Synthetic oligonucleotide
tgtttagatttata

SEQ ID NO: 8120 - DNA, 14 bp, Artificial Sequence
  Description of Artificial Sequence: Synthetic oligonucleotide
ttgtttagatttat

SEQ ID NO: 8121 - DNA, 14 bp, Artificial Sequence
  Description of Artificial Sequence: Synthetic oligonucleotide
gttgtttagattta

SEQ ID NO: 8122 - DNA, 14 bp, Artificial Sequence
  Description of Artificial Sequence: Synthetic oligonucleotide
tgttgtttagattt

SEQ ID NO: 8123 - DNA, 14 bp, Artificial Sequence
  Description of Artificial Sequence: Synthetic oligonucleotide
ttgttgtttagatt

SEQ ID NO: 8124 - DNA, 14 bp, Artificial Sequence
  Description of Artificial Sequence: Synthetic oligonucleotide
tttgttgtttagat

SEQ ID NO: 8125 - DNA, 14 bp, Artificial Sequence
  Description of Artificial Sequence: Synthetic oligonucleotide
ttttgttgtttaga

SEQ ID NO: 8126 - DNA, 14 bp, Artificial Sequence
  Description of Artificial Sequence: Synthetic oligonucleotide
cttttgttgtttag

SEQ ID NO: 8127 - DNA, 14 bp, Artificial Sequence
  Description of Artificial Sequence: Synthetic oligonucleotide
gcttttgttgttta

SEQ ID NO: 8128 - DNA, 14 bp, Artificial Sequence
  Description of Artificial Sequence: Synthetic oligonucleotide
tgcttttgttgttt

SEQ ID NO: 8129 - DNA, 14 bp, Artificial Sequence
  Description of Artificial Sequence: Synthetic oligonucleotide
gtgcttttgttgtt

SEQ ID NO: 8130 - DNA, 14 bp, Artificial Sequence
  Description of Artificial Sequence: Synthetic oligonucleotide
agtgcttttgttgt

SEQ ID NO: 8131 - DNA, 14 bp, Artificial Sequence
  Description of Artificial Sequence: Synthetic oligonucleotide
aagtgcttttgttg

SEQ ID NO: 8132 - DNA, 14 bp, Artificial Sequence
  Description of Artificial Sequence: Synthetic oligonucleotide
caagtgcttttgtt

SEQ ID NO: 8133 - DNA, 14 bp, Artificial Sequence
  Description of Artificial Sequence: Synthetic oligonucleotide
acaagtgcttttgt

SEQ ID NO: 8134 - DNA, 14 bp, Artificial Sequence
  Description of Artificial Sequence: Synthetic oligonucleotide
tacaagtgcttttg

SEQ ID NO: 8135 - DNA, 14 bp, Artificial Sequence
  Description of Artificial Sequence: Synthetic oligonucleotide
ttacaagtgctttt

SEQ ID NO: 8136 - DNA, 14 bp, Artificial Sequence
  Description of Artificial Sequence: Synthetic oligonucleotide
gttacaagtgcttt

SEQ ID NO: 8137 - DNA, 14 bp, Artificial Sequence
  Description of Artificial Sequence: Synthetic oligonucleotide
agttacaagtgctt

SEQ ID NO: 8138 - DNA, 14 bp, Artificial Sequence
  Description of Artificial Sequence: Synthetic oligonucleotide
aagttacaagtgct

SEQ ID NO: 8139 - DNA, 14 bp, Artificial Sequence
  Description of Artificial Sequence: Synthetic oligonucleotide
caagttacaagtgc

SEQ ID NO: 8140 - DNA, 14 bp, Artificial Sequence
  Description of Artificial Sequence: Synthetic oligonucleotide
acaagttacaagtg

SEQ ID NO: 8141 - DNA, 14 bp, Artificial Sequence
  Description of Artificial Sequence: Synthetic oligonucleotide
aacaagttacaagt

SEQ ID NO: 8142 - DNA, 14 bp, Artificial Sequence
  Description of Artificial Sequence: Synthetic oligonucleotide
aaacaagttacaag

SEQ ID NO: 8143 - DNA, 14 bp, Artificial Sequence
  Description of Artificial Sequence: Synthetic oligonucleotide
taaacaagttacaa

SEQ ID NO: 8144 - DNA, 14 bp, Artificial Sequence
  Description of Artificial Sequence: Synthetic oligonucleotide
ctaaacaagttaca

SEQ ID NO: 8145 - DNA, 14 bp, Artificial Sequence
  Description of Artificial Sequence: Synthetic oligonucleotide
actaaacaagttac

SEQ ID NO: 8146 - DNA, 14 bp, Artificial Sequence
  Description of Artificial Sequence: Synthetic oligonucleotide
tactaaacaagtta

SEQ ID NO: 8147 - DNA, 14 bp, Artificial Sequence
  Description of Artificial Sequence: Synthetic oligonucleotide
ttactaaacaagtt

SEQ ID NO: 8148 - DNA, 14 bp, Artificial Sequence
  Description of Artificial Sequence: Synthetic oligonucleotide
tttactaaacaagt

SEQ ID NO: 8149 - DNA, 14 bp, Artificial Sequence
  Description of Artificial Sequence: Synthetic oligonucleotide
atttactaaacaag

SEQ ID NO: 8150 - DNA, 14 bp, Artificial Sequence
  Description of Artificial Sequence: Synthetic oligonucleotide
aatttactaaacaa

SEQ ID NO: 8151 - DNA, 14 bp, Artificial Sequence
  Description of Artificial Sequence: Synthetic oligonucleotide
gaatttactaaaca

SEQ ID NO: 8152 - DNA, 14 bp, Artificial Sequence
  Description of Artificial Sequence: Synthetic oligonucleotide
ggaatttactaaac

SEQ ID NO: 8153 - DNA, 14 bp, Artificial Sequence
  Description of Artificial Sequence: Synthetic oligonucleotide
tggaatttactaaa

SEQ ID NO: 8154 - DNA, 14 bp, Artificial Sequence
  Description of Artificial Sequence: Synthetic oligonucleotide
atggaatttactaa

SEQ ID NO: 8155 - DNA, 14 bp, Artificial Sequence
  Description of Artificial Sequence: Synthetic oligonucleotide
catggaatttacta

SEQ ID NO: 8156 - DNA, 14 bp, Artificial Sequence
  Description of Artificial Sequence: Synthetic oligonucleotide
gcatggaatttact

SEQ ID NO: 8157 - DNA, 14 bp, Artificial Sequence
  Description of Artificial Sequence: Synthetic oligonucleotide
ggcatggaatttac

SEQ ID NO: 8158 - DNA, 14 bp, Artificial Sequence
  Description of Artificial Sequence: Synthetic oligonucleotide
aggcatggaattta

SEQ ID NO: 8159 - DNA, 14 bp, Artificial Sequence
  Description of Artificial Sequence: Synthetic oligonucleotide
aaggcatggaattt

SEQ ID NO: 8160 - DNA, 14 bp, Artificial Sequence
  Description of Artificial Sequence: Synthetic oligonucleotide
taaggcatggaatt

SEQ ID NO: 8161 - DNA, 14 bp, Artificial Sequence
  Description of Artificial Sequence: Synthetic oligonucleotide
ataaggcatggaat

SEQ ID NO: 8162 - DNA, 14 bp, Artificial Sequence
  Description of Artificial Sequence: Synthetic oligonucleotide
aataaggcatggaa

SEQ ID NO: 8163 - DNA, 14 bp, Artificial Sequence
  Description of Artificial Sequence: Synthetic oligonucleotide
aaataaggcatgga

SEQ ID NO: 8164 - DNA, 14 bp, Artificial Sequence
  Description of Artificial Sequence: Synthetic oligonucleotide
aaaataaggcatgg

SEQ ID NO: 8165 - DNA, 14 bp, Artificial Sequence
  Description of Artificial Sequence: Synthetic oligonucleotide
gaaaataaggcatg

SEQ ID NO: 8166 - DNA, 14 bp, Artificial Sequence
  Description of Artificial Sequence: Synthetic oligonucleotide
ggaaaataaggcat

SEQ ID NO: 8167 - DNA, 14 bp, Artificial Sequence
  Description of Artificial Sequence: Synthetic oligonucleotide
tggaaaataaggca

SEQ ID NO: 8168 - DNA, 14 bp, Artificial Sequence
  Description of Artificial Sequence: Synthetic oligonucleotide
atggaaaataaggc

SEQ ID NO: 8169 - DNA, 14 bp, Artificial Sequence
  Description of Artificial Sequence: Synthetic oligonucleotide
aatggaaaataagg

SEQ ID NO: 8170 - DNA, 14 bp, Artificial Sequence
  Description of Artificial Sequence: Synthetic oligonucleotide
aaatggaaaataag

SEQ ID NO: 8171 - DNA, 14 bp, Artificial Sequence
  Description of Artificial Sequence: Synthetic oligonucleotide
aaaatggaaaataa

SEQ ID NO: 8172 - DNA, 14 bp, Artificial Sequence
  Description of Artificial Sequence: Synthetic oligonucleotide
aaaaatggaaaata

SEQ ID NO: 8173 - DNA, 14 bp, Artificial Sequence
  Description of Artificial Sequence: Synthetic oligonucleotide
caaaaatggaaaat

SEQ ID NO: 8174 - DNA, 14 bp, Artificial Sequence
  Description of Artificial Sequence: Synthetic oligonucleotide
tcaaaaatggaaaa

SEQ ID NO: 8175 - DNA, 14 bp, Artificial Sequence
  Description of Artificial Sequence: Synthetic oligonucleotide
gtcaaaaatggaaa

SEQ ID NO: 8176 - DNA, 14 bp, Artificial Sequence
  Description of Artificial Sequence: Synthetic oligonucleotide
tgtcaaaaatggaa

SEQ ID NO: 8177 - DNA, 14 bp, Artificial Sequence
  Description of Artificial Sequence: Synthetic oligonucleotide
gtgtcaaaaatgga

SEQ ID NO: 8178 - DNA, 14 bp, Artificial Sequence
  Description of Artificial Sequence: Synthetic oligonucleotide
ggtgtcaaaaatgg

SEQ ID NO: 8179 - DNA, 14 bp, Artificial Sequence
  Description of Artificial Sequence: Synthetic oligonucleotide
cggtgtcaaaaatg

SEQ ID NO: 8180 - DNA, 14 bp, Artificial Sequence
  Description of Artificial Sequence: Synthetic oligonucleotide
acggtgtcaaaaat

SEQ ID NO: 8181 - DNA, 14 bp, Artificial Sequence
  Description of Artificial Sequence: Synthetic oligonucleotide
tacggtgtcaaaaa

SEQ ID NO: 8182 - DNA, 14 bp, Artificial Sequence
  Description of Artificial Sequence: Synthetic oligonucleotide
ttacggtgtcaaaa

SEQ ID NO: 8183 - DNA, 14 bp, Artificial Sequence
  Description of Artificial Sequence: Synthetic oligonucleotide
tttacggtgtcaaa

SEQ ID NO: 8184 - DNA, 14 bp, Artificial Sequence
  Description of Artificial Sequence: Synthetic oligonucleotide
ctttacggtgtcaa

SEQ ID NO: 8185 - DNA, 14 bp, Artificial Sequence
  Description of Artificial Sequence: Synthetic oligonucleotide
actttacggtgtca

SEQ ID NO: 8186 - DNA, 14 bp, Artificial Sequence
  Description of Artificial Sequence: Synthetic oligonucleotide
cactttacggtgtc

SEQ ID NO: 8187 - DNA, 14 bp, Artificial Sequence
  Description of Artificial Sequence: Synthetic oligonucleotide
gcactttacggtgt

SEQ ID NO: 8188 - DNA, 14 bp, Artificial Sequence
  Description of Artificial Sequence: Synthetic oligonucleotide
tgcactttacggtg

SEQ ID NO: 8189 - DNA, 14 bp, Artificial Sequence
  Description of Artificial Sequence: Synthetic oligonucleotide
atgcactttacggt

SEQ ID NO: 8190 - DNA, 14 bp, Artificial Sequence
  Description of Artificial Sequence: Synthetic oligonucleotide
aatgcactttacgg

SEQ ID NO: 8191 - DNA, 14 bp, Artificial Sequence
  Description of Artificial Sequence: Synthetic oligonucleotide
aaatgcactttacg

SEQ ID NO: 8192 - DNA, 14 bp, Artificial Sequence
  Description of Artificial Sequence: Synthetic oligonucleotide
aaaatgcactttac

SEQ ID NO: 8193 - DNA, 14 bp, Artificial Sequence
  Description of Artificial Sequence: Synthetic oligonucleotide
gaaaatgcacttta

SEQ ID NO: 8194 - DNA, 14 bp, Artificial Sequence
  Description of Artificial Sequence: Synthetic oligonucleotide
agaaaatgcacttt

SEQ ID NO: 8195 - DNA, 14 bp, Artificial Sequence
  Description of Artificial Sequence: Synthetic oligonucleotide
cagaaaatgcactt

SEQ ID NO: 8196 - DNA, 14 bp, Artificial Sequence
  Description of Artificial Sequence: Synthetic oligonucleotide
acagaaaatgcact

SEQ ID NO: 8197 - DNA, 14 bp, Artificial Sequence
  Description of Artificial Sequence: Synthetic oligonucleotide
gacagaaaatgcac

SEQ ID NO: 8198 - DNA, 14 bp, Artificial Sequence
  Description of Artificial Sequence: Synthetic oligonucleotide
cgacagaaaatgca

SEQ ID NO: 8199 - DNA, 14 bp, Artificial Sequence
  Description of Artificial Sequence: Synthetic oligonucleotide
tcgacagaaaatgc

SEQ ID NO: 8200 - DNA, 14 bp, Artificial Sequence
  Description of Artificial Sequence: Synthetic oligonucleotide
gtcgacagaaaatg

SEQ ID NO: 8201 - DNA, 14 bp, Artificial Sequence
  Description of Artificial Sequence: Synthetic oligonucleotide
agtcgacagaaaat

SEQ ID NO: 8202 - DNA, 14 bp, Artificial Sequence
  Description of Artificial Sequence: Synthetic oligonucleotide
cagtcgacagaaaa

SEQ ID NO: 8203 - DNA, 14 bp, Artificial Sequence
  Description of Artificial Sequence: Synthetic oligonucleotide
acagtcgacagaaa

SEQ ID NO: 8204 - DNA, 14 bp, Artificial Sequence
  Description of Artificial Sequence: Synthetic oligonucleotide
cacagtcgacagaa

SEQ ID NO: 8205 - DNA, 14 bp, Artificial Sequence
  Description of Artificial Sequence: Synthetic oligonucleotide
tcacagtcgacaga

SEQ ID NO: 8206 - DNA, 14 bp, Artificial Sequence
  Description of Artificial Sequence: Synthetic oligonucleotide
ctcacagtcgacag

SEQ ID NO: 8207 - DNA, 14 bp, Artificial Sequence
  Description of Artificial Sequence: Synthetic oligonucleotide
gctcacagtcgaca

SEQ ID NO: 8208 - DNA, 14 bp, Artificial Sequence
  Description of Artificial Sequence: Synthetic oligonucleotide
tgctcacagtcgac

SEQ ID NO: 8209 - DNA, 14 bp, Artificial Sequence
  Description of Artificial Sequence: Synthetic oligonucleotide
ttgctcacagtcga

SEQ ID NO: 8210 - DNA, 14 bp, Artificial Sequence
  Description of Artificial Sequence: Synthetic oligonucleotide
tttgctcacagtcg

SEQ ID NO: 8211 - DNA, 14 bp, Artificial Sequence
  Description of Artificial Sequence: Synthetic oligonucleotide
atttgctcacagtc

SEQ ID NO: 8212 - DNA, 14 bp, Artificial Sequence
  Description of Artificial Sequence: Synthetic oligonucleotide
aatttgctcacagt

SEQ ID NO: 8213 - DNA, 14 bp, Artificial Sequence
  Description of Artificial Sequence: Synthetic oligonucleotide
aaatttgctcacag

SEQ ID NO: 8214 - DNA, 14 bp, Artificial Sequence
  Description of Artificial Sequence: Synthetic oligonucleotide
gaaatttgctcaca

SEQ ID NO: 8215 - DNA, 14 bp, Artificial Sequence
  Description of Artificial Sequence: Synthetic oligonucleotide
ggaaatttgctcac

SEQ ID NO: 8216 - DNA, 14 bp, Artificial Sequence
  Description of Artificial Sequence: Synthetic oligonucleotide
gggaaatttgctca

SEQ ID NO: 8217 - DNA, 14 bp, Artificial Sequence
  Description of Artificial Sequence: Synthetic oligonucleotide
agggaaatttgctc

SEQ ID NO: 8218 - DNA, 14 bp, Artificial Sequence
  Description of Artificial Sequence: Synthetic oligonucleotide
aagggaaatttgct

SEQ ID NO: 8219 - DNA, 14 bp, Artificial Sequence
  Description of Artificial Sequence: Synthetic oligonucleotide
aaagggaaatttgc

SEQ ID NO: 8220 - DNA, 14 bp, Artificial Sequence
  Description of Artificial Sequence: Synthetic oligonucleotide
aaaagggaaatttg

SEQ ID NO: 8221 - DNA, 14 bp, Artificial Sequence
  Description of Artificial Sequence: Synthetic oligonucleotide
caaaagggaaattt

SEQ ID NO: 8222 - DNA, 14 bp, Artificial Sequence
  Description of Artificial Sequence: Synthetic oligonucleotide
gcaaaagggaaatt

SEQ ID NO: 8223 - DNA, 14 bp, Artificial Sequence
  Description of Artificial Sequence: Synthetic oligonucleotide
ggcaaaagggaaat

SEQ ID NO: 8224 - DNA, 14 bp, Artificial Sequence
  Description of Artificial Sequence: Synthetic oligonucleotide
aggcaaaagggaaa

SEQ ID NO: 8225 - DNA, 14 bp, Artificial Sequence
  Description of Artificial Sequence: Synthetic oligonucleotide
aaggcaaaagggaa

SEQ ID NO: 8226 - DNA, 14 bp, Artificial Sequence
  Description of Artificial Sequence: Synthetic oligonucleotide
aaaggcaaaaggga

SEQ ID NO: 8227 - DNA, 14 bp, Artificial Sequence
  Description of Artificial Sequence: Synthetic oligonucleotide
taaaggcaaaaggg

SEQ ID NO: 8228 - DNA, 14 bp, Artificial Sequence
  Description of Artificial Sequence: Synthetic oligonucleotide
ttaaaggcaaaagg

SEQ ID NO: 8229 - DNA, 14 bp, Artificial Sequence
  Description of Artificial Sequence: Synthetic oligonucleotide
attaaaggcaaaag

SEQ ID NO: 8230 - DNA, 14 bp, Artificial Sequence
  Description of Artificial Sequence: Synthetic oligonucleotide
cattaaaggcaaaa

SEQ ID NO: 8231 - DNA, 14 bp, Artificial Sequence
  Description of Artificial Sequence: Synthetic oligonucleotide
tcattaaaggcaaa

SEQ ID NO: 8232 - DNA, 14 bp, Artificial Sequence
  Description of Artificial Sequence: Synthetic oligonucleotide
ttcattaaaggcaa

SEQ ID NO: 8233 - DNA, 14 bp, Artificial Sequence
  Description of Artificial Sequence: Synthetic oligonucleotide
tttcattaaaggca

SEQ ID NO: 8234 - DNA, 14 bp, Artificial Sequence
  Description of Artificial Sequence: Synthetic oligonucleotide
ttttcattaaaggc

SEQ ID NO: 8235 - DNA, 14 bp, Artificial Sequence
  Description of Artificial Sequence: Synthetic oligonucleotide
attttcattaaagg

SEQ ID NO: 8236 - DNA, 14 bp, Artificial Sequence
  Description of Artificial Sequence: Synthetic oligonucleotide
tattttcattaaag

SEQ ID NO: 8237 - DNA, 14 bp, Artificial Sequence
  Description of Artificial Sequence: Synthetic oligonucleotide
ctattttcattaaa

SEQ ID NO: 8238 - DNA, 14 bp, Artificial Sequence
  Description of Artificial Sequence: Synthetic oligonucleotide
actattttcattaa

SEQ ID NO: 8239 - DNA, 14 bp, Artificial Sequence
  Description of Artificial Sequence: Synthetic oligonucleotide
cactattttcatta

SEQ ID NO: 8240 - DNA, 14 bp, Artificial Sequence
  Description of Artificial Sequence: Synthetic oligonucleotide
gcactattttcatt

SEQ ID NO: 8241 - DNA, 14 bp, Artificial Sequence
  Description of Artificial Sequence: Synthetic oligonucleotide
tgcactattttcat

SEQ ID NO: 8242 - DNA, 14 bp, Artificial Sequence
  Description of Artificial Sequence: Synthetic oligonucleotide
atgcactattttca

SEQ ID NO: 8243 - DNA, 14 bp, Artificial Sequence
  Description of Artificial Sequence: Synthetic oligonucleotide
aatgcactattttc

SEQ ID NO: 8244 - DNA, 14 bp, Artificial Sequence
  Description of Artificial Sequence: Synthetic oligonucleotide
taatgcactatttt

SEQ ID NO: 8245 - DNA, 14 bp, Artificial Sequence
  Description of Artificial Sequence: Synthetic oligonucleotide
ttaatgcactattt

SEQ ID NO: 8246 - DNA, 14 bp, Artificial Sequence
  Description of Artificial Sequence: Synthetic oligonucleotide
cttaatgcactatt

SEQ ID NO: 8247 - DNA, 14 bp, Artificial Sequence
  Description of Artificial Sequence: Synthetic oligonucleotide
acttaatgcactat

SEQ ID NO: 8248 - DNA, 14 bp, Artificial Sequence
  Description of Artificial Sequence: Synthetic oligonucleotide
tacttaatgcacta

SEQ ID NO: 8249 - DNA, 14 bp, Artificial Sequence
  Description of Artificial Sequence: Synthetic oligonucleotide
ctacttaatgcact

SEQ ID NO: 8250 - DNA, 14 bp, Artificial Sequence
  Description of Artificial Sequence: Synthetic oligonucleotide
gctacttaatgcac

SEQ ID NO: 8251 - DNA, 14 bp, Artificial Sequence
  Description of Artificial Sequence: Synthetic oligonucleotide
ggctacttaatgca

SEQ ID NO: 8252 - DNA, 14 bp, Artificial Sequence
  Description of Artificial Sequence: Synthetic oligonucleotide
tggctacttaatgc

SEQ ID NO: 8253 - DNA, 14 bp, Artificial Sequence
  Description of Artificial Sequence: Synthetic oligonucleotide
ttggctacttaatg

SEQ ID NO: 8254 - DNA, 14 bp, Artificial Sequence
  Description of Artificial Sequence: Synthetic oligonucleotide
attggctacttaat

SEQ ID NO: 8255 - DNA, 14 bp, Artificial Sequence
  Description of Artificial Sequence: Synthetic oligonucleotide
aattggctacttaa

SEQ ID NO: 8256 - DNA, 14 bp, Artificial Sequence
  Description of Artificial Sequence: Synthetic oligonucleotide
caattggctactta

SEQ ID NO: 8257 - DNA, 14 bp, Artificial Sequence
  Description of Artificial Sequence: Synthetic oligonucleotide
gcaattggctactt

SEQ ID NO: 8258 - DNA, 14 bp, Artificial Sequence
  Description of Artificial Sequence: Synthetic oligonucleotide
agcaattggctact

SEQ ID NO: 8259 - DNA, 14 bp, Artificial Sequence
  Description of Artificial Sequence: Synthetic oligonucleotide
cagcaattggctac

SEQ ID NO: 8260 - DNA, 14 bp, Artificial Sequence
  Description of Artificial Sequence: Synthetic oligonucleotide
gcagcaattggcta

SEQ ID NO: 8261 - DNA, 14 bp, Artificial Sequence
  Description of Artificial Sequence: Synthetic oligonucleotide
tgcagcaattggct

SEQ ID NO: 8262 - DNA, 14 bp, Artificial Sequence
  Description of Artificial Sequence: Synthetic oligonucleotide
ctgcagcaattggc

SEQ ID NO: 8263 - DNA, 14 bp, Artificial Sequence
  Description of Artificial Sequence: Synthetic oligonucleotide
tctgcagcaattgg

SEQ ID NO: 8264 - DNA, 14 bp, Artificial Sequence
  Description of Artificial Sequence: Synthetic oligonucleotide
ttctgcagcaattg

SEQ ID NO: 8265 - DNA, 14 bp, Artificial Sequence
  Description of Artificial Sequence: Synthetic oligonucleotide
attctgcagcaatt

SEQ ID NO: 8266 - DNA, 14 bp, Artificial Sequence
  Description of Artificial Sequence: Synthetic oligonucleotide
aattctgcagcaat

SEQ ID NO: 8267 - DNA, 14 bp, Artificial Sequence
  Description of Artificial Sequence: Synthetic oligonucleotide
taattctgcagcaa

SEQ ID NO: 8268 - DNA, 14 bp, Artificial Sequence
  Description of Artificial Sequence: Synthetic oligonucleotide
ataattctgcagca

SEQ ID NO: 8269 - DNA, 14 bp, Artificial Sequence
  Description of Artificial Sequence: Synthetic oligonucleotide
tataattctgcagc

SEQ ID NO: 8270 - DNA, 14 bp, Artificial Sequence
  Description of Artificial Sequence: Synthetic oligonucleotide
ttataattctgcag

SEQ ID NO: 8271 - DNA, 14 bp, Artificial Sequence
  Description of Artificial Sequence: Synthetic oligonucleotide
tttataattctgca

SEQ ID NO: 8272 - DNA, 14 bp, Artificial Sequence
  Description of Artificial Sequence: Synthetic oligonucleotide
ctttataattctgc

SEQ ID NO: 8273 - DNA, 14 bp, Artificial Sequence
  Description of Artificial Sequence: Synthetic oligonucleotide
gctttataattctg

SEQ ID NO: 8274 - DNA, 14 bp, Artificial Sequence
  Description of Artificial Sequence: Synthetic oligonucleotide
tgctttataattct

SEQ ID NO: 8275 - DNA, 14 bp, Artificial Sequence
  Description of Artificial Sequence: Synthetic oligonucleotide
ttgctttataattc

SEQ ID NO: 8276 - DNA, 14 bp, Artificial Sequence
  Description of Artificial Sequence: Synthetic oligonucleotide
tttgctttataatt

SEQ ID NO: 8277 - DNA, 14 bp, Artificial Sequence
  Description of Artificial Sequence: Synthetic oligonucleotide
atttgctttataat

SEQ ID NO: 8278 - DNA, 14 bp, Artificial Sequence
  Description of Artificial Sequence: Synthetic oligonucleotide
aatttgctttataa

SEQ ID NO: 8279 - DNA, 14 bp, Artificial Sequence
  Description of Artificial Sequence: Synthetic oligonucleotide
taatttgctttata

SEQ ID NO: 8280 - DNA, 14 bp, Artificial Sequence
  Description of Artificial Sequence: Synthetic oligonucleotide
ctaatttgctttat

SEQ ID NO: 8281 - DNA, 14 bp, Artificial Sequence
  Description of Artificial Sequence: Synthetic oligonucleotide
gctaatttgcttta

SEQ ID NO: 8282 - DNA, 14 bp, Artificial Sequence
  Description of Artificial Sequence: Synthetic oligonucleotide
agctaatttgcttt

SEQ ID NO: 8283 - DNA, 14 bp, Artificial Sequence
  Description of Artificial Sequence: Synthetic oligonucleotide
tagctaatttgctt

SEQ ID NO: 8284 - DNA, 14 bp, Artificial Sequence
  Description of Artificial Sequence: Synthetic oligonucleotide
ttagctaatttgct

SEQ ID NO: 8285 - DNA, 14 bp, Artificial Sequence
  Description of Artificial Sequence: Synthetic oligonucleotide
gttagctaatttgc

SEQ ID NO: 8286 - DNA, 14 bp, Artificial Sequence
  Description of Artificial Sequence: Synthetic oligonucleotide
tgttagctaatttg

SEQ ID NO: 8287 - DNA, 14 bp, Artificial Sequence
  Description of Artificial Sequence: Synthetic oligonucleotide
ctgttagctaattt

SEQ ID NO: 8288 - DNA, 14 bp, Artificial Sequence
  Description of Artificial Sequence: Synthetic oligonucleotide
actgttagctaatt

SEQ ID NO: 8289 - DNA, 14 bp, Artificial Sequence
  Description of Artificial Sequence: Synthetic oligonucleotide
cactgttagctaat

SEQ ID NO: 8290 - DNA, 14 bp, Artificial Sequence
  Description of Artificial Sequence: Synthetic oligonucleotide
ccactgttagctaa

SEQ ID NO: 8291 - DNA, 14 bp, Artificial Sequence
  Description of Artificial Sequence: Synthetic oligonucleotide
cccactgttagcta

SEQ ID NO: 8292 - DNA, 14 bp, Artificial Sequence
  Description of Artificial Sequence: Synthetic oligonucleotide
acccactgttagct

SEQ ID NO: 8293 - DNA, 14 bp, Artificial Sequence
  Description of Artificial Sequence: Synthetic oligonucleotide
gacccactgttagc

SEQ ID NO: 8294 - DNA, 14 bp, Artificial Sequence
  Description of Artificial Sequence: Synthetic oligonucleotide
tgacccactgttag

SEQ ID NO: 8295 - DNA, 14 bp, Artificial Sequence
  Description of Artificial Sequence: Synthetic oligonucleotide
gtgacccactgtta

SEQ ID NO: 8296 - DNA, 14 bp, Artificial Sequence
  Description of Artificial Sequence: Synthetic oligonucleotide
tgtgacccactgtt

SEQ ID NO: 8297 - DNA, 14 bp, Artificial Sequence
  Description of Artificial Sequence: Synthetic oligonucleotide
atgtgacccactgt

SEQ ID NO: 8298 - DNA, 14 bp, Artificial Sequence
  Description of Artificial Sequence: Synthetic oligonucleotide
aatgtgacccactg

SEQ ID NO: 8299 - DNA, 14 bp, Artificial Sequence
  Description of Artificial Sequence: Synthetic oligonucleotide
caatgtgacccact

SEQ ID NO: 8300 - DNA, 14 bp, Artificial Sequence
  Description of Artificial Sequence: Synthetic oligonucleotide
ccaatgtgacccac

SEQ ID NO: 8301 - DNA, 14 bp, Artificial Sequence
  Description of Artificial Sequence: Synthetic oligonucleotide
tccaatgtgaccca

SEQ ID NO: 8302 - DNA, 14 bp, Artificial Sequence
  Description of Artificial Sequence: Synthetic oligonucleotide
gtccaatgtgaccc

SEQ ID NO: 8303 - DNA, 14 bp, Artificial Sequence
  Description of Artificial Sequence: Synthetic oligonucleotide
agtccaatgtgacc

SEQ ID NO: 8304 - DNA, 14 bp, Artificial Sequence
  Description of Artificial Sequence: Synthetic oligonucleotide
tagtccaatgtgac

SEQ ID NO: 8305 - DNA, 14 bp, Artificial Sequence
  Description of Artificial Sequence: Synthetic oligonucleotide
gtagtccaatgtga

SEQ ID NO: 8306 - DNA, 14 bp, Artificial Sequence
  Description of Artificial Sequence: Synthetic oligonucleotide
ggtagtccaatgtg

SEQ ID NO: 8307 - DNA, 14 bp, Artificial Sequence
  Description of Artificial Sequence: Synthetic oligonucleotide
tggtagtccaatgt

SEQ ID NO: 8308 - DNA, 14 bp, Artificial Sequence
  Description of Artificial Sequence: Synthetic oligonucleotide
gtggtagtccaatg

SEQ ID NO: 8309 - DNA, 14 bp, Artificial Sequence
  Description of Artificial Sequence: Synthetic oligonucleotide
agtggtagtccaat

SEQ ID NO: 8310 - DNA, 14 bp, Artificial Sequence
  Description of Artificial Sequence: Synthetic oligonucleotide
gagtggtagtccaa

SEQ ID NO: 8311 - DNA, 14 bp, Artificial Sequence
  Description of Artificial Sequence: Synthetic oligonucleotide
tgagtggtagtcca

SEQ ID NO: 8312 - DNA, 14 bp, Artificial Sequence
  Description of Artificial Sequence: Synthetic oligonucleotide
ttgagtggtagtcc

SEQ ID NO: 8313 - DNA, 14 bp, Artificial Sequence
  Description of Artificial Sequence: Synthetic oligonucleotide
tttgagtggtagtc

SEQ ID NO: 8314 - DNA, 14 bp, Artificial Sequence
  Description of Artificial Sequence: Synthetic oligonucleotide
ctttgagtggtagt

SEQ ID NO: 8315 - DNA, 14 bp, Artificial Sequence
  Description of Artificial Sequence: Synthetic oligonucleotide
tctttgagtggtag

SEQ ID NO: 8316 - DNA, 14 bp, Artificial Sequence
  Description of Artificial Sequence: Synthetic oligonucleotide
ttctttgagtggta

SEQ ID NO: 8317 - DNA, 14 bp, Artificial Sequence
  Description of Artificial Sequence: Synthetic oligonucleotide
tttctttgagtggt

SEQ ID NO: 8318 - DNA, 14 bp, Artificial Sequence
  Description of Artificial Sequence: Synthetic oligonucleotide
gtttctttgagtgg

SEQ ID NO: 8319 - DNA, 14 bp, Artificial Sequence
  Description of Artificial Sequence: Synthetic oligonucleotide
tgtttctttgagtg

SEQ ID NO: 8320 - DNA, 14 bp, Artificial Sequence
  Description of Artificial Sequence: Synthetic oligonucleotide
ttgtttctttgagt

SEQ ID NO: 8321 - DNA, 14 bp, Artificial Sequence
  Description of Artificial Sequence: Synthetic oligonucleotide
cttgtttctttgag

SEQ ID NO: 8322 - DNA, 14 bp, Artificial Sequence
  Description of Artificial Sequence: Synthetic oligonucleotide
tcttgtttctttga

SEQ ID NO: 8323 - DNA, 14 bp, Artificial Sequence
  Description of Artificial Sequence: Synthetic oligonucleotide
atcttgtttctttg

SEQ ID NO: 8324 - DNA, 14 bp, Artificial Sequence
  Description of Artificial Sequence: Synthetic oligonucleotide
catcttgtttcttt

SEQ ID NO: 8325 - DNA, 14 bp, Artificial Sequence
  Description of Artificial Sequence: Synthetic oligonucleotide
gcatcttgtttctt

SEQ ID NO: 8326 - DNA, 14 bp, Artificial Sequence
  Description of Artificial Sequence: Synthetic oligonucleotide
tgcatcttgtttct

SEQ ID NO: 8327 - DNA, 14 bp, Artificial Sequence
  Description of Artificial Sequence: Synthetic oligonucleotide
atgcatcttgtttc

SEQ ID NO: 8328 - DNA, 14 bp, Artificial Sequence
  Description of Artificial Sequence: Synthetic oligonucleotide
tatgcatcttgttt

SEQ ID NO: 8329 - DNA, 14 bp, Artificial Sequence
  Description of Artificial Sequence: Synthetic oligonucleotide
ttatgcatcttgtt

SEQ ID NO: 8330 - DNA, 14 bp, Artificial Sequence
  Description of Artificial Sequence: Synthetic oligonucleotide
gttatgcatcttgt

SEQ ID NO: 8331 - DNA, 14 bp, Artificial Sequence
  Description of Artificial Sequence: Synthetic oligonucleotide
tgttatgcatcttg

SEQ ID NO: 8332 - DNA, 14 bp, Artificial Sequence
  Description of Artificial Sequence: Synthetic oligonucleotide
ctgttatgcatctt

SEQ ID NO: 8333 - DNA, 14 bp, Artificial Sequence
  Description of Artificial Sequence: Synthetic oligonucleotide
tctgttatgcatct

SEQ ID NO: 8334 - DNA, 14 bp, Artificial Sequence
  Description of Artificial Sequence: Synthetic oligonucleotide
atctgttatgcatc

SEQ ID NO: 8335 - DNA, 14 bp, Artificial Sequence
  Description of Artificial Sequence: Synthetic oligonucleotide
catctgttatgcat

SEQ ID NO: 8336 - DNA, 14 bp, Artificial Sequence
  Description of Artificial Sequence: Synthetic oligonucleotide
tcatctgttatgca

SEQ ID NO: 8337 - DNA, 14 bp, Artificial Sequence
  Description of Artificial Sequence: Synthetic oligonucleotide
atcatctgttatgc

SEQ ID NO: 8338 - DNA, 14 bp, Artificial Sequence
  Description of Artificial Sequence: Synthetic oligonucleotide
catcatctgttatg

SEQ ID NO: 8339 - DNA, 14 bp, Artificial Sequence
  Description of Artificial Sequence: Synthetic oligonucleotide
ccatcatctgttat

SEQ ID NO: 8340 - DNA, 14 bp, Artificial Sequence
  Description of Artificial Sequence: Synthetic oligonucleotide
tccatcatctgtta

SEQ ID NO: 8341 - DNA, 14 bp, Artificial Sequence
  Description of Artificial Sequence: Synthetic oligonucleotide
ttccatcatctgtt

SEQ ID NO: 8342 - DNA, 14 bp, Artificial Sequence
  Description of Artificial Sequence: Synthetic oligonucleotide
cttccatcatctgt

SEQ ID NO: 8343 - DNA, 14 bp, Artificial Sequence
  Description of Artificial Sequence: Synthetic oligonucleotide
ccttccatcatctg

SEQ ID NO: 8344 - DNA, 14 bp, Artificial Sequence
  Description of Artificial Sequence: Synthetic oligonucleotide
accttccatcatct

SEQ ID NO: 8345 - DNA, 14 bp, Artificial Sequence
  Description of Artificial Sequence: Synthetic oligonucleotide
taccttccatcatc

SEQ ID NO: 8346 - DNA, 14 bp, Artificial Sequence
  Description of Artificial Sequence: Synthetic oligonucleotide
gtaccttccatcat

SEQ ID NO: 8347 - DNA, 14 bp, Artificial Sequence
  Description of Artificial Sequence: Synthetic oligonucleotide
tgtaccttccatca

SEQ ID NO: 8348 - DNA, 14 bp, Artificial Sequence
  Description of Artificial Sequence: Synthetic oligonucleotide
atgtaccttccatc

SEQ ID NO: 8349 - DNA, 14 bp, Artificial Sequence
  Description of Artificial Sequence: Synthetic oligonucleotide
catgtaccttccat

SEQ ID NO: 8350 - DNA, 14 bp, Artificial Sequence
  Description of Artificial Sequence: Synthetic oligonucleotide
acatgtaccttcca

SEQ ID NO: 8351 - DNA, 14 bp, Artificial Sequence
  Description of Artificial Sequence: Synthetic oligonucleotide
cacatgtaccttcc

SEQ ID NO: 8352 - DNA, 14 bp, Artificial Sequence
  Description of Artificial Sequence: Synthetic oligonucleotide
ccacatgtaccttc

SEQ ID NO: 8353 - DNA, 14 bp, Artificial Sequence
  Description of Artificial Sequence: Synthetic oligonucleotide
accacatgtacctt

SEQ ID NO: 8354 - DNA, 14 bp, Artificial Sequence
  Description of Artificial Sequence: Synthetic oligonucleotide
caccacatgtacct

SEQ ID NO: 8355 - DNA, 14 bp, Artificial Sequence
  Description of Artificial Sequence: Synthetic oligonucleotide
acaccacatgtacc

SEQ ID NO: 8356 - DNA, 14 bp, Artificial Sequence
  Description of Artificial Sequence: Synthetic oligonucleotide
cacaccacatgtac

SEQ ID NO: 8357 - DNA, 14 bp, Artificial Sequence
  Description of Artificial Sequence: Synthetic oligonucleotide
ccacaccacatgta

SEQ ID NO: 8358 - DNA, 14 bp, Artificial Sequence
  Description of Artificial Sequence: Synthetic oligonucleotide
gccacaccacatgt

SEQ ID NO: 8359 - DNA, 14 bp, Artificial Sequence
  Description of Artificial Sequence: Synthetic oligonucleotide
agccacaccacatg

SEQ ID NO: 8360 - DNA, 14 bp, Artificial Sequence
  Description of Artificial Sequence: Synthetic oligonucleotide
aagccacaccacat

SEQ ID NO: 8361 - DNA, 14 bp, Artificial Sequence
  Description of Artificial Sequence: Synthetic oligonucleotide
taagccacaccaca

SEQ ID NO: 8362 - DNA, 14 bp, Artificial Sequence
  Description of Artificial Sequence: Synthetic oligonucleotide
ctaagccacaccac

SEQ ID NO: 8363 - DNA, 14 bp, Artificial Sequence
  Description of Artificial Sequence: Synthetic oligonucleotide
cctaagccacacca

SEQ ID NO: 8364 - DNA, 14 bp, Artificial Sequence
  Description of Artificial Sequence: Synthetic oligonucleotide
ccctaagccacacc

SEQ ID NO: 8365 - DNA, 14 bp, Artificial Sequence
  Description of Artificial Sequence: Synthetic oligonucleotide
tccctaagccacac

SEQ ID NO: 8366 - DNA, 14 bp, Artificial Sequence
  Description of Artificial Sequence: Synthetic oligonucleotide
ctccctaagccaca

SEQ ID NO: 8367 - DNA, 14 bp, Artificial Sequence
  Description of Artificial Sequence: Synthetic oligonucleotide
tctccctaagccac

SEQ ID NO: 8368 - DNA, 14 bp, Artificial Sequence
  Description of Artificial Sequence: Synthetic oligonucleotide
ctctccctaagcca

SEQ ID NO: 8369 - DNA, 14 bp, Artificial Sequence
  Description of Artificial Sequence: Synthetic oligonucleotide
gctctccctaagcc

SEQ ID NO: 8370 - DNA, 14 bp, Artificial Sequence
  Description of Artificial Sequence: Synthetic oligonucleotide
cgctctccctaagc

SEQ ID NO: 8371 - DNA, 14 bp, Artificial Sequence
  Description of Artificial Sequence: Synthetic oligonucleotide
gcgctctccctaag

SEQ ID NO: 8372 - DNA, 14 bp, Artificial Sequence
  Description of Artificial Sequence: Synthetic oligonucleotide
tgcgctctccctaa

SEQ ID NO: 8373 - DNA, 14 bp, Artificial Sequence
  Description of Artificial Sequence: Synthetic oligonucleotide
gtgcgctctcccta

SEQ ID NO: 8374 - DNA, 14 bp, Artificial Sequence
  Description of Artificial Sequence: Synthetic oligonucleotide
ggtgcgctctccct

SEQ ID NO: 8375 - DNA, 14 bp, Artificial Sequence
  Description of Artificial Sequence: Synthetic oligonucleotide
aggtgcgctctccc

SEQ ID NO: 8376 - DNA, 14 bp, Artificial Sequence
  Description of Artificial Sequence: Synthetic oligonucleotide
caggtgcgctctcc

SEQ ID NO: 8377 - DNA, 14 bp, Artificial Sequence
  Description of Artificial Sequence: Synthetic oligonucleotide
acaggtgcgctctc

SEQ ID NO: 8378 - DNA, 14 bp, Artificial Sequence
  Description of Artificial Sequence: Synthetic oligonucleotide
cacaggtgcgctct

SEQ ID NO: 8379 - DNA, 14 bp, Artificial Sequence
  Description of Artificial Sequence: Synthetic oligonucleotide
gcacaggtgcgctc

SEQ ID NO: 8380 - DNA, 14 bp, Artificial Sequence
  Description of Artificial Sequence: Synthetic oligonucleotide
ggcacaggtgcgct

SEQ ID NO: 8381 - DNA, 14 bp, Artificial Sequence
  Description of Artificial Sequence: Synthetic oligonucleotide
tggcacaggtgcgc

SEQ ID NO: 8382 - DNA, 14 bp, Artificial Sequence
  Description of Artificial Sequence: Synthetic oligonucleotide
ctggcacaggtgcg

SEQ ID NO: 8383 - DNA, 14 bp, Artificial Sequence
  Description of Artificial Sequence: Synthetic oligonucleotide
tctggcacaggtgc

SEQ ID NO: 8384 - DNA, 14 bp, Artificial Sequence
  Description of Artificial Sequence: Synthetic oligonucleotide
atctggcacaggtg

SEQ ID NO: 8385 - DNA, 14 bp, Artificial Sequence
  Description of Artificial Sequence: Synthetic oligonucleotide
catctggcacaggt

SEQ ID NO: 8386 - DNA, 14 bp, Artificial Sequence
  Description of Artificial Sequence: Synthetic oligonucleotide
gcatctggcacagg

SEQ ID NO: 8387 - DNA, 14 bp, Artificial Sequence
  Description of Artificial Sequence: Synthetic oligonucleotide
tgcatctggcacag

SEQ ID NO: 8388 - DNA, 14 bp, Artificial Sequence
  Description of Artificial Sequence: Synthetic oligonucleotide
atgcatctggcaca

SEQ ID NO: 8389 - DNA, 14 bp, Artificial Sequence
  Description of Artificial Sequence: Synthetic oligonucleotide
catgcatctggcac

SEQ ID NO: 8390 - DNA, 14 bp, Artificial Sequence
  Description of Artificial Sequence: Synthetic oligonucleotide
gcatgcatctggca

SEQ ID NO: 8391 - DNA, 14 bp, Artificial Sequence
  Description of Artificial Sequence: Synthetic oligonucleotide
ggcatgcatctggc

SEQ ID NO: 8392 - DNA, 14 bp, Artificial Sequence
  Description of Artificial Sequence: Synthetic oligonucleotide
tggcatgcatctgg

SEQ ID NO: 8393 - DNA, 14 bp, Artificial Sequence
  Description of Artificial Sequence: Synthetic oligonucleotide
gtggcatgcatctg

SEQ ID NO: 8394 - DNA, 14 bp, Artificial Sequence
  Description of Artificial Sequence: Synthetic oligonucleotide
agtggcatgcatct

SEQ ID NO: 8395 - DNA, 14 bp, Artificial Sequence
  Description of Artificial Sequence: Synthetic oligonucleotide
aagtggcatgcatc

SEQ ID NO: 8396 - DNA, 14 bp, Artificial Sequence
  Description of Artificial Sequence: Synthetic oligonucleotide
aaagtggcatgcat

SEQ ID NO: 8397 - DNA, 14 bp, Artificial Sequence
  Description of Artificial Sequence: Synthetic oligonucleotide
gaaagtggcatgca

SEQ ID NO: 8398 - DNA, 14 bp, Artificial Sequence
  Description of Artificial Sequence: Synthetic oligonucleotide
tgaaagtggcatgc

SEQ ID NO: 8399 - DNA, 14 bp, Artificial Sequence
  Description of Artificial Sequence: Synthetic oligonucleotide
ctgaaagtggcatg

SEQ ID NO: 8400 - DNA, 14 bp, Artificial Sequence
  Description of Artificial Sequence: Synthetic oligonucleotide
actgaaagtggcat

SEQ ID NO: 8401 - DNA, 14 bp, Artificial Sequence
  Description of Artificial Sequence: Synthetic oligonucleotide
tactgaaagtggca

SEQ ID NO: 8402 - DNA, 14 bp, Artificial Sequence
  Description of Artificial Sequence: Synthetic oligonucleotide
ctactgaaagtggc

SEQ ID NO: 8403 - DNA, 14 bp, Artificial Sequence
  Description of Artificial Sequence: Synthetic oligonucleotide
gctactgaaagtgg

SEQ ID NO: 8404 - DNA, 14 bp, Artificial Sequence
  Description of Artificial Sequence: Synthetic oligonucleotide
agctactgaaagtg

SEQ ID NO: 8405 - DNA, 14 bp, Artificial Sequence
  Description of Artificial Sequence: Synthetic oligonucleotide
cagctactgaaagt

SEQ ID NO: 8406 - DNA, 14 bp, Artificial Sequence
  Description of Artificial Sequence: Synthetic oligonucleotide
gcagctactgaaag

SEQ ID NO: 8407 - DNA, 14 bp, Artificial Sequence
  Description of Artificial Sequence: Synthetic oligonucleotide
ggcagctactgaaa

SEQ ID NO: 8408 - DNA, 14 bp, Artificial Sequence
  Description of Artificial Sequence: Synthetic oligonucleotide
tggcagctactgaa

SEQ ID NO: 8409 - DNA, 14 bp, Artificial Sequence
  Description of Artificial Sequence: Synthetic oligonucleotide
ttggcagctactga

SEQ ID NO: 8410 - DNA, 14 bp, Artificial Sequence
  Description of Artificial Sequence: Synthetic oligonucleotide
tttggcagctactg

SEQ ID NO: 8411 - DNA, 14 bp, Artificial Sequence
  Description of Artificial Sequence: Synthetic oligonucleotide
atttggcagctact

SEQ ID NO: 8412 - DNA, 14 bp, Artificial Sequence
  Description of Artificial Sequence: Synthetic oligonucleotide
catttggcagctac

SEQ ID NO: 8413 - DNA, 14 bp, Artificial Sequence
  Description of Artificial Sequence: Synthetic oligonucleotide
acatttggcagcta

SEQ ID NO: 8414 - DNA, 14 bp, Artificial Sequence
  Description of Artificial Sequence: Synthetic oligonucleotide
cacatttggcagct

SEQ ID NO: 8415 - DNA, 14 bp, Artificial Sequence
  Description of Artificial Sequence: Synthetic oligonucleotide
gcacatttggcagc

SEQ ID NO: 8416 - DNA, 14 bp, Artificial Sequence
  Description of Artificial Sequence: Synthetic oligonucleotide
ggcacatttggcag

SEQ ID NO: 8417 - DNA, 14 bp, Artificial Sequence
  Description of Artificial Sequence: Synthetic oligonucleotide
aggcacatttggca

SEQ ID NO: 8418 - DNA, 14 bp, Artificial Sequence
  Description of Artificial Sequence: Synthetic oligonucleotide
aaggcacatttggc

SEQ ID NO: 8419 - DNA, 14 bp, Artificial Sequence
  Description of Artificial Sequence: Synthetic oligonucleotide
aaaggcacatttgg

SEQ ID NO: 8420 - DNA, 14 bp, Artificial Sequence
  Description of Artificial Sequence: Synthetic oligonucleotide
taaaggcacatttg

SEQ ID NO: 8421 - DNA, 14 bp, Artificial Sequence
  Description of Artificial Sequence: Synthetic oligonucleotide
ttaaaggcacattt

SEQ ID NO: 8422 - DNA, 14 bp, Artificial Sequence
  Description of Artificial Sequence: Synthetic oligonucleotide
attaaaggcacatt

SEQ ID NO: 8423 - DNA, 14 bp, Artificial Sequence
  Description of Artificial Sequence: Synthetic oligonucleotide
aattaaaggcacat

SEQ ID NO: 8424 - DNA, 14 bp, Artificial Sequence
  Description of Artificial Sequence: Synthetic oligonucleotide
taattaaaggcaca

SEQ ID NO: 8425 - DNA, 14 bp, Artificial Sequence
  Description of Artificial Sequence: Synthetic oligonucleotide
ttaattaaaggcac

SEQ ID NO: 8426 - DNA, 14 bp, Artificial Sequence
  Description of Artificial Sequence: Synthetic oligonucleotide
cttaattaaaggca

SEQ ID NO: 8427 - DNA, 14 bp, Artificial Sequence
  Description of Artificial Sequence: Synthetic oligonucleotide
tcttaattaaaggc

SEQ ID NO: 8428 - DNA, 14 bp, Artificial Sequence
  Description of Artificial Sequence: Synthetic oligonucleotide
ttcttaattaaagg

SEQ ID NO: 8429 - DNA, 14 bp, Artificial Sequence
  Description of Artificial Sequence: Synthetic oligonucleotide
gttcttaattaaag

SEQ ID NO: 8430 - DNA, 14 bp, Artificial Sequence
  Description of Artificial Sequence: Synthetic oligonucleotide
tgttcttaattaaa

SEQ ID NO: 8431 - DNA, 14 bp, Artificial Sequence
  Description of Artificial Sequence: Synthetic oligonucleotide
atgttcttaattaa

SEQ ID NO: 8432 - DNA, 14 bp, Artificial Sequence
  Description of Artificial Sequence: Synthetic oligonucleotide
gatgttcttaatta

SEQ ID NO: 8433 - DNA, 14 bp, Artificial Sequence
  Description of Artificial Sequence: Synthetic oligonucleotide
agatgttcttaatt

SEQ ID NO: 8434 - DNA, 14 bp, Artificial Sequence
  Description of Artificial Sequence: Synthetic oligonucleotide
gagatgttcttaat

SEQ ID NO: 8435 - DNA, 14 bp, Artificial Sequence
  Description of Artificial Sequence: Synthetic oligonucleotide
agagatgttcttaa

SEQ ID NO: 8436 - DNA, 14 bp, Artificial Sequence
  Description of Artificial Sequence: Synthetic oligonucleotide
tagagatgttctta

SEQ ID NO: 8437 - DNA, 14 bp, Artificial Sequence
  Description of Artificial Sequence: Synthetic oligonucleotide
ttagagatgttctt

SEQ ID NO: 8438 - DNA, 14 bp, Artificial Sequence
  Description of Artificial Sequence: Synthetic oligonucleotide
attagagatgttct

SEQ ID NO: 8439 - DNA, 14 bp, Artificial Sequence
  Description of Artificial Sequence: Synthetic oligonucleotide
aattagagatgttc

SEQ ID NO: 8440 - DNA, 14 bp, Artificial Sequence
  Description of Artificial Sequence: Synthetic oligonucleotide
aaattagagatgtt

SEQ ID NO: 8441 - DNA, 14 bp, Artificial Sequence
  Description of Artificial Sequence: Synthetic oligonucleotide
aaaattagagatgt

SEQ ID NO: 8442 - DNA, 14 bp, Artificial Sequence
  Description of Artificial Sequence: Synthetic oligonucleotide
aaaaattagagatg

SEQ ID NO: 8443 - DNA, 14 bp, Artificial Sequence
  Description of Artificial Sequence: Synthetic oligonucleotide
aaaaaattagagat

SEQ ID NO: 8444 - DNA, 14 bp, Artificial Sequence
  Description of Artificial Sequence: Synthetic oligonucleotide
aaaaaaattagaga

SEQ ID NO: 8445 - DNA, 14 bp, Artificial Sequence
  Description of Artificial Sequence: Synthetic oligonucleotide
gaaaaaaattagag

SEQ ID NO: 8446 - DNA, 14 bp, Artificial Sequence
  Description of Artificial Sequence: Synthetic oligonucleotide
agaaaaaaattaga

SEQ ID NO: 8447 - DNA, 14 bp, Artificial Sequence
  Description of Artificial Sequence: Synthetic oligonucleotide
aagaaaaaaattag

SEQ ID NO: 8448 - DNA, 14 bp, Artificial Sequence
  Description of Artificial Sequence: Synthetic oligonucleotide
gaagaaaaaaatta

SEQ ID NO: 8449 - DNA, 14 bp, Artificial Sequence
  Description of Artificial Sequence: Synthetic oligonucleotide
tgaagaaaaaaatt

SEQ ID NO: 8450 - DNA, 14 bp, Artificial Sequence
  Description of Artificial Sequence: Synthetic oligonucleotide
ctgaagaaaaaaat

SEQ ID NO: 8451 - DNA, 14 bp, Artificial Sequence
  Description of Artificial Sequence: Synthetic oligonucleotide
tctgaagaaaaaaa

SEQ ID NO: 8452 - DNA, 14 bp, Artificial Sequence
  Description of Artificial Sequence: Synthetic oligonucleotide
atctgaagaaaaaa

SEQ ID NO: 8453 - DNA, 14 bp, Artificial Sequence
  Description of Artificial Sequence: Synthetic oligonucleotide
gatctgaagaaaaa

SEQ ID NO: 8454 - DNA, 14 bp, Artificial Sequence
  Description of Artificial Sequence: Synthetic oligonucleotide
tgatctgaagaaaa

SEQ ID NO: 8455 - DNA, 14 bp, Artificial Sequence
  Description of Artificial Sequence: Synthetic oligonucleotide
ttgatctgaagaaa

SEQ ID NO: 8456 - DNA, 14 bp, Artificial Sequence
  Description of Artificial Sequence: Synthetic oligonucleotide
cttgatctgaagaa

SEQ ID NO: 8457 - DNA, 14 bp, Artificial Sequence
  Description of Artificial Sequence: Synthetic oligonucleotide
acttgatctgaaga

SEQ ID NO: 8458 - DNA, 14 bp, Artificial Sequence
  Description of Artificial Sequence: Synthetic oligonucleotide
gacttgatctgaag

SEQ ID NO: 8459 - DNA, 14 bp, Artificial Sequence
  Description of Artificial Sequence: Synthetic oligonucleotide
tgacttgatctgaa

SEQ ID NO: 8460 - DNA, 14 bp, Artificial Sequence
  Description of Artificial Sequence: Synthetic oligonucleotide
ctgacttgatctga

SEQ ID NO: 8461 - DNA, 14 bp, Artificial Sequence
  Description of Artificial Sequence: Synthetic oligonucleotide
gctgacttgatctg

SEQ ID NO: 8462 - DNA, 14 bp, Artificial Sequence
  Description of Artificial Sequence: Synthetic oligonucleotide
tgctgacttgatct

SEQ ID NO: 8463 - DNA, 14 bp, Artificial Sequence
  Description of Artificial Sequence: Synthetic oligonucleotide
atgctgacttgatc

SEQ ID NO: 8464 - DNA, 14 bp, Artificial Sequence
  Description of Artificial Sequence: Synthetic oligonucleotide
aatgctgacttgat

SEQ ID NO: 8465 - DNA, 14 bp, Artificial Sequence
  Description of Artificial Sequence: Synthetic oligonucleotide
aaatgctgacttga

SEQ ID NO: 8466 - DNA, 14 bp, Artificial Sequence
  Description of Artificial Sequence: Synthetic oligonucleotide
caaatgctgacttg

SEQ ID NO: 8467 - DNA, 14 bp, Artificial Sequence
  Description of Artificial Sequence: Synthetic oligonucleotide
ccaaatgctgactt

SEQ ID NO: 8468 - DNA, 14 bp, Artificial Sequence
  Description of Artificial Sequence: Synthetic oligonucleotide
cccaaatgctgact

SEQ ID NO: 8469 - DNA, 14 bp, Artificial Sequence
  Description of Artificial Sequence: Synthetic oligonucleotide
ccccaaatgctgac

SEQ ID NO: 8470 - DNA, 14 bp, Artificial Sequence
  Description of Artificial Sequence: Synthetic oligonucleotide
accccaaatgctga

SEQ ID NO: 8471 - DNA, 14 bp, Artificial Sequence
  Description of Artificial Sequence: Synthetic oligonucleotide
gaccccaaatgctg

SEQ ID NO: 8472 - DNA, 14 bp, Artificial Sequence
  Description of Artificial Sequence: Synthetic oligonucleotide
cgaccccaaatgct

SEQ ID NO: 8473 - DNA, 14 bp, Artificial Sequence
  Description of Artificial Sequence: Synthetic oligonucleotide
ccgaccccaaatgc

SEQ ID NO: 8474 - DNA, 14 bp, Artificial Sequence
  Description of Artificial Sequence: Synthetic oligonucleotide
cccgaccccaaatg

SEQ ID NO: 8475 - DNA, 14 bp, Artificial Sequence
  Description of Artificial Sequence: Synthetic oligonucleotide
tcccgaccccaaat

SEQ ID NO: 8476 - DNA, 14 bp, Artificial Sequence
  Description of Artificial Sequence: Synthetic oligonucleotide
atcccgaccccaaa

SEQ ID NO: 8477 - DNA, 14 bp, Artificial Sequence
  Description of Artificial Sequence: Synthetic oligonucleotide
aatcccgaccccaa

SEQ ID NO: 8478 - DNA, 14 bp, Artificial Sequence
  Description of Artificial Sequence: Synthetic oligonucleotide
aaatcccgacccca

SEQ ID NO: 8479 - DNA, 14 bp, Artificial Sequence
  Description of Artificial Sequence: Synthetic oligonucleotide
caaatcccgacccc

SEQ ID NO: 8480 - DNA, 14 bp, Artificial Sequence
  Description of Artificial Sequence: Synthetic oligonucleotide
ccaaatcccgaccc

SEQ ID NO: 8481 - DNA, 14 bp, Artificial Sequence
  Description of Artificial Sequence: Synthetic oligonucleotide
cccaaatcccgacc

SEQ ID NO: 8482 - DNA, 14 bp, Artificial Sequence
  Description of Artificial Sequence: Synthetic oligonucleotide
gcccaaatcccgac

SEQ ID NO: 8483 - DNA, 14 bp, Artificial Sequence
  Description of Artificial Sequence: Synthetic oligonucleotide
tgcccaaatcccga

SEQ ID NO: 8484 - DNA, 14 bp, Artificial Sequence
  Description of Artificial Sequence: Synthetic oligonucleotide
ctgcccaaatcccg

SEQ ID NO: 8485 - DNA, 14 bp, Artificial Sequence
  Description of Artificial Sequence: Synthetic oligonucleotide
cctgcccaaatccc

SEQ ID NO: 8486 - DNA, 14 bp, Artificial Sequence
  Description of Artificial Sequence: Synthetic oligonucleotide
ccctgcccaaatcc

SEQ ID NO: 8487 - DNA, 14 bp, Artificial Sequence
  Description of Artificial Sequence: Synthetic oligonucleotide
tccctgcccaaatc

SEQ ID NO: 8488 - DNA, 14 bp, Artificial Sequence
  Description of Artificial Sequence: Synthetic oligonucleotide
ttccctgcccaaat

SEQ ID NO: 8489 - DNA, 14 bp, Artificial Sequence
  Description of Artificial Sequence: Synthetic oligonucleotide
gttccctgcccaaa

SEQ ID NO: 8490 - DNA, 14 bp, Artificial Sequence
  Description of Artificial Sequence: Synthetic oligonucleotide
agttccctgcccaa

SEQ ID NO: 8491 - DNA, 14 bp, Artificial Sequence
  Description of Artificial Sequence: Synthetic oligonucleotide
aagttccctgccca

SEQ ID NO: 8492 - DNA, 14 bp, Artificial Sequence
  Description of Artificial Sequence: Synthetic oligonucleotide
aaagttccctgccc

SEQ ID NO: 8493 - DNA, 14 bp, Artificial Sequence
  Description of Artificial Sequence: Synthetic oligonucleotide
caaagttccctgcc

SEQ ID NO: 8494 - DNA, 14 bp, Artificial Sequence
  Description of Artificial Sequence: Synthetic oligonucleotide
ccaaagttccctgc

SEQ ID NO: 8495 - DNA, 14 bp, Artificial Sequence
  Description of Artificial Sequence: Synthetic oligonucleotide
cccaaagttccctg

SEQ ID NO: 8496 - DNA, 14 bp, Artificial Sequence
  Description of Artificial Sequence: Synthetic oligonucleotide
ccccaaagttccct

SEQ ID NO: 8497 - DNA, 14 bp, Artificial Sequence
  Description of Artificial Sequence: Synthetic oligonucleotide
accccaaagttccc

SEQ ID NO: 8498 - DNA, 14 bp, Artificial Sequence
  Description of Artificial Sequence: Synthetic oligonucleotide
caccccaaagttcc

SEQ ID NO: 8499 - DNA, 14 bp, Artificial Sequence
  Description of Artificial Sequence: Synthetic oligonucleotide
gcaccccaaagttc

SEQ ID NO: 8500 - DNA, 14 bp, Artificial Sequence
  Description of Artificial Sequence: Synthetic oligonucleotide
tgcaccccaaagtt

SEQ ID NO: 8501 - DNA, 14 bp, Artificial Sequence
  Description of Artificial Sequence: Synthetic oligonucleotide
ttgcaccccaaagt

SEQ ID NO: 8502 - DNA, 14 bp, Artificial Sequence
  Description of Artificial Sequence: Synthetic oligonucleotide
tttgcaccccaaag

SEQ ID NO: 8503 - DNA, 14 bp, Artificial Sequence
  Description of Artificial Sequence: Synthetic oligonucleotide
atttgcaccccaaa

SEQ ID NO: 8504 - DNA, 14 bp, Artificial Sequence
  Description of Artificial Sequence: Synthetic oligonucleotide
tatttgcaccccaa

SEQ ID NO: 8505 - DNA, 14 bp, Artificial Sequence
  Description of Artificial Sequence: Synthetic oligonucleotide
atatttgcacccca

SEQ ID NO: 8506 - DNA, 14 bp, Artificial Sequence
  Description of Artificial Sequence: Synthetic oligonucleotide
gatatttgcacccc

SEQ ID NO: 8507 - DNA, 14 bp, Artificial Sequence
  Description of Artificial Sequence: Synthetic oligonucleotide
agatatttgcaccc

SEQ ID NO: 8508 - DNA, 14 bp, Artificial Sequence
  Description of Artificial Sequence: Synthetic oligonucleotide
cagatatttgcacc

SEQ ID NO: 8509 - DNA, 14 bp, Artificial Sequence
  Description of Artificial Sequence: Synthetic oligonucleotide
ccagatatttgcac

SEQ ID NO: 8510 - DNA, 14 bp, Artificial Sequence
  Description of Artificial Sequence: Synthetic oligonucleotide
accagatatttgca

SEQ ID NO: 8511 - DNA, 14 bp, Artificial Sequence
  Description of Artificial Sequence: Synthetic oligonucleotide
caccagatatttgc

SEQ ID NO: 8512 - DNA, 14 bp, Artificial Sequence
  Description of Artificial Sequence: Synthetic oligonucleotide
tcaccagatatttg

SEQ ID NO: 8513 - DNA, 14 bp, Artificial Sequence
  Description of Artificial Sequence: Synthetic oligonucleotide
ttcaccagatattt

SEQ ID NO: 8514 - DNA, 14 bp, Artificial Sequence
  Description of Artificial Sequence: Synthetic oligonucleotide
tttcaccagatatt

SEQ ID NO: 8515 - DNA, 14 bp, Artificial Sequence
  Description of Artificial Sequence: Synthetic oligonucleotide
gtttcaccagatat

SEQ ID NO: 8516 - DNA, 14 bp, Artificial Sequence
  Description of Artificial Sequence: Synthetic oligonucleotide
ggtttcaccagata

SEQ ID NO: 8517 - DNA, 14 bp, Artificial Sequence
  Description of Artificial Sequence: Synthetic oligonucleotide
tggtttcaccagat

SEQ ID NO: 8518 - DNA, 14 bp, Artificial Sequence
  Description of Artificial Sequence: Synthetic oligonucleotide
gtggtttcaccaga

SEQ ID NO: 8519 - DNA, 14 bp, Artificial Sequence
  Description of Artificial Sequence: Synthetic oligonucleotide
ggtggtttcaccag

SEQ ID NO: 8520 - DNA, 14 bp, Artificial Sequence
  Description of Artificial Sequence: Synthetic oligonucleotide
tggtggtttcacca

SEQ ID NO: 8521 - DNA, 14 bp, Artificial Sequence
  Description of Artificial Sequence: Synthetic oligonucleotide
ctggtggtttcacc

SEQ ID NO: 8522 - DNA, 14 bp, Artificial Sequence
  Description of Artificial Sequence: Synthetic oligonucleotide
tctggtggtttcac

SEQ ID NO: 8523 - DNA, 14 bp, Artificial Sequence
  Description of Artificial Sequence: Synthetic oligonucleotide
ctctggtggtttca

SEQ ID NO: 8524 - DNA, 14 bp, Artificial Sequence
  Description of Artificial Sequence: Synthetic oligonucleotide
tctctggtggtttc

SEQ ID NO: 8525 - DNA, 14 bp, Artificial Sequence
  Description of Artificial Sequence: Synthetic oligonucleotide
ttctctggtggttt

SEQ ID NO: 8526 - DNA, 14 bp, Artificial Sequence
  Description of Artificial Sequence: Synthetic oligonucleotide
attctctggtggtt

SEQ ID NO: 8527 - DNA, 14 bp, Artificial Sequence
  Description of Artificial Sequence: Synthetic oligonucleotide
aattctctggtggt

SEQ ID NO: 8528 - DNA, 14 bp, Artificial Sequence
  Description of Artificial Sequence: Synthetic oligonucleotide
aaattctctggtgg

SEQ ID NO: 8529 - DNA, 14 bp, Artificial Sequence
  Description of Artificial Sequence: Synthetic oligonucleotide
caaattctctggtg

SEQ ID NO: 8530 - DNA, 14 bp, Artificial Sequence
  Description of Artificial Sequence: Synthetic oligonucleotide
acaaattctctggt

SEQ ID NO: 8531 - DNA, 14 bp, Artificial Sequence
  Description of Artificial Sequence: Synthetic oligonucleotide
aacaaattctctgg

SEQ ID NO: 8532 - DNA, 14 bp, Artificial Sequence
  Description of Artificial Sequence: Synthetic oligonucleotide
aaacaaattctctg

SEQ ID NO: 8533 - DNA, 14 bp, Artificial Sequence
  Description of Artificial Sequence: Synthetic oligonucleotide
caaacaaattctct

SEQ ID NO: 8534 - DNA, 14 bp, Artificial Sequence
  Description of Artificial Sequence: Synthetic oligonucleotide
acaaacaaattctc

SEQ ID NO: 8535 - DNA, 14 bp, Artificial Sequence
  Description of Artificial Sequence: Synthetic oligonucleotide
gacaaacaaattct

SEQ ID NO: 8536 - DNA, 14 bp, Artificial Sequence
  Description of Artificial Sequence: Synthetic oligonucleotide
tgacaaacaaattc

SEQ ID NO: 8537 - DNA, 14 bp, Artificial Sequence
  Description of Artificial Sequence: Synthetic oligonucleotide
ttgacaaacaaatt

SEQ ID NO: 8538 - DNA, 14 bp, Artificial Sequence
  Description of Artificial Sequence: Synthetic oligonucleotide
tttgacaaacaaat

SEQ ID NO: 8539 - DNA, 14 bp, Artificial Sequence
  Description of Artificial Sequence: Synthetic oligonucleotide
ctttgacaaacaaa

SEQ ID NO: 8540 - DNA, 14 bp, Artificial Sequence
  Description of Artificial Sequence: Synthetic oligonucleotide
actttgacaaacaa

SEQ ID NO: 8541 - DNA, 14 bp, Artificial Sequence
  Description of Artificial Sequence: Synthetic oligonucleotide
cactttgacaaaca

SEQ ID NO: 8542 - DNA, 14 bp, Artificial Sequence
  Description of Artificial Sequence: Synthetic oligonucleotide
tcactttgacaaac

SEQ ID NO: 8543 - DNA, 14 bp, Artificial Sequence
  Description of Artificial Sequence: Synthetic oligonucleotide
gtcactttgacaaa

SEQ ID NO: 8544 - DNA, 14 bp, Artificial Sequence
  Description of Artificial Sequence: Synthetic oligonucleotide
tgtcactttgacaa

SEQ ID NO: 8545 - DNA, 14 bp, Artificial Sequence
  Description of Artificial Sequence: Synthetic oligonucleotide
atgtcactttgaca

SEQ ID NO: 8546 - DNA, 14 bp, Artificial Sequence
  Description of Artificial Sequence: Synthetic oligonucleotide
catgtcactttgac

SEQ ID NO: 8547 - DNA, 14 bp, Artificial Sequence
  Description of Artificial Sequence: Synthetic oligonucleotide
acatgtcactttga

SEQ ID NO: 8548 - DNA, 14 bp, Artificial Sequence
  Description of Artificial Sequence: Synthetic oligonucleotide
tacatgtcactttg

SEQ ID NO: 8549 - DNA, 14 bp, Artificial Sequence
  Description of Artificial Sequence: Synthetic oligonucleotide
atacatgtcacttt

SEQ ID NO: 8550 - DNA, 14 bp, Artificial Sequence
  Description of Artificial Sequence: Synthetic oligonucleotide
tatacatgtcactt

SEQ ID NO: 8551 - DNA, 14 bp, Artificial Sequence
  Description of Artificial Sequence: Synthetic oligonucleotide
ttatacatgtcact

SEQ ID NO: 8552 - DNA, 14 bp, Artificial Sequence
  Description of Artificial Sequence: Synthetic oligonucleotide
attatacatgtcac

SEQ ID NO: 8553 - DNA, 14 bp, Artificial Sequence
  Description of Artificial Sequence: Synthetic oligonucleotide
aattatacatgtca

SEQ ID NO: 8554 - DNA, 14 bp, Artificial Sequence
  Description of Artificial Sequence: Synthetic oligonucleotide
aaattatacatgtc

SEQ ID NO: 8555 - DNA, 14 bp, Artificial Sequence
  Description of Artificial Sequence: Synthetic oligonucleotide
aaaattatacatgt

SEQ ID NO: 8556 - DNA, 14 bp, Artificial Sequence
  Description of Artificial Sequence: Synthetic oligonucleotide
taaaattatacatg

SEQ ID NO: 8557 - DNA, 14 bp, Artificial Sequence
  Description of Artificial Sequence: Synthetic oligonucleotide
ctaaaattatacat

SEQ ID NO: 8558 - DNA, 14 bp, Artificial Sequence
  Description of Artificial Sequence: Synthetic oligonucleotide
actaaaattataca

SEQ ID NO: 8559 - DNA, 14 bp, Artificial Sequence
  Description of Artificial Sequence: Synthetic oligonucleotide
aactaaaattatac

SEQ ID NO: 8560 - DNA, 14 bp, Artificial Sequence
  Description of Artificial Sequence: Synthetic oligonucleotide
caactaaaattata

SEQ ID NO: 8561 - DNA, 14 bp, Artificial Sequence
  Description of Artificial Sequence: Synthetic oligonucleotide
tcaactaaaattat

SEQ ID NO: 8562 - DNA, 14 bp, Artificial Sequence
  Description of Artificial Sequence: Synthetic oligonucleotide
ctcaactaaaatta

SEQ ID NO: 8563 - DNA, 14 bp, Artificial Sequence
  Description of Artificial Sequence: Synthetic oligonucleotide
tctcaactaaaatt

SEQ ID NO: 8564 - DNA, 14 bp, Artificial Sequence
  Description of Artificial Sequence: Synthetic oligonucleotide
gtctcaactaaaat

SEQ ID NO: 8565 - DNA, 14 bp, Artificial Sequence
  Description of Artificial Sequence: Synthetic oligonucleotide
cgtctcaactaaaa

SEQ ID NO: 8566 - DNA, 14 bp, Artificial Sequence
  Description of Artificial Sequence: Synthetic oligonucleotide
acgtctcaactaaa

SEQ ID NO: 8567 - DNA, 14 bp, Artificial Sequence
  Description of Artificial Sequence: Synthetic oligonucleotide
cacgtctcaactaa

SEQ ID NO: 8568 - DNA, 14 bp, Artificial Sequence
  Description of Artificial Sequence: Synthetic oligonucleotide
acacgtctcaacta

SEQ ID NO: 8569 - DNA, 14 bp, Artificial Sequence
  Description of Artificial Sequence: Synthetic oligonucleotide
aacacgtctcaact

SEQ ID NO: 8570 - DNA, 14 bp, Artificial Sequence
  Description of Artificial Sequence: Synthetic oligonucleotide
aaacacgtctcaac

SEQ ID NO: 8571 - DNA, 14 bp, Artificial Sequence
  Description of Artificial Sequence: Synthetic oligonucleotide
caaacacgtctcaa

SEQ ID NO: 8572 - DNA, 14 bp, Artificial Sequence
  Description of Artificial Sequence: Synthetic oligonucleotide
acaaacacgtctca

SEQ ID NO: 8573 - DNA, 14 bp, Artificial Sequence
  Description of Artificial Sequence: Synthetic oligonucleotide
cacaaacacgtctc

SEQ ID NO: 8574 - DNA, 14 bp, Artificial Sequence
  Description of Artificial Sequence: Synthetic oligonucleotide
acacaaacacgtct

SEQ ID NO: 8575 - DNA, 14 bp, Artificial Sequence
  Description of Artificial Sequence: Synthetic oligonucleotide
tacacaaacacgtc

SEQ ID NO: 8576 - DNA, 14 bp, Artificial Sequence
  Description of Artificial Sequence: Synthetic oligonucleotide
atacacaaacacgt

SEQ ID NO: 8577 - DNA, 14 bp, Artificial Sequence
  Description of Artificial Sequence: Synthetic oligonucleotide
tatacacaaacacg

SEQ ID NO: 8578 - DNA, 14 bp, Artificial Sequence
  Description of Artificial Sequence: Synthetic oligonucleotide
atatacacaaacac

SEQ ID NO: 8579 - DNA, 14 bp, Artificial Sequence
  Description of Artificial Sequence: Synthetic oligonucleotide
tatatacacaaaca

SEQ ID NO: 8580 - DNA, 14 bp, Artificial Sequence
  Description of Artificial Sequence: Synthetic oligonucleotide
atatatacacaaac

SEQ ID NO: 8581 - DNA, 14 bp, Artificial Sequence
  Description of Artificial Sequence: Synthetic oligonucleotide
catatatacacaaa

SEQ ID NO: 8582 - DNA, 14 bp, Artificial Sequence
  Description of Artificial Sequence: Synthetic oligonucleotide
acatatatacacaa

SEQ ID NO: 8583 - DNA, 14 bp, Artificial Sequence
  Description of Artificial Sequence: Synthetic oligonucleotide
cacatatatacaca

SEQ ID NO: 8584 - DNA, 14 bp, Artificial Sequence
  Description of Artificial Sequence: Synthetic oligonucleotide
acacatatatacac

SEQ ID NO: 8585 - DNA, 14 bp, Artificial Sequence
  Description of Artificial Sequence: Synthetic oligonucleotide
tacacatatataca

SEQ ID NO: 8586 - DNA, 14 bp, Artificial Sequence
  Description of Artificial Sequence: Synthetic oligonucleotide
atacacatatatac

SEQ ID NO: 8587 - DNA, 14 bp, Artificial Sequence
  Description of Artificial Sequence: Synthetic oligonucleotide
aatacacatatata

SEQ ID NO: 8588 - DNA, 14 bp, Artificial Sequence
  Description of Artificial Sequence: Synthetic oligonucleotide
aaatacacatatat

SEQ ID NO: 8589 - DNA, 14 bp, Artificial Sequence
  Description of Artificial Sequence: Synthetic oligonucleotide
caaatacacatata

SEQ ID NO: 8590 - DNA, 14 bp, Artificial Sequence
  Description of Artificial Sequence: Synthetic oligonucleotide
gcaaatacacatat

SEQ ID NO: 8591 - DNA, 14 bp, Artificial Sequence
  Description of Artificial Sequence: Synthetic oligonucleotide
ggcaaatacacata

SEQ ID NO: 8592 - DNA, 14 bp, Artificial Sequence
  Description of Artificial Sequence: Synthetic oligonucleotide
aggcaaatacacat

SEQ ID NO: 8593 - DNA, 14 bp, Artificial Sequence
  Description of Artificial Sequence: Synthetic oligonucleotide
aaggcaaatacaca

SEQ ID NO: 8594 - DNA, 14 bp, Artificial Sequence
  Description of Artificial Sequence: Synthetic oligonucleotide
aaaggcaaatacac

SEQ ID NO: 8595 - DNA, 14 bp, Artificial Sequence
  Description of Artificial Sequence: Synthetic oligonucleotide
caaaggcaaataca

SEQ ID NO: 8596 - DNA, 14 bp, Artificial Sequence
  Description of Artificial Sequence: Synthetic oligonucleotide
acaaaggcaaatac

SEQ ID NO: 8597 - DNA, 14 bp, Artificial Sequence
  Description of Artificial Sequence: Synthetic oligonucleotide
aacaaaggcaaata

SEQ ID NO: 8598 - DNA, 14 bp, Artificial Sequence
  Description of Artificial Sequence: Synthetic oligonucleotide
aaacaaaggcaaat

SEQ ID NO: 8599 - DNA, 14 bp, Artificial Sequence
  Description of Artificial Sequence: Synthetic oligonucleotide
taaacaaaggcaaa

SEQ ID NO: 8600 - DNA, 14 bp, Artificial Sequence
  Description of Artificial Sequence: Synthetic oligonucleotide
ctaaacaaaggcaa

SEQ ID NO: 8601 - DNA, 14 bp, Artificial Sequence
  Description of Artificial Sequence: Synthetic oligonucleotide
actaaacaaaggca

SEQ ID NO: 8602 - DNA, 14 bp, Artificial Sequence
  Description of Artificial Sequence: Synthetic oligonucleotide
tactaaacaaaggc

SEQ ID NO: 8603 - DNA, 14 bp, Artificial Sequence
  Description of Artificial Sequence: Synthetic oligonucleotide
ctactaaacaaagg

SEQ ID NO: 8604 - DNA, 14 bp, Artificial Sequence
  Description of Artificial Sequence: Synthetic oligonucleotide
gctactaaacaaag

SEQ ID NO: 8605 - DNA, 14 bp, Artificial Sequence
  Description of Artificial Sequence: Synthetic oligonucleotide
tgctactaaacaaa

SEQ ID NO: 8606 - DNA, 14 bp, Artificial Sequence
  Description of Artificial Sequence: Synthetic oligonucleotide
gtgctactaaacaa

SEQ ID NO: 8607 - DNA, 14 bp, Artificial Sequence
  Description of Artificial Sequence: Synthetic oligonucleotide
cgtgctactaaaca

SEQ ID NO: 8608 - DNA, 14 bp, Artificial Sequence
  Description of Artificial Sequence: Synthetic oligonucleotide
ccgtgctactaaac

SEQ ID NO: 8609 - DNA, 14 bp, Artificial Sequence
  Description of Artificial Sequence: Synthetic oligonucleotide
accgtgctactaaa

SEQ ID NO: 8610 - DNA, 14 bp, Artificial Sequence
  Description of Artificial Sequence: Synthetic oligonucleotide
aaccgtgctactaa

SEQ ID NO: 8611 - DNA, 14 bp, Artificial Sequence
  Description of Artificial Sequence: Synthetic oligonucleotide
taaccgtgctacta

SEQ ID NO: 8612 - DNA, 14 bp, Artificial Sequence
  Description of Artificial Sequence: Synthetic oligonucleotide
ataaccgtgctact

SEQ ID NO: 8613 - DNA, 14 bp, Artificial Sequence
  Description of Artificial Sequence: Synthetic oligonucleotide
aataaccgtgctac

SEQ ID NO: 8614 - DNA, 14 bp, Artificial Sequence
  Description of Artificial Sequence: Synthetic oligonucleotide
aaataaccgtgcta

SEQ ID NO: 8615 - DNA, 14 bp, Artificial Sequence
  Description of Artificial Sequence: Synthetic oligonucleotide
caaataaccgtgct

SEQ ID NO: 8616 - DNA, 14 bp, Artificial Sequence
  Description of Artificial Sequence: Synthetic oligonucleotide
gcaaataaccgtgc

SEQ ID NO: 8617 - DNA, 14 bp, Artificial Sequence
  Description of Artificial Sequence: Synthetic oligonucleotide
agcaaataaccgtg

SEQ ID NO: 8618 - DNA, 14 bp, Artificial Sequence
  Description of Artificial Sequence: Synthetic oligonucleotide
tagcaaataaccgt

SEQ ID NO: 8619 - DNA, 14 bp, Artificial Sequence
  Description of Artificial Sequence: Synthetic oligonucleotide
ttagcaaataaccg

SEQ ID NO: 8620 - DNA, 14 bp, Artificial Sequence
  Description of Artificial Sequence: Synthetic oligonucleotide
tttagcaaataacc

SEQ ID NO: 8621 - DNA, 14 bp, Artificial Sequence
  Description of Artificial Sequence: Synthetic oligonucleotide
ttttagcaaataac

SEQ ID NO: 8622 - DNA, 14 bp, Artificial Sequence
  Description of Artificial Sequence: Synthetic oligonucleotide
attttagcaaataa

SEQ ID NO: 8623 - DNA, 14 bp, Artificial Sequence
  Description of Artificial Sequence: Synthetic oligonucleotide
tattttagcaaata

SEQ ID NO: 8624 - DNA, 14 bp, Artificial Sequence
  Description of Artificial Sequence: Synthetic oligonucleotide
ttattttagcaaat

SEQ ID NO: 8625 - DNA, 14 bp, Artificial Sequence
  Description of Artificial Sequence: Synthetic oligonucleotide
attattttagcaaa

SEQ ID NO: 8626 - DNA, 14 bp, Artificial Sequence
  Description of Artificial Sequence: Synthetic oligonucleotide
aattattttagcaa

SEQ ID NO: 8627 - DNA, 14 bp, Artificial Sequence
  Description of Artificial Sequence: Synthetic oligonucleotide
caattattttagca

SEQ ID NO: 8628 - DNA, 14 bp, Artificial Sequence
  Description of Artificial Sequence: Synthetic oligonucleotide
acaattattttagc

SEQ ID NO: 8629 - DNA, 14 bp, Artificial Sequence
  Description of Artificial Sequence: Synthetic oligonucleotide
gacaattattttag

SEQ ID NO: 8630 - DNA, 14 bp, Artificial Sequence
  Description of Artificial Sequence: Synthetic oligonucleotide
tgacaattatttta

SEQ ID NO: 8631 - DNA, 14 bp, Artificial Sequence
  Description of Artificial Sequence: Synthetic oligonucleotide
ttgacaattatttt

SEQ ID NO: 8632 - DNA, 14 bp, Artificial Sequence
  Description of Artificial Sequence: Synthetic oligonucleotide
tttgacaattattt

SEQ ID NO: 8633 - DNA, 14 bp, Artificial Sequence
  Description of Artificial Sequence: Synthetic oligonucleotide
ttttgacaattatt

SEQ ID NO: 8634 - DNA, 14 bp, Artificial Sequence
  Description of Artificial Sequence: Synthetic oligonucleotide
tttttgacaattat

SEQ ID NO: 8635 - DNA, 14 bp, Artificial Sequence
  Description of Artificial Sequence: Synthetic oligonucleotide
ttttttgacaatta

SEQ ID NO: 8636 - DNA, 14 bp, Artificial Sequence
  Description of Artificial Sequence: Synthetic oligonucleotide
attttttgacaatt

SEQ ID NO: 8637 - DNA, 14 bp, Artificial Sequence
  Description of Artificial Sequence: Synthetic oligonucleotide
aattttttgacaat

SEQ ID NO: 8638 - DNA, 14 bp, Artificial Sequence
  Description of Artificial Sequence: Synthetic oligonucleotide
caattttttgacaa

SEQ ID NO: 8639 - DNA, 14 bp, Artificial Sequence
  Description of Artificial Sequence: Synthetic oligonucleotide
gcaattttttgaca

SEQ ID NO: 8640 - DNA, 14 bp, Artificial Sequence
  Description of Artificial Sequence: Synthetic oligonucleotide
agcaattttttgac

SEQ ID NO: 8641 - DNA, 14 bp, Artificial Sequence
  Description of Artificial Sequence: Synthetic oligonucleotide
gagcaattttttga

SEQ ID NO: 8642 - DNA, 14 bp, Artificial Sequence
  Description of Artificial Sequence: Synthetic oligonucleotide
agagcaattttttg

SEQ ID NO: 8643 - DNA, 14 bp, Artificial Sequence
  Description of Artificial Sequence: Synthetic oligonucleotide
cagagcaatttttt

SEQ ID NO: 8644 - DNA, 14 bp, Artificial Sequence
  Description of Artificial Sequence: Synthetic oligonucleotide
acagagcaattttt

SEQ ID NO: 8645 - DNA, 14 bp, Artificial Sequence
  Description of Artificial Sequence: Synthetic oligonucleotide
gacagagcaatttt

SEQ ID NO: 8646 - DNA, 14 bp, Artificial Sequence
  Description of Artificial Sequence: Synthetic oligonucleotide
cgacagagcaattt

SEQ ID NO: 8647 - DNA, 14 bp, Artificial Sequence
  Description of Artificial Sequence: Synthetic oligonucleotide
ccgacagagcaatt

SEQ ID NO: 8648 - DNA, 14 bp, Artificial Sequence
  Description of Artificial Sequence: Synthetic oligonucleotide
accgacagagcaat

SEQ ID NO: 8649 - DNA, 14 bp, Artificial Sequence
  Description of Artificial Sequence: Synthetic oligonucleotide
gaccgacagagcaa

SEQ ID NO: 8650 - DNA, 14 bp, Artificial Sequence
  Description of Artificial Sequence: Synthetic oligonucleotide
cgaccgacagagca

SEQ ID NO: 8651 - DNA, 14 bp, Artificial Sequence
  Description of Artificial Sequence: Synthetic oligonucleotide
ccgaccgacagagc

SEQ ID NO: 8652 - DNA, 14 bp, Artificial Sequence
  Description of Artificial Sequence: Synthetic oligonucleotide
accgaccgacagag

SEQ ID NO: 8653 - DNA, 14 bp, Artificial Sequence
  Description of Artificial Sequence: Synthetic oligonucleotide
gaccgaccgacaga

SEQ ID NO: 8654 - DNA, 14 bp, Artificial Sequence
  Description of Artificial Sequence: Synthetic oligonucleotide
agaccgaccgacag

SEQ ID NO: 8655 - DNA, 14 bp, Artificial Sequence
  Description of Artificial Sequence: Synthetic oligonucleotide
aagaccgaccgaca

SEQ ID NO: 8656 - DNA, 14 bp, Artificial Sequence
  Description of Artificial Sequence: Synthetic oligonucleotide
aaagaccgaccgac

SEQ ID NO: 8657 - DNA, 14 bp, Artificial Sequence
  Description of Artificial Sequence: Synthetic oligonucleotide
caaagaccgaccga

SEQ ID NO: 8658 - DNA, 14 bp, Artificial Sequence
  Description of Artificial Sequence: Synthetic oligonucleotide
tcaaagaccgaccg

SEQ ID NO: 8659 - DNA, 14 bp, Artificial Sequence
  Description of Artificial Sequence: Synthetic oligonucleotide
atcaaagaccgacc

SEQ ID NO: 8660 - DNA, 14 bp, Artificial Sequence
  Description of Artificial Sequence: Synthetic oligonucleotide
catcaaagaccgac

SEQ ID NO: 8661 - DNA, 14 bp, Artificial Sequence
  Description of Artificial Sequence: Synthetic oligonucleotide
acatcaaagaccga

SEQ ID NO: 8662 - DNA, 14 bp, Artificial Sequence
  Description of Artificial Sequence: Synthetic oligonucleotide
tacatcaaagaccg

SEQ ID NO: 8663 - DNA, 14 bp, Artificial Sequence
  Description of Artificial Sequence: Synthetic oligonucleotide
ttacatcaaagacc

SEQ ID NO: 8664 - DNA, 14 bp, Artificial Sequence
  Description of Artificial Sequence: Synthetic oligonucleotide
cttacatcaaagac

SEQ ID NO: 8665 - DNA, 14 bp, Artificial Sequence
  Description of Artificial Sequence: Synthetic oligonucleotide
tcttacatcaaaga

SEQ ID NO: 8666 - DNA, 14 bp, Artificial Sequence
  Description of Artificial Sequence: Synthetic oligonucleotide
ttcttacatcaaag

SEQ ID NO: 8667 - DNA, 14 bp, Artificial Sequence
  Description of Artificial Sequence: Synthetic oligonucleotide
gttcttacatcaaa

SEQ ID NO: 8668 - DNA, 14 bp, Artificial Sequence
  Description of Artificial Sequence: Synthetic oligonucleotide
tgttcttacatcaa

SEQ ID NO: 8669 - DNA, 14 bp, Artificial Sequence
  Description of Artificial Sequence: Synthetic oligonucleotide
ttgttcttacatca

SEQ ID NO: 8670 - DNA, 14 bp, Artificial Sequence
  Description of Artificial Sequence: Synthetic oligonucleotide
tttgttcttacatc

SEQ ID NO: 8671 - DNA, 14 bp, Artificial Sequence
  Description of Artificial Sequence: Synthetic oligonucleotide
ctttgttcttacat

SEQ ID NO: 8672 - DNA, 14 bp, Artificial Sequence
  Description of Artificial Sequence: Synthetic oligonucleotide
actttgttcttaca

SEQ ID NO: 8673 - DNA, 14 bp, Artificial Sequence
  Description of Artificial Sequence: Synthetic oligonucleotide
cactttgttcttac

SEQ ID NO: 8674 - DNA, 14 bp, Artificial Sequence
  Description of Artificial Sequence: Synthetic oligonucleotide
acactttgttctta

SEQ ID NO: 8675 - DNA, 14 bp, Artificial Sequence
  Description of Artificial Sequence: Synthetic oligonucleotide
cacactttgttctt

SEQ ID NO: 8676 - DNA, 14 bp, Artificial Sequence
  Description of Artificial Sequence: Synthetic oligonucleotide
ccacactttgttct

SEQ ID NO: 8677 - DNA, 14 bp, Artificial Sequence
  Description of Artificial Sequence: Synthetic oligonucleotide
accacactttgttc

SEQ ID NO: 8678 - DNA, 14 bp, Artificial Sequence
  Description of Artificial Sequence: Synthetic oligonucleotide
gaccacactttgtt

SEQ ID NO: 8679 - DNA, 14 bp, Artificial Sequence
  Description of Artificial Sequence: Synthetic oligonucleotide
agaccacactttgt

SEQ ID NO: 8680 - DNA, 14 bp, Artificial Sequence
  Description of Artificial Sequence: Synthetic oligonucleotide
tagaccacactttg

SEQ ID NO: 8681 - DNA, 14 bp, Artificial Sequence
  Description of Artificial Sequence: Synthetic oligonucleotide
atagaccacacttt

SEQ ID NO: 8682 - DNA, 14 bp, Artificial Sequence
  Description of Artificial Sequence: Synthetic oligonucleotide
tatagaccacactt

SEQ ID NO: 8683 - DNA, 14 bp, Artificial Sequence
  Description of Artificial Sequence: Synthetic oligonucleotide
gtatagaccacact

SEQ ID NO: 8684 - DNA, 14 bp, Artificial Sequence
  Description of Artificial Sequence: Synthetic oligonucleotide
tgtatagaccacac

SEQ ID NO: 8685 - DNA, 14 bp, Artificial Sequence
  Description of Artificial Sequence: Synthetic oligonucleotide
atgtatagaccaca

SEQ ID NO: 8686 - DNA, 14 bp, Artificial Sequence
  Description of Artificial Sequence: Synthetic oligonucleotide
gatgtatagaccac

SEQ ID NO: 8687 - DNA, 14 bp, Artificial Sequence
  Description of Artificial Sequence: Synthetic oligonucleotide
agatgtatagacca

SEQ ID NO: 8688 - DNA, 14 bp, Artificial Sequence
  Description of Artificial Sequence: Synthetic oligonucleotide
tagatgtatagacc

SEQ ID NO: 8689 - DNA, 14 bp, Artificial Sequence
  Description of Artificial Sequence: Synthetic oligonucleotide
ttagatgtatagac

SEQ ID NO: 8690 - DNA, 14 bp, Artificial Sequence
  Description of Artificial Sequence: Synthetic oligonucleotide
attagatgtataga

SEQ ID NO: 8691 - DNA, 14 bp, Artificial Sequence
  Description of Artificial Sequence: Synthetic oligonucleotide
tattagatgtatag

SEQ ID NO: 8692 - DNA, 14 bp, Artificial Sequence
  Description of Artificial Sequence: Synthetic oligonucleotide
atattagatgtata

SEQ ID NO: 8693 - DNA, 14 bp, Artificial Sequence
  Description of Artificial Sequence: Synthetic oligonucleotide
catattagatgtat

SEQ ID NO: 8694 - DNA, 14 bp, Artificial Sequence
  Description of Artificial Sequence: Synthetic oligonucleotide
ccatattagatgta

SEQ ID NO: 8695 - DNA, 14 bp, Artificial Sequence
  Description of Artificial Sequence: Synthetic oligonucleotide
gccatattagatgt

SEQ ID NO: 8696 - DNA, 14 bp, Artificial Sequence
  Description of Artificial Sequence: Synthetic oligonucleotide
ggccatattagatg

SEQ ID NO: 8697 - DNA, 14 bp, Artificial Sequence
  Description of Artificial Sequence: Synthetic oligonucleotide
aggccatattagat

SEQ ID NO: 8698 - DNA, 14 bp, Artificial Sequence
  Description of Artificial Sequence: Synthetic oligonucleotide
aaggccatattaga

SEQ ID NO: 8699 - DNA, 14 bp, Artificial Sequence
  Description of Artificial Sequence: Synthetic oligonucleotide
aaaggccatattag

SEQ ID NO: 8700 - DNA, 14 bp, Artificial Sequence
  Description of Artificial Sequence: Synthetic oligonucleotide
caaaggccatatta

SEQ ID NO: 8701 - DNA, 14 bp, Artificial Sequence
  Description of Artificial Sequence: Synthetic oligonucleotide
acaaaggccatatt

SEQ ID NO: 8702 - DNA, 14 bp, Artificial Sequence
  Description of Artificial Sequence: Synthetic oligonucleotide
tacaaaggccatat

SEQ ID NO: 8703 - DNA, 14 bp, Artificial Sequence
  Description of Artificial Sequence: Synthetic oligonucleotide
gtacaaaggccata

SEQ ID NO: 8704 - DNA, 14 bp, Artificial Sequence
  Description of Artificial Sequence: Synthetic oligonucleotide
ggtacaaaggccat

SEQ ID NO: 8705 - DNA, 14 bp, Artificial Sequence
  Description of Artificial Sequence: Synthetic oligonucleotide
aggtacaaaggcca

SEQ ID NO: 8706 - DNA, 14 bp, Artificial Sequence
  Description of Artificial Sequence: Synthetic oligonucleotide
taggtacaaaggcc

SEQ ID NO: 8707 - DNA, 14 bp, Artificial Sequence
  Description of Artificial Sequence: Synthetic oligonucleotide
ttaggtacaaaggc

SEQ ID NO: 8708 - DNA, 14 bp, Artificial Sequence
  Description of Artificial Sequence: Synthetic oligonucleotide
gttaggtacaaagg

SEQ ID NO: 8709 - DNA, 14 bp, Artificial Sequence
  Description of Artificial Sequence: Synthetic oligonucleotide
ggttaggtacaaag

SEQ ID NO: 8710 - DNA, 14 bp, Artificial Sequence
  Description of Artificial Sequence: Synthetic oligonucleotide
tggttaggtacaaa

SEQ ID NO: 8711 - DNA, 14 bp, Artificial Sequence
  Description of Artificial Sequence: Synthetic oligonucleotide
atggttaggtacaa

SEQ ID NO: 8712 - DNA, 14 bp, Artificial Sequence
  Description of Artificial Sequence: Synthetic oligonucleotide
catggttaggtaca

SEQ ID NO: 8713 - DNA, 14 bp, Artificial Sequence
  Description of Artificial Sequence: Synthetic oligonucleotide
acatggttaggtac

SEQ ID NO: 8714 - DNA, 14 bp, Artificial Sequence
  Description of Artificial Sequence: Synthetic oligonucleotide
aacatggttaggta

SEQ ID NO: 8715 - DNA, 14 bp, Artificial Sequence
  Description of Artificial Sequence: Synthetic oligonucleotide
gaacatggttaggt

SEQ ID NO: 8716 - DNA, 14 bp, Artificial Sequence
  Description of Artificial Sequence: Synthetic oligonucleotide
tgaacatggttagg

SEQ ID NO: 8717 - DNA, 14 bp, Artificial Sequence
  Description of Artificial Sequence: Synthetic oligonucleotide
atgaacatggttag

SEQ ID NO: 8718 - DNA, 14 bp, Artificial Sequence
  Description of Artificial Sequence: Synthetic oligonucleotide
tatgaacatggtta

SEQ ID NO: 8719 - DNA, 14 bp, Artificial Sequence
  Description of Artificial Sequence: Synthetic oligonucleotide
ctatgaacatggtt

SEQ ID NO: 8720 - DNA, 14 bp, Artificial Sequence
  Description of Artificial Sequence: Synthetic oligonucleotide
cctatgaacatggt

SEQ ID NO: 8721 - DNA, 14 bp, Artificial Sequence
  Description of Artificial Sequence: Synthetic oligonucleotide
acctatgaacatgg

SEQ ID NO: 8722 - DNA, 14 bp, Artificial Sequence
  Description of Artificial Sequence: Synthetic oligonucleotide
tacctatgaacatg

SEQ ID NO: 8723 - DNA, 14 bp, Artificial Sequence
  Description of Artificial Sequence: Synthetic oligonucleotide
ttacctatgaacat

SEQ ID NO: 8724 - DNA, 14 bp, Artificial Sequence
  Description of Artificial Sequence: Synthetic oligonucleotide
attacctatgaaca

SEQ ID NO: 8725 - DNA, 14 bp, Artificial Sequence
  Description of Artificial Sequence: Synthetic oligonucleotide
gattacctatgaac

SEQ ID NO: 8726 - DNA, 14 bp, Artificial Sequence
  Description of Artificial Sequence: Synthetic oligonucleotide
agattacctatgaa

SEQ ID NO: 8727 - DNA, 14 bp, Artificial Sequence
  Description of Artificial Sequence: Synthetic oligonucleotide
aagattacctatga

SEQ ID NO: 8728 - DNA, 14 bp, Artificial Sequence
  Description of Artificial Sequence: Synthetic oligonucleotide
aaagattacctatg

SEQ ID NO: 8729 - DNA, 14 bp, Artificial Sequence
  Description of Artificial Sequence: Synthetic oligonucleotide
caaagattacctat

SEQ ID NO: 8730 - DNA, 14 bp, Artificial Sequence
  Description of Artificial Sequence: Synthetic oligonucleotide
acaaagattaccta

SEQ ID NO: 8731 - DNA, 14 bp, Artificial Sequence
  Description of Artificial Sequence: Synthetic oligonucleotide
tacaaagattacct

SEQ ID NO: 8732 - DNA, 14 bp, Artificial Sequence
  Description of Artificial Sequence: Synthetic oligonucleotide
gtacaaagattacc

SEQ ID NO: 8733 - DNA, 14 bp, Artificial Sequence
  Description of Artificial Sequence: Synthetic oligonucleotide
agtacaaagattac

SEQ ID NO: 8734 - DNA, 14 bp, Artificial Sequence
  Description of Artificial Sequence: Synthetic oligonucleotide
gagtacaaagatta

SEQ ID NO: 8735 - DNA, 14 bp, Artificial Sequence
  Description of Artificial Sequence: Synthetic oligonucleotide
agagtacaaagatt

SEQ ID NO: 8736 - DNA, 14 bp, Artificial Sequence
  Description of Artificial Sequence: Synthetic oligonucleotide
cagagtacaaagat

SEQ ID NO: 8737 - DNA, 14 bp, Artificial Sequence
  Description of Artificial Sequence: Synthetic oligonucleotide
acagagtacaaaga

SEQ ID NO: 8738 - DNA, 14 bp, Artificial Sequence
  Description of Artificial Sequence: Synthetic oligonucleotide
cacagagtacaaag

SEQ ID NO: 8739 - DNA, 14 bp, Artificial Sequence
  Description of Artificial Sequence: Synthetic oligonucleotide
acacagagtacaaa

SEQ ID NO: 8740 - DNA, 14 bp, Artificial Sequence
  Description of Artificial Sequence: Synthetic oligonucleotide
cacacagagtacaa

SEQ ID NO: 8741 - DNA, 14 bp, Artificial Sequence
  Description of Artificial Sequence: Synthetic oligonucleotide
gcacacagagtaca

SEQ ID NO: 8742 - DNA, 14 bp, Artificial Sequence
  Description of Artificial Sequence: Synthetic oligonucleotide
tgcacacagagtac

SEQ ID NO: 8743 - DNA, 14 bp, Artificial Sequence
  Description of Artificial Sequence: Synthetic oligonucleotide
ctgcacacagagta

SEQ ID NO: 8744 - DNA, 14 bp, Artificial Sequence
  Description of Artificial Sequence: Synthetic oligonucleotide
gctgcacacagagt

SEQ ID NO: 8745 - DNA, 14 bp, Artificial Sequence
  Description of Artificial Sequence: Synthetic oligonucleotide
tgctgcacacagag

SEQ ID NO: 8746 - DNA, 14 bp, Artificial Sequence
  Description of Artificial Sequence: Synthetic oligonucleotide
ctgctgcacacaga

SEQ ID NO: 8747 - DNA, 14 bp, Artificial Sequence
  Description of Artificial Sequence: Synthetic oligonucleotide
actgctgcacacag

SEQ ID NO: 8748 - DNA, 14 bp, Artificial Sequence
  Description of Artificial Sequence: Synthetic oligonucleotide
tactgctgcacaca

SEQ ID NO: 8749 - DNA, 14 bp, Artificial Sequence
  Description of Artificial Sequence: Synthetic oligonucleotide
atactgctgcacac

SEQ ID NO: 8750 - DNA, 14 bp, Artificial Sequence
  Description of Artificial Sequence: Synthetic oligonucleotide
aatactgctgcaca

SEQ ID NO: 8751 - DNA, 14 bp, Artificial Sequence
  Description of Artificial Sequence: Synthetic oligonucleotide
aaatactgctgcac

SEQ ID NO: 8752 - DNA, 14 bp, Artificial Sequence
  Description of Artificial Sequence: Synthetic oligonucleotide
caaatactgctgca

SEQ ID NO: 8753 - DNA, 14 bp, Artificial Sequence
  Description of Artificial Sequence: Synthetic oligonucleotide
ccaaatactgctgc

SEQ ID NO: 8754 - DNA, 14 bp, Artificial Sequence
  Description of Artificial Sequence: Synthetic oligonucleotide
accaaatactgctg

SEQ ID NO: 8755 - DNA, 14 bp, Artificial Sequence
  Description of Artificial Sequence: Synthetic oligonucleotide
aaccaaatactgct

SEQ ID NO: 8756 - DNA, 14 bp, Artificial Sequence
  Description of Artificial Sequence: Synthetic oligonucleotide
aaaccaaatactgc

SEQ ID NO: 8757 - DNA, 14 bp, Artificial Sequence
  Description of Artificial Sequence: Synthetic oligonucleotide
caaaccaaatactg

SEQ ID NO: 8758 - DNA, 14 bp, Artificial Sequence
  Description of Artificial Sequence: Synthetic oligonucleotide
gcaaaccaaatact

SEQ ID NO: 8759 - DNA, 14 bp, Artificial Sequence
  Description of Artificial Sequence: Synthetic oligonucleotide
tgcaaaccaaatac

SEQ ID NO: 8760 - DNA, 14 bp, Artificial Sequence
  Description of Artificial Sequence: Synthetic oligonucleotide
atgcaaaccaaata

SEQ ID NO: 8761 - DNA, 14 bp, Artificial Sequence
  Description of Artificial Sequence: Synthetic oligonucleotide
aatgcaaaccaaat

SEQ ID NO: 8762 - DNA, 14 bp, Artificial Sequence
  Description of Artificial Sequence: Synthetic oligonucleotide
aaatgcaaaccaaa

SEQ ID NO: 8763 - DNA, 14 bp, Artificial Sequence
  Description of Artificial Sequence: Synthetic oligonucleotide
taaatgcaaaccaa

SEQ ID NO: 8764 - DNA, 14 bp, Artificial Sequence
  Description of Artificial Sequence: Synthetic oligonucleotide
ttaaatgcaaacca

SEQ ID NO: 8765 - DNA, 14 bp, Artificial Sequence
  Description of Artificial Sequence: Synthetic oligonucleotide
tttaaatgcaaacc

SEQ ID NO: 8766 - DNA, 14 bp, Artificial Sequence
  Description of Artificial Sequence: Synthetic oligonucleotide
ctttaaatgcaaac

SEQ ID NO: 8767 - DNA, 14 bp, Artificial Sequence
  Description of Artificial Sequence: Synthetic oligonucleotide
actttaaatgcaaa

SEQ ID NO: 8768 - DNA, 14 bp, Artificial Sequence
  Description of Artificial Sequence: Synthetic oligonucleotide
cactttaaatgcaa

SEQ ID NO: 8769 - DNA, 14 bp, Artificial Sequence
  Description of Artificial Sequence: Synthetic oligonucleotide
tcactttaaatgca

SEQ ID NO: 8770 - DNA, 14 bp, Artificial Sequence
  Description of Artificial Sequence: Synthetic oligonucleotide
ttcactttaaatgc

SEQ ID NO: 8771 - DNA, 14 bp, Artificial Sequence
  Description of Artificial Sequence: Synthetic oligonucleotide
tttcactttaaatg

SEQ ID NO: 8772 - DNA, 14 bp, Artificial Sequence
  Description of Artificial Sequence: Synthetic oligonucleotide
ttttcactttaaat

SEQ ID NO: 8773 - DNA, 14 bp, Artificial Sequence
  Description of Artificial Sequence: Synthetic oligonucleotide
attttcactttaaa

SEQ ID NO: 8774 - DNA, 14 bp, Artificial Sequence
  Description of Artificial Sequence: Synthetic oligonucleotide
tattttcactttaa

SEQ ID NO: 8775 - DNA, 14 bp, Artificial Sequence
  Description of Artificial Sequence: Synthetic oligonucleotide
ttattttcacttta

SEQ ID NO: 8776 - DNA, 14 bp, Artificial Sequence
  Description of Artificial Sequence: Synthetic oligonucleotide
gttattttcacttt

SEQ ID NO: 8777 - DNA, 14 bp, Artificial Sequence
  Description of Artificial Sequence: Synthetic oligonucleotide
cgttattttcactt

SEQ ID NO: 8778 - DNA, 14 bp, Artificial Sequence
  Description of Artificial Sequence: Synthetic oligonucleotide
ccgttattttcact

SEQ ID NO: 8779 - DNA, 14 bp, Artificial Sequence
  Description of Artificial Sequence: Synthetic oligonucleotide
gccgttattttcac

SEQ ID NO: 8780 - DNA, 14 bp, Artificial Sequence
  Description of Artificial Sequence: Synthetic oligonucleotide
agccgttattttca

SEQ ID NO: 8781 - DNA, 14 bp, Artificial Sequence
  Description of Artificial Sequence: Synthetic oligonucleotide
cagccgttattttc

SEQ ID NO: 8782 - DNA, 14 bp, Artificial Sequence
  Description of Artificial Sequence: Synthetic oligonucleotide
acagccgttatttt

SEQ ID NO: 8783 - DNA, 14 bp, Artificial Sequence
  Description of Artificial Sequence: Synthetic oligonucleotide
aacagccgttattt

SEQ ID NO: 8784 - DNA, 14 bp, Artificial Sequence
  Description of Artificial Sequence: Synthetic oligonucleotide
taacagccgttatt

SEQ ID NO: 8785 - DNA, 14 bp, Artificial Sequence
  Description of Artificial Sequence: Synthetic oligonucleotide
ataacagccgttat

SEQ ID NO: 8786 - DNA, 14 bp, Artificial Sequence
  Description of Artificial Sequence: Synthetic oligonucleotide
aataacagccgtta

SEQ ID NO: 8787 - DNA, 14 bp, Artificial Sequence
  Description of Artificial Sequence: Synthetic oligonucleotide
aaataacagccgtt

SEQ ID NO: 8788 - DNA, 14 bp, Artificial Sequence
  Description of Artificial Sequence: Synthetic oligonucleotide
aaaataacagccgt

SEQ ID NO: 8789 - DNA, 14 bp, Artificial Sequence
  Description of Artificial Sequence: Synthetic oligonucleotide
aaaaataacagccg

SEQ ID NO: 8790 - DNA, 14 bp, Artificial Sequence
  Description of Artificial Sequence: Synthetic oligonucleotide
gaaaaataacagcc

SEQ ID NO: 8791 - DNA, 14 bp, Artificial Sequence
  Description of Artificial Sequence: Synthetic oligonucleotide
agaaaaataacagc

SEQ ID NO: 8792 - DNA, 14 bp, Artificial Sequence
  Description of Artificial Sequence: Synthetic oligonucleotide
cagaaaaataacag

SEQ ID NO: 8793 - DNA, 14 bp, Artificial Sequence
  Description of Artificial Sequence: Synthetic oligonucleotide
ccagaaaaataaca

SEQ ID NO: 8794 - DNA, 14 bp, Artificial Sequence
  Description of Artificial Sequence: Synthetic oligonucleotide
gccagaaaaataac

SEQ ID NO: 8795 - DNA, 14 bp, Artificial Sequence
  Description of Artificial Sequence: Synthetic oligonucleotide
tgccagaaaaataa

SEQ ID NO: 8796 - DNA, 14 bp, Artificial Sequence
  Description of Artificial Sequence: Synthetic oligonucleotide
atgccagaaaaata

SEQ ID NO: 8797 - DNA, 14 bp, Artificial Sequence
  Description of Artificial Sequence: Synthetic oligonucleotide
aatgccagaaaaat

SEQ ID NO: 8798 - DNA, 14 bp, Artificial Sequence
  Description of Artificial Sequence: Synthetic oligonucleotide
taatgccagaaaaa

SEQ ID NO: 8799 - DNA, 14 bp, Artificial Sequence
  Description of Artificial Sequence: Synthetic oligonucleotide
gtaatgccagaaaa

SEQ ID NO: 8800 - DNA, 14 bp, Artificial Sequence
  Description of Artificial Sequence: Synthetic oligonucleotide
agtaatgccagaaa

SEQ ID NO: 8801 - DNA, 14 bp, Artificial Sequence
  Description of Artificial Sequence: Synthetic oligonucleotide
tagtaatgccagaa

SEQ ID NO: 8802 - DNA, 14 bp, Artificial Sequence
  Description of Artificial Sequence: Synthetic oligonucleotide
ttagtaatgccaga

SEQ ID NO: 8803 - DNA, 14 bp, Artificial Sequence
  Description of Artificial Sequence: Synthetic oligonucleotide
cttagtaatgccag

SEQ ID NO: 8804 - DNA, 14 bp, Artificial Sequence
  Description of Artificial Sequence: Synthetic oligonucleotide
tcttagtaatgcca

SEQ ID NO: 8805 - DNA, 14 bp, Artificial Sequence
  Description of Artificial Sequence: Synthetic oligonucleotide
atcttagtaatgcc

SEQ ID NO: 8806 - DNA, 14 bp, Artificial Sequence
  Description of Artificial Sequence: Synthetic oligonucleotide
tatcttagtaatgc

SEQ ID NO: 8807 - DNA, 14 bp, Artificial Sequence
  Description of Artificial Sequence: Synthetic oligonucleotide
ttatcttagtaatg

SEQ ID NO: 8808 - DNA, 14 bp, Artificial Sequence
  Description of Artificial Sequence: Synthetic oligonucleotide
tttatcttagtaat

SEQ ID NO: 8809 - DNA, 14 bp, Artificial Sequence
  Description of Artificial Sequence: Synthetic oligonucleotide
gtttatcttagtaa

SEQ ID NO: 8810 - DNA, 14 bp, Artificial Sequence
  Description of Artificial Sequence: Synthetic oligonucleotide
agtttatcttagta

SEQ ID NO: 8811 - DNA, 14 bp, Artificial Sequence
  Description of Artificial Sequence: Synthetic oligonucleotide
cagtttatcttagt

SEQ ID NO: 8812 - DNA, 14 bp, Artificial Sequence
  Description of Artificial Sequence: Synthetic oligonucleotide
tcagtttatcttag

SEQ ID NO: 8813 - DNA, 14 bp, Artificial Sequence
  Description of Artificial Sequence: Synthetic oligonucleotide
ttcagtttatctta

SEQ ID NO: 8814 - DNA, 14 bp, Artificial Sequence
  Description of Artificial Sequence: Synthetic oligonucleotide
tttcagtttatctt

SEQ ID NO: 8815 - DNA, 14 bp, Artificial Sequence
  Description of Artificial Sequence: Synthetic oligonucleotide
ttttcagtttatct

SEQ ID NO: 8816 - DNA, 14 bp, Artificial Sequence
  Description of Artificial Sequence: Synthetic oligonucleotide
tttttcagtttatc

SEQ ID NO: 8817 - DNA, 14 bp, Artificial Sequence
  Description of Artificial Sequence: Synthetic oligonucleotide
atttttcagtttat

SEQ ID NO: 8818 - DNA, 14 bp, Artificial Sequence
  Description of Artificial Sequence: Synthetic oligonucleotide
tatttttcagttta

SEQ ID NO: 8819 - DNA, 14 bp, Artificial Sequence
  Description of Artificial Sequence: Synthetic oligonucleotide
ttatttttcagttt

SEQ ID NO: 8820 - DNA, 14 bp, Artificial Sequence
  Description of Artificial Sequence: Synthetic oligonucleotide
attatttttcagtt

SEQ ID NO: 8821 - DNA, 14 bp, Artificial Sequence
  Description of Artificial Sequence: Synthetic oligonucleotide
tattatttttcagt

SEQ ID NO: 8822 - DNA, 14 bp, Artificial Sequence
  Description of Artificial Sequence: Synthetic oligonucleotide
ttattatttttcag

SEQ ID NO: 8823 - DNA, 14 bp, Artificial Sequence
  Description of Artificial Sequence: Synthetic oligonucleotide
tttattatttttca

SEQ ID NO: 8824 - DNA, 14 bp, Artificial Sequence
  Description of Artificial Sequence: Synthetic oligonucleotide
ctttattatttttc

SEQ ID NO: 8825 - DNA, 14 bp, Artificial Sequence
  Description of Artificial Sequence: Synthetic oligonucleotide
tctttattattttt

SEQ ID NO: 8826 - DNA, 14 bp, Artificial Sequence
  Description of Artificial Sequence: Synthetic oligonucleotide
ttctttattatttt

SEQ ID NO: 8827 - DNA, 14 bp, Artificial Sequence
  Description of Artificial Sequence: Synthetic oligonucleotide
tttctttattattt

SEQ ID NO: 8828 - DNA, 14 bp, Artificial Sequence
  Description of Artificial Sequence: Synthetic oligonucleotide
ttttctttattatt

SEQ ID NO: 8829 - DNA, 14 bp, Artificial Sequence
  Description of Artificial Sequence: Synthetic oligonucleotide
tttttctttattat

SEQ ID NO: 8830 - DNA, 14 bp, Artificial Sequence
  Description of Artificial Sequence: Synthetic oligonucleotide
atttttctttatta

SEQ ID NO: 8831 - DNA, 14 bp, Artificial Sequence
  Description of Artificial Sequence: Synthetic oligonucleotide
catttttctttatt

SEQ ID NO: 8832 - DNA, 14 bp, Artificial Sequence
  Description of Artificial Sequence: Synthetic oligonucleotide
gcatttttctttat

SEQ ID NO: 8833 - DNA, 14 bp, Artificial Sequence
  Description of Artificial Sequence: Synthetic oligonucleotide
ggcatttttcttta

SEQ ID NO: 8834 - DNA, 14 bp, Artificial Sequence
  Description of Artificial Sequence: Synthetic oligonucleotide
aggcatttttcttt

SEQ ID NO: 8835 - DNA, 14 bp, Artificial Sequence
  Description of Artificial Sequence: Synthetic oligonucleotide
aaggcatttttctt

SEQ ID NO: 8836 - DNA, 14 bp, Artificial Sequence
  Description of Artificial Sequence: Synthetic oligonucleotide
taaggcatttttct

SEQ ID NO: 8837 - DNA, 14 bp, Artificial Sequence
  Description of Artificial Sequence: Synthetic oligonucleotide
gtaaggcatttttc

SEQ ID NO: 8838 - DNA, 14 bp, Artificial Sequence
  Description of Artificial Sequence: Synthetic oligonucleotide
tgtaaggcattttt

SEQ ID NO: 8839 - DNA, 14 bp, Artificial Sequence
  Description of Artificial Sequence: Synthetic oligonucleotide
atgtaaggcatttt

SEQ ID NO: 8840 - DNA, 14 bp, Artificial Sequence
  Description of Artificial Sequence: Synthetic oligonucleotide
tatgtaaggcattt

SEQ ID NO: 8841 - DNA, 14 bp, Artificial Sequence
  Description of Artificial Sequence: Synthetic oligonucleotide
ctatgtaaggcatt

SEQ ID NO: 8842 - DNA, 14 bp, Artificial Sequence
  Description of Artificial Sequence: Synthetic oligonucleotide
gctatgtaaggcat

SEQ ID NO: 8843 - DNA, 14 bp, Artificial Sequence
  Description of Artificial Sequence: Synthetic oligonucleotide
ggctatgtaaggca

SEQ ID NO: 8844 - DNA, 14 bp, Artificial Sequence
  Description of Artificial Sequence: Synthetic oligonucleotide
gggctatgtaaggc

SEQ ID NO: 8845 - DNA, 14 bp, Artificial Sequence
  Description of Artificial Sequence: Synthetic oligonucleotide
tgggctatgtaagg

SEQ ID NO: 8846 - DNA, 14 bp, Artificial Sequence
  Description of Artificial Sequence: Synthetic oligonucleotide
gtgggctatgtaag

SEQ ID NO: 8847 - DNA, 14 bp, Artificial Sequence
  Description of Artificial Sequence: Synthetic oligonucleotide
tgtgggctatgtaa

SEQ ID NO: 8848-8887 - skipped (40 entries)

SEQ ID NO: 8888 - DNA, 8395 bp, Homo sapiens
attagagaaaaaaggcgacaggcattctgaatagcaggagacagagacagaagtgatgtgtttgtaggaggcaagagcagttcattttgagtgagagatacagctagaaagataagtagcggtccgattgtgcaaggccatggataccaggttaaggactttggaatttatcctgggacgccagtgtgagttcttgaacagaaaagtccaggggcaagttcatcctactctcgagtctaatgatgatgctcttcagtatgttgaagaattaattttgcaattattaaatatgctatgccaagctcagccccgaagtgcttcagatgtagaggaacgtgttcaaaaaagtttccctcatccaattgataaatgggcaatagctgatgcccaatcagctattgaaaagaggaagcgaagaaaccctttatctctcccagtagaaaaaattcatcctttattaaaggaggtcctaggttataaaattgaccaccaggtttctgtttacatagtagcagtcttagaatacatttctgcagacattttaaagctggttgggaattatgtaagaaatatacggcattatgaaattacaaaacaagatattaaagtggcaatgtgtgctgacaaggtattgatggatatgtttcatcaagatgtagaagatattaatatattatctttaactgacgaagagccttccacctcaggagaacaaacttactatgatttggtaaaagcatttatggcagaaattcgacaatatataagggaactaaatctaattataaaagtttttagagagccctttgtctccaattcaaaattgttttcagctaatgatgtagaaaatatatttagtcgcatagtagatatacatgaacttagtgtaaagttactgggccatatagaagatacagtagaaatgacagatgaaggcagtccccatccactagtaggaagctgctttgaagacttagcagaggaactggcatttgatccatatgaatcgtatgctcgagatattttgcgacctggttttcatgatcgtttccttagtcagttatcaaagcctggggcagcactttatttgcagtcaataggcgaaggtttcaaagaagctgttcaatatgttttacccaggctgcttctggcccctgtttaccactgtctccattactttgaacttttgaagcagttagaagaaaaaagtgaagatcaagaagacaaggaatgtttaaaacaagcaataacagctttgcttaatgttcagagtggtatggaaaaaatatgttctaaaagtcttgcaaaacgaagactgagtgaatctgcatgtcggttttatagtcagcaaatgaaggggaaacaactagcaatcaagaagatgaacgagattcagaagaatattgatggttgggagggaaaagacattggacagtgttgtaatgaatttataatggaaggaactcttacacgtgtaggagccaaacatgagagacacatatttctctttgatggcttaatgatttgctgtaaatcaaatcatgggcagccaagacttcctggtgctagcaatgcagaatatcgtcttaaagaaaagttttttatgcgaaaggtacaaattaatgataaagatgacaccaatgaatacaagcatgcttttgaaataattttaaaagatgaaaatagtgttatattttctgccaagtcagctgaagagaaaaacaattggatggcagcattgatatctttacagtaccggagtacactggaaaggatgcttgatgtaacaatgctacaggaagagaaagaggagcagatgaggctgcctagtgctgatgtttatagatttgcagagcctgactctgaagagaatattatatttgaagagaacatgcagcccaaggctggaattccaattatcaaagcaggaactgttattaaacttatagagaggcttacgtaccatatgtacgcagatcccaattttgttcggacatttcttacaacatacagatccttttgcaaacctcaagaactactgagtcttataatagaaaggtttgaaattccagagcctgagccaacagaagctgatcgcatagctatagagaatggagatcaacccttgagtgcagaactgaaaagatttagaaaagaatatatacagcctgtgcaactgcgagtattaaatgtatgtcggcactgggtagagcaccacttctatgattttgaaagagatgcatatcttttgcaacgaatggaagaatttattggaacagtaagaggtaaagcaatgaaaaaatgggttgaatccatcactaaaataatccaaaggaaaaaaattgcaagagacaatggaccaggtcataatattacatttcagagttcacctcccacagttgagtggcatataagcagacctgggcacatagagacttttgacctgctcaccttacacccaatagaaattgctcgacaactcactttacttgaatcagatctataccgagctgtacagccatcagaattagttggaagtgtgtggacaaaagaagacaaagaaattaactctcctaatcttctgaaaatgattcgacataccaccaacctcactctgtggtttgagaaatgtattgtagaaactgaaaatttagaagaaagagtagctgtggtgagtcgaattattgagattctacaagtctttcaagagttgaacaactttaatggtgtccttgaggttgtcagtgctatgaattcatcacctgtttacagactagaccacacatttgagcaaataccaagtcgccagaagaaaattttagaagaagctcatgaattgagtgaagatcactataagaaatatttggcaaaactcaggtctattaatccaccatgtgtgcctttctttggaatttatctcactaatatcttgaaaacagaagaaggcaaccctgaggtcctaaaaagacatggaaaagagcttataaactttagcaaaaggaggaaagtagcagaaataacaggagagatccagcagtaccaaaatcagccttactgtttacgagtagaatcagatatcaaaaggttctttgaaaacttgaatccgatgggaaatagcatggagaaggaatttacagattatcttttcaacaaatccctagaaatagaaccacgaaaccctaagcctctcccaagatttccaaaaaaatatagctatcccctaaaatctcctggtgttcgtccatcaaacccaagaccaggtaccatgaggcatcccacacctctgcagcaggagccaaggaaaattagttatagtaggatccctgaaagtgaaacagaaagtacagcatctgcaccaaattctccaagaacaccgttaacacctccgcctgcttctggtgcttccagtaccacagatgtttgcagtgtatttgattccgatcattcgagcccttttcactcaagcaatgataccgtctttatccaagttactctgccccatggcccaagatctgcttctgtatcatctataagtttaaccaaaggcactgatgaagtgcctgtccctcctcctgttcctccacgaagacgaccagaatctgccccagcagaatcttcaccatctaagattatgtctaagcatttggacagtcccccagccattcctcctaggcaacccacatcaaaagcctattcaccacgatattcaatatcagaccggacctctatctcagaccctcctgaaagccctcccttattaccaccacgagaacctgtgaggacacctgatgttttctcaagctcaccactacatctccaacctccccctttgggcaaaaaaagtgaccatggcaatgccttcttcccaaacagcccttccccctttacaccacctcctcctcaaacaccttctcctcacggcacaagaaggcatctgccatcaccaccattgacacaagaagtggaccttcattccattgctgggccgcctgttcctccacgacaaagcacttctcaacatatccctaaactccctccaaaaacttacaaaagggagcacacacacccatccatgcacagagatggaccaccactgttggagaatgcccattcttcctgagttcctctgtactgggatgtatattttcctagccccaaatccattgctggcaatggatgcactgaatgtgccagcactgaggagttaaaatgagaactccaaacactaacgactcttcttcaagatgcagtataagacaatgaattttaacctagatgtaattatacaatggaaatggtattccagtttagaatatggaaagaccgacctagaggaattggacaactgattgcacctgaaaatcataaagggactttttctggccaataggcaggagtcctctttttgtgaagtgatcttttgtgaagtgatcattaaagggatggaaaacacagtctagtgtccagcaggcccacatgacagtttttgtaattcaaattatgcacttttaaaaaaaaaaacttaaacagggatcttaatatcttcctttgttttcctttgctttactcttctactttagaatattttcttaaaaatcactcaaaggactgtgaggaaaggctgtggtacctgaccttgttgaaatcaaggcccggcactgtactacaggcctgtttacagattattacggtgaactgaatgggtaccgaggcttcaccaaagaggtacttttttgttgttgttgttgttttaggaataattgtaccaattttaagagcattccccccacctgtccccacacacccaaacaaaatgtggtggtgttgccttcaaaaaagagaagttttgtgtcattaacatgacagaagaactttttaaaaaaaaataactgtcaactattctatttgcatttaggagactgttcatctatgctagattgtcattttccctccttctcccacagaagtttactggtagtccatgtcatggctcgtagctatccctctaaccataccatggaaatgcaggcacccaatgtgaaaaggagcacttgctgggcatcactgacaccgctcatgttttacacatagttgagtaatcagcatatctagaattatcttgcattgcctaaatcatatgtatatagtgaatgttatataatatacctggcaggtctgttttaatttaattgaataaagatacaaatactttgtttggctggcatatattaaattattatatgaagaaaatggttgattcttatttcttttagttgaaaaacacacaaaaacactaaacataaaagcacgttttgtggtacgccttggtttctagttctggatatatgtattaatcttaaagaatgatctaaagtcacagcttggcatataggaagatacttggttagaataggatgggtatcttttaagcagaactttgtaagtaagttttaagttcctaagcaacaagtatacagtttgttaaggtttatattgaacattctaccttgcttgaggttttctgctttatcaaaactattcataatagaacatctacctgcatcattactatcataatatggattattcataaagcgtatgtactgttcttctgagtctaacaaatactgtgactgaaatgcatgcaccttgttgaagagaaaacattttattaatctccactataatgtctgtgaaatgtgcagtattccatccttagagagtttatctggttcatcagcatctgcatgtatcctctgaataatgaagcaacatttcagcaattctgttaaccacaccattagagacatttttagaagtgctgcaacatggtgggaacctagtactttaataatttcctatgatatttattagagcataaaatgtacatcacgatagtacagtatgtagtcctttaagaccagaaggtatgttaactgcaccatcattaagcagtctatcctattttcttatttatttgttagaattgaatcctttctcaatatctgtaccattcctatgatggtagccattcttctctttataaaatatttcctctttgaaaagcgtcctaaaacattaatttcaaatcccctcttggatgcaaagtgtccctaagaccatccattcaacagtatttatgtgagccaacttactagagccgctacaactaatcatgatagacagtccagaatctccctggactttatactgggccagcctcattgtccctaagatttctctttttatgtctcatggattacttctctttttaattgccccaggcacattccaaatgagaacctggtaaaagtcacattggacccccttcagtatgtcttcggctaatgtgttagccttcaataaggtgataaccccttttcaacctatctagtctataaagaggaaaaattcagatttggagttctaatcctatttctcccaaagggaactattcttctaccccatggttctaggagaccacttcactgtgcaacagttttacatgcattgtggatggaggatatttttattctgaactgttacatttaggtaaaaatattttctgcagtggtaactgattagaaaaatgccaattggatgcccttaggtggaggtgagaaaatggcatccttgccttcttctcaatatgaaacattaactagttgacaaatttatccttgtagtaatgaaaatctatttaatcagggaccagaaatggctgaggagataaatgcatcattacaaaattctgcttttgaatcctggacattacaagggggtaaatgcagcatgactttttgttaaccacattccaaaatgtggaacatttcttttagaaatgaaaatatttcaaggctgatgtattttaagactacacattatcaggaaacatacattgagagttcgcttaattaaaggttgttgggcatcaaattatgtttagtaggttactattctctaacaactcaaggatgctttaatggatctgaatttgacaaagagcatgccacactaatactacagtcaacaacagcccagagaacaattactatgtcagctggaggctatattatgattctaaattcttaaaggtttttttccctccataaatcaaaaattaccttatgtaaaccaaaaattagttggtatttatggtcatgatcttaattctcaagtttagcttaatcttgtatttcattgtttgtcttctaatatgacagcttaaattcagatttttaagtgactcagcaaaataggaggagtgtcccaatttattagtgttgtacatattgaagaaaacctttttgttccttcagatttagaaagaaacagtttaaccatttatttcttggtattctgctgctgtgaataggtttacttattcttttaacatatattgtgtgactacgcaagtataggtcctgttgtattgcattaatctttaccagtaactaaacatcacaaggttaatattggtttggctgaaagaattatgcagtaaagttatttataagggaacatgatgactttattcaatatttttcttctttgaaacatctcattactaacttttaagattatttcataatcccttatacatgagccaatgaaatattttgagctctacttaagaagcatgaagtctatattataaatctaaacaacaaaagcacttgtaacttgtttagtaaattccatgccttattttccatttttgacaccgtaaagtgcattttctgtcgactgtgagcaaatttcccttttgcctttaatgaaaatagtgcattaagtagccaattgctgcagaattataaagcaaattagctaacagtgggtcacattggactaccactcaaagaaacaagatgcataacagatgatggaaggtacatgtggtgtggcttagggagagcgcacctgtgccagatgcatgccactttcagtagctgccaaatgtgcctttaattaagaacatctctaatttttttcttcagatcaagtcagcatttggggtcgggatttgggcagggaactttggggtgcaaatatctggtgaaaccaccagagaatttgtttgtcaaagtgacatgtataattttagttgagacgtgtttgtgtatatatgtgtatttgcctttgtttagtagcacggttatttgctaaaataattgtcaaaaaattgctctgtcggtcggtctttgatgtaagaacaaagtgtggtctatacatctaatatggcctttgtacctaaccatgttcataggtaatctttgtactctgtgtgcagcagtatttggtttgcatttaaagtgaaaataacggctgttatttttctggcattactaagataaactgaaaaataataaagaaaaatgccttacatagcccacaa

SEQ ID NO: 8889 - DNA, 8861 bp, Homo sapiens
agtagcgagcaggttcagttcgctagtaggaagctccagcgctacaccggcggcggcggtggcggcggcggccgcggcggcacctcagggcagccagattccccaacaacgacctccggtccttccccttccccgcgagacctccgccccagctccgccccgcccggggctcttgcgtttcggagtcccaactacgcggagcgggcgccgcggccggagcgtccctccacacgtcctcccccagccgccagctccgccgcggggccagaccgggcccgggagtgcagccccggcgggcgggcggcggccgcggcagagggcagcccggggcggcgccggcgggccggggaggggcggggggcctggccccggggcggtggtgcgggatgccgccgcctccgggccgcgtccgttctccacggctggtacctgtgtcgggtgggtggccaggcgcgggcctcgccccccagccccctcgccagggctagcccggctgcgcggcgcccggagggggccgggccgtccggtggggccgcggccctgttccgcgctgcgagctcgccctctcgcggctccctggcccggccgccgccgcccctctccccgcccagaggcgccccgggggcaccatgcaggcgcagcagctgccctacgagtttttcagcgaagagaacgcgcccaagtggcggggactactggtgcctgcgctgaaaaaggtccaggggcaagttcatcctactctcgagtctaatgatgatgctcttcagtatgttgaagaattaattttgcaattattaaatatgctatgccaagctcagccccgaagtgcttcagatgtagaggaacgtgttcaaaaaagtttccctcatccaattgataaatgggcaatagctgatgcccaatcagctattgaaaagaggaagcgaagaaaccctttatctctcccagtagaaaaaattcatcctttattaaaggaggtcctaggttataaaattgaccaccaggtttctgtttacatagtagcagtcttagaatacatttctgcagacattttaaagctggttgggaattatgtaagaaatatacggcattatgaaattacaaaacaagatattaaagtggcaatgtgtgctgacaaggtattgatggatatgtttcatcaagatgtagaagatattaatatattatctttaactgacgaagagccttccacctcaggagaacaaacttactatgatttggtaaaagcatttatggcagaaattcgacaatatataagggaactaaatctaattataaaagtttttagagagccctttgtctccaattcaaaattgttttcagctaatgatgtagaaaatatatttagtcgcatagtagatatacatgaacttagtgtaaagttactgggccatatagaagatacagtagaaatgacagatgaaggcagtccccatccactagtaggaagctgctttgaagacttagcagaggaactggcatttgatccatatgaatcgtatgctcgagatattttgcgacctggttttcatgatcgtttccttagtcagttatcaaagcctggggcagcactttatttgcagtcaataggcgaaggtttcaaagaagctgttcaatatgttttacccaggctgcttctggcccctgtttaccactgtctccattactttgaacttttgaagcagttagaagaaaaaagtgaagatcaagaagacaaggaatgtttaaaacaagcaataacagctttgcttaatgttcagagtggtatggaaaaaatatgttctaaaagtcttgcaaaacgaagactgagtgaatctgcatgtcggttttatagtcagcaaatgaaggggaaacaactagcaatcaagaagatgaacgagattcagaagaatattgatggttgggagggaaaagacattggacagtgttgtaatgaatttataatggaaggaactcttacacgtgtaggagccaaacatgagagacacatatttctctttgatggcttaatgatttgctgtaaatcaaatcatgggcagccaagacttcctggtgctagcaatgcagaatatcgtcttaaagaaaagttttttatgcgaaaggtacaaattaatgataaagatgacaccaatgaatacaagcatgcttttgaaataattttaaaagatgaaaatagtgttatattttctgccaagtcagctgaagagaaaaacaattggatggcagcattgatatctttacagtaccggagtacactggaaaggatgcttgatgtaacaatgctacaggaagagaaagaggagcagatgaggctgcctagtgctgatgtttatagatttgcagagcctgactctgaagagaatattatatttgaagagaacatgcagcccaaggctggaattccaattatcaaagcaggaactgttattaaacttatagagaggcttacgtaccatatgtacgcagatcccaattttgttcggacatttcttacaacatacagatccttttgcaaacctcaagaactactgagtcttataatagaaaggtttgaaattccagagcctgagccaacagaagctgatcgcatagctatagagaatggagatcaacccttgagtgcagaactgaaaagatttagaaaagaatatatacagcctgtgcaactgcgagtattaaatgtatgtcggcactgggtagagcaccacttctatgattttgaaagagatgcatatcttttgcaacgaatggaagaatttattggaacagtaagaggtaaagcaatgaaaaaatgggttgaatccatcactaaaataatccaaaggaaaaaaattgcaagagacaatggaccaggtcataatattacatttcagagttcacctcccacagttgagtggcatataagcagacctgggcacatagagacttttgacctgctcaccttacacccaatagaaattgctcgacaactcactttacttgaatcagatctataccgagctgtacagccatcagaattagttggaagtgtgtggacaaaagaagacaaagaaattaactctcctaatcttctgaaaatgattcgacataccaccaacctcactctgtggtttgagaaatgtattgtagaaactgaaaatttagaagaaagagtagctgtggtgagtcgaattattgagattctacaagtctttcaagagttgaacaactttaatggtgtccttgaggttgtcagtgctatgaattcatcacctgtttacagactagaccacacatttgagcaaataccaagtcgccagaagaaaattttagaagaagctcatgaattgagtgaagatcactataagaaatatttggcaaaactcaggtctattaatccaccatgtgtgcctttctttggaatttatctcactaatatcttgaaaacagaagaaggcaaccctgaggtcctaaaaagacatggaaaagagcttataaactttagcaaaaggaggaaagtagcagaaataacaggagagatccagcagtaccaaaatcagccttactgtttacgagtagaatcagatatcaaaaggttctttgaaaacttgaatccgatgggaaatagcatggagaaggaatttacagattatcttttcaacaaatccctagaaatagaaccacgaaaccctaagcctctcccaagatttccaaaaaaatatagctatcccctaaaatctcctggtgttcgtccatcaaacccaagaccaggtaccatgaggcatcccacacctctgcagcaggagccaaggaaaattagttatagtaggatccctgaaagtgaaacagaaagtacagcatctgcaccaaattctccaagaacaccgttaacacctccgcctgcttctggtgcttccagtaccacagatgtttgcagtgtatttgattccgatcattcgagcccttttcactcaagatctgcttctgtatcatctataagtttaaccaaaggcactgatgaagtgcctgtccctcctcctgttcctccacgaagacgaccagaatctgccccagcagaatcttcaccatctaagattatgtctaagcatttggacagtcccccagccattcctcctaggcaacccacatcaaaagcctattcaccacgatattcaatatcagaccggacctctatctcagaccctcctgaaagccctcccttattaccaccacgagaacctgtgaggacacctgatgttttctcaagctcaccactacatctccaacctccccctttgggcaaaaaaagtgaccatggcaatgccttcttcccaaacagcccttccccctttacaccacctcctcctcaaacaccttctcctcacggcacaagaaggcatctgccatcaccaccattgacacaagaagtggaccttcattccattgctgggccgcctgttcctccacgacaaagcacttctcaacatatccctaaactccctccaaaaacttacaaaagggagcacacacacccatccatgcacagagatggaccaccactgttggagaatgcccattcttcctgagttcctctgtactgggatgtatattttcctagccccaaatccattgctggcaatggatgcactgaatgtgccagcactgaggagttaaaatgagaactccaaacactaacgactcttcttcaagatgcagtataagacaatgaattttaacctagatgtaattatacaatggaaatggtattccagtttagaatatggaaagaccgacctagaggaattggacaactgattgcacctgaaaatcataaagggactttttctggccaataggcaggagtcctctttttgtgaagtgatcttttgtgaagtgatcattaaagggatggaaaacacagtctagtgtccagcaggcccacatgacagtttttgtaattcaaattatgcacttttaaaaaaaaaaacttaaacagggatcttaatatcttcctttgttttcctttgctttactcttctactttagaatattttcttaaaaatcactcaaaggactgtgaggaaaggctgtggtacctgaccttgttgaaatcaaggcccggcactgtactacaggcctgtttacagattattacggtgaactgaatgggtaccgaggcttcaccaaagaggtacttttttgttgttgttgttgttttaggaataattgtaccaattttaagagcattccccccacctgtccccacacacccaaacaaaatgtggtggtgttgccttcaaaaaagagaagttttgtgtcattaacatgacagaagaactttttaaaaaaaaataactgtcaactattctatttgcatttaggagactgttcatctatgctagattgtcattttccctccttctcccacagaagtttactggtagtccatgtcatggctcgtagctatccctctaaccataccatggaaatgcaggcacccaatgtgaaaaggagcacttgctgggcatcactgacaccgctcatgttttacacatagttgagtaatcagcatatctagaattatcttgcattgcctaaatcatatgtatatagtgaatgttatataatatacctggcaggtctgttttaatttaattgaataaagatacaaatactttgtttggctggcatatattaaattattatatgaagaaaatggttgattcttatttcttttagttgaaaaacacacaaaaacactaaacataaaagcacgttttgtggtacgccttggtttctagttctggatatatgtattaatcttaaagaatgatctaaagtcacagcttggcatataggaagatacttggttagaataggatgggtatcttttaagcagaactttgtaagtaagttttaagttcctaagcaacaagtatacagtttgttaaggtttatattgaacattctaccttgcttgaggttttctgctttatcaaaactattcataatagaacatctacctgcatcattactatcataatatggattattcataaagcgtatgtactgttcttctgagtctaacaaatactgtgactgaaatgcatgcaccttgttgaagagaaaacattttattaatctccactataatgtctgtgaaatgtgcagtattccatccttagagagtttatctggttcatcagcatctgcatgtatcctctgaataatgaagcaacatttcagcaattctgttaaccacaccattagagacatttttagaagtgctgcaacatggtgggaacctagtactttaataatttcctatgatatttattagagcataaaatgtacatcacgatagtacagtatgtagtcctttaagaccagaaggtatgttaactgcaccatcattaagcagtctatcctattttcttatttatttgttagaattgaatcctttctcaatatctgtaccattcctatgatggtagccattcttctctttataaaatatttcctctttgaaaagcgtcctaaaacattaatttcaaatcccctcttggatgcaaagtgtccctaagaccatccattcaacagtatttatgtgagccaacttactagagccgctacaactaatcatgatagacagtccagaatctccctggactttatactgggccagcctcattgtccctaagatttctctttttatgtctcatggattacttctctttttaattgccccaggcacattccaaatgagaacctggtaaaagtcacattggacccccttcagtatgtcttcggctaatgtgttagccttcaataaggtgataaccccttttcaacctatctagtctataaagaggaaaaattcagatttggagttctaatcctatttctcccaaagggaactattcttctaccccatggttctaggagaccacttcactgtgcaacagttttacatgcattgtggatggaggatatttttattctgaactgttacatttaggtaaaaatattttctgcagtggtaactgattagaaaaatgccaattggatgcccttaggtggaggtgagaaaatggcatccttgccttcttctcaatatgaaacattaactagttgacaaatttatccttgtagtaatgaaaatctatttaatcagggaccagaaatggctgaggagataaatgcatcattacaaaattctgcttttgaatcctggacattacaagggggtaaatgcagcatgactttttgttaaccacattccaaaatgtggaacatttcttttagaaatgaaaatatttcaaggctgatgtattttaagactacacattatcaggaaacatacattgagagttcgcttaattaaaggttgttgggcatcaaattatgtttagtaggttactattctctaacaactcaaggatgctttaatggatctgaatttgacaaagagcatgccacactaatactacagtcaacaacagcccagagaacaattactatgtcagctggaggctatattatgattctaaattcttaaaggtttttttccctccataaatcaaaaattaccttatgtaaaccaaaaattagttggtatttatggtcatgatcttaattctcaagtttagcttaatcttgtatttcattgtttgtcttctaatatgacagcttaaattcagatttttaagtgactcagcaaaataggaggagtgtcccaatttattagtgttgtacatattgaagaaaacctttttgttccttcagatttagaaagaaacagtttaaccatttatttcttggtattctgctgctgtgaataggtttacttattcttttaacatatattgtgtgactacgcaagtataggtcctgttgtattgcattaatctttaccagtaactaaacatcacaaggttaatattggtttggctgaaagaattatgcagtaaagttatttataagggaacatgatgactttattcaatatttttcttctttgaaacatctcattactaacttttaagattatttcataatcccttatacatgagccaatgaaatattttgagctctacttaagaagcatgaagtctatattataaatctaaacaacaaaagcacttgtaacttgtttagtaaattccatgccttattttccatttttgacaccgtaaagtgcattttctgtcgactgtgagcaaatttcccttttgcctttaatgaaaatagtgcattaagtagccaattgctgcagaattataaagcaaattagctaacagtgggtcacattggactaccactcaaagaaacaagatgcataacagatgatggaaggtacatgtggtgtggcttagggagagcgcacctgtgccagatgcatgccactttcagtagctgccaaatgtgcctttaattaagaacatctctaatttttttcttcagatcaagtcagcatttggggtcgggatttgggcagggaactttggggtgcaaatatctggtgaaaccaccagagaatttgtttgtcaaagtgacatgtataattttagttgagacgtgtttgtgtatatatgtgtatttgcctttgtttagtagcacggttatttgctaaaataattgtcaaaaaattgctctgtcggtcggtctttgatgtaagaacaaagtgtggtctatacatctaatatggcctttgtacctaaccatgttcataggtaatctttgtactctgtgtgcagcagtatttggtttgcatttaaagtgaaaataacggctgttatttttctggcattactaagataaactgaaaaataataaagaaaaatgccttacatagcccacaa

SEQ ID NO: 8890 - DNA, 8906 bp, Homo sapiens
agtagcgagcaggttcagttcgctagtaggaagctccagcgctacaccggcggcggcggtggcggcggcggccgcggcggcacctcagggcagccagattccccaacaacgacctccggtccttccccttccccgcgagacctccgccccagctccgccccgcccggggctcttgcgtttcggagtcccaactacgcggagcgggcgccgcggccggagcgtccctccacacgtcctcccccagccgccagctccgccgcggggccagaccgggcccgggagtgcagccccggcgggcgggcggcggccgcggcagagggcagcccggggcggcgccggcgggccggggaggggcggggggcctggccccggggcggtggtgcgggatgccgccgcctccgggccgcgtccgttctccacggctggtacctgtgtcgggtgggtggccaggcgcgggcctcgccccccagccccctcgccagggctagcccggctgcgcggcgcccggagggggccgggccgtccggtggggccgcggccctgttccgcgctgcgagctcgccctctcgcggctccctggcccggccgccgccgcccctctccccgcccagaggcgccccgggggcaccatgcaggcgcagcagctgccctacgagtttttcagcgaagagaacgcgcccaagtggcggggactactggtgcctgcgctgaaaaaggtccaggggcaagttcatcctactctcgagtctaatgatgatgctcttcagtatgttgaagaattaattttgcaattattaaatatgctatgccaagctcagccccgaagtgcttcagatgtagaggaacgtgttcaaaaaagtttccctcatccaattgataaatgggcaatagctgatgcccaatcagctattgaaaagaggaagcgaagaaaccctttatctctcccagtagaaaaaattcatcctttattaaaggaggtcctaggttataaaattgaccaccaggtttctgtttacatagtagcagtcttagaatacatttctgcagacattttaaagctggttgggaattatgtaagaaatatacggcattatgaaattacaaaacaagatattaaagtggcaatgtgtgctgacaaggtattgatggatatgtttcatcaagatgtagaagatattaatatattatctttaactgacgaagagccttccacctcaggagaacaaacttactatgatttggtaaaagcatttatggcagaaattcgacaatatataagggaactaaatctaattataaaagtttttagagagccctttgtctccaattcaaaattgttttcagctaatgatgtagaaaatatatttagtcgcatagtagatatacatgaacttagtgtaaagttactgggccatatagaagatacagtagaaatgacagatgaaggcagtccccatccactagtaggaagctgctttgaagacttagcagaggaactggcatttgatccatatgaatcgtatgctcgagatattttgcgacctggttttcatgatcgtttccttagtcagttatcaaagcctggggcagcactttatttgcagtcaataggcgaaggtttcaaagaagctgttcaatatgttttacccaggctgcttctggcccctgtttaccactgtctccattactttgaacttttgaagcagttagaagaaaaaagtgaagatcaagaagacaaggaatgtttaaaacaagcaataacagctttgcttaatgttcagagtggtatggaaaaaatatgttctaaaagtcttgcaaaacgaagactgagtgaatctgcatgtcggttttatagtcagcaaatgaaggggaaacaactagcaatcaagaagatgaacgagattcagaagaatattgatggttgggagggaaaagacattggacagtgttgtaatgaatttataatggaaggaactcttacacgtgtaggagccaaacatgagagacacatatttctctttgatggcttaatgatttgctgtaaatcaaatcatgggcagccaagacttcctggtgctagcaatgcagaatatcgtcttaaagaaaagttttttatgcgaaaggtacaaattaatgataaagatgacaccaatgaatacaagcatgcttttgaaataattttaaaagatgaaaatagtgttatattttctgccaagtcagctgaagagaaaaacaattggatggcagcattgatatctttacagtaccggagtacactggaaaggatgcttgatgtaacaatgctacaggaagagaaagaggagcagatgaggctgcctagtgctgatgtttatagatttgcagagcctgactctgaagagaatattatatttgaagagaacatgcagcccaaggctggaattccaattatcaaagcaggaactgttattaaacttatagagaggcttacgtaccatatgtacgcagatcccaattttgttcggacatttcttacaacatacagatccttttgcaaacctcaagaactactgagtcttataatagaaaggtttgaaattccagagcctgagccaacagaagctgatcgcatagctatagagaatggagatcaacccttgagtgcagaactgaaaagatttagaaaagaatatatacagcctgtgcaactgcgagtattaaatgtatgtcggcactgggtagagcaccacttctatgattttgaaagagatgcatatcttttgcaacgaatggaagaatttattggaacagtaagaggtaaagcaatgaaaaaatgggttgaatccatcactaaaataatccaaaggaaaaaaattgcaagagacaatggaccaggtcataatattacatttcagagttcacctcccacagttgagtggcatataagcagacctgggcacatagagacttttgacctgctcaccttacacccaatagaaattgctcgacaactcactttacttgaatcagatctataccgagctgtacagccatcagaattagttggaagtgtgtggacaaaagaagacaaagaaattaactctcctaatcttctgaaaatgattcgacataccaccaacctcactctgtggtttgagaaatgtattgtagaaactgaaaatttagaagaaagagtagctgtggtgagtcgaattattgagattctacaagtctttcaagagttgaacaactttaatggtgtccttgaggttgtcagtgctatgaattcatcacctgtttacagactagaccacacatttgagcaaataccaagtcgccagaagaaaattttagaagaagctcatgaattgagtgaagatcactataagaaatatttggcaaaactcaggtctattaatccaccatgtgtgcctttctttggaatttatctcactaatatcttgaaaacagaagaaggcaaccctgaggtcctaaaaagacatggaaaagagcttataaactttagcaaaaggaggaaagtagcagaaataacaggagagatccagcagtaccaaaatcagccttactgtttacgagtagaatcagatatcaaaaggttctttgaaaacttgaatccgatgggaaatagcatggagaaggaatttacagattatcttttcaacaaatccctagaaatagaaccacgaaaccctaagcctctcccaagatttccaaaaaaatatagctatcccctaaaatctcctggtgttcgtccatcaaacccaagaccaggtaccatgaggcatcccacacctctgcagcaggagccaaggaaaattagttatagtaggatccctgaaagtgaaacagaaagtacagcatctgcaccaaattctccaagaacaccgttaacacctccgcctgcttctggtgcttccagtaccacagatgtttgcagtgtatttgattccgatcattcgagcccttttcactcaagcaatgataccgtctttatccaagttactctgccccatggcccaagatctgcttctgtatcatctataagtttaaccaaaggcactgatgaagtgcctgtccctcctcctgttcctccacgaagacgaccagaatctgccccagcagaatcttcaccatctaagattatgtctaagcatttggacagtcccccagccattcctcctaggcaacccacatcaaaagcctattcaccacgatattcaatatcagaccggacctctatctcagaccctcctgaaagccctcccttattaccaccacgagaacctgtgaggacacctgatgttttctcaagctcaccactacatctccaacctccccctttgggcaaaaaaagtgaccatggcaatgccttcttcccaaacagcccttccccctttacaccacctcctcctcaaacaccttctcctcacggcacaagaaggcatctgccatcaccaccattgacacaagaagtggaccttcattccattgctgggccgcctgttcctccacgacaaagcacttctcaacatatccctaaactccctccaaaaacttacaaaagggagcacacacacccatccatgcacagagatggaccaccactgttggagaatgcccattcttcctgagttcctctgtactgggatgtatattttcctagccccaaatccattgctggcaatggatgcactgaatgtgccagcactgaggagttaaaatgagaactccaaacactaacgactcttcttcaagatgcagtataagacaatgaattttaacctagatgtaattatacaatggaaatggtattccagtttagaatatggaaagaccgacctagaggaattggacaactgattgcacctgaaaatcataaagggactttttctggccaataggcaggagtcctctttttgtgaagtgatcttttgtgaagtgatcattaaagggatggaaaacacagtctagtgtccagcaggcccacatgacagtttttgtaattcaaattatgcacttttaaaaaaaaaaacttaaacagggatcttaatatcttcctttgttttcctttgctttactcttctactttagaatattttcttaaaaatcactcaaaggactgtgaggaaaggctgtggtacctgaccttgttgaaatcaaggcccggcactgtactacaggcctgtttacagattattacggtgaactgaatgggtaccgaggcttcaccaaagaggtacttttttgttgttgttgttgttttaggaataattgtaccaattttaagagcattccccccacctgtccccacacacccaaacaaaatgtggtggtgttgccttcaaaaaagagaagttttgtgtcattaacatgacagaagaactttttaaaaaaaaataactgtcaactattctatttgcatttaggagactgttcatctatgctagattgtcattttccctccttctcccacagaagtttactggtagtccatgtcatggctcgtagctatccctctaaccataccatggaaatgcaggcacccaatgtgaaaaggagcacttgctgggcatcactgacaccgctcatgttttacacatagttgagtaatcagcatatctagaattatcttgcattgcctaaatcatatgtatatagtgaatgttatataatatacctggcaggtctgttttaatttaattgaataaagatacaaatactttgtttggctggcatatattaaattattatatgaagaaaatggttgattcttatttcttttagttgaaaaacacacaaaaacactaaacataaaagcacgttttgtggtacgccttggtttctagttctggatatatgtattaatcttaaagaatgatctaaagtcacagcttggcatataggaagatacttggttagaataggatgggtatcttttaagcagaactttgtaagtaagttttaagttcctaagcaacaagtatacagtttgttaaggtttatattgaacattctaccttgcttgaggttttctgctttatcaaaactattcataatagaacatctacctgcatcattactatcataatatggattattcataaagcgtatgtactgttcttctgagtctaacaaatactgtgactgaaatgcatgcaccttgttgaagagaaaacattttattaatctccactataatgtctgtgaaatgtgcagtattccatccttagagagtttatctggttcatcagcatctgcatgtatcctctgaataatgaagcaacatttcagcaattctgttaaccacaccattagagacatttttagaagtgctgcaacatggtgggaacctagtactttaataatttcctatgatatttattagagcataaaatgtacatcacgatagtacagtatgtagtcctttaagaccagaaggtatgttaactgcaccatcattaagcagtctatcctattttcttatttatttgttagaattgaatcctttctcaatatctgtaccattcctatgatggtagccattcttctctttataaaatatttcctctttgaaaagcgtcctaaaacattaatttcaaatcccctcttggatgcaaagtgtccctaagaccatccattcaacagtatttatgtgagccaacttactagagccgctacaactaatcatgatagacagtccagaatctccctggactttatactgggccagcctcattgtccctaagatttctctttttatgtctcatggattacttctctttttaattgccccaggcacattccaaatgagaacctggtaaaagtcacattggacccccttcagtatgtcttcggctaatgtgttagccttcaataaggtgataaccccttttcaacctatctagtctataaagaggaaaaattcagatttggagttctaatcctatttctcccaaagggaactattcttctaccccatggttctaggagaccacttcactgtgcaacagttttacatgcattgtggatggaggatatttttattctgaactgttacatttaggtaaaaatattttctgcagtggtaactgattagaaaaatgccaattggatgcccttaggtggaggtgagaaaatggcatccttgccttcttctcaatatgaaacattaactagttgacaaatttatccttgtagtaatgaaaatctatttaatcagggaccagaaatggctgaggagataaatgcatcattacaaaattctgcttttgaatcctggacattacaagggggtaaatgcagcatgactttttgttaaccacattccaaaatgtggaacatttcttttagaaatgaaaatatttcaaggctgatgtattttaagactacacattatcaggaaacatacattgagagttcgcttaattaaaggttgttgggcatcaaattatgtttagtaggttactattctctaacaactcaaggatgctttaatggatctgaatttgacaaagagcatgccacactaatactacagtcaacaacagcccagagaacaattactatgtcagctggaggctatattatgattctaaattcttaaaggtttttttccctccataaatcaaaaattaccttatgtaaaccaaaaattagttggtatttatggtcatgatcttaattctcaagtttagcttaatcttgtatttcattgtttgtcttctaatatgacagcttaaattcagatttttaagtgactcagcaaaataggaggagtgtcccaatttattagtgttgtacatattgaagaaaacctttttgttccttcagatttagaaagaaacagtttaaccatttatttcttggtattctgctgctgtgaataggtttacttattcttttaacatatattgtgtgactacgcaagtataggtcctgttgtattgcattaatctttaccagtaactaaacatcacaaggttaatattggtttggctgaaagaattatgcagtaaagttatttataagggaacatgatgactttattcaatatttttcttctttgaaacatctcattactaacttttaagattatttcataatcccttatacatgagccaatgaaatattttgagctctacttaagaagcatgaagtctatattataaatctaaacaacaaaagcacttgtaacttgtttagtaaattccatgccttattttccatttttgacaccgtaaagtgcattttctgtcgactgtgagcaaatttcccttttgcctttaatgaaaatagtgcattaagtagccaattgctgcagaattataaagcaaattagctaacagtgggtcacattggactaccactcaaagaaacaagatgcataacagatgatggaaggtacatgtggtgtggcttagggagagcgcacctgtgccagatgcatgccactttcagtagctgccaaatgtgcctttaattaagaacatctctaatttttttcttcagatcaagtcagcatttggggtcgggatttgggcagggaactttggggtgcaaatatctggtgaaaccaccagagaatttgtttgtcaaagtgacatgtataattttagttgagacgtgtttgtgtatatatgtgtatttgcctttgtttagtagcacggttatttgctaaaataattgtcaaaaaattgctctgtcggtcggtctttgatgtaagaacaaagtgtggtctatacatctaatatggcctttgtacctaaccatgttcataggtaatctttgtactctgtgtgcagcagtatttggtttgcatttaaagtgaaaataacggctgttatttttctggcattactaagataaactgaaaaataataaagaaaaatgccttacatagcccacaa

SEQ ID NO: 8891 - DNA, 5508 bp, Homo sapiens
agaagcgggccagcgccgccgggaaaggaggtcgccgcccggggtcgcccgggcttgcgggtcgccgcgcttcctctgcgggcgctgcgggaggcgagggccgcctcggcggaggaagccgaccccggggtctccgccagcccgccggcgccgcctccgagccgcctcggccgtagcctcggcccgggcgggaggcggcggccgccggcgaggcgaggcggcccgcgccctgcctgtcaggccaccggcccggcccgcgggctgcccccgatgcggaggcgctgtcgccggggccatgcagcaggcgccgcagccttacgagttcttcagcgaggagaacagtccgaaatggcggggactgttggtctcggccctgcggaaggttcaggaacaagtgcatcccactctctcagctaatgaagagtctctctattatattgaagagctgatttttcagctgcttaataaattatgcatggcccagccaaggactgttcaagatgtagaggagcgagttcagaagacctttcctcacccaattgataaatgggccattgctgatgcacaatctgctatagaaaaacgaaaacgaagaaatcctcttttactgcctgtggacaaaatccatccttcgttgaaggaagtattagggtacaaagtggactaccatgtatccctatatattgtggctgtactagagtatatctcagctgatattttaaaattggctggtaattatgtttttaatatccggcattatgaaatatctcagcaggacattaaagtgtcaatgtgtgcggataaggttttgatggacatgtttgatcaggatgacataggtttggtttctctctgtgaagatgaacctagttcttctggtgaattaaactactatgatcttgtcagaactgaaatcgcagaagaaagacagtatctacgggaattaaatatgatcataaaagtgtttcgagaagcctttctttctgatagaaagctgtttaaaccttctgatatcgaaaagatttttagtaacatttcagatatacatgaattgactgtgaaacttttaggtttgattgaagacacagttgaaatgactgatgaaagcagtcctcatcccttagctggcagctgttttgaagatttggcagaagagcaagcatttgatccttatgaaacattatcacaggacattctttcaccagagtttcatgaacatttcaataaattgatggccagacctgcagttgctctacactttcagtccattgctgatggttttaaagaggcagttcgttatgtccttccacgtcttatgctggtgccagtgtatcactgttggcactactttgagttactaaagcaattgaaagcatgtagtgaagaacaagaagacagagaatgtttgaaccaagctattactgctctcatgaatctccaaggtagcatggaccgaatttacaagcagtattcacctagacgtcgacctggagatcctgtttgccctttttatagtcaccaattaagaagcaaacacctggctatcaaaaaaatgaatgaaattcagaaaaatatcgatggatgggaaggcaaagatattggacagtgttgtaatgaattcattatggagggaccattgacaagaatcggtgccaaacatgaacggcatatttttctgtttgatggcttaatgatcagttgtaaacctaatcatggccagactcggcttccaggttacagtagtgcagaatacaggttaaaagaaaaatttgtcatgaggaaaatacaaatttgtgataaagaagatacttgtgagcacaagcatgcatttgaattagtatccaaagatgagaacagcataatatttgctgctaagtctgctgaagaaaaaaacaactggatggcagcccttatttctcttcattatcgtagtactctagatcgaatgttagattcagtattattgaaagaagaaaatgagcaaccactgagattaccaagtcctgaagtatatcgttttgtagtaaaagactctgaggaaaacattgtttttgaagacaacttgcaaagtagaagtggcatccccattattaaaggaggaactgtagtgaaattaattgaaaggttaacatatcatatgtatgcagatcccaattttgttcgtacttttcttaccacatatcgttcattttgtaaaccacaggaattgctgagcttactgattgaacggtttgaaattccagagccagaacctactgacgcagacaaattggcaatagagaaaggcgagcagccaatcagtgcagaccttaaaagatttcgcaaggaatatgtccaaccagtacaacttaggatcttaaatgtatttcggcattgggttgaacatcatttttatgactttgaaagagacttggaattgcttgaaagactagaatccttcatttcaagtgtaagagggaaagctatgaaaaaatgggtagagtcaattgctaagatcatcaggaggaagaagcaagctcaggcaaacggagtaagccataatattacctttgaaagtccacctccaccaattgaatggcatatcagcaaaccaggacagtttgaaacatttgatctcatgacacttcatccaatagaaattgcacgtcagctgacacttttggagtctgatctttacaggaaagttcaaccgtctgaacttgtagggagtgtgtggaccaaagaagataaagaaataaattctccaaatttattaaaaatgattcgccataccacaaatctcaccctctggtttgaaaaatgcattgtggaagcagaaaattttgaagaacgggtggcagtactaagtagaattatagaaattctgcaagtttttcaagatttgaataatttcaatggcgtattggagatagtcagtgcagtaaattcagtgtcagtatacagactagaccatacctttgaggcactgcaggaaaggaaaaggaaaattttggacgaagctgtggaattaagtcaagatcactttaaaaaatacctagtaaaacttaagtcaatcaatccaccttgtgtgcctttttttggaatatatttaacaaatattctgaagaccgaagaagggaataatgattttttaaaaaagaaagggaaagatttaatcaatttcagtaagaggaggaaagtagctgaaattactggagaaattcagcagtatcagaatcagccttactgtttacggatagaaccagatatgaggagattctttgaaaaccttaaccccatgggaagtgcatctgaaaaagagtttacagattatttgttcaacaagtcactagaaattgaacctcgaaactgcaaacagccacctcgatttcctaggaaatcaactttttccttaaaatctcctggaataaggcctaacacaggccgacatggctctacctcaggtactttacgaggtcacccaacaccattagaaagagaaccatgtaaaataagctttagtcggattgctgaaactgagctggaatcaacagtgtcagcaccaacctctccaaatacaccatctactccaccagtatctgcttcttcagaccttagtgtatttttagatgtggatctcaacagctcctgtggcagcaatagcatctttgctccagtgcttttgccacattcaaagtctttctttagttcatgtggtagtttacataaactaagtgaagagcccctgattcctcctcctcttcctcctcgaaaaaagtttgatcatgatgcttcaaattccaagggaaatatgaaatctgatgatgatcctcctgctattccaccgagacagcctcctcctccaaaggtaaaacccagagttcctgttcctactggtgcatttgatgggcctctgcatagtccacctccgccaccaccaagagatcctcttcctgatacccctccaccagttccccttcggcctccagaacactttataaactgtccatttaatcttcagccacctccactggggcatcttcacagagattcagactggctcagagacattagtacgtgtccaaattcgccaagcactcctcctagcacaccctctccaagggtaccgcgtcgatgctatgtgctcagttctagtcagaataatcttgctcatcctccagctccccctgttccaccaaggcagaattcaagccctcatctgccaaaactgccaccaaagacttacaaacgggagctttcgcaccccccattgtacagactgcctttgctagaaaatgcagaaactccccaatgaccttagccatatgtagtcattgacactggaatggtatttgtaaagttttttttttaatttattcaaaaaaagacatagtattttagtactttttacaaataatgctcttacaaaaatgctactgatcaaataagcttttaagaattggaaaaataaaaatacaaaagtccttcaccattatcctcaggtgatcagtagcattgccttgtcttggatcctcagtgctgccaaaaggccagtataaagaatttatatttgcactgtaaactctgcaaaaatatggtttaaagtgacatgattgcactgaaaagggatagtgcttttgtgaaatttttcaaatttgagtaatagatgcctttttaaggcagtgaatttacacaaatatgggaggggtatatggtgttactgatttttaaacctctttgaccatcttctagtttttacttctagtttttacatctaggagaattgtgaataacaccaactgttcttaaactctttaatgccatgtcttaaatgccggtatttgctgctgaagacaaaaatgaaaagtaggatgaaaataatagaatggcactgtaagtgtttattattttgtcaaaatgtaaacaaagactacataacccaatgatggagggaaaaagggcatgtatctcattcagatgtgccttttgtttttgcagactatgacgtctttagctaatgaattgcctattgttatggaaaacagttaatatgccatgtatgtacagttttgtttatattgtatatttaaagatactgctaataacctatataaatttaagtgacttgaggcctataatacaatctgctactttactaattcataaattcaaaaaaaattctatggcataggaaccaactgccttgccttcaagacctagtaactttctctataaatctcgtgttaactgaaattttttttaaatatattttttagattggtaatatttaaaccagcaaatacttaaagctttattaaacattttaatcagataagtgagtaaagcttttatttgccatttggatgccttcgttcaaagtgatagagtgttttgctgatagtgctgtagcagcagttgtaaagtagccaaaagccacgttgtttatttactggtttgtggccttttactgtgctttgtatcagagttcttaacaagattaataaatcaccccagtcttaatttttaaaa

SEQ ID NO: 8892-10000 - skipped (1109 entries)

SEQ ID NO: 10001 - RNA, 14 nt, Artificial Sequence
  Description of Artificial Sequence: Synthetic oligonucleotide
accugcucgcuacu

SEQ ID NO: 10002 - RNA, 14 nt, Artificial Sequence
  Description of Artificial Sequence: Synthetic oligonucleotide
aaccugcucgcuac

SEQ ID NO: 10003 - RNA, 14 nt, Artificial Sequence
  Description of Artificial Sequence: Synthetic oligonucleotide
gaaccugcucgcua

SEQ ID NO: 10004 - RNA, 14 nt, Artificial Sequence
  Description of Artificial Sequence: Synthetic oligonucleotide
ugaaccugcucgcu

SEQ ID NO: 10005 - RNA, 14 nt, Artificial Sequence
  Description of Artificial Sequence: Synthetic oligonucleotide
cugaaccugcucgc

SEQ ID NO: 10006 - RNA, 14 nt, Artificial Sequence
  Description of Artificial Sequence: Synthetic oligonucleotide
acugaaccugcucg

SEQ ID NO: 10007 - RNA, 14 nt, Artificial Sequence
  Description of Artificial Sequence: Synthetic oligonucleotide
aacugaaccugcuc

SEQ ID NO: 10008 - RNA, 14 nt, Artificial Sequence
  Description of Artificial Sequence: Synthetic oligonucleotide
gaacugaaccugcu

SEQ ID NO: 10009 - RNA, 14 nt, Artificial Sequence
  Description of Artificial Sequence: Synthetic oligonucleotide
cgaacugaaccugc

SEQ ID NO: 10010 - RNA, 14 nt, Artificial Sequence
  Description of Artificial Sequence: Synthetic oligonucleotide
gcgaacugaaccug

SEQ ID NO: 10011 - RNA, 14 nt, Artificial Sequence
  Description of Artificial Sequence: Synthetic oligonucleotide
agcgaacugaaccu

SEQ ID NO: 10012 - skipped

SEQ ID NO: 10013 - RNA, 14 nt, Artificial Sequence
  Description of Artificial Sequence: Synthetic oligonucleotide
cuagcgaacugaac

SEQ ID NO: 10014 - RNA, 14 nt, Artificial Sequence
  Description of Artificial Sequence: Synthetic oligonucleotide
acuagcgaacugaa

SEQ ID NO: 10015 - RNA, 14 nt, Artificial Sequence
  Description of Artificial Sequence: Synthetic oligonucleotide
uacuagcgaacuga

SEQ ID NO: 10016 - RNA, 14 nt, Artificial Sequence
  Description of Artificial Sequence: Synthetic oligonucleotide
cuacuagcgaacug

SEQ ID NO: 10017 - RNA, 14 nt, Artificial Sequence
  Description of Artificial Sequence: Synthetic oligonucleotide
ccuacuagcgaacu

SEQ ID NO: 10018 - RNA, 14 nt, Artificial Sequence
  Description of Artificial Sequence: Synthetic oligonucleotide
uccuacuagcgaac

SEQ ID NO: 10019 - RNA, 14 nt, Artificial Sequence
  Description of Artificial Sequence: Synthetic oligonucleotide
uuccuacuagcgaa

SEQ ID NO: 10020 - RNA, 14 nt, Artificial Sequence
  Description of Artificial Sequence: Synthetic oligonucleotide
cuuccuacuagcga

SEQ ID NO: 10021 - RNA, 14 nt, Artificial Sequence
  Description of Artificial Sequence: Synthetic oligonucleotide
gcuuccuacuagcg

SEQ ID NO: 10022 - RNA, 14 nt, Artificial Sequence
  Description of Artificial Sequence: Synthetic oligonucleotide
agcuuccuacuagc

SEQ ID NO: 10023 - RNA, 14 nt, Artificial Sequence
  Description of Artificial Sequence: Synthetic oligonucleotide
gagcuuccuacuag

SEQ ID NO: 10024 - RNA, 14 nt, Artificial Sequence
  Description of Artificial Sequence: Synthetic oligonucleotide
ggagcuuccuacua

SEQ ID NO: 10025 - RNA, 14 nt, Artificial Sequence
  Description of Artificial Sequence: Synthetic oligonucleotide
uggagcuuccuacu

SEQ ID NO: 10026 - RNA, 14 nt, Artificial Sequence
  Description of Artificial Sequence: Synthetic oligonucleotide
cuggagcuuccuac

SEQ ID NO: 10027 - RNA, 14 nt, Artificial Sequence
  Description of Artificial Sequence: Synthetic oligonucleotide
gcuggagcuuccua

SEQ ID NO: 10028 - RNA, 14 nt, Artificial Sequence
  Description of Artificial Sequence: Synthetic oligonucleotide
cgcuggagcuuccu

SEQ ID NO: 10029 - RNA, 14 nt, Artificial Sequence
  Description of Artificial Sequence: Synthetic oligonucleotide
gcgcuggagcuucc

SEQ ID NO: 10030 - RNA, 14 nt, Artificial Sequence
  Description of Artificial Sequence: Synthetic oligonucleotide
agcgcuggagcuuc

SEQ ID NO: 10031 - RNA, 14 nt, Artificial Sequence
  Description of Artificial Sequence: Synthetic oligonucleotide
uagcgcuggagcuu

SEQ ID NO: 10032 - RNA, 14 nt, Artificial Sequence
  Description of Artificial Sequence: Synthetic oligonucleotide
guagcgcuggagcu

SEQ ID NO: 10033 - RNA, 14 nt, Artificial Sequence
  Description of Artificial Sequence: Synthetic oligonucleotide
uguagcgcuggagc

SEQ ID NO: 10034 - RNA, 14 nt, Artificial Sequence
  Description of Artificial Sequence: Synthetic oligonucleotide
guguagcgcuggag

SEQ ID NO: 10035 - RNA, 14 nt, Artificial Sequence
  Description of Artificial Sequence: Synthetic oligonucleotide
gguguagcgcugga

SEQ ID NO: 10036 - RNA, 14 nt, Artificial Sequence
  Description of Artificial Sequence: Synthetic oligonucleotide
cgguguagcgcugg

SEQ ID NO: 10037 - skipped

SEQ ID NO: 10038 - RNA, 14 nt, Artificial Sequence
  Description of Artificial Sequence: Synthetic oligonucleotide
gccgguguagcgcu

SEQ ID NO: 10039 - RNA, 14 nt, Artificial Sequence
  Description of Artificial Sequence: Synthetic oligonucleotide
cgccgguguagcgc

SEQ ID NO: 10040 - RNA, 14 nt, Artificial Sequence
  Description of Artificial Sequence: Synthetic oligonucleotide
ccgccgguguagcg

SEQ ID NO: 10041 - RNA, 14 nt, Artificial Sequence
  Description of Artificial Sequence: Synthetic oligonucleotide
gccgccgguguagc

SEQ ID NO: 10042 - RNA, 14 nt, Artificial Sequence
  Description of Artificial Sequence: Synthetic oligonucleotide
cgccgccgguguag

SEQ ID NO: 10043 - RNA, 14 nt, Artificial Sequence
  Description of Artificial Sequence: Synthetic oligonucleotide
ccgccgccggugua

SEQ ID NO: 10044 - RNA, 14 nt, Artificial Sequence
  Description of Artificial Sequence: Synthetic oligonucleotide
gccgccgccggugu

SEQ ID NO: 10045 - RNA, 14 nt, Artificial Sequence
  Description of Artificial Sequence: Synthetic oligonucleotide
cgccgccgccggug

SEQ ID NO: 10046 - RNA, 14 nt, Artificial Sequence
  Description of Artificial Sequence: Synthetic oligonucleotide
ccgccgccgccggu

SEQ ID NO: 10047 - DNA, 14 bp, Artificial Sequence
  Description of Artificial Sequence: Synthetic oligonucleotide
accgccgccgccgg

SEQ ID NO: 10048 - DNA, 14 bp, Artificial Sequence
  Description of Artificial Sequence: Synthetic oligonucleotide
caccgccgccgccg

SEQ ID NO: 10049 - DNA, 14 bp, Artificial Sequence
  Description of Artificial Sequence: Synthetic oligonucleotide
ccaccgccgccgcc

SEQ ID NO: 10050 - DNA, 14 bp, Artificial Sequence
  Description of Artificial Sequence: Synthetic oligonucleotide
gccaccgccgccgc

SEQ ID NO: 10051 - DNA, 14 bp, Artificial Sequence
  Description of Artificial Sequence: Synthetic oligonucleotide
cgccaccgccgccg

SEQ ID NO: 10052 - DNA, 14 bp, Artificial Sequence
  Description of Artificial Sequence: Synthetic oligonucleotide
ccgccaccgccgcc

SEQ ID NO: 10053 - DNA, 14 bp, Artificial Sequence
  Description of Artificial Sequence: Synthetic oligonucleotide
gccgccaccgccgc

SEQ ID NO: 10054 - DNA, 14 bp, Artificial Sequence
  Description of Artificial Sequence: Synthetic oligonucleotide
cgccgccaccgccg

SEQ ID NO: 10055 - DNA, 14 bp, Artificial Sequence
  Description of Artificial Sequence: Synthetic oligonucleotide
ccgccgccaccgcc

SEQ ID NO: 10056 - DNA, 14 bp, Artificial Sequence
  Description of Artificial Sequence: Synthetic oligonucleotide
gccgccgccaccgc

SEQ ID NO: 10057 - DNA, 14 bp, Artificial Sequence
  Description of Artificial Sequence: Synthetic oligonucleotide
cgccgccgccaccg

SEQ ID NO: 10058 - DNA, 14 bp, Artificial Sequence
  Description of Artificial Sequence: Synthetic oligonucleotide
ccgccgccgccacc

SEQ ID NO: 10059 - DNA, 14 bp, Artificial Sequence
  Description of Artificial Sequence: Synthetic oligonucleotide
gccgccgccgccac

SEQ ID NO: 10060 - DNA, 14 bp, Artificial Sequence
  Description of Artificial Sequence: Synthetic oligonucleotide
ggccgccgccgcca

SEQ ID NO: 10061 - DNA, 14 bp, Artificial Sequence
  Description of Artificial Sequence: Synthetic oligonucleotide
cggccgccgccgcc

SEQ ID NO: 10062 - DNA, 14 bp, Artificial Sequence
  Description of Artificial Sequence: Synthetic oligonucleotide
gcggccgccgccgc

SEQ ID NO: 10063 - DNA, 14 bp, Artificial Sequence
  Description of Artificial Sequence: Synthetic oligonucleotide
cgcggccgccgccg

SEQ ID NO: 10064 - DNA, 14 bp, Artificial Sequence
  Description of Artificial Sequence: Synthetic oligonucleotide
ccgcggccgccgcc

SEQ ID NO: 10065 - DNA, 14 bp, Artificial Sequence
  Description of Artificial Sequence: Synthetic oligonucleotide
gccgcggccgccgc

SEQ ID NO: 10066 - DNA, 14 bp, Artificial Sequence
  Description of Artificial Sequence: Synthetic oligonucleotide
cgccgcggccgccg

SEQ ID NO: 10067 - DNA, 14 bp, Artificial Sequence
  Description of Artificial Sequence: Synthetic oligonucleotide
ccgccgcggccgcc

SEQ ID NO: 10068 - DNA, 14 bp, Artificial Sequence
  Description of Artificial Sequence: Synthetic oligonucleotide
gccgccgcggccgc

SEQ ID NO: 10069 - RNA, 14 nt, Artificial Sequence
  Description of Artificial Sequence: Synthetic oligonucleotide
ugccgccgcggccg

SEQ ID NO: 10070 - RNA, 14 nt, Artificial Sequence
  Description of Artificial Sequence: Synthetic oligonucleotide
gugccgccgcggcc

SEQ ID NO: 10071 - RNA, 14 nt, Artificial Sequence
  Description of Artificial Sequence: Synthetic oligonucleotide
ggugccgccgcggc

SEQ ID NO: 10072 - RNA, 14 nt, Artificial Sequence
  Description of Artificial Sequence: Synthetic oligonucleotide
aggugccgccgcgg

SEQ ID NO: 10073 - RNA, 14 nt, Artificial Sequence
  Description of Artificial Sequence: Synthetic oligonucleotide
gaggugccgccgcg

SEQ ID NO: 10074 - RNA, 14 nt, Artificial Sequence
  Description of Artificial Sequence: Synthetic oligonucleotide
ugaggugccgccgc

SEQ ID NO: 10075 - RNA, 14 nt, Artificial Sequence
  Description of Artificial Sequence: Synthetic oligonucleotide
cugaggugccgccg

SEQ ID NO: 10076 - RNA, 14 nt, Artificial Sequence
  Description of Artificial Sequence: Synthetic oligonucleotide
ccugaggugccgcc

SEQ ID NO: 10077 - RNA, 14 nt, Artificial Sequence
  Description of Artificial Sequence: Synthetic oligonucleotide
cccugaggugccgc

SEQ ID NO: 10078 - RNA, 14 nt, Artificial Sequence
  Description of Artificial Sequence: Synthetic oligonucleotide
gcccugaggugccg

SEQ ID NO: 10079 - RNA, 14 nt, Artificial Sequence
  Description of Artificial Sequence: Synthetic oligonucleotide
ugcccugaggugcc

SEQ ID NO: 10080 - RNA, 14 nt, Artificial Sequence
  Description of Artificial Sequence: Synthetic oligonucleotide
cugcccugaggugc

SEQ ID NO: 10081 - RNA, 14 nt, Artificial Sequence
  Description of Artificial Sequence: Synthetic oligonucleotide
gcugcccugaggug

SEQ ID NO: 10082 - RNA, 14 nt, Artificial Sequence
  Description of Artificial Sequence: Synthetic oligonucleotide
ggcugcccugaggu

SEQ ID NO: 10083 - RNA, 14 nt, Artificial Sequence
  Description of Artificial Sequence: Synthetic oligonucleotide
uggcugcccugagg

SEQ ID NO: 10084 - RNA, 14 nt, Artificial Sequence
  Description of Artificial Sequence: Synthetic oligonucleotide
cuggcugcccugag

SEQ ID NO: 10085 - RNA, 14 nt, Artificial Sequence
  Description of Artificial Sequence: Synthetic oligonucleotide
ucuggcugcccuga

SEQ ID NO: 10086 - RNA, 14 nt, Artificial Sequence
  Description of Artificial Sequence: Synthetic oligonucleotide
aucuggcugcccug

SEQ ID NO: 10087 - RNA, 14 nt, Artificial Sequence
  Description of Artificial Sequence: Synthetic oligonucleotide
aaucuggcugcccu

SEQ ID NO: 10088 - RNA, 14 nt, Artificial Sequence
  Description of Artificial Sequence: Synthetic oligonucleotide
gaaucuggcugccc

SEQ ID NO: 10089 - RNA, 14 nt, Artificial Sequence
  Description of Artificial Sequence: Synthetic oligonucleotide
ggaaucuggcugcc

SEQ ID NO: 10090 - RNA, 14 nt, Artificial Sequence
  Description of Artificial Sequence: Synthetic oligonucleotide
gggaaucuggcugc

SEQ ID NO: 10091 - RNA, 14 nt, Artificial Sequence
  Description of Artificial Sequence: Synthetic oligonucleotide
ggggaaucuggcug

SEQ ID NO: 10092 - RNA, 14 nt, Artificial Sequence
  Description of Artificial Sequence: Synthetic oligonucleotide
uggggaaucuggcu

SEQ ID NO: 10093 - RNA, 14 nt, Artificial Sequence
  Description of Artificial Sequence: Synthetic oligonucleotide
uuggggaaucuggc

SEQ ID NO: 10094 - RNA, 14 nt, Artificial Sequence
  Description of Artificial Sequence: Synthetic oligonucleotide
guuggggaaucugg

SEQ ID NO: 10095 - RNA, 14 nt, Artificial Sequence
  Description of Artificial Sequence: Synthetic oligonucleotide
uguuggggaaucug

SEQ ID NO: 10096 - RNA, 14 nt, Artificial Sequence
  Description of Artificial Sequence: Synthetic oligonucleotide
uuguuggggaaucu

SEQ ID NO: 10097 - RNA, 14 nt, Artificial Sequence
  Description of Artificial Sequence: Synthetic oligonucleotide
guuguuggggaauc

SEQ ID NO: 10098 - RNA, 14 nt, Artificial Sequence
  Description of Artificial Sequence: Synthetic oligonucleotide
cguuguuggggaau

SEQ ID NO: 10099 - RNA, 14 nt, Artificial Sequence
  Description of Artificial Sequence: Synthetic oligonucleotide
ucguuguuggggaa

SEQ ID NO: 10100 - RNA, 14 nt, Artificial Sequence
  Description of Artificial Sequence: Synthetic oligonucleotide
gucguuguugggga

SEQ ID NO: 10101 - RNA, 14 nt, Artificial Sequence
  Description of Artificial Sequence: Synthetic oligonucleotide
ggucguuguugggg

SEQ ID NO: 10102 - RNA, 14 nt, Artificial Sequence
  Description of Artificial Sequence: Synthetic oligonucleotide
aggucguuguuggg

SEQ ID NO: 10103 - RNA, 14 nt, Artificial Sequence
  Description of Artificial Sequence: Synthetic oligonucleotide
gaggucguuguugg

SEQ ID NO: 10104 - skipped

SEQ ID NO: 10105 - RNA, 14 nt, Artificial Sequence
  Description of Artificial Sequence: Synthetic oligonucleotide
cggaggucguuguu

SEQ ID NO: 10106 - RNA, 14 nt, Artificial Sequence
  Description of Artificial Sequence: Synthetic oligonucleotide
ccggaggucguugu

SEQ ID NO: 10107 - skipped

SEQ ID NO: 10108 - RNA, 14 nt, Artificial Sequence
  Description of Artificial Sequence: Synthetic oligonucleotide
gaccggaggucguu

SEQ ID NO: 10109 - skipped

SEQ ID NO: 10110 - RNA, 14 nt, Artificial Sequence
  Description of Artificial Sequence: Synthetic oligonucleotide
aggaccggaggucg

SEQ ID NO: 10111 - RNA, 14 nt, Artificial Sequence
  Description of Artificial Sequence: Synthetic oligonucleotide
aaggaccggagguc

SEQ ID NO: 10112 - RNA, 14 nt, Artificial Sequence
  Description of Artificial Sequence: Synthetic oligonucleotide
gaaggaccggaggu

SEQ ID NO: 10113 - DNA, 14 bp, Artificial Sequence
  Description of Artificial Sequence: Synthetic oligonucleotide
ggaaggaccggagg

SEQ ID NO: 10114 - DNA, 14 bp, Artificial Sequence
  Description of Artificial Sequence: Synthetic oligonucleotide
gggaaggaccggag

SEQ ID NO: 10115 - DNA, 14 bp, Artificial Sequence
  Description of Artificial Sequence: Synthetic oligonucleotide
ggggaaggaccgga

SEQ ID NO: 10116 - DNA, 14 bp, Artificial Sequence
  Description of Artificial Sequence: Synthetic oligonucleotide
aggggaaggaccgg

SEQ ID NO: 10117 - DNA, 14 bp, Artificial Sequence
  Description of Artificial Sequence: Synthetic oligonucleotide
aaggggaaggaccg

SEQ ID NO: 10118 - DNA, 14 bp, Artificial Sequence
  Description of Artificial Sequence: Synthetic oligonucleotide
gaaggggaaggacc

SEQ ID NO: 10119 - DNA, 14 bp, Artificial Sequence
  Description of Artificial Sequence: Synthetic oligonucleotide
ggaaggggaaggac

SEQ ID NO: 10120 - DNA, 14 bp, Artificial Sequence
  Description of Artificial Sequence: Synthetic oligonucleotide
gggaaggggaagga

SEQ ID NO: 10121 - DNA, 14 bp, Artificial Sequence
  Description of Artificial Sequence: Synthetic oligonucleotide
ggggaaggggaagg

SEQ ID NO: 10122 - DNA, 14 bp, Artificial Sequence
  Description of Artificial Sequence: Synthetic oligonucleotide
cggggaaggggaag

SEQ ID NO: 10123 - DNA, 14 bp, Artificial Sequence
  Description of Artificial Sequence: Synthetic oligonucleotide
gcggggaaggggaa

SEQ ID NO: 10124 - DNA, 14 bp, Artificial Sequence
  Description of Artificial Sequence: Synthetic oligonucleotide
cgcggggaagggga

SEQ ID NO: 10125 - RNA, 14 nt, Artificial Sequence
  Description of Artificial Sequence: Synthetic oligonucleotide
ucgcggggaagggg

SEQ ID NO: 10126 - RNA, 14 nt, Artificial Sequence
  Description of Artificial Sequence: Synthetic oligonucleotide
cucgcggggaaggg

SEQ ID NO: 10127 - RNA, 14 nt, Artificial Sequence
  Description of Artificial Sequence: Synthetic oligonucleotide
ucucgcggggaagg

SEQ ID NO: 10128 - RNA, 14 nt, Artificial Sequence
  Description of Artificial Sequence: Synthetic oligonucleotide
gucucgcggggaag

SEQ ID NO: 10129 - RNA, 14 nt, Artificial Sequence
  Description of Artificial Sequence: Synthetic oligonucleotide
ggucucgcggggaa

SEQ ID NO: 10130 - RNA, 14 nt, Artificial Sequence
  Description of Artificial Sequence: Synthetic oligonucleotide
aggucucgcgggga

SEQ ID NO: 10131 - skipped

SEQ ID NO: 10132 - RNA, 14 nt, Artificial Sequence
  Description of Artificial Sequence: Synthetic oligonucleotide
ggaggucucgcggg

SEQ ID NO: 10133 - RNA, 14 nt, Artificial Sequence
  Description of Artificial Sequence: Synthetic oligonucleotide
cggaggucucgcgg

SEQ ID NO: 10134 - RNA, 14 nt, Artificial Sequence
  Description of Artificial Sequence: Synthetic oligonucleotide
gcggaggucucgcg

SEQ ID NO: 10135 - RNA, 14 nt, Artificial Sequence
  Description of Artificial Sequence: Synthetic oligonucleotide
ggcggaggucucgc

SEQ ID NO: 10136 - RNA, 14 nt, Artificial Sequence
  Description of Artificial Sequence: Synthetic oligonucleotide
gggcggaggucucg

SEQ ID NO: 10137 - RNA, 14 nt, Artificial Sequence
  Description of Artificial Sequence: Synthetic oligonucleotide
ggggcggaggucuc

SEQ ID NO: 10138 - RNA, 14 nt, Artificial Sequence
  Description of Artificial Sequence: Synthetic oligonucleotide
uggggcggaggucu

SEQ ID NO: 10139 - RNA, 14 nt, Artificial Sequence
  Description of Artificial Sequence: Synthetic oligonucleotide
cuggggcggagguc

SEQ ID NO: 10140 - RNA, 14 nt, Artificial Sequence
  Description of Artificial Sequence: Synthetic oligonucleotide
gcuggggcggaggu

SEQ ID NO: 10141 - RNA, 14 nt, Artificial Sequence
  Description of Artificial Sequence: Synthetic oligonucleotide
agcuggggcggagg

SEQ ID NO: 10142 - RNA, 14 nt, Artificial Sequence
  Description of Artificial Sequence: Synthetic oligonucleotide
gagcuggggcggag

SEQ ID NO: 10143 - RNA, 14 nt, Artificial Sequence
  Description of Artificial Sequence: Synthetic oligonucleotide
ggagcuggggcgga

SEQ ID NO: 10144 - RNA, 14 nt, Artificial Sequence
  Description of Artificial Sequence: Synthetic oligonucleotide
cggagcuggggcgg

SEQ ID NO: 10145 - RNA, 14 nt, Artificial Sequence
  Description of Artificial Sequence: Synthetic oligonucleotide
gcggagcuggggcg

SEQ ID NO: 10146 - RNA, 14 nt, Artificial Sequence
  Description of Artificial Sequence: Synthetic oligonucleotide
ggcggagcuggggc

SEQ ID NO: 10147 - RNA, 14 nt, Artificial Sequence
  Description of Artificial Sequence: Synthetic oligonucleotide
gggcggagcugggg

SEQ ID NO: 10148 - RNA, 14 nt, Artificial Sequence
  Description of Artificial Sequence: Synthetic oligonucleotide
ggggcggagcuggg

SEQ ID NO: 10149 - RNA, 14 nt, Artificial Sequence
  Description of Artificial Sequence: Synthetic oligonucleotide
cggggcggagcugg

SEQ ID NO: 10150 - RNA, 14 nt, Artificial Sequence
  Description of Artificial Sequence: Synthetic oligonucleotide
gcggggcggagcug

SEQ ID NO: 10151 - RNA, 14 nt, Artificial Sequence
  Description of Artificial Sequence: Synthetic oligonucleotide
ggcggggcggagcu

SEQ ID NO: 10152 - DNA, 14 bp, Artificial Sequence
  Description of Artificial Sequence: Synthetic oligonucleotide
gggcggggcggagc

SEQ ID NO: 10153 - DNA, 14 bp, Artificial Sequence
  Description of Artificial Sequence: Synthetic oligonucleotide
cgggcggggcggag

SEQ ID NO: 10154 - DNA, 14 bp, Artificial Sequence
  Description of Artificial Sequence: Synthetic oligonucleotide
ccgggcggggcgga

SEQ ID NO: 10155 - DNA, 14 bp, Artificial Sequence
  Description of Artificial Sequence: Synthetic oligonucleotide
cccgggcggggcgg

SEQ ID NO: 10156 - DNA, 14 bp, Artificial Sequence
  Description of Artificial Sequence: Synthetic oligonucleotide
ccccgggcggggcg

SEQ ID NO: 10157 - DNA, 14 bp, Artificial Sequence
  Description of Artificial Sequence: Synthetic oligonucleotide
gccccgggcggggc

SEQ ID NO: 10158 - DNA, 14 bp, Artificial Sequence
  Description of Artificial Sequence: Synthetic oligonucleotide
agccccgggcgggg

SEQ ID NO: 10159 - DNA, 14 bp, Artificial Sequence
  Description of Artificial Sequence: Synthetic oligonucleotide
gagccccgggcggg

SEQ ID NO: 10160 - DNA, 14 bp, Artificial Sequence
  Description of Artificial Sequence: Synthetic oligonucleotide
agagccccgggcgg

SEQ ID NO: 10161 - DNA, 14 bp, Artificial Sequence
  Description of Artificial Sequence: Synthetic oligonucleotide
aagagccccgggcg

SEQ ID NO: 10162 - DNA, 14 bp, Artificial Sequence
  Description of Artificial Sequence: Synthetic oligonucleotide
caagagccccgggc

SEQ ID NO: 10163 - DNA, 14 bp, Artificial Sequence
  Description of Artificial Sequence: Synthetic oligonucleotide
gcaagagccccggg

SEQ ID NO: 10164 - DNA, 14 bp, Artificial Sequence
  Description of Artificial Sequence: Synthetic oligonucleotide
cgcaagagccccgg

SEQ ID NO: 10165 - DNA, 14 bp, Artificial Sequence
  Description of Artificial Sequence: Synthetic oligonucleotide
acgcaagagccccg

SEQ ID NO: 10166 - DNA, 14 bp, Artificial Sequence
  Description of Artificial Sequence: Synthetic oligonucleotide
aacgcaagagcccc

SEQ ID NO: 10167 - DNA, 14 bp, Artificial Sequence
  Description of Artificial Sequence: Synthetic oligonucleotide
aaacgcaagagccc

SEQ ID NO: 10168 - DNA, 14 bp, Artificial Sequence
  Description of Artificial Sequence: Synthetic oligonucleotide
gaaacgcaagagcc

SEQ ID NO: 10169 - DNA, 14 bp, Artificial Sequence
  Description of Artificial Sequence: Synthetic oligonucleotide
cgaaacgcaagagc

SEQ ID NO: 10170-10171 - skipped (2 entries)

SEQ ID NO: 10172 - RNA, 14 nt, Artificial Sequence
  Description of Artificial Sequence: Synthetic oligonucleotide
cuccgaaacgcaag

SEQ ID NO: 10173 - RNA, 14 nt, Artificial Sequence
  Description of Artificial Sequence: Synthetic oligonucleotide
acuccgaaacgcaa

SEQ ID NO: 10174 - RNA, 14 nt, Artificial Sequence
  Description of Artificial Sequence: Synthetic oligonucleotide
gacuccgaaacgca

SEQ ID NO: 10175 - RNA, 14 nt, Artificial Sequence
  Description of Artificial Sequence: Synthetic oligonucleotide
ggacuccgaaacgc

SEQ ID NO: 10176 - RNA, 14 nt, Artificial Sequence
  Description of Artificial Sequence: Synthetic oligonucleotide
gggacuccgaaacg

SEQ ID NO: 10177 - RNA, 14 nt, Artificial Sequence
  Description of Artificial Sequence: Synthetic oligonucleotide
ugggacuccgaaac

SEQ ID NO: 10178 - RNA, 14 nt, Artificial Sequence
  Description of Artificial Sequence: Synthetic oligonucleotide
uugggacuccgaaa

SEQ ID NO: 10179 - RNA, 14 nt, Artificial Sequence
  Description of Artificial Sequence: Synthetic oligonucleotide
guugggacuccgaa

SEQ ID NO: 10180 - RNA, 14 nt, Artificial Sequence
  Description of Artificial Sequence: Synthetic oligonucleotide
aguugggacuccga

SEQ ID NO: 10181 - RNA, 14 nt, Artificial Sequence
  Description of Artificial Sequence: Synthetic oligonucleotide
uaguugggacuccg

SEQ ID NO: 10182 - RNA, 14 nt, Artificial Sequence
  Description of Artificial Sequence: Synthetic oligonucleotide
guaguugggacucc

SEQ ID NO: 10183 - RNA, 14 nt, Artificial Sequence
  Description of Artificial Sequence: Synthetic oligonucleotide
cguaguugggacuc

SEQ ID NO: 10184 - RNA, 14 nt, Artificial Sequence
  Description of Artificial Sequence: Synthetic oligonucleotide
gcguaguugggacu

SEQ ID NO: 10185 - RNA, 14 nt, Artificial Sequence
  Description of Artificial Sequence: Synthetic oligonucleotide
cgcguaguugggac

SEQ ID NO: 10186 - RNA, 14 nt, Artificial Sequence
  Description of Artificial Sequence: Synthetic oligonucleotide
ccgcguaguuggga

SEQ ID NO: 10187 - RNA, 14 nt, Artificial Sequence
  Description of Artificial Sequence: Synthetic oligonucleotide
uccgcguaguuggg

SEQ ID NO: 10188 - RNA, 14 nt, Artificial Sequence
  Description of Artificial Sequence: Synthetic oligonucleotide
cuccgcguaguugg

SEQ ID NO: 10189 - RNA, 14 nt, Artificial Sequence
  Description of Artificial Sequence: Synthetic oligonucleotide
gcuccgcguaguug

SEQ ID NO: 10190 - RNA, 14 nt, Artificial Sequence
  Description of Artificial Sequence: Synthetic oligonucleotide
cgcuccgcguaguu

SEQ ID NO: 10191 - RNA, 14 nt, Artificial Sequence
  Description of Artificial Sequence: Synthetic oligonucleotide
ccgcuccgcguagu

SEQ ID NO: 10192 - RNA, 14 nt, Artificial Sequence
  Description of Artificial Sequence: Synthetic oligonucleotide
cccgcuccgcguag

SEQ ID NO: 10193 - RNA, 14 nt, Artificial Sequence
  Description of Artificial Sequence: Synthetic oligonucleotide
gcccgcuccgcgua

SEQ ID NO: 10194 - RNA, 14 nt, Artificial Sequence
  Description of Artificial Sequence: Synthetic oligonucleotide
cgcccgcuccgcgu

SEQ ID NO: 10195 - RNA, 14 nt, Artificial Sequence
  Description of Artificial Sequence: Synthetic oligonucleotide
gcgcccgcuccgcg

SEQ ID NO: 10196 - RNA, 14 nt, Artificial Sequence
  Description of Artificial Sequence: Synthetic oligonucleotide
ggcgcccgcuccgc

SEQ ID NO: 10197 - RNA, 14 nt, Artificial Sequence
  Description of Artificial Sequence: Synthetic oligonucleotide
cggcgcccgcuccg

SEQ ID NO: 10198 - RNA, 14 nt, Artificial Sequence
  Description of Artificial Sequence: Synthetic oligonucleotide
gcggcgcccgcucc

SEQ ID NO: 10199 - RNA, 14 nt, Artificial Sequence
  Description of Artificial Sequence: Synthetic oligonucleotide
cgcggcgcccgcuc

SEQ ID NO: 10200 - RNA, 14 nt, Artificial Sequence
  Description of Artificial Sequence: Synthetic oligonucleotide
ccgcggcgcccgcu

SEQ ID NO: 10201 - DNA, 14 bp, Artificial Sequence
  Description of Artificial Sequence: Synthetic oligonucleotide
gccgcggcgcccgc

SEQ ID NO: 10202 - DNA, 14 bp, Artificial Sequence
  Description of Artificial Sequence: Synthetic oligonucleotide
ggccgcggcgcccg

SEQ ID NO: 10203 - DNA, 14 bp, Artificial Sequence
  Description of Artificial Sequence: Synthetic oligonucleotide
cggccgcggcgccc

SEQ ID NO: 10204 - DNA, 14 bp, Artificial Sequence
  Description of Artificial Sequence: Synthetic oligonucleotide
ccggccgcggcgcc

SEQ ID NO: 10205 - RNA, 14 nt, Artificial Sequence
  Description of Artificial Sequence: Synthetic oligonucleotide
uccggccgcggcgc

SEQ ID NO: 10206 - RNA, 14 nt, Artificial Sequence
  Description of Artificial Sequence: Synthetic oligonucleotide
cuccggccgcggcg

SEQ ID NO: 10207 - RNA, 14 nt, Artificial Sequence
  Description of Artificial Sequence: Synthetic oligonucleotide
gcuccggccgcggc

SEQ ID NO: 10208 - RNA, 14 nt, Artificial Sequence
  Description of Artificial Sequence: Synthetic oligonucleotide
cgcuccggccgcgg

SEQ ID NO: 10209 - RNA, 14 nt, Artificial Sequence
  Description of Artificial Sequence: Synthetic oligonucleotide
acgcuccggccgcg

SEQ ID NO: 10210 - RNA, 14 nt, Artificial Sequence
  Description of Artificial Sequence: Synthetic oligonucleotide
gacgcuccggccgc

SEQ ID NO: 10211 - RNA, 14 nt, Artificial Sequence
  Description of Artificial Sequence: Synthetic oligonucleotide
ggacgcuccggccg

SEQ ID NO: 10212 - RNA, 14 nt, Artificial Sequence
  Description of Artificial Sequence: Synthetic oligonucleotide
gggacgcuccggcc

SEQ ID NO: 10213 - RNA, 14 nt, Artificial Sequence
  Description of Artificial Sequence: Synthetic oligonucleotide
agggacgcuccggc

SEQ ID NO: 10214 - RNA, 14 nt, Artificial Sequence
  Description of Artificial Sequence: Synthetic oligonucleotide
gagggacgcuccgg

SEQ ID NO: 10215 - RNA, 14 nt, Artificial Sequence
  Description of Artificial Sequence: Synthetic oligonucleotide
ggagggacgcuccg

SEQ ID NO: 10216 - RNA, 14 nt, Artificial Sequence
  Description of Artificial Sequence: Synthetic oligonucleotide
uggagggacgcucc

SEQ ID NO: 10217 - RNA, 14 nt, Artificial Sequence
  Description of Artificial Sequence: Synthetic oligonucleotide
guggagggacgcuc

SEQ ID NO: 10218 - RNA, 14 nt, Artificial Sequence
  Description of Artificial Sequence: Synthetic oligonucleotide
uguggagggacgcu

SEQ ID NO: 10219 - RNA, 14 nt, Artificial Sequence
  Description of Artificial Sequence: Synthetic oligonucleotide
guguggagggacgc

SEQ ID NO: 10220 - RNA, 14 nt, Artificial Sequence
  Description of Artificial Sequence: Synthetic oligonucleotide
cguguggagggacg

SEQ ID NO: 10221 - RNA, 14 nt, Artificial Sequence
  Description of Artificial Sequence: Synthetic oligonucleotide
acguguggagggac

SEQ ID NO: 10222 - RNA, 14 nt, Artificial Sequence
  Description of Artificial Sequence: Synthetic oligonucleotide
gacguguggaggga

SEQ ID NO: 10223 - RNA, 14 nt, Artificial Sequence
  Description of Artificial Sequence: Synthetic oligonucleotide
ggacguguggaggg

SEQ ID NO: 10224 - RNA, 14 nt, Artificial Sequence
  Description of Artificial Sequence: Synthetic oligonucleotide
aggacguguggagg

SEQ ID NO: 10225 - RNA, 14 nt, Artificial Sequence
  Description of Artificial Sequence: Synthetic oligonucleotide
gaggacguguggag

SEQ ID NO: 10226 - RNA, 14 nt, Artificial Sequence
  Description of Artificial Sequence: Synthetic oligonucleotide
ggaggacgugugga

SEQ ID NO: 10227 - RNA, 14 nt, Artificial Sequence
  Description of Artificial Sequence: Synthetic oligonucleotide
gggaggacgugugg

SEQ ID NO: 10228 - skipped

SEQ ID NO: 10229 - RNA, 14 nt, Artificial Sequence
  Description of Artificial Sequence: Synthetic oligonucleotide
gggggaggacgugu

SEQ ID NO: 10230 - RNA, 14 nt, Artificial Sequence
  Description of Artificial Sequence: Synthetic oligonucleotide
ugggggaggacgug

SEQ ID NO: 10231 - RNA, 14 nt, Artificial Sequence
  Description of Artificial Sequence: Synthetic oligonucleotide
cugggggaggacgu

SEQ ID NO: 10232 - RNA, 14 nt, Artificial Sequence
  Description of Artificial Sequence: Synthetic oligonucleotide
gcugggggaggacg

SEQ ID NO: 10233 - RNA, 14 nt, Artificial Sequence
  Description of Artificial Sequence: Synthetic oligonucleotide
ggcugggggaggac

SEQ ID NO: 10234 - RNA, 14 nt, Artificial Sequence
  Description of Artificial Sequence: Synthetic oligonucleotide
cggcugggggagga

SEQ ID NO: 10235 - RNA, 14 nt, Artificial Sequence
  Description of Artificial Sequence: Synthetic oligonucleotide
gcggcugggggagg

SEQ ID NO: 10236 - RNA, 14 nt, Artificial Sequence
  Description of Artificial Sequence: Synthetic oligonucleotide
ggcggcugggggag

SEQ ID NO: 10237 - RNA, 14 nt, Artificial Sequence
  Description of Artificial Sequence: Synthetic oligonucleotide
uggcggcuggggga

SEQ ID NO: 10238 - RNA, 14 nt, Artificial Sequence
  Description of Artificial Sequence: Synthetic oligonucleotide
cuggcggcuggggg

SEQ ID NO: 10239 - RNA, 14 nt, Artificial Sequence
  Description of Artificial Sequence: Synthetic oligonucleotide
gcuggcggcugggg

SEQ ID NO: 10240 - RNA, 14 nt, Artificial Sequence
  Description of Artificial Sequence: Synthetic oligonucleotide
agcuggcggcuggg

SEQ ID NO: 10241 - RNA, 14 nt, Artificial Sequence
  Description of Artificial Sequence: Synthetic oligonucleotide
gagcuggcggcugg

SEQ ID NO: 10242 - RNA, 14 nt, Artificial Sequence
  Description of Artificial Sequence: Synthetic oligonucleotide
ggagcuggcggcug

SEQ ID NO: 10243 - RNA, 14 nt, Artificial Sequence
  Description of Artificial Sequence: Synthetic oligonucleotide
cggagcuggcggcu

SEQ ID NO: 10244 - RNA, 14 nt, Artificial Sequence
  Description of Artificial Sequence: Synthetic oligonucleotide
gcggagcuggcggc

SEQ ID NO: 10245 - RNA, 14 nt, Artificial Sequence
  Description of Artificial Sequence: Synthetic oligonucleotide
ggcggagcuggcgg

SEQ ID NO: 10246 - RNA, 14 nt, Artificial Sequence
  Description of Artificial Sequence: Synthetic oligonucleotide
cggcggagcuggcg

SEQ ID NO: 10247 - RNA, 14 nt, Artificial Sequence
  Description of Artificial Sequence: Synthetic oligonucleotide
gcggcggagcuggc

SEQ ID NO: 10248 - RNA, 14 nt, Artificial Sequence
  Description of Artificial Sequence: Synthetic oligonucleotide
cgcggcggagcugg

SEQ ID NO: 10249 - RNA, 14 nt, Artificial Sequence
  Description of Artificial Sequence: Synthetic oligonucleotide
ccgcggcggagcug

SEQ ID NO: 10250 - RNA, 14 nt, Artificial Sequence
  Description of Artificial Sequence: Synthetic oligonucleotide
cccgcggcggagcu

SEQ ID NO: 10251 - DNA, 14 bp, Artificial Sequence
  Description of Artificial Sequence: Synthetic oligonucleotide
ccccgcggcggagc

SEQ ID NO: 10252 - DNA, 14 bp, Artificial Sequence
  Description of Artificial Sequence: Synthetic oligonucleotide
gccccgcggcggag

SEQ ID NO: 10253 - DNA, 14 bp, Artificial Sequence
  Description of Artificial Sequence: Synthetic oligonucleotide
ggccccgcggcgga

SEQ ID NO: 10254 - RNA, 14 nt, Artificial Sequence
  Description of Artificial Sequence: Synthetic oligonucleotide
uggccccgcggcgg

SEQ ID NO: 10255 - RNA, 14 nt, Artificial Sequence
  Description of Artificial Sequence: Synthetic oligonucleotide
cuggccccgcggcg

SEQ ID NO: 10256 - RNA, 14 nt, Artificial Sequence
  Description of Artificial Sequence: Synthetic oligonucleotide
ucuggccccgcggc

SEQ ID NO: 10257 - RNA, 14 nt, Artificial Sequence
  Description of Artificial Sequence: Synthetic oligonucleotide
gucuggccccgcgg

SEQ ID NO: 10258 - RNA, 14 nt, Artificial Sequence
  Description of Artificial Sequence: Synthetic oligonucleotide
ggucuggccccgcg

SEQ ID NO: 10259 - RNA, 14 nt, Artificial Sequence
  Description of Artificial Sequence: Synthetic oligonucleotide
cggucuggccccgc

SEQ ID NO: 10260 - RNA, 14 nt, Artificial Sequence
  Description of Artificial Sequence: Synthetic oligonucleotide
ccggucuggccccg

SEQ ID NO: 10261 - RNA, 14 nt, Artificial Sequence
  Description of Artificial Sequence: Synthetic oligonucleotide
cccggucuggcccc

SEQ ID NO: 10262 - RNA, 14 nt, Artificial Sequence
  Description of Artificial Sequence: Synthetic oligonucleotide
gcccggucuggccc

SEQ ID NO: 10263 - RNA, 14 nt, Artificial Sequence
  Description of Artificial Sequence: Synthetic oligonucleotide
ggcccggucuggcc

SEQ ID NO: 10264 - RNA, 14 nt, Artificial Sequence
  Description of Artificial Sequence: Synthetic oligonucleotide
gggcccggucuggc

SEQ ID NO: 10265 - RNA, 14 nt, Artificial Sequence
  Description of Artificial Sequence: Synthetic oligonucleotide
cgggcccggucugg

SEQ ID NO: 10266 - RNA, 14 nt, Artificial Sequence
  Description of Artificial Sequence: Synthetic oligonucleotide
ccgggcccggucug

SEQ ID NO: 10267 - RNA, 14 nt, Artificial Sequence
  Description of Artificial Sequence: Synthetic oligonucleotide
cccgggcccggucu

SEQ ID NO: 10268 - RNA, 14 nt, Artificial Sequence
  Description of Artificial Sequence: Synthetic oligonucleotide
ucccgggcccgguc

SEQ ID NO: 10269 - RNA, 14 nt, Artificial Sequence
  Description of Artificial Sequence: Synthetic oligonucleotide
cucccgggcccggu

SEQ ID NO: 10270 - RNA, 14 nt, Artificial Sequence
  Description of Artificial Sequence: Synthetic oligonucleotide
acucccgggcccgg

SEQ ID NO: 10271 - RNA, 14 nt, Artificial Sequence
  Description of Artificial Sequence: Synthetic oligonucleotide
cacucccgggcccg

SEQ ID NO: 10272 - RNA, 14 nt, Artificial Sequence
  Description of Artificial Sequence: Synthetic oligonucleotide
gcacucccgggccc

SEQ ID NO: 10273 - RNA, 14 nt, Artificial Sequence
  Description of Artificial Sequence: Synthetic oligonucleotide
ugcacucccgggcc

SEQ ID NO: 10274 - RNA, 14 nt, Artificial Sequence
  Description of Artificial Sequence: Synthetic oligonucleotide
cugcacucccgggc

SEQ ID NO: 10275 - RNA, 14 nt, Artificial Sequence
  Description of Artificial Sequence: Synthetic oligonucleotide
gcugcacucccggg

SEQ ID NO: 10276 - RNA, 14 nt, Artificial Sequence
  Description of Artificial Sequence: Synthetic oligonucleotide
ggcugcacucccgg

SEQ ID NO: 10277 - RNA, 14 nt, Artificial Sequence
  Description of Artificial Sequence: Synthetic oligonucleotide
gggcugcacucccg

SEQ ID NO: 10278 - RNA, 14 nt, Artificial Sequence
  Description of Artificial Sequence: Synthetic oligonucleotide
ggggcugcacuccc

SEQ ID NO: 10279 - RNA, 14 nt, Artificial Sequence
  Description of Artificial Sequence: Synthetic oligonucleotide
cggggcugcacucc

SEQ ID NO: 10280 - RNA, 14 nt, Artificial Sequence
  Description of Artificial Sequence: Synthetic oligonucleotide
ccggggcugcacuc

SEQ ID NO: 10281 - RNA, 14 nt, Artificial Sequence
  Description of Artificial Sequence: Synthetic oligonucleotide
gccggggcugcacu

SEQ ID NO: 10282 - RNA, 14 nt, Artificial Sequence
  Description of Artificial Sequence: Synthetic oligonucleotide
cgccggggcugcac

SEQ ID NO: 10283 - RNA, 14 nt, Artificial Sequence
  Description of Artificial Sequence: Synthetic oligonucleotide
ccgccggggcugca

SEQ ID NO: 10284 - RNA, 14 nt, Artificial Sequence
  Description of Artificial Sequence: Synthetic oligonucleotide
cccgccggggcugc

SEQ ID NO: 10285 - RNA, 14 nt, Artificial Sequence
  Description of Artificial Sequence: Synthetic oligonucleotide
gcccgccggggcug

SEQ ID NO: 10286 - RNA, 14 nt, Artificial Sequence
  Description of Artificial Sequence: Synthetic oligonucleotide
cgcccgccggggcu

SEQ ID NO: 10287 - DNA, 14 bp, Artificial Sequence
  Description of Artificial Sequence: Synthetic oligonucleotide
ccgcccgccggggc

SEQ ID NO: 10288 - DNA, 14 bp, Artificial Sequence
  Description of Artificial Sequence: Synthetic oligonucleotide
cccgcccgccgggg

SEQ ID NO: 10289 - DNA, 14 bp, Artificial Sequence
  Description of Artificial Sequence: Synthetic oligonucleotide
gcccgcccgccggg

SEQ ID NO: 10290 - DNA, 14 bp, Artificial Sequence
  Description of Artificial Sequence: Synthetic oligonucleotide
cgcccgcccgccgg

SEQ ID NO: 10291 - DNA, 14 bp, Artificial Sequence
  Description of Artificial Sequence: Synthetic oligonucleotide
ccgcccgcccgccg

SEQ ID NO: 10292 - DNA, 14 bp, Artificial Sequence
  Description of Artificial Sequence: Synthetic oligonucleotide
gccgcccgcccgcc

SEQ ID NO: 10293 - DNA, 14 bp, Artificial Sequence
  Description of Artificial Sequence: Synthetic oligonucleotide
cgccgcccgcccgc

SEQ ID NO: 10294 - DNA, 14 bp, Artificial Sequence
  Description of Artificial Sequence: Synthetic oligonucleotide
ccgccgcccgcccg

SEQ ID NO: 10295 - DNA, 14 bp, Artificial Sequence
  Description of Artificial Sequence: Synthetic oligonucleotide
gccgccgcccgccc

SEQ ID NO: 10296 - DNA, 14 bp, Artificial Sequence
  Description of Artificial Sequence: Synthetic oligonucleotide
ggccgccgcccgcc

SEQ ID NO: 10297 - DNA, 14 bp, Artificial Sequence
  Description of Artificial Sequence: Synthetic oligonucleotide
cggccgccgcccgc

SEQ ID NO: 10298 - DNA, 14 bp, Artificial Sequence
  Description of Artificial Sequence: Synthetic oligonucleotide
gcggccgccgcccg

SEQ ID NO: 10299 - DNA, 14 bp, Artificial Sequence
  Description of Artificial Sequence: Synthetic oligonucleotide
cgcggccgccgccc

SEQ ID NO: 10300-10301 - skipped (2 entries)

SEQ ID NO: 10302 - RNA, 14 nt, Artificial Sequence
  Description of Artificial Sequence: Synthetic oligonucleotide
ugccgcggccgccg

SEQ ID NO: 10303 - RNA, 14 nt, Artificial Sequence
  Description of Artificial Sequence: Synthetic oligonucleotide
cugccgcggccgcc

SEQ ID NO: 10304 - RNA, 14 nt, Artificial Sequence
  Description of Artificial Sequence: Synthetic oligonucleotide
ucugccgcggccgc

SEQ ID NO: 10305 - RNA, 14 nt, Artificial Sequence
  Description of Artificial Sequence: Synthetic oligonucleotide
cucugccgcggccg

SEQ ID NO: 10306 - RNA, 14 nt, Artificial Sequence
  Description of Artificial Sequence: Synthetic oligonucleotide
ccucugccgcggcc

SEQ ID NO: 10307 - RNA, 14 nt, Artificial Sequence
  Description of Artificial Sequence: Synthetic oligonucleotide
cccucugccgcggc

SEQ ID NO: 10308 - RNA, 14 nt, Artificial Sequence
  Description of Artificial Sequence: Synthetic oligonucleotide
gcccucugccgcgg

SEQ ID NO: 10309 - RNA, 14 nt, Artificial Sequence
  Description of Artificial Sequence: Synthetic oligonucleotide
ugcccucugccgcg

SEQ ID NO: 10310 - RNA, 14 nt, Artificial Sequence
  Description of Artificial Sequence: Synthetic oligonucleotide
cugcccucugccgc

SEQ ID NO: 10311 - RNA, 14 nt, Artificial Sequence
  Description of Artificial Sequence: Synthetic oligonucleotide
gcugcccucugccg

SEQ ID NO: 10312 - RNA, 14 nt, Artificial Sequence
  Description of Artificial Sequence: Synthetic oligonucleotide
ggcugcccucugcc

SEQ ID NO: 10313 - RNA, 14 nt, Artificial Sequence
  Description of Artificial Sequence: Synthetic oligonucleotide
gggcugcccucugc

SEQ ID NO: 10314 - RNA, 14 nt, Artificial Sequence
  Description of Artificial Sequence: Synthetic oligonucleotide
cgggcugcccucug

SEQ ID NO: 10315 - RNA, 14 nt, Artificial Sequence
  Description of Artificial Sequence: Synthetic oligonucleotide
ccgggcugcccucu

SEQ ID NO: 10316 - RNA, 14 nt, Artificial Sequence
  Description of Artificial Sequence: Synthetic oligonucleotide
cccgggcugcccuc

SEQ ID NO: 10317 - RNA, 14 nt, Artificial Sequence
  Description of Artificial Sequence: Synthetic oligonucleotide
ccccgggcugcccu

SEQ ID NO: 10318 - RNA, 14 nt, Artificial Sequence
  Description of Artificial Sequence: Synthetic oligonucleotide
gccccgggcugccc

SEQ ID NO: 10319 - RNA, 14 nt, Artificial Sequence
  Description of Artificial Sequence: Synthetic oligonucleotide
cgccccgggcugcc

SEQ ID NO: 10320 - RNA, 14 nt, Artificial Sequence
  Description of Artificial Sequence: Synthetic oligonucleotide
ccgccccgggcugc

SEQ ID NO: 10321 - RNA, 14 nt, Artificial Sequence
  Description of Artificial Sequence: Synthetic oligonucleotide
gccgccccgggcug

SEQ ID NO: 10322 - RNA, 14 nt, Artificial Sequence
  Description of Artificial Sequence: Synthetic oligonucleotide
cgccgccccgggcu

SEQ ID NO: 10323 - DNA, 14 bp, Artificial Sequence
  Description of Artificial Sequence: Synthetic oligonucleotide
gcgccgccccgggc

SEQ ID NO: 10324 - DNA, 14 bp, Artificial Sequence
  Description of Artificial Sequence: Synthetic oligonucleotide
ggcgccgccccggg

SEQ ID NO: 10325 - DNA, 14 bp, Artificial Sequence
  Description of Artificial Sequence: Synthetic oligonucleotide
cggcgccgccccgg

SEQ ID NO: 10326 - DNA, 14 bp, Artificial Sequence
  Description of Artificial Sequence: Synthetic oligonucleotide
ccggcgccgccccg

SEQ ID NO: 10327 - DNA, 14 bp, Artificial Sequence
  Description of Artificial Sequence: Synthetic oligonucleotide
gccggcgccgcccc

SEQ ID NO: 10328 - DNA, 14 bp, Artificial Sequence
  Description of Artificial Sequence: Synthetic oligonucleotide
cgccggcgccgccc

SEQ ID NO: 10329 - DNA, 14 bp, Artificial Sequence
  Description of Artificial Sequence: Synthetic oligonucleotide
ccgccggcgccgcc

SEQ ID NO: 10330 - DNA, 14 bp, Artificial Sequence
  Description of Artificial Sequence: Synthetic oligonucleotide
cccgccggcgccgc

SEQ ID NO: 10331 - DNA, 14 bp, Artificial Sequence
  Description of Artificial Sequence: Synthetic oligonucleotide
gcccgccggcgccg

SEQ ID NO: 10332 - DNA, 14 bp, Artificial Sequence
  Description of Artificial Sequence: Synthetic oligonucleotide
ggcccgccggcgcc

SEQ ID NO: 10333 - DNA, 14 bp, Artificial Sequence
  Description of Artificial Sequence: Synthetic oligonucleotide
cggcccgccggcgc

SEQ ID NO: 10334 - DNA, 14 bp, Artificial Sequence
  Description of Artificial Sequence: Synthetic oligonucleotide
ccggcccgccggcg

SEQ ID NO: 10335 - DNA, 14 bp, Artificial Sequence
  Description of Artificial Sequence: Synthetic oligonucleotide
cccggcccgccggc

SEQ ID NO: 10336 - DNA, 14 bp, Artificial Sequence
  Description of Artificial Sequence: Synthetic oligonucleotide
ccccggcccgccgg

SEQ ID NO: 10337 - RNA, 14 nt, Artificial Sequence
  Description of Artificial Sequence: Synthetic oligonucleotide
uccccggcccgccg

SEQ ID NO: 10338 - RNA, 14 nt, Artificial Sequence
  Description of Artificial Sequence: Synthetic oligonucleotide
cuccccggcccgcc

SEQ ID NO: 10339 - RNA, 14 nt, Artificial Sequence
  Description of Artificial Sequence: Synthetic oligonucleotide
ccuccccggcccgc

SEQ ID NO: 10340 - RNA, 14 nt, Artificial Sequence
  Description of Artificial Sequence: Synthetic oligonucleotide
cccuccccggcccg

SEQ ID NO: 10341 - RNA, 14 nt, Artificial Sequence
  Description of Artificial Sequence: Synthetic oligonucleotide
ccccuccccggccc

SEQ ID NO: 10342 - RNA, 14 nt, Artificial Sequence
  Description of Artificial Sequence: Synthetic oligonucleotide
gccccuccccggcc

SEQ ID NO: 10343 - RNA, 14 nt, Artificial Sequence
  Description of Artificial Sequence: Synthetic oligonucleotide
cgccccuccccggc

SEQ ID NO: 10344 - RNA, 14 nt, Artificial Sequence
  Description of Artificial Sequence: Synthetic oligonucleotide
ccgccccuccccgg

SEQ ID NO: 10345 - RNA, 14 nt, Artificial Sequence
  Description of Artificial Sequence: Synthetic oligonucleotide
cccgccccuccccg

SEQ ID NO: 10346 - RNA, 14 nt, Artificial Sequence
  Description of Artificial Sequence: Synthetic oligonucleotide
ccccgccccucccc

SEQ ID NO: 10347 - RNA, 14 nt, Artificial Sequence
  Description of Artificial Sequence: Synthetic oligonucleotide
cccccgccccuccc

SEQ ID NO: 10348 - RNA, 14 nt, Artificial Sequence
  Description of Artificial Sequence: Synthetic oligonucleotide
ccccccgccccucc

SEQ ID NO: 10349 - RNA, 14 nt, Artificial Sequence
  Description of Artificial Sequence: Synthetic oligonucleotide
gccccccgccccuc

SEQ ID NO: 10350 - RNA, 14 nt, Artificial Sequence
  Description of Artificial Sequence: Synthetic oligonucleotide
ggccccccgccccu

SEQ ID NO: 10351 - DNA, 14 bp, Artificial Sequence
  Description of Artificial Sequence: Synthetic oligonucleotide
aggccccccgcccc

SEQ ID NO: 10352 - DNA, 14 bp, Artificial Sequence
  Description of Artificial Sequence: Synthetic oligonucleotide
caggccccccgccc

SEQ ID NO: 10353 - DNA, 14 bp, Artificial Sequence
  Description of Artificial Sequence: Synthetic oligonucleotide
ccaggccccccgcc

SEQ ID NO: 10354 - DNA, 14 bp, Artificial Sequence
  Description of Artificial Sequence: Synthetic oligonucleotide
gccaggccccccgc

SEQ ID NO: 10355 - DNA, 14 bp, Artificial Sequence
  Description of Artificial Sequence: Synthetic oligonucleotide
ggccaggccccccg

SEQ ID NO: 10356 - DNA, 14 bp, Artificial Sequence
  Description of Artificial Sequence: Synthetic oligonucleotide
gggccaggcccccc

SEQ ID NO: 10357 - DNA, 14 bp, Artificial Sequence
  Description of Artificial Sequence: Synthetic oligonucleotide
ggggccaggccccc

SEQ ID NO: 10358 - DNA, 14 bp, Artificial Sequence
  Description of Artificial Sequence: Synthetic oligonucleotide
cggggccaggcccc

SEQ ID NO: 10359 - DNA, 14 bp, Artificial Sequence
  Description of Artificial Sequence: Synthetic oligonucleotide
ccggggccaggccc

SEQ ID NO: 10360 - DNA, 14 bp, Artificial Sequence
  Description of Artificial Sequence: Synthetic oligonucleotide
cccggggccaggcc

SEQ ID NO: 10361 - DNA, 14 bp, Artificial Sequence
  Description of Artificial Sequence: Synthetic oligonucleotide
ccccggggccaggc

SEQ ID NO: 10362 - DNA, 14 bp, Artificial Sequence
  Description of Artificial Sequence: Synthetic oligonucleotide
gccccggggccagg

SEQ ID NO: 10363 - DNA, 14 bp, Artificial Sequence
  Description of Artificial Sequence: Synthetic oligonucleotide
cgccccggggccag

SEQ ID NO: 10364 - DNA, 14 bp, Artificial Sequence
  Description of Artificial Sequence: Synthetic oligonucleotide
ccgccccggggcca

SEQ ID NO: 10365 - DNA, 14 bp, Artificial Sequence
  Description of Artificial Sequence: Synthetic oligonucleotide
accgccccggggcc

SEQ ID NO: 10366 - DNA, 14 bp, Artificial Sequence
  Description of Artificial Sequence: Synthetic oligonucleotide
caccgccccggggc

SEQ ID NO: 10367 - DNA, 14 bp, Artificial Sequence
  Description of Artificial Sequence: Synthetic oligonucleotide
ccaccgccccgggg

SEQ ID NO: 10368 - DNA, 14 bp, Artificial Sequence
  Description of Artificial Sequence: Synthetic oligonucleotide
accaccgccccggg

SEQ ID NO: 10369 - DNA, 14 bp, Artificial Sequence
  Description of Artificial Sequence: Synthetic oligonucleotide
caccaccgccccgg

SEQ ID NO: 10370 - DNA, 14 bp, Artificial Sequence
  Description of Artificial Sequence: Synthetic oligonucleotide
gcaccaccgccccg

SEQ ID NO: 10371 - DNA, 14 bp, Artificial Sequence
  Description of Artificial Sequence: Synthetic oligonucleotide
cgcaccaccgcccc

SEQ ID NO: 10372 - DNA, 14 bp, Artificial Sequence
  Description of Artificial Sequence: Synthetic oligonucleotide
ccgcaccaccgccc

SEQ ID NO: 10373 - DNA, 14 bp, Artificial Sequence
  Description of Artificial Sequence: Synthetic oligonucleotide
cccgcaccaccgcc

SEQ ID NO: 10374 - RNA, 14 nt, Artificial Sequence
  Description of Artificial Sequence: Synthetic oligonucleotide
ucccgcaccaccgc

SEQ ID NO: 10375 - RNA, 14 nt, Artificial Sequence
  Description of Artificial Sequence: Synthetic oligonucleotide
aucccgcaccaccg

SEQ ID NO: 10376 - RNA, 14 nt, Artificial Sequence
  Description of Artificial Sequence: Synthetic oligonucleotide
caucccgcaccacc

SEQ ID NO: 10377 - RNA, 14 nt, Artificial Sequence
  Description of Artificial Sequence: Synthetic oligonucleotide
gcaucccgcaccac

SEQ ID NO: 10378 - RNA, 14 nt, Artificial Sequence
  Description of Artificial Sequence: Synthetic oligonucleotide
ggcaucccgcacca

SEQ ID NO: 10379 - RNA, 14 nt, Artificial Sequence
  Description of Artificial Sequence: Synthetic oligonucleotide
cggcaucccgcacc

SEQ ID NO: 10380 - skipped

SEQ ID NO: 10381 - RNA, 14 nt, Artificial Sequence
  Description of Artificial Sequence: Synthetic oligonucleotide
ggcggcaucccgca

SEQ ID NO: 10382 - RNA, 14 nt, Artificial Sequence
  Description of Artificial Sequence: Synthetic oligonucleotide
cggcggcaucccgc

SEQ ID NO: 10383 - RNA, 14 nt, Artificial Sequence
  Description of Artificial Sequence: Synthetic oligonucleotide
gcggcggcaucccg

SEQ ID NO: 10384 - RNA, 14 nt, Artificial Sequence
  Description of Artificial Sequence: Synthetic oligonucleotide
ggcggcggcauccc

SEQ ID NO: 10385 - RNA, 14 nt, Artificial Sequence
  Description of Artificial Sequence: Synthetic oligonucleotide
aggcggcggcaucc

SEQ ID NO: 10386 - RNA, 14 nt, Artificial Sequence
  Description of Artificial Sequence: Synthetic oligonucleotide
gaggcggcggcauc

SEQ ID NO: 10387 - RNA, 14 nt, Artificial Sequence
  Description of Artificial Sequence: Synthetic oligonucleotide
ggaggcggcggcau

SEQ ID NO: 10388 - DNA, 14 bp, Artificial Sequence
  Description of Artificial Sequence: Synthetic oligonucleotide
cggaggcggcggca

SEQ ID NO: 10389 - DNA, 14 bp, Artificial Sequence
  Description of Artificial Sequence: Synthetic oligonucleotide
ccggaggcggcggc

SEQ ID NO: 10390 - DNA, 14 bp, Artificial Sequence
  Description of Artificial Sequence: Synthetic oligonucleotide
cccggaggcggcgg

SEQ ID NO: 10391 - DNA, 14 bp, Artificial Sequence
  Description of Artificial Sequence: Synthetic oligonucleotide
gcccggaggcggcg

SEQ ID NO: 10392 - DNA, 14 bp, Artificial Sequence
  Description of Artificial Sequence: Synthetic oligonucleotide
ggcccggaggcggc

SEQ ID NO: 10393 - DNA, 14 bp, Artificial Sequence
  Description of Artificial Sequence: Synthetic oligonucleotide
cggcccggaggcgg

SEQ ID NO: 10394 - DNA, 14 bp, Artificial Sequence
  Description of Artificial Sequence: Synthetic oligonucleotide
gcggcccggaggcg

SEQ ID NO: 10395 - DNA, 14 bp, Artificial Sequence
  Description of Artificial Sequence: Synthetic oligonucleotide
cgcggcccggaggc

SEQ ID NO: 10396 - DNA, 14 bp, Artificial Sequence
  Description of Artificial Sequence: Synthetic oligonucleotide
acgcggcccggagg

SEQ ID NO: 10397 - DNA, 14 bp, Artificial Sequence
  Description of Artificial Sequence: Synthetic oligonucleotide
gacgcggcccggag

SEQ ID NO: 10398 - DNA, 14 bp, Artificial Sequence
  Description of Artificial Sequence: Synthetic oligonucleotide
ggacgcggcccgga

SEQ ID NO: 10399 - DNA, 14 bp, Artificial Sequence
  Description of Artificial Sequence: Synthetic oligonucleotide
cggacgcggcccgg

SEQ ID NO: 10400 - DNA, 14 bp, Artificial Sequence
  Description of Artificial Sequence: Synthetic oligonucleotide
acggacgcggcccg

SEQ ID NO: 10401 - DNA, 14 bp, Artificial Sequence
  Description of Artificial Sequence: Synthetic oligonucleotide
aacggacgcggccc

SEQ ID NO: 10402 - DNA, 14 bp, Artificial Sequence
  Description of Artificial Sequence: Synthetic oligonucleotide
gaacggacgcggcc

SEQ ID NO: 10403 - DNA, 14 bp, Artificial Sequence
  Description of Artificial Sequence: Synthetic oligonucleotide
agaacggacgcggc

SEQ ID NO: 10404 - DNA, 14 bp, Artificial Sequence
  Description of Artificial Sequence: Synthetic oligonucleotide
gagaacggacgcgg

SEQ ID NO: 10405 - DNA, 14 bp, Artificial Sequence
  Description of Artificial Sequence: Synthetic oligonucleotide
ggagaacggacgcg

SEQ ID NO: 10406 - RNA, 14 nt, Artificial Sequence
  Description of Artificial Sequence: Synthetic oligonucleotide
uggagaacggacgc

SEQ ID NO: 10407 - RNA, 14 nt, Artificial Sequence
  Description of Artificial Sequence: Synthetic oligonucleotide
guggagaacggacg

SEQ ID NO: 10408 - RNA, 14 nt, Artificial Sequence
  Description of Artificial Sequence: Synthetic oligonucleotide
cguggagaacggac

SEQ ID NO: 10409 - RNA, 14 nt, Artificial Sequence
  Description of Artificial Sequence: Synthetic oligonucleotide
ccguggagaacgga

SEQ ID NO: 10410 - RNA, 14 nt, Artificial Sequence
  Description of Artificial Sequence: Synthetic oligonucleotide
gccguggagaacgg

SEQ ID NO: 10411 - RNA, 14 nt, Artificial Sequence
  Description of Artificial Sequence: Synthetic oligonucleotide
agccguggagaacg

SEQ ID NO: 10412 - RNA, 14 nt, Artificial Sequence
  Description of Artificial Sequence: Synthetic oligonucleotide
cagccguggagaac

SEQ ID NO: 10413 - RNA, 14 nt, Artificial Sequence
  Description of Artificial Sequence: Synthetic oligonucleotide
ccagccguggagaa

SEQ ID NO: 10414 - RNA, 14 nt, Artificial Sequence
  Description of Artificial Sequence: Synthetic oligonucleotide
accagccguggaga

SEQ ID NO: 10415 - RNA, 14 nt, Artificial Sequence
  Description of Artificial Sequence: Synthetic oligonucleotide
uaccagccguggag

SEQ ID NO: 10416 - RNA, 14 nt, Artificial Sequence
  Description of Artificial Sequence: Synthetic oligonucleotide
guaccagccgugga

SEQ ID NO: 10417 - RNA, 14 nt, Artificial Sequence
  Description of Artificial Sequence: Synthetic oligonucleotide
gguaccagccgugg

SEQ ID NO: 10418 - RNA, 14 nt, Artificial Sequence
  Description of Artificial Sequence: Synthetic oligonucleotide
agguaccagccgug

SEQ ID NO: 10419 - RNA, 14 nt, Artificial Sequence
  Description of Artificial Sequence: Synthetic oligonucleotide
cagguaccagccgu

SEQ ID NO: 10420 - RNA, 14 nt, Artificial Sequence
  Description of Artificial Sequence: Synthetic oligonucleotide
acagguaccagccg

SEQ ID NO: 10421 - RNA, 14 nt, Artificial Sequence
  Description of Artificial Sequence: Synthetic oligonucleotide
cacagguaccagcc

SEQ ID NO: 10422 - RNA, 14 nt, Artificial Sequence
  Description of Artificial Sequence: Synthetic oligonucleotide
acacagguaccagc

SEQ ID NO: 10423 - RNA, 14 nt, Artificial Sequence
  Description of Artificial Sequence: Synthetic oligonucleotide
gacacagguaccag

SEQ ID NO: 10424 - RNA, 14 nt, Artificial Sequence
  Description of Artificial Sequence: Synthetic oligonucleotide
cgacacagguacca

SEQ ID NO: 10425 - RNA, 14 nt, Artificial Sequence
  Description of Artificial Sequence: Synthetic oligonucleotide
ccgacacagguacc

SEQ ID NO: 10426 - RNA, 14 nt, Artificial Sequence
  Description of Artificial Sequence: Synthetic oligonucleotide
cccgacacagguac

SEQ ID NO: 10427 - RNA, 14 nt, Artificial Sequence
  Description of Artificial Sequence: Synthetic oligonucleotide
acccgacacaggua

SEQ ID NO: 10428 - RNA, 14 nt, Artificial Sequence
  Description of Artificial Sequence: Synthetic oligonucleotide
cacccgacacaggu

SEQ ID NO: 10429 - DNA, 14 bp, Artificial Sequence
  Description of Artificial Sequence: Synthetic oligonucleotide
ccacccgacacagg

SEQ ID NO: 10430 - DNA, 14 bp, Artificial Sequence
  Description of Artificial Sequence: Synthetic oligonucleotide
cccacccgacacag

SEQ ID NO: 10431 - DNA, 14 bp, Artificial Sequence
  Description of Artificial Sequence: Synthetic oligonucleotide
acccacccgacaca

SEQ ID NO: 10432 - DNA, 14 bp, Artificial Sequence
  Description of Artificial Sequence: Synthetic oligonucleotide
cacccacccgacac

SEQ ID NO: 10433 - DNA, 14 bp, Artificial Sequence
  Description of Artificial Sequence: Synthetic oligonucleotide
ccacccacccgaca

SEQ ID NO: 10434 - DNA, 14 bp, Artificial Sequence
  Description of Artificial Sequence: Synthetic oligonucleotide
gccacccacccgac

SEQ ID NO: 10435 - DNA, 14 bp, Artificial Sequence
  Description of Artificial Sequence: Synthetic oligonucleotide
ggccacccacccga

SEQ ID NO: 10436 - RNA, 14 nt, Artificial Sequence
  Description of Artificial Sequence: Synthetic oligonucleotide
uggccacccacccg

SEQ ID NO: 10437 - RNA, 14 nt, Artificial Sequence
  Description of Artificial Sequence: Synthetic oligonucleotide
cuggccacccaccc

SEQ ID NO: 10438 - RNA, 14 nt, Artificial Sequence
  Description of Artificial Sequence: Synthetic oligonucleotide
ccuggccacccacc

SEQ ID NO: 10439 - RNA, 14 nt, Artificial Sequence
  Description of Artificial Sequence: Synthetic oligonucleotide
gccuggccacccac

SEQ ID NO: 10440 - RNA, 14 nt, Artificial Sequence
  Description of Artificial Sequence: Synthetic oligonucleotide
cgccuggccaccca

SEQ ID NO: 10441 - RNA, 14 nt, Artificial Sequence
  Description of Artificial Sequence: Synthetic oligonucleotide
gcgccuggccaccc

SEQ ID NO: 10442 - RNA, 14 nt, Artificial Sequence
  Description of Artificial Sequence: Synthetic oligonucleotide
cgcgccuggccacc

SEQ ID NO: 10443 - RNA, 14 nt, Artificial Sequence
  Description of Artificial Sequence: Synthetic oligonucleotide
ccgcgccuggccac

SEQ ID NO: 10444 - RNA, 14 nt, Artificial Sequence
  Description of Artificial Sequence: Synthetic oligonucleotide
cccgcgccuggcca

SEQ ID NO: 10445 - RNA, 14 nt, Artificial Sequence
  Description of Artificial Sequence: Synthetic oligonucleotide
gcccgcgccuggcc

SEQ ID NO: 10446 - RNA, 14 nt, Artificial Sequence
  Description of Artificial Sequence: Synthetic oligonucleotide
ggcccgcgccuggc

SEQ ID NO: 10447 - RNA, 14 nt, Artificial Sequence
  Description of Artificial Sequence: Synthetic oligonucleotide
aggcccgcgccugg

SEQ ID NO: 10448 - RNA, 14 nt, Artificial Sequence
  Description of Artificial Sequence: Synthetic oligonucleotide
gaggcccgcgccug

SEQ ID NO: 10449 - RNA, 14 nt, Artificial Sequence
  Description of Artificial Sequence: Synthetic oligonucleotide
cgaggcccgcgccu

SEQ ID NO: 10450 - DNA, 14 bp, Artificial Sequence
  Description of Artificial Sequence: Synthetic oligonucleotide
gcgaggcccgcgcc

SEQ ID NO: 10451 - DNA, 14 bp, Artificial Sequence
  Description of Artificial Sequence: Synthetic oligonucleotide
ggcgaggcccgcgc

SEQ ID NO: 10452 - DNA, 14 bp, Artificial Sequence
  Description of Artificial Sequence: Synthetic oligonucleotide
gggcgaggcccgcg

SEQ ID NO: 10453 - DNA, 14 bp, Artificial Sequence
  Description of Artificial Sequence: Synthetic oligonucleotide
ggggcgaggcccgc

SEQ ID NO: 10454 - DNA, 14 bp, Artificial Sequence
  Description of Artificial Sequence: Synthetic oligonucleotide
gggggcgaggcccg

SEQ ID NO: 10455 - DNA, 14 bp, Artificial Sequence
  Description of Artificial Sequence: Synthetic oligonucleotide
ggggggcgaggccc

SEQ ID NO: 10456 - RNA, 14 nt, Artificial Sequence
  Description of Artificial Sequence: Synthetic oligonucleotide
uggggggcgaggcc

SEQ ID NO: 10457 - RNA, 14 nt, Artificial Sequence
  Description of Artificial Sequence: Synthetic oligonucleotide
cuggggggcgaggc

SEQ ID NO: 10458 - RNA, 14 nt, Artificial Sequence
  Description of Artificial Sequence: Synthetic oligonucleotide
gcuggggggcgagg

SEQ ID NO: 10459 - RNA, 14 nt, Artificial Sequence
  Description of Artificial Sequence: Synthetic oligonucleotide
ggcuggggggcgag

SEQ ID NO: 10460 - RNA, 14 nt, Artificial Sequence
  Description of Artificial Sequence: Synthetic oligonucleotide
gggcuggggggcga

SEQ ID NO: 10461 - RNA, 14 nt, Artificial Sequence
  Description of Artificial Sequence: Synthetic oligonucleotide
ggggcuggggggcg

SEQ ID NO: 10462 - RNA, 14 nt, Artificial Sequence
  Description of Artificial Sequence: Synthetic oligonucleotide
gggggcuggggggc

SEQ ID NO: 10463 - RNA, 14 nt, Artificial Sequence
  Description of Artificial Sequence: Synthetic oligonucleotide
agggggcugggggg

SEQ ID NO: 10464 - RNA, 14 nt, Artificial Sequence
  Description of Artificial Sequence: Synthetic oligonucleotide
gagggggcuggggg

SEQ ID NO: 10465 - RNA, 14 nt, Artificial Sequence
  Description of Artificial Sequence: Synthetic oligonucleotide
cgagggggcugggg

SEQ ID NO: 10466 - RNA, 14 nt, Artificial Sequence
  Description of Artificial Sequence: Synthetic oligonucleotide
gcgagggggcuggg

SEQ ID NO: 10467 - RNA, 14 nt, Artificial Sequence
  Description of Artificial Sequence: Synthetic oligonucleotide
ggcgagggggcugg

SEQ ID NO: 10468 - RNA, 14 nt, Artificial Sequence
  Description of Artificial Sequence: Synthetic oligonucleotide
uggcgagggggcug

SEQ ID NO: 10469 - RNA, 14 nt, Artificial Sequence
  Description of Artificial Sequence: Synthetic oligonucleotide
cuggcgagggggcu

SEQ ID NO: 10470 - RNA, 14 nt, Artificial Sequence
  Description of Artificial Sequence: Synthetic oligonucleotide
ccuggcgagggggc

SEQ ID NO: 10471 - RNA, 14 nt, Artificial Sequence
  Description of Artificial Sequence: Synthetic oligonucleotide
cccuggcgaggggg

SEQ ID NO: 10472 - RNA, 14 nt, Artificial Sequence
  Description of Artificial Sequence: Synthetic oligonucleotide
gcccuggcgagggg

SEQ ID NO: 10473 - RNA, 14 nt, Artificial Sequence
  Description of Artificial Sequence: Synthetic oligonucleotide
agcccuggcgaggg

SEQ ID NO: 10474 - RNA, 14 nt, Artificial Sequence
  Description of Artificial Sequence: Synthetic oligonucleotide
uagcccuggcgagg

SEQ ID NO: 10475 - RNA, 14 nt, Artificial Sequence
  Description of Artificial Sequence: Synthetic oligonucleotide
cuagcccuggcgag

SEQ ID NO: 10476 - RNA, 14 nt, Artificial Sequence
  Description of Artificial Sequence: Synthetic oligonucleotide
gcuagcccuggcga

SEQ ID NO: 10477 - RNA, 14 nt, Artificial Sequence
  Description of Artificial Sequence: Synthetic oligonucleotide
ggcuagcccuggcg

SEQ ID NO: 10478 - RNA, 14 nt, Artificial Sequence
  Description of Artificial Sequence: Synthetic oligonucleotide
gggcuagcccuggc

SEQ ID NO: 10479 - RNA, 14 nt, Artificial Sequence
  Description of Artificial Sequence: Synthetic oligonucleotide
cgggcuagcccugg

SEQ ID NO: 10480 - RNA, 14 nt, Artificial Sequence
  Description of Artificial Sequence: Synthetic oligonucleotide
ccgggcuagcccug

SEQ ID NO: 10481 - RNA, 14 nt, Artificial Sequence
  Description of Artificial Sequence: Synthetic oligonucleotide
gccgggcuagcccu

SEQ ID NO: 10482 - RNA, 14 nt, Artificial Sequence
  Description of Artificial Sequence: Synthetic oligonucleotide
agccgggcuagccc

SEQ ID NO: 10483 - RNA, 14 nt, Artificial Sequence
  Description of Artificial Sequence: Synthetic oligonucleotide
cagccgggcuagcc

SEQ ID NO: 10484 - RNA, 14 nt, Artificial Sequence
  Description of Artificial Sequence: Synthetic oligonucleotide
gcagccgggcuagc

SEQ ID NO: 10485 - RNA, 14 nt, Artificial Sequence
  Description of Artificial Sequence: Synthetic oligonucleotide
cgcagccgggcuag

SEQ ID NO: 10486 - RNA, 14 nt, Artificial Sequence
  Description of Artificial Sequence: Synthetic oligonucleotide
gcgcagccgggcua

SEQ ID NO: 10487 - RNA, 14 nt, Artificial Sequence
  Description of Artificial Sequence: Synthetic oligonucleotide
cgcgcagccgggcu

SEQ ID NO: 10488 - DNA, 14 bp, Artificial Sequence
  Description of Artificial Sequence: Synthetic oligonucleotide
ccgcgcagccgggc

SEQ ID NO: 10489 - DNA, 14 bp, Artificial Sequence
  Description of Artificial Sequence: Synthetic oligonucleotide
gccgcgcagccggg

SEQ ID NO: 10490 - DNA, 14 bp, Artificial Sequence
  Description of Artificial Sequence: Synthetic oligonucleotide
cgccgcgcagccgg

SEQ ID NO: 10491 - DNA, 14 bp, Artificial Sequence
  Description of Artificial Sequence: Synthetic oligonucleotide
gcgccgcgcagccg

SEQ ID NO: 10492 - DNA, 14 bp, Artificial Sequence
  Description of Artificial Sequence: Synthetic oligonucleotide
ggcgccgcgcagcc

SEQ ID NO: 10493 - DNA, 14 bp, Artificial Sequence
  Description of Artificial Sequence: Synthetic oligonucleotide
gggcgccgcgcagc

SEQ ID NO: 10494 - DNA, 14 bp, Artificial Sequence
  Description of Artificial Sequence: Synthetic oligonucleotide
cgggcgccgcgcag

SEQ ID NO: 10495 - DNA, 14 bp, Artificial Sequence
  Description of Artificial Sequence: Synthetic oligonucleotide
ccgggcgccgcgca

SEQ ID NO: 10496 - RNA, 14 nt, Artificial Sequence
  Description of Artificial Sequence: Synthetic oligonucleotide
uccgggcgccgcgc

SEQ ID NO: 10497 - RNA, 14 nt, Artificial Sequence
  Description of Artificial Sequence: Synthetic oligonucleotide
cuccgggcgccgcg

SEQ ID NO: 10498 - RNA, 14 nt, Artificial Sequence
  Description of Artificial Sequence: Synthetic oligonucleotide
ccuccgggcgccgc

SEQ ID NO: 10499 - RNA, 14 nt, Artificial Sequence
  Description of Artificial Sequence: Synthetic oligonucleotide
cccuccgggcgccg

SEQ ID NO: 10500 - RNA, 14 nt, Artificial Sequence
  Description of Artificial Sequence: Synthetic oligonucleotide
ccccuccgggcgcc

SEQ ID NO: 10501 - RNA, 14 nt, Artificial Sequence
  Description of Artificial Sequence: Synthetic oligonucleotide
cccccuccgggcgc

SEQ ID NO: 10502 - RNA, 14 nt, Artificial Sequence
  Description of Artificial Sequence: Synthetic oligonucleotide
gcccccuccgggcg

SEQ ID NO: 10503 - RNA, 14 nt, Artificial Sequence
  Description of Artificial Sequence: Synthetic oligonucleotide
ggcccccuccgggc

SEQ ID NO: 10504 - RNA, 14 nt, Artificial Sequence
  Description of Artificial Sequence: Synthetic oligonucleotide
cggcccccuccggg

SEQ ID NO: 10505 - RNA, 14 nt, Artificial Sequence
  Description of Artificial Sequence: Synthetic oligonucleotide
ccggcccccuccgg

SEQ ID NO: 10506 - RNA, 14 nt, Artificial Sequence
  Description of Artificial Sequence: Synthetic oligonucleotide
cccggcccccuccg

SEQ ID NO: 10507 - RNA, 14 nt, Artificial Sequence
  Description of Artificial Sequence: Synthetic oligonucleotide
gcccggcccccucc

SEQ ID NO: 10508 - RNA, 14 nt, Artificial Sequence
  Description of Artificial Sequence: Synthetic oligonucleotide
ggcccggcccccuc

SEQ ID NO: 10509 - RNA, 14 nt, Artificial Sequence
  Description of Artificial Sequence: Synthetic oligonucleotide
cggcccggcccccu

SEQ ID NO: 10510 - DNA, 14 bp, Artificial Sequence
  Description of Artificial Sequence: Synthetic oligonucleotide
acggcccggccccc

SEQ ID NO: 10511 - DNA, 14 bp, Artificial Sequence
  Description of Artificial Sequence: Synthetic oligonucleotide
gacggcccggcccc

SEQ ID NO: 10512 - DNA, 14 bp, Artificial Sequence
  Description of Artificial Sequence: Synthetic oligonucleotide
ggacggcccggccc

SEQ ID NO: 10513 - DNA, 14 bp, Artificial Sequence
  Description of Artificial Sequence: Synthetic oligonucleotide
cggacggcccggcc

SEQ ID NO: 10514 - DNA, 14 bp, Artificial Sequence
  Description of Artificial Sequence: Synthetic oligonucleotide
ccggacggcccggc

SEQ ID NO: 10515 - DNA, 14 bp, Artificial Sequence
  Description of Artificial Sequence: Synthetic oligonucleotide
accggacggcccgg

SEQ ID NO: 10516 - DNA, 14 bp, Artificial Sequence
  Description of Artificial Sequence: Synthetic oligonucleotide
caccggacggcccg

SEQ ID NO: 10517 - DNA, 14 bp, Artificial Sequence
  Description of Artificial Sequence: Synthetic oligonucleotide
ccaccggacggccc

SEQ ID NO: 10518 - DNA, 14 bp, Artificial Sequence
  Description of Artificial Sequence: Synthetic oligonucleotide
cccaccggacggcc

SEQ ID NO: 10519 - DNA, 14 bp, Artificial Sequence
  Description of Artificial Sequence: Synthetic oligonucleotide
ccccaccggacggc

SEQ ID NO: 10520 - DNA, 14 bp, Artificial Sequence
  Description of Artificial Sequence: Synthetic oligonucleotide
gccccaccggacgg

SEQ ID NO: 10521 - DNA, 14 bp, Artificial Sequence
  Description of Artificial Sequence: Synthetic oligonucleotide
ggccccaccggacg

SEQ ID NO: 10522 - DNA, 14 bp, Artificial Sequence
  Description of Artificial Sequence: Synthetic oligonucleotide
cggccccaccggac

SEQ ID NO: 10523 - DNA, 14 bp, Artificial Sequence
  Description of Artificial Sequence: Synthetic oligonucleotide
gcggccccaccgga

SEQ ID NO: 10524 - DNA, 14 bp, Artificial Sequence
  Description of Artificial Sequence: Synthetic oligonucleotide
cgcggccccaccgg

SEQ ID NO: 10525 - DNA, 14 bp, Artificial Sequence
  Description of Artificial Sequence: Synthetic oligonucleotide
ccgcggccccaccg

SEQ ID NO: 10526 - DNA, 14 bp, Artificial Sequence
  Description of Artificial Sequence: Synthetic oligonucleotide
gccgcggccccacc

SEQ ID NO: 10527 - DNA, 14 bp, Artificial Sequence
  Description of Artificial Sequence: Synthetic oligonucleotide
ggccgcggccccac

SEQ ID NO: 10528 - DNA, 14 bp, Artificial Sequence
  Description of Artificial Sequence: Synthetic oligonucleotide
gggccgcggcccca

SEQ ID NO: 10529 - DNA, 14 bp, Artificial Sequence
  Description of Artificial Sequence: Synthetic oligonucleotide
agggccgcggcccc

SEQ ID NO: 10530 - DNA, 14 bp, Artificial Sequence
  Description of Artificial Sequence: Synthetic oligonucleotide
cagggccgcggccc

SEQ ID NO: 10531 - DNA, 14 bp, Artificial Sequence
  Description of Artificial Sequence: Synthetic oligonucleotide
acagggccgcggcc

SEQ ID NO: 10532 - DNA, 14 bp, Artificial Sequence
  Description of Artificial Sequence: Synthetic oligonucleotide
aacagggccgcggc

SEQ ID NO: 10533 - DNA, 14 bp, Artificial Sequence
  Description of Artificial Sequence: Synthetic oligonucleotide
gaacagggccgcgg

SEQ ID NO: 10534 - DNA, 14 bp, Artificial Sequence
  Description of Artificial Sequence: Synthetic oligonucleotide
ggaacagggccgcg

SEQ ID NO: 10535 - DNA, 14 bp, Artificial Sequence
  Description of Artificial Sequence: Synthetic oligonucleotide
cggaacagggccgc

SEQ ID NO: 10536 - DNA, 14 bp, Artificial Sequence
  Description of Artificial Sequence: Synthetic oligonucleotide
gcggaacagggccg

SEQ ID NO: 10537 - DNA, 14 bp, Artificial Sequence
  Description of Artificial Sequence: Synthetic oligonucleotide
cgcggaacagggcc

SEQ ID NO: 10538 - DNA, 14 bp, Artificial Sequence
  Description of Artificial Sequence: Synthetic oligonucleotide
gcgcggaacagggc

SEQ ID NO: 10539 - DNA, 14 bp, Artificial Sequence
  Description of Artificial Sequence: Synthetic oligonucleotide
agcgcggaacaggg

SEQ ID NO: 10540 - DNA, 14 bp, Artificial Sequence
  Description of Artificial Sequence: Synthetic oligonucleotide
cagcgcggaacagg

SEQ ID NO: 10541 - DNA, 14 bp, Artificial Sequence
  Description of Artificial Sequence: Synthetic oligonucleotide
gcagcgcggaacag

SEQ ID NO: 10542 - DNA, 14 bp, Artificial Sequence
  Description of Artificial Sequence: Synthetic oligonucleotide
cgcagcgcggaaca

SEQ ID NO: 10543 - RNA, 14 nt, Artificial Sequence
  Description of Artificial Sequence: Synthetic oligonucleotide
ucgcagcgcggaac

SEQ ID NO: 10544 - RNA, 14 nt, Artificial Sequence
  Description of Artificial Sequence: Synthetic oligonucleotide
cucgcagcgcggaa

SEQ ID NO: 10545 - RNA, 14 nt, Artificial Sequence
  Description of Artificial Sequence: Synthetic oligonucleotide
gcucgcagcgcgga

SEQ ID NO: 10546 - RNA, 14 nt, Artificial Sequence
  Description of Artificial Sequence: Synthetic oligonucleotide
agcucgcagcgcgg

SEQ ID NO: 10547 - RNA, 14 nt, Artificial Sequence
  Description of Artificial Sequence: Synthetic oligonucleotide
gagcucgcagcgcg

SEQ ID NO: 10548 - RNA, 14 nt, Artificial Sequence
  Description of Artificial Sequence: Synthetic oligonucleotide
cgagcucgcagcgc

SEQ ID NO: 10549 - RNA, 14 nt, Artificial Sequence
  Description of Artificial Sequence: Synthetic oligonucleotide
gcgagcucgcagcg

SEQ ID NO: 10550 - RNA, 14 nt, Artificial Sequence
  Description of Artificial Sequence: Synthetic oligonucleotide
ggcgagcucgcagc

SEQ ID NO: 10551 - RNA, 14 nt, Artificial Sequence
  Description of Artificial Sequence: Synthetic oligonucleotide
gggcgagcucgcag

SEQ ID NO: 10552 - RNA, 14 nt, Artificial Sequence
  Description of Artificial Sequence: Synthetic oligonucleotide
agggcgagcucgca

SEQ ID NO: 10553 - RNA, 14 nt, Artificial Sequence
  Description of Artificial Sequence: Synthetic oligonucleotide
gagggcgagcucgc

SEQ ID NO: 10554 - RNA, 14 nt, Artificial Sequence
  Description of Artificial Sequence: Synthetic oligonucleotide
agagggcgagcucg

SEQ ID NO: 10555 - RNA, 14 nt, Artificial Sequence
  Description of Artificial Sequence: Synthetic oligonucleotide
gagagggcgagcuc

SEQ ID NO: 10556 - RNA, 14 nt, Artificial Sequence
  Description of Artificial Sequence: Synthetic oligonucleotide
cgagagggcgagcu

SEQ ID NO: 10557 - DNA, 14 bp, Artificial Sequence
  Description of Artificial Sequence: Synthetic oligonucleotide
gcgagagggcgagc

SEQ ID NO: 10558 - DNA, 14 bp, Artificial Sequence
  Description of Artificial Sequence: Synthetic oligonucleotide
cgcgagagggcgag

SEQ ID NO: 10559 - DNA, 14 bp, Artificial Sequence
  Description of Artificial Sequence: Synthetic oligonucleotide
ccgcgagagggcga

SEQ ID NO: 10560 - DNA, 14 bp, Artificial Sequence
  Description of Artificial Sequence: Synthetic oligonucleotide
gccgcgagagggcg

SEQ ID NO: 10561 - DNA, 14 bp, Artificial Sequence
  Description of Artificial Sequence: Synthetic oligonucleotide
agccgcgagagggc

SEQ ID NO: 10562 - DNA, 14 bp, Artificial Sequence
  Description of Artificial Sequence: Synthetic oligonucleotide
gagccgcgagaggg

SEQ ID NO: 10563 - DNA, 14 bp, Artificial Sequence
  Description of Artificial Sequence: Synthetic oligonucleotide
ggagccgcgagagg

SEQ ID NO: 10564 - DNA, 14 bp, Artificial Sequence
  Description of Artificial Sequence: Synthetic oligonucleotide
gggagccgcgagag

SEQ ID NO: 10565 - DNA, 14 bp, Artificial Sequence
  Description of Artificial Sequence: Synthetic oligonucleotide
agggagccgcgaga

SEQ ID NO: 10566 - DNA, 14 bp, Artificial Sequence
  Description of Artificial Sequence: Synthetic oligonucleotide
cagggagccgcgag

SEQ ID NO: 10567 - DNA, 14 bp, Artificial Sequence
  Description of Artificial Sequence: Synthetic oligonucleotide
ccagggagccgcga

SEQ ID NO: 10568 - DNA, 14 bp, Artificial Sequence
  Description of Artificial Sequence: Synthetic oligonucleotide
gccagggagccgcg

SEQ ID NO: 10569 - DNA, 14 bp, Artificial Sequence
  Description of Artificial Sequence: Synthetic oligonucleotide
ggccagggagccgc

SEQ ID NO: 10570 - DNA, 14 bp, Artificial Sequence
  Description of Artificial Sequence: Synthetic oligonucleotide
gggccagggagccg

SEQ ID NO: 10571 - DNA, 14 bp, Artificial Sequence
  Description of Artificial Sequence: Synthetic oligonucleotide
cgggccagggagcc

SEQ ID NO: 10572 - DNA, 14 bp, Artificial Sequence
  Description of Artificial Sequence: Synthetic oligonucleotide
ccgggccagggagc

SEQ ID NO: 10573 - DNA, 14 bp, Artificial Sequence
  Description of Artificial Sequence: Synthetic oligonucleotide
gccgggccagggag

SEQ ID NO: 10574 - DNA, 14 bp, Artificial Sequence
  Description of Artificial Sequence: Synthetic oligonucleotide
ggccgggccaggga

SEQ ID NO: 10575 - DNA, 14 bp, Artificial Sequence
  Description of Artificial Sequence: Synthetic oligonucleotide
cggccgggccaggg

SEQ ID NO: 10576 - DNA, 14 bp, Artificial Sequence
  Description of Artificial Sequence: Synthetic oligonucleotide
gcggccgggccagg

SEQ ID NO: 10577 - DNA, 14 bp, Artificial Sequence
  Description of Artificial Sequence: Synthetic oligonucleotide
ggcggccgggccag

SEQ ID NO: 10578 - DNA, 14 bp, Artificial Sequence
  Description of Artificial Sequence: Synthetic oligonucleotide
cggcggccgggcca

SEQ ID NO: 10579 - DNA, 14 bp, Artificial Sequence
  Description of Artificial Sequence: Synthetic oligonucleotide
gcggcggccgggcc

SEQ ID NO: 10580 - DNA, 14 bp, Artificial Sequence
  Description of Artificial Sequence: Synthetic oligonucleotide
ggcggcggccgggc

SEQ ID NO: 10581 - DNA, 14 bp, Artificial Sequence
  Description of Artificial Sequence: Synthetic oligonucleotide
cggcggcggccggg

SEQ ID NO: 10582 - DNA, 14 bp, Artificial Sequence
  Description of Artificial Sequence: Synthetic oligonucleotide
gcggcggcggccgg

SEQ ID NO: 10583 - DNA, 14 bp, Artificial Sequence
  Description of Artificial Sequence: Synthetic oligonucleotide
ggcggcggcggccg

SEQ ID NO: 10584 - DNA, 14 bp, Artificial Sequence
  Description of Artificial Sequence: Synthetic oligonucleotide
gggcggcggcggcc

SEQ ID NO: 10585 - DNA, 14 bp, Artificial Sequence
  Description of Artificial Sequence: Synthetic oligonucleotide
ggggcggcggcggc

SEQ ID NO: 10586 - DNA, 14 bp, Artificial Sequence
  Description of Artificial Sequence: Synthetic oligonucleotide
aggggcggcggcgg

SEQ ID NO: 10587 - DNA, 14 bp, Artificial Sequence
  Description of Artificial Sequence: Synthetic oligonucleotide
gaggggcggcggcg

SEQ ID NO: 10588 - DNA, 14 bp, Artificial Sequence
  Description of Artificial Sequence: Synthetic oligonucleotide
agaggggcggcggc

SEQ ID NO: 10589 - DNA, 14 bp, Artificial Sequence
  Description of Artificial Sequence: Synthetic oligonucleotide
gagaggggcggcgg

SEQ ID NO: 10590 - DNA, 14 bp, Artificial Sequence
  Description of Artificial Sequence: Synthetic oligonucleotide
ggagaggggcggcg

SEQ ID NO: 10591 - DNA, 14 bp, Artificial Sequence
  Description of Artificial Sequence: Synthetic oligonucleotide
gggagaggggcggc

SEQ ID NO: 10592 - DNA, 14 bp, Artificial Sequence
  Description of Artificial Sequence: Synthetic oligonucleotide
ggggagaggggcgg

SEQ ID NO: 10593 - DNA, 14 bp, Artificial Sequence
  Description of Artificial Sequence: Synthetic oligonucleotide
cggggagaggggcg

SEQ ID NO: 10594 - DNA, 14 bp, Artificial Sequence
  Description of Artificial Sequence: Synthetic oligonucleotide
gcggggagaggggc

SEQ ID NO: 10595 - DNA, 14 bp, Artificial Sequence
  Description of Artificial Sequence: Synthetic oligonucleotide
ggcggggagagggg

SEQ ID NO: 10596 - DNA, 14 bp, Artificial Sequence
  Description of Artificial Sequence: Synthetic oligonucleotide
gggcggggagaggg

SEQ ID NO: 10597 - RNA, 14 nt, Artificial Sequence
  Description of Artificial Sequence: Synthetic oligonucleotide
ugggcggggagagg

SEQ ID NO: 10598 - RNA, 14 nt, Artificial Sequence
  Description of Artificial Sequence: Synthetic oligonucleotide
cugggcggggagag

SEQ ID NO: 10599 - RNA, 14 nt, Artificial Sequence
  Description of Artificial Sequence: Synthetic oligonucleotide
ucugggcggggaga

SEQ ID NO: 10600 - RNA, 14 nt, Artificial Sequence
  Description of Artificial Sequence: Synthetic oligonucleotide
cucugggcggggag

SEQ ID NO: 10601 - RNA, 14 nt, Artificial Sequence
  Description of Artificial Sequence: Synthetic oligonucleotide
ccucugggcgggga

SEQ ID NO: 10602 - RNA, 14 nt, Artificial Sequence
  Description of Artificial Sequence: Synthetic oligonucleotide
gccucugggcgggg

SEQ ID NO: 10603 - RNA, 14 nt, Artificial Sequence
  Description of Artificial Sequence: Synthetic oligonucleotide
cgccucugggcggg

SEQ ID NO: 10604 - RNA, 14 nt, Artificial Sequence
  Description of Artificial Sequence: Synthetic oligonucleotide
gcgccucugggcgg

SEQ ID NO: 10605 - RNA, 14 nt, Artificial Sequence
  Description of Artificial Sequence: Synthetic oligonucleotide
ggcgccucugggcg

SEQ ID NO: 10606 - RNA, 14 nt, Artificial Sequence
  Description of Artificial Sequence: Synthetic oligonucleotide
gggcgccucugggc

SEQ ID NO: 10607 - RNA, 14 nt, Artificial Sequence
  Description of Artificial Sequence: Synthetic oligonucleotide
ggggcgccucuggg

SEQ ID NO: 10608 - RNA, 14 nt, Artificial Sequence
  Description of Artificial Sequence: Synthetic oligonucleotide
cggggcgccucugg

SEQ ID NO: 10609 - RNA, 14 nt, Artificial Sequence
  Description of Artificial Sequence: Synthetic oligonucleotide
ccggggcgccucug

SEQ ID NO: 10610 - RNA, 14 nt, Artificial Sequence
  Description of Artificial Sequence: Synthetic oligonucleotide
cccggggcgccucu

SEQ ID NO: 10611 - RNA, 14 nt, Artificial Sequence
  Description of Artificial Sequence: Synthetic oligonucleotide
ccccggggcgccuc

SEQ ID NO: 10612 - RNA, 14 nt, Artificial Sequence
  Description of Artificial Sequence: Synthetic oligonucleotide
cccccggggcgccu

SEQ ID NO: 10613 - DNA, 14 bp, Artificial Sequence
  Description of Artificial Sequence: Synthetic oligonucleotide
gcccccggggcgcc

SEQ ID NO: 10614 - RNA, 14 nt, Artificial Sequence
  Description of Artificial Sequence: Synthetic oligonucleotide
ugcccccggggcgc

SEQ ID NO: 10615 - RNA, 14 nt, Artificial Sequence
  Description of Artificial Sequence: Synthetic oligonucleotide
gugcccccggggcg

SEQ ID NO: 10616 - RNA, 14 nt, Artificial Sequence
  Description of Artificial Sequence: Synthetic oligonucleotide
ggugcccccggggc

SEQ ID NO: 10617 - RNA, 14 nt, Artificial Sequence
  Description of Artificial Sequence: Synthetic oligonucleotide
uggugcccccgggg

SEQ ID NO: 10618 - RNA, 14 nt, Artificial Sequence
  Description of Artificial Sequence: Synthetic oligonucleotide
auggugcccccggg

SEQ ID NO: 10619 - RNA, 14 nt, Artificial Sequence
  Description of Artificial Sequence: Synthetic oligonucleotide
cauggugcccccgg

SEQ ID NO: 10620 - RNA, 14 nt, Artificial Sequence
  Description of Artificial Sequence: Synthetic oligonucleotide
gcauggugcccccg

SEQ ID NO: 10621 - RNA, 14 nt, Artificial Sequence
  Description of Artificial Sequence: Synthetic oligonucleotide
ugcauggugccccc

SEQ ID NO: 10622 - RNA, 14 nt, Artificial Sequence
  Description of Artificial Sequence: Synthetic oligonucleotide
cugcauggugcccc

SEQ ID NO: 10623 - RNA, 14 nt, Artificial Sequence
  Description of Artificial Sequence: Synthetic oligonucleotide
ccugcauggugccc

SEQ ID NO: 10624 - RNA, 14 nt, Artificial Sequence
  Description of Artificial Sequence: Synthetic oligonucleotide
gccugcauggugcc

SEQ ID NO: 10625 - RNA, 14 nt, Artificial Sequence
  Description of Artificial Sequence: Synthetic oligonucleotide
cgccugcauggugc

SEQ ID NO: 10626 - RNA, 14 nt, Artificial Sequence
  Description of Artificial Sequence: Synthetic oligonucleotide
gcgccugcauggug

SEQ ID NO: 10627 - RNA, 14 nt, Artificial Sequence
  Description of Artificial Sequence: Synthetic oligonucleotide
ugcgccugcauggu

SEQ ID NO: 10628 - RNA, 14 nt, Artificial Sequence
  Description of Artificial Sequence: Synthetic oligonucleotide
cugcgccugcaugg

SEQ ID NO: 10629 - RNA, 14 nt, Artificial Sequence
  Description of Artificial Sequence: Synthetic oligonucleotide
gcugcgccugcaug

SEQ ID NO: 10630 - RNA, 14 nt, Artificial Sequence
  Description of Artificial Sequence: Synthetic oligonucleotide
ugcugcgccugcau

SEQ ID NO: 10631 - RNA, 14 nt, Artificial Sequence
  Description of Artificial Sequence: Synthetic oligonucleotide
cugcugcgccugca

SEQ ID NO: 10632 - RNA, 14 nt, Artificial Sequence
  Description of Artificial Sequence: Synthetic oligonucleotide
gcugcugcgccugc

SEQ ID NO: 10633 - RNA, 14 nt, Artificial Sequence
  Description of Artificial Sequence: Synthetic oligonucleotide
agcugcugcgccug

SEQ ID NO: 10634 - RNA, 14 nt, Artificial Sequence
  Description of Artificial Sequence: Synthetic oligonucleotide
cagcugcugcgccu

SEQ ID NO: 10635 - RNA, 14 nt, Artificial Sequence
  Description of Artificial Sequence: Synthetic oligonucleotide
gcagcugcugcgcc

SEQ ID NO: 10636 - RNA, 14 nt, Artificial Sequence
  Description of Artificial Sequence: Synthetic oligonucleotide
ggcagcugcugcgc

SEQ ID NO: 10637 - RNA, 14 nt, Artificial Sequence
  Description of Artificial Sequence: Synthetic oligonucleotide
gggcagcugcugcg

SEQ ID NO: 10638 - RNA, 14 nt, Artificial Sequence
  Description of Artificial Sequence: Synthetic oligonucleotide
agggcagcugcugc

SEQ ID NO: 10639 - RNA, 14 nt, Artificial Sequence
  Description of Artificial Sequence: Synthetic oligonucleotide
uagggcagcugcug

SEQ ID NO: 10640 - RNA, 14 nt, Artificial Sequence
  Description of Artificial Sequence: Synthetic oligonucleotide
guagggcagcugcu

SEQ ID NO: 10641 - RNA, 14 nt, Artificial Sequence
  Description of Artificial Sequence: Synthetic oligonucleotide
cguagggcagcugc

SEQ ID NO: 10642 - RNA, 14 nt, Artificial Sequence
  Description of Artificial Sequence: Synthetic oligonucleotide
ucguagggcagcug

SEQ ID NO: 10643 - RNA, 14 nt, Artificial Sequence
  Description of Artificial Sequence: Synthetic oligonucleotide
cucguagggcagcu

SEQ ID NO: 10644 - RNA, 14 nt, Artificial Sequence
  Description of Artificial Sequence: Synthetic oligonucleotide
acucguagggcagc

SEQ ID NO: 10645 - RNA, 14 nt, Artificial Sequence
  Description of Artificial Sequence: Synthetic oligonucleotide
aacucguagggcag

SEQ ID NO: 10646 - RNA, 14 nt, Artificial Sequence
  Description of Artificial Sequence: Synthetic oligonucleotide
aaacucguagggca

SEQ ID NO: 10647 - RNA, 14 nt, Artificial Sequence
  Description of Artificial Sequence: Synthetic oligonucleotide
aaaacucguagggc

SEQ ID NO: 10648 - RNA, 14 nt, Artificial Sequence
  Description of Artificial Sequence: Synthetic oligonucleotide
aaaaacucguaggg

SEQ ID NO: 10649 - RNA, 14 nt, Artificial Sequence
  Description of Artificial Sequence: Synthetic oligonucleotide
gaaaaacucguagg

SEQ ID NO: 10650 - RNA, 14 nt, Artificial Sequence
  Description of Artificial Sequence: Synthetic oligonucleotide
ugaaaaacucguag

SEQ ID NO: 10651 - RNA, 14 nt, Artificial Sequence
  Description of Artificial Sequence: Synthetic oligonucleotide
cugaaaaacucgua

SEQ ID NO: 10652 - RNA, 14 nt, Artificial Sequence
  Description of Artificial Sequence: Synthetic oligonucleotide
gcugaaaaacucgu

SEQ ID NO: 10653 - RNA, 14 nt, Artificial Sequence
  Description of Artificial Sequence: Synthetic oligonucleotide
cgcugaaaaacucg

SEQ ID NO: 10654 - RNA, 14 nt, Artificial Sequence
  Description of Artificial Sequence: Synthetic oligonucleotide
ucgcugaaaaacuc

SEQ ID NO: 10655 - RNA, 14 nt, Artificial Sequence
  Description of Artificial Sequence: Synthetic oligonucleotide
uucgcugaaaaacu

SEQ ID NO: 10656 - RNA, 14 nt, Artificial Sequence
  Description of Artificial Sequence: Synthetic oligonucleotide
cuucgcugaaaaac

SEQ ID NO: 10657 - RNA, 14 nt, Artificial Sequence
  Description of Artificial Sequence: Synthetic oligonucleotide
ucuucgcugaaaaa

SEQ ID NO: 10658 - RNA, 14 nt, Artificial Sequence
  Description of Artificial Sequence: Synthetic oligonucleotide
cucuucgcugaaaa

SEQ ID NO: 10659 - RNA, 14 nt, Artificial Sequence
  Description of Artificial Sequence: Synthetic oligonucleotide
ucucuucgcugaaa

SEQ ID NO: 10660 - RNA, 14 nt, Artificial Sequence
  Description of Artificial Sequence: Synthetic oligonucleotide
uucucuucgcugaa

SEQ ID NO: 10661 - RNA, 14 nt, Artificial Sequence
  Description of Artificial Sequence: Synthetic oligonucleotide
guucucuucgcuga

SEQ ID NO: 10662 - RNA, 14 nt, Artificial Sequence
  Description of Artificial Sequence: Synthetic oligonucleotide
cguucucuucgcug

SEQ ID NO: 10663 - RNA, 14 nt, Artificial Sequence
  Description of Artificial Sequence: Synthetic oligonucleotide
gcguucucuucgcu

SEQ ID NO: 10664 - RNA, 14 nt, Artificial Sequence
  Description of Artificial Sequence: Synthetic oligonucleotide
cgcguucucuucgc

SEQ ID NO: 10665 - RNA, 14 nt, Artificial Sequence
  Description of Artificial Sequence: Synthetic oligonucleotide
gcgcguucucuucg

SEQ ID NO: 10666 - RNA, 14 nt, Artificial Sequence
  Description of Artificial Sequence: Synthetic oligonucleotide
ggcgcguucucuuc

SEQ ID NO: 10667 - RNA, 14 nt, Artificial Sequence
  Description of Artificial Sequence: Synthetic oligonucleotide
gggcgcguucucuu

SEQ ID NO: 10668 - RNA, 14 nt, Artificial Sequence
  Description of Artificial Sequence: Synthetic oligonucleotide
ugggcgcguucucu

SEQ ID NO: 10669 - RNA, 14 nt, Artificial Sequence
  Description of Artificial Sequence: Synthetic oligonucleotide
uugggcgcguucuc

SEQ ID NO: 10670 - RNA, 14 nt, Artificial Sequence
  Description of Artificial Sequence: Synthetic oligonucleotide
cuugggcgcguucu

SEQ ID NO: 10671 - RNA, 14 nt, Artificial Sequence
  Description of Artificial Sequence: Synthetic oligonucleotide
acuugggcgcguuc

SEQ ID NO: 10672 - RNA, 14 nt, Artificial Sequence
  Description of Artificial Sequence: Synthetic oligonucleotide
cacuugggcgcguu

SEQ ID NO: 10673 - RNA, 14 nt, Artificial Sequence
  Description of Artificial Sequence: Synthetic oligonucleotide
ccacuugggcgcgu

SEQ ID NO: 10674 - RNA, 14 nt, Artificial Sequence
  Description of Artificial Sequence: Synthetic oligonucleotide
gccacuugggcgcg

SEQ ID NO: 10675 - RNA, 14 nt, Artificial Sequence
  Description of Artificial Sequence: Synthetic oligonucleotide
cgccacuugggcgc

SEQ ID NO: 10676 - RNA, 14 nt, Artificial Sequence
  Description of Artificial Sequence: Synthetic oligonucleotide
ccgccacuugggcg

SEQ ID NO: 10677 - RNA, 14 nt, Artificial Sequence
  Description of Artificial Sequence: Synthetic oligonucleotide
cccgccacuugggc

SEQ ID NO: 10678 - RNA, 14 nt, Artificial Sequence
  Description of Artificial Sequence: Synthetic oligonucleotide
ccccgccacuuggg

SEQ ID NO: 10679 - RNA, 14 nt, Artificial Sequence
  Description of Artificial Sequence: Synthetic oligonucleotide
uccccgccacuugg

SEQ ID NO: 10680 - RNA, 14 nt, Artificial Sequence
  Description of Artificial Sequence: Synthetic oligonucleotide
guccccgccacuug

SEQ ID NO: 10681 - RNA, 14 nt, Artificial Sequence
  Description of Artificial Sequence: Synthetic oligonucleotide
aguccccgccacuu

SEQ ID NO: 10682 - RNA, 14 nt, Artificial Sequence
  Description of Artificial Sequence: Synthetic oligonucleotide
uaguccccgccacu

SEQ ID NO: 10683 - RNA, 14 nt, Artificial Sequence
  Description of Artificial Sequence: Synthetic oligonucleotide
guaguccccgccac

SEQ ID NO: 10684 - RNA, 14 nt, Artificial Sequence
  Description of Artificial Sequence: Synthetic oligonucleotide
aguaguccccgcca

SEQ ID NO: 10685 - RNA, 14 nt, Artificial Sequence
  Description of Artificial Sequence: Synthetic oligonucleotide
caguaguccccgcc

SEQ ID NO: 10686 - RNA, 14 nt, Artificial Sequence
  Description of Artificial Sequence: Synthetic oligonucleotide
ccaguaguccccgc

SEQ ID NO: 10687 - RNA, 14 nt, Artificial Sequence
  Description of Artificial Sequence: Synthetic oligonucleotide
accaguaguccccg

SEQ ID NO: 10688 - RNA, 14 nt, Artificial Sequence
  Description of Artificial Sequence: Synthetic oligonucleotide
caccaguagucccc

SEQ ID NO: 10689 - RNA, 14 nt, Artificial Sequence
  Description of Artificial Sequence: Synthetic oligonucleotide
gcaccaguaguccc

SEQ ID NO: 10690 - RNA, 14 nt, Artificial Sequence
  Description of Artificial Sequence: Synthetic oligonucleotide
ggcaccaguagucc

SEQ ID NO: 10691 - RNA, 14 nt, Artificial Sequence
  Description of Artificial Sequence: Synthetic oligonucleotide
aggcaccaguaguc

SEQ ID NO: 10692 - RNA, 14 nt, Artificial Sequence
  Description of Artificial Sequence: Synthetic oligonucleotide
caggcaccaguagu

SEQ ID NO: 10693 - RNA, 14 nt, Artificial Sequence
  Description of Artificial Sequence: Synthetic oligonucleotide
gcaggcaccaguag

SEQ ID NO: 10694 - RNA, 14 nt, Artificial Sequence
  Description of Artificial Sequence: Synthetic oligonucleotide
cgcaggcaccagua

SEQ ID NO: 10695 - RNA, 14 nt, Artificial Sequence
  Description of Artificial Sequence: Synthetic oligonucleotide
gcgcaggcaccagu

SEQ ID NO: 10696 - DNA, 14 bp, Artificial Sequence
  Description of Artificial Sequence: Synthetic oligonucleotide
agcgcaggcaccag

SEQ ID NO: 10697 - DNA, 14 bp, Artificial Sequence
  Description of Artificial Sequence: Synthetic oligonucleotide
cagcgcaggcacca

SEQ ID NO: 10698 - RNA, 14 nt, Artificial Sequence
  Description of Artificial Sequence: Synthetic oligonucleotide
ucagcgcaggcacc

SEQ ID NO: 10699 - RNA, 14 nt, Artificial Sequence
  Description of Artificial Sequence: Synthetic oligonucleotide
uucagcgcaggcac

SEQ ID NO: 10700 - RNA, 14 nt, Artificial Sequence
  Description of Artificial Sequence: Synthetic oligonucleotide
uuucagcgcaggca

SEQ ID NO: 10701 - RNA, 14 nt, Artificial Sequence
  Description of Artificial Sequence: Synthetic oligonucleotide
uuuucagcgcaggc

SEQ ID NO: 10702 - RNA, 14 nt, Artificial Sequence
  Description of Artificial Sequence: Synthetic oligonucleotide
uuuuucagcgcagg

SEQ ID NO: 10703 - RNA, 14 nt, Artificial Sequence
  Description of Artificial Sequence: Synthetic oligonucleotide
cuuuuucagcgcag

SEQ ID NO: 10704 - RNA, 14 nt, Artificial Sequence
  Description of Artificial Sequence: Synthetic oligonucleotide
ccuuuuucagcgca

SEQ ID NO: 10705 - RNA, 14 nt, Artificial Sequence
  Description of Artificial Sequence: Synthetic oligonucleotide
accuuuuucagcgc

SEQ ID NO: 10706 - RNA, 14 nt, Artificial Sequence
  Description of Artificial Sequence: Synthetic oligonucleotide
gaccuuuuucagcg

SEQ ID NO: 10707 - RNA, 14 nt, Artificial Sequence
  Description of Artificial Sequence: Synthetic oligonucleotide
ggaccuuuuucagc

SEQ ID NO: 10708 - RNA, 14 nt, Artificial Sequence
  Description of Artificial Sequence: Synthetic oligonucleotide
uggaccuuuuucag

SEQ ID NO: 10709 - RNA, 14 nt, Artificial Sequence
  Description of Artificial Sequence: Synthetic oligonucleotide
cuggaccuuuuuca

SEQ ID NO: 10710 - RNA, 14 nt, Artificial Sequence
  Description of Artificial Sequence: Synthetic oligonucleotide
ccuggaccuuuuuc

SEQ ID NO: 10711 - RNA, 14 nt, Artificial Sequence
  Description of Artificial Sequence: Synthetic oligonucleotide
cccuggaccuuuuu

SEQ ID NO: 10712 - RNA, 14 nt, Artificial Sequence
  Description of Artificial Sequence: Synthetic oligonucleotide
ccccuggaccuuuu

SEQ ID NO: 10713 - RNA, 14 nt, Artificial Sequence
  Description of Artificial Sequence: Synthetic oligonucleotide
gccccuggaccuuu

SEQ ID NO: 10714 - RNA, 14 nt, Artificial Sequence
  Description of Artificial Sequence: Synthetic oligonucleotide
ugccccuggaccuu

SEQ ID NO: 10715 - RNA, 14 nt, Artificial Sequence
  Description of Artificial Sequence: Synthetic oligonucleotide
uugccccuggaccu

SEQ ID NO: 10716 - RNA, 14 nt, Artificial Sequence
  Description of Artificial Sequence: Synthetic oligonucleotide
cuugccccuggacc

SEQ ID NO: 10717 - RNA, 14 nt, Artificial Sequence
  Description of Artificial Sequence: Synthetic oligonucleotide
acuugccccuggac

SEQ ID NO: 10718 - RNA, 14 nt, Artificial Sequence
  Description of Artificial Sequence: Synthetic oligonucleotide
aacuugccccugga

SEQ ID NO: 10719 - RNA, 14 nt, Artificial Sequence
  Description of Artificial Sequence: Synthetic oligonucleotide
gaacuugccccugg

SEQ ID NO: 10720 - RNA, 14 nt, Artificial Sequence
  Description of Artificial Sequence: Synthetic oligonucleotide
ugaacuugccccug

SEQ ID NO: 10721 - RNA, 14 nt, Artificial Sequence
  Description of Artificial Sequence: Synthetic oligonucleotide
augaacuugccccu

SEQ ID NO: 10722 - RNA, 14 nt, Artificial Sequence
  Description of Artificial Sequence: Synthetic oligonucleotide
gaugaacuugcccc

SEQ ID NO: 10723 - RNA, 14 nt, Artificial Sequence
  Description of Artificial Sequence: Synthetic oligonucleotide
ggaugaacuugccc

SEQ ID NO: 10724 - RNA, 14 nt, Artificial Sequence
  Description of Artificial Sequence: Synthetic oligonucleotide
aggaugaacuugcc

SEQ ID NO: 10725 - RNA, 14 nt, Artificial Sequence
  Description of Artificial Sequence: Synthetic oligonucleotide
uaggaugaacuugc

SEQ ID NO: 10726 - RNA, 14 nt, Artificial Sequence
  Description of Artificial Sequence: Synthetic oligonucleotide
guaggaugaacuug

SEQ ID NO: 10727 - RNA, 14 nt, Artificial Sequence
  Description of Artificial Sequence: Synthetic oligonucleotide
aguaggaugaacuu

SEQ ID NO: 10728 - RNA, 14 nt, Artificial Sequence
  Description of Artificial Sequence: Synthetic oligonucleotide
gaguaggaugaacu

SEQ ID NO: 10729 - RNA, 14 nt, Artificial Sequence
  Description of Artificial Sequence: Synthetic oligonucleotide
agaguaggaugaac

SEQ ID NO: 10730 - RNA, 14 nt, Artificial Sequence
  Description of Artificial Sequence: Synthetic oligonucleotide
gagaguaggaugaa

SEQ ID NO: 10731 - RNA, 14 nt, Artificial Sequence
  Description of Artificial Sequence: Synthetic oligonucleotide
cgagaguaggauga

SEQ ID NO: 10732 - RNA, 14 nt, Artificial Sequence
  Description of Artificial Sequence: Synthetic oligonucleotide
ucgagaguaggaug

SEQ ID NO: 10733 - RNA, 14 nt, Artificial Sequence
  Description of Artificial Sequence: Synthetic oligonucleotide
cucgagaguaggau

SEQ ID NO: 10734 - RNA, 14 nt, Artificial Sequence
  Description of Artificial Sequence: Synthetic oligonucleotide
acucgagaguagga

SEQ ID NO: 10735 - RNA, 14 nt, Artificial Sequence
  Description of Artificial Sequence: Synthetic oligonucleotide
gacucgagaguagg

SEQ ID NO: 10736 - RNA, 14 nt, Artificial Sequence
  Description of Artificial Sequence: Synthetic oligonucleotide
agacucgagaguag

SEQ ID NO: 10737 - RNA, 14 nt, Artificial Sequence
  Description of Artificial Sequence: Synthetic oligonucleotide
uagacucgagagua

SEQ ID NO: 10738 - RNA, 14 nt, Artificial Sequence
  Description of Artificial Sequence: Synthetic oligonucleotide
uuagacucgagagu

SEQ ID NO: 10739 - RNA, 14 nt, Artificial Sequence
  Description of Artificial Sequence: Synthetic oligonucleotide
auuagacucgagag

SEQ ID NO: 10740 - RNA, 14 nt, Artificial Sequence
  Description of Artificial Sequence: Synthetic oligonucleotide
cauuagacucgaga

SEQ ID NO: 10741 - RNA, 14 nt, Artificial Sequence
  Description of Artificial Sequence: Synthetic oligonucleotide
ucauuagacucgag

SEQ ID NO: 10742 - RNA, 14 nt, Artificial Sequence
  Description of Artificial Sequence: Synthetic oligonucleotide
aucauuagacucga

SEQ ID NO: 10743 - RNA, 14 nt, Artificial Sequence
  Description of Artificial Sequence: Synthetic oligonucleotide
caucauuagacucg

SEQ ID NO: 10744 - RNA, 14 nt, Artificial Sequence
  Description of Artificial Sequence: Synthetic oligonucleotide
ucaucauuagacuc

SEQ ID NO: 10745 - RNA, 14 nt, Artificial Sequence
  Description of Artificial Sequence: Synthetic oligonucleotide
aucaucauuagacu

SEQ ID NO: 10746 - RNA, 14 nt, Artificial Sequence
  Description of Artificial Sequence: Synthetic oligonucleotide
caucaucauuagac

SEQ ID NO: 10747 - RNA, 14 nt, Artificial Sequence
  Description of Artificial Sequence: Synthetic oligonucleotide
gcaucaucauuaga

SEQ ID NO: 10748 - RNA, 14 nt, Artificial Sequence
  Description of Artificial Sequence: Synthetic oligonucleotide
agcaucaucauuag

SEQ ID NO: 10749 - RNA, 14 nt, Artificial Sequence
  Description of Artificial Sequence: Synthetic oligonucleotide
gagcaucaucauua

SEQ ID NO: 10750 - RNA, 14 nt, Artificial Sequence
  Description of Artificial Sequence: Synthetic oligonucleotide
agagcaucaucauu

SEQ ID NO: 10751 - RNA, 14 nt, Artificial Sequence
  Description of Artificial Sequence: Synthetic oligonucleotide
uuucauaaugccgg

SEQ ID NO: 10752 - RNA, 14 nt, Artificial Sequence
  Description of Artificial Sequence: Synthetic oligonucleotide
gaagagcaucauca

SEQ ID NO: 10753 - RNA, 14 nt, Artificial Sequence
  Description of Artificial Sequence: Synthetic oligonucleotide
ugaagagcaucauc

SEQ ID NO: 10754 - RNA, 14 nt, Artificial Sequence
  Description of Artificial Sequence: Synthetic oligonucleotide
cugaagagcaucau

SEQ ID NO: 10755 - RNA, 14 nt, Artificial Sequence
  Description of Artificial Sequence: Synthetic oligonucleotide
acugaagagcauca

SEQ ID NO: 10756 - RNA, 14 nt, Artificial Sequence
  Description of Artificial Sequence: Synthetic oligonucleotide
uacugaagagcauc

SEQ ID NO: 10757 - RNA, 14 nt, Artificial Sequence
  Description of Artificial Sequence: Synthetic oligonucleotide
auacugaagagcau

SEQ ID NO: 10758 - RNA, 14 nt, Artificial Sequence
  Description of Artificial Sequence: Synthetic oligonucleotide
cauacugaagagca

SEQ ID NO: 10759 - RNA, 14 nt, Artificial Sequence
  Description of Artificial Sequence: Synthetic oligonucleotide
acauacugaagagc

SEQ ID NO: 10760 - RNA, 14 nt, Artificial Sequence
  Description of Artificial Sequence: Synthetic oligonucleotide
aacauacugaagag

SEQ ID NO: 10761 - RNA, 14 nt, Artificial Sequence
  Description of Artificial Sequence: Synthetic oligonucleotide
caacauacugaaga

SEQ ID NO: 10762 - RNA, 14 nt, Artificial Sequence
  Description of Artificial Sequence: Synthetic oligonucleotide
ucaacauacugaag

SEQ ID NO: 10763 - RNA, 14 nt, Artificial Sequence
  Description of Artificial Sequence: Synthetic oligonucleotide
uucaacauacugaa

SEQ ID NO: 10764 - RNA, 14 nt, Artificial Sequence
  Description of Artificial Sequence: Synthetic oligonucleotide
cuucaacauacuga

SEQ ID NO: 10765 - RNA, 14 nt, Artificial Sequence
  Description of Artificial Sequence: Synthetic oligonucleotide
ucuucaacauacug

SEQ ID NO: 10766 - RNA, 14 nt, Artificial Sequence
  Description of Artificial Sequence: Synthetic oligonucleotide
uucuucaacauacu

SEQ ID NO: 10767 - RNA, 14 nt, Artificial Sequence
  Description of Artificial Sequence: Synthetic oligonucleotide
auucuucaacauac

SEQ ID NO: 10768 - RNA, 14 nt, Artificial Sequence
  Description of Artificial Sequence: Synthetic oligonucleotide
aauucuucaacaua

SEQ ID NO: 10769 - RNA, 14 nt, Artificial Sequence
  Description of Artificial Sequence: Synthetic oligonucleotide
uaauucuucaacau

SEQ ID NO: 10770 - RNA, 14 nt, Artificial Sequence
  Description of Artificial Sequence: Synthetic oligonucleotide
uuaauucuucaaca

SEQ ID NO: 10771 - RNA, 14 nt, Artificial Sequence
  Description of Artificial Sequence: Synthetic oligonucleotide
auuaauucuucaac

SEQ ID NO: 10772 - RNA, 14 nt, Artificial Sequence
  Description of Artificial Sequence: Synthetic oligonucleotide
aauuaauucuucaa

SEQ ID NO: 10773 - RNA, 14 nt, Artificial Sequence
  Description of Artificial Sequence: Synthetic oligonucleotide
aaauuaauucuuca

SEQ ID NO: 10774 - RNA, 14 nt, Artificial Sequence
  Description of Artificial Sequence: Synthetic oligonucleotide
aaaauuaauucuuc

SEQ ID NO: 10775 - RNA, 14 nt, Artificial Sequence
  Description of Artificial Sequence: Synthetic oligonucleotide
caaaauuaauucuu

SEQ ID NO: 10776 - RNA, 14 nt, Artificial Sequence
  Description of Artificial Sequence: Synthetic oligonucleotide
gcaaaauuaauucu

SEQ ID NO: 10777 - RNA, 14 nt, Artificial Sequence
  Description of Artificial Sequence: Synthetic oligonucleotide
ugcaaaauuaauuc

SEQ ID NO: 10778 - RNA, 14 nt, Artificial Sequence
  Description of Artificial Sequence: Synthetic oligonucleotide
uugcaaaauuaauu

SEQ ID NO: 10779 - RNA, 14 nt, Artificial Sequence
  Description of Artificial Sequence: Synthetic oligonucleotide
auugcaaaauuaau

SEQ ID NO: 10780 - RNA, 14 nt, Artificial Sequence
  Description of Artificial Sequence: Synthetic oligonucleotide
aauugcaaaauuaa

SEQ ID NO: 10781 - RNA, 14 nt, Artificial Sequence
  Description of Artificial Sequence: Synthetic oligonucleotide
uaauugcaaaauua

SEQ ID NO: 10782 - RNA, 14 nt, Artificial Sequence
  Description of Artificial Sequence: Synthetic oligonucleotide
auaauugcaaaauu

SEQ ID NO: 10783 - RNA, 14 nt, Artificial Sequence
  Description of Artificial Sequence: Synthetic oligonucleotide
aauaauugcaaaau

SEQ ID NO: 10784 - RNA, 14 nt, Artificial Sequence
  Description of Artificial Sequence: Synthetic oligonucleotide
uaauaauugcaaaa

SEQ ID NO: 10785 - RNA, 14 nt, Artificial Sequence
  Description of Artificial Sequence: Synthetic oligonucleotide
uuaauaauugcaaa

SEQ ID NO: 10786 - RNA, 14 nt, Artificial Sequence
  Description of Artificial Sequence: Synthetic oligonucleotide
uuuaauaauugcaa

SEQ ID NO: 10787 - RNA, 14 nt, Artificial Sequence
  Description of Artificial Sequence: Synthetic oligonucleotide
auuuaauaauugca

SEQ ID NO: 10788 - RNA, 14 nt, Artificial Sequence
  Description of Artificial Sequence: Synthetic oligonucleotide
uauuuaauaauugc

SEQ ID NO: 10789 - RNA, 14 nt, Artificial Sequence
  Description of Artificial Sequence: Synthetic oligonucleotide
auauuuaauaauug

SEQ ID NO: 10790 - RNA, 14 nt, Artificial Sequence
  Description of Artificial Sequence: Synthetic oligonucleotide
cauauuuaauaauu

SEQ ID NO: 10791 - RNA, 14 nt, Artificial Sequence
  Description of Artificial Sequence: Synthetic oligonucleotide
gcauauuuaauaau

SEQ ID NO: 10792 - RNA, 14 nt, Artificial Sequence
  Description of Artificial Sequence: Synthetic oligonucleotide
agcauauuuaauaa

SEQ ID NO: 10793 - RNA, 14 nt, Artificial Sequence
  Description of Artificial Sequence: Synthetic oligonucleotide
uagcauauuuaaua

SEQ ID NO: 10794 - RNA, 14 nt, Artificial Sequence
  Description of Artificial Sequence: Synthetic oligonucleotide
auagcauauuuaau

SEQ ID NO: 10795 - RNA, 14 nt, Artificial Sequence
  Description of Artificial Sequence: Synthetic oligonucleotide
cauagcauauuuaa

SEQ ID NO: 10796 - RNA, 14 nt, Artificial Sequence
  Description of Artificial Sequence: Synthetic oligonucleotide
gcauagcauauuua

SEQ ID NO: 10797 - RNA, 14 nt, Artificial Sequence
  Description of Artificial Sequence: Synthetic oligonucleotide
ggcauagcauauuu

SEQ ID NO: 10798 - RNA, 14 nt, Artificial Sequence
  Description of Artificial Sequence: Synthetic oligonucleotide
uggcauagcauauu

SEQ ID NO: 10799 - RNA, 14 nt, Artificial Sequence
  Description of Artificial Sequence: Synthetic oligonucleotide
uuggcauagcauau

SEQ ID NO: 10800 - RNA, 14 nt, Artificial Sequence
  Description of Artificial Sequence: Synthetic oligonucleotide
cuuggcauagcaua

SEQ ID NO: 10801 - RNA, 14 nt, Artificial Sequence
  Description of Artificial Sequence: Synthetic oligonucleotide
gcuuggcauagcau

SEQ ID NO: 10802 - RNA, 14 nt, Artificial Sequence
  Description of Artificial Sequence: Synthetic oligonucleotide
agcuuggcauagca

SEQ ID NO: 10803 - RNA, 14 nt, Artificial Sequence
  Description of Artificial Sequence: Synthetic oligonucleotide
gagcuuggcauagc

SEQ ID NO: 10804 - RNA, 14 nt, Artificial Sequence
  Description of Artificial Sequence: Synthetic oligonucleotide
ugagcuuggcauag

SEQ ID NO: 10805 - RNA, 14 nt, Artificial Sequence
  Description of Artificial Sequence: Synthetic oligonucleotide
cugagcuuggcaua

SEQ ID NO: 10806 - RNA, 14 nt, Artificial Sequence
  Description of Artificial Sequence: Synthetic oligonucleotide
gcugagcuuggcau

SEQ ID NO: 10807 - RNA, 14 nt, Artificial Sequence
  Description of Artificial Sequence: Synthetic oligonucleotide
ggcugagcuuggca

SEQ ID NO: 10808 - RNA, 14 nt, Artificial Sequence
  Description of Artificial Sequence: Synthetic oligonucleotide
gggcugagcuuggc

SEQ ID NO: 10809 - RNA, 14 nt, Artificial Sequence
  Description of Artificial Sequence: Synthetic oligonucleotide
ggggcugagcuugg

SEQ ID NO: 10810 - RNA, 14 nt, Artificial Sequence
  Description of Artificial Sequence: Synthetic oligonucleotide
cggggcugagcuug

SEQ ID NO: 10811 - RNA, 14 nt, Artificial Sequence
  Description of Artificial Sequence: Synthetic oligonucleotide
ucggggcugagcuu

SEQ ID NO: 10812 - RNA, 14 nt, Artificial Sequence
  Description of Artificial Sequence: Synthetic oligonucleotide
uucggggcugagcu

SEQ ID NO: 10813 - RNA, 14 nt, Artificial Sequence
  Description of Artificial Sequence: Synthetic oligonucleotide
cuucggggcugagc

SEQ ID NO: 10814 - RNA, 14 nt, Artificial Sequence
  Description of Artificial Sequence: Synthetic oligonucleotide
acuucggggcugag

SEQ ID NO: 10815 - RNA, 14 nt, Artificial Sequence
  Description of Artificial Sequence: Synthetic oligonucleotide
cacuucggggcuga

SEQ ID NO: 10816 - RNA, 14 nt, Artificial Sequence
  Description of Artificial Sequence: Synthetic oligonucleotide
gcacuucggggcug

SEQ ID NO: 10817 - RNA, 14 nt, Artificial Sequence
  Description of Artificial Sequence: Synthetic oligonucleotide
agcacuucggggcu

SEQ ID NO: 10818 - RNA, 14 nt, Artificial Sequence
  Description of Artificial Sequence: Synthetic oligonucleotide
aagcacuucggggc

SEQ ID NO: 10819 - RNA, 14 nt, Artificial Sequence
  Description of Artificial Sequence: Synthetic oligonucleotide
gaagcacuucgggg

SEQ ID NO: 10820 - RNA, 14 nt, Artificial Sequence
  Description of Artificial Sequence: Synthetic oligonucleotide
ugaagcacuucggg

SEQ ID NO: 10821 - RNA, 14 nt, Artificial Sequence
  Description of Artificial Sequence: Synthetic oligonucleotide
cugaagcacuucgg

SEQ ID NO: 10822 - RNA, 14 nt, Artificial Sequence
  Description of Artificial Sequence: Synthetic oligonucleotide
ucugaagcacuucg

SEQ ID NO: 10823 - RNA, 14 nt, Artificial Sequence
  Description of Artificial Sequence: Synthetic oligonucleotide
aucugaagcacuuc

SEQ ID NO: 10824 - RNA, 14 nt, Artificial Sequence
  Description of Artificial Sequence: Synthetic oligonucleotide
caucugaagcacuu

SEQ ID NO: 10825 - RNA, 14 nt, Artificial Sequence
  Description of Artificial Sequence: Synthetic oligonucleotide
acaucugaagcacu

SEQ ID NO: 10826 - RNA, 14 nt, Artificial Sequence
  Description of Artificial Sequence: Synthetic oligonucleotide
uacaucugaagcac

SEQ ID NO: 10827 - RNA, 14 nt, Artificial Sequence
  Description of Artificial Sequence: Synthetic oligonucleotide
cuacaucugaagca

SEQ ID NO: 10828 - RNA, 14 nt, Artificial Sequence
  Description of Artificial Sequence: Synthetic oligonucleotide
ucuacaucugaagc

SEQ ID NO: 10829 - RNA, 14 nt, Artificial Sequence
  Description of Artificial Sequence: Synthetic oligonucleotide
cucuacaucugaag

SEQ ID NO: 10830 - RNA, 14 nt, Artificial Sequence
  Description of Artificial Sequence: Synthetic oligonucleotide
ccucuacaucugaa

SEQ ID NO: 10831 - RNA, 14 nt, Artificial Sequence
  Description of Artificial Sequence: Synthetic oligonucleotide
uccucuacaucuga

SEQ ID NO: 10832 - RNA, 14 nt, Artificial Sequence
  Description of Artificial Sequence: Synthetic oligonucleotide
uuccucuacaucug

SEQ ID NO: 10833 - RNA, 14 nt, Artificial Sequence
  Description of Artificial Sequence: Synthetic oligonucleotide
guuccucuacaucu

SEQ ID NO: 10834 - RNA, 14 nt, Artificial Sequence
  Description of Artificial Sequence: Synthetic oligonucleotide
cguuccucuacauc

SEQ ID NO: 10835 - RNA, 14 nt, Artificial Sequence
  Description of Artificial Sequence: Synthetic oligonucleotide
acguuccucuacau

SEQ ID NO: 10836 - RNA, 14 nt, Artificial Sequence
  Description of Artificial Sequence: Synthetic oligonucleotide
cacguuccucuaca

SEQ ID NO: 10837 - RNA, 14 nt, Artificial Sequence
  Description of Artificial Sequence: Synthetic oligonucleotide
acacguuccucuac

SEQ ID NO: 10838 - RNA, 14 nt, Artificial Sequence
  Description of Artificial Sequence: Synthetic oligonucleotide
aacacguuccucua

SEQ ID NO: 10839 - RNA, 14 nt, Artificial Sequence
  Description of Artificial Sequence: Synthetic oligonucleotide
gaacacguuccucu

SEQ ID NO: 10840 - RNA, 14 nt, Artificial Sequence
  Description of Artificial Sequence: Synthetic oligonucleotide
ugaacacguuccuc

SEQ ID NO: 10841 - RNA, 14 nt, Artificial Sequence
  Description of Artificial Sequence: Synthetic oligonucleotide
uugaacacguuccu

SEQ ID NO: 10842 - RNA, 14 nt, Artificial Sequence
  Description of Artificial Sequence: Synthetic oligonucleotide
uuugaacacguucc

SEQ ID NO: 10843 - RNA, 14 nt, Artificial Sequence
  Description of Artificial Sequence: Synthetic oligonucleotide
uuuugaacacguuc

SEQ ID NO: 10844 - RNA, 14 nt, Artificial Sequence
  Description of Artificial Sequence: Synthetic oligonucleotide
uuuuugaacacguu

SEQ ID NO: 10845 - RNA, 14 nt, Artificial Sequence
  Description of Artificial Sequence: Synthetic oligonucleotide
uuuuuugaacacgu

SEQ ID NO: 10846 - RNA, 14 nt, Artificial Sequence
  Description of Artificial Sequence: Synthetic oligonucleotide
cuuuuuugaacacg

SEQ ID NO: 10847 - RNA, 14 nt, Artificial Sequence
  Description of Artificial Sequence: Synthetic oligonucleotide
acuuuuuugaacac

SEQ ID NO: 10848 - RNA, 14 nt, Artificial Sequence
  Description of Artificial Sequence: Synthetic oligonucleotide
aacuuuuuugaaca

SEQ ID NO: 10849 - RNA, 14 nt, Artificial Sequence
  Description of Artificial Sequence: Synthetic oligonucleotide
aaacuuuuuugaac

SEQ ID NO: 10850 - RNA, 14 nt, Artificial Sequence
  Description of Artificial Sequence: Synthetic oligonucleotide
gaaacuuuuuugaa

SEQ ID NO: 10851 - RNA, 14 nt, Artificial Sequence
  Description of Artificial Sequence: Synthetic oligonucleotide
ggaaacuuuuuuga

SEQ ID NO: 10852 - RNA, 14 nt, Artificial Sequence
  Description of Artificial Sequence: Synthetic oligonucleotide
gggaaacuuuuuug

SEQ ID NO: 10853 - RNA, 14 nt, Artificial Sequence
  Description of Artificial Sequence: Synthetic oligonucleotide
agggaaacuuuuuu

SEQ ID NO: 10854 - RNA, 14 nt, Artificial Sequence
  Description of Artificial Sequence: Synthetic oligonucleotide
gagggaaacuuuuu

SEQ ID NO: 10855 - RNA, 14 nt, Artificial Sequence
  Description of Artificial Sequence: Synthetic oligonucleotide
ugagggaaacuuuu

SEQ ID NO: 10856 - RNA, 14 nt, Artificial Sequence
  Description of Artificial Sequence: Synthetic oligonucleotide
augagggaaacuuu

SEQ ID NO: 10857 - RNA, 14 nt, Artificial Sequence
  Description of Artificial Sequence: Synthetic oligonucleotide
gaugagggaaacuu

SEQ ID NO: 10858 - RNA, 14 nt, Artificial Sequence
  Description of Artificial Sequence: Synthetic oligonucleotide
ggaugagggaaacu

SEQ ID NO: 10859 - RNA, 14 nt, Artificial Sequence
  Description of Artificial Sequence: Synthetic oligonucleotide
uggaugagggaaac

SEQ ID NO: 10860 - RNA, 14 nt, Artificial Sequence
  Description of Artificial Sequence: Synthetic oligonucleotide
uuggaugagggaaa

SEQ ID NO: 10861 - RNA, 14 nt, Artificial Sequence
  Description of Artificial Sequence: Synthetic oligonucleotide
auuggaugagggaa

SEQ ID NO: 10862 - RNA, 14 nt, Artificial Sequence
  Description of Artificial Sequence: Synthetic oligonucleotide
aauuggaugaggga

SEQ ID NO: 10863 - RNA, 14 nt, Artificial Sequence
  Description of Artificial Sequence: Synthetic oligonucleotide
caauuggaugaggg

SEQ ID NO: 10864 - RNA, 14 nt, Artificial Sequence
  Description of Artificial Sequence: Synthetic oligonucleotide
ucaauuggaugagg

SEQ ID NO: 10865 - RNA, 14 nt, Artificial Sequence
  Description of Artificial Sequence: Synthetic oligonucleotide
aucaauuggaugag

SEQ ID NO: 10866 - RNA, 14 nt, Artificial Sequence
  Description of Artificial Sequence: Synthetic oligonucleotide
uaucaauuggauga

SEQ ID NO: 10867 - RNA, 14 nt, Artificial Sequence
  Description of Artificial Sequence: Synthetic oligonucleotide
uuaucaauuggaug

SEQ ID NO: 10868 - RNA, 14 nt, Artificial Sequence
  Description of Artificial Sequence: Synthetic oligonucleotide
uuuaucaauuggau

SEQ ID NO: 10869 - RNA, 14 nt, Artificial Sequence
  Description of Artificial Sequence: Synthetic oligonucleotide
auuuaucaauugga

SEQ ID NO: 10870 - RNA, 14 nt, Artificial Sequence
  Description of Artificial Sequence: Synthetic oligonucleotide
cauuuaucaauugg

SEQ ID NO: 10871 - RNA, 14 nt, Artificial Sequence
  Description of Artificial Sequence: Synthetic oligonucleotide
ccauuuaucaauug

SEQ ID NO: 10872 - RNA, 14 nt, Artificial Sequence
  Description of Artificial Sequence: Synthetic oligonucleotide
cccauuuaucaauu

SEQ ID NO: 10873 - RNA, 14 nt, Artificial Sequence
  Description of Artificial Sequence: Synthetic oligonucleotide
gcccauuuaucaau

SEQ ID NO: 10874 - RNA, 14 nt, Artificial Sequence
  Description of Artificial Sequence: Synthetic oligonucleotide
ugcccauuuaucaa

SEQ ID NO: 10875 - RNA, 14 nt, Artificial Sequence
  Description of Artificial Sequence: Synthetic oligonucleotide
uugcccauuuauca

SEQ ID NO: 10876 - RNA, 14 nt, Artificial Sequence
  Description of Artificial Sequence: Synthetic oligonucleotide
auugcccauuuauc

SEQ ID NO: 10877 - RNA, 14 nt, Artificial Sequence
  Description of Artificial Sequence: Synthetic oligonucleotide
uauugcccauuuau

SEQ ID NO: 10878 - RNA, 14 nt, Artificial Sequence
  Description of Artificial Sequence: Synthetic oligonucleotide
cuauugcccauuua

SEQ ID NO: 10879 - RNA, 14 nt, Artificial Sequence
  Description of Artificial Sequence: Synthetic oligonucleotide
gcuauugcccauuu

SEQ ID NO: 10880 - RNA, 14 nt, Artificial Sequence
  Description of Artificial Sequence: Synthetic oligonucleotide
agcuauugcccauu

SEQ ID NO: 10881 - RNA, 14 nt, Artificial Sequence
  Description of Artificial Sequence: Synthetic oligonucleotide
cagcuauugcccau

SEQ ID NO: 10882 - RNA, 14 nt, Artificial Sequence
  Description of Artificial Sequence: Synthetic oligonucleotide
ucagcuauugccca

SEQ ID NO: 10883 - RNA, 14 nt, Artificial Sequence
  Description of Artificial Sequence: Synthetic oligonucleotide
aucagcuauugccc

SEQ ID NO: 10884 - RNA, 14 nt, Artificial Sequence
  Description of Artificial Sequence: Synthetic oligonucleotide
caucagcuauugcc

SEQ ID NO: 10885 - RNA, 14 nt, Artificial Sequence
  Description of Artificial Sequence: Synthetic oligonucleotide
gcaucagcuauugc

SEQ ID NO: 10886 - RNA, 14 nt, Artificial Sequence
  Description of Artificial Sequence: Synthetic oligonucleotide
ggcaucagcuauug

SEQ ID NO: 10887 - RNA, 14 nt, Artificial Sequence
  Description of Artificial Sequence: Synthetic oligonucleotide
gggcaucagcuauu

SEQ ID NO: 10888 - RNA, 14 nt, Artificial Sequence
  Description of Artificial Sequence: Synthetic oligonucleotide
ugggcaucagcuau

SEQ ID NO: 10889 - RNA, 14 nt, Artificial Sequence
  Description of Artificial Sequence: Synthetic oligonucleotide
uugggcaucagcua

SEQ ID NO: 10890 - RNA, 14 nt, Artificial Sequence
  Description of Artificial Sequence: Synthetic oligonucleotide
auugggcaucagcu

SEQ ID NO: 10891 - RNA, 14 nt, Artificial Sequence
  Description of Artificial Sequence: Synthetic oligonucleotide
gauugggcaucagc

SEQ ID NO: 10892 - RNA, 14 nt, Artificial Sequence
  Description of Artificial Sequence: Synthetic oligonucleotide
ugauugggcaucag

SEQ ID NO: 10893 - RNA, 14 nt, Artificial Sequence
  Description of Artificial Sequence: Synthetic oligonucleotide
cugauugggcauca

SEQ ID NO: 10894 - RNA, 14 nt, Artificial Sequence
  Description of Artificial Sequence: Synthetic oligonucleotide
gcugauugggcauc

SEQ ID NO: 10895 - RNA, 14 nt, Artificial Sequence
  Description of Artificial Sequence: Synthetic oligonucleotide
agcugauugggcau

SEQ ID NO: 10896 - RNA, 14 nt, Artificial Sequence
  Description of Artificial Sequence: Synthetic oligonucleotide
uagcugauugggca

SEQ ID NO: 10897 - RNA, 14 nt, Artificial Sequence
  Description of Artificial Sequence: Synthetic oligonucleotide
auagcugauugggc

SEQ ID NO: 10898 - RNA, 14 nt, Artificial Sequence
  Description of Artificial Sequence: Synthetic oligonucleotide
aauagcugauuggg

SEQ ID NO: 10899 - RNA, 14 nt, Artificial Sequence
  Description of Artificial Sequence: Synthetic oligonucleotide
caauagcugauugg

SEQ ID NO: 10900 - RNA, 14 nt, Artificial Sequence
  Description of Artificial Sequence: Synthetic oligonucleotide
ucaauagcugauug

SEQ ID NO: 10901 - RNA, 14 nt, Artificial Sequence
  Description of Artificial Sequence: Synthetic oligonucleotide
uucaauagcugauu

SEQ ID NO: 10902 - RNA, 14 nt, Artificial Sequence
  Description of Artificial Sequence: Synthetic oligonucleotide
uuucaauagcugau

SEQ ID NO: 10903 - RNA, 14 nt, Artificial Sequence
  Description of Artificial Sequence: Synthetic oligonucleotide
uuuucaauagcuga

SEQ ID NO: 10904 - RNA, 14 nt, Artificial Sequence
  Description of Artificial Sequence: Synthetic oligonucleotide
cuuuucaauagcug

SEQ ID NO: 10905 - RNA, 14 nt, Artificial Sequence
  Description of Artificial Sequence: Synthetic oligonucleotide
ucuuuucaauagcu

SEQ ID NO: 10906 - RNA, 14 nt, Artificial Sequence
  Description of Artificial Sequence: Synthetic oligonucleotide
cucuuuucaauagc

SEQ ID NO: 10907 - RNA, 14 nt, Artificial Sequence
  Description of Artificial Sequence: Synthetic oligonucleotide
ccucuuuucaauag

SEQ ID NO: 10908 - RNA, 14 nt, Artificial Sequence
  Description of Artificial Sequence: Synthetic oligonucleotide
uccucuuuucaaua

SEQ ID NO: 10909 - RNA, 14 nt, Artificial Sequence
  Description of Artificial Sequence: Synthetic oligonucleotide
uuccucuuuucaau

SEQ ID NO: 10910 - RNA, 14 nt, Artificial Sequence
  Description of Artificial Sequence: Synthetic oligonucleotide
cuuccucuuuucaa

SEQ ID NO: 10911 - RNA, 14 nt, Artificial Sequence
  Description of Artificial Sequence: Synthetic oligonucleotide
gcuuccucuuuuca

SEQ ID NO: 10912 - RNA, 14 nt, Artificial Sequence
  Description of Artificial Sequence: Synthetic oligonucleotide
cgcuuccucuuuuc

SEQ ID NO: 10913 - RNA, 14 nt, Artificial Sequence
  Description of Artificial Sequence: Synthetic oligonucleotide
ucgcuuccucuuuu

SEQ ID NO: 10914 - RNA, 14 nt, Artificial Sequence
  Description of Artificial Sequence: Synthetic oligonucleotide
uucgcuuccucuuu

SEQ ID NO: 10915 - RNA, 14 nt, Artificial Sequence
  Description of Artificial Sequence: Synthetic oligonucleotide
cuucgcuuccucuu

SEQ ID NO: 10916 - RNA, 14 nt, Artificial Sequence
  Description of Artificial Sequence: Synthetic oligonucleotide
ucuucgcuuccucu

SEQ ID NO: 10917 - RNA, 14 nt, Artificial Sequence
  Description of Artificial Sequence: Synthetic oligonucleotide
uucuucgcuuccuc

SEQ ID NO: 10918 - RNA, 14 nt, Artificial Sequence
  Description of Artificial Sequence: Synthetic oligonucleotide
uuucuucgcuuccu

SEQ ID NO: 10919 - RNA, 14 nt, Artificial Sequence
  Description of Artificial Sequence: Synthetic oligonucleotide
guuucuucgcuucc

SEQ ID NO: 10920 - RNA, 14 nt, Artificial Sequence
  Description of Artificial Sequence: Synthetic oligonucleotide
gguuucuucgcuuc

SEQ ID NO: 10921 - RNA, 14 nt, Artificial Sequence
  Description of Artificial Sequence: Synthetic oligonucleotide
ggguuucuucgcuu

SEQ ID NO: 10922 - RNA, 14 nt, Artificial Sequence
  Description of Artificial Sequence: Synthetic oligonucleotide
aggguuucuucgcu

SEQ ID NO: 10923 - RNA, 14 nt, Artificial Sequence
  Description of Artificial Sequence: Synthetic oligonucleotide
aaggguuucuucgc

SEQ ID NO: 10924 - RNA, 14 nt, Artificial Sequence
  Description of Artificial Sequence: Synthetic oligonucleotide
aaaggguuucuucg

SEQ ID NO: 10925 - RNA, 14 nt, Artificial Sequence
  Description of Artificial Sequence: Synthetic oligonucleotide
uaaaggguuucuuc

SEQ ID NO: 10926 - RNA, 14 nt, Artificial Sequence
  Description of Artificial Sequence: Synthetic oligonucleotide
auaaaggguuucuu

SEQ ID NO: 10927 - RNA, 14 nt, Artificial Sequence
  Description of Artificial Sequence: Synthetic oligonucleotide
gauaaaggguuucu

SEQ ID NO: 10928 - RNA, 14 nt, Artificial Sequence
  Description of Artificial Sequence: Synthetic oligonucleotide
agauaaaggguuuc

SEQ ID NO: 10929 - RNA, 14 nt, Artificial Sequence
  Description of Artificial Sequence: Synthetic oligonucleotide
gagauaaaggguuu

SEQ ID NO: 10930 - RNA, 14 nt, Artificial Sequence
  Description of Artificial Sequence: Synthetic oligonucleotide
agagauaaaggguu

SEQ ID NO: 10931 - RNA, 14 nt, Artificial Sequence
  Description of Artificial Sequence: Synthetic oligonucleotide
gagagauaaagggu

SEQ ID NO: 10932 - RNA, 14 nt, Artificial Sequence
  Description of Artificial Sequence: Synthetic oligonucleotide
ggagagauaaaggg

SEQ ID NO: 10933 - RNA, 14 nt, Artificial Sequence
  Description of Artificial Sequence: Synthetic oligonucleotide
gggagagauaaagg

SEQ ID NO: 10934 - RNA, 14 nt, Artificial Sequence
  Description of Artificial Sequence: Synthetic oligonucleotide
ugggagagauaaag

SEQ ID NO: 10935 - RNA, 14 nt, Artificial Sequence
  Description of Artificial Sequence: Synthetic oligonucleotide
cugggagagauaaa

SEQ ID NO: 10936 - RNA, 14 nt, Artificial Sequence
  Description of Artificial Sequence: Synthetic oligonucleotide
acugggagagauaa

SEQ ID NO: 10937 - RNA, 14 nt, Artificial Sequence
  Description of Artificial Sequence: Synthetic oligonucleotide
uacugggagagaua

SEQ ID NO: 10938 - RNA, 14 nt, Artificial Sequence
  Description of Artificial Sequence: Synthetic oligonucleotide
cuacugggagagau

SEQ ID NO: 10939 - RNA, 14 nt, Artificial Sequence
  Description of Artificial Sequence: Synthetic oligonucleotide
ucuacugggagaga

SEQ ID NO: 10940 - RNA, 14 nt, Artificial Sequence
  Description of Artificial Sequence: Synthetic oligonucleotide
uucuacugggagag

SEQ ID NO: 10941 - RNA, 14 nt, Artificial Sequence
  Description of Artificial Sequence: Synthetic oligonucleotide
uuucuacugggaga

SEQ ID NO: 10942 - RNA, 14 nt, Artificial Sequence
  Description of Artificial Sequence: Synthetic oligonucleotide
uuuucuacugggag

SEQ ID NO: 10943 - RNA, 14 nt, Artificial Sequence
  Description of Artificial Sequence: Synthetic oligonucleotide
uuuuucuacuggga

SEQ ID NO: 10944 - RNA, 14 nt, Artificial Sequence
  Description of Artificial Sequence: Synthetic oligonucleotide
uuuuuucuacuggg

SEQ ID NO: 10945 - RNA, 14 nt, Artificial Sequence
  Description of Artificial Sequence: Synthetic oligonucleotide
auuuuuucuacugg

SEQ ID NO: 10946 - RNA, 14 nt, Artificial Sequence
  Description of Artificial Sequence: Synthetic oligonucleotide
aauuuuuucuacug

SEQ ID NO: 10947 - RNA, 14 nt, Artificial Sequence
  Description of Artificial Sequence: Synthetic oligonucleotide
gaauuuuuucuacu

SEQ ID NO: 10948 - RNA, 14 nt, Artificial Sequence
  Description of Artificial Sequence: Synthetic oligonucleotide
ugaauuuuuucuac

SEQ ID NO: 10949 - RNA, 14 nt, Artificial Sequence
  Description of Artificial Sequence: Synthetic oligonucleotide
augaauuuuuucua

SEQ ID NO: 10950 - RNA, 14 nt, Artificial Sequence
  Description of Artificial Sequence: Synthetic oligonucleotide
gaugaauuuuuucu

SEQ ID NO: 10951 - RNA, 14 nt, Artificial Sequence
  Description of Artificial Sequence: Synthetic oligonucleotide
ggaugaauuuuuuc

SEQ ID NO: 10952 - RNA, 14 nt, Artificial Sequence
  Description of Artificial Sequence: Synthetic oligonucleotide
aggaugaauuuuuu

SEQ ID NO: 10953 - RNA, 14 nt, Artificial Sequence
  Description of Artificial Sequence: Synthetic oligonucleotide
aaggaugaauuuuu

SEQ ID NO: 10954 - RNA, 14 nt, Artificial Sequence
  Description of Artificial Sequence: Synthetic oligonucleotide
aaaggaugaauuuu

SEQ ID NO: 10955 - RNA, 14 nt, Artificial Sequence
  Description of Artificial Sequence: Synthetic oligonucleotide
uaaaggaugaauuu

SEQ ID NO: 10956 - RNA, 14 nt, Artificial Sequence
  Description of Artificial Sequence: Synthetic oligonucleotide
auaaaggaugaauu

SEQ ID NO: 10957 - RNA, 14 nt, Artificial Sequence
  Description of Artificial Sequence: Synthetic oligonucleotide
aauaaaggaugaau

SEQ ID NO: 10958 - RNA, 14 nt, Artificial Sequence
  Description of Artificial Sequence: Synthetic oligonucleotide
uaauaaaggaugaa

SEQ ID NO: 10959 - RNA, 14 nt, Artificial Sequence
  Description of Artificial Sequence: Synthetic oligonucleotide
uuaauaaaggauga

SEQ ID NO: 10960 - RNA, 14 nt, Artificial Sequence
  Description of Artificial Sequence: Synthetic oligonucleotide
uuuaauaaaggaug

SEQ ID NO: 10961 - RNA, 14 nt, Artificial Sequence
  Description of Artificial Sequence: Synthetic oligonucleotide
cuuuaauaaaggau

SEQ ID NO: 10962 - RNA, 14 nt, Artificial Sequence
  Description of Artificial Sequence: Synthetic oligonucleotide
ccuuuaauaaagga

SEQ ID NO: 10963 - RNA, 14 nt, Artificial Sequence
  Description of Artificial Sequence: Synthetic oligonucleotide
uccuuuaauaaagg

SEQ ID NO: 10964 - RNA, 14 nt, Artificial Sequence
  Description of Artificial Sequence: Synthetic oligonucleotide
cuccuuuaauaaag

SEQ ID NO: 10965 - RNA, 14 nt, Artificial Sequence
  Description of Artificial Sequence: Synthetic oligonucleotide
ccuccuuuaauaaa

SEQ ID NO: 10966 - RNA, 14 nt, Artificial Sequence
  Description of Artificial Sequence: Synthetic oligonucleotide
accuccuuuaauaa

SEQ ID NO: 10967 - RNA, 14 nt, Artificial Sequence
  Description of Artificial Sequence: Synthetic oligonucleotide
gaccuccuuuaaua

SEQ ID NO: 10968 - RNA, 14 nt, Artificial Sequence
  Description of Artificial Sequence: Synthetic oligonucleotide
ggaccuccuuuaau

SEQ ID NO: 10969 - RNA, 14 nt, Artificial Sequence
  Description of Artificial Sequence: Synthetic oligonucleotide
aggaccuccuuuaa

SEQ ID NO: 10970 - RNA, 14 nt, Artificial Sequence
  Description of Artificial Sequence: Synthetic oligonucleotide
uaggaccuccuuua

SEQ ID NO: 10971 - RNA, 14 nt, Artificial Sequence
  Description of Artificial Sequence: Synthetic oligonucleotide
cuaggaccuccuuu

SEQ ID NO: 10972 - RNA, 14 nt, Artificial Sequence
  Description of Artificial Sequence: Synthetic oligonucleotide
ccuaggaccuccuu

SEQ ID NO: 10973 - RNA, 14 nt, Artificial Sequence
  Description of Artificial Sequence: Synthetic oligonucleotide
accuaggaccuccu

SEQ ID NO: 10974 - RNA, 14 nt, Artificial Sequence
  Description of Artificial Sequence: Synthetic oligonucleotide
aaccuaggaccucc

SEQ ID NO: 10975 - RNA, 14 nt, Artificial Sequence
  Description of Artificial Sequence: Synthetic oligonucleotide
uaaccuaggaccuc

SEQ ID NO: 10976 - RNA, 14 nt, Artificial Sequence
  Description of Artificial Sequence: Synthetic oligonucleotide
auaaccuaggaccu

SEQ ID NO: 10977 - RNA, 14 nt, Artificial Sequence
  Description of Artificial Sequence: Synthetic oligonucleotide
uauaaccuaggacc

SEQ ID NO: 10978 - RNA, 14 nt, Artificial Sequence
  Description of Artificial Sequence: Synthetic oligonucleotide
uuauaaccuaggac

SEQ ID NO: 10979 - RNA, 14 nt, Artificial Sequence
  Description of Artificial Sequence: Synthetic oligonucleotide
uuuauaaccuagga

SEQ ID NO: 10980 - RNA, 14 nt, Artificial Sequence
  Description of Artificial Sequence: Synthetic oligonucleotide
uuuuauaaccuagg

SEQ ID NO: 10981 - RNA, 14 nt, Artificial Sequence
  Description of Artificial Sequence: Synthetic oligonucleotide
auuuuauaaccuag

SEQ ID NO: 10982 - RNA, 14 nt, Artificial Sequence
  Description of Artificial Sequence: Synthetic oligonucleotide
aauuuuauaaccua

SEQ ID NO: 10983 - RNA, 14 nt, Artificial Sequence
  Description of Artificial Sequence: Synthetic oligonucleotide
caauuuuauaaccu

SEQ ID NO: 10984 - RNA, 14 nt, Artificial Sequence
  Description of Artificial Sequence: Synthetic oligonucleotide
ucaauuuuauaacc

SEQ ID NO: 10985 - RNA, 14 nt, Artificial Sequence
  Description of Artificial Sequence: Synthetic oligonucleotide
gucaauuuuauaac

SEQ ID NO: 10986 - RNA, 14 nt, Artificial Sequence
  Description of Artificial Sequence: Synthetic oligonucleotide
ggucaauuuuauaa

SEQ ID NO: 10987 - RNA, 14 nt, Artificial Sequence
  Description of Artificial Sequence: Synthetic oligonucleotide
uggucaauuuuaua

SEQ ID NO: 10988 - RNA, 14 nt, Artificial Sequence
  Description of Artificial Sequence: Synthetic oligonucleotide
guggucaauuuuau

SEQ ID NO: 10989 - RNA, 14 nt, Artificial Sequence
  Description of Artificial Sequence: Synthetic oligonucleotide
gguggucaauuuua

SEQ ID NO: 10990 - RNA, 14 nt, Artificial Sequence
  Description of Artificial Sequence: Synthetic oligonucleotide
ugguggucaauuuu

SEQ ID NO: 10991 - RNA, 14 nt, Artificial Sequence
  Description of Artificial Sequence: Synthetic oligonucleotide
cugguggucaauuu

SEQ ID NO: 10992 - RNA, 14 nt, Artificial Sequence
  Description of Artificial Sequence: Synthetic oligonucleotide
ccugguggucaauu

SEQ ID NO: 10993 - RNA, 14 nt, Artificial Sequence
  Description of Artificial Sequence: Synthetic oligonucleotide
accugguggucaau

SEQ ID NO: 10994 - RNA, 14 nt, Artificial Sequence
  Description of Artificial Sequence: Synthetic oligonucleotide
aaccugguggucaa

SEQ ID NO: 10995 - RNA, 14 nt, Artificial Sequence
  Description of Artificial Sequence: Synthetic oligonucleotide
aaaccuggugguca

SEQ ID NO: 10996 - RNA, 14 nt, Artificial Sequence
  Description of Artificial Sequence: Synthetic oligonucleotide
gaaaccuggugguc

SEQ ID NO: 10997 - RNA, 14 nt, Artificial Sequence
  Description of Artificial Sequence: Synthetic oligonucleotide
agaaaccugguggu

SEQ ID NO: 10998 - RNA, 14 nt, Artificial Sequence
  Description of Artificial Sequence: Synthetic oligonucleotide
cagaaaccuggugg

SEQ ID NO: 10999 - RNA, 14 nt, Artificial Sequence
  Description of Artificial Sequence: Synthetic oligonucleotide
acagaaaccuggug

SEQ ID NO: 11000 - RNA, 14 nt, Artificial Sequence
  Description of Artificial Sequence: Synthetic oligonucleotide
aacagaaaccuggu

SEQ ID NO: 11001 - RNA, 14 nt, Artificial Sequence
  Description of Artificial Sequence: Synthetic oligonucleotide
aaacagaaaccugg

SEQ ID NO: 11002 - RNA, 14 nt, Artificial Sequence
  Description of Artificial Sequence: Synthetic oligonucleotide
uaaacagaaaccug

SEQ ID NO: 11003 - RNA, 14 nt, Artificial Sequence
  Description of Artificial Sequence: Synthetic oligonucleotide
guaaacagaaaccu

SEQ ID NO: 11004 - RNA, 14 nt, Artificial Sequence
  Description of Artificial Sequence: Synthetic oligonucleotide
uguaaacagaaacc

SEQ ID NO: 11005 - RNA, 14 nt, Artificial Sequence
  Description of Artificial Sequence: Synthetic oligonucleotide
auguaaacagaaac

SEQ ID NO: 11006 - RNA, 14 nt, Artificial Sequence
  Description of Artificial Sequence: Synthetic oligonucleotide
uauguaaacagaaa

SEQ ID NO: 11007 - RNA, 14 nt, Artificial Sequence
  Description of Artificial Sequence: Synthetic oligonucleotide
cuauguaaacagaa

SEQ ID NO: 11008 - RNA, 14 nt, Artificial Sequence
  Description of Artificial Sequence: Synthetic oligonucleotide
acuauguaaacaga

SEQ ID NO: 11009 - RNA, 14 nt, Artificial Sequence
  Description of Artificial Sequence: Synthetic oligonucleotide
uacuauguaaacag

SEQ ID NO: 11010 - RNA, 14 nt, Artificial Sequence
  Description of Artificial Sequence: Synthetic oligonucleotide
cuacuauguaaaca

SEQ ID NO: 11011 - RNA, 14 nt, Artificial Sequence
  Description of Artificial Sequence: Synthetic oligonucleotide
gcuacuauguaaac

SEQ ID NO: 11012 - RNA, 14 nt, Artificial Sequence
  Description of Artificial Sequence: Synthetic oligonucleotide
ugcuacuauguaaa

SEQ ID NO: 11013 - RNA, 14 nt, Artificial Sequence
  Description of Artificial Sequence: Synthetic oligonucleotide
cugcuacuauguaa

SEQ ID NO: 11014 - RNA, 14 nt, Artificial Sequence
  Description of Artificial Sequence: Synthetic oligonucleotide
acugcuacuaugua

SEQ ID NO: 11015 - RNA, 14 nt, Artificial Sequence
  Description of Artificial Sequence: Synthetic oligonucleotide
gacugcuacuaugu

SEQ ID NO: 11016 - RNA, 14 nt, Artificial Sequence
  Description of Artificial Sequence: Synthetic oligonucleotide
agacugcuacuaug

SEQ ID NO: 11017 - RNA, 14 nt, Artificial Sequence
  Description of Artificial Sequence: Synthetic oligonucleotide
aagacugcuacuau

SEQ ID NO: 11018 - RNA, 14 nt, Artificial Sequence
  Description of Artificial Sequence: Synthetic oligonucleotide
uaagacugcuacua

SEQ ID NO: 11019 - RNA, 14 nt, Artificial Sequence
  Description of Artificial Sequence: Synthetic oligonucleotide
cuaagacugcuacu

SEQ ID NO: 11020 - RNA, 14 nt, Artificial Sequence
  Description of Artificial Sequence: Synthetic oligonucleotide
ucuaagacugcuac

SEQ ID NO: 11021 - RNA, 14 nt, Artificial Sequence
  Description of Artificial Sequence: Synthetic oligonucleotide
uucuaagacugcua

SEQ ID NO: 11022 - RNA, 14 nt, Artificial Sequence
  Description of Artificial Sequence: Synthetic oligonucleotide
auucuaagacugcu

SEQ ID NO: 11023 - RNA, 14 nt, Artificial Sequence
  Description of Artificial Sequence: Synthetic oligonucleotide
uauucuaagacugc

SEQ ID NO: 11024 - RNA, 14 nt, Artificial Sequence
  Description of Artificial Sequence: Synthetic oligonucleotide
guauucuaagacug

SEQ ID NO: 11025 - RNA, 14 nt, Artificial Sequence
  Description of Artificial Sequence: Synthetic oligonucleotide
uguauucuaagacu

SEQ ID NO: 11026 - RNA, 14 nt, Artificial Sequence
  Description of Artificial Sequence: Synthetic oligonucleotide
auguauucuaagac

SEQ ID NO: 11027 - RNA, 14 nt, Artificial Sequence
  Description of Artificial Sequence: Synthetic oligonucleotide
aauguauucuaaga

SEQ ID NO: 11028 - RNA, 14 nt, Artificial Sequence
  Description of Artificial Sequence: Synthetic oligonucleotide
aaauguauucuaag

SEQ ID NO: 11029 - RNA, 14 nt, Artificial Sequence
  Description of Artificial Sequence: Synthetic oligonucleotide
gaaauguauucuaa

SEQ ID NO: 11030 - RNA, 14 nt, Artificial Sequence
  Description of Artificial Sequence: Synthetic oligonucleotide
agaaauguauucua

SEQ ID NO: 11031 - RNA, 14 nt, Artificial Sequence
  Description of Artificial Sequence: Synthetic oligonucleotide
cagaaauguauucu

SEQ ID NO: 11032 - RNA, 14 nt, Artificial Sequence
  Description of Artificial Sequence: Synthetic oligonucleotide
gcagaaauguauuc

SEQ ID NO: 11033 - RNA, 14 nt, Artificial Sequence
  Description of Artificial Sequence: Synthetic oligonucleotide
ugcagaaauguauu

SEQ ID NO: 11034 - RNA, 14 nt, Artificial Sequence
  Description of Artificial Sequence: Synthetic oligonucleotide
cugcagaaauguau

SEQ ID NO: 11035 - RNA, 14 nt, Artificial Sequence
  Description of Artificial Sequence: Synthetic oligonucleotide
ucugcagaaaugua

SEQ ID NO: 11036 - RNA, 14 nt, Artificial Sequence
  Description of Artificial Sequence: Synthetic oligonucleotide
gucugcagaaaugu

SEQ ID NO: 11037 - RNA, 14 nt, Artificial Sequence
  Description of Artificial Sequence: Synthetic oligonucleotide
ugucugcagaaaug

SEQ ID NO: 11038 - RNA, 14 nt, Artificial Sequence
  Description of Artificial Sequence: Synthetic oligonucleotide
uucauguauaucug

SEQ ID NO: 11039 - RNA, 14 nt, Artificial Sequence
  Description of Artificial Sequence: Synthetic oligonucleotide
aaugucugcagaaa

SEQ ID NO: 11040 - RNA, 14 nt, Artificial Sequence
  Description of Artificial Sequence: Synthetic oligonucleotide
aaaugucugcagaa

SEQ ID NO: 11041 - RNA, 14 nt, Artificial Sequence
  Description of Artificial Sequence: Synthetic oligonucleotide
aaaaugucugcaga

SEQ ID NO: 11042 - RNA, 14 nt, Artificial Sequence
  Description of Artificial Sequence: Synthetic oligonucleotide
uaaaaugucugcag

SEQ ID NO: 11043 - RNA, 14 nt, Artificial Sequence
  Description of Artificial Sequence: Synthetic oligonucleotide
uuaaaaugucugca

SEQ ID NO: 11044 - RNA, 14 nt, Artificial Sequence
  Description of Artificial Sequence: Synthetic oligonucleotide
uuuaaaaugucugc

SEQ ID NO: 11045 - RNA, 14 nt, Artificial Sequence
  Description of Artificial Sequence: Synthetic oligonucleotide
cuuuaaaaugucug

SEQ ID NO: 11046 - RNA, 14 nt, Artificial Sequence
  Description of Artificial Sequence: Synthetic oligonucleotide
gcuuuaaaaugucu

SEQ ID NO: 11047 - RNA, 14 nt, Artificial Sequence
  Description of Artificial Sequence: Synthetic oligonucleotide
agcuuuaaaauguc

SEQ ID NO: 11048 - RNA, 14 nt, Artificial Sequence
  Description of Artificial Sequence: Synthetic oligonucleotide
cagcuuuaaaaugu

SEQ ID NO: 11049 - RNA, 14 nt, Artificial Sequence
  Description of Artificial Sequence: Synthetic oligonucleotide
ccagcuuuaaaaug

SEQ ID NO: 11050 - RNA, 14 nt, Artificial Sequence
  Description of Artificial Sequence: Synthetic oligonucleotide
accagcuuuaaaau

SEQ ID NO: 11051 - RNA, 14 nt, Artificial Sequence
  Description of Artificial Sequence: Synthetic oligonucleotide
aaccagcuuuaaaa

SEQ ID NO: 11052 - RNA, 14 nt, Artificial Sequence
  Description of Artificial Sequence: Synthetic oligonucleotide
caaccagcuuuaaa

SEQ ID NO: 11053 - RNA, 14 nt, Artificial Sequence
  Description of Artificial Sequence: Synthetic oligonucleotide
ccaaccagcuuuaa

SEQ ID NO: 11054 - RNA, 14 nt, Artificial Sequence
  Description of Artificial Sequence: Synthetic oligonucleotide
cccaaccagcuuua

SEQ ID NO: 11055 - RNA, 14 nt, Artificial Sequence
  Description of Artificial Sequence: Synthetic oligonucleotide
ucccaaccagcuuu

SEQ ID NO: 11056 - RNA, 14 nt, Artificial Sequence
  Description of Artificial Sequence: Synthetic oligonucleotide
uucccaaccagcuu

SEQ ID NO: 11057 - RNA, 14 nt, Artificial Sequence
  Description of Artificial Sequence: Synthetic oligonucleotide
auucccaaccagcu

SEQ ID NO: 11058 - RNA, 14 nt, Artificial Sequence
  Description of Artificial Sequence: Synthetic oligonucleotide
aauucccaaccagc

SEQ ID NO: 11059 - RNA, 14 nt, Artificial Sequence
  Description of Artificial Sequence: Synthetic oligonucleotide
uaauucccaaccag

SEQ ID NO: 11060 - RNA, 14 nt, Artificial Sequence
  Description of Artificial Sequence: Synthetic oligonucleotide
auaauucccaacca

SEQ ID NO: 11061 - RNA, 14 nt, Artificial Sequence
  Description of Artificial Sequence: Synthetic oligonucleotide
cauaauucccaacc

SEQ ID NO: 11062 - RNA, 14 nt, Artificial Sequence
  Description of Artificial Sequence: Synthetic oligonucleotide
acauaauucccaac

SEQ ID NO: 11063 - RNA, 14 nt, Artificial Sequence
  Description of Artificial Sequence: Synthetic oligonucleotide
uacauaauucccaa

SEQ ID NO: 11064 - RNA, 14 nt, Artificial Sequence
  Description of Artificial Sequence: Synthetic oligonucleotide
uuacauaauuccca

SEQ ID NO: 11065 - RNA, 14 nt, Artificial Sequence
  Description of Artificial Sequence: Synthetic oligonucleotide
cuuacauaauuccc

SEQ ID NO: 11066 - RNA, 14 nt, Artificial Sequence
  Description of Artificial Sequence: Synthetic oligonucleotide
ucuuacauaauucc

SEQ ID NO: 11067 - RNA, 14 nt, Artificial Sequence
  Description of Artificial Sequence: Synthetic oligonucleotide
uucuuacauaauuc

SEQ ID NO: 11068 - RNA, 14 nt, Artificial Sequence
  Description of Artificial Sequence: Synthetic oligonucleotide
uuucuuacauaauu

SEQ ID NO: 11069 - RNA, 14 nt, Artificial Sequence
  Description of Artificial Sequence: Synthetic oligonucleotide
auuucuuacauaau

SEQ ID NO: 11070 - RNA, 14 nt, Artificial Sequence
  Description of Artificial Sequence: Synthetic oligonucleotide
uauuucuuacauaa

SEQ ID NO: 11071 - RNA, 14 nt, Artificial Sequence
  Description of Artificial Sequence: Synthetic oligonucleotide
auauuucuuacaua

SEQ ID NO: 11072 - RNA, 14 nt, Artificial Sequence
  Description of Artificial Sequence: Synthetic oligonucleotide
uauauuucuuacau

SEQ ID NO: 11073 - RNA, 14 nt, Artificial Sequence
  Description of Artificial Sequence: Synthetic oligonucleotide
guauauuucuuaca

SEQ ID NO: 11074 - RNA, 14 nt, Artificial Sequence
  Description of Artificial Sequence: Synthetic oligonucleotide
cguauauuucuuac

SEQ ID NO: 11075 - RNA, 14 nt, Artificial Sequence
  Description of Artificial Sequence: Synthetic oligonucleotide
ccguauauuucuua

SEQ ID NO: 11076 - RNA, 14 nt, Artificial Sequence
  Description of Artificial Sequence: Synthetic oligonucleotide
gccguauauuucuu

SEQ ID NO: 11077 - RNA, 14 nt, Artificial Sequence
  Description of Artificial Sequence: Synthetic oligonucleotide
ugccguauauuucu

SEQ ID NO: 11078 - RNA, 14 nt, Artificial Sequence
  Description of Artificial Sequence: Synthetic oligonucleotide
augccguauauuuc

SEQ ID NO: 11079 - RNA, 14 nt, Artificial Sequence
  Description of Artificial Sequence: Synthetic oligonucleotide
aaugccguauauuu

SEQ ID NO: 11080 - RNA, 14 nt, Artificial Sequence
  Description of Artificial Sequence: Synthetic oligonucleotide
uaaugccguauauu

SEQ ID NO: 11081 - RNA, 14 nt, Artificial Sequence
  Description of Artificial Sequence: Synthetic oligonucleotide
auaaugccguauau

SEQ ID NO: 11082 - RNA, 14 nt, Artificial Sequence
  Description of Artificial Sequence: Synthetic oligonucleotide
cauaaugccguaua

SEQ ID NO: 11083 - RNA, 14 nt, Artificial Sequence
  Description of Artificial Sequence: Synthetic oligonucleotide
ucauaaugccguau

SEQ ID NO: 11084 - RNA, 14 nt, Artificial Sequence
  Description of Artificial Sequence: Synthetic oligonucleotide
uucauaaugccgua

SEQ ID NO: 11085 - RNA, 14 nt, Artificial Sequence
  Description of Artificial Sequence: Synthetic oligonucleotide
uuucauaaugccgu

SEQ ID NO: 11086 - RNA, 14 nt, Artificial Sequence
  Description of Artificial Sequence: Synthetic oligonucleotide
auuucauaaugccg

SEQ ID NO: 11087 - RNA, 14 nt, Artificial Sequence
  Description of Artificial Sequence: Synthetic oligonucleotide
aauuucauaaugcc

SEQ ID NO: 11088 - RNA, 14 nt, Artificial Sequence
  Description of Artificial Sequence: Synthetic oligonucleotide
uaauuucauaaugc

SEQ ID NO: 11089 - RNA, 14 nt, Artificial Sequence
  Description of Artificial Sequence: Synthetic oligonucleotide
guaauuucauaaug

SEQ ID NO: 11090 - RNA, 14 nt, Artificial Sequence
  Description of Artificial Sequence: Synthetic oligonucleotide
uguaauuucauaau

SEQ ID NO: 11091 - RNA, 14 nt, Artificial Sequence
  Description of Artificial Sequence: Synthetic oligonucleotide
uuguaauuucauaa

SEQ ID NO: 11092 - RNA, 14 nt, Artificial Sequence
  Description of Artificial Sequence: Synthetic oligonucleotide
uuuguaauuucaua

SEQ ID NO: 11093 - RNA, 14 nt, Artificial Sequence
  Description of Artificial Sequence: Synthetic oligonucleotide
uuuuguaauuucau

SEQ ID NO: 11094 - RNA, 14 nt, Artificial Sequence
  Description of Artificial Sequence: Synthetic oligonucleotide
guuuuguaauuuca

SEQ ID NO: 11095 - RNA, 14 nt, Artificial Sequence
  Description of Artificial Sequence: Synthetic oligonucleotide
uguuuuguaauuuc

SEQ ID NO: 11096 - RNA, 14 nt, Artificial Sequence
  Description of Artificial Sequence: Synthetic oligonucleotide
uuguuuuguaauuu

SEQ ID NO: 11097 - RNA, 14 nt, Artificial Sequence
  Description of Artificial Sequence: Synthetic oligonucleotide
cuuguuuuguaauu

SEQ ID NO: 11098 - RNA, 14 nt, Artificial Sequence
  Description of Artificial Sequence: Synthetic oligonucleotide
ucuuguuuuguaau

SEQ ID NO: 11099 - RNA, 14 nt, Artificial Sequence
  Description of Artificial Sequence: Synthetic oligonucleotide
aucuuguuuuguaa

SEQ ID NO: 11100 - RNA, 14 nt, Artificial Sequence
  Description of Artificial Sequence: Synthetic oligonucleotide
uaucuuguuuugua

SEQ ID NO: 11101 - RNA, 14 nt, Artificial Sequence
  Description of Artificial Sequence: Synthetic oligonucleotide
auaucuuguuuugu

SEQ ID NO: 11102 - RNA, 14 nt, Artificial Sequence
  Description of Artificial Sequence: Synthetic oligonucleotide
aauaucuuguuuug

SEQ ID NO: 11103 - RNA, 14 nt, Artificial Sequence
  Description of Artificial Sequence: Synthetic oligonucleotide
uaauaucuuguuuu

SEQ ID NO: 11104 - RNA, 14 nt, Artificial Sequence
  Description of Artificial Sequence: Synthetic oligonucleotide
uuaauaucuuguuu

SEQ ID NO: 11105 - RNA, 14 nt, Artificial Sequence
  Description of Artificial Sequence: Synthetic oligonucleotide
uuuaauaucuuguu

SEQ ID NO: 11106 - RNA, 14 nt, Artificial Sequence
  Description of Artificial Sequence: Synthetic oligonucleotide
cuuuaauaucuugu

SEQ ID NO: 11107 - RNA, 14 nt, Artificial Sequence
  Description of Artificial Sequence: Synthetic oligonucleotide
acuuuaauaucuug

SEQ ID NO: 11108 - RNA, 14 nt, Artificial Sequence
  Description of Artificial Sequence: Synthetic oligonucleotide
cacuuuaauaucuu

SEQ ID NO: 11109 - RNA, 14 nt, Artificial Sequence
  Description of Artificial Sequence: Synthetic oligonucleotide
ccacuuuaauaucu

SEQ ID NO: 11110 - RNA, 14 nt, Artificial Sequence
  Description of Artificial Sequence: Synthetic oligonucleotide
gccacuuuaauauc

SEQ ID NO: 11111 - RNA, 14 nt, Artificial Sequence
  Description of Artificial Sequence: Synthetic oligonucleotide
ugccacuuuaauau

SEQ ID NO: 11112 - RNA, 14 nt, Artificial Sequence
  Description of Artificial Sequence: Synthetic oligonucleotide
uugccacuuuaaua

SEQ ID NO: 11113 - RNA, 14 nt, Artificial Sequence
  Description of Artificial Sequence: Synthetic oligonucleotide
auugccacuuuaau

SEQ ID NO: 11114 - RNA, 14 nt, Artificial Sequence
  Description of Artificial Sequence: Synthetic oligonucleotide
cauugccacuuuaa

SEQ ID NO: 11115 - RNA, 14 nt, Artificial Sequence
  Description of Artificial Sequence: Synthetic oligonucleotide
acauugccacuuua

SEQ ID NO: 11116 - RNA, 14 nt, Artificial Sequence
  Description of Artificial Sequence: Synthetic oligonucleotide
cacauugccacuuu

SEQ ID NO: 11117 - RNA, 14 nt, Artificial Sequence
  Description of Artificial Sequence: Synthetic oligonucleotide
acacauugccacuu

SEQ ID NO: 11118 - RNA, 14 nt, Artificial Sequence
  Description of Artificial Sequence: Synthetic oligonucleotide
cacacauugccacu

SEQ ID NO: 11119 - RNA, 14 nt, Artificial Sequence
  Description of Artificial Sequence: Synthetic oligonucleotide
gcacacauugccac

SEQ ID NO: 11120 - RNA, 14 nt, Artificial Sequence
  Description of Artificial Sequence: Synthetic oligonucleotide
agcacacauugcca

SEQ ID NO: 11121 - RNA, 14 nt, Artificial Sequence
  Description of Artificial Sequence: Synthetic oligonucleotide
cagcacacauugcc

SEQ ID NO: 11122 - RNA, 14 nt, Artificial Sequence
  Description of Artificial Sequence: Synthetic oligonucleotide
ucagcacacauugc

SEQ ID NO: 11123 - RNA, 14 nt, Artificial Sequence
  Description of Artificial Sequence: Synthetic oligonucleotide
gucagcacacauug

SEQ ID NO: 11124 - RNA, 14 nt, Artificial Sequence
  Description of Artificial Sequence: Synthetic oligonucleotide
ugucagcacacauu

SEQ ID NO: 11125 - RNA, 14 nt, Artificial Sequence
  Description of Artificial Sequence: Synthetic oligonucleotide
uugucagcacacau

SEQ ID NO: 11126 - RNA, 14 nt, Artificial Sequence
  Description of Artificial Sequence: Synthetic oligonucleotide
cuugucagcacaca

SEQ ID NO: 11127 - RNA, 14 nt, Artificial Sequence
  Description of Artificial Sequence: Synthetic oligonucleotide
ccuugucagcacac

SEQ ID NO: 11128 - RNA, 14 nt, Artificial Sequence
  Description of Artificial Sequence: Synthetic oligonucleotide
accuugucagcaca

SEQ ID NO: 11129 - RNA, 14 nt, Artificial Sequence
  Description of Artificial Sequence: Synthetic oligonucleotide
uaccuugucagcac

SEQ ID NO: 11130 - RNA, 14 nt, Artificial Sequence
  Description of Artificial Sequence: Synthetic oligonucleotide
auaccuugucagca

SEQ ID NO: 11131 - RNA, 14 nt, Artificial Sequence
  Description of Artificial Sequence: Synthetic oligonucleotide
aauaccuugucagc

SEQ ID NO: 11132 - RNA, 14 nt, Artificial Sequence
  Description of Artificial Sequence: Synthetic oligonucleotide
caauaccuugucag

SEQ ID NO: 11133 - RNA, 14 nt, Artificial Sequence
  Description of Artificial Sequence: Synthetic oligonucleotide
ucaauaccuuguca

SEQ ID NO: 11134 - RNA, 14 nt, Artificial Sequence
  Description of Artificial Sequence: Synthetic oligonucleotide
aucaauaccuuguc

SEQ ID NO: 11135 - RNA, 14 nt, Artificial Sequence
  Description of Artificial Sequence: Synthetic oligonucleotide
caucaauaccuugu

SEQ ID NO: 11136 - RNA, 14 nt, Artificial Sequence
  Description of Artificial Sequence: Synthetic oligonucleotide
ccaucaauaccuug

SEQ ID NO: 11137 - RNA, 14 nt, Artificial Sequence
  Description of Artificial Sequence: Synthetic oligonucleotide
uccaucaauaccuu

SEQ ID NO: 11138 - RNA, 14 nt, Artificial Sequence
  Description of Artificial Sequence: Synthetic oligonucleotide
auccaucaauaccu

SEQ ID NO: 11139 - RNA, 14 nt, Artificial Sequence
  Description of Artificial Sequence: Synthetic oligonucleotide
uauccaucaauacc

SEQ ID NO: 11140 - RNA, 14 nt, Artificial Sequence
  Description of Artificial Sequence: Synthetic oligonucleotide
auauccaucaauac

SEQ ID NO: 11141 - RNA, 14 nt, Artificial Sequence
  Description of Artificial Sequence: Synthetic oligonucleotide
cauauccaucaaua

SEQ ID NO: 11142 - RNA, 14 nt, Artificial Sequence
  Description of Artificial Sequence: Synthetic oligonucleotide
acauauccaucaau

SEQ ID NO: 11143 - RNA, 14 nt, Artificial Sequence
  Description of Artificial Sequence: Synthetic oligonucleotide
aacauauccaucaa

SEQ ID NO: 11144 - RNA, 14 nt, Artificial Sequence
  Description of Artificial Sequence: Synthetic oligonucleotide
aaacauauccauca

SEQ ID NO: 11145 - RNA, 14 nt, Artificial Sequence
  Description of Artificial Sequence: Synthetic oligonucleotide
gaaacauauccauc

SEQ ID NO: 11146 - RNA, 14 nt, Artificial Sequence
  Description of Artificial Sequence: Synthetic oligonucleotide
ugaaacauauccau

SEQ ID NO: 11147 - RNA, 14 nt, Artificial Sequence
  Description of Artificial Sequence: Synthetic oligonucleotide
augaaacauaucca

SEQ ID NO: 11148 - RNA, 14 nt, Artificial Sequence
  Description of Artificial Sequence: Synthetic oligonucleotide
gaugaaacauaucc

SEQ ID NO: 11149 - RNA, 14 nt, Artificial Sequence
  Description of Artificial Sequence: Synthetic oligonucleotide
ugaugaaacauauc

SEQ ID NO: 11150 - RNA, 14 nt, Artificial Sequence
  Description of Artificial Sequence: Synthetic oligonucleotide
uugaugaaacauau

SEQ ID NO: 11151 - RNA, 14 nt, Artificial Sequence
  Description of Artificial Sequence: Synthetic oligonucleotide
cuugaugaaacaua

SEQ ID NO: 11152 - RNA, 14 nt, Artificial Sequence
  Description of Artificial Sequence: Synthetic oligonucleotide
ucuugaugaaacau

SEQ ID NO: 11153 - RNA, 14 nt, Artificial Sequence
  Description of Artificial Sequence: Synthetic oligonucleotide
aucuugaugaaaca

SEQ ID NO: 11154 - RNA, 14 nt, Artificial Sequence
  Description of Artificial Sequence: Synthetic oligonucleotide
caucuugaugaaac

SEQ ID NO: 11155 - RNA, 14 nt, Artificial Sequence
  Description of Artificial Sequence: Synthetic oligonucleotide
acaucuugaugaaa

SEQ ID NO: 11156 - RNA, 14 nt, Artificial Sequence
  Description of Artificial Sequence: Synthetic oligonucleotide
uacaucuugaugaa

SEQ ID NO: 11157 - RNA, 14 nt, Artificial Sequence
  Description of Artificial Sequence: Synthetic oligonucleotide
cuacaucuugauga

SEQ ID NO: 11158 - RNA, 14 nt, Artificial Sequence
  Description of Artificial Sequence: Synthetic oligonucleotide
ucuacaucuugaug

SEQ ID NO: 11159 - RNA, 14 nt, Artificial Sequence
  Description of Artificial Sequence: Synthetic oligonucleotide
uucuacaucuugau

SEQ ID NO: 11160 - RNA, 14 nt, Artificial Sequence
  Description of Artificial Sequence: Synthetic oligonucleotide
cuucuacaucuuga

SEQ ID NO: 11161 - RNA, 14 nt, Artificial Sequence
  Description of Artificial Sequence: Synthetic oligonucleotide
ucuucuacaucuug

SEQ ID NO: 11162 - RNA, 14 nt, Artificial Sequence
  Description of Artificial Sequence: Synthetic oligonucleotide
aucuucuacaucuu

SEQ ID NO: 11163 - RNA, 14 nt, Artificial Sequence
  Description of Artificial Sequence: Synthetic oligonucleotide
uaucuucuacaucu

SEQ ID NO: 11164 - RNA, 14 nt, Artificial Sequence
  Description of Artificial Sequence: Synthetic oligonucleotide
auaucuucuacauc

SEQ ID NO: 11165 - RNA, 14 nt, Artificial Sequence
  Description of Artificial Sequence: Synthetic oligonucleotide
aauaucuucuacau

SEQ ID NO: 11166 - RNA, 14 nt, Artificial Sequence
  Description of Artificial Sequence: Synthetic oligonucleotide
uaauaucuucuaca

SEQ ID NO: 11167 - RNA, 14 nt, Artificial Sequence
  Description of Artificial Sequence: Synthetic oligonucleotide
uuaauaucuucuac

SEQ ID NO: 11168 - RNA, 14 nt, Artificial Sequence
  Description of Artificial Sequence: Synthetic oligonucleotide
auuaauaucuucua

SEQ ID NO: 11169 - RNA, 14 nt, Artificial Sequence
  Description of Artificial Sequence: Synthetic oligonucleotide
uauuaauaucuucu

SEQ ID NO: 11170 - RNA, 14 nt, Artificial Sequence
  Description of Artificial Sequence: Synthetic oligonucleotide
auauuaauaucuuc

SEQ ID NO: 11171 - RNA, 14 nt, Artificial Sequence
  Description of Artificial Sequence: Synthetic oligonucleotide
uauauuaauaucuu

SEQ ID NO: 11172 - RNA, 14 nt, Artificial Sequence
  Description of Artificial Sequence: Synthetic oligonucleotide
auauauuaauaucu

SEQ ID NO: 11173 - RNA, 14 nt, Artificial Sequence
  Description of Artificial Sequence: Synthetic oligonucleotide
aauauauuaauauc

SEQ ID NO: 11174 - RNA, 14 nt, Artificial Sequence
  Description of Artificial Sequence: Synthetic oligonucleotide
uaauauauuaauau

SEQ ID NO: 11175 - RNA, 14 nt, Artificial Sequence
  Description of Artificial Sequence: Synthetic oligonucleotide
auaauauauuaaua

SEQ ID NO: 11176 - RNA, 14 nt, Artificial Sequence
  Description of Artificial Sequence: Synthetic oligonucleotide
gauaauauauuaau

SEQ ID NO: 11177 - RNA, 14 nt, Artificial Sequence
  Description of Artificial Sequence: Synthetic oligonucleotide
agauaauauauuaa

SEQ ID NO: 11178 - RNA, 14 nt, Artificial Sequence
  Description of Artificial Sequence: Synthetic oligonucleotide
aagauaauauauua

SEQ ID NO: 11179 - RNA, 14 nt, Artificial Sequence
  Description of Artificial Sequence: Synthetic oligonucleotide
aaagauaauauauu

SEQ ID NO: 11180 - RNA, 14 nt, Artificial Sequence
  Description of Artificial Sequence: Synthetic oligonucleotide
uaaagauaauauau

SEQ ID NO: 11181 - RNA, 14 nt, Artificial Sequence
  Description of Artificial Sequence: Synthetic oligonucleotide
uuaaagauaauaua

SEQ ID NO: 11182 - RNA, 14 nt, Artificial Sequence
  Description of Artificial Sequence: Synthetic oligonucleotide
guuaaagauaauau

SEQ ID NO: 11183 - RNA, 14 nt, Artificial Sequence
  Description of Artificial Sequence: Synthetic oligonucleotide
aguuaaagauaaua

SEQ ID NO: 11184 - RNA, 14 nt, Artificial Sequence
  Description of Artificial Sequence: Synthetic oligonucleotide
caguuaaagauaau

SEQ ID NO: 11185 - RNA, 14 nt, Artificial Sequence
  Description of Artificial Sequence: Synthetic oligonucleotide
ucaguuaaagauaa

SEQ ID NO: 11186 - RNA, 14 nt, Artificial Sequence
  Description of Artificial Sequence: Synthetic oligonucleotide
gucaguuaaagaua

SEQ ID NO: 11187 - RNA, 14 nt, Artificial Sequence
  Description of Artificial Sequence: Synthetic oligonucleotide
cgucaguuaaagau

SEQ ID NO: 11188 - RNA, 14 nt, Artificial Sequence
  Description of Artificial Sequence: Synthetic oligonucleotide
ucgucaguuaaaga

SEQ ID NO: 11189 - RNA, 14 nt, Artificial Sequence
  Description of Artificial Sequence: Synthetic oligonucleotide
uucgucaguuaaag

SEQ ID NO: 11190 - RNA, 14 nt, Artificial Sequence
  Description of Artificial Sequence: Synthetic oligonucleotide
cuucgucaguuaaa

SEQ ID NO: 11191 - RNA, 14 nt, Artificial Sequence
  Description of Artificial Sequence: Synthetic oligonucleotide
ucuucgucaguuaa

SEQ ID NO: 11192 - RNA, 14 nt, Artificial Sequence
  Description of Artificial Sequence: Synthetic oligonucleotide
cucuucgucaguua

SEQ ID NO: 11193 - RNA, 14 nt, Artificial Sequence
  Description of Artificial Sequence: Synthetic oligonucleotide
gcucuucgucaguu

SEQ ID NO: 11194 - RNA, 14 nt, Artificial Sequence
  Description of Artificial Sequence: Synthetic oligonucleotide
ggcucuucgucagu

SEQ ID NO: 11195 - RNA, 14 nt, Artificial Sequence
  Description of Artificial Sequence: Synthetic oligonucleotide
aggcucuucgucag

SEQ ID NO: 11196 - RNA, 14 nt, Artificial Sequence
  Description of Artificial Sequence: Synthetic oligonucleotide
aaggcucuucguca

SEQ ID NO: 11197 - RNA, 14 nt, Artificial Sequence
  Description of Artificial Sequence: Synthetic oligonucleotide
gaaggcucuucguc

SEQ ID NO: 11198 - RNA, 14 nt, Artificial Sequence
  Description of Artificial Sequence: Synthetic oligonucleotide
ggaaggcucuucgu

SEQ ID NO: 11199 - RNA, 14 nt, Artificial Sequence
  Description of Artificial Sequence: Synthetic oligonucleotide
uggaaggcucuucg

SEQ ID NO: 11200 - RNA, 14 nt, Artificial Sequence
  Description of Artificial Sequence: Synthetic oligonucleotide
guggaaggcucuuc

SEQ ID NO: 11201 - RNA, 14 nt, Artificial Sequence
  Description of Artificial Sequence: Synthetic oligonucleotide
gguggaaggcucuu

SEQ ID NO: 11202 - RNA, 14 nt, Artificial Sequence
  Description of Artificial Sequence: Synthetic oligonucleotide
agguggaaggcucu

SEQ ID NO: 11203 - RNA, 14 nt, Artificial Sequence
  Description of Artificial Sequence: Synthetic oligonucleotide
gagguggaaggcuc

SEQ ID NO: 11204 - RNA, 14 nt, Artificial Sequence
  Description of Artificial Sequence: Synthetic oligonucleotide
ugagguggaaggcu

SEQ ID NO: 11205 - RNA, 14 nt, Artificial Sequence
  Description of Artificial Sequence: Synthetic oligonucleotide
cugagguggaaggc

SEQ ID NO: 11206 - RNA, 14 nt, Artificial Sequence
  Description of Artificial Sequence: Synthetic oligonucleotide
ccugagguggaagg

SEQ ID NO: 11207 - RNA, 14 nt, Artificial Sequence
  Description of Artificial Sequence: Synthetic oligonucleotide
uccugagguggaag

SEQ ID NO: 11208 - RNA, 14 nt, Artificial Sequence
  Description of Artificial Sequence: Synthetic oligonucleotide
cuccugagguggaa

SEQ ID NO: 11209 - RNA, 14 nt, Artificial Sequence
  Description of Artificial Sequence: Synthetic oligonucleotide
ucuccugaggugga

SEQ ID NO: 11210 - RNA, 14 nt, Artificial Sequence
  Description of Artificial Sequence: Synthetic oligonucleotide
uucuccugaggugg

SEQ ID NO: 11211 - RNA, 14 nt, Artificial Sequence
  Description of Artificial Sequence: Synthetic oligonucleotide
guucuccugaggug

SEQ ID NO: 11212 - RNA, 14 nt, Artificial Sequence
  Description of Artificial Sequence: Synthetic oligonucleotide
uguucuccugaggu

SEQ ID NO: 11213 - RNA, 14 nt, Artificial Sequence
  Description of Artificial Sequence: Synthetic oligonucleotide
uuguucuccugagg

SEQ ID NO: 11214 - RNA, 14 nt, Artificial Sequence
  Description of Artificial Sequence: Synthetic oligonucleotide
uuuguucuccugag

SEQ ID NO: 11215 - RNA, 14 nt, Artificial Sequence
  Description of Artificial Sequence: Synthetic oligonucleotide
guuuguucuccuga

SEQ ID NO: 11216 - RNA, 14 nt, Artificial Sequence
  Description of Artificial Sequence: Synthetic oligonucleotide
aguuuguucuccug

SEQ ID NO: 11217 - RNA, 14 nt, Artificial Sequence
  Description of Artificial Sequence: Synthetic oligonucleotide
aaguuuguucuccu

SEQ ID NO: 11218 - RNA, 14 nt, Artificial Sequence
  Description of Artificial Sequence: Synthetic oligonucleotide
uaaguuuguucucc

SEQ ID NO: 11219 - RNA, 14 nt, Artificial Sequence
  Description of Artificial Sequence: Synthetic oligonucleotide
guaaguuuguucuc

SEQ ID NO: 11220 - RNA, 14 nt, Artificial Sequence
  Description of Artificial Sequence: Synthetic oligonucleotide
aguaaguuuguucu

SEQ ID NO: 11221 - RNA, 14 nt, Artificial Sequence
  Description of Artificial Sequence: Synthetic oligonucleotide
uaguaaguuuguuc

SEQ ID NO: 11222 - RNA, 14 nt, Artificial Sequence
  Description of Artificial Sequence: Synthetic oligonucleotide
auaguaaguuuguu

SEQ ID NO: 11223 - RNA, 14 nt, Artificial Sequence
  Description of Artificial Sequence: Synthetic oligonucleotide
cauaguaaguuugu

SEQ ID NO: 11224 - RNA, 14 nt, Artificial Sequence
  Description of Artificial Sequence: Synthetic oligonucleotide
ucauaguaaguuug

SEQ ID NO: 11225 - RNA, 14 nt, Artificial Sequence
  Description of Artificial Sequence: Synthetic oligonucleotide
aucauaguaaguuu

SEQ ID NO: 11226 - RNA, 14 nt, Artificial Sequence
  Description of Artificial Sequence: Synthetic oligonucleotide
aaucauaguaaguu

SEQ ID NO: 11227 - RNA, 14 nt, Artificial Sequence
  Description of Artificial Sequence: Synthetic oligonucleotide
aaaucauaguaagu

SEQ ID NO: 11228 - RNA, 14 nt, Artificial Sequence
  Description of Artificial Sequence: Synthetic oligonucleotide
caaaucauaguaag

SEQ ID NO: 11229 - RNA, 14 nt, Artificial Sequence
  Description of Artificial Sequence: Synthetic oligonucleotide
ccaaaucauaguaa

SEQ ID NO: 11230 - RNA, 14 nt, Artificial Sequence
  Description of Artificial Sequence: Synthetic oligonucleotide
accaaaucauagua

SEQ ID NO: 11231 - RNA, 14 nt, Artificial Sequence
  Description of Artificial Sequence: Synthetic oligonucleotide
uaccaaaucauagu

SEQ ID NO: 11232 - RNA, 14 nt, Artificial Sequence
  Description of Artificial Sequence: Synthetic oligonucleotide
uuaccaaaucauag

SEQ ID NO: 11233 - RNA, 14 nt, Artificial Sequence
  Description of Artificial Sequence: Synthetic oligonucleotide
uuuaccaaaucaua

SEQ ID NO: 11234 - RNA, 14 nt, Artificial Sequence
  Description of Artificial Sequence: Synthetic oligonucleotide
uuuuaccaaaucau

SEQ ID NO: 11235 - RNA, 14 nt, Artificial Sequence
  Description of Artificial Sequence: Synthetic oligonucleotide
cuuuuaccaaauca

SEQ ID NO: 11236 - RNA, 14 nt, Artificial Sequence
  Description of Artificial Sequence: Synthetic oligonucleotide
gcuuuuaccaaauc

SEQ ID NO: 11237 - RNA, 14 nt, Artificial Sequence
  Description of Artificial Sequence: Synthetic oligonucleotide
ugcuuuuaccaaau

SEQ ID NO: 11238 - RNA, 14 nt, Artificial Sequence
  Description of Artificial Sequence: Synthetic oligonucleotide
augcuuuuaccaaa

SEQ ID NO: 11239 - RNA, 14 nt, Artificial Sequence
  Description of Artificial Sequence: Synthetic oligonucleotide
aaugcuuuuaccaa

SEQ ID NO: 11240 - RNA, 14 nt, Artificial Sequence
  Description of Artificial Sequence: Synthetic oligonucleotide
aaaugcuuuuacca

SEQ ID NO: 11241 - RNA, 14 nt, Artificial Sequence
  Description of Artificial Sequence: Synthetic oligonucleotide
uaaaugcuuuuacc

SEQ ID NO: 11242 - RNA, 14 nt, Artificial Sequence
  Description of Artificial Sequence: Synthetic oligonucleotide
auaaaugcuuuuac

SEQ ID NO: 11243 - RNA, 14 nt, Artificial Sequence
  Description of Artificial Sequence: Synthetic oligonucleotide
cauaaaugcuuuua

SEQ ID NO: 11244 - RNA, 14 nt, Artificial Sequence
  Description of Artificial Sequence: Synthetic oligonucleotide
ccauaaaugcuuuu

SEQ ID NO: 11245 - RNA, 14 nt, Artificial Sequence
  Description of Artificial Sequence: Synthetic oligonucleotide
gccauaaaugcuuu

SEQ ID NO: 11246 - RNA, 14 nt, Artificial Sequence
  Description of Artificial Sequence: Synthetic oligonucleotide
ugccauaaaugcuu

SEQ ID NO: 11247 - RNA, 14 nt, Artificial Sequence
  Description of Artificial Sequence: Synthetic oligonucleotide
cugccauaaaugcu

SEQ ID NO: 11248 - RNA, 14 nt, Artificial Sequence
  Description of Artificial Sequence: Synthetic oligonucleotide
ucugccauaaaugc

SEQ ID NO: 11249 - RNA, 14 nt, Artificial Sequence
  Description of Artificial Sequence: Synthetic oligonucleotide
uucugccauaaaug

SEQ ID NO: 11250 - RNA, 14 nt, Artificial Sequence
  Description of Artificial Sequence: Synthetic oligonucleotide
uuucugccauaaau

SEQ ID NO: 11251 - RNA, 14 nt, Artificial Sequence
  Description of Artificial Sequence: Synthetic oligonucleotide
auuucugccauaaa

SEQ ID NO: 11252 - RNA, 14 nt, Artificial Sequence
  Description of Artificial Sequence: Synthetic oligonucleotide
aauuucugccauaa

SEQ ID NO: 11253 - RNA, 14 nt, Artificial Sequence
  Description of Artificial Sequence: Synthetic oligonucleotide
gaauuucugccaua

SEQ ID NO: 11254 - RNA, 14 nt, Artificial Sequence
  Description of Artificial Sequence: Synthetic oligonucleotide
cgaauuucugccau

SEQ ID NO: 11255 - RNA, 14 nt, Artificial Sequence
  Description of Artificial Sequence: Synthetic oligonucleotide
ucgaauuucugcca

SEQ ID NO: 11256 - RNA, 14 nt, Artificial Sequence
  Description of Artificial Sequence: Synthetic oligonucleotide
gucgaauuucugcc

SEQ ID NO: 11257 - RNA, 14 nt, Artificial Sequence
  Description of Artificial Sequence: Synthetic oligonucleotide
ugucgaauuucugc

SEQ ID NO: 11258 - RNA, 14 nt, Artificial Sequence
  Description of Artificial Sequence: Synthetic oligonucleotide
uugucgaauuucug

SEQ ID NO: 11259 - RNA, 14 nt, Artificial Sequence
  Description of Artificial Sequence: Synthetic oligonucleotide
auugucgaauuucu

SEQ ID NO: 11260 - RNA, 14 nt, Artificial Sequence
  Description of Artificial Sequence: Synthetic oligonucleotide
uauugucgaauuuc

SEQ ID NO: 11261 - RNA, 14 nt, Artificial Sequence
  Description of Artificial Sequence: Synthetic oligonucleotide
auauugucgaauuu

SEQ ID NO: 11262 - RNA, 14 nt, Artificial Sequence
  Description of Artificial Sequence: Synthetic oligonucleotide
uauauugucgaauu

SEQ ID NO: 11263 - RNA, 14 nt, Artificial Sequence
  Description of Artificial Sequence: Synthetic oligonucleotide
auauauugucgaau

SEQ ID NO: 11264 - RNA, 14 nt, Artificial Sequence
  Description of Artificial Sequence: Synthetic oligonucleotide
uauauauugucgaa

SEQ ID NO: 11265 - RNA, 14 nt, Artificial Sequence
  Description of Artificial Sequence: Synthetic oligonucleotide
uuauauauugucga

SEQ ID NO: 11266 - RNA, 14 nt, Artificial Sequence
  Description of Artificial Sequence: Synthetic oligonucleotide
cuuauauauugucg

SEQ ID NO: 11267 - RNA, 14 nt, Artificial Sequence
  Description of Artificial Sequence: Synthetic oligonucleotide
ccuuauauauuguc

SEQ ID NO: 11268 - RNA, 14 nt, Artificial Sequence
  Description of Artificial Sequence: Synthetic oligonucleotide
cccuuauauauugu

SEQ ID NO: 11269 - RNA, 14 nt, Artificial Sequence
  Description of Artificial Sequence: Synthetic oligonucleotide
ucccuuauauauug

SEQ ID NO: 11270 - RNA, 14 nt, Artificial Sequence
  Description of Artificial Sequence: Synthetic oligonucleotide
uucccuuauauauu

SEQ ID NO: 11271 - RNA, 14 nt, Artificial Sequence
  Description of Artificial Sequence: Synthetic oligonucleotide
guucccuuauauau

SEQ ID NO: 11272 - RNA, 14 nt, Artificial Sequence
  Description of Artificial Sequence: Synthetic oligonucleotide
aguucccuuauaua

SEQ ID NO: 11273 - RNA, 14 nt, Artificial Sequence
  Description of Artificial Sequence: Synthetic oligonucleotide
uaguucccuuauau

SEQ ID NO: 11274 - RNA, 14 nt, Artificial Sequence
  Description of Artificial Sequence: Synthetic oligonucleotide
uuaguucccuuaua

SEQ ID NO: 11275 - RNA, 14 nt, Artificial Sequence
  Description of Artificial Sequence: Synthetic oligonucleotide
uuuaguucccuuau

SEQ ID NO: 11276 - RNA, 14 nt, Artificial Sequence
  Description of Artificial Sequence: Synthetic oligonucleotide
auuuaguucccuua

SEQ ID NO: 11277 - RNA, 14 nt, Artificial Sequence
  Description of Artificial Sequence: Synthetic oligonucleotide
gauuuaguucccuu

SEQ ID NO: 11278 - RNA, 14 nt, Artificial Sequence
  Description of Artificial Sequence: Synthetic oligonucleotide
agauuuaguucccu

SEQ ID NO: 11279 - RNA, 14 nt, Artificial Sequence
  Description of Artificial Sequence: Synthetic oligonucleotide
uagauuuaguuccc

SEQ ID NO: 11280 - RNA, 14 nt, Artificial Sequence
  Description of Artificial Sequence: Synthetic oligonucleotide
uuagauuuaguucc

SEQ ID NO: 11281 - RNA, 14 nt, Artificial Sequence
  Description of Artificial Sequence: Synthetic oligonucleotide
auuagauuuaguuc

SEQ ID NO: 11282 - RNA, 14 nt, Artificial Sequence
  Description of Artificial Sequence: Synthetic oligonucleotide
aauuagauuuaguu

SEQ ID NO: 11283 - RNA, 14 nt, Artificial Sequence
  Description of Artificial Sequence: Synthetic oligonucleotide
uaauuagauuuagu

SEQ ID NO: 11284 - RNA, 14 nt, Artificial Sequence
  Description of Artificial Sequence: Synthetic oligonucleotide
auaauuagauuuag

SEQ ID NO: 11285 - RNA, 14 nt, Artificial Sequence
  Description of Artificial Sequence: Synthetic oligonucleotide
uauaauuagauuua

SEQ ID NO: 11286 - RNA, 14 nt, Artificial Sequence
  Description of Artificial Sequence: Synthetic oligonucleotide
uuauaauuagauuu

SEQ ID NO: 11287 - RNA, 14 nt, Artificial Sequence
  Description of Artificial Sequence: Synthetic oligonucleotide
uuuauaauuagauu

SEQ ID NO: 11288 - RNA, 14 nt, Artificial Sequence
  Description of Artificial Sequence: Synthetic oligonucleotide
uuuuauaauuagau

SEQ ID NO: 11289 - RNA, 14 nt, Artificial Sequence
  Description of Artificial Sequence: Synthetic oligonucleotide
cuuuuauaauuaga

SEQ ID NO: 11290 - RNA, 14 nt, Artificial Sequence
  Description of Artificial Sequence: Synthetic oligonucleotide
acuuuuauaauuag

SEQ ID NO: 11291 - RNA, 14 nt, Artificial Sequence
  Description of Artificial Sequence: Synthetic oligonucleotide
aacuuuuauaauua

SEQ ID NO: 11292 - RNA, 14 nt, Artificial Sequence
  Description of Artificial Sequence: Synthetic oligonucleotide
aaacuuuuauaauu

SEQ ID NO: 11293 - RNA, 14 nt, Artificial Sequence
  Description of Artificial Sequence: Synthetic oligonucleotide
aaaacuuuuauaau

SEQ ID NO: 11294 - RNA, 14 nt, Artificial Sequence
  Description of Artificial Sequence: Synthetic oligonucleotide
aaaaacuuuuauaa

SEQ ID NO: 11295 - RNA, 14 nt, Artificial Sequence
  Description of Artificial Sequence: Synthetic oligonucleotide
uaaaaacuuuuaua

SEQ ID NO: 11296 - RNA, 14 nt, Artificial Sequence
  Description of Artificial Sequence: Synthetic oligonucleotide
cuaaaaacuuuuau

SEQ ID NO: 11297 - RNA, 14 nt, Artificial Sequence
  Description of Artificial Sequence: Synthetic oligonucleotide
ucuaaaaacuuuua

SEQ ID NO: 11298 - RNA, 14 nt, Artificial Sequence
  Description of Artificial Sequence: Synthetic oligonucleotide
cucuaaaaacuuuu

SEQ ID NO: 11299 - RNA, 14 nt, Artificial Sequence
  Description of Artificial Sequence: Synthetic oligonucleotide
ucucuaaaaacuuu

SEQ ID NO: 11300 - RNA, 14 nt, Artificial Sequence
  Description of Artificial Sequence: Synthetic oligonucleotide
cucucuaaaaacuu

SEQ ID NO: 11301 - RNA, 14 nt, Artificial Sequence
  Description of Artificial Sequence: Synthetic oligonucleotide
gcucucuaaaaacu

SEQ ID NO: 11302 - RNA, 14 nt, Artificial Sequence
  Description of Artificial Sequence: Synthetic oligonucleotide
ggcucucuaaaaac

SEQ ID NO: 11303 - RNA, 14 nt, Artificial Sequence
  Description of Artificial Sequence: Synthetic oligonucleotide
gggcucucuaaaaa

SEQ ID NO: 11304 - RNA, 14 nt, Artificial Sequence
  Description of Artificial Sequence: Synthetic oligonucleotide
agggcucucuaaaa

SEQ ID NO: 11305 - RNA, 14 nt, Artificial Sequence
  Description of Artificial Sequence: Synthetic oligonucleotide
aagggcucucuaaa

SEQ ID NO: 11306 - RNA, 14 nt, Artificial Sequence
  Description of Artificial Sequence: Synthetic oligonucleotide
aaagggcucucuaa

SEQ ID NO: 11307 - RNA, 14 nt, Artificial Sequence
  Description of Artificial Sequence: Synthetic oligonucleotide
caaagggcucucua

SEQ ID NO: 11308 - RNA, 14 nt, Artificial Sequence
  Description of Artificial Sequence: Synthetic oligonucleotide
acaaagggcucucu

SEQ ID NO: 11309 - RNA, 14 nt, Artificial Sequence
  Description of Artificial Sequence: Synthetic oligonucleotide
gacaaagggcucuc

SEQ ID NO: 11310 - RNA, 14 nt, Artificial Sequence
  Description of Artificial Sequence: Synthetic oligonucleotide
agacaaagggcucu

SEQ ID NO: 11311 - RNA, 14 nt, Artificial Sequence
  Description of Artificial Sequence: Synthetic oligonucleotide
gagacaaagggcuc

SEQ ID NO: 11312 - RNA, 14 nt, Artificial Sequence
  Description of Artificial Sequence: Synthetic oligonucleotide
ggagacaaagggcu

SEQ ID NO: 11313 - RNA, 14 nt, Artificial Sequence
  Description of Artificial Sequence: Synthetic oligonucleotide
uggagacaaagggc

SEQ ID NO: 11314 - RNA, 14 nt, Artificial Sequence
  Description of Artificial Sequence: Synthetic oligonucleotide
uuggagacaaaggg

SEQ ID NO: 11315 - RNA, 14 nt, Artificial Sequence
  Description of Artificial Sequence: Synthetic oligonucleotide
auuggagacaaagg

SEQ ID NO: 11316 - RNA, 14 nt, Artificial Sequence
  Description of Artificial Sequence: Synthetic oligonucleotide
aauuggagacaaag

SEQ ID NO: 11317 - RNA, 14 nt, Artificial Sequence
  Description of Artificial Sequence: Synthetic oligonucleotide
gaauuggagacaaa

SEQ ID NO: 11318 - RNA, 14 nt, Artificial Sequence
  Description of Artificial Sequence: Synthetic oligonucleotide
ugaauuggagacaa

SEQ ID NO: 11319 - RNA, 14 nt, Artificial Sequence
  Description of Artificial Sequence: Synthetic oligonucleotide
uugaauuggagaca

SEQ ID NO: 11320 - RNA, 14 nt, Artificial Sequence
  Description of Artificial Sequence: Synthetic oligonucleotide
uuugaauuggagac

SEQ ID NO: 11321 - RNA, 14 nt, Artificial Sequence
  Description of Artificial Sequence: Synthetic oligonucleotide
uuuugaauuggaga

SEQ ID NO: 11322 - RNA, 14 nt, Artificial Sequence
  Description of Artificial Sequence: Synthetic oligonucleotide
auuuugaauuggag

SEQ ID NO: 11323 - RNA, 14 nt, Artificial Sequence
  Description of Artificial Sequence: Synthetic oligonucleotide
aauuuugaauugga

SEQ ID NO: 11324 - RNA, 14 nt, Artificial Sequence
  Description of Artificial Sequence: Synthetic oligonucleotide
caauuuugaauugg

SEQ ID NO: 11325 - RNA, 14 nt, Artificial Sequence
  Description of Artificial Sequence: Synthetic oligonucleotide
acaauuuugaauug

SEQ ID NO: 11326 - RNA, 14 nt, Artificial Sequence
  Description of Artificial Sequence: Synthetic oligonucleotide
aacaauuuugaauu

SEQ ID NO: 11327 - RNA, 14 nt, Artificial Sequence
  Description of Artificial Sequence: Synthetic oligonucleotide
aaacaauuuugaau

SEQ ID NO: 11328 - RNA, 14 nt, Artificial Sequence
  Description of Artificial Sequence: Synthetic oligonucleotide
aaaacaauuuugaa

SEQ ID NO: 11329 - RNA, 14 nt, Artificial Sequence
  Description of Artificial Sequence: Synthetic oligonucleotide
gaaaacaauuuuga

SEQ ID NO: 11330 - RNA, 14 nt, Artificial Sequence
  Description of Artificial Sequence: Synthetic oligonucleotide
ugaaaacaauuuug

SEQ ID NO: 11331 - RNA, 14 nt, Artificial Sequence
  Description of Artificial Sequence: Synthetic oligonucleotide
cugaaaacaauuuu

SEQ ID NO: 11332 - RNA, 14 nt, Artificial Sequence
  Description of Artificial Sequence: Synthetic oligonucleotide
gcugaaaacaauuu

SEQ ID NO: 11333 - RNA, 14 nt, Artificial Sequence
  Description of Artificial Sequence: Synthetic oligonucleotide
agcugaaaacaauu

SEQ ID NO: 11334 - RNA, 14 nt, Artificial Sequence
  Description of Artificial Sequence: Synthetic oligonucleotide
uagcugaaaacaau

SEQ ID NO: 11335 - RNA, 14 nt, Artificial Sequence
  Description of Artificial Sequence: Synthetic oligonucleotide
uuagcugaaaacaa

SEQ ID NO: 11336 - RNA, 14 nt, Artificial Sequence
  Description of Artificial Sequence: Synthetic oligonucleotide
auuagcugaaaaca

SEQ ID NO: 11337 - RNA, 14 nt, Artificial Sequence
  Description of Artificial Sequence: Synthetic oligonucleotide
cauuagcugaaaac

SEQ ID NO: 11338 - RNA, 14 nt, Artificial Sequence
  Description of Artificial Sequence: Synthetic oligonucleotide
ucauuagcugaaaa

SEQ ID NO: 11339 - RNA, 14 nt, Artificial Sequence
  Description of Artificial Sequence: Synthetic oligonucleotide
aucauuagcugaaa

SEQ ID NO: 11340 - RNA, 14 nt, Artificial Sequence
  Description of Artificial Sequence: Synthetic oligonucleotide
caucauuagcugaa

SEQ ID NO: 11341 - RNA, 14 nt, Artificial Sequence
  Description of Artificial Sequence: Synthetic oligonucleotide
acaucauuagcuga

SEQ ID NO: 11342 - RNA, 14 nt, Artificial Sequence
  Description of Artificial Sequence: Synthetic oligonucleotide
uacaucauuagcug

SEQ ID NO: 11343 - RNA, 14 nt, Artificial Sequence
  Description of Artificial Sequence: Synthetic oligonucleotide
cuacaucauuagcu

SEQ ID NO: 11344 - RNA, 14 nt, Artificial Sequence
  Description of Artificial Sequence: Synthetic oligonucleotide
ucuacaucauuagc

SEQ ID NO: 11345 - RNA, 14 nt, Artificial Sequence
  Description of Artificial Sequence: Synthetic oligonucleotide
uucuacaucauuag

SEQ ID NO: 11346 - RNA, 14 nt, Artificial Sequence
  Description of Artificial Sequence: Synthetic oligonucleotide
uuucuacaucauua

SEQ ID NO: 11347 - RNA, 14 nt, Artificial Sequence
  Description of Artificial Sequence: Synthetic oligonucleotide
uuuucuacaucauu

SEQ ID NO: 11348 - RNA, 14 nt, Artificial Sequence
  Description of Artificial Sequence: Synthetic oligonucleotide
auuuucuacaucau

SEQ ID NO: 11349 - RNA, 14 nt, Artificial Sequence
  Description of Artificial Sequence: Synthetic oligonucleotide
uauuuucuacauca

SEQ ID NO: 11350 - RNA, 14 nt, Artificial Sequence
  Description of Artificial Sequence: Synthetic oligonucleotide
auauuuucuacauc

SEQ ID NO: 11351 - RNA, 14 nt, Artificial Sequence
  Description of Artificial Sequence: Synthetic oligonucleotide
uauauuuucuacau

SEQ ID NO: 11352 - RNA, 14 nt, Artificial Sequence
  Description of Artificial Sequence: Synthetic oligonucleotide
auauauuuucuaca

SEQ ID NO: 11353 - RNA, 14 nt, Artificial Sequence
  Description of Artificial Sequence: Synthetic oligonucleotide
aauauauuuucuac

SEQ ID NO: 11354 - RNA, 14 nt, Artificial Sequence
  Description of Artificial Sequence: Synthetic oligonucleotide
aaauauauuuucua

SEQ ID NO: 11355 - RNA, 14 nt, Artificial Sequence
  Description of Artificial Sequence: Synthetic oligonucleotide
uaaauauauuuucu

SEQ ID NO: 11356 - RNA, 14 nt, Artificial Sequence
  Description of Artificial Sequence: Synthetic oligonucleotide
cuaaauauauuuuc

SEQ ID NO: 11357 - RNA, 14 nt, Artificial Sequence
  Description of Artificial Sequence: Synthetic oligonucleotide
acuaaauauauuuu

SEQ ID NO: 11358 - RNA, 14 nt, Artificial Sequence
  Description of Artificial Sequence: Synthetic oligonucleotide
gacuaaauauauuu

SEQ ID NO: 11359 - RNA, 14 nt, Artificial Sequence
  Description of Artificial Sequence: Synthetic oligonucleotide
cgacuaaauauauu

SEQ ID NO: 11360 - RNA, 14 nt, Artificial Sequence
  Description of Artificial Sequence: Synthetic oligonucleotide
gcgacuaaauauau

SEQ ID NO: 11361 - RNA, 14 nt, Artificial Sequence
  Description of Artificial Sequence: Synthetic oligonucleotide
ugcgacuaaauaua

SEQ ID NO: 11362 - RNA, 14 nt, Artificial Sequence
  Description of Artificial Sequence: Synthetic oligonucleotide
augcgacuaaauau

SEQ ID NO: 11363 - RNA, 14 nt, Artificial Sequence
  Description of Artificial Sequence: Synthetic oligonucleotide
uaugcgacuaaaua

SEQ ID NO: 11364 - RNA, 14 nt, Artificial Sequence
  Description of Artificial Sequence: Synthetic oligonucleotide
cuaugcgacuaaau

SEQ ID NO: 11365 - RNA, 14 nt, Artificial Sequence
  Description of Artificial Sequence: Synthetic oligonucleotide
acuaugcgacuaaa

SEQ ID NO: 11366 - RNA, 14 nt, Artificial Sequence
  Description of Artificial Sequence: Synthetic oligonucleotide
uacuaugcgacuaa

SEQ ID NO: 11367 - RNA, 14 nt, Artificial Sequence
  Description of Artificial Sequence: Synthetic oligonucleotide
cuacuaugcgacua

SEQ ID NO: 11368 - RNA, 14 nt, Artificial Sequence
  Description of Artificial Sequence: Synthetic oligonucleotide
ucuacuaugcgacu

SEQ ID NO: 11369 - RNA, 14 nt, Artificial Sequence
  Description of Artificial Sequence: Synthetic oligonucleotide
aucuacuaugcgac

SEQ ID NO: 11370 - RNA, 14 nt, Artificial Sequence
  Description of Artificial Sequence: Synthetic oligonucleotide
uaucuacuaugcga

SEQ ID NO: 11371 - RNA, 14 nt, Artificial Sequence
  Description of Artificial Sequence: Synthetic oligonucleotide
auaucuacuaugcg

SEQ ID NO: 11372 - RNA, 14 nt, Artificial Sequence
  Description of Artificial Sequence: Synthetic oligonucleotide
uauaucuacuaugc

SEQ ID NO: 11373 - RNA, 14 nt, Artificial Sequence
  Description of Artificial Sequence: Synthetic oligonucleotide
guauaucuacuaug

SEQ ID NO: 11374 - RNA, 14 nt, Artificial Sequence
  Description of Artificial Sequence: Synthetic oligonucleotide
uguauaucuacuau

SEQ ID NO: 11375 - RNA, 14 nt, Artificial Sequence
  Description of Artificial Sequence: Synthetic oligonucleotide
auguauaucuacua

SEQ ID NO: 11376 - RNA, 14 nt, Artificial Sequence
  Description of Artificial Sequence: Synthetic oligonucleotide
cauguauaucuacu

SEQ ID NO: 11377 - RNA, 14 nt, Artificial Sequence
  Description of Artificial Sequence: Synthetic oligonucleotide
ucauguauaucuac

SEQ ID NO: 11378 - RNA, 14 nt, Artificial Sequence
  Description of Artificial Sequence: Synthetic oligonucleotide
uucauguauaucua

SEQ ID NO: 11379 - RNA, 14 nt, Artificial Sequence
  Description of Artificial Sequence: Synthetic oligonucleotide
guucauguauaucu

SEQ ID NO: 11380 - RNA, 14 nt, Artificial Sequence
  Description of Artificial Sequence: Synthetic oligonucleotide
aguucauguauauc

SEQ ID NO: 11381 - RNA, 14 nt, Artificial Sequence
  Description of Artificial Sequence: Synthetic oligonucleotide
aaguucauguauau

SEQ ID NO: 11382 - RNA, 14 nt, Artificial Sequence
  Description of Artificial Sequence: Synthetic oligonucleotide
uaaguucauguaua

SEQ ID NO: 11383 - RNA, 14 nt, Artificial Sequence
  Description of Artificial Sequence: Synthetic oligonucleotide
cuaaguucauguau

SEQ ID NO: 11384 - RNA, 14 nt, Artificial Sequence
  Description of Artificial Sequence: Synthetic oligonucleotide
acuaaguucaugua

SEQ ID NO: 11385 - RNA, 14 nt, Artificial Sequence
  Description of Artificial Sequence: Synthetic oligonucleotide
cacuaaguucaugu

SEQ ID NO: 11386 - RNA, 14 nt, Artificial Sequence
  Description of Artificial Sequence: Synthetic oligonucleotide
acacuaaguucaug

SEQ ID NO: 11387 - RNA, 14 nt, Artificial Sequence
  Description of Artificial Sequence: Synthetic oligonucleotide
uacacuaaguucau

SEQ ID NO: 11388 - RNA, 14 nt, Artificial Sequence
  Description of Artificial Sequence: Synthetic oligonucleotide
uuacacuaaguuca

SEQ ID NO: 11389 - RNA, 14 nt, Artificial Sequence
  Description of Artificial Sequence: Synthetic oligonucleotide
uuuacacuaaguuc

SEQ ID NO: 11390 - RNA, 14 nt, Artificial Sequence
  Description of Artificial Sequence: Synthetic oligonucleotide
cuuuacacuaaguu

SEQ ID NO: 11391 - RNA, 14 nt, Artificial Sequence
  Description of Artificial Sequence: Synthetic oligonucleotide
acuuuacacuaagu

SEQ ID NO: 11392 - RNA, 14 nt, Artificial Sequence
  Description of Artificial Sequence: Synthetic oligonucleotide
aacuuuacacuaag

SEQ ID NO: 11393 - RNA, 14 nt, Artificial Sequence
  Description of Artificial Sequence: Synthetic oligonucleotide
uaacuuuacacuaa

SEQ ID NO: 11394 - RNA, 14 nt, Artificial Sequence
  Description of Artificial Sequence: Synthetic oligonucleotide
guaacuuuacacua

SEQ ID NO: 11395 - RNA, 14 nt, Artificial Sequence
  Description of Artificial Sequence: Synthetic oligonucleotide
aguaacuuuacacu

SEQ ID NO: 11396 - RNA, 14 nt, Artificial Sequence
  Description of Artificial Sequence: Synthetic oligonucleotide
caguaacuuuacac

SEQ ID NO: 11397 - RNA, 14 nt, Artificial Sequence
  Description of Artificial Sequence: Synthetic oligonucleotide
ccaguaacuuuaca

SEQ ID NO: 11398 - RNA, 14 nt, Artificial Sequence
  Description of Artificial Sequence: Synthetic oligonucleotide
cccaguaacuuuac

SEQ ID NO: 11399 - RNA, 14 nt, Artificial Sequence
  Description of Artificial Sequence: Synthetic oligonucleotide
gcccaguaacuuua

SEQ ID NO: 11400 - RNA, 14 nt, Artificial Sequence
  Description of Artificial Sequence: Synthetic oligonucleotide
ggcccaguaacuuu

SEQ ID NO: 11401 - RNA, 14 nt, Artificial Sequence
  Description of Artificial Sequence: Synthetic oligonucleotide
uggcccaguaacuu

SEQ ID NO: 11402 - RNA, 14 nt, Artificial Sequence
  Description of Artificial Sequence: Synthetic oligonucleotide
auggcccaguaacu

SEQ ID NO: 11403 - RNA, 14 nt, Artificial Sequence
  Description of Artificial Sequence: Synthetic oligonucleotide
uauggcccaguaac

SEQ ID NO: 11404 - RNA, 14 nt, Artificial Sequence
  Description of Artificial Sequence: Synthetic oligonucleotide
auauggcccaguaa

SEQ ID NO: 11405 - RNA, 14 nt, Artificial Sequence
  Description of Artificial Sequence: Synthetic oligonucleotide
uauauggcccagua

SEQ ID NO: 11406 - RNA, 14 nt, Artificial Sequence
  Description of Artificial Sequence: Synthetic oligonucleotide
cuauauggcccagu

SEQ ID NO: 11407 - RNA, 14 nt, Artificial Sequence
  Description of Artificial Sequence: Synthetic oligonucleotide
ucuauauggcccag

SEQ ID NO: 11408 - RNA, 14 nt, Artificial Sequence
  Description of Artificial Sequence: Synthetic oligonucleotide
uucuauauggccca

SEQ ID NO: 11409 - RNA, 14 nt, Artificial Sequence
  Description of Artificial Sequence: Synthetic oligonucleotide
cuucuauauggccc

SEQ ID NO: 11410 - RNA, 14 nt, Artificial Sequence
  Description of Artificial Sequence: Synthetic oligonucleotide
ucuucuauauggcc

SEQ ID NO: 11411 - RNA, 14 nt, Artificial Sequence
  Description of Artificial Sequence: Synthetic oligonucleotide
aucuucuauauggc

SEQ ID NO: 11412 - RNA, 14 nt, Artificial Sequence
  Description of Artificial Sequence: Synthetic oligonucleotide
uaucuucuauaugg

SEQ ID NO: 11413 - RNA, 14 nt, Artificial Sequence
  Description of Artificial Sequence: Synthetic oligonucleotide
guaucuucuauaug

SEQ ID NO: 11414 - RNA, 14 nt, Artificial Sequence
  Description of Artificial Sequence: Synthetic oligonucleotide
uguaucuucuauau

SEQ ID NO: 11415 - RNA, 14 nt, Artificial Sequence
  Description of Artificial Sequence: Synthetic oligonucleotide
cuguaucuucuaua

SEQ ID NO: 11416 - RNA, 14 nt, Artificial Sequence
  Description of Artificial Sequence: Synthetic oligonucleotide
acuguaucuucuau

SEQ ID NO: 11417 - RNA, 14 nt, Artificial Sequence
  Description of Artificial Sequence: Synthetic oligonucleotide
uacuguaucuucua

SEQ ID NO: 11418 - RNA, 14 nt, Artificial Sequence
  Description of Artificial Sequence: Synthetic oligonucleotide
cuacuguaucuucu

SEQ ID NO: 11419 - RNA, 14 nt, Artificial Sequence
  Description of Artificial Sequence: Synthetic oligonucleotide
ucuacuguaucuuc

SEQ ID NO: 11420 - RNA, 14 nt, Artificial Sequence
  Description of Artificial Sequence: Synthetic oligonucleotide
uucuacuguaucuu

SEQ ID NO: 11421 - RNA, 14 nt, Artificial Sequence
  Description of Artificial Sequence: Synthetic oligonucleotide
uuucuacuguaucu

SEQ ID NO: 11422 - RNA, 14 nt, Artificial Sequence
  Description of Artificial Sequence: Synthetic oligonucleotide
auuucuacuguauc

SEQ ID NO: 11423 - RNA, 14 nt, Artificial Sequence
  Description of Artificial Sequence: Synthetic oligonucleotide
cauuucuacuguau

SEQ ID NO: 11424 - RNA, 14 nt, Artificial Sequence
  Description of Artificial Sequence: Synthetic oligonucleotide
ucauuucuacugua

SEQ ID NO: 11425 - RNA, 14 nt, Artificial Sequence
  Description of Artificial Sequence: Synthetic oligonucleotide
gucauuucuacugu

SEQ ID NO: 11426 - RNA, 14 nt, Artificial Sequence
  Description of Artificial Sequence: Synthetic oligonucleotide
ugucauuucuacug

SEQ ID NO: 11427 - RNA, 14 nt, Artificial Sequence
  Description of Artificial Sequence: Synthetic oligonucleotide
cugucauuucuacu

SEQ ID NO: 11428 - RNA, 14 nt, Artificial Sequence
  Description of Artificial Sequence: Synthetic oligonucleotide
ucugucauuucuac

SEQ ID NO: 11429 - RNA, 14 nt, Artificial Sequence
  Description of Artificial Sequence: Synthetic oligonucleotide
aucugucauuucua

SEQ ID NO: 11430 - RNA, 14 nt, Artificial Sequence
  Description of Artificial Sequence: Synthetic oligonucleotide
caucugucauuucu

SEQ ID NO: 11431 - RNA, 14 nt, Artificial Sequence
  Description of Artificial Sequence: Synthetic oligonucleotide
ucaucugucauuuc

SEQ ID NO: 11432 - RNA, 14 nt, Artificial Sequence
  Description of Artificial Sequence: Synthetic oligonucleotide
uucaucugucauuu

SEQ ID NO: 11433 - RNA, 14 nt, Artificial Sequence
  Description of Artificial Sequence: Synthetic oligonucleotide
cuucaucugucauu

SEQ ID NO: 11434 - RNA, 14 nt, Artificial Sequence
  Description of Artificial Sequence: Synthetic oligonucleotide
ccuucaucugucau

SEQ ID NO: 11435 - RNA, 14 nt, Artificial Sequence
  Description of Artificial Sequence: Synthetic oligonucleotide
gccuucaucuguca

SEQ ID NO: 11436 - RNA, 14 nt, Artificial Sequence
  Description of Artificial Sequence: Synthetic oligonucleotide
ugccuucaucuguc

SEQ ID NO: 11437 - RNA, 14 nt, Artificial Sequence
  Description of Artificial Sequence: Synthetic oligonucleotide
cugccuucaucugu

SEQ ID NO: 11438 - RNA, 14 nt, Artificial Sequence
  Description of Artificial Sequence: Synthetic oligonucleotide
acugccuucaucug

SEQ ID NO: 11439 - RNA, 14 nt, Artificial Sequence
  Description of Artificial Sequence: Synthetic oligonucleotide
gacugccuucaucu

SEQ ID NO: 11440 - RNA, 14 nt, Artificial Sequence
  Description of Artificial Sequence: Synthetic oligonucleotide
ggacugccuucauc

SEQ ID NO: 11441 - RNA, 14 nt, Artificial Sequence
  Description of Artificial Sequence: Synthetic oligonucleotide
gggacugccuucau

SEQ ID NO: 11442 - RNA, 14 nt, Artificial Sequence
  Description of Artificial Sequence: Synthetic oligonucleotide
ggggacugccuuca

SEQ ID NO: 11443 - RNA, 14 nt, Artificial Sequence
  Description of Artificial Sequence: Synthetic oligonucleotide
uggggacugccuuc

SEQ ID NO: 11444 - RNA, 14 nt, Artificial Sequence
  Description of Artificial Sequence: Synthetic oligonucleotide
auggggacugccuu

SEQ ID NO: 11445 - RNA, 14 nt, Artificial Sequence
  Description of Artificial Sequence: Synthetic oligonucleotide
gauggggacugccu

SEQ ID NO: 11446 - RNA, 14 nt, Artificial Sequence
  Description of Artificial Sequence: Synthetic oligonucleotide
ggauggggacugcc

SEQ ID NO: 11447 - RNA, 14 nt, Artificial Sequence
  Description of Artificial Sequence: Synthetic oligonucleotide
uggauggggacugc

SEQ ID NO: 11448 - RNA, 14 nt, Artificial Sequence
  Description of Artificial Sequence: Synthetic oligonucleotide
guggauggggacug

SEQ ID NO: 11449 - RNA, 14 nt, Artificial Sequence
  Description of Artificial Sequence: Synthetic oligonucleotide
aguggauggggacu

SEQ ID NO: 11450 - RNA, 14 nt, Artificial Sequence
  Description of Artificial Sequence: Synthetic oligonucleotide
uaguggauggggac

SEQ ID NO: 11451 - RNA, 14 nt, Artificial Sequence
  Description of Artificial Sequence: Synthetic oligonucleotide
cuaguggaugggga

SEQ ID NO: 11452 - RNA, 14 nt, Artificial Sequence
  Description of Artificial Sequence: Synthetic oligonucleotide
acuaguggaugggg

SEQ ID NO: 11453 - RNA, 14 nt, Artificial Sequence
  Description of Artificial Sequence: Synthetic oligonucleotide
uacuaguggauggg

SEQ ID NO: 11454 - RNA, 14 nt, Artificial Sequence
  Description of Artificial Sequence: Synthetic oligonucleotide
cuacuaguggaugg

SEQ ID NO: 11455 - RNA, 14 nt, Artificial Sequence
  Description of Artificial Sequence: Synthetic oligonucleotide
ccuacuaguggaug

SEQ ID NO: 11456 - RNA, 14 nt, Artificial Sequence
  Description of Artificial Sequence: Synthetic oligonucleotide
uccuacuaguggau

SEQ ID NO: 11457 - RNA, 14 nt, Artificial Sequence
  Description of Artificial Sequence: Synthetic oligonucleotide
uuccuacuagugga

SEQ ID NO: 11458 - RNA, 14 nt, Artificial Sequence
  Description of Artificial Sequence: Synthetic oligonucleotide
cuuccuacuagugg

SEQ ID NO: 11459 - RNA, 14 nt, Artificial Sequence
  Description of Artificial Sequence: Synthetic oligonucleotide
gcuuccuacuagug

SEQ ID NO: 11460 - RNA, 14 nt, Artificial Sequence
  Description of Artificial Sequence: Synthetic oligonucleotide
agcuuccuacuagu

SEQ ID NO: 11461 - RNA, 14 nt, Artificial Sequence
  Description of Artificial Sequence: Synthetic oligonucleotide
cagcuuccuacuag

SEQ ID NO: 11462 - RNA, 14 nt, Artificial Sequence
  Description of Artificial Sequence: Synthetic oligonucleotide
gcagcuuccuacua

SEQ ID NO: 11463 - RNA, 14 nt, Artificial Sequence
  Description of Artificial Sequence: Synthetic oligonucleotide
agcagcuuccuacu

SEQ ID NO: 11464 - RNA, 14 nt, Artificial Sequence
  Description of Artificial Sequence: Synthetic oligonucleotide
aagcagcuuccuac

SEQ ID NO: 11465 - RNA, 14 nt, Artificial Sequence
  Description of Artificial Sequence: Synthetic oligonucleotide
aaagcagcuuccua

SEQ ID NO: 11466 - RNA, 14 nt, Artificial Sequence
  Description of Artificial Sequence: Synthetic oligonucleotide
caaagcagcuuccu

SEQ ID NO: 11467 - RNA, 14 nt, Artificial Sequence
  Description of Artificial Sequence: Synthetic oligonucleotide
ucaaagcagcuucc

SEQ ID NO: 11468 - RNA, 14 nt, Artificial Sequence
  Description of Artificial Sequence: Synthetic oligonucleotide
uucaaagcagcuuc

SEQ ID NO: 11469 - RNA, 14 nt, Artificial Sequence
  Description of Artificial Sequence: Synthetic oligonucleotide
cuucaaagcagcuu

SEQ ID NO: 11470 - RNA, 14 nt, Artificial Sequence
  Description of Artificial Sequence: Synthetic oligonucleotide
ucuucaaagcagcu

SEQ ID NO: 11471 - RNA, 14 nt, Artificial Sequence
  Description of Artificial Sequence: Synthetic oligonucleotide
gucuucaaagcagc

SEQ ID NO: 11472 - RNA, 14 nt, Artificial Sequence
  Description of Artificial Sequence: Synthetic oligonucleotide
agucuucaaagcag

SEQ ID NO: 11473 - RNA, 14 nt, Artificial Sequence
  Description of Artificial Sequence: Synthetic oligonucleotide
aagucuucaaagca

SEQ ID NO: 11474 - RNA, 14 nt, Artificial Sequence
  Description of Artificial Sequence: Synthetic oligonucleotide
uaagucuucaaagc

SEQ ID NO: 11475 - RNA, 14 nt, Artificial Sequence
  Description of Artificial Sequence: Synthetic oligonucleotide
cuaagucuucaaag

SEQ ID NO: 11476 - RNA, 14 nt, Artificial Sequence
  Description of Artificial Sequence: Synthetic oligonucleotide
gcuaagucuucaaa

SEQ ID NO: 11477 - RNA, 14 nt, Artificial Sequence
  Description of Artificial Sequence: Synthetic oligonucleotide
ugcuaagucuucaa

SEQ ID NO: 11478 - RNA, 14 nt, Artificial Sequence
  Description of Artificial Sequence: Synthetic oligonucleotide
cugcuaagucuuca

SEQ ID NO: 11479 - RNA, 14 nt, Artificial Sequence
  Description of Artificial Sequence: Synthetic oligonucleotide
ucugcuaagucuuc

SEQ ID NO: 11480 - RNA, 14 nt, Artificial Sequence
  Description of Artificial Sequence: Synthetic oligonucleotide
cucugcuaagucuu

SEQ ID NO: 11481 - RNA, 14 nt, Artificial Sequence
  Description of Artificial Sequence: Synthetic oligonucleotide
ccucugcuaagucu

SEQ ID NO: 11482 - RNA, 14 nt, Artificial Sequence
  Description of Artificial Sequence: Synthetic oligonucleotide
uccucugcuaaguc

SEQ ID NO: 11483 - RNA, 14 nt, Artificial Sequence
  Description of Artificial Sequence: Synthetic oligonucleotide
uuccucugcuaagu

SEQ ID NO: 11484 - RNA, 14 nt, Artificial Sequence
  Description of Artificial Sequence: Synthetic oligonucleotide
guuccucugcuaag

SEQ ID NO: 11485 - RNA, 14 nt, Artificial Sequence
  Description of Artificial Sequence: Synthetic oligonucleotide
aguuccucugcuaa

SEQ ID NO: 11486 - RNA, 14 nt, Artificial Sequence
  Description of Artificial Sequence: Synthetic oligonucleotide
caguuccucugcua

SEQ ID NO: 11487 - RNA, 14 nt, Artificial Sequence
  Description of Artificial Sequence: Synthetic oligonucleotide
ccaguuccucugcu

SEQ ID NO: 11488 - RNA, 14 nt, Artificial Sequence
  Description of Artificial Sequence: Synthetic oligonucleotide
gccaguuccucugc

SEQ ID NO: 11489 - RNA, 14 nt, Artificial Sequence
  Description of Artificial Sequence: Synthetic oligonucleotide
ugccaguuccucug

SEQ ID NO: 11490 - RNA, 14 nt, Artificial Sequence
  Description of Artificial Sequence: Synthetic oligonucleotide
augccaguuccucu

SEQ ID NO: 11491 - RNA, 14 nt, Artificial Sequence
  Description of Artificial Sequence: Synthetic oligonucleotide
aaugccaguuccuc

SEQ ID NO: 11492 - RNA, 14 nt, Artificial Sequence
  Description of Artificial Sequence: Synthetic oligonucleotide
aaaugccaguuccu

SEQ ID NO: 11493 - RNA, 14 nt, Artificial Sequence
  Description of Artificial Sequence: Synthetic oligonucleotide
caaaugccaguucc

SEQ ID NO: 11494 - RNA, 14 nt, Artificial Sequence
  Description of Artificial Sequence: Synthetic oligonucleotide
ucaaaugccaguuc

SEQ ID NO: 11495 - RNA, 14 nt, Artificial Sequence
  Description of Artificial Sequence: Synthetic oligonucleotide
aucaaaugccaguu

SEQ ID NO: 11496 - RNA, 14 nt, Artificial Sequence
  Description of Artificial Sequence: Synthetic oligonucleotide
gaucaaaugccagu

SEQ ID NO: 11497 - RNA, 14 nt, Artificial Sequence
  Description of Artificial Sequence: Synthetic oligonucleotide
ggaucaaaugccag

SEQ ID NO: 11498 - RNA, 14 nt, Artificial Sequence
  Description of Artificial Sequence: Synthetic oligonucleotide
uggaucaaaugcca

SEQ ID NO: 11499 - RNA, 14 nt, Artificial Sequence
  Description of Artificial Sequence: Synthetic oligonucleotide
auggaucaaaugcc

SEQ ID NO: 11500 - RNA, 14 nt, Artificial Sequence
  Description of Artificial Sequence: Synthetic oligonucleotide
uauggaucaaaugc

SEQ ID NO: 11501 - RNA, 14 nt, Artificial Sequence
  Description of Artificial Sequence: Synthetic oligonucleotide
auauggaucaaaug

SEQ ID NO: 11502 - RNA, 14 nt, Artificial Sequence
  Description of Artificial Sequence: Synthetic oligonucleotide
cauauggaucaaau

SEQ ID NO: 11503 - RNA, 14 nt, Artificial Sequence
  Description of Artificial Sequence: Synthetic oligonucleotide
ucauauggaucaaa

SEQ ID NO: 11504 - RNA, 14 nt, Artificial Sequence
  Description of Artificial Sequence: Synthetic oligonucleotide
uucauauggaucaa

SEQ ID NO: 11505 - RNA, 14 nt, Artificial Sequence
  Description of Artificial Sequence: Synthetic oligonucleotide
auucauauggauca

SEQ ID NO: 11506 - RNA, 14 nt, Artificial Sequence
  Description of Artificial Sequence: Synthetic oligonucleotide
gauucauauggauc

SEQ ID NO: 11507 - RNA, 14 nt, Artificial Sequence
  Description of Artificial Sequence: Synthetic oligonucleotide
cgauucauauggau

SEQ ID NO: 11508 - RNA, 14 nt, Artificial Sequence
  Description of Artificial Sequence: Synthetic oligonucleotide
acgauucauaugga

SEQ ID NO: 11509 - RNA, 14 nt, Artificial Sequence
  Description of Artificial Sequence: Synthetic oligonucleotide
uacgauucauaugg

SEQ ID NO: 11510 - RNA, 14 nt, Artificial Sequence
  Description of Artificial Sequence: Synthetic oligonucleotide
auacgauucauaug

SEQ ID NO: 11511 - RNA, 14 nt, Artificial Sequence
  Description of Artificial Sequence: Synthetic oligonucleotide
cauacgauucauau

SEQ ID NO: 11512 - RNA, 14 nt, Artificial Sequence
  Description of Artificial Sequence: Synthetic oligonucleotide
gcauacgauucaua

SEQ ID NO: 11513 - RNA, 14 nt, Artificial Sequence
  Description of Artificial Sequence: Synthetic oligonucleotide
agcauacgauucau

SEQ ID NO: 11514 - RNA, 14 nt, Artificial Sequence
  Description of Artificial Sequence: Synthetic oligonucleotide
gagcauacgauuca

SEQ ID NO: 11515 - RNA, 14 nt, Artificial Sequence
  Description of Artificial Sequence: Synthetic oligonucleotide
cgagcauacgauuc

SEQ ID NO: 11516 - RNA, 14 nt, Artificial Sequence
  Description of Artificial Sequence: Synthetic oligonucleotide
ucgagcauacgauu

SEQ ID NO: 11517 - RNA, 14 nt, Artificial Sequence
  Description of Artificial Sequence: Synthetic oligonucleotide
cucgagcauacgau

SEQ ID NO: 11518 - RNA, 14 nt, Artificial Sequence
  Description of Artificial Sequence: Synthetic oligonucleotide
ucucgagcauacga

SEQ ID NO: 11519 - RNA, 14 nt, Artificial Sequence
  Description of Artificial Sequence: Synthetic oligonucleotide
aucucgagcauacg

SEQ ID NO: 11520 - RNA, 14 nt, Artificial Sequence
  Description of Artificial Sequence: Synthetic oligonucleotide
uaucucgagcauac

SEQ ID NO: 11521 - RNA, 14 nt, Artificial Sequence
  Description of Artificial Sequence: Synthetic oligonucleotide
auaucucgagcaua

SEQ ID NO: 11522 - RNA, 14 nt, Artificial Sequence
  Description of Artificial Sequence: Synthetic oligonucleotide
aauaucucgagcau

SEQ ID NO: 11523 - RNA, 14 nt, Artificial Sequence
  Description of Artificial Sequence: Synthetic oligonucleotide
aaauaucucgagca

SEQ ID NO: 11524 - RNA, 14 nt, Artificial Sequence
  Description of Artificial Sequence: Synthetic oligonucleotide
aaaauaucucgagc

SEQ ID NO: 11525 - RNA, 14 nt, Artificial Sequence
  Description of Artificial Sequence: Synthetic oligonucleotide
caaaauaucucgag

SEQ ID NO: 11526 - RNA, 14 nt, Artificial Sequence
  Description of Artificial Sequence: Synthetic oligonucleotide
gcaaaauaucucga

SEQ ID NO: 11527 - RNA, 14 nt, Artificial Sequence
  Description of Artificial Sequence: Synthetic oligonucleotide
cgcaaaauaucucg

SEQ ID NO: 11528 - RNA, 14 nt, Artificial Sequence
  Description of Artificial Sequence: Synthetic oligonucleotide
ucgcaaaauaucuc

SEQ ID NO: 11529 - RNA, 14 nt, Artificial Sequence
  Description of Artificial Sequence: Synthetic oligonucleotide
gucgcaaaauaucu

SEQ ID NO: 11530 - RNA, 14 nt, Artificial Sequence
  Description of Artificial Sequence: Synthetic oligonucleotide
ggucgcaaaauauc

SEQ ID NO: 11531 - RNA, 14 nt, Artificial Sequence
  Description of Artificial Sequence: Synthetic oligonucleotide
aggucgcaaaauau

SEQ ID NO: 11532 - RNA, 14 nt, Artificial Sequence
  Description of Artificial Sequence: Synthetic oligonucleotide
caggucgcaaaaua

SEQ ID NO: 11533 - RNA, 14 nt, Artificial Sequence
  Description of Artificial Sequence: Synthetic oligonucleotide
ccaggucgcaaaau

SEQ ID NO: 11534 - RNA, 14 nt, Artificial Sequence
  Description of Artificial Sequence: Synthetic oligonucleotide
accaggucgcaaaa

SEQ ID NO: 11535 - RNA, 14 nt, Artificial Sequence
  Description of Artificial Sequence: Synthetic oligonucleotide
aaccaggucgcaaa

SEQ ID NO: 11536 - RNA, 14 nt, Artificial Sequence
  Description of Artificial Sequence: Synthetic oligonucleotide
aaaccaggucgcaa

SEQ ID NO: 11537 - RNA, 14 nt, Artificial Sequence
  Description of Artificial Sequence: Synthetic oligonucleotide
aaaaccaggucgca

SEQ ID NO: 11538 - RNA, 14 nt, Artificial Sequence
  Description of Artificial Sequence: Synthetic oligonucleotide
gaaaaccaggucgc

SEQ ID NO: 11539 - RNA, 14 nt, Artificial Sequence
  Description of Artificial Sequence: Synthetic oligonucleotide
ugaaaaccaggucg

SEQ ID NO: 11540 - RNA, 14 nt, Artificial Sequence
  Description of Artificial Sequence: Synthetic oligonucleotide
augaaaaccagguc

SEQ ID NO: 11541 - RNA, 14 nt, Artificial Sequence
  Description of Artificial Sequence: Synthetic oligonucleotide
caugaaaaccaggu

SEQ ID NO: 11542 - RNA, 14 nt, Artificial Sequence
  Description of Artificial Sequence: Synthetic oligonucleotide
ucaugaaaaccagg

SEQ ID NO: 11543 - RNA, 14 nt, Artificial Sequence
  Description of Artificial Sequence: Synthetic oligonucleotide
aucaugaaaaccag

SEQ ID NO: 11544 - RNA, 14 nt, Artificial Sequence
  Description of Artificial Sequence: Synthetic oligonucleotide
gaucaugaaaacca

SEQ ID NO: 11545 - RNA, 14 nt, Artificial Sequence
  Description of Artificial Sequence: Synthetic oligonucleotide
cgaucaugaaaacc

SEQ ID NO: 11546 - RNA, 14 nt, Artificial Sequence
  Description of Artificial Sequence: Synthetic oligonucleotide
acgaucaugaaaac

SEQ ID NO: 11547 - RNA, 14 nt, Artificial Sequence
  Description of Artificial Sequence: Synthetic oligonucleotide
aacgaucaugaaaa

SEQ ID NO: 11548 - RNA, 14 nt, Artificial Sequence
  Description of Artificial Sequence: Synthetic oligonucleotide
aaacgaucaugaaa

SEQ ID NO: 11549 - RNA, 14 nt, Artificial Sequence
  Description of Artificial Sequence: Synthetic oligonucleotide
gaaacgaucaugaa

SEQ ID NO: 11550 - RNA, 14 nt, Artificial Sequence
  Description of Artificial Sequence: Synthetic oligonucleotide
ggaaacgaucauga

SEQ ID NO: 11551 - RNA, 14 nt, Artificial Sequence
  Description of Artificial Sequence: Synthetic oligonucleotide
aggaaacgaucaug

SEQ ID NO: 11552 - RNA, 14 nt, Artificial Sequence
  Description of Artificial Sequence: Synthetic oligonucleotide
aaggaaacgaucau

SEQ ID NO: 11553 - RNA, 14 nt, Artificial Sequence
  Description of Artificial Sequence: Synthetic oligonucleotide
uaaggaaacgauca

SEQ ID NO: 11554 - RNA, 14 nt, Artificial Sequence
  Description of Artificial Sequence: Synthetic oligonucleotide
cuaaggaaacgauc

SEQ ID NO: 11555 - RNA, 14 nt, Artificial Sequence
  Description of Artificial Sequence: Synthetic oligonucleotide
acuaaggaaacgau

SEQ ID NO: 11556 - RNA, 14 nt, Artificial Sequence
  Description of Artificial Sequence: Synthetic oligonucleotide
gacuaaggaaacga

SEQ ID NO: 11557 - RNA, 14 nt, Artificial Sequence
  Description of Artificial Sequence: Synthetic oligonucleotide
ugacuaaggaaacg

SEQ ID NO: 11558 - RNA, 14 nt, Artificial Sequence
  Description of Artificial Sequence: Synthetic oligonucleotide
cugacuaaggaaac

SEQ ID NO: 11559 - RNA, 14 nt, Artificial Sequence
  Description of Artificial Sequence: Synthetic oligonucleotide
acugacuaaggaaa

SEQ ID NO: 11560 - RNA, 14 nt, Artificial Sequence
  Description of Artificial Sequence: Synthetic oligonucleotide
aacugacuaaggaa

SEQ ID NO: 11561 - RNA, 14 nt, Artificial Sequence
  Description of Artificial Sequence: Synthetic oligonucleotide
uaacugacuaagga

SEQ ID NO: 11562 - RNA, 14 nt, Artificial Sequence
  Description of Artificial Sequence: Synthetic oligonucleotide
auaacugacuaagg

SEQ ID NO: 11563 - RNA, 14 nt, Artificial Sequence
  Description of Artificial Sequence: Synthetic oligonucleotide
gauaacugacuaag

SEQ ID NO: 11564 - RNA, 14 nt, Artificial Sequence
  Description of Artificial Sequence: Synthetic oligonucleotide
ugauaacugacuaa

SEQ ID NO: 11565 - RNA, 14 nt, Artificial Sequence
  Description of Artificial Sequence: Synthetic oligonucleotide
uugauaacugacua

SEQ ID NO: 11566 - RNA, 14 nt, Artificial Sequence
  Description of Artificial Sequence: Synthetic oligonucleotide
uuugauaacugacu

SEQ ID NO: 11567 - RNA, 14 nt, Artificial Sequence
  Description of Artificial Sequence: Synthetic oligonucleotide
cuuugauaacugac

SEQ ID NO: 11568 - RNA, 14 nt, Artificial Sequence
  Description of Artificial Sequence: Synthetic oligonucleotide
gcuuugauaacuga

SEQ ID NO: 11569 - RNA, 14 nt, Artificial Sequence
  Description of Artificial Sequence: Synthetic oligonucleotide
ggcuuugauaacug

SEQ ID NO: 11570 - RNA, 14 nt, Artificial Sequence
  Description of Artificial Sequence: Synthetic oligonucleotide
aggcuuugauaacu

SEQ ID NO: 11571 - RNA, 14 nt, Artificial Sequence
  Description of Artificial Sequence: Synthetic oligonucleotide
caggcuuugauaac

SEQ ID NO: 11572 - RNA, 14 nt, Artificial Sequence
  Description of Artificial Sequence: Synthetic oligonucleotide
ccaggcuuugauaa

SEQ ID NO: 11573 - RNA, 14 nt, Artificial Sequence
  Description of Artificial Sequence: Synthetic oligonucleotide
cccaggcuuugaua

SEQ ID NO: 11574 - RNA, 14 nt, Artificial Sequence
  Description of Artificial Sequence: Synthetic oligonucleotide
ccccaggcuuugau

SEQ ID NO: 11575 - RNA, 14 nt, Artificial Sequence
  Description of Artificial Sequence: Synthetic oligonucleotide
gccccaggcuuuga

SEQ ID NO: 11576 - RNA, 14 nt, Artificial Sequence
  Description of Artificial Sequence: Synthetic oligonucleotide
ugccccaggcuuug

SEQ ID NO: 11577 - RNA, 14 nt, Artificial Sequence
  Description of Artificial Sequence: Synthetic oligonucleotide
cugccccaggcuuu

SEQ ID NO: 11578 - RNA, 14 nt, Artificial Sequence
  Description of Artificial Sequence: Synthetic oligonucleotide
gcugccccaggcuu

SEQ ID NO: 11579 - RNA, 14 nt, Artificial Sequence
  Description of Artificial Sequence: Synthetic oligonucleotide
ugcugccccaggcu

SEQ ID NO: 11580 - RNA, 14 nt, Artificial Sequence
  Description of Artificial Sequence: Synthetic oligonucleotide
gugcugccccaggc

SEQ ID NO: 11581 - RNA, 14 nt, Artificial Sequence
  Description of Artificial Sequence: Synthetic oligonucleotide
agugcugccccagg

SEQ ID NO: 11582 - RNA, 14 nt, Artificial Sequence
  Description of Artificial Sequence: Synthetic oligonucleotide
aagugcugccccag

SEQ ID NO: 11583 - RNA, 14 nt, Artificial Sequence
  Description of Artificial Sequence: Synthetic oligonucleotide
aaagugcugcccca

SEQ ID NO: 11584 - RNA, 14 nt, Artificial Sequence
  Description of Artificial Sequence: Synthetic oligonucleotide
uaaagugcugcccc

SEQ ID NO: 11585 - RNA, 14 nt, Artificial Sequence
  Description of Artificial Sequence: Synthetic oligonucleotide
auaaagugcugccc

SEQ ID NO: 11586 - RNA, 14 nt, Artificial Sequence
  Description of Artificial Sequence: Synthetic oligonucleotide
aauaaagugcugcc

SEQ ID NO: 11587 - RNA, 14 nt, Artificial Sequence
  Description of Artificial Sequence: Synthetic oligonucleotide
aaauaaagugcugc

SEQ ID NO: 11588 - RNA, 14 nt, Artificial Sequence
  Description of Artificial Sequence: Synthetic oligonucleotide
caaauaaagugcug

SEQ ID NO: 11589 - RNA, 14 nt, Artificial Sequence
  Description of Artificial Sequence: Synthetic oligonucleotide
gcaaauaaagugcu

SEQ ID NO: 11590 - RNA, 14 nt, Artificial Sequence
  Description of Artificial Sequence: Synthetic oligonucleotide
ugcaaauaaagugc

SEQ ID NO: 11591 - RNA, 14 nt, Artificial Sequence
  Description of Artificial Sequence: Synthetic oligonucleotide
cugcaaauaaagug

SEQ ID NO: 11592 - RNA, 14 nt, Artificial Sequence
  Description of Artificial Sequence: Synthetic oligonucleotide
acugcaaauaaagu

SEQ ID NO: 11593 - RNA, 14 nt, Artificial Sequence
  Description of Artificial Sequence: Synthetic oligonucleotide
gacugcaaauaaag

SEQ ID NO: 11594 - RNA, 14 nt, Artificial Sequence
  Description of Artificial Sequence: Synthetic oligonucleotide
ugacugcaaauaaa

SEQ ID NO: 11595 - RNA, 14 nt, Artificial Sequence
  Description of Artificial Sequence: Synthetic oligonucleotide
uugacugcaaauaa

SEQ ID NO: 11596 - RNA, 14 nt, Artificial Sequence
  Description of Artificial Sequence: Synthetic oligonucleotide
auugacugcaaaua

SEQ ID NO: 11597 - RNA, 14 nt, Artificial Sequence
  Description of Artificial Sequence: Synthetic oligonucleotide
uauugacugcaaau

SEQ ID NO: 11598 - RNA, 14 nt, Artificial Sequence
  Description of Artificial Sequence: Synthetic oligonucleotide
cuauugacugcaaa

SEQ ID NO: 11599 - RNA, 14 nt, Artificial Sequence
  Description of Artificial Sequence: Synthetic oligonucleotide
ccuauugacugcaa

SEQ ID NO: 11600 - RNA, 14 nt, Artificial Sequence
  Description of Artificial Sequence: Synthetic oligonucleotide
gccuauugacugca

SEQ ID NO: 11601 - RNA, 14 nt, Artificial Sequence
  Description of Artificial Sequence: Synthetic oligonucleotide
cgccuauugacugc

SEQ ID NO: 11602 - RNA, 14 nt, Artificial Sequence
  Description of Artificial Sequence: Synthetic oligonucleotide
ucgccuauugacug

SEQ ID NO: 11603 - RNA, 14 nt, Artificial Sequence
  Description of Artificial Sequence: Synthetic oligonucleotide
uucgccuauugacu

SEQ ID NO: 11604 - RNA, 14 nt, Artificial Sequence
  Description of Artificial Sequence: Synthetic oligonucleotide
cuucgccuauugac

SEQ ID NO: 11605 - RNA, 14 nt, Artificial Sequence
  Description of Artificial Sequence: Synthetic oligonucleotide
ccuucgccuauuga

SEQ ID NO: 11606 - RNA, 14 nt, Artificial Sequence
  Description of Artificial Sequence: Synthetic oligonucleotide
accuucgccuauug

SEQ ID NO: 11607 - RNA, 14 nt, Artificial Sequence
  Description of Artificial Sequence: Synthetic oligonucleotide
aaccuucgccuauu

SEQ ID NO: 11608 - RNA, 14 nt, Artificial Sequence
  Description of Artificial Sequence: Synthetic oligonucleotide
aaaccuucgccuau

SEQ ID NO: 11609 - RNA, 14 nt, Artificial Sequence
  Description of Artificial Sequence: Synthetic oligonucleotide
gaaaccuucgccua

SEQ ID NO: 11610 - RNA, 14 nt, Artificial Sequence
  Description of Artificial Sequence: Synthetic oligonucleotide
ugaaaccuucgccu

SEQ ID NO: 11611 - RNA, 14 nt, Artificial Sequence
  Description of Artificial Sequence: Synthetic oligonucleotide
uugaaaccuucgcc

SEQ ID NO: 11612 - RNA, 14 nt, Artificial Sequence
  Description of Artificial Sequence: Synthetic oligonucleotide
uuugaaaccuucgc

SEQ ID NO: 11613 - RNA, 14 nt, Artificial Sequence
  Description of Artificial Sequence: Synthetic oligonucleotide
cuuugaaaccuucg

SEQ ID NO: 11614 - RNA, 14 nt, Artificial Sequence
  Description of Artificial Sequence: Synthetic oligonucleotide
ucuuugaaaccuuc

SEQ ID NO: 11615 - RNA, 14 nt, Artificial Sequence
  Description of Artificial Sequence: Synthetic oligonucleotide
uucuuugaaaccuu

SEQ ID NO: 11616 - RNA, 14 nt, Artificial Sequence
  Description of Artificial Sequence: Synthetic oligonucleotide
cuucuuugaaaccu

SEQ ID NO: 11617 - RNA, 14 nt, Artificial Sequence
  Description of Artificial Sequence: Synthetic oligonucleotide
gcuucuuugaaacc

SEQ ID NO: 11618 - RNA, 14 nt, Artificial Sequence
  Description of Artificial Sequence: Synthetic oligonucleotide
agcuucuuugaaac

SEQ ID NO: 11619 - RNA, 14 nt, Artificial Sequence
  Description of Artificial Sequence: Synthetic oligonucleotide
cagcuucuuugaaa

SEQ ID NO: 11620 - RNA, 14 nt, Artificial Sequence
  Description of Artificial Sequence: Synthetic oligonucleotide
acagcuucuuugaa

SEQ ID NO: 11621 - RNA, 14 nt, Artificial Sequence
  Description of Artificial Sequence: Synthetic oligonucleotide
aacagcuucuuuga

SEQ ID NO: 11622 - RNA, 14 nt, Artificial Sequence
  Description of Artificial Sequence: Synthetic oligonucleotide
gaacagcuucuuug

SEQ ID NO: 11623 - RNA, 14 nt, Artificial Sequence
  Description of Artificial Sequence: Synthetic oligonucleotide
ugaacagcuucuuu

SEQ ID NO: 11624 - RNA, 14 nt, Artificial Sequence
  Description of Artificial Sequence: Synthetic oligonucleotide
uugaacagcuucuu

SEQ ID NO: 11625 - RNA, 14 nt, Artificial Sequence
  Description of Artificial Sequence: Synthetic oligonucleotide
auugaacagcuucu

SEQ ID NO: 11626 - RNA, 14 nt, Artificial Sequence
  Description of Artificial Sequence: Synthetic oligonucleotide
uauugaacagcuuc

SEQ ID NO: 11627 - RNA, 14 nt, Artificial Sequence
  Description of Artificial Sequence: Synthetic oligonucleotide
auauugaacagcuu

SEQ ID NO: 11628 - RNA, 14 nt, Artificial Sequence
  Description of Artificial Sequence: Synthetic oligonucleotide
cauauugaacagcu

SEQ ID NO: 11629 - RNA, 14 nt, Artificial Sequence
  Description of Artificial Sequence: Synthetic oligonucleotide
acauauugaacagc

SEQ ID NO: 11630 - RNA, 14 nt, Artificial Sequence
  Description of Artificial Sequence: Synthetic oligonucleotide
aacauauugaacag

SEQ ID NO: 11631 - RNA, 14 nt, Artificial Sequence
  Description of Artificial Sequence: Synthetic oligonucleotide
aaacauauugaaca

SEQ ID NO: 11632 - RNA, 14 nt, Artificial Sequence
  Description of Artificial Sequence: Synthetic oligonucleotide
aaaacauauugaac

SEQ ID NO: 11633 - RNA, 14 nt, Artificial Sequence
  Description of Artificial Sequence: Synthetic oligonucleotide
uaaaacauauugaa

SEQ ID NO: 11634 - RNA, 14 nt, Artificial Sequence
  Description of Artificial Sequence: Synthetic oligonucleotide
guaaaacauauuga

SEQ ID NO: 11635 - RNA, 14 nt, Artificial Sequence
  Description of Artificial Sequence: Synthetic oligonucleotide
gguaaaacauauug

SEQ ID NO: 11636 - RNA, 14 nt, Artificial Sequence
  Description of Artificial Sequence: Synthetic oligonucleotide
ggguaaaacauauu

SEQ ID NO: 11637 - RNA, 14 nt, Artificial Sequence
  Description of Artificial Sequence: Synthetic oligonucleotide
uggguaaaacauau

SEQ ID NO: 11638 - RNA, 14 nt, Artificial Sequence
  Description of Artificial Sequence: Synthetic oligonucleotide
cuggguaaaacaua

SEQ ID NO: 11639 - RNA, 14 nt, Artificial Sequence
  Description of Artificial Sequence: Synthetic oligonucleotide
ccuggguaaaacau

SEQ ID NO: 11640 - RNA, 14 nt, Artificial Sequence
  Description of Artificial Sequence: Synthetic oligonucleotide
gccuggguaaaaca

SEQ ID NO: 11641 - RNA, 14 nt, Artificial Sequence
  Description of Artificial Sequence: Synthetic oligonucleotide
agccuggguaaaac

SEQ ID NO: 11642 - RNA, 14 nt, Artificial Sequence
  Description of Artificial Sequence: Synthetic oligonucleotide
cagccuggguaaaa

SEQ ID NO: 11643 - RNA, 14 nt, Artificial Sequence
  Description of Artificial Sequence: Synthetic oligonucleotide
gcagccuggguaaa

SEQ ID NO: 11644 - RNA, 14 nt, Artificial Sequence
  Description of Artificial Sequence: Synthetic oligonucleotide
agcagccuggguaa

SEQ ID NO: 11645 - RNA, 14 nt, Artificial Sequence
  Description of Artificial Sequence: Synthetic oligonucleotide
aagcagccugggua

SEQ ID NO: 11646 - RNA, 14 nt, Artificial Sequence
  Description of Artificial Sequence: Synthetic oligonucleotide
gaagcagccugggu

SEQ ID NO: 11647 - RNA, 14 nt, Artificial Sequence
  Description of Artificial Sequence: Synthetic oligonucleotide
agaagcagccuggg

SEQ ID NO: 11648 - RNA, 14 nt, Artificial Sequence
  Description of Artificial Sequence: Synthetic oligonucleotide
cagaagcagccugg

SEQ ID NO: 11649 - RNA, 14 nt, Artificial Sequence
  Description of Artificial Sequence: Synthetic oligonucleotide
ccagaagcagccug

SEQ ID NO: 11650 - RNA, 14 nt, Artificial Sequence
  Description of Artificial Sequence: Synthetic oligonucleotide
gccagaagcagccu

SEQ ID NO: 11651 - DNA, 14 bp, Artificial Sequence
  Description of Artificial Sequence: Synthetic oligonucleotide
ggccagaagcagcc

SEQ ID NO: 11652 - DNA, 14 bp, Artificial Sequence
  Description of Artificial Sequence: Synthetic oligonucleotide
gggccagaagcagc

SEQ ID NO: 11653 - DNA, 14 bp, Artificial Sequence
  Description of Artificial Sequence: Synthetic oligonucleotide
ggggccagaagcag

SEQ ID NO: 11654 - DNA, 14 bp, Artificial Sequence
  Description of Artificial Sequence: Synthetic oligonucleotide
aggggccagaagca

SEQ ID NO: 11655 - DNA, 14 bp, Artificial Sequence
  Description of Artificial Sequence: Synthetic oligonucleotide
caggggccagaagc

SEQ ID NO: 11656 - DNA, 14 bp, Artificial Sequence
  Description of Artificial Sequence: Synthetic oligonucleotide
acaggggccagaag

SEQ ID NO: 11657 - DNA, 14 bp, Artificial Sequence
  Description of Artificial Sequence: Synthetic oligonucleotide
aacaggggccagaa

SEQ ID NO: 11658 - DNA, 14 bp, Artificial Sequence
  Description of Artificial Sequence: Synthetic oligonucleotide
aaacaggggccaga

SEQ ID NO: 11659 - RNA, 14 nt, Artificial Sequence
  Description of Artificial Sequence: Synthetic oligonucleotide
uaaacaggggccag

SEQ ID NO: 11660 - RNA, 14 nt, Artificial Sequence
  Description of Artificial Sequence: Synthetic oligonucleotide
guaaacaggggcca

SEQ ID NO: 11661 - RNA, 14 nt, Artificial Sequence
  Description of Artificial Sequence: Synthetic oligonucleotide
gguaaacaggggcc

SEQ ID NO: 11662 - RNA, 14 nt, Artificial Sequence
  Description of Artificial Sequence: Synthetic oligonucleotide
ugguaaacaggggc

SEQ ID NO: 11663 - RNA, 14 nt, Artificial Sequence
  Description of Artificial Sequence: Synthetic oligonucleotide
gugguaaacagggg

SEQ ID NO: 11664 - RNA, 14 nt, Artificial Sequence
  Description of Artificial Sequence: Synthetic oligonucleotide
agugguaaacaggg

SEQ ID NO: 11665 - RNA, 14 nt, Artificial Sequence
  Description of Artificial Sequence: Synthetic oligonucleotide
cagugguaaacagg

SEQ ID NO: 11666 - RNA, 14 nt, Artificial Sequence
  Description of Artificial Sequence: Synthetic oligonucleotide
acagugguaaacag

SEQ ID NO: 11667 - RNA, 14 nt, Artificial Sequence
  Description of Artificial Sequence: Synthetic oligonucleotide
gacagugguaaaca

SEQ ID NO: 11668 - RNA, 14 nt, Artificial Sequence
  Description of Artificial Sequence: Synthetic oligonucleotide
agacagugguaaac

SEQ ID NO: 11669 - RNA, 14 nt, Artificial Sequence
  Description of Artificial Sequence: Synthetic oligonucleotide
gagacagugguaaa

SEQ ID NO: 11670 - RNA, 14 nt, Artificial Sequence
  Description of Artificial Sequence: Synthetic oligonucleotide
ggagacagugguaa

SEQ ID NO: 11671 - RNA, 14 nt, Artificial Sequence
  Description of Artificial Sequence: Synthetic oligonucleotide
uggagacaguggua

SEQ ID NO: 11672 - RNA, 14 nt, Artificial Sequence
  Description of Artificial Sequence: Synthetic oligonucleotide
auggagacaguggu

SEQ ID NO: 11673 - RNA, 14 nt, Artificial Sequence
  Description of Artificial Sequence: Synthetic oligonucleotide
aauggagacagugg

SEQ ID NO: 11674 - RNA, 14 nt, Artificial Sequence
  Description of Artificial Sequence: Synthetic oligonucleotide
uaauggagacagug

SEQ ID NO: 11675 - RNA, 14 nt, Artificial Sequence
  Description of Artificial Sequence: Synthetic oligonucleotide
guaauggagacagu

SEQ ID NO: 11676 - RNA, 14 nt, Artificial Sequence
  Description of Artificial Sequence: Synthetic oligonucleotide
aguaauggagacag

SEQ ID NO: 11677 - RNA, 14 nt, Artificial Sequence
  Description of Artificial Sequence: Synthetic oligonucleotide
aaguaauggagaca

SEQ ID NO: 11678 - RNA, 14 nt, Artificial Sequence
  Description of Artificial Sequence: Synthetic oligonucleotide
aaaguaauggagac

SEQ ID NO: 11679 - RNA, 14 nt, Artificial Sequence
  Description of Artificial Sequence: Synthetic oligonucleotide
caaaguaauggaga

SEQ ID NO: 11680 - RNA, 14 nt, Artificial Sequence
  Description of Artificial Sequence: Synthetic oligonucleotide
ucaaaguaauggag

SEQ ID NO: 11681 - RNA, 14 nt, Artificial Sequence
  Description of Artificial Sequence: Synthetic oligonucleotide
uucaaaguaaugga

SEQ ID NO: 11682 - RNA, 14 nt, Artificial Sequence
  Description of Artificial Sequence: Synthetic oligonucleotide
guucaaaguaaugg

SEQ ID NO: 11683 - RNA, 14 nt, Artificial Sequence
  Description of Artificial Sequence: Synthetic oligonucleotide
aguucaaaguaaug

SEQ ID NO: 11684 - RNA, 14 nt, Artificial Sequence
  Description of Artificial Sequence: Synthetic oligonucleotide
aaguucaaaguaau

SEQ ID NO: 11685 - RNA, 14 nt, Artificial Sequence
  Description of Artificial Sequence: Synthetic oligonucleotide
aaaguucaaaguaa

SEQ ID NO: 11686 - RNA, 14 nt, Artificial Sequence
  Description of Artificial Sequence: Synthetic oligonucleotide
aaaaguucaaagua

SEQ ID NO: 11687 - RNA, 14 nt, Artificial Sequence
  Description of Artificial Sequence: Synthetic oligonucleotide
caaaaguucaaagu

SEQ ID NO: 11688 - RNA, 14 nt, Artificial Sequence
  Description of Artificial Sequence: Synthetic oligonucleotide
ucaaaaguucaaag

SEQ ID NO: 11689 - RNA, 14 nt, Artificial Sequence
  Description of Artificial Sequence: Synthetic oligonucleotide
uucaaaaguucaaa

SEQ ID NO: 11690 - RNA, 14 nt, Artificial Sequence
  Description of Artificial Sequence: Synthetic oligonucleotide
cuucaaaaguucaa

SEQ ID NO: 11691 - RNA, 14 nt, Artificial Sequence
  Description of Artificial Sequence: Synthetic oligonucleotide
gcuucaaaaguuca

SEQ ID NO: 11692 - RNA, 14 nt, Artificial Sequence
  Description of Artificial Sequence: Synthetic oligonucleotide
ugcuucaaaaguuc

SEQ ID NO: 11693 - RNA, 14 nt, Artificial Sequence
  Description of Artificial Sequence: Synthetic oligonucleotide
cugcuucaaaaguu

SEQ ID NO: 11694 - RNA, 14 nt, Artificial Sequence
  Description of Artificial Sequence: Synthetic oligonucleotide
acugcuucaaaagu

SEQ ID NO: 11695 - RNA, 14 nt, Artificial Sequence
  Description of Artificial Sequence: Synthetic oligonucleotide
aacugcuucaaaag

SEQ ID NO: 11696 - RNA, 14 nt, Artificial Sequence
  Description of Artificial Sequence: Synthetic oligonucleotide
uaacugcuucaaaa

SEQ ID NO: 11697 - RNA, 14 nt, Artificial Sequence
  Description of Artificial Sequence: Synthetic oligonucleotide
cuaacugcuucaaa

SEQ ID NO: 11698 - RNA, 14 nt, Artificial Sequence
  Description of Artificial Sequence: Synthetic oligonucleotide
ucuaacugcuucaa

SEQ ID NO: 11699 - RNA, 14 nt, Artificial Sequence
  Description of Artificial Sequence: Synthetic oligonucleotide
uucuaacugcuuca

SEQ ID NO: 11700 - RNA, 14 nt, Artificial Sequence
  Description of Artificial Sequence: Synthetic oligonucleotide
cuucuaacugcuuc

SEQ ID NO: 11701 - RNA, 14 nt, Artificial Sequence
  Description of Artificial Sequence: Synthetic oligonucleotide
ucuucuaacugcuu

SEQ ID NO: 11702 - RNA, 14 nt, Artificial Sequence
  Description of Artificial Sequence: Synthetic oligonucleotide
uucuucuaacugcu

SEQ ID NO: 11703 - RNA, 14 nt, Artificial Sequence
  Description of Artificial Sequence: Synthetic oligonucleotide
uuucuucuaacugc

SEQ ID NO: 11704 - RNA, 14 nt, Artificial Sequence
  Description of Artificial Sequence: Synthetic oligonucleotide
uuuucuucuaacug

SEQ ID NO: 11705 - RNA, 14 nt, Artificial Sequence
  Description of Artificial Sequence: Synthetic oligonucleotide
uuuuucuucuaacu

SEQ ID NO: 11706 - RNA, 14 nt, Artificial Sequence
  Description of Artificial Sequence: Synthetic oligonucleotide
uuuuuucuucuaac

SEQ ID NO: 11707 - RNA, 14 nt, Artificial Sequence
  Description of Artificial Sequence: Synthetic oligonucleotide
cuuuuuucuucuaa

SEQ ID NO: 11708 - RNA, 14 nt, Artificial Sequence
  Description of Artificial Sequence: Synthetic oligonucleotide
acuuuuuucuucua

SEQ ID NO: 11709 - RNA, 14 nt, Artificial Sequence
  Description of Artificial Sequence: Synthetic oligonucleotide
cacuuuuuucuucu

SEQ ID NO: 11710 - RNA, 14 nt, Artificial Sequence
  Description of Artificial Sequence: Synthetic oligonucleotide
ucacuuuuuucuuc

SEQ ID NO: 11711 - RNA, 14 nt, Artificial Sequence
  Description of Artificial Sequence: Synthetic oligonucleotide
uucacuuuuuucuu

SEQ ID NO: 11712 - RNA, 14 nt, Artificial Sequence
  Description of Artificial Sequence: Synthetic oligonucleotide
cuucacuuuuuucu

SEQ ID NO: 11713 - RNA, 14 nt, Artificial Sequence
  Description of Artificial Sequence: Synthetic oligonucleotide
ucuucacuuuuuuc

SEQ ID NO: 11714 - RNA, 14 nt, Artificial Sequence
  Description of Artificial Sequence: Synthetic oligonucleotide
aucuucacuuuuuu

SEQ ID NO: 11715 - RNA, 14 nt, Artificial Sequence
  Description of Artificial Sequence: Synthetic oligonucleotide
gaucuucacuuuuu

SEQ ID NO: 11716 - RNA, 14 nt, Artificial Sequence
  Description of Artificial Sequence: Synthetic oligonucleotide
ugaucuucacuuuu

SEQ ID NO: 11717 - RNA, 14 nt, Artificial Sequence
  Description of Artificial Sequence: Synthetic oligonucleotide
uugaucuucacuuu

SEQ ID NO: 11718 - RNA, 14 nt, Artificial Sequence
  Description of Artificial Sequence: Synthetic oligonucleotide
cuugaucuucacuu

SEQ ID NO: 11719 - RNA, 14 nt, Artificial Sequence
  Description of Artificial Sequence: Synthetic oligonucleotide
ucuugaucuucacu

SEQ ID NO: 11720 - RNA, 14 nt, Artificial Sequence
  Description of Artificial Sequence: Synthetic oligonucleotide
uucuugaucuucac

SEQ ID NO: 11721 - RNA, 14 nt, Artificial Sequence
  Description of Artificial Sequence: Synthetic oligonucleotide
cuucuugaucuuca

SEQ ID NO: 11722 - RNA, 14 nt, Artificial Sequence
  Description of Artificial Sequence: Synthetic oligonucleotide
ucuucuugaucuuc

SEQ ID NO: 11723 - RNA, 14 nt, Artificial Sequence
  Description of Artificial Sequence: Synthetic oligonucleotide
gucuucuugaucuu

SEQ ID NO: 11724 - RNA, 14 nt, Artificial Sequence
  Description of Artificial Sequence: Synthetic oligonucleotide
ugucuucuugaucu

SEQ ID NO: 11725 - RNA, 14 nt, Artificial Sequence
  Description of Artificial Sequence: Synthetic oligonucleotide
uugucuucuugauc

SEQ ID NO: 11726 - RNA, 14 nt, Artificial Sequence
  Description of Artificial Sequence: Synthetic oligonucleotide
cuugucuucuugau

SEQ ID NO: 11727 - RNA, 14 nt, Artificial Sequence
  Description of Artificial Sequence: Synthetic oligonucleotide
ccuugucuucuuga

SEQ ID NO: 11728 - RNA, 14 nt, Artificial Sequence
  Description of Artificial Sequence: Synthetic oligonucleotide
uccuugucuucuug

SEQ ID NO: 11729 - RNA, 14 nt, Artificial Sequence
  Description of Artificial Sequence: Synthetic oligonucleotide
uuccuugucuucuu

SEQ ID NO: 11730 - RNA, 14 nt, Artificial Sequence
  Description of Artificial Sequence: Synthetic oligonucleotide
auuccuugucuucu

SEQ ID NO: 11731 - RNA, 14 nt, Artificial Sequence
  Description of Artificial Sequence: Synthetic oligonucleotide
cauuccuugucuuc

SEQ ID NO: 11732 - RNA, 14 nt, Artificial Sequence
  Description of Artificial Sequence: Synthetic oligonucleotide
acauuccuugucuu

SEQ ID NO: 11733 - RNA, 14 nt, Artificial Sequence
  Description of Artificial Sequence: Synthetic oligonucleotide
aacauuccuugucu

SEQ ID NO: 11734 - RNA, 14 nt, Artificial Sequence
  Description of Artificial Sequence: Synthetic oligonucleotide
aaacauuccuuguc

SEQ ID NO: 11735 - RNA, 14 nt, Artificial Sequence
  Description of Artificial Sequence: Synthetic oligonucleotide
uaaacauuccuugu

SEQ ID NO: 11736 - RNA, 14 nt, Artificial Sequence
  Description of Artificial Sequence: Synthetic oligonucleotide
uuaaacauuccuug

SEQ ID NO: 11737 - RNA, 14 nt, Artificial Sequence
  Description of Artificial Sequence: Synthetic oligonucleotide
uuuaaacauuccuu

SEQ ID NO: 11738 - RNA, 14 nt, Artificial Sequence
  Description of Artificial Sequence: Synthetic oligonucleotide
uuuuaaacauuccu

SEQ ID NO: 11739 - RNA, 14 nt, Artificial Sequence
  Description of Artificial Sequence: Synthetic oligonucleotide
guuuuaaacauucc

SEQ ID NO: 11740 - RNA, 14 nt, Artificial Sequence
  Description of Artificial Sequence: Synthetic oligonucleotide
uguuuuaaacauuc

SEQ ID NO: 11741 - RNA, 14 nt, Artificial Sequence
  Description of Artificial Sequence: Synthetic oligonucleotide
uuguuuuaaacauu

SEQ ID NO: 11742 - RNA, 14 nt, Artificial Sequence
  Description of Artificial Sequence: Synthetic oligonucleotide
cuuguuuuaaacau

SEQ ID NO: 11743 - RNA, 14 nt, Artificial Sequence
  Description of Artificial Sequence: Synthetic oligonucleotide
gcuuguuuuaaaca

SEQ ID NO: 11744 - RNA, 14 nt, Artificial Sequence
  Description of Artificial Sequence: Synthetic oligonucleotide
ugcuuguuuuaaac

SEQ ID NO: 11745 - RNA, 14 nt, Artificial Sequence
  Description of Artificial Sequence: Synthetic oligonucleotide
uugcuuguuuuaaa

SEQ ID NO: 11746 - RNA, 14 nt, Artificial Sequence
  Description of Artificial Sequence: Synthetic oligonucleotide
auugcuuguuuuaa

SEQ ID NO: 11747 - RNA, 14 nt, Artificial Sequence
  Description of Artificial Sequence: Synthetic oligonucleotide
uauugcuuguuuua

SEQ ID NO: 11748 - RNA, 14 nt, Artificial Sequence
  Description of Artificial Sequence: Synthetic oligonucleotide
uuauugcuuguuuu

SEQ ID NO: 11749 - RNA, 14 nt, Artificial Sequence
  Description of Artificial Sequence: Synthetic oligonucleotide
guuauugcuuguuu

SEQ ID NO: 11750 - RNA, 14 nt, Artificial Sequence
  Description of Artificial Sequence: Synthetic oligonucleotide
uguuauugcuuguu

SEQ ID NO: 11751 - RNA, 14 nt, Artificial Sequence
  Description of Artificial Sequence: Synthetic oligonucleotide
cuguuauugcuugu

SEQ ID NO: 11752 - RNA, 14 nt, Artificial Sequence
  Description of Artificial Sequence: Synthetic oligonucleotide
gcuguuauugcuug

SEQ ID NO: 11753 - RNA, 14 nt, Artificial Sequence
  Description of Artificial Sequence: Synthetic oligonucleotide
agcuguuauugcuu

SEQ ID NO: 11754 - RNA, 14 nt, Artificial Sequence
  Description of Artificial Sequence: Synthetic oligonucleotide
aagcuguuauugcu

SEQ ID NO: 11755 - RNA, 14 nt, Artificial Sequence
  Description of Artificial Sequence: Synthetic oligonucleotide
aaagcuguuauugc

SEQ ID NO: 11756 - RNA, 14 nt, Artificial Sequence
  Description of Artificial Sequence: Synthetic oligonucleotide
caaagcuguuauug

SEQ ID NO: 11757 - RNA, 14 nt, Artificial Sequence
  Description of Artificial Sequence: Synthetic oligonucleotide
gcaaagcuguuauu

SEQ ID NO: 11758 - RNA, 14 nt, Artificial Sequence
  Description of Artificial Sequence: Synthetic oligonucleotide
agcaaagcuguuau

SEQ ID NO: 11759 - RNA, 14 nt, Artificial Sequence
  Description of Artificial Sequence: Synthetic oligonucleotide
aagcaaagcuguua

SEQ ID NO: 11760 - RNA, 14 nt, Artificial Sequence
  Description of Artificial Sequence: Synthetic oligonucleotide
uaagcaaagcuguu

SEQ ID NO: 11761 - RNA, 14 nt, Artificial Sequence
  Description of Artificial Sequence: Synthetic oligonucleotide
uuaagcaaagcugu

SEQ ID NO: 11762 - RNA, 14 nt, Artificial Sequence
  Description of Artificial Sequence: Synthetic oligonucleotide
auuaagcaaagcug

SEQ ID NO: 11763 - RNA, 14 nt, Artificial Sequence
  Description of Artificial Sequence: Synthetic oligonucleotide
cauuaagcaaagcu

SEQ ID NO: 11764 - RNA, 14 nt, Artificial Sequence
  Description of Artificial Sequence: Synthetic oligonucleotide
acauuaagcaaagc

SEQ ID NO: 11765 - RNA, 14 nt, Artificial Sequence
  Description of Artificial Sequence: Synthetic oligonucleotide
aacauuaagcaaag

SEQ ID NO: 11766 - RNA, 14 nt, Artificial Sequence
  Description of Artificial Sequence: Synthetic oligonucleotide
gaacauuaagcaaa

SEQ ID NO: 11767 - RNA, 14 nt, Artificial Sequence
  Description of Artificial Sequence: Synthetic oligonucleotide
ugaacauuaagcaa

SEQ ID NO: 11768 - RNA, 14 nt, Artificial Sequence
  Description of Artificial Sequence: Synthetic oligonucleotide
cugaacauuaagca

SEQ ID NO: 11769 - RNA, 14 nt, Artificial Sequence
  Description of Artificial Sequence: Synthetic oligonucleotide
ucugaacauuaagc

SEQ ID NO: 11770 - RNA, 14 nt, Artificial Sequence
  Description of Artificial Sequence: Synthetic oligonucleotide
cucugaacauuaag

SEQ ID NO: 11771 - RNA, 14 nt, Artificial Sequence
  Description of Artificial Sequence: Synthetic oligonucleotide
acucugaacauuaa

SEQ ID NO: 11772 - RNA, 14 nt, Artificial Sequence
  Description of Artificial Sequence: Synthetic oligonucleotide
cacucugaacauua

SEQ ID NO: 11773 - RNA, 14 nt, Artificial Sequence
  Description of Artificial Sequence: Synthetic oligonucleotide
ccacucugaacauu

SEQ ID NO: 11774 - RNA, 14 nt, Artificial Sequence
  Description of Artificial Sequence: Synthetic oligonucleotide
accacucugaacau

SEQ ID NO: 11775 - RNA, 14 nt, Artificial Sequence
  Description of Artificial Sequence: Synthetic oligonucleotide
uaccacucugaaca

SEQ ID NO: 11776 - RNA, 14 nt, Artificial Sequence
  Description of Artificial Sequence: Synthetic oligonucleotide
auaccacucugaac

SEQ ID NO: 11777 - RNA, 14 nt, Artificial Sequence
  Description of Artificial Sequence: Synthetic oligonucleotide
cauaccacucugaa

SEQ ID NO: 11778 - RNA, 14 nt, Artificial Sequence
  Description of Artificial Sequence: Synthetic oligonucleotide
ccauaccacucuga

SEQ ID NO: 11779 - RNA, 14 nt, Artificial Sequence
  Description of Artificial Sequence: Synthetic oligonucleotide
uccauaccacucug

SEQ ID NO: 11780 - RNA, 14 nt, Artificial Sequence
  Description of Artificial Sequence: Synthetic oligonucleotide
uuccauaccacucu

SEQ ID NO: 11781 - RNA, 14 nt, Artificial Sequence
  Description of Artificial Sequence: Synthetic oligonucleotide
uuuccauaccacuc

SEQ ID NO: 11782 - RNA, 14 nt, Artificial Sequence
  Description of Artificial Sequence: Synthetic oligonucleotide
uuuuccauaccacu

SEQ ID NO: 11783 - RNA, 14 nt, Artificial Sequence
  Description of Artificial Sequence: Synthetic oligonucleotide
uuuuuccauaccac

SEQ ID NO: 11784 - RNA, 14 nt, Artificial Sequence
  Description of Artificial Sequence: Synthetic oligonucleotide
uuuuuuccauacca

SEQ ID NO: 11785 - RNA, 14 nt, Artificial Sequence
  Description of Artificial Sequence: Synthetic oligonucleotide
auuuuuuccauacc

SEQ ID NO: 11786 - RNA, 14 nt, Artificial Sequence
  Description of Artificial Sequence: Synthetic oligonucleotide
uauuuuuuccauac

SEQ ID NO: 11787 - RNA, 14 nt, Artificial Sequence
  Description of Artificial Sequence: Synthetic oligonucleotide
auauuuuuuccaua

SEQ ID NO: 11788 - RNA, 14 nt, Artificial Sequence
  Description of Artificial Sequence: Synthetic oligonucleotide
cauauuuuuuccau

SEQ ID NO: 11789 - RNA, 14 nt, Artificial Sequence
  Description of Artificial Sequence: Synthetic oligonucleotide
acauauuuuuucca

SEQ ID NO: 11790 - RNA, 14 nt, Artificial Sequence
  Description of Artificial Sequence: Synthetic oligonucleotide
aacauauuuuuucc

SEQ ID NO: 11791 - RNA, 14 nt, Artificial Sequence
  Description of Artificial Sequence: Synthetic oligonucleotide
gaacauauuuuuuc

SEQ ID NO: 11792 - RNA, 14 nt, Artificial Sequence
  Description of Artificial Sequence: Synthetic oligonucleotide
agaacauauuuuuu

SEQ ID NO: 11793 - RNA, 14 nt, Artificial Sequence
  Description of Artificial Sequence: Synthetic oligonucleotide
uagaacauauuuuu

SEQ ID NO: 11794 - RNA, 14 nt, Artificial Sequence
  Description of Artificial Sequence: Synthetic oligonucleotide
uuagaacauauuuu

SEQ ID NO: 11795 - RNA, 14 nt, Artificial Sequence
  Description of Artificial Sequence: Synthetic oligonucleotide
uuuagaacauauuu

SEQ ID NO: 11796 - RNA, 14 nt, Artificial Sequence
  Description of Artificial Sequence: Synthetic oligonucleotide
uuuuagaacauauu

SEQ ID NO: 11797 - RNA, 14 nt, Artificial Sequence
  Description of Artificial Sequence: Synthetic oligonucleotide
cuuuuagaacauau

SEQ ID NO: 11798 - RNA, 14 nt, Artificial Sequence
  Description of Artificial Sequence: Synthetic oligonucleotide
acuuuuagaacaua

SEQ ID NO: 11799 - RNA, 14 nt, Artificial Sequence
  Description of Artificial Sequence: Synthetic oligonucleotide
gacuuuuagaacau

SEQ ID NO: 11800 - RNA, 14 nt, Artificial Sequence
  Description of Artificial Sequence: Synthetic oligonucleotide
agacuuuuagaaca

SEQ ID NO: 11801 - RNA, 14 nt, Artificial Sequence
  Description of Artificial Sequence: Synthetic oligonucleotide
aagacuuuuagaac

SEQ ID NO: 11802 - RNA, 14 nt, Artificial Sequence
  Description of Artificial Sequence: Synthetic oligonucleotide
caagacuuuuagaa

SEQ ID NO: 11803 - RNA, 14 nt, Artificial Sequence
  Description of Artificial Sequence: Synthetic oligonucleotide
gcaagacuuuuaga

SEQ ID NO: 11804 - RNA, 14 nt, Artificial Sequence
  Description of Artificial Sequence: Synthetic oligonucleotide
ugcaagacuuuuag

SEQ ID NO: 11805 - RNA, 14 nt, Artificial Sequence
  Description of Artificial Sequence: Synthetic oligonucleotide
uugcaagacuuuua

SEQ ID NO: 11806 - RNA, 14 nt, Artificial Sequence
  Description of Artificial Sequence: Synthetic oligonucleotide
uuugcaagacuuuu

SEQ ID NO: 11807 - RNA, 14 nt, Artificial Sequence
  Description of Artificial Sequence: Synthetic oligonucleotide
uuuugcaagacuuu

SEQ ID NO: 11808 - RNA, 14 nt, Artificial Sequence
  Description of Artificial Sequence: Synthetic oligonucleotide
guuuugcaagacuu

SEQ ID NO: 11809 - RNA, 14 nt, Artificial Sequence
  Description of Artificial Sequence: Synthetic oligonucleotide
cguuuugcaagacu

SEQ ID NO: 11810 - RNA, 14 nt, Artificial Sequence
  Description of Artificial Sequence: Synthetic oligonucleotide
ucguuuugcaagac

SEQ ID NO: 11811 - RNA, 14 nt, Artificial Sequence
  Description of Artificial Sequence: Synthetic oligonucleotide
uucguuuugcaaga

SEQ ID NO: 11812 - RNA, 14 nt, Artificial Sequence
  Description of Artificial Sequence: Synthetic oligonucleotide
cuucguuuugcaag

SEQ ID NO: 11813 - RNA, 14 nt, Artificial Sequence
  Description of Artificial Sequence: Synthetic oligonucleotide
ucuucguuuugcaa

SEQ ID NO: 11814 - RNA, 14 nt, Artificial Sequence
  Description of Artificial Sequence: Synthetic oligonucleotide
gucuucguuuugca

SEQ ID NO: 11815 - RNA, 14 nt, Artificial Sequence
  Description of Artificial Sequence: Synthetic oligonucleotide
agucuucguuuugc

SEQ ID NO: 11816 - RNA, 14 nt, Artificial Sequence
  Description of Artificial Sequence: Synthetic oligonucleotide
cagucuucguuuug

SEQ ID NO: 11817 - RNA, 14 nt, Artificial Sequence
  Description of Artificial Sequence: Synthetic oligonucleotide
ucagucuucguuuu

SEQ ID NO: 11818 - RNA, 14 nt, Artificial Sequence
  Description of Artificial Sequence: Synthetic oligonucleotide
cucagucuucguuu

SEQ ID NO: 11819 - RNA, 14 nt, Artificial Sequence
  Description of Artificial Sequence: Synthetic oligonucleotide
acucagucuucguu

SEQ ID NO: 11820 - RNA, 14 nt, Artificial Sequence
  Description of Artificial Sequence: Synthetic oligonucleotide
cacucagucuucgu

SEQ ID NO: 11821 - RNA, 14 nt, Artificial Sequence
  Description of Artificial Sequence: Synthetic oligonucleotide
ucacucagucuucg

SEQ ID NO: 11822 - RNA, 14 nt, Artificial Sequence
  Description of Artificial Sequence: Synthetic oligonucleotide
uucacucagucuuc

SEQ ID NO: 11823 - RNA, 14 nt, Artificial Sequence
  Description of Artificial Sequence: Synthetic oligonucleotide
auucacucagucuu

SEQ ID NO: 11824 - RNA, 14 nt, Artificial Sequence
  Description of Artificial Sequence: Synthetic oligonucleotide
gauucacucagucu

SEQ ID NO: 11825 - RNA, 14 nt, Artificial Sequence
  Description of Artificial Sequence: Synthetic oligonucleotide
agauucacucaguc

SEQ ID NO: 11826 - RNA, 14 nt, Artificial Sequence
  Description of Artificial Sequence: Synthetic oligonucleotide
cagauucacucagu

SEQ ID NO: 11827 - RNA, 14 nt, Artificial Sequence
  Description of Artificial Sequence: Synthetic oligonucleotide
gcagauucacucag

SEQ ID NO: 11828 - RNA, 14 nt, Artificial Sequence
  Description of Artificial Sequence: Synthetic oligonucleotide
ugcagauucacuca

SEQ ID NO: 11829 - RNA, 14 nt, Artificial Sequence
  Description of Artificial Sequence: Synthetic oligonucleotide
augcagauucacuc

SEQ ID NO: 11830 - RNA, 14 nt, Artificial Sequence
  Description of Artificial Sequence: Synthetic oligonucleotide
caugcagauucacu

SEQ ID NO: 11831 - RNA, 14 nt, Artificial Sequence
  Description of Artificial Sequence: Synthetic oligonucleotide
acaugcagauucac

SEQ ID NO: 11832 - RNA, 14 nt, Artificial Sequence
  Description of Artificial Sequence: Synthetic oligonucleotide
gacaugcagauuca

SEQ ID NO: 11833 - RNA, 14 nt, Artificial Sequence
  Description of Artificial Sequence: Synthetic oligonucleotide
cgacaugcagauuc

SEQ ID NO: 11834 - RNA, 14 nt, Artificial Sequence
  Description of Artificial Sequence: Synthetic oligonucleotide
ccgacaugcagauu

SEQ ID NO: 11835 - RNA, 14 nt, Artificial Sequence
  Description of Artificial Sequence: Synthetic oligonucleotide
accgacaugcagau

SEQ ID NO: 11836 - RNA, 14 nt, Artificial Sequence
  Description of Artificial Sequence: Synthetic oligonucleotide
aaccgacaugcaga

SEQ ID NO: 11837 - RNA, 14 nt, Artificial Sequence
  Description of Artificial Sequence: Synthetic oligonucleotide
aaaccgacaugcag

SEQ ID NO: 11838 - RNA, 14 nt, Artificial Sequence
  Description of Artificial Sequence: Synthetic oligonucleotide
aaaaccgacaugca

SEQ ID NO: 11839 - RNA, 14 nt, Artificial Sequence
  Description of Artificial Sequence: Synthetic oligonucleotide
uaaaaccgacaugc

SEQ ID NO: 11840 - RNA, 14 nt, Artificial Sequence
  Description of Artificial Sequence: Synthetic oligonucleotide
auaaaaccgacaug

SEQ ID NO: 11841 - RNA, 14 nt, Artificial Sequence
  Description of Artificial Sequence: Synthetic oligonucleotide
uauaaaaccgacau

SEQ ID NO: 11842 - RNA, 14 nt, Artificial Sequence
  Description of Artificial Sequence: Synthetic oligonucleotide
cuauaaaaccgaca

SEQ ID NO: 11843 - RNA, 14 nt, Artificial Sequence
  Description of Artificial Sequence: Synthetic oligonucleotide
acuauaaaaccgac

SEQ ID NO: 11844 - RNA, 14 nt, Artificial Sequence
  Description of Artificial Sequence: Synthetic oligonucleotide
gacuauaaaaccga

SEQ ID NO: 11845 - RNA, 14 nt, Artificial Sequence
  Description of Artificial Sequence: Synthetic oligonucleotide
ugacuauaaaaccg

SEQ ID NO: 11846 - RNA, 14 nt, Artificial Sequence
  Description of Artificial Sequence: Synthetic oligonucleotide
cugacuauaaaacc

SEQ ID NO: 11847 - RNA, 14 nt, Artificial Sequence
  Description of Artificial Sequence: Synthetic oligonucleotide
gcugacuauaaaac

SEQ ID NO: 11848 - RNA, 14 nt, Artificial Sequence
  Description of Artificial Sequence: Synthetic oligonucleotide
ugcugacuauaaaa

SEQ ID NO: 11849 - RNA, 14 nt, Artificial Sequence
  Description of Artificial Sequence: Synthetic oligonucleotide
uugcugacuauaaa

SEQ ID NO: 11850 - RNA, 14 nt, Artificial Sequence
  Description of Artificial Sequence: Synthetic oligonucleotide
uuugcugacuauaa

SEQ ID NO: 11851 - RNA, 14 nt, Artificial Sequence
  Description of Artificial Sequence: Synthetic oligonucleotide
auuugcugacuaua

SEQ ID NO: 11852 - RNA, 14 nt, Artificial Sequence
  Description of Artificial Sequence: Synthetic oligonucleotide
cauuugcugacuau

SEQ ID NO: 11853 - RNA, 14 nt, Artificial Sequence
  Description of Artificial Sequence: Synthetic oligonucleotide
ucauuugcugacua

SEQ ID NO: 11854 - RNA, 14 nt, Artificial Sequence
  Description of Artificial Sequence: Synthetic oligonucleotide
uucauuugcugacu

SEQ ID NO: 11855 - RNA, 14 nt, Artificial Sequence
  Description of Artificial Sequence: Synthetic oligonucleotide
cuucauuugcugac

SEQ ID NO: 11856 - RNA, 14 nt, Artificial Sequence
  Description of Artificial Sequence: Synthetic oligonucleotide
ccuucauuugcuga

SEQ ID NO: 11857 - RNA, 14 nt, Artificial Sequence
  Description of Artificial Sequence: Synthetic oligonucleotide
cccuucauuugcug

SEQ ID NO: 11858 - RNA, 14 nt, Artificial Sequence
  Description of Artificial Sequence: Synthetic oligonucleotide
ccccuucauuugcu

SEQ ID NO: 11859 - RNA, 14 nt, Artificial Sequence
  Description of Artificial Sequence: Synthetic oligonucleotide
uccccuucauuugc

SEQ ID NO: 11860 - RNA, 14 nt, Artificial Sequence
  Description of Artificial Sequence: Synthetic oligonucleotide
uuccccuucauuug

SEQ ID NO: 11861 - RNA, 14 nt, Artificial Sequence
  Description of Artificial Sequence: Synthetic oligonucleotide
uuuccccuucauuu

SEQ ID NO: 11862 - RNA, 14 nt, Artificial Sequence
  Description of Artificial Sequence: Synthetic oligonucleotide
guuuccccuucauu

SEQ ID NO: 11863 - RNA, 14 nt, Artificial Sequence
  Description of Artificial Sequence: Synthetic oligonucleotide
uguuuccccuucau

SEQ ID NO: 11864 - RNA, 14 nt, Artificial Sequence
  Description of Artificial Sequence: Synthetic oligonucleotide
uuguuuccccuuca

SEQ ID NO: 11865 - RNA, 14 nt, Artificial Sequence
  Description of Artificial Sequence: Synthetic oligonucleotide
guuguuuccccuuc

SEQ ID NO: 11866 - RNA, 14 nt, Artificial Sequence
  Description of Artificial Sequence: Synthetic oligonucleotide
aguuguuuccccuu

SEQ ID NO: 11867 - RNA, 14 nt, Artificial Sequence
  Description of Artificial Sequence: Synthetic oligonucleotide
uaguuguuuccccu

SEQ ID NO: 11868 - RNA, 14 nt, Artificial Sequence
  Description of Artificial Sequence: Synthetic oligonucleotide
cuaguuguuucccc

SEQ ID NO: 11869 - RNA, 14 nt, Artificial Sequence
  Description of Artificial Sequence: Synthetic oligonucleotide
gcuaguuguuuccc

SEQ ID NO: 11870 - RNA, 14 nt, Artificial Sequence
  Description of Artificial Sequence: Synthetic oligonucleotide
ugcuaguuguuucc

SEQ ID NO: 11871 - RNA, 14 nt, Artificial Sequence
  Description of Artificial Sequence: Synthetic oligonucleotide
uugcuaguuguuuc

SEQ ID NO: 11872 - RNA, 14 nt, Artificial Sequence
  Description of Artificial Sequence: Synthetic oligonucleotide
auugcuaguuguuu

SEQ ID NO: 11873 - RNA, 14 nt, Artificial Sequence
  Description of Artificial Sequence: Synthetic oligonucleotide
gauugcuaguuguu

SEQ ID NO: 11874 - RNA, 14 nt, Artificial Sequence
  Description of Artificial Sequence: Synthetic oligonucleotide
ugauugcuaguugu

SEQ ID NO: 11875 - RNA, 14 nt, Artificial Sequence
  Description of Artificial Sequence: Synthetic oligonucleotide
uugauugcuaguug

SEQ ID NO: 11876 - RNA, 14 nt, Artificial Sequence
  Description of Artificial Sequence: Synthetic oligonucleotide
cuugauugcuaguu

SEQ ID NO: 11877 - RNA, 14 nt, Artificial Sequence
  Description of Artificial Sequence: Synthetic oligonucleotide
ucuugauugcuagu

SEQ ID NO: 11878 - RNA, 14 nt, Artificial Sequence
  Description of Artificial Sequence: Synthetic oligonucleotide
uucuugauugcuag

SEQ ID NO: 11879 - RNA, 14 nt, Artificial Sequence
  Description of Artificial Sequence: Synthetic oligonucleotide
cuucuugauugcua

SEQ ID NO: 11880 - RNA, 14 nt, Artificial Sequence
  Description of Artificial Sequence: Synthetic oligonucleotide
ucuucuugauugcu

SEQ ID NO: 11881 - RNA, 14 nt, Artificial Sequence
  Description of Artificial Sequence: Synthetic oligonucleotide
aucuucuugauugc

SEQ ID NO: 11882 - RNA, 14 nt, Artificial Sequence
  Description of Artificial Sequence: Synthetic oligonucleotide
caucuucuugauug

SEQ ID NO: 11883 - RNA, 14 nt, Artificial Sequence
  Description of Artificial Sequence: Synthetic oligonucleotide
ucaucuucuugauu

SEQ ID NO: 11884 - RNA, 14 nt, Artificial Sequence
  Description of Artificial Sequence: Synthetic oligonucleotide
uucaucuucuugau

SEQ ID NO: 11885 - RNA, 14 nt, Artificial Sequence
  Description of Artificial Sequence: Synthetic oligonucleotide
guucaucuucuuga

SEQ ID NO: 11886 - RNA, 14 nt, Artificial Sequence
  Description of Artificial Sequence: Synthetic oligonucleotide
cguucaucuucuug

SEQ ID NO: 11887 - RNA, 14 nt, Artificial Sequence
  Description of Artificial Sequence: Synthetic oligonucleotide
ucguucaucuucuu

SEQ ID NO: 11888 - RNA, 14 nt, Artificial Sequence
  Description of Artificial Sequence: Synthetic oligonucleotide
cucguucaucuucu

SEQ ID NO: 11889 - RNA, 14 nt, Artificial Sequence
  Description of Artificial Sequence: Synthetic oligonucleotide
ucucguucaucuuc

SEQ ID NO: 11890 - RNA, 14 nt, Artificial Sequence
  Description of Artificial Sequence: Synthetic oligonucleotide
aucucguucaucuu

SEQ ID NO: 11891 - RNA, 14 nt, Artificial Sequence
  Description of Artificial Sequence: Synthetic oligonucleotide
aaucucguucaucu

SEQ ID NO: 11892 - RNA, 14 nt, Artificial Sequence
  Description of Artificial Sequence: Synthetic oligonucleotide
gaaucucguucauc

SEQ ID NO: 11893 - RNA, 14 nt, Artificial Sequence
  Description of Artificial Sequence: Synthetic oligonucleotide
ugaaucucguucau

SEQ ID NO: 11894 - RNA, 14 nt, Artificial Sequence
  Description of Artificial Sequence: Synthetic oligonucleotide
cugaaucucguuca

SEQ ID NO: 11895 - RNA, 14 nt, Artificial Sequence
  Description of Artificial Sequence: Synthetic oligonucleotide
ucugaaucucguuc

SEQ ID NO: 11896 - RNA, 14 nt, Artificial Sequence
  Description of Artificial Sequence: Synthetic oligonucleotide
uucugaaucucguu

SEQ ID NO: 11897 - RNA, 14 nt, Artificial Sequence
  Description of Artificial Sequence: Synthetic oligonucleotide
cuucugaaucucgu

SEQ ID NO: 11898 - RNA, 14 nt, Artificial Sequence
  Description of Artificial Sequence: Synthetic oligonucleotide
ucuucugaaucucg

SEQ ID NO: 11899 - RNA, 14 nt, Artificial Sequence
  Description of Artificial Sequence: Synthetic oligonucleotide
uucuucugaaucuc

SEQ ID NO: 11900 - RNA, 14 nt, Artificial Sequence
  Description of Artificial Sequence: Synthetic oligonucleotide
auucuucugaaucu

SEQ ID NO: 11901 - RNA, 14 nt, Artificial Sequence
  Description of Artificial Sequence: Synthetic oligonucleotide
uauucuucugaauc

SEQ ID NO: 11902 - RNA, 14 nt, Artificial Sequence
  Description of Artificial Sequence: Synthetic oligonucleotide
auauucuucugaau

SEQ ID NO: 11903 - RNA, 14 nt, Artificial Sequence
  Description of Artificial Sequence: Synthetic oligonucleotide
aauauucuucugaa

SEQ ID NO: 11904 - RNA, 14 nt, Artificial Sequence
  Description of Artificial Sequence: Synthetic oligonucleotide
caauauucuucuga

SEQ ID NO: 11905 - RNA, 14 nt, Artificial Sequence
  Description of Artificial Sequence: Synthetic oligonucleotide
ucaauauucuucug

SEQ ID NO: 11906 - RNA, 14 nt, Artificial Sequence
  Description of Artificial Sequence: Synthetic oligonucleotide
aucaauauucuucu

SEQ ID NO: 11907 - RNA, 14 nt, Artificial Sequence
  Description of Artificial Sequence: Synthetic oligonucleotide
caucaauauucuuc

SEQ ID NO: 11908 - RNA, 14 nt, Artificial Sequence
  Description of Artificial Sequence: Synthetic oligonucleotide
ccaucaauauucuu

SEQ ID NO: 11909 - RNA, 14 nt, Artificial Sequence
  Description of Artificial Sequence: Synthetic oligonucleotide
accaucaauauucu

SEQ ID NO: 11910 - RNA, 14 nt, Artificial Sequence
  Description of Artificial Sequence: Synthetic oligonucleotide
aaccaucaauauuc

SEQ ID NO: 11911 - RNA, 14 nt, Artificial Sequence
  Description of Artificial Sequence: Synthetic oligonucleotide
caaccaucaauauu

SEQ ID NO: 11912 - RNA, 14 nt, Artificial Sequence
  Description of Artificial Sequence: Synthetic oligonucleotide
ccaaccaucaauau

SEQ ID NO: 11913 - RNA, 14 nt, Artificial Sequence
  Description of Artificial Sequence: Synthetic oligonucleotide
cccaaccaucaaua

SEQ ID NO: 11914 - RNA, 14 nt, Artificial Sequence
  Description of Artificial Sequence: Synthetic oligonucleotide
ucccaaccaucaau

SEQ ID NO: 11915 - RNA, 14 nt, Artificial Sequence
  Description of Artificial Sequence: Synthetic oligonucleotide
cucccaaccaucaa

SEQ ID NO: 11916 - RNA, 14 nt, Artificial Sequence
  Description of Artificial Sequence: Synthetic oligonucleotide
ccucccaaccauca

SEQ ID NO: 11917 - RNA, 14 nt, Artificial Sequence
  Description of Artificial Sequence: Synthetic oligonucleotide
cccucccaaccauc

SEQ ID NO: 11918 - RNA, 14 nt, Artificial Sequence
  Description of Artificial Sequence: Synthetic oligonucleotide
ucccucccaaccau

SEQ ID NO: 11919 - RNA, 14 nt, Artificial Sequence
  Description of Artificial Sequence: Synthetic oligonucleotide
uucccucccaacca

SEQ ID NO: 11920 - RNA, 14 nt, Artificial Sequence
  Description of Artificial Sequence: Synthetic oligonucleotide
uuucccucccaacc

SEQ ID NO: 11921 - RNA, 14 nt, Artificial Sequence
  Description of Artificial Sequence: Synthetic oligonucleotide
uuuucccucccaac

SEQ ID NO: 11922 - RNA, 14 nt, Artificial Sequence
  Description of Artificial Sequence: Synthetic oligonucleotide
cuuuucccucccaa

SEQ ID NO: 11923 - RNA, 14 nt, Artificial Sequence
  Description of Artificial Sequence: Synthetic oligonucleotide
ucuuuucccuccca

SEQ ID NO: 11924 - RNA, 14 nt, Artificial Sequence
  Description of Artificial Sequence: Synthetic oligonucleotide
gucuuuucccuccc

SEQ ID NO: 11925 - RNA, 14 nt, Artificial Sequence
  Description of Artificial Sequence: Synthetic oligonucleotide
ugucuuuucccucc

SEQ ID NO: 11926 - RNA, 14 nt, Artificial Sequence
  Description of Artificial Sequence: Synthetic oligonucleotide
augucuuuucccuc

SEQ ID NO: 11927 - RNA, 14 nt, Artificial Sequence
  Description of Artificial Sequence: Synthetic oligonucleotide
aaugucuuuucccu

SEQ ID NO: 11928 - RNA, 14 nt, Artificial Sequence
  Description of Artificial Sequence: Synthetic oligonucleotide
caaugucuuuuccc

SEQ ID NO: 11929 - RNA, 14 nt, Artificial Sequence
  Description of Artificial Sequence: Synthetic oligonucleotide
ccaaugucuuuucc

SEQ ID NO: 11930 - RNA, 14 nt, Artificial Sequence
  Description of Artificial Sequence: Synthetic oligonucleotide
uccaaugucuuuuc

SEQ ID NO: 11931 - RNA, 14 nt, Artificial Sequence
  Description of Artificial Sequence: Synthetic oligonucleotide
guccaaugucuuuu

SEQ ID NO: 11932 - RNA, 14 nt, Artificial Sequence
  Description of Artificial Sequence: Synthetic oligonucleotide
uguccaaugucuuu

SEQ ID NO: 11933 - RNA, 14 nt, Artificial Sequence
  Description of Artificial Sequence: Synthetic oligonucleotide
cuguccaaugucuu

SEQ ID NO: 11934 - RNA, 14 nt, Artificial Sequence
  Description of Artificial Sequence: Synthetic oligonucleotide
acuguccaaugucu

SEQ ID NO: 11935 - RNA, 14 nt, Artificial Sequence
  Description of Artificial Sequence: Synthetic oligonucleotide
cacuguccaauguc

SEQ ID NO: 11936 - RNA, 14 nt, Artificial Sequence
  Description of Artificial Sequence: Synthetic oligonucleotide
acacuguccaaugu

SEQ ID NO: 11937 - RNA, 14 nt, Artificial Sequence
  Description of Artificial Sequence: Synthetic oligonucleotide
aacacuguccaaug

SEQ ID NO: 11938 - RNA, 14 nt, Artificial Sequence
  Description of Artificial Sequence: Synthetic oligonucleotide
caacacuguccaau

SEQ ID NO: 11939 - RNA, 14 nt, Artificial Sequence
  Description of Artificial Sequence: Synthetic oligonucleotide
acaacacuguccaa

SEQ ID NO: 11940 - RNA, 14 nt, Artificial Sequence
  Description of Artificial Sequence: Synthetic oligonucleotide
uacaacacugucca

SEQ ID NO: 11941 - RNA, 14 nt, Artificial Sequence
  Description of Artificial Sequence: Synthetic oligonucleotide
uuacaacacugucc

SEQ ID NO: 11942 - RNA, 14 nt, Artificial Sequence
  Description of Artificial Sequence: Synthetic oligonucleotide
auuacaacacuguc

SEQ ID NO: 11943 - RNA, 14 nt, Artificial Sequence
  Description of Artificial Sequence: Synthetic oligonucleotide
cauuacaacacugu

SEQ ID NO: 11944 - RNA, 14 nt, Artificial Sequence
  Description of Artificial Sequence: Synthetic oligonucleotide
ucauuacaacacug

SEQ ID NO: 11945 - RNA, 14 nt, Artificial Sequence
  Description of Artificial Sequence: Synthetic oligonucleotide
uucauuacaacacu

SEQ ID NO: 11946 - RNA, 14 nt, Artificial Sequence
  Description of Artificial Sequence: Synthetic oligonucleotide
auucauuacaacac

SEQ ID NO: 11947 - RNA, 14 nt, Artificial Sequence
  Description of Artificial Sequence: Synthetic oligonucleotide
aauucauuacaaca

SEQ ID NO: 11948 - RNA, 14 nt, Artificial Sequence
  Description of Artificial Sequence: Synthetic oligonucleotide
aaauucauuacaac

SEQ ID NO: 11949 - RNA, 14 nt, Artificial Sequence
  Description of Artificial Sequence: Synthetic oligonucleotide
uaaauucauuacaa

SEQ ID NO: 11950 - RNA, 14 nt, Artificial Sequence
  Description of Artificial Sequence: Synthetic oligonucleotide
auaaauucauuaca

SEQ ID NO: 11951 - RNA, 14 nt, Artificial Sequence
  Description of Artificial Sequence: Synthetic oligonucleotide
uauaaauucauuac

SEQ ID NO: 11952 - RNA, 14 nt, Artificial Sequence
  Description of Artificial Sequence: Synthetic oligonucleotide
uuauaaauucauua

SEQ ID NO: 11953 - RNA, 14 nt, Artificial Sequence
  Description of Artificial Sequence: Synthetic oligonucleotide
auuauaaauucauu

SEQ ID NO: 11954 - RNA, 14 nt, Artificial Sequence
  Description of Artificial Sequence: Synthetic oligonucleotide
cauuauaaauucau

SEQ ID NO: 11955 - RNA, 14 nt, Artificial Sequence
  Description of Artificial Sequence: Synthetic oligonucleotide
ccauuauaaauuca

SEQ ID NO: 11956 - RNA, 14 nt, Artificial Sequence
  Description of Artificial Sequence: Synthetic oligonucleotide
uccauuauaaauuc

SEQ ID NO: 11957 - RNA, 14 nt, Artificial Sequence
  Description of Artificial Sequence: Synthetic oligonucleotide
uuccauuauaaauu

SEQ ID NO: 11958 - RNA, 14 nt, Artificial Sequence
  Description of Artificial Sequence: Synthetic oligonucleotide
cuuccauuauaaau

SEQ ID NO: 11959 - RNA, 14 nt, Artificial Sequence
  Description of Artificial Sequence: Synthetic oligonucleotide
ccuuccauuauaaa

SEQ ID NO: 11960 - RNA, 14 nt, Artificial Sequence
  Description of Artificial Sequence: Synthetic oligonucleotide
uccuuccauuauaa

SEQ ID NO: 11961 - RNA, 14 nt, Artificial Sequence
  Description of Artificial Sequence: Synthetic oligonucleotide
uuccuuccauuaua

SEQ ID NO: 11962 - RNA, 14 nt, Artificial Sequence
  Description of Artificial Sequence: Synthetic oligonucleotide
guuccuuccauuau

SEQ ID NO: 11963 - RNA, 14 nt, Artificial Sequence
  Description of Artificial Sequence: Synthetic oligonucleotide
aguuccuuccauua

SEQ ID NO: 11964 - RNA, 14 nt, Artificial Sequence
  Description of Artificial Sequence: Synthetic oligonucleotide
gaguuccuuccauu

SEQ ID NO: 11965 - RNA, 14 nt, Artificial Sequence
  Description of Artificial Sequence: Synthetic oligonucleotide
agaguuccuuccau

SEQ ID NO: 11966 - RNA, 14 nt, Artificial Sequence
  Description of Artificial Sequence: Synthetic oligonucleotide
aagaguuccuucca

SEQ ID NO: 11967 - RNA, 14 nt, Artificial Sequence
  Description of Artificial Sequence: Synthetic oligonucleotide
uaagaguuccuucc

SEQ ID NO: 11968 - RNA, 14 nt, Artificial Sequence
  Description of Artificial Sequence: Synthetic oligonucleotide
guaagaguuccuuc

SEQ ID NO: 11969 - RNA, 14 nt, Artificial Sequence
  Description of Artificial Sequence: Synthetic oligonucleotide
uguaagaguuccuu

SEQ ID NO: 11970 - RNA, 14 nt, Artificial Sequence
  Description of Artificial Sequence: Synthetic oligonucleotide
guguaagaguuccu

SEQ ID NO: 11971 - RNA, 14 nt, Artificial Sequence
  Description of Artificial Sequence: Synthetic oligonucleotide
cguguaagaguucc

SEQ ID NO: 11972 - RNA, 14 nt, Artificial Sequence
  Description of Artificial Sequence: Synthetic oligonucleotide
acguguaagaguuc

SEQ ID NO: 11973 - RNA, 14 nt, Artificial Sequence
  Description of Artificial Sequence: Synthetic oligonucleotide
cacguguaagaguu

SEQ ID NO: 11974 - RNA, 14 nt, Artificial Sequence
  Description of Artificial Sequence: Synthetic oligonucleotide
acacguguaagagu

SEQ ID NO: 11975 - RNA, 14 nt, Artificial Sequence
  Description of Artificial Sequence: Synthetic oligonucleotide
uacacguguaagag

SEQ ID NO: 11976 - RNA, 14 nt, Artificial Sequence
  Description of Artificial Sequence: Synthetic oligonucleotide
cuacacguguaaga

SEQ ID NO: 11977 - RNA, 14 nt, Artificial Sequence
  Description of Artificial Sequence: Synthetic oligonucleotide
ccuacacguguaag

SEQ ID NO: 11978 - RNA, 14 nt, Artificial Sequence
  Description of Artificial Sequence: Synthetic oligonucleotide
uccuacacguguaa

SEQ ID NO: 11979 - RNA, 14 nt, Artificial Sequence
  Description of Artificial Sequence: Synthetic oligonucleotide
cuccuacacgugua

SEQ ID NO: 11980 - RNA, 14 nt, Artificial Sequence
  Description of Artificial Sequence: Synthetic oligonucleotide
gcuccuacacgugu

SEQ ID NO: 11981 - RNA, 14 nt, Artificial Sequence
  Description of Artificial Sequence: Synthetic oligonucleotide
ggcuccuacacgug

SEQ ID NO: 11982 - RNA, 14 nt, Artificial Sequence
  Description of Artificial Sequence: Synthetic oligonucleotide
uggcuccuacacgu

SEQ ID NO: 11983 - RNA, 14 nt, Artificial Sequence
  Description of Artificial Sequence: Synthetic oligonucleotide
uuggcuccuacacg

SEQ ID NO: 11984 - RNA, 14 nt, Artificial Sequence
  Description of Artificial Sequence: Synthetic oligonucleotide
uuuggcuccuacac

SEQ ID NO: 11985 - RNA, 14 nt, Artificial Sequence
  Description of Artificial Sequence: Synthetic oligonucleotide
guuuggcuccuaca

SEQ ID NO: 11986 - RNA, 14 nt, Artificial Sequence
  Description of Artificial Sequence: Synthetic oligonucleotide
uguuuggcuccuac

SEQ ID NO: 11987 - RNA, 14 nt, Artificial Sequence
  Description of Artificial Sequence: Synthetic oligonucleotide
auguuuggcuccua

SEQ ID NO: 11988 - RNA, 14 nt, Artificial Sequence
  Description of Artificial Sequence: Synthetic oligonucleotide
cauguuuggcuccu

SEQ ID NO: 11989 - RNA, 14 nt, Artificial Sequence
  Description of Artificial Sequence: Synthetic oligonucleotide
ucauguuuggcucc

SEQ ID NO: 11990 - RNA, 14 nt, Artificial Sequence
  Description of Artificial Sequence: Synthetic oligonucleotide
cucauguuuggcuc

SEQ ID NO: 11991 - RNA, 14 nt, Artificial Sequence
  Description of Artificial Sequence: Synthetic oligonucleotide
ucucauguuuggcu

SEQ ID NO: 11992 - RNA, 14 nt, Artificial Sequence
  Description of Artificial Sequence: Synthetic oligonucleotide
cucucauguuuggc

SEQ ID NO: 11993 - RNA, 14 nt, Artificial Sequence
  Description of Artificial Sequence: Synthetic oligonucleotide
ucucucauguuugg

SEQ ID NO: 11994 - RNA, 14 nt, Artificial Sequence
  Description of Artificial Sequence: Synthetic oligonucleotide
gucucucauguuug

SEQ ID NO: 11995 - RNA, 14 nt, Artificial Sequence
  Description of Artificial Sequence: Synthetic oligonucleotide
ugucucucauguuu

SEQ ID NO: 11996 - RNA, 14 nt, Artificial Sequence
  Description of Artificial Sequence: Synthetic oligonucleotide
gugucucucauguu

SEQ ID NO: 11997 - RNA, 14 nt, Artificial Sequence
  Description of Artificial Sequence: Synthetic oligonucleotide
ugugucucucaugu

SEQ ID NO: 11998 - RNA, 14 nt, Artificial Sequence
  Description of Artificial Sequence: Synthetic oligonucleotide
augugucucucaug

SEQ ID NO: 11999 - RNA, 14 nt, Artificial Sequence
  Description of Artificial Sequence: Synthetic oligonucleotide
uaugugucucucau

SEQ ID NO: 12000 - RNA, 14 nt, Artificial Sequence
  Description of Artificial Sequence: Synthetic oligonucleotide
auaugugucucuca

SEQ ID NO: 12001 - RNA, 14 nt, Artificial Sequence
  Description of Artificial Sequence: Synthetic oligonucleotide
aauaugugucucuc

SEQ ID NO: 12002 - RNA, 14 nt, Artificial Sequence
  Description of Artificial Sequence: Synthetic oligonucleotide
aaauaugugucucu

SEQ ID NO: 12003 - RNA, 14 nt, Artificial Sequence
  Description of Artificial Sequence: Synthetic oligonucleotide
gaaauaugugucuc

SEQ ID NO: 12004 - RNA, 14 nt, Artificial Sequence
  Description of Artificial Sequence: Synthetic oligonucleotide
agaaauaugugucu

SEQ ID NO: 12005 - RNA, 14 nt, Artificial Sequence
  Description of Artificial Sequence: Synthetic oligonucleotide
gagaaauauguguc

SEQ ID NO: 12006 - RNA, 14 nt, Artificial Sequence
  Description of Artificial Sequence: Synthetic oligonucleotide
agagaaauaugugu

SEQ ID NO: 12007 - RNA, 14 nt, Artificial Sequence
  Description of Artificial Sequence: Synthetic oligonucleotide
aagagaaauaugug

SEQ ID NO: 12008 - RNA, 14 nt, Artificial Sequence
  Description of Artificial Sequence: Synthetic oligonucleotide
aaagagaaauaugu

SEQ ID NO: 12009 - RNA, 14 nt, Artificial Sequence
  Description of Artificial Sequence: Synthetic oligonucleotide
caaagagaaauaug

SEQ ID NO: 12010 - RNA, 14 nt, Artificial Sequence
  Description of Artificial Sequence: Synthetic oligonucleotide
ucaaagagaaauau

SEQ ID NO: 12011 - RNA, 14 nt, Artificial Sequence
  Description of Artificial Sequence: Synthetic oligonucleotide
aucaaagagaaaua

SEQ ID NO: 12012 - RNA, 14 nt, Artificial Sequence
  Description of Artificial Sequence: Synthetic oligonucleotide
caucaaagagaaau

SEQ ID NO: 12013 - RNA, 14 nt, Artificial Sequence
  Description of Artificial Sequence: Synthetic oligonucleotide
ccaucaaagagaaa

SEQ ID NO: 12014 - RNA, 14 nt, Artificial Sequence
  Description of Artificial Sequence: Synthetic oligonucleotide
gccaucaaagagaa

SEQ ID NO: 12015 - RNA, 14 nt, Artificial Sequence
  Description of Artificial Sequence: Synthetic oligonucleotide
agccaucaaagaga

SEQ ID NO: 12016 - RNA, 14 nt, Artificial Sequence
  Description of Artificial Sequence: Synthetic oligonucleotide
aagccaucaaagag

SEQ ID NO: 12017 - RNA, 14 nt, Artificial Sequence
  Description of Artificial Sequence: Synthetic oligonucleotide
uaagccaucaaaga

SEQ ID NO: 12018 - RNA, 14 nt, Artificial Sequence
  Description of Artificial Sequence: Synthetic oligonucleotide
uuaagccaucaaag

SEQ ID NO: 12019 - RNA, 14 nt, Artificial Sequence
  Description of Artificial Sequence: Synthetic oligonucleotide
auuaagccaucaaa

SEQ ID NO: 12020 - RNA, 14 nt, Artificial Sequence
  Description of Artificial Sequence: Synthetic oligonucleotide
cauuaagccaucaa

SEQ ID NO: 12021 - RNA, 14 nt, Artificial Sequence
  Description of Artificial Sequence: Synthetic oligonucleotide
ucauuaagccauca

SEQ ID NO: 12022 - RNA, 14 nt, Artificial Sequence
  Description of Artificial Sequence: Synthetic oligonucleotide
aucauuaagccauc

SEQ ID NO: 12023 - RNA, 14 nt, Artificial Sequence
  Description of Artificial Sequence: Synthetic oligonucleotide
aaucauuaagccau

SEQ ID NO: 12024 - RNA, 14 nt, Artificial Sequence
  Description of Artificial Sequence: Synthetic oligonucleotide
aaaucauuaagcca

SEQ ID NO: 12025 - RNA, 14 nt, Artificial Sequence
  Description of Artificial Sequence: Synthetic oligonucleotide
caaaucauuaagcc

SEQ ID NO: 12026 - RNA, 14 nt, Artificial Sequence
  Description of Artificial Sequence: Synthetic oligonucleotide
gcaaaucauuaagc

SEQ ID NO: 12027 - RNA, 14 nt, Artificial Sequence
  Description of Artificial Sequence: Synthetic oligonucleotide
agcaaaucauuaag

SEQ ID NO: 12028 - RNA, 14 nt, Artificial Sequence
  Description of Artificial Sequence: Synthetic oligonucleotide
cagcaaaucauuaa

SEQ ID NO: 12029 - RNA, 14 nt, Artificial Sequence
  Description of Artificial Sequence: Synthetic oligonucleotide
acagcaaaucauua

SEQ ID NO: 12030 - RNA, 14 nt, Artificial Sequence
  Description of Artificial Sequence: Synthetic oligonucleotide
uacagcaaaucauu

SEQ ID NO: 12031 - RNA, 14 nt, Artificial Sequence
  Description of Artificial Sequence: Synthetic oligonucleotide
uuacagcaaaucau

SEQ ID NO: 12032 - RNA, 14 nt, Artificial Sequence
  Description of Artificial Sequence: Synthetic oligonucleotide
uuuacagcaaauca

SEQ ID NO: 12033 - RNA, 14 nt, Artificial Sequence
  Description of Artificial Sequence: Synthetic oligonucleotide
auuuacagcaaauc

SEQ ID NO: 12034 - RNA, 14 nt, Artificial Sequence
  Description of Artificial Sequence: Synthetic oligonucleotide
gauuuacagcaaau

SEQ ID NO: 12035 - RNA, 14 nt, Artificial Sequence
  Description of Artificial Sequence: Synthetic oligonucleotide
ugauuuacagcaaa

SEQ ID NO: 12036 - RNA, 14 nt, Artificial Sequence
  Description of Artificial Sequence: Synthetic oligonucleotide
uugauuuacagcaa

SEQ ID NO: 12037 - RNA, 14 nt, Artificial Sequence
  Description of Artificial Sequence: Synthetic oligonucleotide
uuugauuuacagca

SEQ ID NO: 12038 - RNA, 14 nt, Artificial Sequence
  Description of Artificial Sequence: Synthetic oligonucleotide
auuugauuuacagc

SEQ ID NO: 12039 - RNA, 14 nt, Artificial Sequence
  Description of Artificial Sequence: Synthetic oligonucleotide
gauuugauuuacag

SEQ ID NO: 12040 - RNA, 14 nt, Artificial Sequence
  Description of Artificial Sequence: Synthetic oligonucleotide
ugauuugauuuaca

SEQ ID NO: 12041 - RNA, 14 nt, Artificial Sequence
  Description of Artificial Sequence: Synthetic oligonucleotide
augauuugauuuac

SEQ ID NO: 12042 - RNA, 14 nt, Artificial Sequence
  Description of Artificial Sequence: Synthetic oligonucleotide
caugauuugauuua

SEQ ID NO: 12043 - RNA, 14 nt, Artificial Sequence
  Description of Artificial Sequence: Synthetic oligonucleotide
ccaugauuugauuu

SEQ ID NO: 12044 - RNA, 14 nt, Artificial Sequence
  Description of Artificial Sequence: Synthetic oligonucleotide
cccaugauuugauu

SEQ ID NO: 12045 - RNA, 14 nt, Artificial Sequence
  Description of Artificial Sequence: Synthetic oligonucleotide
gcccaugauuugau

SEQ ID NO: 12046 - RNA, 14 nt, Artificial Sequence
  Description of Artificial Sequence: Synthetic oligonucleotide
ugcccaugauuuga

SEQ ID NO: 12047 - RNA, 14 nt, Artificial Sequence
  Description of Artificial Sequence: Synthetic oligonucleotide
cugcccaugauuug

SEQ ID NO: 12048 - RNA, 14 nt, Artificial Sequence
  Description of Artificial Sequence: Synthetic oligonucleotide
gcugcccaugauuu

SEQ ID NO: 12049 - RNA, 14 nt, Artificial Sequence
  Description of Artificial Sequence: Synthetic oligonucleotide
ggcugcccaugauu

SEQ ID NO: 12050 - RNA, 14 nt, Artificial Sequence
  Description of Artificial Sequence: Synthetic oligonucleotide
uggcugcccaugau

SEQ ID NO: 12051 - RNA, 14 nt, Artificial Sequence
  Description of Artificial Sequence: Synthetic oligonucleotide
uuggcugcccauga

SEQ ID NO: 12052 - RNA, 14 nt, Artificial Sequence
  Description of Artificial Sequence: Synthetic oligonucleotide
cuuggcugcccaug

SEQ ID NO: 12053 - RNA, 14 nt, Artificial Sequence
  Description of Artificial Sequence: Synthetic oligonucleotide
ucuuggcugcccau

SEQ ID NO: 12054 - RNA, 14 nt, Artificial Sequence
  Description of Artificial Sequence: Synthetic oligonucleotide
gucuuggcugccca

SEQ ID NO: 12055 - RNA, 14 nt, Artificial Sequence
  Description of Artificial Sequence: Synthetic oligonucleotide
agucuuggcugccc

SEQ ID NO: 12056 - RNA, 14 nt, Artificial Sequence
  Description of Artificial Sequence: Synthetic oligonucleotide
aagucuuggcugcc

SEQ ID NO: 12057 - RNA, 14 nt, Artificial Sequence
  Description of Artificial Sequence: Synthetic oligonucleotide
gaagucuuggcugc

SEQ ID NO: 12058 - RNA, 14 nt, Artificial Sequence
  Description of Artificial Sequence: Synthetic oligonucleotide
ggaagucuuggcug

SEQ ID NO: 12059 - RNA, 14 nt, Artificial Sequence
  Description of Artificial Sequence: Synthetic oligonucleotide
aggaagucuuggcu

SEQ ID NO: 12060 - RNA, 14 nt, Artificial Sequence
  Description of Artificial Sequence: Synthetic oligonucleotide
caggaagucuuggc

SEQ ID NO: 12061 - RNA, 14 nt, Artificial Sequence
  Description of Artificial Sequence: Synthetic oligonucleotide
ccaggaagucuugg

SEQ ID NO: 12062 - RNA, 14 nt, Artificial Sequence
  Description of Artificial Sequence: Synthetic oligonucleotide
accaggaagucuug

SEQ ID NO: 12063 - RNA, 14 nt, Artificial Sequence
  Description of Artificial Sequence: Synthetic oligonucleotide
caccaggaagucuu

SEQ ID NO: 12064 - RNA, 14 nt, Artificial Sequence
  Description of Artificial Sequence: Synthetic oligonucleotide
gcaccaggaagucu

SEQ ID NO: 12065 - RNA, 14 nt, Artificial Sequence
  Description of Artificial Sequence: Synthetic oligonucleotide
agcaccaggaaguc

SEQ ID NO: 12066 - RNA, 14 nt, Artificial Sequence
  Description of Artificial Sequence: Synthetic oligonucleotide
uagcaccaggaagu

SEQ ID NO: 12067 - RNA, 14 nt, Artificial Sequence
  Description of Artificial Sequence: Synthetic oligonucleotide
cuagcaccaggaag

SEQ ID NO: 12068 - RNA, 14 nt, Artificial Sequence
  Description of Artificial Sequence: Synthetic oligonucleotide
gcuagcaccaggaa

SEQ ID NO: 12069 - RNA, 14 nt, Artificial Sequence
  Description of Artificial Sequence: Synthetic oligonucleotide
ugcuagcaccagga

SEQ ID NO: 12070 - RNA, 14 nt, Artificial Sequence
  Description of Artificial Sequence: Synthetic oligonucleotide
uugcuagcaccagg

SEQ ID NO: 12071 - RNA, 14 nt, Artificial Sequence
  Description of Artificial Sequence: Synthetic oligonucleotide
auugcuagcaccag

SEQ ID NO: 12072 - RNA, 14 nt, Artificial Sequence
  Description of Artificial Sequence: Synthetic oligonucleotide
cauugcuagcacca

SEQ ID NO: 12073 - RNA, 14 nt, Artificial Sequence
  Description of Artificial Sequence: Synthetic oligonucleotide
gcauugcuagcacc

SEQ ID NO: 12074 - RNA, 14 nt, Artificial Sequence
  Description of Artificial Sequence: Synthetic oligonucleotide
ugcauugcuagcac

SEQ ID NO: 12075 - RNA, 14 nt, Artificial Sequence
  Description of Artificial Sequence: Synthetic oligonucleotide
cugcauugcuagca

SEQ ID NO: 12076 - RNA, 14 nt, Artificial Sequence
  Description of Artificial Sequence: Synthetic oligonucleotide
ucugcauugcuagc

SEQ ID NO: 12077 - RNA, 14 nt, Artificial Sequence
  Description of Artificial Sequence: Synthetic oligonucleotide
uucugcauugcuag

SEQ ID NO: 12078 - RNA, 14 nt, Artificial Sequence
  Description of Artificial Sequence: Synthetic oligonucleotide
auucugcauugcua

SEQ ID NO: 12079 - RNA, 14 nt, Artificial Sequence
  Description of Artificial Sequence: Synthetic oligonucleotide
uauucugcauugcu

SEQ ID NO: 12080 - RNA, 14 nt, Artificial Sequence
  Description of Artificial Sequence: Synthetic oligonucleotide
auauucugcauugc

SEQ ID NO: 12081 - RNA, 14 nt, Artificial Sequence
  Description of Artificial Sequence: Synthetic oligonucleotide
gauauucugcauug

SEQ ID NO: 12082 - RNA, 14 nt, Artificial Sequence
  Description of Artificial Sequence: Synthetic oligonucleotide
cgauauucugcauu

SEQ ID NO: 12083 - RNA, 14 nt, Artificial Sequence
  Description of Artificial Sequence: Synthetic oligonucleotide
acgauauucugcau

SEQ ID NO: 12084 - RNA, 14 nt, Artificial Sequence
  Description of Artificial Sequence: Synthetic oligonucleotide
gacgauauucugca

SEQ ID NO: 12085 - RNA, 14 nt, Artificial Sequence
  Description of Artificial Sequence: Synthetic oligonucleotide
agacgauauucugc

SEQ ID NO: 12086 - RNA, 14 nt, Artificial Sequence
  Description of Artificial Sequence: Synthetic oligonucleotide
aagacgauauucug

SEQ ID NO: 12087 - RNA, 14 nt, Artificial Sequence
  Description of Artificial Sequence: Synthetic oligonucleotide
uaagacgauauucu

SEQ ID NO: 12088 - RNA, 14 nt, Artificial Sequence
  Description of Artificial Sequence: Synthetic oligonucleotide
uuaagacgauauuc

SEQ ID NO: 12089 - RNA, 14 nt, Artificial Sequence
  Description of Artificial Sequence: Synthetic oligonucleotide
uuuaagacgauauu

SEQ ID NO: 12090 - RNA, 14 nt, Artificial Sequence
  Description of Artificial Sequence: Synthetic oligonucleotide
cuuuaagacgauau

SEQ ID NO: 12091 - RNA, 14 nt, Artificial Sequence
  Description of Artificial Sequence: Synthetic oligonucleotide
ucuuuaagacgaua

SEQ ID NO: 12092 - RNA, 14 nt, Artificial Sequence
  Description of Artificial Sequence: Synthetic oligonucleotide
uucuuuaagacgau

SEQ ID NO: 12093 - RNA, 14 nt, Artificial Sequence
  Description of Artificial Sequence: Synthetic oligonucleotide
uuucuuuaagacga

SEQ ID NO: 12094 - RNA, 14 nt, Artificial Sequence
  Description of Artificial Sequence: Synthetic oligonucleotide
uuuucuuuaagacg

SEQ ID NO: 12095 - RNA, 14 nt, Artificial Sequence
  Description of Artificial Sequence: Synthetic oligonucleotide
cuuuucuuuaagac

SEQ ID NO: 12096 - RNA, 14 nt, Artificial Sequence
  Description of Artificial Sequence: Synthetic oligonucleotide
acuuuucuuuaaga

SEQ ID NO: 12097 - RNA, 14 nt, Artificial Sequence
  Description of Artificial Sequence: Synthetic oligonucleotide
aacuuuucuuuaag

SEQ ID NO: 12098 - RNA, 14 nt, Artificial Sequence
  Description of Artificial Sequence: Synthetic oligonucleotide
aaacuuuucuuuaa

SEQ ID NO: 12099 - RNA, 14 nt, Artificial Sequence
  Description of Artificial Sequence: Synthetic oligonucleotide
aaaacuuuucuuua

SEQ ID NO: 12100 - RNA, 14 nt, Artificial Sequence
  Description of Artificial Sequence: Synthetic oligonucleotide
aaaaacuuuucuuu

SEQ ID NO: 12101 - RNA, 14 nt, Artificial Sequence
  Description of Artificial Sequence: Synthetic oligonucleotide
aaaaaacuuuucuu

SEQ ID NO: 12102 - RNA, 14 nt, Artificial Sequence
  Description of Artificial Sequence: Synthetic oligonucleotide
uaaaaaacuuuucu

SEQ ID NO: 12103 - RNA, 14 nt, Artificial Sequence
  Description of Artificial Sequence: Synthetic oligonucleotide
auaaaaaacuuuuc

SEQ ID NO: 12104 - RNA, 14 nt, Artificial Sequence
  Description of Artificial Sequence: Synthetic oligonucleotide
cauaaaaaacuuuu

SEQ ID NO: 12105 - RNA, 14 nt, Artificial Sequence
  Description of Artificial Sequence: Synthetic oligonucleotide
gcauaaaaaacuuu

SEQ ID NO: 12106 - RNA, 14 nt, Artificial Sequence
  Description of Artificial Sequence: Synthetic oligonucleotide
cgcauaaaaaacuu

SEQ ID NO: 12107 - RNA, 14 nt, Artificial Sequence
  Description of Artificial Sequence: Synthetic oligonucleotide
ucgcauaaaaaacu

SEQ ID NO: 12108 - RNA, 14 nt, Artificial Sequence
  Description of Artificial Sequence: Synthetic oligonucleotide
uucgcauaaaaaac

SEQ ID NO: 12109 - RNA, 14 nt, Artificial Sequence
  Description of Artificial Sequence: Synthetic oligonucleotide
uuucgcauaaaaaa

SEQ ID NO: 12110 - RNA, 14 nt, Artificial Sequence
  Description of Artificial Sequence: Synthetic oligonucleotide
cuuucgcauaaaaa

SEQ ID NO: 12111 - RNA, 14 nt, Artificial Sequence
  Description of Artificial Sequence: Synthetic oligonucleotide
ccuuucgcauaaaa

SEQ ID NO: 12112 - RNA, 14 nt, Artificial Sequence
  Description of Artificial Sequence: Synthetic oligonucleotide
accuuucgcauaaa

SEQ ID NO: 12113 - RNA, 14 nt, Artificial Sequence
  Description of Artificial Sequence: Synthetic oligonucleotide
uaccuuucgcauaa

SEQ ID NO: 12114 - RNA, 14 nt, Artificial Sequence
  Description of Artificial Sequence: Synthetic oligonucleotide
guaccuuucgcaua

SEQ ID NO: 12115 - RNA, 14 nt, Artificial Sequence
  Description of Artificial Sequence: Synthetic oligonucleotide
uguaccuuucgcau

SEQ ID NO: 12116 - RNA, 14 nt, Artificial Sequence
  Description of Artificial Sequence: Synthetic oligonucleotide
uuguaccuuucgca

SEQ ID NO: 12117 - RNA, 14 nt, Artificial Sequence
  Description of Artificial Sequence: Synthetic oligonucleotide
uuuguaccuuucgc

SEQ ID NO: 12118 - RNA, 14 nt, Artificial Sequence
  Description of Artificial Sequence: Synthetic oligonucleotide
auuuguaccuuucg

SEQ ID NO: 12119 - RNA, 14 nt, Artificial Sequence
  Description of Artificial Sequence: Synthetic oligonucleotide
aauuuguaccuuuc

SEQ ID NO: 12120 - RNA, 14 nt, Artificial Sequence
  Description of Artificial Sequence: Synthetic oligonucleotide
uaauuuguaccuuu

SEQ ID NO: 12121 - RNA, 14 nt, Artificial Sequence
  Description of Artificial Sequence: Synthetic oligonucleotide
uuaauuuguaccuu

SEQ ID NO: 12122 - RNA, 14 nt, Artificial Sequence
  Description of Artificial Sequence: Synthetic oligonucleotide
auuaauuuguaccu

SEQ ID NO: 12123 - RNA, 14 nt, Artificial Sequence
  Description of Artificial Sequence: Synthetic oligonucleotide
cauuaauuuguacc

SEQ ID NO: 12124 - RNA, 14 nt, Artificial Sequence
  Description of Artificial Sequence: Synthetic oligonucleotide
ucauuaauuuguac

SEQ ID NO: 12125 - RNA, 14 nt, Artificial Sequence
  Description of Artificial Sequence: Synthetic oligonucleotide
aucauuaauuugua

SEQ ID NO: 12126 - RNA, 14 nt, Artificial Sequence
  Description of Artificial Sequence: Synthetic oligonucleotide
uaucauuaauuugu

SEQ ID NO: 12127 - RNA, 14 nt, Artificial Sequence
  Description of Artificial Sequence: Synthetic oligonucleotide
uuaucauuaauuug

SEQ ID NO: 12128 - RNA, 14 nt, Artificial Sequence
  Description of Artificial Sequence: Synthetic oligonucleotide
uuuaucauuaauuu

SEQ ID NO: 12129 - RNA, 14 nt, Artificial Sequence
  Description of Artificial Sequence: Synthetic oligonucleotide
cuuuaucauuaauu

SEQ ID NO: 12130 - RNA, 14 nt, Artificial Sequence
  Description of Artificial Sequence: Synthetic oligonucleotide
ucuuuaucauuaau

SEQ ID NO: 12131 - RNA, 14 nt, Artificial Sequence
  Description of Artificial Sequence: Synthetic oligonucleotide
aucuuuaucauuaa

SEQ ID NO: 12132 - RNA, 14 nt, Artificial Sequence
  Description of Artificial Sequence: Synthetic oligonucleotide
caucuuuaucauua

SEQ ID NO: 12133 - RNA, 14 nt, Artificial Sequence
  Description of Artificial Sequence: Synthetic oligonucleotide
ucaucuuuaucauu

SEQ ID NO: 12134 - RNA, 14 nt, Artificial Sequence
  Description of Artificial Sequence: Synthetic oligonucleotide
gucaucuuuaucau

SEQ ID NO: 12135 - RNA, 14 nt, Artificial Sequence
  Description of Artificial Sequence: Synthetic oligonucleotide
ugucaucuuuauca

SEQ ID NO: 12136 - RNA, 14 nt, Artificial Sequence
  Description of Artificial Sequence: Synthetic oligonucleotide
gugucaucuuuauc

SEQ ID NO: 12137 - RNA, 14 nt, Artificial Sequence
  Description of Artificial Sequence: Synthetic oligonucleotide
ggugucaucuuuau

SEQ ID NO: 12138 - RNA, 14 nt, Artificial Sequence
  Description of Artificial Sequence: Synthetic oligonucleotide
uggugucaucuuua

SEQ ID NO: 12139 - RNA, 14 nt, Artificial Sequence
  Description of Artificial Sequence: Synthetic oligonucleotide
uuggugucaucuuu

SEQ ID NO: 12140 - RNA, 14 nt, Artificial Sequence
  Description of Artificial Sequence: Synthetic oligonucleotide
auuggugucaucuu

SEQ ID NO: 12141 - RNA, 14 nt, Artificial Sequence
  Description of Artificial Sequence: Synthetic oligonucleotide
cauuggugucaucu

SEQ ID NO: 12142 - RNA, 14 nt, Artificial Sequence
  Description of Artificial Sequence: Synthetic oligonucleotide
ucauuggugucauc

SEQ ID NO: 12143 - RNA, 14 nt, Artificial Sequence
  Description of Artificial Sequence: Synthetic oligonucleotide
uucauuggugucau

SEQ ID NO: 12144 - RNA, 14 nt, Artificial Sequence
  Description of Artificial Sequence: Synthetic oligonucleotide
auucauugguguca

SEQ ID NO: 12145 - RNA, 14 nt, Artificial Sequence
  Description of Artificial Sequence: Synthetic oligonucleotide
uauucauugguguc

SEQ ID NO: 12146 - RNA, 14 nt, Artificial Sequence
  Description of Artificial Sequence: Synthetic oligonucleotide
guauucauuggugu

SEQ ID NO: 12147 - RNA, 14 nt, Artificial Sequence
  Description of Artificial Sequence: Synthetic oligonucleotide
uguauucauuggug

SEQ ID NO: 12148 - RNA, 14 nt, Artificial Sequence
  Description of Artificial Sequence: Synthetic oligonucleotide
uuguauucauuggu

SEQ ID NO: 12149 - RNA, 14 nt, Artificial Sequence
  Description of Artificial Sequence: Synthetic oligonucleotide
cuuguauucauugg

SEQ ID NO: 12150 - RNA, 14 nt, Artificial Sequence
  Description of Artificial Sequence: Synthetic oligonucleotide
gcuuguauucauug

SEQ ID NO: 12151 - RNA, 14 nt, Artificial Sequence
  Description of Artificial Sequence: Synthetic oligonucleotide
ugcuuguauucauu

SEQ ID NO: 12152 - RNA, 14 nt, Artificial Sequence
  Description of Artificial Sequence: Synthetic oligonucleotide
augcuuguauucau

SEQ ID NO: 12153 - RNA, 14 nt, Artificial Sequence
  Description of Artificial Sequence: Synthetic oligonucleotide
caugcuuguauuca

SEQ ID NO: 12154 - RNA, 14 nt, Artificial Sequence
  Description of Artificial Sequence: Synthetic oligonucleotide
gcaugcuuguauuc

SEQ ID NO: 12155 - RNA, 14 nt, Artificial Sequence
  Description of Artificial Sequence: Synthetic oligonucleotide
agcaugcuuguauu

SEQ ID NO: 12156 - RNA, 14 nt, Artificial Sequence
  Description of Artificial Sequence: Synthetic oligonucleotide
aagcaugcuuguau

SEQ ID NO: 12157 - RNA, 14 nt, Artificial Sequence
  Description of Artificial Sequence: Synthetic oligonucleotide
aaagcaugcuugua

SEQ ID NO: 12158 - RNA, 14 nt, Artificial Sequence
  Description of Artificial Sequence: Synthetic oligonucleotide
aaaagcaugcuugu

SEQ ID NO: 12159 - RNA, 14 nt, Artificial Sequence
  Description of Artificial Sequence: Synthetic oligonucleotide
caaaagcaugcuug

SEQ ID NO: 12160 - RNA, 14 nt, Artificial Sequence
  Description of Artificial Sequence: Synthetic oligonucleotide
ucaaaagcaugcuu

SEQ ID NO: 12161 - RNA, 14 nt, Artificial Sequence
  Description of Artificial Sequence: Synthetic oligonucleotide
uucaaaagcaugcu

SEQ ID NO: 12162 - RNA, 14 nt, Artificial Sequence
  Description of Artificial Sequence: Synthetic oligonucleotide
uuucaaaagcaugc

SEQ ID NO: 12163 - RNA, 14 nt, Artificial Sequence
  Description of Artificial Sequence: Synthetic oligonucleotide
auuucaaaagcaug

SEQ ID NO: 12164 - RNA, 14 nt, Artificial Sequence
  Description of Artificial Sequence: Synthetic oligonucleotide
uauuucaaaagcau

SEQ ID NO: 12165 - RNA, 14 nt, Artificial Sequence
  Description of Artificial Sequence: Synthetic oligonucleotide
uuauuucaaaagca

SEQ ID NO: 12166 - RNA, 14 nt, Artificial Sequence
  Description of Artificial Sequence: Synthetic oligonucleotide
auuauuucaaaagc

SEQ ID NO: 12167 - RNA, 14 nt, Artificial Sequence
  Description of Artificial Sequence: Synthetic oligonucleotide
aauuauuucaaaag

SEQ ID NO: 12168 - RNA, 14 nt, Artificial Sequence
  Description of Artificial Sequence: Synthetic oligonucleotide
aaauuauuucaaaa

SEQ ID NO: 12169 - RNA, 14 nt, Artificial Sequence
  Description of Artificial Sequence: Synthetic oligonucleotide
aaaauuauuucaaa

SEQ ID NO: 12170 - RNA, 14 nt, Artificial Sequence
  Description of Artificial Sequence: Synthetic oligonucleotide
uaaaauuauuucaa

SEQ ID NO: 12171 - RNA, 14 nt, Artificial Sequence
  Description of Artificial Sequence: Synthetic oligonucleotide
uuaaaauuauuuca

SEQ ID NO: 12172 - RNA, 14 nt, Artificial Sequence
  Description of Artificial Sequence: Synthetic oligonucleotide
uuuaaaauuauuuc

SEQ ID NO: 12173 - RNA, 14 nt, Artificial Sequence
  Description of Artificial Sequence: Synthetic oligonucleotide
uuuuaaaauuauuu

SEQ ID NO: 12174 - RNA, 14 nt, Artificial Sequence
  Description of Artificial Sequence: Synthetic oligonucleotide
cuuuuaaaauuauu

SEQ ID NO: 12175 - RNA, 14 nt, Artificial Sequence
  Description of Artificial Sequence: Synthetic oligonucleotide
ucuuuuaaaauuau

SEQ ID NO: 12176 - RNA, 14 nt, Artificial Sequence
  Description of Artificial Sequence: Synthetic oligonucleotide
aucuuuuaaaauua

SEQ ID NO: 12177 - RNA, 14 nt, Artificial Sequence
  Description of Artificial Sequence: Synthetic oligonucleotide
caucuuuuaaaauu

SEQ ID NO: 12178 - RNA, 14 nt, Artificial Sequence
  Description of Artificial Sequence: Synthetic oligonucleotide
ucaucuuuuaaaau

SEQ ID NO: 12179 - RNA, 14 nt, Artificial Sequence
  Description of Artificial Sequence: Synthetic oligonucleotide
uucaucuuuuaaaa

SEQ ID NO: 12180 - RNA, 14 nt, Artificial Sequence
  Description of Artificial Sequence: Synthetic oligonucleotide
uuucaucuuuuaaa

SEQ ID NO: 12181 - RNA, 14 nt, Artificial Sequence
  Description of Artificial Sequence: Synthetic oligonucleotide
uuuucaucuuuuaa

SEQ ID NO: 12182 - RNA, 14 nt, Artificial Sequence
  Description of Artificial Sequence: Synthetic oligonucleotide
auuuucaucuuuua

SEQ ID NO: 12183 - RNA, 14 nt, Artificial Sequence
  Description of Artificial Sequence: Synthetic oligonucleotide
uauuuucaucuuuu

SEQ ID NO: 12184 - RNA, 14 nt, Artificial Sequence
  Description of Artificial Sequence: Synthetic oligonucleotide
cuauuuucaucuuu

SEQ ID NO: 12185 - RNA, 14 nt, Artificial Sequence
  Description of Artificial Sequence: Synthetic oligonucleotide
acuauuuucaucuu

SEQ ID NO: 12186 - RNA, 14 nt, Artificial Sequence
  Description of Artificial Sequence: Synthetic oligonucleotide
cacuauuuucaucu

SEQ ID NO: 12187 - RNA, 14 nt, Artificial Sequence
  Description of Artificial Sequence: Synthetic oligonucleotide
acacuauuuucauc

SEQ ID NO: 12188 - RNA, 14 nt, Artificial Sequence
  Description of Artificial Sequence: Synthetic oligonucleotide
aacacuauuuucau

SEQ ID NO: 12189 - RNA, 14 nt, Artificial Sequence
  Description of Artificial Sequence: Synthetic oligonucleotide
uaacacuauuuuca

SEQ ID NO: 12190 - RNA, 14 nt, Artificial Sequence
  Description of Artificial Sequence: Synthetic oligonucleotide
auaacacuauuuuc

SEQ ID NO: 12191 - RNA, 14 nt, Artificial Sequence
  Description of Artificial Sequence: Synthetic oligonucleotide
uauaacacuauuuu

SEQ ID NO: 12192 - RNA, 14 nt, Artificial Sequence
  Description of Artificial Sequence: Synthetic oligonucleotide
auauaacacuauuu

SEQ ID NO: 12193 - RNA, 14 nt, Artificial Sequence
  Description of Artificial Sequence: Synthetic oligonucleotide
aauauaacacuauu

SEQ ID NO: 12194 - RNA, 14 nt, Artificial Sequence
  Description of Artificial Sequence: Synthetic oligonucleotide
aaauauaacacuau

SEQ ID NO: 12195 - RNA, 14 nt, Artificial Sequence
  Description of Artificial Sequence: Synthetic oligonucleotide
aaaauauaacacua

SEQ ID NO: 12196 - RNA, 14 nt, Artificial Sequence
  Description of Artificial Sequence: Synthetic oligonucleotide
gaaaauauaacacu

SEQ ID NO: 12197 - RNA, 14 nt, Artificial Sequence
  Description of Artificial Sequence: Synthetic oligonucleotide
agaaaauauaacac

SEQ ID NO: 12198 - RNA, 14 nt, Artificial Sequence
  Description of Artificial Sequence: Synthetic oligonucleotide
cagaaaauauaaca

SEQ ID NO: 12199 - RNA, 14 nt, Artificial Sequence
  Description of Artificial Sequence: Synthetic oligonucleotide
gcagaaaauauaac

SEQ ID NO: 12200 - RNA, 14 nt, Artificial Sequence
  Description of Artificial Sequence: Synthetic oligonucleotide
ggcagaaaauauaa

SEQ ID NO: 12201 - RNA, 14 nt, Artificial Sequence
  Description of Artificial Sequence: Synthetic oligonucleotide
uggcagaaaauaua

SEQ ID NO: 12202 - RNA, 14 nt, Artificial Sequence
  Description of Artificial Sequence: Synthetic oligonucleotide
uuggcagaaaauau

SEQ ID NO: 12203 - RNA, 14 nt, Artificial Sequence
  Description of Artificial Sequence: Synthetic oligonucleotide
cuuggcagaaaaua

SEQ ID NO: 12204 - RNA, 14 nt, Artificial Sequence
  Description of Artificial Sequence: Synthetic oligonucleotide
acuuggcagaaaau

SEQ ID NO: 12205 - RNA, 14 nt, Artificial Sequence
  Description of Artificial Sequence: Synthetic oligonucleotide
gacuuggcagaaaa

SEQ ID NO: 12206 - RNA, 14 nt, Artificial Sequence
  Description of Artificial Sequence: Synthetic oligonucleotide
ugacuuggcagaaa

SEQ ID NO: 12207 - RNA, 14 nt, Artificial Sequence
  Description of Artificial Sequence: Synthetic oligonucleotide
cugacuuggcagaa

SEQ ID NO: 12208 - RNA, 14 nt, Artificial Sequence
  Description of Artificial Sequence: Synthetic oligonucleotide
gcugacuuggcaga

SEQ ID NO: 12209 - RNA, 14 nt, Artificial Sequence
  Description of Artificial Sequence: Synthetic oligonucleotide
agcugacuuggcag

SEQ ID NO: 12210 - RNA, 14 nt, Artificial Sequence
  Description of Artificial Sequence: Synthetic oligonucleotide
cagcugacuuggca

SEQ ID NO: 12211 - RNA, 14 nt, Artificial Sequence
  Description of Artificial Sequence: Synthetic oligonucleotide
ucagcugacuuggc

SEQ ID NO: 12212 - RNA, 14 nt, Artificial Sequence
  Description of Artificial Sequence: Synthetic oligonucleotide
uucagcugacuugg

SEQ ID NO: 12213 - RNA, 14 nt, Artificial Sequence
  Description of Artificial Sequence: Synthetic oligonucleotide
cuucagcugacuug

SEQ ID NO: 12214 - RNA, 14 nt, Artificial Sequence
  Description of Artificial Sequence: Synthetic oligonucleotide
ucuucagcugacuu

SEQ ID NO: 12215 - RNA, 14 nt, Artificial Sequence
  Description of Artificial Sequence: Synthetic oligonucleotide
cucuucagcugacu

SEQ ID NO: 12216 - RNA, 14 nt, Artificial Sequence
  Description of Artificial Sequence: Synthetic oligonucleotide
ucucuucagcugac

SEQ ID NO: 12217 - RNA, 14 nt, Artificial Sequence
  Description of Artificial Sequence: Synthetic oligonucleotide
uucucuucagcuga

SEQ ID NO: 12218 - RNA, 14 nt, Artificial Sequence
  Description of Artificial Sequence: Synthetic oligonucleotide
uuucucuucagcug

SEQ ID NO: 12219 - RNA, 14 nt, Artificial Sequence
  Description of Artificial Sequence: Synthetic oligonucleotide
uuuucucuucagcu

SEQ ID NO: 12220 - RNA, 14 nt, Artificial Sequence
  Description of Artificial Sequence: Synthetic oligonucleotide
uuuuucucuucagc

SEQ ID NO: 12221 - RNA, 14 nt, Artificial Sequence
  Description of Artificial Sequence: Synthetic oligonucleotide
guuuuucucuucag

SEQ ID NO: 12222 - RNA, 14 nt, Artificial Sequence
  Description of Artificial Sequence: Synthetic oligonucleotide
uguuuuucucuuca

SEQ ID NO: 12223 - RNA, 14 nt, Artificial Sequence
  Description of Artificial Sequence: Synthetic oligonucleotide
uuguuuuucucuuc

SEQ ID NO: 12224 - RNA, 14 nt, Artificial Sequence
  Description of Artificial Sequence: Synthetic oligonucleotide
auuguuuuucucuu

SEQ ID NO: 12225 - RNA, 14 nt, Artificial Sequence
  Description of Artificial Sequence: Synthetic oligonucleotide
aauuguuuuucucu

SEQ ID NO: 12226 - RNA, 14 nt, Artificial Sequence
  Description of Artificial Sequence: Synthetic oligonucleotide
caauuguuuuucuc

SEQ ID NO: 12227 - RNA, 14 nt, Artificial Sequence
  Description of Artificial Sequence: Synthetic oligonucleotide
ccaauuguuuuucu

SEQ ID NO: 12228 - RNA, 14 nt, Artificial Sequence
  Description of Artificial Sequence: Synthetic oligonucleotide
uccaauuguuuuuc

SEQ ID NO: 12229 - RNA, 14 nt, Artificial Sequence
  Description of Artificial Sequence: Synthetic oligonucleotide
auccaauuguuuuu

SEQ ID NO: 12230 - RNA, 14 nt, Artificial Sequence
  Description of Artificial Sequence: Synthetic oligonucleotide
cauccaauuguuuu

SEQ ID NO: 12231 - RNA, 14 nt, Artificial Sequence
  Description of Artificial Sequence: Synthetic oligonucleotide
ccauccaauuguuu

SEQ ID NO: 12232 - RNA, 14 nt, Artificial Sequence
  Description of Artificial Sequence: Synthetic oligonucleotide
gccauccaauuguu

SEQ ID NO: 12233 - RNA, 14 nt, Artificial Sequence
  Description of Artificial Sequence: Synthetic oligonucleotide
ugccauccaauugu

SEQ ID NO: 12234 - RNA, 14 nt, Artificial Sequence
  Description of Artificial Sequence: Synthetic oligonucleotide
cugccauccaauug

SEQ ID NO: 12235 - RNA, 14 nt, Artificial Sequence
  Description of Artificial Sequence: Synthetic oligonucleotide
gcugccauccaauu

SEQ ID NO: 12236 - RNA, 14 nt, Artificial Sequence
  Description of Artificial Sequence: Synthetic oligonucleotide
ugcugccauccaau

SEQ ID NO: 12237 - RNA, 14 nt, Artificial Sequence
  Description of Artificial Sequence: Synthetic oligonucleotide
augcugccauccaa

SEQ ID NO: 12238 - RNA, 14 nt, Artificial Sequence
  Description of Artificial Sequence: Synthetic oligonucleotide
aaugcugccaucca

SEQ ID NO: 12239 - RNA, 14 nt, Artificial Sequence
  Description of Artificial Sequence: Synthetic oligonucleotide
caaugcugccaucc

SEQ ID NO: 12240 - RNA, 14 nt, Artificial Sequence
  Description of Artificial Sequence: Synthetic oligonucleotide
ucaaugcugccauc

SEQ ID NO: 12241 - RNA, 14 nt, Artificial Sequence
  Description of Artificial Sequence: Synthetic oligonucleotide
aucaaugcugccau

SEQ ID NO: 12242 - RNA, 14 nt, Artificial Sequence
  Description of Artificial Sequence: Synthetic oligonucleotide
uaucaaugcugcca

SEQ ID NO: 12243 - RNA, 14 nt, Artificial Sequence
  Description of Artificial Sequence: Synthetic oligonucleotide
auaucaaugcugcc

SEQ ID NO: 12244 - RNA, 14 nt, Artificial Sequence
  Description of Artificial Sequence: Synthetic oligonucleotide
gauaucaaugcugc

SEQ ID NO: 12245 - RNA, 14 nt, Artificial Sequence
  Description of Artificial Sequence: Synthetic oligonucleotide
agauaucaaugcug

SEQ ID NO: 12246 - RNA, 14 nt, Artificial Sequence
  Description of Artificial Sequence: Synthetic oligonucleotide
aagauaucaaugcu

SEQ ID NO: 12247 - RNA, 14 nt, Artificial Sequence
  Description of Artificial Sequence: Synthetic oligonucleotide
aaagauaucaaugc

SEQ ID NO: 12248 - RNA, 14 nt, Artificial Sequence
  Description of Artificial Sequence: Synthetic oligonucleotide
uaaagauaucaaug

SEQ ID NO: 12249 - RNA, 14 nt, Artificial Sequence
  Description of Artificial Sequence: Synthetic oligonucleotide
guaaagauaucaau

SEQ ID NO: 12250 - RNA, 14 nt, Artificial Sequence
  Description of Artificial Sequence: Synthetic oligonucleotide
uguaaagauaucaa

SEQ ID NO: 12251 - RNA, 14 nt, Artificial Sequence
  Description of Artificial Sequence: Synthetic oligonucleotide
cuguaaagauauca

SEQ ID NO: 12252 - RNA, 14 nt, Artificial Sequence
  Description of Artificial Sequence: Synthetic oligonucleotide
acuguaaagauauc

SEQ ID NO: 12253 - RNA, 14 nt, Artificial Sequence
  Description of Artificial Sequence: Synthetic oligonucleotide
uacuguaaagauau

SEQ ID NO: 12254 - RNA, 14 nt, Artificial Sequence
  Description of Artificial Sequence: Synthetic oligonucleotide
guacuguaaagaua

SEQ ID NO: 12255 - RNA, 14 nt, Artificial Sequence
  Description of Artificial Sequence: Synthetic oligonucleotide
gguacuguaaagau

SEQ ID NO: 12256 - RNA, 14 nt, Artificial Sequence
  Description of Artificial Sequence: Synthetic oligonucleotide
cgguacuguaaaga

SEQ ID NO: 12257 - RNA, 14 nt, Artificial Sequence
  Description of Artificial Sequence: Synthetic oligonucleotide
ccgguacuguaaag

SEQ ID NO: 12258 - RNA, 14 nt, Artificial Sequence
  Description of Artificial Sequence: Synthetic oligonucleotide
uccgguacuguaaa

SEQ ID NO: 12259 - RNA, 14 nt, Artificial Sequence
  Description of Artificial Sequence: Synthetic oligonucleotide
cuccgguacuguaa

SEQ ID NO: 12260 - RNA, 14 nt, Artificial Sequence
  Description of Artificial Sequence: Synthetic oligonucleotide
acuccgguacugua

SEQ ID NO: 12261 - RNA, 14 nt, Artificial Sequence
  Description of Artificial Sequence: Synthetic oligonucleotide
uacuccgguacugu

SEQ ID NO: 12262 - RNA, 14 nt, Artificial Sequence
  Description of Artificial Sequence: Synthetic oligonucleotide
guacuccgguacug

SEQ ID NO: 12263 - RNA, 14 nt, Artificial Sequence
  Description of Artificial Sequence: Synthetic oligonucleotide
uguacuccgguacu

SEQ ID NO: 12264 - RNA, 14 nt, Artificial Sequence
  Description of Artificial Sequence: Synthetic oligonucleotide
guguacuccgguac

SEQ ID NO: 12265 - RNA, 14 nt, Artificial Sequence
  Description of Artificial Sequence: Synthetic oligonucleotide
aguguacuccggua

SEQ ID NO: 12266 - RNA, 14 nt, Artificial Sequence
  Description of Artificial Sequence: Synthetic oligonucleotide
caguguacuccggu

SEQ ID NO: 12267 - RNA, 14 nt, Artificial Sequence
  Description of Artificial Sequence: Synthetic oligonucleotide
ccaguguacuccgg

SEQ ID NO: 12268 - RNA, 14 nt, Artificial Sequence
  Description of Artificial Sequence: Synthetic oligonucleotide
uccaguguacuccg

SEQ ID NO: 12269 - RNA, 14 nt, Artificial Sequence
  Description of Artificial Sequence: Synthetic oligonucleotide
uuccaguguacucc

SEQ ID NO: 12270 - RNA, 14 nt, Artificial Sequence
  Description of Artificial Sequence: Synthetic oligonucleotide
uuuccaguguacuc

SEQ ID NO: 12271 - RNA, 14 nt, Artificial Sequence
  Description of Artificial Sequence: Synthetic oligonucleotide
cuuuccaguguacu

SEQ ID NO: 12272 - RNA, 14 nt, Artificial Sequence
  Description of Artificial Sequence: Synthetic oligonucleotide
ccuuuccaguguac

SEQ ID NO: 12273 - RNA, 14 nt, Artificial Sequence
  Description of Artificial Sequence: Synthetic oligonucleotide
uccuuuccagugua

SEQ ID NO: 12274 - RNA, 14 nt, Artificial Sequence
  Description of Artificial Sequence: Synthetic oligonucleotide
auccuuuccagugu

SEQ ID NO: 12275 - RNA, 14 nt, Artificial Sequence
  Description of Artificial Sequence: Synthetic oligonucleotide
cauccuuuccagug

SEQ ID NO: 12276 - RNA, 14 nt, Artificial Sequence
  Description of Artificial Sequence: Synthetic oligonucleotide
gcauccuuuccagu

SEQ ID NO: 12277 - RNA, 14 nt, Artificial Sequence
  Description of Artificial Sequence: Synthetic oligonucleotide
agcauccuuuccag

SEQ ID NO: 12278 - RNA, 14 nt, Artificial Sequence
  Description of Artificial Sequence: Synthetic oligonucleotide
aagcauccuuucca

SEQ ID NO: 12279 - RNA, 14 nt, Artificial Sequence
  Description of Artificial Sequence: Synthetic oligonucleotide
caagcauccuuucc

SEQ ID NO: 12280 - RNA, 14 nt, Artificial Sequence
  Description of Artificial Sequence: Synthetic oligonucleotide
ucaagcauccuuuc

SEQ ID NO: 12281 - RNA, 14 nt, Artificial Sequence
  Description of Artificial Sequence: Synthetic oligonucleotide
aucaagcauccuuu

SEQ ID NO: 12282 - RNA, 14 nt, Artificial Sequence
  Description of Artificial Sequence: Synthetic oligonucleotide
caucaagcauccuu

SEQ ID NO: 12283 - RNA, 14 nt, Artificial Sequence
  Description of Artificial Sequence: Synthetic oligonucleotide
acaucaagcauccu

SEQ ID NO: 12284 - RNA, 14 nt, Artificial Sequence
  Description of Artificial Sequence: Synthetic oligonucleotide
uacaucaagcaucc

SEQ ID NO: 12285 - RNA, 14 nt, Artificial Sequence
  Description of Artificial Sequence: Synthetic oligonucleotide
uuacaucaagcauc

SEQ ID NO: 12286 - RNA, 14 nt, Artificial Sequence
  Description of Artificial Sequence: Synthetic oligonucleotide
guuacaucaagcau

SEQ ID NO: 12287 - RNA, 14 nt, Artificial Sequence
  Description of Artificial Sequence: Synthetic oligonucleotide
uguuacaucaagca

SEQ ID NO: 12288 - RNA, 14 nt, Artificial Sequence
  Description of Artificial Sequence: Synthetic oligonucleotide
uuguuacaucaagc

SEQ ID NO: 12289 - RNA, 14 nt, Artificial Sequence
  Description of Artificial Sequence: Synthetic oligonucleotide
auuguuacaucaag

SEQ ID NO: 12290 - RNA, 14 nt, Artificial Sequence
  Description of Artificial Sequence: Synthetic oligonucleotide
cauuguuacaucaa

SEQ ID NO: 12291 - RNA, 14 nt, Artificial Sequence
  Description of Artificial Sequence: Synthetic oligonucleotide
gcauuguuacauca

SEQ ID NO: 12292 - RNA, 14 nt, Artificial Sequence
  Description of Artificial Sequence: Synthetic oligonucleotide
agcauuguuacauc

SEQ ID NO: 12293 - RNA, 14 nt, Artificial Sequence
  Description of Artificial Sequence: Synthetic oligonucleotide
uagcauuguuacau

SEQ ID NO: 12294 - RNA, 14 nt, Artificial Sequence
  Description of Artificial Sequence: Synthetic oligonucleotide
guagcauuguuaca

SEQ ID NO: 12295 - RNA, 14 nt, Artificial Sequence
  Description of Artificial Sequence: Synthetic oligonucleotide
uguagcauuguuac

SEQ ID NO: 12296 - RNA, 14 nt, Artificial Sequence
  Description of Artificial Sequence: Synthetic oligonucleotide
cuguagcauuguua

SEQ ID NO: 12297 - RNA, 14 nt, Artificial Sequence
  Description of Artificial Sequence: Synthetic oligonucleotide
ccuguagcauuguu

SEQ ID NO: 12298 - RNA, 14 nt, Artificial Sequence
  Description of Artificial Sequence: Synthetic oligonucleotide
uccuguagcauugu

SEQ ID NO: 12299 - RNA, 14 nt, Artificial Sequence
  Description of Artificial Sequence: Synthetic oligonucleotide
uuccuguagcauug

SEQ ID NO: 12300 - RNA, 14 nt, Artificial Sequence
  Description of Artificial Sequence: Synthetic oligonucleotide
cuuccuguagcauu

SEQ ID NO: 12301 - RNA, 14 nt, Artificial Sequence
  Description of Artificial Sequence: Synthetic oligonucleotide
ucuuccuguagcau

SEQ ID NO: 12302 - RNA, 14 nt, Artificial Sequence
  Description of Artificial Sequence: Synthetic oligonucleotide
cucuuccuguagca

SEQ ID NO: 12303 - RNA, 14 nt, Artificial Sequence
  Description of Artificial Sequence: Synthetic oligonucleotide
ucucuuccuguagc

SEQ ID NO: 12304 - RNA, 14 nt, Artificial Sequence
  Description of Artificial Sequence: Synthetic oligonucleotide
uucucuuccuguag

SEQ ID NO: 12305 - RNA, 14 nt, Artificial Sequence
  Description of Artificial Sequence: Synthetic oligonucleotide
uuucucuuccugua

SEQ ID NO: 12306 - RNA, 14 nt, Artificial Sequence
  Description of Artificial Sequence: Synthetic oligonucleotide
cuuucucuuccugu

SEQ ID NO: 12307 - RNA, 14 nt, Artificial Sequence
  Description of Artificial Sequence: Synthetic oligonucleotide
ucuuucucuuccug

SEQ ID NO: 12308 - RNA, 14 nt, Artificial Sequence
  Description of Artificial Sequence: Synthetic oligonucleotide
cucuuucucuuccu

SEQ ID NO: 12309 - RNA, 14 nt, Artificial Sequence
  Description of Artificial Sequence: Synthetic oligonucleotide
ccucuuucucuucc

SEQ ID NO: 12310 - RNA, 14 nt, Artificial Sequence
  Description of Artificial Sequence: Synthetic oligonucleotide
uccucuuucucuuc

SEQ ID NO: 12311 - RNA, 14 nt, Artificial Sequence
  Description of Artificial Sequence: Synthetic oligonucleotide
cuccucuuucucuu

SEQ ID NO: 12312 - RNA, 14 nt, Artificial Sequence
  Description of Artificial Sequence: Synthetic oligonucleotide
gcuccucuuucucu

SEQ ID NO: 12313 - RNA, 14 nt, Artificial Sequence
  Description of Artificial Sequence: Synthetic oligonucleotide
ugcuccucuuucuc

SEQ ID NO: 12314 - RNA, 14 nt, Artificial Sequence
  Description of Artificial Sequence: Synthetic oligonucleotide
cugcuccucuuucu

SEQ ID NO: 12315 - RNA, 14 nt, Artificial Sequence
  Description of Artificial Sequence: Synthetic oligonucleotide
ucugcuccucuuuc

SEQ ID NO: 12316 - RNA, 14 nt, Artificial Sequence
  Description of Artificial Sequence: Synthetic oligonucleotide
aucugcuccucuuu

SEQ ID NO: 12317 - RNA, 14 nt, Artificial Sequence
  Description of Artificial Sequence: Synthetic oligonucleotide
caucugcuccucuu

SEQ ID NO: 12318 - RNA, 14 nt, Artificial Sequence
  Description of Artificial Sequence: Synthetic oligonucleotide
ucaucugcuccucu

SEQ ID NO: 12319 - RNA, 14 nt, Artificial Sequence
  Description of Artificial Sequence: Synthetic oligonucleotide
cucaucugcuccuc

SEQ ID NO: 12320 - RNA, 14 nt, Artificial Sequence
  Description of Artificial Sequence: Synthetic oligonucleotide
ccucaucugcuccu

SEQ ID NO: 12321 - RNA, 14 nt, Artificial Sequence
  Description of Artificial Sequence: Synthetic oligonucleotide
gccucaucugcucc

SEQ ID NO: 12322 - RNA, 14 nt, Artificial Sequence
  Description of Artificial Sequence: Synthetic oligonucleotide
agccucaucugcuc

SEQ ID NO: 12323 - RNA, 14 nt, Artificial Sequence
  Description of Artificial Sequence: Synthetic oligonucleotide
cagccucaucugcu

SEQ ID NO: 12324 - RNA, 14 nt, Artificial Sequence
  Description of Artificial Sequence: Synthetic oligonucleotide
gcagccucaucugc

SEQ ID NO: 12325 - RNA, 14 nt, Artificial Sequence
  Description of Artificial Sequence: Synthetic oligonucleotide
ggcagccucaucug

SEQ ID NO: 12326 - RNA, 14 nt, Artificial Sequence
  Description of Artificial Sequence: Synthetic oligonucleotide
aggcagccucaucu

SEQ ID NO: 12327 - RNA, 14 nt, Artificial Sequence
  Description of Artificial Sequence: Synthetic oligonucleotide
uaggcagccucauc

SEQ ID NO: 12328 - RNA, 14 nt, Artificial Sequence
  Description of Artificial Sequence: Synthetic oligonucleotide
cuaggcagccucau

SEQ ID NO: 12329 - RNA, 14 nt, Artificial Sequence
  Description of Artificial Sequence: Synthetic oligonucleotide
acuaggcagccuca

SEQ ID NO: 12330 - RNA, 14 nt, Artificial Sequence
  Description of Artificial Sequence: Synthetic oligonucleotide
cacuaggcagccuc

SEQ ID NO: 12331 - RNA, 14 nt, Artificial Sequence
  Description of Artificial Sequence: Synthetic oligonucleotide
gcacuaggcagccu

SEQ ID NO: 12332 - RNA, 14 nt, Artificial Sequence
  Description of Artificial Sequence: Synthetic oligonucleotide
agcacuaggcagcc

SEQ ID NO: 12333 - RNA, 14 nt, Artificial Sequence
  Description of Artificial Sequence: Synthetic oligonucleotide
cagcacuaggcagc

SEQ ID NO: 12334 - RNA, 14 nt, Artificial Sequence
  Description of Artificial Sequence: Synthetic oligonucleotide
ucagcacuaggcag

SEQ ID NO: 12335 - RNA, 14 nt, Artificial Sequence
  Description of Artificial Sequence: Synthetic oligonucleotide
aucagcacuaggca

SEQ ID NO: 12336 - RNA, 14 nt, Artificial Sequence
  Description of Artificial Sequence: Synthetic oligonucleotide
caucagcacuaggc

SEQ ID NO: 12337 - RNA, 14 nt, Artificial Sequence
  Description of Artificial Sequence: Synthetic oligonucleotide
acaucagcacuagg

SEQ ID NO: 12338 - RNA, 14 nt, Artificial Sequence
  Description of Artificial Sequence: Synthetic oligonucleotide
aacaucagcacuag

SEQ ID NO: 12339 - RNA, 14 nt, Artificial Sequence
  Description of Artificial Sequence: Synthetic oligonucleotide
aaacaucagcacua

SEQ ID NO: 12340 - RNA, 14 nt, Artificial Sequence
  Description of Artificial Sequence: Synthetic oligonucleotide
uaaacaucagcacu

SEQ ID NO: 12341 - RNA, 14 nt, Artificial Sequence
  Description of Artificial Sequence: Synthetic oligonucleotide
auaaacaucagcac

SEQ ID NO: 12342 - RNA, 14 nt, Artificial Sequence
  Description of Artificial Sequence: Synthetic oligonucleotide
uauaaacaucagca

SEQ ID NO: 12343 - RNA, 14 nt, Artificial Sequence
  Description of Artificial Sequence: Synthetic oligonucleotide
cuauaaacaucagc

SEQ ID NO: 12344 - RNA, 14 nt, Artificial Sequence
  Description of Artificial Sequence: Synthetic oligonucleotide
ucuauaaacaucag

SEQ ID NO: 12345 - RNA, 14 nt, Artificial Sequence
  Description of Artificial Sequence: Synthetic oligonucleotide
aucuauaaacauca

SEQ ID NO: 12346 - RNA, 14 nt, Artificial Sequence
  Description of Artificial Sequence: Synthetic oligonucleotide
aaucuauaaacauc

SEQ ID NO: 12347 - RNA, 14 nt, Artificial Sequence
  Description of Artificial Sequence: Synthetic oligonucleotide
aaaucuauaaacau

SEQ ID NO: 12348 - RNA, 14 nt, Artificial Sequence
  Description of Artificial Sequence: Synthetic oligonucleotide
caaaucuauaaaca

SEQ ID NO: 12349 - RNA, 14 nt, Artificial Sequence
  Description of Artificial Sequence: Synthetic oligonucleotide
gcaaaucuauaaac

SEQ ID NO: 12350 - RNA, 14 nt, Artificial Sequence
  Description of Artificial Sequence: Synthetic oligonucleotide
ugcaaaucuauaaa

SEQ ID NO: 12351 - RNA, 14 nt, Artificial Sequence
  Description of Artificial Sequence: Synthetic oligonucleotide
cugcaaaucuauaa

SEQ ID NO: 12352 - RNA, 14 nt, Artificial Sequence
  Description of Artificial Sequence: Synthetic oligonucleotide
ucugcaaaucuaua

SEQ ID NO: 12353 - RNA, 14 nt, Artificial Sequence
  Description of Artificial Sequence: Synthetic oligonucleotide
cucugcaaaucuau

SEQ ID NO: 12354 - RNA, 14 nt, Artificial Sequence
  Description of Artificial Sequence: Synthetic oligonucleotide
gcucugcaaaucua

SEQ ID NO: 12355 - RNA, 14 nt, Artificial Sequence
  Description of Artificial Sequence: Synthetic oligonucleotide
ggcucugcaaaucu

SEQ ID NO: 12356 - RNA, 14 nt, Artificial Sequence
  Description of Artificial Sequence: Synthetic oligonucleotide
aggcucugcaaauc

SEQ ID NO: 12357 - RNA, 14 nt, Artificial Sequence
  Description of Artificial Sequence: Synthetic oligonucleotide
caggcucugcaaau

SEQ ID NO: 12358 - RNA, 14 nt, Artificial Sequence
  Description of Artificial Sequence: Synthetic oligonucleotide
ucaggcucugcaaa

SEQ ID NO: 12359 - RNA, 14 nt, Artificial Sequence
  Description of Artificial Sequence: Synthetic oligonucleotide
gucaggcucugcaa

SEQ ID NO: 12360 - RNA, 14 nt, Artificial Sequence
  Description of Artificial Sequence: Synthetic oligonucleotide
agucaggcucugca

SEQ ID NO: 12361 - RNA, 14 nt, Artificial Sequence
  Description of Artificial Sequence: Synthetic oligonucleotide
gagucaggcucugc

SEQ ID NO: 12362 - RNA, 14 nt, Artificial Sequence
  Description of Artificial Sequence: Synthetic oligonucleotide
agagucaggcucug

SEQ ID NO: 12363 - RNA, 14 nt, Artificial Sequence
  Description of Artificial Sequence: Synthetic oligonucleotide
cagagucaggcucu

SEQ ID NO: 12364 - RNA, 14 nt, Artificial Sequence
  Description of Artificial Sequence: Synthetic oligonucleotide
ucagagucaggcuc

SEQ ID NO: 12365 - RNA, 14 nt, Artificial Sequence
  Description of Artificial Sequence: Synthetic oligonucleotide
uucagagucaggcu

SEQ ID NO: 12366 - RNA, 14 nt, Artificial Sequence
  Description of Artificial Sequence: Synthetic oligonucleotide
cuucagagucaggc

SEQ ID NO: 12367 - RNA, 14 nt, Artificial Sequence
  Description of Artificial Sequence: Synthetic oligonucleotide
ucuucagagucagg

SEQ ID NO: 12368 - RNA, 14 nt, Artificial Sequence
  Description of Artificial Sequence: Synthetic oligonucleotide
cucuucagagucag

SEQ ID NO: 12369 - RNA, 14 nt, Artificial Sequence
  Description of Artificial Sequence: Synthetic oligonucleotide
ucucuucagaguca

SEQ ID NO: 12370 - RNA, 14 nt, Artificial Sequence
  Description of Artificial Sequence: Synthetic oligonucleotide
uucucuucagaguc

SEQ ID NO: 12371 - RNA, 14 nt, Artificial Sequence
  Description of Artificial Sequence: Synthetic oligonucleotide
auucucuucagagu

SEQ ID NO: 12372 - RNA, 14 nt, Artificial Sequence
  Description of Artificial Sequence: Synthetic oligonucleotide
uauucucuucagag

SEQ ID NO: 12373 - RNA, 14 nt, Artificial Sequence
  Description of Artificial Sequence: Synthetic oligonucleotide
auauucucuucaga

SEQ ID NO: 12374 - RNA, 14 nt, Artificial Sequence
  Description of Artificial Sequence: Synthetic oligonucleotide
aauauucucuucag

SEQ ID NO: 12375 - RNA, 14 nt, Artificial Sequence
  Description of Artificial Sequence: Synthetic oligonucleotide
uaauauucucuuca

SEQ ID NO: 12376 - RNA, 14 nt, Artificial Sequence
  Description of Artificial Sequence: Synthetic oligonucleotide
auaauauucucuuc

SEQ ID NO: 12377 - RNA, 14 nt, Artificial Sequence
  Description of Artificial Sequence: Synthetic oligonucleotide
uauaauauucucuu

SEQ ID NO: 12378 - RNA, 14 nt, Artificial Sequence
  Description of Artificial Sequence: Synthetic oligonucleotide
auauaauauucucu

SEQ ID NO: 12379 - RNA, 14 nt, Artificial Sequence
  Description of Artificial Sequence: Synthetic oligonucleotide
aauauaauauucuc

SEQ ID NO: 12380 - RNA, 14 nt, Artificial Sequence
  Description of Artificial Sequence: Synthetic oligonucleotide
aaauauaauauucu

SEQ ID NO: 12381 - RNA, 14 nt, Artificial Sequence
  Description of Artificial Sequence: Synthetic oligonucleotide
caaauauaauauuc

SEQ ID NO: 12382 - RNA, 14 nt, Artificial Sequence
  Description of Artificial Sequence: Synthetic oligonucleotide
ucaaauauaauauu

SEQ ID NO: 12383 - RNA, 14 nt, Artificial Sequence
  Description of Artificial Sequence: Synthetic oligonucleotide
uucaaauauaauau

SEQ ID NO: 12384 - RNA, 14 nt, Artificial Sequence
  Description of Artificial Sequence: Synthetic oligonucleotide
cuucaaauauaaua

SEQ ID NO: 12385 - RNA, 14 nt, Artificial Sequence
  Description of Artificial Sequence: Synthetic oligonucleotide
ucuucaaauauaau

SEQ ID NO: 12386 - RNA, 14 nt, Artificial Sequence
  Description of Artificial Sequence: Synthetic oligonucleotide
cucuucaaauauaa

SEQ ID NO: 12387 - RNA, 14 nt, Artificial Sequence
  Description of Artificial Sequence: Synthetic oligonucleotide
ucucuucaaauaua

SEQ ID NO: 12388 - RNA, 14 nt, Artificial Sequence
  Description of Artificial Sequence: Synthetic oligonucleotide
uucucuucaaauau

SEQ ID NO: 12389 - RNA, 14 nt, Artificial Sequence
  Description of Artificial Sequence: Synthetic oligonucleotide
guucucuucaaaua

SEQ ID NO: 12390 - RNA, 14 nt, Artificial Sequence
  Description of Artificial Sequence: Synthetic oligonucleotide
uguucucuucaaau

SEQ ID NO: 12391 - RNA, 14 nt, Artificial Sequence
  Description of Artificial Sequence: Synthetic oligonucleotide
auguucucuucaaa

SEQ ID NO: 12392 - RNA, 14 nt, Artificial Sequence
  Description of Artificial Sequence: Synthetic oligonucleotide
cauguucucuucaa

SEQ ID NO: 12393 - RNA, 14 nt, Artificial Sequence
  Description of Artificial Sequence: Synthetic oligonucleotide
gcauguucucuuca

SEQ ID NO: 12394 - RNA, 14 nt, Artificial Sequence
  Description of Artificial Sequence: Synthetic oligonucleotide
ugcauguucucuuc

SEQ ID NO: 12395 - RNA, 14 nt, Artificial Sequence
  Description of Artificial Sequence: Synthetic oligonucleotide
cugcauguucucuu

SEQ ID NO: 12396 - RNA, 14 nt, Artificial Sequence
  Description of Artificial Sequence: Synthetic oligonucleotide
gcugcauguucucu

SEQ ID NO: 12397 - RNA, 14 nt, Artificial Sequence
  Description of Artificial Sequence: Synthetic oligonucleotide
ggcugcauguucuc

SEQ ID NO: 12398 - RNA, 14 nt, Artificial Sequence
  Description of Artificial Sequence: Synthetic oligonucleotide
gggcugcauguucu

SEQ ID NO: 12399 - RNA, 14 nt, Artificial Sequence
  Description of Artificial Sequence: Synthetic oligonucleotide
ugggcugcauguuc

SEQ ID NO: 12400 - RNA, 14 nt, Artificial Sequence
  Description of Artificial Sequence: Synthetic oligonucleotide
uugggcugcauguu

SEQ ID NO: 12401 - RNA, 14 nt, Artificial Sequence
  Description of Artificial Sequence: Synthetic oligonucleotide
cuugggcugcaugu

SEQ ID NO: 12402 - RNA, 14 nt, Artificial Sequence
  Description of Artificial Sequence: Synthetic oligonucleotide
ccuugggcugcaug

SEQ ID NO: 12403 - RNA, 14 nt, Artificial Sequence
  Description of Artificial Sequence: Synthetic oligonucleotide
gccuugggcugcau

SEQ ID NO: 12404 - RNA, 14 nt, Artificial Sequence
  Description of Artificial Sequence: Synthetic oligonucleotide
agccuugggcugca

SEQ ID NO: 12405 - RNA, 14 nt, Artificial Sequence
  Description of Artificial Sequence: Synthetic oligonucleotide
cagccuugggcugc

SEQ ID NO: 12406 - RNA, 14 nt, Artificial Sequence
  Description of Artificial Sequence: Synthetic oligonucleotide
ccagccuugggcug

SEQ ID NO: 12407 - RNA, 14 nt, Artificial Sequence
  Description of Artificial Sequence: Synthetic oligonucleotide
uccagccuugggcu

SEQ ID NO: 12408 - RNA, 14 nt, Artificial Sequence
  Description of Artificial Sequence: Synthetic oligonucleotide
uuccagccuugggc

SEQ ID NO: 12409 - RNA, 14 nt, Artificial Sequence
  Description of Artificial Sequence: Synthetic oligonucleotide
auuccagccuuggg

SEQ ID NO: 12410 - RNA, 14 nt, Artificial Sequence
  Description of Artificial Sequence: Synthetic oligonucleotide
aauuccagccuugg

SEQ ID NO: 12411 - RNA, 14 nt, Artificial Sequence
  Description of Artificial Sequence: Synthetic oligonucleotide
gaauuccagccuug

SEQ ID NO: 12412 - RNA, 14 nt, Artificial Sequence
  Description of Artificial Sequence: Synthetic oligonucleotide
ggaauuccagccuu

SEQ ID NO: 12413 - RNA, 14 nt, Artificial Sequence
  Description of Artificial Sequence: Synthetic oligonucleotide
uggaauuccagccu

SEQ ID NO: 12414 - RNA, 14 nt, Artificial Sequence
  Description of Artificial Sequence: Synthetic oligonucleotide
uuggaauuccagcc

SEQ ID NO: 12415 - RNA, 14 nt, Artificial Sequence
  Description of Artificial Sequence: Synthetic oligonucleotide
auuggaauuccagc

SEQ ID NO: 12416 - RNA, 14 nt, Artificial Sequence
  Description of Artificial Sequence: Synthetic oligonucleotide
aauuggaauuccag

SEQ ID NO: 12417 - RNA, 14 nt, Artificial Sequence
  Description of Artificial Sequence: Synthetic oligonucleotide
uaauuggaauucca

SEQ ID NO: 12418 - RNA, 14 nt, Artificial Sequence
  Description of Artificial Sequence: Synthetic oligonucleotide
auaauuggaauucc

SEQ ID NO: 12419 - RNA, 14 nt, Artificial Sequence
  Description of Artificial Sequence: Synthetic oligonucleotide
gauaauuggaauuc

SEQ ID NO: 12420 - RNA, 14 nt, Artificial Sequence
  Description of Artificial Sequence: Synthetic oligonucleotide
ugauaauuggaauu

SEQ ID NO: 12421 - RNA, 14 nt, Artificial Sequence
  Description of Artificial Sequence: Synthetic oligonucleotide
uugauaauuggaau

SEQ ID NO: 12422 - RNA, 14 nt, Artificial Sequence
  Description of Artificial Sequence: Synthetic oligonucleotide
uuugauaauuggaa

SEQ ID NO: 12423 - RNA, 14 nt, Artificial Sequence
  Description of Artificial Sequence: Synthetic oligonucleotide
cuuugauaauugga

SEQ ID NO: 12424 - RNA, 14 nt, Artificial Sequence
  Description of Artificial Sequence: Synthetic oligonucleotide
gcuuugauaauugg

SEQ ID NO: 12425 - RNA, 14 nt, Artificial Sequence
  Description of Artificial Sequence: Synthetic oligonucleotide
ugcuuugauaauug

SEQ ID NO: 12426 - RNA, 14 nt, Artificial Sequence
  Description of Artificial Sequence: Synthetic oligonucleotide
cugcuuugauaauu

SEQ ID NO: 12427 - RNA, 14 nt, Artificial Sequence
  Description of Artificial Sequence: Synthetic oligonucleotide
ccugcuuugauaau

SEQ ID NO: 12428 - RNA, 14 nt, Artificial Sequence
  Description of Artificial Sequence: Synthetic oligonucleotide
uccugcuuugauaa

SEQ ID NO: 12429 - RNA, 14 nt, Artificial Sequence
  Description of Artificial Sequence: Synthetic oligonucleotide
uuccugcuuugaua

SEQ ID NO: 12430 - RNA, 14 nt, Artificial Sequence
  Description of Artificial Sequence: Synthetic oligonucleotide
guuccugcuuugau

SEQ ID NO: 12431 - RNA, 14 nt, Artificial Sequence
  Description of Artificial Sequence: Synthetic oligonucleotide
aguuccugcuuuga

SEQ ID NO: 12432 - RNA, 14 nt, Artificial Sequence
  Description of Artificial Sequence: Synthetic oligonucleotide
caguuccugcuuug

SEQ ID NO: 12433 - RNA, 14 nt, Artificial Sequence
  Description of Artificial Sequence: Synthetic oligonucleotide
acaguuccugcuuu

SEQ ID NO: 12434 - RNA, 14 nt, Artificial Sequence
  Description of Artificial Sequence: Synthetic oligonucleotide
aacaguuccugcuu

SEQ ID NO: 12435 - RNA, 14 nt, Artificial Sequence
  Description of Artificial Sequence: Synthetic oligonucleotide
uaacaguuccugcu

SEQ ID NO: 12436 - RNA, 14 nt, Artificial Sequence
  Description of Artificial Sequence: Synthetic oligonucleotide
auaacaguuccugc

SEQ ID NO: 12437 - RNA, 14 nt, Artificial Sequence
  Description of Artificial Sequence: Synthetic oligonucleotide
aauaacaguuccug

SEQ ID NO: 12438 - RNA, 14 nt, Artificial Sequence
  Description of Artificial Sequence: Synthetic oligonucleotide
uaauaacaguuccu

SEQ ID NO: 12439 - RNA, 14 nt, Artificial Sequence
  Description of Artificial Sequence: Synthetic oligonucleotide
uuaauaacaguucc

SEQ ID NO: 12440 - RNA, 14 nt, Artificial Sequence
  Description of Artificial Sequence: Synthetic oligonucleotide
uuuaauaacaguuc

SEQ ID NO: 12441 - RNA, 14 nt, Artificial Sequence
  Description of Artificial Sequence: Synthetic oligonucleotide
guuuaauaacaguu

SEQ ID NO: 12442 - RNA, 14 nt, Artificial Sequence
  Description of Artificial Sequence: Synthetic oligonucleotide
aguuuaauaacagu

SEQ ID NO: 12443 - RNA, 14 nt, Artificial Sequence
  Description of Artificial Sequence: Synthetic oligonucleotide
aaguuuaauaacag

SEQ ID NO: 12444 - RNA, 14 nt, Artificial Sequence
  Description of Artificial Sequence: Synthetic oligonucleotide
uaaguuuaauaaca

SEQ ID NO: 12445 - RNA, 14 nt, Artificial Sequence
  Description of Artificial Sequence: Synthetic oligonucleotide
auaaguuuaauaac

SEQ ID NO: 12446 - RNA, 14 nt, Artificial Sequence
  Description of Artificial Sequence: Synthetic oligonucleotide
uauaaguuuaauaa

SEQ ID NO: 12447 - RNA, 14 nt, Artificial Sequence
  Description of Artificial Sequence: Synthetic oligonucleotide
cuauaaguuuaaua

SEQ ID NO: 12448 - RNA, 14 nt, Artificial Sequence
  Description of Artificial Sequence: Synthetic oligonucleotide
ucuauaaguuuaau

SEQ ID NO: 12449 - RNA, 14 nt, Artificial Sequence
  Description of Artificial Sequence: Synthetic oligonucleotide
cucuauaaguuuaa

SEQ ID NO: 12450 - RNA, 14 nt, Artificial Sequence
  Description of Artificial Sequence: Synthetic oligonucleotide
ucucuauaaguuua

SEQ ID NO: 12451 - RNA, 14 nt, Artificial Sequence
  Description of Artificial Sequence: Synthetic oligonucleotide
cucucuauaaguuu

SEQ ID NO: 12452 - RNA, 14 nt, Artificial Sequence
  Description of Artificial Sequence: Synthetic oligonucleotide
ccucucuauaaguu

SEQ ID NO: 12453 - RNA, 14 nt, Artificial Sequence
  Description of Artificial Sequence: Synthetic oligonucleotide
gccucucuauaagu

SEQ ID NO: 12454 - RNA, 14 nt, Artificial Sequence
  Description of Artificial Sequence: Synthetic oligonucleotide
agccucucuauaag

SEQ ID NO: 12455 - RNA, 14 nt, Artificial Sequence
  Description of Artificial Sequence: Synthetic oligonucleotide
aagccucucuauaa

SEQ ID NO: 12456 - RNA, 14 nt, Artificial Sequence
  Description of Artificial Sequence: Synthetic oligonucleotide
uaagccucucuaua

SEQ ID NO: 12457 - RNA, 14 nt, Artificial Sequence
  Description of Artificial Sequence: Synthetic oligonucleotide
guaagccucucuau

SEQ ID NO: 12458 - RNA, 14 nt, Artificial Sequence
  Description of Artificial Sequence: Synthetic oligonucleotide
cguaagccucucua

SEQ ID NO: 12459 - RNA, 14 nt, Artificial Sequence
  Description of Artificial Sequence: Synthetic oligonucleotide
acguaagccucucu

SEQ ID NO: 12460 - RNA, 14 nt, Artificial Sequence
  Description of Artificial Sequence: Synthetic oligonucleotide
uacguaagccucuc

SEQ ID NO: 12461 - RNA, 14 nt, Artificial Sequence
  Description of Artificial Sequence: Synthetic oligonucleotide
guacguaagccucu

SEQ ID NO: 12462 - RNA, 14 nt, Artificial Sequence
  Description of Artificial Sequence: Synthetic oligonucleotide
gguacguaagccuc

SEQ ID NO: 12463 - RNA, 14 nt, Artificial Sequence
  Description of Artificial Sequence: Synthetic oligonucleotide
ugguacguaagccu

SEQ ID NO: 12464 - RNA, 14 nt, Artificial Sequence
  Description of Artificial Sequence: Synthetic oligonucleotide
augguacguaagcc

SEQ ID NO: 12465 - RNA, 14 nt, Artificial Sequence
  Description of Artificial Sequence: Synthetic oligonucleotide
uaugguacguaagc

SEQ ID NO: 12466 - RNA, 14 nt, Artificial Sequence
  Description of Artificial Sequence: Synthetic oligonucleotide
auaugguacguaag

SEQ ID NO: 12467 - RNA, 14 nt, Artificial Sequence
  Description of Artificial Sequence: Synthetic oligonucleotide
cauaugguacguaa

SEQ ID NO: 12468 - RNA, 14 nt, Artificial Sequence
  Description of Artificial Sequence: Synthetic oligonucleotide
acauaugguacgua

SEQ ID NO: 12469 - RNA, 14 nt, Artificial Sequence
  Description of Artificial Sequence: Synthetic oligonucleotide
uacauaugguacgu

SEQ ID NO: 12470 - RNA, 14 nt, Artificial Sequence
  Description of Artificial Sequence: Synthetic oligonucleotide
guacauaugguacg

SEQ ID NO: 12471 - RNA, 14 nt, Artificial Sequence
  Description of Artificial Sequence: Synthetic oligonucleotide
cguacauaugguac

SEQ ID NO: 12472 - RNA, 14 nt, Artificial Sequence
  Description of Artificial Sequence: Synthetic oligonucleotide
gcguacauauggua

SEQ ID NO: 12473 - RNA, 14 nt, Artificial Sequence
  Description of Artificial Sequence: Synthetic oligonucleotide
ugcguacauauggu

SEQ ID NO: 12474 - RNA, 14 nt, Artificial Sequence
  Description of Artificial Sequence: Synthetic oligonucleotide
cugcguacauaugg

SEQ ID NO: 12475 - RNA, 14 nt, Artificial Sequence
  Description of Artificial Sequence: Synthetic oligonucleotide
ucugcguacauaug

SEQ ID NO: 12476 - RNA, 14 nt, Artificial Sequence
  Description of Artificial Sequence: Synthetic oligonucleotide
aucugcguacauau

SEQ ID NO: 12477 - RNA, 14 nt, Artificial Sequence
  Description of Artificial Sequence: Synthetic oligonucleotide
gaucugcguacaua

SEQ ID NO: 12478 - RNA, 14 nt, Artificial Sequence
  Description of Artificial Sequence: Synthetic oligonucleotide
ggaucugcguacau

SEQ ID NO: 12479 - RNA, 14 nt, Artificial Sequence
  Description of Artificial Sequence: Synthetic oligonucleotide
gggaucugcguaca

SEQ ID NO: 12480 - RNA, 14 nt, Artificial Sequence
  Description of Artificial Sequence: Synthetic oligonucleotide
ugggaucugcguac

SEQ ID NO: 12481 - RNA, 14 nt, Artificial Sequence
  Description of Artificial Sequence: Synthetic oligonucleotide
uugggaucugcgua

SEQ ID NO: 12482 - RNA, 14 nt, Artificial Sequence
  Description of Artificial Sequence: Synthetic oligonucleotide
auugggaucugcgu

SEQ ID NO: 12483 - RNA, 14 nt, Artificial Sequence
  Description of Artificial Sequence: Synthetic oligonucleotide
aauugggaucugcg

SEQ ID NO: 12484 - RNA, 14 nt, Artificial Sequence
  Description of Artificial Sequence: Synthetic oligonucleotide
aaauugggaucugc

SEQ ID NO: 12485 - RNA, 14 nt, Artificial Sequence
  Description of Artificial Sequence: Synthetic oligonucleotide
aaaauugggaucug

SEQ ID NO: 12486 - RNA, 14 nt, Artificial Sequence
  Description of Artificial Sequence: Synthetic oligonucleotide
caaaauugggaucu

SEQ ID NO: 12487 - RNA, 14 nt, Artificial Sequence
  Description of Artificial Sequence: Synthetic oligonucleotide
acaaaauugggauc

SEQ ID NO: 12488 - RNA, 14 nt, Artificial Sequence
  Description of Artificial Sequence: Synthetic oligonucleotide
aacaaaauugggau

SEQ ID NO: 12489 - RNA, 14 nt, Artificial Sequence
  Description of Artificial Sequence: Synthetic oligonucleotide
gaacaaaauuggga

SEQ ID NO: 12490 - RNA, 14 nt, Artificial Sequence
  Description of Artificial Sequence: Synthetic oligonucleotide
cgaacaaaauuggg

SEQ ID NO: 12491 - RNA, 14 nt, Artificial Sequence
  Description of Artificial Sequence: Synthetic oligonucleotide
ccgaacaaaauugg

SEQ ID NO: 12492 - RNA, 14 nt, Artificial Sequence
  Description of Artificial Sequence: Synthetic oligonucleotide
uccgaacaaaauug

SEQ ID NO: 12493 - RNA, 14 nt, Artificial Sequence
  Description of Artificial Sequence: Synthetic oligonucleotide
guccgaacaaaauu

SEQ ID NO: 12494 - RNA, 14 nt, Artificial Sequence
  Description of Artificial Sequence: Synthetic oligonucleotide
uguccgaacaaaau

SEQ ID NO: 12495 - RNA, 14 nt, Artificial Sequence
  Description of Artificial Sequence: Synthetic oligonucleotide
auguccgaacaaaa

SEQ ID NO: 12496 - RNA, 14 nt, Artificial Sequence
  Description of Artificial Sequence: Synthetic oligonucleotide
aauguccgaacaaa

SEQ ID NO: 12497 - RNA, 14 nt, Artificial Sequence
  Description of Artificial Sequence: Synthetic oligonucleotide
aaauguccgaacaa

SEQ ID NO: 12498 - RNA, 14 nt, Artificial Sequence
  Description of Artificial Sequence: Synthetic oligonucleotide
gaaauguccgaaca

SEQ ID NO: 12499 - RNA, 14 nt, Artificial Sequence
  Description of Artificial Sequence: Synthetic oligonucleotide
agaaauguccgaac

SEQ ID NO: 12500 - RNA, 14 nt, Artificial Sequence
  Description of Artificial Sequence: Synthetic oligonucleotide
aagaaauguccgaa

SEQ ID NO: 12501 - RNA, 14 nt, Artificial Sequence
  Description of Artificial Sequence: Synthetic oligonucleotide
uaagaaauguccga

SEQ ID NO: 12502 - RNA, 14 nt, Artificial Sequence
  Description of Artificial Sequence: Synthetic oligonucleotide
guaagaaauguccg

SEQ ID NO: 12503 - RNA, 14 nt, Artificial Sequence
  Description of Artificial Sequence: Synthetic oligonucleotide
uguaagaaaugucc

SEQ ID NO: 12504 - RNA, 14 nt, Artificial Sequence
  Description of Artificial Sequence: Synthetic oligonucleotide
uuguaagaaauguc

SEQ ID NO: 12505 - RNA, 14 nt, Artificial Sequence
  Description of Artificial Sequence: Synthetic oligonucleotide
guuguaagaaaugu

SEQ ID NO: 12506 - RNA, 14 nt, Artificial Sequence
  Description of Artificial Sequence: Synthetic oligonucleotide
uguuguaagaaaug

SEQ ID NO: 12507 - RNA, 14 nt, Artificial Sequence
  Description of Artificial Sequence: Synthetic oligonucleotide
auguuguaagaaau

SEQ ID NO: 12508 - RNA, 14 nt, Artificial Sequence
  Description of Artificial Sequence: Synthetic oligonucleotide
uauguuguaagaaa

SEQ ID NO: 12509 - RNA, 14 nt, Artificial Sequence
  Description of Artificial Sequence: Synthetic oligonucleotide
guauguuguaagaa

SEQ ID NO: 12510 - RNA, 14 nt, Artificial Sequence
  Description of Artificial Sequence: Synthetic oligonucleotide
uguauguuguaaga

SEQ ID NO: 12511 - RNA, 14 nt, Artificial Sequence
  Description of Artificial Sequence: Synthetic oligonucleotide
cuguauguuguaag

SEQ ID NO: 12512 - RNA, 14 nt, Artificial Sequence
  Description of Artificial Sequence: Synthetic oligonucleotide
ucuguauguuguaa

SEQ ID NO: 12513 - RNA, 14 nt, Artificial Sequence
  Description of Artificial Sequence: Synthetic oligonucleotide
aucuguauguugua

SEQ ID NO: 12514 - RNA, 14 nt, Artificial Sequence
  Description of Artificial Sequence: Synthetic oligonucleotide
gaucuguauguugu

SEQ ID NO: 12515 - RNA, 14 nt, Artificial Sequence
  Description of Artificial Sequence: Synthetic oligonucleotide
ggaucuguauguug

SEQ ID NO: 12516 - RNA, 14 nt, Artificial Sequence
  Description of Artificial Sequence: Synthetic oligonucleotide
aggaucuguauguu

SEQ ID NO: 12517 - RNA, 14 nt, Artificial Sequence
  Description of Artificial Sequence: Synthetic oligonucleotide
aaggaucuguaugu

SEQ ID NO: 12518 - RNA, 14 nt, Artificial Sequence
  Description of Artificial Sequence: Synthetic oligonucleotide
aaaggaucuguaug

SEQ ID NO: 12519 - RNA, 14 nt, Artificial Sequence
  Description of Artificial Sequence: Synthetic oligonucleotide
aaaaggaucuguau

SEQ ID NO: 12520 - RNA, 14 nt, Artificial Sequence
  Description of Artificial Sequence: Synthetic oligonucleotide
caaaaggaucugua

SEQ ID NO: 12521 - RNA, 14 nt, Artificial Sequence
  Description of Artificial Sequence: Synthetic oligonucleotide
gcaaaaggaucugu

SEQ ID NO: 12522 - RNA, 14 nt, Artificial Sequence
  Description of Artificial Sequence: Synthetic oligonucleotide
ugcaaaaggaucug

SEQ ID NO: 12523 - RNA, 14 nt, Artificial Sequence
  Description of Artificial Sequence: Synthetic oligonucleotide
uugcaaaaggaucu

SEQ ID NO: 12524 - RNA, 14 nt, Artificial Sequence
  Description of Artificial Sequence: Synthetic oligonucleotide
uuugcaaaaggauc

SEQ ID NO: 12525 - RNA, 14 nt, Artificial Sequence
  Description of Artificial Sequence: Synthetic oligonucleotide
guuugcaaaaggau

SEQ ID NO: 12526 - RNA, 14 nt, Artificial Sequence
  Description of Artificial Sequence: Synthetic oligonucleotide
gguuugcaaaagga

SEQ ID NO: 12527 - RNA, 14 nt, Artificial Sequence
  Description of Artificial Sequence: Synthetic oligonucleotide
agguuugcaaaagg

SEQ ID NO: 12528 - RNA, 14 nt, Artificial Sequence
  Description of Artificial Sequence: Synthetic oligonucleotide
gagguuugcaaaag

SEQ ID NO: 12529 - RNA, 14 nt, Artificial Sequence
  Description of Artificial Sequence: Synthetic oligonucleotide
ugagguuugcaaaa

SEQ ID NO: 12530 - RNA, 14 nt, Artificial Sequence
  Description of Artificial Sequence: Synthetic oligonucleotide
uugagguuugcaaa

SEQ ID NO: 12531 - RNA, 14 nt, Artificial Sequence
  Description of Artificial Sequence: Synthetic oligonucleotide
cuugagguuugcaa

SEQ ID NO: 12532 - RNA, 14 nt, Artificial Sequence
  Description of Artificial Sequence: Synthetic oligonucleotide
ucuugagguuugca

SEQ ID NO: 12533 - RNA, 14 nt, Artificial Sequence
  Description of Artificial Sequence: Synthetic oligonucleotide
uucuugagguuugc

SEQ ID NO: 12534 - RNA, 14 nt, Artificial Sequence
  Description of Artificial Sequence: Synthetic oligonucleotide
guucuugagguuug

SEQ ID NO: 12535 - RNA, 14 nt, Artificial Sequence
  Description of Artificial Sequence: Synthetic oligonucleotide
aguucuugagguuu

SEQ ID NO: 12536 - RNA, 14 nt, Artificial Sequence
  Description of Artificial Sequence: Synthetic oligonucleotide
uaguucuugagguu

SEQ ID NO: 12537 - RNA, 14 nt, Artificial Sequence
  Description of Artificial Sequence: Synthetic oligonucleotide
guaguucuugaggu

SEQ ID NO: 12538 - RNA, 14 nt, Artificial Sequence
  Description of Artificial Sequence: Synthetic oligonucleotide
aguaguucuugagg

SEQ ID NO: 12539 - RNA, 14 nt, Artificial Sequence
  Description of Artificial Sequence: Synthetic oligonucleotide
caguaguucuugag

SEQ ID NO: 12540 - RNA, 14 nt, Artificial Sequence
  Description of Artificial Sequence: Synthetic oligonucleotide
ucaguaguucuuga

SEQ ID NO: 12541 - RNA, 14 nt, Artificial Sequence
  Description of Artificial Sequence: Synthetic oligonucleotide
cucaguaguucuug

SEQ ID NO: 12542 - RNA, 14 nt, Artificial Sequence
  Description of Artificial Sequence: Synthetic oligonucleotide
acucaguaguucuu

SEQ ID NO: 12543 - RNA, 14 nt, Artificial Sequence
  Description of Artificial Sequence: Synthetic oligonucleotide
gacucaguaguucu

SEQ ID NO: 12544 - RNA, 14 nt, Artificial Sequence
  Description of Artificial Sequence: Synthetic oligonucleotide
agacucaguaguuc

SEQ ID NO: 12545 - RNA, 14 nt, Artificial Sequence
  Description of Artificial Sequence: Synthetic oligonucleotide
aagacucaguaguu

SEQ ID NO: 12546 - RNA, 14 nt, Artificial Sequence
  Description of Artificial Sequence: Synthetic oligonucleotide
uaagacucaguagu

SEQ ID NO: 12547 - RNA, 14 nt, Artificial Sequence
  Description of Artificial Sequence: Synthetic oligonucleotide
auaagacucaguag

SEQ ID NO: 12548 - RNA, 14 nt, Artificial Sequence
  Description of Artificial Sequence: Synthetic oligonucleotide
uauaagacucagua

SEQ ID NO: 12549 - RNA, 14 nt, Artificial Sequence
  Description of Artificial Sequence: Synthetic oligonucleotide
uuauaagacucagu

SEQ ID NO: 12550 - RNA, 14 nt, Artificial Sequence
  Description of Artificial Sequence: Synthetic oligonucleotide
auuauaagacucag

SEQ ID NO: 12551 - RNA, 14 nt, Artificial Sequence
  Description of Artificial Sequence: Synthetic oligonucleotide
uauuauaagacuca

SEQ ID NO: 12552 - RNA, 14 nt, Artificial Sequence
  Description of Artificial Sequence: Synthetic oligonucleotide
cuauuauaagacuc

SEQ ID NO: 12553 - RNA, 14 nt, Artificial Sequence
  Description of Artificial Sequence: Synthetic oligonucleotide
ucuauuauaagacu

SEQ ID NO: 12554 - RNA, 14 nt, Artificial Sequence
  Description of Artificial Sequence: Synthetic oligonucleotide
uucuauuauaagac

SEQ ID NO: 12555 - RNA, 14 nt, Artificial Sequence
  Description of Artificial Sequence: Synthetic oligonucleotide
uuucuauuauaaga

SEQ ID NO: 12556 - RNA, 14 nt, Artificial Sequence
  Description of Artificial Sequence: Synthetic oligonucleotide
cuuucuauuauaag

SEQ ID NO: 12557 - RNA, 14 nt, Artificial Sequence
  Description of Artificial Sequence: Synthetic oligonucleotide
ccuuucuauuauaa

SEQ ID NO: 12558 - RNA, 14 nt, Artificial Sequence
  Description of Artificial Sequence: Synthetic oligonucleotide
accuuucuauuaua

SEQ ID NO: 12559 - RNA, 14 nt, Artificial Sequence
  Description of Artificial Sequence: Synthetic oligonucleotide
aaccuuucuauuau

SEQ ID NO: 12560 - RNA, 14 nt, Artificial Sequence
  Description of Artificial Sequence: Synthetic oligonucleotide
aaaccuuucuauua

SEQ ID NO: 12561 - RNA, 14 nt, Artificial Sequence
  Description of Artificial Sequence: Synthetic oligonucleotide
caaaccuuucuauu

SEQ ID NO: 12562 - RNA, 14 nt, Artificial Sequence
  Description of Artificial Sequence: Synthetic oligonucleotide
ucaaaccuuucuau

SEQ ID NO: 12563 - RNA, 14 nt, Artificial Sequence
  Description of Artificial Sequence: Synthetic oligonucleotide
uucaaaccuuucua

SEQ ID NO: 12564 - RNA, 14 nt, Artificial Sequence
  Description of Artificial Sequence: Synthetic oligonucleotide
uuucaaaccuuucu

SEQ ID NO: 12565 - RNA, 14 nt, Artificial Sequence
  Description of Artificial Sequence: Synthetic oligonucleotide
auuucaaaccuuuc

SEQ ID NO: 12566 - RNA, 14 nt, Artificial Sequence
  Description of Artificial Sequence: Synthetic oligonucleotide
aauuucaaaccuuu

SEQ ID NO: 12567 - RNA, 14 nt, Artificial Sequence
  Description of Artificial Sequence: Synthetic oligonucleotide
gaauuucaaaccuu

SEQ ID NO: 12568 - RNA, 14 nt, Artificial Sequence
  Description of Artificial Sequence: Synthetic oligonucleotide
ggaauuucaaaccu

SEQ ID NO: 12569 - RNA, 14 nt, Artificial Sequence
  Description of Artificial Sequence: Synthetic oligonucleotide
uggaauuucaaacc

SEQ ID NO: 12570 - RNA, 14 nt, Artificial Sequence
  Description of Artificial Sequence: Synthetic oligonucleotide
cuggaauuucaaac

SEQ ID NO: 12571 - RNA, 14 nt, Artificial Sequence
  Description of Artificial Sequence: Synthetic oligonucleotide
ucuggaauuucaaa

SEQ ID NO: 12572 - RNA, 14 nt, Artificial Sequence
  Description of Artificial Sequence: Synthetic oligonucleotide
cucuggaauuucaa

SEQ ID NO: 12573 - RNA, 14 nt, Artificial Sequence
  Description of Artificial Sequence: Synthetic oligonucleotide
gcucuggaauuuca

SEQ ID NO: 12574 - RNA, 14 nt, Artificial Sequence
  Description of Artificial Sequence: Synthetic oligonucleotide
ggcucuggaauuuc

SEQ ID NO: 12575 - RNA, 14 nt, Artificial Sequence
  Description of Artificial Sequence: Synthetic oligonucleotide
aggcucuggaauuu

SEQ ID NO: 12576 - RNA, 14 nt, Artificial Sequence
  Description of Artificial Sequence: Synthetic oligonucleotide
caggcucuggaauu

SEQ ID NO: 12577 - RNA, 14 nt, Artificial Sequence
  Description of Artificial Sequence: Synthetic oligonucleotide
ucaggcucuggaau

SEQ ID NO: 12578 - RNA, 14 nt, Artificial Sequence
  Description of Artificial Sequence: Synthetic oligonucleotide
cucaggcucuggaa

SEQ ID NO: 12579 - RNA, 14 nt, Artificial Sequence
  Description of Artificial Sequence: Synthetic oligonucleotide
gcucaggcucugga

SEQ ID NO: 12580 - RNA, 14 nt, Artificial Sequence
  Description of Artificial Sequence: Synthetic oligonucleotide
ggcucaggcucugg

SEQ ID NO: 12581 - RNA, 14 nt, Artificial Sequence
  Description of Artificial Sequence: Synthetic oligonucleotide
uggcucaggcucug

SEQ ID NO: 12582 - RNA, 14 nt, Artificial Sequence
  Description of Artificial Sequence: Synthetic oligonucleotide
uuggcucaggcucu

SEQ ID NO: 12583 - RNA, 14 nt, Artificial Sequence
  Description of Artificial Sequence: Synthetic oligonucleotide
guuggcucaggcuc

SEQ ID NO: 12584 - RNA, 14 nt, Artificial Sequence
  Description of Artificial Sequence: Synthetic oligonucleotide
uguuggcucaggcu

SEQ ID NO: 12585 - RNA, 14 nt, Artificial Sequence
  Description of Artificial Sequence: Synthetic oligonucleotide
cuguuggcucaggc

SEQ ID NO: 12586 - RNA, 14 nt, Artificial Sequence
  Description of Artificial Sequence: Synthetic oligonucleotide
ucuguuggcucagg

SEQ ID NO: 12587 - RNA, 14 nt, Artificial Sequence
  Description of Artificial Sequence: Synthetic oligonucleotide
uucuguuggcucag

SEQ ID NO: 12588 - RNA, 14 nt, Artificial Sequence
  Description of Artificial Sequence: Synthetic oligonucleotide
cuucuguuggcuca

SEQ ID NO: 12589 - RNA, 14 nt, Artificial Sequence
  Description of Artificial Sequence: Synthetic oligonucleotide
gcuucuguuggcuc

SEQ ID NO: 12590 - RNA, 14 nt, Artificial Sequence
  Description of Artificial Sequence: Synthetic oligonucleotide
agcuucuguuggcu

SEQ ID NO: 12591 - RNA, 14 nt, Artificial Sequence
  Description of Artificial Sequence: Synthetic oligonucleotide
cagcuucuguuggc

SEQ ID NO: 12592 - RNA, 14 nt, Artificial Sequence
  Description of Artificial Sequence: Synthetic oligonucleotide
ucagcuucuguugg

SEQ ID NO: 12593 - RNA, 14 nt, Artificial Sequence
  Description of Artificial Sequence: Synthetic oligonucleotide
aucagcuucuguug

SEQ ID NO: 12594 - RNA, 14 nt, Artificial Sequence
  Description of Artificial Sequence: Synthetic oligonucleotide
gaucagcuucuguu

SEQ ID NO: 12595 - RNA, 14 nt, Artificial Sequence
  Description of Artificial Sequence: Synthetic oligonucleotide
cgaucagcuucugu

SEQ ID NO: 12596 - RNA, 14 nt, Artificial Sequence
  Description of Artificial Sequence: Synthetic oligonucleotide
gcgaucagcuucug

SEQ ID NO: 12597 - RNA, 14 nt, Artificial Sequence
  Description of Artificial Sequence: Synthetic oligonucleotide
ugcgaucagcuucu

SEQ ID NO: 12598 - RNA, 14 nt, Artificial Sequence
  Description of Artificial Sequence: Synthetic oligonucleotide
augcgaucagcuuc

SEQ ID NO: 12599 - RNA, 14 nt, Artificial Sequence
  Description of Artificial Sequence: Synthetic oligonucleotide
uaugcgaucagcuu

SEQ ID NO: 12600 - RNA, 14 nt, Artificial Sequence
  Description of Artificial Sequence: Synthetic oligonucleotide
cuaugcgaucagcu

SEQ ID NO: 12601 - RNA, 14 nt, Artificial Sequence
  Description of Artificial Sequence: Synthetic oligonucleotide
gcuaugcgaucagc

SEQ ID NO: 12602 - RNA, 14 nt, Artificial Sequence
  Description of Artificial Sequence: Synthetic oligonucleotide
agcuaugcgaucag

SEQ ID NO: 12603 - RNA, 14 nt, Artificial Sequence
  Description of Artificial Sequence: Synthetic oligonucleotide
uagcuaugcgauca

SEQ ID NO: 12604 - RNA, 14 nt, Artificial Sequence
  Description of Artificial Sequence: Synthetic oligonucleotide
auagcuaugcgauc

SEQ ID NO: 12605 - RNA, 14 nt, Artificial Sequence
  Description of Artificial Sequence: Synthetic oligonucleotide
uauagcuaugcgau

SEQ ID NO: 12606 - RNA, 14 nt, Artificial Sequence
  Description of Artificial Sequence: Synthetic oligonucleotide
cuauagcuaugcga

SEQ ID NO: 12607 - RNA, 14 nt, Artificial Sequence
  Description of Artificial Sequence: Synthetic oligonucleotide
ucuauagcuaugcg

SEQ ID NO: 12608 - RNA, 14 nt, Artificial Sequence
  Description of Artificial Sequence: Synthetic oligonucleotide
cucuauagcuaugc

SEQ ID NO: 12609 - RNA, 14 nt, Artificial Sequence
  Description of Artificial Sequence: Synthetic oligonucleotide
ucucuauagcuaug

SEQ ID NO: 12610 - RNA, 14 nt, Artificial Sequence
  Description of Artificial Sequence: Synthetic oligonucleotide
uucucuauagcuau

SEQ ID NO: 12611 - RNA, 14 nt, Artificial Sequence
  Description of Artificial Sequence: Synthetic oligonucleotide
auucucuauagcua

SEQ ID NO: 12612 - RNA, 14 nt, Artificial Sequence
  Description of Artificial Sequence: Synthetic oligonucleotide
cauucucuauagcu

SEQ ID NO: 12613 - RNA, 14 nt, Artificial Sequence
  Description of Artificial Sequence: Synthetic oligonucleotide
ccauucucuauagc

SEQ ID NO: 12614 - RNA, 14 nt, Artificial Sequence
  Description of Artificial Sequence: Synthetic oligonucleotide
uccauucucuauag

SEQ ID NO: 12615 - RNA, 14 nt, Artificial Sequence
  Description of Artificial Sequence: Synthetic oligonucleotide
cuccauucucuaua

SEQ ID NO: 12616 - RNA, 14 nt, Artificial Sequence
  Description of Artificial Sequence: Synthetic oligonucleotide
ucuccauucucuau

SEQ ID NO: 12617 - RNA, 14 nt, Artificial Sequence
  Description of Artificial Sequence: Synthetic oligonucleotide
aucuccauucucua

SEQ ID NO: 12618 - RNA, 14 nt, Artificial Sequence
  Description of Artificial Sequence: Synthetic oligonucleotide
gaucuccauucucu

SEQ ID NO: 12619 - RNA, 14 nt, Artificial Sequence
  Description of Artificial Sequence: Synthetic oligonucleotide
ugaucuccauucuc

SEQ ID NO: 12620 - RNA, 14 nt, Artificial Sequence
  Description of Artificial Sequence: Synthetic oligonucleotide
uugaucuccauucu

SEQ ID NO: 12621 - RNA, 14 nt, Artificial Sequence
  Description of Artificial Sequence: Synthetic oligonucleotide
guugaucuccauuc

SEQ ID NO: 12622 - RNA, 14 nt, Artificial Sequence
  Description of Artificial Sequence: Synthetic oligonucleotide
gguugaucuccauu

SEQ ID NO: 12623 - RNA, 14 nt, Artificial Sequence
  Description of Artificial Sequence: Synthetic oligonucleotide
ggguugaucuccau

SEQ ID NO: 12624 - RNA, 14 nt, Artificial Sequence
  Description of Artificial Sequence: Synthetic oligonucleotide
aggguugaucucca

SEQ ID NO: 12625 - RNA, 14 nt, Artificial Sequence
  Description of Artificial Sequence: Synthetic oligonucleotide
aaggguugaucucc

SEQ ID NO: 12626 - RNA, 14 nt, Artificial Sequence
  Description of Artificial Sequence: Synthetic oligonucleotide
caaggguugaucuc

SEQ ID NO: 12627 - RNA, 14 nt, Artificial Sequence
  Description of Artificial Sequence: Synthetic oligonucleotide
ucaaggguugaucu

SEQ ID NO: 12628 - RNA, 14 nt, Artificial Sequence
  Description of Artificial Sequence: Synthetic oligonucleotide
cucaaggguugauc

SEQ ID NO: 12629 - RNA, 14 nt, Artificial Sequence
  Description of Artificial Sequence: Synthetic oligonucleotide
acucaaggguugau

SEQ ID NO: 12630 - RNA, 14 nt, Artificial Sequence
  Description of Artificial Sequence: Synthetic oligonucleotide
cacucaaggguuga

SEQ ID NO: 12631 - RNA, 14 nt, Artificial Sequence
  Description of Artificial Sequence: Synthetic oligonucleotide
gcacucaaggguug

SEQ ID NO: 12632 - RNA, 14 nt, Artificial Sequence
  Description of Artificial Sequence: Synthetic oligonucleotide
ugcacucaaggguu

SEQ ID NO: 12633 - RNA, 14 nt, Artificial Sequence
  Description of Artificial Sequence: Synthetic oligonucleotide
cugcacucaagggu

SEQ ID NO: 12634 - RNA, 14 nt, Artificial Sequence
  Description of Artificial Sequence: Synthetic oligonucleotide
ucugcacucaaggg

SEQ ID NO: 12635 - RNA, 14 nt, Artificial Sequence
  Description of Artificial Sequence: Synthetic oligonucleotide
uucugcacucaagg

SEQ ID NO: 12636 - RNA, 14 nt, Artificial Sequence
  Description of Artificial Sequence: Synthetic oligonucleotide
guucugcacucaag

SEQ ID NO: 12637 - RNA, 14 nt, Artificial Sequence
  Description of Artificial Sequence: Synthetic oligonucleotide
aguucugcacucaa

SEQ ID NO: 12638 - RNA, 14 nt, Artificial Sequence
  Description of Artificial Sequence: Synthetic oligonucleotide
caguucugcacuca

SEQ ID NO: 12639 - RNA, 14 nt, Artificial Sequence
  Description of Artificial Sequence: Synthetic oligonucleotide
ucaguucugcacuc

SEQ ID NO: 12640 - RNA, 14 nt, Artificial Sequence
  Description of Artificial Sequence: Synthetic oligonucleotide
uucaguucugcacu

SEQ ID NO: 12641 - RNA, 14 nt, Artificial Sequence
  Description of Artificial Sequence: Synthetic oligonucleotide
uuucaguucugcac

SEQ ID NO: 12642 - RNA, 14 nt, Artificial Sequence
  Description of Artificial Sequence: Synthetic oligonucleotide
uuuucaguucugca

SEQ ID NO: 12643 - RNA, 14 nt, Artificial Sequence
  Description of Artificial Sequence: Synthetic oligonucleotide
cuuuucaguucugc

SEQ ID NO: 12644 - RNA, 14 nt, Artificial Sequence
  Description of Artificial Sequence: Synthetic oligonucleotide
ucuuuucaguucug

SEQ ID NO: 12645 - RNA, 14 nt, Artificial Sequence
  Description of Artificial Sequence: Synthetic oligonucleotide
aucuuuucaguucu

SEQ ID NO: 12646 - RNA, 14 nt, Artificial Sequence
  Description of Artificial Sequence: Synthetic oligonucleotide
aaucuuuucaguuc

SEQ ID NO: 12647 - RNA, 14 nt, Artificial Sequence
  Description of Artificial Sequence: Synthetic oligonucleotide
aaaucuuuucaguu

SEQ ID NO: 12648 - RNA, 14 nt, Artificial Sequence
  Description of Artificial Sequence: Synthetic oligonucleotide
uaaaucuuuucagu

SEQ ID NO: 12649 - RNA, 14 nt, Artificial Sequence
  Description of Artificial Sequence: Synthetic oligonucleotide
cuaaaucuuuucag

SEQ ID NO: 12650 - RNA, 14 nt, Artificial Sequence
  Description of Artificial Sequence: Synthetic oligonucleotide
ucuaaaucuuuuca

SEQ ID NO: 12651 - RNA, 14 nt, Artificial Sequence
  Description of Artificial Sequence: Synthetic oligonucleotide
uucuaaaucuuuuc

SEQ ID NO: 12652 - RNA, 14 nt, Artificial Sequence
  Description of Artificial Sequence: Synthetic oligonucleotide
uuucuaaaucuuuu

SEQ ID NO: 12653 - RNA, 14 nt, Artificial Sequence
  Description of Artificial Sequence: Synthetic oligonucleotide
uuuucuaaaucuuu

SEQ ID NO: 12654 - RNA, 14 nt, Artificial Sequence
  Description of Artificial Sequence: Synthetic oligonucleotide
cuuuucuaaaucuu

SEQ ID NO: 12655 - RNA, 14 nt, Artificial Sequence
  Description of Artificial Sequence: Synthetic oligonucleotide
ucuuuucuaaaucu

SEQ ID NO: 12656 - RNA, 14 nt, Artificial Sequence
  Description of Artificial Sequence: Synthetic oligonucleotide
uucuuuucuaaauc

SEQ ID NO: 12657 - RNA, 14 nt, Artificial Sequence
  Description of Artificial Sequence: Synthetic oligonucleotide
auucuuuucuaaau

SEQ ID NO: 12658 - RNA, 14 nt, Artificial Sequence
  Description of Artificial Sequence: Synthetic oligonucleotide
uauucuuuucuaaa

SEQ ID NO: 12659 - RNA, 14 nt, Artificial Sequence
  Description of Artificial Sequence: Synthetic oligonucleotide
auauucuuuucuaa

SEQ ID NO: 12660 - RNA, 14 nt, Artificial Sequence
  Description of Artificial Sequence: Synthetic oligonucleotide
uauauucuuuucua

SEQ ID NO: 12661 - RNA, 14 nt, Artificial Sequence
  Description of Artificial Sequence: Synthetic oligonucleotide
auauauucuuuucu

SEQ ID NO: 12662 - RNA, 14 nt, Artificial Sequence
  Description of Artificial Sequence: Synthetic oligonucleotide
uauauauucuuuuc

SEQ ID NO: 12663 - RNA, 14 nt, Artificial Sequence
  Description of Artificial Sequence: Synthetic oligonucleotide
guauauauucuuuu

SEQ ID NO: 12664 - RNA, 14 nt, Artificial Sequence
  Description of Artificial Sequence: Synthetic oligonucleotide
uguauauauucuuu

SEQ ID NO: 12665 - RNA, 14 nt, Artificial Sequence
  Description of Artificial Sequence: Synthetic oligonucleotide
cuguauauauucuu

SEQ ID NO: 12666 - RNA, 14 nt, Artificial Sequence
  Description of Artificial Sequence: Synthetic oligonucleotide
gcuguauauauucu

SEQ ID NO: 12667 - RNA, 14 nt, Artificial Sequence
  Description of Artificial Sequence: Synthetic oligonucleotide
ggcuguauauauuc

SEQ ID NO: 12668 - RNA, 14 nt, Artificial Sequence
  Description of Artificial Sequence: Synthetic oligonucleotide
aggcuguauauauu

SEQ ID NO: 12669 - RNA, 14 nt, Artificial Sequence
  Description of Artificial Sequence: Synthetic oligonucleotide
caggcuguauauau

SEQ ID NO: 12670 - RNA, 14 nt, Artificial Sequence
  Description of Artificial Sequence: Synthetic oligonucleotide
acaggcuguauaua

SEQ ID NO: 12671 - RNA, 14 nt, Artificial Sequence
  Description of Artificial Sequence: Synthetic oligonucleotide
cacaggcuguauau

SEQ ID NO: 12672 - RNA, 14 nt, Artificial Sequence
  Description of Artificial Sequence: Synthetic oligonucleotide
gcacaggcuguaua

SEQ ID NO: 12673 - RNA, 14 nt, Artificial Sequence
  Description of Artificial Sequence: Synthetic oligonucleotide
ugcacaggcuguau

SEQ ID NO: 12674 - RNA, 14 nt, Artificial Sequence
  Description of Artificial Sequence: Synthetic oligonucleotide
uugcacaggcugua

SEQ ID NO: 12675 - RNA, 14 nt, Artificial Sequence
  Description of Artificial Sequence: Synthetic oligonucleotide
guugcacaggcugu

SEQ ID NO: 12676 - RNA, 14 nt, Artificial Sequence
  Description of Artificial Sequence: Synthetic oligonucleotide
aguugcacaggcug

SEQ ID NO: 12677 - RNA, 14 nt, Artificial Sequence
  Description of Artificial Sequence: Synthetic oligonucleotide
caguugcacaggcu

SEQ ID NO: 12678 - RNA, 14 nt, Artificial Sequence
  Description of Artificial Sequence: Synthetic oligonucleotide
gcaguugcacaggc

SEQ ID NO: 12679 - RNA, 14 nt, Artificial Sequence
  Description of Artificial Sequence: Synthetic oligonucleotide
cgcaguugcacagg

SEQ ID NO: 12680 - RNA, 14 nt, Artificial Sequence
  Description of Artificial Sequence: Synthetic oligonucleotide
ucgcaguugcacag

SEQ ID NO: 12681 - RNA, 14 nt, Artificial Sequence
  Description of Artificial Sequence: Synthetic oligonucleotide
cucgcaguugcaca

SEQ ID NO: 12682 - RNA, 14 nt, Artificial Sequence
  Description of Artificial Sequence: Synthetic oligonucleotide
acucgcaguugcac

SEQ ID NO: 12683 - RNA, 14 nt, Artificial Sequence
  Description of Artificial Sequence: Synthetic oligonucleotide
uacucgcaguugca

SEQ ID NO: 12684 - RNA, 14 nt, Artificial Sequence
  Description of Artificial Sequence: Synthetic oligonucleotide
auacucgcaguugc

SEQ ID NO: 12685 - RNA, 14 nt, Artificial Sequence
  Description of Artificial Sequence: Synthetic oligonucleotide
aauacucgcaguug

SEQ ID NO: 12686 - RNA, 14 nt, Artificial Sequence
  Description of Artificial Sequence: Synthetic oligonucleotide
uaauacucgcaguu

SEQ ID NO: 12687 - RNA, 14 nt, Artificial Sequence
  Description of Artificial Sequence: Synthetic oligonucleotide
uuaauacucgcagu

SEQ ID NO: 12688 - RNA, 14 nt, Artificial Sequence
  Description of Artificial Sequence: Synthetic oligonucleotide
uuuaauacucgcag

SEQ ID NO: 12689 - RNA, 14 nt, Artificial Sequence
  Description of Artificial Sequence: Synthetic oligonucleotide
auuuaauacucgca

SEQ ID NO: 12690 - RNA, 14 nt, Artificial Sequence
  Description of Artificial Sequence: Synthetic oligonucleotide
cauuuaauacucgc

SEQ ID NO: 12691 - RNA, 14 nt, Artificial Sequence
  Description of Artificial Sequence: Synthetic oligonucleotide
acauuuaauacucg

SEQ ID NO: 12692 - RNA, 14 nt, Artificial Sequence
  Description of Artificial Sequence: Synthetic oligonucleotide
uacauuuaauacuc

SEQ ID NO: 12693 - RNA, 14 nt, Artificial Sequence
  Description of Artificial Sequence: Synthetic oligonucleotide
auacauuuaauacu

SEQ ID NO: 12694 - RNA, 14 nt, Artificial Sequence
  Description of Artificial Sequence: Synthetic oligonucleotide
cauacauuuaauac

SEQ ID NO: 12695 - RNA, 14 nt, Artificial Sequence
  Description of Artificial Sequence: Synthetic oligonucleotide
acauacauuuaaua

SEQ ID NO: 12696 - RNA, 14 nt, Artificial Sequence
  Description of Artificial Sequence: Synthetic oligonucleotide
gacauacauuuaau

SEQ ID NO: 12697 - RNA, 14 nt, Artificial Sequence
  Description of Artificial Sequence: Synthetic oligonucleotide
cgacauacauuuaa

SEQ ID NO: 12698 - RNA, 14 nt, Artificial Sequence
  Description of Artificial Sequence: Synthetic oligonucleotide
ccgacauacauuua

SEQ ID NO: 12699 - RNA, 14 nt, Artificial Sequence
  Description of Artificial Sequence: Synthetic oligonucleotide
gccgacauacauuu

SEQ ID NO: 12700 - RNA, 14 nt, Artificial Sequence
  Description of Artificial Sequence: Synthetic oligonucleotide
ugccgacauacauu

SEQ ID NO: 12701 - RNA, 14 nt, Artificial Sequence
  Description of Artificial Sequence: Synthetic oligonucleotide
gugccgacauacau

SEQ ID NO: 12702 - RNA, 14 nt, Artificial Sequence
  Description of Artificial Sequence: Synthetic oligonucleotide
agugccgacauaca

SEQ ID NO: 12703 - RNA, 14 nt, Artificial Sequence
  Description of Artificial Sequence: Synthetic oligonucleotide
cagugccgacauac

SEQ ID NO: 12704 - RNA, 14 nt, Artificial Sequence
  Description of Artificial Sequence: Synthetic oligonucleotide
ccagugccgacaua

SEQ ID NO: 12705 - RNA, 14 nt, Artificial Sequence
  Description of Artificial Sequence: Synthetic oligonucleotide
cccagugccgacau

SEQ ID NO: 12706 - RNA, 14 nt, Artificial Sequence
  Description of Artificial Sequence: Synthetic oligonucleotide
acccagugccgaca

SEQ ID NO: 12707 - RNA, 14 nt, Artificial Sequence
  Description of Artificial Sequence: Synthetic oligonucleotide
uacccagugccgac

SEQ ID NO: 12708 - RNA, 14 nt, Artificial Sequence
  Description of Artificial Sequence: Synthetic oligonucleotide
cuacccagugccga

SEQ ID NO: 12709 - RNA, 14 nt, Artificial Sequence
  Description of Artificial Sequence: Synthetic oligonucleotide
ucuacccagugccg

SEQ ID NO: 12710 - RNA, 14 nt, Artificial Sequence
  Description of Artificial Sequence: Synthetic oligonucleotide
cucuacccagugcc

SEQ ID NO: 12711 - RNA, 14 nt, Artificial Sequence
  Description of Artificial Sequence: Synthetic oligonucleotide
gcucuacccagugc

SEQ ID NO: 12712 - RNA, 14 nt, Artificial Sequence
  Description of Artificial Sequence: Synthetic oligonucleotide
ugcucuacccagug

SEQ ID NO: 12713 - RNA, 14 nt, Artificial Sequence
  Description of Artificial Sequence: Synthetic oligonucleotide
gugcucuacccagu

SEQ ID NO: 12714 - RNA, 14 nt, Artificial Sequence
  Description of Artificial Sequence: Synthetic oligonucleotide
ggugcucuacccag

SEQ ID NO: 12715 - RNA, 14 nt, Artificial Sequence
  Description of Artificial Sequence: Synthetic oligonucleotide
uggugcucuaccca

SEQ ID NO: 12716 - RNA, 14 nt, Artificial Sequence
  Description of Artificial Sequence: Synthetic oligonucleotide
guggugcucuaccc

SEQ ID NO: 12717 - RNA, 14 nt, Artificial Sequence
  Description of Artificial Sequence: Synthetic oligonucleotide
aguggugcucuacc

SEQ ID NO: 12718 - RNA, 14 nt, Artificial Sequence
  Description of Artificial Sequence: Synthetic oligonucleotide
aaguggugcucuac

SEQ ID NO: 12719 - RNA, 14 nt, Artificial Sequence
  Description of Artificial Sequence: Synthetic oligonucleotide
gaaguggugcucua

SEQ ID NO: 12720 - RNA, 14 nt, Artificial Sequence
  Description of Artificial Sequence: Synthetic oligonucleotide
agaaguggugcucu

SEQ ID NO: 12721 - RNA, 14 nt, Artificial Sequence
  Description of Artificial Sequence: Synthetic oligonucleotide
uagaaguggugcuc

SEQ ID NO: 12722 - RNA, 14 nt, Artificial Sequence
  Description of Artificial Sequence: Synthetic oligonucleotide
auagaaguggugcu

SEQ ID NO: 12723 - RNA, 14 nt, Artificial Sequence
  Description of Artificial Sequence: Synthetic oligonucleotide
cauagaaguggugc

SEQ ID NO: 12724 - RNA, 14 nt, Artificial Sequence
  Description of Artificial Sequence: Synthetic oligonucleotide
ucauagaaguggug

SEQ ID NO: 12725 - RNA, 14 nt, Artificial Sequence
  Description of Artificial Sequence: Synthetic oligonucleotide
aucauagaaguggu

SEQ ID NO: 12726 - RNA, 14 nt, Artificial Sequence
  Description of Artificial Sequence: Synthetic oligonucleotide
aaucauagaagugg

SEQ ID NO: 12727 - RNA, 14 nt, Artificial Sequence
  Description of Artificial Sequence: Synthetic oligonucleotide
aaaucauagaagug

SEQ ID NO: 12728 - RNA, 14 nt, Artificial Sequence
  Description of Artificial Sequence: Synthetic oligonucleotide
aaaaucauagaagu

SEQ ID NO: 12729 - RNA, 14 nt, Artificial Sequence
  Description of Artificial Sequence: Synthetic oligonucleotide
caaaaucauagaag

SEQ ID NO: 12730 - RNA, 14 nt, Artificial Sequence
  Description of Artificial Sequence: Synthetic oligonucleotide
ucaaaaucauagaa

SEQ ID NO: 12731 - RNA, 14 nt, Artificial Sequence
  Description of Artificial Sequence: Synthetic oligonucleotide
uucaaaaucauaga

SEQ ID NO: 12732 - RNA, 14 nt, Artificial Sequence
  Description of Artificial Sequence: Synthetic oligonucleotide
uuucaaaaucauag

SEQ ID NO: 12733 - RNA, 14 nt, Artificial Sequence
  Description of Artificial Sequence: Synthetic oligonucleotide
cuuucaaaaucaua

SEQ ID NO: 12734 - RNA, 14 nt, Artificial Sequence
  Description of Artificial Sequence: Synthetic oligonucleotide
ucuuucaaaaucau

SEQ ID NO: 12735 - RNA, 14 nt, Artificial Sequence
  Description of Artificial Sequence: Synthetic oligonucleotide
cucuuucaaaauca

SEQ ID NO: 12736 - RNA, 14 nt, Artificial Sequence
  Description of Artificial Sequence: Synthetic oligonucleotide
ucucuuucaaaauc

SEQ ID NO: 12737 - RNA, 14 nt, Artificial Sequence
  Description of Artificial Sequence: Synthetic oligonucleotide
aucucuuucaaaau

SEQ ID NO: 12738 - RNA, 14 nt, Artificial Sequence
  Description of Artificial Sequence: Synthetic oligonucleotide
caucucuuucaaaa

SEQ ID NO: 12739 - RNA, 14 nt, Artificial Sequence
  Description of Artificial Sequence: Synthetic oligonucleotide
gcaucucuuucaaa

SEQ ID NO: 12740 - RNA, 14 nt, Artificial Sequence
  Description of Artificial Sequence: Synthetic oligonucleotide
ugcaucucuuucaa

SEQ ID NO: 12741 - RNA, 14 nt, Artificial Sequence
  Description of Artificial Sequence: Synthetic oligonucleotide
augcaucucuuuca

SEQ ID NO: 12742 - RNA, 14 nt, Artificial Sequence
  Description of Artificial Sequence: Synthetic oligonucleotide
uaugcaucucuuuc

SEQ ID NO: 12743 - RNA, 14 nt, Artificial Sequence
  Description of Artificial Sequence: Synthetic oligonucleotide
auaugcaucucuuu

SEQ ID NO: 12744 - RNA, 14 nt, Artificial Sequence
  Description of Artificial Sequence: Synthetic oligonucleotide
gauaugcaucucuu

SEQ ID NO: 12745 - RNA, 14 nt, Artificial Sequence
  Description of Artificial Sequence: Synthetic oligonucleotide
agauaugcaucucu

SEQ ID NO: 12746 - RNA, 14 nt, Artificial Sequence
  Description of Artificial Sequence: Synthetic oligonucleotide
aagauaugcaucuc

SEQ ID NO: 12747 - RNA, 14 nt, Artificial Sequence
  Description of Artificial Sequence: Synthetic oligonucleotide
aaagauaugcaucu

SEQ ID NO: 12748 - RNA, 14 nt, Artificial Sequence
  Description of Artificial Sequence: Synthetic oligonucleotide
aaaagauaugcauc

SEQ ID NO: 12749 - RNA, 14 nt, Artificial Sequence
  Description of Artificial Sequence: Synthetic oligonucleotide
caaaagauaugcau

SEQ ID NO: 12750 - RNA, 14 nt, Artificial Sequence
  Description of Artificial Sequence: Synthetic oligonucleotide
gcaaaagauaugca

SEQ ID NO: 12751 - RNA, 14 nt, Artificial Sequence
  Description of Artificial Sequence: Synthetic oligonucleotide
ugcaaaagauaugc

SEQ ID NO: 12752 - RNA, 14 nt, Artificial Sequence
  Description of Artificial Sequence: Synthetic oligonucleotide
uugcaaaagauaug

SEQ ID NO: 12753 - RNA, 14 nt, Artificial Sequence
  Description of Artificial Sequence: Synthetic oligonucleotide
guugcaaaagauau

SEQ ID NO: 12754 - RNA, 14 nt, Artificial Sequence
  Description of Artificial Sequence: Synthetic oligonucleotide
cguugcaaaagaua

SEQ ID NO: 12755 - RNA, 14 nt, Artificial Sequence
  Description of Artificial Sequence: Synthetic oligonucleotide
ucguugcaaaagau

SEQ ID NO: 12756 - RNA, 14 nt, Artificial Sequence
  Description of Artificial Sequence: Synthetic oligonucleotide
uucguugcaaaaga

SEQ ID NO: 12757 - RNA, 14 nt, Artificial Sequence
  Description of Artificial Sequence: Synthetic oligonucleotide
auucguugcaaaag

SEQ ID NO: 12758 - RNA, 14 nt, Artificial Sequence
  Description of Artificial Sequence: Synthetic oligonucleotide
cauucguugcaaaa

SEQ ID NO: 12759 - RNA, 14 nt, Artificial Sequence
  Description of Artificial Sequence: Synthetic oligonucleotide
ccauucguugcaaa

SEQ ID NO: 12760 - RNA, 14 nt, Artificial Sequence
  Description of Artificial Sequence: Synthetic oligonucleotide
uccauucguugcaa

SEQ ID NO: 12761 - RNA, 14 nt, Artificial Sequence
  Description of Artificial Sequence: Synthetic oligonucleotide
uuccauucguugca

SEQ ID NO: 12762 - RNA, 14 nt, Artificial Sequence
  Description of Artificial Sequence: Synthetic oligonucleotide
cuuccauucguugc

SEQ ID NO: 12763 - RNA, 14 nt, Artificial Sequence
  Description of Artificial Sequence: Synthetic oligonucleotide
ucuuccauucguug

SEQ ID NO: 12764 - RNA, 14 nt, Artificial Sequence
  Description of Artificial Sequence: Synthetic oligonucleotide
uucuuccauucguu

SEQ ID NO: 12765 - RNA, 14 nt, Artificial Sequence
  Description of Artificial Sequence: Synthetic oligonucleotide
auucuuccauucgu

SEQ ID NO: 12766 - RNA, 14 nt, Artificial Sequence
  Description of Artificial Sequence: Synthetic oligonucleotide
aauucuuccauucg

SEQ ID NO: 12767 - RNA, 14 nt, Artificial Sequence
  Description of Artificial Sequence: Synthetic oligonucleotide
aaauucuuccauuc

SEQ ID NO: 12768 - RNA, 14 nt, Artificial Sequence
  Description of Artificial Sequence: Synthetic oligonucleotide
uaaauucuuccauu

SEQ ID NO: 12769 - RNA, 14 nt, Artificial Sequence
  Description of Artificial Sequence: Synthetic oligonucleotide
auaaauucuuccau

SEQ ID NO: 12770 - RNA, 14 nt, Artificial Sequence
  Description of Artificial Sequence: Synthetic oligonucleotide
aauaaauucuucca

SEQ ID NO: 12771 - RNA, 14 nt, Artificial Sequence
  Description of Artificial Sequence: Synthetic oligonucleotide
caauaaauucuucc

SEQ ID NO: 12772 - RNA, 14 nt, Artificial Sequence
  Description of Artificial Sequence: Synthetic oligonucleotide
ccaauaaauucuuc

SEQ ID NO: 12773 - RNA, 14 nt, Artificial Sequence
  Description of Artificial Sequence: Synthetic oligonucleotide
uccaauaaauucuu

SEQ ID NO: 12774 - RNA, 14 nt, Artificial Sequence
  Description of Artificial Sequence: Synthetic oligonucleotide
uuccaauaaauucu

SEQ ID NO: 12775 - RNA, 14 nt, Artificial Sequence
  Description of Artificial Sequence: Synthetic oligonucleotide
guuccaauaaauuc

SEQ ID NO: 12776 - RNA, 14 nt, Artificial Sequence
  Description of Artificial Sequence: Synthetic oligonucleotide
uguuccaauaaauu

SEQ ID NO: 12777 - RNA, 14 nt, Artificial Sequence
  Description of Artificial Sequence: Synthetic oligonucleotide
cuguuccaauaaau

SEQ ID NO: 12778 - RNA, 14 nt, Artificial Sequence
  Description of Artificial Sequence: Synthetic oligonucleotide
acuguuccaauaaa

SEQ ID NO: 12779 - RNA, 14 nt, Artificial Sequence
  Description of Artificial Sequence: Synthetic oligonucleotide
uacuguuccaauaa

SEQ ID NO: 12780 - RNA, 14 nt, Artificial Sequence
  Description of Artificial Sequence: Synthetic oligonucleotide
uuacuguuccaaua

SEQ ID NO: 12781 - RNA, 14 nt, Artificial Sequence
  Description of Artificial Sequence: Synthetic oligonucleotide
cuuacuguuccaau

SEQ ID NO: 12782 - RNA, 14 nt, Artificial Sequence
  Description of Artificial Sequence: Synthetic oligonucleotide
ucuuacuguuccaa

SEQ ID NO: 12783 - RNA, 14 nt, Artificial Sequence
  Description of Artificial Sequence: Synthetic oligonucleotide
cucuuacuguucca

SEQ ID NO: 12784 - RNA, 14 nt, Artificial Sequence
  Description of Artificial Sequence: Synthetic oligonucleotide
ccucuuacuguucc

SEQ ID NO: 12785 - RNA, 14 nt, Artificial Sequence
  Description of Artificial Sequence: Synthetic oligonucleotide
accucuuacuguuc

SEQ ID NO: 12786 - RNA, 14 nt, Artificial Sequence
  Description of Artificial Sequence: Synthetic oligonucleotide
uaccucuuacuguu

SEQ ID NO: 12787 - RNA, 14 nt, Artificial Sequence
  Description of Artificial Sequence: Synthetic oligonucleotide
uuaccucuuacugu

SEQ ID NO: 12788 - RNA, 14 nt, Artificial Sequence
  Description of Artificial Sequence: Synthetic oligonucleotide
uuuaccucuuacug

SEQ ID NO: 12789 - RNA, 14 nt, Artificial Sequence
  Description of Artificial Sequence: Synthetic oligonucleotide
cuuuaccucuuacu

SEQ ID NO: 12790 - RNA, 14 nt, Artificial Sequence
  Description of Artificial Sequence: Synthetic oligonucleotide
gcuuuaccucuuac

SEQ ID NO: 12791 - RNA, 14 nt, Artificial Sequence
  Description of Artificial Sequence: Synthetic oligonucleotide
ugcuuuaccucuua

SEQ ID NO: 12792 - RNA, 14 nt, Artificial Sequence
  Description of Artificial Sequence: Synthetic oligonucleotide
uugcuuuaccucuu

SEQ ID NO: 12793 - RNA, 14 nt, Artificial Sequence
  Description of Artificial Sequence: Synthetic oligonucleotide
auugcuuuaccucu

SEQ ID NO: 12794 - RNA, 14 nt, Artificial Sequence
  Description of Artificial Sequence: Synthetic oligonucleotide
cauugcuuuaccuc

SEQ ID NO: 12795 - RNA, 14 nt, Artificial Sequence
  Description of Artificial Sequence: Synthetic oligonucleotide
ucauugcuuuaccu

SEQ ID NO: 12796 - RNA, 14 nt, Artificial Sequence
  Description of Artificial Sequence: Synthetic oligonucleotide
uucauugcuuuacc

SEQ ID NO: 12797 - RNA, 14 nt, Artificial Sequence
  Description of Artificial Sequence: Synthetic oligonucleotide
uuucauugcuuuac

SEQ ID NO: 12798 - RNA, 14 nt, Artificial Sequence
  Description of Artificial Sequence: Synthetic oligonucleotide
uuuucauugcuuua

SEQ ID NO: 12799 - RNA, 14 nt, Artificial Sequence
  Description of Artificial Sequence: Synthetic oligonucleotide
uuuuucauugcuuu

SEQ ID NO: 12800 - RNA, 14 nt, Artificial Sequence
  Description of Artificial Sequence: Synthetic oligonucleotide
uuuuuucauugcuu

SEQ ID NO: 12801 - RNA, 14 nt, Artificial Sequence
  Description of Artificial Sequence: Synthetic oligonucleotide
auuuuuucauugcu

SEQ ID NO: 12802 - RNA, 14 nt, Artificial Sequence
  Description of Artificial Sequence: Synthetic oligonucleotide
cauuuuuucauugc

SEQ ID NO: 12803 - RNA, 14 nt, Artificial Sequence
  Description of Artificial Sequence: Synthetic oligonucleotide
ccauuuuuucauug

SEQ ID NO: 12804 - RNA, 14 nt, Artificial Sequence
  Description of Artificial Sequence: Synthetic oligonucleotide
cccauuuuuucauu

SEQ ID NO: 12805 - RNA, 14 nt, Artificial Sequence
  Description of Artificial Sequence: Synthetic oligonucleotide
acccauuuuuucau

SEQ ID NO: 12806 - RNA, 14 nt, Artificial Sequence
  Description of Artificial Sequence: Synthetic oligonucleotide
aacccauuuuuuca

SEQ ID NO: 12807 - RNA, 14 nt, Artificial Sequence
  Description of Artificial Sequence: Synthetic oligonucleotide
caacccauuuuuuc

SEQ ID NO: 12808 - RNA, 14 nt, Artificial Sequence
  Description of Artificial Sequence: Synthetic oligonucleotide
ucaacccauuuuuu

SEQ ID NO: 12809 - RNA, 14 nt, Artificial Sequence
  Description of Artificial Sequence: Synthetic oligonucleotide
uucaacccauuuuu

SEQ ID NO: 12810 - RNA, 14 nt, Artificial Sequence
  Description of Artificial Sequence: Synthetic oligonucleotide
auucaacccauuuu

SEQ ID NO: 12811 - RNA, 14 nt, Artificial Sequence
  Description of Artificial Sequence: Synthetic oligonucleotide
gauucaacccauuu

SEQ ID NO: 12812 - RNA, 14 nt, Artificial Sequence
  Description of Artificial Sequence: Synthetic oligonucleotide
ggauucaacccauu

SEQ ID NO: 12813 - RNA, 14 nt, Artificial Sequence
  Description of Artificial Sequence: Synthetic oligonucleotide
uggauucaacccau

SEQ ID NO: 12814 - RNA, 14 nt, Artificial Sequence
  Description of Artificial Sequence: Synthetic oligonucleotide
auggauucaaccca

SEQ ID NO: 12815 - RNA, 14 nt, Artificial Sequence
  Description of Artificial Sequence: Synthetic oligonucleotide
gauggauucaaccc

SEQ ID NO: 12816 - RNA, 14 nt, Artificial Sequence
  Description of Artificial Sequence: Synthetic oligonucleotide
ugauggauucaacc

SEQ ID NO: 12817 - RNA, 14 nt, Artificial Sequence
  Description of Artificial Sequence: Synthetic oligonucleotide
gugauggauucaac

SEQ ID NO: 12818 - RNA, 14 nt, Artificial Sequence
  Description of Artificial Sequence: Synthetic oligonucleotide
agugauggauucaa

SEQ ID NO: 12819 - RNA, 14 nt, Artificial Sequence
  Description of Artificial Sequence: Synthetic oligonucleotide
uagugauggauuca

SEQ ID NO: 12820 - RNA, 14 nt, Artificial Sequence
  Description of Artificial Sequence: Synthetic oligonucleotide
uuagugauggauuc

SEQ ID NO: 12821 - RNA, 14 nt, Artificial Sequence
  Description of Artificial Sequence: Synthetic oligonucleotide
uuuagugauggauu

SEQ ID NO: 12822 - RNA, 14 nt, Artificial Sequence
  Description of Artificial Sequence: Synthetic oligonucleotide
uuuuagugauggau

SEQ ID NO: 12823 - RNA, 14 nt, Artificial Sequence
  Description of Artificial Sequence: Synthetic oligonucleotide
auuuuagugaugga

SEQ ID NO: 12824 - RNA, 14 nt, Artificial Sequence
  Description of Artificial Sequence: Synthetic oligonucleotide
uauuuuagugaugg

SEQ ID NO: 12825 - RNA, 14 nt, Artificial Sequence
  Description of Artificial Sequence: Synthetic oligonucleotide
uuauuuuagugaug

SEQ ID NO: 12826 - RNA, 14 nt, Artificial Sequence
  Description of Artificial Sequence: Synthetic oligonucleotide
auuauuuuagugau

SEQ ID NO: 12827 - RNA, 14 nt, Artificial Sequence
  Description of Artificial Sequence: Synthetic oligonucleotide
gauuauuuuaguga

SEQ ID NO: 12828 - RNA, 14 nt, Artificial Sequence
  Description of Artificial Sequence: Synthetic oligonucleotide
ggauuauuuuagug

SEQ ID NO: 12829 - RNA, 14 nt, Artificial Sequence
  Description of Artificial Sequence: Synthetic oligonucleotide
uggauuauuuuagu

SEQ ID NO: 12830 - RNA, 14 nt, Artificial Sequence
  Description of Artificial Sequence: Synthetic oligonucleotide
uuggauuauuuuag

SEQ ID NO: 12831 - RNA, 14 nt, Artificial Sequence
  Description of Artificial Sequence: Synthetic oligonucleotide
uuuggauuauuuua

SEQ ID NO: 12832 - RNA, 14 nt, Artificial Sequence
  Description of Artificial Sequence: Synthetic oligonucleotide
cuuuggauuauuuu

SEQ ID NO: 12833 - RNA, 14 nt, Artificial Sequence
  Description of Artificial Sequence: Synthetic oligonucleotide
ccuuuggauuauuu

SEQ ID NO: 12834 - RNA, 14 nt, Artificial Sequence
  Description of Artificial Sequence: Synthetic oligonucleotide
uccuuuggauuauu

SEQ ID NO: 12835 - RNA, 14 nt, Artificial Sequence
  Description of Artificial Sequence: Synthetic oligonucleotide
uuccuuuggauuau

SEQ ID NO: 12836 - RNA, 14 nt, Artificial Sequence
  Description of Artificial Sequence: Synthetic oligonucleotide
uuuccuuuggauua

SEQ ID NO: 12837 - RNA, 14 nt, Artificial Sequence
  Description of Artificial Sequence: Synthetic oligonucleotide
uuuuccuuuggauu

SEQ ID NO: 12838 - RNA, 14 nt, Artificial Sequence
  Description of Artificial Sequence: Synthetic oligonucleotide
uuuuuccuuuggau

SEQ ID NO: 12839 - RNA, 14 nt, Artificial Sequence
  Description of Artificial Sequence: Synthetic oligonucleotide
uuuuuuccuuugga

SEQ ID NO: 12840 - RNA, 14 nt, Artificial Sequence
  Description of Artificial Sequence: Synthetic oligonucleotide
uuuuuuuccuuugg

SEQ ID NO: 12841 - RNA, 14 nt, Artificial Sequence
  Description of Artificial Sequence: Synthetic oligonucleotide
auuuuuuuccuuug

SEQ ID NO: 12842 - RNA, 14 nt, Artificial Sequence
  Description of Artificial Sequence: Synthetic oligonucleotide
aauuuuuuuccuuu

SEQ ID NO: 12843 - RNA, 14 nt, Artificial Sequence
  Description of Artificial Sequence: Synthetic oligonucleotide
caauuuuuuuccuu

SEQ ID NO: 12844 - RNA, 14 nt, Artificial Sequence
  Description of Artificial Sequence: Synthetic oligonucleotide
gcaauuuuuuuccu

SEQ ID NO: 12845 - RNA, 14 nt, Artificial Sequence
  Description of Artificial Sequence: Synthetic oligonucleotide
ugcaauuuuuuucc

SEQ ID NO: 12846 - RNA, 14 nt, Artificial Sequence
  Description of Artificial Sequence: Synthetic oligonucleotide
uugcaauuuuuuuc

SEQ ID NO: 12847 - RNA, 14 nt, Artificial Sequence
  Description of Artificial Sequence: Synthetic oligonucleotide
cuugcaauuuuuuu

SEQ ID NO: 12848 - RNA, 14 nt, Artificial Sequence
  Description of Artificial Sequence: Synthetic oligonucleotide
ucuugcaauuuuuu

SEQ ID NO: 12849 - RNA, 14 nt, Artificial Sequence
  Description of Artificial Sequence: Synthetic oligonucleotide
cucuugcaauuuuu

SEQ ID NO: 12850 - RNA, 14 nt, Artificial Sequence
  Description of Artificial Sequence: Synthetic oligonucleotide
ucucuugcaauuuu

SEQ ID NO: 12851 - RNA, 14 nt, Artificial Sequence
  Description of Artificial Sequence: Synthetic oligonucleotide
gucucuugcaauuu

SEQ ID NO: 12852 - RNA, 14 nt, Artificial Sequence
  Description of Artificial Sequence: Synthetic oligonucleotide
ugucucuugcaauu

SEQ ID NO: 12853 - RNA, 14 nt, Artificial Sequence
  Description of Artificial Sequence: Synthetic oligonucleotide
uugucucuugcaau

SEQ ID NO: 12854 - RNA, 14 nt, Artificial Sequence
  Description of Artificial Sequence: Synthetic oligonucleotide
auugucucuugcaa

SEQ ID NO: 12855 - RNA, 14 nt, Artificial Sequence
  Description of Artificial Sequence: Synthetic oligonucleotide
cauugucucuugca

SEQ ID NO: 12856 - RNA, 14 nt, Artificial Sequence
  Description of Artificial Sequence: Synthetic oligonucleotide
ccauugucucuugc

SEQ ID NO: 12857 - RNA, 14 nt, Artificial Sequence
  Description of Artificial Sequence: Synthetic oligonucleotide
uccauugucucuug

SEQ ID NO: 12858 - RNA, 14 nt, Artificial Sequence
  Description of Artificial Sequence: Synthetic oligonucleotide
guccauugucucuu

SEQ ID NO: 12859 - RNA, 14 nt, Artificial Sequence
  Description of Artificial Sequence: Synthetic oligonucleotide
gguccauugucucu

SEQ ID NO: 12860 - RNA, 14 nt, Artificial Sequence
  Description of Artificial Sequence: Synthetic oligonucleotide
ugguccauugucuc

SEQ ID NO: 12861 - RNA, 14 nt, Artificial Sequence
  Description of Artificial Sequence: Synthetic oligonucleotide
cugguccauugucu

SEQ ID NO: 12862 - RNA, 14 nt, Artificial Sequence
  Description of Artificial Sequence: Synthetic oligonucleotide
ccugguccauuguc

SEQ ID NO: 12863 - RNA, 14 nt, Artificial Sequence
  Description of Artificial Sequence: Synthetic oligonucleotide
accugguccauugu

SEQ ID NO: 12864 - RNA, 14 nt, Artificial Sequence
  Description of Artificial Sequence: Synthetic oligonucleotide
gaccugguccauug

SEQ ID NO: 12865 - RNA, 14 nt, Artificial Sequence
  Description of Artificial Sequence: Synthetic oligonucleotide
ugaccugguccauu

SEQ ID NO: 12866 - RNA, 14 nt, Artificial Sequence
  Description of Artificial Sequence: Synthetic oligonucleotide
augaccugguccau

SEQ ID NO: 12867 - RNA, 14 nt, Artificial Sequence
  Description of Artificial Sequence: Synthetic oligonucleotide
uaugaccuggucca

SEQ ID NO: 12868 - RNA, 14 nt, Artificial Sequence
  Description of Artificial Sequence: Synthetic oligonucleotide
uuaugaccuggucc

SEQ ID NO: 12869 - RNA, 14 nt, Artificial Sequence
  Description of Artificial Sequence: Synthetic oligonucleotide
auuaugaccugguc

SEQ ID NO: 12870 - RNA, 14 nt, Artificial Sequence
  Description of Artificial Sequence: Synthetic oligonucleotide
uauuaugaccuggu

SEQ ID NO: 12871 - RNA, 14 nt, Artificial Sequence
  Description of Artificial Sequence: Synthetic oligonucleotide
auauuaugaccugg

SEQ ID NO: 12872 - RNA, 14 nt, Artificial Sequence
  Description of Artificial Sequence: Synthetic oligonucleotide
aauauuaugaccug

SEQ ID NO: 12873 - RNA, 14 nt, Artificial Sequence
  Description of Artificial Sequence: Synthetic oligonucleotide
uaauauuaugaccu

SEQ ID NO: 12874 - RNA, 14 nt, Artificial Sequence
  Description of Artificial Sequence: Synthetic oligonucleotide
guaauauuaugacc

SEQ ID NO: 12875 - RNA, 14 nt, Artificial Sequence
  Description of Artificial Sequence: Synthetic oligonucleotide
uguaauauuaugac

SEQ ID NO: 12876 - RNA, 14 nt, Artificial Sequence
  Description of Artificial Sequence: Synthetic oligonucleotide
auguaauauuauga

SEQ ID NO: 12877 - RNA, 14 nt, Artificial Sequence
  Description of Artificial Sequence: Synthetic oligonucleotide
aauguaauauuaug

SEQ ID NO: 12878 - RNA, 14 nt, Artificial Sequence
  Description of Artificial Sequence: Synthetic oligonucleotide
aaauguaauauuau

SEQ ID NO: 12879 - RNA, 14 nt, Artificial Sequence
  Description of Artificial Sequence: Synthetic oligonucleotide
gaaauguaauauua

SEQ ID NO: 12880 - RNA, 14 nt, Artificial Sequence
  Description of Artificial Sequence: Synthetic oligonucleotide
ugaaauguaauauu

SEQ ID NO: 12881 - RNA, 14 nt, Artificial Sequence
  Description of Artificial Sequence: Synthetic oligonucleotide
cugaaauguaauau

SEQ ID NO: 12882 - RNA, 14 nt, Artificial Sequence
  Description of Artificial Sequence: Synthetic oligonucleotide
ucugaaauguaaua

SEQ ID NO: 12883 - RNA, 14 nt, Artificial Sequence
  Description of Artificial Sequence: Synthetic oligonucleotide
cucugaaauguaau

SEQ ID NO: 12884 - RNA, 14 nt, Artificial Sequence
  Description of Artificial Sequence: Synthetic oligonucleotide
acucugaaauguaa

SEQ ID NO: 12885 - RNA, 14 nt, Artificial Sequence
  Description of Artificial Sequence: Synthetic oligonucleotide
aacucugaaaugua

SEQ ID NO: 12886 - RNA, 14 nt, Artificial Sequence
  Description of Artificial Sequence: Synthetic oligonucleotide
gaacucugaaaugu

SEQ ID NO: 12887 - RNA, 14 nt, Artificial Sequence
  Description of Artificial Sequence: Synthetic oligonucleotide
ugaacucugaaaug

SEQ ID NO: 12888 - RNA, 14 nt, Artificial Sequence
  Description of Artificial Sequence: Synthetic oligonucleotide
gugaacucugaaau

SEQ ID NO: 12889 - RNA, 14 nt, Artificial Sequence
  Description of Artificial Sequence: Synthetic oligonucleotide
ggugaacucugaaa

SEQ ID NO: 12890 - RNA, 14 nt, Artificial Sequence
  Description of Artificial Sequence: Synthetic oligonucleotide
aggugaacucugaa

SEQ ID NO: 12891 - RNA, 14 nt, Artificial Sequence
  Description of Artificial Sequence: Synthetic oligonucleotide
gaggugaacucuga

SEQ ID NO: 12892 - RNA, 14 nt, Artificial Sequence
  Description of Artificial Sequence: Synthetic oligonucleotide
ggaggugaacucug

SEQ ID NO: 12893 - RNA, 14 nt, Artificial Sequence
  Description of Artificial Sequence: Synthetic oligonucleotide
gggaggugaacucu

SEQ ID NO: 12894 - RNA, 14 nt, Artificial Sequence
  Description of Artificial Sequence: Synthetic oligonucleotide
ugggaggugaacuc

SEQ ID NO: 12895 - RNA, 14 nt, Artificial Sequence
  Description of Artificial Sequence: Synthetic oligonucleotide
gugggaggugaacu

SEQ ID NO: 12896 - RNA, 14 nt, Artificial Sequence
  Description of Artificial Sequence: Synthetic oligonucleotide
ugugggaggugaac

SEQ ID NO: 12897 - RNA, 14 nt, Artificial Sequence
  Description of Artificial Sequence: Synthetic oligonucleotide
cugugggaggugaa

SEQ ID NO: 12898 - RNA, 14 nt, Artificial Sequence
  Description of Artificial Sequence: Synthetic oligonucleotide
acugugggagguga

SEQ ID NO: 12899 - RNA, 14 nt, Artificial Sequence
  Description of Artificial Sequence: Synthetic oligonucleotide
aacugugggaggug

SEQ ID NO: 12900 - RNA, 14 nt, Artificial Sequence
  Description of Artificial Sequence: Synthetic oligonucleotide
caacugugggaggu

SEQ ID NO: 12901 - RNA, 14 nt, Artificial Sequence
  Description of Artificial Sequence: Synthetic oligonucleotide
ucaacugugggagg

SEQ ID NO: 12902 - RNA, 14 nt, Artificial Sequence
  Description of Artificial Sequence: Synthetic oligonucleotide
cucaacugugggag

SEQ ID NO: 12903 - RNA, 14 nt, Artificial Sequence
  Description of Artificial Sequence: Synthetic oligonucleotide
acucaacuguggga

SEQ ID NO: 12904 - RNA, 14 nt, Artificial Sequence
  Description of Artificial Sequence: Synthetic oligonucleotide
cacucaacuguggg

SEQ ID NO: 12905 - RNA, 14 nt, Artificial Sequence
  Description of Artificial Sequence: Synthetic oligonucleotide
ccacucaacugugg

SEQ ID NO: 12906 - RNA, 14 nt, Artificial Sequence
  Description of Artificial Sequence: Synthetic oligonucleotide
gccacucaacugug

SEQ ID NO: 12907 - RNA, 14 nt, Artificial Sequence
  Description of Artificial Sequence: Synthetic oligonucleotide
ugccacucaacugu

SEQ ID NO: 12908 - RNA, 14 nt, Artificial Sequence
  Description of Artificial Sequence: Synthetic oligonucleotide
augccacucaacug

SEQ ID NO: 12909 - RNA, 14 nt, Artificial Sequence
  Description of Artificial Sequence: Synthetic oligonucleotide
uaugccacucaacu

SEQ ID NO: 12910 - RNA, 14 nt, Artificial Sequence
  Description of Artificial Sequence: Synthetic oligonucleotide
auaugccacucaac

SEQ ID NO: 12911 - RNA, 14 nt, Artificial Sequence
  Description of Artificial Sequence: Synthetic oligonucleotide
uauaugccacucaa

SEQ ID NO: 12912 - RNA, 14 nt, Artificial Sequence
  Description of Artificial Sequence: Synthetic oligonucleotide
uuauaugccacuca

SEQ ID NO: 12913 - RNA, 14 nt, Artificial Sequence
  Description of Artificial Sequence: Synthetic oligonucleotide
cuuauaugccacuc

SEQ ID NO: 12914 - RNA, 14 nt, Artificial Sequence
  Description of Artificial Sequence: Synthetic oligonucleotide
gcuuauaugccacu

SEQ ID NO: 12915 - RNA, 14 nt, Artificial Sequence
  Description of Artificial Sequence: Synthetic oligonucleotide
ugcuuauaugccac

SEQ ID NO: 12916 - RNA, 14 nt, Artificial Sequence
  Description of Artificial Sequence: Synthetic oligonucleotide
cugcuuauaugcca

SEQ ID NO: 12917 - RNA, 14 nt, Artificial Sequence
  Description of Artificial Sequence: Synthetic oligonucleotide
ucugcuuauaugcc

SEQ ID NO: 12918 - RNA, 14 nt, Artificial Sequence
  Description of Artificial Sequence: Synthetic oligonucleotide
gucugcuuauaugc

SEQ ID NO: 12919 - RNA, 14 nt, Artificial Sequence
  Description of Artificial Sequence: Synthetic oligonucleotide
ggucugcuuauaug

SEQ ID NO: 12920 - RNA, 14 nt, Artificial Sequence
  Description of Artificial Sequence: Synthetic oligonucleotide
aggucugcuuauau

SEQ ID NO: 12921 - RNA, 14 nt, Artificial Sequence
  Description of Artificial Sequence: Synthetic oligonucleotide
caggucugcuuaua

SEQ ID NO: 12922 - RNA, 14 nt, Artificial Sequence
  Description of Artificial Sequence: Synthetic oligonucleotide
ccaggucugcuuau

SEQ ID NO: 12923 - RNA, 14 nt, Artificial Sequence
  Description of Artificial Sequence: Synthetic oligonucleotide
cccaggucugcuua

SEQ ID NO: 12924 - RNA, 14 nt, Artificial Sequence
  Description of Artificial Sequence: Synthetic oligonucleotide
gcccaggucugcuu

SEQ ID NO: 12925 - RNA, 14 nt, Artificial Sequence
  Description of Artificial Sequence: Synthetic oligonucleotide
ugcccaggucugcu

SEQ ID NO: 12926 - RNA, 14 nt, Artificial Sequence
  Description of Artificial Sequence: Synthetic oligonucleotide
gugcccaggucugc

SEQ ID NO: 12927 - RNA, 14 nt, Artificial Sequence
  Description of Artificial Sequence: Synthetic oligonucleotide
ugugcccaggucug

SEQ ID NO: 12928 - RNA, 14 nt, Artificial Sequence
  Description of Artificial Sequence: Synthetic oligonucleotide
augugcccaggucu

SEQ ID NO: 12929 - RNA, 14 nt, Artificial Sequence
  Description of Artificial Sequence: Synthetic oligonucleotide
uaugugcccagguc

SEQ ID NO: 12930 - RNA, 14 nt, Artificial Sequence
  Description of Artificial Sequence: Synthetic oligonucleotide
cuaugugcccaggu

SEQ ID NO: 12931 - RNA, 14 nt, Artificial Sequence
  Description of Artificial Sequence: Synthetic oligonucleotide
ucuaugugcccagg

SEQ ID NO: 12932 - RNA, 14 nt, Artificial Sequence
  Description of Artificial Sequence: Synthetic oligonucleotide
cucuaugugcccag

SEQ ID NO: 12933 - RNA, 14 nt, Artificial Sequence
  Description of Artificial Sequence: Synthetic oligonucleotide
ucucuaugugccca

SEQ ID NO: 12934 - RNA, 14 nt, Artificial Sequence
  Description of Artificial Sequence: Synthetic oligonucleotide
gucucuaugugccc

SEQ ID NO: 12935 - RNA, 14 nt, Artificial Sequence
  Description of Artificial Sequence: Synthetic oligonucleotide
agucucuaugugcc

SEQ ID NO: 12936 - RNA, 14 nt, Artificial Sequence
  Description of Artificial Sequence: Synthetic oligonucleotide
aagucucuaugugc

SEQ ID NO: 12937 - RNA, 14 nt, Artificial Sequence
  Description of Artificial Sequence: Synthetic oligonucleotide
aaagucucuaugug

SEQ ID NO: 12938 - RNA, 14 nt, Artificial Sequence
  Description of Artificial Sequence: Synthetic oligonucleotide
aaaagucucuaugu

SEQ ID NO: 12939 - RNA, 14 nt, Artificial Sequence
  Description of Artificial Sequence: Synthetic oligonucleotide
caaaagucucuaug

SEQ ID NO: 12940 - RNA, 14 nt, Artificial Sequence
  Description of Artificial Sequence: Synthetic oligonucleotide
ucaaaagucucuau

SEQ ID NO: 12941 - RNA, 14 nt, Artificial Sequence
  Description of Artificial Sequence: Synthetic oligonucleotide
gucaaaagucucua

SEQ ID NO: 12942 - RNA, 14 nt, Artificial Sequence
  Description of Artificial Sequence: Synthetic oligonucleotide
ggucaaaagucucu

SEQ ID NO: 12943 - RNA, 14 nt, Artificial Sequence
  Description of Artificial Sequence: Synthetic oligonucleotide
aggucaaaagucuc

SEQ ID NO: 12944 - RNA, 14 nt, Artificial Sequence
  Description of Artificial Sequence: Synthetic oligonucleotide
caggucaaaagucu

SEQ ID NO: 12945 - RNA, 14 nt, Artificial Sequence
  Description of Artificial Sequence: Synthetic oligonucleotide
gcaggucaaaaguc

SEQ ID NO: 12946 - RNA, 14 nt, Artificial Sequence
  Description of Artificial Sequence: Synthetic oligonucleotide
agcaggucaaaagu

SEQ ID NO: 12947 - RNA, 14 nt, Artificial Sequence
  Description of Artificial Sequence: Synthetic oligonucleotide
gagcaggucaaaag

SEQ ID NO: 12948 - RNA, 14 nt, Artificial Sequence
  Description of Artificial Sequence: Synthetic oligonucleotide
ugagcaggucaaaa

SEQ ID NO: 12949 - RNA, 14 nt, Artificial Sequence
  Description of Artificial Sequence: Synthetic oligonucleotide
gugagcaggucaaa

SEQ ID NO: 12950 - RNA, 14 nt, Artificial Sequence
  Description of Artificial Sequence: Synthetic oligonucleotide
ggugagcaggucaa

SEQ ID NO: 12951 - RNA, 14 nt, Artificial Sequence
  Description of Artificial Sequence: Synthetic oligonucleotide
aggugagcagguca

SEQ ID NO: 12952 - RNA, 14 nt, Artificial Sequence
  Description of Artificial Sequence: Synthetic oligonucleotide
aaggugagcagguc

SEQ ID NO: 12953 - RNA, 14 nt, Artificial Sequence
  Description of Artificial Sequence: Synthetic oligonucleotide
uaaggugagcaggu

SEQ ID NO: 12954 - RNA, 14 nt, Artificial Sequence
  Description of Artificial Sequence: Synthetic oligonucleotide
guaaggugagcagg

SEQ ID NO: 12955 - RNA, 14 nt, Artificial Sequence
  Description of Artificial Sequence: Synthetic oligonucleotide
uguaaggugagcag

SEQ ID NO: 12956 - RNA, 14 nt, Artificial Sequence
  Description of Artificial Sequence: Synthetic oligonucleotide
guguaaggugagca

SEQ ID NO: 12957 - RNA, 14 nt, Artificial Sequence
  Description of Artificial Sequence: Synthetic oligonucleotide
gguguaaggugagc

SEQ ID NO: 12958 - RNA, 14 nt, Artificial Sequence
  Description of Artificial Sequence: Synthetic oligonucleotide
ggguguaaggugag

SEQ ID NO: 12959 - RNA, 14 nt, Artificial Sequence
  Description of Artificial Sequence: Synthetic oligonucleotide
uggguguaagguga

SEQ ID NO: 12960 - RNA, 14 nt, Artificial Sequence
  Description of Artificial Sequence: Synthetic oligonucleotide
uuggguguaaggug

SEQ ID NO: 12961 - RNA, 14 nt, Artificial Sequence
  Description of Artificial Sequence: Synthetic oligonucleotide
auuggguguaaggu

SEQ ID NO: 12962 - RNA, 14 nt, Artificial Sequence
  Description of Artificial Sequence: Synthetic oligonucleotide
uauuggguguaagg

SEQ ID NO: 12963 - RNA, 14 nt, Artificial Sequence
  Description of Artificial Sequence: Synthetic oligonucleotide
cuauuggguguaag

SEQ ID NO: 12964 - RNA, 14 nt, Artificial Sequence
  Description of Artificial Sequence: Synthetic oligonucleotide
ucuauuggguguaa

SEQ ID NO: 12965 - RNA, 14 nt, Artificial Sequence
  Description of Artificial Sequence: Synthetic oligonucleotide
uucuauugggugua

SEQ ID NO: 12966 - RNA, 14 nt, Artificial Sequence
  Description of Artificial Sequence: Synthetic oligonucleotide
uuucuauugggugu

SEQ ID NO: 12967 - RNA, 14 nt, Artificial Sequence
  Description of Artificial Sequence: Synthetic oligonucleotide
auuucuauugggug

SEQ ID NO: 12968 - RNA, 14 nt, Artificial Sequence
  Description of Artificial Sequence: Synthetic oligonucleotide
aauuucuauugggu

SEQ ID NO: 12969 - RNA, 14 nt, Artificial Sequence
  Description of Artificial Sequence: Synthetic oligonucleotide
caauuucuauuggg

SEQ ID NO: 12970 - RNA, 14 nt, Artificial Sequence
  Description of Artificial Sequence: Synthetic oligonucleotide
gcaauuucuauugg

SEQ ID NO: 12971 - RNA, 14 nt, Artificial Sequence
  Description of Artificial Sequence: Synthetic oligonucleotide
agcaauuucuauug

SEQ ID NO: 12972 - RNA, 14 nt, Artificial Sequence
  Description of Artificial Sequence: Synthetic oligonucleotide
gagcaauuucuauu

SEQ ID NO: 12973 - RNA, 14 nt, Artificial Sequence
  Description of Artificial Sequence: Synthetic oligonucleotide
cgagcaauuucuau

SEQ ID NO: 12974 - RNA, 14 nt, Artificial Sequence
  Description of Artificial Sequence: Synthetic oligonucleotide
ucgagcaauuucua

SEQ ID NO: 12975 - RNA, 14 nt, Artificial Sequence
  Description of Artificial Sequence: Synthetic oligonucleotide
gucgagcaauuucu

SEQ ID NO: 12976 - RNA, 14 nt, Artificial Sequence
  Description of Artificial Sequence: Synthetic oligonucleotide
ugucgagcaauuuc

SEQ ID NO: 12977 - RNA, 14 nt, Artificial Sequence
  Description of Artificial Sequence: Synthetic oligonucleotide
uugucgagcaauuu

SEQ ID NO: 12978 - RNA, 14 nt, Artificial Sequence
  Description of Artificial Sequence: Synthetic oligonucleotide
guugucgagcaauu

SEQ ID NO: 12979 - RNA, 14 nt, Artificial Sequence
  Description of Artificial Sequence: Synthetic oligonucleotide
aguugucgagcaau

SEQ ID NO: 12980 - RNA, 14 nt, Artificial Sequence
  Description of Artificial Sequence: Synthetic oligonucleotide
gaguugucgagcaa

SEQ ID NO: 12981 - RNA, 14 nt, Artificial Sequence
  Description of Artificial Sequence: Synthetic oligonucleotide
ugaguugucgagca

SEQ ID NO: 12982 - RNA, 14 nt, Artificial Sequence
  Description of Artificial Sequence: Synthetic oligonucleotide
gugaguugucgagc

SEQ ID NO: 12983 - RNA, 14 nt, Artificial Sequence
  Description of Artificial Sequence: Synthetic oligonucleotide
agugaguugucgag

SEQ ID NO: 12984 - RNA, 14 nt, Artificial Sequence
  Description of Artificial Sequence: Synthetic oligonucleotide
aagugaguugucga

SEQ ID NO: 12985 - RNA, 14 nt, Artificial Sequence
  Description of Artificial Sequence: Synthetic oligonucleotide
aaagugaguugucg

SEQ ID NO: 12986 - RNA, 14 nt, Artificial Sequence
  Description of Artificial Sequence: Synthetic oligonucleotide
uaaagugaguuguc

SEQ ID NO: 12987 - RNA, 14 nt, Artificial Sequence
  Description of Artificial Sequence: Synthetic oligonucleotide
guaaagugaguugu

SEQ ID NO: 12988 - RNA, 14 nt, Artificial Sequence
  Description of Artificial Sequence: Synthetic oligonucleotide
aguaaagugaguug

SEQ ID NO: 12989 - RNA, 14 nt, Artificial Sequence
  Description of Artificial Sequence: Synthetic oligonucleotide
aaguaaagugaguu

SEQ ID NO: 12990 - RNA, 14 nt, Artificial Sequence
  Description of Artificial Sequence: Synthetic oligonucleotide
caaguaaagugagu

SEQ ID NO: 12991 - RNA, 14 nt, Artificial Sequence
  Description of Artificial Sequence: Synthetic oligonucleotide
ucaaguaaagugag

SEQ ID NO: 12992 - RNA, 14 nt, Artificial Sequence
  Description of Artificial Sequence: Synthetic oligonucleotide
uucaaguaaaguga

SEQ ID NO: 12993 - RNA, 14 nt, Artificial Sequence
  Description of Artificial Sequence: Synthetic oligonucleotide
auucaaguaaagug

SEQ ID NO: 12994 - RNA, 14 nt, Artificial Sequence
  Description of Artificial Sequence: Synthetic oligonucleotide
gauucaaguaaagu

SEQ ID NO: 12995 - RNA, 14 nt, Artificial Sequence
  Description of Artificial Sequence: Synthetic oligonucleotide
ugauucaaguaaag

SEQ ID NO: 12996 - RNA, 14 nt, Artificial Sequence
  Description of Artificial Sequence: Synthetic oligonucleotide
cugauucaaguaaa

SEQ ID NO: 12997 - RNA, 14 nt, Artificial Sequence
  Description of Artificial Sequence: Synthetic oligonucleotide
ucugauucaaguaa

SEQ ID NO: 12998 - RNA, 14 nt, Artificial Sequence
  Description of Artificial Sequence: Synthetic oligonucleotide
aucugauucaagua

SEQ ID NO: 12999 - RNA, 14 nt, Artificial Sequence
  Description of Artificial Sequence: Synthetic oligonucleotide
gaucugauucaagu

SEQ ID NO: 13000 - RNA, 14 nt, Artificial Sequence
  Description of Artificial Sequence: Synthetic oligonucleotide
agaucugauucaag

SEQ ID NO: 13001 - RNA, 14 nt, Artificial Sequence
  Description of Artificial Sequence: Synthetic oligonucleotide
uagaucugauucaa

SEQ ID NO: 13002 - RNA, 14 nt, Artificial Sequence
  Description of Artificial Sequence: Synthetic oligonucleotide
auagaucugauuca

SEQ ID NO: 13003 - RNA, 14 nt, Artificial Sequence
  Description of Artificial Sequence: Synthetic oligonucleotide
uauagaucugauuc

SEQ ID NO: 13004 - RNA, 14 nt, Artificial Sequence
  Description of Artificial Sequence: Synthetic oligonucleotide
guauagaucugauu

SEQ ID NO: 13005 - RNA, 14 nt, Artificial Sequence
  Description of Artificial Sequence: Synthetic oligonucleotide
gguauagaucugau

SEQ ID NO: 13006 - RNA, 14 nt, Artificial Sequence
  Description of Artificial Sequence: Synthetic oligonucleotide
cgguauagaucuga

SEQ ID NO: 13007 - RNA, 14 nt, Artificial Sequence
  Description of Artificial Sequence: Synthetic oligonucleotide
ucgguauagaucug

SEQ ID NO: 13008 - RNA, 14 nt, Artificial Sequence
  Description of Artificial Sequence: Synthetic oligonucleotide
cucgguauagaucu

SEQ ID NO: 13009 - RNA, 14 nt, Artificial Sequence
  Description of Artificial Sequence: Synthetic oligonucleotide
gcucgguauagauc

SEQ ID NO: 13010 - RNA, 14 nt, Artificial Sequence
  Description of Artificial Sequence: Synthetic oligonucleotide
agcucgguauagau

SEQ ID NO: 13011 - RNA, 14 nt, Artificial Sequence
  Description of Artificial Sequence: Synthetic oligonucleotide
cagcucgguauaga

SEQ ID NO: 13012 - RNA, 14 nt, Artificial Sequence
  Description of Artificial Sequence: Synthetic oligonucleotide
acagcucgguauag

SEQ ID NO: 13013 - RNA, 14 nt, Artificial Sequence
  Description of Artificial Sequence: Synthetic oligonucleotide
uacagcucgguaua

SEQ ID NO: 13014 - RNA, 14 nt, Artificial Sequence
  Description of Artificial Sequence: Synthetic oligonucleotide
guacagcucgguau

SEQ ID NO: 13015 - RNA, 14 nt, Artificial Sequence
  Description of Artificial Sequence: Synthetic oligonucleotide
uguacagcucggua

SEQ ID NO: 13016 - RNA, 14 nt, Artificial Sequence
  Description of Artificial Sequence: Synthetic oligonucleotide
cuguacagcucggu

SEQ ID NO: 13017 - RNA, 14 nt, Artificial Sequence
  Description of Artificial Sequence: Synthetic oligonucleotide
gcuguacagcucgg

SEQ ID NO: 13018 - RNA, 14 nt, Artificial Sequence
  Description of Artificial Sequence: Synthetic oligonucleotide
ggcuguacagcucg

SEQ ID NO: 13019 - RNA, 14 nt, Artificial Sequence
  Description of Artificial Sequence: Synthetic oligonucleotide
uggcuguacagcuc

SEQ ID NO: 13020 - RNA, 14 nt, Artificial Sequence
  Description of Artificial Sequence: Synthetic oligonucleotide
auggcuguacagcu

SEQ ID NO: 13021 - RNA, 14 nt, Artificial Sequence
  Description of Artificial Sequence: Synthetic oligonucleotide
gauggcuguacagc

SEQ ID NO: 13022 - RNA, 14 nt, Artificial Sequence
  Description of Artificial Sequence: Synthetic oligonucleotide
ugauggcuguacag

SEQ ID NO: 13023 - RNA, 14 nt, Artificial Sequence
  Description of Artificial Sequence: Synthetic oligonucleotide
cugauggcuguaca

SEQ ID NO: 13024 - RNA, 14 nt, Artificial Sequence
  Description of Artificial Sequence: Synthetic oligonucleotide
ucugauggcuguac

SEQ ID NO: 13025 - RNA, 14 nt, Artificial Sequence
  Description of Artificial Sequence: Synthetic oligonucleotide
uucugauggcugua

SEQ ID NO: 13026 - RNA, 14 nt, Artificial Sequence
  Description of Artificial Sequence: Synthetic oligonucleotide
auucugauggcugu

SEQ ID NO: 13027 - RNA, 14 nt, Artificial Sequence
  Description of Artificial Sequence: Synthetic oligonucleotide
aauucugauggcug

SEQ ID NO: 13028 - RNA, 14 nt, Artificial Sequence
  Description of Artificial Sequence: Synthetic oligonucleotide
uaauucugauggcu

SEQ ID NO: 13029 - RNA, 14 nt, Artificial Sequence
  Description of Artificial Sequence: Synthetic oligonucleotide
cuaauucugauggc

SEQ ID NO: 13030 - RNA, 14 nt, Artificial Sequence
  Description of Artificial Sequence: Synthetic oligonucleotide
acuaauucugaugg

SEQ ID NO: 13031 - RNA, 14 nt, Artificial Sequence
  Description of Artificial Sequence: Synthetic oligonucleotide
aacuaauucugaug

SEQ ID NO: 13032 - RNA, 14 nt, Artificial Sequence
  Description of Artificial Sequence: Synthetic oligonucleotide
caacuaauucugau

SEQ ID NO: 13033 - RNA, 14 nt, Artificial Sequence
  Description of Artificial Sequence: Synthetic oligonucleotide
ccaacuaauucuga

SEQ ID NO: 13034 - RNA, 14 nt, Artificial Sequence
  Description of Artificial Sequence: Synthetic oligonucleotide
uccaacuaauucug

SEQ ID NO: 13035 - RNA, 14 nt, Artificial Sequence
  Description of Artificial Sequence: Synthetic oligonucleotide
uuccaacuaauucu

SEQ ID NO: 13036 - RNA, 14 nt, Artificial Sequence
  Description of Artificial Sequence: Synthetic oligonucleotide
cuuccaacuaauuc

SEQ ID NO: 13037 - RNA, 14 nt, Artificial Sequence
  Description of Artificial Sequence: Synthetic oligonucleotide
acuuccaacuaauu

SEQ ID NO: 13038 - RNA, 14 nt, Artificial Sequence
  Description of Artificial Sequence: Synthetic oligonucleotide
cacuuccaacuaau

SEQ ID NO: 13039 - RNA, 14 nt, Artificial Sequence
  Description of Artificial Sequence: Synthetic oligonucleotide
acacuuccaacuaa

SEQ ID NO: 13040 - RNA, 14 nt, Artificial Sequence
  Description of Artificial Sequence: Synthetic oligonucleotide
cacacuuccaacua

SEQ ID NO: 13041 - RNA, 14 nt, Artificial Sequence
  Description of Artificial Sequence: Synthetic oligonucleotide
acacacuuccaacu

SEQ ID NO: 13042 - RNA, 14 nt, Artificial Sequence
  Description of Artificial Sequence: Synthetic oligonucleotide
cacacacuuccaac

SEQ ID NO: 13043 - RNA, 14 nt, Artificial Sequence
  Description of Artificial Sequence: Synthetic oligonucleotide
ccacacacuuccaa

SEQ ID NO: 13044 - RNA, 14 nt, Artificial Sequence
  Description of Artificial Sequence: Synthetic oligonucleotide
uccacacacuucca

SEQ ID NO: 13045 - RNA, 14 nt, Artificial Sequence
  Description of Artificial Sequence: Synthetic oligonucleotide
guccacacacuucc

SEQ ID NO: 13046 - RNA, 14 nt, Artificial Sequence
  Description of Artificial Sequence: Synthetic oligonucleotide
uguccacacacuuc

SEQ ID NO: 13047 - RNA, 14 nt, Artificial Sequence
  Description of Artificial Sequence: Synthetic oligonucleotide
uuguccacacacuu

SEQ ID NO: 13048 - RNA, 14 nt, Artificial Sequence
  Description of Artificial Sequence: Synthetic oligonucleotide
uuuguccacacacu

SEQ ID NO: 13049 - RNA, 14 nt, Artificial Sequence
  Description of Artificial Sequence: Synthetic oligonucleotide
uuuuguccacacac

SEQ ID NO: 13050 - RNA, 14 nt, Artificial Sequence
  Description of Artificial Sequence: Synthetic oligonucleotide
cuuuuguccacaca

SEQ ID NO: 13051 - RNA, 14 nt, Artificial Sequence
  Description of Artificial Sequence: Synthetic oligonucleotide
ucuuuuguccacac

SEQ ID NO: 13052 - RNA, 14 nt, Artificial Sequence
  Description of Artificial Sequence: Synthetic oligonucleotide
uucuuuuguccaca

SEQ ID NO: 13053 - RNA, 14 nt, Artificial Sequence
  Description of Artificial Sequence: Synthetic oligonucleotide
cuucuuuuguccac

SEQ ID NO: 13054 - RNA, 14 nt, Artificial Sequence
  Description of Artificial Sequence: Synthetic oligonucleotide
ucuucuuuugucca

SEQ ID NO: 13055 - RNA, 14 nt, Artificial Sequence
  Description of Artificial Sequence: Synthetic oligonucleotide
gucuucuuuugucc

SEQ ID NO: 13056 - RNA, 14 nt, Artificial Sequence
  Description of Artificial Sequence: Synthetic oligonucleotide
ugucuucuuuuguc

SEQ ID NO: 13057 - RNA, 14 nt, Artificial Sequence
  Description of Artificial Sequence: Synthetic oligonucleotide
uugucuucuuuugu

SEQ ID NO: 13058 - RNA, 14 nt, Artificial Sequence
  Description of Artificial Sequence: Synthetic oligonucleotide
uuugucuucuuuug

SEQ ID NO: 13059 - RNA, 14 nt, Artificial Sequence
  Description of Artificial Sequence: Synthetic oligonucleotide
cuuugucuucuuuu

SEQ ID NO: 13060 - RNA, 14 nt, Artificial Sequence
  Description of Artificial Sequence: Synthetic oligonucleotide
ucuuugucuucuuu

SEQ ID NO: 13061 - RNA, 14 nt, Artificial Sequence
  Description of Artificial Sequence: Synthetic oligonucleotide
uucuuugucuucuu

SEQ ID NO: 13062 - RNA, 14 nt, Artificial Sequence
  Description of Artificial Sequence: Synthetic oligonucleotide
uuucuuugucuucu

SEQ ID NO: 13063 - RNA, 14 nt, Artificial Sequence
  Description of Artificial Sequence: Synthetic oligonucleotide
auuucuuugucuuc

SEQ ID NO: 13064 - RNA, 14 nt, Artificial Sequence
  Description of Artificial Sequence: Synthetic oligonucleotide
aauuucuuugucuu

SEQ ID NO: 13065 - RNA, 14 nt, Artificial Sequence
  Description of Artificial Sequence: Synthetic oligonucleotide
uaauuucuuugucu

SEQ ID NO: 13066 - RNA, 14 nt, Artificial Sequence
  Description of Artificial Sequence: Synthetic oligonucleotide
uuaauuucuuuguc

SEQ ID NO: 13067 - RNA, 14 nt, Artificial Sequence
  Description of Artificial Sequence: Synthetic oligonucleotide
guuaauuucuuugu

SEQ ID NO: 13068 - RNA, 14 nt, Artificial Sequence
  Description of Artificial Sequence: Synthetic oligonucleotide
aguuaauuucuuug

SEQ ID NO: 13069 - RNA, 14 nt, Artificial Sequence
  Description of Artificial Sequence: Synthetic oligonucleotide
gaguuaauuucuuu

SEQ ID NO: 13070 - RNA, 14 nt, Artificial Sequence
  Description of Artificial Sequence: Synthetic oligonucleotide
agaguuaauuucuu

SEQ ID NO: 13071 - RNA, 14 nt, Artificial Sequence
  Description of Artificial Sequence: Synthetic oligonucleotide
gagaguuaauuucu

SEQ ID NO: 13072 - RNA, 14 nt, Artificial Sequence
  Description of Artificial Sequence: Synthetic oligonucleotide
ggagaguuaauuuc

SEQ ID NO: 13073 - RNA, 14 nt, Artificial Sequence
  Description of Artificial Sequence: Synthetic oligonucleotide
aggagaguuaauuu

SEQ ID NO: 13074 - RNA, 14 nt, Artificial Sequence
  Description of Artificial Sequence: Synthetic oligonucleotide
uaggagaguuaauu

SEQ ID NO: 13075 - RNA, 14 nt, Artificial Sequence
  Description of Artificial Sequence: Synthetic oligonucleotide
uuaggagaguuaau

SEQ ID NO: 13076 - RNA, 14 nt, Artificial Sequence
  Description of Artificial Sequence: Synthetic oligonucleotide
auuaggagaguuaa

SEQ ID NO: 13077 - RNA, 14 nt, Artificial Sequence
  Description of Artificial Sequence: Synthetic oligonucleotide
gauuaggagaguua

SEQ ID NO: 13078 - RNA, 14 nt, Artificial Sequence
  Description of Artificial Sequence: Synthetic oligonucleotide
agauuaggagaguu

SEQ ID NO: 13079 - RNA, 14 nt, Artificial Sequence
  Description of Artificial Sequence: Synthetic oligonucleotide
aagauuaggagagu

SEQ ID NO: 13080 - RNA, 14 nt, Artificial Sequence
  Description of Artificial Sequence: Synthetic oligonucleotide
gaagauuaggagag

SEQ ID NO: 13081 - RNA, 14 nt, Artificial Sequence
  Description of Artificial Sequence: Synthetic oligonucleotide
agaagauuaggaga

SEQ ID NO: 13082 - RNA, 14 nt, Artificial Sequence
  Description of Artificial Sequence: Synthetic oligonucleotide
cagaagauuaggag

SEQ ID NO: 13083 - RNA, 14 nt, Artificial Sequence
  Description of Artificial Sequence: Synthetic oligonucleotide
ucagaagauuagga

SEQ ID NO: 13084 - RNA, 14 nt, Artificial Sequence
  Description of Artificial Sequence: Synthetic oligonucleotide
uucagaagauuagg

SEQ ID NO: 13085 - RNA, 14 nt, Artificial Sequence
  Description of Artificial Sequence: Synthetic oligonucleotide
uuucagaagauuag

SEQ ID NO: 13086 - RNA, 14 nt, Artificial Sequence
  Description of Artificial Sequence: Synthetic oligonucleotide
uuuucagaagauua

SEQ ID NO: 13087 - RNA, 14 nt, Artificial Sequence
  Description of Artificial Sequence: Synthetic oligonucleotide
auuuucagaagauu

SEQ ID NO: 13088 - RNA, 14 nt, Artificial Sequence
  Description of Artificial Sequence: Synthetic oligonucleotide
cauuuucagaagau

SEQ ID NO: 13089 - RNA, 14 nt, Artificial Sequence
  Description of Artificial Sequence: Synthetic oligonucleotide
ucauuuucagaaga

SEQ ID NO: 13090 - RNA, 14 nt, Artificial Sequence
  Description of Artificial Sequence: Synthetic oligonucleotide
aucauuuucagaag

SEQ ID NO: 13091 - RNA, 14 nt, Artificial Sequence
  Description of Artificial Sequence: Synthetic oligonucleotide
aaucauuuucagaa

SEQ ID NO: 13092 - RNA, 14 nt, Artificial Sequence
  Description of Artificial Sequence: Synthetic oligonucleotide
gaaucauuuucaga

SEQ ID NO: 13093 - RNA, 14 nt, Artificial Sequence
  Description of Artificial Sequence: Synthetic oligonucleotide
cgaaucauuuucag

SEQ ID NO: 13094 - RNA, 14 nt, Artificial Sequence
  Description of Artificial Sequence: Synthetic oligonucleotide
ucgaaucauuuuca

SEQ ID NO: 13095 - RNA, 14 nt, Artificial Sequence
  Description of Artificial Sequence: Synthetic oligonucleotide
gucgaaucauuuuc

SEQ ID NO: 13096 - RNA, 14 nt, Artificial Sequence
  Description of Artificial Sequence: Synthetic oligonucleotide
ugucgaaucauuuu

SEQ ID NO: 13097 - RNA, 14 nt, Artificial Sequence
  Description of Artificial Sequence: Synthetic oligonucleotide
augucgaaucauuu

SEQ ID NO: 13098 - RNA, 14 nt, Artificial Sequence
  Description of Artificial Sequence: Synthetic oligonucleotide
uaugucgaaucauu

SEQ ID NO: 13099 - RNA, 14 nt, Artificial Sequence
  Description of Artificial Sequence: Synthetic oligonucleotide
guaugucgaaucau

SEQ ID NO: 13100 - RNA, 14 nt, Artificial Sequence
  Description of Artificial Sequence: Synthetic oligonucleotide
gguaugucgaauca

SEQ ID NO: 13101 - RNA, 14 nt, Artificial Sequence
  Description of Artificial Sequence: Synthetic oligonucleotide
ugguaugucgaauc

SEQ ID NO: 13102 - RNA, 14 nt, Artificial Sequence
  Description of Artificial Sequence: Synthetic oligonucleotide
gugguaugucgaau

SEQ ID NO: 13103 - RNA, 14 nt, Artificial Sequence
  Description of Artificial Sequence: Synthetic oligonucleotide
ggugguaugucgaa

SEQ ID NO: 13104 - RNA, 14 nt, Artificial Sequence
  Description of Artificial Sequence: Synthetic oligonucleotide
uggugguaugucga

SEQ ID NO: 13105 - RNA, 14 nt, Artificial Sequence
  Description of Artificial Sequence: Synthetic oligonucleotide
uuggugguaugucg

SEQ ID NO: 13106 - RNA, 14 nt, Artificial Sequence
  Description of Artificial Sequence: Synthetic oligonucleotide
guuggugguauguc

SEQ ID NO: 13107 - RNA, 14 nt, Artificial Sequence
  Description of Artificial Sequence: Synthetic oligonucleotide
gguuggugguaugu

SEQ ID NO: 13108 - RNA, 14 nt, Artificial Sequence
  Description of Artificial Sequence: Synthetic oligonucleotide
agguuggugguaug

SEQ ID NO: 13109 - RNA, 14 nt, Artificial Sequence
  Description of Artificial Sequence: Synthetic oligonucleotide
gagguuggugguau

SEQ ID NO: 13110 - RNA, 14 nt, Artificial Sequence
  Description of Artificial Sequence: Synthetic oligonucleotide
ugagguugguggua

SEQ ID NO: 13111 - RNA, 14 nt, Artificial Sequence
  Description of Artificial Sequence: Synthetic oligonucleotide
gugagguugguggu

SEQ ID NO: 13112 - RNA, 14 nt, Artificial Sequence
  Description of Artificial Sequence: Synthetic oligonucleotide
agugagguuggugg

SEQ ID NO: 13113 - RNA, 14 nt, Artificial Sequence
  Description of Artificial Sequence: Synthetic oligonucleotide
gagugagguuggug

SEQ ID NO: 13114 - RNA, 14 nt, Artificial Sequence
  Description of Artificial Sequence: Synthetic oligonucleotide
agagugagguuggu

SEQ ID NO: 13115 - RNA, 14 nt, Artificial Sequence
  Description of Artificial Sequence: Synthetic oligonucleotide
cagagugagguugg

SEQ ID NO: 13116 - RNA, 14 nt, Artificial Sequence
  Description of Artificial Sequence: Synthetic oligonucleotide
acagagugagguug

SEQ ID NO: 13117 - RNA, 14 nt, Artificial Sequence
  Description of Artificial Sequence: Synthetic oligonucleotide
cacagagugagguu

SEQ ID NO: 13118 - RNA, 14 nt, Artificial Sequence
  Description of Artificial Sequence: Synthetic oligonucleotide
ccacagagugaggu

SEQ ID NO: 13119 - RNA, 14 nt, Artificial Sequence
  Description of Artificial Sequence: Synthetic oligonucleotide
accacagagugagg

SEQ ID NO: 13120 - RNA, 14 nt, Artificial Sequence
  Description of Artificial Sequence: Synthetic oligonucleotide
aaccacagagugag

SEQ ID NO: 13121 - RNA, 14 nt, Artificial Sequence
  Description of Artificial Sequence: Synthetic oligonucleotide
aaaccacagaguga

SEQ ID NO: 13122 - RNA, 14 nt, Artificial Sequence
  Description of Artificial Sequence: Synthetic oligonucleotide
caaaccacagagug

SEQ ID NO: 13123 - RNA, 14 nt, Artificial Sequence
  Description of Artificial Sequence: Synthetic oligonucleotide
ucaaaccacagagu

SEQ ID NO: 13124 - RNA, 14 nt, Artificial Sequence
  Description of Artificial Sequence: Synthetic oligonucleotide
cucaaaccacagag

SEQ ID NO: 13125 - RNA, 14 nt, Artificial Sequence
  Description of Artificial Sequence: Synthetic oligonucleotide
ucucaaaccacaga

SEQ ID NO: 13126 - RNA, 14 nt, Artificial Sequence
  Description of Artificial Sequence: Synthetic oligonucleotide
uucucaaaccacag

SEQ ID NO: 13127 - RNA, 14 nt, Artificial Sequence
  Description of Artificial Sequence: Synthetic oligonucleotide
uuucucaaaccaca

SEQ ID NO: 13128 - RNA, 14 nt, Artificial Sequence
  Description of Artificial Sequence: Synthetic oligonucleotide
auuucucaaaccac

SEQ ID NO: 13129 - RNA, 14 nt, Artificial Sequence
  Description of Artificial Sequence: Synthetic oligonucleotide
cauuucucaaacca

SEQ ID NO: 13130 - RNA, 14 nt, Artificial Sequence
  Description of Artificial Sequence: Synthetic oligonucleotide
acauuucucaaacc

SEQ ID NO: 13131 - RNA, 14 nt, Artificial Sequence
  Description of Artificial Sequence: Synthetic oligonucleotide
uacauuucucaaac

SEQ ID NO: 13132 - RNA, 14 nt, Artificial Sequence
  Description of Artificial Sequence: Synthetic oligonucleotide
auacauuucucaaa

SEQ ID NO: 13133 - RNA, 14 nt, Artificial Sequence
  Description of Artificial Sequence: Synthetic oligonucleotide
aauacauuucucaa

SEQ ID NO: 13134 - RNA, 14 nt, Artificial Sequence
  Description of Artificial Sequence: Synthetic oligonucleotide
caauacauuucuca

SEQ ID NO: 13135 - RNA, 14 nt, Artificial Sequence
  Description of Artificial Sequence: Synthetic oligonucleotide
acaauacauuucuc

SEQ ID NO: 13136 - RNA, 14 nt, Artificial Sequence
  Description of Artificial Sequence: Synthetic oligonucleotide
uacaauacauuucu

SEQ ID NO: 13137 - RNA, 14 nt, Artificial Sequence
  Description of Artificial Sequence: Synthetic oligonucleotide
cuacaauacauuuc

SEQ ID NO: 13138 - RNA, 14 nt, Artificial Sequence
  Description of Artificial Sequence: Synthetic oligonucleotide
ucuacaauacauuu

SEQ ID NO: 13139 - RNA, 14 nt, Artificial Sequence
  Description of Artificial Sequence: Synthetic oligonucleotide
uucuacaauacauu

SEQ ID NO: 13140 - RNA, 14 nt, Artificial Sequence
  Description of Artificial Sequence: Synthetic oligonucleotide
uuucuacaauacau

SEQ ID NO: 13141 - RNA, 14 nt, Artificial Sequence
  Description of Artificial Sequence: Synthetic oligonucleotide
guuucuacaauaca

SEQ ID NO: 13142 - RNA, 14 nt, Artificial Sequence
  Description of Artificial Sequence: Synthetic oligonucleotide
aguuucuacaauac

SEQ ID NO: 13143 - RNA, 14 nt, Artificial Sequence
  Description of Artificial Sequence: Synthetic oligonucleotide
caguuucuacaaua

SEQ ID NO: 13144 - RNA, 14 nt, Artificial Sequence
  Description of Artificial Sequence: Synthetic oligonucleotide
ucaguuucuacaau

SEQ ID NO: 13145 - RNA, 14 nt, Artificial Sequence
  Description of Artificial Sequence: Synthetic oligonucleotide
uucaguuucuacaa

SEQ ID NO: 13146 - RNA, 14 nt, Artificial Sequence
  Description of Artificial Sequence: Synthetic oligonucleotide
uuucaguuucuaca

SEQ ID NO: 13147 - RNA, 14 nt, Artificial Sequence
  Description of Artificial Sequence: Synthetic oligonucleotide
uuuucaguuucuac

SEQ ID NO: 13148 - RNA, 14 nt, Artificial Sequence
  Description of Artificial Sequence: Synthetic oligonucleotide
auuuucaguuucua

SEQ ID NO: 13149 - RNA, 14 nt, Artificial Sequence
  Description of Artificial Sequence: Synthetic oligonucleotide
aauuuucaguuucu

SEQ ID NO: 13150 - RNA, 14 nt, Artificial Sequence
  Description of Artificial Sequence: Synthetic oligonucleotide
aaauuuucaguuuc

SEQ ID NO: 13151 - RNA, 14 nt, Artificial Sequence
  Description of Artificial Sequence: Synthetic oligonucleotide
uaaauuuucaguuu

SEQ ID NO: 13152 - RNA, 14 nt, Artificial Sequence
  Description of Artificial Sequence: Synthetic oligonucleotide
cuaaauuuucaguu

SEQ ID NO: 13153 - RNA, 14 nt, Artificial Sequence
  Description of Artificial Sequence: Synthetic oligonucleotide
ucuaaauuuucagu

SEQ ID NO: 13154 - RNA, 14 nt, Artificial Sequence
  Description of Artificial Sequence: Synthetic oligonucleotide
uucuaaauuuucag

SEQ ID NO: 13155 - RNA, 14 nt, Artificial Sequence
  Description of Artificial Sequence: Synthetic oligonucleotide
cuucuaaauuuuca

SEQ ID NO: 13156 - RNA, 14 nt, Artificial Sequence
  Description of Artificial Sequence: Synthetic oligonucleotide
ucuucuaaauuuuc

SEQ ID NO: 13157 - RNA, 14 nt, Artificial Sequence
  Description of Artificial Sequence: Synthetic oligonucleotide
uucuucuaaauuuu

SEQ ID NO: 13158 - RNA, 14 nt, Artificial Sequence
  Description of Artificial Sequence: Synthetic oligonucleotide
uuucuucuaaauuu

SEQ ID NO: 13159 - RNA, 14 nt, Artificial Sequence
  Description of Artificial Sequence: Synthetic oligonucleotide
cuuucuucuaaauu

SEQ ID NO: 13160 - RNA, 14 nt, Artificial Sequence
  Description of Artificial Sequence: Synthetic oligonucleotide
ucuuucuucuaaau

SEQ ID NO: 13161 - RNA, 14 nt, Artificial Sequence
  Description of Artificial Sequence: Synthetic oligonucleotide
cucuuucuucuaaa

SEQ ID NO: 13162 - RNA, 14 nt, Artificial Sequence
  Description of Artificial Sequence: Synthetic oligonucleotide
acucuuucuucuaa

SEQ ID NO: 13163 - RNA, 14 nt, Artificial Sequence
  Description of Artificial Sequence: Synthetic oligonucleotide
uacucuuucuucua

SEQ ID NO: 13164 - RNA, 14 nt, Artificial Sequence
  Description of Artificial Sequence: Synthetic oligonucleotide
cuacucuuucuucu

SEQ ID NO: 13165 - RNA, 14 nt, Artificial Sequence
  Description of Artificial Sequence: Synthetic oligonucleotide
gcuacucuuucuuc

SEQ ID NO: 13166 - RNA, 14 nt, Artificial Sequence
  Description of Artificial Sequence: Synthetic oligonucleotide
agcuacucuuucuu

SEQ ID NO: 13167 - RNA, 14 nt, Artificial Sequence
  Description of Artificial Sequence: Synthetic oligonucleotide
cagcuacucuuucu

SEQ ID NO: 13168 - RNA, 14 nt, Artificial Sequence
  Description of Artificial Sequence: Synthetic oligonucleotide
acagcuacucuuuc

SEQ ID NO: 13169 - RNA, 14 nt, Artificial Sequence
  Description of Artificial Sequence: Synthetic oligonucleotide
cacagcuacucuuu

SEQ ID NO: 13170 - RNA, 14 nt, Artificial Sequence
  Description of Artificial Sequence: Synthetic oligonucleotide
ccacagcuacucuu

SEQ ID NO: 13171 - RNA, 14 nt, Artificial Sequence
  Description of Artificial Sequence: Synthetic oligonucleotide
accacagcuacucu

SEQ ID NO: 13172 - RNA, 14 nt, Artificial Sequence
  Description of Artificial Sequence: Synthetic oligonucleotide
caccacagcuacuc

SEQ ID NO: 13173 - RNA, 14 nt, Artificial Sequence
  Description of Artificial Sequence: Synthetic oligonucleotide
ucaccacagcuacu

SEQ ID NO: 13174 - RNA, 14 nt, Artificial Sequence
  Description of Artificial Sequence: Synthetic oligonucleotide
cucaccacagcuac

SEQ ID NO: 13175 - RNA, 14 nt, Artificial Sequence
  Description of Artificial Sequence: Synthetic oligonucleotide
acucaccacagcua

SEQ ID NO: 13176 - RNA, 14 nt, Artificial Sequence
  Description of Artificial Sequence: Synthetic oligonucleotide
gacucaccacagcu

SEQ ID NO: 13177 - RNA, 14 nt, Artificial Sequence
  Description of Artificial Sequence: Synthetic oligonucleotide
cgacucaccacagc

SEQ ID NO: 13178 - RNA, 14 nt, Artificial Sequence
  Description of Artificial Sequence: Synthetic oligonucleotide
ucgacucaccacag

SEQ ID NO: 13179 - RNA, 14 nt, Artificial Sequence
  Description of Artificial Sequence: Synthetic oligonucleotide
uucgacucaccaca

SEQ ID NO: 13180 - RNA, 14 nt, Artificial Sequence
  Description of Artificial Sequence: Synthetic oligonucleotide
auucgacucaccac

SEQ ID NO: 13181 - RNA, 14 nt, Artificial Sequence
  Description of Artificial Sequence: Synthetic oligonucleotide
aauucgacucacca

SEQ ID NO: 13182 - RNA, 14 nt, Artificial Sequence
  Description of Artificial Sequence: Synthetic oligonucleotide
uaauucgacucacc

SEQ ID NO: 13183 - RNA, 14 nt, Artificial Sequence
  Description of Artificial Sequence: Synthetic oligonucleotide
auaauucgacucac

SEQ ID NO: 13184 - RNA, 14 nt, Artificial Sequence
  Description of Artificial Sequence: Synthetic oligonucleotide
aauaauucgacuca

SEQ ID NO: 13185 - RNA, 14 nt, Artificial Sequence
  Description of Artificial Sequence: Synthetic oligonucleotide
caauaauucgacuc

SEQ ID NO: 13186 - RNA, 14 nt, Artificial Sequence
  Description of Artificial Sequence: Synthetic oligonucleotide
ucaauaauucgacu

SEQ ID NO: 13187 - RNA, 14 nt, Artificial Sequence
  Description of Artificial Sequence: Synthetic oligonucleotide
cucaauaauucgac

SEQ ID NO: 13188 - RNA, 14 nt, Artificial Sequence
  Description of Artificial Sequence: Synthetic oligonucleotide
ucucaauaauucga

SEQ ID NO: 13189 - RNA, 14 nt, Artificial Sequence
  Description of Artificial Sequence: Synthetic oligonucleotide
aucucaauaauucg

SEQ ID NO: 13190 - RNA, 14 nt, Artificial Sequence
  Description of Artificial Sequence: Synthetic oligonucleotide
aaucucaauaauuc

SEQ ID NO: 13191 - RNA, 14 nt, Artificial Sequence
  Description of Artificial Sequence: Synthetic oligonucleotide
gaaucucaauaauu

SEQ ID NO: 13192 - RNA, 14 nt, Artificial Sequence
  Description of Artificial Sequence: Synthetic oligonucleotide
agaaucucaauaau

SEQ ID NO: 13193 - RNA, 14 nt, Artificial Sequence
  Description of Artificial Sequence: Synthetic oligonucleotide
uagaaucucaauaa

SEQ ID NO: 13194 - RNA, 14 nt, Artificial Sequence
  Description of Artificial Sequence: Synthetic oligonucleotide
guagaaucucaaua

SEQ ID NO: 13195 - RNA, 14 nt, Artificial Sequence
  Description of Artificial Sequence: Synthetic oligonucleotide
uguagaaucucaau

SEQ ID NO: 13196 - RNA, 14 nt, Artificial Sequence
  Description of Artificial Sequence: Synthetic oligonucleotide
uuguagaaucucaa

SEQ ID NO: 13197 - RNA, 14 nt, Artificial Sequence
  Description of Artificial Sequence: Synthetic oligonucleotide
cuuguagaaucuca

SEQ ID NO: 13198 - RNA, 14 nt, Artificial Sequence
  Description of Artificial Sequence: Synthetic oligonucleotide
acuuguagaaucuc

SEQ ID NO: 13199 - RNA, 14 nt, Artificial Sequence
  Description of Artificial Sequence: Synthetic oligonucleotide
gacuuguagaaucu

SEQ ID NO: 13200 - RNA, 14 nt, Artificial Sequence
  Description of Artificial Sequence: Synthetic oligonucleotide
agacuuguagaauc

SEQ ID NO: 13201 - RNA, 14 nt, Artificial Sequence
  Description of Artificial Sequence: Synthetic oligonucleotide
aagacuuguagaau

SEQ ID NO: 13202 - RNA, 14 nt, Artificial Sequence
  Description of Artificial Sequence: Synthetic oligonucleotide
aaagacuuguagaa

SEQ ID NO: 13203 - RNA, 14 nt, Artificial Sequence
  Description of Artificial Sequence: Synthetic oligonucleotide
gaaagacuuguaga

SEQ ID NO: 13204 - RNA, 14 nt, Artificial Sequence
  Description of Artificial Sequence: Synthetic oligonucleotide
ugaaagacuuguag

SEQ ID NO: 13205 - RNA, 14 nt, Artificial Sequence
  Description of Artificial Sequence: Synthetic oligonucleotide
uugaaagacuugua

SEQ ID NO: 13206 - RNA, 14 nt, Artificial Sequence
  Description of Artificial Sequence: Synthetic oligonucleotide
cuugaaagacuugu

SEQ ID NO: 13207 - RNA, 14 nt, Artificial Sequence
  Description of Artificial Sequence: Synthetic oligonucleotide
ucuugaaagacuug

SEQ ID NO: 13208 - RNA, 14 nt, Artificial Sequence
  Description of Artificial Sequence: Synthetic oligonucleotide
cucuugaaagacuu

SEQ ID NO: 13209 - RNA, 14 nt, Artificial Sequence
  Description of Artificial Sequence: Synthetic oligonucleotide
acucuugaaagacu

SEQ ID NO: 13210 - RNA, 14 nt, Artificial Sequence
  Description of Artificial Sequence: Synthetic oligonucleotide
aacucuugaaagac

SEQ ID NO: 13211 - RNA, 14 nt, Artificial Sequence
  Description of Artificial Sequence: Synthetic oligonucleotide
caacucuugaaaga

SEQ ID NO: 13212 - RNA, 14 nt, Artificial Sequence
  Description of Artificial Sequence: Synthetic oligonucleotide
ucaacucuugaaag

SEQ ID NO: 13213 - RNA, 14 nt, Artificial Sequence
  Description of Artificial Sequence: Synthetic oligonucleotide
uucaacucuugaaa

SEQ ID NO: 13214 - RNA, 14 nt, Artificial Sequence
  Description of Artificial Sequence: Synthetic oligonucleotide
guucaacucuugaa

SEQ ID NO: 13215 - RNA, 14 nt, Artificial Sequence
  Description of Artificial Sequence: Synthetic oligonucleotide
uguucaacucuuga

SEQ ID NO: 13216 - RNA, 14 nt, Artificial Sequence
  Description of Artificial Sequence: Synthetic oligonucleotide
uuguucaacucuug

SEQ ID NO: 13217 - RNA, 14 nt, Artificial Sequence
  Description of Artificial Sequence: Synthetic oligonucleotide
guuguucaacucuu

SEQ ID NO: 13218 - RNA, 14 nt, Artificial Sequence
  Description of Artificial Sequence: Synthetic oligonucleotide
aguuguucaacucu

SEQ ID NO: 13219 - RNA, 14 nt, Artificial Sequence
  Description of Artificial Sequence: Synthetic oligonucleotide
aaguuguucaacuc

SEQ ID NO: 13220 - RNA, 14 nt, Artificial Sequence
  Description of Artificial Sequence: Synthetic oligonucleotide
aaaguuguucaacu

SEQ ID NO: 13221 - RNA, 14 nt, Artificial Sequence
  Description of Artificial Sequence: Synthetic oligonucleotide
uaaaguuguucaac

SEQ ID NO: 13222 - RNA, 14 nt, Artificial Sequence
  Description of Artificial Sequence: Synthetic oligonucleotide
uuaaaguuguucaa

SEQ ID NO: 13223 - RNA, 14 nt, Artificial Sequence
  Description of Artificial Sequence: Synthetic oligonucleotide
auuaaaguuguuca

SEQ ID NO: 13224 - RNA, 14 nt, Artificial Sequence
  Description of Artificial Sequence: Synthetic oligonucleotide
cauuaaaguuguuc

SEQ ID NO: 13225 - RNA, 14 nt, Artificial Sequence
  Description of Artificial Sequence: Synthetic oligonucleotide
ccauuaaaguuguu

SEQ ID NO: 13226 - RNA, 14 nt, Artificial Sequence
  Description of Artificial Sequence: Synthetic oligonucleotide
accauuaaaguugu

SEQ ID NO: 13227 - RNA, 14 nt, Artificial Sequence
  Description of Artificial Sequence: Synthetic oligonucleotide
caccauuaaaguug

SEQ ID NO: 13228 - RNA, 14 nt, Artificial Sequence
  Description of Artificial Sequence: Synthetic oligonucleotide
acaccauuaaaguu

SEQ ID NO: 13229 - RNA, 14 nt, Artificial Sequence
  Description of Artificial Sequence: Synthetic oligonucleotide
gacaccauuaaagu

SEQ ID NO: 13230 - RNA, 14 nt, Artificial Sequence
  Description of Artificial Sequence: Synthetic oligonucleotide
ggacaccauuaaag

SEQ ID NO: 13231 - RNA, 14 nt, Artificial Sequence
  Description of Artificial Sequence: Synthetic oligonucleotide
aggacaccauuaaa

SEQ ID NO: 13232 - RNA, 14 nt, Artificial Sequence
  Description of Artificial Sequence: Synthetic oligonucleotide
aaggacaccauuaa

SEQ ID NO: 13233 - RNA, 14 nt, Artificial Sequence
  Description of Artificial Sequence: Synthetic oligonucleotide
caaggacaccauua

SEQ ID NO: 13234 - RNA, 14 nt, Artificial Sequence
  Description of Artificial Sequence: Synthetic oligonucleotide
ucaaggacaccauu

SEQ ID NO: 13235 - RNA, 14 nt, Artificial Sequence
  Description of Artificial Sequence: Synthetic oligonucleotide
cucaaggacaccau

SEQ ID NO: 13236 - RNA, 14 nt, Artificial Sequence
  Description of Artificial Sequence: Synthetic oligonucleotide
ccucaaggacacca

SEQ ID NO: 13237 - RNA, 14 nt, Artificial Sequence
  Description of Artificial Sequence: Synthetic oligonucleotide
accucaaggacacc

SEQ ID NO: 13238 - RNA, 14 nt, Artificial Sequence
  Description of Artificial Sequence: Synthetic oligonucleotide
aaccucaaggacac

SEQ ID NO: 13239 - RNA, 14 nt, Artificial Sequence
  Description of Artificial Sequence: Synthetic oligonucleotide
caaccucaaggaca

SEQ ID NO: 13240 - RNA, 14 nt, Artificial Sequence
  Description of Artificial Sequence: Synthetic oligonucleotide
acaaccucaaggac

SEQ ID NO: 13241 - RNA, 14 nt, Artificial Sequence
  Description of Artificial Sequence: Synthetic oligonucleotide
gacaaccucaagga

SEQ ID NO: 13242 - RNA, 14 nt, Artificial Sequence
  Description of Artificial Sequence: Synthetic oligonucleotide
ugacaaccucaagg

SEQ ID NO: 13243 - RNA, 14 nt, Artificial Sequence
  Description of Artificial Sequence: Synthetic oligonucleotide
cugacaaccucaag

SEQ ID NO: 13244 - RNA, 14 nt, Artificial Sequence
  Description of Artificial Sequence: Synthetic oligonucleotide
acugacaaccucaa

SEQ ID NO: 13245 - RNA, 14 nt, Artificial Sequence
  Description of Artificial Sequence: Synthetic oligonucleotide
cacugacaaccuca

SEQ ID NO: 13246 - RNA, 14 nt, Artificial Sequence
  Description of Artificial Sequence: Synthetic oligonucleotide
gcacugacaaccuc

SEQ ID NO: 13247 - RNA, 14 nt, Artificial Sequence
  Description of Artificial Sequence: Synthetic oligonucleotide
agcacugacaaccu

SEQ ID NO: 13248 - RNA, 14 nt, Artificial Sequence
  Description of Artificial Sequence: Synthetic oligonucleotide
uagcacugacaacc

SEQ ID NO: 13249 - RNA, 14 nt, Artificial Sequence
  Description of Artificial Sequence: Synthetic oligonucleotide
auagcacugacaac

SEQ ID NO: 13250 - RNA, 14 nt, Artificial Sequence
  Description of Artificial Sequence: Synthetic oligonucleotide
cauagcacugacaa

SEQ ID NO: 13251 - RNA, 14 nt, Artificial Sequence
  Description of Artificial Sequence: Synthetic oligonucleotide
ucauagcacugaca

SEQ ID NO: 13252 - RNA, 14 nt, Artificial Sequence
  Description of Artificial Sequence: Synthetic oligonucleotide
uucauagcacugac

SEQ ID NO: 13253 - RNA, 14 nt, Artificial Sequence
  Description of Artificial Sequence: Synthetic oligonucleotide
auucauagcacuga

SEQ ID NO: 13254 - RNA, 14 nt, Artificial Sequence
  Description of Artificial Sequence: Synthetic oligonucleotide
aauucauagcacug

SEQ ID NO: 13255 - RNA, 14 nt, Artificial Sequence
  Description of Artificial Sequence: Synthetic oligonucleotide
gaauucauagcacu

SEQ ID NO: 13256 - RNA, 14 nt, Artificial Sequence
  Description of Artificial Sequence: Synthetic oligonucleotide
ugaauucauagcac

SEQ ID NO: 13257 - RNA, 14 nt, Artificial Sequence
  Description of Artificial Sequence: Synthetic oligonucleotide
augaauucauagca

SEQ ID NO: 13258 - RNA, 14 nt, Artificial Sequence
  Description of Artificial Sequence: Synthetic oligonucleotide
gaugaauucauagc

SEQ ID NO: 13259 - RNA, 14 nt, Artificial Sequence
  Description of Artificial Sequence: Synthetic oligonucleotide
ugaugaauucauag

SEQ ID NO: 13260 - RNA, 14 nt, Artificial Sequence
  Description of Artificial Sequence: Synthetic oligonucleotide
gugaugaauucaua

SEQ ID NO: 13261 - RNA, 14 nt, Artificial Sequence
  Description of Artificial Sequence: Synthetic oligonucleotide
ggugaugaauucau

SEQ ID NO: 13262 - RNA, 14 nt, Artificial Sequence
  Description of Artificial Sequence: Synthetic oligonucleotide
aggugaugaauuca

SEQ ID NO: 13263 - RNA, 14 nt, Artificial Sequence
  Description of Artificial Sequence: Synthetic oligonucleotide
caggugaugaauuc

SEQ ID NO: 13264 - RNA, 14 nt, Artificial Sequence
  Description of Artificial Sequence: Synthetic oligonucleotide
acaggugaugaauu

SEQ ID NO: 13265 - RNA, 14 nt, Artificial Sequence
  Description of Artificial Sequence: Synthetic oligonucleotide
aacaggugaugaau

SEQ ID NO: 13266 - RNA, 14 nt, Artificial Sequence
  Description of Artificial Sequence: Synthetic oligonucleotide
aaacaggugaugaa

SEQ ID NO: 13267 - RNA, 14 nt, Artificial Sequence
  Description of Artificial Sequence: Synthetic oligonucleotide
uaaacaggugauga

SEQ ID NO: 13268 - RNA, 14 nt, Artificial Sequence
  Description of Artificial Sequence: Synthetic oligonucleotide
guaaacaggugaug

SEQ ID NO: 13269 - RNA, 14 nt, Artificial Sequence
  Description of Artificial Sequence: Synthetic oligonucleotide
uguaaacaggugau

SEQ ID NO: 13270 - RNA, 14 nt, Artificial Sequence
  Description of Artificial Sequence: Synthetic oligonucleotide
cuguaaacagguga

SEQ ID NO: 13271 - RNA, 14 nt, Artificial Sequence
  Description of Artificial Sequence: Synthetic oligonucleotide
ucuguaaacaggug

SEQ ID NO: 13272 - RNA, 14 nt, Artificial Sequence
  Description of Artificial Sequence: Synthetic oligonucleotide
gucuguaaacaggu

SEQ ID NO: 13273 - RNA, 14 nt, Artificial Sequence
  Description of Artificial Sequence: Synthetic oligonucleotide
agucuguaaacagg

SEQ ID NO: 13274 - RNA, 14 nt, Artificial Sequence
  Description of Artificial Sequence: Synthetic oligonucleotide
uagucuguaaacag

SEQ ID NO: 13275 - RNA, 14 nt, Artificial Sequence
  Description of Artificial Sequence: Synthetic oligonucleotide
cuagucuguaaaca

SEQ ID NO: 13276 - RNA, 14 nt, Artificial Sequence
  Description of Artificial Sequence: Synthetic oligonucleotide
ucuagucuguaaac

SEQ ID NO: 13277 - RNA, 14 nt, Artificial Sequence
  Description of Artificial Sequence: Synthetic oligonucleotide
gucuagucuguaaa

SEQ ID NO: 13278 - RNA, 14 nt, Artificial Sequence
  Description of Artificial Sequence: Synthetic oligonucleotide
ggucuagucuguaa

SEQ ID NO: 13279 - RNA, 14 nt, Artificial Sequence
  Description of Artificial Sequence: Synthetic oligonucleotide
uggucuagucugua

SEQ ID NO: 13280 - RNA, 14 nt, Artificial Sequence
  Description of Artificial Sequence: Synthetic oligonucleotide
guggucuagucugu

SEQ ID NO: 13281 - RNA, 14 nt, Artificial Sequence
  Description of Artificial Sequence: Synthetic oligonucleotide
uguggucuagucug

SEQ ID NO: 13282 - RNA, 14 nt, Artificial Sequence
  Description of Artificial Sequence: Synthetic oligonucleotide
guguggucuagucu

SEQ ID NO: 13283 - RNA, 14 nt, Artificial Sequence
  Description of Artificial Sequence: Synthetic oligonucleotide
uguguggucuaguc

SEQ ID NO: 13284 - RNA, 14 nt, Artificial Sequence
  Description of Artificial Sequence: Synthetic oligonucleotide
auguguggucuagu

SEQ ID NO: 13285 - RNA, 14 nt, Artificial Sequence
  Description of Artificial Sequence: Synthetic oligonucleotide
aauguguggucuag

SEQ ID NO: 13286 - RNA, 14 nt, Artificial Sequence
  Description of Artificial Sequence: Synthetic oligonucleotide
aaauguguggucua

SEQ ID NO: 13287 - RNA, 14 nt, Artificial Sequence
  Description of Artificial Sequence: Synthetic oligonucleotide
caaauguguggucu

SEQ ID NO: 13288 - RNA, 14 nt, Artificial Sequence
  Description of Artificial Sequence: Synthetic oligonucleotide
ucaaaugugugguc

SEQ ID NO: 13289 - RNA, 14 nt, Artificial Sequence
  Description of Artificial Sequence: Synthetic oligonucleotide
cucaaauguguggu

SEQ ID NO: 13290 - RNA, 14 nt, Artificial Sequence
  Description of Artificial Sequence: Synthetic oligonucleotide
gcucaaaugugugg

SEQ ID NO: 13291 - RNA, 14 nt, Artificial Sequence
  Description of Artificial Sequence: Synthetic oligonucleotide
ugcucaaaugugug

SEQ ID NO: 13292 - RNA, 14 nt, Artificial Sequence
  Description of Artificial Sequence: Synthetic oligonucleotide
uugcucaaaugugu

SEQ ID NO: 13293 - RNA, 14 nt, Artificial Sequence
  Description of Artificial Sequence: Synthetic oligonucleotide
uuugcucaaaugug

SEQ ID NO: 13294 - RNA, 14 nt, Artificial Sequence
  Description of Artificial Sequence: Synthetic oligonucleotide
auuugcucaaaugu

SEQ ID NO: 13295 - RNA, 14 nt, Artificial Sequence
  Description of Artificial Sequence: Synthetic oligonucleotide
uauuugcucaaaug

SEQ ID NO: 13296 - RNA, 14 nt, Artificial Sequence
  Description of Artificial Sequence: Synthetic oligonucleotide
guauuugcucaaau

SEQ ID NO: 13297 - RNA, 14 nt, Artificial Sequence
  Description of Artificial Sequence: Synthetic oligonucleotide
gguauuugcucaaa

SEQ ID NO: 13298 - RNA, 14 nt, Artificial Sequence
  Description of Artificial Sequence: Synthetic oligonucleotide
ugguauuugcucaa

SEQ ID NO: 13299 - RNA, 14 nt, Artificial Sequence
  Description of Artificial Sequence: Synthetic oligonucleotide
uugguauuugcuca

SEQ ID NO: 13300 - RNA, 14 nt, Artificial Sequence
  Description of Artificial Sequence: Synthetic oligonucleotide
cuugguauuugcuc

SEQ ID NO: 13301 - RNA, 14 nt, Artificial Sequence
  Description of Artificial Sequence: Synthetic oligonucleotide
acuugguauuugcu

SEQ ID NO: 13302 - RNA, 14 nt, Artificial Sequence
  Description of Artificial Sequence: Synthetic oligonucleotide
gacuugguauuugc

SEQ ID NO: 13303 - RNA, 14 nt, Artificial Sequence
  Description of Artificial Sequence: Synthetic oligonucleotide
cgacuugguauuug

SEQ ID NO: 13304 - RNA, 14 nt, Artificial Sequence
  Description of Artificial Sequence: Synthetic oligonucleotide
gcgacuugguauuu

SEQ ID NO: 13305 - RNA, 14 nt, Artificial Sequence
  Description of Artificial Sequence: Synthetic oligonucleotide
ggcgacuugguauu

SEQ ID NO: 13306 - RNA, 14 nt, Artificial Sequence
  Description of Artificial Sequence: Synthetic oligonucleotide
uggcgacuugguau

SEQ ID NO: 13307 - RNA, 14 nt, Artificial Sequence
  Description of Artificial Sequence: Synthetic oligonucleotide
cuggcgacuuggua

SEQ ID NO: 13308 - RNA, 14 nt, Artificial Sequence
  Description of Artificial Sequence: Synthetic oligonucleotide
ucuggcgacuuggu

SEQ ID NO: 13309 - RNA, 14 nt, Artificial Sequence
  Description of Artificial Sequence: Synthetic oligonucleotide
uucuggcgacuugg

SEQ ID NO: 13310 - RNA, 14 nt, Artificial Sequence
  Description of Artificial Sequence: Synthetic oligonucleotide
cuucuggcgacuug

SEQ ID NO: 13311 - RNA, 14 nt, Artificial Sequence
  Description of Artificial Sequence: Synthetic oligonucleotide
ucuucuggcgacuu

SEQ ID NO: 13312 - RNA, 14 nt, Artificial Sequence
  Description of Artificial Sequence: Synthetic oligonucleotide
uucuucuggcgacu

SEQ ID NO: 13313 - RNA, 14 nt, Artificial Sequence
  Description of Artificial Sequence: Synthetic oligonucleotide
uuucuucuggcgac

SEQ ID NO: 13314 - RNA, 14 nt, Artificial Sequence
  Description of Artificial Sequence: Synthetic oligonucleotide
uuuucuucuggcga

SEQ ID NO: 13315 - RNA, 14 nt, Artificial Sequence
  Description of Artificial Sequence: Synthetic oligonucleotide
auuuucuucuggcg

SEQ ID NO: 13316 - RNA, 14 nt, Artificial Sequence
  Description of Artificial Sequence: Synthetic oligonucleotide
aauuuucuucuggc

SEQ ID NO: 13317 - RNA, 14 nt, Artificial Sequence
  Description of Artificial Sequence: Synthetic oligonucleotide
aaauuuucuucugg

SEQ ID NO: 13318 - RNA, 14 nt, Artificial Sequence
  Description of Artificial Sequence: Synthetic oligonucleotide
aaaauuuucuucug

SEQ ID NO: 13319 - RNA, 14 nt, Artificial Sequence
  Description of Artificial Sequence: Synthetic oligonucleotide
uaaaauuuucuucu

SEQ ID NO: 13320 - RNA, 14 nt, Artificial Sequence
  Description of Artificial Sequence: Synthetic oligonucleotide
cuaaaauuuucuuc

SEQ ID NO: 13321 - RNA, 14 nt, Artificial Sequence
  Description of Artificial Sequence: Synthetic oligonucleotide
ucuaaaauuuucuu

SEQ ID NO: 13322 - RNA, 14 nt, Artificial Sequence
  Description of Artificial Sequence: Synthetic oligonucleotide
uucuaaaauuuucu

SEQ ID NO: 13323 - RNA, 14 nt, Artificial Sequence
  Description of Artificial Sequence: Synthetic oligonucleotide
cuucuaaaauuuuc

SEQ ID NO: 13324 - RNA, 14 nt, Artificial Sequence
  Description of Artificial Sequence: Synthetic oligonucleotide
ucuucuaaaauuuu

SEQ ID NO: 13325 - RNA, 14 nt, Artificial Sequence
  Description of Artificial Sequence: Synthetic oligonucleotide
uucuucuaaaauuu

SEQ ID NO: 13326 - RNA, 14 nt, Artificial Sequence
  Description of Artificial Sequence: Synthetic oligonucleotide
cuucuucuaaaauu

SEQ ID NO: 13327 - RNA, 14 nt, Artificial Sequence
  Description of Artificial Sequence: Synthetic oligonucleotide
gcuucuucuaaaau

SEQ ID NO: 13328 - RNA, 14 nt, Artificial Sequence
  Description of Artificial Sequence: Synthetic oligonucleotide
agcuucuucuaaaa

SEQ ID NO: 13329 - RNA, 14 nt, Artificial Sequence
  Description of Artificial Sequence: Synthetic oligonucleotide
gagcuucuucuaaa

SEQ ID NO: 13330 - RNA, 14 nt, Artificial Sequence
  Description of Artificial Sequence: Synthetic oligonucleotide
ugagcuucuucuaa

SEQ ID NO: 13331 - RNA, 14 nt, Artificial Sequence
  Description of Artificial Sequence: Synthetic oligonucleotide
augagcuucuucua

SEQ ID NO: 13332 - RNA, 14 nt, Artificial Sequence
  Description of Artificial Sequence: Synthetic oligonucleotide
caugagcuucuucu

SEQ ID NO: 13333 - RNA, 14 nt, Artificial Sequence
  Description of Artificial Sequence: Synthetic oligonucleotide
ucaugagcuucuuc

SEQ ID NO: 13334 - RNA, 14 nt, Artificial Sequence
  Description of Artificial Sequence: Synthetic oligonucleotide
uucaugagcuucuu

SEQ ID NO: 13335 - RNA, 14 nt, Artificial Sequence
  Description of Artificial Sequence: Synthetic oligonucleotide
auucaugagcuucu

SEQ ID NO: 13336 - RNA, 14 nt, Artificial Sequence
  Description of Artificial Sequence: Synthetic oligonucleotide
aauucaugagcuuc

SEQ ID NO: 13337 - RNA, 14 nt, Artificial Sequence
  Description of Artificial Sequence: Synthetic oligonucleotide
caauucaugagcuu

SEQ ID NO: 13338 - RNA, 14 nt, Artificial Sequence
  Description of Artificial Sequence: Synthetic oligonucleotide
ucaauucaugagcu

SEQ ID NO: 13339 - RNA, 14 nt, Artificial Sequence
  Description of Artificial Sequence: Synthetic oligonucleotide
cucaauucaugagc

SEQ ID NO: 13340 - RNA, 14 nt, Artificial Sequence
  Description of Artificial Sequence: Synthetic oligonucleotide
acucaauucaugag

SEQ ID NO: 13341 - RNA, 14 nt, Artificial Sequence
  Description of Artificial Sequence: Synthetic oligonucleotide
cacucaauucauga

SEQ ID NO: 13342 - RNA, 14 nt, Artificial Sequence
  Description of Artificial Sequence: Synthetic oligonucleotide
ucacucaauucaug

SEQ ID NO: 13343 - RNA, 14 nt, Artificial Sequence
  Description of Artificial Sequence: Synthetic oligonucleotide
uucacucaauucau

SEQ ID NO: 13344 - RNA, 14 nt, Artificial Sequence
  Description of Artificial Sequence: Synthetic oligonucleotide
cuucacucaauuca

SEQ ID NO: 13345 - RNA, 14 nt, Artificial Sequence
  Description of Artificial Sequence: Synthetic oligonucleotide
ucuucacucaauuc

SEQ ID NO: 13346 - RNA, 14 nt, Artificial Sequence
  Description of Artificial Sequence: Synthetic oligonucleotide
aucuucacucaauu

SEQ ID NO: 13347 - RNA, 14 nt, Artificial Sequence
  Description of Artificial Sequence: Synthetic oligonucleotide
gaucuucacucaau

SEQ ID NO: 13348 - RNA, 14 nt, Artificial Sequence
  Description of Artificial Sequence: Synthetic oligonucleotide
ugaucuucacucaa

SEQ ID NO: 13349 - RNA, 14 nt, Artificial Sequence
  Description of Artificial Sequence: Synthetic oligonucleotide
gugaucuucacuca

SEQ ID NO: 13350 - RNA, 14 nt, Artificial Sequence
  Description of Artificial Sequence: Synthetic oligonucleotide
agugaucuucacuc

SEQ ID NO: 13351 - RNA, 14 nt, Artificial Sequence
  Description of Artificial Sequence: Synthetic oligonucleotide
uagugaucuucacu

SEQ ID NO: 13352 - RNA, 14 nt, Artificial Sequence
  Description of Artificial Sequence: Synthetic oligonucleotide
auagugaucuucac

SEQ ID NO: 13353 - RNA, 14 nt, Artificial Sequence
  Description of Artificial Sequence: Synthetic oligonucleotide
uauagugaucuuca

SEQ ID NO: 13354 - RNA, 14 nt, Artificial Sequence
  Description of Artificial Sequence: Synthetic oligonucleotide
uuauagugaucuuc

SEQ ID NO: 13355 - RNA, 14 nt, Artificial Sequence
  Description of Artificial Sequence: Synthetic oligonucleotide
cuuauagugaucuu

SEQ ID NO: 13356 - RNA, 14 nt, Artificial Sequence
  Description of Artificial Sequence: Synthetic oligonucleotide
ucuuauagugaucu

SEQ ID NO: 13357 - RNA, 14 nt, Artificial Sequence
  Description of Artificial Sequence: Synthetic oligonucleotide
uucuuauagugauc

SEQ ID NO: 13358 - RNA, 14 nt, Artificial Sequence
  Description of Artificial Sequence: Synthetic oligonucleotide
uuucuuauagugau

SEQ ID NO: 13359 - RNA, 14 nt, Artificial Sequence
  Description of Artificial Sequence: Synthetic oligonucleotide
auuucuuauaguga

SEQ ID NO: 13360 - RNA, 14 nt, Artificial Sequence
  Description of Artificial Sequence: Synthetic oligonucleotide
uauuucuuauagug

SEQ ID NO: 13361 - RNA, 14 nt, Artificial Sequence
  Description of Artificial Sequence: Synthetic oligonucleotide
auauuucuuauagu

SEQ ID NO: 13362 - RNA, 14 nt, Artificial Sequence
  Description of Artificial Sequence: Synthetic oligonucleotide
aauauuucuuauag

SEQ ID NO: 13363 - RNA, 14 nt, Artificial Sequence
  Description of Artificial Sequence: Synthetic oligonucleotide
aaauauuucuuaua

SEQ ID NO: 13364 - RNA, 14 nt, Artificial Sequence
  Description of Artificial Sequence: Synthetic oligonucleotide
caaauauuucuuau

SEQ ID NO: 13365 - RNA, 14 nt, Artificial Sequence
  Description of Artificial Sequence: Synthetic oligonucleotide
ccaaauauuucuua

SEQ ID NO: 13366 - RNA, 14 nt, Artificial Sequence
  Description of Artificial Sequence: Synthetic oligonucleotide
gccaaauauuucuu

SEQ ID NO: 13367 - RNA, 14 nt, Artificial Sequence
  Description of Artificial Sequence: Synthetic oligonucleotide
ugccaaauauuucu

SEQ ID NO: 13368 - RNA, 14 nt, Artificial Sequence
  Description of Artificial Sequence: Synthetic oligonucleotide
uugccaaauauuuc

SEQ ID NO: 13369 - RNA, 14 nt, Artificial Sequence
  Description of Artificial Sequence: Synthetic oligonucleotide
uuugccaaauauuu

SEQ ID NO: 13370 - RNA, 14 nt, Artificial Sequence
  Description of Artificial Sequence: Synthetic oligonucleotide
uuuugccaaauauu

SEQ ID NO: 13371 - RNA, 14 nt, Artificial Sequence
  Description of Artificial Sequence: Synthetic oligonucleotide
guuuugccaaauau

SEQ ID NO: 13372 - RNA, 14 nt, Artificial Sequence
  Description of Artificial Sequence: Synthetic oligonucleotide
aguuuugccaaaua

SEQ ID NO: 13373 - RNA, 14 nt, Artificial Sequence
  Description of Artificial Sequence: Synthetic oligonucleotide
gaguuuugccaaau

SEQ ID NO: 13374 - RNA, 14 nt, Artificial Sequence
  Description of Artificial Sequence: Synthetic oligonucleotide
ugaguuuugccaaa

SEQ ID NO: 13375 - RNA, 14 nt, Artificial Sequence
  Description of Artificial Sequence: Synthetic oligonucleotide
cugaguuuugccaa

SEQ ID NO: 13376 - RNA, 14 nt, Artificial Sequence
  Description of Artificial Sequence: Synthetic oligonucleotide
ccugaguuuugcca

SEQ ID NO: 13377 - RNA, 14 nt, Artificial Sequence
  Description of Artificial Sequence: Synthetic oligonucleotide
accugaguuuugcc

SEQ ID NO: 13378 - RNA, 14 nt, Artificial Sequence
  Description of Artificial Sequence: Synthetic oligonucleotide
gaccugaguuuugc

SEQ ID NO: 13379 - RNA, 14 nt, Artificial Sequence
  Description of Artificial Sequence: Synthetic oligonucleotide
agaccugaguuuug

SEQ ID NO: 13380 - RNA, 14 nt, Artificial Sequence
  Description of Artificial Sequence: Synthetic oligonucleotide
uagaccugaguuuu

SEQ ID NO: 13381 - RNA, 14 nt, Artificial Sequence
  Description of Artificial Sequence: Synthetic oligonucleotide
auagaccugaguuu

SEQ ID NO: 13382 - RNA, 14 nt, Artificial Sequence
  Description of Artificial Sequence: Synthetic oligonucleotide
aauagaccugaguu

SEQ ID NO: 13383 - RNA, 14 nt, Artificial Sequence
  Description of Artificial Sequence: Synthetic oligonucleotide
uaauagaccugagu

SEQ ID NO: 13384 - RNA, 14 nt, Artificial Sequence
  Description of Artificial Sequence: Synthetic oligonucleotide
uuaauagaccugag

SEQ ID NO: 13385 - RNA, 14 nt, Artificial Sequence
  Description of Artificial Sequence: Synthetic oligonucleotide
auuaauagaccuga

SEQ ID NO: 13386 - RNA, 14 nt, Artificial Sequence
  Description of Artificial Sequence: Synthetic oligonucleotide
gauuaauagaccug

SEQ ID NO: 13387 - RNA, 14 nt, Artificial Sequence
  Description of Artificial Sequence: Synthetic oligonucleotide
ggauuaauagaccu

SEQ ID NO: 13388 - RNA, 14 nt, Artificial Sequence
  Description of Artificial Sequence: Synthetic oligonucleotide
uggauuaauagacc

SEQ ID NO: 13389 - RNA, 14 nt, Artificial Sequence
  Description of Artificial Sequence: Synthetic oligonucleotide
guggauuaauagac

SEQ ID NO: 13390 - RNA, 14 nt, Artificial Sequence
  Description of Artificial Sequence: Synthetic oligonucleotide
gguggauuaauaga

SEQ ID NO: 13391 - RNA, 14 nt, Artificial Sequence
  Description of Artificial Sequence: Synthetic oligonucleotide
ugguggauuaauag

SEQ ID NO: 13392 - RNA, 14 nt, Artificial Sequence
  Description of Artificial Sequence: Synthetic oligonucleotide
augguggauuaaua

SEQ ID NO: 13393 - RNA, 14 nt, Artificial Sequence
  Description of Artificial Sequence: Synthetic oligonucleotide
caugguggauuaau

SEQ ID NO: 13394 - RNA, 14 nt, Artificial Sequence
  Description of Artificial Sequence: Synthetic oligonucleotide
acaugguggauuaa

SEQ ID NO: 13395 - RNA, 14 nt, Artificial Sequence
  Description of Artificial Sequence: Synthetic oligonucleotide
cacaugguggauua

SEQ ID NO: 13396 - RNA, 14 nt, Artificial Sequence
  Description of Artificial Sequence: Synthetic oligonucleotide
acacaugguggauu

SEQ ID NO: 13397 - RNA, 14 nt, Artificial Sequence
  Description of Artificial Sequence: Synthetic oligonucleotide
cacacaugguggau

SEQ ID NO: 13398 - RNA, 14 nt, Artificial Sequence
  Description of Artificial Sequence: Synthetic oligonucleotide
gcacacauggugga

SEQ ID NO: 13399 - RNA, 14 nt, Artificial Sequence
  Description of Artificial Sequence: Synthetic oligonucleotide
ggcacacauggugg

SEQ ID NO: 13400 - RNA, 14 nt, Artificial Sequence
  Description of Artificial Sequence: Synthetic oligonucleotide
aggcacacauggug

SEQ ID NO: 13401 - RNA, 14 nt, Artificial Sequence
  Description of Artificial Sequence: Synthetic oligonucleotide
aaggcacacauggu

SEQ ID NO: 13402 - RNA, 14 nt, Artificial Sequence
  Description of Artificial Sequence: Synthetic oligonucleotide
aaaggcacacaugg

SEQ ID NO: 13403 - RNA, 14 nt, Artificial Sequence
  Description of Artificial Sequence: Synthetic oligonucleotide
gaaaggcacacaug

SEQ ID NO: 13404 - RNA, 14 nt, Artificial Sequence
  Description of Artificial Sequence: Synthetic oligonucleotide
agaaaggcacacau

SEQ ID NO: 13405 - DNA, 14 bp, Artificial Sequence
  Description of Artificial Sequence: Synthetic oligonucleotide
aagaaaggcacaca

SEQ ID NO: 13406 - DNA, 14 bp, Artificial Sequence
  Description of Artificial Sequence: Synthetic oligonucleotide
aaagaaaggcacac

SEQ ID NO: 13407 - DNA, 14 bp, Artificial Sequence
  Description of Artificial Sequence: Synthetic oligonucleotide
caaagaaaggcaca

SEQ ID NO: 13408 - DNA, 14 bp, Artificial Sequence
  Description of Artificial Sequence: Synthetic oligonucleotide
ccaaagaaaggcac

SEQ ID NO: 13409 - RNA, 14 nt, Artificial Sequence
  Description of Artificial Sequence: Synthetic oligonucleotide
uccaaagaaaggca

SEQ ID NO: 13410 - RNA, 14 nt, Artificial Sequence
  Description of Artificial Sequence: Synthetic oligonucleotide
uuccaaagaaaggc

SEQ ID NO: 13411 - RNA, 14 nt, Artificial Sequence
  Description of Artificial Sequence: Synthetic oligonucleotide
auuccaaagaaagg

SEQ ID NO: 13412 - RNA, 14 nt, Artificial Sequence
  Description of Artificial Sequence: Synthetic oligonucleotide
aauuccaaagaaag

SEQ ID NO: 13413 - RNA, 14 nt, Artificial Sequence
  Description of Artificial Sequence: Synthetic oligonucleotide
aaauuccaaagaaa

SEQ ID NO: 13414 - RNA, 14 nt, Artificial Sequence
  Description of Artificial Sequence: Synthetic oligonucleotide
uaaauuccaaagaa

SEQ ID NO: 13415 - RNA, 14 nt, Artificial Sequence
  Description of Artificial Sequence: Synthetic oligonucleotide
auaaauuccaaaga

SEQ ID NO: 13416 - RNA, 14 nt, Artificial Sequence
  Description of Artificial Sequence: Synthetic oligonucleotide
gauaaauuccaaag

SEQ ID NO: 13417 - RNA, 14 nt, Artificial Sequence
  Description of Artificial Sequence: Synthetic oligonucleotide
agauaaauuccaaa

SEQ ID NO: 13418 - RNA, 14 nt, Artificial Sequence
  Description of Artificial Sequence: Synthetic oligonucleotide
gagauaaauuccaa

SEQ ID NO: 13419 - RNA, 14 nt, Artificial Sequence
  Description of Artificial Sequence: Synthetic oligonucleotide
ugagauaaauucca

SEQ ID NO: 13420 - RNA, 14 nt, Artificial Sequence
  Description of Artificial Sequence: Synthetic oligonucleotide
gugagauaaauucc

SEQ ID NO: 13421 - RNA, 14 nt, Artificial Sequence
  Description of Artificial Sequence: Synthetic oligonucleotide
agugagauaaauuc

SEQ ID NO: 13422 - RNA, 14 nt, Artificial Sequence
  Description of Artificial Sequence: Synthetic oligonucleotide
uagugagauaaauu

SEQ ID NO: 13423 - RNA, 14 nt, Artificial Sequence
  Description of Artificial Sequence: Synthetic oligonucleotide
uuagugagauaaau

SEQ ID NO: 13424 - RNA, 14 nt, Artificial Sequence
  Description of Artificial Sequence: Synthetic oligonucleotide
auuagugagauaaa

SEQ ID NO: 13425 - RNA, 14 nt, Artificial Sequence
  Description of Artificial Sequence: Synthetic oligonucleotide
uauuagugagauaa

SEQ ID NO: 13426 - RNA, 14 nt, Artificial Sequence
  Description of Artificial Sequence: Synthetic oligonucleotide
auauuagugagaua

SEQ ID NO: 13427 - RNA, 14 nt, Artificial Sequence
  Description of Artificial Sequence: Synthetic oligonucleotide
gauauuagugagau

SEQ ID NO: 13428 - RNA, 14 nt, Artificial Sequence
  Description of Artificial Sequence: Synthetic oligonucleotide
agauauuagugaga

SEQ ID NO: 13429 - RNA, 14 nt, Artificial Sequence
  Description of Artificial Sequence: Synthetic oligonucleotide
aagauauuagugag

SEQ ID NO: 13430 - RNA, 14 nt, Artificial Sequence
  Description of Artificial Sequence: Synthetic oligonucleotide
caagauauuaguga

SEQ ID NO: 13431 - RNA, 14 nt, Artificial Sequence
  Description of Artificial Sequence: Synthetic oligonucleotide
ucaagauauuagug

SEQ ID NO: 13432 - RNA, 14 nt, Artificial Sequence
  Description of Artificial Sequence: Synthetic oligonucleotide
uucaagauauuagu

SEQ ID NO: 13433 - RNA, 14 nt, Artificial Sequence
  Description of Artificial Sequence: Synthetic oligonucleotide
uuucaagauauuag

SEQ ID NO: 13434 - RNA, 14 nt, Artificial Sequence
  Description of Artificial Sequence: Synthetic oligonucleotide
uuuucaagauauua

SEQ ID NO: 13435 - RNA, 14 nt, Artificial Sequence
  Description of Artificial Sequence: Synthetic oligonucleotide
guuuucaagauauu

SEQ ID NO: 13436 - RNA, 14 nt, Artificial Sequence
  Description of Artificial Sequence: Synthetic oligonucleotide
uguuuucaagauau

SEQ ID NO: 13437 - RNA, 14 nt, Artificial Sequence
  Description of Artificial Sequence: Synthetic oligonucleotide
cuguuuucaagaua

SEQ ID NO: 13438 - RNA, 14 nt, Artificial Sequence
  Description of Artificial Sequence: Synthetic oligonucleotide
ucuguuuucaagau

SEQ ID NO: 13439 - RNA, 14 nt, Artificial Sequence
  Description of Artificial Sequence: Synthetic oligonucleotide
uucuguuuucaaga

SEQ ID NO: 13440 - RNA, 14 nt, Artificial Sequence
  Description of Artificial Sequence: Synthetic oligonucleotide
cuucuguuuucaag

SEQ ID NO: 13441 - RNA, 14 nt, Artificial Sequence
  Description of Artificial Sequence: Synthetic oligonucleotide
ucuucuguuuucaa

SEQ ID NO: 13442 - RNA, 14 nt, Artificial Sequence
  Description of Artificial Sequence: Synthetic oligonucleotide
uucuucuguuuuca

SEQ ID NO: 13443 - RNA, 14 nt, Artificial Sequence
  Description of Artificial Sequence: Synthetic oligonucleotide
cuucuucuguuuuc

SEQ ID NO: 13444 - RNA, 14 nt, Artificial Sequence
  Description of Artificial Sequence: Synthetic oligonucleotide
ccuucuucuguuuu

SEQ ID NO: 13445 - RNA, 14 nt, Artificial Sequence
  Description of Artificial Sequence: Synthetic oligonucleotide
gccuucuucuguuu

SEQ ID NO: 13446 - RNA, 14 nt, Artificial Sequence
  Description of Artificial Sequence: Synthetic oligonucleotide
ugccuucuucuguu

SEQ ID NO: 13447 - RNA, 14 nt, Artificial Sequence
  Description of Artificial Sequence: Synthetic oligonucleotide
uugccuucuucugu

SEQ ID NO: 13448 - RNA, 14 nt, Artificial Sequence
  Description of Artificial Sequence: Synthetic oligonucleotide
guugccuucuucug

SEQ ID NO: 13449 - RNA, 14 nt, Artificial Sequence
  Description of Artificial Sequence: Synthetic oligonucleotide
gguugccuucuucu

SEQ ID NO: 13450 - RNA, 14 nt, Artificial Sequence
  Description of Artificial Sequence: Synthetic oligonucleotide
ggguugccuucuuc

SEQ ID NO: 13451 - RNA, 14 nt, Artificial Sequence
  Description of Artificial Sequence: Synthetic oligonucleotide
aggguugccuucuu

SEQ ID NO: 13452 - RNA, 14 nt, Artificial Sequence
  Description of Artificial Sequence: Synthetic oligonucleotide
caggguugccuucu

SEQ ID NO: 13453 - RNA, 14 nt, Artificial Sequence
  Description of Artificial Sequence: Synthetic oligonucleotide
ucaggguugccuuc

SEQ ID NO: 13454 - RNA, 14 nt, Artificial Sequence
  Description of Artificial Sequence: Synthetic oligonucleotide
cucaggguugccuu

SEQ ID NO: 13455 - RNA, 14 nt, Artificial Sequence
  Description of Artificial Sequence: Synthetic oligonucleotide
ccucaggguugccu

SEQ ID NO: 13456 - RNA, 14 nt, Artificial Sequence
  Description of Artificial Sequence: Synthetic oligonucleotide
accucaggguugcc

SEQ ID NO: 13457 - RNA, 14 nt, Artificial Sequence
  Description of Artificial Sequence: Synthetic oligonucleotide
gaccucaggguugc

SEQ ID NO: 13458 - RNA, 14 nt, Artificial Sequence
  Description of Artificial Sequence: Synthetic oligonucleotide
ggaccucaggguug

SEQ ID NO: 13459 - RNA, 14 nt, Artificial Sequence
  Description of Artificial Sequence: Synthetic oligonucleotide
aggaccucaggguu

SEQ ID NO: 13460 - RNA, 14 nt, Artificial Sequence
  Description of Artificial Sequence: Synthetic oligonucleotide
uaggaccucagggu

SEQ ID NO: 13461 - RNA, 14 nt, Artificial Sequence
  Description of Artificial Sequence: Synthetic oligonucleotide
uuaggaccucaggg

SEQ ID NO: 13462 - RNA, 14 nt, Artificial Sequence
  Description of Artificial Sequence: Synthetic oligonucleotide
uuuaggaccucagg

SEQ ID NO: 13463 - RNA, 14 nt, Artificial Sequence
  Description of Artificial Sequence: Synthetic oligonucleotide
uuuuaggaccucag

SEQ ID NO: 13464 - RNA, 14 nt, Artificial Sequence
  Description of Artificial Sequence: Synthetic oligonucleotide
uuuuuaggaccuca

SEQ ID NO: 13465 - RNA, 14 nt, Artificial Sequence
  Description of Artificial Sequence: Synthetic oligonucleotide
cuuuuuaggaccuc

SEQ ID NO: 13466 - RNA, 14 nt, Artificial Sequence
  Description of Artificial Sequence: Synthetic oligonucleotide
ucuuuuuaggaccu

SEQ ID NO: 13467 - RNA, 14 nt, Artificial Sequence
  Description of Artificial Sequence: Synthetic oligonucleotide
gucuuuuuaggacc

SEQ ID NO: 13468 - RNA, 14 nt, Artificial Sequence
  Description of Artificial Sequence: Synthetic oligonucleotide
ugucuuuuuaggac

SEQ ID NO: 13469 - RNA, 14 nt, Artificial Sequence
  Description of Artificial Sequence: Synthetic oligonucleotide
augucuuuuuagga

SEQ ID NO: 13470 - RNA, 14 nt, Artificial Sequence
  Description of Artificial Sequence: Synthetic oligonucleotide
caugucuuuuuagg

SEQ ID NO: 13471 - RNA, 14 nt, Artificial Sequence
  Description of Artificial Sequence: Synthetic oligonucleotide
ccaugucuuuuuag

SEQ ID NO: 13472 - RNA, 14 nt, Artificial Sequence
  Description of Artificial Sequence: Synthetic oligonucleotide
uccaugucuuuuua

SEQ ID NO: 13473 - RNA, 14 nt, Artificial Sequence
  Description of Artificial Sequence: Synthetic oligonucleotide
uuccaugucuuuuu

SEQ ID NO: 13474 - RNA, 14 nt, Artificial Sequence
  Description of Artificial Sequence: Synthetic oligonucleotide
uuuccaugucuuuu

SEQ ID NO: 13475 - RNA, 14 nt, Artificial Sequence
  Description of Artificial Sequence: Synthetic oligonucleotide
uuuuccaugucuuu

SEQ ID NO: 13476 - RNA, 14 nt, Artificial Sequence
  Description of Artificial Sequence: Synthetic oligonucleotide
cuuuuccaugucuu

SEQ ID NO: 13477 - RNA, 14 nt, Artificial Sequence
  Description of Artificial Sequence: Synthetic oligonucleotide
ucuuuuccaugucu

SEQ ID NO: 13478 - RNA, 14 nt, Artificial Sequence
  Description of Artificial Sequence: Synthetic oligonucleotide
cucuuuuccauguc

SEQ ID NO: 13479 - RNA, 14 nt, Artificial Sequence
  Description of Artificial Sequence: Synthetic oligonucleotide
gcucuuuuccaugu

SEQ ID NO: 13480 - RNA, 14 nt, Artificial Sequence
  Description of Artificial Sequence: Synthetic oligonucleotide
agcucuuuuccaug

SEQ ID NO: 13481 - RNA, 14 nt, Artificial Sequence
  Description of Artificial Sequence: Synthetic oligonucleotide
aagcucuuuuccau

SEQ ID NO: 13482 - RNA, 14 nt, Artificial Sequence
  Description of Artificial Sequence: Synthetic oligonucleotide
uaagcucuuuucca

SEQ ID NO: 13483 - RNA, 14 nt, Artificial Sequence
  Description of Artificial Sequence: Synthetic oligonucleotide
auaagcucuuuucc

SEQ ID NO: 13484 - RNA, 14 nt, Artificial Sequence
  Description of Artificial Sequence: Synthetic oligonucleotide
uauaagcucuuuuc

SEQ ID NO: 13485 - RNA, 14 nt, Artificial Sequence
  Description of Artificial Sequence: Synthetic oligonucleotide
uuauaagcucuuuu

SEQ ID NO: 13486 - RNA, 14 nt, Artificial Sequence
  Description of Artificial Sequence: Synthetic oligonucleotide
uuuauaagcucuuu

SEQ ID NO: 13487 - RNA, 14 nt, Artificial Sequence
  Description of Artificial Sequence: Synthetic oligonucleotide
guuuauaagcucuu

SEQ ID NO: 13488 - RNA, 14 nt, Artificial Sequence
  Description of Artificial Sequence: Synthetic oligonucleotide
aguuuauaagcucu

SEQ ID NO: 13489 - RNA, 14 nt, Artificial Sequence
  Description of Artificial Sequence: Synthetic oligonucleotide
aaguuuauaagcuc

SEQ ID NO: 13490 - RNA, 14 nt, Artificial Sequence
  Description of Artificial Sequence: Synthetic oligonucleotide
aaaguuuauaagcu

SEQ ID NO: 13491 - RNA, 14 nt, Artificial Sequence
  Description of Artificial Sequence: Synthetic oligonucleotide
uaaaguuuauaagc

SEQ ID NO: 13492 - RNA, 14 nt, Artificial Sequence
  Description of Artificial Sequence: Synthetic oligonucleotide
cuaaaguuuauaag

SEQ ID NO: 13493 - RNA, 14 nt, Artificial Sequence
  Description of Artificial Sequence: Synthetic oligonucleotide
gcuaaaguuuauaa

SEQ ID NO: 13494 - RNA, 14 nt, Artificial Sequence
  Description of Artificial Sequence: Synthetic oligonucleotide
ugcuaaaguuuaua

SEQ ID NO: 13495 - RNA, 14 nt, Artificial Sequence
  Description of Artificial Sequence: Synthetic oligonucleotide
uugcuaaaguuuau

SEQ ID NO: 13496 - RNA, 14 nt, Artificial Sequence
  Description of Artificial Sequence: Synthetic oligonucleotide
uuugcuaaaguuua

SEQ ID NO: 13497 - RNA, 14 nt, Artificial Sequence
  Description of Artificial Sequence: Synthetic oligonucleotide
uuuugcuaaaguuu

SEQ ID NO: 13498 - RNA, 14 nt, Artificial Sequence
  Description of Artificial Sequence: Synthetic oligonucleotide
cuuuugcuaaaguu

SEQ ID NO: 13499 - RNA, 14 nt, Artificial Sequence
  Description of Artificial Sequence: Synthetic oligonucleotide
ccuuuugcuaaagu

SEQ ID NO: 13500 - RNA, 14 nt, Artificial Sequence
  Description of Artificial Sequence: Synthetic oligonucleotide
uccuuuugcuaaag

SEQ ID NO: 13501 - RNA, 14 nt, Artificial Sequence
  Description of Artificial Sequence: Synthetic oligonucleotide
cuccuuuugcuaaa

SEQ ID NO: 13502 - RNA, 14 nt, Artificial Sequence
  Description of Artificial Sequence: Synthetic oligonucleotide
ccuccuuuugcuaa

SEQ ID NO: 13503 - RNA, 14 nt, Artificial Sequence
  Description of Artificial Sequence: Synthetic oligonucleotide
uccuccuuuugcua

SEQ ID NO: 13504 - RNA, 14 nt, Artificial Sequence
  Description of Artificial Sequence: Synthetic oligonucleotide
uuccuccuuuugcu

SEQ ID NO: 13505 - RNA, 14 nt, Artificial Sequence
  Description of Artificial Sequence: Synthetic oligonucleotide
uuuccuccuuuugc

SEQ ID NO: 13506 - RNA, 14 nt, Artificial Sequence
  Description of Artificial Sequence: Synthetic oligonucleotide
cuuuccuccuuuug

SEQ ID NO: 13507 - RNA, 14 nt, Artificial Sequence
  Description of Artificial Sequence: Synthetic oligonucleotide
acuuuccuccuuuu

SEQ ID NO: 13508 - RNA, 14 nt, Artificial Sequence
  Description of Artificial Sequence: Synthetic oligonucleotide
uacuuuccuccuuu

SEQ ID NO: 13509 - RNA, 14 nt, Artificial Sequence
  Description of Artificial Sequence: Synthetic oligonucleotide
cuacuuuccuccuu

SEQ ID NO: 13510 - RNA, 14 nt, Artificial Sequence
  Description of Artificial Sequence: Synthetic oligonucleotide
gcuacuuuccuccu

SEQ ID NO: 13511 - RNA, 14 nt, Artificial Sequence
  Description of Artificial Sequence: Synthetic oligonucleotide
ugcuacuuuccucc

SEQ ID NO: 13512 - RNA, 14 nt, Artificial Sequence
  Description of Artificial Sequence: Synthetic oligonucleotide
cugcuacuuuccuc

SEQ ID NO: 13513 - RNA, 14 nt, Artificial Sequence
  Description of Artificial Sequence: Synthetic oligonucleotide
ucugcuacuuuccu

SEQ ID NO: 13514 - RNA, 14 nt, Artificial Sequence
  Description of Artificial Sequence: Synthetic oligonucleotide
uucugcuacuuucc

SEQ ID NO: 13515 - RNA, 14 nt, Artificial Sequence
  Description of Artificial Sequence: Synthetic oligonucleotide
uuucugcuacuuuc

SEQ ID NO: 13516 - RNA, 14 nt, Artificial Sequence
  Description of Artificial Sequence: Synthetic oligonucleotide
auuucugcuacuuu

SEQ ID NO: 13517 - RNA, 14 nt, Artificial Sequence
  Description of Artificial Sequence: Synthetic oligonucleotide
uauuucugcuacuu

SEQ ID NO: 13518 - RNA, 14 nt, Artificial Sequence
  Description of Artificial Sequence: Synthetic oligonucleotide
uuauuucugcuacu

SEQ ID NO: 13519 - RNA, 14 nt, Artificial Sequence
  Description of Artificial Sequence: Synthetic oligonucleotide
guuauuucugcuac

SEQ ID NO: 13520 - RNA, 14 nt, Artificial Sequence
  Description of Artificial Sequence: Synthetic oligonucleotide
uguuauuucugcua

SEQ ID NO: 13521 - RNA, 14 nt, Artificial Sequence
  Description of Artificial Sequence: Synthetic oligonucleotide
cuguuauuucugcu

SEQ ID NO: 13522 - RNA, 14 nt, Artificial Sequence
  Description of Artificial Sequence: Synthetic oligonucleotide
ccuguuauuucugc

SEQ ID NO: 13523 - RNA, 14 nt, Artificial Sequence
  Description of Artificial Sequence: Synthetic oligonucleotide
uccuguuauuucug

SEQ ID NO: 13524 - RNA, 14 nt, Artificial Sequence
  Description of Artificial Sequence: Synthetic oligonucleotide
cuccuguuauuucu

SEQ ID NO: 13525 - RNA, 14 nt, Artificial Sequence
  Description of Artificial Sequence: Synthetic oligonucleotide
ucuccuguuauuuc

SEQ ID NO: 13526 - RNA, 14 nt, Artificial Sequence
  Description of Artificial Sequence: Synthetic oligonucleotide
cucuccuguuauuu

SEQ ID NO: 13527 - RNA, 14 nt, Artificial Sequence
  Description of Artificial Sequence: Synthetic oligonucleotide
ucucuccuguuauu

SEQ ID NO: 13528 - RNA, 14 nt, Artificial Sequence
  Description of Artificial Sequence: Synthetic oligonucleotide
aucucuccuguuau

SEQ ID NO: 13529 - RNA, 14 nt, Artificial Sequence
  Description of Artificial Sequence: Synthetic oligonucleotide
gaucucuccuguua

SEQ ID NO: 13530 - RNA, 14 nt, Artificial Sequence
  Description of Artificial Sequence: Synthetic oligonucleotide
ggaucucuccuguu

SEQ ID NO: 13531 - RNA, 14 nt, Artificial Sequence
  Description of Artificial Sequence: Synthetic oligonucleotide
uggaucucuccugu

SEQ ID NO: 13532 - RNA, 14 nt, Artificial Sequence
  Description of Artificial Sequence: Synthetic oligonucleotide
cuggaucucuccug

SEQ ID NO: 13533 - RNA, 14 nt, Artificial Sequence
  Description of Artificial Sequence: Synthetic oligonucleotide
gcuggaucucuccu

SEQ ID NO: 13534 - RNA, 14 nt, Artificial Sequence
  Description of Artificial Sequence: Synthetic oligonucleotide
ugcuggaucucucc

SEQ ID NO: 13535 - RNA, 14 nt, Artificial Sequence
  Description of Artificial Sequence: Synthetic oligonucleotide
cugcuggaucucuc

SEQ ID NO: 13536 - RNA, 14 nt, Artificial Sequence
  Description of Artificial Sequence: Synthetic oligonucleotide
acugcuggaucucu

SEQ ID NO: 13537 - RNA, 14 nt, Artificial Sequence
  Description of Artificial Sequence: Synthetic oligonucleotide
uacugcuggaucuc

SEQ ID NO: 13538 - RNA, 14 nt, Artificial Sequence
  Description of Artificial Sequence: Synthetic oligonucleotide
guacugcuggaucu

SEQ ID NO: 13539 - RNA, 14 nt, Artificial Sequence
  Description of Artificial Sequence: Synthetic oligonucleotide
gguacugcuggauc

SEQ ID NO: 13540 - RNA, 14 nt, Artificial Sequence
  Description of Artificial Sequence: Synthetic oligonucleotide
ugguacugcuggau

SEQ ID NO: 13541 - RNA, 14 nt, Artificial Sequence
  Description of Artificial Sequence: Synthetic oligonucleotide
uugguacugcugga

SEQ ID NO: 13542 - RNA, 14 nt, Artificial Sequence
  Description of Artificial Sequence: Synthetic oligonucleotide
uuugguacugcugg

SEQ ID NO: 13543 - RNA, 14 nt, Artificial Sequence
  Description of Artificial Sequence: Synthetic oligonucleotide
uuuugguacugcug

SEQ ID NO: 13544 - RNA, 14 nt, Artificial Sequence
  Description of Artificial Sequence: Synthetic oligonucleotide
auuuugguacugcu

SEQ ID NO: 13545 - RNA, 14 nt, Artificial Sequence
  Description of Artificial Sequence: Synthetic oligonucleotide
gauuuugguacugc

SEQ ID NO: 13546 - RNA, 14 nt, Artificial Sequence
  Description of Artificial Sequence: Synthetic oligonucleotide
ugauuuugguacug

SEQ ID NO: 13547 - RNA, 14 nt, Artificial Sequence
  Description of Artificial Sequence: Synthetic oligonucleotide
cugauuuugguacu

SEQ ID NO: 13548 - RNA, 14 nt, Artificial Sequence
  Description of Artificial Sequence: Synthetic oligonucleotide
gcugauuuugguac

SEQ ID NO: 13549 - RNA, 14 nt, Artificial Sequence
  Description of Artificial Sequence: Synthetic oligonucleotide
ggcugauuuuggua

SEQ ID NO: 13550 - RNA, 14 nt, Artificial Sequence
  Description of Artificial Sequence: Synthetic oligonucleotide
aggcugauuuuggu

SEQ ID NO: 13551 - RNA, 14 nt, Artificial Sequence
  Description of Artificial Sequence: Synthetic oligonucleotide
aaggcugauuuugg

SEQ ID NO: 13552 - RNA, 14 nt, Artificial Sequence
  Description of Artificial Sequence: Synthetic oligonucleotide
uaaggcugauuuug

SEQ ID NO: 13553 - RNA, 14 nt, Artificial Sequence
  Description of Artificial Sequence: Synthetic oligonucleotide
guaaggcugauuuu

SEQ ID NO: 13554 - RNA, 14 nt, Artificial Sequence
  Description of Artificial Sequence: Synthetic oligonucleotide
aguaaggcugauuu

SEQ ID NO: 13555 - RNA, 14 nt, Artificial Sequence
  Description of Artificial Sequence: Synthetic oligonucleotide
caguaaggcugauu

SEQ ID NO: 13556 - RNA, 14 nt, Artificial Sequence
  Description of Artificial Sequence: Synthetic oligonucleotide
acaguaaggcugau

SEQ ID NO: 13557 - RNA, 14 nt, Artificial Sequence
  Description of Artificial Sequence: Synthetic oligonucleotide
aacaguaaggcuga

SEQ ID NO: 13558 - RNA, 14 nt, Artificial Sequence
  Description of Artificial Sequence: Synthetic oligonucleotide
aaacaguaaggcug

SEQ ID NO: 13559 - RNA, 14 nt, Artificial Sequence
  Description of Artificial Sequence: Synthetic oligonucleotide
uaaacaguaaggcu

SEQ ID NO: 13560 - RNA, 14 nt, Artificial Sequence
  Description of Artificial Sequence: Synthetic oligonucleotide
guaaacaguaaggc

SEQ ID NO: 13561 - RNA, 14 nt, Artificial Sequence
  Description of Artificial Sequence: Synthetic oligonucleotide
cguaaacaguaagg

SEQ ID NO: 13562 - RNA, 14 nt, Artificial Sequence
  Description of Artificial Sequence: Synthetic oligonucleotide
ucguaaacaguaag

SEQ ID NO: 13563 - RNA, 14 nt, Artificial Sequence
  Description of Artificial Sequence: Synthetic oligonucleotide
cucguaaacaguaa

SEQ ID NO: 13564 - RNA, 14 nt, Artificial Sequence
  Description of Artificial Sequence: Synthetic oligonucleotide
acucguaaacagua

SEQ ID NO: 13565 - RNA, 14 nt, Artificial Sequence
  Description of Artificial Sequence: Synthetic oligonucleotide
uacucguaaacagu

SEQ ID NO: 13566 - RNA, 14 nt, Artificial Sequence
  Description of Artificial Sequence: Synthetic oligonucleotide
cuacucguaaacag

SEQ ID NO: 13567 - RNA, 14 nt, Artificial Sequence
  Description of Artificial Sequence: Synthetic oligonucleotide
ucuacucguaaaca

SEQ ID NO: 13568 - RNA, 14 nt, Artificial Sequence
  Description of Artificial Sequence: Synthetic oligonucleotide
uucuacucguaaac

SEQ ID NO: 13569 - RNA, 14 nt, Artificial Sequence
  Description of Artificial Sequence: Synthetic oligonucleotide
auucuacucguaaa

SEQ ID NO: 13570 - RNA, 14 nt, Artificial Sequence
  Description of Artificial Sequence: Synthetic oligonucleotide
gauucuacucguaa

SEQ ID NO: 13571 - RNA, 14 nt, Artificial Sequence
  Description of Artificial Sequence: Synthetic oligonucleotide
ugauucuacucgua

SEQ ID NO: 13572 - RNA, 14 nt, Artificial Sequence
  Description of Artificial Sequence: Synthetic oligonucleotide
cugauucuacucgu

SEQ ID NO: 13573 - RNA, 14 nt, Artificial Sequence
  Description of Artificial Sequence: Synthetic oligonucleotide
ucugauucuacucg

SEQ ID NO: 13574 - RNA, 14 nt, Artificial Sequence
  Description of Artificial Sequence: Synthetic oligonucleotide
aucugauucuacuc

SEQ ID NO: 13575 - RNA, 14 nt, Artificial Sequence
  Description of Artificial Sequence: Synthetic oligonucleotide
uaucugauucuacu

SEQ ID NO: 13576 - RNA, 14 nt, Artificial Sequence
  Description of Artificial Sequence: Synthetic oligonucleotide
auaucugauucuac

SEQ ID NO: 13577 - RNA, 14 nt, Artificial Sequence
  Description of Artificial Sequence: Synthetic oligonucleotide
gauaucugauucua

SEQ ID NO: 13578 - RNA, 14 nt, Artificial Sequence
  Description of Artificial Sequence: Synthetic oligonucleotide
ugauaucugauucu

SEQ ID NO: 13579 - RNA, 14 nt, Artificial Sequence
  Description of Artificial Sequence: Synthetic oligonucleotide
uugauaucugauuc

SEQ ID NO: 13580 - RNA, 14 nt, Artificial Sequence
  Description of Artificial Sequence: Synthetic oligonucleotide
uuugauaucugauu

SEQ ID NO: 13581 - RNA, 14 nt, Artificial Sequence
  Description of Artificial Sequence: Synthetic oligonucleotide
uuuugauaucugau

SEQ ID NO: 13582 - RNA, 14 nt, Artificial Sequence
  Description of Artificial Sequence: Synthetic oligonucleotide
cuuuugauaucuga

SEQ ID NO: 13583 - RNA, 14 nt, Artificial Sequence
  Description of Artificial Sequence: Synthetic oligonucleotide
ccuuuugauaucug

SEQ ID NO: 13584 - RNA, 14 nt, Artificial Sequence
  Description of Artificial Sequence: Synthetic oligonucleotide
accuuuugauaucu

SEQ ID NO: 13585 - RNA, 14 nt, Artificial Sequence
  Description of Artificial Sequence: Synthetic oligonucleotide
aaccuuuugauauc

SEQ ID NO: 13586 - RNA, 14 nt, Artificial Sequence
  Description of Artificial Sequence: Synthetic oligonucleotide
gaaccuuuugauau

SEQ ID NO: 13587 - RNA, 14 nt, Artificial Sequence
  Description of Artificial Sequence: Synthetic oligonucleotide
agaaccuuuugaua

SEQ ID NO: 13588 - RNA, 14 nt, Artificial Sequence
  Description of Artificial Sequence: Synthetic oligonucleotide
aagaaccuuuugau

SEQ ID NO: 13589 - RNA, 14 nt, Artificial Sequence
  Description of Artificial Sequence: Synthetic oligonucleotide
aaagaaccuuuuga

SEQ ID NO: 13590 - RNA, 14 nt, Artificial Sequence
  Description of Artificial Sequence: Synthetic oligonucleotide
caaagaaccuuuug

SEQ ID NO: 13591 - RNA, 14 nt, Artificial Sequence
  Description of Artificial Sequence: Synthetic oligonucleotide
ucaaagaaccuuuu

SEQ ID NO: 13592 - RNA, 14 nt, Artificial Sequence
  Description of Artificial Sequence: Synthetic oligonucleotide
uucaaagaaccuuu

SEQ ID NO: 13593 - RNA, 14 nt, Artificial Sequence
  Description of Artificial Sequence: Synthetic oligonucleotide
uuucaaagaaccuu

SEQ ID NO: 13594 - RNA, 14 nt, Artificial Sequence
  Description of Artificial Sequence: Synthetic oligonucleotide
uuuucaaagaaccu

SEQ ID NO: 13595 - RNA, 14 nt, Artificial Sequence
  Description of Artificial Sequence: Synthetic oligonucleotide
guuuucaaagaacc

SEQ ID NO: 13596 - RNA, 14 nt, Artificial Sequence
  Description of Artificial Sequence: Synthetic oligonucleotide
aguuuucaaagaac

SEQ ID NO: 13597 - RNA, 14 nt, Artificial Sequence
  Description of Artificial Sequence: Synthetic oligonucleotide
aaguuuucaaagaa

SEQ ID NO: 13598 - RNA, 14 nt, Artificial Sequence
  Description of Artificial Sequence: Synthetic oligonucleotide
caaguuuucaaaga

SEQ ID NO: 13599 - RNA, 14 nt, Artificial Sequence
  Description of Artificial Sequence: Synthetic oligonucleotide
ucaaguuuucaaag

SEQ ID NO: 13600 - RNA, 14 nt, Artificial Sequence
  Description of Artificial Sequence: Synthetic oligonucleotide
uucaaguuuucaaa

SEQ ID NO: 13601 - RNA, 14 nt, Artificial Sequence
  Description of Artificial Sequence: Synthetic oligonucleotide
auucaaguuuucaa

SEQ ID NO: 13602 - RNA, 14 nt, Artificial Sequence
  Description of Artificial Sequence: Synthetic oligonucleotide
gauucaaguuuuca

SEQ ID NO: 13603 - RNA, 14 nt, Artificial Sequence
  Description of Artificial Sequence: Synthetic oligonucleotide
ggauucaaguuuuc

SEQ ID NO: 13604 - RNA, 14 nt, Artificial Sequence
  Description of Artificial Sequence: Synthetic oligonucleotide
cggauucaaguuuu

SEQ ID NO: 13605 - RNA, 14 nt, Artificial Sequence
  Description of Artificial Sequence: Synthetic oligonucleotide
ucggauucaaguuu

SEQ ID NO: 13606 - RNA, 14 nt, Artificial Sequence
  Description of Artificial Sequence: Synthetic oligonucleotide
aucggauucaaguu

SEQ ID NO: 13607 - RNA, 14 nt, Artificial Sequence
  Description of Artificial Sequence: Synthetic oligonucleotide
caucggauucaagu

SEQ ID NO: 13608 - RNA, 14 nt, Artificial Sequence
  Description of Artificial Sequence: Synthetic oligonucleotide
ccaucggauucaag

SEQ ID NO: 13609 - RNA, 14 nt, Artificial Sequence
  Description of Artificial Sequence: Synthetic oligonucleotide
cccaucggauucaa

SEQ ID NO: 13610 - RNA, 14 nt, Artificial Sequence
  Description of Artificial Sequence: Synthetic oligonucleotide
ucccaucggauuca

SEQ ID NO: 13611 - RNA, 14 nt, Artificial Sequence
  Description of Artificial Sequence: Synthetic oligonucleotide
uucccaucggauuc

SEQ ID NO: 13612 - RNA, 14 nt, Artificial Sequence
  Description of Artificial Sequence: Synthetic oligonucleotide
uuucccaucggauu

SEQ ID NO: 13613 - RNA, 14 nt, Artificial Sequence
  Description of Artificial Sequence: Synthetic oligonucleotide
auuucccaucggau

SEQ ID NO: 13614 - RNA, 14 nt, Artificial Sequence
  Description of Artificial Sequence: Synthetic oligonucleotide
uauuucccaucgga

SEQ ID NO: 13615 - RNA, 14 nt, Artificial Sequence
  Description of Artificial Sequence: Synthetic oligonucleotide
cuauuucccaucgg

SEQ ID NO: 13616 - RNA, 14 nt, Artificial Sequence
  Description of Artificial Sequence: Synthetic oligonucleotide
gcuauuucccaucg

SEQ ID NO: 13617 - RNA, 14 nt, Artificial Sequence
  Description of Artificial Sequence: Synthetic oligonucleotide
ugcuauuucccauc

SEQ ID NO: 13618 - RNA, 14 nt, Artificial Sequence
  Description of Artificial Sequence: Synthetic oligonucleotide
augcuauuucccau

SEQ ID NO: 13619 - RNA, 14 nt, Artificial Sequence
  Description of Artificial Sequence: Synthetic oligonucleotide
caugcuauuuccca

SEQ ID NO: 13620 - RNA, 14 nt, Artificial Sequence
  Description of Artificial Sequence: Synthetic oligonucleotide
ccaugcuauuuccc

SEQ ID NO: 13621 - RNA, 14 nt, Artificial Sequence
  Description of Artificial Sequence: Synthetic oligonucleotide
uccaugcuauuucc

SEQ ID NO: 13622 - RNA, 14 nt, Artificial Sequence
  Description of Artificial Sequence: Synthetic oligonucleotide
cuccaugcuauuuc

SEQ ID NO: 13623 - RNA, 14 nt, Artificial Sequence
  Description of Artificial Sequence: Synthetic oligonucleotide
ucuccaugcuauuu

SEQ ID NO: 13624 - RNA, 14 nt, Artificial Sequence
  Description of Artificial Sequence: Synthetic oligonucleotide
uucuccaugcuauu

SEQ ID NO: 13625 - RNA, 14 nt, Artificial Sequence
  Description of Artificial Sequence: Synthetic oligonucleotide
cuucuccaugcuau

SEQ ID NO: 13626 - RNA, 14 nt, Artificial Sequence
  Description of Artificial Sequence: Synthetic oligonucleotide
ccuucuccaugcua

SEQ ID NO: 13627 - RNA, 14 nt, Artificial Sequence
  Description of Artificial Sequence: Synthetic oligonucleotide
uccuucuccaugcu

SEQ ID NO: 13628 - RNA, 14 nt, Artificial Sequence
  Description of Artificial Sequence: Synthetic oligonucleotide
uuccuucuccaugc

SEQ ID NO: 13629 - RNA, 14 nt, Artificial Sequence
  Description of Artificial Sequence: Synthetic oligonucleotide
auuccuucuccaug

SEQ ID NO: 13630 - RNA, 14 nt, Artificial Sequence
  Description of Artificial Sequence: Synthetic oligonucleotide
aauuccuucuccau

SEQ ID NO: 13631 - RNA, 14 nt, Artificial Sequence
  Description of Artificial Sequence: Synthetic oligonucleotide
aaauuccuucucca

SEQ ID NO: 13632 - RNA, 14 nt, Artificial Sequence
  Description of Artificial Sequence: Synthetic oligonucleotide
uaaauuccuucucc

SEQ ID NO: 13633 - RNA, 14 nt, Artificial Sequence
  Description of Artificial Sequence: Synthetic oligonucleotide
guaaauuccuucuc

SEQ ID NO: 13634 - RNA, 14 nt, Artificial Sequence
  Description of Artificial Sequence: Synthetic oligonucleotide
uguaaauuccuucu

SEQ ID NO: 13635 - RNA, 14 nt, Artificial Sequence
  Description of Artificial Sequence: Synthetic oligonucleotide
cuguaaauuccuuc

SEQ ID NO: 13636 - RNA, 14 nt, Artificial Sequence
  Description of Artificial Sequence: Synthetic oligonucleotide
ucuguaaauuccuu

SEQ ID NO: 13637 - RNA, 14 nt, Artificial Sequence
  Description of Artificial Sequence: Synthetic oligonucleotide
aucuguaaauuccu

SEQ ID NO: 13638 - RNA, 14 nt, Artificial Sequence
  Description of Artificial Sequence: Synthetic oligonucleotide
aaucuguaaauucc

SEQ ID NO: 13639 - RNA, 14 nt, Artificial Sequence
  Description of Artificial Sequence: Synthetic oligonucleotide
uaaucuguaaauuc

SEQ ID NO: 13640 - RNA, 14 nt, Artificial Sequence
  Description of Artificial Sequence: Synthetic oligonucleotide
auaaucuguaaauu

SEQ ID NO: 13641 - RNA, 14 nt, Artificial Sequence
  Description of Artificial Sequence: Synthetic oligonucleotide
gauaaucuguaaau

SEQ ID NO: 13642 - RNA, 14 nt, Artificial Sequence
  Description of Artificial Sequence: Synthetic oligonucleotide
agauaaucuguaaa

SEQ ID NO: 13643 - RNA, 14 nt, Artificial Sequence
  Description of Artificial Sequence: Synthetic oligonucleotide
aagauaaucuguaa

SEQ ID NO: 13644 - RNA, 14 nt, Artificial Sequence
  Description of Artificial Sequence: Synthetic oligonucleotide
aaagauaaucugua

SEQ ID NO: 13645 - RNA, 14 nt, Artificial Sequence
  Description of Artificial Sequence: Synthetic oligonucleotide
aaaagauaaucugu

SEQ ID NO: 13646 - RNA, 14 nt, Artificial Sequence
  Description of Artificial Sequence: Synthetic oligonucleotide
gaaaagauaaucug

SEQ ID NO: 13647 - RNA, 14 nt, Artificial Sequence
  Description of Artificial Sequence: Synthetic oligonucleotide
ugaaaagauaaucu

SEQ ID NO: 13648 - RNA, 14 nt, Artificial Sequence
  Description of Artificial Sequence: Synthetic oligonucleotide
uugaaaagauaauc

SEQ ID NO: 13649 - RNA, 14 nt, Artificial Sequence
  Description of Artificial Sequence: Synthetic oligonucleotide
guugaaaagauaau

SEQ ID NO: 13650 - RNA, 14 nt, Artificial Sequence
  Description of Artificial Sequence: Synthetic oligonucleotide
uguugaaaagauaa

SEQ ID NO: 13651 - RNA, 14 nt, Artificial Sequence
  Description of Artificial Sequence: Synthetic oligonucleotide
uuguugaaaagaua

SEQ ID NO: 13652 - RNA, 14 nt, Artificial Sequence
  Description of Artificial Sequence: Synthetic oligonucleotide
uuuguugaaaagau

SEQ ID NO: 13653 - RNA, 14 nt, Artificial Sequence
  Description of Artificial Sequence: Synthetic oligonucleotide
auuuguugaaaaga

SEQ ID NO: 13654 - RNA, 14 nt, Artificial Sequence
  Description of Artificial Sequence: Synthetic oligonucleotide
gauuuguugaaaag

SEQ ID NO: 13655 - RNA, 14 nt, Artificial Sequence
  Description of Artificial Sequence: Synthetic oligonucleotide
ggauuuguugaaaa

SEQ ID NO: 13656 - RNA, 14 nt, Artificial Sequence
  Description of Artificial Sequence: Synthetic oligonucleotide
gggauuuguugaaa

SEQ ID NO: 13657 - RNA, 14 nt, Artificial Sequence
  Description of Artificial Sequence: Synthetic oligonucleotide
agggauuuguugaa

SEQ ID NO: 13658 - RNA, 14 nt, Artificial Sequence
  Description of Artificial Sequence: Synthetic oligonucleotide
uagggauuuguuga

SEQ ID NO: 13659 - RNA, 14 nt, Artificial Sequence
  Description of Artificial Sequence: Synthetic oligonucleotide
cuagggauuuguug

SEQ ID NO: 13660 - RNA, 14 nt, Artificial Sequence
  Description of Artificial Sequence: Synthetic oligonucleotide
ucuagggauuuguu

SEQ ID NO: 13661 - RNA, 14 nt, Artificial Sequence
  Description of Artificial Sequence: Synthetic oligonucleotide
uucuagggauuugu

SEQ ID NO: 13662 - RNA, 14 nt, Artificial Sequence
  Description of Artificial Sequence: Synthetic oligonucleotide
uuucuagggauuug

SEQ ID NO: 13663 - RNA, 14 nt, Artificial Sequence
  Description of Artificial Sequence: Synthetic oligonucleotide
auuucuagggauuu

SEQ ID NO: 13664 - RNA, 14 nt, Artificial Sequence
  Description of Artificial Sequence: Synthetic oligonucleotide
uauuucuagggauu

SEQ ID NO: 13665 - RNA, 14 nt, Artificial Sequence
  Description of Artificial Sequence: Synthetic oligonucleotide
cuauuucuagggau

SEQ ID NO: 13666 - RNA, 14 nt, Artificial Sequence
  Description of Artificial Sequence: Synthetic oligonucleotide
ucuauuucuaggga

SEQ ID NO: 13667 - RNA, 14 nt, Artificial Sequence
  Description of Artificial Sequence: Synthetic oligonucleotide
uucuauuucuaggg

SEQ ID NO: 13668 - RNA, 14 nt, Artificial Sequence
  Description of Artificial Sequence: Synthetic oligonucleotide
guucuauuucuagg

SEQ ID NO: 13669 - RNA, 14 nt, Artificial Sequence
  Description of Artificial Sequence: Synthetic oligonucleotide
gguucuauuucuag

SEQ ID NO: 13670 - RNA, 14 nt, Artificial Sequence
  Description of Artificial Sequence: Synthetic oligonucleotide
ugguucuauuucua

SEQ ID NO: 13671 - RNA, 14 nt, Artificial Sequence
  Description of Artificial Sequence: Synthetic oligonucleotide
gugguucuauuucu

SEQ ID NO: 13672 - RNA, 14 nt, Artificial Sequence
  Description of Artificial Sequence: Synthetic oligonucleotide
cgugguucuauuuc

SEQ ID NO: 13673 - RNA, 14 nt, Artificial Sequence
  Description of Artificial Sequence: Synthetic oligonucleotide
ucgugguucuauuu

SEQ ID NO: 13674 - RNA, 14 nt, Artificial Sequence
  Description of Artificial Sequence: Synthetic oligonucleotide
uucgugguucuauu

SEQ ID NO: 13675 - RNA, 14 nt, Artificial Sequence
  Description of Artificial Sequence: Synthetic oligonucleotide
uuucgugguucuau

SEQ ID NO: 13676 - RNA, 14 nt, Artificial Sequence
  Description of Artificial Sequence: Synthetic oligonucleotide
guuucgugguucua

SEQ ID NO: 13677 - RNA, 14 nt, Artificial Sequence
  Description of Artificial Sequence: Synthetic oligonucleotide
gguuucgugguucu

SEQ ID NO: 13678 - RNA, 14 nt, Artificial Sequence
  Description of Artificial Sequence: Synthetic oligonucleotide
ggguuucgugguuc

SEQ ID NO: 13679 - RNA, 14 nt, Artificial Sequence
  Description of Artificial Sequence: Synthetic oligonucleotide
aggguuucgugguu

SEQ ID NO: 13680 - RNA, 14 nt, Artificial Sequence
  Description of Artificial Sequence: Synthetic oligonucleotide
uaggguuucguggu

SEQ ID NO: 13681 - RNA, 14 nt, Artificial Sequence
  Description of Artificial Sequence: Synthetic oligonucleotide
uuaggguuucgugg

SEQ ID NO: 13682 - RNA, 14 nt, Artificial Sequence
  Description of Artificial Sequence: Synthetic oligonucleotide
cuuaggguuucgug

SEQ ID NO: 13683 - RNA, 14 nt, Artificial Sequence
  Description of Artificial Sequence: Synthetic oligonucleotide
gcuuaggguuucgu

SEQ ID NO: 13684 - RNA, 14 nt, Artificial Sequence
  Description of Artificial Sequence: Synthetic oligonucleotide
ggcuuaggguuucg

SEQ ID NO: 13685 - RNA, 14 nt, Artificial Sequence
  Description of Artificial Sequence: Synthetic oligonucleotide
aggcuuaggguuuc

SEQ ID NO: 13686 - RNA, 14 nt, Artificial Sequence
  Description of Artificial Sequence: Synthetic oligonucleotide
gaggcuuaggguuu

SEQ ID NO: 13687 - RNA, 14 nt, Artificial Sequence
  Description of Artificial Sequence: Synthetic oligonucleotide
agaggcuuaggguu

SEQ ID NO: 13688 - RNA, 14 nt, Artificial Sequence
  Description of Artificial Sequence: Synthetic oligonucleotide
gagaggcuuagggu

SEQ ID NO: 13689 - RNA, 14 nt, Artificial Sequence
  Description of Artificial Sequence: Synthetic oligonucleotide
ggagaggcuuaggg

SEQ ID NO: 13690 - RNA, 14 nt, Artificial Sequence
  Description of Artificial Sequence: Synthetic oligonucleotide
gggagaggcuuagg

SEQ ID NO: 13691 - RNA, 14 nt, Artificial Sequence
  Description of Artificial Sequence: Synthetic oligonucleotide
ugggagaggcuuag

SEQ ID NO: 13692 - RNA, 14 nt, Artificial Sequence
  Description of Artificial Sequence: Synthetic oligonucleotide
uugggagaggcuua

SEQ ID NO: 13693 - RNA, 14 nt, Artificial Sequence
  Description of Artificial Sequence: Synthetic oligonucleotide
cuugggagaggcuu

SEQ ID NO: 13694 - RNA, 14 nt, Artificial Sequence
  Description of Artificial Sequence: Synthetic oligonucleotide
ucuugggagaggcu

SEQ ID NO: 13695 - RNA, 14 nt, Artificial Sequence
  Description of Artificial Sequence: Synthetic oligonucleotide
aucuugggagaggc

SEQ ID NO: 13696 - RNA, 14 nt, Artificial Sequence
  Description of Artificial Sequence: Synthetic oligonucleotide
aaucuugggagagg

SEQ ID NO: 13697 - RNA, 14 nt, Artificial Sequence
  Description of Artificial Sequence: Synthetic oligonucleotide
aaaucuugggagag

SEQ ID NO: 13698 - RNA, 14 nt, Artificial Sequence
  Description of Artificial Sequence: Synthetic oligonucleotide
gaaaucuugggaga

SEQ ID NO: 13699 - RNA, 14 nt, Artificial Sequence
  Description of Artificial Sequence: Synthetic oligonucleotide
ggaaaucuugggag

SEQ ID NO: 13700 - RNA, 14 nt, Artificial Sequence
  Description of Artificial Sequence: Synthetic oligonucleotide
uggaaaucuuggga

SEQ ID NO: 13701 - RNA, 14 nt, Artificial Sequence
  Description of Artificial Sequence: Synthetic oligonucleotide
uuggaaaucuuggg

SEQ ID NO: 13702 - RNA, 14 nt, Artificial Sequence
  Description of Artificial Sequence: Synthetic oligonucleotide
uuuggaaaucuugg

SEQ ID NO: 13703 - RNA, 14 nt, Artificial Sequence
  Description of Artificial Sequence: Synthetic oligonucleotide
uuuuggaaaucuug

SEQ ID NO: 13704 - RNA, 14 nt, Artificial Sequence
  Description of Artificial Sequence: Synthetic oligonucleotide
uuuuuggaaaucuu

SEQ ID NO: 13705 - RNA, 14 nt, Artificial Sequence
  Description of Artificial Sequence: Synthetic oligonucleotide
uuuuuuggaaaucu

SEQ ID NO: 13706 - RNA, 14 nt, Artificial Sequence
  Description of Artificial Sequence: Synthetic oligonucleotide
uuuuuuuggaaauc

SEQ ID NO: 13707 - RNA, 14 nt, Artificial Sequence
  Description of Artificial Sequence: Synthetic oligonucleotide
auuuuuuuggaaau

SEQ ID NO: 13708 - RNA, 14 nt, Artificial Sequence
  Description of Artificial Sequence: Synthetic oligonucleotide
uauuuuuuuggaaa

SEQ ID NO: 13709 - RNA, 14 nt, Artificial Sequence
  Description of Artificial Sequence: Synthetic oligonucleotide
auauuuuuuuggaa

SEQ ID NO: 13710 - RNA, 14 nt, Artificial Sequence
  Description of Artificial Sequence: Synthetic oligonucleotide
uauauuuuuuugga

SEQ ID NO: 13711 - RNA, 14 nt, Artificial Sequence
  Description of Artificial Sequence: Synthetic oligonucleotide
cuauauuuuuuugg

SEQ ID NO: 13712 - RNA, 14 nt, Artificial Sequence
  Description of Artificial Sequence: Synthetic oligonucleotide
gcuauauuuuuuug

SEQ ID NO: 13713 - RNA, 14 nt, Artificial Sequence
  Description of Artificial Sequence: Synthetic oligonucleotide
agcuauauuuuuuu

SEQ ID NO: 13714 - RNA, 14 nt, Artificial Sequence
  Description of Artificial Sequence: Synthetic oligonucleotide
uagcuauauuuuuu

SEQ ID NO: 13715 - RNA, 14 nt, Artificial Sequence
  Description of Artificial Sequence: Synthetic oligonucleotide
auagcuauauuuuu

SEQ ID NO: 13716 - RNA, 14 nt, Artificial Sequence
  Description of Artificial Sequence: Synthetic oligonucleotide
gauagcuauauuuu

SEQ ID NO: 13717 - RNA, 14 nt, Artificial Sequence
  Description of Artificial Sequence: Synthetic oligonucleotide
ggauagcuauauuu

SEQ ID NO: 13718 - RNA, 14 nt, Artificial Sequence
  Description of Artificial Sequence: Synthetic oligonucleotide
gggauagcuauauu

SEQ ID NO: 13719 - RNA, 14 nt, Artificial Sequence
  Description of Artificial Sequence: Synthetic oligonucleotide
ggggauagcuauau

SEQ ID NO: 13720 - RNA, 14 nt, Artificial Sequence
  Description of Artificial Sequence: Synthetic oligonucleotide
aggggauagcuaua

SEQ ID NO: 13721 - RNA, 14 nt, Artificial Sequence
  Description of Artificial Sequence: Synthetic oligonucleotide
uaggggauagcuau

SEQ ID NO: 13722 - RNA, 14 nt, Artificial Sequence
  Description of Artificial Sequence: Synthetic oligonucleotide
uuaggggauagcua

SEQ ID NO: 13723 - RNA, 14 nt, Artificial Sequence
  Description of Artificial Sequence: Synthetic oligonucleotide
uuuaggggauagcu

SEQ ID NO: 13724 - RNA, 14 nt, Artificial Sequence
  Description of Artificial Sequence: Synthetic oligonucleotide
uuuuaggggauagc

SEQ ID NO: 13725 - RNA, 14 nt, Artificial Sequence
  Description of Artificial Sequence: Synthetic oligonucleotide
auuuuaggggauag

SEQ ID NO: 13726 - RNA, 14 nt, Artificial Sequence
  Description of Artificial Sequence: Synthetic oligonucleotide
gauuuuaggggaua

SEQ ID NO: 13727 - RNA, 14 nt, Artificial Sequence
  Description of Artificial Sequence: Synthetic oligonucleotide
agauuuuaggggau

SEQ ID NO: 13728 - RNA, 14 nt, Artificial Sequence
  Description of Artificial Sequence: Synthetic oligonucleotide
gagauuuuagggga

SEQ ID NO: 13729 - RNA, 14 nt, Artificial Sequence
  Description of Artificial Sequence: Synthetic oligonucleotide
ggagauuuuagggg

SEQ ID NO: 13730 - RNA, 14 nt, Artificial Sequence
  Description of Artificial Sequence: Synthetic oligonucleotide
aggagauuuuaggg

SEQ ID NO: 13731 - RNA, 14 nt, Artificial Sequence
  Description of Artificial Sequence: Synthetic oligonucleotide
caggagauuuuagg

SEQ ID NO: 13732 - RNA, 14 nt, Artificial Sequence
  Description of Artificial Sequence: Synthetic oligonucleotide
ccaggagauuuuag

SEQ ID NO: 13733 - RNA, 14 nt, Artificial Sequence
  Description of Artificial Sequence: Synthetic oligonucleotide
accaggagauuuua

SEQ ID NO: 13734 - RNA, 14 nt, Artificial Sequence
  Description of Artificial Sequence: Synthetic oligonucleotide
caccaggagauuuu

SEQ ID NO: 13735 - RNA, 14 nt, Artificial Sequence
  Description of Artificial Sequence: Synthetic oligonucleotide
acaccaggagauuu

SEQ ID NO: 13736 - RNA, 14 nt, Artificial Sequence
  Description of Artificial Sequence: Synthetic oligonucleotide
aacaccaggagauu

SEQ ID NO: 13737 - RNA, 14 nt, Artificial Sequence
  Description of Artificial Sequence: Synthetic oligonucleotide
gaacaccaggagau

SEQ ID NO: 13738 - DNA, 14 bp, Artificial Sequence
  Description of Artificial Sequence: Synthetic oligonucleotide
cgaacaccaggaga

SEQ ID NO: 13739 - DNA, 14 bp, Artificial Sequence
  Description of Artificial Sequence: Synthetic oligonucleotide
acgaacaccaggag

SEQ ID NO: 13740 - DNA, 14 bp, Artificial Sequence
  Description of Artificial Sequence: Synthetic oligonucleotide
gacgaacaccagga

SEQ ID NO: 13741 - DNA, 14 bp, Artificial Sequence
  Description of Artificial Sequence: Synthetic oligonucleotide
ggacgaacaccagg

SEQ ID NO: 13742 - RNA, 14 nt, Artificial Sequence
  Description of Artificial Sequence: Synthetic oligonucleotide
uggacgaacaccag

SEQ ID NO: 13743 - RNA, 14 nt, Artificial Sequence
  Description of Artificial Sequence: Synthetic oligonucleotide
auggacgaacacca

SEQ ID NO: 13744 - RNA, 14 nt, Artificial Sequence
  Description of Artificial Sequence: Synthetic oligonucleotide
gauggacgaacacc

SEQ ID NO: 13745 - RNA, 14 nt, Artificial Sequence
  Description of Artificial Sequence: Synthetic oligonucleotide
ugauggacgaacac

SEQ ID NO: 13746 - RNA, 14 nt, Artificial Sequence
  Description of Artificial Sequence: Synthetic oligonucleotide
uugauggacgaaca

SEQ ID NO: 13747 - RNA, 14 nt, Artificial Sequence
  Description of Artificial Sequence: Synthetic oligonucleotide
uuugauggacgaac

SEQ ID NO: 13748 - RNA, 14 nt, Artificial Sequence
  Description of Artificial Sequence: Synthetic oligonucleotide
guuugauggacgaa

SEQ ID NO: 13749 - RNA, 14 nt, Artificial Sequence
  Description of Artificial Sequence: Synthetic oligonucleotide
gguuugauggacga

SEQ ID NO: 13750 - RNA, 14 nt, Artificial Sequence
  Description of Artificial Sequence: Synthetic oligonucleotide
ggguuugauggacg

SEQ ID NO: 13751 - RNA, 14 nt, Artificial Sequence
  Description of Artificial Sequence: Synthetic oligonucleotide
uggguuugauggac

SEQ ID NO: 13752 - RNA, 14 nt, Artificial Sequence
  Description of Artificial Sequence: Synthetic oligonucleotide
uuggguuugaugga

SEQ ID NO: 13753 - RNA, 14 nt, Artificial Sequence
  Description of Artificial Sequence: Synthetic oligonucleotide
cuuggguuugaugg

SEQ ID NO: 13754 - RNA, 14 nt, Artificial Sequence
  Description of Artificial Sequence: Synthetic oligonucleotide
ucuuggguuugaug

SEQ ID NO: 13755 - RNA, 14 nt, Artificial Sequence
  Description of Artificial Sequence: Synthetic oligonucleotide
gucuuggguuugau

SEQ ID NO: 13756 - RNA, 14 nt, Artificial Sequence
  Description of Artificial Sequence: Synthetic oligonucleotide
ggucuuggguuuga

SEQ ID NO: 13757 - RNA, 14 nt, Artificial Sequence
  Description of Artificial Sequence: Synthetic oligonucleotide
uggucuuggguuug

SEQ ID NO: 13758 - RNA, 14 nt, Artificial Sequence
  Description of Artificial Sequence: Synthetic oligonucleotide
cuggucuuggguuu

SEQ ID NO: 13759 - RNA, 14 nt, Artificial Sequence
  Description of Artificial Sequence: Synthetic oligonucleotide
ccuggucuuggguu

SEQ ID NO: 13760 - RNA, 14 nt, Artificial Sequence
  Description of Artificial Sequence: Synthetic oligonucleotide
accuggucuugggu

SEQ ID NO: 13761 - RNA, 14 nt, Artificial Sequence
  Description of Artificial Sequence: Synthetic oligonucleotide
uaccuggucuuggg

SEQ ID NO: 13762 - RNA, 14 nt, Artificial Sequence
  Description of Artificial Sequence: Synthetic oligonucleotide
guaccuggucuugg

SEQ ID NO: 13763 - RNA, 14 nt, Artificial Sequence
  Description of Artificial Sequence: Synthetic oligonucleotide
gguaccuggucuug

SEQ ID NO: 13764 - RNA, 14 nt, Artificial Sequence
  Description of Artificial Sequence: Synthetic oligonucleotide
ugguaccuggucuu

SEQ ID NO: 13765 - RNA, 14 nt, Artificial Sequence
  Description of Artificial Sequence: Synthetic oligonucleotide
augguaccuggucu

SEQ ID NO: 13766 - RNA, 14 nt, Artificial Sequence
  Description of Artificial Sequence: Synthetic oligonucleotide
caugguaccugguc

SEQ ID NO: 13767 - RNA, 14 nt, Artificial Sequence
  Description of Artificial Sequence: Synthetic oligonucleotide
ucaugguaccuggu

SEQ ID NO: 13768 - RNA, 14 nt, Artificial Sequence
  Description of Artificial Sequence: Synthetic oligonucleotide
cucaugguaccugg

SEQ ID NO: 13769 - RNA, 14 nt, Artificial Sequence
  Description of Artificial Sequence: Synthetic oligonucleotide
ccucaugguaccug

SEQ ID NO: 13770 - RNA, 14 nt, Artificial Sequence
  Description of Artificial Sequence: Synthetic oligonucleotide
gccucaugguaccu

SEQ ID NO: 13771 - RNA, 14 nt, Artificial Sequence
  Description of Artificial Sequence: Synthetic oligonucleotide
ugccucaugguacc

SEQ ID NO: 13772 - RNA, 14 nt, Artificial Sequence
  Description of Artificial Sequence: Synthetic oligonucleotide
augccucaugguac

SEQ ID NO: 13773 - RNA, 14 nt, Artificial Sequence
  Description of Artificial Sequence: Synthetic oligonucleotide
gaugccucauggua

SEQ ID NO: 13774 - RNA, 14 nt, Artificial Sequence
  Description of Artificial Sequence: Synthetic oligonucleotide
ggaugccucauggu

SEQ ID NO: 13775 - RNA, 14 nt, Artificial Sequence
  Description of Artificial Sequence: Synthetic oligonucleotide
gggaugccucaugg

SEQ ID NO: 13776 - RNA, 14 nt, Artificial Sequence
  Description of Artificial Sequence: Synthetic oligonucleotide
ugggaugccucaug

SEQ ID NO: 13777 - RNA, 14 nt, Artificial Sequence
  Description of Artificial Sequence: Synthetic oligonucleotide
gugggaugccucau

SEQ ID NO: 13778 - RNA, 14 nt, Artificial Sequence
  Description of Artificial Sequence: Synthetic oligonucleotide
ugugggaugccuca

SEQ ID NO: 13779 - RNA, 14 nt, Artificial Sequence
  Description of Artificial Sequence: Synthetic oligonucleotide
gugugggaugccuc

SEQ ID NO: 13780 - RNA, 14 nt, Artificial Sequence
  Description of Artificial Sequence: Synthetic oligonucleotide
ggugugggaugccu

SEQ ID NO: 13781 - RNA, 14 nt, Artificial Sequence
  Description of Artificial Sequence: Synthetic oligonucleotide
aggugugggaugcc

SEQ ID NO: 13782 - RNA, 14 nt, Artificial Sequence
  Description of Artificial Sequence: Synthetic oligonucleotide
gaggugugggaugc

SEQ ID NO: 13783 - RNA, 14 nt, Artificial Sequence
  Description of Artificial Sequence: Synthetic oligonucleotide
agaggugugggaug

SEQ ID NO: 13784 - RNA, 14 nt, Artificial Sequence
  Description of Artificial Sequence: Synthetic oligonucleotide
cagaggugugggau

SEQ ID NO: 13785 - RNA, 14 nt, Artificial Sequence
  Description of Artificial Sequence: Synthetic oligonucleotide
gcagagguguggga

SEQ ID NO: 13786 - RNA, 14 nt, Artificial Sequence
  Description of Artificial Sequence: Synthetic oligonucleotide
ugcagagguguggg

SEQ ID NO: 13787 - RNA, 14 nt, Artificial Sequence
  Description of Artificial Sequence: Synthetic oligonucleotide
cugcagaggugugg

SEQ ID NO: 13788 - RNA, 14 nt, Artificial Sequence
  Description of Artificial Sequence: Synthetic oligonucleotide
gcugcagaggugug

SEQ ID NO: 13789 - RNA, 14 nt, Artificial Sequence
  Description of Artificial Sequence: Synthetic oligonucleotide
ugcugcagaggugu

SEQ ID NO: 13790 - RNA, 14 nt, Artificial Sequence
  Description of Artificial Sequence: Synthetic oligonucleotide
cugcugcagaggug

SEQ ID NO: 13791 - RNA, 14 nt, Artificial Sequence
  Description of Artificial Sequence: Synthetic oligonucleotide
ccugcugcagaggu

SEQ ID NO: 13792 - RNA, 14 nt, Artificial Sequence
  Description of Artificial Sequence: Synthetic oligonucleotide
uccugcugcagagg

SEQ ID NO: 13793 - RNA, 14 nt, Artificial Sequence
  Description of Artificial Sequence: Synthetic oligonucleotide
cuccugcugcagag

SEQ ID NO: 13794 - RNA, 14 nt, Artificial Sequence
  Description of Artificial Sequence: Synthetic oligonucleotide
gcuccugcugcaga

SEQ ID NO: 13795 - RNA, 14 nt, Artificial Sequence
  Description of Artificial Sequence: Synthetic oligonucleotide
ggcuccugcugcag

SEQ ID NO: 13796 - RNA, 14 nt, Artificial Sequence
  Description of Artificial Sequence: Synthetic oligonucleotide
uggcuccugcugca

SEQ ID NO: 13797 - RNA, 14 nt, Artificial Sequence
  Description of Artificial Sequence: Synthetic oligonucleotide
uuggcuccugcugc

SEQ ID NO: 13798 - RNA, 14 nt, Artificial Sequence
  Description of Artificial Sequence: Synthetic oligonucleotide
cuuggcuccugcug

SEQ ID NO: 13799 - RNA, 14 nt, Artificial Sequence
  Description of Artificial Sequence: Synthetic oligonucleotide
ccuuggcuccugcu

SEQ ID NO: 13800 - RNA, 14 nt, Artificial Sequence
  Description of Artificial Sequence: Synthetic oligonucleotide
uccuuggcuccugc

SEQ ID NO: 13801 - RNA, 14 nt, Artificial Sequence
  Description of Artificial Sequence: Synthetic oligonucleotide
uuccuuggcuccug

SEQ ID NO: 13802 - RNA, 14 nt, Artificial Sequence
  Description of Artificial Sequence: Synthetic oligonucleotide
uuuccuuggcuccu

SEQ ID NO: 13803 - RNA, 14 nt, Artificial Sequence
  Description of Artificial Sequence: Synthetic oligonucleotide
uuuuccuuggcucc

SEQ ID NO: 13804 - RNA, 14 nt, Artificial Sequence
  Description of Artificial Sequence: Synthetic oligonucleotide
auuuuccuuggcuc

SEQ ID NO: 13805 - RNA, 14 nt, Artificial Sequence
  Description of Artificial Sequence: Synthetic oligonucleotide
aauuuuccuuggcu

SEQ ID NO: 13806 - RNA, 14 nt, Artificial Sequence
  Description of Artificial Sequence: Synthetic oligonucleotide
uaauuuuccuuggc

SEQ ID NO: 13807 - RNA, 14 nt, Artificial Sequence
  Description of Artificial Sequence: Synthetic oligonucleotide
cuaauuuuccuugg

SEQ ID NO: 13808 - RNA, 14 nt, Artificial Sequence
  Description of Artificial Sequence: Synthetic oligonucleotide
acuaauuuuccuug

SEQ ID NO: 13809 - RNA, 14 nt, Artificial Sequence
  Description of Artificial Sequence: Synthetic oligonucleotide
aacuaauuuuccuu

SEQ ID NO: 13810 - RNA, 14 nt, Artificial Sequence
  Description of Artificial Sequence: Synthetic oligonucleotide
uaacuaauuuuccu

SEQ ID NO: 13811 - RNA, 14 nt, Artificial Sequence
  Description of Artificial Sequence: Synthetic oligonucleotide
auaacuaauuuucc

SEQ ID NO: 13812 - RNA, 14 nt, Artificial Sequence
  Description of Artificial Sequence: Synthetic oligonucleotide
uauaacuaauuuuc

SEQ ID NO: 13813 - RNA, 14 nt, Artificial Sequence
  Description of Artificial Sequence: Synthetic oligonucleotide
cuauaacuaauuuu

SEQ ID NO: 13814 - RNA, 14 nt, Artificial Sequence
  Description of Artificial Sequence: Synthetic oligonucleotide
acuauaacuaauuu

SEQ ID NO: 13815 - RNA, 14 nt, Artificial Sequence
  Description of Artificial Sequence: Synthetic oligonucleotide
uacuauaacuaauu

SEQ ID NO: 13816 - RNA, 14 nt, Artificial Sequence
  Description of Artificial Sequence: Synthetic oligonucleotide
cuacuauaacuaau

SEQ ID NO: 13817 - RNA, 14 nt, Artificial Sequence
  Description of Artificial Sequence: Synthetic oligonucleotide
ccuacuauaacuaa

SEQ ID NO: 13818 - RNA, 14 nt, Artificial Sequence
  Description of Artificial Sequence: Synthetic oligonucleotide
uccuacuauaacua

SEQ ID NO: 13819 - RNA, 14 nt, Artificial Sequence
  Description of Artificial Sequence: Synthetic oligonucleotide
auccuacuauaacu

SEQ ID NO: 13820 - RNA, 14 nt, Artificial Sequence
  Description of Artificial Sequence: Synthetic oligonucleotide
gauccuacuauaac

SEQ ID NO: 13821 - RNA, 14 nt, Artificial Sequence
  Description of Artificial Sequence: Synthetic oligonucleotide
ggauccuacuauaa

SEQ ID NO: 13822 - RNA, 14 nt, Artificial Sequence
  Description of Artificial Sequence: Synthetic oligonucleotide
gggauccuacuaua

SEQ ID NO: 13823 - RNA, 14 nt, Artificial Sequence
  Description of Artificial Sequence: Synthetic oligonucleotide
agggauccuacuau

SEQ ID NO: 13824 - RNA, 14 nt, Artificial Sequence
  Description of Artificial Sequence: Synthetic oligonucleotide
cagggauccuacua

SEQ ID NO: 13825 - RNA, 14 nt, Artificial Sequence
  Description of Artificial Sequence: Synthetic oligonucleotide
ucagggauccuacu

SEQ ID NO: 13826 - RNA, 14 nt, Artificial Sequence
  Description of Artificial Sequence: Synthetic oligonucleotide
uucagggauccuac

SEQ ID NO: 13827 - RNA, 14 nt, Artificial Sequence
  Description of Artificial Sequence: Synthetic oligonucleotide
uuucagggauccua

SEQ ID NO: 13828 - RNA, 14 nt, Artificial Sequence
  Description of Artificial Sequence: Synthetic oligonucleotide
cuuucagggauccu

SEQ ID NO: 13829 - RNA, 14 nt, Artificial Sequence
  Description of Artificial Sequence: Synthetic oligonucleotide
acuuucagggaucc

SEQ ID NO: 13830 - RNA, 14 nt, Artificial Sequence
  Description of Artificial Sequence: Synthetic oligonucleotide
cacuuucagggauc

SEQ ID NO: 13831 - RNA, 14 nt, Artificial Sequence
  Description of Artificial Sequence: Synthetic oligonucleotide
ucacuuucagggau

SEQ ID NO: 13832 - RNA, 14 nt, Artificial Sequence
  Description of Artificial Sequence: Synthetic oligonucleotide
uucacuuucaggga

SEQ ID NO: 13833 - RNA, 14 nt, Artificial Sequence
  Description of Artificial Sequence: Synthetic oligonucleotide
uuucacuuucaggg

SEQ ID NO: 13834 - RNA, 14 nt, Artificial Sequence
  Description of Artificial Sequence: Synthetic oligonucleotide
guuucacuuucagg

SEQ ID NO: 13835 - RNA, 14 nt, Artificial Sequence
  Description of Artificial Sequence: Synthetic oligonucleotide
uguuucacuuucag

SEQ ID NO: 13836 - RNA, 14 nt, Artificial Sequence
  Description of Artificial Sequence: Synthetic oligonucleotide
cuguuucacuuuca

SEQ ID NO: 13837 - RNA, 14 nt, Artificial Sequence
  Description of Artificial Sequence: Synthetic oligonucleotide
ucuguuucacuuuc

SEQ ID NO: 13838 - RNA, 14 nt, Artificial Sequence
  Description of Artificial Sequence: Synthetic oligonucleotide
uucuguuucacuuu

SEQ ID NO: 13839 - RNA, 14 nt, Artificial Sequence
  Description of Artificial Sequence: Synthetic oligonucleotide
uuucuguuucacuu

SEQ ID NO: 13840 - RNA, 14 nt, Artificial Sequence
  Description of Artificial Sequence: Synthetic oligonucleotide
cuuucuguuucacu

SEQ ID NO: 13841 - RNA, 14 nt, Artificial Sequence
  Description of Artificial Sequence: Synthetic oligonucleotide
acuuucuguuucac

SEQ ID NO: 13842 - RNA, 14 nt, Artificial Sequence
  Description of Artificial Sequence: Synthetic oligonucleotide
uacuuucuguuuca

SEQ ID NO: 13843 - RNA, 14 nt, Artificial Sequence
  Description of Artificial Sequence: Synthetic oligonucleotide
guacuuucuguuuc

SEQ ID NO: 13844 - RNA, 14 nt, Artificial Sequence
  Description of Artificial Sequence: Synthetic oligonucleotide
uguacuuucuguuu

SEQ ID NO: 13845 - RNA, 14 nt, Artificial Sequence
  Description of Artificial Sequence: Synthetic oligonucleotide
cuguacuuucuguu

SEQ ID NO: 13846 - RNA, 14 nt, Artificial Sequence
  Description of Artificial Sequence: Synthetic oligonucleotide
gcuguacuuucugu

SEQ ID NO: 13847 - RNA, 14 nt, Artificial Sequence
  Description of Artificial Sequence: Synthetic oligonucleotide
ugcuguacuuucug

SEQ ID NO: 13848 - RNA, 14 nt, Artificial Sequence
  Description of Artificial Sequence: Synthetic oligonucleotide
augcuguacuuucu

SEQ ID NO: 13849 - RNA, 14 nt, Artificial Sequence
  Description of Artificial Sequence: Synthetic oligonucleotide
gaugcuguacuuuc

SEQ ID NO: 13850 - RNA, 14 nt, Artificial Sequence
  Description of Artificial Sequence: Synthetic oligonucleotide
agaugcuguacuuu

SEQ ID NO: 13851 - RNA, 14 nt, Artificial Sequence
  Description of Artificial Sequence: Synthetic oligonucleotide
cagaugcuguacuu

SEQ ID NO: 13852 - RNA, 14 nt, Artificial Sequence
  Description of Artificial Sequence: Synthetic oligonucleotide
gcagaugcuguacu

SEQ ID NO: 13853 - RNA, 14 nt, Artificial Sequence
  Description of Artificial Sequence: Synthetic oligonucleotide
ugcagaugcuguac

SEQ ID NO: 13854 - RNA, 14 nt, Artificial Sequence
  Description of Artificial Sequence: Synthetic oligonucleotide
gugcagaugcugua

SEQ ID NO: 13855 - RNA, 14 nt, Artificial Sequence
  Description of Artificial Sequence: Synthetic oligonucleotide
ggugcagaugcugu

SEQ ID NO: 13856 - RNA, 14 nt, Artificial Sequence
  Description of Artificial Sequence: Synthetic oligonucleotide
uggugcagaugcug

SEQ ID NO: 13857 - RNA, 14 nt, Artificial Sequence
  Description of Artificial Sequence: Synthetic oligonucleotide
uuggugcagaugcu

SEQ ID NO: 13858 - RNA, 14 nt, Artificial Sequence
  Description of Artificial Sequence: Synthetic oligonucleotide
uuuggugcagaugc

SEQ ID NO: 13859 - RNA, 14 nt, Artificial Sequence
  Description of Artificial Sequence: Synthetic oligonucleotide
auuuggugcagaug

SEQ ID NO: 13860 - RNA, 14 nt, Artificial Sequence
  Description of Artificial Sequence: Synthetic oligonucleotide
aauuuggugcagau

SEQ ID NO: 13861 - RNA, 14 nt, Artificial Sequence
  Description of Artificial Sequence: Synthetic oligonucleotide
gaauuuggugcaga

SEQ ID NO: 13862 - RNA, 14 nt, Artificial Sequence
  Description of Artificial Sequence: Synthetic oligonucleotide
agaauuuggugcag

SEQ ID NO: 13863 - RNA, 14 nt, Artificial Sequence
  Description of Artificial Sequence: Synthetic oligonucleotide
gagaauuuggugca

SEQ ID NO: 13864 - RNA, 14 nt, Artificial Sequence
  Description of Artificial Sequence: Synthetic oligonucleotide
ggagaauuuggugc

SEQ ID NO: 13865 - RNA, 14 nt, Artificial Sequence
  Description of Artificial Sequence: Synthetic oligonucleotide
uggagaauuuggug

SEQ ID NO: 13866 - RNA, 14 nt, Artificial Sequence
  Description of Artificial Sequence: Synthetic oligonucleotide
uuggagaauuuggu

SEQ ID NO: 13867 - RNA, 14 nt, Artificial Sequence
  Description of Artificial Sequence: Synthetic oligonucleotide
cuuggagaauuugg

SEQ ID NO: 13868 - RNA, 14 nt, Artificial Sequence
  Description of Artificial Sequence: Synthetic oligonucleotide
ucuuggagaauuug

SEQ ID NO: 13869 - RNA, 14 nt, Artificial Sequence
  Description of Artificial Sequence: Synthetic oligonucleotide
uucuuggagaauuu

SEQ ID NO: 13870 - RNA, 14 nt, Artificial Sequence
  Description of Artificial Sequence: Synthetic oligonucleotide
guucuuggagaauu

SEQ ID NO: 13871 - RNA, 14 nt, Artificial Sequence
  Description of Artificial Sequence: Synthetic oligonucleotide
uguucuuggagaau

SEQ ID NO: 13872 - RNA, 14 nt, Artificial Sequence
  Description of Artificial Sequence: Synthetic oligonucleotide
guguucuuggagaa

SEQ ID NO: 13873 - RNA, 14 nt, Artificial Sequence
  Description of Artificial Sequence: Synthetic oligonucleotide
gguguucuuggaga

SEQ ID NO: 13874 - RNA, 14 nt, Artificial Sequence
  Description of Artificial Sequence: Synthetic oligonucleotide
cgguguucuuggag

SEQ ID NO: 13875 - RNA, 14 nt, Artificial Sequence
  Description of Artificial Sequence: Synthetic oligonucleotide
acgguguucuugga

SEQ ID NO: 13876 - RNA, 14 nt, Artificial Sequence
  Description of Artificial Sequence: Synthetic oligonucleotide
aacgguguucuugg

SEQ ID NO: 13877 - RNA, 14 nt, Artificial Sequence
  Description of Artificial Sequence: Synthetic oligonucleotide
uaacgguguucuug

SEQ ID NO: 13878 - RNA, 14 nt, Artificial Sequence
  Description of Artificial Sequence: Synthetic oligonucleotide
uuaacgguguucuu

SEQ ID NO: 13879 - RNA, 14 nt, Artificial Sequence
  Description of Artificial Sequence: Synthetic oligonucleotide
guuaacgguguucu

SEQ ID NO: 13880 - RNA, 14 nt, Artificial Sequence
  Description of Artificial Sequence: Synthetic oligonucleotide
uguuaacgguguuc

SEQ ID NO: 13881 - RNA, 14 nt, Artificial Sequence
  Description of Artificial Sequence: Synthetic oligonucleotide
guguuaacgguguu

SEQ ID NO: 13882 - RNA, 14 nt, Artificial Sequence
  Description of Artificial Sequence: Synthetic oligonucleotide
gguguuaacggugu

SEQ ID NO: 13883 - RNA, 14 nt, Artificial Sequence
  Description of Artificial Sequence: Synthetic oligonucleotide
agguguuaacggug

SEQ ID NO: 13884 - RNA, 14 nt, Artificial Sequence
  Description of Artificial Sequence: Synthetic oligonucleotide
gagguguuaacggu

SEQ ID NO: 13885 - RNA, 14 nt, Artificial Sequence
  Description of Artificial Sequence: Synthetic oligonucleotide
ggagguguuaacgg

SEQ ID NO: 13886 - RNA, 14 nt, Artificial Sequence
  Description of Artificial Sequence: Synthetic oligonucleotide
cggagguguuaacg

SEQ ID NO: 13887 - RNA, 14 nt, Artificial Sequence
  Description of Artificial Sequence: Synthetic oligonucleotide
gcggagguguuaac

SEQ ID NO: 13888 - RNA, 14 nt, Artificial Sequence
  Description of Artificial Sequence: Synthetic oligonucleotide
ggcggagguguuaa

SEQ ID NO: 13889 - RNA, 14 nt, Artificial Sequence
  Description of Artificial Sequence: Synthetic oligonucleotide
aggcggagguguua

SEQ ID NO: 13890 - RNA, 14 nt, Artificial Sequence
  Description of Artificial Sequence: Synthetic oligonucleotide
caggcggagguguu

SEQ ID NO: 13891 - RNA, 14 nt, Artificial Sequence
  Description of Artificial Sequence: Synthetic oligonucleotide
gcaggcggaggugu

SEQ ID NO: 13892 - RNA, 14 nt, Artificial Sequence
  Description of Artificial Sequence: Synthetic oligonucleotide
agcaggcggaggug

SEQ ID NO: 13893 - RNA, 14 nt, Artificial Sequence
  Description of Artificial Sequence: Synthetic oligonucleotide
aagcaggcggaggu

SEQ ID NO: 13894 - DNA, 14 bp, Artificial Sequence
  Description of Artificial Sequence: Synthetic oligonucleotide
gaagcaggcggagg

SEQ ID NO: 13895 - DNA, 14 bp, Artificial Sequence
  Description of Artificial Sequence: Synthetic oligonucleotide
agaagcaggcggag

SEQ ID NO: 13896 - DNA, 14 bp, Artificial Sequence
  Description of Artificial Sequence: Synthetic oligonucleotide
cagaagcaggcgga

SEQ ID NO: 13897 - DNA, 14 bp, Artificial Sequence
  Description of Artificial Sequence: Synthetic oligonucleotide
ccagaagcaggcgg

SEQ ID NO: 13898 - DNA, 14 bp, Artificial Sequence
  Description of Artificial Sequence: Synthetic oligonucleotide
accagaagcaggcg

SEQ ID NO: 13899 - DNA, 14 bp, Artificial Sequence
  Description of Artificial Sequence: Synthetic oligonucleotide
caccagaagcaggc

SEQ ID NO: 13900 - DNA, 14 bp, Artificial Sequence
  Description of Artificial Sequence: Synthetic oligonucleotide
gcaccagaagcagg

SEQ ID NO: 13901 - DNA, 14 bp, Artificial Sequence
  Description of Artificial Sequence: Synthetic oligonucleotide
agcaccagaagcag

SEQ ID NO: 13902 - DNA, 14 bp, Artificial Sequence
  Description of Artificial Sequence: Synthetic oligonucleotide
aagcaccagaagca

SEQ ID NO: 13903 - DNA, 14 bp, Artificial Sequence
  Description of Artificial Sequence: Synthetic oligonucleotide
gaagcaccagaagc

SEQ ID NO: 13904 - DNA, 14 bp, Artificial Sequence
  Description of Artificial Sequence: Synthetic oligonucleotide
ggaagcaccagaag

SEQ ID NO: 13905 - RNA, 14 nt, Artificial Sequence
  Description of Artificial Sequence: Synthetic oligonucleotide
uggaagcaccagaa

SEQ ID NO: 13906 - RNA, 14 nt, Artificial Sequence
  Description of Artificial Sequence: Synthetic oligonucleotide
cuggaagcaccaga

SEQ ID NO: 13907 - RNA, 14 nt, Artificial Sequence
  Description of Artificial Sequence: Synthetic oligonucleotide
acuggaagcaccag

SEQ ID NO: 13908 - RNA, 14 nt, Artificial Sequence
  Description of Artificial Sequence: Synthetic oligonucleotide
uacuggaagcacca

SEQ ID NO: 13909 - RNA, 14 nt, Artificial Sequence
  Description of Artificial Sequence: Synthetic oligonucleotide
guacuggaagcacc

SEQ ID NO: 13910 - RNA, 14 nt, Artificial Sequence
  Description of Artificial Sequence: Synthetic oligonucleotide
gguacuggaagcac

SEQ ID NO: 13911 - RNA, 14 nt, Artificial Sequence
  Description of Artificial Sequence: Synthetic oligonucleotide
ugguacuggaagca

SEQ ID NO: 13912 - RNA, 14 nt, Artificial Sequence
  Description of Artificial Sequence: Synthetic oligonucleotide
gugguacuggaagc

SEQ ID NO: 13913 - RNA, 14 nt, Artificial Sequence
  Description of Artificial Sequence: Synthetic oligonucleotide
ugugguacuggaag

SEQ ID NO: 13914 - RNA, 14 nt, Artificial Sequence
  Description of Artificial Sequence: Synthetic oligonucleotide
cugugguacuggaa

SEQ ID NO: 13915 - RNA, 14 nt, Artificial Sequence
  Description of Artificial Sequence: Synthetic oligonucleotide
ucugugguacugga

SEQ ID NO: 13916 - RNA, 14 nt, Artificial Sequence
  Description of Artificial Sequence: Synthetic oligonucleotide
aucugugguacugg

SEQ ID NO: 13917 - RNA, 14 nt, Artificial Sequence
  Description of Artificial Sequence: Synthetic oligonucleotide
caucugugguacug

SEQ ID NO: 13918 - RNA, 14 nt, Artificial Sequence
  Description of Artificial Sequence: Synthetic oligonucleotide
acaucugugguacu

SEQ ID NO: 13919 - RNA, 14 nt, Artificial Sequence
  Description of Artificial Sequence: Synthetic oligonucleotide
aacaucugugguac

SEQ ID NO: 13920 - RNA, 14 nt, Artificial Sequence
  Description of Artificial Sequence: Synthetic oligonucleotide
aaacaucuguggua

SEQ ID NO: 13921 - RNA, 14 nt, Artificial Sequence
  Description of Artificial Sequence: Synthetic oligonucleotide
caaacaucuguggu

SEQ ID NO: 13922 - RNA, 14 nt, Artificial Sequence
  Description of Artificial Sequence: Synthetic oligonucleotide
gcaaacaucugugg

SEQ ID NO: 13923 - RNA, 14 nt, Artificial Sequence
  Description of Artificial Sequence: Synthetic oligonucleotide
ugcaaacaucugug

SEQ ID NO: 13924 - RNA, 14 nt, Artificial Sequence
  Description of Artificial Sequence: Synthetic oligonucleotide
cugcaaacaucugu

SEQ ID NO: 13925 - RNA, 14 nt, Artificial Sequence
  Description of Artificial Sequence: Synthetic oligonucleotide
acugcaaacaucug

SEQ ID NO: 13926 - RNA, 14 nt, Artificial Sequence
  Description of Artificial Sequence: Synthetic oligonucleotide
cacugcaaacaucu

SEQ ID NO: 13927 - RNA, 14 nt, Artificial Sequence
  Description of Artificial Sequence: Synthetic oligonucleotide
acacugcaaacauc

SEQ ID NO: 13928 - RNA, 14 nt, Artificial Sequence
  Description of Artificial Sequence: Synthetic oligonucleotide
uacacugcaaacau

SEQ ID NO: 13929 - RNA, 14 nt, Artificial Sequence
  Description of Artificial Sequence: Synthetic oligonucleotide
auacacugcaaaca

SEQ ID NO: 13930 - RNA, 14 nt, Artificial Sequence
  Description of Artificial Sequence: Synthetic oligonucleotide
aauacacugcaaac

SEQ ID NO: 13931 - RNA, 14 nt, Artificial Sequence
  Description of Artificial Sequence: Synthetic oligonucleotide
aaauacacugcaaa

SEQ ID NO: 13932 - RNA, 14 nt, Artificial Sequence
  Description of Artificial Sequence: Synthetic oligonucleotide
caaauacacugcaa

SEQ ID NO: 13933 - RNA, 14 nt, Artificial Sequence
  Description of Artificial Sequence: Synthetic oligonucleotide
ucaaauacacugca

SEQ ID NO: 13934 - RNA, 14 nt, Artificial Sequence
  Description of Artificial Sequence: Synthetic oligonucleotide
aucaaauacacugc

SEQ ID NO: 13935 - RNA, 14 nt, Artificial Sequence
  Description of Artificial Sequence: Synthetic oligonucleotide
aaucaaauacacug

SEQ ID NO: 13936 - RNA, 14 nt, Artificial Sequence
  Description of Artificial Sequence: Synthetic oligonucleotide
gaaucaaauacacu

SEQ ID NO: 13937 - RNA, 14 nt, Artificial Sequence
  Description of Artificial Sequence: Synthetic oligonucleotide
ggaaucaaauacac

SEQ ID NO: 13938 - RNA, 14 nt, Artificial Sequence
  Description of Artificial Sequence: Synthetic oligonucleotide
cggaaucaaauaca

SEQ ID NO: 13939 - RNA, 14 nt, Artificial Sequence
  Description of Artificial Sequence: Synthetic oligonucleotide
ucggaaucaaauac

SEQ ID NO: 13940 - RNA, 14 nt, Artificial Sequence
  Description of Artificial Sequence: Synthetic oligonucleotide
aucggaaucaaaua

SEQ ID NO: 13941 - RNA, 14 nt, Artificial Sequence
  Description of Artificial Sequence: Synthetic oligonucleotide
gaucggaaucaaau

SEQ ID NO: 13942 - RNA, 14 nt, Artificial Sequence
  Description of Artificial Sequence: Synthetic oligonucleotide
ugaucggaaucaaa

SEQ ID NO: 13943 - RNA, 14 nt, Artificial Sequence
  Description of Artificial Sequence: Synthetic oligonucleotide
augaucggaaucaa

SEQ ID NO: 13944 - RNA, 14 nt, Artificial Sequence
  Description of Artificial Sequence: Synthetic oligonucleotide
aaugaucggaauca

SEQ ID NO: 13945 - RNA, 14 nt, Artificial Sequence
  Description of Artificial Sequence: Synthetic oligonucleotide
gaaugaucggaauc

SEQ ID NO: 13946 - RNA, 14 nt, Artificial Sequence
  Description of Artificial Sequence: Synthetic oligonucleotide
cgaaugaucggaau

SEQ ID NO: 13947 - RNA, 14 nt, Artificial Sequence
  Description of Artificial Sequence: Synthetic oligonucleotide
ucgaaugaucggaa

SEQ ID NO: 13948 - RNA, 14 nt, Artificial Sequence
  Description of Artificial Sequence: Synthetic oligonucleotide
cucgaaugaucgga

SEQ ID NO: 13949 - RNA, 14 nt, Artificial Sequence
  Description of Artificial Sequence: Synthetic oligonucleotide
gcucgaaugaucgg

SEQ ID NO: 13950 - RNA, 14 nt, Artificial Sequence
  Description of Artificial Sequence: Synthetic oligonucleotide
ggcucgaaugaucg

SEQ ID NO: 13951 - RNA, 14 nt, Artificial Sequence
  Description of Artificial Sequence: Synthetic oligonucleotide
gggcucgaaugauc

SEQ ID NO: 13952 - RNA, 14 nt, Artificial Sequence
  Description of Artificial Sequence: Synthetic oligonucleotide
agggcucgaaugau

SEQ ID NO: 13953 - RNA, 14 nt, Artificial Sequence
  Description of Artificial Sequence: Synthetic oligonucleotide
aagggcucgaauga

SEQ ID NO: 13954 - RNA, 14 nt, Artificial Sequence
  Description of Artificial Sequence: Synthetic oligonucleotide
aaagggcucgaaug

SEQ ID NO: 13955 - RNA, 14 nt, Artificial Sequence
  Description of Artificial Sequence: Synthetic oligonucleotide
aaaagggcucgaau

SEQ ID NO: 13956 - RNA, 14 nt, Artificial Sequence
  Description of Artificial Sequence: Synthetic oligonucleotide
gaaaagggcucgaa

SEQ ID NO: 13957 - RNA, 14 nt, Artificial Sequence
  Description of Artificial Sequence: Synthetic oligonucleotide
ugaaaagggcucga

SEQ ID NO: 13958 - RNA, 14 nt, Artificial Sequence
  Description of Artificial Sequence: Synthetic oligonucleotide
gugaaaagggcucg

SEQ ID NO: 13959 - RNA, 14 nt, Artificial Sequence
  Description of Artificial Sequence: Synthetic oligonucleotide
agugaaaagggcuc

SEQ ID NO: 13960 - RNA, 14 nt, Artificial Sequence
  Description of Artificial Sequence: Synthetic oligonucleotide
gagugaaaagggcu

SEQ ID NO: 13961 - RNA, 14 nt, Artificial Sequence
  Description of Artificial Sequence: Synthetic oligonucleotide
ugagugaaaagggc

SEQ ID NO: 13962 - RNA, 14 nt, Artificial Sequence
  Description of Artificial Sequence: Synthetic oligonucleotide
uugagugaaaaggg

SEQ ID NO: 13963 - RNA, 14 nt, Artificial Sequence
  Description of Artificial Sequence: Synthetic oligonucleotide
cuugagugaaaagg

SEQ ID NO: 13964 - RNA, 14 nt, Artificial Sequence
  Description of Artificial Sequence: Synthetic oligonucleotide
ucuugagugaaaag

SEQ ID NO: 13965 - RNA, 14 nt, Artificial Sequence
  Description of Artificial Sequence: Synthetic oligonucleotide
aucuugagugaaaa

SEQ ID NO: 13966 - RNA, 14 nt, Artificial Sequence
  Description of Artificial Sequence: Synthetic oligonucleotide
gaucuugagugaaa

SEQ ID NO: 13967 - RNA, 14 nt, Artificial Sequence
  Description of Artificial Sequence: Synthetic oligonucleotide
agaucuugagugaa

SEQ ID NO: 13968 - RNA, 14 nt, Artificial Sequence
  Description of Artificial Sequence: Synthetic oligonucleotide
cagaucuugaguga

SEQ ID NO: 13969 - RNA, 14 nt, Artificial Sequence
  Description of Artificial Sequence: Synthetic oligonucleotide
gcagaucuugagug

SEQ ID NO: 13970 - RNA, 14 nt, Artificial Sequence
  Description of Artificial Sequence: Synthetic oligonucleotide
agcagaucuugagu

SEQ ID NO: 13971 - RNA, 14 nt, Artificial Sequence
  Description of Artificial Sequence: Synthetic oligonucleotide
aagcagaucuugag

SEQ ID NO: 13972 - RNA, 14 nt, Artificial Sequence
  Description of Artificial Sequence: Synthetic oligonucleotide
gaagcagaucuuga

SEQ ID NO: 13973 - RNA, 14 nt, Artificial Sequence
  Description of Artificial Sequence: Synthetic oligonucleotide
agaagcagaucuug

SEQ ID NO: 13974 - RNA, 14 nt, Artificial Sequence
  Description of Artificial Sequence: Synthetic oligonucleotide
cagaagcagaucuu

SEQ ID NO: 13975 - RNA, 14 nt, Artificial Sequence
  Description of Artificial Sequence: Synthetic oligonucleotide
acagaagcagaucu

SEQ ID NO: 13976 - RNA, 14 nt, Artificial Sequence
  Description of Artificial Sequence: Synthetic oligonucleotide
uacagaagcagauc

SEQ ID NO: 13977 - RNA, 14 nt, Artificial Sequence
  Description of Artificial Sequence: Synthetic oligonucleotide
auacagaagcagau

SEQ ID NO: 13978 - RNA, 14 nt, Artificial Sequence
  Description of Artificial Sequence: Synthetic oligonucleotide
gauacagaagcaga

SEQ ID NO: 13979 - RNA, 14 nt, Artificial Sequence
  Description of Artificial Sequence: Synthetic oligonucleotide
ugauacagaagcag

SEQ ID NO: 13980 - RNA, 14 nt, Artificial Sequence
  Description of Artificial Sequence: Synthetic oligonucleotide
augauacagaagca

SEQ ID NO: 13981 - RNA, 14 nt, Artificial Sequence
  Description of Artificial Sequence: Synthetic oligonucleotide
gaugauacagaagc

SEQ ID NO: 13982 - RNA, 14 nt, Artificial Sequence
  Description of Artificial Sequence: Synthetic oligonucleotide
agaugauacagaag

SEQ ID NO: 13983 - RNA, 14 nt, Artificial Sequence
  Description of Artificial Sequence: Synthetic oligonucleotide
uagaugauacagaa

SEQ ID NO: 13984 - RNA, 14 nt, Artificial Sequence
  Description of Artificial Sequence: Synthetic oligonucleotide
auagaugauacaga

SEQ ID NO: 13985 - RNA, 14 nt, Artificial Sequence
  Description of Artificial Sequence: Synthetic oligonucleotide
uauagaugauacag

SEQ ID NO: 13986 - RNA, 14 nt, Artificial Sequence
  Description of Artificial Sequence: Synthetic oligonucleotide
uuauagaugauaca

SEQ ID NO: 13987 - RNA, 14 nt, Artificial Sequence
  Description of Artificial Sequence: Synthetic oligonucleotide
cuuauagaugauac

SEQ ID NO: 13988 - RNA, 14 nt, Artificial Sequence
  Description of Artificial Sequence: Synthetic oligonucleotide
acuuauagaugaua

SEQ ID NO: 13989 - RNA, 14 nt, Artificial Sequence
  Description of Artificial Sequence: Synthetic oligonucleotide
aacuuauagaugau

SEQ ID NO: 13990 - RNA, 14 nt, Artificial Sequence
  Description of Artificial Sequence: Synthetic oligonucleotide
aaacuuauagauga

SEQ ID NO: 13991 - RNA, 14 nt, Artificial Sequence
  Description of Artificial Sequence: Synthetic oligonucleotide
uaaacuuauagaug

SEQ ID NO: 13992 - RNA, 14 nt, Artificial Sequence
  Description of Artificial Sequence: Synthetic oligonucleotide
uuaaacuuauagau

SEQ ID NO: 13993 - RNA, 14 nt, Artificial Sequence
  Description of Artificial Sequence: Synthetic oligonucleotide
guuaaacuuauaga

SEQ ID NO: 13994 - RNA, 14 nt, Artificial Sequence
  Description of Artificial Sequence: Synthetic oligonucleotide
gguuaaacuuauag

SEQ ID NO: 13995 - RNA, 14 nt, Artificial Sequence
  Description of Artificial Sequence: Synthetic oligonucleotide
ugguuaaacuuaua

SEQ ID NO: 13996 - RNA, 14 nt, Artificial Sequence
  Description of Artificial Sequence: Synthetic oligonucleotide
uugguuaaacuuau

SEQ ID NO: 13997 - RNA, 14 nt, Artificial Sequence
  Description of Artificial Sequence: Synthetic oligonucleotide
uuugguuaaacuua

SEQ ID NO: 13998 - RNA, 14 nt, Artificial Sequence
  Description of Artificial Sequence: Synthetic oligonucleotide
cuuugguuaaacuu

SEQ ID NO: 13999 - RNA, 14 nt, Artificial Sequence
  Description of Artificial Sequence: Synthetic oligonucleotide
ccuuugguuaaacu

SEQ ID NO: 14000 - RNA, 14 nt, Artificial Sequence
  Description of Artificial Sequence: Synthetic oligonucleotide
gccuuugguuaaac

SEQ ID NO: 14001 - RNA, 14 nt, Artificial Sequence
  Description of Artificial Sequence: Synthetic oligonucleotide
ugccuuugguuaaa

SEQ ID NO: 14002 - RNA, 14 nt, Artificial Sequence
  Description of Artificial Sequence: Synthetic oligonucleotide
gugccuuugguuaa

SEQ ID NO: 14003 - RNA, 14 nt, Artificial Sequence
  Description of Artificial Sequence: Synthetic oligonucleotide
agugccuuugguua

SEQ ID NO: 14004 - RNA, 14 nt, Artificial Sequence
  Description of Artificial Sequence: Synthetic oligonucleotide
cagugccuuugguu

SEQ ID NO: 14005 - RNA, 14 nt, Artificial Sequence
  Description of Artificial Sequence: Synthetic oligonucleotide
ucagugccuuuggu

SEQ ID NO: 14006 - RNA, 14 nt, Artificial Sequence
  Description of Artificial Sequence: Synthetic oligonucleotide
aucagugccuuugg

SEQ ID NO: 14007 - RNA, 14 nt, Artificial Sequence
  Description of Artificial Sequence: Synthetic oligonucleotide
caucagugccuuug

SEQ ID NO: 14008 - RNA, 14 nt, Artificial Sequence
  Description of Artificial Sequence: Synthetic oligonucleotide
ucaucagugccuuu

SEQ ID NO: 14009 - RNA, 14 nt, Artificial Sequence
  Description of Artificial Sequence: Synthetic oligonucleotide
uucaucagugccuu

SEQ ID NO: 14010 - RNA, 14 nt, Artificial Sequence
  Description of Artificial Sequence: Synthetic oligonucleotide
cuucaucagugccu

SEQ ID NO: 14011 - RNA, 14 nt, Artificial Sequence
  Description of Artificial Sequence: Synthetic oligonucleotide
acuucaucagugcc

SEQ ID NO: 14012 - RNA, 14 nt, Artificial Sequence
  Description of Artificial Sequence: Synthetic oligonucleotide
cacuucaucagugc

SEQ ID NO: 14013 - RNA, 14 nt, Artificial Sequence
  Description of Artificial Sequence: Synthetic oligonucleotide
gcacuucaucagug

SEQ ID NO: 14014 - RNA, 14 nt, Artificial Sequence
  Description of Artificial Sequence: Synthetic oligonucleotide
ggcacuucaucagu

SEQ ID NO: 14015 - RNA, 14 nt, Artificial Sequence
  Description of Artificial Sequence: Synthetic oligonucleotide
aggcacuucaucag

SEQ ID NO: 14016 - RNA, 14 nt, Artificial Sequence
  Description of Artificial Sequence: Synthetic oligonucleotide
caggcacuucauca

SEQ ID NO: 14017 - RNA, 14 nt, Artificial Sequence
  Description of Artificial Sequence: Synthetic oligonucleotide
acaggcacuucauc

SEQ ID NO: 14018 - RNA, 14 nt, Artificial Sequence
  Description of Artificial Sequence: Synthetic oligonucleotide
gacaggcacuucau

SEQ ID NO: 14019 - RNA, 14 nt, Artificial Sequence
  Description of Artificial Sequence: Synthetic oligonucleotide
ggacaggcacuuca

SEQ ID NO: 14020 - RNA, 14 nt, Artificial Sequence
  Description of Artificial Sequence: Synthetic oligonucleotide
gggacaggcacuuc

SEQ ID NO: 14021 - RNA, 14 nt, Artificial Sequence
  Description of Artificial Sequence: Synthetic oligonucleotide
agggacaggcacuu

SEQ ID NO: 14022 - RNA, 14 nt, Artificial Sequence
  Description of Artificial Sequence: Synthetic oligonucleotide
gagggacaggcacu

SEQ ID NO: 14023 - DNA, 14 bp, Artificial Sequence
  Description of Artificial Sequence: Synthetic oligonucleotide
ggagggacaggcac

SEQ ID NO: 14024 - DNA, 14 bp, Artificial Sequence
  Description of Artificial Sequence: Synthetic oligonucleotide
aggagggacaggca

SEQ ID NO: 14025 - DNA, 14 bp, Artificial Sequence
  Description of Artificial Sequence: Synthetic oligonucleotide
gaggagggacaggc

SEQ ID NO: 14026 - DNA, 14 bp, Artificial Sequence
  Description of Artificial Sequence: Synthetic oligonucleotide
ggaggagggacagg

SEQ ID NO: 14027 - DNA, 14 bp, Artificial Sequence
  Description of Artificial Sequence: Synthetic oligonucleotide
aggaggagggacag

SEQ ID NO: 14028 - DNA, 14 bp, Artificial Sequence
  Description of Artificial Sequence: Synthetic oligonucleotide
caggaggagggaca

SEQ ID NO: 14029 - DNA, 14 bp, Artificial Sequence
  Description of Artificial Sequence: Synthetic oligonucleotide
acaggaggagggac

SEQ ID NO: 14030 - DNA, 14 bp, Artificial Sequence
  Description of Artificial Sequence: Synthetic oligonucleotide
aacaggaggaggga

SEQ ID NO: 14031 - DNA, 14 bp, Artificial Sequence
  Description of Artificial Sequence: Synthetic oligonucleotide
gaacaggaggaggg

SEQ ID NO: 14032 - DNA, 14 bp, Artificial Sequence
  Description of Artificial Sequence: Synthetic oligonucleotide
ggaacaggaggagg

SEQ ID NO: 14033 - DNA, 14 bp, Artificial Sequence
  Description of Artificial Sequence: Synthetic oligonucleotide
aggaacaggaggag

SEQ ID NO: 14034 - DNA, 14 bp, Artificial Sequence
  Description of Artificial Sequence: Synthetic oligonucleotide
gaggaacaggagga

SEQ ID NO: 14035 - DNA, 14 bp, Artificial Sequence
  Description of Artificial Sequence: Synthetic oligonucleotide
ggaggaacaggagg

SEQ ID NO: 14036 - RNA, 14 nt, Artificial Sequence
  Description of Artificial Sequence: Synthetic oligonucleotide
uggaggaacaggag

SEQ ID NO: 14037 - RNA, 14 nt, Artificial Sequence
  Description of Artificial Sequence: Synthetic oligonucleotide
guggaggaacagga

SEQ ID NO: 14038 - RNA, 14 nt, Artificial Sequence
  Description of Artificial Sequence: Synthetic oligonucleotide
cguggaggaacagg

SEQ ID NO: 14039 - RNA, 14 nt, Artificial Sequence
  Description of Artificial Sequence: Synthetic oligonucleotide
ucguggaggaacag

SEQ ID NO: 14040 - RNA, 14 nt, Artificial Sequence
  Description of Artificial Sequence: Synthetic oligonucleotide
uucguggaggaaca

SEQ ID NO: 14041 - RNA, 14 nt, Artificial Sequence
  Description of Artificial Sequence: Synthetic oligonucleotide
cuucguggaggaac

SEQ ID NO: 14042 - RNA, 14 nt, Artificial Sequence
  Description of Artificial Sequence: Synthetic oligonucleotide
ucuucguggaggaa

SEQ ID NO: 14043 - RNA, 14 nt, Artificial Sequence
  Description of Artificial Sequence: Synthetic oligonucleotide
gucuucguggagga

SEQ ID NO: 14044 - RNA, 14 nt, Artificial Sequence
  Description of Artificial Sequence: Synthetic oligonucleotide
cgucuucguggagg

SEQ ID NO: 14045 - RNA, 14 nt, Artificial Sequence
  Description of Artificial Sequence: Synthetic oligonucleotide
ucgucuucguggag

SEQ ID NO: 14046 - RNA, 14 nt, Artificial Sequence
  Description of Artificial Sequence: Synthetic oligonucleotide
gucgucuucgugga

SEQ ID NO: 14047 - RNA, 14 nt, Artificial Sequence
  Description of Artificial Sequence: Synthetic oligonucleotide
ggucgucuucgugg

SEQ ID NO: 14048 - RNA, 14 nt, Artificial Sequence
  Description of Artificial Sequence: Synthetic oligonucleotide
uggucgucuucgug

SEQ ID NO: 14049 - RNA, 14 nt, Artificial Sequence
  Description of Artificial Sequence: Synthetic oligonucleotide
cuggucgucuucgu

SEQ ID NO: 14050 - RNA, 14 nt, Artificial Sequence
  Description of Artificial Sequence: Synthetic oligonucleotide
ucuggucgucuucg

SEQ ID NO: 14051 - RNA, 14 nt, Artificial Sequence
  Description of Artificial Sequence: Synthetic oligonucleotide
uucuggucgucuuc

SEQ ID NO: 14052 - RNA, 14 nt, Artificial Sequence
  Description of Artificial Sequence: Synthetic oligonucleotide
auucuggucgucuu

SEQ ID NO: 14053 - RNA, 14 nt, Artificial Sequence
  Description of Artificial Sequence: Synthetic oligonucleotide
gauucuggucgucu

SEQ ID NO: 14054 - RNA, 14 nt, Artificial Sequence
  Description of Artificial Sequence: Synthetic oligonucleotide
agauucuggucguc

SEQ ID NO: 14055 - RNA, 14 nt, Artificial Sequence
  Description of Artificial Sequence: Synthetic oligonucleotide
cagauucuggucgu

SEQ ID NO: 14056 - RNA, 14 nt, Artificial Sequence
  Description of Artificial Sequence: Synthetic oligonucleotide
gcagauucuggucg

SEQ ID NO: 14057 - RNA, 14 nt, Artificial Sequence
  Description of Artificial Sequence: Synthetic oligonucleotide
ggcagauucugguc

SEQ ID NO: 14058 - RNA, 14 nt, Artificial Sequence
  Description of Artificial Sequence: Synthetic oligonucleotide
gggcagauucuggu

SEQ ID NO: 14059 - RNA, 14 nt, Artificial Sequence
  Description of Artificial Sequence: Synthetic oligonucleotide
ggggcagauucugg

SEQ ID NO: 14060 - RNA, 14 nt, Artificial Sequence
  Description of Artificial Sequence: Synthetic oligonucleotide
uggggcagauucug

SEQ ID NO: 14061 - RNA, 14 nt, Artificial Sequence
  Description of Artificial Sequence: Synthetic oligonucleotide
cuggggcagauucu

SEQ ID NO: 14062 - RNA, 14 nt, Artificial Sequence
  Description of Artificial Sequence: Synthetic oligonucleotide
gcuggggcagauuc

SEQ ID NO: 14063 - RNA, 14 nt, Artificial Sequence
  Description of Artificial Sequence: Synthetic oligonucleotide
ugcuggggcagauu

SEQ ID NO: 14064 - RNA, 14 nt, Artificial Sequence
  Description of Artificial Sequence: Synthetic oligonucleotide
cugcuggggcagau

SEQ ID NO: 14065 - RNA, 14 nt, Artificial Sequence
  Description of Artificial Sequence: Synthetic oligonucleotide
ucugcuggggcaga

SEQ ID NO: 14066 - RNA, 14 nt, Artificial Sequence
  Description of Artificial Sequence: Synthetic oligonucleotide
uucugcuggggcag

SEQ ID NO: 14067 - RNA, 14 nt, Artificial Sequence
  Description of Artificial Sequence: Synthetic oligonucleotide
auucugcuggggca

SEQ ID NO: 14068 - RNA, 14 nt, Artificial Sequence
  Description of Artificial Sequence: Synthetic oligonucleotide
gauucugcuggggc

SEQ ID NO: 14069 - RNA, 14 nt, Artificial Sequence
  Description of Artificial Sequence: Synthetic oligonucleotide
agauucugcugggg

SEQ ID NO: 14070 - RNA, 14 nt, Artificial Sequence
  Description of Artificial Sequence: Synthetic oligonucleotide
aagauucugcuggg

SEQ ID NO: 14071 - RNA, 14 nt, Artificial Sequence
  Description of Artificial Sequence: Synthetic oligonucleotide
gaagauucugcugg

SEQ ID NO: 14072 - RNA, 14 nt, Artificial Sequence
  Description of Artificial Sequence: Synthetic oligonucleotide
ugaagauucugcug

SEQ ID NO: 14073 - RNA, 14 nt, Artificial Sequence
  Description of Artificial Sequence: Synthetic oligonucleotide
gugaagauucugcu

SEQ ID NO: 14074 - RNA, 14 nt, Artificial Sequence
  Description of Artificial Sequence: Synthetic oligonucleotide
ggugaagauucugc

SEQ ID NO: 14075 - RNA, 14 nt, Artificial Sequence
  Description of Artificial Sequence: Synthetic oligonucleotide
uggugaagauucug

SEQ ID NO: 14076 - RNA, 14 nt, Artificial Sequence
  Description of Artificial Sequence: Synthetic oligonucleotide
auggugaagauucu

SEQ ID NO: 14077 - RNA, 14 nt, Artificial Sequence
  Description of Artificial Sequence: Synthetic oligonucleotide
gauggugaagauuc

SEQ ID NO: 14078 - RNA, 14 nt, Artificial Sequence
  Description of Artificial Sequence: Synthetic oligonucleotide
agauggugaagauu

SEQ ID NO: 14079 - RNA, 14 nt, Artificial Sequence
  Description of Artificial Sequence: Synthetic oligonucleotide
uagauggugaagau

SEQ ID NO: 14080 - RNA, 14 nt, Artificial Sequence
  Description of Artificial Sequence: Synthetic oligonucleotide
uuagauggugaaga

SEQ ID NO: 14081 - RNA, 14 nt, Artificial Sequence
  Description of Artificial Sequence: Synthetic oligonucleotide
cuuagauggugaag

SEQ ID NO: 14082 - RNA, 14 nt, Artificial Sequence
  Description of Artificial Sequence: Synthetic oligonucleotide
ucuuagauggugaa

SEQ ID NO: 14083 - RNA, 14 nt, Artificial Sequence
  Description of Artificial Sequence: Synthetic oligonucleotide
aucuuagaugguga

SEQ ID NO: 14084 - RNA, 14 nt, Artificial Sequence
  Description of Artificial Sequence: Synthetic oligonucleotide
aaucuuagauggug

SEQ ID NO: 14085 - RNA, 14 nt, Artificial Sequence
  Description of Artificial Sequence: Synthetic oligonucleotide
uaaucuuagauggu

SEQ ID NO: 14086 - RNA, 14 nt, Artificial Sequence
  Description of Artificial Sequence: Synthetic oligonucleotide
auaaucuuagaugg

SEQ ID NO: 14087 - RNA, 14 nt, Artificial Sequence
  Description of Artificial Sequence: Synthetic oligonucleotide
cauaaucuuagaug

SEQ ID NO: 14088 - RNA, 14 nt, Artificial Sequence
  Description of Artificial Sequence: Synthetic oligonucleotide
acauaaucuuagau

SEQ ID NO: 14089 - RNA, 14 nt, Artificial Sequence
  Description of Artificial Sequence: Synthetic oligonucleotide
gacauaaucuuaga

SEQ ID NO: 14090 - RNA, 14 nt, Artificial Sequence
  Description of Artificial Sequence: Synthetic oligonucleotide
agacauaaucuuag

SEQ ID NO: 14091 - RNA, 14 nt, Artificial Sequence
  Description of Artificial Sequence: Synthetic oligonucleotide
uagacauaaucuua

SEQ ID NO: 14092 - RNA, 14 nt, Artificial Sequence
  Description of Artificial Sequence: Synthetic oligonucleotide
uuagacauaaucuu

SEQ ID NO: 14093 - RNA, 14 nt, Artificial Sequence
  Description of Artificial Sequence: Synthetic oligonucleotide
cuuagacauaaucu

SEQ ID NO: 14094 - RNA, 14 nt, Artificial Sequence
  Description of Artificial Sequence: Synthetic oligonucleotide
gcuuagacauaauc

SEQ ID NO: 14095 - RNA, 14 nt, Artificial Sequence
  Description of Artificial Sequence: Synthetic oligonucleotide
ugcuuagacauaau

SEQ ID NO: 14096 - RNA, 14 nt, Artificial Sequence
  Description of Artificial Sequence: Synthetic oligonucleotide
augcuuagacauaa

SEQ ID NO: 14097 - RNA, 14 nt, Artificial Sequence
  Description of Artificial Sequence: Synthetic oligonucleotide
aaugcuuagacaua

SEQ ID NO: 14098 - RNA, 14 nt, Artificial Sequence
  Description of Artificial Sequence: Synthetic oligonucleotide
aaaugcuuagacau

SEQ ID NO: 14099 - RNA, 14 nt, Artificial Sequence
  Description of Artificial Sequence: Synthetic oligonucleotide
caaaugcuuagaca

SEQ ID NO: 14100 - RNA, 14 nt, Artificial Sequence
  Description of Artificial Sequence: Synthetic oligonucleotide
ccaaaugcuuagac

SEQ ID NO: 14101 - RNA, 14 nt, Artificial Sequence
  Description of Artificial Sequence: Synthetic oligonucleotide
uccaaaugcuuaga

SEQ ID NO: 14102 - RNA, 14 nt, Artificial Sequence
  Description of Artificial Sequence: Synthetic oligonucleotide
guccaaaugcuuag

SEQ ID NO: 14103 - RNA, 14 nt, Artificial Sequence
  Description of Artificial Sequence: Synthetic oligonucleotide
uguccaaaugcuua

SEQ ID NO: 14104 - RNA, 14 nt, Artificial Sequence
  Description of Artificial Sequence: Synthetic oligonucleotide
cuguccaaaugcuu

SEQ ID NO: 14105 - RNA, 14 nt, Artificial Sequence
  Description of Artificial Sequence: Synthetic oligonucleotide
acuguccaaaugcu

SEQ ID NO: 14106 - RNA, 14 nt, Artificial Sequence
  Description of Artificial Sequence: Synthetic oligonucleotide
gacuguccaaaugc

SEQ ID NO: 14107 - RNA, 14 nt, Artificial Sequence
  Description of Artificial Sequence: Synthetic oligonucleotide
ggacuguccaaaug

SEQ ID NO: 14108 - RNA, 14 nt, Artificial Sequence
  Description of Artificial Sequence: Synthetic oligonucleotide
gggacuguccaaau

SEQ ID NO: 14109 - RNA, 14 nt, Artificial Sequence
  Description of Artificial Sequence: Synthetic oligonucleotide
ggggacuguccaaa

SEQ ID NO: 14110 - RNA, 14 nt, Artificial Sequence
  Description of Artificial Sequence: Synthetic oligonucleotide
gggggacuguccaa

SEQ ID NO: 14111 - RNA, 14 nt, Artificial Sequence
  Description of Artificial Sequence: Synthetic oligonucleotide
ugggggacugucca

SEQ ID NO: 14112 - RNA, 14 nt, Artificial Sequence
  Description of Artificial Sequence: Synthetic oligonucleotide
cugggggacugucc

SEQ ID NO: 14113 - RNA, 14 nt, Artificial Sequence
  Description of Artificial Sequence: Synthetic oligonucleotide
gcugggggacuguc

SEQ ID NO: 14114 - RNA, 14 nt, Artificial Sequence
  Description of Artificial Sequence: Synthetic oligonucleotide
ggcugggggacugu

SEQ ID NO: 14115 - RNA, 14 nt, Artificial Sequence
  Description of Artificial Sequence: Synthetic oligonucleotide
uggcugggggacug

SEQ ID NO: 14116 - RNA, 14 nt, Artificial Sequence
  Description of Artificial Sequence: Synthetic oligonucleotide
auggcugggggacu

SEQ ID NO: 14117 - RNA, 14 nt, Artificial Sequence
  Description of Artificial Sequence: Synthetic oligonucleotide
aauggcugggggac

SEQ ID NO: 14118 - RNA, 14 nt, Artificial Sequence
  Description of Artificial Sequence: Synthetic oligonucleotide
gaauggcuggggga

SEQ ID NO: 14119 - RNA, 14 nt, Artificial Sequence
  Description of Artificial Sequence: Synthetic oligonucleotide
ggaauggcuggggg

SEQ ID NO: 14120 - RNA, 14 nt, Artificial Sequence
  Description of Artificial Sequence: Synthetic oligonucleotide
aggaauggcugggg

SEQ ID NO: 14121 - RNA, 14 nt, Artificial Sequence
  Description of Artificial Sequence: Synthetic oligonucleotide
gaggaauggcuggg

SEQ ID NO: 14122 - RNA, 14 nt, Artificial Sequence
  Description of Artificial Sequence: Synthetic oligonucleotide
ggaggaauggcugg

SEQ ID NO: 14123 - RNA, 14 nt, Artificial Sequence
  Description of Artificial Sequence: Synthetic oligonucleotide
aggaggaauggcug

SEQ ID NO: 14124 - RNA, 14 nt, Artificial Sequence
  Description of Artificial Sequence: Synthetic oligonucleotide
uaggaggaauggcu

SEQ ID NO: 14125 - RNA, 14 nt, Artificial Sequence
  Description of Artificial Sequence: Synthetic oligonucleotide
cuaggaggaauggc

SEQ ID NO: 14126 - RNA, 14 nt, Artificial Sequence
  Description of Artificial Sequence: Synthetic oligonucleotide
ccuaggaggaaugg

SEQ ID NO: 14127 - RNA, 14 nt, Artificial Sequence
  Description of Artificial Sequence: Synthetic oligonucleotide
gccuaggaggaaug

SEQ ID NO: 14128 - RNA, 14 nt, Artificial Sequence
  Description of Artificial Sequence: Synthetic oligonucleotide
ugccuaggaggaau

SEQ ID NO: 14129 - RNA, 14 nt, Artificial Sequence
  Description of Artificial Sequence: Synthetic oligonucleotide
uugccuaggaggaa

SEQ ID NO: 14130 - RNA, 14 nt, Artificial Sequence
  Description of Artificial Sequence: Synthetic oligonucleotide
guugccuaggagga

SEQ ID NO: 14131 - RNA, 14 nt, Artificial Sequence
  Description of Artificial Sequence: Synthetic oligonucleotide
gguugccuaggagg

SEQ ID NO: 14132 - RNA, 14 nt, Artificial Sequence
  Description of Artificial Sequence: Synthetic oligonucleotide
ggguugccuaggag

SEQ ID NO: 14133 - RNA, 14 nt, Artificial Sequence
  Description of Artificial Sequence: Synthetic oligonucleotide
uggguugccuagga

SEQ ID NO: 14134 - RNA, 14 nt, Artificial Sequence
  Description of Artificial Sequence: Synthetic oligonucleotide
guggguugccuagg

SEQ ID NO: 14135 - RNA, 14 nt, Artificial Sequence
  Description of Artificial Sequence: Synthetic oligonucleotide
uguggguugccuag

SEQ ID NO: 14136 - RNA, 14 nt, Artificial Sequence
  Description of Artificial Sequence: Synthetic oligonucleotide
auguggguugccua

SEQ ID NO: 14137 - RNA, 14 nt, Artificial Sequence
  Description of Artificial Sequence: Synthetic oligonucleotide
gauguggguugccu

SEQ ID NO: 14138 - RNA, 14 nt, Artificial Sequence
  Description of Artificial Sequence: Synthetic oligonucleotide
ugauguggguugcc

SEQ ID NO: 14139 - RNA, 14 nt, Artificial Sequence
  Description of Artificial Sequence: Synthetic oligonucleotide
uugauguggguugc

SEQ ID NO: 14140 - RNA, 14 nt, Artificial Sequence
  Description of Artificial Sequence: Synthetic oligonucleotide
uuugauguggguug

SEQ ID NO: 14141 - RNA, 14 nt, Artificial Sequence
  Description of Artificial Sequence: Synthetic oligonucleotide
uuuugauguggguu

SEQ ID NO: 14142 - RNA, 14 nt, Artificial Sequence
  Description of Artificial Sequence: Synthetic oligonucleotide
cuuuugaugugggu

SEQ ID NO: 14143 - RNA, 14 nt, Artificial Sequence
  Description of Artificial Sequence: Synthetic oligonucleotide
gcuuuugauguggg

SEQ ID NO: 14144 - RNA, 14 nt, Artificial Sequence
  Description of Artificial Sequence: Synthetic oligonucleotide
ggcuuuugaugugg

SEQ ID NO: 14145 - RNA, 14 nt, Artificial Sequence
  Description of Artificial Sequence: Synthetic oligonucleotide
aggcuuuugaugug

SEQ ID NO: 14146 - RNA, 14 nt, Artificial Sequence
  Description of Artificial Sequence: Synthetic oligonucleotide
uaggcuuuugaugu

SEQ ID NO: 14147 - RNA, 14 nt, Artificial Sequence
  Description of Artificial Sequence: Synthetic oligonucleotide
auaggcuuuugaug

SEQ ID NO: 14148 - RNA, 14 nt, Artificial Sequence
  Description of Artificial Sequence: Synthetic oligonucleotide
aauaggcuuuugau

SEQ ID NO: 14149 - RNA, 14 nt, Artificial Sequence
  Description of Artificial Sequence: Synthetic oligonucleotide
gaauaggcuuuuga

SEQ ID NO: 14150 - RNA, 14 nt, Artificial Sequence
  Description of Artificial Sequence: Synthetic oligonucleotide
ugaauaggcuuuug

SEQ ID NO: 14151 - RNA, 14 nt, Artificial Sequence
  Description of Artificial Sequence: Synthetic oligonucleotide
gugaauaggcuuuu

SEQ ID NO: 14152 - RNA, 14 nt, Artificial Sequence
  Description of Artificial Sequence: Synthetic oligonucleotide
ggugaauaggcuuu

SEQ ID NO: 14153 - RNA, 14 nt, Artificial Sequence
  Description of Artificial Sequence: Synthetic oligonucleotide
uggugaauaggcuu

SEQ ID NO: 14154 - RNA, 14 nt, Artificial Sequence
  Description of Artificial Sequence: Synthetic oligonucleotide
guggugaauaggcu

SEQ ID NO: 14155 - RNA, 14 nt, Artificial Sequence
  Description of Artificial Sequence: Synthetic oligonucleotide
cguggugaauaggc

SEQ ID NO: 14156 - RNA, 14 nt, Artificial Sequence
  Description of Artificial Sequence: Synthetic oligonucleotide
ucguggugaauagg

SEQ ID NO: 14157 - RNA, 14 nt, Artificial Sequence
  Description of Artificial Sequence: Synthetic oligonucleotide
aucguggugaauag

SEQ ID NO: 14158 - RNA, 14 nt, Artificial Sequence
  Description of Artificial Sequence: Synthetic oligonucleotide
uaucguggugaaua

SEQ ID NO: 14159 - RNA, 14 nt, Artificial Sequence
  Description of Artificial Sequence: Synthetic oligonucleotide
auaucguggugaau

SEQ ID NO: 14160 - RNA, 14 nt, Artificial Sequence
  Description of Artificial Sequence: Synthetic oligonucleotide
aauaucguggugaa

SEQ ID NO: 14161 - RNA, 14 nt, Artificial Sequence
  Description of Artificial Sequence: Synthetic oligonucleotide
gaauaucgugguga

SEQ ID NO: 14162 - RNA, 14 nt, Artificial Sequence
  Description of Artificial Sequence: Synthetic oligonucleotide
ugaauaucguggug

SEQ ID NO: 14163 - RNA, 14 nt, Artificial Sequence
  Description of Artificial Sequence: Synthetic oligonucleotide
uugaauaucguggu

SEQ ID NO: 14164 - RNA, 14 nt, Artificial Sequence
  Description of Artificial Sequence: Synthetic oligonucleotide
auugaauaucgugg

SEQ ID NO: 14165 - RNA, 14 nt, Artificial Sequence
  Description of Artificial Sequence: Synthetic oligonucleotide
uauugaauaucgug

SEQ ID NO: 14166 - RNA, 14 nt, Artificial Sequence
  Description of Artificial Sequence: Synthetic oligonucleotide
auauugaauaucgu

SEQ ID NO: 14167 - RNA, 14 nt, Artificial Sequence
  Description of Artificial Sequence: Synthetic oligonucleotide
gauauugaauaucg

SEQ ID NO: 14168 - RNA, 14 nt, Artificial Sequence
  Description of Artificial Sequence: Synthetic oligonucleotide
ugauauugaauauc

SEQ ID NO: 14169 - RNA, 14 nt, Artificial Sequence
  Description of Artificial Sequence: Synthetic oligonucleotide
cugauauugaauau

SEQ ID NO: 14170 - RNA, 14 nt, Artificial Sequence
  Description of Artificial Sequence: Synthetic oligonucleotide
ucugauauugaaua

SEQ ID NO: 14171 - RNA, 14 nt, Artificial Sequence
  Description of Artificial Sequence: Synthetic oligonucleotide
gucugauauugaau

SEQ ID NO: 14172 - RNA, 14 nt, Artificial Sequence
  Description of Artificial Sequence: Synthetic oligonucleotide
ggucugauauugaa

SEQ ID NO: 14173 - RNA, 14 nt, Artificial Sequence
  Description of Artificial Sequence: Synthetic oligonucleotide
cggucugauauuga

SEQ ID NO: 14174 - RNA, 14 nt, Artificial Sequence
  Description of Artificial Sequence: Synthetic oligonucleotide
ccggucugauauug

SEQ ID NO: 14175 - RNA, 14 nt, Artificial Sequence
  Description of Artificial Sequence: Synthetic oligonucleotide
uccggucugauauu

SEQ ID NO: 14176 - RNA, 14 nt, Artificial Sequence
  Description of Artificial Sequence: Synthetic oligonucleotide
guccggucugauau

SEQ ID NO: 14177 - RNA, 14 nt, Artificial Sequence
  Description of Artificial Sequence: Synthetic oligonucleotide
gguccggucugaua

SEQ ID NO: 14178 - RNA, 14 nt, Artificial Sequence
  Description of Artificial Sequence: Synthetic oligonucleotide
agguccggucugau

SEQ ID NO: 14179 - RNA, 14 nt, Artificial Sequence
  Description of Artificial Sequence: Synthetic oligonucleotide
gagguccggucuga

SEQ ID NO: 14180 - RNA, 14 nt, Artificial Sequence
  Description of Artificial Sequence: Synthetic oligonucleotide
agagguccggucug

SEQ ID NO: 14181 - RNA, 14 nt, Artificial Sequence
  Description of Artificial Sequence: Synthetic oligonucleotide
uagagguccggucu

SEQ ID NO: 14182 - RNA, 14 nt, Artificial Sequence
  Description of Artificial Sequence: Synthetic oligonucleotide
auagagguccgguc

SEQ ID NO: 14183 - RNA, 14 nt, Artificial Sequence
  Description of Artificial Sequence: Synthetic oligonucleotide
gauagagguccggu

SEQ ID NO: 14184 - RNA, 14 nt, Artificial Sequence
  Description of Artificial Sequence: Synthetic oligonucleotide
agauagagguccgg

SEQ ID NO: 14185 - RNA, 14 nt, Artificial Sequence
  Description of Artificial Sequence: Synthetic oligonucleotide
gagauagagguccg

SEQ ID NO: 14186 - RNA, 14 nt, Artificial Sequence
  Description of Artificial Sequence: Synthetic oligonucleotide
ugagauagaggucc

SEQ ID NO: 14187 - RNA, 14 nt, Artificial Sequence
  Description of Artificial Sequence: Synthetic oligonucleotide
cugagauagagguc

SEQ ID NO: 14188 - RNA, 14 nt, Artificial Sequence
  Description of Artificial Sequence: Synthetic oligonucleotide
ucugagauagaggu

SEQ ID NO: 14189 - RNA, 14 nt, Artificial Sequence
  Description of Artificial Sequence: Synthetic oligonucleotide
gucugagauagagg

SEQ ID NO: 14190 - RNA, 14 nt, Artificial Sequence
  Description of Artificial Sequence: Synthetic oligonucleotide
ggucugagauagag

SEQ ID NO: 14191 - RNA, 14 nt, Artificial Sequence
  Description of Artificial Sequence: Synthetic oligonucleotide
gggucugagauaga

SEQ ID NO: 14192 - RNA, 14 nt, Artificial Sequence
  Description of Artificial Sequence: Synthetic oligonucleotide
agggucugagauag

SEQ ID NO: 14193 - RNA, 14 nt, Artificial Sequence
  Description of Artificial Sequence: Synthetic oligonucleotide
gagggucugagaua

SEQ ID NO: 14194 - RNA, 14 nt, Artificial Sequence
  Description of Artificial Sequence: Synthetic oligonucleotide
ggagggucugagau

SEQ ID NO: 14195 - RNA, 14 nt, Artificial Sequence
  Description of Artificial Sequence: Synthetic oligonucleotide
aggagggucugaga

SEQ ID NO: 14196 - RNA, 14 nt, Artificial Sequence
  Description of Artificial Sequence: Synthetic oligonucleotide
caggagggucugag

SEQ ID NO: 14197 - RNA, 14 nt, Artificial Sequence
  Description of Artificial Sequence: Synthetic oligonucleotide
ucaggagggucuga

SEQ ID NO: 14198 - RNA, 14 nt, Artificial Sequence
  Description of Artificial Sequence: Synthetic oligonucleotide
uucaggagggucug

SEQ ID NO: 14199 - RNA, 14 nt, Artificial Sequence
  Description of Artificial Sequence: Synthetic oligonucleotide
uuucaggagggucu

SEQ ID NO: 14200 - RNA, 14 nt, Artificial Sequence
  Description of Artificial Sequence: Synthetic oligonucleotide
cuuucaggaggguc

SEQ ID NO: 14201 - RNA, 14 nt, Artificial Sequence
  Description of Artificial Sequence: Synthetic oligonucleotide
gcuuucaggagggu

SEQ ID NO: 14202 - RNA, 14 nt, Artificial Sequence
  Description of Artificial Sequence: Synthetic oligonucleotide
ggcuuucaggaggg

SEQ ID NO: 14203 - RNA, 14 nt, Artificial Sequence
  Description of Artificial Sequence: Synthetic oligonucleotide
gggcuuucaggagg

SEQ ID NO: 14204 - RNA, 14 nt, Artificial Sequence
  Description of Artificial Sequence: Synthetic oligonucleotide
agggcuuucaggag

SEQ ID NO: 14205 - RNA, 14 nt, Artificial Sequence
  Description of Artificial Sequence: Synthetic oligonucleotide
gagggcuuucagga

SEQ ID NO: 14206 - RNA, 14 nt, Artificial Sequence
  Description of Artificial Sequence: Synthetic oligonucleotide
ggagggcuuucagg

SEQ ID NO: 14207 - RNA, 14 nt, Artificial Sequence
  Description of Artificial Sequence: Synthetic oligonucleotide
gggagggcuuucag

SEQ ID NO: 14208 - RNA, 14 nt, Artificial Sequence
  Description of Artificial Sequence: Synthetic oligonucleotide
agggagggcuuuca

SEQ ID NO: 14209 - RNA, 14 nt, Artificial Sequence
  Description of Artificial Sequence: Synthetic oligonucleotide
aagggagggcuuuc

SEQ ID NO: 14210 - RNA, 14 nt, Artificial Sequence
  Description of Artificial Sequence: Synthetic oligonucleotide
uaagggagggcuuu

SEQ ID NO: 14211 - RNA, 14 nt, Artificial Sequence
  Description of Artificial Sequence: Synthetic oligonucleotide
auaagggagggcuu

SEQ ID NO: 14212 - RNA, 14 nt, Artificial Sequence
  Description of Artificial Sequence: Synthetic oligonucleotide
aauaagggagggcu

SEQ ID NO: 14213 - RNA, 14 nt, Artificial Sequence
  Description of Artificial Sequence: Synthetic oligonucleotide
uaauaagggagggc

SEQ ID NO: 14214 - RNA, 14 nt, Artificial Sequence
  Description of Artificial Sequence: Synthetic oligonucleotide
guaauaagggaggg

SEQ ID NO: 14215 - RNA, 14 nt, Artificial Sequence
  Description of Artificial Sequence: Synthetic oligonucleotide
gguaauaagggagg

SEQ ID NO: 14216 - RNA, 14 nt, Artificial Sequence
  Description of Artificial Sequence: Synthetic oligonucleotide
ugguaauaagggag

SEQ ID NO: 14217 - RNA, 14 nt, Artificial Sequence
  Description of Artificial Sequence: Synthetic oligonucleotide
gugguaauaaggga

SEQ ID NO: 14218 - RNA, 14 nt, Artificial Sequence
  Description of Artificial Sequence: Synthetic oligonucleotide
ggugguaauaaggg

SEQ ID NO: 14219 - RNA, 14 nt, Artificial Sequence
  Description of Artificial Sequence: Synthetic oligonucleotide
uggugguaauaagg

SEQ ID NO: 14220 - RNA, 14 nt, Artificial Sequence
  Description of Artificial Sequence: Synthetic oligonucleotide
guggugguaauaag

SEQ ID NO: 14221 - RNA, 14 nt, Artificial Sequence
  Description of Artificial Sequence: Synthetic oligonucleotide
cguggugguaauaa

SEQ ID NO: 14222 - RNA, 14 nt, Artificial Sequence
  Description of Artificial Sequence: Synthetic oligonucleotide
ucguggugguaaua

SEQ ID NO: 14223 - RNA, 14 nt, Artificial Sequence
  Description of Artificial Sequence: Synthetic oligonucleotide
cucguggugguaau

SEQ ID NO: 14224 - RNA, 14 nt, Artificial Sequence
  Description of Artificial Sequence: Synthetic oligonucleotide
ucucguggugguaa

SEQ ID NO: 14225 - RNA, 14 nt, Artificial Sequence
  Description of Artificial Sequence: Synthetic oligonucleotide
uucucgugguggua

SEQ ID NO: 14226 - RNA, 14 nt, Artificial Sequence
  Description of Artificial Sequence: Synthetic oligonucleotide
guucucgugguggu

SEQ ID NO: 14227 - RNA, 14 nt, Artificial Sequence
  Description of Artificial Sequence: Synthetic oligonucleotide
gguucucguggugg

SEQ ID NO: 14228 - RNA, 14 nt, Artificial Sequence
  Description of Artificial Sequence: Synthetic oligonucleotide
agguucucguggug

SEQ ID NO: 14229 - RNA, 14 nt, Artificial Sequence
  Description of Artificial Sequence: Synthetic oligonucleotide
cagguucucguggu

SEQ ID NO: 14230 - RNA, 14 nt, Artificial Sequence
  Description of Artificial Sequence: Synthetic oligonucleotide
acagguucucgugg

SEQ ID NO: 14231 - RNA, 14 nt, Artificial Sequence
  Description of Artificial Sequence: Synthetic oligonucleotide
cacagguucucgug

SEQ ID NO: 14232 - RNA, 14 nt, Artificial Sequence
  Description of Artificial Sequence: Synthetic oligonucleotide
ucacagguucucgu

SEQ ID NO: 14233 - RNA, 14 nt, Artificial Sequence
  Description of Artificial Sequence: Synthetic oligonucleotide
cucacagguucucg

SEQ ID NO: 14234 - RNA, 14 nt, Artificial Sequence
  Description of Artificial Sequence: Synthetic oligonucleotide
ccucacagguucuc

SEQ ID NO: 14235 - RNA, 14 nt, Artificial Sequence
  Description of Artificial Sequence: Synthetic oligonucleotide
uccucacagguucu

SEQ ID NO: 14236 - RNA, 14 nt, Artificial Sequence
  Description of Artificial Sequence: Synthetic oligonucleotide
guccucacagguuc

SEQ ID NO: 14237 - RNA, 14 nt, Artificial Sequence
  Description of Artificial Sequence: Synthetic oligonucleotide
uguccucacagguu

SEQ ID NO: 14238 - RNA, 14 nt, Artificial Sequence
  Description of Artificial Sequence: Synthetic oligonucleotide
guguccucacaggu

SEQ ID NO: 14239 - RNA, 14 nt, Artificial Sequence
  Description of Artificial Sequence: Synthetic oligonucleotide
gguguccucacagg

SEQ ID NO: 14240 - RNA, 14 nt, Artificial Sequence
  Description of Artificial Sequence: Synthetic oligonucleotide
agguguccucacag

SEQ ID NO: 14241 - RNA, 14 nt, Artificial Sequence
  Description of Artificial Sequence: Synthetic oligonucleotide
cagguguccucaca

SEQ ID NO: 14242 - RNA, 14 nt, Artificial Sequence
  Description of Artificial Sequence: Synthetic oligonucleotide
ucagguguccucac

SEQ ID NO: 14243 - RNA, 14 nt, Artificial Sequence
  Description of Artificial Sequence: Synthetic oligonucleotide
aucagguguccuca

SEQ ID NO: 14244 - RNA, 14 nt, Artificial Sequence
  Description of Artificial Sequence: Synthetic oligonucleotide
caucagguguccuc

SEQ ID NO: 14245 - RNA, 14 nt, Artificial Sequence
  Description of Artificial Sequence: Synthetic oligonucleotide
acaucagguguccu

SEQ ID NO: 14246 - RNA, 14 nt, Artificial Sequence
  Description of Artificial Sequence: Synthetic oligonucleotide
aacaucaggugucc

SEQ ID NO: 14247 - RNA, 14 nt, Artificial Sequence
  Description of Artificial Sequence: Synthetic oligonucleotide
aaacaucagguguc

SEQ ID NO: 14248 - RNA, 14 nt, Artificial Sequence
  Description of Artificial Sequence: Synthetic oligonucleotide
aaaacaucaggugu

SEQ ID NO: 14249 - RNA, 14 nt, Artificial Sequence
  Description of Artificial Sequence: Synthetic oligonucleotide
gaaaacaucaggug

SEQ ID NO: 14250 - RNA, 14 nt, Artificial Sequence
  Description of Artificial Sequence: Synthetic oligonucleotide
agaaaacaucaggu

SEQ ID NO: 14251 - RNA, 14 nt, Artificial Sequence
  Description of Artificial Sequence: Synthetic oligonucleotide
gagaaaacaucagg

SEQ ID NO: 14252 - RNA, 14 nt, Artificial Sequence
  Description of Artificial Sequence: Synthetic oligonucleotide
ugagaaaacaucag

SEQ ID NO: 14253 - RNA, 14 nt, Artificial Sequence
  Description of Artificial Sequence: Synthetic oligonucleotide
uugagaaaacauca

SEQ ID NO: 14254 - RNA, 14 nt, Artificial Sequence
  Description of Artificial Sequence: Synthetic oligonucleotide
cuugagaaaacauc

SEQ ID NO: 14255 - RNA, 14 nt, Artificial Sequence
  Description of Artificial Sequence: Synthetic oligonucleotide
gcuugagaaaacau

SEQ ID NO: 14256 - RNA, 14 nt, Artificial Sequence
  Description of Artificial Sequence: Synthetic oligonucleotide
agcuugagaaaaca

SEQ ID NO: 14257 - RNA, 14 nt, Artificial Sequence
  Description of Artificial Sequence: Synthetic oligonucleotide
gagcuugagaaaac

SEQ ID NO: 14258 - RNA, 14 nt, Artificial Sequence
  Description of Artificial Sequence: Synthetic oligonucleotide
ugagcuugagaaaa

SEQ ID NO: 14259 - RNA, 14 nt, Artificial Sequence
  Description of Artificial Sequence: Synthetic oligonucleotide
gugagcuugagaaa

SEQ ID NO: 14260 - RNA, 14 nt, Artificial Sequence
  Description of Artificial Sequence: Synthetic oligonucleotide
ggugagcuugagaa

SEQ ID NO: 14261 - RNA, 14 nt, Artificial Sequence
  Description of Artificial Sequence: Synthetic oligonucleotide
uggugagcuugaga

SEQ ID NO: 14262 - RNA, 14 nt, Artificial Sequence
  Description of Artificial Sequence: Synthetic oligonucleotide
guggugagcuugag

SEQ ID NO: 14263 - RNA, 14 nt, Artificial Sequence
  Description of Artificial Sequence: Synthetic oligonucleotide
aguggugagcuuga

SEQ ID NO: 14264 - RNA, 14 nt, Artificial Sequence
  Description of Artificial Sequence: Synthetic oligonucleotide
uaguggugagcuug

SEQ ID NO: 14265 - RNA, 14 nt, Artificial Sequence
  Description of Artificial Sequence: Synthetic oligonucleotide
guaguggugagcuu

SEQ ID NO: 14266 - RNA, 14 nt, Artificial Sequence
  Description of Artificial Sequence: Synthetic oligonucleotide
uguaguggugagcu

SEQ ID NO: 14267 - RNA, 14 nt, Artificial Sequence
  Description of Artificial Sequence: Synthetic oligonucleotide
auguaguggugagc

SEQ ID NO: 14268 - RNA, 14 nt, Artificial Sequence
  Description of Artificial Sequence: Synthetic oligonucleotide
gauguaguggugag

SEQ ID NO: 14269 - RNA, 14 nt, Artificial Sequence
  Description of Artificial Sequence: Synthetic oligonucleotide
agauguagugguga

SEQ ID NO: 14270 - RNA, 14 nt, Artificial Sequence
  Description of Artificial Sequence: Synthetic oligonucleotide
gagauguaguggug

SEQ ID NO: 14271 - RNA, 14 nt, Artificial Sequence
  Description of Artificial Sequence: Synthetic oligonucleotide
ggagauguaguggu

SEQ ID NO: 14272 - RNA, 14 nt, Artificial Sequence
  Description of Artificial Sequence: Synthetic oligonucleotide
uggagauguagugg

SEQ ID NO: 14273 - RNA, 14 nt, Artificial Sequence
  Description of Artificial Sequence: Synthetic oligonucleotide
uuggagauguagug

SEQ ID NO: 14274 - RNA, 14 nt, Artificial Sequence
  Description of Artificial Sequence: Synthetic oligonucleotide
guuggagauguagu

SEQ ID NO: 14275 - RNA, 14 nt, Artificial Sequence
  Description of Artificial Sequence: Synthetic oligonucleotide
gguuggagauguag

SEQ ID NO: 14276 - RNA, 14 nt, Artificial Sequence
  Description of Artificial Sequence: Synthetic oligonucleotide
agguuggagaugua

SEQ ID NO: 14277 - RNA, 14 nt, Artificial Sequence
  Description of Artificial Sequence: Synthetic oligonucleotide
gagguuggagaugu

SEQ ID NO: 14278 - RNA, 14 nt, Artificial Sequence
  Description of Artificial Sequence: Synthetic oligonucleotide
ggagguuggagaug

SEQ ID NO: 14279 - RNA, 14 nt, Artificial Sequence
  Description of Artificial Sequence: Synthetic oligonucleotide
gggagguuggagau

SEQ ID NO: 14280 - RNA, 14 nt, Artificial Sequence
  Description of Artificial Sequence: Synthetic oligonucleotide
ggggagguuggaga

SEQ ID NO: 14281 - RNA, 14 nt, Artificial Sequence
  Description of Artificial Sequence: Synthetic oligonucleotide
gggggagguuggag

SEQ ID NO: 14282 - RNA, 14 nt, Artificial Sequence
  Description of Artificial Sequence: Synthetic oligonucleotide
agggggagguugga

SEQ ID NO: 14283 - RNA, 14 nt, Artificial Sequence
  Description of Artificial Sequence: Synthetic oligonucleotide
aagggggagguugg

SEQ ID NO: 14284 - RNA, 14 nt, Artificial Sequence
  Description of Artificial Sequence: Synthetic oligonucleotide
aaagggggagguug

SEQ ID NO: 14285 - RNA, 14 nt, Artificial Sequence
  Description of Artificial Sequence: Synthetic oligonucleotide
caaagggggagguu

SEQ ID NO: 14286 - RNA, 14 nt, Artificial Sequence
  Description of Artificial Sequence: Synthetic oligonucleotide
ccaaagggggaggu

SEQ ID NO: 14287 - DNA, 14 bp, Artificial Sequence
  Description of Artificial Sequence: Synthetic oligonucleotide
cccaaagggggagg

SEQ ID NO: 14288 - DNA, 14 bp, Artificial Sequence
  Description of Artificial Sequence: Synthetic oligonucleotide
gcccaaagggggag

SEQ ID NO: 14289 - RNA, 14 nt, Artificial Sequence
  Description of Artificial Sequence: Synthetic oligonucleotide
ugcccaaaggggga

SEQ ID NO: 14290 - RNA, 14 nt, Artificial Sequence
  Description of Artificial Sequence: Synthetic oligonucleotide
uugcccaaaggggg

SEQ ID NO: 14291 - RNA, 14 nt, Artificial Sequence
  Description of Artificial Sequence: Synthetic oligonucleotide
uuugcccaaagggg

SEQ ID NO: 14292 - RNA, 14 nt, Artificial Sequence
  Description of Artificial Sequence: Synthetic oligonucleotide
uuuugcccaaaggg

SEQ ID NO: 14293 - RNA, 14 nt, Artificial Sequence
  Description of Artificial Sequence: Synthetic oligonucleotide
uuuuugcccaaagg

SEQ ID NO: 14294 - RNA, 14 nt, Artificial Sequence
  Description of Artificial Sequence: Synthetic oligonucleotide
uuuuuugcccaaag

SEQ ID NO: 14295 - RNA, 14 nt, Artificial Sequence
  Description of Artificial Sequence: Synthetic oligonucleotide
uuuuuuugcccaaa

SEQ ID NO: 14296 - RNA, 14 nt, Artificial Sequence
  Description of Artificial Sequence: Synthetic oligonucleotide
cuuuuuuugcccaa

SEQ ID NO: 14297 - RNA, 14 nt, Artificial Sequence
  Description of Artificial Sequence: Synthetic oligonucleotide
acuuuuuuugccca

SEQ ID NO: 14298 - RNA, 14 nt, Artificial Sequence
  Description of Artificial Sequence: Synthetic oligonucleotide
cacuuuuuuugccc

SEQ ID NO: 14299 - RNA, 14 nt, Artificial Sequence
  Description of Artificial Sequence: Synthetic oligonucleotide
ucacuuuuuuugcc

SEQ ID NO: 14300 - RNA, 14 nt, Artificial Sequence
  Description of Artificial Sequence: Synthetic oligonucleotide
gucacuuuuuuugc

SEQ ID NO: 14301 - RNA, 14 nt, Artificial Sequence
  Description of Artificial Sequence: Synthetic oligonucleotide
ggucacuuuuuuug

SEQ ID NO: 14302 - RNA, 14 nt, Artificial Sequence
  Description of Artificial Sequence: Synthetic oligonucleotide
uggucacuuuuuuu

SEQ ID NO: 14303 - RNA, 14 nt, Artificial Sequence
  Description of Artificial Sequence: Synthetic oligonucleotide
auggucacuuuuuu

SEQ ID NO: 14304 - RNA, 14 nt, Artificial Sequence
  Description of Artificial Sequence: Synthetic oligonucleotide
cauggucacuuuuu

SEQ ID NO: 14305 - RNA, 14 nt, Artificial Sequence
  Description of Artificial Sequence: Synthetic oligonucleotide
ccauggucacuuuu

SEQ ID NO: 14306 - RNA, 14 nt, Artificial Sequence
  Description of Artificial Sequence: Synthetic oligonucleotide
gccauggucacuuu

SEQ ID NO: 14307 - RNA, 14 nt, Artificial Sequence
  Description of Artificial Sequence: Synthetic oligonucleotide
ugccauggucacuu

SEQ ID NO: 14308 - RNA, 14 nt, Artificial Sequence
  Description of Artificial Sequence: Synthetic oligonucleotide
uugccauggucacu

SEQ ID NO: 14309 - RNA, 14 nt, Artificial Sequence
  Description of Artificial Sequence: Synthetic oligonucleotide
auugccauggucac

SEQ ID NO: 14310 - RNA, 14 nt, Artificial Sequence
  Description of Artificial Sequence: Synthetic oligonucleotide
cauugccaugguca

SEQ ID NO: 14311 - RNA, 14 nt, Artificial Sequence
  Description of Artificial Sequence: Synthetic oligonucleotide
gcauugccaugguc

SEQ ID NO: 14312 - RNA, 14 nt, Artificial Sequence
  Description of Artificial Sequence: Synthetic oligonucleotide
ggcauugccauggu

SEQ ID NO: 14313 - RNA, 14 nt, Artificial Sequence
  Description of Artificial Sequence: Synthetic oligonucleotide
aggcauugccaugg

SEQ ID NO: 14314 - RNA, 14 nt, Artificial Sequence
  Description of Artificial Sequence: Synthetic oligonucleotide
aaggcauugccaug

SEQ ID NO: 14315 - RNA, 14 nt, Artificial Sequence
  Description of Artificial Sequence: Synthetic oligonucleotide
gaaggcauugccau

SEQ ID NO: 14316 - RNA, 14 nt, Artificial Sequence
  Description of Artificial Sequence: Synthetic oligonucleotide
agaaggcauugcca

SEQ ID NO: 14317 - RNA, 14 nt, Artificial Sequence
  Description of Artificial Sequence: Synthetic oligonucleotide
aagaaggcauugcc

SEQ ID NO: 14318 - RNA, 14 nt, Artificial Sequence
  Description of Artificial Sequence: Synthetic oligonucleotide
gaagaaggcauugc

SEQ ID NO: 14319 - RNA, 14 nt, Artificial Sequence
  Description of Artificial Sequence: Synthetic oligonucleotide
ggaagaaggcauug

SEQ ID NO: 14320 - RNA, 14 nt, Artificial Sequence
  Description of Artificial Sequence: Synthetic oligonucleotide
gggaagaaggcauu

SEQ ID NO: 14321 - RNA, 14 nt, Artificial Sequence
  Description of Artificial Sequence: Synthetic oligonucleotide
ugggaagaaggcau

SEQ ID NO: 14322 - RNA, 14 nt, Artificial Sequence
  Description of Artificial Sequence: Synthetic oligonucleotide
uugggaagaaggca

SEQ ID NO: 14323 - RNA, 14 nt, Artificial Sequence
  Description of Artificial Sequence: Synthetic oligonucleotide
uuugggaagaaggc

SEQ ID NO: 14324 - RNA, 14 nt, Artificial Sequence
  Description of Artificial Sequence: Synthetic oligonucleotide
guuugggaagaagg

SEQ ID NO: 14325 - RNA, 14 nt, Artificial Sequence
  Description of Artificial Sequence: Synthetic oligonucleotide
uguuugggaagaag

SEQ ID NO: 14326 - RNA, 14 nt, Artificial Sequence
  Description of Artificial Sequence: Synthetic oligonucleotide
cuguuugggaagaa

SEQ ID NO: 14327 - RNA, 14 nt, Artificial Sequence
  Description of Artificial Sequence: Synthetic oligonucleotide
gcuguuugggaaga

SEQ ID NO: 14328 - RNA, 14 nt, Artificial Sequence
  Description of Artificial Sequence: Synthetic oligonucleotide
ggcuguuugggaag

SEQ ID NO: 14329 - RNA, 14 nt, Artificial Sequence
  Description of Artificial Sequence: Synthetic oligonucleotide
gggcuguuugggaa

SEQ ID NO: 14330 - RNA, 14 nt, Artificial Sequence
  Description of Artificial Sequence: Synthetic oligonucleotide
agggcuguuuggga

SEQ ID NO: 14331 - RNA, 14 nt, Artificial Sequence
  Description of Artificial Sequence: Synthetic oligonucleotide
aagggcuguuuggg

SEQ ID NO: 14332 - RNA, 14 nt, Artificial Sequence
  Description of Artificial Sequence: Synthetic oligonucleotide
gaagggcuguuugg

SEQ ID NO: 14333 - RNA, 14 nt, Artificial Sequence
  Description of Artificial Sequence: Synthetic oligonucleotide
ggaagggcuguuug

SEQ ID NO: 14334 - RNA, 14 nt, Artificial Sequence
  Description of Artificial Sequence: Synthetic oligonucleotide
gggaagggcuguuu

SEQ ID NO: 14335 - RNA, 14 nt, Artificial Sequence
  Description of Artificial Sequence: Synthetic oligonucleotide
ggggaagggcuguu

SEQ ID NO: 14336 - RNA, 14 nt, Artificial Sequence
  Description of Artificial Sequence: Synthetic oligonucleotide
gggggaagggcugu

SEQ ID NO: 14337 - RNA, 14 nt, Artificial Sequence
  Description of Artificial Sequence: Synthetic oligonucleotide
agggggaagggcug

SEQ ID NO: 14338 - RNA, 14 nt, Artificial Sequence
  Description of Artificial Sequence: Synthetic oligonucleotide
aagggggaagggcu

SEQ ID NO: 14339 - DNA, 14 bp, Artificial Sequence
  Description of Artificial Sequence: Synthetic oligonucleotide
aaagggggaagggc

SEQ ID NO: 14340 - RNA, 14 nt, Artificial Sequence
  Description of Artificial Sequence: Synthetic oligonucleotide
uaaagggggaaggg

SEQ ID NO: 14341 - RNA, 14 nt, Artificial Sequence
  Description of Artificial Sequence: Synthetic oligonucleotide
guaaagggggaagg

SEQ ID NO: 14342 - RNA, 14 nt, Artificial Sequence
  Description of Artificial Sequence: Synthetic oligonucleotide
uguaaagggggaag

SEQ ID NO: 14343 - RNA, 14 nt, Artificial Sequence
  Description of Artificial Sequence: Synthetic oligonucleotide
guguaaagggggaa

SEQ ID NO: 14344 - RNA, 14 nt, Artificial Sequence
  Description of Artificial Sequence: Synthetic oligonucleotide
gguguaaaggggga

SEQ ID NO: 14345 - RNA, 14 nt, Artificial Sequence
  Description of Artificial Sequence: Synthetic oligonucleotide
ugguguaaaggggg

SEQ ID NO: 14346 - RNA, 14 nt, Artificial Sequence
  Description of Artificial Sequence: Synthetic oligonucleotide
gugguguaaagggg

SEQ ID NO: 14347 - RNA, 14 nt, Artificial Sequence
  Description of Artificial Sequence: Synthetic oligonucleotide
ggugguguaaaggg

SEQ ID NO: 14348 - RNA, 14 nt, Artificial Sequence
  Description of Artificial Sequence: Synthetic oligonucleotide
aggugguguaaagg

SEQ ID NO: 14349 - RNA, 14 nt, Artificial Sequence
  Description of Artificial Sequence: Synthetic oligonucleotide
gaggugguguaaag

SEQ ID NO: 14350 - RNA, 14 nt, Artificial Sequence
  Description of Artificial Sequence: Synthetic oligonucleotide
ggaggugguguaaa

SEQ ID NO: 14351 - RNA, 14 nt, Artificial Sequence
  Description of Artificial Sequence: Synthetic oligonucleotide
aggaggugguguaa

SEQ ID NO: 14352 - RNA, 14 nt, Artificial Sequence
  Description of Artificial Sequence: Synthetic oligonucleotide
gaggagguggugua

SEQ ID NO: 14353 - RNA, 14 nt, Artificial Sequence
  Description of Artificial Sequence: Synthetic oligonucleotide
ggaggagguggugu

SEQ ID NO: 14354 - RNA, 14 nt, Artificial Sequence
  Description of Artificial Sequence: Synthetic oligonucleotide
aggaggagguggug

SEQ ID NO: 14355 - RNA, 14 nt, Artificial Sequence
  Description of Artificial Sequence: Synthetic oligonucleotide
gaggaggagguggu

SEQ ID NO: 14356 - RNA, 14 nt, Artificial Sequence
  Description of Artificial Sequence: Synthetic oligonucleotide
ugaggaggaggugg

SEQ ID NO: 14357 - RNA, 14 nt, Artificial Sequence
  Description of Artificial Sequence: Synthetic oligonucleotide
uugaggaggaggug

SEQ ID NO: 14358 - RNA, 14 nt, Artificial Sequence
  Description of Artificial Sequence: Synthetic oligonucleotide
uuugaggaggaggu

SEQ ID NO: 14359 - RNA, 14 nt, Artificial Sequence
  Description of Artificial Sequence: Synthetic oligonucleotide
guuugaggaggagg

SEQ ID NO: 14360 - RNA, 14 nt, Artificial Sequence
  Description of Artificial Sequence: Synthetic oligonucleotide
uguuugaggaggag

SEQ ID NO: 14361 - RNA, 14 nt, Artificial Sequence
  Description of Artificial Sequence: Synthetic oligonucleotide
guguuugaggagga

SEQ ID NO: 14362 - RNA, 14 nt, Artificial Sequence
  Description of Artificial Sequence: Synthetic oligonucleotide
gguguuugaggagg

SEQ ID NO: 14363 - RNA, 14 nt, Artificial Sequence
  Description of Artificial Sequence: Synthetic oligonucleotide
agguguuugaggag

SEQ ID NO: 14364 - RNA, 14 nt, Artificial Sequence
  Description of Artificial Sequence: Synthetic oligonucleotide
aagguguuugagga

SEQ ID NO: 14365 - RNA, 14 nt, Artificial Sequence
  Description of Artificial Sequence: Synthetic oligonucleotide
gaagguguuugagg

SEQ ID NO: 14366 - RNA, 14 nt, Artificial Sequence
  Description of Artificial Sequence: Synthetic oligonucleotide
agaagguguuugag

SEQ ID NO: 14367 - RNA, 14 nt, Artificial Sequence
  Description of Artificial Sequence: Synthetic oligonucleotide
gagaagguguuuga

SEQ ID NO: 14368 - RNA, 14 nt, Artificial Sequence
  Description of Artificial Sequence: Synthetic oligonucleotide
ggagaagguguuug

SEQ ID NO: 14369 - RNA, 14 nt, Artificial Sequence
  Description of Artificial Sequence: Synthetic oligonucleotide
aggagaagguguuu

SEQ ID NO: 14370 - RNA, 14 nt, Artificial Sequence
  Description of Artificial Sequence: Synthetic oligonucleotide
gaggagaagguguu

SEQ ID NO: 14371 - RNA, 14 nt, Artificial Sequence
  Description of Artificial Sequence: Synthetic oligonucleotide
ugaggagaaggugu

SEQ ID NO: 14372 - RNA, 14 nt, Artificial Sequence
  Description of Artificial Sequence: Synthetic oligonucleotide
gugaggagaaggug

SEQ ID NO: 14373 - RNA, 14 nt, Artificial Sequence
  Description of Artificial Sequence: Synthetic oligonucleotide
cgugaggagaaggu

SEQ ID NO: 14374 - RNA, 14 nt, Artificial Sequence
  Description of Artificial Sequence: Synthetic oligonucleotide
ccgugaggagaagg

SEQ ID NO: 14375 - RNA, 14 nt, Artificial Sequence
  Description of Artificial Sequence: Synthetic oligonucleotide
gccgugaggagaag

SEQ ID NO: 14376 - RNA, 14 nt, Artificial Sequence
  Description of Artificial Sequence: Synthetic oligonucleotide
ugccgugaggagaa

SEQ ID NO: 14377 - RNA, 14 nt, Artificial Sequence
  Description of Artificial Sequence: Synthetic oligonucleotide
gugccgugaggaga

SEQ ID NO: 14378 - RNA, 14 nt, Artificial Sequence
  Description of Artificial Sequence: Synthetic oligonucleotide
ugugccgugaggag

SEQ ID NO: 14379 - RNA, 14 nt, Artificial Sequence
  Description of Artificial Sequence: Synthetic oligonucleotide
uugugccgugagga

SEQ ID NO: 14380 - RNA, 14 nt, Artificial Sequence
  Description of Artificial Sequence: Synthetic oligonucleotide
cuugugccgugagg

SEQ ID NO: 14381 - RNA, 14 nt, Artificial Sequence
  Description of Artificial Sequence: Synthetic oligonucleotide
ucuugugccgugag

SEQ ID NO: 14382 - RNA, 14 nt, Artificial Sequence
  Description of Artificial Sequence: Synthetic oligonucleotide
uucuugugccguga

SEQ ID NO: 14383 - RNA, 14 nt, Artificial Sequence
  Description of Artificial Sequence: Synthetic oligonucleotide
cuucuugugccgug

SEQ ID NO: 14384 - RNA, 14 nt, Artificial Sequence
  Description of Artificial Sequence: Synthetic oligonucleotide
ccuucuugugccgu

SEQ ID NO: 14385 - RNA, 14 nt, Artificial Sequence
  Description of Artificial Sequence: Synthetic oligonucleotide
gccuucuugugccg

SEQ ID NO: 14386 - RNA, 14 nt, Artificial Sequence
  Description of Artificial Sequence: Synthetic oligonucleotide
ugccuucuugugcc

SEQ ID NO: 14387 - RNA, 14 nt, Artificial Sequence
  Description of Artificial Sequence: Synthetic oligonucleotide
augccuucuugugc

SEQ ID NO: 14388 - RNA, 14 nt, Artificial Sequence
  Description of Artificial Sequence: Synthetic oligonucleotide
gaugccuucuugug

SEQ ID NO: 14389 - RNA, 14 nt, Artificial Sequence
  Description of Artificial Sequence: Synthetic oligonucleotide
agaugccuucuugu

SEQ ID NO: 14390 - RNA, 14 nt, Artificial Sequence
  Description of Artificial Sequence: Synthetic oligonucleotide
cagaugccuucuug

SEQ ID NO: 14391 - RNA, 14 nt, Artificial Sequence
  Description of Artificial Sequence: Synthetic oligonucleotide
gcagaugccuucuu

SEQ ID NO: 14392 - RNA, 14 nt, Artificial Sequence
  Description of Artificial Sequence: Synthetic oligonucleotide
ggcagaugccuucu

SEQ ID NO: 14393 - RNA, 14 nt, Artificial Sequence
  Description of Artificial Sequence: Synthetic oligonucleotide
uggcagaugccuuc

SEQ ID NO: 14394 - RNA, 14 nt, Artificial Sequence
  Description of Artificial Sequence: Synthetic oligonucleotide
auggcagaugccuu

SEQ ID NO: 14395 - RNA, 14 nt, Artificial Sequence
  Description of Artificial Sequence: Synthetic oligonucleotide
gauggcagaugccu

SEQ ID NO: 14396 - RNA, 14 nt, Artificial Sequence
  Description of Artificial Sequence: Synthetic oligonucleotide
ugauggcagaugcc

SEQ ID NO: 14397 - RNA, 14 nt, Artificial Sequence
  Description of Artificial Sequence: Synthetic oligonucleotide
gugauggcagaugc

SEQ ID NO: 14398 - RNA, 14 nt, Artificial Sequence
  Description of Artificial Sequence: Synthetic oligonucleotide
ggugauggcagaug

SEQ ID NO: 14399 - RNA, 14 nt, Artificial Sequence
  Description of Artificial Sequence: Synthetic oligonucleotide
uggugauggcagau

SEQ ID NO: 14400 - RNA, 14 nt, Artificial Sequence
  Description of Artificial Sequence: Synthetic oligonucleotide
guggugauggcaga

SEQ ID NO: 14401 - RNA, 14 nt, Artificial Sequence
  Description of Artificial Sequence: Synthetic oligonucleotide
gguggugauggcag

SEQ ID NO: 14402 - RNA, 14 nt, Artificial Sequence
  Description of Artificial Sequence: Synthetic oligonucleotide
ugguggugauggca

SEQ ID NO: 14403 - RNA, 14 nt, Artificial Sequence
  Description of Artificial Sequence: Synthetic oligonucleotide
augguggugauggc

SEQ ID NO: 14404 - RNA, 14 nt, Artificial Sequence
  Description of Artificial Sequence: Synthetic oligonucleotide
aaugguggugaugg

SEQ ID NO: 14405 - RNA, 14 nt, Artificial Sequence
  Description of Artificial Sequence: Synthetic oligonucleotide
caaugguggugaug

SEQ ID NO: 14406 - RNA, 14 nt, Artificial Sequence
  Description of Artificial Sequence: Synthetic oligonucleotide
ucaaugguggugau

SEQ ID NO: 14407 - RNA, 14 nt, Artificial Sequence
  Description of Artificial Sequence: Synthetic oligonucleotide
gucaauggugguga

SEQ ID NO: 14408 - RNA, 14 nt, Artificial Sequence
  Description of Artificial Sequence: Synthetic oligonucleotide
ugucaaugguggug

SEQ ID NO: 14409 - RNA, 14 nt, Artificial Sequence
  Description of Artificial Sequence: Synthetic oligonucleotide
gugucaaugguggu

SEQ ID NO: 14410 - RNA, 14 nt, Artificial Sequence
  Description of Artificial Sequence: Synthetic oligonucleotide
ugugucaauggugg

SEQ ID NO: 14411 - RNA, 14 nt, Artificial Sequence
  Description of Artificial Sequence: Synthetic oligonucleotide
uugugucaauggug

SEQ ID NO: 14412 - RNA, 14 nt, Artificial Sequence
  Description of Artificial Sequence: Synthetic oligonucleotide
cuugugucaauggu

SEQ ID NO: 14413 - RNA, 14 nt, Artificial Sequence
  Description of Artificial Sequence: Synthetic oligonucleotide
ucuugugucaaugg

SEQ ID NO: 14414 - RNA, 14 nt, Artificial Sequence
  Description of Artificial Sequence: Synthetic oligonucleotide
uucuugugucaaug

SEQ ID NO: 14415 - RNA, 14 nt, Artificial Sequence
  Description of Artificial Sequence: Synthetic oligonucleotide
cuucuugugucaau

SEQ ID NO: 14416 - RNA, 14 nt, Artificial Sequence
  Description of Artificial Sequence: Synthetic oligonucleotide
acuucuugugucaa

SEQ ID NO: 14417 - RNA, 14 nt, Artificial Sequence
  Description of Artificial Sequence: Synthetic oligonucleotide
cacuucuuguguca

SEQ ID NO: 14418 - RNA, 14 nt, Artificial Sequence
  Description of Artificial Sequence: Synthetic oligonucleotide
ccacuucuuguguc

SEQ ID NO: 14419 - RNA, 14 nt, Artificial Sequence
  Description of Artificial Sequence: Synthetic oligonucleotide
uccacuucuugugu

SEQ ID NO: 14420 - RNA, 14 nt, Artificial Sequence
  Description of Artificial Sequence: Synthetic oligonucleotide
guccacuucuugug

SEQ ID NO: 14421 - RNA, 14 nt, Artificial Sequence
  Description of Artificial Sequence: Synthetic oligonucleotide
gguccacuucuugu

SEQ ID NO: 14422 - RNA, 14 nt, Artificial Sequence
  Description of Artificial Sequence: Synthetic oligonucleotide
agguccacuucuug

SEQ ID NO: 14423 - RNA, 14 nt, Artificial Sequence
  Description of Artificial Sequence: Synthetic oligonucleotide
aagguccacuucuu

SEQ ID NO: 14424 - RNA, 14 nt, Artificial Sequence
  Description of Artificial Sequence: Synthetic oligonucleotide
gaagguccacuucu

SEQ ID NO: 14425 - RNA, 14 nt, Artificial Sequence
  Description of Artificial Sequence: Synthetic oligonucleotide
ugaagguccacuuc

SEQ ID NO: 14426 - RNA, 14 nt, Artificial Sequence
  Description of Artificial Sequence: Synthetic oligonucleotide
augaagguccacuu

SEQ ID NO: 14427 - RNA, 14 nt, Artificial Sequence
  Description of Artificial Sequence: Synthetic oligonucleotide
aaugaagguccacu

SEQ ID NO: 14428 - RNA, 14 nt, Artificial Sequence
  Description of Artificial Sequence: Synthetic oligonucleotide
gaaugaagguccac

SEQ ID NO: 14429 - RNA, 14 nt, Artificial Sequence
  Description of Artificial Sequence: Synthetic oligonucleotide
ggaaugaaggucca

SEQ ID NO: 14430 - RNA, 14 nt, Artificial Sequence
  Description of Artificial Sequence: Synthetic oligonucleotide
uggaaugaaggucc

SEQ ID NO: 14431 - RNA, 14 nt, Artificial Sequence
  Description of Artificial Sequence: Synthetic oligonucleotide
auggaaugaagguc

SEQ ID NO: 14432 - RNA, 14 nt, Artificial Sequence
  Description of Artificial Sequence: Synthetic oligonucleotide
aauggaaugaaggu

SEQ ID NO: 14433 - RNA, 14 nt, Artificial Sequence
  Description of Artificial Sequence: Synthetic oligonucleotide
caauggaaugaagg

SEQ ID NO: 14434 - RNA, 14 nt, Artificial Sequence
  Description of Artificial Sequence: Synthetic oligonucleotide
gcaauggaaugaag

SEQ ID NO: 14435 - RNA, 14 nt, Artificial Sequence
  Description of Artificial Sequence: Synthetic oligonucleotide
agcaauggaaugaa

SEQ ID NO: 14436 - RNA, 14 nt, Artificial Sequence
  Description of Artificial Sequence: Synthetic oligonucleotide
cagcaauggaauga

SEQ ID NO: 14437 - RNA, 14 nt, Artificial Sequence
  Description of Artificial Sequence: Synthetic oligonucleotide
ccagcaauggaaug

SEQ ID NO: 14438 - RNA, 14 nt, Artificial Sequence
  Description of Artificial Sequence: Synthetic oligonucleotide
cccagcaauggaau

SEQ ID NO: 14439 - RNA, 14 nt, Artificial Sequence
  Description of Artificial Sequence: Synthetic oligonucleotide
gcccagcaauggaa

SEQ ID NO: 14440 - RNA, 14 nt, Artificial Sequence
  Description of Artificial Sequence: Synthetic oligonucleotide
ggcccagcaaugga

SEQ ID NO: 14441 - RNA, 14 nt, Artificial Sequence
  Description of Artificial Sequence: Synthetic oligonucleotide
cggcccagcaaugg

SEQ ID NO: 14442 - RNA, 14 nt, Artificial Sequence
  Description of Artificial Sequence: Synthetic oligonucleotide
gcggcccagcaaug

SEQ ID NO: 14443 - RNA, 14 nt, Artificial Sequence
  Description of Artificial Sequence: Synthetic oligonucleotide
ggcggcccagcaau

SEQ ID NO: 14444 - DNA, 14 bp, Artificial Sequence
  Description of Artificial Sequence: Synthetic oligonucleotide
aggcggcccagcaa

SEQ ID NO: 14445 - DNA, 14 bp, Artificial Sequence
  Description of Artificial Sequence: Synthetic oligonucleotide
caggcggcccagca

SEQ ID NO: 14446 - DNA, 14 bp, Artificial Sequence
  Description of Artificial Sequence: Synthetic oligonucleotide
acaggcggcccagc

SEQ ID NO: 14447 - DNA, 14 bp, Artificial Sequence
  Description of Artificial Sequence: Synthetic oligonucleotide
aacaggcggcccag

SEQ ID NO: 14448 - DNA, 14 bp, Artificial Sequence
  Description of Artificial Sequence: Synthetic oligonucleotide
gaacaggcggccca

SEQ ID NO: 14449 - DNA, 14 bp, Artificial Sequence
  Description of Artificial Sequence: Synthetic oligonucleotide
ggaacaggcggccc

SEQ ID NO: 14450 - DNA, 14 bp, Artificial Sequence
  Description of Artificial Sequence: Synthetic oligonucleotide
aggaacaggcggcc

SEQ ID NO: 14451 - DNA, 14 bp, Artificial Sequence
  Description of Artificial Sequence: Synthetic oligonucleotide
gaggaacaggcggc

SEQ ID NO: 14452 - DNA, 14 bp, Artificial Sequence
  Description of Artificial Sequence: Synthetic oligonucleotide
ggaggaacaggcgg

SEQ ID NO: 14453 - RNA, 14 nt, Artificial Sequence
  Description of Artificial Sequence: Synthetic oligonucleotide
uggaggaacaggcg

SEQ ID NO: 14454 - RNA, 14 nt, Artificial Sequence
  Description of Artificial Sequence: Synthetic oligonucleotide
guggaggaacaggc

SEQ ID NO: 14455-14456 - skipped (2 entries)

SEQ ID NO: 14457 - RNA, 14 nt, Artificial Sequence
  Description of Artificial Sequence: Synthetic oligonucleotide
gucguggaggaaca

SEQ ID NO: 14458 - RNA, 14 nt, Artificial Sequence
  Description of Artificial Sequence: Synthetic oligonucleotide
ugucguggaggaac

SEQ ID NO: 14459 - RNA, 14 nt, Artificial Sequence
  Description of Artificial Sequence: Synthetic oligonucleotide
uugucguggaggaa

SEQ ID NO: 14460 - RNA, 14 nt, Artificial Sequence
  Description of Artificial Sequence: Synthetic oligonucleotide
uuugucguggagga

SEQ ID NO: 14461 - RNA, 14 nt, Artificial Sequence
  Description of Artificial Sequence: Synthetic oligonucleotide
cuuugucguggagg

SEQ ID NO: 14462 - RNA, 14 nt, Artificial Sequence
  Description of Artificial Sequence: Synthetic oligonucleotide
gcuuugucguggag

SEQ ID NO: 14463 - RNA, 14 nt, Artificial Sequence
  Description of Artificial Sequence: Synthetic oligonucleotide
ugcuuugucgugga

SEQ ID NO: 14464 - RNA, 14 nt, Artificial Sequence
  Description of Artificial Sequence: Synthetic oligonucleotide
gugcuuugucgugg

SEQ ID NO: 14465 - RNA, 14 nt, Artificial Sequence
  Description of Artificial Sequence: Synthetic oligonucleotide
agugcuuugucgug

SEQ ID NO: 14466 - RNA, 14 nt, Artificial Sequence
  Description of Artificial Sequence: Synthetic oligonucleotide
aagugcuuugucgu

SEQ ID NO: 14467 - RNA, 14 nt, Artificial Sequence
  Description of Artificial Sequence: Synthetic oligonucleotide
gaagugcuuugucg

SEQ ID NO: 14468 - RNA, 14 nt, Artificial Sequence
  Description of Artificial Sequence: Synthetic oligonucleotide
agaagugcuuuguc

SEQ ID NO: 14469 - RNA, 14 nt, Artificial Sequence
  Description of Artificial Sequence: Synthetic oligonucleotide
gagaagugcuuugu

SEQ ID NO: 14470 - RNA, 14 nt, Artificial Sequence
  Description of Artificial Sequence: Synthetic oligonucleotide
ugagaagugcuuug

SEQ ID NO: 14471 - RNA, 14 nt, Artificial Sequence
  Description of Artificial Sequence: Synthetic oligonucleotide
uugagaagugcuuu

SEQ ID NO: 14472 - RNA, 14 nt, Artificial Sequence
  Description of Artificial Sequence: Synthetic oligonucleotide
guugagaagugcuu

SEQ ID NO: 14473 - RNA, 14 nt, Artificial Sequence
  Description of Artificial Sequence: Synthetic oligonucleotide
uguugagaagugcu

SEQ ID NO: 14474 - RNA, 14 nt, Artificial Sequence
  Description of Artificial Sequence: Synthetic oligonucleotide
auguugagaagugc

SEQ ID NO: 14475 - RNA, 14 nt, Artificial Sequence
  Description of Artificial Sequence: Synthetic oligonucleotide
uauguugagaagug

SEQ ID NO: 14476 - RNA, 14 nt, Artificial Sequence
  Description of Artificial Sequence: Synthetic oligonucleotide
auauguugagaagu

SEQ ID NO: 14477 - RNA, 14 nt, Artificial Sequence
  Description of Artificial Sequence: Synthetic oligonucleotide
gauauguugagaag

SEQ ID NO: 14478 - RNA, 14 nt, Artificial Sequence
  Description of Artificial Sequence: Synthetic oligonucleotide
ggauauguugagaa

SEQ ID NO: 14479 - RNA, 14 nt, Artificial Sequence
  Description of Artificial Sequence: Synthetic oligonucleotide
gggauauguugaga

SEQ ID NO: 14480 - RNA, 14 nt, Artificial Sequence
  Description of Artificial Sequence: Synthetic oligonucleotide
agggauauguugag

SEQ ID NO: 14481 - RNA, 14 nt, Artificial Sequence
  Description of Artificial Sequence: Synthetic oligonucleotide
uagggauauguuga

SEQ ID NO: 14482 - RNA, 14 nt, Artificial Sequence
  Description of Artificial Sequence: Synthetic oligonucleotide
uuagggauauguug

SEQ ID NO: 14483 - RNA, 14 nt, Artificial Sequence
  Description of Artificial Sequence: Synthetic oligonucleotide
uuuagggauauguu

SEQ ID NO: 14484 - RNA, 14 nt, Artificial Sequence
  Description of Artificial Sequence: Synthetic oligonucleotide
guuuagggauaugu

SEQ ID NO: 14485 - RNA, 14 nt, Artificial Sequence
  Description of Artificial Sequence: Synthetic oligonucleotide
aguuuagggauaug

SEQ ID NO: 14486 - RNA, 14 nt, Artificial Sequence
  Description of Artificial Sequence: Synthetic oligonucleotide
gaguuuagggauau

SEQ ID NO: 14487 - RNA, 14 nt, Artificial Sequence
  Description of Artificial Sequence: Synthetic oligonucleotide
ggaguuuagggaua

SEQ ID NO: 14488 - RNA, 14 nt, Artificial Sequence
  Description of Artificial Sequence: Synthetic oligonucleotide
gggaguuuagggau

SEQ ID NO: 14489 - RNA, 14 nt, Artificial Sequence
  Description of Artificial Sequence: Synthetic oligonucleotide
agggaguuuaggga

SEQ ID NO: 14490 - RNA, 14 nt, Artificial Sequence
  Description of Artificial Sequence: Synthetic oligonucleotide
gagggaguuuaggg

SEQ ID NO: 14491 - RNA, 14 nt, Artificial Sequence
  Description of Artificial Sequence: Synthetic oligonucleotide
ggagggaguuuagg

SEQ ID NO: 14492 - RNA, 14 nt, Artificial Sequence
  Description of Artificial Sequence: Synthetic oligonucleotide
uggagggaguuuag

SEQ ID NO: 14493 - RNA, 14 nt, Artificial Sequence
  Description of Artificial Sequence: Synthetic oligonucleotide
uuggagggaguuua

SEQ ID NO: 14494 - RNA, 14 nt, Artificial Sequence
  Description of Artificial Sequence: Synthetic oligonucleotide
uuuggagggaguuu

SEQ ID NO: 14495 - RNA, 14 nt, Artificial Sequence
  Description of Artificial Sequence: Synthetic oligonucleotide
uuuuggagggaguu

SEQ ID NO: 14496 - RNA, 14 nt, Artificial Sequence
  Description of Artificial Sequence: Synthetic oligonucleotide
uuuuuggagggagu

SEQ ID NO: 14497 - RNA, 14 nt, Artificial Sequence
  Description of Artificial Sequence: Synthetic oligonucleotide
guuuuuggagggag

SEQ ID NO: 14498 - RNA, 14 nt, Artificial Sequence
  Description of Artificial Sequence: Synthetic oligonucleotide
aguuuuuggaggga

SEQ ID NO: 14499 - RNA, 14 nt, Artificial Sequence
  Description of Artificial Sequence: Synthetic oligonucleotide
aaguuuuuggaggg

SEQ ID NO: 14500 - RNA, 14 nt, Artificial Sequence
  Description of Artificial Sequence: Synthetic oligonucleotide
uaaguuuuuggagg

SEQ ID NO: 14501 - RNA, 14 nt, Artificial Sequence
  Description of Artificial Sequence: Synthetic oligonucleotide
guaaguuuuuggag

SEQ ID NO: 14502 - RNA, 14 nt, Artificial Sequence
  Description of Artificial Sequence: Synthetic oligonucleotide
uguaaguuuuugga

SEQ ID NO: 14503 - RNA, 14 nt, Artificial Sequence
  Description of Artificial Sequence: Synthetic oligonucleotide
uuguaaguuuuugg

SEQ ID NO: 14504 - RNA, 14 nt, Artificial Sequence
  Description of Artificial Sequence: Synthetic oligonucleotide
uuuguaaguuuuug

SEQ ID NO: 14505 - RNA, 14 nt, Artificial Sequence
  Description of Artificial Sequence: Synthetic oligonucleotide
uuuuguaaguuuuu

SEQ ID NO: 14506 - RNA, 14 nt, Artificial Sequence
  Description of Artificial Sequence: Synthetic oligonucleotide
cuuuuguaaguuuu

SEQ ID NO: 14507 - RNA, 14 nt, Artificial Sequence
  Description of Artificial Sequence: Synthetic oligonucleotide
ccuuuuguaaguuu

SEQ ID NO: 14508 - RNA, 14 nt, Artificial Sequence
  Description of Artificial Sequence: Synthetic oligonucleotide
cccuuuuguaaguu

SEQ ID NO: 14509 - RNA, 14 nt, Artificial Sequence
  Description of Artificial Sequence: Synthetic oligonucleotide
ucccuuuuguaagu

SEQ ID NO: 14510 - RNA, 14 nt, Artificial Sequence
  Description of Artificial Sequence: Synthetic oligonucleotide
cucccuuuuguaag

SEQ ID NO: 14511 - RNA, 14 nt, Artificial Sequence
  Description of Artificial Sequence: Synthetic oligonucleotide
gcucccuuuuguaa

SEQ ID NO: 14512 - RNA, 14 nt, Artificial Sequence
  Description of Artificial Sequence: Synthetic oligonucleotide
ugcucccuuuugua

SEQ ID NO: 14513 - RNA, 14 nt, Artificial Sequence
  Description of Artificial Sequence: Synthetic oligonucleotide
gugcucccuuuugu

SEQ ID NO: 14514 - RNA, 14 nt, Artificial Sequence
  Description of Artificial Sequence: Synthetic oligonucleotide
ugugcucccuuuug

SEQ ID NO: 14515 - RNA, 14 nt, Artificial Sequence
  Description of Artificial Sequence: Synthetic oligonucleotide
gugugcucccuuuu

SEQ ID NO: 14516 - RNA, 14 nt, Artificial Sequence
  Description of Artificial Sequence: Synthetic oligonucleotide
ugugugcucccuuu

SEQ ID NO: 14517 - RNA, 14 nt, Artificial Sequence
  Description of Artificial Sequence: Synthetic oligonucleotide
gugugugcucccuu

SEQ ID NO: 14518 - RNA, 14 nt, Artificial Sequence
  Description of Artificial Sequence: Synthetic oligonucleotide
ugugugugcucccu

SEQ ID NO: 14519 - RNA, 14 nt, Artificial Sequence
  Description of Artificial Sequence: Synthetic oligonucleotide
gugugugugcuccc

SEQ ID NO: 14520 - RNA, 14 nt, Artificial Sequence
  Description of Artificial Sequence: Synthetic oligonucleotide
ggugugugugcucc

SEQ ID NO: 14521 - RNA, 14 nt, Artificial Sequence
  Description of Artificial Sequence: Synthetic oligonucleotide
gggugugugugcuc

SEQ ID NO: 14522 - RNA, 14 nt, Artificial Sequence
  Description of Artificial Sequence: Synthetic oligonucleotide
ugggugugugugcu

SEQ ID NO: 14523 - RNA, 14 nt, Artificial Sequence
  Description of Artificial Sequence: Synthetic oligonucleotide
augggugugugugc

SEQ ID NO: 14524 - RNA, 14 nt, Artificial Sequence
  Description of Artificial Sequence: Synthetic oligonucleotide
gaugggugugugug

SEQ ID NO: 14525 - RNA, 14 nt, Artificial Sequence
  Description of Artificial Sequence: Synthetic oligonucleotide
ggaugggugugugu

SEQ ID NO: 14526 - RNA, 14 nt, Artificial Sequence
  Description of Artificial Sequence: Synthetic oligonucleotide
uggaugggugugug

SEQ ID NO: 14527 - RNA, 14 nt, Artificial Sequence
  Description of Artificial Sequence: Synthetic oligonucleotide
auggaugggugugu

SEQ ID NO: 14528 - RNA, 14 nt, Artificial Sequence
  Description of Artificial Sequence: Synthetic oligonucleotide
cauggaugggugug

SEQ ID NO: 14529 - RNA, 14 nt, Artificial Sequence
  Description of Artificial Sequence: Synthetic oligonucleotide
gcauggaugggugu

SEQ ID NO: 14530 - RNA, 14 nt, Artificial Sequence
  Description of Artificial Sequence: Synthetic oligonucleotide
ugcauggaugggug

SEQ ID NO: 14531 - RNA, 14 nt, Artificial Sequence
  Description of Artificial Sequence: Synthetic oligonucleotide
gugcauggaugggu

SEQ ID NO: 14532 - RNA, 14 nt, Artificial Sequence
  Description of Artificial Sequence: Synthetic oligonucleotide
ugugcauggauggg

SEQ ID NO: 14533 - RNA, 14 nt, Artificial Sequence
  Description of Artificial Sequence: Synthetic oligonucleotide
cugugcauggaugg

SEQ ID NO: 14534 - RNA, 14 nt, Artificial Sequence
  Description of Artificial Sequence: Synthetic oligonucleotide
ucugugcauggaug

SEQ ID NO: 14535 - RNA, 14 nt, Artificial Sequence
  Description of Artificial Sequence: Synthetic oligonucleotide
cucugugcauggau

SEQ ID NO: 14536 - RNA, 14 nt, Artificial Sequence
  Description of Artificial Sequence: Synthetic oligonucleotide
ucucugugcaugga

SEQ ID NO: 14537 - RNA, 14 nt, Artificial Sequence
  Description of Artificial Sequence: Synthetic oligonucleotide
aucucugugcaugg

SEQ ID NO: 14538 - RNA, 14 nt, Artificial Sequence
  Description of Artificial Sequence: Synthetic oligonucleotide
caucucugugcaug

SEQ ID NO: 14539 - RNA, 14 nt, Artificial Sequence
  Description of Artificial Sequence: Synthetic oligonucleotide
ccaucucugugcau

SEQ ID NO: 14540 - RNA, 14 nt, Artificial Sequence
  Description of Artificial Sequence: Synthetic oligonucleotide
uccaucucugugca

SEQ ID NO: 14541 - RNA, 14 nt, Artificial Sequence
  Description of Artificial Sequence: Synthetic oligonucleotide
guccaucucugugc

SEQ ID NO: 14542 - RNA, 14 nt, Artificial Sequence
  Description of Artificial Sequence: Synthetic oligonucleotide
gguccaucucugug

SEQ ID NO: 14543 - RNA, 14 nt, Artificial Sequence
  Description of Artificial Sequence: Synthetic oligonucleotide
ugguccaucucugu

SEQ ID NO: 14544 - RNA, 14 nt, Artificial Sequence
  Description of Artificial Sequence: Synthetic oligonucleotide
gugguccaucucug

SEQ ID NO: 14545 - RNA, 14 nt, Artificial Sequence
  Description of Artificial Sequence: Synthetic oligonucleotide
ggugguccaucucu

SEQ ID NO: 14546 - RNA, 14 nt, Artificial Sequence
  Description of Artificial Sequence: Synthetic oligonucleotide
uggugguccaucuc

SEQ ID NO: 14547 - RNA, 14 nt, Artificial Sequence
  Description of Artificial Sequence: Synthetic oligonucleotide
guggugguccaucu

SEQ ID NO: 14548 - RNA, 14 nt, Artificial Sequence
  Description of Artificial Sequence: Synthetic oligonucleotide
aguggugguccauc

SEQ ID NO: 14549 - RNA, 14 nt, Artificial Sequence
  Description of Artificial Sequence: Synthetic oligonucleotide
caguggugguccau

SEQ ID NO: 14550 - RNA, 14 nt, Artificial Sequence
  Description of Artificial Sequence: Synthetic oligonucleotide
acagugguggucca

SEQ ID NO: 14551 - RNA, 14 nt, Artificial Sequence
  Description of Artificial Sequence: Synthetic oligonucleotide
aacagugguggucc

SEQ ID NO: 14552 - RNA, 14 nt, Artificial Sequence
  Description of Artificial Sequence: Synthetic oligonucleotide
caacaguggugguc

SEQ ID NO: 14553 - RNA, 14 nt, Artificial Sequence
  Description of Artificial Sequence: Synthetic oligonucleotide
ccaacagugguggu

SEQ ID NO: 14554 - RNA, 14 nt, Artificial Sequence
  Description of Artificial Sequence: Synthetic oligonucleotide
uccaacaguggugg

SEQ ID NO: 14555 - RNA, 14 nt, Artificial Sequence
  Description of Artificial Sequence: Synthetic oligonucleotide
cuccaacaguggug

SEQ ID NO: 14556 - RNA, 14 nt, Artificial Sequence
  Description of Artificial Sequence: Synthetic oligonucleotide
ucuccaacaguggu

SEQ ID NO: 14557 - RNA, 14 nt, Artificial Sequence
  Description of Artificial Sequence: Synthetic oligonucleotide
uucuccaacagugg

SEQ ID NO: 14558 - RNA, 14 nt, Artificial Sequence
  Description of Artificial Sequence: Synthetic oligonucleotide
auucuccaacagug

SEQ ID NO: 14559 - RNA, 14 nt, Artificial Sequence
  Description of Artificial Sequence: Synthetic oligonucleotide
cauucuccaacagu

SEQ ID NO: 14560 - RNA, 14 nt, Artificial Sequence
  Description of Artificial Sequence: Synthetic oligonucleotide
gcauucuccaacag

SEQ ID NO: 14561 - RNA, 14 nt, Artificial Sequence
  Description of Artificial Sequence: Synthetic oligonucleotide
ggcauucuccaaca

SEQ ID NO: 14562 - RNA, 14 nt, Artificial Sequence
  Description of Artificial Sequence: Synthetic oligonucleotide
gggcauucuccaac

SEQ ID NO: 14563 - RNA, 14 nt, Artificial Sequence
  Description of Artificial Sequence: Synthetic oligonucleotide
ugggcauucuccaa

SEQ ID NO: 14564 - RNA, 14 nt, Artificial Sequence
  Description of Artificial Sequence: Synthetic oligonucleotide
augggcauucucca

SEQ ID NO: 14565 - RNA, 14 nt, Artificial Sequence
  Description of Artificial Sequence: Synthetic oligonucleotide
aaugggcauucucc

SEQ ID NO: 14566 - RNA, 14 nt, Artificial Sequence
  Description of Artificial Sequence: Synthetic oligonucleotide
gaaugggcauucuc

SEQ ID NO: 14567 - RNA, 14 nt, Artificial Sequence
  Description of Artificial Sequence: Synthetic oligonucleotide
agaaugggcauucu

SEQ ID NO: 14568 - RNA, 14 nt, Artificial Sequence
  Description of Artificial Sequence: Synthetic oligonucleotide
aagaaugggcauuc

SEQ ID NO: 14569 - RNA, 14 nt, Artificial Sequence
  Description of Artificial Sequence: Synthetic oligonucleotide
gaagaaugggcauu

SEQ ID NO: 14570 - RNA, 14 nt, Artificial Sequence
  Description of Artificial Sequence: Synthetic oligonucleotide
ggaagaaugggcau

SEQ ID NO: 14571 - RNA, 14 nt, Artificial Sequence
  Description of Artificial Sequence: Synthetic oligonucleotide
aggaagaaugggca

SEQ ID NO: 14572 - RNA, 14 nt, Artificial Sequence
  Description of Artificial Sequence: Synthetic oligonucleotide
caggaagaaugggc

SEQ ID NO: 14573 - RNA, 14 nt, Artificial Sequence
  Description of Artificial Sequence: Synthetic oligonucleotide
ucaggaagaauggg

SEQ ID NO: 14574 - RNA, 14 nt, Artificial Sequence
  Description of Artificial Sequence: Synthetic oligonucleotide
cucaggaagaaugg

SEQ ID NO: 14575 - RNA, 14 nt, Artificial Sequence
  Description of Artificial Sequence: Synthetic oligonucleotide
acucaggaagaaug

SEQ ID NO: 14576 - RNA, 14 nt, Artificial Sequence
  Description of Artificial Sequence: Synthetic oligonucleotide
aacucaggaagaau

SEQ ID NO: 14577 - RNA, 14 nt, Artificial Sequence
  Description of Artificial Sequence: Synthetic oligonucleotide
gaacucaggaagaa

SEQ ID NO: 14578 - RNA, 14 nt, Artificial Sequence
  Description of Artificial Sequence: Synthetic oligonucleotide
ggaacucaggaaga

SEQ ID NO: 14579 - RNA, 14 nt, Artificial Sequence
  Description of Artificial Sequence: Synthetic oligonucleotide
aggaacucaggaag

SEQ ID NO: 14580 - RNA, 14 nt, Artificial Sequence
  Description of Artificial Sequence: Synthetic oligonucleotide
gaggaacucaggaa

SEQ ID NO: 14581 - RNA, 14 nt, Artificial Sequence
  Description of Artificial Sequence: Synthetic oligonucleotide
agaggaacucagga

SEQ ID NO: 14582 - RNA, 14 nt, Artificial Sequence
  Description of Artificial Sequence: Synthetic oligonucleotide
cagaggaacucagg

SEQ ID NO: 14583 - RNA, 14 nt, Artificial Sequence
  Description of Artificial Sequence: Synthetic oligonucleotide
acagaggaacucag

SEQ ID NO: 14584 - RNA, 14 nt, Artificial Sequence
  Description of Artificial Sequence: Synthetic oligonucleotide
uacagaggaacuca

SEQ ID NO: 14585 - RNA, 14 nt, Artificial Sequence
  Description of Artificial Sequence: Synthetic oligonucleotide
guacagaggaacuc

SEQ ID NO: 14586 - RNA, 14 nt, Artificial Sequence
  Description of Artificial Sequence: Synthetic oligonucleotide
aguacagaggaacu

SEQ ID NO: 14587 - RNA, 14 nt, Artificial Sequence
  Description of Artificial Sequence: Synthetic oligonucleotide
caguacagaggaac

SEQ ID NO: 14588 - RNA, 14 nt, Artificial Sequence
  Description of Artificial Sequence: Synthetic oligonucleotide
ccaguacagaggaa

SEQ ID NO: 14589 - RNA, 14 nt, Artificial Sequence
  Description of Artificial Sequence: Synthetic oligonucleotide
cccaguacagagga

SEQ ID NO: 14590 - RNA, 14 nt, Artificial Sequence
  Description of Artificial Sequence: Synthetic oligonucleotide
ucccaguacagagg

SEQ ID NO: 14591 - RNA, 14 nt, Artificial Sequence
  Description of Artificial Sequence: Synthetic oligonucleotide
aucccaguacagag

SEQ ID NO: 14592 - RNA, 14 nt, Artificial Sequence
  Description of Artificial Sequence: Synthetic oligonucleotide
caucccaguacaga

SEQ ID NO: 14593 - RNA, 14 nt, Artificial Sequence
  Description of Artificial Sequence: Synthetic oligonucleotide
acaucccaguacag

SEQ ID NO: 14594 - RNA, 14 nt, Artificial Sequence
  Description of Artificial Sequence: Synthetic oligonucleotide
uacaucccaguaca

SEQ ID NO: 14595 - RNA, 14 nt, Artificial Sequence
  Description of Artificial Sequence: Synthetic oligonucleotide
auacaucccaguac

SEQ ID NO: 14596 - RNA, 14 nt, Artificial Sequence
  Description of Artificial Sequence: Synthetic oligonucleotide
uauacaucccagua

SEQ ID NO: 14597 - RNA, 14 nt, Artificial Sequence
  Description of Artificial Sequence: Synthetic oligonucleotide
auauacaucccagu

SEQ ID NO: 14598 - RNA, 14 nt, Artificial Sequence
  Description of Artificial Sequence: Synthetic oligonucleotide
aauauacaucccag

SEQ ID NO: 14599 - RNA, 14 nt, Artificial Sequence
  Description of Artificial Sequence: Synthetic oligonucleotide
aaauauacauccca

SEQ ID NO: 14600 - RNA, 14 nt, Artificial Sequence
  Description of Artificial Sequence: Synthetic oligonucleotide
aaaauauacauccc

SEQ ID NO: 14601 - RNA, 14 nt, Artificial Sequence
  Description of Artificial Sequence: Synthetic oligonucleotide
gaaaauauacaucc

SEQ ID NO: 14602 - RNA, 14 nt, Artificial Sequence
  Description of Artificial Sequence: Synthetic oligonucleotide
ggaaaauauacauc

SEQ ID NO: 14603 - RNA, 14 nt, Artificial Sequence
  Description of Artificial Sequence: Synthetic oligonucleotide
aggaaaauauacau

SEQ ID NO: 14604 - RNA, 14 nt, Artificial Sequence
  Description of Artificial Sequence: Synthetic oligonucleotide
uaggaaaauauaca

SEQ ID NO: 14605 - RNA, 14 nt, Artificial Sequence
  Description of Artificial Sequence: Synthetic oligonucleotide
cuaggaaaauauac

SEQ ID NO: 14606 - RNA, 14 nt, Artificial Sequence
  Description of Artificial Sequence: Synthetic oligonucleotide
gcuaggaaaauaua

SEQ ID NO: 14607 - RNA, 14 nt, Artificial Sequence
  Description of Artificial Sequence: Synthetic oligonucleotide
ggcuaggaaaauau

SEQ ID NO: 14608 - RNA, 14 nt, Artificial Sequence
  Description of Artificial Sequence: Synthetic oligonucleotide
gggcuaggaaaaua

SEQ ID NO: 14609 - RNA, 14 nt, Artificial Sequence
  Description of Artificial Sequence: Synthetic oligonucleotide
ggggcuaggaaaau

SEQ ID NO: 14610 - RNA, 14 nt, Artificial Sequence
  Description of Artificial Sequence: Synthetic oligonucleotide
uggggcuaggaaaa

SEQ ID NO: 14611 - RNA, 14 nt, Artificial Sequence
  Description of Artificial Sequence: Synthetic oligonucleotide
uuggggcuaggaaa

SEQ ID NO: 14612 - RNA, 14 nt, Artificial Sequence
  Description of Artificial Sequence: Synthetic oligonucleotide
uuuggggcuaggaa

SEQ ID NO: 14613 - RNA, 14 nt, Artificial Sequence
  Description of Artificial Sequence: Synthetic oligonucleotide
auuuggggcuagga

SEQ ID NO: 14614 - RNA, 14 nt, Artificial Sequence
  Description of Artificial Sequence: Synthetic oligonucleotide
gauuuggggcuagg

SEQ ID NO: 14615 - RNA, 14 nt, Artificial Sequence
  Description of Artificial Sequence: Synthetic oligonucleotide
ggauuuggggcuag

SEQ ID NO: 14616 - RNA, 14 nt, Artificial Sequence
  Description of Artificial Sequence: Synthetic oligonucleotide
uggauuuggggcua

SEQ ID NO: 14617 - RNA, 14 nt, Artificial Sequence
  Description of Artificial Sequence: Synthetic oligonucleotide
auggauuuggggcu

SEQ ID NO: 14618 - RNA, 14 nt, Artificial Sequence
  Description of Artificial Sequence: Synthetic oligonucleotide
aauggauuuggggc

SEQ ID NO: 14619 - RNA, 14 nt, Artificial Sequence
  Description of Artificial Sequence: Synthetic oligonucleotide
caauggauuugggg

SEQ ID NO: 14620 - RNA, 14 nt, Artificial Sequence
  Description of Artificial Sequence: Synthetic oligonucleotide
gcaauggauuuggg

SEQ ID NO: 14621 - RNA, 14 nt, Artificial Sequence
  Description of Artificial Sequence: Synthetic oligonucleotide
agcaauggauuugg

SEQ ID NO: 14622 - RNA, 14 nt, Artificial Sequence
  Description of Artificial Sequence: Synthetic oligonucleotide
cagcaauggauuug

SEQ ID NO: 14623 - RNA, 14 nt, Artificial Sequence
  Description of Artificial Sequence: Synthetic oligonucleotide
ccagcaauggauuu

SEQ ID NO: 14624 - RNA, 14 nt, Artificial Sequence
  Description of Artificial Sequence: Synthetic oligonucleotide
gccagcaauggauu

SEQ ID NO: 14625 - RNA, 14 nt, Artificial Sequence
  Description of Artificial Sequence: Synthetic oligonucleotide
ugccagcaauggau

SEQ ID NO: 14626 - RNA, 14 nt, Artificial Sequence
  Description of Artificial Sequence: Synthetic oligonucleotide
uugccagcaaugga

SEQ ID NO: 14627 - RNA, 14 nt, Artificial Sequence
  Description of Artificial Sequence: Synthetic oligonucleotide
auugccagcaaugg

SEQ ID NO: 14628 - RNA, 14 nt, Artificial Sequence
  Description of Artificial Sequence: Synthetic oligonucleotide
cauugccagcaaug

SEQ ID NO: 14629 - RNA, 14 nt, Artificial Sequence
  Description of Artificial Sequence: Synthetic oligonucleotide
ccauugccagcaau

SEQ ID NO: 14630 - RNA, 14 nt, Artificial Sequence
  Description of Artificial Sequence: Synthetic oligonucleotide
uccauugccagcaa

SEQ ID NO: 14631 - RNA, 14 nt, Artificial Sequence
  Description of Artificial Sequence: Synthetic oligonucleotide
auccauugccagca

SEQ ID NO: 14632 - RNA, 14 nt, Artificial Sequence
  Description of Artificial Sequence: Synthetic oligonucleotide
cauccauugccagc

SEQ ID NO: 14633 - RNA, 14 nt, Artificial Sequence
  Description of Artificial Sequence: Synthetic oligonucleotide
gcauccauugccag

SEQ ID NO: 14634 - RNA, 14 nt, Artificial Sequence
  Description of Artificial Sequence: Synthetic oligonucleotide
ugcauccauugcca

SEQ ID NO: 14635 - RNA, 14 nt, Artificial Sequence
  Description of Artificial Sequence: Synthetic oligonucleotide
gugcauccauugcc

SEQ ID NO: 14636 - RNA, 14 nt, Artificial Sequence
  Description of Artificial Sequence: Synthetic oligonucleotide
agugcauccauugc

SEQ ID NO: 14637 - RNA, 14 nt, Artificial Sequence
  Description of Artificial Sequence: Synthetic oligonucleotide
cagugcauccauug

SEQ ID NO: 14638 - RNA, 14 nt, Artificial Sequence
  Description of Artificial Sequence: Synthetic oligonucleotide
ucagugcauccauu

SEQ ID NO: 14639 - RNA, 14 nt, Artificial Sequence
  Description of Artificial Sequence: Synthetic oligonucleotide
uucagugcauccau

SEQ ID NO: 14640 - RNA, 14 nt, Artificial Sequence
  Description of Artificial Sequence: Synthetic oligonucleotide
auucagugcaucca

SEQ ID NO: 14641 - RNA, 14 nt, Artificial Sequence
  Description of Artificial Sequence: Synthetic oligonucleotide
cauucagugcaucc

SEQ ID NO: 14642 - RNA, 14 nt, Artificial Sequence
  Description of Artificial Sequence: Synthetic oligonucleotide
acauucagugcauc

SEQ ID NO: 14643 - RNA, 14 nt, Artificial Sequence
  Description of Artificial Sequence: Synthetic oligonucleotide
cacauucagugcau

SEQ ID NO: 14644 - RNA, 14 nt, Artificial Sequence
  Description of Artificial Sequence: Synthetic oligonucleotide
gcacauucagugca

SEQ ID NO: 14645 - RNA, 14 nt, Artificial Sequence
  Description of Artificial Sequence: Synthetic oligonucleotide
ggcacauucagugc

SEQ ID NO: 14646 - RNA, 14 nt, Artificial Sequence
  Description of Artificial Sequence: Synthetic oligonucleotide
uggcacauucagug

SEQ ID NO: 14647 - RNA, 14 nt, Artificial Sequence
  Description of Artificial Sequence: Synthetic oligonucleotide
cuggcacauucagu

SEQ ID NO: 14648 - RNA, 14 nt, Artificial Sequence
  Description of Artificial Sequence: Synthetic oligonucleotide
gcuggcacauucag

SEQ ID NO: 14649 - RNA, 14 nt, Artificial Sequence
  Description of Artificial Sequence: Synthetic oligonucleotide
ugcuggcacauuca

SEQ ID NO: 14650 - RNA, 14 nt, Artificial Sequence
  Description of Artificial Sequence: Synthetic oligonucleotide
gugcuggcacauuc

SEQ ID NO: 14651 - RNA, 14 nt, Artificial Sequence
  Description of Artificial Sequence: Synthetic oligonucleotide
agugcuggcacauu

SEQ ID NO: 14652 - RNA, 14 nt, Artificial Sequence
  Description of Artificial Sequence: Synthetic oligonucleotide
cagugcuggcacau

SEQ ID NO: 14653 - RNA, 14 nt, Artificial Sequence
  Description of Artificial Sequence: Synthetic oligonucleotide
ucagugcuggcaca

SEQ ID NO: 14654 - RNA, 14 nt, Artificial Sequence
  Description of Artificial Sequence: Synthetic oligonucleotide
cucagugcuggcac

SEQ ID NO: 14655 - RNA, 14 nt, Artificial Sequence
  Description of Artificial Sequence: Synthetic oligonucleotide
ccucagugcuggca

SEQ ID NO: 14656 - RNA, 14 nt, Artificial Sequence
  Description of Artificial Sequence: Synthetic oligonucleotide
uccucagugcuggc

SEQ ID NO: 14657 - RNA, 14 nt, Artificial Sequence
  Description of Artificial Sequence: Synthetic oligonucleotide
cuccucagugcugg

SEQ ID NO: 14658 - RNA, 14 nt, Artificial Sequence
  Description of Artificial Sequence: Synthetic oligonucleotide
acuccucagugcug

SEQ ID NO: 14659 - RNA, 14 nt, Artificial Sequence
  Description of Artificial Sequence: Synthetic oligonucleotide
aacuccucagugcu

SEQ ID NO: 14660 - RNA, 14 nt, Artificial Sequence
  Description of Artificial Sequence: Synthetic oligonucleotide
uaacuccucagugc

SEQ ID NO: 14661 - RNA, 14 nt, Artificial Sequence
  Description of Artificial Sequence: Synthetic oligonucleotide
uuaacuccucagug

SEQ ID NO: 14662 - RNA, 14 nt, Artificial Sequence
  Description of Artificial Sequence: Synthetic oligonucleotide
uuuaacuccucagu

SEQ ID NO: 14663 - RNA, 14 nt, Artificial Sequence
  Description of Artificial Sequence: Synthetic oligonucleotide
uuuuaacuccucag

SEQ ID NO: 14664 - RNA, 14 nt, Artificial Sequence
  Description of Artificial Sequence: Synthetic oligonucleotide
auuuuaacuccuca

SEQ ID NO: 14665 - RNA, 14 nt, Artificial Sequence
  Description of Artificial Sequence: Synthetic oligonucleotide
cauuuuaacuccuc

SEQ ID NO: 14666 - RNA, 14 nt, Artificial Sequence
  Description of Artificial Sequence: Synthetic oligonucleotide
ucauuuuaacuccu

SEQ ID NO: 14667 - RNA, 14 nt, Artificial Sequence
  Description of Artificial Sequence: Synthetic oligonucleotide
cucauuuuaacucc

SEQ ID NO: 14668 - RNA, 14 nt, Artificial Sequence
  Description of Artificial Sequence: Synthetic oligonucleotide
ucucauuuuaacuc

SEQ ID NO: 14669 - RNA, 14 nt, Artificial Sequence
  Description of Artificial Sequence: Synthetic oligonucleotide
uucucauuuuaacu

SEQ ID NO: 14670 - RNA, 14 nt, Artificial Sequence
  Description of Artificial Sequence: Synthetic oligonucleotide
guucucauuuuaac

SEQ ID NO: 14671 - RNA, 14 nt, Artificial Sequence
  Description of Artificial Sequence: Synthetic oligonucleotide
aguucucauuuuaa

SEQ ID NO: 14672 - RNA, 14 nt, Artificial Sequence
  Description of Artificial Sequence: Synthetic oligonucleotide
gaguucucauuuua

SEQ ID NO: 14673 - RNA, 14 nt, Artificial Sequence
  Description of Artificial Sequence: Synthetic oligonucleotide
ggaguucucauuuu

SEQ ID NO: 14674 - RNA, 14 nt, Artificial Sequence
  Description of Artificial Sequence: Synthetic oligonucleotide
uggaguucucauuu

SEQ ID NO: 14675 - RNA, 14 nt, Artificial Sequence
  Description of Artificial Sequence: Synthetic oligonucleotide
uuggaguucucauu

SEQ ID NO: 14676 - RNA, 14 nt, Artificial Sequence
  Description of Artificial Sequence: Synthetic oligonucleotide
uuuggaguucucau

SEQ ID NO: 14677 - RNA, 14 nt, Artificial Sequence
  Description of Artificial Sequence: Synthetic oligonucleotide
guuuggaguucuca

SEQ ID NO: 14678 - RNA, 14 nt, Artificial Sequence
  Description of Artificial Sequence: Synthetic oligonucleotide
uguuuggaguucuc

SEQ ID NO: 14679 - RNA, 14 nt, Artificial Sequence
  Description of Artificial Sequence: Synthetic oligonucleotide
guguuuggaguucu

SEQ ID NO: 14680 - RNA, 14 nt, Artificial Sequence
  Description of Artificial Sequence: Synthetic oligonucleotide
aguguuuggaguuc

SEQ ID NO: 14681 - RNA, 14 nt, Artificial Sequence
  Description of Artificial Sequence: Synthetic oligonucleotide
uaguguuuggaguu

SEQ ID NO: 14682 - RNA, 14 nt, Artificial Sequence
  Description of Artificial Sequence: Synthetic oligonucleotide
uuaguguuuggagu

SEQ ID NO: 14683 - RNA, 14 nt, Artificial Sequence
  Description of Artificial Sequence: Synthetic oligonucleotide
guuaguguuuggag

SEQ ID NO: 14684 - RNA, 14 nt, Artificial Sequence
  Description of Artificial Sequence: Synthetic oligonucleotide
cguuaguguuugga

SEQ ID NO: 14685 - RNA, 14 nt, Artificial Sequence
  Description of Artificial Sequence: Synthetic oligonucleotide
ucguuaguguuugg

SEQ ID NO: 14686 - RNA, 14 nt, Artificial Sequence
  Description of Artificial Sequence: Synthetic oligonucleotide
gucguuaguguuug

SEQ ID NO: 14687 - RNA, 14 nt, Artificial Sequence
  Description of Artificial Sequence: Synthetic oligonucleotide
agucguuaguguuu

SEQ ID NO: 14688 - RNA, 14 nt, Artificial Sequence
  Description of Artificial Sequence: Synthetic oligonucleotide
gagucguuaguguu

SEQ ID NO: 14689 - RNA, 14 nt, Artificial Sequence
  Description of Artificial Sequence: Synthetic oligonucleotide
agagucguuagugu

SEQ ID NO: 14690 - RNA, 14 nt, Artificial Sequence
  Description of Artificial Sequence: Synthetic oligonucleotide
aagagucguuagug

SEQ ID NO: 14691 - RNA, 14 nt, Artificial Sequence
  Description of Artificial Sequence: Synthetic oligonucleotide
gaagagucguuagu

SEQ ID NO: 14692 - RNA, 14 nt, Artificial Sequence
  Description of Artificial Sequence: Synthetic oligonucleotide
agaagagucguuag

SEQ ID NO: 14693 - RNA, 14 nt, Artificial Sequence
  Description of Artificial Sequence: Synthetic oligonucleotide
aagaagagucguua

SEQ ID NO: 14694 - RNA, 14 nt, Artificial Sequence
  Description of Artificial Sequence: Synthetic oligonucleotide
gaagaagagucguu

SEQ ID NO: 14695 - RNA, 14 nt, Artificial Sequence
  Description of Artificial Sequence: Synthetic oligonucleotide
ugaagaagagucgu

SEQ ID NO: 14696 - RNA, 14 nt, Artificial Sequence
  Description of Artificial Sequence: Synthetic oligonucleotide
uugaagaagagucg

SEQ ID NO: 14697 - RNA, 14 nt, Artificial Sequence
  Description of Artificial Sequence: Synthetic oligonucleotide
cuugaagaagaguc

SEQ ID NO: 14698 - RNA, 14 nt, Artificial Sequence
  Description of Artificial Sequence: Synthetic oligonucleotide
ucuugaagaagagu

SEQ ID NO: 14699 - RNA, 14 nt, Artificial Sequence
  Description of Artificial Sequence: Synthetic oligonucleotide
aucuugaagaagag

SEQ ID NO: 14700 - RNA, 14 nt, Artificial Sequence
  Description of Artificial Sequence: Synthetic oligonucleotide
caucuugaagaaga

SEQ ID NO: 14701 - RNA, 14 nt, Artificial Sequence
  Description of Artificial Sequence: Synthetic oligonucleotide
gcaucuugaagaag

SEQ ID NO: 14702 - RNA, 14 nt, Artificial Sequence
  Description of Artificial Sequence: Synthetic oligonucleotide
ugcaucuugaagaa

SEQ ID NO: 14703 - RNA, 14 nt, Artificial Sequence
  Description of Artificial Sequence: Synthetic oligonucleotide
cugcaucuugaaga

SEQ ID NO: 14704 - RNA, 14 nt, Artificial Sequence
  Description of Artificial Sequence: Synthetic oligonucleotide
acugcaucuugaag

SEQ ID NO: 14705 - RNA, 14 nt, Artificial Sequence
  Description of Artificial Sequence: Synthetic oligonucleotide
uacugcaucuugaa

SEQ ID NO: 14706 - RNA, 14 nt, Artificial Sequence
  Description of Artificial Sequence: Synthetic oligonucleotide
auacugcaucuuga

SEQ ID NO: 14707 - RNA, 14 nt, Artificial Sequence
  Description of Artificial Sequence: Synthetic oligonucleotide
uauacugcaucuug

SEQ ID NO: 14708 - RNA, 14 nt, Artificial Sequence
  Description of Artificial Sequence: Synthetic oligonucleotide
uuauacugcaucuu

SEQ ID NO: 14709 - RNA, 14 nt, Artificial Sequence
  Description of Artificial Sequence: Synthetic oligonucleotide
cuuauacugcaucu

SEQ ID NO: 14710 - RNA, 14 nt, Artificial Sequence
  Description of Artificial Sequence: Synthetic oligonucleotide
ucuuauacugcauc

SEQ ID NO: 14711 - RNA, 14 nt, Artificial Sequence
  Description of Artificial Sequence: Synthetic oligonucleotide
gucuuauacugcau

SEQ ID NO: 14712 - RNA, 14 nt, Artificial Sequence
  Description of Artificial Sequence: Synthetic oligonucleotide
ugucuuauacugca

SEQ ID NO: 14713 - RNA, 14 nt, Artificial Sequence
  Description of Artificial Sequence: Synthetic oligonucleotide
uugucuuauacugc

SEQ ID NO: 14714 - RNA, 14 nt, Artificial Sequence
  Description of Artificial Sequence: Synthetic oligonucleotide
auugucuuauacug

SEQ ID NO: 14715 - RNA, 14 nt, Artificial Sequence
  Description of Artificial Sequence: Synthetic oligonucleotide
cauugucuuauacu

SEQ ID NO: 14716 - RNA, 14 nt, Artificial Sequence
  Description of Artificial Sequence: Synthetic oligonucleotide
ucauugucuuauac

SEQ ID NO: 14717 - RNA, 14 nt, Artificial Sequence
  Description of Artificial Sequence: Synthetic oligonucleotide
uucauugucuuaua

SEQ ID NO: 14718 - RNA, 14 nt, Artificial Sequence
  Description of Artificial Sequence: Synthetic oligonucleotide
auucauugucuuau

SEQ ID NO: 14719 - RNA, 14 nt, Artificial Sequence
  Description of Artificial Sequence: Synthetic oligonucleotide
aauucauugucuua

SEQ ID NO: 14720 - RNA, 14 nt, Artificial Sequence
  Description of Artificial Sequence: Synthetic oligonucleotide
aaauucauugucuu

SEQ ID NO: 14721 - RNA, 14 nt, Artificial Sequence
  Description of Artificial Sequence: Synthetic oligonucleotide
aaaauucauugucu

SEQ ID NO: 14722 - RNA, 14 nt, Artificial Sequence
  Description of Artificial Sequence: Synthetic oligonucleotide
uaaaauucauuguc

SEQ ID NO: 14723 - RNA, 14 nt, Artificial Sequence
  Description of Artificial Sequence: Synthetic oligonucleotide
uuaaaauucauugu

SEQ ID NO: 14724 - RNA, 14 nt, Artificial Sequence
  Description of Artificial Sequence: Synthetic oligonucleotide
guuaaaauucauug

SEQ ID NO: 14725 - RNA, 14 nt, Artificial Sequence
  Description of Artificial Sequence: Synthetic oligonucleotide
gguuaaaauucauu

SEQ ID NO: 14726 - RNA, 14 nt, Artificial Sequence
  Description of Artificial Sequence: Synthetic oligonucleotide
agguuaaaauucau

SEQ ID NO: 14727 - RNA, 14 nt, Artificial Sequence
  Description of Artificial Sequence: Synthetic oligonucleotide
uagguuaaaauuca

SEQ ID NO: 14728 - RNA, 14 nt, Artificial Sequence
  Description of Artificial Sequence: Synthetic oligonucleotide
cuagguuaaaauuc

SEQ ID NO: 14729 - RNA, 14 nt, Artificial Sequence
  Description of Artificial Sequence: Synthetic oligonucleotide
ucuagguuaaaauu

SEQ ID NO: 14730 - RNA, 14 nt, Artificial Sequence
  Description of Artificial Sequence: Synthetic oligonucleotide
aucuagguuaaaau

SEQ ID NO: 14731 - RNA, 14 nt, Artificial Sequence
  Description of Artificial Sequence: Synthetic oligonucleotide
caucuagguuaaaa

SEQ ID NO: 14732 - RNA, 14 nt, Artificial Sequence
  Description of Artificial Sequence: Synthetic oligonucleotide
acaucuagguuaaa

SEQ ID NO: 14733 - RNA, 14 nt, Artificial Sequence
  Description of Artificial Sequence: Synthetic oligonucleotide
uacaucuagguuaa

SEQ ID NO: 14734 - RNA, 14 nt, Artificial Sequence
  Description of Artificial Sequence: Synthetic oligonucleotide
uuacaucuagguua

SEQ ID NO: 14735 - RNA, 14 nt, Artificial Sequence
  Description of Artificial Sequence: Synthetic oligonucleotide
auuacaucuagguu

SEQ ID NO: 14736 - RNA, 14 nt, Artificial Sequence
  Description of Artificial Sequence: Synthetic oligonucleotide
aauuacaucuaggu

SEQ ID NO: 14737 - RNA, 14 nt, Artificial Sequence
  Description of Artificial Sequence: Synthetic oligonucleotide
uaauuacaucuagg

SEQ ID NO: 14738 - RNA, 14 nt, Artificial Sequence
  Description of Artificial Sequence: Synthetic oligonucleotide
auaauuacaucuag

SEQ ID NO: 14739 - RNA, 14 nt, Artificial Sequence
  Description of Artificial Sequence: Synthetic oligonucleotide
uauaauuacaucua

SEQ ID NO: 14740 - RNA, 14 nt, Artificial Sequence
  Description of Artificial Sequence: Synthetic oligonucleotide
guauaauuacaucu

SEQ ID NO: 14741 - RNA, 14 nt, Artificial Sequence
  Description of Artificial Sequence: Synthetic oligonucleotide
uguauaauuacauc

SEQ ID NO: 14742 - RNA, 14 nt, Artificial Sequence
  Description of Artificial Sequence: Synthetic oligonucleotide
uuguauaauuacau

SEQ ID NO: 14743 - RNA, 14 nt, Artificial Sequence
  Description of Artificial Sequence: Synthetic oligonucleotide
auuguauaauuaca

SEQ ID NO: 14744 - RNA, 14 nt, Artificial Sequence
  Description of Artificial Sequence: Synthetic oligonucleotide
cauuguauaauuac

SEQ ID NO: 14745 - RNA, 14 nt, Artificial Sequence
  Description of Artificial Sequence: Synthetic oligonucleotide
ccauuguauaauua

SEQ ID NO: 14746 - RNA, 14 nt, Artificial Sequence
  Description of Artificial Sequence: Synthetic oligonucleotide
uccauuguauaauu

SEQ ID NO: 14747 - RNA, 14 nt, Artificial Sequence
  Description of Artificial Sequence: Synthetic oligonucleotide
uuccauuguauaau

SEQ ID NO: 14748 - RNA, 14 nt, Artificial Sequence
  Description of Artificial Sequence: Synthetic oligonucleotide
uuuccauuguauaa

SEQ ID NO: 14749 - RNA, 14 nt, Artificial Sequence
  Description of Artificial Sequence: Synthetic oligonucleotide
auuuccauuguaua

SEQ ID NO: 14750 - RNA, 14 nt, Artificial Sequence
  Description of Artificial Sequence: Synthetic oligonucleotide
cauuuccauuguau

SEQ ID NO: 14751 - RNA, 14 nt, Artificial Sequence
  Description of Artificial Sequence: Synthetic oligonucleotide
ccauuuccauugua

SEQ ID NO: 14752 - RNA, 14 nt, Artificial Sequence
  Description of Artificial Sequence: Synthetic oligonucleotide
accauuuccauugu

SEQ ID NO: 14753 - RNA, 14 nt, Artificial Sequence
  Description of Artificial Sequence: Synthetic oligonucleotide
uaccauuuccauug

SEQ ID NO: 14754 - RNA, 14 nt, Artificial Sequence
  Description of Artificial Sequence: Synthetic oligonucleotide
auaccauuuccauu

SEQ ID NO: 14755 - RNA, 14 nt, Artificial Sequence
  Description of Artificial Sequence: Synthetic oligonucleotide
aauaccauuuccau

SEQ ID NO: 14756 - RNA, 14 nt, Artificial Sequence
  Description of Artificial Sequence: Synthetic oligonucleotide
gaauaccauuucca

SEQ ID NO: 14757 - RNA, 14 nt, Artificial Sequence
  Description of Artificial Sequence: Synthetic oligonucleotide
ggaauaccauuucc

SEQ ID NO: 14758 - RNA, 14 nt, Artificial Sequence
  Description of Artificial Sequence: Synthetic oligonucleotide
uggaauaccauuuc

SEQ ID NO: 14759 - RNA, 14 nt, Artificial Sequence
  Description of Artificial Sequence: Synthetic oligonucleotide
cuggaauaccauuu

SEQ ID NO: 14760 - RNA, 14 nt, Artificial Sequence
  Description of Artificial Sequence: Synthetic oligonucleotide
acuggaauaccauu

SEQ ID NO: 14761 - RNA, 14 nt, Artificial Sequence
  Description of Artificial Sequence: Synthetic oligonucleotide
aacuggaauaccau

SEQ ID NO: 14762 - RNA, 14 nt, Artificial Sequence
  Description of Artificial Sequence: Synthetic oligonucleotide
aaacuggaauacca

SEQ ID NO: 14763 - RNA, 14 nt, Artificial Sequence
  Description of Artificial Sequence: Synthetic oligonucleotide
uaaacuggaauacc

SEQ ID NO: 14764 - RNA, 14 nt, Artificial Sequence
  Description of Artificial Sequence: Synthetic oligonucleotide
cuaaacuggaauac

SEQ ID NO: 14765 - RNA, 14 nt, Artificial Sequence
  Description of Artificial Sequence: Synthetic oligonucleotide
ucuaaacuggaaua

SEQ ID NO: 14766 - RNA, 14 nt, Artificial Sequence
  Description of Artificial Sequence: Synthetic oligonucleotide
uucuaaacuggaau

SEQ ID NO: 14767 - RNA, 14 nt, Artificial Sequence
  Description of Artificial Sequence: Synthetic oligonucleotide
auucuaaacuggaa

SEQ ID NO: 14768 - RNA, 14 nt, Artificial Sequence
  Description of Artificial Sequence: Synthetic oligonucleotide
uauucuaaacugga

SEQ ID NO: 14769 - RNA, 14 nt, Artificial Sequence
  Description of Artificial Sequence: Synthetic oligonucleotide
auauucuaaacugg

SEQ ID NO: 14770 - RNA, 14 nt, Artificial Sequence
  Description of Artificial Sequence: Synthetic oligonucleotide
cauauucuaaacug

SEQ ID NO: 14771 - RNA, 14 nt, Artificial Sequence
  Description of Artificial Sequence: Synthetic oligonucleotide
ccauauucuaaacu

SEQ ID NO: 14772 - RNA, 14 nt, Artificial Sequence
  Description of Artificial Sequence: Synthetic oligonucleotide
uccauauucuaaac

SEQ ID NO: 14773 - RNA, 14 nt, Artificial Sequence
  Description of Artificial Sequence: Synthetic oligonucleotide
uuccauauucuaaa

SEQ ID NO: 14774 - RNA, 14 nt, Artificial Sequence
  Description of Artificial Sequence: Synthetic oligonucleotide
uuuccauauucuaa

SEQ ID NO: 14775 - RNA, 14 nt, Artificial Sequence
  Description of Artificial Sequence: Synthetic oligonucleotide
cuuuccauauucua

SEQ ID NO: 14776 - RNA, 14 nt, Artificial Sequence
  Description of Artificial Sequence: Synthetic oligonucleotide
ucuuuccauauucu

SEQ ID NO: 14777 - RNA, 14 nt, Artificial Sequence
  Description of Artificial Sequence: Synthetic oligonucleotide
gucuuuccauauuc

SEQ ID NO: 14778 - RNA, 14 nt, Artificial Sequence
  Description of Artificial Sequence: Synthetic oligonucleotide
ggucuuuccauauu

SEQ ID NO: 14779 - RNA, 14 nt, Artificial Sequence
  Description of Artificial Sequence: Synthetic oligonucleotide
cggucuuuccauau

SEQ ID NO: 14780 - RNA, 14 nt, Artificial Sequence
  Description of Artificial Sequence: Synthetic oligonucleotide
ucggucuuuccaua

SEQ ID NO: 14781 - RNA, 14 nt, Artificial Sequence
  Description of Artificial Sequence: Synthetic oligonucleotide
gucggucuuuccau

SEQ ID NO: 14782 - RNA, 14 nt, Artificial Sequence
  Description of Artificial Sequence: Synthetic oligonucleotide
ggucggucuuucca

SEQ ID NO: 14783 - RNA, 14 nt, Artificial Sequence
  Description of Artificial Sequence: Synthetic oligonucleotide
aggucggucuuucc

SEQ ID NO: 14784 - RNA, 14 nt, Artificial Sequence
  Description of Artificial Sequence: Synthetic oligonucleotide
uaggucggucuuuc

SEQ ID NO: 14785 - RNA, 14 nt, Artificial Sequence
  Description of Artificial Sequence: Synthetic oligonucleotide
cuaggucggucuuu

SEQ ID NO: 14786 - RNA, 14 nt, Artificial Sequence
  Description of Artificial Sequence: Synthetic oligonucleotide
ucuaggucggucuu

SEQ ID NO: 14787 - RNA, 14 nt, Artificial Sequence
  Description of Artificial Sequence: Synthetic oligonucleotide
cucuaggucggucu

SEQ ID NO: 14788 - RNA, 14 nt, Artificial Sequence
  Description of Artificial Sequence: Synthetic oligonucleotide
ccucuaggucgguc

SEQ ID NO: 14789 - RNA, 14 nt, Artificial Sequence
  Description of Artificial Sequence: Synthetic oligonucleotide
uccucuaggucggu

SEQ ID NO: 14790 - RNA, 14 nt, Artificial Sequence
  Description of Artificial Sequence: Synthetic oligonucleotide
uuccucuaggucgg

SEQ ID NO: 14791 - RNA, 14 nt, Artificial Sequence
  Description of Artificial Sequence: Synthetic oligonucleotide
auuccucuaggucg

SEQ ID NO: 14792 - RNA, 14 nt, Artificial Sequence
  Description of Artificial Sequence: Synthetic oligonucleotide
aauuccucuagguc

SEQ ID NO: 14793 - RNA, 14 nt, Artificial Sequence
  Description of Artificial Sequence: Synthetic oligonucleotide
caauuccucuaggu

SEQ ID NO: 14794 - RNA, 14 nt, Artificial Sequence
  Description of Artificial Sequence: Synthetic oligonucleotide
ccaauuccucuagg

SEQ ID NO: 14795 - RNA, 14 nt, Artificial Sequence
  Description of Artificial Sequence: Synthetic oligonucleotide
uccaauuccucuag

SEQ ID NO: 14796 - RNA, 14 nt, Artificial Sequence
  Description of Artificial Sequence: Synthetic oligonucleotide
guccaauuccucua

SEQ ID NO: 14797 - RNA, 14 nt, Artificial Sequence
  Description of Artificial Sequence: Synthetic oligonucleotide
uguccaauuccucu

SEQ ID NO: 14798 - RNA, 14 nt, Artificial Sequence
  Description of Artificial Sequence: Synthetic oligonucleotide
uuguccaauuccuc

SEQ ID NO: 14799 - RNA, 14 nt, Artificial Sequence
  Description of Artificial Sequence: Synthetic oligonucleotide
guuguccaauuccu

SEQ ID NO: 14800 - RNA, 14 nt, Artificial Sequence
  Description of Artificial Sequence: Synthetic oligonucleotide
aguuguccaauucc

SEQ ID NO: 14801 - RNA, 14 nt, Artificial Sequence
  Description of Artificial Sequence: Synthetic oligonucleotide
caguuguccaauuc

SEQ ID NO: 14802 - RNA, 14 nt, Artificial Sequence
  Description of Artificial Sequence: Synthetic oligonucleotide
ucaguuguccaauu

SEQ ID NO: 14803 - RNA, 14 nt, Artificial Sequence
  Description of Artificial Sequence: Synthetic oligonucleotide
aucaguuguccaau

SEQ ID NO: 14804 - RNA, 14 nt, Artificial Sequence
  Description of Artificial Sequence: Synthetic oligonucleotide
aaucaguuguccaa

SEQ ID NO: 14805 - RNA, 14 nt, Artificial Sequence
  Description of Artificial Sequence: Synthetic oligonucleotide
caaucaguugucca

SEQ ID NO: 14806 - RNA, 14 nt, Artificial Sequence
  Description of Artificial Sequence: Synthetic oligonucleotide
gcaaucaguugucc

SEQ ID NO: 14807 - RNA, 14 nt, Artificial Sequence
  Description of Artificial Sequence: Synthetic oligonucleotide
ugcaaucaguuguc

SEQ ID NO: 14808 - RNA, 14 nt, Artificial Sequence
  Description of Artificial Sequence: Synthetic oligonucleotide
gugcaaucaguugu

SEQ ID NO: 14809 - RNA, 14 nt, Artificial Sequence
  Description of Artificial Sequence: Synthetic oligonucleotide
ggugcaaucaguug

SEQ ID NO: 14810 - RNA, 14 nt, Artificial Sequence
  Description of Artificial Sequence: Synthetic oligonucleotide
aggugcaaucaguu

SEQ ID NO: 14811 - RNA, 14 nt, Artificial Sequence
  Description of Artificial Sequence: Synthetic oligonucleotide
caggugcaaucagu

SEQ ID NO: 14812 - RNA, 14 nt, Artificial Sequence
  Description of Artificial Sequence: Synthetic oligonucleotide
ucaggugcaaucag

SEQ ID NO: 14813 - RNA, 14 nt, Artificial Sequence
  Description of Artificial Sequence: Synthetic oligonucleotide
uucaggugcaauca

SEQ ID NO: 14814 - RNA, 14 nt, Artificial Sequence
  Description of Artificial Sequence: Synthetic oligonucleotide
uuucaggugcaauc

SEQ ID NO: 14815 - RNA, 14 nt, Artificial Sequence
  Description of Artificial Sequence: Synthetic oligonucleotide
uuuucaggugcaau

SEQ ID NO: 14816 - RNA, 14 nt, Artificial Sequence
  Description of Artificial Sequence: Synthetic oligonucleotide
auuuucaggugcaa

SEQ ID NO: 14817 - RNA, 14 nt, Artificial Sequence
  Description of Artificial Sequence: Synthetic oligonucleotide
gauuuucaggugca

SEQ ID NO: 14818 - RNA, 14 nt, Artificial Sequence
  Description of Artificial Sequence: Synthetic oligonucleotide
ugauuuucaggugc

SEQ ID NO: 14819 - RNA, 14 nt, Artificial Sequence
  Description of Artificial Sequence: Synthetic oligonucleotide
augauuuucaggug

SEQ ID NO: 14820 - RNA, 14 nt, Artificial Sequence
  Description of Artificial Sequence: Synthetic oligonucleotide
uaugauuuucaggu

SEQ ID NO: 14821 - RNA, 14 nt, Artificial Sequence
  Description of Artificial Sequence: Synthetic oligonucleotide
uuaugauuuucagg

SEQ ID NO: 14822 - RNA, 14 nt, Artificial Sequence
  Description of Artificial Sequence: Synthetic oligonucleotide
uuuaugauuuucag

SEQ ID NO: 14823 - RNA, 14 nt, Artificial Sequence
  Description of Artificial Sequence: Synthetic oligonucleotide
cuuuaugauuuuca

SEQ ID NO: 14824 - RNA, 14 nt, Artificial Sequence
  Description of Artificial Sequence: Synthetic oligonucleotide
ccuuuaugauuuuc

SEQ ID NO: 14825 - RNA, 14 nt, Artificial Sequence
  Description of Artificial Sequence: Synthetic oligonucleotide
cccuuuaugauuuu

SEQ ID NO: 14826 - RNA, 14 nt, Artificial Sequence
  Description of Artificial Sequence: Synthetic oligonucleotide
ucccuuuaugauuu

SEQ ID NO: 14827 - RNA, 14 nt, Artificial Sequence
  Description of Artificial Sequence: Synthetic oligonucleotide
gucccuuuaugauu

SEQ ID NO: 14828 - RNA, 14 nt, Artificial Sequence
  Description of Artificial Sequence: Synthetic oligonucleotide
agucccuuuaugau

SEQ ID NO: 14829 - RNA, 14 nt, Artificial Sequence
  Description of Artificial Sequence: Synthetic oligonucleotide
aagucccuuuauga

SEQ ID NO: 14830 - RNA, 14 nt, Artificial Sequence
  Description of Artificial Sequence: Synthetic oligonucleotide
aaagucccuuuaug

SEQ ID NO: 14831 - RNA, 14 nt, Artificial Sequence
  Description of Artificial Sequence: Synthetic oligonucleotide
aaaagucccuuuau

SEQ ID NO: 14832 - RNA, 14 nt, Artificial Sequence
  Description of Artificial Sequence: Synthetic oligonucleotide
aaaaagucccuuua

SEQ ID NO: 14833 - RNA, 14 nt, Artificial Sequence
  Description of Artificial Sequence: Synthetic oligonucleotide
gaaaaagucccuuu

SEQ ID NO: 14834 - RNA, 14 nt, Artificial Sequence
  Description of Artificial Sequence: Synthetic oligonucleotide
agaaaaagucccuu

SEQ ID NO: 14835 - RNA, 14 nt, Artificial Sequence
  Description of Artificial Sequence: Synthetic oligonucleotide
cagaaaaagucccu

SEQ ID NO: 14836 - RNA, 14 nt, Artificial Sequence
  Description of Artificial Sequence: Synthetic oligonucleotide
ccagaaaaaguccc

SEQ ID NO: 14837 - RNA, 14 nt, Artificial Sequence
  Description of Artificial Sequence: Synthetic oligonucleotide
gccagaaaaagucc

SEQ ID NO: 14838 - RNA, 14 nt, Artificial Sequence
  Description of Artificial Sequence: Synthetic oligonucleotide
ggccagaaaaaguc

SEQ ID NO: 14839 - RNA, 14 nt, Artificial Sequence
  Description of Artificial Sequence: Synthetic oligonucleotide
uggccagaaaaagu

SEQ ID NO: 14840 - RNA, 14 nt, Artificial Sequence
  Description of Artificial Sequence: Synthetic oligonucleotide
uuggccagaaaaag

SEQ ID NO: 14841 - RNA, 14 nt, Artificial Sequence
  Description of Artificial Sequence: Synthetic oligonucleotide
auuggccagaaaaa

SEQ ID NO: 14842 - RNA, 14 nt, Artificial Sequence
  Description of Artificial Sequence: Synthetic oligonucleotide
uauuggccagaaaa

SEQ ID NO: 14843 - RNA, 14 nt, Artificial Sequence
  Description of Artificial Sequence: Synthetic oligonucleotide
cuauuggccagaaa

SEQ ID NO: 14844 - RNA, 14 nt, Artificial Sequence
  Description of Artificial Sequence: Synthetic oligonucleotide
ccuauuggccagaa

SEQ ID NO: 14845 - RNA, 14 nt, Artificial Sequence
  Description of Artificial Sequence: Synthetic oligonucleotide
gccuauuggccaga

SEQ ID NO: 14846 - RNA, 14 nt, Artificial Sequence
  Description of Artificial Sequence: Synthetic oligonucleotide
ugccuauuggccag

SEQ ID NO: 14847 - RNA, 14 nt, Artificial Sequence
  Description of Artificial Sequence: Synthetic oligonucleotide
cugccuauuggcca

SEQ ID NO: 14848 - RNA, 14 nt, Artificial Sequence
  Description of Artificial Sequence: Synthetic oligonucleotide
ccugccuauuggcc

SEQ ID NO: 14849 - RNA, 14 nt, Artificial Sequence
  Description of Artificial Sequence: Synthetic oligonucleotide
uccugccuauuggc

SEQ ID NO: 14850 - RNA, 14 nt, Artificial Sequence
  Description of Artificial Sequence: Synthetic oligonucleotide
cuccugccuauugg

SEQ ID NO: 14851 - RNA, 14 nt, Artificial Sequence
  Description of Artificial Sequence: Synthetic oligonucleotide
acuccugccuauug

SEQ ID NO: 14852 - RNA, 14 nt, Artificial Sequence
  Description of Artificial Sequence: Synthetic oligonucleotide
gacuccugccuauu

SEQ ID NO: 14853 - RNA, 14 nt, Artificial Sequence
  Description of Artificial Sequence: Synthetic oligonucleotide
ggacuccugccuau

SEQ ID NO: 14854 - RNA, 14 nt, Artificial Sequence
  Description of Artificial Sequence: Synthetic oligonucleotide
aggacuccugccua

SEQ ID NO: 14855 - RNA, 14 nt, Artificial Sequence
  Description of Artificial Sequence: Synthetic oligonucleotide
gaggacuccugccu

SEQ ID NO: 14856 - RNA, 14 nt, Artificial Sequence
  Description of Artificial Sequence: Synthetic oligonucleotide
agaggacuccugcc

SEQ ID NO: 14857 - RNA, 14 nt, Artificial Sequence
  Description of Artificial Sequence: Synthetic oligonucleotide
aagaggacuccugc

SEQ ID NO: 14858 - RNA, 14 nt, Artificial Sequence
  Description of Artificial Sequence: Synthetic oligonucleotide
aaagaggacuccug

SEQ ID NO: 14859 - RNA, 14 nt, Artificial Sequence
  Description of Artificial Sequence: Synthetic oligonucleotide
aaaagaggacuccu

SEQ ID NO: 14860 - RNA, 14 nt, Artificial Sequence
  Description of Artificial Sequence: Synthetic oligonucleotide
aaaaagaggacucc

SEQ ID NO: 14861 - RNA, 14 nt, Artificial Sequence
  Description of Artificial Sequence: Synthetic oligonucleotide
caaaaagaggacuc

SEQ ID NO: 14862 - RNA, 14 nt, Artificial Sequence
  Description of Artificial Sequence: Synthetic oligonucleotide
acaaaaagaggacu

SEQ ID NO: 14863 - DNA, 14 bp, Artificial Sequence
  Description of Artificial Sequence: Synthetic oligonucleotide
cacaaaaagaggac

SEQ ID NO: 14864 - RNA, 14 nt, Artificial Sequence
  Description of Artificial Sequence: Synthetic oligonucleotide
ucacaaaaagagga

SEQ ID NO: 14865 - RNA, 14 nt, Artificial Sequence
  Description of Artificial Sequence: Synthetic oligonucleotide
uucacaaaaagagg

SEQ ID NO: 14866 - RNA, 14 nt, Artificial Sequence
  Description of Artificial Sequence: Synthetic oligonucleotide
cuucacaaaaagag

SEQ ID NO: 14867 - RNA, 14 nt, Artificial Sequence
  Description of Artificial Sequence: Synthetic oligonucleotide
acuucacaaaaaga

SEQ ID NO: 14868 - RNA, 14 nt, Artificial Sequence
  Description of Artificial Sequence: Synthetic oligonucleotide
cacuucacaaaaag

SEQ ID NO: 14869 - RNA, 14 nt, Artificial Sequence
  Description of Artificial Sequence: Synthetic oligonucleotide
ucacuucacaaaaa

SEQ ID NO: 14870 - RNA, 14 nt, Artificial Sequence
  Description of Artificial Sequence: Synthetic oligonucleotide
aucacuucacaaaa

SEQ ID NO: 14871 - RNA, 14 nt, Artificial Sequence
  Description of Artificial Sequence: Synthetic oligonucleotide
gaucacuucacaaa

SEQ ID NO: 14872 - RNA, 14 nt, Artificial Sequence
  Description of Artificial Sequence: Synthetic oligonucleotide
agaucacuucacaa

SEQ ID NO: 14873 - RNA, 14 nt, Artificial Sequence
  Description of Artificial Sequence: Synthetic oligonucleotide
aagaucacuucaca

SEQ ID NO: 14874 - RNA, 14 nt, Artificial Sequence
  Description of Artificial Sequence: Synthetic oligonucleotide
aaagaucacuucac

SEQ ID NO: 14875 - RNA, 14 nt, Artificial Sequence
  Description of Artificial Sequence: Synthetic oligonucleotide
aaaagaucacuuca

SEQ ID NO: 14876 - RNA, 14 nt, Artificial Sequence
  Description of Artificial Sequence: Synthetic oligonucleotide
caaaagaucacuuc

SEQ ID NO: 14877 - RNA, 14 nt, Artificial Sequence
  Description of Artificial Sequence: Synthetic oligonucleotide
acaaaagaucacuu

SEQ ID NO: 14878 - RNA, 14 nt, Artificial Sequence
  Description of Artificial Sequence: Synthetic oligonucleotide
cacaaaagaucacu

SEQ ID NO: 14879 - RNA, 14 nt, Artificial Sequence
  Description of Artificial Sequence: Synthetic oligonucleotide
ucacaaaagaucac

SEQ ID NO: 14880 - RNA, 14 nt, Artificial Sequence
  Description of Artificial Sequence: Synthetic oligonucleotide
uucacaaaagauca

SEQ ID NO: 14881 - RNA, 14 nt, Artificial Sequence
  Description of Artificial Sequence: Synthetic oligonucleotide
cuucacaaaagauc

SEQ ID NO: 14882 - RNA, 14 nt, Artificial Sequence
  Description of Artificial Sequence: Synthetic oligonucleotide
acuucacaaaagau

SEQ ID NO: 14883 - RNA, 14 nt, Artificial Sequence
  Description of Artificial Sequence: Synthetic oligonucleotide
cacuucacaaaaga

SEQ ID NO: 14884 - RNA, 14 nt, Artificial Sequence
  Description of Artificial Sequence: Synthetic oligonucleotide
ucacuucacaaaag

SEQ ID NO: 14885-14886 - skipped (2 entries)

SEQ ID NO: 14887 - RNA, 14 nt, Artificial Sequence
  Description of Artificial Sequence: Synthetic oligonucleotide
ugaucacuucacaa

SEQ ID NO: 14888 - RNA, 14 nt, Artificial Sequence
  Description of Artificial Sequence: Synthetic oligonucleotide
augaucacuucaca

SEQ ID NO: 14889 - RNA, 14 nt, Artificial Sequence
  Description of Artificial Sequence: Synthetic oligonucleotide
aaugaucacuucac

SEQ ID NO: 14890 - RNA, 14 nt, Artificial Sequence
  Description of Artificial Sequence: Synthetic oligonucleotide
uaaugaucacuuca

SEQ ID NO: 14891 - RNA, 14 nt, Artificial Sequence
  Description of Artificial Sequence: Synthetic oligonucleotide
uuaaugaucacuuc

SEQ ID NO: 14892 - RNA, 14 nt, Artificial Sequence
  Description of Artificial Sequence: Synthetic oligonucleotide
uuuaaugaucacuu

SEQ ID NO: 14893 - RNA, 14 nt, Artificial Sequence
  Description of Artificial Sequence: Synthetic oligonucleotide
cuuuaaugaucacu

SEQ ID NO: 14894 - RNA, 14 nt, Artificial Sequence
  Description of Artificial Sequence: Synthetic oligonucleotide
ccuuuaaugaucac

SEQ ID NO: 14895 - RNA, 14 nt, Artificial Sequence
  Description of Artificial Sequence: Synthetic oligonucleotide
cccuuuaaugauca

SEQ ID NO: 14896 - RNA, 14 nt, Artificial Sequence
  Description of Artificial Sequence: Synthetic oligonucleotide
ucccuuuaaugauc

SEQ ID NO: 14897 - RNA, 14 nt, Artificial Sequence
  Description of Artificial Sequence: Synthetic oligonucleotide
aucccuuuaaugau

SEQ ID NO: 14898 - RNA, 14 nt, Artificial Sequence
  Description of Artificial Sequence: Synthetic oligonucleotide
caucccuuuaauga

SEQ ID NO: 14899 - RNA, 14 nt, Artificial Sequence
  Description of Artificial Sequence: Synthetic oligonucleotide
ccaucccuuuaaug

SEQ ID NO: 14900 - RNA, 14 nt, Artificial Sequence
  Description of Artificial Sequence: Synthetic oligonucleotide
uccaucccuuuaau

SEQ ID NO: 14901 - RNA, 14 nt, Artificial Sequence
  Description of Artificial Sequence: Synthetic oligonucleotide
uuccaucccuuuaa

SEQ ID NO: 14902 - RNA, 14 nt, Artificial Sequence
  Description of Artificial Sequence: Synthetic oligonucleotide
uuuccaucccuuua

SEQ ID NO: 14903 - RNA, 14 nt, Artificial Sequence
  Description of Artificial Sequence: Synthetic oligonucleotide
uuuuccaucccuuu

SEQ ID NO: 14904 - RNA, 14 nt, Artificial Sequence
  Description of Artificial Sequence: Synthetic oligonucleotide
guuuuccaucccuu

SEQ ID NO: 14905 - RNA, 14 nt, Artificial Sequence
  Description of Artificial Sequence: Synthetic oligonucleotide
uguuuuccaucccu

SEQ ID NO: 14906 - RNA, 14 nt, Artificial Sequence
  Description of Artificial Sequence: Synthetic oligonucleotide
guguuuuccauccc

SEQ ID NO: 14907 - RNA, 14 nt, Artificial Sequence
  Description of Artificial Sequence: Synthetic oligonucleotide
uguguuuuccaucc

SEQ ID NO: 14908 - RNA, 14 nt, Artificial Sequence
  Description of Artificial Sequence: Synthetic oligonucleotide
cuguguuuuccauc

SEQ ID NO: 14909 - RNA, 14 nt, Artificial Sequence
  Description of Artificial Sequence: Synthetic oligonucleotide
acuguguuuuccau

SEQ ID NO: 14910 - RNA, 14 nt, Artificial Sequence
  Description of Artificial Sequence: Synthetic oligonucleotide
gacuguguuuucca

SEQ ID NO: 14911 - RNA, 14 nt, Artificial Sequence
  Description of Artificial Sequence: Synthetic oligonucleotide
agacuguguuuucc

SEQ ID NO: 14912 - RNA, 14 nt, Artificial Sequence
  Description of Artificial Sequence: Synthetic oligonucleotide
uagacuguguuuuc

SEQ ID NO: 14913 - RNA, 14 nt, Artificial Sequence
  Description of Artificial Sequence: Synthetic oligonucleotide
cuagacuguguuuu

SEQ ID NO: 14914 - RNA, 14 nt, Artificial Sequence
  Description of Artificial Sequence: Synthetic oligonucleotide
acuagacuguguuu

SEQ ID NO: 14915 - RNA, 14 nt, Artificial Sequence
  Description of Artificial Sequence: Synthetic oligonucleotide
cacuagacuguguu

SEQ ID NO: 14916 - RNA, 14 nt, Artificial Sequence
  Description of Artificial Sequence: Synthetic oligonucleotide
acacuagacugugu

SEQ ID NO: 14917 - RNA, 14 nt, Artificial Sequence
  Description of Artificial Sequence: Synthetic oligonucleotide
gacacuagacugug

SEQ ID NO: 14918 - RNA, 14 nt, Artificial Sequence
  Description of Artificial Sequence: Synthetic oligonucleotide
ggacacuagacugu

SEQ ID NO: 14919 - RNA, 14 nt, Artificial Sequence
  Description of Artificial Sequence: Synthetic oligonucleotide
uggacacuagacug

SEQ ID NO: 14920 - RNA, 14 nt, Artificial Sequence
  Description of Artificial Sequence: Synthetic oligonucleotide
cuggacacuagacu

SEQ ID NO: 14921 - RNA, 14 nt, Artificial Sequence
  Description of Artificial Sequence: Synthetic oligonucleotide
gcuggacacuagac

SEQ ID NO: 14922 - RNA, 14 nt, Artificial Sequence
  Description of Artificial Sequence: Synthetic oligonucleotide
ugcuggacacuaga

SEQ ID NO: 14923 - RNA, 14 nt, Artificial Sequence
  Description of Artificial Sequence: Synthetic oligonucleotide
cugcuggacacuag

SEQ ID NO: 14924 - RNA, 14 nt, Artificial Sequence
  Description of Artificial Sequence: Synthetic oligonucleotide
ccugcuggacacua

SEQ ID NO: 14925 - RNA, 14 nt, Artificial Sequence
  Description of Artificial Sequence: Synthetic oligonucleotide
gccugcuggacacu

SEQ ID NO: 14926 - RNA, 14 nt, Artificial Sequence
  Description of Artificial Sequence: Synthetic oligonucleotide
ggccugcuggacac

SEQ ID NO: 14927 - RNA, 14 nt, Artificial Sequence
  Description of Artificial Sequence: Synthetic oligonucleotide
gggccugcuggaca

SEQ ID NO: 14928 - RNA, 14 nt, Artificial Sequence
  Description of Artificial Sequence: Synthetic oligonucleotide
ugggccugcuggac

SEQ ID NO: 14929 - RNA, 14 nt, Artificial Sequence
  Description of Artificial Sequence: Synthetic oligonucleotide
gugggccugcugga

SEQ ID NO: 14930 - RNA, 14 nt, Artificial Sequence
  Description of Artificial Sequence: Synthetic oligonucleotide
ugugggccugcugg

SEQ ID NO: 14931 - RNA, 14 nt, Artificial Sequence
  Description of Artificial Sequence: Synthetic oligonucleotide
augugggccugcug

SEQ ID NO: 14932 - RNA, 14 nt, Artificial Sequence
  Description of Artificial Sequence: Synthetic oligonucleotide
caugugggccugcu

SEQ ID NO: 14933 - RNA, 14 nt, Artificial Sequence
  Description of Artificial Sequence: Synthetic oligonucleotide
ucaugugggccugc

SEQ ID NO: 14934 - RNA, 14 nt, Artificial Sequence
  Description of Artificial Sequence: Synthetic oligonucleotide
gucaugugggccug

SEQ ID NO: 14935 - RNA, 14 nt, Artificial Sequence
  Description of Artificial Sequence: Synthetic oligonucleotide
ugucaugugggccu

SEQ ID NO: 14936 - RNA, 14 nt, Artificial Sequence
  Description of Artificial Sequence: Synthetic oligonucleotide
cugucaugugggcc

SEQ ID NO: 14937 - RNA, 14 nt, Artificial Sequence
  Description of Artificial Sequence: Synthetic oligonucleotide
acugucaugugggc

SEQ ID NO: 14938 - RNA, 14 nt, Artificial Sequence
  Description of Artificial Sequence: Synthetic oligonucleotide
aacugucauguggg

SEQ ID NO: 14939 - RNA, 14 nt, Artificial Sequence
  Description of Artificial Sequence: Synthetic oligonucleotide
aaacugucaugugg

SEQ ID NO: 14940 - RNA, 14 nt, Artificial Sequence
  Description of Artificial Sequence: Synthetic oligonucleotide
aaaacugucaugug

SEQ ID NO: 14941 - RNA, 14 nt, Artificial Sequence
  Description of Artificial Sequence: Synthetic oligonucleotide
aaaaacugucaugu

SEQ ID NO: 14942 - RNA, 14 nt, Artificial Sequence
  Description of Artificial Sequence: Synthetic oligonucleotide
caaaaacugucaug

SEQ ID NO: 14943 - RNA, 14 nt, Artificial Sequence
  Description of Artificial Sequence: Synthetic oligonucleotide
acaaaaacugucau

SEQ ID NO: 14944 - RNA, 14 nt, Artificial Sequence
  Description of Artificial Sequence: Synthetic oligonucleotide
uacaaaaacuguca

SEQ ID NO: 14945 - RNA, 14 nt, Artificial Sequence
  Description of Artificial Sequence: Synthetic oligonucleotide
uuacaaaaacuguc

SEQ ID NO: 14946 - RNA, 14 nt, Artificial Sequence
  Description of Artificial Sequence: Synthetic oligonucleotide
auuacaaaaacugu

SEQ ID NO: 14947 - RNA, 14 nt, Artificial Sequence
  Description of Artificial Sequence: Synthetic oligonucleotide
aauuacaaaaacug

SEQ ID NO: 14948 - RNA, 14 nt, Artificial Sequence
  Description of Artificial Sequence: Synthetic oligonucleotide
gaauuacaaaaacu

SEQ ID NO: 14949 - RNA, 14 nt, Artificial Sequence
  Description of Artificial Sequence: Synthetic oligonucleotide
ugaauuacaaaaac

SEQ ID NO: 14950 - RNA, 14 nt, Artificial Sequence
  Description of Artificial Sequence: Synthetic oligonucleotide
uugaauuacaaaaa

SEQ ID NO: 14951 - RNA, 14 nt, Artificial Sequence
  Description of Artificial Sequence: Synthetic oligonucleotide
uuugaauuacaaaa

SEQ ID NO: 14952 - RNA, 14 nt, Artificial Sequence
  Description of Artificial Sequence: Synthetic oligonucleotide
auuugaauuacaaa

SEQ ID NO: 14953 - RNA, 14 nt, Artificial Sequence
  Description of Artificial Sequence: Synthetic oligonucleotide
aauuugaauuacaa

SEQ ID NO: 14954 - RNA, 14 nt, Artificial Sequence
  Description of Artificial Sequence: Synthetic oligonucleotide
uaauuugaauuaca

SEQ ID NO: 14955 - RNA, 14 nt, Artificial Sequence
  Description of Artificial Sequence: Synthetic oligonucleotide
auaauuugaauuac

SEQ ID NO: 14956 - RNA, 14 nt, Artificial Sequence
  Description of Artificial Sequence: Synthetic oligonucleotide
cauaauuugaauua

SEQ ID NO: 14957 - RNA, 14 nt, Artificial Sequence
  Description of Artificial Sequence: Synthetic oligonucleotide
gcauaauuugaauu

SEQ ID NO: 14958 - RNA, 14 nt, Artificial Sequence
  Description of Artificial Sequence: Synthetic oligonucleotide
ugcauaauuugaau

SEQ ID NO: 14959 - RNA, 14 nt, Artificial Sequence
  Description of Artificial Sequence: Synthetic oligonucleotide
gugcauaauuugaa

SEQ ID NO: 14960 - RNA, 14 nt, Artificial Sequence
  Description of Artificial Sequence: Synthetic oligonucleotide
agugcauaauuuga

SEQ ID NO: 14961 - RNA, 14 nt, Artificial Sequence
  Description of Artificial Sequence: Synthetic oligonucleotide
aagugcauaauuug

SEQ ID NO: 14962 - RNA, 14 nt, Artificial Sequence
  Description of Artificial Sequence: Synthetic oligonucleotide
aaagugcauaauuu

SEQ ID NO: 14963 - RNA, 14 nt, Artificial Sequence
  Description of Artificial Sequence: Synthetic oligonucleotide
aaaagugcauaauu

SEQ ID NO: 14964 - RNA, 14 nt, Artificial Sequence
  Description of Artificial Sequence: Synthetic oligonucleotide
uaaaagugcauaau

SEQ ID NO: 14965 - RNA, 14 nt, Artificial Sequence
  Description of Artificial Sequence: Synthetic oligonucleotide
uuaaaagugcauaa

SEQ ID NO: 14966 - RNA, 14 nt, Artificial Sequence
  Description of Artificial Sequence: Synthetic oligonucleotide
uuuaaaagugcaua

SEQ ID NO: 14967 - RNA, 14 nt, Artificial Sequence
  Description of Artificial Sequence: Synthetic oligonucleotide
uuuuaaaagugcau

SEQ ID NO: 14968 - RNA, 14 nt, Artificial Sequence
  Description of Artificial Sequence: Synthetic oligonucleotide
uuuuuaaaagugca

SEQ ID NO: 14969 - RNA, 14 nt, Artificial Sequence
  Description of Artificial Sequence: Synthetic oligonucleotide
uuuuuuaaaagugc

SEQ ID NO: 14970 - RNA, 14 nt, Artificial Sequence
  Description of Artificial Sequence: Synthetic oligonucleotide
uuuuuuuaaaagug

SEQ ID NO: 14971 - RNA, 14 nt, Artificial Sequence
  Description of Artificial Sequence: Synthetic oligonucleotide
uuuuuuuuaaaagu

SEQ ID NO: 14972 - RNA, 14 nt, Artificial Sequence
  Description of Artificial Sequence: Synthetic oligonucleotide
uuuuuuuuuaaaag

SEQ ID NO: 14973 - RNA, 14 nt, Artificial Sequence
  Description of Artificial Sequence: Synthetic oligonucleotide
uuuuuuuuuuaaaa

SEQ ID NO: 14974 - RNA, 14 nt, Artificial Sequence
  Description of Artificial Sequence: Synthetic oligonucleotide
uuuuuuuuuuuaaa

SEQ ID NO: 14975 - RNA, 14 nt, Artificial Sequence
  Description of Artificial Sequence: Synthetic oligonucleotide
guuuuuuuuuuuaa

SEQ ID NO: 14976 - RNA, 14 nt, Artificial Sequence
  Description of Artificial Sequence: Synthetic oligonucleotide
aguuuuuuuuuuua

SEQ ID NO: 14977 - RNA, 14 nt, Artificial Sequence
  Description of Artificial Sequence: Synthetic oligonucleotide
aaguuuuuuuuuuu

SEQ ID NO: 14978 - RNA, 14 nt, Artificial Sequence
  Description of Artificial Sequence: Synthetic oligonucleotide
uaaguuuuuuuuuu

SEQ ID NO: 14979 - RNA, 14 nt, Artificial Sequence
  Description of Artificial Sequence: Synthetic oligonucleotide
uuaaguuuuuuuuu

SEQ ID NO: 14980 - RNA, 14 nt, Artificial Sequence
  Description of Artificial Sequence: Synthetic oligonucleotide
uuuaaguuuuuuuu

SEQ ID NO: 14981 - RNA, 14 nt, Artificial Sequence
  Description of Artificial Sequence: Synthetic oligonucleotide
guuuaaguuuuuuu

SEQ ID NO: 14982 - RNA, 14 nt, Artificial Sequence
  Description of Artificial Sequence: Synthetic oligonucleotide
uguuuaaguuuuuu

SEQ ID NO: 14983 - RNA, 14 nt, Artificial Sequence
  Description of Artificial Sequence: Synthetic oligonucleotide
cuguuuaaguuuuu

SEQ ID NO: 14984 - RNA, 14 nt, Artificial Sequence
  Description of Artificial Sequence: Synthetic oligonucleotide
ccuguuuaaguuuu

SEQ ID NO: 14985 - RNA, 14 nt, Artificial Sequence
  Description of Artificial Sequence: Synthetic oligonucleotide
cccuguuuaaguuu

SEQ ID NO: 14986 - RNA, 14 nt, Artificial Sequence
  Description of Artificial Sequence: Synthetic oligonucleotide
ucccuguuuaaguu

SEQ ID NO: 14987 - RNA, 14 nt, Artificial Sequence
  Description of Artificial Sequence: Synthetic oligonucleotide
aucccuguuuaagu

SEQ ID NO: 14988 - RNA, 14 nt, Artificial Sequence
  Description of Artificial Sequence: Synthetic oligonucleotide
gaucccuguuuaag

SEQ ID NO: 14989 - RNA, 14 nt, Artificial Sequence
  Description of Artificial Sequence: Synthetic oligonucleotide
agaucccuguuuaa

SEQ ID NO: 14990 - RNA, 14 nt, Artificial Sequence
  Description of Artificial Sequence: Synthetic oligonucleotide
aagaucccuguuua

SEQ ID NO: 14991 - RNA, 14 nt, Artificial Sequence
  Description of Artificial Sequence: Synthetic oligonucleotide
uaagaucccuguuu

SEQ ID NO: 14992 - RNA, 14 nt, Artificial Sequence
  Description of Artificial Sequence: Synthetic oligonucleotide
uuaagaucccuguu

SEQ ID NO: 14993 - RNA, 14 nt, Artificial Sequence
  Description of Artificial Sequence: Synthetic oligonucleotide
auuaagaucccugu

SEQ ID NO: 14994 - RNA, 14 nt, Artificial Sequence
  Description of Artificial Sequence: Synthetic oligonucleotide
uauuaagaucccug

SEQ ID NO: 14995 - RNA, 14 nt, Artificial Sequence
  Description of Artificial Sequence: Synthetic oligonucleotide
auauuaagaucccu

SEQ ID NO: 14996 - RNA, 14 nt, Artificial Sequence
  Description of Artificial Sequence: Synthetic oligonucleotide
gauauuaagauccc

SEQ ID NO: 14997 - RNA, 14 nt, Artificial Sequence
  Description of Artificial Sequence: Synthetic oligonucleotide
agauauuaagaucc

SEQ ID NO: 14998 - RNA, 14 nt, Artificial Sequence
  Description of Artificial Sequence: Synthetic oligonucleotide
aagauauuaagauc

SEQ ID NO: 14999 - RNA, 14 nt, Artificial Sequence
  Description of Artificial Sequence: Synthetic oligonucleotide
gaagauauuaagau

SEQ ID NO: 15000 - RNA, 14 nt, Artificial Sequence
  Description of Artificial Sequence: Synthetic oligonucleotide
ggaagauauuaaga

SEQ ID NO: 15001 - RNA, 14 nt, Artificial Sequence
  Description of Artificial Sequence: Synthetic oligonucleotide
aggaagauauuaag

SEQ ID NO: 15002 - RNA, 14 nt, Artificial Sequence
  Description of Artificial Sequence: Synthetic oligonucleotide
aaggaagauauuaa

SEQ ID NO: 15003 - RNA, 14 nt, Artificial Sequence
  Description of Artificial Sequence: Synthetic oligonucleotide
aaaggaagauauua

SEQ ID NO: 15004 - RNA, 14 nt, Artificial Sequence
  Description of Artificial Sequence: Synthetic oligonucleotide
caaaggaagauauu

SEQ ID NO: 15005 - RNA, 14 nt, Artificial Sequence
  Description of Artificial Sequence: Synthetic oligonucleotide
acaaaggaagauau

SEQ ID NO: 15006 - RNA, 14 nt, Artificial Sequence
  Description of Artificial Sequence: Synthetic oligonucleotide
aacaaaggaagaua

SEQ ID NO: 15007 - RNA, 14 nt, Artificial Sequence
  Description of Artificial Sequence: Synthetic oligonucleotide
aaacaaaggaagau

SEQ ID NO: 15008 - DNA, 14 bp, Artificial Sequence
  Description of Artificial Sequence: Synthetic oligonucleotide
aaaacaaaggaaga

SEQ ID NO: 15009 - DNA, 14 bp, Artificial Sequence
  Description of Artificial Sequence: Synthetic oligonucleotide
gaaaacaaaggaag

SEQ ID NO: 15010 - DNA, 14 bp, Artificial Sequence
  Description of Artificial Sequence: Synthetic oligonucleotide
ggaaaacaaaggaa

SEQ ID NO: 15011 - DNA, 14 bp, Artificial Sequence
  Description of Artificial Sequence: Synthetic oligonucleotide
aggaaaacaaagga

SEQ ID NO: 15012 - DNA, 14 bp, Artificial Sequence
  Description of Artificial Sequence: Synthetic oligonucleotide
aaggaaaacaaagg

SEQ ID NO: 15013 - DNA, 14 bp, Artificial Sequence
  Description of Artificial Sequence: Synthetic oligonucleotide
aaaggaaaacaaag

SEQ ID NO: 15014 - DNA, 14 bp, Artificial Sequence
  Description of Artificial Sequence: Synthetic oligonucleotide
caaaggaaaacaaa

SEQ ID NO: 15015 - DNA, 14 bp, Artificial Sequence
  Description of Artificial Sequence: Synthetic oligonucleotide
gcaaaggaaaacaa

SEQ ID NO: 15016 - DNA, 14 bp, Artificial Sequence
  Description of Artificial Sequence: Synthetic oligonucleotide
agcaaaggaaaaca

SEQ ID NO: 15017 - DNA, 14 bp, Artificial Sequence
  Description of Artificial Sequence: Synthetic oligonucleotide
aagcaaaggaaaac

SEQ ID NO: 15018 - DNA, 14 bp, Artificial Sequence
  Description of Artificial Sequence: Synthetic oligonucleotide
aaagcaaaggaaaa

SEQ ID NO: 15019 - RNA, 14 nt, Artificial Sequence
  Description of Artificial Sequence: Synthetic oligonucleotide
uaaagcaaaggaaa

SEQ ID NO: 15020 - RNA, 14 nt, Artificial Sequence
  Description of Artificial Sequence: Synthetic oligonucleotide
guaaagcaaaggaa

SEQ ID NO: 15021 - RNA, 14 nt, Artificial Sequence
  Description of Artificial Sequence: Synthetic oligonucleotide
aguaaagcaaagga

SEQ ID NO: 15022 - RNA, 14 nt, Artificial Sequence
  Description of Artificial Sequence: Synthetic oligonucleotide
gaguaaagcaaagg

SEQ ID NO: 15023 - RNA, 14 nt, Artificial Sequence
  Description of Artificial Sequence: Synthetic oligonucleotide
agaguaaagcaaag

SEQ ID NO: 15024 - RNA, 14 nt, Artificial Sequence
  Description of Artificial Sequence: Synthetic oligonucleotide
aagaguaaagcaaa

SEQ ID NO: 15025 - RNA, 14 nt, Artificial Sequence
  Description of Artificial Sequence: Synthetic oligonucleotide
gaagaguaaagcaa

SEQ ID NO: 15026 - RNA, 14 nt, Artificial Sequence
  Description of Artificial Sequence: Synthetic oligonucleotide
agaagaguaaagca

SEQ ID NO: 15027 - RNA, 14 nt, Artificial Sequence
  Description of Artificial Sequence: Synthetic oligonucleotide
uagaagaguaaagc

SEQ ID NO: 15028 - RNA, 14 nt, Artificial Sequence
  Description of Artificial Sequence: Synthetic oligonucleotide
guagaagaguaaag

SEQ ID NO: 15029 - RNA, 14 nt, Artificial Sequence
  Description of Artificial Sequence: Synthetic oligonucleotide
aguagaagaguaaa

SEQ ID NO: 15030 - RNA, 14 nt, Artificial Sequence
  Description of Artificial Sequence: Synthetic oligonucleotide
aaguagaagaguaa

SEQ ID NO: 15031 - RNA, 14 nt, Artificial Sequence
  Description of Artificial Sequence: Synthetic oligonucleotide
aaaguagaagagua

SEQ ID NO: 15032 - RNA, 14 nt, Artificial Sequence
  Description of Artificial Sequence: Synthetic oligonucleotide
uaaaguagaagagu

SEQ ID NO: 15033 - RNA, 14 nt, Artificial Sequence
  Description of Artificial Sequence: Synthetic oligonucleotide
cuaaaguagaagag

SEQ ID NO: 15034 - RNA, 14 nt, Artificial Sequence
  Description of Artificial Sequence: Synthetic oligonucleotide
ucuaaaguagaaga

SEQ ID NO: 15035 - RNA, 14 nt, Artificial Sequence
  Description of Artificial Sequence: Synthetic oligonucleotide
uucuaaaguagaag

SEQ ID NO: 15036 - RNA, 14 nt, Artificial Sequence
  Description of Artificial Sequence: Synthetic oligonucleotide
auucuaaaguagaa

SEQ ID NO: 15037 - RNA, 14 nt, Artificial Sequence
  Description of Artificial Sequence: Synthetic oligonucleotide
uauucuaaaguaga

SEQ ID NO: 15038 - RNA, 14 nt, Artificial Sequence
  Description of Artificial Sequence: Synthetic oligonucleotide
auauucuaaaguag

SEQ ID NO: 15039 - RNA, 14 nt, Artificial Sequence
  Description of Artificial Sequence: Synthetic oligonucleotide
aauauucuaaagua

SEQ ID NO: 15040 - RNA, 14 nt, Artificial Sequence
  Description of Artificial Sequence: Synthetic oligonucleotide
aaauauucuaaagu

SEQ ID NO: 15041 - RNA, 14 nt, Artificial Sequence
  Description of Artificial Sequence: Synthetic oligonucleotide
aaaauauucuaaag

SEQ ID NO: 15042 - RNA, 14 nt, Artificial Sequence
  Description of Artificial Sequence: Synthetic oligonucleotide
gaaaauauucuaaa

SEQ ID NO: 15043 - RNA, 14 nt, Artificial Sequence
  Description of Artificial Sequence: Synthetic oligonucleotide
agaaaauauucuaa

SEQ ID NO: 15044 - RNA, 14 nt, Artificial Sequence
  Description of Artificial Sequence: Synthetic oligonucleotide
aagaaaauauucua

SEQ ID NO: 15045 - RNA, 14 nt, Artificial Sequence
  Description of Artificial Sequence: Synthetic oligonucleotide
uaagaaaauauucu

SEQ ID NO: 15046 - RNA, 14 nt, Artificial Sequence
  Description of Artificial Sequence: Synthetic oligonucleotide
uuaagaaaauauuc

SEQ ID NO: 15047 - RNA, 14 nt, Artificial Sequence
  Description of Artificial Sequence: Synthetic oligonucleotide
uuuaagaaaauauu

SEQ ID NO: 15048 - RNA, 14 nt, Artificial Sequence
  Description of Artificial Sequence: Synthetic oligonucleotide
uuuuaagaaaauau

SEQ ID NO: 15049 - RNA, 14 nt, Artificial Sequence
  Description of Artificial Sequence: Synthetic oligonucleotide
uuuuuaagaaaaua

SEQ ID NO: 15050 - RNA, 14 nt, Artificial Sequence
  Description of Artificial Sequence: Synthetic oligonucleotide
auuuuuaagaaaau

SEQ ID NO: 15051 - RNA, 14 nt, Artificial Sequence
  Description of Artificial Sequence: Synthetic oligonucleotide
gauuuuuaagaaaa

SEQ ID NO: 15052 - RNA, 14 nt, Artificial Sequence
  Description of Artificial Sequence: Synthetic oligonucleotide
ugauuuuuaagaaa

SEQ ID NO: 15053 - RNA, 14 nt, Artificial Sequence
  Description of Artificial Sequence: Synthetic oligonucleotide
gugauuuuuaagaa

SEQ ID NO: 15054 - RNA, 14 nt, Artificial Sequence
  Description of Artificial Sequence: Synthetic oligonucleotide
agugauuuuuaaga

SEQ ID NO: 15055 - RNA, 14 nt, Artificial Sequence
  Description of Artificial Sequence: Synthetic oligonucleotide
gagugauuuuuaag

SEQ ID NO: 15056 - RNA, 14 nt, Artificial Sequence
  Description of Artificial Sequence: Synthetic oligonucleotide
ugagugauuuuuaa

SEQ ID NO: 15057 - RNA, 14 nt, Artificial Sequence
  Description of Artificial Sequence: Synthetic oligonucleotide
uugagugauuuuua

SEQ ID NO: 15058 - RNA, 14 nt, Artificial Sequence
  Description of Artificial Sequence: Synthetic oligonucleotide
uuugagugauuuuu

SEQ ID NO: 15059 - RNA, 14 nt, Artificial Sequence
  Description of Artificial Sequence: Synthetic oligonucleotide
cuuugagugauuuu

SEQ ID NO: 15060 - RNA, 14 nt, Artificial Sequence
  Description of Artificial Sequence: Synthetic oligonucleotide
ccuuugagugauuu

SEQ ID NO: 15061 - RNA, 14 nt, Artificial Sequence
  Description of Artificial Sequence: Synthetic oligonucleotide
uccuuugagugauu

SEQ ID NO: 15062 - RNA, 14 nt, Artificial Sequence
  Description of Artificial Sequence: Synthetic oligonucleotide
guccuuugagugau

SEQ ID NO: 15063 - RNA, 14 nt, Artificial Sequence
  Description of Artificial Sequence: Synthetic oligonucleotide
aguccuuugaguga

SEQ ID NO: 15064 - RNA, 14 nt, Artificial Sequence
  Description of Artificial Sequence: Synthetic oligonucleotide
caguccuuugagug

SEQ ID NO: 15065 - RNA, 14 nt, Artificial Sequence
  Description of Artificial Sequence: Synthetic oligonucleotide
acaguccuuugagu

SEQ ID NO: 15066 - RNA, 14 nt, Artificial Sequence
  Description of Artificial Sequence: Synthetic oligonucleotide
cacaguccuuugag

SEQ ID NO: 15067 - RNA, 14 nt, Artificial Sequence
  Description of Artificial Sequence: Synthetic oligonucleotide
ucacaguccuuuga

SEQ ID NO: 15068 - RNA, 14 nt, Artificial Sequence
  Description of Artificial Sequence: Synthetic oligonucleotide
cucacaguccuuug

SEQ ID NO: 15069 - RNA, 14 nt, Artificial Sequence
  Description of Artificial Sequence: Synthetic oligonucleotide
ccucacaguccuuu

SEQ ID NO: 15070 - RNA, 14 nt, Artificial Sequence
  Description of Artificial Sequence: Synthetic oligonucleotide
uccucacaguccuu

SEQ ID NO: 15071 - RNA, 14 nt, Artificial Sequence
  Description of Artificial Sequence: Synthetic oligonucleotide
uuccucacaguccu

SEQ ID NO: 15072 - RNA, 14 nt, Artificial Sequence
  Description of Artificial Sequence: Synthetic oligonucleotide
uuuccucacagucc

SEQ ID NO: 15073 - RNA, 14 nt, Artificial Sequence
  Description of Artificial Sequence: Synthetic oligonucleotide
cuuuccucacaguc

SEQ ID NO: 15074 - RNA, 14 nt, Artificial Sequence
  Description of Artificial Sequence: Synthetic oligonucleotide
ccuuuccucacagu

SEQ ID NO: 15075 - RNA, 14 nt, Artificial Sequence
  Description of Artificial Sequence: Synthetic oligonucleotide
gccuuuccucacag

SEQ ID NO: 15076 - RNA, 14 nt, Artificial Sequence
  Description of Artificial Sequence: Synthetic oligonucleotide
agccuuuccucaca

SEQ ID NO: 15077 - RNA, 14 nt, Artificial Sequence
  Description of Artificial Sequence: Synthetic oligonucleotide
cagccuuuccucac

SEQ ID NO: 15078 - RNA, 14 nt, Artificial Sequence
  Description of Artificial Sequence: Synthetic oligonucleotide
acagccuuuccuca

SEQ ID NO: 15079 - RNA, 14 nt, Artificial Sequence
  Description of Artificial Sequence: Synthetic oligonucleotide
cacagccuuuccuc

SEQ ID NO: 15080 - RNA, 14 nt, Artificial Sequence
  Description of Artificial Sequence: Synthetic oligonucleotide
ccacagccuuuccu

SEQ ID NO: 15081 - RNA, 14 nt, Artificial Sequence
  Description of Artificial Sequence: Synthetic oligonucleotide
accacagccuuucc

SEQ ID NO: 15082 - RNA, 14 nt, Artificial Sequence
  Description of Artificial Sequence: Synthetic oligonucleotide
uaccacagccuuuc

SEQ ID NO: 15083 - RNA, 14 nt, Artificial Sequence
  Description of Artificial Sequence: Synthetic oligonucleotide
guaccacagccuuu

SEQ ID NO: 15084 - RNA, 14 nt, Artificial Sequence
  Description of Artificial Sequence: Synthetic oligonucleotide
gguaccacagccuu

SEQ ID NO: 15085 - RNA, 14 nt, Artificial Sequence
  Description of Artificial Sequence: Synthetic oligonucleotide
agguaccacagccu

SEQ ID NO: 15086 - RNA, 14 nt, Artificial Sequence
  Description of Artificial Sequence: Synthetic oligonucleotide
cagguaccacagcc

SEQ ID NO: 15087 - RNA, 14 nt, Artificial Sequence
  Description of Artificial Sequence: Synthetic oligonucleotide
ucagguaccacagc

SEQ ID NO: 15088 - RNA, 14 nt, Artificial Sequence
  Description of Artificial Sequence: Synthetic oligonucleotide
gucagguaccacag

SEQ ID NO: 15089 - RNA, 14 nt, Artificial Sequence
  Description of Artificial Sequence: Synthetic oligonucleotide
ggucagguaccaca

SEQ ID NO: 15090 - RNA, 14 nt, Artificial Sequence
  Description of Artificial Sequence: Synthetic oligonucleotide
aggucagguaccac

SEQ ID NO: 15091 - RNA, 14 nt, Artificial Sequence
  Description of Artificial Sequence: Synthetic oligonucleotide
aaggucagguacca

SEQ ID NO: 15092 - RNA, 14 nt, Artificial Sequence
  Description of Artificial Sequence: Synthetic oligonucleotide
caaggucagguacc

SEQ ID NO: 15093 - RNA, 14 nt, Artificial Sequence
  Description of Artificial Sequence: Synthetic oligonucleotide
acaaggucagguac

SEQ ID NO: 15094 - RNA, 14 nt, Artificial Sequence
  Description of Artificial Sequence: Synthetic oligonucleotide
aacaaggucaggua

SEQ ID NO: 15095 - RNA, 14 nt, Artificial Sequence
  Description of Artificial Sequence: Synthetic oligonucleotide
caacaaggucaggu

SEQ ID NO: 15096 - RNA, 14 nt, Artificial Sequence
  Description of Artificial Sequence: Synthetic oligonucleotide
ucaacaaggucagg

SEQ ID NO: 15097 - RNA, 14 nt, Artificial Sequence
  Description of Artificial Sequence: Synthetic oligonucleotide
uucaacaaggucag

SEQ ID NO: 15098 - RNA, 14 nt, Artificial Sequence
  Description of Artificial Sequence: Synthetic oligonucleotide
uuucaacaagguca

SEQ ID NO: 15099 - RNA, 14 nt, Artificial Sequence
  Description of Artificial Sequence: Synthetic oligonucleotide
auuucaacaagguc

SEQ ID NO: 15100 - RNA, 14 nt, Artificial Sequence
  Description of Artificial Sequence: Synthetic oligonucleotide
gauuucaacaaggu

SEQ ID NO: 15101 - RNA, 14 nt, Artificial Sequence
  Description of Artificial Sequence: Synthetic oligonucleotide
ugauuucaacaagg

SEQ ID NO: 15102 - RNA, 14 nt, Artificial Sequence
  Description of Artificial Sequence: Synthetic oligonucleotide
uugauuucaacaag

SEQ ID NO: 15103 - RNA, 14 nt, Artificial Sequence
  Description of Artificial Sequence: Synthetic oligonucleotide
cuugauuucaacaa

SEQ ID NO: 15104 - RNA, 14 nt, Artificial Sequence
  Description of Artificial Sequence: Synthetic oligonucleotide
ccuugauuucaaca

SEQ ID NO: 15105 - RNA, 14 nt, Artificial Sequence
  Description of Artificial Sequence: Synthetic oligonucleotide
gccuugauuucaac

SEQ ID NO: 15106 - RNA, 14 nt, Artificial Sequence
  Description of Artificial Sequence: Synthetic oligonucleotide
ggccuugauuucaa

SEQ ID NO: 15107 - RNA, 14 nt, Artificial Sequence
  Description of Artificial Sequence: Synthetic oligonucleotide
gggccuugauuuca

SEQ ID NO: 15108 - RNA, 14 nt, Artificial Sequence
  Description of Artificial Sequence: Synthetic oligonucleotide
cgggccuugauuuc

SEQ ID NO: 15109 - RNA, 14 nt, Artificial Sequence
  Description of Artificial Sequence: Synthetic oligonucleotide
ccgggccuugauuu

SEQ ID NO: 15110 - RNA, 14 nt, Artificial Sequence
  Description of Artificial Sequence: Synthetic oligonucleotide
gccgggccuugauu

SEQ ID NO: 15111 - RNA, 14 nt, Artificial Sequence
  Description of Artificial Sequence: Synthetic oligonucleotide
ugccgggccuugau

SEQ ID NO: 15112 - RNA, 14 nt, Artificial Sequence
  Description of Artificial Sequence: Synthetic oligonucleotide
gugccgggccuuga

SEQ ID NO: 15113 - RNA, 14 nt, Artificial Sequence
  Description of Artificial Sequence: Synthetic oligonucleotide
agugccgggccuug

SEQ ID NO: 15114 - RNA, 14 nt, Artificial Sequence
  Description of Artificial Sequence: Synthetic oligonucleotide
cagugccgggccuu

SEQ ID NO: 15115 - RNA, 14 nt, Artificial Sequence
  Description of Artificial Sequence: Synthetic oligonucleotide
acagugccgggccu

SEQ ID NO: 15116 - RNA, 14 nt, Artificial Sequence
  Description of Artificial Sequence: Synthetic oligonucleotide
uacagugccgggcc

SEQ ID NO: 15117 - RNA, 14 nt, Artificial Sequence
  Description of Artificial Sequence: Synthetic oligonucleotide
guacagugccgggc

SEQ ID NO: 15118 - RNA, 14 nt, Artificial Sequence
  Description of Artificial Sequence: Synthetic oligonucleotide
aguacagugccggg

SEQ ID NO: 15119 - RNA, 14 nt, Artificial Sequence
  Description of Artificial Sequence: Synthetic oligonucleotide
uaguacagugccgg

SEQ ID NO: 15120 - RNA, 14 nt, Artificial Sequence
  Description of Artificial Sequence: Synthetic oligonucleotide
guaguacagugccg

SEQ ID NO: 15121 - RNA, 14 nt, Artificial Sequence
  Description of Artificial Sequence: Synthetic oligonucleotide
uguaguacagugcc

SEQ ID NO: 15122 - RNA, 14 nt, Artificial Sequence
  Description of Artificial Sequence: Synthetic oligonucleotide
cuguaguacagugc

SEQ ID NO: 15123 - RNA, 14 nt, Artificial Sequence
  Description of Artificial Sequence: Synthetic oligonucleotide
ccuguaguacagug

SEQ ID NO: 15124 - RNA, 14 nt, Artificial Sequence
  Description of Artificial Sequence: Synthetic oligonucleotide
gccuguaguacagu

SEQ ID NO: 15125 - RNA, 14 nt, Artificial Sequence
  Description of Artificial Sequence: Synthetic oligonucleotide
ggccuguaguacag

SEQ ID NO: 15126 - RNA, 14 nt, Artificial Sequence
  Description of Artificial Sequence: Synthetic oligonucleotide
aggccuguaguaca

SEQ ID NO: 15127 - RNA, 14 nt, Artificial Sequence
  Description of Artificial Sequence: Synthetic oligonucleotide
caggccuguaguac

SEQ ID NO: 15128 - RNA, 14 nt, Artificial Sequence
  Description of Artificial Sequence: Synthetic oligonucleotide
acaggccuguagua

SEQ ID NO: 15129 - RNA, 14 nt, Artificial Sequence
  Description of Artificial Sequence: Synthetic oligonucleotide
aacaggccuguagu

SEQ ID NO: 15130 - RNA, 14 nt, Artificial Sequence
  Description of Artificial Sequence: Synthetic oligonucleotide
aaacaggccuguag

SEQ ID NO: 15131 - RNA, 14 nt, Artificial Sequence
  Description of Artificial Sequence: Synthetic oligonucleotide
uaaacaggccugua

SEQ ID NO: 15132 - RNA, 14 nt, Artificial Sequence
  Description of Artificial Sequence: Synthetic oligonucleotide
guaaacaggccugu

SEQ ID NO: 15133 - RNA, 14 nt, Artificial Sequence
  Description of Artificial Sequence: Synthetic oligonucleotide
uguaaacaggccug

SEQ ID NO: 15134 - RNA, 14 nt, Artificial Sequence
  Description of Artificial Sequence: Synthetic oligonucleotide
cuguaaacaggccu

SEQ ID NO: 15135 - RNA, 14 nt, Artificial Sequence
  Description of Artificial Sequence: Synthetic oligonucleotide
ucuguaaacaggcc

SEQ ID NO: 15136 - RNA, 14 nt, Artificial Sequence
  Description of Artificial Sequence: Synthetic oligonucleotide
aucuguaaacaggc

SEQ ID NO: 15137 - RNA, 14 nt, Artificial Sequence
  Description of Artificial Sequence: Synthetic oligonucleotide
aaucuguaaacagg

SEQ ID NO: 15138 - RNA, 14 nt, Artificial Sequence
  Description of Artificial Sequence: Synthetic oligonucleotide
uaaucuguaaacag

SEQ ID NO: 15139 - RNA, 14 nt, Artificial Sequence
  Description of Artificial Sequence: Synthetic oligonucleotide
auaaucuguaaaca

SEQ ID NO: 15140 - RNA, 14 nt, Artificial Sequence
  Description of Artificial Sequence: Synthetic oligonucleotide
aauaaucuguaaac

SEQ ID NO: 15141 - RNA, 14 nt, Artificial Sequence
  Description of Artificial Sequence: Synthetic oligonucleotide
uaauaaucuguaaa

SEQ ID NO: 15142 - RNA, 14 nt, Artificial Sequence
  Description of Artificial Sequence: Synthetic oligonucleotide
guaauaaucuguaa

SEQ ID NO: 15143 - RNA, 14 nt, Artificial Sequence
  Description of Artificial Sequence: Synthetic oligonucleotide
cguaauaaucugua

SEQ ID NO: 15144 - RNA, 14 nt, Artificial Sequence
  Description of Artificial Sequence: Synthetic oligonucleotide
ccguaauaaucugu

SEQ ID NO: 15145 - RNA, 14 nt, Artificial Sequence
  Description of Artificial Sequence: Synthetic oligonucleotide
accguaauaaucug

SEQ ID NO: 15146 - RNA, 14 nt, Artificial Sequence
  Description of Artificial Sequence: Synthetic oligonucleotide
caccguaauaaucu

SEQ ID NO: 15147 - RNA, 14 nt, Artificial Sequence
  Description of Artificial Sequence: Synthetic oligonucleotide
ucaccguaauaauc

SEQ ID NO: 15148 - RNA, 14 nt, Artificial Sequence
  Description of Artificial Sequence: Synthetic oligonucleotide
uucaccguaauaau

SEQ ID NO: 15149 - RNA, 14 nt, Artificial Sequence
  Description of Artificial Sequence: Synthetic oligonucleotide
guucaccguaauaa

SEQ ID NO: 15150 - RNA, 14 nt, Artificial Sequence
  Description of Artificial Sequence: Synthetic oligonucleotide
aguucaccguaaua

SEQ ID NO: 15151 - RNA, 14 nt, Artificial Sequence
  Description of Artificial Sequence: Synthetic oligonucleotide
caguucaccguaau

SEQ ID NO: 15152 - RNA, 14 nt, Artificial Sequence
  Description of Artificial Sequence: Synthetic oligonucleotide
ucaguucaccguaa

SEQ ID NO: 15153 - RNA, 14 nt, Artificial Sequence
  Description of Artificial Sequence: Synthetic oligonucleotide
uucaguucaccgua

SEQ ID NO: 15154 - RNA, 14 nt, Artificial Sequence
  Description of Artificial Sequence: Synthetic oligonucleotide
auucaguucaccgu

SEQ ID NO: 15155 - RNA, 14 nt, Artificial Sequence
  Description of Artificial Sequence: Synthetic oligonucleotide
cauucaguucaccg

SEQ ID NO: 15156 - RNA, 14 nt, Artificial Sequence
  Description of Artificial Sequence: Synthetic oligonucleotide
ccauucaguucacc

SEQ ID NO: 15157 - RNA, 14 nt, Artificial Sequence
  Description of Artificial Sequence: Synthetic oligonucleotide
cccauucaguucac

SEQ ID NO: 15158 - RNA, 14 nt, Artificial Sequence
  Description of Artificial Sequence: Synthetic oligonucleotide
acccauucaguuca

SEQ ID NO: 15159 - RNA, 14 nt, Artificial Sequence
  Description of Artificial Sequence: Synthetic oligonucleotide
uacccauucaguuc

SEQ ID NO: 15160 - RNA, 14 nt, Artificial Sequence
  Description of Artificial Sequence: Synthetic oligonucleotide
guacccauucaguu

SEQ ID NO: 15161 - RNA, 14 nt, Artificial Sequence
  Description of Artificial Sequence: Synthetic oligonucleotide
gguacccauucagu

SEQ ID NO: 15162 - RNA, 14 nt, Artificial Sequence
  Description of Artificial Sequence: Synthetic oligonucleotide
cgguacccauucag

SEQ ID NO: 15163 - RNA, 14 nt, Artificial Sequence
  Description of Artificial Sequence: Synthetic oligonucleotide
ucgguacccauuca

SEQ ID NO: 15164 - RNA, 14 nt, Artificial Sequence
  Description of Artificial Sequence: Synthetic oligonucleotide
cucgguacccauuc

SEQ ID NO: 15165 - RNA, 14 nt, Artificial Sequence
  Description of Artificial Sequence: Synthetic oligonucleotide
ccucgguacccauu

SEQ ID NO: 15166 - RNA, 14 nt, Artificial Sequence
  Description of Artificial Sequence: Synthetic oligonucleotide
gccucgguacccau

SEQ ID NO: 15167 - RNA, 14 nt, Artificial Sequence
  Description of Artificial Sequence: Synthetic oligonucleotide
agccucgguaccca

SEQ ID NO: 15168 - RNA, 14 nt, Artificial Sequence
  Description of Artificial Sequence: Synthetic oligonucleotide
aagccucgguaccc

SEQ ID NO: 15169 - RNA, 14 nt, Artificial Sequence
  Description of Artificial Sequence: Synthetic oligonucleotide
gaagccucgguacc

SEQ ID NO: 15170 - RNA, 14 nt, Artificial Sequence
  Description of Artificial Sequence: Synthetic oligonucleotide
ugaagccucgguac

SEQ ID NO: 15171 - RNA, 14 nt, Artificial Sequence
  Description of Artificial Sequence: Synthetic oligonucleotide
gugaagccucggua

SEQ ID NO: 15172 - RNA, 14 nt, Artificial Sequence
  Description of Artificial Sequence: Synthetic oligonucleotide
ggugaagccucggu

SEQ ID NO: 15173 - RNA, 14 nt, Artificial Sequence
  Description of Artificial Sequence: Synthetic oligonucleotide
uggugaagccucgg

SEQ ID NO: 15174 - RNA, 14 nt, Artificial Sequence
  Description of Artificial Sequence: Synthetic oligonucleotide
uuggugaagccucg

SEQ ID NO: 15175 - RNA, 14 nt, Artificial Sequence
  Description of Artificial Sequence: Synthetic oligonucleotide
uuuggugaagccuc

SEQ ID NO: 15176 - RNA, 14 nt, Artificial Sequence
  Description of Artificial Sequence: Synthetic oligonucleotide
cuuuggugaagccu

SEQ ID NO: 15177 - RNA, 14 nt, Artificial Sequence
  Description of Artificial Sequence: Synthetic oligonucleotide
ucuuuggugaagcc

SEQ ID NO: 15178 - RNA, 14 nt, Artificial Sequence
  Description of Artificial Sequence: Synthetic oligonucleotide
cucuuuggugaagc

SEQ ID NO: 15179 - RNA, 14 nt, Artificial Sequence
  Description of Artificial Sequence: Synthetic oligonucleotide
ccucuuuggugaag

SEQ ID NO: 15180 - RNA, 14 nt, Artificial Sequence
  Description of Artificial Sequence: Synthetic oligonucleotide
accucuuuggugaa

SEQ ID NO: 15181 - RNA, 14 nt, Artificial Sequence
  Description of Artificial Sequence: Synthetic oligonucleotide
uaccucuuugguga

SEQ ID NO: 15182 - RNA, 14 nt, Artificial Sequence
  Description of Artificial Sequence: Synthetic oligonucleotide
guaccucuuuggug

SEQ ID NO: 15183 - RNA, 14 nt, Artificial Sequence
  Description of Artificial Sequence: Synthetic oligonucleotide
aguaccucuuuggu

SEQ ID NO: 15184 - RNA, 14 nt, Artificial Sequence
  Description of Artificial Sequence: Synthetic oligonucleotide
aaguaccucuuugg

SEQ ID NO: 15185 - RNA, 14 nt, Artificial Sequence
  Description of Artificial Sequence: Synthetic oligonucleotide
aaaguaccucuuug

SEQ ID NO: 15186 - RNA, 14 nt, Artificial Sequence
  Description of Artificial Sequence: Synthetic oligonucleotide
aaaaguaccucuuu

SEQ ID NO: 15187 - RNA, 14 nt, Artificial Sequence
  Description of Artificial Sequence: Synthetic oligonucleotide
aaaaaguaccucuu

SEQ ID NO: 15188 - RNA, 14 nt, Artificial Sequence
  Description of Artificial Sequence: Synthetic oligonucleotide
aaaaaaguaccucu

SEQ ID NO: 15189 - RNA, 14 nt, Artificial Sequence
  Description of Artificial Sequence: Synthetic oligonucleotide
caaaaaaguaccuc

SEQ ID NO: 15190 - RNA, 14 nt, Artificial Sequence
  Description of Artificial Sequence: Synthetic oligonucleotide
acaaaaaaguaccu

SEQ ID NO: 15191 - RNA, 14 nt, Artificial Sequence
  Description of Artificial Sequence: Synthetic oligonucleotide
aacaaaaaaguacc

SEQ ID NO: 15192 - RNA, 14 nt, Artificial Sequence
  Description of Artificial Sequence: Synthetic oligonucleotide
caacaaaaaaguac

SEQ ID NO: 15193 - RNA, 14 nt, Artificial Sequence
  Description of Artificial Sequence: Synthetic oligonucleotide
acaacaaaaaagua

SEQ ID NO: 15194 - RNA, 14 nt, Artificial Sequence
  Description of Artificial Sequence: Synthetic oligonucleotide
aacaacaaaaaagu

SEQ ID NO: 15195 - DNA, 14 bp, Artificial Sequence
  Description of Artificial Sequence: Synthetic oligonucleotide
caacaacaaaaaag

SEQ ID NO: 15196 - DNA, 14 bp, Artificial Sequence
  Description of Artificial Sequence: Synthetic oligonucleotide
acaacaacaaaaaa

SEQ ID NO: 15197 - DNA, 14 bp, Artificial Sequence
  Description of Artificial Sequence: Synthetic oligonucleotide
aacaacaacaaaaa

SEQ ID NO: 15198 - DNA, 14 bp, Artificial Sequence
  Description of Artificial Sequence: Synthetic oligonucleotide
caacaacaacaaaa

SEQ ID NO: 15199 - DNA, 14 bp, Artificial Sequence
  Description of Artificial Sequence: Synthetic oligonucleotide
acaacaacaacaaa

SEQ ID NO: 15200 - DNA, 14 bp, Artificial Sequence
  Description of Artificial Sequence: Synthetic oligonucleotide
aacaacaacaacaa

SEQ ID NO: 15201 - DNA, 14 bp, Artificial Sequence
  Description of Artificial Sequence: Synthetic oligonucleotide
caacaacaacaaca

SEQ ID NO: 15202 - DNA, 14 bp, Artificial Sequence
  Description of Artificial Sequence: Synthetic oligonucleotide
acaacaacaacaac

SEQ ID NO: 15203 - skipped

SEQ ID NO: 15204 - DNA, 14 bp, Artificial Sequence
  Description of Artificial Sequence: Synthetic oligonucleotide
aaacaacaacaaca

SEQ ID NO: 15205 - DNA, 14 bp, Artificial Sequence
  Description of Artificial Sequence: Synthetic oligonucleotide
aaaacaacaacaac

SEQ ID NO: 15206 - RNA, 14 nt, Artificial Sequence
  Description of Artificial Sequence: Synthetic oligonucleotide
uaaaacaacaacaa

SEQ ID NO: 15207 - RNA, 14 nt, Artificial Sequence
  Description of Artificial Sequence: Synthetic oligonucleotide
cuaaaacaacaaca

SEQ ID NO: 15208 - RNA, 14 nt, Artificial Sequence
  Description of Artificial Sequence: Synthetic oligonucleotide
ccuaaaacaacaac

SEQ ID NO: 15209 - RNA, 14 nt, Artificial Sequence
  Description of Artificial Sequence: Synthetic oligonucleotide
uccuaaaacaacaa

SEQ ID NO: 15210 - RNA, 14 nt, Artificial Sequence
  Description of Artificial Sequence: Synthetic oligonucleotide
uuccuaaaacaaca

SEQ ID NO: 15211 - RNA, 14 nt, Artificial Sequence
  Description of Artificial Sequence: Synthetic oligonucleotide
auuccuaaaacaac

SEQ ID NO: 15212 - RNA, 14 nt, Artificial Sequence
  Description of Artificial Sequence: Synthetic oligonucleotide
uauuccuaaaacaa

SEQ ID NO: 15213 - RNA, 14 nt, Artificial Sequence
  Description of Artificial Sequence: Synthetic oligonucleotide
uuauuccuaaaaca

SEQ ID NO: 15214 - RNA, 14 nt, Artificial Sequence
  Description of Artificial Sequence: Synthetic oligonucleotide
auuauuccuaaaac

SEQ ID NO: 15215 - RNA, 14 nt, Artificial Sequence
  Description of Artificial Sequence: Synthetic oligonucleotide
aauuauuccuaaaa

SEQ ID NO: 15216 - RNA, 14 nt, Artificial Sequence
  Description of Artificial Sequence: Synthetic oligonucleotide
caauuauuccuaaa

SEQ ID NO: 15217 - RNA, 14 nt, Artificial Sequence
  Description of Artificial Sequence: Synthetic oligonucleotide
acaauuauuccuaa

SEQ ID NO: 15218 - RNA, 14 nt, Artificial Sequence
  Description of Artificial Sequence: Synthetic oligonucleotide
uacaauuauuccua

SEQ ID NO: 15219 - RNA, 14 nt, Artificial Sequence
  Description of Artificial Sequence: Synthetic oligonucleotide
guacaauuauuccu

SEQ ID NO: 15220 - RNA, 14 nt, Artificial Sequence
  Description of Artificial Sequence: Synthetic oligonucleotide
gguacaauuauucc

SEQ ID NO: 15221 - RNA, 14 nt, Artificial Sequence
  Description of Artificial Sequence: Synthetic oligonucleotide
ugguacaauuauuc

SEQ ID NO: 15222 - RNA, 14 nt, Artificial Sequence
  Description of Artificial Sequence: Synthetic oligonucleotide
uugguacaauuauu

SEQ ID NO: 15223 - RNA, 14 nt, Artificial Sequence
  Description of Artificial Sequence: Synthetic oligonucleotide
auugguacaauuau

SEQ ID NO: 15224 - RNA, 14 nt, Artificial Sequence
  Description of Artificial Sequence: Synthetic oligonucleotide
aauugguacaauua

SEQ ID NO: 15225 - RNA, 14 nt, Artificial Sequence
  Description of Artificial Sequence: Synthetic oligonucleotide
aaauugguacaauu

SEQ ID NO: 15226 - RNA, 14 nt, Artificial Sequence
  Description of Artificial Sequence: Synthetic oligonucleotide
aaaauugguacaau

SEQ ID NO: 15227 - RNA, 14 nt, Artificial Sequence
  Description of Artificial Sequence: Synthetic oligonucleotide
uaaaauugguacaa

SEQ ID NO: 15228 - RNA, 14 nt, Artificial Sequence
  Description of Artificial Sequence: Synthetic oligonucleotide
uuaaaauugguaca

SEQ ID NO: 15229 - RNA, 14 nt, Artificial Sequence
  Description of Artificial Sequence: Synthetic oligonucleotide
cuuaaaauugguac

SEQ ID NO: 15230 - RNA, 14 nt, Artificial Sequence
  Description of Artificial Sequence: Synthetic oligonucleotide
ucuuaaaauuggua

SEQ ID NO: 15231 - RNA, 14 nt, Artificial Sequence
  Description of Artificial Sequence: Synthetic oligonucleotide
cucuuaaaauuggu

SEQ ID NO: 15232 - RNA, 14 nt, Artificial Sequence
  Description of Artificial Sequence: Synthetic oligonucleotide
gcucuuaaaauugg

SEQ ID NO: 15233 - RNA, 14 nt, Artificial Sequence
  Description of Artificial Sequence: Synthetic oligonucleotide
ugcucuuaaaauug

SEQ ID NO: 15234 - RNA, 14 nt, Artificial Sequence
  Description of Artificial Sequence: Synthetic oligonucleotide
augcucuuaaaauu

SEQ ID NO: 15235 - RNA, 14 nt, Artificial Sequence
  Description of Artificial Sequence: Synthetic oligonucleotide
aaugcucuuaaaau

SEQ ID NO: 15236 - RNA, 14 nt, Artificial Sequence
  Description of Artificial Sequence: Synthetic oligonucleotide
gaaugcucuuaaaa

SEQ ID NO: 15237 - RNA, 14 nt, Artificial Sequence
  Description of Artificial Sequence: Synthetic oligonucleotide
ggaaugcucuuaaa

SEQ ID NO: 15238 - RNA, 14 nt, Artificial Sequence
  Description of Artificial Sequence: Synthetic oligonucleotide
gggaaugcucuuaa

SEQ ID NO: 15239 - RNA, 14 nt, Artificial Sequence
  Description of Artificial Sequence: Synthetic oligonucleotide
ggggaaugcucuua

SEQ ID NO: 15240 - RNA, 14 nt, Artificial Sequence
  Description of Artificial Sequence: Synthetic oligonucleotide
gggggaaugcucuu

SEQ ID NO: 15241 - RNA, 14 nt, Artificial Sequence
  Description of Artificial Sequence: Synthetic oligonucleotide
ggggggaaugcucu

SEQ ID NO: 15242 - RNA, 14 nt, Artificial Sequence
  Description of Artificial Sequence: Synthetic oligonucleotide
uggggggaaugcuc

SEQ ID NO: 15243 - RNA, 14 nt, Artificial Sequence
  Description of Artificial Sequence: Synthetic oligonucleotide
guggggggaaugcu

SEQ ID NO: 15244 - RNA, 14 nt, Artificial Sequence
  Description of Artificial Sequence: Synthetic oligonucleotide
gguggggggaaugc

SEQ ID NO: 15245 - RNA, 14 nt, Artificial Sequence
  Description of Artificial Sequence: Synthetic oligonucleotide
agguggggggaaug

SEQ ID NO: 15246 - RNA, 14 nt, Artificial Sequence
  Description of Artificial Sequence: Synthetic oligonucleotide
cagguggggggaau

SEQ ID NO: 15247 - RNA, 14 nt, Artificial Sequence
  Description of Artificial Sequence: Synthetic oligonucleotide
acagguggggggaa

SEQ ID NO: 15248 - RNA, 14 nt, Artificial Sequence
  Description of Artificial Sequence: Synthetic oligonucleotide
gacaggugggggga

SEQ ID NO: 15249 - RNA, 14 nt, Artificial Sequence
  Description of Artificial Sequence: Synthetic oligonucleotide
ggacaggugggggg

SEQ ID NO: 15250 - RNA, 14 nt, Artificial Sequence
  Description of Artificial Sequence: Synthetic oligonucleotide
gggacagguggggg

SEQ ID NO: 15251 - RNA, 14 nt, Artificial Sequence
  Description of Artificial Sequence: Synthetic oligonucleotide
ggggacaggugggg

SEQ ID NO: 15252 - RNA, 14 nt, Artificial Sequence
  Description of Artificial Sequence: Synthetic oligonucleotide
uggggacagguggg

SEQ ID NO: 15253 - RNA, 14 nt, Artificial Sequence
  Description of Artificial Sequence: Synthetic oligonucleotide
guggggacaggugg

SEQ ID NO: 15254 - RNA, 14 nt, Artificial Sequence
  Description of Artificial Sequence: Synthetic oligonucleotide
uguggggacaggug

SEQ ID NO: 15255 - RNA, 14 nt, Artificial Sequence
  Description of Artificial Sequence: Synthetic oligonucleotide
guguggggacaggu

SEQ ID NO: 15256 - RNA, 14 nt, Artificial Sequence
  Description of Artificial Sequence: Synthetic oligonucleotide
uguguggggacagg

SEQ ID NO: 15257 - RNA, 14 nt, Artificial Sequence
  Description of Artificial Sequence: Synthetic oligonucleotide
guguguggggacag

SEQ ID NO: 15258 - RNA, 14 nt, Artificial Sequence
  Description of Artificial Sequence: Synthetic oligonucleotide
gguguguggggaca

SEQ ID NO: 15259 - RNA, 14 nt, Artificial Sequence
  Description of Artificial Sequence: Synthetic oligonucleotide
ggguguguggggac

SEQ ID NO: 15260 - RNA, 14 nt, Artificial Sequence
  Description of Artificial Sequence: Synthetic oligonucleotide
ugggugugugggga

SEQ ID NO: 15261 - RNA, 14 nt, Artificial Sequence
  Description of Artificial Sequence: Synthetic oligonucleotide
uugggugugugggg

SEQ ID NO: 15262 - RNA, 14 nt, Artificial Sequence
  Description of Artificial Sequence: Synthetic oligonucleotide
uuuggguguguggg

SEQ ID NO: 15263 - RNA, 14 nt, Artificial Sequence
  Description of Artificial Sequence: Synthetic oligonucleotide
guuugggugugugg

SEQ ID NO: 15264 - RNA, 14 nt, Artificial Sequence
  Description of Artificial Sequence: Synthetic oligonucleotide
uguuugggugugug

SEQ ID NO: 15265 - RNA, 14 nt, Artificial Sequence
  Description of Artificial Sequence: Synthetic oligonucleotide
uuguuugggugugu

SEQ ID NO: 15266 - RNA, 14 nt, Artificial Sequence
  Description of Artificial Sequence: Synthetic oligonucleotide
uuuguuugggugug

SEQ ID NO: 15267 - RNA, 14 nt, Artificial Sequence
  Description of Artificial Sequence: Synthetic oligonucleotide
uuuuguuugggugu

SEQ ID NO: 15268 - RNA, 14 nt, Artificial Sequence
  Description of Artificial Sequence: Synthetic oligonucleotide
auuuuguuugggug

SEQ ID NO: 15269 - RNA, 14 nt, Artificial Sequence
  Description of Artificial Sequence: Synthetic oligonucleotide
cauuuuguuugggu

SEQ ID NO: 15270 - RNA, 14 nt, Artificial Sequence
  Description of Artificial Sequence: Synthetic oligonucleotide
acauuuuguuuggg

SEQ ID NO: 15271 - RNA, 14 nt, Artificial Sequence
  Description of Artificial Sequence: Synthetic oligonucleotide
cacauuuuguuugg

SEQ ID NO: 15272 - RNA, 14 nt, Artificial Sequence
  Description of Artificial Sequence: Synthetic oligonucleotide
ccacauuuuguuug

SEQ ID NO: 15273 - RNA, 14 nt, Artificial Sequence
  Description of Artificial Sequence: Synthetic oligonucleotide
accacauuuuguuu

SEQ ID NO: 15274 - RNA, 14 nt, Artificial Sequence
  Description of Artificial Sequence: Synthetic oligonucleotide
caccacauuuuguu

SEQ ID NO: 15275 - RNA, 14 nt, Artificial Sequence
  Description of Artificial Sequence: Synthetic oligonucleotide
ccaccacauuuugu

SEQ ID NO: 15276 - RNA, 14 nt, Artificial Sequence
  Description of Artificial Sequence: Synthetic oligonucleotide
accaccacauuuug

SEQ ID NO: 15277 - RNA, 14 nt, Artificial Sequence
  Description of Artificial Sequence: Synthetic oligonucleotide
caccaccacauuuu

SEQ ID NO: 15278 - RNA, 14 nt, Artificial Sequence
  Description of Artificial Sequence: Synthetic oligonucleotide
acaccaccacauuu

SEQ ID NO: 15279 - RNA, 14 nt, Artificial Sequence
  Description of Artificial Sequence: Synthetic oligonucleotide
aacaccaccacauu

SEQ ID NO: 15280 - RNA, 14 nt, Artificial Sequence
  Description of Artificial Sequence: Synthetic oligonucleotide
caacaccaccacau

SEQ ID NO: 15281 - DNA, 14 bp, Artificial Sequence
  Description of Artificial Sequence: Synthetic oligonucleotide
gcaacaccaccaca

SEQ ID NO: 15282 - DNA, 14 bp, Artificial Sequence
  Description of Artificial Sequence: Synthetic oligonucleotide
ggcaacaccaccac

SEQ ID NO: 15283 - DNA, 14 bp, Artificial Sequence
  Description of Artificial Sequence: Synthetic oligonucleotide
aggcaacaccacca

SEQ ID NO: 15284 - DNA, 14 bp, Artificial Sequence
  Description of Artificial Sequence: Synthetic oligonucleotide
aaggcaacaccacc

SEQ ID NO: 15285 - DNA, 14 bp, Artificial Sequence
  Description of Artificial Sequence: Synthetic oligonucleotide
gaaggcaacaccac

SEQ ID NO: 15286 - RNA, 14 nt, Artificial Sequence
  Description of Artificial Sequence: Synthetic oligonucleotide
ugaaggcaacacca

SEQ ID NO: 15287 - RNA, 14 nt, Artificial Sequence
  Description of Artificial Sequence: Synthetic oligonucleotide
uugaaggcaacacc

SEQ ID NO: 15288 - RNA, 14 nt, Artificial Sequence
  Description of Artificial Sequence: Synthetic oligonucleotide
uuugaaggcaacac

SEQ ID NO: 15289 - RNA, 14 nt, Artificial Sequence
  Description of Artificial Sequence: Synthetic oligonucleotide
uuuugaaggcaaca

SEQ ID NO: 15290 - RNA, 14 nt, Artificial Sequence
  Description of Artificial Sequence: Synthetic oligonucleotide
uuuuugaaggcaac

SEQ ID NO: 15291 - RNA, 14 nt, Artificial Sequence
  Description of Artificial Sequence: Synthetic oligonucleotide
uuuuuugaaggcaa

SEQ ID NO: 15292 - RNA, 14 nt, Artificial Sequence
  Description of Artificial Sequence: Synthetic oligonucleotide
cuuuuuugaaggca

SEQ ID NO: 15293 - RNA, 14 nt, Artificial Sequence
  Description of Artificial Sequence: Synthetic oligonucleotide
ucuuuuuugaaggc

SEQ ID NO: 15294 - RNA, 14 nt, Artificial Sequence
  Description of Artificial Sequence: Synthetic oligonucleotide
cucuuuuuugaagg

SEQ ID NO: 15295 - RNA, 14 nt, Artificial Sequence
  Description of Artificial Sequence: Synthetic oligonucleotide
ucucuuuuuugaag

SEQ ID NO: 15296 - RNA, 14 nt, Artificial Sequence
  Description of Artificial Sequence: Synthetic oligonucleotide
uucucuuuuuugaa

SEQ ID NO: 15297 - RNA, 14 nt, Artificial Sequence
  Description of Artificial Sequence: Synthetic oligonucleotide
cuucucuuuuuuga

SEQ ID NO: 15298 - RNA, 14 nt, Artificial Sequence
  Description of Artificial Sequence: Synthetic oligonucleotide
acuucucuuuuuug

SEQ ID NO: 15299 - RNA, 14 nt, Artificial Sequence
  Description of Artificial Sequence: Synthetic oligonucleotide
aacuucucuuuuuu

SEQ ID NO: 15300 - RNA, 14 nt, Artificial Sequence
  Description of Artificial Sequence: Synthetic oligonucleotide
aaacuucucuuuuu

SEQ ID NO: 15301 - RNA, 14 nt, Artificial Sequence
  Description of Artificial Sequence: Synthetic oligonucleotide
aaaacuucucuuuu

SEQ ID NO: 15302 - RNA, 14 nt, Artificial Sequence
  Description of Artificial Sequence: Synthetic oligonucleotide
caaaacuucucuuu

SEQ ID NO: 15303 - RNA, 14 nt, Artificial Sequence
  Description of Artificial Sequence: Synthetic oligonucleotide
acaaaacuucucuu

SEQ ID NO: 15304 - RNA, 14 nt, Artificial Sequence
  Description of Artificial Sequence: Synthetic oligonucleotide
cacaaaacuucucu

SEQ ID NO: 15305 - RNA, 14 nt, Artificial Sequence
  Description of Artificial Sequence: Synthetic oligonucleotide
acacaaaacuucuc

SEQ ID NO: 15306 - RNA, 14 nt, Artificial Sequence
  Description of Artificial Sequence: Synthetic oligonucleotide
gacacaaaacuucu

SEQ ID NO: 15307 - RNA, 14 nt, Artificial Sequence
  Description of Artificial Sequence: Synthetic oligonucleotide
ugacacaaaacuuc

SEQ ID NO: 15308 - RNA, 14 nt, Artificial Sequence
  Description of Artificial Sequence: Synthetic oligonucleotide
augacacaaaacuu

SEQ ID NO: 15309 - RNA, 14 nt, Artificial Sequence
  Description of Artificial Sequence: Synthetic oligonucleotide
aaugacacaaaacu

SEQ ID NO: 15310 - RNA, 14 nt, Artificial Sequence
  Description of Artificial Sequence: Synthetic oligonucleotide
uaaugacacaaaac

SEQ ID NO: 15311 - RNA, 14 nt, Artificial Sequence
  Description of Artificial Sequence: Synthetic oligonucleotide
uuaaugacacaaaa

SEQ ID NO: 15312 - RNA, 14 nt, Artificial Sequence
  Description of Artificial Sequence: Synthetic oligonucleotide
guuaaugacacaaa

SEQ ID NO: 15313 - RNA, 14 nt, Artificial Sequence
  Description of Artificial Sequence: Synthetic oligonucleotide
uguuaaugacacaa

SEQ ID NO: 15314 - RNA, 14 nt, Artificial Sequence
  Description of Artificial Sequence: Synthetic oligonucleotide
auguuaaugacaca

SEQ ID NO: 15315 - RNA, 14 nt, Artificial Sequence
  Description of Artificial Sequence: Synthetic oligonucleotide
cauguuaaugacac

SEQ ID NO: 15316 - RNA, 14 nt, Artificial Sequence
  Description of Artificial Sequence: Synthetic oligonucleotide
ucauguuaaugaca

SEQ ID NO: 15317 - RNA, 14 nt, Artificial Sequence
  Description of Artificial Sequence: Synthetic oligonucleotide
gucauguuaaugac

SEQ ID NO: 15318 - RNA, 14 nt, Artificial Sequence
  Description of Artificial Sequence: Synthetic oligonucleotide
ugucauguuaauga

SEQ ID NO: 15319 - RNA, 14 nt, Artificial Sequence
  Description of Artificial Sequence: Synthetic oligonucleotide
cugucauguuaaug

SEQ ID NO: 15320 - RNA, 14 nt, Artificial Sequence
  Description of Artificial Sequence: Synthetic oligonucleotide
ucugucauguuaau

SEQ ID NO: 15321 - RNA, 14 nt, Artificial Sequence
  Description of Artificial Sequence: Synthetic oligonucleotide
uucugucauguuaa

SEQ ID NO: 15322 - RNA, 14 nt, Artificial Sequence
  Description of Artificial Sequence: Synthetic oligonucleotide
cuucugucauguua

SEQ ID NO: 15323 - RNA, 14 nt, Artificial Sequence
  Description of Artificial Sequence: Synthetic oligonucleotide
ucuucugucauguu

SEQ ID NO: 15324 - RNA, 14 nt, Artificial Sequence
  Description of Artificial Sequence: Synthetic oligonucleotide
uucuucugucaugu

SEQ ID NO: 15325 - RNA, 14 nt, Artificial Sequence
  Description of Artificial Sequence: Synthetic oligonucleotide
guucuucugucaug

SEQ ID NO: 15326 - RNA, 14 nt, Artificial Sequence
  Description of Artificial Sequence: Synthetic oligonucleotide
aguucuucugucau

SEQ ID NO: 15327 - RNA, 14 nt, Artificial Sequence
  Description of Artificial Sequence: Synthetic oligonucleotide
aaguucuucuguca

SEQ ID NO: 15328 - RNA, 14 nt, Artificial Sequence
  Description of Artificial Sequence: Synthetic oligonucleotide
aaaguucuucuguc

SEQ ID NO: 15329 - RNA, 14 nt, Artificial Sequence
  Description of Artificial Sequence: Synthetic oligonucleotide
aaaaguucuucugu

SEQ ID NO: 15330 - RNA, 14 nt, Artificial Sequence
  Description of Artificial Sequence: Synthetic oligonucleotide
aaaaaguucuucug

SEQ ID NO: 15331 - RNA, 14 nt, Artificial Sequence
  Description of Artificial Sequence: Synthetic oligonucleotide
uaaaaaguucuucu

SEQ ID NO: 15332 - RNA, 14 nt, Artificial Sequence
  Description of Artificial Sequence: Synthetic oligonucleotide
uuaaaaaguucuuc

SEQ ID NO: 15333 - RNA, 14 nt, Artificial Sequence
  Description of Artificial Sequence: Synthetic oligonucleotide
uuuaaaaaguucuu

SEQ ID NO: 15334 - RNA, 14 nt, Artificial Sequence
  Description of Artificial Sequence: Synthetic oligonucleotide
uuuuaaaaaguucu

SEQ ID NO: 15335 - RNA, 14 nt, Artificial Sequence
  Description of Artificial Sequence: Synthetic oligonucleotide
uuuuuaaaaaguuc

SEQ ID NO: 15336 - RNA, 14 nt, Artificial Sequence
  Description of Artificial Sequence: Synthetic oligonucleotide
uuuuuuaaaaaguu

SEQ ID NO: 15337 - RNA, 14 nt, Artificial Sequence
  Description of Artificial Sequence: Synthetic oligonucleotide
uuuuuuuaaaaagu

SEQ ID NO: 15338 - RNA, 14 nt, Artificial Sequence
  Description of Artificial Sequence: Synthetic oligonucleotide
uuuuuuuuaaaaag

SEQ ID NO: 15339 - RNA, 14 nt, Artificial Sequence
  Description of Artificial Sequence: Synthetic oligonucleotide
uuuuuuuuuaaaaa

SEQ ID NO: 15340 - RNA, 14 nt, Artificial Sequence
  Description of Artificial Sequence: Synthetic oligonucleotide
auuuuuuuuuaaaa

SEQ ID NO: 15341 - RNA, 14 nt, Artificial Sequence
  Description of Artificial Sequence: Synthetic oligonucleotide
uauuuuuuuuuaaa

SEQ ID NO: 15342 - RNA, 14 nt, Artificial Sequence
  Description of Artificial Sequence: Synthetic oligonucleotide
uuauuuuuuuuuaa

SEQ ID NO: 15343 - RNA, 14 nt, Artificial Sequence
  Description of Artificial Sequence: Synthetic oligonucleotide
guuauuuuuuuuua

SEQ ID NO: 15344 - RNA, 14 nt, Artificial Sequence
  Description of Artificial Sequence: Synthetic oligonucleotide
aguuauuuuuuuuu

SEQ ID NO: 15345 - RNA, 14 nt, Artificial Sequence
  Description of Artificial Sequence: Synthetic oligonucleotide
caguuauuuuuuuu

SEQ ID NO: 15346 - RNA, 14 nt, Artificial Sequence
  Description of Artificial Sequence: Synthetic oligonucleotide
acaguuauuuuuuu

SEQ ID NO: 15347 - RNA, 14 nt, Artificial Sequence
  Description of Artificial Sequence: Synthetic oligonucleotide
gacaguuauuuuuu

SEQ ID NO: 15348 - RNA, 14 nt, Artificial Sequence
  Description of Artificial Sequence: Synthetic oligonucleotide
ugacaguuauuuuu

SEQ ID NO: 15349 - RNA, 14 nt, Artificial Sequence
  Description of Artificial Sequence: Synthetic oligonucleotide
uugacaguuauuuu

SEQ ID NO: 15350 - RNA, 14 nt, Artificial Sequence
  Description of Artificial Sequence: Synthetic oligonucleotide
guugacaguuauuu

SEQ ID NO: 15351 - RNA, 14 nt, Artificial Sequence
  Description of Artificial Sequence: Synthetic oligonucleotide
aguugacaguuauu

SEQ ID NO: 15352 - RNA, 14 nt, Artificial Sequence
  Description of Artificial Sequence: Synthetic oligonucleotide
uaguugacaguuau

SEQ ID NO: 15353 - RNA, 14 nt, Artificial Sequence
  Description of Artificial Sequence: Synthetic oligonucleotide
auaguugacaguua

SEQ ID NO: 15354 - RNA, 14 nt, Artificial Sequence
  Description of Artificial Sequence: Synthetic oligonucleotide
aauaguugacaguu

SEQ ID NO: 15355 - RNA, 14 nt, Artificial Sequence
  Description of Artificial Sequence: Synthetic oligonucleotide
gaauaguugacagu

SEQ ID NO: 15356 - RNA, 14 nt, Artificial Sequence
  Description of Artificial Sequence: Synthetic oligonucleotide
agaauaguugacag

SEQ ID NO: 15357 - RNA, 14 nt, Artificial Sequence
  Description of Artificial Sequence: Synthetic oligonucleotide
uagaauaguugaca

SEQ ID NO: 15358 - RNA, 14 nt, Artificial Sequence
  Description of Artificial Sequence: Synthetic oligonucleotide
auagaauaguugac

SEQ ID NO: 15359 - RNA, 14 nt, Artificial Sequence
  Description of Artificial Sequence: Synthetic oligonucleotide
aauagaauaguuga

SEQ ID NO: 15360 - RNA, 14 nt, Artificial Sequence
  Description of Artificial Sequence: Synthetic oligonucleotide
aaauagaauaguug

SEQ ID NO: 15361 - RNA, 14 nt, Artificial Sequence
  Description of Artificial Sequence: Synthetic oligonucleotide
caaauagaauaguu

SEQ ID NO: 15362 - RNA, 14 nt, Artificial Sequence
  Description of Artificial Sequence: Synthetic oligonucleotide
gcaaauagaauagu

SEQ ID NO: 15363 - RNA, 14 nt, Artificial Sequence
  Description of Artificial Sequence: Synthetic oligonucleotide
ugcaaauagaauag

SEQ ID NO: 15364 - RNA, 14 nt, Artificial Sequence
  Description of Artificial Sequence: Synthetic oligonucleotide
augcaaauagaaua

SEQ ID NO: 15365 - RNA, 14 nt, Artificial Sequence
  Description of Artificial Sequence: Synthetic oligonucleotide
aaugcaaauagaau

SEQ ID NO: 15366 - RNA, 14 nt, Artificial Sequence
  Description of Artificial Sequence: Synthetic oligonucleotide
aaaugcaaauagaa

SEQ ID NO: 15367 - RNA, 14 nt, Artificial Sequence
  Description of Artificial Sequence: Synthetic oligonucleotide
uaaaugcaaauaga

SEQ ID NO: 15368 - RNA, 14 nt, Artificial Sequence
  Description of Artificial Sequence: Synthetic oligonucleotide
cuaaaugcaaauag

SEQ ID NO: 15369 - RNA, 14 nt, Artificial Sequence
  Description of Artificial Sequence: Synthetic oligonucleotide
ccuaaaugcaaaua

SEQ ID NO: 15370 - RNA, 14 nt, Artificial Sequence
  Description of Artificial Sequence: Synthetic oligonucleotide
uccuaaaugcaaau

SEQ ID NO: 15371 - RNA, 14 nt, Artificial Sequence
  Description of Artificial Sequence: Synthetic oligonucleotide
cuccuaaaugcaaa

SEQ ID NO: 15372 - RNA, 14 nt, Artificial Sequence
  Description of Artificial Sequence: Synthetic oligonucleotide
ucuccuaaaugcaa

SEQ ID NO: 15373 - RNA, 14 nt, Artificial Sequence
  Description of Artificial Sequence: Synthetic oligonucleotide
gucuccuaaaugca

SEQ ID NO: 15374 - RNA, 14 nt, Artificial Sequence
  Description of Artificial Sequence: Synthetic oligonucleotide
agucuccuaaaugc

SEQ ID NO: 15375 - RNA, 14 nt, Artificial Sequence
  Description of Artificial Sequence: Synthetic oligonucleotide
cagucuccuaaaug

SEQ ID NO: 15376 - RNA, 14 nt, Artificial Sequence
  Description of Artificial Sequence: Synthetic oligonucleotide
acagucuccuaaau

SEQ ID NO: 15377 - RNA, 14 nt, Artificial Sequence
  Description of Artificial Sequence: Synthetic oligonucleotide
aacagucuccuaaa

SEQ ID NO: 15378 - RNA, 14 nt, Artificial Sequence
  Description of Artificial Sequence: Synthetic oligonucleotide
gaacagucuccuaa

SEQ ID NO: 15379 - RNA, 14 nt, Artificial Sequence
  Description of Artificial Sequence: Synthetic oligonucleotide
ugaacagucuccua

SEQ ID NO: 15380 - RNA, 14 nt, Artificial Sequence
  Description of Artificial Sequence: Synthetic oligonucleotide
augaacagucuccu

SEQ ID NO: 15381 - RNA, 14 nt, Artificial Sequence
  Description of Artificial Sequence: Synthetic oligonucleotide
gaugaacagucucc

SEQ ID NO: 15382 - RNA, 14 nt, Artificial Sequence
  Description of Artificial Sequence: Synthetic oligonucleotide
agaugaacagucuc

SEQ ID NO: 15383 - RNA, 14 nt, Artificial Sequence
  Description of Artificial Sequence: Synthetic oligonucleotide
uagaugaacagucu

SEQ ID NO: 15384 - RNA, 14 nt, Artificial Sequence
  Description of Artificial Sequence: Synthetic oligonucleotide
auagaugaacaguc

SEQ ID NO: 15385 - RNA, 14 nt, Artificial Sequence
  Description of Artificial Sequence: Synthetic oligonucleotide
cauagaugaacagu

SEQ ID NO: 15386 - RNA, 14 nt, Artificial Sequence
  Description of Artificial Sequence: Synthetic oligonucleotide
gcauagaugaacag

SEQ ID NO: 15387 - RNA, 14 nt, Artificial Sequence
  Description of Artificial Sequence: Synthetic oligonucleotide
agcauagaugaaca

SEQ ID NO: 15388 - RNA, 14 nt, Artificial Sequence
  Description of Artificial Sequence: Synthetic oligonucleotide
uagcauagaugaac

SEQ ID NO: 15389 - RNA, 14 nt, Artificial Sequence
  Description of Artificial Sequence: Synthetic oligonucleotide
cuagcauagaugaa

SEQ ID NO: 15390 - RNA, 14 nt, Artificial Sequence
  Description of Artificial Sequence: Synthetic oligonucleotide
ucuagcauagauga

SEQ ID NO: 15391 - RNA, 14 nt, Artificial Sequence
  Description of Artificial Sequence: Synthetic oligonucleotide
aucuagcauagaug

SEQ ID NO: 15392 - RNA, 14 nt, Artificial Sequence
  Description of Artificial Sequence: Synthetic oligonucleotide
aaucuagcauagau

SEQ ID NO: 15393 - RNA, 14 nt, Artificial Sequence
  Description of Artificial Sequence: Synthetic oligonucleotide
caaucuagcauaga

SEQ ID NO: 15394 - RNA, 14 nt, Artificial Sequence
  Description of Artificial Sequence: Synthetic oligonucleotide
acaaucuagcauag

SEQ ID NO: 15395 - RNA, 14 nt, Artificial Sequence
  Description of Artificial Sequence: Synthetic oligonucleotide
gacaaucuagcaua

SEQ ID NO: 15396 - RNA, 14 nt, Artificial Sequence
  Description of Artificial Sequence: Synthetic oligonucleotide
ugacaaucuagcau

SEQ ID NO: 15397 - RNA, 14 nt, Artificial Sequence
  Description of Artificial Sequence: Synthetic oligonucleotide
augacaaucuagca

SEQ ID NO: 15398 - RNA, 14 nt, Artificial Sequence
  Description of Artificial Sequence: Synthetic oligonucleotide
aaugacaaucuagc

SEQ ID NO: 15399 - RNA, 14 nt, Artificial Sequence
  Description of Artificial Sequence: Synthetic oligonucleotide
aaaugacaaucuag

SEQ ID NO: 15400 - RNA, 14 nt, Artificial Sequence
  Description of Artificial Sequence: Synthetic oligonucleotide
aaaaugacaaucua

SEQ ID NO: 15401 - RNA, 14 nt, Artificial Sequence
  Description of Artificial Sequence: Synthetic oligonucleotide
gaaaaugacaaucu

SEQ ID NO: 15402 - RNA, 14 nt, Artificial Sequence
  Description of Artificial Sequence: Synthetic oligonucleotide
ggaaaaugacaauc

SEQ ID NO: 15403 - RNA, 14 nt, Artificial Sequence
  Description of Artificial Sequence: Synthetic oligonucleotide
gggaaaaugacaau

SEQ ID NO: 15404 - RNA, 14 nt, Artificial Sequence
  Description of Artificial Sequence: Synthetic oligonucleotide
agggaaaaugacaa

SEQ ID NO: 15405 - RNA, 14 nt, Artificial Sequence
  Description of Artificial Sequence: Synthetic oligonucleotide
gagggaaaaugaca

SEQ ID NO: 15406 - RNA, 14 nt, Artificial Sequence
  Description of Artificial Sequence: Synthetic oligonucleotide
ggagggaaaaugac

SEQ ID NO: 15407 - RNA, 14 nt, Artificial Sequence
  Description of Artificial Sequence: Synthetic oligonucleotide
aggagggaaaauga

SEQ ID NO: 15408 - RNA, 14 nt, Artificial Sequence
  Description of Artificial Sequence: Synthetic oligonucleotide
aaggagggaaaaug

SEQ ID NO: 15409 - RNA, 14 nt, Artificial Sequence
  Description of Artificial Sequence: Synthetic oligonucleotide
gaaggagggaaaau

SEQ ID NO: 15410 - DNA, 14 bp, Artificial Sequence
  Description of Artificial Sequence: Synthetic oligonucleotide
agaaggagggaaaa

SEQ ID NO: 15411 - DNA, 14 bp, Artificial Sequence
  Description of Artificial Sequence: Synthetic oligonucleotide
gagaaggagggaaa

SEQ ID NO: 15412 - DNA, 14 bp, Artificial Sequence
  Description of Artificial Sequence: Synthetic oligonucleotide
ggagaaggagggaa

SEQ ID NO: 15413 - DNA, 14 bp, Artificial Sequence
  Description of Artificial Sequence: Synthetic oligonucleotide
gggagaaggaggga

SEQ ID NO: 15414 - RNA, 14 nt, Artificial Sequence
  Description of Artificial Sequence: Synthetic oligonucleotide
ugggagaaggaggg

SEQ ID NO: 15415 - RNA, 14 nt, Artificial Sequence
  Description of Artificial Sequence: Synthetic oligonucleotide
gugggagaaggagg

SEQ ID NO: 15416 - RNA, 14 nt, Artificial Sequence
  Description of Artificial Sequence: Synthetic oligonucleotide
ugugggagaaggag

SEQ ID NO: 15417 - RNA, 14 nt, Artificial Sequence
  Description of Artificial Sequence: Synthetic oligonucleotide
cugugggagaagga

SEQ ID NO: 15418 - RNA, 14 nt, Artificial Sequence
  Description of Artificial Sequence: Synthetic oligonucleotide
ucugugggagaagg

SEQ ID NO: 15419 - RNA, 14 nt, Artificial Sequence
  Description of Artificial Sequence: Synthetic oligonucleotide
uucugugggagaag

SEQ ID NO: 15420 - RNA, 14 nt, Artificial Sequence
  Description of Artificial Sequence: Synthetic oligonucleotide
cuucugugggagaa

SEQ ID NO: 15421 - RNA, 14 nt, Artificial Sequence
  Description of Artificial Sequence: Synthetic oligonucleotide
acuucugugggaga

SEQ ID NO: 15422 - RNA, 14 nt, Artificial Sequence
  Description of Artificial Sequence: Synthetic oligonucleotide
aacuucugugggag

SEQ ID NO: 15423 - RNA, 14 nt, Artificial Sequence
  Description of Artificial Sequence: Synthetic oligonucleotide
aaacuucuguggga

SEQ ID NO: 15424 - RNA, 14 nt, Artificial Sequence
  Description of Artificial Sequence: Synthetic oligonucleotide
uaaacuucuguggg

SEQ ID NO: 15425 - RNA, 14 nt, Artificial Sequence
  Description of Artificial Sequence: Synthetic oligonucleotide
guaaacuucugugg

SEQ ID NO: 15426 - RNA, 14 nt, Artificial Sequence
  Description of Artificial Sequence: Synthetic oligonucleotide
aguaaacuucugug

SEQ ID NO: 15427 - RNA, 14 nt, Artificial Sequence
  Description of Artificial Sequence: Synthetic oligonucleotide
caguaaacuucugu

SEQ ID NO: 15428 - RNA, 14 nt, Artificial Sequence
  Description of Artificial Sequence: Synthetic oligonucleotide
ccaguaaacuucug

SEQ ID NO: 15429 - RNA, 14 nt, Artificial Sequence
  Description of Artificial Sequence: Synthetic oligonucleotide
accaguaaacuucu

SEQ ID NO: 15430 - RNA, 14 nt, Artificial Sequence
  Description of Artificial Sequence: Synthetic oligonucleotide
uaccaguaaacuuc

SEQ ID NO: 15431 - RNA, 14 nt, Artificial Sequence
  Description of Artificial Sequence: Synthetic oligonucleotide
cuaccaguaaacuu

SEQ ID NO: 15432 - RNA, 14 nt, Artificial Sequence
  Description of Artificial Sequence: Synthetic oligonucleotide
acuaccaguaaacu

SEQ ID NO: 15433 - RNA, 14 nt, Artificial Sequence
  Description of Artificial Sequence: Synthetic oligonucleotide
gacuaccaguaaac

SEQ ID NO: 15434 - RNA, 14 nt, Artificial Sequence
  Description of Artificial Sequence: Synthetic oligonucleotide
ggacuaccaguaaa

SEQ ID NO: 15435 - RNA, 14 nt, Artificial Sequence
  Description of Artificial Sequence: Synthetic oligonucleotide
uggacuaccaguaa

SEQ ID NO: 15436 - RNA, 14 nt, Artificial Sequence
  Description of Artificial Sequence: Synthetic oligonucleotide
auggacuaccagua

SEQ ID NO: 15437 - RNA, 14 nt, Artificial Sequence
  Description of Artificial Sequence: Synthetic oligonucleotide
cauggacuaccagu

SEQ ID NO: 15438 - RNA, 14 nt, Artificial Sequence
  Description of Artificial Sequence: Synthetic oligonucleotide
acauggacuaccag

SEQ ID NO: 15439 - RNA, 14 nt, Artificial Sequence
  Description of Artificial Sequence: Synthetic oligonucleotide
gacauggacuacca

SEQ ID NO: 15440 - RNA, 14 nt, Artificial Sequence
  Description of Artificial Sequence: Synthetic oligonucleotide
ugacauggacuacc

SEQ ID NO: 15441 - RNA, 14 nt, Artificial Sequence
  Description of Artificial Sequence: Synthetic oligonucleotide
augacauggacuac

SEQ ID NO: 15442 - RNA, 14 nt, Artificial Sequence
  Description of Artificial Sequence: Synthetic oligonucleotide
caugacauggacua

SEQ ID NO: 15443 - RNA, 14 nt, Artificial Sequence
  Description of Artificial Sequence: Synthetic oligonucleotide
ccaugacauggacu

SEQ ID NO: 15444 - RNA, 14 nt, Artificial Sequence
  Description of Artificial Sequence: Synthetic oligonucleotide
gccaugacauggac

SEQ ID NO: 15445 - RNA, 14 nt, Artificial Sequence
  Description of Artificial Sequence: Synthetic oligonucleotide
agccaugacaugga

SEQ ID NO: 15446 - RNA, 14 nt, Artificial Sequence
  Description of Artificial Sequence: Synthetic oligonucleotide
gagccaugacaugg

SEQ ID NO: 15447 - RNA, 14 nt, Artificial Sequence
  Description of Artificial Sequence: Synthetic oligonucleotide
cgagccaugacaug

SEQ ID NO: 15448 - RNA, 14 nt, Artificial Sequence
  Description of Artificial Sequence: Synthetic oligonucleotide
acgagccaugacau

SEQ ID NO: 15449 - RNA, 14 nt, Artificial Sequence
  Description of Artificial Sequence: Synthetic oligonucleotide
uacgagccaugaca

SEQ ID NO: 15450 - RNA, 14 nt, Artificial Sequence
  Description of Artificial Sequence: Synthetic oligonucleotide
cuacgagccaugac

SEQ ID NO: 15451 - RNA, 14 nt, Artificial Sequence
  Description of Artificial Sequence: Synthetic oligonucleotide
gcuacgagccauga

SEQ ID NO: 15452 - RNA, 14 nt, Artificial Sequence
  Description of Artificial Sequence: Synthetic oligonucleotide
agcuacgagccaug

SEQ ID NO: 15453 - RNA, 14 nt, Artificial Sequence
  Description of Artificial Sequence: Synthetic oligonucleotide
uagcuacgagccau

SEQ ID NO: 15454 - RNA, 14 nt, Artificial Sequence
  Description of Artificial Sequence: Synthetic oligonucleotide
auagcuacgagcca

SEQ ID NO: 15455 - RNA, 14 nt, Artificial Sequence
  Description of Artificial Sequence: Synthetic oligonucleotide
gauagcuacgagcc

SEQ ID NO: 15456 - RNA, 14 nt, Artificial Sequence
  Description of Artificial Sequence: Synthetic oligonucleotide
ggauagcuacgagc

SEQ ID NO: 15457 - RNA, 14 nt, Artificial Sequence
  Description of Artificial Sequence: Synthetic oligonucleotide
gggauagcuacgag

SEQ ID NO: 15458 - RNA, 14 nt, Artificial Sequence
  Description of Artificial Sequence: Synthetic oligonucleotide
agggauagcuacga

SEQ ID NO: 15459 - RNA, 14 nt, Artificial Sequence
  Description of Artificial Sequence: Synthetic oligonucleotide
gagggauagcuacg

SEQ ID NO: 15460 - RNA, 14 nt, Artificial Sequence
  Description of Artificial Sequence: Synthetic oligonucleotide
agagggauagcuac

SEQ ID NO: 15461 - RNA, 14 nt, Artificial Sequence
  Description of Artificial Sequence: Synthetic oligonucleotide
uagagggauagcua

SEQ ID NO: 15462 - RNA, 14 nt, Artificial Sequence
  Description of Artificial Sequence: Synthetic oligonucleotide
uuagagggauagcu

SEQ ID NO: 15463 - RNA, 14 nt, Artificial Sequence
  Description of Artificial Sequence: Synthetic oligonucleotide
guuagagggauagc

SEQ ID NO: 15464 - RNA, 14 nt, Artificial Sequence
  Description of Artificial Sequence: Synthetic oligonucleotide
gguuagagggauag

SEQ ID NO: 15465 - RNA, 14 nt, Artificial Sequence
  Description of Artificial Sequence: Synthetic oligonucleotide
ugguuagagggaua

SEQ ID NO: 15466 - RNA, 14 nt, Artificial Sequence
  Description of Artificial Sequence: Synthetic oligonucleotide
augguuagagggau

SEQ ID NO: 15467 - RNA, 14 nt, Artificial Sequence
  Description of Artificial Sequence: Synthetic oligonucleotide
uaugguuagaggga

SEQ ID NO: 15468 - RNA, 14 nt, Artificial Sequence
  Description of Artificial Sequence: Synthetic oligonucleotide
guaugguuagaggg

SEQ ID NO: 15469 - RNA, 14 nt, Artificial Sequence
  Description of Artificial Sequence: Synthetic oligonucleotide
gguaugguuagagg

SEQ ID NO: 15470 - RNA, 14 nt, Artificial Sequence
  Description of Artificial Sequence: Synthetic oligonucleotide
ugguaugguuagag

SEQ ID NO: 15471 - RNA, 14 nt, Artificial Sequence
  Description of Artificial Sequence: Synthetic oligonucleotide
augguaugguuaga

SEQ ID NO: 15472 - RNA, 14 nt, Artificial Sequence
  Description of Artificial Sequence: Synthetic oligonucleotide
caugguaugguuag

SEQ ID NO: 15473 - RNA, 14 nt, Artificial Sequence
  Description of Artificial Sequence: Synthetic oligonucleotide
ccaugguaugguua

SEQ ID NO: 15474 - RNA, 14 nt, Artificial Sequence
  Description of Artificial Sequence: Synthetic oligonucleotide
uccaugguaugguu

SEQ ID NO: 15475 - RNA, 14 nt, Artificial Sequence
  Description of Artificial Sequence: Synthetic oligonucleotide
uuccaugguauggu

SEQ ID NO: 15476 - RNA, 14 nt, Artificial Sequence
  Description of Artificial Sequence: Synthetic oligonucleotide
uuuccaugguaugg

SEQ ID NO: 15477 - RNA, 14 nt, Artificial Sequence
  Description of Artificial Sequence: Synthetic oligonucleotide
auuuccaugguaug

SEQ ID NO: 15478 - RNA, 14 nt, Artificial Sequence
  Description of Artificial Sequence: Synthetic oligonucleotide
cauuuccaugguau

SEQ ID NO: 15479 - RNA, 14 nt, Artificial Sequence
  Description of Artificial Sequence: Synthetic oligonucleotide
gcauuuccauggua

SEQ ID NO: 15480 - RNA, 14 nt, Artificial Sequence
  Description of Artificial Sequence: Synthetic oligonucleotide
ugcauuuccauggu

SEQ ID NO: 15481 - RNA, 14 nt, Artificial Sequence
  Description of Artificial Sequence: Synthetic oligonucleotide
cugcauuuccaugg

SEQ ID NO: 15482 - RNA, 14 nt, Artificial Sequence
  Description of Artificial Sequence: Synthetic oligonucleotide
ccugcauuuccaug

SEQ ID NO: 15483 - RNA, 14 nt, Artificial Sequence
  Description of Artificial Sequence: Synthetic oligonucleotide
gccugcauuuccau

SEQ ID NO: 15484 - RNA, 14 nt, Artificial Sequence
  Description of Artificial Sequence: Synthetic oligonucleotide
ugccugcauuucca

SEQ ID NO: 15485 - RNA, 14 nt, Artificial Sequence
  Description of Artificial Sequence: Synthetic oligonucleotide
gugccugcauuucc

SEQ ID NO: 15486 - RNA, 14 nt, Artificial Sequence
  Description of Artificial Sequence: Synthetic oligonucleotide
ggugccugcauuuc

SEQ ID NO: 15487 - RNA, 14 nt, Artificial Sequence
  Description of Artificial Sequence: Synthetic oligonucleotide
gggugccugcauuu

SEQ ID NO: 15488 - RNA, 14 nt, Artificial Sequence
  Description of Artificial Sequence: Synthetic oligonucleotide
ugggugccugcauu

SEQ ID NO: 15489 - RNA, 14 nt, Artificial Sequence
  Description of Artificial Sequence: Synthetic oligonucleotide
uugggugccugcau

SEQ ID NO: 15490 - RNA, 14 nt, Artificial Sequence
  Description of Artificial Sequence: Synthetic oligonucleotide
auugggugccugca

SEQ ID NO: 15491 - RNA, 14 nt, Artificial Sequence
  Description of Artificial Sequence: Synthetic oligonucleotide
cauugggugccugc

SEQ ID NO: 15492 - RNA, 14 nt, Artificial Sequence
  Description of Artificial Sequence: Synthetic oligonucleotide
acauugggugccug

SEQ ID NO: 15493 - RNA, 14 nt, Artificial Sequence
  Description of Artificial Sequence: Synthetic oligonucleotide
cacauugggugccu

SEQ ID NO: 15494 - RNA, 14 nt, Artificial Sequence
  Description of Artificial Sequence: Synthetic oligonucleotide
ucacauugggugcc

SEQ ID NO: 15495 - RNA, 14 nt, Artificial Sequence
  Description of Artificial Sequence: Synthetic oligonucleotide
uucacauugggugc

SEQ ID NO: 15496 - RNA, 14 nt, Artificial Sequence
  Description of Artificial Sequence: Synthetic oligonucleotide
uuucacauugggug

SEQ ID NO: 15497 - RNA, 14 nt, Artificial Sequence
  Description of Artificial Sequence: Synthetic oligonucleotide
uuuucacauugggu

SEQ ID NO: 15498 - RNA, 14 nt, Artificial Sequence
  Description of Artificial Sequence: Synthetic oligonucleotide
cuuuucacauuggg

SEQ ID NO: 15499 - RNA, 14 nt, Artificial Sequence
  Description of Artificial Sequence: Synthetic oligonucleotide
ccuuuucacauugg

SEQ ID NO: 15500 - RNA, 14 nt, Artificial Sequence
  Description of Artificial Sequence: Synthetic oligonucleotide
uccuuuucacauug

SEQ ID NO: 15501 - RNA, 14 nt, Artificial Sequence
  Description of Artificial Sequence: Synthetic oligonucleotide
cuccuuuucacauu

SEQ ID NO: 15502 - RNA, 14 nt, Artificial Sequence
  Description of Artificial Sequence: Synthetic oligonucleotide
gcuccuuuucacau

SEQ ID NO: 15503 - RNA, 14 nt, Artificial Sequence
  Description of Artificial Sequence: Synthetic oligonucleotide
ugcuccuuuucaca

SEQ ID NO: 15504 - RNA, 14 nt, Artificial Sequence
  Description of Artificial Sequence: Synthetic oligonucleotide
gugcuccuuuucac

SEQ ID NO: 15505 - RNA, 14 nt, Artificial Sequence
  Description of Artificial Sequence: Synthetic oligonucleotide
agugcuccuuuuca

SEQ ID NO: 15506 - RNA, 14 nt, Artificial Sequence
  Description of Artificial Sequence: Synthetic oligonucleotide
aagugcuccuuuuc

SEQ ID NO: 15507 - RNA, 14 nt, Artificial Sequence
  Description of Artificial Sequence: Synthetic oligonucleotide
caagugcuccuuuu

SEQ ID NO: 15508 - RNA, 14 nt, Artificial Sequence
  Description of Artificial Sequence: Synthetic oligonucleotide
gcaagugcuccuuu

SEQ ID NO: 15509 - RNA, 14 nt, Artificial Sequence
  Description of Artificial Sequence: Synthetic oligonucleotide
agcaagugcuccuu

SEQ ID NO: 15510 - RNA, 14 nt, Artificial Sequence
  Description of Artificial Sequence: Synthetic oligonucleotide
cagcaagugcuccu

SEQ ID NO: 15511 - RNA, 14 nt, Artificial Sequence
  Description of Artificial Sequence: Synthetic oligonucleotide
ccagcaagugcucc

SEQ ID NO: 15512 - RNA, 14 nt, Artificial Sequence
  Description of Artificial Sequence: Synthetic oligonucleotide
cccagcaagugcuc

SEQ ID NO: 15513 - RNA, 14 nt, Artificial Sequence
  Description of Artificial Sequence: Synthetic oligonucleotide
gcccagcaagugcu

SEQ ID NO: 15514 - RNA, 14 nt, Artificial Sequence
  Description of Artificial Sequence: Synthetic oligonucleotide
ugcccagcaagugc

SEQ ID NO: 15515 - RNA, 14 nt, Artificial Sequence
  Description of Artificial Sequence: Synthetic oligonucleotide
augcccagcaagug

SEQ ID NO: 15516 - RNA, 14 nt, Artificial Sequence
  Description of Artificial Sequence: Synthetic oligonucleotide
gaugcccagcaagu

SEQ ID NO: 15517 - RNA, 14 nt, Artificial Sequence
  Description of Artificial Sequence: Synthetic oligonucleotide
ugaugcccagcaag

SEQ ID NO: 15518 - RNA, 14 nt, Artificial Sequence
  Description of Artificial Sequence: Synthetic oligonucleotide
gugaugcccagcaa

SEQ ID NO: 15519 - RNA, 14 nt, Artificial Sequence
  Description of Artificial Sequence: Synthetic oligonucleotide
agugaugcccagca

SEQ ID NO: 15520 - RNA, 14 nt, Artificial Sequence
  Description of Artificial Sequence: Synthetic oligonucleotide
cagugaugcccagc

SEQ ID NO: 15521 - RNA, 14 nt, Artificial Sequence
  Description of Artificial Sequence: Synthetic oligonucleotide
ucagugaugcccag

SEQ ID NO: 15522 - RNA, 14 nt, Artificial Sequence
  Description of Artificial Sequence: Synthetic oligonucleotide
gucagugaugccca

SEQ ID NO: 15523 - RNA, 14 nt, Artificial Sequence
  Description of Artificial Sequence: Synthetic oligonucleotide
ugucagugaugccc

SEQ ID NO: 15524 - RNA, 14 nt, Artificial Sequence
  Description of Artificial Sequence: Synthetic oligonucleotide
gugucagugaugcc

SEQ ID NO: 15525 - RNA, 14 nt, Artificial Sequence
  Description of Artificial Sequence: Synthetic oligonucleotide
ggugucagugaugc

SEQ ID NO: 15526 - RNA, 14 nt, Artificial Sequence
  Description of Artificial Sequence: Synthetic oligonucleotide
cggugucagugaug

SEQ ID NO: 15527 - RNA, 14 nt, Artificial Sequence
  Description of Artificial Sequence: Synthetic oligonucleotide
gcggugucagugau

SEQ ID NO: 15528 - RNA, 14 nt, Artificial Sequence
  Description of Artificial Sequence: Synthetic oligonucleotide
agcggugucaguga

SEQ ID NO: 15529 - RNA, 14 nt, Artificial Sequence
  Description of Artificial Sequence: Synthetic oligonucleotide
gagcggugucagug

SEQ ID NO: 15530 - RNA, 14 nt, Artificial Sequence
  Description of Artificial Sequence: Synthetic oligonucleotide
ugagcggugucagu

SEQ ID NO: 15531 - RNA, 14 nt, Artificial Sequence
  Description of Artificial Sequence: Synthetic oligonucleotide
augagcggugucag

SEQ ID NO: 15532 - RNA, 14 nt, Artificial Sequence
  Description of Artificial Sequence: Synthetic oligonucleotide
caugagcgguguca

SEQ ID NO: 15533 - RNA, 14 nt, Artificial Sequence
  Description of Artificial Sequence: Synthetic oligonucleotide
acaugagcgguguc

SEQ ID NO: 15534 - RNA, 14 nt, Artificial Sequence
  Description of Artificial Sequence: Synthetic oligonucleotide
aacaugagcggugu

SEQ ID NO: 15535 - RNA, 14 nt, Artificial Sequence
  Description of Artificial Sequence: Synthetic oligonucleotide
aaacaugagcggug

SEQ ID NO: 15536 - RNA, 14 nt, Artificial Sequence
  Description of Artificial Sequence: Synthetic oligonucleotide
aaaacaugagcggu

SEQ ID NO: 15537 - RNA, 14 nt, Artificial Sequence
  Description of Artificial Sequence: Synthetic oligonucleotide
uaaaacaugagcgg

SEQ ID NO: 15538 - RNA, 14 nt, Artificial Sequence
  Description of Artificial Sequence: Synthetic oligonucleotide
guaaaacaugagcg

SEQ ID NO: 15539 - RNA, 14 nt, Artificial Sequence
  Description of Artificial Sequence: Synthetic oligonucleotide
uguaaaacaugagc

SEQ ID NO: 15540 - RNA, 14 nt, Artificial Sequence
  Description of Artificial Sequence: Synthetic oligonucleotide
guguaaaacaugag

SEQ ID NO: 15541 - RNA, 14 nt, Artificial Sequence
  Description of Artificial Sequence: Synthetic oligonucleotide
uguguaaaacauga

SEQ ID NO: 15542 - RNA, 14 nt, Artificial Sequence
  Description of Artificial Sequence: Synthetic oligonucleotide
auguguaaaacaug

SEQ ID NO: 15543 - RNA, 14 nt, Artificial Sequence
  Description of Artificial Sequence: Synthetic oligonucleotide
uauguguaaaacau

SEQ ID NO: 15544 - RNA, 14 nt, Artificial Sequence
  Description of Artificial Sequence: Synthetic oligonucleotide
cuauguguaaaaca

SEQ ID NO: 15545 - RNA, 14 nt, Artificial Sequence
  Description of Artificial Sequence: Synthetic oligonucleotide
acuauguguaaaac

SEQ ID NO: 15546 - RNA, 14 nt, Artificial Sequence
  Description of Artificial Sequence: Synthetic oligonucleotide
aacuauguguaaaa

SEQ ID NO: 15547 - RNA, 14 nt, Artificial Sequence
  Description of Artificial Sequence: Synthetic oligonucleotide
caacuauguguaaa

SEQ ID NO: 15548 - RNA, 14 nt, Artificial Sequence
  Description of Artificial Sequence: Synthetic oligonucleotide
ucaacuauguguaa

SEQ ID NO: 15549 - RNA, 14 nt, Artificial Sequence
  Description of Artificial Sequence: Synthetic oligonucleotide
cucaacuaugugua

SEQ ID NO: 15550 - RNA, 14 nt, Artificial Sequence
  Description of Artificial Sequence: Synthetic oligonucleotide
acucaacuaugugu

SEQ ID NO: 15551 - RNA, 14 nt, Artificial Sequence
  Description of Artificial Sequence: Synthetic oligonucleotide
uacucaacuaugug

SEQ ID NO: 15552 - RNA, 14 nt, Artificial Sequence
  Description of Artificial Sequence: Synthetic oligonucleotide
uuacucaacuaugu

SEQ ID NO: 15553 - RNA, 14 nt, Artificial Sequence
  Description of Artificial Sequence: Synthetic oligonucleotide
auuacucaacuaug

SEQ ID NO: 15554 - RNA, 14 nt, Artificial Sequence
  Description of Artificial Sequence: Synthetic oligonucleotide
gauuacucaacuau

SEQ ID NO: 15555 - RNA, 14 nt, Artificial Sequence
  Description of Artificial Sequence: Synthetic oligonucleotide
ugauuacucaacua

SEQ ID NO: 15556 - RNA, 14 nt, Artificial Sequence
  Description of Artificial Sequence: Synthetic oligonucleotide
cugauuacucaacu

SEQ ID NO: 15557 - RNA, 14 nt, Artificial Sequence
  Description of Artificial Sequence: Synthetic oligonucleotide
gcugauuacucaac

SEQ ID NO: 15558 - RNA, 14 nt, Artificial Sequence
  Description of Artificial Sequence: Synthetic oligonucleotide
ugcugauuacucaa

SEQ ID NO: 15559 - RNA, 14 nt, Artificial Sequence
  Description of Artificial Sequence: Synthetic oligonucleotide
augcugauuacuca

SEQ ID NO: 15560 - RNA, 14 nt, Artificial Sequence
  Description of Artificial Sequence: Synthetic oligonucleotide
uaugcugauuacuc

SEQ ID NO: 15561 - RNA, 14 nt, Artificial Sequence
  Description of Artificial Sequence: Synthetic oligonucleotide
auaugcugauuacu

SEQ ID NO: 15562 - RNA, 14 nt, Artificial Sequence
  Description of Artificial Sequence: Synthetic oligonucleotide
gauaugcugauuac

SEQ ID NO: 15563 - RNA, 14 nt, Artificial Sequence
  Description of Artificial Sequence: Synthetic oligonucleotide
agauaugcugauua

SEQ ID NO: 15564 - RNA, 14 nt, Artificial Sequence
  Description of Artificial Sequence: Synthetic oligonucleotide
uagauaugcugauu

SEQ ID NO: 15565 - RNA, 14 nt, Artificial Sequence
  Description of Artificial Sequence: Synthetic oligonucleotide
cuagauaugcugau

SEQ ID NO: 15566 - RNA, 14 nt, Artificial Sequence
  Description of Artificial Sequence: Synthetic oligonucleotide
ucuagauaugcuga

SEQ ID NO: 15567 - RNA, 14 nt, Artificial Sequence
  Description of Artificial Sequence: Synthetic oligonucleotide
uucuagauaugcug

SEQ ID NO: 15568 - RNA, 14 nt, Artificial Sequence
  Description of Artificial Sequence: Synthetic oligonucleotide
auucuagauaugcu

SEQ ID NO: 15569 - RNA, 14 nt, Artificial Sequence
  Description of Artificial Sequence: Synthetic oligonucleotide
aauucuagauaugc

SEQ ID NO: 15570 - RNA, 14 nt, Artificial Sequence
  Description of Artificial Sequence: Synthetic oligonucleotide
uaauucuagauaug

SEQ ID NO: 15571 - RNA, 14 nt, Artificial Sequence
  Description of Artificial Sequence: Synthetic oligonucleotide
auaauucuagauau

SEQ ID NO: 15572 - RNA, 14 nt, Artificial Sequence
  Description of Artificial Sequence: Synthetic oligonucleotide
gauaauucuagaua

SEQ ID NO: 15573 - RNA, 14 nt, Artificial Sequence
  Description of Artificial Sequence: Synthetic oligonucleotide
agauaauucuagau

SEQ ID NO: 15574 - RNA, 14 nt, Artificial Sequence
  Description of Artificial Sequence: Synthetic oligonucleotide
aagauaauucuaga

SEQ ID NO: 15575 - RNA, 14 nt, Artificial Sequence
  Description of Artificial Sequence: Synthetic oligonucleotide
caagauaauucuag

SEQ ID NO: 15576 - RNA, 14 nt, Artificial Sequence
  Description of Artificial Sequence: Synthetic oligonucleotide
gcaagauaauucua

SEQ ID NO: 15577 - RNA, 14 nt, Artificial Sequence
  Description of Artificial Sequence: Synthetic oligonucleotide
ugcaagauaauucu

SEQ ID NO: 15578 - RNA, 14 nt, Artificial Sequence
  Description of Artificial Sequence: Synthetic oligonucleotide
augcaagauaauuc

SEQ ID NO: 15579 - RNA, 14 nt, Artificial Sequence
  Description of Artificial Sequence: Synthetic oligonucleotide
aaugcaagauaauu

SEQ ID NO: 15580 - RNA, 14 nt, Artificial Sequence
  Description of Artificial Sequence: Synthetic oligonucleotide
caaugcaagauaau

SEQ ID NO: 15581 - RNA, 14 nt, Artificial Sequence
  Description of Artificial Sequence: Synthetic oligonucleotide
gcaaugcaagauaa

SEQ ID NO: 15582 - RNA, 14 nt, Artificial Sequence
  Description of Artificial Sequence: Synthetic oligonucleotide
ggcaaugcaagaua

SEQ ID NO: 15583 - RNA, 14 nt, Artificial Sequence
  Description of Artificial Sequence: Synthetic oligonucleotide
aggcaaugcaagau

SEQ ID NO: 15584 - RNA, 14 nt, Artificial Sequence
  Description of Artificial Sequence: Synthetic oligonucleotide
uaggcaaugcaaga

SEQ ID NO: 15585 - RNA, 14 nt, Artificial Sequence
  Description of Artificial Sequence: Synthetic oligonucleotide
uuaggcaaugcaag

SEQ ID NO: 15586 - RNA, 14 nt, Artificial Sequence
  Description of Artificial Sequence: Synthetic oligonucleotide
uuuaggcaaugcaa

SEQ ID NO: 15587 - RNA, 14 nt, Artificial Sequence
  Description of Artificial Sequence: Synthetic oligonucleotide
auuuaggcaaugca

SEQ ID NO: 15588 - RNA, 14 nt, Artificial Sequence
  Description of Artificial Sequence: Synthetic oligonucleotide
gauuuaggcaaugc

SEQ ID NO: 15589 - RNA, 14 nt, Artificial Sequence
  Description of Artificial Sequence: Synthetic oligonucleotide
ugauuuaggcaaug

SEQ ID NO: 15590 - RNA, 14 nt, Artificial Sequence
  Description of Artificial Sequence: Synthetic oligonucleotide
augauuuaggcaau

SEQ ID NO: 15591 - RNA, 14 nt, Artificial Sequence
  Description of Artificial Sequence: Synthetic oligonucleotide
uaugauuuaggcaa

SEQ ID NO: 15592 - RNA, 14 nt, Artificial Sequence
  Description of Artificial Sequence: Synthetic oligonucleotide
auaugauuuaggca

SEQ ID NO: 15593 - RNA, 14 nt, Artificial Sequence
  Description of Artificial Sequence: Synthetic oligonucleotide
cauaugauuuaggc

SEQ ID NO: 15594 - RNA, 14 nt, Artificial Sequence
  Description of Artificial Sequence: Synthetic oligonucleotide
acauaugauuuagg

SEQ ID NO: 15595 - RNA, 14 nt, Artificial Sequence
  Description of Artificial Sequence: Synthetic oligonucleotide
uacauaugauuuag

SEQ ID NO: 15596 - RNA, 14 nt, Artificial Sequence
  Description of Artificial Sequence: Synthetic oligonucleotide
auacauaugauuua

SEQ ID NO: 15597 - RNA, 14 nt, Artificial Sequence
  Description of Artificial Sequence: Synthetic oligonucleotide
uauacauaugauuu

SEQ ID NO: 15598 - RNA, 14 nt, Artificial Sequence
  Description of Artificial Sequence: Synthetic oligonucleotide
auauacauaugauu

SEQ ID NO: 15599 - RNA, 14 nt, Artificial Sequence
  Description of Artificial Sequence: Synthetic oligonucleotide
uauauacauaugau

SEQ ID NO: 15600 - RNA, 14 nt, Artificial Sequence
  Description of Artificial Sequence: Synthetic oligonucleotide
cuauauacauauga

SEQ ID NO: 15601 - RNA, 14 nt, Artificial Sequence
  Description of Artificial Sequence: Synthetic oligonucleotide
acuauauacauaug

SEQ ID NO: 15602 - RNA, 14 nt, Artificial Sequence
  Description of Artificial Sequence: Synthetic oligonucleotide
cacuauauacauau

SEQ ID NO: 15603 - RNA, 14 nt, Artificial Sequence
  Description of Artificial Sequence: Synthetic oligonucleotide
ucacuauauacaua

SEQ ID NO: 15604 - RNA, 14 nt, Artificial Sequence
  Description of Artificial Sequence: Synthetic oligonucleotide
uucacuauauacau

SEQ ID NO: 15605 - RNA, 14 nt, Artificial Sequence
  Description of Artificial Sequence: Synthetic oligonucleotide
auucacuauauaca

SEQ ID NO: 15606 - RNA, 14 nt, Artificial Sequence
  Description of Artificial Sequence: Synthetic oligonucleotide
cauucacuauauac

SEQ ID NO: 15607 - RNA, 14 nt, Artificial Sequence
  Description of Artificial Sequence: Synthetic oligonucleotide
acauucacuauaua

SEQ ID NO: 15608 - RNA, 14 nt, Artificial Sequence
  Description of Artificial Sequence: Synthetic oligonucleotide
aacauucacuauau

SEQ ID NO: 15609 - RNA, 14 nt, Artificial Sequence
  Description of Artificial Sequence: Synthetic oligonucleotide
uaacauucacuaua

SEQ ID NO: 15610 - RNA, 14 nt, Artificial Sequence
  Description of Artificial Sequence: Synthetic oligonucleotide
auaacauucacuau

SEQ ID NO: 15611 - RNA, 14 nt, Artificial Sequence
  Description of Artificial Sequence: Synthetic oligonucleotide
uauaacauucacua

SEQ ID NO: 15612 - RNA, 14 nt, Artificial Sequence
  Description of Artificial Sequence: Synthetic oligonucleotide
auauaacauucacu

SEQ ID NO: 15613 - RNA, 14 nt, Artificial Sequence
  Description of Artificial Sequence: Synthetic oligonucleotide
uauauaacauucac

SEQ ID NO: 15614 - RNA, 14 nt, Artificial Sequence
  Description of Artificial Sequence: Synthetic oligonucleotide
uuauauaacauuca

SEQ ID NO: 15615 - RNA, 14 nt, Artificial Sequence
  Description of Artificial Sequence: Synthetic oligonucleotide
auuauauaacauuc

SEQ ID NO: 15616 - RNA, 14 nt, Artificial Sequence
  Description of Artificial Sequence: Synthetic oligonucleotide
uauuauauaacauu

SEQ ID NO: 15617 - RNA, 14 nt, Artificial Sequence
  Description of Artificial Sequence: Synthetic oligonucleotide
auauuauauaacau

SEQ ID NO: 15618 - RNA, 14 nt, Artificial Sequence
  Description of Artificial Sequence: Synthetic oligonucleotide
uauauuauauaaca

SEQ ID NO: 15619 - RNA, 14 nt, Artificial Sequence
  Description of Artificial Sequence: Synthetic oligonucleotide
guauauuauauaac

SEQ ID NO: 15620 - RNA, 14 nt, Artificial Sequence
  Description of Artificial Sequence: Synthetic oligonucleotide
gguauauuauauaa

SEQ ID NO: 15621 - RNA, 14 nt, Artificial Sequence
  Description of Artificial Sequence: Synthetic oligonucleotide
agguauauuauaua

SEQ ID NO: 15622 - RNA, 14 nt, Artificial Sequence
  Description of Artificial Sequence: Synthetic oligonucleotide
cagguauauuauau

SEQ ID NO: 15623 - RNA, 14 nt, Artificial Sequence
  Description of Artificial Sequence: Synthetic oligonucleotide
ccagguauauuaua

SEQ ID NO: 15624 - RNA, 14 nt, Artificial Sequence
  Description of Artificial Sequence: Synthetic oligonucleotide
gccagguauauuau

SEQ ID NO: 15625 - RNA, 14 nt, Artificial Sequence
  Description of Artificial Sequence: Synthetic oligonucleotide
ugccagguauauua

SEQ ID NO: 15626 - RNA, 14 nt, Artificial Sequence
  Description of Artificial Sequence: Synthetic oligonucleotide
cugccagguauauu

SEQ ID NO: 15627 - RNA, 14 nt, Artificial Sequence
  Description of Artificial Sequence: Synthetic oligonucleotide
ccugccagguauau

SEQ ID NO: 15628 - RNA, 14 nt, Artificial Sequence
  Description of Artificial Sequence: Synthetic oligonucleotide
accugccagguaua

SEQ ID NO: 15629 - RNA, 14 nt, Artificial Sequence
  Description of Artificial Sequence: Synthetic oligonucleotide
gaccugccagguau

SEQ ID NO: 15630 - RNA, 14 nt, Artificial Sequence
  Description of Artificial Sequence: Synthetic oligonucleotide
agaccugccaggua

SEQ ID NO: 15631 - RNA, 14 nt, Artificial Sequence
  Description of Artificial Sequence: Synthetic oligonucleotide
cagaccugccaggu

SEQ ID NO: 15632 - RNA, 14 nt, Artificial Sequence
  Description of Artificial Sequence: Synthetic oligonucleotide
acagaccugccagg

SEQ ID NO: 15633 - RNA, 14 nt, Artificial Sequence
  Description of Artificial Sequence: Synthetic oligonucleotide
aacagaccugccag

SEQ ID NO: 15634 - RNA, 14 nt, Artificial Sequence
  Description of Artificial Sequence: Synthetic oligonucleotide
aaacagaccugcca

SEQ ID NO: 15635 - RNA, 14 nt, Artificial Sequence
  Description of Artificial Sequence: Synthetic oligonucleotide
aaaacagaccugcc

SEQ ID NO: 15636 - RNA, 14 nt, Artificial Sequence
  Description of Artificial Sequence: Synthetic oligonucleotide
uaaaacagaccugc

SEQ ID NO: 15637 - RNA, 14 nt, Artificial Sequence
  Description of Artificial Sequence: Synthetic oligonucleotide
uuaaaacagaccug

SEQ ID NO: 15638 - RNA, 14 nt, Artificial Sequence
  Description of Artificial Sequence: Synthetic oligonucleotide
auuaaaacagaccu

SEQ ID NO: 15639 - RNA, 14 nt, Artificial Sequence
  Description of Artificial Sequence: Synthetic oligonucleotide
aauuaaaacagacc

SEQ ID NO: 15640 - RNA, 14 nt, Artificial Sequence
  Description of Artificial Sequence: Synthetic oligonucleotide
aaauuaaaacagac

SEQ ID NO: 15641 - RNA, 14 nt, Artificial Sequence
  Description of Artificial Sequence: Synthetic oligonucleotide
uaaauuaaaacaga

SEQ ID NO: 15642 - RNA, 14 nt, Artificial Sequence
  Description of Artificial Sequence: Synthetic oligonucleotide
uuaaauuaaaacag

SEQ ID NO: 15643 - RNA, 14 nt, Artificial Sequence
  Description of Artificial Sequence: Synthetic oligonucleotide
auuaaauuaaaaca

SEQ ID NO: 15644 - RNA, 14 nt, Artificial Sequence
  Description of Artificial Sequence: Synthetic oligonucleotide
aauuaaauuaaaac

SEQ ID NO: 15645 - RNA, 14 nt, Artificial Sequence
  Description of Artificial Sequence: Synthetic oligonucleotide
caauuaaauuaaaa

SEQ ID NO: 15646 - RNA, 14 nt, Artificial Sequence
  Description of Artificial Sequence: Synthetic oligonucleotide
ucaauuaaauuaaa

SEQ ID NO: 15647 - RNA, 14 nt, Artificial Sequence
  Description of Artificial Sequence: Synthetic oligonucleotide
uucaauuaaauuaa

SEQ ID NO: 15648 - RNA, 14 nt, Artificial Sequence
  Description of Artificial Sequence: Synthetic oligonucleotide
auucaauuaaauua

SEQ ID NO: 15649 - RNA, 14 nt, Artificial Sequence
  Description of Artificial Sequence: Synthetic oligonucleotide
uauucaauuaaauu

SEQ ID NO: 15650 - RNA, 14 nt, Artificial Sequence
  Description of Artificial Sequence: Synthetic oligonucleotide
uuauucaauuaaau

SEQ ID NO: 15651 - RNA, 14 nt, Artificial Sequence
  Description of Artificial Sequence: Synthetic oligonucleotide
uuuauucaauuaaa

SEQ ID NO: 15652 - RNA, 14 nt, Artificial Sequence
  Description of Artificial Sequence: Synthetic oligonucleotide
cuuuauucaauuaa

SEQ ID NO: 15653 - RNA, 14 nt, Artificial Sequence
  Description of Artificial Sequence: Synthetic oligonucleotide
ucuuuauucaauua

SEQ ID NO: 15654 - RNA, 14 nt, Artificial Sequence
  Description of Artificial Sequence: Synthetic oligonucleotide
aucuuuauucaauu

SEQ ID NO: 15655 - RNA, 14 nt, Artificial Sequence
  Description of Artificial Sequence: Synthetic oligonucleotide
uaucuuuauucaau

SEQ ID NO: 15656 - RNA, 14 nt, Artificial Sequence
  Description of Artificial Sequence: Synthetic oligonucleotide
guaucuuuauucaa

SEQ ID NO: 15657 - RNA, 14 nt, Artificial Sequence
  Description of Artificial Sequence: Synthetic oligonucleotide
uguaucuuuauuca

SEQ ID NO: 15658 - RNA, 14 nt, Artificial Sequence
  Description of Artificial Sequence: Synthetic oligonucleotide
uuguaucuuuauuc

SEQ ID NO: 15659 - RNA, 14 nt, Artificial Sequence
  Description of Artificial Sequence: Synthetic oligonucleotide
uuuguaucuuuauu

SEQ ID NO: 15660 - RNA, 14 nt, Artificial Sequence
  Description of Artificial Sequence: Synthetic oligonucleotide
auuuguaucuuuau

SEQ ID NO: 15661 - RNA, 14 nt, Artificial Sequence
  Description of Artificial Sequence: Synthetic oligonucleotide
uauuuguaucuuua

SEQ ID NO: 15662 - RNA, 14 nt, Artificial Sequence
  Description of Artificial Sequence: Synthetic oligonucleotide
guauuuguaucuuu

SEQ ID NO: 15663 - RNA, 14 nt, Artificial Sequence
  Description of Artificial Sequence: Synthetic oligonucleotide
aguauuuguaucuu

SEQ ID NO: 15664 - RNA, 14 nt, Artificial Sequence
  Description of Artificial Sequence: Synthetic oligonucleotide
aaguauuuguaucu

SEQ ID NO: 15665 - RNA, 14 nt, Artificial Sequence
  Description of Artificial Sequence: Synthetic oligonucleotide
aaaguauuuguauc

SEQ ID NO: 15666 - RNA, 14 nt, Artificial Sequence
  Description of Artificial Sequence: Synthetic oligonucleotide
caaaguauuuguau

SEQ ID NO: 15667 - RNA, 14 nt, Artificial Sequence
  Description of Artificial Sequence: Synthetic oligonucleotide
acaaaguauuugua

SEQ ID NO: 15668 - RNA, 14 nt, Artificial Sequence
  Description of Artificial Sequence: Synthetic oligonucleotide
aacaaaguauuugu

SEQ ID NO: 15669 - RNA, 14 nt, Artificial Sequence
  Description of Artificial Sequence: Synthetic oligonucleotide
aaacaaaguauuug

SEQ ID NO: 15670 - RNA, 14 nt, Artificial Sequence
  Description of Artificial Sequence: Synthetic oligonucleotide
caaacaaaguauuu

SEQ ID NO: 15671 - RNA, 14 nt, Artificial Sequence
  Description of Artificial Sequence: Synthetic oligonucleotide
ccaaacaaaguauu

SEQ ID NO: 15672 - RNA, 14 nt, Artificial Sequence
  Description of Artificial Sequence: Synthetic oligonucleotide
gccaaacaaaguau

SEQ ID NO: 15673 - RNA, 14 nt, Artificial Sequence
  Description of Artificial Sequence: Synthetic oligonucleotide
agccaaacaaagua

SEQ ID NO: 15674 - RNA, 14 nt, Artificial Sequence
  Description of Artificial Sequence: Synthetic oligonucleotide
cagccaaacaaagu

SEQ ID NO: 15675 - DNA, 14 bp, Artificial Sequence
  Description of Artificial Sequence: Synthetic oligonucleotide
ccagccaaacaaag

SEQ ID NO: 15676 - DNA, 14 bp, Artificial Sequence
  Description of Artificial Sequence: Synthetic oligonucleotide
gccagccaaacaaa

SEQ ID NO: 15677 - RNA, 14 nt, Artificial Sequence
  Description of Artificial Sequence: Synthetic oligonucleotide
ugccagccaaacaa

SEQ ID NO: 15678 - RNA, 14 nt, Artificial Sequence
  Description of Artificial Sequence: Synthetic oligonucleotide
augccagccaaaca

SEQ ID NO: 15679 - RNA, 14 nt, Artificial Sequence
  Description of Artificial Sequence: Synthetic oligonucleotide
uaugccagccaaac

SEQ ID NO: 15680 - RNA, 14 nt, Artificial Sequence
  Description of Artificial Sequence: Synthetic oligonucleotide
auaugccagccaaa

SEQ ID NO: 15681 - RNA, 14 nt, Artificial Sequence
  Description of Artificial Sequence: Synthetic oligonucleotide
uauaugccagccaa

SEQ ID NO: 15682 - RNA, 14 nt, Artificial Sequence
  Description of Artificial Sequence: Synthetic oligonucleotide
auauaugccagcca

SEQ ID NO: 15683 - RNA, 14 nt, Artificial Sequence
  Description of Artificial Sequence: Synthetic oligonucleotide
aauauaugccagcc

SEQ ID NO: 15684 - RNA, 14 nt, Artificial Sequence
  Description of Artificial Sequence: Synthetic oligonucleotide
uaauauaugccagc

SEQ ID NO: 15685 - RNA, 14 nt, Artificial Sequence
  Description of Artificial Sequence: Synthetic oligonucleotide
uuaauauaugccag

SEQ ID NO: 15686 - RNA, 14 nt, Artificial Sequence
  Description of Artificial Sequence: Synthetic oligonucleotide
uuuaauauaugcca

SEQ ID NO: 15687 - RNA, 14 nt, Artificial Sequence
  Description of Artificial Sequence: Synthetic oligonucleotide
auuuaauauaugcc

SEQ ID NO: 15688 - RNA, 14 nt, Artificial Sequence
  Description of Artificial Sequence: Synthetic oligonucleotide
aauuuaauauaugc

SEQ ID NO: 15689 - RNA, 14 nt, Artificial Sequence
  Description of Artificial Sequence: Synthetic oligonucleotide
uaauuuaauauaug

SEQ ID NO: 15690 - RNA, 14 nt, Artificial Sequence
  Description of Artificial Sequence: Synthetic oligonucleotide
auaauuuaauauau

SEQ ID NO: 15691 - RNA, 14 nt, Artificial Sequence
  Description of Artificial Sequence: Synthetic oligonucleotide
aauaauuuaauaua

SEQ ID NO: 15692 - RNA, 14 nt, Artificial Sequence
  Description of Artificial Sequence: Synthetic oligonucleotide
uaauaauuuaauau

SEQ ID NO: 15693 - RNA, 14 nt, Artificial Sequence
  Description of Artificial Sequence: Synthetic oligonucleotide
auaauaauuuaaua

SEQ ID NO: 15694 - RNA, 14 nt, Artificial Sequence
  Description of Artificial Sequence: Synthetic oligonucleotide
uauaauaauuuaau

SEQ ID NO: 15695 - RNA, 14 nt, Artificial Sequence
  Description of Artificial Sequence: Synthetic oligonucleotide
auauaauaauuuaa

SEQ ID NO: 15696 - RNA, 14 nt, Artificial Sequence
  Description of Artificial Sequence: Synthetic oligonucleotide
cauauaauaauuua

SEQ ID NO: 15697 - RNA, 14 nt, Artificial Sequence
  Description of Artificial Sequence: Synthetic oligonucleotide
ucauauaauaauuu

SEQ ID NO: 15698 - RNA, 14 nt, Artificial Sequence
  Description of Artificial Sequence: Synthetic oligonucleotide
uucauauaauaauu

SEQ ID NO: 15699 - RNA, 14 nt, Artificial Sequence
  Description of Artificial Sequence: Synthetic oligonucleotide
cuucauauaauaau

SEQ ID NO: 15700 - RNA, 14 nt, Artificial Sequence
  Description of Artificial Sequence: Synthetic oligonucleotide
ucuucauauaauaa

SEQ ID NO: 15701 - RNA, 14 nt, Artificial Sequence
  Description of Artificial Sequence: Synthetic oligonucleotide
uucuucauauaaua

SEQ ID NO: 15702 - RNA, 14 nt, Artificial Sequence
  Description of Artificial Sequence: Synthetic oligonucleotide
uuucuucauauaau

SEQ ID NO: 15703 - RNA, 14 nt, Artificial Sequence
  Description of Artificial Sequence: Synthetic oligonucleotide
uuuucuucauauaa

SEQ ID NO: 15704 - RNA, 14 nt, Artificial Sequence
  Description of Artificial Sequence: Synthetic oligonucleotide
auuuucuucauaua

SEQ ID NO: 15705 - RNA, 14 nt, Artificial Sequence
  Description of Artificial Sequence: Synthetic oligonucleotide
cauuuucuucauau

SEQ ID NO: 15706 - RNA, 14 nt, Artificial Sequence
  Description of Artificial Sequence: Synthetic oligonucleotide
ccauuuucuucaua

SEQ ID NO: 15707 - RNA, 14 nt, Artificial Sequence
  Description of Artificial Sequence: Synthetic oligonucleotide
accauuuucuucau

SEQ ID NO: 15708 - RNA, 14 nt, Artificial Sequence
  Description of Artificial Sequence: Synthetic oligonucleotide
aaccauuuucuuca

SEQ ID NO: 15709 - RNA, 14 nt, Artificial Sequence
  Description of Artificial Sequence: Synthetic oligonucleotide
caaccauuuucuuc

SEQ ID NO: 15710 - RNA, 14 nt, Artificial Sequence
  Description of Artificial Sequence: Synthetic oligonucleotide
ucaaccauuuucuu

SEQ ID NO: 15711 - RNA, 14 nt, Artificial Sequence
  Description of Artificial Sequence: Synthetic oligonucleotide
aucaaccauuuucu

SEQ ID NO: 15712 - RNA, 14 nt, Artificial Sequence
  Description of Artificial Sequence: Synthetic oligonucleotide
aaucaaccauuuuc

SEQ ID NO: 15713 - RNA, 14 nt, Artificial Sequence
  Description of Artificial Sequence: Synthetic oligonucleotide
gaaucaaccauuuu

SEQ ID NO: 15714 - RNA, 14 nt, Artificial Sequence
  Description of Artificial Sequence: Synthetic oligonucleotide
agaaucaaccauuu

SEQ ID NO: 15715 - RNA, 14 nt, Artificial Sequence
  Description of Artificial Sequence: Synthetic oligonucleotide
aagaaucaaccauu

SEQ ID NO: 15716 - RNA, 14 nt, Artificial Sequence
  Description of Artificial Sequence: Synthetic oligonucleotide
uaagaaucaaccau

SEQ ID NO: 15717 - RNA, 14 nt, Artificial Sequence
  Description of Artificial Sequence: Synthetic oligonucleotide
auaagaaucaacca

SEQ ID NO: 15718 - RNA, 14 nt, Artificial Sequence
  Description of Artificial Sequence: Synthetic oligonucleotide
aauaagaaucaacc

SEQ ID NO: 15719 - RNA, 14 nt, Artificial Sequence
  Description of Artificial Sequence: Synthetic oligonucleotide
aaauaagaaucaac

SEQ ID NO: 15720 - RNA, 14 nt, Artificial Sequence
  Description of Artificial Sequence: Synthetic oligonucleotide
gaaauaagaaucaa

SEQ ID NO: 15721 - RNA, 14 nt, Artificial Sequence
  Description of Artificial Sequence: Synthetic oligonucleotide
agaaauaagaauca

SEQ ID NO: 15722 - RNA, 14 nt, Artificial Sequence
  Description of Artificial Sequence: Synthetic oligonucleotide
aagaaauaagaauc

SEQ ID NO: 15723 - RNA, 14 nt, Artificial Sequence
  Description of Artificial Sequence: Synthetic oligonucleotide
aaagaaauaagaau

SEQ ID NO: 15724 - RNA, 14 nt, Artificial Sequence
  Description of Artificial Sequence: Synthetic oligonucleotide
aaaagaaauaagaa

SEQ ID NO: 15725 - RNA, 14 nt, Artificial Sequence
  Description of Artificial Sequence: Synthetic oligonucleotide
uaaaagaaauaaga

SEQ ID NO: 15726 - RNA, 14 nt, Artificial Sequence
  Description of Artificial Sequence: Synthetic oligonucleotide
cuaaaagaaauaag

SEQ ID NO: 15727 - RNA, 14 nt, Artificial Sequence
  Description of Artificial Sequence: Synthetic oligonucleotide
acuaaaagaaauaa

SEQ ID NO: 15728 - RNA, 14 nt, Artificial Sequence
  Description of Artificial Sequence: Synthetic oligonucleotide
aacuaaaagaaaua

SEQ ID NO: 15729 - RNA, 14 nt, Artificial Sequence
  Description of Artificial Sequence: Synthetic oligonucleotide
caacuaaaagaaau

SEQ ID NO: 15730 - RNA, 14 nt, Artificial Sequence
  Description of Artificial Sequence: Synthetic oligonucleotide
ucaacuaaaagaaa

SEQ ID NO: 15731 - RNA, 14 nt, Artificial Sequence
  Description of Artificial Sequence: Synthetic oligonucleotide
uucaacuaaaagaa

SEQ ID NO: 15732 - RNA, 14 nt, Artificial Sequence
  Description of Artificial Sequence: Synthetic oligonucleotide
uuucaacuaaaaga

SEQ ID NO: 15733 - RNA, 14 nt, Artificial Sequence
  Description of Artificial Sequence: Synthetic oligonucleotide
uuuucaacuaaaag

SEQ ID NO: 15734 - RNA, 14 nt, Artificial Sequence
  Description of Artificial Sequence: Synthetic oligonucleotide
uuuuucaacuaaaa

SEQ ID NO: 15735 - RNA, 14 nt, Artificial Sequence
  Description of Artificial Sequence: Synthetic oligonucleotide
guuuuucaacuaaa

SEQ ID NO: 15736 - RNA, 14 nt, Artificial Sequence
  Description of Artificial Sequence: Synthetic oligonucleotide
uguuuuucaacuaa

SEQ ID NO: 15737 - RNA, 14 nt, Artificial Sequence
  Description of Artificial Sequence: Synthetic oligonucleotide
guguuuuucaacua

SEQ ID NO: 15738 - RNA, 14 nt, Artificial Sequence
  Description of Artificial Sequence: Synthetic oligonucleotide
uguguuuuucaacu

SEQ ID NO: 15739 - RNA, 14 nt, Artificial Sequence
  Description of Artificial Sequence: Synthetic oligonucleotide
guguguuuuucaac

SEQ ID NO: 15740 - RNA, 14 nt, Artificial Sequence
  Description of Artificial Sequence: Synthetic oligonucleotide
uguguguuuuucaa

SEQ ID NO: 15741 - RNA, 14 nt, Artificial Sequence
  Description of Artificial Sequence: Synthetic oligonucleotide
uuguguguuuuuca

SEQ ID NO: 15742 - RNA, 14 nt, Artificial Sequence
  Description of Artificial Sequence: Synthetic oligonucleotide
uuuguguguuuuuc

SEQ ID NO: 15743 - RNA, 14 nt, Artificial Sequence
  Description of Artificial Sequence: Synthetic oligonucleotide
uuuuguguguuuuu

SEQ ID NO: 15744 - RNA, 14 nt, Artificial Sequence
  Description of Artificial Sequence: Synthetic oligonucleotide
uuuuuguguguuuu

SEQ ID NO: 15745 - RNA, 14 nt, Artificial Sequence
  Description of Artificial Sequence: Synthetic oligonucleotide
guuuuuguguguuu

SEQ ID NO: 15746 - RNA, 14 nt, Artificial Sequence
  Description of Artificial Sequence: Synthetic oligonucleotide
uguuuuuguguguu

SEQ ID NO: 15747 - RNA, 14 nt, Artificial Sequence
  Description of Artificial Sequence: Synthetic oligonucleotide
guguuuuugugugu

SEQ ID NO: 15748 - RNA, 14 nt, Artificial Sequence
  Description of Artificial Sequence: Synthetic oligonucleotide
aguguuuuugugug

SEQ ID NO: 15749 - RNA, 14 nt, Artificial Sequence
  Description of Artificial Sequence: Synthetic oligonucleotide
uaguguuuuugugu

SEQ ID NO: 15750 - RNA, 14 nt, Artificial Sequence
  Description of Artificial Sequence: Synthetic oligonucleotide
uuaguguuuuugug

SEQ ID NO: 15751 - RNA, 14 nt, Artificial Sequence
  Description of Artificial Sequence: Synthetic oligonucleotide
uuuaguguuuuugu

SEQ ID NO: 15752 - RNA, 14 nt, Artificial Sequence
  Description of Artificial Sequence: Synthetic oligonucleotide
guuuaguguuuuug

SEQ ID NO: 15753 - RNA, 14 nt, Artificial Sequence
  Description of Artificial Sequence: Synthetic oligonucleotide
uguuuaguguuuuu

SEQ ID NO: 15754 - RNA, 14 nt, Artificial Sequence
  Description of Artificial Sequence: Synthetic oligonucleotide
auguuuaguguuuu

SEQ ID NO: 15755 - RNA, 14 nt, Artificial Sequence
  Description of Artificial Sequence: Synthetic oligonucleotide
uauguuuaguguuu

SEQ ID NO: 15756 - RNA, 14 nt, Artificial Sequence
  Description of Artificial Sequence: Synthetic oligonucleotide
uuauguuuaguguu

SEQ ID NO: 15757 - RNA, 14 nt, Artificial Sequence
  Description of Artificial Sequence: Synthetic oligonucleotide
uuuauguuuagugu

SEQ ID NO: 15758 - RNA, 14 nt, Artificial Sequence
  Description of Artificial Sequence: Synthetic oligonucleotide
uuuuauguuuagug

SEQ ID NO: 15759 - RNA, 14 nt, Artificial Sequence
  Description of Artificial Sequence: Synthetic oligonucleotide
cuuuuauguuuagu

SEQ ID NO: 15760 - RNA, 14 nt, Artificial Sequence
  Description of Artificial Sequence: Synthetic oligonucleotide
gcuuuuauguuuag

SEQ ID NO: 15761 - RNA, 14 nt, Artificial Sequence
  Description of Artificial Sequence: Synthetic oligonucleotide
ugcuuuuauguuua

SEQ ID NO: 15762 - RNA, 14 nt, Artificial Sequence
  Description of Artificial Sequence: Synthetic oligonucleotide
gugcuuuuauguuu

SEQ ID NO: 15763 - RNA, 14 nt, Artificial Sequence
  Description of Artificial Sequence: Synthetic oligonucleotide
cgugcuuuuauguu

SEQ ID NO: 15764 - RNA, 14 nt, Artificial Sequence
  Description of Artificial Sequence: Synthetic oligonucleotide
acgugcuuuuaugu

SEQ ID NO: 15765 - RNA, 14 nt, Artificial Sequence
  Description of Artificial Sequence: Synthetic oligonucleotide
aacgugcuuuuaug

SEQ ID NO: 15766 - RNA, 14 nt, Artificial Sequence
  Description of Artificial Sequence: Synthetic oligonucleotide
aaacgugcuuuuau

SEQ ID NO: 15767 - RNA, 14 nt, Artificial Sequence
  Description of Artificial Sequence: Synthetic oligonucleotide
aaaacgugcuuuua

SEQ ID NO: 15768 - RNA, 14 nt, Artificial Sequence
  Description of Artificial Sequence: Synthetic oligonucleotide
caaaacgugcuuuu

SEQ ID NO: 15769 - RNA, 14 nt, Artificial Sequence
  Description of Artificial Sequence: Synthetic oligonucleotide
acaaaacgugcuuu

SEQ ID NO: 15770 - RNA, 14 nt, Artificial Sequence
  Description of Artificial Sequence: Synthetic oligonucleotide
cacaaaacgugcuu

SEQ ID NO: 15771 - RNA, 14 nt, Artificial Sequence
  Description of Artificial Sequence: Synthetic oligonucleotide
ccacaaaacgugcu

SEQ ID NO: 15772 - RNA, 14 nt, Artificial Sequence
  Description of Artificial Sequence: Synthetic oligonucleotide
accacaaaacgugc

SEQ ID NO: 15773 - RNA, 14 nt, Artificial Sequence
  Description of Artificial Sequence: Synthetic oligonucleotide
uaccacaaaacgug

SEQ ID NO: 15774 - RNA, 14 nt, Artificial Sequence
  Description of Artificial Sequence: Synthetic oligonucleotide
guaccacaaaacgu

SEQ ID NO: 15775 - RNA, 14 nt, Artificial Sequence
  Description of Artificial Sequence: Synthetic oligonucleotide
cguaccacaaaacg

SEQ ID NO: 15776 - RNA, 14 nt, Artificial Sequence
  Description of Artificial Sequence: Synthetic oligonucleotide
gcguaccacaaaac

SEQ ID NO: 15777 - RNA, 14 nt, Artificial Sequence
  Description of Artificial Sequence: Synthetic oligonucleotide
ggcguaccacaaaa

SEQ ID NO: 15778 - RNA, 14 nt, Artificial Sequence
  Description of Artificial Sequence: Synthetic oligonucleotide
aggcguaccacaaa

SEQ ID NO: 15779 - RNA, 14 nt, Artificial Sequence
  Description of Artificial Sequence: Synthetic oligonucleotide
aaggcguaccacaa

SEQ ID NO: 15780 - RNA, 14 nt, Artificial Sequence
  Description of Artificial Sequence: Synthetic oligonucleotide
caaggcguaccaca

SEQ ID NO: 15781 - RNA, 14 nt, Artificial Sequence
  Description of Artificial Sequence: Synthetic oligonucleotide
ccaaggcguaccac

SEQ ID NO: 15782 - RNA, 14 nt, Artificial Sequence
  Description of Artificial Sequence: Synthetic oligonucleotide
accaaggcguacca

SEQ ID NO: 15783 - RNA, 14 nt, Artificial Sequence
  Description of Artificial Sequence: Synthetic oligonucleotide
aaccaaggcguacc

SEQ ID NO: 15784 - RNA, 14 nt, Artificial Sequence
  Description of Artificial Sequence: Synthetic oligonucleotide
aaaccaaggcguac

SEQ ID NO: 15785 - RNA, 14 nt, Artificial Sequence
  Description of Artificial Sequence: Synthetic oligonucleotide
gaaaccaaggcgua

SEQ ID NO: 15786 - RNA, 14 nt, Artificial Sequence
  Description of Artificial Sequence: Synthetic oligonucleotide
agaaaccaaggcgu

SEQ ID NO: 15787 - RNA, 14 nt, Artificial Sequence
  Description of Artificial Sequence: Synthetic oligonucleotide
uagaaaccaaggcg

SEQ ID NO: 15788 - RNA, 14 nt, Artificial Sequence
  Description of Artificial Sequence: Synthetic oligonucleotide
cuagaaaccaaggc

SEQ ID NO: 15789 - RNA, 14 nt, Artificial Sequence
  Description of Artificial Sequence: Synthetic oligonucleotide
acuagaaaccaagg

SEQ ID NO: 15790 - RNA, 14 nt, Artificial Sequence
  Description of Artificial Sequence: Synthetic oligonucleotide
aacuagaaaccaag

SEQ ID NO: 15791 - RNA, 14 nt, Artificial Sequence
  Description of Artificial Sequence: Synthetic oligonucleotide
gaacuagaaaccaa

SEQ ID NO: 15792 - RNA, 14 nt, Artificial Sequence
  Description of Artificial Sequence: Synthetic oligonucleotide
agaacuagaaacca

SEQ ID NO: 15793 - RNA, 14 nt, Artificial Sequence
  Description of Artificial Sequence: Synthetic oligonucleotide
cagaacuagaaacc

SEQ ID NO: 15794 - RNA, 14 nt, Artificial Sequence
  Description of Artificial Sequence: Synthetic oligonucleotide
ccagaacuagaaac

SEQ ID NO: 15795 - RNA, 14 nt, Artificial Sequence
  Description of Artificial Sequence: Synthetic oligonucleotide
uccagaacuagaaa

SEQ ID NO: 15796 - RNA, 14 nt, Artificial Sequence
  Description of Artificial Sequence: Synthetic oligonucleotide
auccagaacuagaa

SEQ ID NO: 15797 - RNA, 14 nt, Artificial Sequence
  Description of Artificial Sequence: Synthetic oligonucleotide
uauccagaacuaga

SEQ ID NO: 15798 - RNA, 14 nt, Artificial Sequence
  Description of Artificial Sequence: Synthetic oligonucleotide
auauccagaacuag

SEQ ID NO: 15799 - RNA, 14 nt, Artificial Sequence
  Description of Artificial Sequence: Synthetic oligonucleotide
uauauccagaacua

SEQ ID NO: 15800 - RNA, 14 nt, Artificial Sequence
  Description of Artificial Sequence: Synthetic oligonucleotide
auauauccagaacu

SEQ ID NO: 15801 - RNA, 14 nt, Artificial Sequence
  Description of Artificial Sequence: Synthetic oligonucleotide
cauauauccagaac

SEQ ID NO: 15802 - RNA, 14 nt, Artificial Sequence
  Description of Artificial Sequence: Synthetic oligonucleotide
acauauauccagaa

SEQ ID NO: 15803 - RNA, 14 nt, Artificial Sequence
  Description of Artificial Sequence: Synthetic oligonucleotide
uacauauauccaga

SEQ ID NO: 15804 - RNA, 14 nt, Artificial Sequence
  Description of Artificial Sequence: Synthetic oligonucleotide
auacauauauccag

SEQ ID NO: 15805 - RNA, 14 nt, Artificial Sequence
  Description of Artificial Sequence: Synthetic oligonucleotide
aauacauauaucca

SEQ ID NO: 15806 - RNA, 14 nt, Artificial Sequence
  Description of Artificial Sequence: Synthetic oligonucleotide
uaauacauauaucc

SEQ ID NO: 15807 - RNA, 14 nt, Artificial Sequence
  Description of Artificial Sequence: Synthetic oligonucleotide
uuaauacauauauc

SEQ ID NO: 15808 - RNA, 14 nt, Artificial Sequence
  Description of Artificial Sequence: Synthetic oligonucleotide
auuaauacauauau

SEQ ID NO: 15809 - RNA, 14 nt, Artificial Sequence
  Description of Artificial Sequence: Synthetic oligonucleotide
gauuaauacauaua

SEQ ID NO: 15810 - RNA, 14 nt, Artificial Sequence
  Description of Artificial Sequence: Synthetic oligonucleotide
agauuaauacauau

SEQ ID NO: 15811 - RNA, 14 nt, Artificial Sequence
  Description of Artificial Sequence: Synthetic oligonucleotide
aagauuaauacaua

SEQ ID NO: 15812 - RNA, 14 nt, Artificial Sequence
  Description of Artificial Sequence: Synthetic oligonucleotide
uaagauuaauacau

SEQ ID NO: 15813 - RNA, 14 nt, Artificial Sequence
  Description of Artificial Sequence: Synthetic oligonucleotide
uuaagauuaauaca

SEQ ID NO: 15814 - RNA, 14 nt, Artificial Sequence
  Description of Artificial Sequence: Synthetic oligonucleotide
uuuaagauuaauac

SEQ ID NO: 15815 - RNA, 14 nt, Artificial Sequence
  Description of Artificial Sequence: Synthetic oligonucleotide
cuuuaagauuaaua

SEQ ID NO: 15816 - RNA, 14 nt, Artificial Sequence
  Description of Artificial Sequence: Synthetic oligonucleotide
ucuuuaagauuaau

SEQ ID NO: 15817 - RNA, 14 nt, Artificial Sequence
  Description of Artificial Sequence: Synthetic oligonucleotide
uucuuuaagauuaa

SEQ ID NO: 15818 - RNA, 14 nt, Artificial Sequence
  Description of Artificial Sequence: Synthetic oligonucleotide
auucuuuaagauua

SEQ ID NO: 15819 - RNA, 14 nt, Artificial Sequence
  Description of Artificial Sequence: Synthetic oligonucleotide
cauucuuuaagauu

SEQ ID NO: 15820 - RNA, 14 nt, Artificial Sequence
  Description of Artificial Sequence: Synthetic oligonucleotide
ucauucuuuaagau

SEQ ID NO: 15821 - RNA, 14 nt, Artificial Sequence
  Description of Artificial Sequence: Synthetic oligonucleotide
aucauucuuuaaga

SEQ ID NO: 15822 - RNA, 14 nt, Artificial Sequence
  Description of Artificial Sequence: Synthetic oligonucleotide
gaucauucuuuaag

SEQ ID NO: 15823 - RNA, 14 nt, Artificial Sequence
  Description of Artificial Sequence: Synthetic oligonucleotide
agaucauucuuuaa

SEQ ID NO: 15824 - RNA, 14 nt, Artificial Sequence
  Description of Artificial Sequence: Synthetic oligonucleotide
uagaucauucuuua

SEQ ID NO: 15825 - RNA, 14 nt, Artificial Sequence
  Description of Artificial Sequence: Synthetic oligonucleotide
uuagaucauucuuu

SEQ ID NO: 15826 - RNA, 14 nt, Artificial Sequence
  Description of Artificial Sequence: Synthetic oligonucleotide
uuuagaucauucuu

SEQ ID NO: 15827 - RNA, 14 nt, Artificial Sequence
  Description of Artificial Sequence: Synthetic oligonucleotide
cuuuagaucauucu

SEQ ID NO: 15828 - RNA, 14 nt, Artificial Sequence
  Description of Artificial Sequence: Synthetic oligonucleotide
acuuuagaucauuc

SEQ ID NO: 15829 - RNA, 14 nt, Artificial Sequence
  Description of Artificial Sequence: Synthetic oligonucleotide
gacuuuagaucauu

SEQ ID NO: 15830 - RNA, 14 nt, Artificial Sequence
  Description of Artificial Sequence: Synthetic oligonucleotide
ugacuuuagaucau

SEQ ID NO: 15831 - RNA, 14 nt, Artificial Sequence
  Description of Artificial Sequence: Synthetic oligonucleotide
gugacuuuagauca

SEQ ID NO: 15832 - RNA, 14 nt, Artificial Sequence
  Description of Artificial Sequence: Synthetic oligonucleotide
ugugacuuuagauc

SEQ ID NO: 15833 - RNA, 14 nt, Artificial Sequence
  Description of Artificial Sequence: Synthetic oligonucleotide
cugugacuuuagau

SEQ ID NO: 15834 - RNA, 14 nt, Artificial Sequence
  Description of Artificial Sequence: Synthetic oligonucleotide
gcugugacuuuaga

SEQ ID NO: 15835 - RNA, 14 nt, Artificial Sequence
  Description of Artificial Sequence: Synthetic oligonucleotide
agcugugacuuuag

SEQ ID NO: 15836 - RNA, 14 nt, Artificial Sequence
  Description of Artificial Sequence: Synthetic oligonucleotide
aagcugugacuuua

SEQ ID NO: 15837 - RNA, 14 nt, Artificial Sequence
  Description of Artificial Sequence: Synthetic oligonucleotide
caagcugugacuuu

SEQ ID NO: 15838 - RNA, 14 nt, Artificial Sequence
  Description of Artificial Sequence: Synthetic oligonucleotide
ccaagcugugacuu

SEQ ID NO: 15839 - RNA, 14 nt, Artificial Sequence
  Description of Artificial Sequence: Synthetic oligonucleotide
gccaagcugugacu

SEQ ID NO: 15840 - RNA, 14 nt, Artificial Sequence
  Description of Artificial Sequence: Synthetic oligonucleotide
ugccaagcugugac

SEQ ID NO: 15841 - RNA, 14 nt, Artificial Sequence
  Description of Artificial Sequence: Synthetic oligonucleotide
augccaagcuguga

SEQ ID NO: 15842 - RNA, 14 nt, Artificial Sequence
  Description of Artificial Sequence: Synthetic oligonucleotide
uaugccaagcugug

SEQ ID NO: 15843 - RNA, 14 nt, Artificial Sequence
  Description of Artificial Sequence: Synthetic oligonucleotide
auaugccaagcugu

SEQ ID NO: 15844 - RNA, 14 nt, Artificial Sequence
  Description of Artificial Sequence: Synthetic oligonucleotide
uauaugccaagcug

SEQ ID NO: 15845 - RNA, 14 nt, Artificial Sequence
  Description of Artificial Sequence: Synthetic oligonucleotide
cuauaugccaagcu

SEQ ID NO: 15846 - RNA, 14 nt, Artificial Sequence
  Description of Artificial Sequence: Synthetic oligonucleotide
ccuauaugccaagc

SEQ ID NO: 15847 - RNA, 14 nt, Artificial Sequence
  Description of Artificial Sequence: Synthetic oligonucleotide
uccuauaugccaag

SEQ ID NO: 15848 - RNA, 14 nt, Artificial Sequence
  Description of Artificial Sequence: Synthetic oligonucleotide
uuccuauaugccaa

SEQ ID NO: 15849 - RNA, 14 nt, Artificial Sequence
  Description of Artificial Sequence: Synthetic oligonucleotide
cuuccuauaugcca

SEQ ID NO: 15850 - RNA, 14 nt, Artificial Sequence
  Description of Artificial Sequence: Synthetic oligonucleotide
ucuuccuauaugcc

SEQ ID NO: 15851 - RNA, 14 nt, Artificial Sequence
  Description of Artificial Sequence: Synthetic oligonucleotide
aucuuccuauaugc

SEQ ID NO: 15852 - RNA, 14 nt, Artificial Sequence
  Description of Artificial Sequence: Synthetic oligonucleotide
uaucuuccuauaug

SEQ ID NO: 15853 - RNA, 14 nt, Artificial Sequence
  Description of Artificial Sequence: Synthetic oligonucleotide
guaucuuccuauau

SEQ ID NO: 15854 - RNA, 14 nt, Artificial Sequence
  Description of Artificial Sequence: Synthetic oligonucleotide
aguaucuuccuaua

SEQ ID NO: 15855 - RNA, 14 nt, Artificial Sequence
  Description of Artificial Sequence: Synthetic oligonucleotide
aaguaucuuccuau

SEQ ID NO: 15856 - RNA, 14 nt, Artificial Sequence
  Description of Artificial Sequence: Synthetic oligonucleotide
caaguaucuuccua

SEQ ID NO: 15857 - RNA, 14 nt, Artificial Sequence
  Description of Artificial Sequence: Synthetic oligonucleotide
ccaaguaucuuccu

SEQ ID NO: 15858 - RNA, 14 nt, Artificial Sequence
  Description of Artificial Sequence: Synthetic oligonucleotide
accaaguaucuucc

SEQ ID NO: 15859 - RNA, 14 nt, Artificial Sequence
  Description of Artificial Sequence: Synthetic oligonucleotide
aaccaaguaucuuc

SEQ ID NO: 15860 - RNA, 14 nt, Artificial Sequence
  Description of Artificial Sequence: Synthetic oligonucleotide
uaaccaaguaucuu

SEQ ID NO: 15861 - RNA, 14 nt, Artificial Sequence
  Description of Artificial Sequence: Synthetic oligonucleotide
cuaaccaaguaucu

SEQ ID NO: 15862 - RNA, 14 nt, Artificial Sequence
  Description of Artificial Sequence: Synthetic oligonucleotide
ucuaaccaaguauc

SEQ ID NO: 15863 - RNA, 14 nt, Artificial Sequence
  Description of Artificial Sequence: Synthetic oligonucleotide
uucuaaccaaguau

SEQ ID NO: 15864 - RNA, 14 nt, Artificial Sequence
  Description of Artificial Sequence: Synthetic oligonucleotide
auucuaaccaagua

SEQ ID NO: 15865 - RNA, 14 nt, Artificial Sequence
  Description of Artificial Sequence: Synthetic oligonucleotide
uauucuaaccaagu

SEQ ID NO: 15866 - RNA, 14 nt, Artificial Sequence
  Description of Artificial Sequence: Synthetic oligonucleotide
cuauucuaaccaag

SEQ ID NO: 15867 - RNA, 14 nt, Artificial Sequence
  Description of Artificial Sequence: Synthetic oligonucleotide
ccuauucuaaccaa

SEQ ID NO: 15868 - RNA, 14 nt, Artificial Sequence
  Description of Artificial Sequence: Synthetic oligonucleotide
uccuauucuaacca

SEQ ID NO: 15869 - RNA, 14 nt, Artificial Sequence
  Description of Artificial Sequence: Synthetic oligonucleotide
auccuauucuaacc

SEQ ID NO: 15870 - RNA, 14 nt, Artificial Sequence
  Description of Artificial Sequence: Synthetic oligonucleotide
cauccuauucuaac

SEQ ID NO: 15871 - RNA, 14 nt, Artificial Sequence
  Description of Artificial Sequence: Synthetic oligonucleotide
ccauccuauucuaa

SEQ ID NO: 15872 - RNA, 14 nt, Artificial Sequence
  Description of Artificial Sequence: Synthetic oligonucleotide
cccauccuauucua

SEQ ID NO: 15873 - RNA, 14 nt, Artificial Sequence
  Description of Artificial Sequence: Synthetic oligonucleotide
acccauccuauucu

SEQ ID NO: 15874 - RNA, 14 nt, Artificial Sequence
  Description of Artificial Sequence: Synthetic oligonucleotide
uacccauccuauuc

SEQ ID NO: 15875 - RNA, 14 nt, Artificial Sequence
  Description of Artificial Sequence: Synthetic oligonucleotide
auacccauccuauu

SEQ ID NO: 15876 - RNA, 14 nt, Artificial Sequence
  Description of Artificial Sequence: Synthetic oligonucleotide
gauacccauccuau

SEQ ID NO: 15877 - RNA, 14 nt, Artificial Sequence
  Description of Artificial Sequence: Synthetic oligonucleotide
agauacccauccua

SEQ ID NO: 15878 - RNA, 14 nt, Artificial Sequence
  Description of Artificial Sequence: Synthetic oligonucleotide
aagauacccauccu

SEQ ID NO: 15879 - RNA, 14 nt, Artificial Sequence
  Description of Artificial Sequence: Synthetic oligonucleotide
aaagauacccaucc

SEQ ID NO: 15880 - RNA, 14 nt, Artificial Sequence
  Description of Artificial Sequence: Synthetic oligonucleotide
aaaagauacccauc

SEQ ID NO: 15881 - RNA, 14 nt, Artificial Sequence
  Description of Artificial Sequence: Synthetic oligonucleotide
uaaaagauacccau

SEQ ID NO: 15882 - RNA, 14 nt, Artificial Sequence
  Description of Artificial Sequence: Synthetic oligonucleotide
uuaaaagauaccca

SEQ ID NO: 15883 - RNA, 14 nt, Artificial Sequence
  Description of Artificial Sequence: Synthetic oligonucleotide
cuuaaaagauaccc

SEQ ID NO: 15884 - RNA, 14 nt, Artificial Sequence
  Description of Artificial Sequence: Synthetic oligonucleotide
gcuuaaaagauacc

SEQ ID NO: 15885 - RNA, 14 nt, Artificial Sequence
  Description of Artificial Sequence: Synthetic oligonucleotide
ugcuuaaaagauac

SEQ ID NO: 15886 - RNA, 14 nt, Artificial Sequence
  Description of Artificial Sequence: Synthetic oligonucleotide
cugcuuaaaagaua

SEQ ID NO: 15887 - RNA, 14 nt, Artificial Sequence
  Description of Artificial Sequence: Synthetic oligonucleotide
ucugcuuaaaagau

SEQ ID NO: 15888 - RNA, 14 nt, Artificial Sequence
  Description of Artificial Sequence: Synthetic oligonucleotide
uucugcuuaaaaga

SEQ ID NO: 15889 - RNA, 14 nt, Artificial Sequence
  Description of Artificial Sequence: Synthetic oligonucleotide
guucugcuuaaaag

SEQ ID NO: 15890 - RNA, 14 nt, Artificial Sequence
  Description of Artificial Sequence: Synthetic oligonucleotide
aguucugcuuaaaa

SEQ ID NO: 15891 - RNA, 14 nt, Artificial Sequence
  Description of Artificial Sequence: Synthetic oligonucleotide
aaguucugcuuaaa

SEQ ID NO: 15892 - RNA, 14 nt, Artificial Sequence
  Description of Artificial Sequence: Synthetic oligonucleotide
aaaguucugcuuaa

SEQ ID NO: 15893 - RNA, 14 nt, Artificial Sequence
  Description of Artificial Sequence: Synthetic oligonucleotide
caaaguucugcuua

SEQ ID NO: 15894 - RNA, 14 nt, Artificial Sequence
  Description of Artificial Sequence: Synthetic oligonucleotide
acaaaguucugcuu

SEQ ID NO: 15895 - RNA, 14 nt, Artificial Sequence
  Description of Artificial Sequence: Synthetic oligonucleotide
uacaaaguucugcu

SEQ ID NO: 15896 - RNA, 14 nt, Artificial Sequence
  Description of Artificial Sequence: Synthetic oligonucleotide
uuacaaaguucugc

SEQ ID NO: 15897 - RNA, 14 nt, Artificial Sequence
  Description of Artificial Sequence: Synthetic oligonucleotide
cuuacaaaguucug

SEQ ID NO: 15898 - RNA, 14 nt, Artificial Sequence
  Description of Artificial Sequence: Synthetic oligonucleotide
acuuacaaaguucu

SEQ ID NO: 15899 - RNA, 14 nt, Artificial Sequence
  Description of Artificial Sequence: Synthetic oligonucleotide
uacuuacaaaguuc

SEQ ID NO: 15900 - RNA, 14 nt, Artificial Sequence
  Description of Artificial Sequence: Synthetic oligonucleotide
uuacuuacaaaguu

SEQ ID NO: 15901 - RNA, 14 nt, Artificial Sequence
  Description of Artificial Sequence: Synthetic oligonucleotide
cuuacuuacaaagu

SEQ ID NO: 15902 - RNA, 14 nt, Artificial Sequence
  Description of Artificial Sequence: Synthetic oligonucleotide
acuuacuuacaaag

SEQ ID NO: 15903 - RNA, 14 nt, Artificial Sequence
  Description of Artificial Sequence: Synthetic oligonucleotide
aacuuacuuacaaa

SEQ ID NO: 15904 - RNA, 14 nt, Artificial Sequence
  Description of Artificial Sequence: Synthetic oligonucleotide
aaacuuacuuacaa

SEQ ID NO: 15905 - RNA, 14 nt, Artificial Sequence
  Description of Artificial Sequence: Synthetic oligonucleotide
aaaacuuacuuaca

SEQ ID NO: 15906 - RNA, 14 nt, Artificial Sequence
  Description of Artificial Sequence: Synthetic oligonucleotide
uaaaacuuacuuac

SEQ ID NO: 15907 - RNA, 14 nt, Artificial Sequence
  Description of Artificial Sequence: Synthetic oligonucleotide
uuaaaacuuacuua

SEQ ID NO: 15908 - RNA, 14 nt, Artificial Sequence
  Description of Artificial Sequence: Synthetic oligonucleotide
cuuaaaacuuacuu

SEQ ID NO: 15909 - RNA, 14 nt, Artificial Sequence
  Description of Artificial Sequence: Synthetic oligonucleotide
acuuaaaacuuacu

SEQ ID NO: 15910 - RNA, 14 nt, Artificial Sequence
  Description of Artificial Sequence: Synthetic oligonucleotide
aacuuaaaacuuac

SEQ ID NO: 15911 - RNA, 14 nt, Artificial Sequence
  Description of Artificial Sequence: Synthetic oligonucleotide
gaacuuaaaacuua

SEQ ID NO: 15912 - RNA, 14 nt, Artificial Sequence
  Description of Artificial Sequence: Synthetic oligonucleotide
ggaacuuaaaacuu

SEQ ID NO: 15913 - RNA, 14 nt, Artificial Sequence
  Description of Artificial Sequence: Synthetic oligonucleotide
aggaacuuaaaacu

SEQ ID NO: 15914 - RNA, 14 nt, Artificial Sequence
  Description of Artificial Sequence: Synthetic oligonucleotide
uaggaacuuaaaac

SEQ ID NO: 15915 - RNA, 14 nt, Artificial Sequence
  Description of Artificial Sequence: Synthetic oligonucleotide
uuaggaacuuaaaa

SEQ ID NO: 15916 - RNA, 14 nt, Artificial Sequence
  Description of Artificial Sequence: Synthetic oligonucleotide
cuuaggaacuuaaa

SEQ ID NO: 15917 - RNA, 14 nt, Artificial Sequence
  Description of Artificial Sequence: Synthetic oligonucleotide
gcuuaggaacuuaa

SEQ ID NO: 15918 - RNA, 14 nt, Artificial Sequence
  Description of Artificial Sequence: Synthetic oligonucleotide
ugcuuaggaacuua

SEQ ID NO: 15919 - RNA, 14 nt, Artificial Sequence
  Description of Artificial Sequence: Synthetic oligonucleotide
uugcuuaggaacuu

SEQ ID NO: 15920 - RNA, 14 nt, Artificial Sequence
  Description of Artificial Sequence: Synthetic oligonucleotide
guugcuuaggaacu

SEQ ID NO: 15921 - RNA, 14 nt, Artificial Sequence
  Description of Artificial Sequence: Synthetic oligonucleotide
uguugcuuaggaac

SEQ ID NO: 15922 - RNA, 14 nt, Artificial Sequence
  Description of Artificial Sequence: Synthetic oligonucleotide
uuguugcuuaggaa

SEQ ID NO: 15923 - RNA, 14 nt, Artificial Sequence
  Description of Artificial Sequence: Synthetic oligonucleotide
cuuguugcuuagga

SEQ ID NO: 15924 - RNA, 14 nt, Artificial Sequence
  Description of Artificial Sequence: Synthetic oligonucleotide
acuuguugcuuagg

SEQ ID NO: 15925 - RNA, 14 nt, Artificial Sequence
  Description of Artificial Sequence: Synthetic oligonucleotide
uacuuguugcuuag

SEQ ID NO: 15926 - RNA, 14 nt, Artificial Sequence
  Description of Artificial Sequence: Synthetic oligonucleotide
auacuuguugcuua

SEQ ID NO: 15927 - RNA, 14 nt, Artificial Sequence
  Description of Artificial Sequence: Synthetic oligonucleotide
uauacuuguugcuu

SEQ ID NO: 15928 - RNA, 14 nt, Artificial Sequence
  Description of Artificial Sequence: Synthetic oligonucleotide
guauacuuguugcu

SEQ ID NO: 15929 - RNA, 14 nt, Artificial Sequence
  Description of Artificial Sequence: Synthetic oligonucleotide
uguauacuuguugc

SEQ ID NO: 15930 - RNA, 14 nt, Artificial Sequence
  Description of Artificial Sequence: Synthetic oligonucleotide
cuguauacuuguug

SEQ ID NO: 15931 - RNA, 14 nt, Artificial Sequence
  Description of Artificial Sequence: Synthetic oligonucleotide
acuguauacuuguu

SEQ ID NO: 15932 - RNA, 14 nt, Artificial Sequence
  Description of Artificial Sequence: Synthetic oligonucleotide
aacuguauacuugu

SEQ ID NO: 15933 - RNA, 14 nt, Artificial Sequence
  Description of Artificial Sequence: Synthetic oligonucleotide
aaacuguauacuug

SEQ ID NO: 15934 - RNA, 14 nt, Artificial Sequence
  Description of Artificial Sequence: Synthetic oligonucleotide
caaacuguauacuu

SEQ ID NO: 15935 - RNA, 14 nt, Artificial Sequence
  Description of Artificial Sequence: Synthetic oligonucleotide
acaaacuguauacu

SEQ ID NO: 15936 - RNA, 14 nt, Artificial Sequence
  Description of Artificial Sequence: Synthetic oligonucleotide
aacaaacuguauac

SEQ ID NO: 15937 - RNA, 14 nt, Artificial Sequence
  Description of Artificial Sequence: Synthetic oligonucleotide
uaacaaacuguaua

SEQ ID NO: 15938 - RNA, 14 nt, Artificial Sequence
  Description of Artificial Sequence: Synthetic oligonucleotide
uuaacaaacuguau

SEQ ID NO: 15939 - RNA, 14 nt, Artificial Sequence
  Description of Artificial Sequence: Synthetic oligonucleotide
cuuaacaaacugua

SEQ ID NO: 15940 - RNA, 14 nt, Artificial Sequence
  Description of Artificial Sequence: Synthetic oligonucleotide
ccuuaacaaacugu

SEQ ID NO: 15941 - RNA, 14 nt, Artificial Sequence
  Description of Artificial Sequence: Synthetic oligonucleotide
accuuaacaaacug

SEQ ID NO: 15942 - RNA, 14 nt, Artificial Sequence
  Description of Artificial Sequence: Synthetic oligonucleotide
aaccuuaacaaacu

SEQ ID NO: 15943 - RNA, 14 nt, Artificial Sequence
  Description of Artificial Sequence: Synthetic oligonucleotide
aaaccuuaacaaac

SEQ ID NO: 15944 - RNA, 14 nt, Artificial Sequence
  Description of Artificial Sequence: Synthetic oligonucleotide
uaaaccuuaacaaa

SEQ ID NO: 15945 - RNA, 14 nt, Artificial Sequence
  Description of Artificial Sequence: Synthetic oligonucleotide
auaaaccuuaacaa

SEQ ID NO: 15946 - RNA, 14 nt, Artificial Sequence
  Description of Artificial Sequence: Synthetic oligonucleotide
uauaaaccuuaaca

SEQ ID NO: 15947 - RNA, 14 nt, Artificial Sequence
  Description of Artificial Sequence: Synthetic oligonucleotide
auauaaaccuuaac

SEQ ID NO: 15948 - RNA, 14 nt, Artificial Sequence
  Description of Artificial Sequence: Synthetic oligonucleotide
aauauaaaccuuaa

SEQ ID NO: 15949 - RNA, 14 nt, Artificial Sequence
  Description of Artificial Sequence: Synthetic oligonucleotide
caauauaaaccuua

SEQ ID NO: 15950 - RNA, 14 nt, Artificial Sequence
  Description of Artificial Sequence: Synthetic oligonucleotide
ucaauauaaaccuu

SEQ ID NO: 15951 - RNA, 14 nt, Artificial Sequence
  Description of Artificial Sequence: Synthetic oligonucleotide
uucaauauaaaccu

SEQ ID NO: 15952 - RNA, 14 nt, Artificial Sequence
  Description of Artificial Sequence: Synthetic oligonucleotide
guucaauauaaacc

SEQ ID NO: 15953 - RNA, 14 nt, Artificial Sequence
  Description of Artificial Sequence: Synthetic oligonucleotide
uguucaauauaaac

SEQ ID NO: 15954 - RNA, 14 nt, Artificial Sequence
  Description of Artificial Sequence: Synthetic oligonucleotide
auguucaauauaaa

SEQ ID NO: 15955 - RNA, 14 nt, Artificial Sequence
  Description of Artificial Sequence: Synthetic oligonucleotide
aauguucaauauaa

SEQ ID NO: 15956 - RNA, 14 nt, Artificial Sequence
  Description of Artificial Sequence: Synthetic oligonucleotide
gaauguucaauaua

SEQ ID NO: 15957 - RNA, 14 nt, Artificial Sequence
  Description of Artificial Sequence: Synthetic oligonucleotide
agaauguucaauau

SEQ ID NO: 15958 - RNA, 14 nt, Artificial Sequence
  Description of Artificial Sequence: Synthetic oligonucleotide
uagaauguucaaua

SEQ ID NO: 15959 - RNA, 14 nt, Artificial Sequence
  Description of Artificial Sequence: Synthetic oligonucleotide
guagaauguucaau

SEQ ID NO: 15960 - RNA, 14 nt, Artificial Sequence
  Description of Artificial Sequence: Synthetic oligonucleotide
gguagaauguucaa

SEQ ID NO: 15961 - RNA, 14 nt, Artificial Sequence
  Description of Artificial Sequence: Synthetic oligonucleotide
agguagaauguuca

SEQ ID NO: 15962 - RNA, 14 nt, Artificial Sequence
  Description of Artificial Sequence: Synthetic oligonucleotide
aagguagaauguuc

SEQ ID NO: 15963 - RNA, 14 nt, Artificial Sequence
  Description of Artificial Sequence: Synthetic oligonucleotide
caagguagaauguu

SEQ ID NO: 15964 - RNA, 14 nt, Artificial Sequence
  Description of Artificial Sequence: Synthetic oligonucleotide
gcaagguagaaugu

SEQ ID NO: 15965 - RNA, 14 nt, Artificial Sequence
  Description of Artificial Sequence: Synthetic oligonucleotide
agcaagguagaaug

SEQ ID NO: 15966 - RNA, 14 nt, Artificial Sequence
  Description of Artificial Sequence: Synthetic oligonucleotide
aagcaagguagaau

SEQ ID NO: 15967 - RNA, 14 nt, Artificial Sequence
  Description of Artificial Sequence: Synthetic oligonucleotide
caagcaagguagaa

SEQ ID NO: 15968 - RNA, 14 nt, Artificial Sequence
  Description of Artificial Sequence: Synthetic oligonucleotide
ucaagcaagguaga

SEQ ID NO: 15969 - RNA, 14 nt, Artificial Sequence
  Description of Artificial Sequence: Synthetic oligonucleotide
cucaagcaagguag

SEQ ID NO: 15970 - RNA, 14 nt, Artificial Sequence
  Description of Artificial Sequence: Synthetic oligonucleotide
ccucaagcaaggua

SEQ ID NO: 15971 - RNA, 14 nt, Artificial Sequence
  Description of Artificial Sequence: Synthetic oligonucleotide
accucaagcaaggu

SEQ ID NO: 15972 - RNA, 14 nt, Artificial Sequence
  Description of Artificial Sequence: Synthetic oligonucleotide
aaccucaagcaagg

SEQ ID NO: 15973 - RNA, 14 nt, Artificial Sequence
  Description of Artificial Sequence: Synthetic oligonucleotide
aaaccucaagcaag

SEQ ID NO: 15974 - RNA, 14 nt, Artificial Sequence
  Description of Artificial Sequence: Synthetic oligonucleotide
aaaaccucaagcaa

SEQ ID NO: 15975 - RNA, 14 nt, Artificial Sequence
  Description of Artificial Sequence: Synthetic oligonucleotide
gaaaaccucaagca

SEQ ID NO: 15976 - RNA, 14 nt, Artificial Sequence
  Description of Artificial Sequence: Synthetic oligonucleotide
agaaaaccucaagc

SEQ ID NO: 15977 - RNA, 14 nt, Artificial Sequence
  Description of Artificial Sequence: Synthetic oligonucleotide
cagaaaaccucaag

SEQ ID NO: 15978 - RNA, 14 nt, Artificial Sequence
  Description of Artificial Sequence: Synthetic oligonucleotide
gcagaaaaccucaa

SEQ ID NO: 15979 - RNA, 14 nt, Artificial Sequence
  Description of Artificial Sequence: Synthetic oligonucleotide
agcagaaaaccuca

SEQ ID NO: 15980 - RNA, 14 nt, Artificial Sequence
  Description of Artificial Sequence: Synthetic oligonucleotide
aagcagaaaaccuc

SEQ ID NO: 15981 - RNA, 14 nt, Artificial Sequence
  Description of Artificial Sequence: Synthetic oligonucleotide
aaagcagaaaaccu

SEQ ID NO: 15982 - RNA, 14 nt, Artificial Sequence
  Description of Artificial Sequence: Synthetic oligonucleotide
uaaagcagaaaacc

SEQ ID NO: 15983 - RNA, 14 nt, Artificial Sequence
  Description of Artificial Sequence: Synthetic oligonucleotide
auaaagcagaaaac

SEQ ID NO: 15984 - RNA, 14 nt, Artificial Sequence
  Description of Artificial Sequence: Synthetic oligonucleotide
gauaaagcagaaaa

SEQ ID NO: 15985 - RNA, 14 nt, Artificial Sequence
  Description of Artificial Sequence: Synthetic oligonucleotide
ugauaaagcagaaa

SEQ ID NO: 15986 - RNA, 14 nt, Artificial Sequence
  Description of Artificial Sequence: Synthetic oligonucleotide
uugauaaagcagaa

SEQ ID NO: 15987 - RNA, 14 nt, Artificial Sequence
  Description of Artificial Sequence: Synthetic oligonucleotide
uuugauaaagcaga

SEQ ID NO: 15988 - RNA, 14 nt, Artificial Sequence
  Description of Artificial Sequence: Synthetic oligonucleotide
uuuugauaaagcag

SEQ ID NO: 15989 - RNA, 14 nt, Artificial Sequence
  Description of Artificial Sequence: Synthetic oligonucleotide
guuuugauaaagca

SEQ ID NO: 15990 - RNA, 14 nt, Artificial Sequence
  Description of Artificial Sequence: Synthetic oligonucleotide
aguuuugauaaagc

SEQ ID NO: 15991 - RNA, 14 nt, Artificial Sequence
  Description of Artificial Sequence: Synthetic oligonucleotide
uaguuuugauaaag

SEQ ID NO: 15992 - RNA, 14 nt, Artificial Sequence
  Description of Artificial Sequence: Synthetic oligonucleotide
auaguuuugauaaa

SEQ ID NO: 15993 - RNA, 14 nt, Artificial Sequence
  Description of Artificial Sequence: Synthetic oligonucleotide
aauaguuuugauaa

SEQ ID NO: 15994 - RNA, 14 nt, Artificial Sequence
  Description of Artificial Sequence: Synthetic oligonucleotide
gaauaguuuugaua

SEQ ID NO: 15995 - RNA, 14 nt, Artificial Sequence
  Description of Artificial Sequence: Synthetic oligonucleotide
ugaauaguuuugau

SEQ ID NO: 15996 - RNA, 14 nt, Artificial Sequence
  Description of Artificial Sequence: Synthetic oligonucleotide
augaauaguuuuga

SEQ ID NO: 15997 - RNA, 14 nt, Artificial Sequence
  Description of Artificial Sequence: Synthetic oligonucleotide
uaugaauaguuuug

SEQ ID NO: 15998 - RNA, 14 nt, Artificial Sequence
  Description of Artificial Sequence: Synthetic oligonucleotide
uuaugaauaguuuu

SEQ ID NO: 15999 - RNA, 14 nt, Artificial Sequence
  Description of Artificial Sequence: Synthetic oligonucleotide
auuaugaauaguuu

SEQ ID NO: 16000 - RNA, 14 nt, Artificial Sequence
  Description of Artificial Sequence: Synthetic oligonucleotide
uauuaugaauaguu

SEQ ID NO: 16001 - RNA, 14 nt, Artificial Sequence
  Description of Artificial Sequence: Synthetic oligonucleotide
cuauuaugaauagu

SEQ ID NO: 16002 - RNA, 14 nt, Artificial Sequence
  Description of Artificial Sequence: Synthetic oligonucleotide
ucuauuaugaauag

SEQ ID NO: 16003 - RNA, 14 nt, Artificial Sequence
  Description of Artificial Sequence: Synthetic oligonucleotide
uucuauuaugaaua

SEQ ID NO: 16004 - RNA, 14 nt, Artificial Sequence
  Description of Artificial Sequence: Synthetic oligonucleotide
guucuauuaugaau

SEQ ID NO: 16005 - RNA, 14 nt, Artificial Sequence
  Description of Artificial Sequence: Synthetic oligonucleotide
uguucuauuaugaa

SEQ ID NO: 16006 - RNA, 14 nt, Artificial Sequence
  Description of Artificial Sequence: Synthetic oligonucleotide
auguucuauuauga

SEQ ID NO: 16007 - RNA, 14 nt, Artificial Sequence
  Description of Artificial Sequence: Synthetic oligonucleotide
gauguucuauuaug

SEQ ID NO: 16008 - RNA, 14 nt, Artificial Sequence
  Description of Artificial Sequence: Synthetic oligonucleotide
agauguucuauuau

SEQ ID NO: 16009 - RNA, 14 nt, Artificial Sequence
  Description of Artificial Sequence: Synthetic oligonucleotide
uagauguucuauua

SEQ ID NO: 16010 - RNA, 14 nt, Artificial Sequence
  Description of Artificial Sequence: Synthetic oligonucleotide
guagauguucuauu

SEQ ID NO: 16011 - RNA, 14 nt, Artificial Sequence
  Description of Artificial Sequence: Synthetic oligonucleotide
gguagauguucuau

SEQ ID NO: 16012 - RNA, 14 nt, Artificial Sequence
  Description of Artificial Sequence: Synthetic oligonucleotide
agguagauguucua

SEQ ID NO: 16013 - RNA, 14 nt, Artificial Sequence
  Description of Artificial Sequence: Synthetic oligonucleotide
cagguagauguucu

SEQ ID NO: 16014 - RNA, 14 nt, Artificial Sequence
  Description of Artificial Sequence: Synthetic oligonucleotide
gcagguagauguuc

SEQ ID NO: 16015 - RNA, 14 nt, Artificial Sequence
  Description of Artificial Sequence: Synthetic oligonucleotide
ugcagguagauguu

SEQ ID NO: 16016 - RNA, 14 nt, Artificial Sequence
  Description of Artificial Sequence: Synthetic oligonucleotide
augcagguagaugu

SEQ ID NO: 16017 - RNA, 14 nt, Artificial Sequence
  Description of Artificial Sequence: Synthetic oligonucleotide
gaugcagguagaug

SEQ ID NO: 16018 - RNA, 14 nt, Artificial Sequence
  Description of Artificial Sequence: Synthetic oligonucleotide
ugaugcagguagau

SEQ ID NO: 16019 - RNA, 14 nt, Artificial Sequence
  Description of Artificial Sequence: Synthetic oligonucleotide
augaugcagguaga

SEQ ID NO: 16020 - RNA, 14 nt, Artificial Sequence
  Description of Artificial Sequence: Synthetic oligonucleotide
aaugaugcagguag

SEQ ID NO: 16021 - RNA, 14 nt, Artificial Sequence
  Description of Artificial Sequence: Synthetic oligonucleotide
uaaugaugcaggua

SEQ ID NO: 16022 - RNA, 14 nt, Artificial Sequence
  Description of Artificial Sequence: Synthetic oligonucleotide
guaaugaugcaggu

SEQ ID NO: 16023 - RNA, 14 nt, Artificial Sequence
  Description of Artificial Sequence: Synthetic oligonucleotide
aguaaugaugcagg

SEQ ID NO: 16024 - RNA, 14 nt, Artificial Sequence
  Description of Artificial Sequence: Synthetic oligonucleotide
uaguaaugaugcag

SEQ ID NO: 16025 - RNA, 14 nt, Artificial Sequence
  Description of Artificial Sequence: Synthetic oligonucleotide
auaguaaugaugca

SEQ ID NO: 16026 - RNA, 14 nt, Artificial Sequence
  Description of Artificial Sequence: Synthetic oligonucleotide
gauaguaaugaugc

SEQ ID NO: 16027 - RNA, 14 nt, Artificial Sequence
  Description of Artificial Sequence: Synthetic oligonucleotide
ugauaguaaugaug

SEQ ID NO: 16028 - RNA, 14 nt, Artificial Sequence
  Description of Artificial Sequence: Synthetic oligonucleotide
augauaguaaugau

SEQ ID NO: 16029 - RNA, 14 nt, Artificial Sequence
  Description of Artificial Sequence: Synthetic oligonucleotide
uaugauaguaauga

SEQ ID NO: 16030 - RNA, 14 nt, Artificial Sequence
  Description of Artificial Sequence: Synthetic oligonucleotide
uuaugauaguaaug

SEQ ID NO: 16031 - RNA, 14 nt, Artificial Sequence
  Description of Artificial Sequence: Synthetic oligonucleotide
auuaugauaguaau

SEQ ID NO: 16032 - RNA, 14 nt, Artificial Sequence
  Description of Artificial Sequence: Synthetic oligonucleotide
uauuaugauaguaa

SEQ ID NO: 16033 - RNA, 14 nt, Artificial Sequence
  Description of Artificial Sequence: Synthetic oligonucleotide
auauuaugauagua

SEQ ID NO: 16034 - RNA, 14 nt, Artificial Sequence
  Description of Artificial Sequence: Synthetic oligonucleotide
cauauuaugauagu

SEQ ID NO: 16035 - RNA, 14 nt, Artificial Sequence
  Description of Artificial Sequence: Synthetic oligonucleotide
ccauauuaugauag

SEQ ID NO: 16036 - RNA, 14 nt, Artificial Sequence
  Description of Artificial Sequence: Synthetic oligonucleotide
uccauauuaugaua

SEQ ID NO: 16037 - RNA, 14 nt, Artificial Sequence
  Description of Artificial Sequence: Synthetic oligonucleotide
auccauauuaugau

SEQ ID NO: 16038 - RNA, 14 nt, Artificial Sequence
  Description of Artificial Sequence: Synthetic oligonucleotide
aauccauauuauga

SEQ ID NO: 16039 - RNA, 14 nt, Artificial Sequence
  Description of Artificial Sequence: Synthetic oligonucleotide
uaauccauauuaug

SEQ ID NO: 16040 - RNA, 14 nt, Artificial Sequence
  Description of Artificial Sequence: Synthetic oligonucleotide
auaauccauauuau

SEQ ID NO: 16041 - RNA, 14 nt, Artificial Sequence
  Description of Artificial Sequence: Synthetic oligonucleotide
aauaauccauauua

SEQ ID NO: 16042 - RNA, 14 nt, Artificial Sequence
  Description of Artificial Sequence: Synthetic oligonucleotide
gaauaauccauauu

SEQ ID NO: 16043 - RNA, 14 nt, Artificial Sequence
  Description of Artificial Sequence: Synthetic oligonucleotide
ugaauaauccauau

SEQ ID NO: 16044 - RNA, 14 nt, Artificial Sequence
  Description of Artificial Sequence: Synthetic oligonucleotide
augaauaauccaua

SEQ ID NO: 16045 - RNA, 14 nt, Artificial Sequence
  Description of Artificial Sequence: Synthetic oligonucleotide
uaugaauaauccau

SEQ ID NO: 16046 - RNA, 14 nt, Artificial Sequence
  Description of Artificial Sequence: Synthetic oligonucleotide
uuaugaauaaucca

SEQ ID NO: 16047 - RNA, 14 nt, Artificial Sequence
  Description of Artificial Sequence: Synthetic oligonucleotide
uuuaugaauaaucc

SEQ ID NO: 16048 - RNA, 14 nt, Artificial Sequence
  Description of Artificial Sequence: Synthetic oligonucleotide
cuuuaugaauaauc

SEQ ID NO: 16049 - RNA, 14 nt, Artificial Sequence
  Description of Artificial Sequence: Synthetic oligonucleotide
gcuuuaugaauaau

SEQ ID NO: 16050 - RNA, 14 nt, Artificial Sequence
  Description of Artificial Sequence: Synthetic oligonucleotide
cgcuuuaugaauaa

SEQ ID NO: 16051 - RNA, 14 nt, Artificial Sequence
  Description of Artificial Sequence: Synthetic oligonucleotide
acgcuuuaugaaua

SEQ ID NO: 16052 - RNA, 14 nt, Artificial Sequence
  Description of Artificial Sequence: Synthetic oligonucleotide
uacgcuuuaugaau

SEQ ID NO: 16053 - RNA, 14 nt, Artificial Sequence
  Description of Artificial Sequence: Synthetic oligonucleotide
auacgcuuuaugaa

SEQ ID NO: 16054 - RNA, 14 nt, Artificial Sequence
  Description of Artificial Sequence: Synthetic oligonucleotide
cauacgcuuuauga

SEQ ID NO: 16055 - RNA, 14 nt, Artificial Sequence
  Description of Artificial Sequence: Synthetic oligonucleotide
acauacgcuuuaug

SEQ ID NO: 16056 - RNA, 14 nt, Artificial Sequence
  Description of Artificial Sequence: Synthetic oligonucleotide
uacauacgcuuuau

SEQ ID NO: 16057 - RNA, 14 nt, Artificial Sequence
  Description of Artificial Sequence: Synthetic oligonucleotide
guacauacgcuuua

SEQ ID NO: 16058 - RNA, 14 nt, Artificial Sequence
  Description of Artificial Sequence: Synthetic oligonucleotide
aguacauacgcuuu

SEQ ID NO: 16059 - RNA, 14 nt, Artificial Sequence
  Description of Artificial Sequence: Synthetic oligonucleotide
caguacauacgcuu

SEQ ID NO: 16060 - RNA, 14 nt, Artificial Sequence
  Description of Artificial Sequence: Synthetic oligonucleotide
acaguacauacgcu

SEQ ID NO: 16061 - RNA, 14 nt, Artificial Sequence
  Description of Artificial Sequence: Synthetic oligonucleotide
aacaguacauacgc

SEQ ID NO: 16062 - RNA, 14 nt, Artificial Sequence
  Description of Artificial Sequence: Synthetic oligonucleotide
gaacaguacauacg

SEQ ID NO: 16063 - RNA, 14 nt, Artificial Sequence
  Description of Artificial Sequence: Synthetic oligonucleotide
agaacaguacauac

SEQ ID NO: 16064 - RNA, 14 nt, Artificial Sequence
  Description of Artificial Sequence: Synthetic oligonucleotide
aagaacaguacaua

SEQ ID NO: 16065 - RNA, 14 nt, Artificial Sequence
  Description of Artificial Sequence: Synthetic oligonucleotide
gaagaacaguacau

SEQ ID NO: 16066 - RNA, 14 nt, Artificial Sequence
  Description of Artificial Sequence: Synthetic oligonucleotide
agaagaacaguaca

SEQ ID NO: 16067 - RNA, 14 nt, Artificial Sequence
  Description of Artificial Sequence: Synthetic oligonucleotide
cagaagaacaguac

SEQ ID NO: 16068 - RNA, 14 nt, Artificial Sequence
  Description of Artificial Sequence: Synthetic oligonucleotide
ucagaagaacagua

SEQ ID NO: 16069 - RNA, 14 nt, Artificial Sequence
  Description of Artificial Sequence: Synthetic oligonucleotide
cucagaagaacagu

SEQ ID NO: 16070 - RNA, 14 nt, Artificial Sequence
  Description of Artificial Sequence: Synthetic oligonucleotide
acucagaagaacag

SEQ ID NO: 16071 - RNA, 14 nt, Artificial Sequence
  Description of Artificial Sequence: Synthetic oligonucleotide
gacucagaagaaca

SEQ ID NO: 16072 - RNA, 14 nt, Artificial Sequence
  Description of Artificial Sequence: Synthetic oligonucleotide
agacucagaagaac

SEQ ID NO: 16073 - RNA, 14 nt, Artificial Sequence
  Description of Artificial Sequence: Synthetic oligonucleotide
uagacucagaagaa

SEQ ID NO: 16074 - RNA, 14 nt, Artificial Sequence
  Description of Artificial Sequence: Synthetic oligonucleotide
uuagacucagaaga

SEQ ID NO: 16075 - RNA, 14 nt, Artificial Sequence
  Description of Artificial Sequence: Synthetic oligonucleotide
guuagacucagaag

SEQ ID NO: 16076 - RNA, 14 nt, Artificial Sequence
  Description of Artificial Sequence: Synthetic oligonucleotide
uguuagacucagaa

SEQ ID NO: 16077 - RNA, 14 nt, Artificial Sequence
  Description of Artificial Sequence: Synthetic oligonucleotide
uuguuagacucaga

SEQ ID NO: 16078 - RNA, 14 nt, Artificial Sequence
  Description of Artificial Sequence: Synthetic oligonucleotide
uuuguuagacucag

SEQ ID NO: 16079 - RNA, 14 nt, Artificial Sequence
  Description of Artificial Sequence: Synthetic oligonucleotide
auuuguuagacuca

SEQ ID NO: 16080 - RNA, 14 nt, Artificial Sequence
  Description of Artificial Sequence: Synthetic oligonucleotide
uauuuguuagacuc

SEQ ID NO: 16081 - RNA, 14 nt, Artificial Sequence
  Description of Artificial Sequence: Synthetic oligonucleotide
guauuuguuagacu

SEQ ID NO: 16082 - RNA, 14 nt, Artificial Sequence
  Description of Artificial Sequence: Synthetic oligonucleotide
aguauuuguuagac

SEQ ID NO: 16083 - RNA, 14 nt, Artificial Sequence
  Description of Artificial Sequence: Synthetic oligonucleotide
caguauuuguuaga

SEQ ID NO: 16084 - RNA, 14 nt, Artificial Sequence
  Description of Artificial Sequence: Synthetic oligonucleotide
acaguauuuguuag

SEQ ID NO: 16085 - RNA, 14 nt, Artificial Sequence
  Description of Artificial Sequence: Synthetic oligonucleotide
cacaguauuuguua

SEQ ID NO: 16086 - RNA, 14 nt, Artificial Sequence
  Description of Artificial Sequence: Synthetic oligonucleotide
ucacaguauuuguu

SEQ ID NO: 16087 - RNA, 14 nt, Artificial Sequence
  Description of Artificial Sequence: Synthetic oligonucleotide
gucacaguauuugu

SEQ ID NO: 16088 - RNA, 14 nt, Artificial Sequence
  Description of Artificial Sequence: Synthetic oligonucleotide
agucacaguauuug

SEQ ID NO: 16089 - RNA, 14 nt, Artificial Sequence
  Description of Artificial Sequence: Synthetic oligonucleotide
cagucacaguauuu

SEQ ID NO: 16090 - RNA, 14 nt, Artificial Sequence
  Description of Artificial Sequence: Synthetic oligonucleotide
ucagucacaguauu

SEQ ID NO: 16091 - RNA, 14 nt, Artificial Sequence
  Description of Artificial Sequence: Synthetic oligonucleotide
uucagucacaguau

SEQ ID NO: 16092 - RNA, 14 nt, Artificial Sequence
  Description of Artificial Sequence: Synthetic oligonucleotide
uuucagucacagua

SEQ ID NO: 16093 - RNA, 14 nt, Artificial Sequence
  Description of Artificial Sequence: Synthetic oligonucleotide
auuucagucacagu

SEQ ID NO: 16094 - RNA, 14 nt, Artificial Sequence
  Description of Artificial Sequence: Synthetic oligonucleotide
cauuucagucacag

SEQ ID NO: 16095 - RNA, 14 nt, Artificial Sequence
  Description of Artificial Sequence: Synthetic oligonucleotide
gcauuucagucaca

SEQ ID NO: 16096 - RNA, 14 nt, Artificial Sequence
  Description of Artificial Sequence: Synthetic oligonucleotide
ugcauuucagucac

SEQ ID NO: 16097 - RNA, 14 nt, Artificial Sequence
  Description of Artificial Sequence: Synthetic oligonucleotide
augcauuucaguca

SEQ ID NO: 16098 - RNA, 14 nt, Artificial Sequence
  Description of Artificial Sequence: Synthetic oligonucleotide
caugcauuucaguc

SEQ ID NO: 16099 - RNA, 14 nt, Artificial Sequence
  Description of Artificial Sequence: Synthetic oligonucleotide
gcaugcauuucagu

SEQ ID NO: 16100 - RNA, 14 nt, Artificial Sequence
  Description of Artificial Sequence: Synthetic oligonucleotide
ugcaugcauuucag

SEQ ID NO: 16101 - RNA, 14 nt, Artificial Sequence
  Description of Artificial Sequence: Synthetic oligonucleotide
gugcaugcauuuca

SEQ ID NO: 16102 - RNA, 14 nt, Artificial Sequence
  Description of Artificial Sequence: Synthetic oligonucleotide
ggugcaugcauuuc

SEQ ID NO: 16103 - RNA, 14 nt, Artificial Sequence
  Description of Artificial Sequence: Synthetic oligonucleotide
aggugcaugcauuu

SEQ ID NO: 16104 - RNA, 14 nt, Artificial Sequence
  Description of Artificial Sequence: Synthetic oligonucleotide
aaggugcaugcauu

SEQ ID NO: 16105 - RNA, 14 nt, Artificial Sequence
  Description of Artificial Sequence: Synthetic oligonucleotide
caaggugcaugcau

SEQ ID NO: 16106 - RNA, 14 nt, Artificial Sequence
  Description of Artificial Sequence: Synthetic oligonucleotide
acaaggugcaugca

SEQ ID NO: 16107 - RNA, 14 nt, Artificial Sequence
  Description of Artificial Sequence: Synthetic oligonucleotide
aacaaggugcaugc

SEQ ID NO: 16108 - RNA, 14 nt, Artificial Sequence
  Description of Artificial Sequence: Synthetic oligonucleotide
caacaaggugcaug

SEQ ID NO: 16109 - RNA, 14 nt, Artificial Sequence
  Description of Artificial Sequence: Synthetic oligonucleotide
ucaacaaggugcau

SEQ ID NO: 16110 - RNA, 14 nt, Artificial Sequence
  Description of Artificial Sequence: Synthetic oligonucleotide
uucaacaaggugca

SEQ ID NO: 16111 - RNA, 14 nt, Artificial Sequence
  Description of Artificial Sequence: Synthetic oligonucleotide
cuucaacaaggugc

SEQ ID NO: 16112 - RNA, 14 nt, Artificial Sequence
  Description of Artificial Sequence: Synthetic oligonucleotide
ucuucaacaaggug

SEQ ID NO: 16113 - RNA, 14 nt, Artificial Sequence
  Description of Artificial Sequence: Synthetic oligonucleotide
cucuucaacaaggu

SEQ ID NO: 16114 - RNA, 14 nt, Artificial Sequence
  Description of Artificial Sequence: Synthetic oligonucleotide
ucucuucaacaagg

SEQ ID NO: 16115 - RNA, 14 nt, Artificial Sequence
  Description of Artificial Sequence: Synthetic oligonucleotide
uucucuucaacaag

SEQ ID NO: 16116 - RNA, 14 nt, Artificial Sequence
  Description of Artificial Sequence: Synthetic oligonucleotide
uuucucuucaacaa

SEQ ID NO: 16117 - RNA, 14 nt, Artificial Sequence
  Description of Artificial Sequence: Synthetic oligonucleotide
uuuucucuucaaca

SEQ ID NO: 16118 - RNA, 14 nt, Artificial Sequence
  Description of Artificial Sequence: Synthetic oligonucleotide
guuuucucuucaac

SEQ ID NO: 16119 - RNA, 14 nt, Artificial Sequence
  Description of Artificial Sequence: Synthetic oligonucleotide
uguuuucucuucaa

SEQ ID NO: 16120 - RNA, 14 nt, Artificial Sequence
  Description of Artificial Sequence: Synthetic oligonucleotide
auguuuucucuuca

SEQ ID NO: 16121 - RNA, 14 nt, Artificial Sequence
  Description of Artificial Sequence: Synthetic oligonucleotide
aauguuuucucuuc

SEQ ID NO: 16122 - RNA, 14 nt, Artificial Sequence
  Description of Artificial Sequence: Synthetic oligonucleotide
aaauguuuucucuu

SEQ ID NO: 16123 - RNA, 14 nt, Artificial Sequence
  Description of Artificial Sequence: Synthetic oligonucleotide
aaaauguuuucucu

SEQ ID NO: 16124 - RNA, 14 nt, Artificial Sequence
  Description of Artificial Sequence: Synthetic oligonucleotide
uaaaauguuuucuc

SEQ ID NO: 16125 - RNA, 14 nt, Artificial Sequence
  Description of Artificial Sequence: Synthetic oligonucleotide
auaaaauguuuucu

SEQ ID NO: 16126 - RNA, 14 nt, Artificial Sequence
  Description of Artificial Sequence: Synthetic oligonucleotide
aauaaaauguuuuc

SEQ ID NO: 16127 - RNA, 14 nt, Artificial Sequence
  Description of Artificial Sequence: Synthetic oligonucleotide
uaauaaaauguuuu

SEQ ID NO: 16128 - RNA, 14 nt, Artificial Sequence
  Description of Artificial Sequence: Synthetic oligonucleotide
uuaauaaaauguuu

SEQ ID NO: 16129 - RNA, 14 nt, Artificial Sequence
  Description of Artificial Sequence: Synthetic oligonucleotide
auuaauaaaauguu

SEQ ID NO: 16130 - RNA, 14 nt, Artificial Sequence
  Description of Artificial Sequence: Synthetic oligonucleotide
gauuaauaaaaugu

SEQ ID NO: 16131 - RNA, 14 nt, Artificial Sequence
  Description of Artificial Sequence: Synthetic oligonucleotide
agauuaauaaaaug

SEQ ID NO: 16132 - RNA, 14 nt, Artificial Sequence
  Description of Artificial Sequence: Synthetic oligonucleotide
gagauuaauaaaau

SEQ ID NO: 16133 - RNA, 14 nt, Artificial Sequence
  Description of Artificial Sequence: Synthetic oligonucleotide
ggagauuaauaaaa

SEQ ID NO: 16134 - RNA, 14 nt, Artificial Sequence
  Description of Artificial Sequence: Synthetic oligonucleotide
uggagauuaauaaa

SEQ ID NO: 16135 - RNA, 14 nt, Artificial Sequence
  Description of Artificial Sequence: Synthetic oligonucleotide
guggagauuaauaa

SEQ ID NO: 16136 - RNA, 14 nt, Artificial Sequence
  Description of Artificial Sequence: Synthetic oligonucleotide
aguggagauuaaua

SEQ ID NO: 16137 - RNA, 14 nt, Artificial Sequence
  Description of Artificial Sequence: Synthetic oligonucleotide
uaguggagauuaau

SEQ ID NO: 16138 - RNA, 14 nt, Artificial Sequence
  Description of Artificial Sequence: Synthetic oligonucleotide
auaguggagauuaa

SEQ ID NO: 16139 - RNA, 14 nt, Artificial Sequence
  Description of Artificial Sequence: Synthetic oligonucleotide
uauaguggagauua

SEQ ID NO: 16140 - RNA, 14 nt, Artificial Sequence
  Description of Artificial Sequence: Synthetic oligonucleotide
uuauaguggagauu

SEQ ID NO: 16141 - RNA, 14 nt, Artificial Sequence
  Description of Artificial Sequence: Synthetic oligonucleotide
auuauaguggagau

SEQ ID NO: 16142 - RNA, 14 nt, Artificial Sequence
  Description of Artificial Sequence: Synthetic oligonucleotide
cauuauaguggaga

SEQ ID NO: 16143 - RNA, 14 nt, Artificial Sequence
  Description of Artificial Sequence: Synthetic oligonucleotide
acauuauaguggag

SEQ ID NO: 16144 - RNA, 14 nt, Artificial Sequence
  Description of Artificial Sequence: Synthetic oligonucleotide
gacauuauagugga

SEQ ID NO: 16145 - RNA, 14 nt, Artificial Sequence
  Description of Artificial Sequence: Synthetic oligonucleotide
agacauuauagugg

SEQ ID NO: 16146 - RNA, 14 nt, Artificial Sequence
  Description of Artificial Sequence: Synthetic oligonucleotide
cagacauuauagug

SEQ ID NO: 16147 - RNA, 14 nt, Artificial Sequence
  Description of Artificial Sequence: Synthetic oligonucleotide
acagacauuauagu

SEQ ID NO: 16148 - RNA, 14 nt, Artificial Sequence
  Description of Artificial Sequence: Synthetic oligonucleotide
cacagacauuauag

SEQ ID NO: 16149 - RNA, 14 nt, Artificial Sequence
  Description of Artificial Sequence: Synthetic oligonucleotide
ucacagacauuaua

SEQ ID NO: 16150 - RNA, 14 nt, Artificial Sequence
  Description of Artificial Sequence: Synthetic oligonucleotide
uucacagacauuau

SEQ ID NO: 16151 - RNA, 14 nt, Artificial Sequence
  Description of Artificial Sequence: Synthetic oligonucleotide
uuucacagacauua

SEQ ID NO: 16152 - RNA, 14 nt, Artificial Sequence
  Description of Artificial Sequence: Synthetic oligonucleotide
auuucacagacauu

SEQ ID NO: 16153 - RNA, 14 nt, Artificial Sequence
  Description of Artificial Sequence: Synthetic oligonucleotide
cauuucacagacau

SEQ ID NO: 16154 - RNA, 14 nt, Artificial Sequence
  Description of Artificial Sequence: Synthetic oligonucleotide
acauuucacagaca

SEQ ID NO: 16155 - RNA, 14 nt, Artificial Sequence
  Description of Artificial Sequence: Synthetic oligonucleotide
cacauuucacagac

SEQ ID NO: 16156 - RNA, 14 nt, Artificial Sequence
  Description of Artificial Sequence: Synthetic oligonucleotide
gcacauuucacaga

SEQ ID NO: 16157 - RNA, 14 nt, Artificial Sequence
  Description of Artificial Sequence: Synthetic oligonucleotide
ugcacauuucacag

SEQ ID NO: 16158 - RNA, 14 nt, Artificial Sequence
  Description of Artificial Sequence: Synthetic oligonucleotide
cugcacauuucaca

SEQ ID NO: 16159 - RNA, 14 nt, Artificial Sequence
  Description of Artificial Sequence: Synthetic oligonucleotide
acugcacauuucac

SEQ ID NO: 16160 - RNA, 14 nt, Artificial Sequence
  Description of Artificial Sequence: Synthetic oligonucleotide
uacugcacauuuca

SEQ ID NO: 16161 - RNA, 14 nt, Artificial Sequence
  Description of Artificial Sequence: Synthetic oligonucleotide
auacugcacauuuc

SEQ ID NO: 16162 - RNA, 14 nt, Artificial Sequence
  Description of Artificial Sequence: Synthetic oligonucleotide
aauacugcacauuu

SEQ ID NO: 16163 - RNA, 14 nt, Artificial Sequence
  Description of Artificial Sequence: Synthetic oligonucleotide
gaauacugcacauu

SEQ ID NO: 16164 - RNA, 14 nt, Artificial Sequence
  Description of Artificial Sequence: Synthetic oligonucleotide
ggaauacugcacau

SEQ ID NO: 16165 - RNA, 14 nt, Artificial Sequence
  Description of Artificial Sequence: Synthetic oligonucleotide
uggaauacugcaca

SEQ ID NO: 16166 - RNA, 14 nt, Artificial Sequence
  Description of Artificial Sequence: Synthetic oligonucleotide
auggaauacugcac

SEQ ID NO: 16167 - RNA, 14 nt, Artificial Sequence
  Description of Artificial Sequence: Synthetic oligonucleotide
gauggaauacugca

SEQ ID NO: 16168 - RNA, 14 nt, Artificial Sequence
  Description of Artificial Sequence: Synthetic oligonucleotide
ggauggaauacugc

SEQ ID NO: 16169 - RNA, 14 nt, Artificial Sequence
  Description of Artificial Sequence: Synthetic oligonucleotide
aggauggaauacug

SEQ ID NO: 16170 - RNA, 14 nt, Artificial Sequence
  Description of Artificial Sequence: Synthetic oligonucleotide
aaggauggaauacu

SEQ ID NO: 16171 - RNA, 14 nt, Artificial Sequence
  Description of Artificial Sequence: Synthetic oligonucleotide
uaaggauggaauac

SEQ ID NO: 16172 - RNA, 14 nt, Artificial Sequence
  Description of Artificial Sequence: Synthetic oligonucleotide
cuaaggauggaaua

SEQ ID NO: 16173 - RNA, 14 nt, Artificial Sequence
  Description of Artificial Sequence: Synthetic oligonucleotide
ucuaaggauggaau

SEQ ID NO: 16174 - RNA, 14 nt, Artificial Sequence
  Description of Artificial Sequence: Synthetic oligonucleotide
cucuaaggauggaa

SEQ ID NO: 16175 - RNA, 14 nt, Artificial Sequence
  Description of Artificial Sequence: Synthetic oligonucleotide
ucucuaaggaugga

SEQ ID NO: 16176 - RNA, 14 nt, Artificial Sequence
  Description of Artificial Sequence: Synthetic oligonucleotide
cucucuaaggaugg

SEQ ID NO: 16177 - RNA, 14 nt, Artificial Sequence
  Description of Artificial Sequence: Synthetic oligonucleotide
acucucuaaggaug

SEQ ID NO: 16178 - RNA, 14 nt, Artificial Sequence
  Description of Artificial Sequence: Synthetic oligonucleotide
aacucucuaaggau

SEQ ID NO: 16179 - RNA, 14 nt, Artificial Sequence
  Description of Artificial Sequence: Synthetic oligonucleotide
aaacucucuaagga

SEQ ID NO: 16180 - RNA, 14 nt, Artificial Sequence
  Description of Artificial Sequence: Synthetic oligonucleotide
uaaacucucuaagg

SEQ ID NO: 16181 - RNA, 14 nt, Artificial Sequence
  Description of Artificial Sequence: Synthetic oligonucleotide
auaaacucucuaag

SEQ ID NO: 16182 - RNA, 14 nt, Artificial Sequence
  Description of Artificial Sequence: Synthetic oligonucleotide
gauaaacucucuaa

SEQ ID NO: 16183 - RNA, 14 nt, Artificial Sequence
  Description of Artificial Sequence: Synthetic oligonucleotide
agauaaacucucua

SEQ ID NO: 16184 - RNA, 14 nt, Artificial Sequence
  Description of Artificial Sequence: Synthetic oligonucleotide
cagauaaacucucu

SEQ ID NO: 16185 - RNA, 14 nt, Artificial Sequence
  Description of Artificial Sequence: Synthetic oligonucleotide
ccagauaaacucuc

SEQ ID NO: 16186 - RNA, 14 nt, Artificial Sequence
  Description of Artificial Sequence: Synthetic oligonucleotide
accagauaaacucu

SEQ ID NO: 16187 - RNA, 14 nt, Artificial Sequence
  Description of Artificial Sequence: Synthetic oligonucleotide
aaccagauaaacuc

SEQ ID NO: 16188 - RNA, 14 nt, Artificial Sequence
  Description of Artificial Sequence: Synthetic oligonucleotide
gaaccagauaaacu

SEQ ID NO: 16189 - RNA, 14 nt, Artificial Sequence
  Description of Artificial Sequence: Synthetic oligonucleotide
ugaaccagauaaac

SEQ ID NO: 16190 - RNA, 14 nt, Artificial Sequence
  Description of Artificial Sequence: Synthetic oligonucleotide
augaaccagauaaa

SEQ ID NO: 16191 - RNA, 14 nt, Artificial Sequence
  Description of Artificial Sequence: Synthetic oligonucleotide
gaugaaccagauaa

SEQ ID NO: 16192 - RNA, 14 nt, Artificial Sequence
  Description of Artificial Sequence: Synthetic oligonucleotide
ugaugaaccagaua

SEQ ID NO: 16193 - RNA, 14 nt, Artificial Sequence
  Description of Artificial Sequence: Synthetic oligonucleotide
cugaugaaccagau

SEQ ID NO: 16194 - RNA, 14 nt, Artificial Sequence
  Description of Artificial Sequence: Synthetic oligonucleotide
gcugaugaaccaga

SEQ ID NO: 16195 - RNA, 14 nt, Artificial Sequence
  Description of Artificial Sequence: Synthetic oligonucleotide
ugcugaugaaccag

SEQ ID NO: 16196 - RNA, 14 nt, Artificial Sequence
  Description of Artificial Sequence: Synthetic oligonucleotide
augcugaugaacca

SEQ ID NO: 16197 - RNA, 14 nt, Artificial Sequence
  Description of Artificial Sequence: Synthetic oligonucleotide
gaugcugaugaacc

SEQ ID NO: 16198 - RNA, 14 nt, Artificial Sequence
  Description of Artificial Sequence: Synthetic oligonucleotide
agaugcugaugaac

SEQ ID NO: 16199 - RNA, 14 nt, Artificial Sequence
  Description of Artificial Sequence: Synthetic oligonucleotide
cagaugcugaugaa

SEQ ID NO: 16200 - RNA, 14 nt, Artificial Sequence
  Description of Artificial Sequence: Synthetic oligonucleotide
gcagaugcugauga

SEQ ID NO: 16201 - RNA, 14 nt, Artificial Sequence
  Description of Artificial Sequence: Synthetic oligonucleotide
ugcagaugcugaug

SEQ ID NO: 16202 - RNA, 14 nt, Artificial Sequence
  Description of Artificial Sequence: Synthetic oligonucleotide
augcagaugcugau

SEQ ID NO: 16203 - RNA, 14 nt, Artificial Sequence
  Description of Artificial Sequence: Synthetic oligonucleotide
caugcagaugcuga

SEQ ID NO: 16204 - RNA, 14 nt, Artificial Sequence
  Description of Artificial Sequence: Synthetic oligonucleotide
acaugcagaugcug

SEQ ID NO: 16205 - RNA, 14 nt, Artificial Sequence
  Description of Artificial Sequence: Synthetic oligonucleotide
uacaugcagaugcu

SEQ ID NO: 16206 - RNA, 14 nt, Artificial Sequence
  Description of Artificial Sequence: Synthetic oligonucleotide
auacaugcagaugc

SEQ ID NO: 16207 - RNA, 14 nt, Artificial Sequence
  Description of Artificial Sequence: Synthetic oligonucleotide
gauacaugcagaug

SEQ ID NO: 16208 - RNA, 14 nt, Artificial Sequence
  Description of Artificial Sequence: Synthetic oligonucleotide
ggauacaugcagau

SEQ ID NO: 16209 - RNA, 14 nt, Artificial Sequence
  Description of Artificial Sequence: Synthetic oligonucleotide
aggauacaugcaga

SEQ ID NO: 16210 - RNA, 14 nt, Artificial Sequence
  Description of Artificial Sequence: Synthetic oligonucleotide
gaggauacaugcag

SEQ ID NO: 16211 - RNA, 14 nt, Artificial Sequence
  Description of Artificial Sequence: Synthetic oligonucleotide
agaggauacaugca

SEQ ID NO: 16212 - RNA, 14 nt, Artificial Sequence
  Description of Artificial Sequence: Synthetic oligonucleotide
cagaggauacaugc

SEQ ID NO: 16213 - RNA, 14 nt, Artificial Sequence
  Description of Artificial Sequence: Synthetic oligonucleotide
ucagaggauacaug

SEQ ID NO: 16214 - RNA, 14 nt, Artificial Sequence
  Description of Artificial Sequence: Synthetic oligonucleotide
uucagaggauacau

SEQ ID NO: 16215 - RNA, 14 nt, Artificial Sequence
  Description of Artificial Sequence: Synthetic oligonucleotide
auucagaggauaca

SEQ ID NO: 16216 - RNA, 14 nt, Artificial Sequence
  Description of Artificial Sequence: Synthetic oligonucleotide
uauucagaggauac

SEQ ID NO: 16217 - RNA, 14 nt, Artificial Sequence
  Description of Artificial Sequence: Synthetic oligonucleotide
uuauucagaggaua

SEQ ID NO: 16218 - RNA, 14 nt, Artificial Sequence
  Description of Artificial Sequence: Synthetic oligonucleotide
auuauucagaggau

SEQ ID NO: 16219 - RNA, 14 nt, Artificial Sequence
  Description of Artificial Sequence: Synthetic oligonucleotide
cauuauucagagga

SEQ ID NO: 16220 - RNA, 14 nt, Artificial Sequence
  Description of Artificial Sequence: Synthetic oligonucleotide
ucauuauucagagg

SEQ ID NO: 16221 - RNA, 14 nt, Artificial Sequence
  Description of Artificial Sequence: Synthetic oligonucleotide
uucauuauucagag

SEQ ID NO: 16222 - RNA, 14 nt, Artificial Sequence
  Description of Artificial Sequence: Synthetic oligonucleotide
cuucauuauucaga

SEQ ID NO: 16223 - RNA, 14 nt, Artificial Sequence
  Description of Artificial Sequence: Synthetic oligonucleotide
gcuucauuauucag

SEQ ID NO: 16224 - RNA, 14 nt, Artificial Sequence
  Description of Artificial Sequence: Synthetic oligonucleotide
ugcuucauuauuca

SEQ ID NO: 16225 - RNA, 14 nt, Artificial Sequence
  Description of Artificial Sequence: Synthetic oligonucleotide
uugcuucauuauuc

SEQ ID NO: 16226 - RNA, 14 nt, Artificial Sequence
  Description of Artificial Sequence: Synthetic oligonucleotide
guugcuucauuauu

SEQ ID NO: 16227 - RNA, 14 nt, Artificial Sequence
  Description of Artificial Sequence: Synthetic oligonucleotide
uguugcuucauuau

SEQ ID NO: 16228 - RNA, 14 nt, Artificial Sequence
  Description of Artificial Sequence: Synthetic oligonucleotide
auguugcuucauua

SEQ ID NO: 16229 - RNA, 14 nt, Artificial Sequence
  Description of Artificial Sequence: Synthetic oligonucleotide
aauguugcuucauu

SEQ ID NO: 16230 - RNA, 14 nt, Artificial Sequence
  Description of Artificial Sequence: Synthetic oligonucleotide
aaauguugcuucau

SEQ ID NO: 16231 - RNA, 14 nt, Artificial Sequence
  Description of Artificial Sequence: Synthetic oligonucleotide
gaaauguugcuuca

SEQ ID NO: 16232 - RNA, 14 nt, Artificial Sequence
  Description of Artificial Sequence: Synthetic oligonucleotide
ugaaauguugcuuc

SEQ ID NO: 16233 - RNA, 14 nt, Artificial Sequence
  Description of Artificial Sequence: Synthetic oligonucleotide
cugaaauguugcuu

SEQ ID NO: 16234 - RNA, 14 nt, Artificial Sequence
  Description of Artificial Sequence: Synthetic oligonucleotide
gcugaaauguugcu

SEQ ID NO: 16235 - RNA, 14 nt, Artificial Sequence
  Description of Artificial Sequence: Synthetic oligonucleotide
ugcugaaauguugc

SEQ ID NO: 16236 - RNA, 14 nt, Artificial Sequence
  Description of Artificial Sequence: Synthetic oligonucleotide
uugcugaaauguug

SEQ ID NO: 16237 - RNA, 14 nt, Artificial Sequence
  Description of Artificial Sequence: Synthetic oligonucleotide
auugcugaaauguu

SEQ ID NO: 16238 - RNA, 14 nt, Artificial Sequence
  Description of Artificial Sequence: Synthetic oligonucleotide
aauugcugaaaugu

SEQ ID NO: 16239 - RNA, 14 nt, Artificial Sequence
  Description of Artificial Sequence: Synthetic oligonucleotide
gaauugcugaaaug

SEQ ID NO: 16240 - RNA, 14 nt, Artificial Sequence
  Description of Artificial Sequence: Synthetic oligonucleotide
agaauugcugaaau

SEQ ID NO: 16241 - RNA, 14 nt, Artificial Sequence
  Description of Artificial Sequence: Synthetic oligonucleotide
cagaauugcugaaa

SEQ ID NO: 16242 - RNA, 14 nt, Artificial Sequence
  Description of Artificial Sequence: Synthetic oligonucleotide
acagaauugcugaa

SEQ ID NO: 16243 - RNA, 14 nt, Artificial Sequence
  Description of Artificial Sequence: Synthetic oligonucleotide
aacagaauugcuga

SEQ ID NO: 16244 - RNA, 14 nt, Artificial Sequence
  Description of Artificial Sequence: Synthetic oligonucleotide
uaacagaauugcug

SEQ ID NO: 16245 - RNA, 14 nt, Artificial Sequence
  Description of Artificial Sequence: Synthetic oligonucleotide
uuaacagaauugcu

SEQ ID NO: 16246 - RNA, 14 nt, Artificial Sequence
  Description of Artificial Sequence: Synthetic oligonucleotide
guuaacagaauugc

SEQ ID NO: 16247 - RNA, 14 nt, Artificial Sequence
  Description of Artificial Sequence: Synthetic oligonucleotide
gguuaacagaauug

SEQ ID NO: 16248 - RNA, 14 nt, Artificial Sequence
  Description of Artificial Sequence: Synthetic oligonucleotide
ugguuaacagaauu

SEQ ID NO: 16249 - RNA, 14 nt, Artificial Sequence
  Description of Artificial Sequence: Synthetic oligonucleotide
gugguuaacagaau

SEQ ID NO: 16250 - RNA, 14 nt, Artificial Sequence
  Description of Artificial Sequence: Synthetic oligonucleotide
ugugguuaacagaa

SEQ ID NO: 16251 - RNA, 14 nt, Artificial Sequence
  Description of Artificial Sequence: Synthetic oligonucleotide
gugugguuaacaga

SEQ ID NO: 16252 - RNA, 14 nt, Artificial Sequence
  Description of Artificial Sequence: Synthetic oligonucleotide
ggugugguuaacag

SEQ ID NO: 16253 - RNA, 14 nt, Artificial Sequence
  Description of Artificial Sequence: Synthetic oligonucleotide
uggugugguuaaca

SEQ ID NO: 16254 - RNA, 14 nt, Artificial Sequence
  Description of Artificial Sequence: Synthetic oligonucleotide
auggugugguuaac

SEQ ID NO: 16255 - RNA, 14 nt, Artificial Sequence
  Description of Artificial Sequence: Synthetic oligonucleotide
aauggugugguuaa

SEQ ID NO: 16256 - RNA, 14 nt, Artificial Sequence
  Description of Artificial Sequence: Synthetic oligonucleotide
uaauggugugguua

SEQ ID NO: 16257 - RNA, 14 nt, Artificial Sequence
  Description of Artificial Sequence: Synthetic oligonucleotide
cuaauggugugguu

SEQ ID NO: 16258 - RNA, 14 nt, Artificial Sequence
  Description of Artificial Sequence: Synthetic oligonucleotide
ucuaaugguguggu

SEQ ID NO: 16259 - RNA, 14 nt, Artificial Sequence
  Description of Artificial Sequence: Synthetic oligonucleotide
cucuaauggugugg

SEQ ID NO: 16260 - RNA, 14 nt, Artificial Sequence
  Description of Artificial Sequence: Synthetic oligonucleotide
ucucuaauggugug

SEQ ID NO: 16261 - RNA, 14 nt, Artificial Sequence
  Description of Artificial Sequence: Synthetic oligonucleotide
gucucuaauggugu

SEQ ID NO: 16262 - RNA, 14 nt, Artificial Sequence
  Description of Artificial Sequence: Synthetic oligonucleotide
ugucucuaauggug

SEQ ID NO: 16263 - RNA, 14 nt, Artificial Sequence
  Description of Artificial Sequence: Synthetic oligonucleotide
augucucuaauggu

SEQ ID NO: 16264 - RNA, 14 nt, Artificial Sequence
  Description of Artificial Sequence: Synthetic oligonucleotide
aaugucucuaaugg

SEQ ID NO: 16265 - RNA, 14 nt, Artificial Sequence
  Description of Artificial Sequence: Synthetic oligonucleotide
aaaugucucuaaug

SEQ ID NO: 16266 - RNA, 14 nt, Artificial Sequence
  Description of Artificial Sequence: Synthetic oligonucleotide
aaaaugucucuaau

SEQ ID NO: 16267 - RNA, 14 nt, Artificial Sequence
  Description of Artificial Sequence: Synthetic oligonucleotide
aaaaaugucucuaa

SEQ ID NO: 16268 - RNA, 14 nt, Artificial Sequence
  Description of Artificial Sequence: Synthetic oligonucleotide
uaaaaaugucucua

SEQ ID NO: 16269 - RNA, 14 nt, Artificial Sequence
  Description of Artificial Sequence: Synthetic oligonucleotide
cuaaaaaugucucu

SEQ ID NO: 16270 - RNA, 14 nt, Artificial Sequence
  Description of Artificial Sequence: Synthetic oligonucleotide
ucuaaaaaugucuc

SEQ ID NO: 16271 - RNA, 14 nt, Artificial Sequence
  Description of Artificial Sequence: Synthetic oligonucleotide
uucuaaaaaugucu

SEQ ID NO: 16272 - RNA, 14 nt, Artificial Sequence
  Description of Artificial Sequence: Synthetic oligonucleotide
cuucuaaaaauguc

SEQ ID NO: 16273 - RNA, 14 nt, Artificial Sequence
  Description of Artificial Sequence: Synthetic oligonucleotide
acuucuaaaaaugu

SEQ ID NO: 16274 - RNA, 14 nt, Artificial Sequence
  Description of Artificial Sequence: Synthetic oligonucleotide
cacuucuaaaaaug

SEQ ID NO: 16275 - RNA, 14 nt, Artificial Sequence
  Description of Artificial Sequence: Synthetic oligonucleotide
gcacuucuaaaaau

SEQ ID NO: 16276 - RNA, 14 nt, Artificial Sequence
  Description of Artificial Sequence: Synthetic oligonucleotide
agcacuucuaaaaa

SEQ ID NO: 16277 - RNA, 14 nt, Artificial Sequence
  Description of Artificial Sequence: Synthetic oligonucleotide
cagcacuucuaaaa

SEQ ID NO: 16278 - RNA, 14 nt, Artificial Sequence
  Description of Artificial Sequence: Synthetic oligonucleotide
gcagcacuucuaaa

SEQ ID NO: 16279 - RNA, 14 nt, Artificial Sequence
  Description of Artificial Sequence: Synthetic oligonucleotide
ugcagcacuucuaa

SEQ ID NO: 16280 - RNA, 14 nt, Artificial Sequence
  Description of Artificial Sequence: Synthetic oligonucleotide
uugcagcacuucua

SEQ ID NO: 16281 - RNA, 14 nt, Artificial Sequence
  Description of Artificial Sequence: Synthetic oligonucleotide
guugcagcacuucu

SEQ ID NO: 16282 - RNA, 14 nt, Artificial Sequence
  Description of Artificial Sequence: Synthetic oligonucleotide
uguugcagcacuuc

SEQ ID NO: 16283 - RNA, 14 nt, Artificial Sequence
  Description of Artificial Sequence: Synthetic oligonucleotide
auguugcagcacuu

SEQ ID NO: 16284 - RNA, 14 nt, Artificial Sequence
  Description of Artificial Sequence: Synthetic oligonucleotide
cauguugcagcacu

SEQ ID NO: 16285 - RNA, 14 nt, Artificial Sequence
  Description of Artificial Sequence: Synthetic oligonucleotide
ccauguugcagcac

SEQ ID NO: 16286 - RNA, 14 nt, Artificial Sequence
  Description of Artificial Sequence: Synthetic oligonucleotide
accauguugcagca

SEQ ID NO: 16287 - RNA, 14 nt, Artificial Sequence
  Description of Artificial Sequence: Synthetic oligonucleotide
caccauguugcagc

SEQ ID NO: 16288 - RNA, 14 nt, Artificial Sequence
  Description of Artificial Sequence: Synthetic oligonucleotide
ccaccauguugcag

SEQ ID NO: 16289 - RNA, 14 nt, Artificial Sequence
  Description of Artificial Sequence: Synthetic oligonucleotide
cccaccauguugca

SEQ ID NO: 16290 - RNA, 14 nt, Artificial Sequence
  Description of Artificial Sequence: Synthetic oligonucleotide
ucccaccauguugc

SEQ ID NO: 16291 - RNA, 14 nt, Artificial Sequence
  Description of Artificial Sequence: Synthetic oligonucleotide
uucccaccauguug

SEQ ID NO: 16292 - RNA, 14 nt, Artificial Sequence
  Description of Artificial Sequence: Synthetic oligonucleotide
guucccaccauguu

SEQ ID NO: 16293 - RNA, 14 nt, Artificial Sequence
  Description of Artificial Sequence: Synthetic oligonucleotide
gguucccaccaugu

SEQ ID NO: 16294 - RNA, 14 nt, Artificial Sequence
  Description of Artificial Sequence: Synthetic oligonucleotide
agguucccaccaug

SEQ ID NO: 16295 - RNA, 14 nt, Artificial Sequence
  Description of Artificial Sequence: Synthetic oligonucleotide
uagguucccaccau

SEQ ID NO: 16296 - RNA, 14 nt, Artificial Sequence
  Description of Artificial Sequence: Synthetic oligonucleotide
cuagguucccacca

SEQ ID NO: 16297 - RNA, 14 nt, Artificial Sequence
  Description of Artificial Sequence: Synthetic oligonucleotide
acuagguucccacc

SEQ ID NO: 16298 - RNA, 14 nt, Artificial Sequence
  Description of Artificial Sequence: Synthetic oligonucleotide
uacuagguucccac

SEQ ID NO: 16299 - RNA, 14 nt, Artificial Sequence
  Description of Artificial Sequence: Synthetic oligonucleotide
guacuagguuccca

SEQ ID NO: 16300 - RNA, 14 nt, Artificial Sequence
  Description of Artificial Sequence: Synthetic oligonucleotide
aguacuagguuccc

SEQ ID NO: 16301 - RNA, 14 nt, Artificial Sequence
  Description of Artificial Sequence: Synthetic oligonucleotide
aaguacuagguucc

SEQ ID NO: 16302 - RNA, 14 nt, Artificial Sequence
  Description of Artificial Sequence: Synthetic oligonucleotide
aaaguacuagguuc

SEQ ID NO: 16303 - RNA, 14 nt, Artificial Sequence
  Description of Artificial Sequence: Synthetic oligonucleotide
uaaaguacuagguu

SEQ ID NO: 16304 - RNA, 14 nt, Artificial Sequence
  Description of Artificial Sequence: Synthetic oligonucleotide
uuaaaguacuaggu

SEQ ID NO: 16305 - RNA, 14 nt, Artificial Sequence
  Description of Artificial Sequence: Synthetic oligonucleotide
auuaaaguacuagg

SEQ ID NO: 16306 - RNA, 14 nt, Artificial Sequence
  Description of Artificial Sequence: Synthetic oligonucleotide
uauuaaaguacuag

SEQ ID NO: 16307 - RNA, 14 nt, Artificial Sequence
  Description of Artificial Sequence: Synthetic oligonucleotide
uuauuaaaguacua

SEQ ID NO: 16308 - RNA, 14 nt, Artificial Sequence
  Description of Artificial Sequence: Synthetic oligonucleotide
auuauuaaaguacu

SEQ ID NO: 16309 - RNA, 14 nt, Artificial Sequence
  Description of Artificial Sequence: Synthetic oligonucleotide
aauuauuaaaguac

SEQ ID NO: 16310 - RNA, 14 nt, Artificial Sequence
  Description of Artificial Sequence: Synthetic oligonucleotide
aaauuauuaaagua

SEQ ID NO: 16311 - RNA, 14 nt, Artificial Sequence
  Description of Artificial Sequence: Synthetic oligonucleotide
gaaauuauuaaagu

SEQ ID NO: 16312 - RNA, 14 nt, Artificial Sequence
  Description of Artificial Sequence: Synthetic oligonucleotide
ggaaauuauuaaag

SEQ ID NO: 16313 - RNA, 14 nt, Artificial Sequence
  Description of Artificial Sequence: Synthetic oligonucleotide
aggaaauuauuaaa

SEQ ID NO: 16314 - RNA, 14 nt, Artificial Sequence
  Description of Artificial Sequence: Synthetic oligonucleotide
uaggaaauuauuaa

SEQ ID NO: 16315 - RNA, 14 nt, Artificial Sequence
  Description of Artificial Sequence: Synthetic oligonucleotide
auaggaaauuauua

SEQ ID NO: 16316 - RNA, 14 nt, Artificial Sequence
  Description of Artificial Sequence: Synthetic oligonucleotide
cauaggaaauuauu

SEQ ID NO: 16317 - RNA, 14 nt, Artificial Sequence
  Description of Artificial Sequence: Synthetic oligonucleotide
ucauaggaaauuau

SEQ ID NO: 16318 - RNA, 14 nt, Artificial Sequence
  Description of Artificial Sequence: Synthetic oligonucleotide
aucauaggaaauua

SEQ ID NO: 16319 - RNA, 14 nt, Artificial Sequence
  Description of Artificial Sequence: Synthetic oligonucleotide
uaucauaggaaauu

SEQ ID NO: 16320 - RNA, 14 nt, Artificial Sequence
  Description of Artificial Sequence: Synthetic oligonucleotide
auaucauaggaaau

SEQ ID NO: 16321 - RNA, 14 nt, Artificial Sequence
  Description of Artificial Sequence: Synthetic oligonucleotide
aauaucauaggaaa

SEQ ID NO: 16322 - RNA, 14 nt, Artificial Sequence
  Description of Artificial Sequence: Synthetic oligonucleotide
aaauaucauaggaa

SEQ ID NO: 16323 - RNA, 14 nt, Artificial Sequence
  Description of Artificial Sequence: Synthetic oligonucleotide
uaaauaucauagga

SEQ ID NO: 16324 - RNA, 14 nt, Artificial Sequence
  Description of Artificial Sequence: Synthetic oligonucleotide
auaaauaucauagg

SEQ ID NO: 16325 - RNA, 14 nt, Artificial Sequence
  Description of Artificial Sequence: Synthetic oligonucleotide
aauaaauaucauag

SEQ ID NO: 16326 - RNA, 14 nt, Artificial Sequence
  Description of Artificial Sequence: Synthetic oligonucleotide
uaauaaauaucaua

SEQ ID NO: 16327 - RNA, 14 nt, Artificial Sequence
  Description of Artificial Sequence: Synthetic oligonucleotide
cuaauaaauaucau

SEQ ID NO: 16328 - RNA, 14 nt, Artificial Sequence
  Description of Artificial Sequence: Synthetic oligonucleotide
ucuaauaaauauca

SEQ ID NO: 16329 - RNA, 14 nt, Artificial Sequence
  Description of Artificial Sequence: Synthetic oligonucleotide
cucuaauaaauauc

SEQ ID NO: 16330 - RNA, 14 nt, Artificial Sequence
  Description of Artificial Sequence: Synthetic oligonucleotide
gcucuaauaaauau

SEQ ID NO: 16331 - RNA, 14 nt, Artificial Sequence
  Description of Artificial Sequence: Synthetic oligonucleotide
ugcucuaauaaaua

SEQ ID NO: 16332 - RNA, 14 nt, Artificial Sequence
  Description of Artificial Sequence: Synthetic oligonucleotide
augcucuaauaaau

SEQ ID NO: 16333 - RNA, 14 nt, Artificial Sequence
  Description of Artificial Sequence: Synthetic oligonucleotide
uaugcucuaauaaa

SEQ ID NO: 16334 - RNA, 14 nt, Artificial Sequence
  Description of Artificial Sequence: Synthetic oligonucleotide
uuaugcucuaauaa

SEQ ID NO: 16335 - RNA, 14 nt, Artificial Sequence
  Description of Artificial Sequence: Synthetic oligonucleotide
uuuaugcucuaaua

SEQ ID NO: 16336 - RNA, 14 nt, Artificial Sequence
  Description of Artificial Sequence: Synthetic oligonucleotide
uuuuaugcucuaau

SEQ ID NO: 16337 - RNA, 14 nt, Artificial Sequence
  Description of Artificial Sequence: Synthetic oligonucleotide
auuuuaugcucuaa

SEQ ID NO: 16338 - RNA, 14 nt, Artificial Sequence
  Description of Artificial Sequence: Synthetic oligonucleotide
cauuuuaugcucua

SEQ ID NO: 16339 - RNA, 14 nt, Artificial Sequence
  Description of Artificial Sequence: Synthetic oligonucleotide
acauuuuaugcucu

SEQ ID NO: 16340 - RNA, 14 nt, Artificial Sequence
  Description of Artificial Sequence: Synthetic oligonucleotide
uacauuuuaugcuc

SEQ ID NO: 16341 - RNA, 14 nt, Artificial Sequence
  Description of Artificial Sequence: Synthetic oligonucleotide
guacauuuuaugcu

SEQ ID NO: 16342 - RNA, 14 nt, Artificial Sequence
  Description of Artificial Sequence: Synthetic oligonucleotide
uguacauuuuaugc

SEQ ID NO: 16343 - RNA, 14 nt, Artificial Sequence
  Description of Artificial Sequence: Synthetic oligonucleotide
auguacauuuuaug

SEQ ID NO: 16344 - RNA, 14 nt, Artificial Sequence
  Description of Artificial Sequence: Synthetic oligonucleotide
gauguacauuuuau

SEQ ID NO: 16345 - RNA, 14 nt, Artificial Sequence
  Description of Artificial Sequence: Synthetic oligonucleotide
ugauguacauuuua

SEQ ID NO: 16346 - RNA, 14 nt, Artificial Sequence
  Description of Artificial Sequence: Synthetic oligonucleotide
gugauguacauuuu

SEQ ID NO: 16347 - RNA, 14 nt, Artificial Sequence
  Description of Artificial Sequence: Synthetic oligonucleotide
cgugauguacauuu

SEQ ID NO: 16348 - RNA, 14 nt, Artificial Sequence
  Description of Artificial Sequence: Synthetic oligonucleotide
ucgugauguacauu

SEQ ID NO: 16349 - RNA, 14 nt, Artificial Sequence
  Description of Artificial Sequence: Synthetic oligonucleotide
aucgugauguacau

SEQ ID NO: 16350 - RNA, 14 nt, Artificial Sequence
  Description of Artificial Sequence: Synthetic oligonucleotide
uaucgugauguaca

SEQ ID NO: 16351 - RNA, 14 nt, Artificial Sequence
  Description of Artificial Sequence: Synthetic oligonucleotide
cuaucgugauguac

SEQ ID NO: 16352 - RNA, 14 nt, Artificial Sequence
  Description of Artificial Sequence: Synthetic oligonucleotide
acuaucgugaugua

SEQ ID NO: 16353 - RNA, 14 nt, Artificial Sequence
  Description of Artificial Sequence: Synthetic oligonucleotide
uacuaucgugaugu

SEQ ID NO: 16354 - RNA, 14 nt, Artificial Sequence
  Description of Artificial Sequence: Synthetic oligonucleotide
guacuaucgugaug

SEQ ID NO: 16355 - RNA, 14 nt, Artificial Sequence
  Description of Artificial Sequence: Synthetic oligonucleotide
uguacuaucgugau

SEQ ID NO: 16356 - RNA, 14 nt, Artificial Sequence
  Description of Artificial Sequence: Synthetic oligonucleotide
cuguacuaucguga

SEQ ID NO: 16357 - RNA, 14 nt, Artificial Sequence
  Description of Artificial Sequence: Synthetic oligonucleotide
acuguacuaucgug

SEQ ID NO: 16358 - RNA, 14 nt, Artificial Sequence
  Description of Artificial Sequence: Synthetic oligonucleotide
uacuguacuaucgu

SEQ ID NO: 16359 - RNA, 14 nt, Artificial Sequence
  Description of Artificial Sequence: Synthetic oligonucleotide
auacuguacuaucg

SEQ ID NO: 16360 - RNA, 14 nt, Artificial Sequence
  Description of Artificial Sequence: Synthetic oligonucleotide
cauacuguacuauc

SEQ ID NO: 16361 - RNA, 14 nt, Artificial Sequence
  Description of Artificial Sequence: Synthetic oligonucleotide
acauacuguacuau

SEQ ID NO: 16362 - RNA, 14 nt, Artificial Sequence
  Description of Artificial Sequence: Synthetic oligonucleotide
uacauacuguacua

SEQ ID NO: 16363 - RNA, 14 nt, Artificial Sequence
  Description of Artificial Sequence: Synthetic oligonucleotide
cuacauacuguacu

SEQ ID NO: 16364 - RNA, 14 nt, Artificial Sequence
  Description of Artificial Sequence: Synthetic oligonucleotide
acuacauacuguac

SEQ ID NO: 16365 - RNA, 14 nt, Artificial Sequence
  Description of Artificial Sequence: Synthetic oligonucleotide
gacuacauacugua

SEQ ID NO: 16366 - RNA, 14 nt, Artificial Sequence
  Description of Artificial Sequence: Synthetic oligonucleotide
ggacuacauacugu

SEQ ID NO: 16367 - RNA, 14 nt, Artificial Sequence
  Description of Artificial Sequence: Synthetic oligonucleotide
aggacuacauacug

SEQ ID NO: 16368 - RNA, 14 nt, Artificial Sequence
  Description of Artificial Sequence: Synthetic oligonucleotide
aaggacuacauacu

SEQ ID NO: 16369 - RNA, 14 nt, Artificial Sequence
  Description of Artificial Sequence: Synthetic oligonucleotide
aaaggacuacauac

SEQ ID NO: 16370 - RNA, 14 nt, Artificial Sequence
  Description of Artificial Sequence: Synthetic oligonucleotide
uaaaggacuacaua

SEQ ID NO: 16371 - RNA, 14 nt, Artificial Sequence
  Description of Artificial Sequence: Synthetic oligonucleotide
uuaaaggacuacau

SEQ ID NO: 16372 - RNA, 14 nt, Artificial Sequence
  Description of Artificial Sequence: Synthetic oligonucleotide
cuuaaaggacuaca

SEQ ID NO: 16373 - RNA, 14 nt, Artificial Sequence
  Description of Artificial Sequence: Synthetic oligonucleotide
ucuuaaaggacuac

SEQ ID NO: 16374 - RNA, 14 nt, Artificial Sequence
  Description of Artificial Sequence: Synthetic oligonucleotide
gucuuaaaggacua

SEQ ID NO: 16375 - RNA, 14 nt, Artificial Sequence
  Description of Artificial Sequence: Synthetic oligonucleotide
ggucuuaaaggacu

SEQ ID NO: 16376 - RNA, 14 nt, Artificial Sequence
  Description of Artificial Sequence: Synthetic oligonucleotide
uggucuuaaaggac

SEQ ID NO: 16377 - RNA, 14 nt, Artificial Sequence
  Description of Artificial Sequence: Synthetic oligonucleotide
cuggucuuaaagga

SEQ ID NO: 16378 - RNA, 14 nt, Artificial Sequence
  Description of Artificial Sequence: Synthetic oligonucleotide
ucuggucuuaaagg

SEQ ID NO: 16379 - RNA, 14 nt, Artificial Sequence
  Description of Artificial Sequence: Synthetic oligonucleotide
uucuggucuuaaag

SEQ ID NO: 16380 - RNA, 14 nt, Artificial Sequence
  Description of Artificial Sequence: Synthetic oligonucleotide
cuucuggucuuaaa

SEQ ID NO: 16381 - RNA, 14 nt, Artificial Sequence
  Description of Artificial Sequence: Synthetic oligonucleotide
ccuucuggucuuaa

SEQ ID NO: 16382 - RNA, 14 nt, Artificial Sequence
  Description of Artificial Sequence: Synthetic oligonucleotide
accuucuggucuua

SEQ ID NO: 16383 - RNA, 14 nt, Artificial Sequence
  Description of Artificial Sequence: Synthetic oligonucleotide
uaccuucuggucuu

SEQ ID NO: 16384 - RNA, 14 nt, Artificial Sequence
  Description of Artificial Sequence: Synthetic oligonucleotide
auaccuucuggucu

SEQ ID NO: 16385 - RNA, 14 nt, Artificial Sequence
  Description of Artificial Sequence: Synthetic oligonucleotide
cauaccuucugguc

SEQ ID NO: 16386 - RNA, 14 nt, Artificial Sequence
  Description of Artificial Sequence: Synthetic oligonucleotide
acauaccuucuggu

SEQ ID NO: 16387 - RNA, 14 nt, Artificial Sequence
  Description of Artificial Sequence: Synthetic oligonucleotide
aacauaccuucugg

SEQ ID NO: 16388 - RNA, 14 nt, Artificial Sequence
  Description of Artificial Sequence: Synthetic oligonucleotide
uaacauaccuucug

SEQ ID NO: 16389 - RNA, 14 nt, Artificial Sequence
  Description of Artificial Sequence: Synthetic oligonucleotide
uuaacauaccuucu

SEQ ID NO: 16390 - RNA, 14 nt, Artificial Sequence
  Description of Artificial Sequence: Synthetic oligonucleotide
guuaacauaccuuc

SEQ ID NO: 16391 - RNA, 14 nt, Artificial Sequence
  Description of Artificial Sequence: Synthetic oligonucleotide
aguuaacauaccuu

SEQ ID NO: 16392 - RNA, 14 nt, Artificial Sequence
  Description of Artificial Sequence: Synthetic oligonucleotide
caguuaacauaccu

SEQ ID NO: 16393 - RNA, 14 nt, Artificial Sequence
  Description of Artificial Sequence: Synthetic oligonucleotide
gcaguuaacauacc

SEQ ID NO: 16394 - RNA, 14 nt, Artificial Sequence
  Description of Artificial Sequence: Synthetic oligonucleotide
ugcaguuaacauac

SEQ ID NO: 16395 - RNA, 14 nt, Artificial Sequence
  Description of Artificial Sequence: Synthetic oligonucleotide
gugcaguuaacaua

SEQ ID NO: 16396 - RNA, 14 nt, Artificial Sequence
  Description of Artificial Sequence: Synthetic oligonucleotide
ggugcaguuaacau

SEQ ID NO: 16397 - RNA, 14 nt, Artificial Sequence
  Description of Artificial Sequence: Synthetic oligonucleotide
uggugcaguuaaca

SEQ ID NO: 16398 - RNA, 14 nt, Artificial Sequence
  Description of Artificial Sequence: Synthetic oligonucleotide
auggugcaguuaac

SEQ ID NO: 16399 - RNA, 14 nt, Artificial Sequence
  Description of Artificial Sequence: Synthetic oligonucleotide
gauggugcaguuaa

SEQ ID NO: 16400 - RNA, 14 nt, Artificial Sequence
  Description of Artificial Sequence: Synthetic oligonucleotide
ugauggugcaguua

SEQ ID NO: 16401 - RNA, 14 nt, Artificial Sequence
  Description of Artificial Sequence: Synthetic oligonucleotide
augauggugcaguu

SEQ ID NO: 16402 - RNA, 14 nt, Artificial Sequence
  Description of Artificial Sequence: Synthetic oligonucleotide
aaugauggugcagu

SEQ ID NO: 16403 - RNA, 14 nt, Artificial Sequence
  Description of Artificial Sequence: Synthetic oligonucleotide
uaaugauggugcag

SEQ ID NO: 16404 - RNA, 14 nt, Artificial Sequence
  Description of Artificial Sequence: Synthetic oligonucleotide
uuaaugauggugca

SEQ ID NO: 16405 - RNA, 14 nt, Artificial Sequence
  Description of Artificial Sequence: Synthetic oligonucleotide
cuuaaugauggugc

SEQ ID NO: 16406 - RNA, 14 nt, Artificial Sequence
  Description of Artificial Sequence: Synthetic oligonucleotide
gcuuaaugauggug

SEQ ID NO: 16407 - RNA, 14 nt, Artificial Sequence
  Description of Artificial Sequence: Synthetic oligonucleotide
ugcuuaaugauggu

SEQ ID NO: 16408 - RNA, 14 nt, Artificial Sequence
  Description of Artificial Sequence: Synthetic oligonucleotide
cugcuuaaugaugg

SEQ ID NO: 16409 - RNA, 14 nt, Artificial Sequence
  Description of Artificial Sequence: Synthetic oligonucleotide
acugcuuaaugaug

SEQ ID NO: 16410 - RNA, 14 nt, Artificial Sequence
  Description of Artificial Sequence: Synthetic oligonucleotide
gacugcuuaaugau

SEQ ID NO: 16411 - RNA, 14 nt, Artificial Sequence
  Description of Artificial Sequence: Synthetic oligonucleotide
agacugcuuaauga

SEQ ID NO: 16412 - RNA, 14 nt, Artificial Sequence
  Description of Artificial Sequence: Synthetic oligonucleotide
uagacugcuuaaug

SEQ ID NO: 16413 - RNA, 14 nt, Artificial Sequence
  Description of Artificial Sequence: Synthetic oligonucleotide
auagacugcuuaau

SEQ ID NO: 16414 - RNA, 14 nt, Artificial Sequence
  Description of Artificial Sequence: Synthetic oligonucleotide
gauagacugcuuaa

SEQ ID NO: 16415 - RNA, 14 nt, Artificial Sequence
  Description of Artificial Sequence: Synthetic oligonucleotide
ggauagacugcuua

SEQ ID NO: 16416 - RNA, 14 nt, Artificial Sequence
  Description of Artificial Sequence: Synthetic oligonucleotide
aggauagacugcuu

SEQ ID NO: 16417 - RNA, 14 nt, Artificial Sequence
  Description of Artificial Sequence: Synthetic oligonucleotide
uaggauagacugcu

SEQ ID NO: 16418 - RNA, 14 nt, Artificial Sequence
  Description of Artificial Sequence: Synthetic oligonucleotide
auaggauagacugc

SEQ ID NO: 16419 - RNA, 14 nt, Artificial Sequence
  Description of Artificial Sequence: Synthetic oligonucleotide
aauaggauagacug

SEQ ID NO: 16420 - RNA, 14 nt, Artificial Sequence
  Description of Artificial Sequence: Synthetic oligonucleotide
aaauaggauagacu

SEQ ID NO: 16421 - RNA, 14 nt, Artificial Sequence
  Description of Artificial Sequence: Synthetic oligonucleotide
aaaauaggauagac

SEQ ID NO: 16422 - RNA, 14 nt, Artificial Sequence
  Description of Artificial Sequence: Synthetic oligonucleotide
gaaaauaggauaga

SEQ ID NO: 16423 - RNA, 14 nt, Artificial Sequence
  Description of Artificial Sequence: Synthetic oligonucleotide
agaaaauaggauag

SEQ ID NO: 16424 - RNA, 14 nt, Artificial Sequence
  Description of Artificial Sequence: Synthetic oligonucleotide
aagaaaauaggaua

SEQ ID NO: 16425 - RNA, 14 nt, Artificial Sequence
  Description of Artificial Sequence: Synthetic oligonucleotide
uaagaaaauaggau

SEQ ID NO: 16426 - RNA, 14 nt, Artificial Sequence
  Description of Artificial Sequence: Synthetic oligonucleotide
auaagaaaauagga

SEQ ID NO: 16427 - RNA, 14 nt, Artificial Sequence
  Description of Artificial Sequence: Synthetic oligonucleotide
aauaagaaaauagg

SEQ ID NO: 16428 - RNA, 14 nt, Artificial Sequence
  Description of Artificial Sequence: Synthetic oligonucleotide
aaauaagaaaauag

SEQ ID NO: 16429 - RNA, 14 nt, Artificial Sequence
  Description of Artificial Sequence: Synthetic oligonucleotide
uaaauaagaaaaua

SEQ ID NO: 16430 - RNA, 14 nt, Artificial Sequence
  Description of Artificial Sequence: Synthetic oligonucleotide
auaaauaagaaaau

SEQ ID NO: 16431 - RNA, 14 nt, Artificial Sequence
  Description of Artificial Sequence: Synthetic oligonucleotide
aauaaauaagaaaa

SEQ ID NO: 16432 - RNA, 14 nt, Artificial Sequence
  Description of Artificial Sequence: Synthetic oligonucleotide
aaauaaauaagaaa

SEQ ID NO: 16433 - RNA, 14 nt, Artificial Sequence
  Description of Artificial Sequence: Synthetic oligonucleotide
caaauaaauaagaa

SEQ ID NO: 16434 - RNA, 14 nt, Artificial Sequence
  Description of Artificial Sequence: Synthetic oligonucleotide
acaaauaaauaaga

SEQ ID NO: 16435 - RNA, 14 nt, Artificial Sequence
  Description of Artificial Sequence: Synthetic oligonucleotide
aacaaauaaauaag

SEQ ID NO: 16436 - RNA, 14 nt, Artificial Sequence
  Description of Artificial Sequence: Synthetic oligonucleotide
uaacaaauaaauaa

SEQ ID NO: 16437 - RNA, 14 nt, Artificial Sequence
  Description of Artificial Sequence: Synthetic oligonucleotide
cuaacaaauaaaua

SEQ ID NO: 16438 - RNA, 14 nt, Artificial Sequence
  Description of Artificial Sequence: Synthetic oligonucleotide
ucuaacaaauaaau

SEQ ID NO: 16439 - RNA, 14 nt, Artificial Sequence
  Description of Artificial Sequence: Synthetic oligonucleotide
uucuaacaaauaaa

SEQ ID NO: 16440 - RNA, 14 nt, Artificial Sequence
  Description of Artificial Sequence: Synthetic oligonucleotide
auucuaacaaauaa

SEQ ID NO: 16441 - RNA, 14 nt, Artificial Sequence
  Description of Artificial Sequence: Synthetic oligonucleotide
aauucuaacaaaua

SEQ ID NO: 16442 - RNA, 14 nt, Artificial Sequence
  Description of Artificial Sequence: Synthetic oligonucleotide
caauucuaacaaau

SEQ ID NO: 16443 - RNA, 14 nt, Artificial Sequence
  Description of Artificial Sequence: Synthetic oligonucleotide
ucaauucuaacaaa

SEQ ID NO: 16444 - RNA, 14 nt, Artificial Sequence
  Description of Artificial Sequence: Synthetic oligonucleotide
uucaauucuaacaa

SEQ ID NO: 16445 - RNA, 14 nt, Artificial Sequence
  Description of Artificial Sequence: Synthetic oligonucleotide
auucaauucuaaca

SEQ ID NO: 16446 - RNA, 14 nt, Artificial Sequence
  Description of Artificial Sequence: Synthetic oligonucleotide
gauucaauucuaac

SEQ ID NO: 16447 - RNA, 14 nt, Artificial Sequence
  Description of Artificial Sequence: Synthetic oligonucleotide
ggauucaauucuaa

SEQ ID NO: 16448 - RNA, 14 nt, Artificial Sequence
  Description of Artificial Sequence: Synthetic oligonucleotide
aggauucaauucua

SEQ ID NO: 16449 - RNA, 14 nt, Artificial Sequence
  Description of Artificial Sequence: Synthetic oligonucleotide
aaggauucaauucu

SEQ ID NO: 16450 - RNA, 14 nt, Artificial Sequence
  Description of Artificial Sequence: Synthetic oligonucleotide
aaaggauucaauuc

SEQ ID NO: 16451 - RNA, 14 nt, Artificial Sequence
  Description of Artificial Sequence: Synthetic oligonucleotide
gaaaggauucaauu

SEQ ID NO: 16452 - RNA, 14 nt, Artificial Sequence
  Description of Artificial Sequence: Synthetic oligonucleotide
agaaaggauucaau

SEQ ID NO: 16453 - RNA, 14 nt, Artificial Sequence
  Description of Artificial Sequence: Synthetic oligonucleotide
gagaaaggauucaa

SEQ ID NO: 16454 - RNA, 14 nt, Artificial Sequence
  Description of Artificial Sequence: Synthetic oligonucleotide
ugagaaaggauuca

SEQ ID NO: 16455 - RNA, 14 nt, Artificial Sequence
  Description of Artificial Sequence: Synthetic oligonucleotide
uugagaaaggauuc

SEQ ID NO: 16456 - RNA, 14 nt, Artificial Sequence
  Description of Artificial Sequence: Synthetic oligonucleotide
auugagaaaggauu

SEQ ID NO: 16457 - RNA, 14 nt, Artificial Sequence
  Description of Artificial Sequence: Synthetic oligonucleotide
uauugagaaaggau

SEQ ID NO: 16458 - RNA, 14 nt, Artificial Sequence
  Description of Artificial Sequence: Synthetic oligonucleotide
auauugagaaagga

SEQ ID NO: 16459 - RNA, 14 nt, Artificial Sequence
  Description of Artificial Sequence: Synthetic oligonucleotide
gauauugagaaagg

SEQ ID NO: 16460 - RNA, 14 nt, Artificial Sequence
  Description of Artificial Sequence: Synthetic oligonucleotide
agauauugagaaag

SEQ ID NO: 16461 - RNA, 14 nt, Artificial Sequence
  Description of Artificial Sequence: Synthetic oligonucleotide
cagauauugagaaa

SEQ ID NO: 16462 - RNA, 14 nt, Artificial Sequence
  Description of Artificial Sequence: Synthetic oligonucleotide
acagauauugagaa

SEQ ID NO: 16463 - RNA, 14 nt, Artificial Sequence
  Description of Artificial Sequence: Synthetic oligonucleotide
uacagauauugaga

SEQ ID NO: 16464 - RNA, 14 nt, Artificial Sequence
  Description of Artificial Sequence: Synthetic oligonucleotide
guacagauauugag

SEQ ID NO: 16465 - RNA, 14 nt, Artificial Sequence
  Description of Artificial Sequence: Synthetic oligonucleotide
gguacagauauuga

SEQ ID NO: 16466 - RNA, 14 nt, Artificial Sequence
  Description of Artificial Sequence: Synthetic oligonucleotide
ugguacagauauug

SEQ ID NO: 16467 - RNA, 14 nt, Artificial Sequence
  Description of Artificial Sequence: Synthetic oligonucleotide
augguacagauauu

SEQ ID NO: 16468 - RNA, 14 nt, Artificial Sequence
  Description of Artificial Sequence: Synthetic oligonucleotide
aaugguacagauau

SEQ ID NO: 16469 - RNA, 14 nt, Artificial Sequence
  Description of Artificial Sequence: Synthetic oligonucleotide
gaaugguacagaua

SEQ ID NO: 16470 - RNA, 14 nt, Artificial Sequence
  Description of Artificial Sequence: Synthetic oligonucleotide
ggaaugguacagau

SEQ ID NO: 16471 - RNA, 14 nt, Artificial Sequence
  Description of Artificial Sequence: Synthetic oligonucleotide
aggaaugguacaga

SEQ ID NO: 16472 - RNA, 14 nt, Artificial Sequence
  Description of Artificial Sequence: Synthetic oligonucleotide
uaggaaugguacag

SEQ ID NO: 16473 - RNA, 14 nt, Artificial Sequence
  Description of Artificial Sequence: Synthetic oligonucleotide
auaggaaugguaca

SEQ ID NO: 16474 - RNA, 14 nt, Artificial Sequence
  Description of Artificial Sequence: Synthetic oligonucleotide
cauaggaaugguac

SEQ ID NO: 16475 - RNA, 14 nt, Artificial Sequence
  Description of Artificial Sequence: Synthetic oligonucleotide
ucauaggaauggua

SEQ ID NO: 16476 - RNA, 14 nt, Artificial Sequence
  Description of Artificial Sequence: Synthetic oligonucleotide
aucauaggaauggu

SEQ ID NO: 16477 - RNA, 14 nt, Artificial Sequence
  Description of Artificial Sequence: Synthetic oligonucleotide
caucauaggaaugg

SEQ ID NO: 16478 - RNA, 14 nt, Artificial Sequence
  Description of Artificial Sequence: Synthetic oligonucleotide
ccaucauaggaaug

SEQ ID NO: 16479 - RNA, 14 nt, Artificial Sequence
  Description of Artificial Sequence: Synthetic oligonucleotide
accaucauaggaau

SEQ ID NO: 16480 - RNA, 14 nt, Artificial Sequence
  Description of Artificial Sequence: Synthetic oligonucleotide
uaccaucauaggaa

SEQ ID NO: 16481 - RNA, 14 nt, Artificial Sequence
  Description of Artificial Sequence: Synthetic oligonucleotide
cuaccaucauagga

SEQ ID NO: 16482 - RNA, 14 nt, Artificial Sequence
  Description of Artificial Sequence: Synthetic oligonucleotide
gcuaccaucauagg

SEQ ID NO: 16483 - RNA, 14 nt, Artificial Sequence
  Description of Artificial Sequence: Synthetic oligonucleotide
ggcuaccaucauag

SEQ ID NO: 16484 - RNA, 14 nt, Artificial Sequence
  Description of Artificial Sequence: Synthetic oligonucleotide
uggcuaccaucaua

SEQ ID NO: 16485 - RNA, 14 nt, Artificial Sequence
  Description of Artificial Sequence: Synthetic oligonucleotide
auggcuaccaucau

SEQ ID NO: 16486 - RNA, 14 nt, Artificial Sequence
  Description of Artificial Sequence: Synthetic oligonucleotide
aauggcuaccauca

SEQ ID NO: 16487 - RNA, 14 nt, Artificial Sequence
  Description of Artificial Sequence: Synthetic oligonucleotide
gaauggcuaccauc

SEQ ID NO: 16488 - RNA, 14 nt, Artificial Sequence
  Description of Artificial Sequence: Synthetic oligonucleotide
agaauggcuaccau

SEQ ID NO: 16489 - RNA, 14 nt, Artificial Sequence
  Description of Artificial Sequence: Synthetic oligonucleotide
aagaauggcuacca

SEQ ID NO: 16490 - RNA, 14 nt, Artificial Sequence
  Description of Artificial Sequence: Synthetic oligonucleotide
gaagaauggcuacc

SEQ ID NO: 16491 - RNA, 14 nt, Artificial Sequence
  Description of Artificial Sequence: Synthetic oligonucleotide
agaagaauggcuac

SEQ ID NO: 16492 - RNA, 14 nt, Artificial Sequence
  Description of Artificial Sequence: Synthetic oligonucleotide
gagaagaauggcua

SEQ ID NO: 16493 - RNA, 14 nt, Artificial Sequence
  Description of Artificial Sequence: Synthetic oligonucleotide
agagaagaauggcu

SEQ ID NO: 16494 - RNA, 14 nt, Artificial Sequence
  Description of Artificial Sequence: Synthetic oligonucleotide
aagagaagaauggc

SEQ ID NO: 16495 - RNA, 14 nt, Artificial Sequence
  Description of Artificial Sequence: Synthetic oligonucleotide
aaagagaagaaugg

SEQ ID NO: 16496 - RNA, 14 nt, Artificial Sequence
  Description of Artificial Sequence: Synthetic oligonucleotide
uaaagagaagaaug

SEQ ID NO: 16497 - RNA, 14 nt, Artificial Sequence
  Description of Artificial Sequence: Synthetic oligonucleotide
auaaagagaagaau

SEQ ID NO: 16498 - RNA, 14 nt, Artificial Sequence
  Description of Artificial Sequence: Synthetic oligonucleotide
uauaaagagaagaa

SEQ ID NO: 16499 - RNA, 14 nt, Artificial Sequence
  Description of Artificial Sequence: Synthetic oligonucleotide
uuauaaagagaaga

SEQ ID NO: 16500 - RNA, 14 nt, Artificial Sequence
  Description of Artificial Sequence: Synthetic oligonucleotide
uuuauaaagagaag

SEQ ID NO: 16501 - RNA, 14 nt, Artificial Sequence
  Description of Artificial Sequence: Synthetic oligonucleotide
uuuuauaaagagaa

SEQ ID NO: 16502 - RNA, 14 nt, Artificial Sequence
  Description of Artificial Sequence: Synthetic oligonucleotide
auuuuauaaagaga

SEQ ID NO: 16503 - RNA, 14 nt, Artificial Sequence
  Description of Artificial Sequence: Synthetic oligonucleotide
uauuuuauaaagag

SEQ ID NO: 16504 - RNA, 14 nt, Artificial Sequence
  Description of Artificial Sequence: Synthetic oligonucleotide
auauuuuauaaaga

SEQ ID NO: 16505 - RNA, 14 nt, Artificial Sequence
  Description of Artificial Sequence: Synthetic oligonucleotide
aauauuuuauaaag

SEQ ID NO: 16506 - RNA, 14 nt, Artificial Sequence
  Description of Artificial Sequence: Synthetic oligonucleotide
aaauauuuuauaaa

SEQ ID NO: 16507 - RNA, 14 nt, Artificial Sequence
  Description of Artificial Sequence: Synthetic oligonucleotide
gaaauauuuuauaa

SEQ ID NO: 16508 - RNA, 14 nt, Artificial Sequence
  Description of Artificial Sequence: Synthetic oligonucleotide
ggaaauauuuuaua

SEQ ID NO: 16509 - RNA, 14 nt, Artificial Sequence
  Description of Artificial Sequence: Synthetic oligonucleotide
aggaaauauuuuau

SEQ ID NO: 16510 - RNA, 14 nt, Artificial Sequence
  Description of Artificial Sequence: Synthetic oligonucleotide
gaggaaauauuuua

SEQ ID NO: 16511 - RNA, 14 nt, Artificial Sequence
  Description of Artificial Sequence: Synthetic oligonucleotide
agaggaaauauuuu

SEQ ID NO: 16512 - RNA, 14 nt, Artificial Sequence
  Description of Artificial Sequence: Synthetic oligonucleotide
aagaggaaauauuu

SEQ ID NO: 16513 - RNA, 14 nt, Artificial Sequence
  Description of Artificial Sequence: Synthetic oligonucleotide
aaagaggaaauauu

SEQ ID NO: 16514 - RNA, 14 nt, Artificial Sequence
  Description of Artificial Sequence: Synthetic oligonucleotide
caaagaggaaauau

SEQ ID NO: 16515 - RNA, 14 nt, Artificial Sequence
  Description of Artificial Sequence: Synthetic oligonucleotide
ucaaagaggaaaua

SEQ ID NO: 16516 - RNA, 14 nt, Artificial Sequence
  Description of Artificial Sequence: Synthetic oligonucleotide
uucaaagaggaaau

SEQ ID NO: 16517 - RNA, 14 nt, Artificial Sequence
  Description of Artificial Sequence: Synthetic oligonucleotide
uuucaaagaggaaa

SEQ ID NO: 16518 - RNA, 14 nt, Artificial Sequence
  Description of Artificial Sequence: Synthetic oligonucleotide
uuuucaaagaggaa

SEQ ID NO: 16519 - RNA, 14 nt, Artificial Sequence
  Description of Artificial Sequence: Synthetic oligonucleotide
cuuuucaaagagga

SEQ ID NO: 16520 - RNA, 14 nt, Artificial Sequence
  Description of Artificial Sequence: Synthetic oligonucleotide
gcuuuucaaagagg

SEQ ID NO: 16521 - RNA, 14 nt, Artificial Sequence
  Description of Artificial Sequence: Synthetic oligonucleotide
cgcuuuucaaagag

SEQ ID NO: 16522 - RNA, 14 nt, Artificial Sequence
  Description of Artificial Sequence: Synthetic oligonucleotide
acgcuuuucaaaga

SEQ ID NO: 16523 - RNA, 14 nt, Artificial Sequence
  Description of Artificial Sequence: Synthetic oligonucleotide
gacgcuuuucaaag

SEQ ID NO: 16524 - RNA, 14 nt, Artificial Sequence
  Description of Artificial Sequence: Synthetic oligonucleotide
ggacgcuuuucaaa

SEQ ID NO: 16525 - RNA, 14 nt, Artificial Sequence
  Description of Artificial Sequence: Synthetic oligonucleotide
aggacgcuuuucaa

SEQ ID NO: 16526 - RNA, 14 nt, Artificial Sequence
  Description of Artificial Sequence: Synthetic oligonucleotide
uaggacgcuuuuca

SEQ ID NO: 16527 - RNA, 14 nt, Artificial Sequence
  Description of Artificial Sequence: Synthetic oligonucleotide
uuaggacgcuuuuc

SEQ ID NO: 16528 - RNA, 14 nt, Artificial Sequence
  Description of Artificial Sequence: Synthetic oligonucleotide
uuuaggacgcuuuu

SEQ ID NO: 16529 - RNA, 14 nt, Artificial Sequence
  Description of Artificial Sequence: Synthetic oligonucleotide
uuuuaggacgcuuu

SEQ ID NO: 16530 - RNA, 14 nt, Artificial Sequence
  Description of Artificial Sequence: Synthetic oligonucleotide
guuuuaggacgcuu

SEQ ID NO: 16531 - RNA, 14 nt, Artificial Sequence
  Description of Artificial Sequence: Synthetic oligonucleotide
uguuuuaggacgcu

SEQ ID NO: 16532 - RNA, 14 nt, Artificial Sequence
  Description of Artificial Sequence: Synthetic oligonucleotide
auguuuuaggacgc

SEQ ID NO: 16533 - RNA, 14 nt, Artificial Sequence
  Description of Artificial Sequence: Synthetic oligonucleotide
aauguuuuaggacg

SEQ ID NO: 16534 - RNA, 14 nt, Artificial Sequence
  Description of Artificial Sequence: Synthetic oligonucleotide
uaauguuuuaggac

SEQ ID NO: 16535 - RNA, 14 nt, Artificial Sequence
  Description of Artificial Sequence: Synthetic oligonucleotide
uuaauguuuuagga

SEQ ID NO: 16536 - RNA, 14 nt, Artificial Sequence
  Description of Artificial Sequence: Synthetic oligonucleotide
auuaauguuuuagg

SEQ ID NO: 16537 - RNA, 14 nt, Artificial Sequence
  Description of Artificial Sequence: Synthetic oligonucleotide
aauuaauguuuuag

SEQ ID NO: 16538 - RNA, 14 nt, Artificial Sequence
  Description of Artificial Sequence: Synthetic oligonucleotide
aaauuaauguuuua

SEQ ID NO: 16539 - RNA, 14 nt, Artificial Sequence
  Description of Artificial Sequence: Synthetic oligonucleotide
gaaauuaauguuuu

SEQ ID NO: 16540 - RNA, 14 nt, Artificial Sequence
  Description of Artificial Sequence: Synthetic oligonucleotide
ugaaauuaauguuu

SEQ ID NO: 16541 - RNA, 14 nt, Artificial Sequence
  Description of Artificial Sequence: Synthetic oligonucleotide
uugaaauuaauguu

SEQ ID NO: 16542 - RNA, 14 nt, Artificial Sequence
  Description of Artificial Sequence: Synthetic oligonucleotide
uuugaaauuaaugu

SEQ ID NO: 16543 - RNA, 14 nt, Artificial Sequence
  Description of Artificial Sequence: Synthetic oligonucleotide
auuugaaauuaaug

SEQ ID NO: 16544 - RNA, 14 nt, Artificial Sequence
  Description of Artificial Sequence: Synthetic oligonucleotide
gauuugaaauuaau

SEQ ID NO: 16545 - RNA, 14 nt, Artificial Sequence
  Description of Artificial Sequence: Synthetic oligonucleotide
ggauuugaaauuaa

SEQ ID NO: 16546 - RNA, 14 nt, Artificial Sequence
  Description of Artificial Sequence: Synthetic oligonucleotide
gggauuugaaauua

SEQ ID NO: 16547 - RNA, 14 nt, Artificial Sequence
  Description of Artificial Sequence: Synthetic oligonucleotide
ggggauuugaaauu

SEQ ID NO: 16548 - RNA, 14 nt, Artificial Sequence
  Description of Artificial Sequence: Synthetic oligonucleotide
aggggauuugaaau

SEQ ID NO: 16549 - RNA, 14 nt, Artificial Sequence
  Description of Artificial Sequence: Synthetic oligonucleotide
gaggggauuugaaa

SEQ ID NO: 16550 - RNA, 14 nt, Artificial Sequence
  Description of Artificial Sequence: Synthetic oligonucleotide
agaggggauuugaa

SEQ ID NO: 16551 - RNA, 14 nt, Artificial Sequence
  Description of Artificial Sequence: Synthetic oligonucleotide
aagaggggauuuga

SEQ ID NO: 16552 - RNA, 14 nt, Artificial Sequence
  Description of Artificial Sequence: Synthetic oligonucleotide
caagaggggauuug

SEQ ID NO: 16553 - RNA, 14 nt, Artificial Sequence
  Description of Artificial Sequence: Synthetic oligonucleotide
ccaagaggggauuu

SEQ ID NO: 16554 - RNA, 14 nt, Artificial Sequence
  Description of Artificial Sequence: Synthetic oligonucleotide
uccaagaggggauu

SEQ ID NO: 16555 - RNA, 14 nt, Artificial Sequence
  Description of Artificial Sequence: Synthetic oligonucleotide
auccaagaggggau

SEQ ID NO: 16556 - RNA, 14 nt, Artificial Sequence
  Description of Artificial Sequence: Synthetic oligonucleotide
cauccaagagggga

SEQ ID NO: 16557 - RNA, 14 nt, Artificial Sequence
  Description of Artificial Sequence: Synthetic oligonucleotide
gcauccaagagggg

SEQ ID NO: 16558 - RNA, 14 nt, Artificial Sequence
  Description of Artificial Sequence: Synthetic oligonucleotide
ugcauccaagaggg

SEQ ID NO: 16559 - RNA, 14 nt, Artificial Sequence
  Description of Artificial Sequence: Synthetic oligonucleotide
uugcauccaagagg

SEQ ID NO: 16560 - RNA, 14 nt, Artificial Sequence
  Description of Artificial Sequence: Synthetic oligonucleotide
uuugcauccaagag

SEQ ID NO: 16561 - RNA, 14 nt, Artificial Sequence
  Description of Artificial Sequence: Synthetic oligonucleotide
cuuugcauccaaga

SEQ ID NO: 16562 - RNA, 14 nt, Artificial Sequence
  Description of Artificial Sequence: Synthetic oligonucleotide
acuuugcauccaag

SEQ ID NO: 16563 - RNA, 14 nt, Artificial Sequence
  Description of Artificial Sequence: Synthetic oligonucleotide
cacuuugcauccaa

SEQ ID NO: 16564 - RNA, 14 nt, Artificial Sequence
  Description of Artificial Sequence: Synthetic oligonucleotide
acacuuugcaucca

SEQ ID NO: 16565 - RNA, 14 nt, Artificial Sequence
  Description of Artificial Sequence: Synthetic oligonucleotide
gacacuuugcaucc

SEQ ID NO: 16566 - RNA, 14 nt, Artificial Sequence
  Description of Artificial Sequence: Synthetic oligonucleotide
ggacacuuugcauc

SEQ ID NO: 16567 - RNA, 14 nt, Artificial Sequence
  Description of Artificial Sequence: Synthetic oligonucleotide
gggacacuuugcau

SEQ ID NO: 16568 - RNA, 14 nt, Artificial Sequence
  Description of Artificial Sequence: Synthetic oligonucleotide
agggacacuuugca

SEQ ID NO: 16569 - RNA, 14 nt, Artificial Sequence
  Description of Artificial Sequence: Synthetic oligonucleotide
uagggacacuuugc

SEQ ID NO: 16570 - RNA, 14 nt, Artificial Sequence
  Description of Artificial Sequence: Synthetic oligonucleotide
uuagggacacuuug

SEQ ID NO: 16571 - RNA, 14 nt, Artificial Sequence
  Description of Artificial Sequence: Synthetic oligonucleotide
cuuagggacacuuu

SEQ ID NO: 16572 - RNA, 14 nt, Artificial Sequence
  Description of Artificial Sequence: Synthetic oligonucleotide
ucuuagggacacuu

SEQ ID NO: 16573 - RNA, 14 nt, Artificial Sequence
  Description of Artificial Sequence: Synthetic oligonucleotide
gucuuagggacacu

SEQ ID NO: 16574 - RNA, 14 nt, Artificial Sequence
  Description of Artificial Sequence: Synthetic oligonucleotide
ggucuuagggacac

SEQ ID NO: 16575 - RNA, 14 nt, Artificial Sequence
  Description of Artificial Sequence: Synthetic oligonucleotide
uggucuuagggaca

SEQ ID NO: 16576 - RNA, 14 nt, Artificial Sequence
  Description of Artificial Sequence: Synthetic oligonucleotide
auggucuuagggac

SEQ ID NO: 16577 - RNA, 14 nt, Artificial Sequence
  Description of Artificial Sequence: Synthetic oligonucleotide
gauggucuuaggga

SEQ ID NO: 16578 - RNA, 14 nt, Artificial Sequence
  Description of Artificial Sequence: Synthetic oligonucleotide
ggauggucuuaggg

SEQ ID NO: 16579 - RNA, 14 nt, Artificial Sequence
  Description of Artificial Sequence: Synthetic oligonucleotide
uggauggucuuagg

SEQ ID NO: 16580 - RNA, 14 nt, Artificial Sequence
  Description of Artificial Sequence: Synthetic oligonucleotide
auggauggucuuag

SEQ ID NO: 16581 - RNA, 14 nt, Artificial Sequence
  Description of Artificial Sequence: Synthetic oligonucleotide
aauggauggucuua

SEQ ID NO: 16582 - RNA, 14 nt, Artificial Sequence
  Description of Artificial Sequence: Synthetic oligonucleotide
gaauggauggucuu

SEQ ID NO: 16583 - RNA, 14 nt, Artificial Sequence
  Description of Artificial Sequence: Synthetic oligonucleotide
ugaauggauggucu

SEQ ID NO: 16584 - RNA, 14 nt, Artificial Sequence
  Description of Artificial Sequence: Synthetic oligonucleotide
uugaauggaugguc

SEQ ID NO: 16585 - RNA, 14 nt, Artificial Sequence
  Description of Artificial Sequence: Synthetic oligonucleotide
guugaauggauggu

SEQ ID NO: 16586 - RNA, 14 nt, Artificial Sequence
  Description of Artificial Sequence: Synthetic oligonucleotide
uguugaauggaugg

SEQ ID NO: 16587 - RNA, 14 nt, Artificial Sequence
  Description of Artificial Sequence: Synthetic oligonucleotide
cuguugaauggaug

SEQ ID NO: 16588 - RNA, 14 nt, Artificial Sequence
  Description of Artificial Sequence: Synthetic oligonucleotide
acuguugaauggau

SEQ ID NO: 16589 - RNA, 14 nt, Artificial Sequence
  Description of Artificial Sequence: Synthetic oligonucleotide
uacuguugaaugga

SEQ ID NO: 16590 - RNA, 14 nt, Artificial Sequence
  Description of Artificial Sequence: Synthetic oligonucleotide
auacuguugaaugg

SEQ ID NO: 16591 - RNA, 14 nt, Artificial Sequence
  Description of Artificial Sequence: Synthetic oligonucleotide
aauacuguugaaug

SEQ ID NO: 16592 - RNA, 14 nt, Artificial Sequence
  Description of Artificial Sequence: Synthetic oligonucleotide
aaauacuguugaau

SEQ ID NO: 16593 - RNA, 14 nt, Artificial Sequence
  Description of Artificial Sequence: Synthetic oligonucleotide
uaaauacuguugaa

SEQ ID NO: 16594 - RNA, 14 nt, Artificial Sequence
  Description of Artificial Sequence: Synthetic oligonucleotide
auaaauacuguuga

SEQ ID NO: 16595 - RNA, 14 nt, Artificial Sequence
  Description of Artificial Sequence: Synthetic oligonucleotide
cauaaauacuguug

SEQ ID NO: 16596 - RNA, 14 nt, Artificial Sequence
  Description of Artificial Sequence: Synthetic oligonucleotide
acauaaauacuguu

SEQ ID NO: 16597 - RNA, 14 nt, Artificial Sequence
  Description of Artificial Sequence: Synthetic oligonucleotide
cacauaaauacugu

SEQ ID NO: 16598 - RNA, 14 nt, Artificial Sequence
  Description of Artificial Sequence: Synthetic oligonucleotide
ucacauaaauacug

SEQ ID NO: 16599 - RNA, 14 nt, Artificial Sequence
  Description of Artificial Sequence: Synthetic oligonucleotide
cucacauaaauacu

SEQ ID NO: 16600 - RNA, 14 nt, Artificial Sequence
  Description of Artificial Sequence: Synthetic oligonucleotide
gcucacauaaauac

SEQ ID NO: 16601 - RNA, 14 nt, Artificial Sequence
  Description of Artificial Sequence: Synthetic oligonucleotide
ggcucacauaaaua

SEQ ID NO: 16602 - RNA, 14 nt, Artificial Sequence
  Description of Artificial Sequence: Synthetic oligonucleotide
uggcucacauaaau

SEQ ID NO: 16603 - RNA, 14 nt, Artificial Sequence
  Description of Artificial Sequence: Synthetic oligonucleotide
uuggcucacauaaa

SEQ ID NO: 16604 - RNA, 14 nt, Artificial Sequence
  Description of Artificial Sequence: Synthetic oligonucleotide
guuggcucacauaa

SEQ ID NO: 16605 - RNA, 14 nt, Artificial Sequence
  Description of Artificial Sequence: Synthetic oligonucleotide
aguuggcucacaua

SEQ ID NO: 16606 - RNA, 14 nt, Artificial Sequence
  Description of Artificial Sequence: Synthetic oligonucleotide
aaguuggcucacau

SEQ ID NO: 16607 - RNA, 14 nt, Artificial Sequence
  Description of Artificial Sequence: Synthetic oligonucleotide
uaaguuggcucaca

SEQ ID NO: 16608 - RNA, 14 nt, Artificial Sequence
  Description of Artificial Sequence: Synthetic oligonucleotide
guaaguuggcucac

SEQ ID NO: 16609 - RNA, 14 nt, Artificial Sequence
  Description of Artificial Sequence: Synthetic oligonucleotide
aguaaguuggcuca

SEQ ID NO: 16610 - RNA, 14 nt, Artificial Sequence
  Description of Artificial Sequence: Synthetic oligonucleotide
uaguaaguuggcuc

SEQ ID NO: 16611 - RNA, 14 nt, Artificial Sequence
  Description of Artificial Sequence: Synthetic oligonucleotide
cuaguaaguuggcu

SEQ ID NO: 16612 - RNA, 14 nt, Artificial Sequence
  Description of Artificial Sequence: Synthetic oligonucleotide
ucuaguaaguuggc

SEQ ID NO: 16613 - RNA, 14 nt, Artificial Sequence
  Description of Artificial Sequence: Synthetic oligonucleotide
cucuaguaaguugg

SEQ ID NO: 16614 - RNA, 14 nt, Artificial Sequence
  Description of Artificial Sequence: Synthetic oligonucleotide
gcucuaguaaguug

SEQ ID NO: 16615 - RNA, 14 nt, Artificial Sequence
  Description of Artificial Sequence: Synthetic oligonucleotide
ggcucuaguaaguu

SEQ ID NO: 16616 - RNA, 14 nt, Artificial Sequence
  Description of Artificial Sequence: Synthetic oligonucleotide
cggcucuaguaagu

SEQ ID NO: 16617 - RNA, 14 nt, Artificial Sequence
  Description of Artificial Sequence: Synthetic oligonucleotide
gcggcucuaguaag

SEQ ID NO: 16618 - RNA, 14 nt, Artificial Sequence
  Description of Artificial Sequence: Synthetic oligonucleotide
agcggcucuaguaa

SEQ ID NO: 16619 - RNA, 14 nt, Artificial Sequence
  Description of Artificial Sequence: Synthetic oligonucleotide
uagcggcucuagua

SEQ ID NO: 16620 - RNA, 14 nt, Artificial Sequence
  Description of Artificial Sequence: Synthetic oligonucleotide
guagcggcucuagu

SEQ ID NO: 16621 - RNA, 14 nt, Artificial Sequence
  Description of Artificial Sequence: Synthetic oligonucleotide
uguagcggcucuag

SEQ ID NO: 16622 - RNA, 14 nt, Artificial Sequence
  Description of Artificial Sequence: Synthetic oligonucleotide
uuguagcggcucua

SEQ ID NO: 16623 - RNA, 14 nt, Artificial Sequence
  Description of Artificial Sequence: Synthetic oligonucleotide
guuguagcggcucu

SEQ ID NO: 16624 - RNA, 14 nt, Artificial Sequence
  Description of Artificial Sequence: Synthetic oligonucleotide
aguuguagcggcuc

SEQ ID NO: 16625 - RNA, 14 nt, Artificial Sequence
  Description of Artificial Sequence: Synthetic oligonucleotide
uaguuguagcggcu

SEQ ID NO: 16626 - RNA, 14 nt, Artificial Sequence
  Description of Artificial Sequence: Synthetic oligonucleotide
uuaguuguagcggc

SEQ ID NO: 16627 - RNA, 14 nt, Artificial Sequence
  Description of Artificial Sequence: Synthetic oligonucleotide
auuaguuguagcgg

SEQ ID NO: 16628 - RNA, 14 nt, Artificial Sequence
  Description of Artificial Sequence: Synthetic oligonucleotide
gauuaguuguagcg

SEQ ID NO: 16629 - RNA, 14 nt, Artificial Sequence
  Description of Artificial Sequence: Synthetic oligonucleotide
ugauuaguuguagc

SEQ ID NO: 16630 - RNA, 14 nt, Artificial Sequence
  Description of Artificial Sequence: Synthetic oligonucleotide
augauuaguuguag

SEQ ID NO: 16631 - RNA, 14 nt, Artificial Sequence
  Description of Artificial Sequence: Synthetic oligonucleotide
caugauuaguugua

SEQ ID NO: 16632 - RNA, 14 nt, Artificial Sequence
  Description of Artificial Sequence: Synthetic oligonucleotide
ucaugauuaguugu

SEQ ID NO: 16633 - RNA, 14 nt, Artificial Sequence
  Description of Artificial Sequence: Synthetic oligonucleotide
aucaugauuaguug

SEQ ID NO: 16634 - RNA, 14 nt, Artificial Sequence
  Description of Artificial Sequence: Synthetic oligonucleotide
uaucaugauuaguu

SEQ ID NO: 16635 - RNA, 14 nt, Artificial Sequence
  Description of Artificial Sequence: Synthetic oligonucleotide
cuaucaugauuagu

SEQ ID NO: 16636 - RNA, 14 nt, Artificial Sequence
  Description of Artificial Sequence: Synthetic oligonucleotide
ucuaucaugauuag

SEQ ID NO: 16637 - RNA, 14 nt, Artificial Sequence
  Description of Artificial Sequence: Synthetic oligonucleotide
gucuaucaugauua

SEQ ID NO: 16638 - RNA, 14 nt, Artificial Sequence
  Description of Artificial Sequence: Synthetic oligonucleotide
ugucuaucaugauu

SEQ ID NO: 16639 - RNA, 14 nt, Artificial Sequence
  Description of Artificial Sequence: Synthetic oligonucleotide
cugucuaucaugau

SEQ ID NO: 16640 - RNA, 14 nt, Artificial Sequence
  Description of Artificial Sequence: Synthetic oligonucleotide
acugucuaucauga

SEQ ID NO: 16641 - RNA, 14 nt, Artificial Sequence
  Description of Artificial Sequence: Synthetic oligonucleotide
gacugucuaucaug

SEQ ID NO: 16642 - RNA, 14 nt, Artificial Sequence
  Description of Artificial Sequence: Synthetic oligonucleotide
ggacugucuaucau

SEQ ID NO: 16643 - RNA, 14 nt, Artificial Sequence
  Description of Artificial Sequence: Synthetic oligonucleotide
uggacugucuauca

SEQ ID NO: 16644 - RNA, 14 nt, Artificial Sequence
  Description of Artificial Sequence: Synthetic oligonucleotide
cuggacugucuauc

SEQ ID NO: 16645 - RNA, 14 nt, Artificial Sequence
  Description of Artificial Sequence: Synthetic oligonucleotide
ucuggacugucuau

SEQ ID NO: 16646 - RNA, 14 nt, Artificial Sequence
  Description of Artificial Sequence: Synthetic oligonucleotide
uucuggacugucua

SEQ ID NO: 16647 - RNA, 14 nt, Artificial Sequence
  Description of Artificial Sequence: Synthetic oligonucleotide
auucuggacugucu

SEQ ID NO: 16648 - RNA, 14 nt, Artificial Sequence
  Description of Artificial Sequence: Synthetic oligonucleotide
gauucuggacuguc

SEQ ID NO: 16649 - RNA, 14 nt, Artificial Sequence
  Description of Artificial Sequence: Synthetic oligonucleotide
agauucuggacugu

SEQ ID NO: 16650 - RNA, 14 nt, Artificial Sequence
  Description of Artificial Sequence: Synthetic oligonucleotide
gagauucuggacug

SEQ ID NO: 16651 - RNA, 14 nt, Artificial Sequence
  Description of Artificial Sequence: Synthetic oligonucleotide
ggagauucuggacu

SEQ ID NO: 16652 - RNA, 14 nt, Artificial Sequence
  Description of Artificial Sequence: Synthetic oligonucleotide
gggagauucuggac

SEQ ID NO: 16653 - RNA, 14 nt, Artificial Sequence
  Description of Artificial Sequence: Synthetic oligonucleotide
agggagauucugga

SEQ ID NO: 16654 - RNA, 14 nt, Artificial Sequence
  Description of Artificial Sequence: Synthetic oligonucleotide
cagggagauucugg

SEQ ID NO: 16655 - RNA, 14 nt, Artificial Sequence
  Description of Artificial Sequence: Synthetic oligonucleotide
ccagggagauucug

SEQ ID NO: 16656 - RNA, 14 nt, Artificial Sequence
  Description of Artificial Sequence: Synthetic oligonucleotide
uccagggagauucu

SEQ ID NO: 16657 - RNA, 14 nt, Artificial Sequence
  Description of Artificial Sequence: Synthetic oligonucleotide
guccagggagauuc

SEQ ID NO: 16658 - RNA, 14 nt, Artificial Sequence
  Description of Artificial Sequence: Synthetic oligonucleotide
aguccagggagauu

SEQ ID NO: 16659 - RNA, 14 nt, Artificial Sequence
  Description of Artificial Sequence: Synthetic oligonucleotide
aaguccagggagau

SEQ ID NO: 16660 - RNA, 14 nt, Artificial Sequence
  Description of Artificial Sequence: Synthetic oligonucleotide
aaaguccagggaga

SEQ ID NO: 16661 - RNA, 14 nt, Artificial Sequence
  Description of Artificial Sequence: Synthetic oligonucleotide
uaaaguccagggag

SEQ ID NO: 16662 - RNA, 14 nt, Artificial Sequence
  Description of Artificial Sequence: Synthetic oligonucleotide
auaaaguccaggga

SEQ ID NO: 16663 - RNA, 14 nt, Artificial Sequence
  Description of Artificial Sequence: Synthetic oligonucleotide
uauaaaguccaggg

SEQ ID NO: 16664 - RNA, 14 nt, Artificial Sequence
  Description of Artificial Sequence: Synthetic oligonucleotide
guauaaaguccagg

SEQ ID NO: 16665 - RNA, 14 nt, Artificial Sequence
  Description of Artificial Sequence: Synthetic oligonucleotide
aguauaaaguccag

SEQ ID NO: 16666 - RNA, 14 nt, Artificial Sequence
  Description of Artificial Sequence: Synthetic oligonucleotide
caguauaaagucca

SEQ ID NO: 16667 - RNA, 14 nt, Artificial Sequence
  Description of Artificial Sequence: Synthetic oligonucleotide
ccaguauaaagucc

SEQ ID NO: 16668 - RNA, 14 nt, Artificial Sequence
  Description of Artificial Sequence: Synthetic oligonucleotide
cccaguauaaaguc

SEQ ID NO: 16669 - RNA, 14 nt, Artificial Sequence
  Description of Artificial Sequence: Synthetic oligonucleotide
gcccaguauaaagu

SEQ ID NO: 16670 - RNA, 14 nt, Artificial Sequence
  Description of Artificial Sequence: Synthetic oligonucleotide
ggcccaguauaaag

SEQ ID NO: 16671 - RNA, 14 nt, Artificial Sequence
  Description of Artificial Sequence: Synthetic oligonucleotide
uggcccaguauaaa

SEQ ID NO: 16672 - RNA, 14 nt, Artificial Sequence
  Description of Artificial Sequence: Synthetic oligonucleotide
cuggcccaguauaa

SEQ ID NO: 16673 - RNA, 14 nt, Artificial Sequence
  Description of Artificial Sequence: Synthetic oligonucleotide
gcuggcccaguaua

SEQ ID NO: 16674 - RNA, 14 nt, Artificial Sequence
  Description of Artificial Sequence: Synthetic oligonucleotide
ggcuggcccaguau

SEQ ID NO: 16675 - RNA, 14 nt, Artificial Sequence
  Description of Artificial Sequence: Synthetic oligonucleotide
aggcuggcccagua

SEQ ID NO: 16676 - RNA, 14 nt, Artificial Sequence
  Description of Artificial Sequence: Synthetic oligonucleotide
gaggcuggcccagu

SEQ ID NO: 16677 - RNA, 14 nt, Artificial Sequence
  Description of Artificial Sequence: Synthetic oligonucleotide
ugaggcuggcccag

SEQ ID NO: 16678 - RNA, 14 nt, Artificial Sequence
  Description of Artificial Sequence: Synthetic oligonucleotide
augaggcuggccca

SEQ ID NO: 16679 - RNA, 14 nt, Artificial Sequence
  Description of Artificial Sequence: Synthetic oligonucleotide
aaugaggcuggccc

SEQ ID NO: 16680 - RNA, 14 nt, Artificial Sequence
  Description of Artificial Sequence: Synthetic oligonucleotide
caaugaggcuggcc

SEQ ID NO: 16681 - RNA, 14 nt, Artificial Sequence
  Description of Artificial Sequence: Synthetic oligonucleotide
acaaugaggcuggc

SEQ ID NO: 16682 - RNA, 14 nt, Artificial Sequence
  Description of Artificial Sequence: Synthetic oligonucleotide
gacaaugaggcugg

SEQ ID NO: 16683 - RNA, 14 nt, Artificial Sequence
  Description of Artificial Sequence: Synthetic oligonucleotide
ggacaaugaggcug

SEQ ID NO: 16684 - RNA, 14 nt, Artificial Sequence
  Description of Artificial Sequence: Synthetic oligonucleotide
gggacaaugaggcu

SEQ ID NO: 16685 - RNA, 14 nt, Artificial Sequence
  Description of Artificial Sequence: Synthetic oligonucleotide
agggacaaugaggc

SEQ ID NO: 16686 - RNA, 14 nt, Artificial Sequence
  Description of Artificial Sequence: Synthetic oligonucleotide
uagggacaaugagg

SEQ ID NO: 16687 - RNA, 14 nt, Artificial Sequence
  Description of Artificial Sequence: Synthetic oligonucleotide
uuagggacaaugag

SEQ ID NO: 16688 - RNA, 14 nt, Artificial Sequence
  Description of Artificial Sequence: Synthetic oligonucleotide
cuuagggacaauga

SEQ ID NO: 16689 - RNA, 14 nt, Artificial Sequence
  Description of Artificial Sequence: Synthetic oligonucleotide
ucuuagggacaaug

SEQ ID NO: 16690 - RNA, 14 nt, Artificial Sequence
  Description of Artificial Sequence: Synthetic oligonucleotide
aucuuagggacaau

SEQ ID NO: 16691 - RNA, 14 nt, Artificial Sequence
  Description of Artificial Sequence: Synthetic oligonucleotide
aaucuuagggacaa

SEQ ID NO: 16692 - RNA, 14 nt, Artificial Sequence
  Description of Artificial Sequence: Synthetic oligonucleotide
aaaucuuagggaca

SEQ ID NO: 16693 - RNA, 14 nt, Artificial Sequence
  Description of Artificial Sequence: Synthetic oligonucleotide
gaaaucuuagggac

SEQ ID NO: 16694 - RNA, 14 nt, Artificial Sequence
  Description of Artificial Sequence: Synthetic oligonucleotide
agaaaucuuaggga

SEQ ID NO: 16695 - RNA, 14 nt, Artificial Sequence
  Description of Artificial Sequence: Synthetic oligonucleotide
gagaaaucuuaggg

SEQ ID NO: 16696 - RNA, 14 nt, Artificial Sequence
  Description of Artificial Sequence: Synthetic oligonucleotide
agagaaaucuuagg

SEQ ID NO: 16697 - RNA, 14 nt, Artificial Sequence
  Description of Artificial Sequence: Synthetic oligonucleotide
aagagaaaucuuag

SEQ ID NO: 16698 - RNA, 14 nt, Artificial Sequence
  Description of Artificial Sequence: Synthetic oligonucleotide
aaagagaaaucuua

SEQ ID NO: 16699 - RNA, 14 nt, Artificial Sequence
  Description of Artificial Sequence: Synthetic oligonucleotide
aaaagagaaaucuu

SEQ ID NO: 16700 - RNA, 14 nt, Artificial Sequence
  Description of Artificial Sequence: Synthetic oligonucleotide
aaaaagagaaaucu

SEQ ID NO: 16701 - RNA, 14 nt, Artificial Sequence
  Description of Artificial Sequence: Synthetic oligonucleotide
uaaaaagagaaauc

SEQ ID NO: 16702 - RNA, 14 nt, Artificial Sequence
  Description of Artificial Sequence: Synthetic oligonucleotide
auaaaaagagaaau

SEQ ID NO: 16703 - RNA, 14 nt, Artificial Sequence
  Description of Artificial Sequence: Synthetic oligonucleotide
cauaaaaagagaaa

SEQ ID NO: 16704 - RNA, 14 nt, Artificial Sequence
  Description of Artificial Sequence: Synthetic oligonucleotide
acauaaaaagagaa

SEQ ID NO: 16705 - RNA, 14 nt, Artificial Sequence
  Description of Artificial Sequence: Synthetic oligonucleotide
gacauaaaaagaga

SEQ ID NO: 16706 - RNA, 14 nt, Artificial Sequence
  Description of Artificial Sequence: Synthetic oligonucleotide
agacauaaaaagag

SEQ ID NO: 16707 - RNA, 14 nt, Artificial Sequence
  Description of Artificial Sequence: Synthetic oligonucleotide
gagacauaaaaaga

SEQ ID NO: 16708 - RNA, 14 nt, Artificial Sequence
  Description of Artificial Sequence: Synthetic oligonucleotide
ugagacauaaaaag

SEQ ID NO: 16709 - RNA, 14 nt, Artificial Sequence
  Description of Artificial Sequence: Synthetic oligonucleotide
augagacauaaaaa

SEQ ID NO: 16710 - RNA, 14 nt, Artificial Sequence
  Description of Artificial Sequence: Synthetic oligonucleotide
caugagacauaaaa

SEQ ID NO: 16711 - RNA, 14 nt, Artificial Sequence
  Description of Artificial Sequence: Synthetic oligonucleotide
ccaugagacauaaa

SEQ ID NO: 16712 - RNA, 14 nt, Artificial Sequence
  Description of Artificial Sequence: Synthetic oligonucleotide
uccaugagacauaa

SEQ ID NO: 16713 - RNA, 14 nt, Artificial Sequence
  Description of Artificial Sequence: Synthetic oligonucleotide
auccaugagacaua

SEQ ID NO: 16714 - RNA, 14 nt, Artificial Sequence
  Description of Artificial Sequence: Synthetic oligonucleotide
aauccaugagacau

SEQ ID NO: 16715 - RNA, 14 nt, Artificial Sequence
  Description of Artificial Sequence: Synthetic oligonucleotide
uaauccaugagaca

SEQ ID NO: 16716 - RNA, 14 nt, Artificial Sequence
  Description of Artificial Sequence: Synthetic oligonucleotide
guaauccaugagac

SEQ ID NO: 16717 - RNA, 14 nt, Artificial Sequence
  Description of Artificial Sequence: Synthetic oligonucleotide
aguaauccaugaga

SEQ ID NO: 16718 - RNA, 14 nt, Artificial Sequence
  Description of Artificial Sequence: Synthetic oligonucleotide
aaguaauccaugag

SEQ ID NO: 16719 - RNA, 14 nt, Artificial Sequence
  Description of Artificial Sequence: Synthetic oligonucleotide
gaaguaauccauga

SEQ ID NO: 16720 - RNA, 14 nt, Artificial Sequence
  Description of Artificial Sequence: Synthetic oligonucleotide
agaaguaauccaug

SEQ ID NO: 16721 - RNA, 14 nt, Artificial Sequence
  Description of Artificial Sequence: Synthetic oligonucleotide
gagaaguaauccau

SEQ ID NO: 16722 - RNA, 14 nt, Artificial Sequence
  Description of Artificial Sequence: Synthetic oligonucleotide
agagaaguaaucca

SEQ ID NO: 16723 - RNA, 14 nt, Artificial Sequence
  Description of Artificial Sequence: Synthetic oligonucleotide
aagagaaguaaucc

SEQ ID NO: 16724 - RNA, 14 nt, Artificial Sequence
  Description of Artificial Sequence: Synthetic oligonucleotide
aaagagaaguaauc

SEQ ID NO: 16725 - RNA, 14 nt, Artificial Sequence
  Description of Artificial Sequence: Synthetic oligonucleotide
aaaagagaaguaau

SEQ ID NO: 16726 - RNA, 14 nt, Artificial Sequence
  Description of Artificial Sequence: Synthetic oligonucleotide
aaaaagagaaguaa

SEQ ID NO: 16727 - RNA, 14 nt, Artificial Sequence
  Description of Artificial Sequence: Synthetic oligonucleotide
uaaaaagagaagua

SEQ ID NO: 16728 - RNA, 14 nt, Artificial Sequence
  Description of Artificial Sequence: Synthetic oligonucleotide
uuaaaaagagaagu

SEQ ID NO: 16729 - RNA, 14 nt, Artificial Sequence
  Description of Artificial Sequence: Synthetic oligonucleotide
auuaaaaagagaag

SEQ ID NO: 16730 - RNA, 14 nt, Artificial Sequence
  Description of Artificial Sequence: Synthetic oligonucleotide
aauuaaaaagagaa

SEQ ID NO: 16731 - RNA, 14 nt, Artificial Sequence
  Description of Artificial Sequence: Synthetic oligonucleotide
caauuaaaaagaga

SEQ ID NO: 16732 - RNA, 14 nt, Artificial Sequence
  Description of Artificial Sequence: Synthetic oligonucleotide
gcaauuaaaaagag

SEQ ID NO: 16733 - RNA, 14 nt, Artificial Sequence
  Description of Artificial Sequence: Synthetic oligonucleotide
ggcaauuaaaaaga

SEQ ID NO: 16734 - RNA, 14 nt, Artificial Sequence
  Description of Artificial Sequence: Synthetic oligonucleotide
gggcaauuaaaaag

SEQ ID NO: 16735 - RNA, 14 nt, Artificial Sequence
  Description of Artificial Sequence: Synthetic oligonucleotide
ggggcaauuaaaaa

SEQ ID NO: 16736 - RNA, 14 nt, Artificial Sequence
  Description of Artificial Sequence: Synthetic oligonucleotide
uggggcaauuaaaa

SEQ ID NO: 16737 - RNA, 14 nt, Artificial Sequence
  Description of Artificial Sequence: Synthetic oligonucleotide
cuggggcaauuaaa

SEQ ID NO: 16738 - RNA, 14 nt, Artificial Sequence
  Description of Artificial Sequence: Synthetic oligonucleotide
ccuggggcaauuaa

SEQ ID NO: 16739 - RNA, 14 nt, Artificial Sequence
  Description of Artificial Sequence: Synthetic oligonucleotide
gccuggggcaauua

SEQ ID NO: 16740 - RNA, 14 nt, Artificial Sequence
  Description of Artificial Sequence: Synthetic oligonucleotide
ugccuggggcaauu

SEQ ID NO: 16741 - RNA, 14 nt, Artificial Sequence
  Description of Artificial Sequence: Synthetic oligonucleotide
gugccuggggcaau

SEQ ID NO: 16742 - RNA, 14 nt, Artificial Sequence
  Description of Artificial Sequence: Synthetic oligonucleotide
ugugccuggggcaa

SEQ ID NO: 16743 - RNA, 14 nt, Artificial Sequence
  Description of Artificial Sequence: Synthetic oligonucleotide
augugccuggggca

SEQ ID NO: 16744 - RNA, 14 nt, Artificial Sequence
  Description of Artificial Sequence: Synthetic oligonucleotide
aaugugccuggggc

SEQ ID NO: 16745 - RNA, 14 nt, Artificial Sequence
  Description of Artificial Sequence: Synthetic oligonucleotide
gaaugugccugggg

SEQ ID NO: 16746 - RNA, 14 nt, Artificial Sequence
  Description of Artificial Sequence: Synthetic oligonucleotide
ggaaugugccuggg

SEQ ID NO: 16747 - RNA, 14 nt, Artificial Sequence
  Description of Artificial Sequence: Synthetic oligonucleotide
uggaaugugccugg

SEQ ID NO: 16748 - RNA, 14 nt, Artificial Sequence
  Description of Artificial Sequence: Synthetic oligonucleotide
uuggaaugugccug

SEQ ID NO: 16749 - RNA, 14 nt, Artificial Sequence
  Description of Artificial Sequence: Synthetic oligonucleotide
uuuggaaugugccu

SEQ ID NO: 16750 - RNA, 14 nt, Artificial Sequence
  Description of Artificial Sequence: Synthetic oligonucleotide
auuuggaaugugcc

SEQ ID NO: 16751 - RNA, 14 nt, Artificial Sequence
  Description of Artificial Sequence: Synthetic oligonucleotide
cauuuggaaugugc

SEQ ID NO: 16752 - RNA, 14 nt, Artificial Sequence
  Description of Artificial Sequence: Synthetic oligonucleotide
ucauuuggaaugug

SEQ ID NO: 16753 - RNA, 14 nt, Artificial Sequence
  Description of Artificial Sequence: Synthetic oligonucleotide
cucauuuggaaugu

SEQ ID NO: 16754 - RNA, 14 nt, Artificial Sequence
  Description of Artificial Sequence: Synthetic oligonucleotide
ucucauuuggaaug

SEQ ID NO: 16755 - RNA, 14 nt, Artificial Sequence
  Description of Artificial Sequence: Synthetic oligonucleotide
uucucauuuggaau

SEQ ID NO: 16756 - RNA, 14 nt, Artificial Sequence
  Description of Artificial Sequence: Synthetic oligonucleotide
guucucauuuggaa

SEQ ID NO: 16757 - RNA, 14 nt, Artificial Sequence
  Description of Artificial Sequence: Synthetic oligonucleotide
gguucucauuugga

SEQ ID NO: 16758 - RNA, 14 nt, Artificial Sequence
  Description of Artificial Sequence: Synthetic oligonucleotide
agguucucauuugg

SEQ ID NO: 16759 - RNA, 14 nt, Artificial Sequence
  Description of Artificial Sequence: Synthetic oligonucleotide
cagguucucauuug

SEQ ID NO: 16760 - RNA, 14 nt, Artificial Sequence
  Description of Artificial Sequence: Synthetic oligonucleotide
ccagguucucauuu

SEQ ID NO: 16761 - RNA, 14 nt, Artificial Sequence
  Description of Artificial Sequence: Synthetic oligonucleotide
accagguucucauu

SEQ ID NO: 16762 - RNA, 14 nt, Artificial Sequence
  Description of Artificial Sequence: Synthetic oligonucleotide
uaccagguucucau

SEQ ID NO: 16763 - RNA, 14 nt, Artificial Sequence
  Description of Artificial Sequence: Synthetic oligonucleotide
uuaccagguucuca

SEQ ID NO: 16764 - RNA, 14 nt, Artificial Sequence
  Description of Artificial Sequence: Synthetic oligonucleotide
uuuaccagguucuc

SEQ ID NO: 16765 - RNA, 14 nt, Artificial Sequence
  Description of Artificial Sequence: Synthetic oligonucleotide
uuuuaccagguucu

SEQ ID NO: 16766 - RNA, 14 nt, Artificial Sequence
  Description of Artificial Sequence: Synthetic oligonucleotide
cuuuuaccagguuc

SEQ ID NO: 16767 - RNA, 14 nt, Artificial Sequence
  Description of Artificial Sequence: Synthetic oligonucleotide
acuuuuaccagguu

SEQ ID NO: 16768 - RNA, 14 nt, Artificial Sequence
  Description of Artificial Sequence: Synthetic oligonucleotide
gacuuuuaccaggu

SEQ ID NO: 16769 - RNA, 14 nt, Artificial Sequence
  Description of Artificial Sequence: Synthetic oligonucleotide
ugacuuuuaccagg

SEQ ID NO: 16770 - RNA, 14 nt, Artificial Sequence
  Description of Artificial Sequence: Synthetic oligonucleotide
gugacuuuuaccag

SEQ ID NO: 16771 - RNA, 14 nt, Artificial Sequence
  Description of Artificial Sequence: Synthetic oligonucleotide
ugugacuuuuacca

SEQ ID NO: 16772 - RNA, 14 nt, Artificial Sequence
  Description of Artificial Sequence: Synthetic oligonucleotide
augugacuuuuacc

SEQ ID NO: 16773 - RNA, 14 nt, Artificial Sequence
  Description of Artificial Sequence: Synthetic oligonucleotide
aaugugacuuuuac

SEQ ID NO: 16774 - RNA, 14 nt, Artificial Sequence
  Description of Artificial Sequence: Synthetic oligonucleotide
caaugugacuuuua

SEQ ID NO: 16775 - RNA, 14 nt, Artificial Sequence
  Description of Artificial Sequence: Synthetic oligonucleotide
ccaaugugacuuuu

SEQ ID NO: 16776 - RNA, 14 nt, Artificial Sequence
  Description of Artificial Sequence: Synthetic oligonucleotide
uccaaugugacuuu

SEQ ID NO: 16777 - RNA, 14 nt, Artificial Sequence
  Description of Artificial Sequence: Synthetic oligonucleotide
guccaaugugacuu

SEQ ID NO: 16778 - RNA, 14 nt, Artificial Sequence
  Description of Artificial Sequence: Synthetic oligonucleotide
gguccaaugugacu

SEQ ID NO: 16779 - RNA, 14 nt, Artificial Sequence
  Description of Artificial Sequence: Synthetic oligonucleotide
ggguccaaugugac

SEQ ID NO: 16780 - RNA, 14 nt, Artificial Sequence
  Description of Artificial Sequence: Synthetic oligonucleotide
gggguccaauguga

SEQ ID NO: 16781 - RNA, 14 nt, Artificial Sequence
  Description of Artificial Sequence: Synthetic oligonucleotide
ggggguccaaugug

SEQ ID NO: 16782 - RNA, 14 nt, Artificial Sequence
  Description of Artificial Sequence: Synthetic oligonucleotide
aggggguccaaugu

SEQ ID NO: 16783 - RNA, 14 nt, Artificial Sequence
  Description of Artificial Sequence: Synthetic oligonucleotide
aaggggguccaaug

SEQ ID NO: 16784 - RNA, 14 nt, Artificial Sequence
  Description of Artificial Sequence: Synthetic oligonucleotide
gaaggggguccaau

SEQ ID NO: 16785 - RNA, 14 nt, Artificial Sequence
  Description of Artificial Sequence: Synthetic oligonucleotide
ugaaggggguccaa

SEQ ID NO: 16786 - RNA, 14 nt, Artificial Sequence
  Description of Artificial Sequence: Synthetic oligonucleotide
cugaagggggucca

SEQ ID NO: 16787 - RNA, 14 nt, Artificial Sequence
  Description of Artificial Sequence: Synthetic oligonucleotide
acugaagggggucc

SEQ ID NO: 16788 - RNA, 14 nt, Artificial Sequence
  Description of Artificial Sequence: Synthetic oligonucleotide
uacugaaggggguc

SEQ ID NO: 16789 - RNA, 14 nt, Artificial Sequence
  Description of Artificial Sequence: Synthetic oligonucleotide
auacugaagggggu

SEQ ID NO: 16790 - RNA, 14 nt, Artificial Sequence
  Description of Artificial Sequence: Synthetic oligonucleotide
cauacugaaggggg

SEQ ID NO: 16791 - RNA, 14 nt, Artificial Sequence
  Description of Artificial Sequence: Synthetic oligonucleotide
acauacugaagggg

SEQ ID NO: 16792 - RNA, 14 nt, Artificial Sequence
  Description of Artificial Sequence: Synthetic oligonucleotide
gacauacugaaggg

SEQ ID NO: 16793 - RNA, 14 nt, Artificial Sequence
  Description of Artificial Sequence: Synthetic oligonucleotide
agacauacugaagg

SEQ ID NO: 16794 - RNA, 14 nt, Artificial Sequence
  Description of Artificial Sequence: Synthetic oligonucleotide
aagacauacugaag

SEQ ID NO: 16795 - RNA, 14 nt, Artificial Sequence
  Description of Artificial Sequence: Synthetic oligonucleotide
gaagacauacugaa

SEQ ID NO: 16796 - RNA, 14 nt, Artificial Sequence
  Description of Artificial Sequence: Synthetic oligonucleotide
cgaagacauacuga

SEQ ID NO: 16797 - RNA, 14 nt, Artificial Sequence
  Description of Artificial Sequence: Synthetic oligonucleotide
ccgaagacauacug

SEQ ID NO: 16798 - RNA, 14 nt, Artificial Sequence
  Description of Artificial Sequence: Synthetic oligonucleotide
gccgaagacauacu

SEQ ID NO: 16799 - RNA, 14 nt, Artificial Sequence
  Description of Artificial Sequence: Synthetic oligonucleotide
agccgaagacauac

SEQ ID NO: 16800 - RNA, 14 nt, Artificial Sequence
  Description of Artificial Sequence: Synthetic oligonucleotide
uagccgaagacaua

SEQ ID NO: 16801 - RNA, 14 nt, Artificial Sequence
  Description of Artificial Sequence: Synthetic oligonucleotide
uuagccgaagacau

SEQ ID NO: 16802 - RNA, 14 nt, Artificial Sequence
  Description of Artificial Sequence: Synthetic oligonucleotide
auuagccgaagaca

SEQ ID NO: 16803 - RNA, 14 nt, Artificial Sequence
  Description of Artificial Sequence: Synthetic oligonucleotide
cauuagccgaagac

SEQ ID NO: 16804 - RNA, 14 nt, Artificial Sequence
  Description of Artificial Sequence: Synthetic oligonucleotide
acauuagccgaaga

SEQ ID NO: 16805 - RNA, 14 nt, Artificial Sequence
  Description of Artificial Sequence: Synthetic oligonucleotide
cacauuagccgaag

SEQ ID NO: 16806 - RNA, 14 nt, Artificial Sequence
  Description of Artificial Sequence: Synthetic oligonucleotide
acacauuagccgaa

SEQ ID NO: 16807 - RNA, 14 nt, Artificial Sequence
  Description of Artificial Sequence: Synthetic oligonucleotide
aacacauuagccga

SEQ ID NO: 16808 - RNA, 14 nt, Artificial Sequence
  Description of Artificial Sequence: Synthetic oligonucleotide
uaacacauuagccg

SEQ ID NO: 16809 - RNA, 14 nt, Artificial Sequence
  Description of Artificial Sequence: Synthetic oligonucleotide
cuaacacauuagcc

SEQ ID NO: 16810 - RNA, 14 nt, Artificial Sequence
  Description of Artificial Sequence: Synthetic oligonucleotide
gcuaacacauuagc

SEQ ID NO: 16811 - RNA, 14 nt, Artificial Sequence
  Description of Artificial Sequence: Synthetic oligonucleotide
ggcuaacacauuag

SEQ ID NO: 16812 - RNA, 14 nt, Artificial Sequence
  Description of Artificial Sequence: Synthetic oligonucleotide
aggcuaacacauua

SEQ ID NO: 16813 - RNA, 14 nt, Artificial Sequence
  Description of Artificial Sequence: Synthetic oligonucleotide
aaggcuaacacauu

SEQ ID NO: 16814 - RNA, 14 nt, Artificial Sequence
  Description of Artificial Sequence: Synthetic oligonucleotide
gaaggcuaacacau

SEQ ID NO: 16815 - RNA, 14 nt, Artificial Sequence
  Description of Artificial Sequence: Synthetic oligonucleotide
ugaaggcuaacaca

SEQ ID NO: 16816 - RNA, 14 nt, Artificial Sequence
  Description of Artificial Sequence: Synthetic oligonucleotide
uugaaggcuaacac

SEQ ID NO: 16817 - RNA, 14 nt, Artificial Sequence
  Description of Artificial Sequence: Synthetic oligonucleotide
auugaaggcuaaca

SEQ ID NO: 16818 - RNA, 14 nt, Artificial Sequence
  Description of Artificial Sequence: Synthetic oligonucleotide
uauugaaggcuaac

SEQ ID NO: 16819 - RNA, 14 nt, Artificial Sequence
  Description of Artificial Sequence: Synthetic oligonucleotide
uuauugaaggcuaa

SEQ ID NO: 16820 - RNA, 14 nt, Artificial Sequence
  Description of Artificial Sequence: Synthetic oligonucleotide
cuuauugaaggcua

SEQ ID NO: 16821 - RNA, 14 nt, Artificial Sequence
  Description of Artificial Sequence: Synthetic oligonucleotide
ccuuauugaaggcu

SEQ ID NO: 16822 - RNA, 14 nt, Artificial Sequence
  Description of Artificial Sequence: Synthetic oligonucleotide
accuuauugaaggc

SEQ ID NO: 16823 - RNA, 14 nt, Artificial Sequence
  Description of Artificial Sequence: Synthetic oligonucleotide
caccuuauugaagg

SEQ ID NO: 16824 - RNA, 14 nt, Artificial Sequence
  Description of Artificial Sequence: Synthetic oligonucleotide
ucaccuuauugaag

SEQ ID NO: 16825 - RNA, 14 nt, Artificial Sequence
  Description of Artificial Sequence: Synthetic oligonucleotide
aucaccuuauugaa

SEQ ID NO: 16826 - RNA, 14 nt, Artificial Sequence
  Description of Artificial Sequence: Synthetic oligonucleotide
uaucaccuuauuga

SEQ ID NO: 16827 - RNA, 14 nt, Artificial Sequence
  Description of Artificial Sequence: Synthetic oligonucleotide
uuaucaccuuauug

SEQ ID NO: 16828 - RNA, 14 nt, Artificial Sequence
  Description of Artificial Sequence: Synthetic oligonucleotide
guuaucaccuuauu

SEQ ID NO: 16829 - RNA, 14 nt, Artificial Sequence
  Description of Artificial Sequence: Synthetic oligonucleotide
gguuaucaccuuau

SEQ ID NO: 16830 - RNA, 14 nt, Artificial Sequence
  Description of Artificial Sequence: Synthetic oligonucleotide
ggguuaucaccuua

SEQ ID NO: 16831 - RNA, 14 nt, Artificial Sequence
  Description of Artificial Sequence: Synthetic oligonucleotide
gggguuaucaccuu

SEQ ID NO: 16832 - RNA, 14 nt, Artificial Sequence
  Description of Artificial Sequence: Synthetic oligonucleotide
agggguuaucaccu

SEQ ID NO: 16833 - RNA, 14 nt, Artificial Sequence
  Description of Artificial Sequence: Synthetic oligonucleotide
aagggguuaucacc

SEQ ID NO: 16834 - RNA, 14 nt, Artificial Sequence
  Description of Artificial Sequence: Synthetic oligonucleotide
aaagggguuaucac

SEQ ID NO: 16835 - RNA, 14 nt, Artificial Sequence
  Description of Artificial Sequence: Synthetic oligonucleotide
aaaagggguuauca

SEQ ID NO: 16836 - RNA, 14 nt, Artificial Sequence
  Description of Artificial Sequence: Synthetic oligonucleotide
gaaaagggguuauc

SEQ ID NO: 16837 - RNA, 14 nt, Artificial Sequence
  Description of Artificial Sequence: Synthetic oligonucleotide
ugaaaagggguuau

SEQ ID NO: 16838 - RNA, 14 nt, Artificial Sequence
  Description of Artificial Sequence: Synthetic oligonucleotide
uugaaaagggguua

SEQ ID NO: 16839 - RNA, 14 nt, Artificial Sequence
  Description of Artificial Sequence: Synthetic oligonucleotide
guugaaaagggguu

SEQ ID NO: 16840 - RNA, 14 nt, Artificial Sequence
  Description of Artificial Sequence: Synthetic oligonucleotide
gguugaaaaggggu

SEQ ID NO: 16841 - RNA, 14 nt, Artificial Sequence
  Description of Artificial Sequence: Synthetic oligonucleotide
agguugaaaagggg

SEQ ID NO: 16842 - RNA, 14 nt, Artificial Sequence
  Description of Artificial Sequence: Synthetic oligonucleotide
uagguugaaaaggg

SEQ ID NO: 16843 - RNA, 14 nt, Artificial Sequence
  Description of Artificial Sequence: Synthetic oligonucleotide
auagguugaaaagg

SEQ ID NO: 16844 - RNA, 14 nt, Artificial Sequence
  Description of Artificial Sequence: Synthetic oligonucleotide
gauagguugaaaag

SEQ ID NO: 16845 - RNA, 14 nt, Artificial Sequence
  Description of Artificial Sequence: Synthetic oligonucleotide
agauagguugaaaa

SEQ ID NO: 16846 - RNA, 14 nt, Artificial Sequence
  Description of Artificial Sequence: Synthetic oligonucleotide
uagauagguugaaa

SEQ ID NO: 16847 - RNA, 14 nt, Artificial Sequence
  Description of Artificial Sequence: Synthetic oligonucleotide
cuagauagguugaa

SEQ ID NO: 16848 - RNA, 14 nt, Artificial Sequence
  Description of Artificial Sequence: Synthetic oligonucleotide
acuagauagguuga

SEQ ID NO: 16849 - RNA, 14 nt, Artificial Sequence
  Description of Artificial Sequence: Synthetic oligonucleotide
gacuagauagguug

SEQ ID NO: 16850 - RNA, 14 nt, Artificial Sequence
  Description of Artificial Sequence: Synthetic oligonucleotide
agacuagauagguu

SEQ ID NO: 16851 - RNA, 14 nt, Artificial Sequence
  Description of Artificial Sequence: Synthetic oligonucleotide
uagacuagauaggu

SEQ ID NO: 16852 - RNA, 14 nt, Artificial Sequence
  Description of Artificial Sequence: Synthetic oligonucleotide
auagacuagauagg

SEQ ID NO: 16853 - RNA, 14 nt, Artificial Sequence
  Description of Artificial Sequence: Synthetic oligonucleotide
uauagacuagauag

SEQ ID NO: 16854 - RNA, 14 nt, Artificial Sequence
  Description of Artificial Sequence: Synthetic oligonucleotide
uuauagacuagaua

SEQ ID NO: 16855 - RNA, 14 nt, Artificial Sequence
  Description of Artificial Sequence: Synthetic oligonucleotide
uuuauagacuagau

SEQ ID NO: 16856 - RNA, 14 nt, Artificial Sequence
  Description of Artificial Sequence: Synthetic oligonucleotide
cuuuauagacuaga

SEQ ID NO: 16857 - RNA, 14 nt, Artificial Sequence
  Description of Artificial Sequence: Synthetic oligonucleotide
ucuuuauagacuag

SEQ ID NO: 16858 - RNA, 14 nt, Artificial Sequence
  Description of Artificial Sequence: Synthetic oligonucleotide
cucuuuauagacua

SEQ ID NO: 16859 - RNA, 14 nt, Artificial Sequence
  Description of Artificial Sequence: Synthetic oligonucleotide
ccucuuuauagacu

SEQ ID NO: 16860 - RNA, 14 nt, Artificial Sequence
  Description of Artificial Sequence: Synthetic oligonucleotide
uccucuuuauagac

SEQ ID NO: 16861 - RNA, 14 nt, Artificial Sequence
  Description of Artificial Sequence: Synthetic oligonucleotide
uuccucuuuauaga

SEQ ID NO: 16862 - RNA, 14 nt, Artificial Sequence
  Description of Artificial Sequence: Synthetic oligonucleotide
uuuccucuuuauag

SEQ ID NO: 16863 - RNA, 14 nt, Artificial Sequence
  Description of Artificial Sequence: Synthetic oligonucleotide
uuuuccucuuuaua

SEQ ID NO: 16864 - RNA, 14 nt, Artificial Sequence
  Description of Artificial Sequence: Synthetic oligonucleotide
uuuuuccucuuuau

SEQ ID NO: 16865 - RNA, 14 nt, Artificial Sequence
  Description of Artificial Sequence: Synthetic oligonucleotide
auuuuuccucuuua

SEQ ID NO: 16866 - RNA, 14 nt, Artificial Sequence
  Description of Artificial Sequence: Synthetic oligonucleotide
aauuuuuccucuuu

SEQ ID NO: 16867 - RNA, 14 nt, Artificial Sequence
  Description of Artificial Sequence: Synthetic oligonucleotide
gaauuuuuccucuu

SEQ ID NO: 16868 - RNA, 14 nt, Artificial Sequence
  Description of Artificial Sequence: Synthetic oligonucleotide
ugaauuuuuccucu

SEQ ID NO: 16869 - RNA, 14 nt, Artificial Sequence
  Description of Artificial Sequence: Synthetic oligonucleotide
cugaauuuuuccuc

SEQ ID NO: 16870 - RNA, 14 nt, Artificial Sequence
  Description of Artificial Sequence: Synthetic oligonucleotide
ucugaauuuuuccu

SEQ ID NO: 16871 - RNA, 14 nt, Artificial Sequence
  Description of Artificial Sequence: Synthetic oligonucleotide
aucugaauuuuucc

SEQ ID NO: 16872 - RNA, 14 nt, Artificial Sequence
  Description of Artificial Sequence: Synthetic oligonucleotide
aaucugaauuuuuc

SEQ ID NO: 16873 - RNA, 14 nt, Artificial Sequence
  Description of Artificial Sequence: Synthetic oligonucleotide
aaaucugaauuuuu

SEQ ID NO: 16874 - RNA, 14 nt, Artificial Sequence
  Description of Artificial Sequence: Synthetic oligonucleotide
caaaucugaauuuu

SEQ ID NO: 16875 - RNA, 14 nt, Artificial Sequence
  Description of Artificial Sequence: Synthetic oligonucleotide
ccaaaucugaauuu

SEQ ID NO: 16876 - RNA, 14 nt, Artificial Sequence
  Description of Artificial Sequence: Synthetic oligonucleotide
uccaaaucugaauu

SEQ ID NO: 16877 - RNA, 14 nt, Artificial Sequence
  Description of Artificial Sequence: Synthetic oligonucleotide
cuccaaaucugaau

SEQ ID NO: 16878 - RNA, 14 nt, Artificial Sequence
  Description of Artificial Sequence: Synthetic oligonucleotide
acuccaaaucugaa

SEQ ID NO: 16879 - RNA, 14 nt, Artificial Sequence
  Description of Artificial Sequence: Synthetic oligonucleotide
aacuccaaaucuga

SEQ ID NO: 16880 - RNA, 14 nt, Artificial Sequence
  Description of Artificial Sequence: Synthetic oligonucleotide
gaacuccaaaucug

SEQ ID NO: 16881 - RNA, 14 nt, Artificial Sequence
  Description of Artificial Sequence: Synthetic oligonucleotide
agaacuccaaaucu

SEQ ID NO: 16882 - RNA, 14 nt, Artificial Sequence
  Description of Artificial Sequence: Synthetic oligonucleotide
uagaacuccaaauc

SEQ ID NO: 16883 - RNA, 14 nt, Artificial Sequence
  Description of Artificial Sequence: Synthetic oligonucleotide
uuagaacuccaaau

SEQ ID NO: 16884 - RNA, 14 nt, Artificial Sequence
  Description of Artificial Sequence: Synthetic oligonucleotide
auuagaacuccaaa

SEQ ID NO: 16885 - RNA, 14 nt, Artificial Sequence
  Description of Artificial Sequence: Synthetic oligonucleotide
gauuagaacuccaa

SEQ ID NO: 16886 - RNA, 14 nt, Artificial Sequence
  Description of Artificial Sequence: Synthetic oligonucleotide
ggauuagaacucca

SEQ ID NO: 16887 - RNA, 14 nt, Artificial Sequence
  Description of Artificial Sequence: Synthetic oligonucleotide
aggauuagaacucc

SEQ ID NO: 16888 - RNA, 14 nt, Artificial Sequence
  Description of Artificial Sequence: Synthetic oligonucleotide
uaggauuagaacuc

SEQ ID NO: 16889 - RNA, 14 nt, Artificial Sequence
  Description of Artificial Sequence: Synthetic oligonucleotide
auaggauuagaacu

SEQ ID NO: 16890 - RNA, 14 nt, Artificial Sequence
  Description of Artificial Sequence: Synthetic oligonucleotide
aauaggauuagaac

SEQ ID NO: 16891 - RNA, 14 nt, Artificial Sequence
  Description of Artificial Sequence: Synthetic oligonucleotide
aaauaggauuagaa

SEQ ID NO: 16892 - RNA, 14 nt, Artificial Sequence
  Description of Artificial Sequence: Synthetic oligonucleotide
gaaauaggauuaga

SEQ ID NO: 16893 - RNA, 14 nt, Artificial Sequence
  Description of Artificial Sequence: Synthetic oligonucleotide
agaaauaggauuag

SEQ ID NO: 16894 - RNA, 14 nt, Artificial Sequence
  Description of Artificial Sequence: Synthetic oligonucleotide
gagaaauaggauua

SEQ ID NO: 16895 - RNA, 14 nt, Artificial Sequence
  Description of Artificial Sequence: Synthetic oligonucleotide
ggagaaauaggauu

SEQ ID NO: 16896 - RNA, 14 nt, Artificial Sequence
  Description of Artificial Sequence: Synthetic oligonucleotide
gggagaaauaggau

SEQ ID NO: 16897 - RNA, 14 nt, Artificial Sequence
  Description of Artificial Sequence: Synthetic oligonucleotide
ugggagaaauagga

SEQ ID NO: 16898 - RNA, 14 nt, Artificial Sequence
  Description of Artificial Sequence: Synthetic oligonucleotide
uugggagaaauagg

SEQ ID NO: 16899 - RNA, 14 nt, Artificial Sequence
  Description of Artificial Sequence: Synthetic oligonucleotide
uuugggagaaauag

SEQ ID NO: 16900 - RNA, 14 nt, Artificial Sequence
  Description of Artificial Sequence: Synthetic oligonucleotide
cuuugggagaaaua

SEQ ID NO: 16901 - RNA, 14 nt, Artificial Sequence
  Description of Artificial Sequence: Synthetic oligonucleotide
ccuuugggagaaau

SEQ ID NO: 16902 - RNA, 14 nt, Artificial Sequence
  Description of Artificial Sequence: Synthetic oligonucleotide
cccuuugggagaaa

SEQ ID NO: 16903 - RNA, 14 nt, Artificial Sequence
  Description of Artificial Sequence: Synthetic oligonucleotide
ucccuuugggagaa

SEQ ID NO: 16904 - RNA, 14 nt, Artificial Sequence
  Description of Artificial Sequence: Synthetic oligonucleotide
uucccuuugggaga

SEQ ID NO: 16905 - RNA, 14 nt, Artificial Sequence
  Description of Artificial Sequence: Synthetic oligonucleotide
guucccuuugggag

SEQ ID NO: 16906 - RNA, 14 nt, Artificial Sequence
  Description of Artificial Sequence: Synthetic oligonucleotide
aguucccuuuggga

SEQ ID NO: 16907 - RNA, 14 nt, Artificial Sequence
  Description of Artificial Sequence: Synthetic oligonucleotide
uaguucccuuuggg

SEQ ID NO: 16908 - RNA, 14 nt, Artificial Sequence
  Description of Artificial Sequence: Synthetic oligonucleotide
auaguucccuuugg

SEQ ID NO: 16909 - RNA, 14 nt, Artificial Sequence
  Description of Artificial Sequence: Synthetic oligonucleotide
aauaguucccuuug

SEQ ID NO: 16910 - RNA, 14 nt, Artificial Sequence
  Description of Artificial Sequence: Synthetic oligonucleotide
gaauaguucccuuu

SEQ ID NO: 16911 - RNA, 14 nt, Artificial Sequence
  Description of Artificial Sequence: Synthetic oligonucleotide
agaauaguucccuu

SEQ ID NO: 16912 - RNA, 14 nt, Artificial Sequence
  Description of Artificial Sequence: Synthetic oligonucleotide
aagaauaguucccu

SEQ ID NO: 16913 - RNA, 14 nt, Artificial Sequence
  Description of Artificial Sequence: Synthetic oligonucleotide
gaagaauaguuccc

SEQ ID NO: 16914 - RNA, 14 nt, Artificial Sequence
  Description of Artificial Sequence: Synthetic oligonucleotide
agaagaauaguucc

SEQ ID NO: 16915 - RNA, 14 nt, Artificial Sequence
  Description of Artificial Sequence: Synthetic oligonucleotide
uagaagaauaguuc

SEQ ID NO: 16916 - RNA, 14 nt, Artificial Sequence
  Description of Artificial Sequence: Synthetic oligonucleotide
guagaagaauaguu

SEQ ID NO: 16917 - RNA, 14 nt, Artificial Sequence
  Description of Artificial Sequence: Synthetic oligonucleotide
gguagaagaauagu

SEQ ID NO: 16918 - RNA, 14 nt, Artificial Sequence
  Description of Artificial Sequence: Synthetic oligonucleotide
ggguagaagaauag

SEQ ID NO: 16919 - RNA, 14 nt, Artificial Sequence
  Description of Artificial Sequence: Synthetic oligonucleotide
gggguagaagaaua

SEQ ID NO: 16920 - RNA, 14 nt, Artificial Sequence
  Description of Artificial Sequence: Synthetic oligonucleotide
ugggguagaagaau

SEQ ID NO: 16921 - RNA, 14 nt, Artificial Sequence
  Description of Artificial Sequence: Synthetic oligonucleotide
augggguagaagaa

SEQ ID NO: 16922 - RNA, 14 nt, Artificial Sequence
  Description of Artificial Sequence: Synthetic oligonucleotide
caugggguagaaga

SEQ ID NO: 16923 - RNA, 14 nt, Artificial Sequence
  Description of Artificial Sequence: Synthetic oligonucleotide
ccaugggguagaag

SEQ ID NO: 16924 - RNA, 14 nt, Artificial Sequence
  Description of Artificial Sequence: Synthetic oligonucleotide
accaugggguagaa

SEQ ID NO: 16925 - RNA, 14 nt, Artificial Sequence
  Description of Artificial Sequence: Synthetic oligonucleotide
aaccaugggguaga

SEQ ID NO: 16926 - RNA, 14 nt, Artificial Sequence
  Description of Artificial Sequence: Synthetic oligonucleotide
gaaccaugggguag

SEQ ID NO: 16927 - RNA, 14 nt, Artificial Sequence
  Description of Artificial Sequence: Synthetic oligonucleotide
agaaccauggggua

SEQ ID NO: 16928 - RNA, 14 nt, Artificial Sequence
  Description of Artificial Sequence: Synthetic oligonucleotide
uagaaccauggggu

SEQ ID NO: 16929 - RNA, 14 nt, Artificial Sequence
  Description of Artificial Sequence: Synthetic oligonucleotide
cuagaaccaugggg

SEQ ID NO: 16930 - RNA, 14 nt, Artificial Sequence
  Description of Artificial Sequence: Synthetic oligonucleotide
ccuagaaccauggg

SEQ ID NO: 16931 - RNA, 14 nt, Artificial Sequence
  Description of Artificial Sequence: Synthetic oligonucleotide
uccuagaaccaugg

SEQ ID NO: 16932 - RNA, 14 nt, Artificial Sequence
  Description of Artificial Sequence: Synthetic oligonucleotide
cuccuagaaccaug

SEQ ID NO: 16933 - RNA, 14 nt, Artificial Sequence
  Description of Artificial Sequence: Synthetic oligonucleotide
ucuccuagaaccau

SEQ ID NO: 16934 - RNA, 14 nt, Artificial Sequence
  Description of Artificial Sequence: Synthetic oligonucleotide
gucuccuagaacca

SEQ ID NO: 16935 - RNA, 14 nt, Artificial Sequence
  Description of Artificial Sequence: Synthetic oligonucleotide
ggucuccuagaacc

SEQ ID NO: 16936 - RNA, 14 nt, Artificial Sequence
  Description of Artificial Sequence: Synthetic oligonucleotide
uggucuccuagaac

SEQ ID NO: 16937 - RNA, 14 nt, Artificial Sequence
  Description of Artificial Sequence: Synthetic oligonucleotide
guggucuccuagaa

SEQ ID NO: 16938 - RNA, 14 nt, Artificial Sequence
  Description of Artificial Sequence: Synthetic oligonucleotide
aguggucuccuaga

SEQ ID NO: 16939 - RNA, 14 nt, Artificial Sequence
  Description of Artificial Sequence: Synthetic oligonucleotide
aaguggucuccuag

SEQ ID NO: 16940 - RNA, 14 nt, Artificial Sequence
  Description of Artificial Sequence: Synthetic oligonucleotide
gaaguggucuccua

SEQ ID NO: 16941 - RNA, 14 nt, Artificial Sequence
  Description of Artificial Sequence: Synthetic oligonucleotide
ugaaguggucuccu

SEQ ID NO: 16942 - RNA, 14 nt, Artificial Sequence
  Description of Artificial Sequence: Synthetic oligonucleotide
gugaaguggucucc

SEQ ID NO: 16943 - RNA, 14 nt, Artificial Sequence
  Description of Artificial Sequence: Synthetic oligonucleotide
agugaaguggucuc

SEQ ID NO: 16944 - RNA, 14 nt, Artificial Sequence
  Description of Artificial Sequence: Synthetic oligonucleotide
cagugaaguggucu

SEQ ID NO: 16945 - RNA, 14 nt, Artificial Sequence
  Description of Artificial Sequence: Synthetic oligonucleotide
acagugaagugguc

SEQ ID NO: 16946 - RNA, 14 nt, Artificial Sequence
  Description of Artificial Sequence: Synthetic oligonucleotide
cacagugaaguggu

SEQ ID NO: 16947 - RNA, 14 nt, Artificial Sequence
  Description of Artificial Sequence: Synthetic oligonucleotide
gcacagugaagugg

SEQ ID NO: 16948 - RNA, 14 nt, Artificial Sequence
  Description of Artificial Sequence: Synthetic oligonucleotide
ugcacagugaagug

SEQ ID NO: 16949 - RNA, 14 nt, Artificial Sequence
  Description of Artificial Sequence: Synthetic oligonucleotide
uugcacagugaagu

SEQ ID NO: 16950 - RNA, 14 nt, Artificial Sequence
  Description of Artificial Sequence: Synthetic oligonucleotide
guugcacagugaag

SEQ ID NO: 16951 - RNA, 14 nt, Artificial Sequence
  Description of Artificial Sequence: Synthetic oligonucleotide
uguugcacagugaa

SEQ ID NO: 16952 - RNA, 14 nt, Artificial Sequence
  Description of Artificial Sequence: Synthetic oligonucleotide
cuguugcacaguga

SEQ ID NO: 16953 - RNA, 14 nt, Artificial Sequence
  Description of Artificial Sequence: Synthetic oligonucleotide
acuguugcacagug

SEQ ID NO: 16954 - RNA, 14 nt, Artificial Sequence
  Description of Artificial Sequence: Synthetic oligonucleotide
aacuguugcacagu

SEQ ID NO: 16955 - RNA, 14 nt, Artificial Sequence
  Description of Artificial Sequence: Synthetic oligonucleotide
aaacuguugcacag

SEQ ID NO: 16956 - RNA, 14 nt, Artificial Sequence
  Description of Artificial Sequence: Synthetic oligonucleotide
aaaacuguugcaca

SEQ ID NO: 16957 - RNA, 14 nt, Artificial Sequence
  Description of Artificial Sequence: Synthetic oligonucleotide
uaaaacuguugcac

SEQ ID NO: 16958 - RNA, 14 nt, Artificial Sequence
  Description of Artificial Sequence: Synthetic oligonucleotide
guaaaacuguugca

SEQ ID NO: 16959 - RNA, 14 nt, Artificial Sequence
  Description of Artificial Sequence: Synthetic oligonucleotide
uguaaaacuguugc

SEQ ID NO: 16960 - RNA, 14 nt, Artificial Sequence
  Description of Artificial Sequence: Synthetic oligonucleotide
auguaaaacuguug

SEQ ID NO: 16961 - RNA, 14 nt, Artificial Sequence
  Description of Artificial Sequence: Synthetic oligonucleotide
cauguaaaacuguu

SEQ ID NO: 16962 - RNA, 14 nt, Artificial Sequence
  Description of Artificial Sequence: Synthetic oligonucleotide
gcauguaaaacugu

SEQ ID NO: 16963 - RNA, 14 nt, Artificial Sequence
  Description of Artificial Sequence: Synthetic oligonucleotide
ugcauguaaaacug

SEQ ID NO: 16964 - RNA, 14 nt, Artificial Sequence
  Description of Artificial Sequence: Synthetic oligonucleotide
augcauguaaaacu

SEQ ID NO: 16965 - RNA, 14 nt, Artificial Sequence
  Description of Artificial Sequence: Synthetic oligonucleotide
aaugcauguaaaac

SEQ ID NO: 16966 - RNA, 14 nt, Artificial Sequence
  Description of Artificial Sequence: Synthetic oligonucleotide
caaugcauguaaaa

SEQ ID NO: 16967 - RNA, 14 nt, Artificial Sequence
  Description of Artificial Sequence: Synthetic oligonucleotide
acaaugcauguaaa

SEQ ID NO: 16968 - RNA, 14 nt, Artificial Sequence
  Description of Artificial Sequence: Synthetic oligonucleotide
cacaaugcauguaa

SEQ ID NO: 16969 - RNA, 14 nt, Artificial Sequence
  Description of Artificial Sequence: Synthetic oligonucleotide
ccacaaugcaugua

SEQ ID NO: 16970 - RNA, 14 nt, Artificial Sequence
  Description of Artificial Sequence: Synthetic oligonucleotide
uccacaaugcaugu

SEQ ID NO: 16971 - RNA, 14 nt, Artificial Sequence
  Description of Artificial Sequence: Synthetic oligonucleotide
auccacaaugcaug

SEQ ID NO: 16972 - RNA, 14 nt, Artificial Sequence
  Description of Artificial Sequence: Synthetic oligonucleotide
cauccacaaugcau

SEQ ID NO: 16973 - RNA, 14 nt, Artificial Sequence
  Description of Artificial Sequence: Synthetic oligonucleotide
ccauccacaaugca

SEQ ID NO: 16974 - RNA, 14 nt, Artificial Sequence
  Description of Artificial Sequence: Synthetic oligonucleotide
uccauccacaaugc

SEQ ID NO: 16975 - RNA, 14 nt, Artificial Sequence
  Description of Artificial Sequence: Synthetic oligonucleotide
cuccauccacaaug

SEQ ID NO: 16976 - RNA, 14 nt, Artificial Sequence
  Description of Artificial Sequence: Synthetic oligonucleotide
ccuccauccacaau

SEQ ID NO: 16977 - RNA, 14 nt, Artificial Sequence
  Description of Artificial Sequence: Synthetic oligonucleotide
uccuccauccacaa

SEQ ID NO: 16978 - RNA, 14 nt, Artificial Sequence
  Description of Artificial Sequence: Synthetic oligonucleotide
auccuccauccaca

SEQ ID NO: 16979 - RNA, 14 nt, Artificial Sequence
  Description of Artificial Sequence: Synthetic oligonucleotide
uauccuccauccac

SEQ ID NO: 16980 - RNA, 14 nt, Artificial Sequence
  Description of Artificial Sequence: Synthetic oligonucleotide
auauccuccaucca

SEQ ID NO: 16981 - RNA, 14 nt, Artificial Sequence
  Description of Artificial Sequence: Synthetic oligonucleotide
aauauccuccaucc

SEQ ID NO: 16982 - RNA, 14 nt, Artificial Sequence
  Description of Artificial Sequence: Synthetic oligonucleotide
aaauauccuccauc

SEQ ID NO: 16983 - RNA, 14 nt, Artificial Sequence
  Description of Artificial Sequence: Synthetic oligonucleotide
aaaauauccuccau

SEQ ID NO: 16984 - RNA, 14 nt, Artificial Sequence
  Description of Artificial Sequence: Synthetic oligonucleotide
aaaaauauccucca

SEQ ID NO: 16985 - RNA, 14 nt, Artificial Sequence
  Description of Artificial Sequence: Synthetic oligonucleotide
uaaaaauauccucc

SEQ ID NO: 16986 - RNA, 14 nt, Artificial Sequence
  Description of Artificial Sequence: Synthetic oligonucleotide
auaaaaauauccuc

SEQ ID NO: 16987 - RNA, 14 nt, Artificial Sequence
  Description of Artificial Sequence: Synthetic oligonucleotide
aauaaaaauauccu

SEQ ID NO: 16988 - RNA, 14 nt, Artificial Sequence
  Description of Artificial Sequence: Synthetic oligonucleotide
gaauaaaaauaucc

SEQ ID NO: 16989 - RNA, 14 nt, Artificial Sequence
  Description of Artificial Sequence: Synthetic oligonucleotide
agaauaaaaauauc

SEQ ID NO: 16990 - RNA, 14 nt, Artificial Sequence
  Description of Artificial Sequence: Synthetic oligonucleotide
cagaauaaaaauau

SEQ ID NO: 16991 - RNA, 14 nt, Artificial Sequence
  Description of Artificial Sequence: Synthetic oligonucleotide
ucagaauaaaaaua

SEQ ID NO: 16992 - RNA, 14 nt, Artificial Sequence
  Description of Artificial Sequence: Synthetic oligonucleotide
uucagaauaaaaau

SEQ ID NO: 16993 - RNA, 14 nt, Artificial Sequence
  Description of Artificial Sequence: Synthetic oligonucleotide
guucagaauaaaaa

SEQ ID NO: 16994 - RNA, 14 nt, Artificial Sequence
  Description of Artificial Sequence: Synthetic oligonucleotide
aguucagaauaaaa

SEQ ID NO: 16995 - RNA, 14 nt, Artificial Sequence
  Description of Artificial Sequence: Synthetic oligonucleotide
caguucagaauaaa

SEQ ID NO: 16996 - RNA, 14 nt, Artificial Sequence
  Description of Artificial Sequence: Synthetic oligonucleotide
acaguucagaauaa

SEQ ID NO: 16997 - RNA, 14 nt, Artificial Sequence
  Description of Artificial Sequence: Synthetic oligonucleotide
aacaguucagaaua

SEQ ID NO: 16998 - RNA, 14 nt, Artificial Sequence
  Description of Artificial Sequence: Synthetic oligonucleotide
uaacaguucagaau

SEQ ID NO: 16999 - RNA, 14 nt, Artificial Sequence
  Description of Artificial Sequence: Synthetic oligonucleotide
guaacaguucagaa

SEQ ID NO: 17000 - RNA, 14 nt, Artificial Sequence
  Description of Artificial Sequence: Synthetic oligonucleotide
uguaacaguucaga

SEQ ID NO: 17001 - RNA, 14 nt, Artificial Sequence
  Description of Artificial Sequence: Synthetic oligonucleotide
auguaacaguucag

SEQ ID NO: 17002 - RNA, 14 nt, Artificial Sequence
  Description of Artificial Sequence: Synthetic oligonucleotide
aauguaacaguuca

SEQ ID NO: 17003 - RNA, 14 nt, Artificial Sequence
  Description of Artificial Sequence: Synthetic oligonucleotide
aaauguaacaguuc

SEQ ID NO: 17004 - RNA, 14 nt, Artificial Sequence
  Description of Artificial Sequence: Synthetic oligonucleotide
uaaauguaacaguu

SEQ ID NO: 17005 - RNA, 14 nt, Artificial Sequence
  Description of Artificial Sequence: Synthetic oligonucleotide
cuaaauguaacagu

SEQ ID NO: 17006 - RNA, 14 nt, Artificial Sequence
  Description of Artificial Sequence: Synthetic oligonucleotide
ccuaaauguaacag

SEQ ID NO: 17007 - RNA, 14 nt, Artificial Sequence
  Description of Artificial Sequence: Synthetic oligonucleotide
accuaaauguaaca

SEQ ID NO: 17008 - RNA, 14 nt, Artificial Sequence
  Description of Artificial Sequence: Synthetic oligonucleotide
uaccuaaauguaac

SEQ ID NO: 17009 - RNA, 14 nt, Artificial Sequence
  Description of Artificial Sequence: Synthetic oligonucleotide
uuaccuaaauguaa

SEQ ID NO: 17010 - RNA, 14 nt, Artificial Sequence
  Description of Artificial Sequence: Synthetic oligonucleotide
uuuaccuaaaugua

SEQ ID NO: 17011 - RNA, 14 nt, Artificial Sequence
  Description of Artificial Sequence: Synthetic oligonucleotide
uuuuaccuaaaugu

SEQ ID NO: 17012 - RNA, 14 nt, Artificial Sequence
  Description of Artificial Sequence: Synthetic oligonucleotide
uuuuuaccuaaaug

SEQ ID NO: 17013 - RNA, 14 nt, Artificial Sequence
  Description of Artificial Sequence: Synthetic oligonucleotide
auuuuuaccuaaau

SEQ ID NO: 17014 - RNA, 14 nt, Artificial Sequence
  Description of Artificial Sequence: Synthetic oligonucleotide
uauuuuuaccuaaa

SEQ ID NO: 17015 - RNA, 14 nt, Artificial Sequence
  Description of Artificial Sequence: Synthetic oligonucleotide
auauuuuuaccuaa

SEQ ID NO: 17016 - RNA, 14 nt, Artificial Sequence
  Description of Artificial Sequence: Synthetic oligonucleotide
aauauuuuuaccua

SEQ ID NO: 17017 - RNA, 14 nt, Artificial Sequence
  Description of Artificial Sequence: Synthetic oligonucleotide
aaauauuuuuaccu

SEQ ID NO: 17018 - RNA, 14 nt, Artificial Sequence
  Description of Artificial Sequence: Synthetic oligonucleotide
aaaauauuuuuacc

SEQ ID NO: 17019 - RNA, 14 nt, Artificial Sequence
  Description of Artificial Sequence: Synthetic oligonucleotide
gaaaauauuuuuac

SEQ ID NO: 17020 - RNA, 14 nt, Artificial Sequence
  Description of Artificial Sequence: Synthetic oligonucleotide
agaaaauauuuuua

SEQ ID NO: 17021 - RNA, 14 nt, Artificial Sequence
  Description of Artificial Sequence: Synthetic oligonucleotide
cagaaaauauuuuu

SEQ ID NO: 17022 - RNA, 14 nt, Artificial Sequence
  Description of Artificial Sequence: Synthetic oligonucleotide
gcagaaaauauuuu

SEQ ID NO: 17023 - RNA, 14 nt, Artificial Sequence
  Description of Artificial Sequence: Synthetic oligonucleotide
ugcagaaaauauuu

SEQ ID NO: 17024 - RNA, 14 nt, Artificial Sequence
  Description of Artificial Sequence: Synthetic oligonucleotide
cugcagaaaauauu

SEQ ID NO: 17025 - RNA, 14 nt, Artificial Sequence
  Description of Artificial Sequence: Synthetic oligonucleotide
acugcagaaaauau

SEQ ID NO: 17026 - RNA, 14 nt, Artificial Sequence
  Description of Artificial Sequence: Synthetic oligonucleotide
cacugcagaaaaua

SEQ ID NO: 17027 - RNA, 14 nt, Artificial Sequence
  Description of Artificial Sequence: Synthetic oligonucleotide
ccacugcagaaaau

SEQ ID NO: 17028 - RNA, 14 nt, Artificial Sequence
  Description of Artificial Sequence: Synthetic oligonucleotide
accacugcagaaaa

SEQ ID NO: 17029 - RNA, 14 nt, Artificial Sequence
  Description of Artificial Sequence: Synthetic oligonucleotide
uaccacugcagaaa

SEQ ID NO: 17030 - RNA, 14 nt, Artificial Sequence
  Description of Artificial Sequence: Synthetic oligonucleotide
uuaccacugcagaa

SEQ ID NO: 17031 - RNA, 14 nt, Artificial Sequence
  Description of Artificial Sequence: Synthetic oligonucleotide
guuaccacugcaga

SEQ ID NO: 17032 - RNA, 14 nt, Artificial Sequence
  Description of Artificial Sequence: Synthetic oligonucleotide
aguuaccacugcag

SEQ ID NO: 17033 - RNA, 14 nt, Artificial Sequence
  Description of Artificial Sequence: Synthetic oligonucleotide
caguuaccacugca

SEQ ID NO: 17034 - RNA, 14 nt, Artificial Sequence
  Description of Artificial Sequence: Synthetic oligonucleotide
ucaguuaccacugc

SEQ ID NO: 17035 - RNA, 14 nt, Artificial Sequence
  Description of Artificial Sequence: Synthetic oligonucleotide
aucaguuaccacug

SEQ ID NO: 17036 - RNA, 14 nt, Artificial Sequence
  Description of Artificial Sequence: Synthetic oligonucleotide
aaucaguuaccacu

SEQ ID NO: 17037 - RNA, 14 nt, Artificial Sequence
  Description of Artificial Sequence: Synthetic oligonucleotide
uaaucaguuaccac

SEQ ID NO: 17038 - RNA, 14 nt, Artificial Sequence
  Description of Artificial Sequence: Synthetic oligonucleotide
cuaaucaguuacca

SEQ ID NO: 17039 - RNA, 14 nt, Artificial Sequence
  Description of Artificial Sequence: Synthetic oligonucleotide
ucuaaucaguuacc

SEQ ID NO: 17040 - RNA, 14 nt, Artificial Sequence
  Description of Artificial Sequence: Synthetic oligonucleotide
uucuaaucaguuac

SEQ ID NO: 17041 - RNA, 14 nt, Artificial Sequence
  Description of Artificial Sequence: Synthetic oligonucleotide
uuucuaaucaguua

SEQ ID NO: 17042 - RNA, 14 nt, Artificial Sequence
  Description of Artificial Sequence: Synthetic oligonucleotide
uuuucuaaucaguu

SEQ ID NO: 17043 - RNA, 14 nt, Artificial Sequence
  Description of Artificial Sequence: Synthetic oligonucleotide
uuuuucuaaucagu

SEQ ID NO: 17044 - RNA, 14 nt, Artificial Sequence
  Description of Artificial Sequence: Synthetic oligonucleotide
auuuuucuaaucag

SEQ ID NO: 17045 - RNA, 14 nt, Artificial Sequence
  Description of Artificial Sequence: Synthetic oligonucleotide
cauuuuucuaauca

SEQ ID NO: 17046 - RNA, 14 nt, Artificial Sequence
  Description of Artificial Sequence: Synthetic oligonucleotide
gcauuuuucuaauc

SEQ ID NO: 17047 - RNA, 14 nt, Artificial Sequence
  Description of Artificial Sequence: Synthetic oligonucleotide
ggcauuuuucuaau

SEQ ID NO: 17048 - RNA, 14 nt, Artificial Sequence
  Description of Artificial Sequence: Synthetic oligonucleotide
uggcauuuuucuaa

SEQ ID NO: 17049 - RNA, 14 nt, Artificial Sequence
  Description of Artificial Sequence: Synthetic oligonucleotide
uuggcauuuuucua

SEQ ID NO: 17050 - RNA, 14 nt, Artificial Sequence
  Description of Artificial Sequence: Synthetic oligonucleotide
auuggcauuuuucu

SEQ ID NO: 17051 - RNA, 14 nt, Artificial Sequence
  Description of Artificial Sequence: Synthetic oligonucleotide
aauuggcauuuuuc

SEQ ID NO: 17052 - RNA, 14 nt, Artificial Sequence
  Description of Artificial Sequence: Synthetic oligonucleotide
caauuggcauuuuu

SEQ ID NO: 17053 - RNA, 14 nt, Artificial Sequence
  Description of Artificial Sequence: Synthetic oligonucleotide
ccaauuggcauuuu

SEQ ID NO: 17054 - RNA, 14 nt, Artificial Sequence
  Description of Artificial Sequence: Synthetic oligonucleotide
uccaauuggcauuu

SEQ ID NO: 17055 - RNA, 14 nt, Artificial Sequence
  Description of Artificial Sequence: Synthetic oligonucleotide
auccaauuggcauu

SEQ ID NO: 17056 - RNA, 14 nt, Artificial Sequence
  Description of Artificial Sequence: Synthetic oligonucleotide
cauccaauuggcau

SEQ ID NO: 17057 - RNA, 14 nt, Artificial Sequence
  Description of Artificial Sequence: Synthetic oligonucleotide
gcauccaauuggca

SEQ ID NO: 17058 - RNA, 14 nt, Artificial Sequence
  Description of Artificial Sequence: Synthetic oligonucleotide
ggcauccaauuggc

SEQ ID NO: 17059 - RNA, 14 nt, Artificial Sequence
  Description of Artificial Sequence: Synthetic oligonucleotide
gggcauccaauugg

SEQ ID NO: 17060 - RNA, 14 nt, Artificial Sequence
  Description of Artificial Sequence: Synthetic oligonucleotide
agggcauccaauug

SEQ ID NO: 17061 - RNA, 14 nt, Artificial Sequence
  Description of Artificial Sequence: Synthetic oligonucleotide
aagggcauccaauu

SEQ ID NO: 17062 - RNA, 14 nt, Artificial Sequence
  Description of Artificial Sequence: Synthetic oligonucleotide
uaagggcauccaau

SEQ ID NO: 17063 - RNA, 14 nt, Artificial Sequence
  Description of Artificial Sequence: Synthetic oligonucleotide
cuaagggcauccaa

SEQ ID NO: 17064 - RNA, 14 nt, Artificial Sequence
  Description of Artificial Sequence: Synthetic oligonucleotide
ccuaagggcaucca

SEQ ID NO: 17065 - RNA, 14 nt, Artificial Sequence
  Description of Artificial Sequence: Synthetic oligonucleotide
accuaagggcaucc

SEQ ID NO: 17066 - RNA, 14 nt, Artificial Sequence
  Description of Artificial Sequence: Synthetic oligonucleotide
caccuaagggcauc

SEQ ID NO: 17067 - RNA, 14 nt, Artificial Sequence
  Description of Artificial Sequence: Synthetic oligonucleotide
ccaccuaagggcau

SEQ ID NO: 17068 - RNA, 14 nt, Artificial Sequence
  Description of Artificial Sequence: Synthetic oligonucleotide
uccaccuaagggca

SEQ ID NO: 17069 - RNA, 14 nt, Artificial Sequence
  Description of Artificial Sequence: Synthetic oligonucleotide
cuccaccuaagggc

SEQ ID NO: 17070 - RNA, 14 nt, Artificial Sequence
  Description of Artificial Sequence: Synthetic oligonucleotide
ccuccaccuaaggg

SEQ ID NO: 17071 - RNA, 14 nt, Artificial Sequence
  Description of Artificial Sequence: Synthetic oligonucleotide
accuccaccuaagg

SEQ ID NO: 17072 - RNA, 14 nt, Artificial Sequence
  Description of Artificial Sequence: Synthetic oligonucleotide
caccuccaccuaag

SEQ ID NO: 17073 - RNA, 14 nt, Artificial Sequence
  Description of Artificial Sequence: Synthetic oligonucleotide
ucaccuccaccuaa

SEQ ID NO: 17074 - RNA, 14 nt, Artificial Sequence
  Description of Artificial Sequence: Synthetic oligonucleotide
cucaccuccaccua

SEQ ID NO: 17075 - RNA, 14 nt, Artificial Sequence
  Description of Artificial Sequence: Synthetic oligonucleotide
ucucaccuccaccu

SEQ ID NO: 17076 - RNA, 14 nt, Artificial Sequence
  Description of Artificial Sequence: Synthetic oligonucleotide
uucucaccuccacc

SEQ ID NO: 17077 - RNA, 14 nt, Artificial Sequence
  Description of Artificial Sequence: Synthetic oligonucleotide
uuucucaccuccac

SEQ ID NO: 17078 - RNA, 14 nt, Artificial Sequence
  Description of Artificial Sequence: Synthetic oligonucleotide
uuuucucaccucca

SEQ ID NO: 17079 - RNA, 14 nt, Artificial Sequence
  Description of Artificial Sequence: Synthetic oligonucleotide
auuuucucaccucc

SEQ ID NO: 17080 - RNA, 14 nt, Artificial Sequence
  Description of Artificial Sequence: Synthetic oligonucleotide
cauuuucucaccuc

SEQ ID NO: 17081 - RNA, 14 nt, Artificial Sequence
  Description of Artificial Sequence: Synthetic oligonucleotide
ccauuuucucaccu

SEQ ID NO: 17082 - RNA, 14 nt, Artificial Sequence
  Description of Artificial Sequence: Synthetic oligonucleotide
gccauuuucucacc

SEQ ID NO: 17083 - RNA, 14 nt, Artificial Sequence
  Description of Artificial Sequence: Synthetic oligonucleotide
ugccauuuucucac

SEQ ID NO: 17084 - RNA, 14 nt, Artificial Sequence
  Description of Artificial Sequence: Synthetic oligonucleotide
augccauuuucuca

SEQ ID NO: 17085 - RNA, 14 nt, Artificial Sequence
  Description of Artificial Sequence: Synthetic oligonucleotide
gaugccauuuucuc

SEQ ID NO: 17086 - RNA, 14 nt, Artificial Sequence
  Description of Artificial Sequence: Synthetic oligonucleotide
ggaugccauuuucu

SEQ ID NO: 17087 - RNA, 14 nt, Artificial Sequence
  Description of Artificial Sequence: Synthetic oligonucleotide
aggaugccauuuuc

SEQ ID NO: 17088 - RNA, 14 nt, Artificial Sequence
  Description of Artificial Sequence: Synthetic oligonucleotide
aaggaugccauuuu

SEQ ID NO: 17089 - RNA, 14 nt, Artificial Sequence
  Description of Artificial Sequence: Synthetic oligonucleotide
caaggaugccauuu

SEQ ID NO: 17090 - RNA, 14 nt, Artificial Sequence
  Description of Artificial Sequence: Synthetic oligonucleotide
gcaaggaugccauu

SEQ ID NO: 17091 - RNA, 14 nt, Artificial Sequence
  Description of Artificial Sequence: Synthetic oligonucleotide
ggcaaggaugccau

SEQ ID NO: 17092 - RNA, 14 nt, Artificial Sequence
  Description of Artificial Sequence: Synthetic oligonucleotide
aggcaaggaugcca

SEQ ID NO: 17093 - RNA, 14 nt, Artificial Sequence
  Description of Artificial Sequence: Synthetic oligonucleotide
aaggcaaggaugcc

SEQ ID NO: 17094 - RNA, 14 nt, Artificial Sequence
  Description of Artificial Sequence: Synthetic oligonucleotide
gaaggcaaggaugc

SEQ ID NO: 17095 - RNA, 14 nt, Artificial Sequence
  Description of Artificial Sequence: Synthetic oligonucleotide
agaaggcaaggaug

SEQ ID NO: 17096 - RNA, 14 nt, Artificial Sequence
  Description of Artificial Sequence: Synthetic oligonucleotide
aagaaggcaaggau

SEQ ID NO: 17097 - DNA, 14 bp, Artificial Sequence
  Description of Artificial Sequence: Synthetic oligonucleotide
gaagaaggcaagga

SEQ ID NO: 17098 - DNA, 14 bp, Artificial Sequence
  Description of Artificial Sequence: Synthetic oligonucleotide
agaagaaggcaagg

SEQ ID NO: 17099 - DNA, 14 bp, Artificial Sequence
  Description of Artificial Sequence: Synthetic oligonucleotide
gagaagaaggcaag

SEQ ID NO: 17100 - RNA, 14 nt, Artificial Sequence
  Description of Artificial Sequence: Synthetic oligonucleotide
ugagaagaaggcaa

SEQ ID NO: 17101 - RNA, 14 nt, Artificial Sequence
  Description of Artificial Sequence: Synthetic oligonucleotide
uugagaagaaggca

SEQ ID NO: 17102 - RNA, 14 nt, Artificial Sequence
  Description of Artificial Sequence: Synthetic oligonucleotide
auugagaagaaggc

SEQ ID NO: 17103 - RNA, 14 nt, Artificial Sequence
  Description of Artificial Sequence: Synthetic oligonucleotide
uauugagaagaagg

SEQ ID NO: 17104 - RNA, 14 nt, Artificial Sequence
  Description of Artificial Sequence: Synthetic oligonucleotide
auauugagaagaag

SEQ ID NO: 17105 - RNA, 14 nt, Artificial Sequence
  Description of Artificial Sequence: Synthetic oligonucleotide
cauauugagaagaa

SEQ ID NO: 17106 - RNA, 14 nt, Artificial Sequence
  Description of Artificial Sequence: Synthetic oligonucleotide
ucauauugagaaga

SEQ ID NO: 17107 - RNA, 14 nt, Artificial Sequence
  Description of Artificial Sequence: Synthetic oligonucleotide
uucauauugagaag

SEQ ID NO: 17108 - RNA, 14 nt, Artificial Sequence
  Description of Artificial Sequence: Synthetic oligonucleotide
uuucauauugagaa

SEQ ID NO: 17109 - RNA, 14 nt, Artificial Sequence
  Description of Artificial Sequence: Synthetic oligonucleotide
guuucauauugaga

SEQ ID NO: 17110 - RNA, 14 nt, Artificial Sequence
  Description of Artificial Sequence: Synthetic oligonucleotide
uguuucauauugag

SEQ ID NO: 17111 - RNA, 14 nt, Artificial Sequence
  Description of Artificial Sequence: Synthetic oligonucleotide
auguuucauauuga

SEQ ID NO: 17112 - RNA, 14 nt, Artificial Sequence
  Description of Artificial Sequence: Synthetic oligonucleotide
aauguuucauauug

SEQ ID NO: 17113 - RNA, 14 nt, Artificial Sequence
  Description of Artificial Sequence: Synthetic oligonucleotide
uaauguuucauauu

SEQ ID NO: 17114 - RNA, 14 nt, Artificial Sequence
  Description of Artificial Sequence: Synthetic oligonucleotide
uuaauguuucauau

SEQ ID NO: 17115 - RNA, 14 nt, Artificial Sequence
  Description of Artificial Sequence: Synthetic oligonucleotide
guuaauguuucaua

SEQ ID NO: 17116 - RNA, 14 nt, Artificial Sequence
  Description of Artificial Sequence: Synthetic oligonucleotide
aguuaauguuucau

SEQ ID NO: 17117 - RNA, 14 nt, Artificial Sequence
  Description of Artificial Sequence: Synthetic oligonucleotide
uaguuaauguuuca

SEQ ID NO: 17118 - RNA, 14 nt, Artificial Sequence
  Description of Artificial Sequence: Synthetic oligonucleotide
cuaguuaauguuuc

SEQ ID NO: 17119 - RNA, 14 nt, Artificial Sequence
  Description of Artificial Sequence: Synthetic oligonucleotide
acuaguuaauguuu

SEQ ID NO: 17120 - RNA, 14 nt, Artificial Sequence
  Description of Artificial Sequence: Synthetic oligonucleotide
aacuaguuaauguu

SEQ ID NO: 17121 - RNA, 14 nt, Artificial Sequence
  Description of Artificial Sequence: Synthetic oligonucleotide
caacuaguuaaugu

SEQ ID NO: 17122 - RNA, 14 nt, Artificial Sequence
  Description of Artificial Sequence: Synthetic oligonucleotide
ucaacuaguuaaug

SEQ ID NO: 17123 - RNA, 14 nt, Artificial Sequence
  Description of Artificial Sequence: Synthetic oligonucleotide
gucaacuaguuaau

SEQ ID NO: 17124 - RNA, 14 nt, Artificial Sequence
  Description of Artificial Sequence: Synthetic oligonucleotide
ugucaacuaguuaa

SEQ ID NO: 17125 - RNA, 14 nt, Artificial Sequence
  Description of Artificial Sequence: Synthetic oligonucleotide
uugucaacuaguua

SEQ ID NO: 17126 - RNA, 14 nt, Artificial Sequence
  Description of Artificial Sequence: Synthetic oligonucleotide
uuugucaacuaguu

SEQ ID NO: 17127 - RNA, 14 nt, Artificial Sequence
  Description of Artificial Sequence: Synthetic oligonucleotide
auuugucaacuagu

SEQ ID NO: 17128 - RNA, 14 nt, Artificial Sequence
  Description of Artificial Sequence: Synthetic oligonucleotide
aauuugucaacuag

SEQ ID NO: 17129 - RNA, 14 nt, Artificial Sequence
  Description of Artificial Sequence: Synthetic oligonucleotide
aaauuugucaacua

SEQ ID NO: 17130 - RNA, 14 nt, Artificial Sequence
  Description of Artificial Sequence: Synthetic oligonucleotide
uaaauuugucaacu

SEQ ID NO: 17131 - RNA, 14 nt, Artificial Sequence
  Description of Artificial Sequence: Synthetic oligonucleotide
auaaauuugucaac

SEQ ID NO: 17132 - RNA, 14 nt, Artificial Sequence
  Description of Artificial Sequence: Synthetic oligonucleotide
gauaaauuugucaa

SEQ ID NO: 17133 - RNA, 14 nt, Artificial Sequence
  Description of Artificial Sequence: Synthetic oligonucleotide
ggauaaauuuguca

SEQ ID NO: 17134 - RNA, 14 nt, Artificial Sequence
  Description of Artificial Sequence: Synthetic oligonucleotide
aggauaaauuuguc

SEQ ID NO: 17135 - RNA, 14 nt, Artificial Sequence
  Description of Artificial Sequence: Synthetic oligonucleotide
aaggauaaauuugu

SEQ ID NO: 17136 - RNA, 14 nt, Artificial Sequence
  Description of Artificial Sequence: Synthetic oligonucleotide
caaggauaaauuug

SEQ ID NO: 17137 - RNA, 14 nt, Artificial Sequence
  Description of Artificial Sequence: Synthetic oligonucleotide
acaaggauaaauuu

SEQ ID NO: 17138 - RNA, 14 nt, Artificial Sequence
  Description of Artificial Sequence: Synthetic oligonucleotide
uacaaggauaaauu

SEQ ID NO: 17139 - RNA, 14 nt, Artificial Sequence
  Description of Artificial Sequence: Synthetic oligonucleotide
cuacaaggauaaau

SEQ ID NO: 17140 - RNA, 14 nt, Artificial Sequence
  Description of Artificial Sequence: Synthetic oligonucleotide
acuacaaggauaaa

SEQ ID NO: 17141 - RNA, 14 nt, Artificial Sequence
  Description of Artificial Sequence: Synthetic oligonucleotide
uacuacaaggauaa

SEQ ID NO: 17142 - RNA, 14 nt, Artificial Sequence
  Description of Artificial Sequence: Synthetic oligonucleotide
uuacuacaaggaua

SEQ ID NO: 17143 - RNA, 14 nt, Artificial Sequence
  Description of Artificial Sequence: Synthetic oligonucleotide
auuacuacaaggau

SEQ ID NO: 17144 - RNA, 14 nt, Artificial Sequence
  Description of Artificial Sequence: Synthetic oligonucleotide
cauuacuacaagga

SEQ ID NO: 17145 - RNA, 14 nt, Artificial Sequence
  Description of Artificial Sequence: Synthetic oligonucleotide
ucauuacuacaagg

SEQ ID NO: 17146 - RNA, 14 nt, Artificial Sequence
  Description of Artificial Sequence: Synthetic oligonucleotide
uucauuacuacaag

SEQ ID NO: 17147 - RNA, 14 nt, Artificial Sequence
  Description of Artificial Sequence: Synthetic oligonucleotide
uuucauuacuacaa

SEQ ID NO: 17148 - RNA, 14 nt, Artificial Sequence
  Description of Artificial Sequence: Synthetic oligonucleotide
uuuucauuacuaca

SEQ ID NO: 17149 - RNA, 14 nt, Artificial Sequence
  Description of Artificial Sequence: Synthetic oligonucleotide
auuuucauuacuac

SEQ ID NO: 17150 - RNA, 14 nt, Artificial Sequence
  Description of Artificial Sequence: Synthetic oligonucleotide
gauuuucauuacua

SEQ ID NO: 17151 - RNA, 14 nt, Artificial Sequence
  Description of Artificial Sequence: Synthetic oligonucleotide
agauuuucauuacu

SEQ ID NO: 17152 - RNA, 14 nt, Artificial Sequence
  Description of Artificial Sequence: Synthetic oligonucleotide
uagauuuucauuac

SEQ ID NO: 17153 - RNA, 14 nt, Artificial Sequence
  Description of Artificial Sequence: Synthetic oligonucleotide
auagauuuucauua

SEQ ID NO: 17154 - RNA, 14 nt, Artificial Sequence
  Description of Artificial Sequence: Synthetic oligonucleotide
aauagauuuucauu

SEQ ID NO: 17155 - RNA, 14 nt, Artificial Sequence
  Description of Artificial Sequence: Synthetic oligonucleotide
aaauagauuuucau

SEQ ID NO: 17156 - RNA, 14 nt, Artificial Sequence
  Description of Artificial Sequence: Synthetic oligonucleotide
uaaauagauuuuca

SEQ ID NO: 17157 - RNA, 14 nt, Artificial Sequence
  Description of Artificial Sequence: Synthetic oligonucleotide
uuaaauagauuuuc

SEQ ID NO: 17158 - RNA, 14 nt, Artificial Sequence
  Description of Artificial Sequence: Synthetic oligonucleotide
auuaaauagauuuu

SEQ ID NO: 17159 - RNA, 14 nt, Artificial Sequence
  Description of Artificial Sequence: Synthetic oligonucleotide
gauuaaauagauuu

SEQ ID NO: 17160 - RNA, 14 nt, Artificial Sequence
  Description of Artificial Sequence: Synthetic oligonucleotide
ugauuaaauagauu

SEQ ID NO: 17161 - RNA, 14 nt, Artificial Sequence
  Description of Artificial Sequence: Synthetic oligonucleotide
cugauuaaauagau

SEQ ID NO: 17162 - RNA, 14 nt, Artificial Sequence
  Description of Artificial Sequence: Synthetic oligonucleotide
ccugauuaaauaga

SEQ ID NO: 17163 - RNA, 14 nt, Artificial Sequence
  Description of Artificial Sequence: Synthetic oligonucleotide
cccugauuaaauag

SEQ ID NO: 17164 - RNA, 14 nt, Artificial Sequence
  Description of Artificial Sequence: Synthetic oligonucleotide
ucccugauuaaaua

SEQ ID NO: 17165 - RNA, 14 nt, Artificial Sequence
  Description of Artificial Sequence: Synthetic oligonucleotide
gucccugauuaaau

SEQ ID NO: 17166 - RNA, 14 nt, Artificial Sequence
  Description of Artificial Sequence: Synthetic oligonucleotide
ggucccugauuaaa

SEQ ID NO: 17167 - RNA, 14 nt, Artificial Sequence
  Description of Artificial Sequence: Synthetic oligonucleotide
uggucccugauuaa

SEQ ID NO: 17168 - RNA, 14 nt, Artificial Sequence
  Description of Artificial Sequence: Synthetic oligonucleotide
cuggucccugauua

SEQ ID NO: 17169 - RNA, 14 nt, Artificial Sequence
  Description of Artificial Sequence: Synthetic oligonucleotide
ucuggucccugauu

SEQ ID NO: 17170 - RNA, 14 nt, Artificial Sequence
  Description of Artificial Sequence: Synthetic oligonucleotide
uucuggucccugau

SEQ ID NO: 17171 - RNA, 14 nt, Artificial Sequence
  Description of Artificial Sequence: Synthetic oligonucleotide
uuucuggucccuga

SEQ ID NO: 17172 - RNA, 14 nt, Artificial Sequence
  Description of Artificial Sequence: Synthetic oligonucleotide
auuucuggucccug

SEQ ID NO: 17173 - RNA, 14 nt, Artificial Sequence
  Description of Artificial Sequence: Synthetic oligonucleotide
cauuucuggucccu

SEQ ID NO: 17174 - RNA, 14 nt, Artificial Sequence
  Description of Artificial Sequence: Synthetic oligonucleotide
ccauuucugguccc

SEQ ID NO: 17175 - RNA, 14 nt, Artificial Sequence
  Description of Artificial Sequence: Synthetic oligonucleotide
gccauuucuggucc

SEQ ID NO: 17176 - RNA, 14 nt, Artificial Sequence
  Description of Artificial Sequence: Synthetic oligonucleotide
agccauuucugguc

SEQ ID NO: 17177 - RNA, 14 nt, Artificial Sequence
  Description of Artificial Sequence: Synthetic oligonucleotide
cagccauuucuggu

SEQ ID NO: 17178 - RNA, 14 nt, Artificial Sequence
  Description of Artificial Sequence: Synthetic oligonucleotide
ucagccauuucugg

SEQ ID NO: 17179 - RNA, 14 nt, Artificial Sequence
  Description of Artificial Sequence: Synthetic oligonucleotide
cucagccauuucug

SEQ ID NO: 17180 - RNA, 14 nt, Artificial Sequence
  Description of Artificial Sequence: Synthetic oligonucleotide
ccucagccauuucu

SEQ ID NO: 17181 - RNA, 14 nt, Artificial Sequence
  Description of Artificial Sequence: Synthetic oligonucleotide
uccucagccauuuc

SEQ ID NO: 17182 - RNA, 14 nt, Artificial Sequence
  Description of Artificial Sequence: Synthetic oligonucleotide
cuccucagccauuu

SEQ ID NO: 17183 - RNA, 14 nt, Artificial Sequence
  Description of Artificial Sequence: Synthetic oligonucleotide
ucuccucagccauu

SEQ ID NO: 17184 - RNA, 14 nt, Artificial Sequence
  Description of Artificial Sequence: Synthetic oligonucleotide
aucuccucagccau

SEQ ID NO: 17185 - RNA, 14 nt, Artificial Sequence
  Description of Artificial Sequence: Synthetic oligonucleotide
uaucuccucagcca

SEQ ID NO: 17186 - RNA, 14 nt, Artificial Sequence
  Description of Artificial Sequence: Synthetic oligonucleotide
uuaucuccucagcc

SEQ ID NO: 17187 - RNA, 14 nt, Artificial Sequence
  Description of Artificial Sequence: Synthetic oligonucleotide
uuuaucuccucagc

SEQ ID NO: 17188 - RNA, 14 nt, Artificial Sequence
  Description of Artificial Sequence: Synthetic oligonucleotide
auuuaucuccucag

SEQ ID NO: 17189 - RNA, 14 nt, Artificial Sequence
  Description of Artificial Sequence: Synthetic oligonucleotide
cauuuaucuccuca

SEQ ID NO: 17190 - RNA, 14 nt, Artificial Sequence
  Description of Artificial Sequence: Synthetic oligonucleotide
gcauuuaucuccuc

SEQ ID NO: 17191 - RNA, 14 nt, Artificial Sequence
  Description of Artificial Sequence: Synthetic oligonucleotide
ugcauuuaucuccu

SEQ ID NO: 17192 - RNA, 14 nt, Artificial Sequence
  Description of Artificial Sequence: Synthetic oligonucleotide
augcauuuaucucc

SEQ ID NO: 17193 - RNA, 14 nt, Artificial Sequence
  Description of Artificial Sequence: Synthetic oligonucleotide
gaugcauuuaucuc

SEQ ID NO: 17194 - RNA, 14 nt, Artificial Sequence
  Description of Artificial Sequence: Synthetic oligonucleotide
ugaugcauuuaucu

SEQ ID NO: 17195 - RNA, 14 nt, Artificial Sequence
  Description of Artificial Sequence: Synthetic oligonucleotide
augaugcauuuauc

SEQ ID NO: 17196 - RNA, 14 nt, Artificial Sequence
  Description of Artificial Sequence: Synthetic oligonucleotide
aaugaugcauuuau

SEQ ID NO: 17197 - RNA, 14 nt, Artificial Sequence
  Description of Artificial Sequence: Synthetic oligonucleotide
uaaugaugcauuua

SEQ ID NO: 17198 - RNA, 14 nt, Artificial Sequence
  Description of Artificial Sequence: Synthetic oligonucleotide
guaaugaugcauuu

SEQ ID NO: 17199 - RNA, 14 nt, Artificial Sequence
  Description of Artificial Sequence: Synthetic oligonucleotide
uguaaugaugcauu

SEQ ID NO: 17200 - RNA, 14 nt, Artificial Sequence
  Description of Artificial Sequence: Synthetic oligonucleotide
uuguaaugaugcau

SEQ ID NO: 17201 - RNA, 14 nt, Artificial Sequence
  Description of Artificial Sequence: Synthetic oligonucleotide
uuuguaaugaugca

SEQ ID NO: 17202 - RNA, 14 nt, Artificial Sequence
  Description of Artificial Sequence: Synthetic oligonucleotide
uuuuguaaugaugc

SEQ ID NO: 17203 - RNA, 14 nt, Artificial Sequence
  Description of Artificial Sequence: Synthetic oligonucleotide
auuuuguaaugaug

SEQ ID NO: 17204 - RNA, 14 nt, Artificial Sequence
  Description of Artificial Sequence: Synthetic oligonucleotide
aauuuuguaaugau

SEQ ID NO: 17205 - RNA, 14 nt, Artificial Sequence
  Description of Artificial Sequence: Synthetic oligonucleotide
gaauuuuguaauga

SEQ ID NO: 17206 - RNA, 14 nt, Artificial Sequence
  Description of Artificial Sequence: Synthetic oligonucleotide
agaauuuuguaaug

SEQ ID NO: 17207 - RNA, 14 nt, Artificial Sequence
  Description of Artificial Sequence: Synthetic oligonucleotide
cagaauuuuguaau

SEQ ID NO: 17208 - RNA, 14 nt, Artificial Sequence
  Description of Artificial Sequence: Synthetic oligonucleotide
gcagaauuuuguaa

SEQ ID NO: 17209 - RNA, 14 nt, Artificial Sequence
  Description of Artificial Sequence: Synthetic oligonucleotide
agcagaauuuugua

SEQ ID NO: 17210 - RNA, 14 nt, Artificial Sequence
  Description of Artificial Sequence: Synthetic oligonucleotide
aagcagaauuuugu

SEQ ID NO: 17211 - RNA, 14 nt, Artificial Sequence
  Description of Artificial Sequence: Synthetic oligonucleotide
aaagcagaauuuug

SEQ ID NO: 17212 - RNA, 14 nt, Artificial Sequence
  Description of Artificial Sequence: Synthetic oligonucleotide
aaaagcagaauuuu

SEQ ID NO: 17213 - RNA, 14 nt, Artificial Sequence
  Description of Artificial Sequence: Synthetic oligonucleotide
caaaagcagaauuu

SEQ ID NO: 17214 - RNA, 14 nt, Artificial Sequence
  Description of Artificial Sequence: Synthetic oligonucleotide
ucaaaagcagaauu

SEQ ID NO: 17215 - RNA, 14 nt, Artificial Sequence
  Description of Artificial Sequence: Synthetic oligonucleotide
uucaaaagcagaau

SEQ ID NO: 17216 - RNA, 14 nt, Artificial Sequence
  Description of Artificial Sequence: Synthetic oligonucleotide
auucaaaagcagaa

SEQ ID NO: 17217 - RNA, 14 nt, Artificial Sequence
  Description of Artificial Sequence: Synthetic oligonucleotide
gauucaaaagcaga

SEQ ID NO: 17218 - RNA, 14 nt, Artificial Sequence
  Description of Artificial Sequence: Synthetic oligonucleotide
ggauucaaaagcag

SEQ ID NO: 17219 - RNA, 14 nt, Artificial Sequence
  Description of Artificial Sequence: Synthetic oligonucleotide
aggauucaaaagca

SEQ ID NO: 17220 - RNA, 14 nt, Artificial Sequence
  Description of Artificial Sequence: Synthetic oligonucleotide
caggauucaaaagc

SEQ ID NO: 17221 - RNA, 14 nt, Artificial Sequence
  Description of Artificial Sequence: Synthetic oligonucleotide
ccaggauucaaaag

SEQ ID NO: 17222 - RNA, 14 nt, Artificial Sequence
  Description of Artificial Sequence: Synthetic oligonucleotide
uccaggauucaaaa

SEQ ID NO: 17223 - RNA, 14 nt, Artificial Sequence
  Description of Artificial Sequence: Synthetic oligonucleotide
guccaggauucaaa

SEQ ID NO: 17224 - RNA, 14 nt, Artificial Sequence
  Description of Artificial Sequence: Synthetic oligonucleotide
uguccaggauucaa

SEQ ID NO: 17225 - RNA, 14 nt, Artificial Sequence
  Description of Artificial Sequence: Synthetic oligonucleotide
auguccaggauuca

SEQ ID NO: 17226 - RNA, 14 nt, Artificial Sequence
  Description of Artificial Sequence: Synthetic oligonucleotide
aauguccaggauuc

SEQ ID NO: 17227 - RNA, 14 nt, Artificial Sequence
  Description of Artificial Sequence: Synthetic oligonucleotide
uaauguccaggauu

SEQ ID NO: 17228 - RNA, 14 nt, Artificial Sequence
  Description of Artificial Sequence: Synthetic oligonucleotide
guaauguccaggau

SEQ ID NO: 17229 - RNA, 14 nt, Artificial Sequence
  Description of Artificial Sequence: Synthetic oligonucleotide
uguaauguccagga

SEQ ID NO: 17230 - RNA, 14 nt, Artificial Sequence
  Description of Artificial Sequence: Synthetic oligonucleotide
uuguaauguccagg

SEQ ID NO: 17231 - RNA, 14 nt, Artificial Sequence
  Description of Artificial Sequence: Synthetic oligonucleotide
cuuguaauguccag

SEQ ID NO: 17232 - RNA, 14 nt, Artificial Sequence
  Description of Artificial Sequence: Synthetic oligonucleotide
ccuuguaaugucca

SEQ ID NO: 17233 - RNA, 14 nt, Artificial Sequence
  Description of Artificial Sequence: Synthetic oligonucleotide
cccuuguaaugucc

SEQ ID NO: 17234 - RNA, 14 nt, Artificial Sequence
  Description of Artificial Sequence: Synthetic oligonucleotide
ccccuuguaauguc

SEQ ID NO: 17235 - RNA, 14 nt, Artificial Sequence
  Description of Artificial Sequence: Synthetic oligonucleotide
cccccuuguaaugu

SEQ ID NO: 17236 - RNA, 14 nt, Artificial Sequence
  Description of Artificial Sequence: Synthetic oligonucleotide
acccccuuguaaug

SEQ ID NO: 17237 - RNA, 14 nt, Artificial Sequence
  Description of Artificial Sequence: Synthetic oligonucleotide
uacccccuuguaau

SEQ ID NO: 17238 - RNA, 14 nt, Artificial Sequence
  Description of Artificial Sequence: Synthetic oligonucleotide
uuacccccuuguaa

SEQ ID NO: 17239 - RNA, 14 nt, Artificial Sequence
  Description of Artificial Sequence: Synthetic oligonucleotide
uuuacccccuugua

SEQ ID NO: 17240 - RNA, 14 nt, Artificial Sequence
  Description of Artificial Sequence: Synthetic oligonucleotide
auuuacccccuugu

SEQ ID NO: 17241 - RNA, 14 nt, Artificial Sequence
  Description of Artificial Sequence: Synthetic oligonucleotide
cauuuacccccuug

SEQ ID NO: 17242 - RNA, 14 nt, Artificial Sequence
  Description of Artificial Sequence: Synthetic oligonucleotide
gcauuuacccccuu

SEQ ID NO: 17243 - RNA, 14 nt, Artificial Sequence
  Description of Artificial Sequence: Synthetic oligonucleotide
ugcauuuacccccu

SEQ ID NO: 17244 - RNA, 14 nt, Artificial Sequence
  Description of Artificial Sequence: Synthetic oligonucleotide
cugcauuuaccccc

SEQ ID NO: 17245 - RNA, 14 nt, Artificial Sequence
  Description of Artificial Sequence: Synthetic oligonucleotide
gcugcauuuacccc

SEQ ID NO: 17246 - RNA, 14 nt, Artificial Sequence
  Description of Artificial Sequence: Synthetic oligonucleotide
ugcugcauuuaccc

SEQ ID NO: 17247 - RNA, 14 nt, Artificial Sequence
  Description of Artificial Sequence: Synthetic oligonucleotide
augcugcauuuacc

SEQ ID NO: 17248 - RNA, 14 nt, Artificial Sequence
  Description of Artificial Sequence: Synthetic oligonucleotide
caugcugcauuuac

SEQ ID NO: 17249 - RNA, 14 nt, Artificial Sequence
  Description of Artificial Sequence: Synthetic oligonucleotide
ucaugcugcauuua

SEQ ID NO: 17250 - RNA, 14 nt, Artificial Sequence
  Description of Artificial Sequence: Synthetic oligonucleotide
gucaugcugcauuu

SEQ ID NO: 17251 - RNA, 14 nt, Artificial Sequence
  Description of Artificial Sequence: Synthetic oligonucleotide
agucaugcugcauu

SEQ ID NO: 17252 - RNA, 14 nt, Artificial Sequence
  Description of Artificial Sequence: Synthetic oligonucleotide
aagucaugcugcau

SEQ ID NO: 17253 - RNA, 14 nt, Artificial Sequence
  Description of Artificial Sequence: Synthetic oligonucleotide
aaagucaugcugca

SEQ ID NO: 17254 - RNA, 14 nt, Artificial Sequence
  Description of Artificial Sequence: Synthetic oligonucleotide
aaaagucaugcugc

SEQ ID NO: 17255 - RNA, 14 nt, Artificial Sequence
  Description of Artificial Sequence: Synthetic oligonucleotide
aaaaagucaugcug

SEQ ID NO: 17256 - RNA, 14 nt, Artificial Sequence
  Description of Artificial Sequence: Synthetic oligonucleotide
caaaaagucaugcu

SEQ ID NO: 17257 - RNA, 14 nt, Artificial Sequence
  Description of Artificial Sequence: Synthetic oligonucleotide
acaaaaagucaugc

SEQ ID NO: 17258 - RNA, 14 nt, Artificial Sequence
  Description of Artificial Sequence: Synthetic oligonucleotide
aacaaaaagucaug

SEQ ID NO: 17259 - RNA, 14 nt, Artificial Sequence
  Description of Artificial Sequence: Synthetic oligonucleotide
uaacaaaaagucau

SEQ ID NO: 17260 - RNA, 14 nt, Artificial Sequence
  Description of Artificial Sequence: Synthetic oligonucleotide
uuaacaaaaaguca

SEQ ID NO: 17261 - RNA, 14 nt, Artificial Sequence
  Description of Artificial Sequence: Synthetic oligonucleotide
guuaacaaaaaguc

SEQ ID NO: 17262 - RNA, 14 nt, Artificial Sequence
  Description of Artificial Sequence: Synthetic oligonucleotide
gguuaacaaaaagu

SEQ ID NO: 17263 - RNA, 14 nt, Artificial Sequence
  Description of Artificial Sequence: Synthetic oligonucleotide
ugguuaacaaaaag

SEQ ID NO: 17264 - RNA, 14 nt, Artificial Sequence
  Description of Artificial Sequence: Synthetic oligonucleotide
gugguuaacaaaaa

SEQ ID NO: 17265 - RNA, 14 nt, Artificial Sequence
  Description of Artificial Sequence: Synthetic oligonucleotide
ugugguuaacaaaa

SEQ ID NO: 17266 - RNA, 14 nt, Artificial Sequence
  Description of Artificial Sequence: Synthetic oligonucleotide
augugguuaacaaa

SEQ ID NO: 17267 - RNA, 14 nt, Artificial Sequence
  Description of Artificial Sequence: Synthetic oligonucleotide
aaugugguuaacaa

SEQ ID NO: 17268 - RNA, 14 nt, Artificial Sequence
  Description of Artificial Sequence: Synthetic oligonucleotide
gaaugugguuaaca

SEQ ID NO: 17269 - RNA, 14 nt, Artificial Sequence
  Description of Artificial Sequence: Synthetic oligonucleotide
ggaaugugguuaac

SEQ ID NO: 17270 - RNA, 14 nt, Artificial Sequence
  Description of Artificial Sequence: Synthetic oligonucleotide
uggaaugugguuaa

SEQ ID NO: 17271 - RNA, 14 nt, Artificial Sequence
  Description of Artificial Sequence: Synthetic oligonucleotide
uuggaaugugguua

SEQ ID NO: 17272 - RNA, 14 nt, Artificial Sequence
  Description of Artificial Sequence: Synthetic oligonucleotide
uuuggaaugugguu

SEQ ID NO: 17273 - RNA, 14 nt, Artificial Sequence
  Description of Artificial Sequence: Synthetic oligonucleotide
uuuuggaauguggu

SEQ ID NO: 17274 - RNA, 14 nt, Artificial Sequence
  Description of Artificial Sequence: Synthetic oligonucleotide
auuuuggaaugugg

SEQ ID NO: 17275 - RNA, 14 nt, Artificial Sequence
  Description of Artificial Sequence: Synthetic oligonucleotide
cauuuuggaaugug

SEQ ID NO: 17276 - RNA, 14 nt, Artificial Sequence
  Description of Artificial Sequence: Synthetic oligonucleotide
acauuuuggaaugu

SEQ ID NO: 17277 - RNA, 14 nt, Artificial Sequence
  Description of Artificial Sequence: Synthetic oligonucleotide
cacauuuuggaaug

SEQ ID NO: 17278 - RNA, 14 nt, Artificial Sequence
  Description of Artificial Sequence: Synthetic oligonucleotide
ccacauuuuggaau

SEQ ID NO: 17279 - RNA, 14 nt, Artificial Sequence
  Description of Artificial Sequence: Synthetic oligonucleotide
uccacauuuuggaa

SEQ ID NO: 17280 - RNA, 14 nt, Artificial Sequence
  Description of Artificial Sequence: Synthetic oligonucleotide
uuccacauuuugga

SEQ ID NO: 17281 - RNA, 14 nt, Artificial Sequence
  Description of Artificial Sequence: Synthetic oligonucleotide
guuccacauuuugg

SEQ ID NO: 17282 - RNA, 14 nt, Artificial Sequence
  Description of Artificial Sequence: Synthetic oligonucleotide
uguuccacauuuug

SEQ ID NO: 17283 - RNA, 14 nt, Artificial Sequence
  Description of Artificial Sequence: Synthetic oligonucleotide
auguuccacauuuu

SEQ ID NO: 17284 - RNA, 14 nt, Artificial Sequence
  Description of Artificial Sequence: Synthetic oligonucleotide
aauguuccacauuu

SEQ ID NO: 17285 - RNA, 14 nt, Artificial Sequence
  Description of Artificial Sequence: Synthetic oligonucleotide
aaauguuccacauu

SEQ ID NO: 17286 - RNA, 14 nt, Artificial Sequence
  Description of Artificial Sequence: Synthetic oligonucleotide
gaaauguuccacau

SEQ ID NO: 17287 - RNA, 14 nt, Artificial Sequence
  Description of Artificial Sequence: Synthetic oligonucleotide
agaaauguuccaca

SEQ ID NO: 17288 - RNA, 14 nt, Artificial Sequence
  Description of Artificial Sequence: Synthetic oligonucleotide
aagaaauguuccac

SEQ ID NO: 17289 - RNA, 14 nt, Artificial Sequence
  Description of Artificial Sequence: Synthetic oligonucleotide
aaagaaauguucca

SEQ ID NO: 17290 - RNA, 14 nt, Artificial Sequence
  Description of Artificial Sequence: Synthetic oligonucleotide
aaaagaaauguucc

SEQ ID NO: 17291 - RNA, 14 nt, Artificial Sequence
  Description of Artificial Sequence: Synthetic oligonucleotide
uaaaagaaauguuc

SEQ ID NO: 17292 - RNA, 14 nt, Artificial Sequence
  Description of Artificial Sequence: Synthetic oligonucleotide
cuaaaagaaauguu

SEQ ID NO: 17293 - RNA, 14 nt, Artificial Sequence
  Description of Artificial Sequence: Synthetic oligonucleotide
ucuaaaagaaaugu

SEQ ID NO: 17294 - RNA, 14 nt, Artificial Sequence
  Description of Artificial Sequence: Synthetic oligonucleotide
uucuaaaagaaaug

SEQ ID NO: 17295 - RNA, 14 nt, Artificial Sequence
  Description of Artificial Sequence: Synthetic oligonucleotide
uuucuaaaagaaau

SEQ ID NO: 17296 - RNA, 14 nt, Artificial Sequence
  Description of Artificial Sequence: Synthetic oligonucleotide
auuucuaaaagaaa

SEQ ID NO: 17297 - RNA, 14 nt, Artificial Sequence
  Description of Artificial Sequence: Synthetic oligonucleotide
cauuucuaaaagaa

SEQ ID NO: 17298 - RNA, 14 nt, Artificial Sequence
  Description of Artificial Sequence: Synthetic oligonucleotide
ucauuucuaaaaga

SEQ ID NO: 17299 - RNA, 14 nt, Artificial Sequence
  Description of Artificial Sequence: Synthetic oligonucleotide
uucauuucuaaaag

SEQ ID NO: 17300 - RNA, 14 nt, Artificial Sequence
  Description of Artificial Sequence: Synthetic oligonucleotide
uuucauuucuaaaa

SEQ ID NO: 17301 - RNA, 14 nt, Artificial Sequence
  Description of Artificial Sequence: Synthetic oligonucleotide
uuuucauuucuaaa

SEQ ID NO: 17302 - RNA, 14 nt, Artificial Sequence
  Description of Artificial Sequence: Synthetic oligonucleotide
auuuucauuucuaa

SEQ ID NO: 17303 - RNA, 14 nt, Artificial Sequence
  Description of Artificial Sequence: Synthetic oligonucleotide
uauuuucauuucua

SEQ ID NO: 17304 - RNA, 14 nt, Artificial Sequence
  Description of Artificial Sequence: Synthetic oligonucleotide
auauuuucauuucu

SEQ ID NO: 17305 - RNA, 14 nt, Artificial Sequence
  Description of Artificial Sequence: Synthetic oligonucleotide
aauauuuucauuuc

SEQ ID NO: 17306 - RNA, 14 nt, Artificial Sequence
  Description of Artificial Sequence: Synthetic oligonucleotide
aaauauuuucauuu

SEQ ID NO: 17307 - RNA, 14 nt, Artificial Sequence
  Description of Artificial Sequence: Synthetic oligonucleotide
gaaauauuuucauu

SEQ ID NO: 17308 - RNA, 14 nt, Artificial Sequence
  Description of Artificial Sequence: Synthetic oligonucleotide
ugaaauauuuucau

SEQ ID NO: 17309 - RNA, 14 nt, Artificial Sequence
  Description of Artificial Sequence: Synthetic oligonucleotide
uugaaauauuuuca

SEQ ID NO: 17310 - RNA, 14 nt, Artificial Sequence
  Description of Artificial Sequence: Synthetic oligonucleotide
cuugaaauauuuuc

SEQ ID NO: 17311 - RNA, 14 nt, Artificial Sequence
  Description of Artificial Sequence: Synthetic oligonucleotide
ccuugaaauauuuu

SEQ ID NO: 17312 - RNA, 14 nt, Artificial Sequence
  Description of Artificial Sequence: Synthetic oligonucleotide
gccuugaaauauuu

SEQ ID NO: 17313 - RNA, 14 nt, Artificial Sequence
  Description of Artificial Sequence: Synthetic oligonucleotide
agccuugaaauauu

SEQ ID NO: 17314 - RNA, 14 nt, Artificial Sequence
  Description of Artificial Sequence: Synthetic oligonucleotide
cagccuugaaauau

SEQ ID NO: 17315 - RNA, 14 nt, Artificial Sequence
  Description of Artificial Sequence: Synthetic oligonucleotide
ucagccuugaaaua

SEQ ID NO: 17316 - RNA, 14 nt, Artificial Sequence
  Description of Artificial Sequence: Synthetic oligonucleotide
aucagccuugaaau

SEQ ID NO: 17317 - RNA, 14 nt, Artificial Sequence
  Description of Artificial Sequence: Synthetic oligonucleotide
caucagccuugaaa

SEQ ID NO: 17318 - RNA, 14 nt, Artificial Sequence
  Description of Artificial Sequence: Synthetic oligonucleotide
acaucagccuugaa

SEQ ID NO: 17319 - RNA, 14 nt, Artificial Sequence
  Description of Artificial Sequence: Synthetic oligonucleotide
uacaucagccuuga

SEQ ID NO: 17320 - RNA, 14 nt, Artificial Sequence
  Description of Artificial Sequence: Synthetic oligonucleotide
auacaucagccuug

SEQ ID NO: 17321 - RNA, 14 nt, Artificial Sequence
  Description of Artificial Sequence: Synthetic oligonucleotide
aauacaucagccuu

SEQ ID NO: 17322 - RNA, 14 nt, Artificial Sequence
  Description of Artificial Sequence: Synthetic oligonucleotide
aaauacaucagccu

SEQ ID NO: 17323 - RNA, 14 nt, Artificial Sequence
  Description of Artificial Sequence: Synthetic oligonucleotide
aaaauacaucagcc

SEQ ID NO: 17324 - RNA, 14 nt, Artificial Sequence
  Description of Artificial Sequence: Synthetic oligonucleotide
uaaaauacaucagc

SEQ ID NO: 17325 - RNA, 14 nt, Artificial Sequence
  Description of Artificial Sequence: Synthetic oligonucleotide
uuaaaauacaucag

SEQ ID NO: 17326 - RNA, 14 nt, Artificial Sequence
  Description of Artificial Sequence: Synthetic oligonucleotide
cuuaaaauacauca

SEQ ID NO: 17327 - RNA, 14 nt, Artificial Sequence
  Description of Artificial Sequence: Synthetic oligonucleotide
ucuuaaaauacauc

SEQ ID NO: 17328 - RNA, 14 nt, Artificial Sequence
  Description of Artificial Sequence: Synthetic oligonucleotide
gucuuaaaauacau

SEQ ID NO: 17329 - RNA, 14 nt, Artificial Sequence
  Description of Artificial Sequence: Synthetic oligonucleotide
agucuuaaaauaca

SEQ ID NO: 17330 - RNA, 14 nt, Artificial Sequence
  Description of Artificial Sequence: Synthetic oligonucleotide
uagucuuaaaauac

SEQ ID NO: 17331 - RNA, 14 nt, Artificial Sequence
  Description of Artificial Sequence: Synthetic oligonucleotide
guagucuuaaaaua

SEQ ID NO: 17332 - RNA, 14 nt, Artificial Sequence
  Description of Artificial Sequence: Synthetic oligonucleotide
uguagucuuaaaau

SEQ ID NO: 17333 - RNA, 14 nt, Artificial Sequence
  Description of Artificial Sequence: Synthetic oligonucleotide
guguagucuuaaaa

SEQ ID NO: 17334 - RNA, 14 nt, Artificial Sequence
  Description of Artificial Sequence: Synthetic oligonucleotide
uguguagucuuaaa

SEQ ID NO: 17335 - RNA, 14 nt, Artificial Sequence
  Description of Artificial Sequence: Synthetic oligonucleotide
auguguagucuuaa

SEQ ID NO: 17336 - RNA, 14 nt, Artificial Sequence
  Description of Artificial Sequence: Synthetic oligonucleotide
aauguguagucuua

SEQ ID NO: 17337 - RNA, 14 nt, Artificial Sequence
  Description of Artificial Sequence: Synthetic oligonucleotide
uaauguguagucuu

SEQ ID NO: 17338 - RNA, 14 nt, Artificial Sequence
  Description of Artificial Sequence: Synthetic oligonucleotide
auaauguguagucu

SEQ ID NO: 17339 - RNA, 14 nt, Artificial Sequence
  Description of Artificial Sequence: Synthetic oligonucleotide
gauaauguguaguc

SEQ ID NO: 17340 - RNA, 14 nt, Artificial Sequence
  Description of Artificial Sequence: Synthetic oligonucleotide
ugauaauguguagu

SEQ ID NO: 17341 - RNA, 14 nt, Artificial Sequence
  Description of Artificial Sequence: Synthetic oligonucleotide
cugauaauguguag

SEQ ID NO: 17342 - RNA, 14 nt, Artificial Sequence
  Description of Artificial Sequence: Synthetic oligonucleotide
ccugauaaugugua

SEQ ID NO: 17343 - RNA, 14 nt, Artificial Sequence
  Description of Artificial Sequence: Synthetic oligonucleotide
uccugauaaugugu

SEQ ID NO: 17344 - RNA, 14 nt, Artificial Sequence
  Description of Artificial Sequence: Synthetic oligonucleotide
uuccugauaaugug

SEQ ID NO: 17345 - RNA, 14 nt, Artificial Sequence
  Description of Artificial Sequence: Synthetic oligonucleotide
uuuccugauaaugu

SEQ ID NO: 17346 - RNA, 14 nt, Artificial Sequence
  Description of Artificial Sequence: Synthetic oligonucleotide
guuuccugauaaug

SEQ ID NO: 17347 - RNA, 14 nt, Artificial Sequence
  Description of Artificial Sequence: Synthetic oligonucleotide
uguuuccugauaau

SEQ ID NO: 17348 - RNA, 14 nt, Artificial Sequence
  Description of Artificial Sequence: Synthetic oligonucleotide
auguuuccugauaa

SEQ ID NO: 17349 - RNA, 14 nt, Artificial Sequence
  Description of Artificial Sequence: Synthetic oligonucleotide
uauguuuccugaua

SEQ ID NO: 17350 - RNA, 14 nt, Artificial Sequence
  Description of Artificial Sequence: Synthetic oligonucleotide
guauguuuccugau

SEQ ID NO: 17351 - RNA, 14 nt, Artificial Sequence
  Description of Artificial Sequence: Synthetic oligonucleotide
uguauguuuccuga

SEQ ID NO: 17352 - RNA, 14 nt, Artificial Sequence
  Description of Artificial Sequence: Synthetic oligonucleotide
auguauguuuccug

SEQ ID NO: 17353 - RNA, 14 nt, Artificial Sequence
  Description of Artificial Sequence: Synthetic oligonucleotide
aauguauguuuccu

SEQ ID NO: 17354 - RNA, 14 nt, Artificial Sequence
  Description of Artificial Sequence: Synthetic oligonucleotide
caauguauguuucc

SEQ ID NO: 17355 - RNA, 14 nt, Artificial Sequence
  Description of Artificial Sequence: Synthetic oligonucleotide
ucaauguauguuuc

SEQ ID NO: 17356 - RNA, 14 nt, Artificial Sequence
  Description of Artificial Sequence: Synthetic oligonucleotide
cucaauguauguuu

SEQ ID NO: 17357 - RNA, 14 nt, Artificial Sequence
  Description of Artificial Sequence: Synthetic oligonucleotide
ucucaauguauguu

SEQ ID NO: 17358 - RNA, 14 nt, Artificial Sequence
  Description of Artificial Sequence: Synthetic oligonucleotide
cucucaauguaugu

SEQ ID NO: 17359 - RNA, 14 nt, Artificial Sequence
  Description of Artificial Sequence: Synthetic oligonucleotide
acucucaauguaug

SEQ ID NO: 17360 - RNA, 14 nt, Artificial Sequence
  Description of Artificial Sequence: Synthetic oligonucleotide
aacucucaauguau

SEQ ID NO: 17361 - RNA, 14 nt, Artificial Sequence
  Description of Artificial Sequence: Synthetic oligonucleotide
gaacucucaaugua

SEQ ID NO: 17362 - RNA, 14 nt, Artificial Sequence
  Description of Artificial Sequence: Synthetic oligonucleotide
cgaacucucaaugu

SEQ ID NO: 17363 - RNA, 14 nt, Artificial Sequence
  Description of Artificial Sequence: Synthetic oligonucleotide
gcgaacucucaaug

SEQ ID NO: 17364 - RNA, 14 nt, Artificial Sequence
  Description of Artificial Sequence: Synthetic oligonucleotide
agcgaacucucaau

SEQ ID NO: 17365 - RNA, 14 nt, Artificial Sequence
  Description of Artificial Sequence: Synthetic oligonucleotide
aagcgaacucucaa

SEQ ID NO: 17366 - RNA, 14 nt, Artificial Sequence
  Description of Artificial Sequence: Synthetic oligonucleotide
uaagcgaacucuca

SEQ ID NO: 17367 - RNA, 14 nt, Artificial Sequence
  Description of Artificial Sequence: Synthetic oligonucleotide
uuaagcgaacucuc

SEQ ID NO: 17368 - RNA, 14 nt, Artificial Sequence
  Description of Artificial Sequence: Synthetic oligonucleotide
auuaagcgaacucu

SEQ ID NO: 17369 - RNA, 14 nt, Artificial Sequence
  Description of Artificial Sequence: Synthetic oligonucleotide
aauuaagcgaacuc

SEQ ID NO: 17370 - RNA, 14 nt, Artificial Sequence
  Description of Artificial Sequence: Synthetic oligonucleotide
uaauuaagcgaacu

SEQ ID NO: 17371 - RNA, 14 nt, Artificial Sequence
  Description of Artificial Sequence: Synthetic oligonucleotide
uuaauuaagcgaac

SEQ ID NO: 17372 - RNA, 14 nt, Artificial Sequence
  Description of Artificial Sequence: Synthetic oligonucleotide
uuuaauuaagcgaa

SEQ ID NO: 17373 - RNA, 14 nt, Artificial Sequence
  Description of Artificial Sequence: Synthetic oligonucleotide
cuuuaauuaagcga

SEQ ID NO: 17374 - RNA, 14 nt, Artificial Sequence
  Description of Artificial Sequence: Synthetic oligonucleotide
ccuuuaauuaagcg

SEQ ID NO: 17375 - RNA, 14 nt, Artificial Sequence
  Description of Artificial Sequence: Synthetic oligonucleotide
accuuuaauuaagc

SEQ ID NO: 17376 - RNA, 14 nt, Artificial Sequence
  Description of Artificial Sequence: Synthetic oligonucleotide
aaccuuuaauuaag

SEQ ID NO: 17377 - RNA, 14 nt, Artificial Sequence
  Description of Artificial Sequence: Synthetic oligonucleotide
caaccuuuaauuaa

SEQ ID NO: 17378 - RNA, 14 nt, Artificial Sequence
  Description of Artificial Sequence: Synthetic oligonucleotide
acaaccuuuaauua

SEQ ID NO: 17379 - RNA, 14 nt, Artificial Sequence
  Description of Artificial Sequence: Synthetic oligonucleotide
aacaaccuuuaauu

SEQ ID NO: 17380 - RNA, 14 nt, Artificial Sequence
  Description of Artificial Sequence: Synthetic oligonucleotide
caacaaccuuuaau

SEQ ID NO: 17381 - RNA, 14 nt, Artificial Sequence
  Description of Artificial Sequence: Synthetic oligonucleotide
ccaacaaccuuuaa

SEQ ID NO: 17382 - RNA, 14 nt, Artificial Sequence
  Description of Artificial Sequence: Synthetic oligonucleotide
cccaacaaccuuua

SEQ ID NO: 17383 - RNA, 14 nt, Artificial Sequence
  Description of Artificial Sequence: Synthetic oligonucleotide
gcccaacaaccuuu

SEQ ID NO: 17384 - RNA, 14 nt, Artificial Sequence
  Description of Artificial Sequence: Synthetic oligonucleotide
ugcccaacaaccuu

SEQ ID NO: 17385 - RNA, 14 nt, Artificial Sequence
  Description of Artificial Sequence: Synthetic oligonucleotide
augcccaacaaccu

SEQ ID NO: 17386 - RNA, 14 nt, Artificial Sequence
  Description of Artificial Sequence: Synthetic oligonucleotide
gaugcccaacaacc

SEQ ID NO: 17387 - RNA, 14 nt, Artificial Sequence
  Description of Artificial Sequence: Synthetic oligonucleotide
ugaugcccaacaac

SEQ ID NO: 17388 - RNA, 14 nt, Artificial Sequence
  Description of Artificial Sequence: Synthetic oligonucleotide
uugaugcccaacaa

SEQ ID NO: 17389 - RNA, 14 nt, Artificial Sequence
  Description of Artificial Sequence: Synthetic oligonucleotide
uuugaugcccaaca

SEQ ID NO: 17390 - RNA, 14 nt, Artificial Sequence
  Description of Artificial Sequence: Synthetic oligonucleotide
auuugaugcccaac

SEQ ID NO: 17391 - RNA, 14 nt, Artificial Sequence
  Description of Artificial Sequence: Synthetic oligonucleotide
aauuugaugcccaa

SEQ ID NO: 17392 - RNA, 14 nt, Artificial Sequence
  Description of Artificial Sequence: Synthetic oligonucleotide
uaauuugaugccca

SEQ ID NO: 17393 - RNA, 14 nt, Artificial Sequence
  Description of Artificial Sequence: Synthetic oligonucleotide
auaauuugaugccc

SEQ ID NO: 17394 - RNA, 14 nt, Artificial Sequence
  Description of Artificial Sequence: Synthetic oligonucleotide
cauaauuugaugcc

SEQ ID NO: 17395 - RNA, 14 nt, Artificial Sequence
  Description of Artificial Sequence: Synthetic oligonucleotide
acauaauuugaugc

SEQ ID NO: 17396 - RNA, 14 nt, Artificial Sequence
  Description of Artificial Sequence: Synthetic oligonucleotide
aacauaauuugaug

SEQ ID NO: 17397 - RNA, 14 nt, Artificial Sequence
  Description of Artificial Sequence: Synthetic oligonucleotide
aaacauaauuugau

SEQ ID NO: 17398 - RNA, 14 nt, Artificial Sequence
  Description of Artificial Sequence: Synthetic oligonucleotide
uaaacauaauuuga

SEQ ID NO: 17399 - RNA, 14 nt, Artificial Sequence
  Description of Artificial Sequence: Synthetic oligonucleotide
cuaaacauaauuug

SEQ ID NO: 17400 - RNA, 14 nt, Artificial Sequence
  Description of Artificial Sequence: Synthetic oligonucleotide
acuaaacauaauuu

SEQ ID NO: 17401 - RNA, 14 nt, Artificial Sequence
  Description of Artificial Sequence: Synthetic oligonucleotide
uacuaaacauaauu

SEQ ID NO: 17402 - RNA, 14 nt, Artificial Sequence
  Description of Artificial Sequence: Synthetic oligonucleotide
cuacuaaacauaau

SEQ ID NO: 17403 - RNA, 14 nt, Artificial Sequence
  Description of Artificial Sequence: Synthetic oligonucleotide
ccuacuaaacauaa

SEQ ID NO: 17404 - RNA, 14 nt, Artificial Sequence
  Description of Artificial Sequence: Synthetic oligonucleotide
accuacuaaacaua

SEQ ID NO: 17405 - RNA, 14 nt, Artificial Sequence
  Description of Artificial Sequence: Synthetic oligonucleotide
aaccuacuaaacau

SEQ ID NO: 17406 - RNA, 14 nt, Artificial Sequence
  Description of Artificial Sequence: Synthetic oligonucleotide
uaaccuacuaaaca

SEQ ID NO: 17407 - RNA, 14 nt, Artificial Sequence
  Description of Artificial Sequence: Synthetic oligonucleotide
guaaccuacuaaac

SEQ ID NO: 17408 - RNA, 14 nt, Artificial Sequence
  Description of Artificial Sequence: Synthetic oligonucleotide
aguaaccuacuaaa

SEQ ID NO: 17409 - RNA, 14 nt, Artificial Sequence
  Description of Artificial Sequence: Synthetic oligonucleotide
uaguaaccuacuaa

SEQ ID NO: 17410 - RNA, 14 nt, Artificial Sequence
  Description of Artificial Sequence: Synthetic oligonucleotide
auaguaaccuacua

SEQ ID NO: 17411 - RNA, 14 nt, Artificial Sequence
  Description of Artificial Sequence: Synthetic oligonucleotide
aauaguaaccuacu

SEQ ID NO: 17412 - RNA, 14 nt, Artificial Sequence
  Description of Artificial Sequence: Synthetic oligonucleotide
gaauaguaaccuac

SEQ ID NO: 17413 - RNA, 14 nt, Artificial Sequence
  Description of Artificial Sequence: Synthetic oligonucleotide
agaauaguaaccua

SEQ ID NO: 17414 - RNA, 14 nt, Artificial Sequence
  Description of Artificial Sequence: Synthetic oligonucleotide
gagaauaguaaccu

SEQ ID NO: 17415 - RNA, 14 nt, Artificial Sequence
  Description of Artificial Sequence: Synthetic oligonucleotide
agagaauaguaacc

SEQ ID NO: 17416 - RNA, 14 nt, Artificial Sequence
  Description of Artificial Sequence: Synthetic oligonucleotide
uagagaauaguaac

SEQ ID NO: 17417 - RNA, 14 nt, Artificial Sequence
  Description of Artificial Sequence: Synthetic oligonucleotide
uuagagaauaguaa

SEQ ID NO: 17418 - RNA, 14 nt, Artificial Sequence
  Description of Artificial Sequence: Synthetic oligonucleotide
guuagagaauagua

SEQ ID NO: 17419 - RNA, 14 nt, Artificial Sequence
  Description of Artificial Sequence: Synthetic oligonucleotide
uguuagagaauagu

SEQ ID NO: 17420 - RNA, 14 nt, Artificial Sequence
  Description of Artificial Sequence: Synthetic oligonucleotide
uuguuagagaauag

SEQ ID NO: 17421 - RNA, 14 nt, Artificial Sequence
  Description of Artificial Sequence: Synthetic oligonucleotide
guuguuagagaaua

SEQ ID NO: 17422 - RNA, 14 nt, Artificial Sequence
  Description of Artificial Sequence: Synthetic oligonucleotide
aguuguuagagaau

SEQ ID NO: 17423 - RNA, 14 nt, Artificial Sequence
  Description of Artificial Sequence: Synthetic oligonucleotide
gaguuguuagagaa

SEQ ID NO: 17424 - RNA, 14 nt, Artificial Sequence
  Description of Artificial Sequence: Synthetic oligonucleotide
ugaguuguuagaga

SEQ ID NO: 17425 - RNA, 14 nt, Artificial Sequence
  Description of Artificial Sequence: Synthetic oligonucleotide
uugaguuguuagag

SEQ ID NO: 17426 - RNA, 14 nt, Artificial Sequence
  Description of Artificial Sequence: Synthetic oligonucleotide
cuugaguuguuaga

SEQ ID NO: 17427 - RNA, 14 nt, Artificial Sequence
  Description of Artificial Sequence: Synthetic oligonucleotide
ccuugaguuguuag

SEQ ID NO: 17428 - RNA, 14 nt, Artificial Sequence
  Description of Artificial Sequence: Synthetic oligonucleotide
uccuugaguuguua

SEQ ID NO: 17429 - RNA, 14 nt, Artificial Sequence
  Description of Artificial Sequence: Synthetic oligonucleotide
auccuugaguuguu

SEQ ID NO: 17430 - RNA, 14 nt, Artificial Sequence
  Description of Artificial Sequence: Synthetic oligonucleotide
cauccuugaguugu

SEQ ID NO: 17431 - RNA, 14 nt, Artificial Sequence
  Description of Artificial Sequence: Synthetic oligonucleotide
gcauccuugaguug

SEQ ID NO: 17432 - RNA, 14 nt, Artificial Sequence
  Description of Artificial Sequence: Synthetic oligonucleotide
agcauccuugaguu

SEQ ID NO: 17433 - RNA, 14 nt, Artificial Sequence
  Description of Artificial Sequence: Synthetic oligonucleotide
aagcauccuugagu

SEQ ID NO: 17434 - RNA, 14 nt, Artificial Sequence
  Description of Artificial Sequence: Synthetic oligonucleotide
aaagcauccuugag

SEQ ID NO: 17435 - RNA, 14 nt, Artificial Sequence
  Description of Artificial Sequence: Synthetic oligonucleotide
uaaagcauccuuga

SEQ ID NO: 17436 - RNA, 14 nt, Artificial Sequence
  Description of Artificial Sequence: Synthetic oligonucleotide
uuaaagcauccuug

SEQ ID NO: 17437 - RNA, 14 nt, Artificial Sequence
  Description of Artificial Sequence: Synthetic oligonucleotide
auuaaagcauccuu

SEQ ID NO: 17438 - RNA, 14 nt, Artificial Sequence
  Description of Artificial Sequence: Synthetic oligonucleotide
cauuaaagcauccu

SEQ ID NO: 17439 - RNA, 14 nt, Artificial Sequence
  Description of Artificial Sequence: Synthetic oligonucleotide
ccauuaaagcaucc

SEQ ID NO: 17440 - RNA, 14 nt, Artificial Sequence
  Description of Artificial Sequence: Synthetic oligonucleotide
uccauuaaagcauc

SEQ ID NO: 17441 - RNA, 14 nt, Artificial Sequence
  Description of Artificial Sequence: Synthetic oligonucleotide
auccauuaaagcau

SEQ ID NO: 17442 - RNA, 14 nt, Artificial Sequence
  Description of Artificial Sequence: Synthetic oligonucleotide
gauccauuaaagca

SEQ ID NO: 17443 - RNA, 14 nt, Artificial Sequence
  Description of Artificial Sequence: Synthetic oligonucleotide
agauccauuaaagc

SEQ ID NO: 17444 - RNA, 14 nt, Artificial Sequence
  Description of Artificial Sequence: Synthetic oligonucleotide
cagauccauuaaag

SEQ ID NO: 17445 - RNA, 14 nt, Artificial Sequence
  Description of Artificial Sequence: Synthetic oligonucleotide
ucagauccauuaaa

SEQ ID NO: 17446 - RNA, 14 nt, Artificial Sequence
  Description of Artificial Sequence: Synthetic oligonucleotide
uucagauccauuaa

SEQ ID NO: 17447 - RNA, 14 nt, Artificial Sequence
  Description of Artificial Sequence: Synthetic oligonucleotide
auucagauccauua

SEQ ID NO: 17448 - RNA, 14 nt, Artificial Sequence
  Description of Artificial Sequence: Synthetic oligonucleotide
aauucagauccauu

SEQ ID NO: 17449 - RNA, 14 nt, Artificial Sequence
  Description of Artificial Sequence: Synthetic oligonucleotide
aaauucagauccau

SEQ ID NO: 17450 - RNA, 14 nt, Artificial Sequence
  Description of Artificial Sequence: Synthetic oligonucleotide
caaauucagaucca

SEQ ID NO: 17451 - RNA, 14 nt, Artificial Sequence
  Description of Artificial Sequence: Synthetic oligonucleotide
ucaaauucagaucc

SEQ ID NO: 17452 - RNA, 14 nt, Artificial Sequence
  Description of Artificial Sequence: Synthetic oligonucleotide
gucaaauucagauc

SEQ ID NO: 17453 - RNA, 14 nt, Artificial Sequence
  Description of Artificial Sequence: Synthetic oligonucleotide
ugucaaauucagau

SEQ ID NO: 17454 - RNA, 14 nt, Artificial Sequence
  Description of Artificial Sequence: Synthetic oligonucleotide
uugucaaauucaga

SEQ ID NO: 17455 - RNA, 14 nt, Artificial Sequence
  Description of Artificial Sequence: Synthetic oligonucleotide
uuugucaaauucag

SEQ ID NO: 17456 - RNA, 14 nt, Artificial Sequence
  Description of Artificial Sequence: Synthetic oligonucleotide
cuuugucaaauuca

SEQ ID NO: 17457 - RNA, 14 nt, Artificial Sequence
  Description of Artificial Sequence: Synthetic oligonucleotide
ucuuugucaaauuc

SEQ ID NO: 17458 - RNA, 14 nt, Artificial Sequence
  Description of Artificial Sequence: Synthetic oligonucleotide
cucuuugucaaauu

SEQ ID NO: 17459 - RNA, 14 nt, Artificial Sequence
  Description of Artificial Sequence: Synthetic oligonucleotide
gcucuuugucaaau

SEQ ID NO: 17460 - RNA, 14 nt, Artificial Sequence
  Description of Artificial Sequence: Synthetic oligonucleotide
ugcucuuugucaaa

SEQ ID NO: 17461 - RNA, 14 nt, Artificial Sequence
  Description of Artificial Sequence: Synthetic oligonucleotide
augcucuuugucaa

SEQ ID NO: 17462 - RNA, 14 nt, Artificial Sequence
  Description of Artificial Sequence: Synthetic oligonucleotide
caugcucuuuguca

SEQ ID NO: 17463 - RNA, 14 nt, Artificial Sequence
  Description of Artificial Sequence: Synthetic oligonucleotide
gcaugcucuuuguc

SEQ ID NO: 17464 - RNA, 14 nt, Artificial Sequence
  Description of Artificial Sequence: Synthetic oligonucleotide
ggcaugcucuuugu

SEQ ID NO: 17465 - RNA, 14 nt, Artificial Sequence
  Description of Artificial Sequence: Synthetic oligonucleotide
uggcaugcucuuug

SEQ ID NO: 17466 - RNA, 14 nt, Artificial Sequence
  Description of Artificial Sequence: Synthetic oligonucleotide
guggcaugcucuuu

SEQ ID NO: 17467 - RNA, 14 nt, Artificial Sequence
  Description of Artificial Sequence: Synthetic oligonucleotide
uguggcaugcucuu

SEQ ID NO: 17468 - RNA, 14 nt, Artificial Sequence
  Description of Artificial Sequence: Synthetic oligonucleotide
guguggcaugcucu

SEQ ID NO: 17469 - RNA, 14 nt, Artificial Sequence
  Description of Artificial Sequence: Synthetic oligonucleotide
aguguggcaugcuc

SEQ ID NO: 17470 - RNA, 14 nt, Artificial Sequence
  Description of Artificial Sequence: Synthetic oligonucleotide
uaguguggcaugcu

SEQ ID NO: 17471 - RNA, 14 nt, Artificial Sequence
  Description of Artificial Sequence: Synthetic oligonucleotide
uuaguguggcaugc

SEQ ID NO: 17472 - RNA, 14 nt, Artificial Sequence
  Description of Artificial Sequence: Synthetic oligonucleotide
auuaguguggcaug

SEQ ID NO: 17473 - RNA, 14 nt, Artificial Sequence
  Description of Artificial Sequence: Synthetic oligonucleotide
uauuaguguggcau

SEQ ID NO: 17474 - RNA, 14 nt, Artificial Sequence
  Description of Artificial Sequence: Synthetic oligonucleotide
guauuaguguggca

SEQ ID NO: 17475 - RNA, 14 nt, Artificial Sequence
  Description of Artificial Sequence: Synthetic oligonucleotide
aguauuaguguggc

SEQ ID NO: 17476 - RNA, 14 nt, Artificial Sequence
  Description of Artificial Sequence: Synthetic oligonucleotide
uaguauuagugugg

SEQ ID NO: 17477 - RNA, 14 nt, Artificial Sequence
  Description of Artificial Sequence: Synthetic oligonucleotide
guaguauuagugug

SEQ ID NO: 17478 - RNA, 14 nt, Artificial Sequence
  Description of Artificial Sequence: Synthetic oligonucleotide
uguaguauuagugu

SEQ ID NO: 17479 - RNA, 14 nt, Artificial Sequence
  Description of Artificial Sequence: Synthetic oligonucleotide
cuguaguauuagug

SEQ ID NO: 17480 - RNA, 14 nt, Artificial Sequence
  Description of Artificial Sequence: Synthetic oligonucleotide
acuguaguauuagu

SEQ ID NO: 17481 - RNA, 14 nt, Artificial Sequence
  Description of Artificial Sequence: Synthetic oligonucleotide
gacuguaguauuag

SEQ ID NO: 17482 - RNA, 14 nt, Artificial Sequence
  Description of Artificial Sequence: Synthetic oligonucleotide
ugacuguaguauua

SEQ ID NO: 17483 - RNA, 14 nt, Artificial Sequence
  Description of Artificial Sequence: Synthetic oligonucleotide
uugacuguaguauu

SEQ ID NO: 17484 - RNA, 14 nt, Artificial Sequence
  Description of Artificial Sequence: Synthetic oligonucleotide
guugacuguaguau

SEQ ID NO: 17485 - RNA, 14 nt, Artificial Sequence
  Description of Artificial Sequence: Synthetic oligonucleotide
uguugacuguagua

SEQ ID NO: 17486 - RNA, 14 nt, Artificial Sequence
  Description of Artificial Sequence: Synthetic oligonucleotide
uuguugacuguagu

SEQ ID NO: 17487 - RNA, 14 nt, Artificial Sequence
  Description of Artificial Sequence: Synthetic oligonucleotide
guuguugacuguag

SEQ ID NO: 17488 - RNA, 14 nt, Artificial Sequence
  Description of Artificial Sequence: Synthetic oligonucleotide
uguuguugacugua

SEQ ID NO: 17489 - RNA, 14 nt, Artificial Sequence
  Description of Artificial Sequence: Synthetic oligonucleotide
cuguuguugacugu

SEQ ID NO: 17490 - RNA, 14 nt, Artificial Sequence
  Description of Artificial Sequence: Synthetic oligonucleotide
gcuguuguugacug

SEQ ID NO: 17491 - RNA, 14 nt, Artificial Sequence
  Description of Artificial Sequence: Synthetic oligonucleotide
ggcuguuguugacu

SEQ ID NO: 17492 - RNA, 14 nt, Artificial Sequence
  Description of Artificial Sequence: Synthetic oligonucleotide
gggcuguuguugac

SEQ ID NO: 17493 - RNA, 14 nt, Artificial Sequence
  Description of Artificial Sequence: Synthetic oligonucleotide
ugggcuguuguuga

SEQ ID NO: 17494 - RNA, 14 nt, Artificial Sequence
  Description of Artificial Sequence: Synthetic oligonucleotide
cugggcuguuguug

SEQ ID NO: 17495 - RNA, 14 nt, Artificial Sequence
  Description of Artificial Sequence: Synthetic oligonucleotide
ucugggcuguuguu

SEQ ID NO: 17496 - RNA, 14 nt, Artificial Sequence
  Description of Artificial Sequence: Synthetic oligonucleotide
cucugggcuguugu

SEQ ID NO: 17497 - RNA, 14 nt, Artificial Sequence
  Description of Artificial Sequence: Synthetic oligonucleotide
ucucugggcuguug

SEQ ID NO: 17498 - RNA, 14 nt, Artificial Sequence
  Description of Artificial Sequence: Synthetic oligonucleotide
uucucugggcuguu

SEQ ID NO: 17499 - RNA, 14 nt, Artificial Sequence
  Description of Artificial Sequence: Synthetic oligonucleotide
guucucugggcugu

SEQ ID NO: 17500 - RNA, 14 nt, Artificial Sequence
  Description of Artificial Sequence: Synthetic oligonucleotide
uguucucugggcug

SEQ ID NO: 17501 - RNA, 14 nt, Artificial Sequence
  Description of Artificial Sequence: Synthetic oligonucleotide
uuguucucugggcu

SEQ ID NO: 17502 - RNA, 14 nt, Artificial Sequence
  Description of Artificial Sequence: Synthetic oligonucleotide
auuguucucugggc

SEQ ID NO: 17503 - RNA, 14 nt, Artificial Sequence
  Description of Artificial Sequence: Synthetic oligonucleotide
aauuguucucuggg

SEQ ID NO: 17504 - RNA, 14 nt, Artificial Sequence
  Description of Artificial Sequence: Synthetic oligonucleotide
uaauuguucucugg

SEQ ID NO: 17505 - RNA, 14 nt, Artificial Sequence
  Description of Artificial Sequence: Synthetic oligonucleotide
guaauuguucucug

SEQ ID NO: 17506 - RNA, 14 nt, Artificial Sequence
  Description of Artificial Sequence: Synthetic oligonucleotide
aguaauuguucucu

SEQ ID NO: 17507 - RNA, 14 nt, Artificial Sequence
  Description of Artificial Sequence: Synthetic oligonucleotide
uaguaauuguucuc

SEQ ID NO: 17508 - RNA, 14 nt, Artificial Sequence
  Description of Artificial Sequence: Synthetic oligonucleotide
auaguaauuguucu

SEQ ID NO: 17509 - RNA, 14 nt, Artificial Sequence
  Description of Artificial Sequence: Synthetic oligonucleotide
cauaguaauuguuc

SEQ ID NO: 17510 - RNA, 14 nt, Artificial Sequence
  Description of Artificial Sequence: Synthetic oligonucleotide
acauaguaauuguu

SEQ ID NO: 17511 - RNA, 14 nt, Artificial Sequence
  Description of Artificial Sequence: Synthetic oligonucleotide
gacauaguaauugu

SEQ ID NO: 17512 - RNA, 14 nt, Artificial Sequence
  Description of Artificial Sequence: Synthetic oligonucleotide
ugacauaguaauug

SEQ ID NO: 17513 - RNA, 14 nt, Artificial Sequence
  Description of Artificial Sequence: Synthetic oligonucleotide
cugacauaguaauu

SEQ ID NO: 17514 - RNA, 14 nt, Artificial Sequence
  Description of Artificial Sequence: Synthetic oligonucleotide
gcugacauaguaau

SEQ ID NO: 17515 - RNA, 14 nt, Artificial Sequence
  Description of Artificial Sequence: Synthetic oligonucleotide
agcugacauaguaa

SEQ ID NO: 17516 - RNA, 14 nt, Artificial Sequence
  Description of Artificial Sequence: Synthetic oligonucleotide
cagcugacauagua

SEQ ID NO: 17517 - RNA, 14 nt, Artificial Sequence
  Description of Artificial Sequence: Synthetic oligonucleotide
ccagcugacauagu

SEQ ID NO: 17518 - RNA, 14 nt, Artificial Sequence
  Description of Artificial Sequence: Synthetic oligonucleotide
uccagcugacauag

SEQ ID NO: 17519 - RNA, 14 nt, Artificial Sequence
  Description of Artificial Sequence: Synthetic oligonucleotide
cuccagcugacaua

SEQ ID NO: 17520 - RNA, 14 nt, Artificial Sequence
  Description of Artificial Sequence: Synthetic oligonucleotide
ccuccagcugacau

SEQ ID NO: 17521 - RNA, 14 nt, Artificial Sequence
  Description of Artificial Sequence: Synthetic oligonucleotide
gccuccagcugaca

SEQ ID NO: 17522 - RNA, 14 nt, Artificial Sequence
  Description of Artificial Sequence: Synthetic oligonucleotide
agccuccagcugac

SEQ ID NO: 17523 - RNA, 14 nt, Artificial Sequence
  Description of Artificial Sequence: Synthetic oligonucleotide
uagccuccagcuga

SEQ ID NO: 17524 - RNA, 14 nt, Artificial Sequence
  Description of Artificial Sequence: Synthetic oligonucleotide
auagccuccagcug

SEQ ID NO: 17525 - RNA, 14 nt, Artificial Sequence
  Description of Artificial Sequence: Synthetic oligonucleotide
uauagccuccagcu

SEQ ID NO: 17526 - RNA, 14 nt, Artificial Sequence
  Description of Artificial Sequence: Synthetic oligonucleotide
auauagccuccagc

SEQ ID NO: 17527 - RNA, 14 nt, Artificial Sequence
  Description of Artificial Sequence: Synthetic oligonucleotide
aauauagccuccag

SEQ ID NO: 17528 - RNA, 14 nt, Artificial Sequence
  Description of Artificial Sequence: Synthetic oligonucleotide
uaauauagccucca

SEQ ID NO: 17529 - RNA, 14 nt, Artificial Sequence
  Description of Artificial Sequence: Synthetic oligonucleotide
auaauauagccucc

SEQ ID NO: 17530 - RNA, 14 nt, Artificial Sequence
  Description of Artificial Sequence: Synthetic oligonucleotide
cauaauauagccuc

SEQ ID NO: 17531 - RNA, 14 nt, Artificial Sequence
  Description of Artificial Sequence: Synthetic oligonucleotide
ucauaauauagccu

SEQ ID NO: 17532 - RNA, 14 nt, Artificial Sequence
  Description of Artificial Sequence: Synthetic oligonucleotide
aucauaauauagcc

SEQ ID NO: 17533 - RNA, 14 nt, Artificial Sequence
  Description of Artificial Sequence: Synthetic oligonucleotide
aaucauaauauagc

SEQ ID NO: 17534 - RNA, 14 nt, Artificial Sequence
  Description of Artificial Sequence: Synthetic oligonucleotide
gaaucauaauauag

SEQ ID NO: 17535 - RNA, 14 nt, Artificial Sequence
  Description of Artificial Sequence: Synthetic oligonucleotide
agaaucauaauaua

SEQ ID NO: 17536 - RNA, 14 nt, Artificial Sequence
  Description of Artificial Sequence: Synthetic oligonucleotide
uagaaucauaauau

SEQ ID NO: 17537 - RNA, 14 nt, Artificial Sequence
  Description of Artificial Sequence: Synthetic oligonucleotide
uuagaaucauaaua

SEQ ID NO: 17538 - RNA, 14 nt, Artificial Sequence
  Description of Artificial Sequence: Synthetic oligonucleotide
uuuagaaucauaau

SEQ ID NO: 17539 - RNA, 14 nt, Artificial Sequence
  Description of Artificial Sequence: Synthetic oligonucleotide
auuuagaaucauaa

SEQ ID NO: 17540 - RNA, 14 nt, Artificial Sequence
  Description of Artificial Sequence: Synthetic oligonucleotide
aauuuagaaucaua

SEQ ID NO: 17541 - RNA, 14 nt, Artificial Sequence
  Description of Artificial Sequence: Synthetic oligonucleotide
gaauuuagaaucau

SEQ ID NO: 17542 - RNA, 14 nt, Artificial Sequence
  Description of Artificial Sequence: Synthetic oligonucleotide
agaauuuagaauca

SEQ ID NO: 17543 - RNA, 14 nt, Artificial Sequence
  Description of Artificial Sequence: Synthetic oligonucleotide
aagaauuuagaauc

SEQ ID NO: 17544 - RNA, 14 nt, Artificial Sequence
  Description of Artificial Sequence: Synthetic oligonucleotide
uaagaauuuagaau

SEQ ID NO: 17545 - RNA, 14 nt, Artificial Sequence
  Description of Artificial Sequence: Synthetic oligonucleotide
uuaagaauuuagaa

SEQ ID NO: 17546 - RNA, 14 nt, Artificial Sequence
  Description of Artificial Sequence: Synthetic oligonucleotide
uuuaagaauuuaga

SEQ ID NO: 17547 - RNA, 14 nt, Artificial Sequence
  Description of Artificial Sequence: Synthetic oligonucleotide
cuuuaagaauuuag

SEQ ID NO: 17548 - RNA, 14 nt, Artificial Sequence
  Description of Artificial Sequence: Synthetic oligonucleotide
ccuuuaagaauuua

SEQ ID NO: 17549 - RNA, 14 nt, Artificial Sequence
  Description of Artificial Sequence: Synthetic oligonucleotide
accuuuaagaauuu

SEQ ID NO: 17550 - RNA, 14 nt, Artificial Sequence
  Description of Artificial Sequence: Synthetic oligonucleotide
aaccuuuaagaauu

SEQ ID NO: 17551 - RNA, 14 nt, Artificial Sequence
  Description of Artificial Sequence: Synthetic oligonucleotide
aaaccuuuaagaau

SEQ ID NO: 17552 - RNA, 14 nt, Artificial Sequence
  Description of Artificial Sequence: Synthetic oligonucleotide
aaaaccuuuaagaa

SEQ ID NO: 17553 - RNA, 14 nt, Artificial Sequence
  Description of Artificial Sequence: Synthetic oligonucleotide
aaaaaccuuuaaga

SEQ ID NO: 17554 - RNA, 14 nt, Artificial Sequence
  Description of Artificial Sequence: Synthetic oligonucleotide
aaaaaaccuuuaag

SEQ ID NO: 17555 - RNA, 14 nt, Artificial Sequence
  Description of Artificial Sequence: Synthetic oligonucleotide
aaaaaaaccuuuaa

SEQ ID NO: 17556 - RNA, 14 nt, Artificial Sequence
  Description of Artificial Sequence: Synthetic oligonucleotide
gaaaaaaaccuuua

SEQ ID NO: 17557 - RNA, 14 nt, Artificial Sequence
  Description of Artificial Sequence: Synthetic oligonucleotide
ggaaaaaaaccuuu

SEQ ID NO: 17558 - RNA, 14 nt, Artificial Sequence
  Description of Artificial Sequence: Synthetic oligonucleotide
gggaaaaaaaccuu

SEQ ID NO: 17559 - RNA, 14 nt, Artificial Sequence
  Description of Artificial Sequence: Synthetic oligonucleotide
agggaaaaaaaccu

SEQ ID NO: 17560 - DNA, 14 bp, Artificial Sequence
  Description of Artificial Sequence: Synthetic oligonucleotide
gagggaaaaaaacc

SEQ ID NO: 17561 - DNA, 14 bp, Artificial Sequence
  Description of Artificial Sequence: Synthetic oligonucleotide
ggagggaaaaaaac

SEQ ID NO: 17562 - RNA, 14 nt, Artificial Sequence
  Description of Artificial Sequence: Synthetic oligonucleotide
uggagggaaaaaaa

SEQ ID NO: 17563 - RNA, 14 nt, Artificial Sequence
  Description of Artificial Sequence: Synthetic oligonucleotide
auggagggaaaaaa

SEQ ID NO: 17564 - RNA, 14 nt, Artificial Sequence
  Description of Artificial Sequence: Synthetic oligonucleotide
uauggagggaaaaa

SEQ ID NO: 17565 - RNA, 14 nt, Artificial Sequence
  Description of Artificial Sequence: Synthetic oligonucleotide
uuauggagggaaaa

SEQ ID NO: 17566 - RNA, 14 nt, Artificial Sequence
  Description of Artificial Sequence: Synthetic oligonucleotide
uuuauggagggaaa

SEQ ID NO: 17567 - RNA, 14 nt, Artificial Sequence
  Description of Artificial Sequence: Synthetic oligonucleotide
auuuauggagggaa

SEQ ID NO: 17568 - RNA, 14 nt, Artificial Sequence
  Description of Artificial Sequence: Synthetic oligonucleotide
gauuuauggaggga

SEQ ID NO: 17569 - RNA, 14 nt, Artificial Sequence
  Description of Artificial Sequence: Synthetic oligonucleotide
ugauuuauggaggg

SEQ ID NO: 17570 - RNA, 14 nt, Artificial Sequence
  Description of Artificial Sequence: Synthetic oligonucleotide
uugauuuauggagg

SEQ ID NO: 17571 - RNA, 14 nt, Artificial Sequence
  Description of Artificial Sequence: Synthetic oligonucleotide
uuugauuuauggag

SEQ ID NO: 17572 - RNA, 14 nt, Artificial Sequence
  Description of Artificial Sequence: Synthetic oligonucleotide
uuuugauuuaugga

SEQ ID NO: 17573 - RNA, 14 nt, Artificial Sequence
  Description of Artificial Sequence: Synthetic oligonucleotide
uuuuugauuuaugg

SEQ ID NO: 17574 - RNA, 14 nt, Artificial Sequence
  Description of Artificial Sequence: Synthetic oligonucleotide
auuuuugauuuaug

SEQ ID NO: 17575 - RNA, 14 nt, Artificial Sequence
  Description of Artificial Sequence: Synthetic oligonucleotide
aauuuuugauuuau

SEQ ID NO: 17576 - RNA, 14 nt, Artificial Sequence
  Description of Artificial Sequence: Synthetic oligonucleotide
uaauuuuugauuua

SEQ ID NO: 17577 - RNA, 14 nt, Artificial Sequence
  Description of Artificial Sequence: Synthetic oligonucleotide
guaauuuuugauuu

SEQ ID NO: 17578 - RNA, 14 nt, Artificial Sequence
  Description of Artificial Sequence: Synthetic oligonucleotide
gguaauuuuugauu

SEQ ID NO: 17579 - RNA, 14 nt, Artificial Sequence
  Description of Artificial Sequence: Synthetic oligonucleotide
agguaauuuuugau

SEQ ID NO: 17580 - RNA, 14 nt, Artificial Sequence
  Description of Artificial Sequence: Synthetic oligonucleotide
aagguaauuuuuga

SEQ ID NO: 17581 - RNA, 14 nt, Artificial Sequence
  Description of Artificial Sequence: Synthetic oligonucleotide
uaagguaauuuuug

SEQ ID NO: 17582 - RNA, 14 nt, Artificial Sequence
  Description of Artificial Sequence: Synthetic oligonucleotide
auaagguaauuuuu

SEQ ID NO: 17583 - RNA, 14 nt, Artificial Sequence
  Description of Artificial Sequence: Synthetic oligonucleotide
cauaagguaauuuu

SEQ ID NO: 17584 - RNA, 14 nt, Artificial Sequence
  Description of Artificial Sequence: Synthetic oligonucleotide
acauaagguaauuu

SEQ ID NO: 17585 - RNA, 14 nt, Artificial Sequence
  Description of Artificial Sequence: Synthetic oligonucleotide
uacauaagguaauu

SEQ ID NO: 17586 - RNA, 14 nt, Artificial Sequence
  Description of Artificial Sequence: Synthetic oligonucleotide
uuacauaagguaau

SEQ ID NO: 17587 - RNA, 14 nt, Artificial Sequence
  Description of Artificial Sequence: Synthetic oligonucleotide
uuuacauaagguaa

SEQ ID NO: 17588 - RNA, 14 nt, Artificial Sequence
  Description of Artificial Sequence: Synthetic oligonucleotide
guuuacauaaggua

SEQ ID NO: 17589 - RNA, 14 nt, Artificial Sequence
  Description of Artificial Sequence: Synthetic oligonucleotide
gguuuacauaaggu

SEQ ID NO: 17590 - RNA, 14 nt, Artificial Sequence
  Description of Artificial Sequence: Synthetic oligonucleotide
ugguuuacauaagg

SEQ ID NO: 17591 - RNA, 14 nt, Artificial Sequence
  Description of Artificial Sequence: Synthetic oligonucleotide
uugguuuacauaag

SEQ ID NO: 17592 - RNA, 14 nt, Artificial Sequence
  Description of Artificial Sequence: Synthetic oligonucleotide
uuugguuuacauaa

SEQ ID NO: 17593 - RNA, 14 nt, Artificial Sequence
  Description of Artificial Sequence: Synthetic oligonucleotide
uuuugguuuacaua

SEQ ID NO: 17594 - RNA, 14 nt, Artificial Sequence
  Description of Artificial Sequence: Synthetic oligonucleotide
uuuuugguuuacau

SEQ ID NO: 17595 - RNA, 14 nt, Artificial Sequence
  Description of Artificial Sequence: Synthetic oligonucleotide
auuuuugguuuaca

SEQ ID NO: 17596 - RNA, 14 nt, Artificial Sequence
  Description of Artificial Sequence: Synthetic oligonucleotide
aauuuuugguuuac

SEQ ID NO: 17597 - RNA, 14 nt, Artificial Sequence
  Description of Artificial Sequence: Synthetic oligonucleotide
uaauuuuugguuua

SEQ ID NO: 17598 - RNA, 14 nt, Artificial Sequence
  Description of Artificial Sequence: Synthetic oligonucleotide
cuaauuuuugguuu

SEQ ID NO: 17599 - RNA, 14 nt, Artificial Sequence
  Description of Artificial Sequence: Synthetic oligonucleotide
acuaauuuuugguu

SEQ ID NO: 17600 - RNA, 14 nt, Artificial Sequence
  Description of Artificial Sequence: Synthetic oligonucleotide
aacuaauuuuuggu

SEQ ID NO: 17601 - RNA, 14 nt, Artificial Sequence
  Description of Artificial Sequence: Synthetic oligonucleotide
caacuaauuuuugg

SEQ ID NO: 17602 - RNA, 14 nt, Artificial Sequence
  Description of Artificial Sequence: Synthetic oligonucleotide
ccaacuaauuuuug

SEQ ID NO: 17603 - RNA, 14 nt, Artificial Sequence
  Description of Artificial Sequence: Synthetic oligonucleotide
accaacuaauuuuu

SEQ ID NO: 17604 - RNA, 14 nt, Artificial Sequence
  Description of Artificial Sequence: Synthetic oligonucleotide
uaccaacuaauuuu

SEQ ID NO: 17605 - RNA, 14 nt, Artificial Sequence
  Description of Artificial Sequence: Synthetic oligonucleotide
auaccaacuaauuu

SEQ ID NO: 17606 - RNA, 14 nt, Artificial Sequence
  Description of Artificial Sequence: Synthetic oligonucleotide
aauaccaacuaauu

SEQ ID NO: 17607 - RNA, 14 nt, Artificial Sequence
  Description of Artificial Sequence: Synthetic oligonucleotide
aaauaccaacuaau

SEQ ID NO: 17608 - RNA, 14 nt, Artificial Sequence
  Description of Artificial Sequence: Synthetic oligonucleotide
uaaauaccaacuaa

SEQ ID NO: 17609 - RNA, 14 nt, Artificial Sequence
  Description of Artificial Sequence: Synthetic oligonucleotide
auaaauaccaacua

SEQ ID NO: 17610 - RNA, 14 nt, Artificial Sequence
  Description of Artificial Sequence: Synthetic oligonucleotide
cauaaauaccaacu

SEQ ID NO: 17611 - RNA, 14 nt, Artificial Sequence
  Description of Artificial Sequence: Synthetic oligonucleotide
ccauaaauaccaac

SEQ ID NO: 17612 - RNA, 14 nt, Artificial Sequence
  Description of Artificial Sequence: Synthetic oligonucleotide
accauaaauaccaa

SEQ ID NO: 17613 - RNA, 14 nt, Artificial Sequence
  Description of Artificial Sequence: Synthetic oligonucleotide
gaccauaaauacca

SEQ ID NO: 17614 - RNA, 14 nt, Artificial Sequence
  Description of Artificial Sequence: Synthetic oligonucleotide
ugaccauaaauacc

SEQ ID NO: 17615 - RNA, 14 nt, Artificial Sequence
  Description of Artificial Sequence: Synthetic oligonucleotide
augaccauaaauac

SEQ ID NO: 17616 - RNA, 14 nt, Artificial Sequence
  Description of Artificial Sequence: Synthetic oligonucleotide
caugaccauaaaua

SEQ ID NO: 17617 - RNA, 14 nt, Artificial Sequence
  Description of Artificial Sequence: Synthetic oligonucleotide
ucaugaccauaaau

SEQ ID NO: 17618 - RNA, 14 nt, Artificial Sequence
  Description of Artificial Sequence: Synthetic oligonucleotide
aucaugaccauaaa

SEQ ID NO: 17619 - RNA, 14 nt, Artificial Sequence
  Description of Artificial Sequence: Synthetic oligonucleotide
gaucaugaccauaa

SEQ ID NO: 17620 - RNA, 14 nt, Artificial Sequence
  Description of Artificial Sequence: Synthetic oligonucleotide
agaucaugaccaua

SEQ ID NO: 17621 - RNA, 14 nt, Artificial Sequence
  Description of Artificial Sequence: Synthetic oligonucleotide
aagaucaugaccau

SEQ ID NO: 17622 - RNA, 14 nt, Artificial Sequence
  Description of Artificial Sequence: Synthetic oligonucleotide
uaagaucaugacca

SEQ ID NO: 17623 - RNA, 14 nt, Artificial Sequence
  Description of Artificial Sequence: Synthetic oligonucleotide
uuaagaucaugacc

SEQ ID NO: 17624 - RNA, 14 nt, Artificial Sequence
  Description of Artificial Sequence: Synthetic oligonucleotide
auuaagaucaugac

SEQ ID NO: 17625 - RNA, 14 nt, Artificial Sequence
  Description of Artificial Sequence: Synthetic oligonucleotide
aauuaagaucauga

SEQ ID NO: 17626 - RNA, 14 nt, Artificial Sequence
  Description of Artificial Sequence: Synthetic oligonucleotide
gaauuaagaucaug

SEQ ID NO: 17627 - RNA, 14 nt, Artificial Sequence
  Description of Artificial Sequence: Synthetic oligonucleotide
agaauuaagaucau

SEQ ID NO: 17628 - RNA, 14 nt, Artificial Sequence
  Description of Artificial Sequence: Synthetic oligonucleotide
gagaauuaagauca

SEQ ID NO: 17629 - RNA, 14 nt, Artificial Sequence
  Description of Artificial Sequence: Synthetic oligonucleotide
ugagaauuaagauc

SEQ ID NO: 17630 - RNA, 14 nt, Artificial Sequence
  Description of Artificial Sequence: Synthetic oligonucleotide
uugagaauuaagau

SEQ ID NO: 17631 - RNA, 14 nt, Artificial Sequence
  Description of Artificial Sequence: Synthetic oligonucleotide
cuugagaauuaaga

SEQ ID NO: 17632 - RNA, 14 nt, Artificial Sequence
  Description of Artificial Sequence: Synthetic oligonucleotide
acuugagaauuaag

SEQ ID NO: 17633 - RNA, 14 nt, Artificial Sequence
  Description of Artificial Sequence: Synthetic oligonucleotide
aacuugagaauuaa

SEQ ID NO: 17634 - RNA, 14 nt, Artificial Sequence
  Description of Artificial Sequence: Synthetic oligonucleotide
aaacuugagaauua

SEQ ID NO: 17635 - RNA, 14 nt, Artificial Sequence
  Description of Artificial Sequence: Synthetic oligonucleotide
uaaacuugagaauu

SEQ ID NO: 17636 - RNA, 14 nt, Artificial Sequence
  Description of Artificial Sequence: Synthetic oligonucleotide
cuaaacuugagaau

SEQ ID NO: 17637 - RNA, 14 nt, Artificial Sequence
  Description of Artificial Sequence: Synthetic oligonucleotide
gcuaaacuugagaa

SEQ ID NO: 17638 - RNA, 14 nt, Artificial Sequence
  Description of Artificial Sequence: Synthetic oligonucleotide
agcuaaacuugaga

SEQ ID NO: 17639 - RNA, 14 nt, Artificial Sequence
  Description of Artificial Sequence: Synthetic oligonucleotide
aagcuaaacuugag

SEQ ID NO: 17640 - RNA, 14 nt, Artificial Sequence
  Description of Artificial Sequence: Synthetic oligonucleotide
uaagcuaaacuuga

SEQ ID NO: 17641 - RNA, 14 nt, Artificial Sequence
  Description of Artificial Sequence: Synthetic oligonucleotide
uuaagcuaaacuug

SEQ ID NO: 17642 - RNA, 14 nt, Artificial Sequence
  Description of Artificial Sequence: Synthetic oligonucleotide
auuaagcuaaacuu

SEQ ID NO: 17643 - RNA, 14 nt, Artificial Sequence
  Description of Artificial Sequence: Synthetic oligonucleotide
gauuaagcuaaacu

SEQ ID NO: 17644 - RNA, 14 nt, Artificial Sequence
  Description of Artificial Sequence: Synthetic oligonucleotide
agauuaagcuaaac

SEQ ID NO: 17645 - RNA, 14 nt, Artificial Sequence
  Description of Artificial Sequence: Synthetic oligonucleotide
aagauuaagcuaaa

SEQ ID NO: 17646 - RNA, 14 nt, Artificial Sequence
  Description of Artificial Sequence: Synthetic oligonucleotide
caagauuaagcuaa

SEQ ID NO: 17647 - RNA, 14 nt, Artificial Sequence
  Description of Artificial Sequence: Synthetic oligonucleotide
acaagauuaagcua

SEQ ID NO: 17648 - RNA, 14 nt, Artificial Sequence
  Description of Artificial Sequence: Synthetic oligonucleotide
uacaagauuaagcu

SEQ ID NO: 17649 - RNA, 14 nt, Artificial Sequence
  Description of Artificial Sequence: Synthetic oligonucleotide
auacaagauuaagc

SEQ ID NO: 17650 - RNA, 14 nt, Artificial Sequence
  Description of Artificial Sequence: Synthetic oligonucleotide
aauacaagauuaag

SEQ ID NO: 17651 - RNA, 14 nt, Artificial Sequence
  Description of Artificial Sequence: Synthetic oligonucleotide
aaauacaagauuaa

SEQ ID NO: 17652 - RNA, 14 nt, Artificial Sequence
  Description of Artificial Sequence: Synthetic oligonucleotide
gaaauacaagauua

SEQ ID NO: 17653 - RNA, 14 nt, Artificial Sequence
  Description of Artificial Sequence: Synthetic oligonucleotide
ugaaauacaagauu

SEQ ID NO: 17654 - RNA, 14 nt, Artificial Sequence
  Description of Artificial Sequence: Synthetic oligonucleotide
augaaauacaagau

SEQ ID NO: 17655 - RNA, 14 nt, Artificial Sequence
  Description of Artificial Sequence: Synthetic oligonucleotide
aaugaaauacaaga

SEQ ID NO: 17656 - RNA, 14 nt, Artificial Sequence
  Description of Artificial Sequence: Synthetic oligonucleotide
caaugaaauacaag

SEQ ID NO: 17657 - RNA, 14 nt, Artificial Sequence
  Description of Artificial Sequence: Synthetic oligonucleotide
acaaugaaauacaa

SEQ ID NO: 17658 - RNA, 14 nt, Artificial Sequence
  Description of Artificial Sequence: Synthetic oligonucleotide
aacaaugaaauaca

SEQ ID NO: 17659 - RNA, 14 nt, Artificial Sequence
  Description of Artificial Sequence: Synthetic oligonucleotide
aaacaaugaaauac

SEQ ID NO: 17660 - RNA, 14 nt, Artificial Sequence
  Description of Artificial Sequence: Synthetic oligonucleotide
caaacaaugaaaua

SEQ ID NO: 17661 - RNA, 14 nt, Artificial Sequence
  Description of Artificial Sequence: Synthetic oligonucleotide
acaaacaaugaaau

SEQ ID NO: 17662 - RNA, 14 nt, Artificial Sequence
  Description of Artificial Sequence: Synthetic oligonucleotide
gacaaacaaugaaa

SEQ ID NO: 17663 - RNA, 14 nt, Artificial Sequence
  Description of Artificial Sequence: Synthetic oligonucleotide
agacaaacaaugaa

SEQ ID NO: 17664 - RNA, 14 nt, Artificial Sequence
  Description of Artificial Sequence: Synthetic oligonucleotide
aagacaaacaauga

SEQ ID NO: 17665 - RNA, 14 nt, Artificial Sequence
  Description of Artificial Sequence: Synthetic oligonucleotide
gaagacaaacaaug

SEQ ID NO: 17666 - RNA, 14 nt, Artificial Sequence
  Description of Artificial Sequence: Synthetic oligonucleotide
agaagacaaacaau

SEQ ID NO: 17667 - RNA, 14 nt, Artificial Sequence
  Description of Artificial Sequence: Synthetic oligonucleotide
uagaagacaaacaa

SEQ ID NO: 17668 - RNA, 14 nt, Artificial Sequence
  Description of Artificial Sequence: Synthetic oligonucleotide
uuagaagacaaaca

SEQ ID NO: 17669 - RNA, 14 nt, Artificial Sequence
  Description of Artificial Sequence: Synthetic oligonucleotide
auuagaagacaaac

SEQ ID NO: 17670 - RNA, 14 nt, Artificial Sequence
  Description of Artificial Sequence: Synthetic oligonucleotide
uauuagaagacaaa

SEQ ID NO: 17671 - RNA, 14 nt, Artificial Sequence
  Description of Artificial Sequence: Synthetic oligonucleotide
auauuagaagacaa

SEQ ID NO: 17672 - RNA, 14 nt, Artificial Sequence
  Description of Artificial Sequence: Synthetic oligonucleotide
cauauuagaagaca

SEQ ID NO: 17673 - RNA, 14 nt, Artificial Sequence
  Description of Artificial Sequence: Synthetic oligonucleotide
ucauauuagaagac

SEQ ID NO: 17674 - RNA, 14 nt, Artificial Sequence
  Description of Artificial Sequence: Synthetic oligonucleotide
gucauauuagaaga

SEQ ID NO: 17675 - RNA, 14 nt, Artificial Sequence
  Description of Artificial Sequence: Synthetic oligonucleotide
ugucauauuagaag

SEQ ID NO: 17676 - RNA, 14 nt, Artificial Sequence
  Description of Artificial Sequence: Synthetic oligonucleotide
cugucauauuagaa

SEQ ID NO: 17677 - RNA, 14 nt, Artificial Sequence
  Description of Artificial Sequence: Synthetic oligonucleotide
gcugucauauuaga

SEQ ID NO: 17678 - RNA, 14 nt, Artificial Sequence
  Description of Artificial Sequence: Synthetic oligonucleotide
agcugucauauuag

SEQ ID NO: 17679 - RNA, 14 nt, Artificial Sequence
  Description of Artificial Sequence: Synthetic oligonucleotide
aagcugucauauua

SEQ ID NO: 17680 - RNA, 14 nt, Artificial Sequence
  Description of Artificial Sequence: Synthetic oligonucleotide
uaagcugucauauu

SEQ ID NO: 17681 - RNA, 14 nt, Artificial Sequence
  Description of Artificial Sequence: Synthetic oligonucleotide
uuaagcugucauau

SEQ ID NO: 17682 - RNA, 14 nt, Artificial Sequence
  Description of Artificial Sequence: Synthetic oligonucleotide
uuuaagcugucaua

SEQ ID NO: 17683 - RNA, 14 nt, Artificial Sequence
  Description of Artificial Sequence: Synthetic oligonucleotide
auuuaagcugucau

SEQ ID NO: 17684 - RNA, 14 nt, Artificial Sequence
  Description of Artificial Sequence: Synthetic oligonucleotide
aauuuaagcuguca

SEQ ID NO: 17685 - RNA, 14 nt, Artificial Sequence
  Description of Artificial Sequence: Synthetic oligonucleotide
gaauuuaagcuguc

SEQ ID NO: 17686 - RNA, 14 nt, Artificial Sequence
  Description of Artificial Sequence: Synthetic oligonucleotide
ugaauuuaagcugu

SEQ ID NO: 17687 - RNA, 14 nt, Artificial Sequence
  Description of Artificial Sequence: Synthetic oligonucleotide
cugaauuuaagcug

SEQ ID NO: 17688 - RNA, 14 nt, Artificial Sequence
  Description of Artificial Sequence: Synthetic oligonucleotide
ucugaauuuaagcu

SEQ ID NO: 17689 - RNA, 14 nt, Artificial Sequence
  Description of Artificial Sequence: Synthetic oligonucleotide
aucugaauuuaagc

SEQ ID NO: 17690 - RNA, 14 nt, Artificial Sequence
  Description of Artificial Sequence: Synthetic oligonucleotide
aaucugaauuuaag

SEQ ID NO: 17691 - RNA, 14 nt, Artificial Sequence
  Description of Artificial Sequence: Synthetic oligonucleotide
aaaucugaauuuaa

SEQ ID NO: 17692 - RNA, 14 nt, Artificial Sequence
  Description of Artificial Sequence: Synthetic oligonucleotide
aaaaucugaauuua

SEQ ID NO: 17693 - RNA, 14 nt, Artificial Sequence
  Description of Artificial Sequence: Synthetic oligonucleotide
aaaaaucugaauuu

SEQ ID NO: 17694 - RNA, 14 nt, Artificial Sequence
  Description of Artificial Sequence: Synthetic oligonucleotide
uaaaaaucugaauu

SEQ ID NO: 17695 - RNA, 14 nt, Artificial Sequence
  Description of Artificial Sequence: Synthetic oligonucleotide
uuaaaaaucugaau

SEQ ID NO: 17696 - RNA, 14 nt, Artificial Sequence
  Description of Artificial Sequence: Synthetic oligonucleotide
cuuaaaaaucugaa

SEQ ID NO: 17697 - RNA, 14 nt, Artificial Sequence
  Description of Artificial Sequence: Synthetic oligonucleotide
acuuaaaaaucuga

SEQ ID NO: 17698 - RNA, 14 nt, Artificial Sequence
  Description of Artificial Sequence: Synthetic oligonucleotide
cacuuaaaaaucug

SEQ ID NO: 17699 - RNA, 14 nt, Artificial Sequence
  Description of Artificial Sequence: Synthetic oligonucleotide
ucacuuaaaaaucu

SEQ ID NO: 17700 - RNA, 14 nt, Artificial Sequence
  Description of Artificial Sequence: Synthetic oligonucleotide
gucacuuaaaaauc

SEQ ID NO: 17701 - RNA, 14 nt, Artificial Sequence
  Description of Artificial Sequence: Synthetic oligonucleotide
agucacuuaaaaau

SEQ ID NO: 17702 - RNA, 14 nt, Artificial Sequence
  Description of Artificial Sequence: Synthetic oligonucleotide
gagucacuuaaaaa

SEQ ID NO: 17703 - RNA, 14 nt, Artificial Sequence
  Description of Artificial Sequence: Synthetic oligonucleotide
ugagucacuuaaaa

SEQ ID NO: 17704 - RNA, 14 nt, Artificial Sequence
  Description of Artificial Sequence: Synthetic oligonucleotide
cugagucacuuaaa

SEQ ID NO: 17705 - RNA, 14 nt, Artificial Sequence
  Description of Artificial Sequence: Synthetic oligonucleotide
gcugagucacuuaa

SEQ ID NO: 17706 - RNA, 14 nt, Artificial Sequence
  Description of Artificial Sequence: Synthetic oligonucleotide
ugcugagucacuua

SEQ ID NO: 17707 - RNA, 14 nt, Artificial Sequence
  Description of Artificial Sequence: Synthetic oligonucleotide
uugcugagucacuu

SEQ ID NO: 17708 - RNA, 14 nt, Artificial Sequence
  Description of Artificial Sequence: Synthetic oligonucleotide
uuugcugagucacu

SEQ ID NO: 17709 - RNA, 14 nt, Artificial Sequence
  Description of Artificial Sequence: Synthetic oligonucleotide
uuuugcugagucac

SEQ ID NO: 17710 - RNA, 14 nt, Artificial Sequence
  Description of Artificial Sequence: Synthetic oligonucleotide
auuuugcugaguca

SEQ ID NO: 17711 - RNA, 14 nt, Artificial Sequence
  Description of Artificial Sequence: Synthetic oligonucleotide
uauuuugcugaguc

SEQ ID NO: 17712 - RNA, 14 nt, Artificial Sequence
  Description of Artificial Sequence: Synthetic oligonucleotide
cuauuuugcugagu

SEQ ID NO: 17713 - RNA, 14 nt, Artificial Sequence
  Description of Artificial Sequence: Synthetic oligonucleotide
ccuauuuugcugag

SEQ ID NO: 17714 - RNA, 14 nt, Artificial Sequence
  Description of Artificial Sequence: Synthetic oligonucleotide
uccuauuuugcuga

SEQ ID NO: 17715 - RNA, 14 nt, Artificial Sequence
  Description of Artificial Sequence: Synthetic oligonucleotide
cuccuauuuugcug

SEQ ID NO: 17716 - RNA, 14 nt, Artificial Sequence
  Description of Artificial Sequence: Synthetic oligonucleotide
ccuccuauuuugcu

SEQ ID NO: 17717 - RNA, 14 nt, Artificial Sequence
  Description of Artificial Sequence: Synthetic oligonucleotide
uccuccuauuuugc

SEQ ID NO: 17718 - RNA, 14 nt, Artificial Sequence
  Description of Artificial Sequence: Synthetic oligonucleotide
cuccuccuauuuug

SEQ ID NO: 17719 - RNA, 14 nt, Artificial Sequence
  Description of Artificial Sequence: Synthetic oligonucleotide
acuccuccuauuuu

SEQ ID NO: 17720 - RNA, 14 nt, Artificial Sequence
  Description of Artificial Sequence: Synthetic oligonucleotide
cacuccuccuauuu

SEQ ID NO: 17721 - RNA, 14 nt, Artificial Sequence
  Description of Artificial Sequence: Synthetic oligonucleotide
acacuccuccuauu

SEQ ID NO: 17722 - RNA, 14 nt, Artificial Sequence
  Description of Artificial Sequence: Synthetic oligonucleotide
gacacuccuccuau

SEQ ID NO: 17723 - RNA, 14 nt, Artificial Sequence
  Description of Artificial Sequence: Synthetic oligonucleotide
ggacacuccuccua

SEQ ID NO: 17724 - RNA, 14 nt, Artificial Sequence
  Description of Artificial Sequence: Synthetic oligonucleotide
gggacacuccuccu

SEQ ID NO: 17725 - RNA, 14 nt, Artificial Sequence
  Description of Artificial Sequence: Synthetic oligonucleotide
ugggacacuccucc

SEQ ID NO: 17726 - RNA, 14 nt, Artificial Sequence
  Description of Artificial Sequence: Synthetic oligonucleotide
uugggacacuccuc

SEQ ID NO: 17727 - RNA, 14 nt, Artificial Sequence
  Description of Artificial Sequence: Synthetic oligonucleotide
auugggacacuccu

SEQ ID NO: 17728 - RNA, 14 nt, Artificial Sequence
  Description of Artificial Sequence: Synthetic oligonucleotide
aauugggacacucc

SEQ ID NO: 17729 - RNA, 14 nt, Artificial Sequence
  Description of Artificial Sequence: Synthetic oligonucleotide
aaauugggacacuc

SEQ ID NO: 17730 - RNA, 14 nt, Artificial Sequence
  Description of Artificial Sequence: Synthetic oligonucleotide
uaaauugggacacu

SEQ ID NO: 17731 - RNA, 14 nt, Artificial Sequence
  Description of Artificial Sequence: Synthetic oligonucleotide
auaaauugggacac

SEQ ID NO: 17732 - RNA, 14 nt, Artificial Sequence
  Description of Artificial Sequence: Synthetic oligonucleotide
aauaaauugggaca

SEQ ID NO: 17733 - RNA, 14 nt, Artificial Sequence
  Description of Artificial Sequence: Synthetic oligonucleotide
uaauaaauugggac

SEQ ID NO: 17734 - RNA, 14 nt, Artificial Sequence
  Description of Artificial Sequence: Synthetic oligonucleotide
cuaauaaauuggga

SEQ ID NO: 17735 - RNA, 14 nt, Artificial Sequence
  Description of Artificial Sequence: Synthetic oligonucleotide
acuaauaaauuggg

SEQ ID NO: 17736 - RNA, 14 nt, Artificial Sequence
  Description of Artificial Sequence: Synthetic oligonucleotide
cacuaauaaauugg

SEQ ID NO: 17737 - RNA, 14 nt, Artificial Sequence
  Description of Artificial Sequence: Synthetic oligonucleotide
acacuaauaaauug

SEQ ID NO: 17738 - RNA, 14 nt, Artificial Sequence
  Description of Artificial Sequence: Synthetic oligonucleotide
aacacuaauaaauu

SEQ ID NO: 17739 - RNA, 14 nt, Artificial Sequence
  Description of Artificial Sequence: Synthetic oligonucleotide
caacacuaauaaau

SEQ ID NO: 17740 - RNA, 14 nt, Artificial Sequence
  Description of Artificial Sequence: Synthetic oligonucleotide
acaacacuaauaaa

SEQ ID NO: 17741 - RNA, 14 nt, Artificial Sequence
  Description of Artificial Sequence: Synthetic oligonucleotide
uacaacacuaauaa

SEQ ID NO: 17742 - RNA, 14 nt, Artificial Sequence
  Description of Artificial Sequence: Synthetic oligonucleotide
guacaacacuaaua

SEQ ID NO: 17743 - RNA, 14 nt, Artificial Sequence
  Description of Artificial Sequence: Synthetic oligonucleotide
uguacaacacuaau

SEQ ID NO: 17744 - RNA, 14 nt, Artificial Sequence
  Description of Artificial Sequence: Synthetic oligonucleotide
auguacaacacuaa

SEQ ID NO: 17745 - RNA, 14 nt, Artificial Sequence
  Description of Artificial Sequence: Synthetic oligonucleotide
uauguacaacacua

SEQ ID NO: 17746 - RNA, 14 nt, Artificial Sequence
  Description of Artificial Sequence: Synthetic oligonucleotide
auauguacaacacu

SEQ ID NO: 17747 - RNA, 14 nt, Artificial Sequence
  Description of Artificial Sequence: Synthetic oligonucleotide
aauauguacaacac

SEQ ID NO: 17748 - RNA, 14 nt, Artificial Sequence
  Description of Artificial Sequence: Synthetic oligonucleotide
caauauguacaaca

SEQ ID NO: 17749 - RNA, 14 nt, Artificial Sequence
  Description of Artificial Sequence: Synthetic oligonucleotide
ucaauauguacaac

SEQ ID NO: 17750 - RNA, 14 nt, Artificial Sequence
  Description of Artificial Sequence: Synthetic oligonucleotide
uucaauauguacaa

SEQ ID NO: 17751 - RNA, 14 nt, Artificial Sequence
  Description of Artificial Sequence: Synthetic oligonucleotide
cuucaauauguaca

SEQ ID NO: 17752 - RNA, 14 nt, Artificial Sequence
  Description of Artificial Sequence: Synthetic oligonucleotide
ucuucaauauguac

SEQ ID NO: 17753 - RNA, 14 nt, Artificial Sequence
  Description of Artificial Sequence: Synthetic oligonucleotide
uucuucaauaugua

SEQ ID NO: 17754 - RNA, 14 nt, Artificial Sequence
  Description of Artificial Sequence: Synthetic oligonucleotide
uuucuucaauaugu

SEQ ID NO: 17755 - RNA, 14 nt, Artificial Sequence
  Description of Artificial Sequence: Synthetic oligonucleotide
uuuucuucaauaug

SEQ ID NO: 17756 - RNA, 14 nt, Artificial Sequence
  Description of Artificial Sequence: Synthetic oligonucleotide
guuuucuucaauau

SEQ ID NO: 17757 - RNA, 14 nt, Artificial Sequence
  Description of Artificial Sequence: Synthetic oligonucleotide
gguuuucuucaaua

SEQ ID NO: 17758 - RNA, 14 nt, Artificial Sequence
  Description of Artificial Sequence: Synthetic oligonucleotide
agguuuucuucaau

SEQ ID NO: 17759 - RNA, 14 nt, Artificial Sequence
  Description of Artificial Sequence: Synthetic oligonucleotide
aagguuuucuucaa

SEQ ID NO: 17760 - RNA, 14 nt, Artificial Sequence
  Description of Artificial Sequence: Synthetic oligonucleotide
aaagguuuucuuca

SEQ ID NO: 17761 - RNA, 14 nt, Artificial Sequence
  Description of Artificial Sequence: Synthetic oligonucleotide
aaaagguuuucuuc

SEQ ID NO: 17762 - RNA, 14 nt, Artificial Sequence
  Description of Artificial Sequence: Synthetic oligonucleotide
aaaaagguuuucuu

SEQ ID NO: 17763 - RNA, 14 nt, Artificial Sequence
  Description of Artificial Sequence: Synthetic oligonucleotide
caaaaagguuuucu

SEQ ID NO: 17764 - RNA, 14 nt, Artificial Sequence
  Description of Artificial Sequence: Synthetic oligonucleotide
acaaaaagguuuuc

SEQ ID NO: 17765 - RNA, 14 nt, Artificial Sequence
  Description of Artificial Sequence: Synthetic oligonucleotide
aacaaaaagguuuu

SEQ ID NO: 17766 - RNA, 14 nt, Artificial Sequence
  Description of Artificial Sequence: Synthetic oligonucleotide
gaacaaaaagguuu

SEQ ID NO: 17767 - RNA, 14 nt, Artificial Sequence
  Description of Artificial Sequence: Synthetic oligonucleotide
ggaacaaaaagguu

SEQ ID NO: 17768 - RNA, 14 nt, Artificial Sequence
  Description of Artificial Sequence: Synthetic oligonucleotide
aggaacaaaaaggu

SEQ ID NO: 17769 - DNA, 14 bp, Artificial Sequence
  Description of Artificial Sequence: Synthetic oligonucleotide
aaggaacaaaaagg

SEQ ID NO: 17770 - DNA, 14 bp, Artificial Sequence
  Description of Artificial Sequence: Synthetic oligonucleotide
gaaggaacaaaaag

SEQ ID NO: 17771 - RNA, 14 nt, Artificial Sequence
  Description of Artificial Sequence: Synthetic oligonucleotide
ugaaggaacaaaaa

SEQ ID NO: 17772 - RNA, 14 nt, Artificial Sequence
  Description of Artificial Sequence: Synthetic oligonucleotide
cugaaggaacaaaa

SEQ ID NO: 17773 - RNA, 14 nt, Artificial Sequence
  Description of Artificial Sequence: Synthetic oligonucleotide
ucugaaggaacaaa

SEQ ID NO: 17774 - RNA, 14 nt, Artificial Sequence
  Description of Artificial Sequence: Synthetic oligonucleotide
aucugaaggaacaa

SEQ ID NO: 17775 - RNA, 14 nt, Artificial Sequence
  Description of Artificial Sequence: Synthetic oligonucleotide
aaucugaaggaaca

SEQ ID NO: 17776 - RNA, 14 nt, Artificial Sequence
  Description of Artificial Sequence: Synthetic oligonucleotide
aaaucugaaggaac

SEQ ID NO: 17777 - RNA, 14 nt, Artificial Sequence
  Description of Artificial Sequence: Synthetic oligonucleotide
uaaaucugaaggaa

SEQ ID NO: 17778 - RNA, 14 nt, Artificial Sequence
  Description of Artificial Sequence: Synthetic oligonucleotide
cuaaaucugaagga

SEQ ID NO: 17779 - RNA, 14 nt, Artificial Sequence
  Description of Artificial Sequence: Synthetic oligonucleotide
ucuaaaucugaagg

SEQ ID NO: 17780 - RNA, 14 nt, Artificial Sequence
  Description of Artificial Sequence: Synthetic oligonucleotide
uucuaaaucugaag

SEQ ID NO: 17781 - RNA, 14 nt, Artificial Sequence
  Description of Artificial Sequence: Synthetic oligonucleotide
uuucuaaaucugaa

SEQ ID NO: 17782 - RNA, 14 nt, Artificial Sequence
  Description of Artificial Sequence: Synthetic oligonucleotide
cuuucuaaaucuga

SEQ ID NO: 17783 - RNA, 14 nt, Artificial Sequence
  Description of Artificial Sequence: Synthetic oligonucleotide
ucuuucuaaaucug

SEQ ID NO: 17784 - RNA, 14 nt, Artificial Sequence
  Description of Artificial Sequence: Synthetic oligonucleotide
uucuuucuaaaucu

SEQ ID NO: 17785 - RNA, 14 nt, Artificial Sequence
  Description of Artificial Sequence: Synthetic oligonucleotide
uuucuuucuaaauc

SEQ ID NO: 17786 - RNA, 14 nt, Artificial Sequence
  Description of Artificial Sequence: Synthetic oligonucleotide
guuucuuucuaaau

SEQ ID NO: 17787 - RNA, 14 nt, Artificial Sequence
  Description of Artificial Sequence: Synthetic oligonucleotide
uguuucuuucuaaa

SEQ ID NO: 17788 - RNA, 14 nt, Artificial Sequence
  Description of Artificial Sequence: Synthetic oligonucleotide
cuguuucuuucuaa

SEQ ID NO: 17789 - RNA, 14 nt, Artificial Sequence
  Description of Artificial Sequence: Synthetic oligonucleotide
acuguuucuuucua

SEQ ID NO: 17790 - RNA, 14 nt, Artificial Sequence
  Description of Artificial Sequence: Synthetic oligonucleotide
aacuguuucuuucu

SEQ ID NO: 17791 - RNA, 14 nt, Artificial Sequence
  Description of Artificial Sequence: Synthetic oligonucleotide
aaacuguuucuuuc

SEQ ID NO: 17792 - RNA, 14 nt, Artificial Sequence
  Description of Artificial Sequence: Synthetic oligonucleotide
uaaacuguuucuuu

SEQ ID NO: 17793 - RNA, 14 nt, Artificial Sequence
  Description of Artificial Sequence: Synthetic oligonucleotide
uuaaacuguuucuu

SEQ ID NO: 17794 - RNA, 14 nt, Artificial Sequence
  Description of Artificial Sequence: Synthetic oligonucleotide
guuaaacuguuucu

SEQ ID NO: 17795 - RNA, 14 nt, Artificial Sequence
  Description of Artificial Sequence: Synthetic oligonucleotide
gguuaaacuguuuc

SEQ ID NO: 17796 - RNA, 14 nt, Artificial Sequence
  Description of Artificial Sequence: Synthetic oligonucleotide
ugguuaaacuguuu

SEQ ID NO: 17797 - RNA, 14 nt, Artificial Sequence
  Description of Artificial Sequence: Synthetic oligonucleotide
augguuaaacuguu

SEQ ID NO: 17798 - RNA, 14 nt, Artificial Sequence
  Description of Artificial Sequence: Synthetic oligonucleotide
aaugguuaaacugu

SEQ ID NO: 17799 - RNA, 14 nt, Artificial Sequence
  Description of Artificial Sequence: Synthetic oligonucleotide
aaaugguuaaacug

SEQ ID NO: 17800 - RNA, 14 nt, Artificial Sequence
  Description of Artificial Sequence: Synthetic oligonucleotide
uaaaugguuaaacu

SEQ ID NO: 17801 - RNA, 14 nt, Artificial Sequence
  Description of Artificial Sequence: Synthetic oligonucleotide
auaaaugguuaaac

SEQ ID NO: 17802 - RNA, 14 nt, Artificial Sequence
  Description of Artificial Sequence: Synthetic oligonucleotide
aauaaaugguuaaa

SEQ ID NO: 17803 - RNA, 14 nt, Artificial Sequence
  Description of Artificial Sequence: Synthetic oligonucleotide
aaauaaaugguuaa

SEQ ID NO: 17804 - RNA, 14 nt, Artificial Sequence
  Description of Artificial Sequence: Synthetic oligonucleotide
gaaauaaaugguua

SEQ ID NO: 17805 - RNA, 14 nt, Artificial Sequence
  Description of Artificial Sequence: Synthetic oligonucleotide
agaaauaaaugguu

SEQ ID NO: 17806 - RNA, 14 nt, Artificial Sequence
  Description of Artificial Sequence: Synthetic oligonucleotide
aagaaauaaauggu

SEQ ID NO: 17807 - RNA, 14 nt, Artificial Sequence
  Description of Artificial Sequence: Synthetic oligonucleotide
caagaaauaaaugg

SEQ ID NO: 17808 - RNA, 14 nt, Artificial Sequence
  Description of Artificial Sequence: Synthetic oligonucleotide
ccaagaaauaaaug

SEQ ID NO: 17809 - RNA, 14 nt, Artificial Sequence
  Description of Artificial Sequence: Synthetic oligonucleotide
accaagaaauaaau

SEQ ID NO: 17810 - RNA, 14 nt, Artificial Sequence
  Description of Artificial Sequence: Synthetic oligonucleotide
uaccaagaaauaaa

SEQ ID NO: 17811 - RNA, 14 nt, Artificial Sequence
  Description of Artificial Sequence: Synthetic oligonucleotide
auaccaagaaauaa

SEQ ID NO: 17812 - RNA, 14 nt, Artificial Sequence
  Description of Artificial Sequence: Synthetic oligonucleotide
aauaccaagaaaua

SEQ ID NO: 17813 - RNA, 14 nt, Artificial Sequence
  Description of Artificial Sequence: Synthetic oligonucleotide
gaauaccaagaaau

SEQ ID NO: 17814 - RNA, 14 nt, Artificial Sequence
  Description of Artificial Sequence: Synthetic oligonucleotide
agaauaccaagaaa

SEQ ID NO: 17815 - RNA, 14 nt, Artificial Sequence
  Description of Artificial Sequence: Synthetic oligonucleotide
cagaauaccaagaa

SEQ ID NO: 17816 - RNA, 14 nt, Artificial Sequence
  Description of Artificial Sequence: Synthetic oligonucleotide
gcagaauaccaaga

SEQ ID NO: 17817 - RNA, 14 nt, Artificial Sequence
  Description of Artificial Sequence: Synthetic oligonucleotide
agcagaauaccaag

SEQ ID NO: 17818 - RNA, 14 nt, Artificial Sequence
  Description of Artificial Sequence: Synthetic oligonucleotide
cagcagaauaccaa

SEQ ID NO: 17819 - RNA, 14 nt, Artificial Sequence
  Description of Artificial Sequence: Synthetic oligonucleotide
gcagcagaauacca

SEQ ID NO: 17820 - RNA, 14 nt, Artificial Sequence
  Description of Artificial Sequence: Synthetic oligonucleotide
agcagcagaauacc

SEQ ID NO: 17821 - RNA, 14 nt, Artificial Sequence
  Description of Artificial Sequence: Synthetic oligonucleotide
cagcagcagaauac

SEQ ID NO: 17822 - RNA, 14 nt, Artificial Sequence
  Description of Artificial Sequence: Synthetic oligonucleotide
acagcagcagaaua

SEQ ID NO: 17823 - RNA, 14 nt, Artificial Sequence
  Description of Artificial Sequence: Synthetic oligonucleotide
cacagcagcagaau

SEQ ID NO: 17824 - RNA, 14 nt, Artificial Sequence
  Description of Artificial Sequence: Synthetic oligonucleotide
ucacagcagcagaa

SEQ ID NO: 17825 - RNA, 14 nt, Artificial Sequence
  Description of Artificial Sequence: Synthetic oligonucleotide
uucacagcagcaga

SEQ ID NO: 17826 - RNA, 14 nt, Artificial Sequence
  Description of Artificial Sequence: Synthetic oligonucleotide
auucacagcagcag

SEQ ID NO: 17827 - RNA, 14 nt, Artificial Sequence
  Description of Artificial Sequence: Synthetic oligonucleotide
uauucacagcagca

SEQ ID NO: 17828 - RNA, 14 nt, Artificial Sequence
  Description of Artificial Sequence: Synthetic oligonucleotide
cuauucacagcagc

SEQ ID NO: 17829 - RNA, 14 nt, Artificial Sequence
  Description of Artificial Sequence: Synthetic oligonucleotide
ccuauucacagcag

SEQ ID NO: 17830 - RNA, 14 nt, Artificial Sequence
  Description of Artificial Sequence: Synthetic oligonucleotide
accuauucacagca

SEQ ID NO: 17831 - RNA, 14 nt, Artificial Sequence
  Description of Artificial Sequence: Synthetic oligonucleotide
aaccuauucacagc

SEQ ID NO: 17832 - RNA, 14 nt, Artificial Sequence
  Description of Artificial Sequence: Synthetic oligonucleotide
aaaccuauucacag

SEQ ID NO: 17833 - RNA, 14 nt, Artificial Sequence
  Description of Artificial Sequence: Synthetic oligonucleotide
uaaaccuauucaca

SEQ ID NO: 17834 - RNA, 14 nt, Artificial Sequence
  Description of Artificial Sequence: Synthetic oligonucleotide
guaaaccuauucac

SEQ ID NO: 17835 - RNA, 14 nt, Artificial Sequence
  Description of Artificial Sequence: Synthetic oligonucleotide
aguaaaccuauuca

SEQ ID NO: 17836 - RNA, 14 nt, Artificial Sequence
  Description of Artificial Sequence: Synthetic oligonucleotide
aaguaaaccuauuc

SEQ ID NO: 17837 - RNA, 14 nt, Artificial Sequence
  Description of Artificial Sequence: Synthetic oligonucleotide
uaaguaaaccuauu

SEQ ID NO: 17838 - RNA, 14 nt, Artificial Sequence
  Description of Artificial Sequence: Synthetic oligonucleotide
auaaguaaaccuau

SEQ ID NO: 17839 - RNA, 14 nt, Artificial Sequence
  Description of Artificial Sequence: Synthetic oligonucleotide
aauaaguaaaccua

SEQ ID NO: 17840 - RNA, 14 nt, Artificial Sequence
  Description of Artificial Sequence: Synthetic oligonucleotide
gaauaaguaaaccu

SEQ ID NO: 17841 - RNA, 14 nt, Artificial Sequence
  Description of Artificial Sequence: Synthetic oligonucleotide
agaauaaguaaacc

SEQ ID NO: 17842 - RNA, 14 nt, Artificial Sequence
  Description of Artificial Sequence: Synthetic oligonucleotide
aagaauaaguaaac

SEQ ID NO: 17843 - RNA, 14 nt, Artificial Sequence
  Description of Artificial Sequence: Synthetic oligonucleotide
aaagaauaaguaaa

SEQ ID NO: 17844 - RNA, 14 nt, Artificial Sequence
  Description of Artificial Sequence: Synthetic oligonucleotide
aaaagaauaaguaa

SEQ ID NO: 17845 - RNA, 14 nt, Artificial Sequence
  Description of Artificial Sequence: Synthetic oligonucleotide
uaaaagaauaagua

SEQ ID NO: 17846 - RNA, 14 nt, Artificial Sequence
  Description of Artificial Sequence: Synthetic oligonucleotide
uuaaaagaauaagu

SEQ ID NO: 17847 - RNA, 14 nt, Artificial Sequence
  Description of Artificial Sequence: Synthetic oligonucleotide
guuaaaagaauaag

SEQ ID NO: 17848 - RNA, 14 nt, Artificial Sequence
  Description of Artificial Sequence: Synthetic oligonucleotide
uguuaaaagaauaa

SEQ ID NO: 17849 - RNA, 14 nt, Artificial Sequence
  Description of Artificial Sequence: Synthetic oligonucleotide
auguuaaaagaaua

SEQ ID NO: 17850 - RNA, 14 nt, Artificial Sequence
  Description of Artificial Sequence: Synthetic oligonucleotide
uauguuaaaagaau

SEQ ID NO: 17851 - RNA, 14 nt, Artificial Sequence
  Description of Artificial Sequence: Synthetic oligonucleotide
auauguuaaaagaa

SEQ ID NO: 17852 - RNA, 14 nt, Artificial Sequence
  Description of Artificial Sequence: Synthetic oligonucleotide
uauauguuaaaaga

SEQ ID NO: 17853 - RNA, 14 nt, Artificial Sequence
  Description of Artificial Sequence: Synthetic oligonucleotide
auauauguuaaaag

SEQ ID NO: 17854 - RNA, 14 nt, Artificial Sequence
  Description of Artificial Sequence: Synthetic oligonucleotide
aauauauguuaaaa

SEQ ID NO: 17855 - RNA, 14 nt, Artificial Sequence
  Description of Artificial Sequence: Synthetic oligonucleotide
caauauauguuaaa

SEQ ID NO: 17856 - RNA, 14 nt, Artificial Sequence
  Description of Artificial Sequence: Synthetic oligonucleotide
acaauauauguuaa

SEQ ID NO: 17857 - RNA, 14 nt, Artificial Sequence
  Description of Artificial Sequence: Synthetic oligonucleotide
cacaauauauguua

SEQ ID NO: 17858 - RNA, 14 nt, Artificial Sequence
  Description of Artificial Sequence: Synthetic oligonucleotide
acacaauauauguu

SEQ ID NO: 17859 - RNA, 14 nt, Artificial Sequence
  Description of Artificial Sequence: Synthetic oligonucleotide
cacacaauauaugu

SEQ ID NO: 17860 - RNA, 14 nt, Artificial Sequence
  Description of Artificial Sequence: Synthetic oligonucleotide
ucacacaauauaug

SEQ ID NO: 17861 - RNA, 14 nt, Artificial Sequence
  Description of Artificial Sequence: Synthetic oligonucleotide
gucacacaauauau

SEQ ID NO: 17862 - RNA, 14 nt, Artificial Sequence
  Description of Artificial Sequence: Synthetic oligonucleotide
agucacacaauaua

SEQ ID NO: 17863 - RNA, 14 nt, Artificial Sequence
  Description of Artificial Sequence: Synthetic oligonucleotide
uagucacacaauau

SEQ ID NO: 17864 - RNA, 14 nt, Artificial Sequence
  Description of Artificial Sequence: Synthetic oligonucleotide
guagucacacaaua

SEQ ID NO: 17865 - RNA, 14 nt, Artificial Sequence
  Description of Artificial Sequence: Synthetic oligonucleotide
cguagucacacaau

SEQ ID NO: 17866 - RNA, 14 nt, Artificial Sequence
  Description of Artificial Sequence: Synthetic oligonucleotide
gcguagucacacaa

SEQ ID NO: 17867 - RNA, 14 nt, Artificial Sequence
  Description of Artificial Sequence: Synthetic oligonucleotide
ugcguagucacaca

SEQ ID NO: 17868 - RNA, 14 nt, Artificial Sequence
  Description of Artificial Sequence: Synthetic oligonucleotide
uugcguagucacac

SEQ ID NO: 17869 - RNA, 14 nt, Artificial Sequence
  Description of Artificial Sequence: Synthetic oligonucleotide
cuugcguagucaca

SEQ ID NO: 17870 - RNA, 14 nt, Artificial Sequence
  Description of Artificial Sequence: Synthetic oligonucleotide
acuugcguagucac

SEQ ID NO: 17871 - RNA, 14 nt, Artificial Sequence
  Description of Artificial Sequence: Synthetic oligonucleotide
uacuugcguaguca

SEQ ID NO: 17872 - RNA, 14 nt, Artificial Sequence
  Description of Artificial Sequence: Synthetic oligonucleotide
auacuugcguaguc

SEQ ID NO: 17873 - RNA, 14 nt, Artificial Sequence
  Description of Artificial Sequence: Synthetic oligonucleotide
uauacuugcguagu

SEQ ID NO: 17874 - RNA, 14 nt, Artificial Sequence
  Description of Artificial Sequence: Synthetic oligonucleotide
cuauacuugcguag

SEQ ID NO: 17875 - RNA, 14 nt, Artificial Sequence
  Description of Artificial Sequence: Synthetic oligonucleotide
ccuauacuugcgua

SEQ ID NO: 17876 - RNA, 14 nt, Artificial Sequence
  Description of Artificial Sequence: Synthetic oligonucleotide
accuauacuugcgu

SEQ ID NO: 17877 - RNA, 14 nt, Artificial Sequence
  Description of Artificial Sequence: Synthetic oligonucleotide
gaccuauacuugcg

SEQ ID NO: 17878 - RNA, 14 nt, Artificial Sequence
  Description of Artificial Sequence: Synthetic oligonucleotide
ggaccuauacuugc

SEQ ID NO: 17879 - RNA, 14 nt, Artificial Sequence
  Description of Artificial Sequence: Synthetic oligonucleotide
aggaccuauacuug

SEQ ID NO: 17880 - RNA, 14 nt, Artificial Sequence
  Description of Artificial Sequence: Synthetic oligonucleotide
caggaccuauacuu

SEQ ID NO: 17881 - RNA, 14 nt, Artificial Sequence
  Description of Artificial Sequence: Synthetic oligonucleotide
acaggaccuauacu

SEQ ID NO: 17882 - RNA, 14 nt, Artificial Sequence
  Description of Artificial Sequence: Synthetic oligonucleotide
aacaggaccuauac

SEQ ID NO: 17883 - RNA, 14 nt, Artificial Sequence
  Description of Artificial Sequence: Synthetic oligonucleotide
caacaggaccuaua

SEQ ID NO: 17884 - RNA, 14 nt, Artificial Sequence
  Description of Artificial Sequence: Synthetic oligonucleotide
acaacaggaccuau

SEQ ID NO: 17885 - RNA, 14 nt, Artificial Sequence
  Description of Artificial Sequence: Synthetic oligonucleotide
uacaacaggaccua

SEQ ID NO: 17886 - RNA, 14 nt, Artificial Sequence
  Description of Artificial Sequence: Synthetic oligonucleotide
auacaacaggaccu

SEQ ID NO: 17887 - RNA, 14 nt, Artificial Sequence
  Description of Artificial Sequence: Synthetic oligonucleotide
aauacaacaggacc

SEQ ID NO: 17888 - RNA, 14 nt, Artificial Sequence
  Description of Artificial Sequence: Synthetic oligonucleotide
caauacaacaggac

SEQ ID NO: 17889 - RNA, 14 nt, Artificial Sequence
  Description of Artificial Sequence: Synthetic oligonucleotide
gcaauacaacagga

SEQ ID NO: 17890 - RNA, 14 nt, Artificial Sequence
  Description of Artificial Sequence: Synthetic oligonucleotide
ugcaauacaacagg

SEQ ID NO: 17891 - RNA, 14 nt, Artificial Sequence
  Description of Artificial Sequence: Synthetic oligonucleotide
augcaauacaacag

SEQ ID NO: 17892 - RNA, 14 nt, Artificial Sequence
  Description of Artificial Sequence: Synthetic oligonucleotide
aaugcaauacaaca

SEQ ID NO: 17893 - RNA, 14 nt, Artificial Sequence
  Description of Artificial Sequence: Synthetic oligonucleotide
uaaugcaauacaac

SEQ ID NO: 17894 - RNA, 14 nt, Artificial Sequence
  Description of Artificial Sequence: Synthetic oligonucleotide
uuaaugcaauacaa

SEQ ID NO: 17895 - RNA, 14 nt, Artificial Sequence
  Description of Artificial Sequence: Synthetic oligonucleotide
auuaaugcaauaca

SEQ ID NO: 17896 - RNA, 14 nt, Artificial Sequence
  Description of Artificial Sequence: Synthetic oligonucleotide
gauuaaugcaauac

SEQ ID NO: 17897 - RNA, 14 nt, Artificial Sequence
  Description of Artificial Sequence: Synthetic oligonucleotide
agauuaaugcaaua

SEQ ID NO: 17898 - RNA, 14 nt, Artificial Sequence
  Description of Artificial Sequence: Synthetic oligonucleotide
aagauuaaugcaau

SEQ ID NO: 17899 - RNA, 14 nt, Artificial Sequence
  Description of Artificial Sequence: Synthetic oligonucleotide
aaagauuaaugcaa

SEQ ID NO: 17900 - RNA, 14 nt, Artificial Sequence
  Description of Artificial Sequence: Synthetic oligonucleotide
uaaagauuaaugca

SEQ ID NO: 17901 - RNA, 14 nt, Artificial Sequence
  Description of Artificial Sequence: Synthetic oligonucleotide
guaaagauuaaugc

SEQ ID NO: 17902 - RNA, 14 nt, Artificial Sequence
  Description of Artificial Sequence: Synthetic oligonucleotide
gguaaagauuaaug

SEQ ID NO: 17903 - RNA, 14 nt, Artificial Sequence
  Description of Artificial Sequence: Synthetic oligonucleotide
ugguaaagauuaau

SEQ ID NO: 17904 - RNA, 14 nt, Artificial Sequence
  Description of Artificial Sequence: Synthetic oligonucleotide
cugguaaagauuaa

SEQ ID NO: 17905 - RNA, 14 nt, Artificial Sequence
  Description of Artificial Sequence: Synthetic oligonucleotide
acugguaaagauua

SEQ ID NO: 17906 - RNA, 14 nt, Artificial Sequence
  Description of Artificial Sequence: Synthetic oligonucleotide
uacugguaaagauu

SEQ ID NO: 17907 - RNA, 14 nt, Artificial Sequence
  Description of Artificial Sequence: Synthetic oligonucleotide
uuacugguaaagau

SEQ ID NO: 17908 - RNA, 14 nt, Artificial Sequence
  Description of Artificial Sequence: Synthetic oligonucleotide
guuacugguaaaga

SEQ ID NO: 17909 - RNA, 14 nt, Artificial Sequence
  Description of Artificial Sequence: Synthetic oligonucleotide
aguuacugguaaag

SEQ ID NO: 17910 - RNA, 14 nt, Artificial Sequence
  Description of Artificial Sequence: Synthetic oligonucleotide
uaguuacugguaaa

SEQ ID NO: 17911 - RNA, 14 nt, Artificial Sequence
  Description of Artificial Sequence: Synthetic oligonucleotide
uuaguuacugguaa

SEQ ID NO: 17912 - RNA, 14 nt, Artificial Sequence
  Description of Artificial Sequence: Synthetic oligonucleotide
uuuaguuacuggua

SEQ ID NO: 17913 - RNA, 14 nt, Artificial Sequence
  Description of Artificial Sequence: Synthetic oligonucleotide
guuuaguuacuggu

SEQ ID NO: 17914 - RNA, 14 nt, Artificial Sequence
  Description of Artificial Sequence: Synthetic oligonucleotide
uguuuaguuacugg

SEQ ID NO: 17915 - RNA, 14 nt, Artificial Sequence
  Description of Artificial Sequence: Synthetic oligonucleotide
auguuuaguuacug

SEQ ID NO: 17916 - RNA, 14 nt, Artificial Sequence
  Description of Artificial Sequence: Synthetic oligonucleotide
gauguuuaguuacu

SEQ ID NO: 17917 - RNA, 14 nt, Artificial Sequence
  Description of Artificial Sequence: Synthetic oligonucleotide
ugauguuuaguuac

SEQ ID NO: 17918 - RNA, 14 nt, Artificial Sequence
  Description of Artificial Sequence: Synthetic oligonucleotide
gugauguuuaguua

SEQ ID NO: 17919 - RNA, 14 nt, Artificial Sequence
  Description of Artificial Sequence: Synthetic oligonucleotide
ugugauguuuaguu

SEQ ID NO: 17920 - RNA, 14 nt, Artificial Sequence
  Description of Artificial Sequence: Synthetic oligonucleotide
uugugauguuuagu

SEQ ID NO: 17921 - RNA, 14 nt, Artificial Sequence
  Description of Artificial Sequence: Synthetic oligonucleotide
cuugugauguuuag

SEQ ID NO: 17922 - RNA, 14 nt, Artificial Sequence
  Description of Artificial Sequence: Synthetic oligonucleotide
ccuugugauguuua

SEQ ID NO: 17923 - RNA, 14 nt, Artificial Sequence
  Description of Artificial Sequence: Synthetic oligonucleotide
accuugugauguuu

SEQ ID NO: 17924 - RNA, 14 nt, Artificial Sequence
  Description of Artificial Sequence: Synthetic oligonucleotide
aaccuugugauguu

SEQ ID NO: 17925 - RNA, 14 nt, Artificial Sequence
  Description of Artificial Sequence: Synthetic oligonucleotide
uaaccuugugaugu

SEQ ID NO: 17926 - RNA, 14 nt, Artificial Sequence
  Description of Artificial Sequence: Synthetic oligonucleotide
uuaaccuugugaug

SEQ ID NO: 17927 - RNA, 14 nt, Artificial Sequence
  Description of Artificial Sequence: Synthetic oligonucleotide
auuaaccuugugau

SEQ ID NO: 17928 - RNA, 14 nt, Artificial Sequence
  Description of Artificial Sequence: Synthetic oligonucleotide
uauuaaccuuguga

SEQ ID NO: 17929 - RNA, 14 nt, Artificial Sequence
  Description of Artificial Sequence: Synthetic oligonucleotide
auauuaaccuugug

SEQ ID NO: 17930 - RNA, 14 nt, Artificial Sequence
  Description of Artificial Sequence: Synthetic oligonucleotide
aauauuaaccuugu

SEQ ID NO: 17931 - RNA, 14 nt, Artificial Sequence
  Description of Artificial Sequence: Synthetic oligonucleotide
caauauuaaccuug

SEQ ID NO: 17932 - RNA, 14 nt, Artificial Sequence
  Description of Artificial Sequence: Synthetic oligonucleotide
ccaauauuaaccuu

SEQ ID NO: 17933 - RNA, 14 nt, Artificial Sequence
  Description of Artificial Sequence: Synthetic oligonucleotide
accaauauuaaccu

SEQ ID NO: 17934 - RNA, 14 nt, Artificial Sequence
  Description of Artificial Sequence: Synthetic oligonucleotide
aaccaauauuaacc

SEQ ID NO: 17935 - RNA, 14 nt, Artificial Sequence
  Description of Artificial Sequence: Synthetic oligonucleotide
aaaccaauauuaac

SEQ ID NO: 17936 - RNA, 14 nt, Artificial Sequence
  Description of Artificial Sequence: Synthetic oligonucleotide
caaaccaauauuaa

SEQ ID NO: 17937 - RNA, 14 nt, Artificial Sequence
  Description of Artificial Sequence: Synthetic oligonucleotide
ccaaaccaauauua

SEQ ID NO: 17938 - RNA, 14 nt, Artificial Sequence
  Description of Artificial Sequence: Synthetic oligonucleotide
gccaaaccaauauu

SEQ ID NO: 17939 - RNA, 14 nt, Artificial Sequence
  Description of Artificial Sequence: Synthetic oligonucleotide
agccaaaccaauau

SEQ ID NO: 17940 - RNA, 14 nt, Artificial Sequence
  Description of Artificial Sequence: Synthetic oligonucleotide
cagccaaaccaaua

SEQ ID NO: 17941 - RNA, 14 nt, Artificial Sequence
  Description of Artificial Sequence: Synthetic oligonucleotide
ucagccaaaccaau

SEQ ID NO: 17942 - RNA, 14 nt, Artificial Sequence
  Description of Artificial Sequence: Synthetic oligonucleotide
uucagccaaaccaa

SEQ ID NO: 17943 - RNA, 14 nt, Artificial Sequence
  Description of Artificial Sequence: Synthetic oligonucleotide
uuucagccaaacca

SEQ ID NO: 17944 - RNA, 14 nt, Artificial Sequence
  Description of Artificial Sequence: Synthetic oligonucleotide
cuuucagccaaacc

SEQ ID NO: 17945 - RNA, 14 nt, Artificial Sequence
  Description of Artificial Sequence: Synthetic oligonucleotide
ucuuucagccaaac

SEQ ID NO: 17946 - RNA, 14 nt, Artificial Sequence
  Description of Artificial Sequence: Synthetic oligonucleotide
uucuuucagccaaa

SEQ ID NO: 17947 - RNA, 14 nt, Artificial Sequence
  Description of Artificial Sequence: Synthetic oligonucleotide
auucuuucagccaa

SEQ ID NO: 17948 - RNA, 14 nt, Artificial Sequence
  Description of Artificial Sequence: Synthetic oligonucleotide
aauucuuucagcca

SEQ ID NO: 17949 - RNA, 14 nt, Artificial Sequence
  Description of Artificial Sequence: Synthetic oligonucleotide
uaauucuuucagcc

SEQ ID NO: 17950 - RNA, 14 nt, Artificial Sequence
  Description of Artificial Sequence: Synthetic oligonucleotide
auaauucuuucagc

SEQ ID NO: 17951 - RNA, 14 nt, Artificial Sequence
  Description of Artificial Sequence: Synthetic oligonucleotide
cauaauucuuucag

SEQ ID NO: 17952 - RNA, 14 nt, Artificial Sequence
  Description of Artificial Sequence: Synthetic oligonucleotide
gcauaauucuuuca

SEQ ID NO: 17953 - RNA, 14 nt, Artificial Sequence
  Description of Artificial Sequence: Synthetic oligonucleotide
ugcauaauucuuuc

SEQ ID NO: 17954 - RNA, 14 nt, Artificial Sequence
  Description of Artificial Sequence: Synthetic oligonucleotide
cugcauaauucuuu

SEQ ID NO: 17955 - RNA, 14 nt, Artificial Sequence
  Description of Artificial Sequence: Synthetic oligonucleotide
acugcauaauucuu

SEQ ID NO: 17956 - RNA, 14 nt, Artificial Sequence
  Description of Artificial Sequence: Synthetic oligonucleotide
uacugcauaauucu

SEQ ID NO: 17957 - RNA, 14 nt, Artificial Sequence
  Description of Artificial Sequence: Synthetic oligonucleotide
uuacugcauaauuc

SEQ ID NO: 17958 - RNA, 14 nt, Artificial Sequence
  Description of Artificial Sequence: Synthetic oligonucleotide
uuuacugcauaauu

SEQ ID NO: 17959 - RNA, 14 nt, Artificial Sequence
  Description of Artificial Sequence: Synthetic oligonucleotide
cuuuacugcauaau

SEQ ID NO: 17960 - RNA, 14 nt, Artificial Sequence
  Description of Artificial Sequence: Synthetic oligonucleotide
acuuuacugcauaa

SEQ ID NO: 17961 - RNA, 14 nt, Artificial Sequence
  Description of Artificial Sequence: Synthetic oligonucleotide
aacuuuacugcaua

SEQ ID NO: 17962 - RNA, 14 nt, Artificial Sequence
  Description of Artificial Sequence: Synthetic oligonucleotide
uaacuuuacugcau

SEQ ID NO: 17963 - RNA, 14 nt, Artificial Sequence
  Description of Artificial Sequence: Synthetic oligonucleotide
auaacuuuacugca

SEQ ID NO: 17964 - RNA, 14 nt, Artificial Sequence
  Description of Artificial Sequence: Synthetic oligonucleotide
aauaacuuuacugc

SEQ ID NO: 17965 - RNA, 14 nt, Artificial Sequence
  Description of Artificial Sequence: Synthetic oligonucleotide
aaauaacuuuacug

SEQ ID NO: 17966 - RNA, 14 nt, Artificial Sequence
  Description of Artificial Sequence: Synthetic oligonucleotide
uaaauaacuuuacu

SEQ ID NO: 17967 - RNA, 14 nt, Artificial Sequence
  Description of Artificial Sequence: Synthetic oligonucleotide
auaaauaacuuuac

SEQ ID NO: 17968 - RNA, 14 nt, Artificial Sequence
  Description of Artificial Sequence: Synthetic oligonucleotide
uauaaauaacuuua

SEQ ID NO: 17969 - RNA, 14 nt, Artificial Sequence
  Description of Artificial Sequence: Synthetic oligonucleotide
uuauaaauaacuuu

SEQ ID NO: 17970 - RNA, 14 nt, Artificial Sequence
  Description of Artificial Sequence: Synthetic oligonucleotide
cuuauaaauaacuu

SEQ ID NO: 17971 - RNA, 14 nt, Artificial Sequence
  Description of Artificial Sequence: Synthetic oligonucleotide
ccuuauaaauaacu

SEQ ID NO: 17972 - RNA, 14 nt, Artificial Sequence
  Description of Artificial Sequence: Synthetic oligonucleotide
cccuuauaaauaac

SEQ ID NO: 17973 - RNA, 14 nt, Artificial Sequence
  Description of Artificial Sequence: Synthetic oligonucleotide
ucccuuauaaauaa

SEQ ID NO: 17974 - RNA, 14 nt, Artificial Sequence
  Description of Artificial Sequence: Synthetic oligonucleotide
uucccuuauaaaua

SEQ ID NO: 17975 - RNA, 14 nt, Artificial Sequence
  Description of Artificial Sequence: Synthetic oligonucleotide
guucccuuauaaau

SEQ ID NO: 17976 - RNA, 14 nt, Artificial Sequence
  Description of Artificial Sequence: Synthetic oligonucleotide
uguucccuuauaaa

SEQ ID NO: 17977 - RNA, 14 nt, Artificial Sequence
  Description of Artificial Sequence: Synthetic oligonucleotide
auguucccuuauaa

SEQ ID NO: 17978 - RNA, 14 nt, Artificial Sequence
  Description of Artificial Sequence: Synthetic oligonucleotide
cauguucccuuaua

SEQ ID NO: 17979 - RNA, 14 nt, Artificial Sequence
  Description of Artificial Sequence: Synthetic oligonucleotide
ucauguucccuuau

SEQ ID NO: 17980 - RNA, 14 nt, Artificial Sequence
  Description of Artificial Sequence: Synthetic oligonucleotide
aucauguucccuua

SEQ ID NO: 17981 - RNA, 14 nt, Artificial Sequence
  Description of Artificial Sequence: Synthetic oligonucleotide
caucauguucccuu

SEQ ID NO: 17982 - RNA, 14 nt, Artificial Sequence
  Description of Artificial Sequence: Synthetic oligonucleotide
ucaucauguucccu

SEQ ID NO: 17983 - RNA, 14 nt, Artificial Sequence
  Description of Artificial Sequence: Synthetic oligonucleotide
gucaucauguuccc

SEQ ID NO: 17984 - RNA, 14 nt, Artificial Sequence
  Description of Artificial Sequence: Synthetic oligonucleotide
agucaucauguucc

SEQ ID NO: 17985 - RNA, 14 nt, Artificial Sequence
  Description of Artificial Sequence: Synthetic oligonucleotide
aagucaucauguuc

SEQ ID NO: 17986 - RNA, 14 nt, Artificial Sequence
  Description of Artificial Sequence: Synthetic oligonucleotide
aaagucaucauguu

SEQ ID NO: 17987 - RNA, 14 nt, Artificial Sequence
  Description of Artificial Sequence: Synthetic oligonucleotide
uaaagucaucaugu

SEQ ID NO: 17988 - RNA, 14 nt, Artificial Sequence
  Description of Artificial Sequence: Synthetic oligonucleotide
auaaagucaucaug

SEQ ID NO: 17989 - RNA, 14 nt, Artificial Sequence
  Description of Artificial Sequence: Synthetic oligonucleotide
aauaaagucaucau

SEQ ID NO: 17990 - RNA, 14 nt, Artificial Sequence
  Description of Artificial Sequence: Synthetic oligonucleotide
gaauaaagucauca

SEQ ID NO: 17991 - RNA, 14 nt, Artificial Sequence
  Description of Artificial Sequence: Synthetic oligonucleotide
ugaauaaagucauc

SEQ ID NO: 17992 - RNA, 14 nt, Artificial Sequence
  Description of Artificial Sequence: Synthetic oligonucleotide
uugaauaaagucau

SEQ ID NO: 17993 - RNA, 14 nt, Artificial Sequence
  Description of Artificial Sequence: Synthetic oligonucleotide
auugaauaaaguca

SEQ ID NO: 17994 - RNA, 14 nt, Artificial Sequence
  Description of Artificial Sequence: Synthetic oligonucleotide
uauugaauaaaguc

SEQ ID NO: 17995 - RNA, 14 nt, Artificial Sequence
  Description of Artificial Sequence: Synthetic oligonucleotide
auauugaauaaagu

SEQ ID NO: 17996 - RNA, 14 nt, Artificial Sequence
  Description of Artificial Sequence: Synthetic oligonucleotide
aauauugaauaaag

SEQ ID NO: 17997 - RNA, 14 nt, Artificial Sequence
  Description of Artificial Sequence: Synthetic oligonucleotide
aaauauugaauaaa

SEQ ID NO: 17998 - RNA, 14 nt, Artificial Sequence
  Description of Artificial Sequence: Synthetic oligonucleotide
aaaauauugaauaa

SEQ ID NO: 17999 - RNA, 14 nt, Artificial Sequence
  Description of Artificial Sequence: Synthetic oligonucleotide
aaaaauauugaaua

SEQ ID NO: 18000 - RNA, 14 nt, Artificial Sequence
  Description of Artificial Sequence: Synthetic oligonucleotide
gaaaaauauugaau

SEQ ID NO: 18001 - RNA, 14 nt, Artificial Sequence
  Description of Artificial Sequence: Synthetic oligonucleotide
agaaaaauauugaa

SEQ ID NO: 18002 - RNA, 14 nt, Artificial Sequence
  Description of Artificial Sequence: Synthetic oligonucleotide
aagaaaaauauuga

SEQ ID NO: 18003 - RNA, 14 nt, Artificial Sequence
  Description of Artificial Sequence: Synthetic oligonucleotide
gaagaaaaauauug

SEQ ID NO: 18004 - RNA, 14 nt, Artificial Sequence
  Description of Artificial Sequence: Synthetic oligonucleotide
agaagaaaaauauu

SEQ ID NO: 18005 - RNA, 14 nt, Artificial Sequence
  Description of Artificial Sequence: Synthetic oligonucleotide
aagaagaaaaauau

SEQ ID NO: 18006 - RNA, 14 nt, Artificial Sequence
  Description of Artificial Sequence: Synthetic oligonucleotide
aaagaagaaaaaua

SEQ ID NO: 18007 - RNA, 14 nt, Artificial Sequence
  Description of Artificial Sequence: Synthetic oligonucleotide
caaagaagaaaaau

SEQ ID NO: 18008 - RNA, 14 nt, Artificial Sequence
  Description of Artificial Sequence: Synthetic oligonucleotide
ucaaagaagaaaaa

SEQ ID NO: 18009 - RNA, 14 nt, Artificial Sequence
  Description of Artificial Sequence: Synthetic oligonucleotide
uucaaagaagaaaa

SEQ ID NO: 18010 - RNA, 14 nt, Artificial Sequence
  Description of Artificial Sequence: Synthetic oligonucleotide
uuucaaagaagaaa

SEQ ID NO: 18011 - RNA, 14 nt, Artificial Sequence
  Description of Artificial Sequence: Synthetic oligonucleotide
guuucaaagaagaa

SEQ ID NO: 18012 - RNA, 14 nt, Artificial Sequence
  Description of Artificial Sequence: Synthetic oligonucleotide
uguuucaaagaaga

SEQ ID NO: 18013 - RNA, 14 nt, Artificial Sequence
  Description of Artificial Sequence: Synthetic oligonucleotide
auguuucaaagaag

SEQ ID NO: 18014 - RNA, 14 nt, Artificial Sequence
  Description of Artificial Sequence: Synthetic oligonucleotide
gauguuucaaagaa

SEQ ID NO: 18015 - RNA, 14 nt, Artificial Sequence
  Description of Artificial Sequence: Synthetic oligonucleotide
agauguuucaaaga

SEQ ID NO: 18016 - RNA, 14 nt, Artificial Sequence
  Description of Artificial Sequence: Synthetic oligonucleotide
gagauguuucaaag

SEQ ID NO: 18017 - RNA, 14 nt, Artificial Sequence
  Description of Artificial Sequence: Synthetic oligonucleotide
ugagauguuucaaa

SEQ ID NO: 18018 - RNA, 14 nt, Artificial Sequence
  Description of Artificial Sequence: Synthetic oligonucleotide
augagauguuucaa

SEQ ID NO: 18019 - RNA, 14 nt, Artificial Sequence
  Description of Artificial Sequence: Synthetic oligonucleotide
aaugagauguuuca

SEQ ID NO: 18020 - RNA, 14 nt, Artificial Sequence
  Description of Artificial Sequence: Synthetic oligonucleotide
uaaugagauguuuc

SEQ ID NO: 18021 - RNA, 14 nt, Artificial Sequence
  Description of Artificial Sequence: Synthetic oligonucleotide
guaaugagauguuu

SEQ ID NO: 18022 - RNA, 14 nt, Artificial Sequence
  Description of Artificial Sequence: Synthetic oligonucleotide
aguaaugagauguu

SEQ ID NO: 18023 - RNA, 14 nt, Artificial Sequence
  Description of Artificial Sequence: Synthetic oligonucleotide
uaguaaugagaugu

SEQ ID NO: 18024 - RNA, 14 nt, Artificial Sequence
  Description of Artificial Sequence: Synthetic oligonucleotide
uuaguaaugagaug

SEQ ID NO: 18025 - RNA, 14 nt, Artificial Sequence
  Description of Artificial Sequence: Synthetic oligonucleotide
guuaguaaugagau

SEQ ID NO: 18026 - RNA, 14 nt, Artificial Sequence
  Description of Artificial Sequence: Synthetic oligonucleotide
aguuaguaaugaga

SEQ ID NO: 18027 - RNA, 14 nt, Artificial Sequence
  Description of Artificial Sequence: Synthetic oligonucleotide
aaguuaguaaugag

SEQ ID NO: 18028 - RNA, 14 nt, Artificial Sequence
  Description of Artificial Sequence: Synthetic oligonucleotide
aaaguuaguaauga

SEQ ID NO: 18029 - RNA, 14 nt, Artificial Sequence
  Description of Artificial Sequence: Synthetic oligonucleotide
aaaaguuaguaaug

SEQ ID NO: 18030 - RNA, 14 nt, Artificial Sequence
  Description of Artificial Sequence: Synthetic oligonucleotide
uaaaaguuaguaau

SEQ ID NO: 18031 - RNA, 14 nt, Artificial Sequence
  Description of Artificial Sequence: Synthetic oligonucleotide
uuaaaaguuaguaa

SEQ ID NO: 18032 - RNA, 14 nt, Artificial Sequence
  Description of Artificial Sequence: Synthetic oligonucleotide
cuuaaaaguuagua

SEQ ID NO: 18033 - RNA, 14 nt, Artificial Sequence
  Description of Artificial Sequence: Synthetic oligonucleotide
ucuuaaaaguuagu

SEQ ID NO: 18034 - RNA, 14 nt, Artificial Sequence
  Description of Artificial Sequence: Synthetic oligonucleotide
aucuuaaaaguuag

SEQ ID NO: 18035 - RNA, 14 nt, Artificial Sequence
  Description of Artificial Sequence: Synthetic oligonucleotide
aaucuuaaaaguua

SEQ ID NO: 18036 - RNA, 14 nt, Artificial Sequence
  Description of Artificial Sequence: Synthetic oligonucleotide
uaaucuuaaaaguu

SEQ ID NO: 18037 - RNA, 14 nt, Artificial Sequence
  Description of Artificial Sequence: Synthetic oligonucleotide
auaaucuuaaaagu

SEQ ID NO: 18038 - RNA, 14 nt, Artificial Sequence
  Description of Artificial Sequence: Synthetic oligonucleotide
aauaaucuuaaaag

SEQ ID NO: 18039 - RNA, 14 nt, Artificial Sequence
  Description of Artificial Sequence: Synthetic oligonucleotide
aaauaaucuuaaaa

SEQ ID NO: 18040 - RNA, 14 nt, Artificial Sequence
  Description of Artificial Sequence: Synthetic oligonucleotide
gaaauaaucuuaaa

SEQ ID NO: 18041 - RNA, 14 nt, Artificial Sequence
  Description of Artificial Sequence: Synthetic oligonucleotide
ugaaauaaucuuaa

SEQ ID NO: 18042 - RNA, 14 nt, Artificial Sequence
  Description of Artificial Sequence: Synthetic oligonucleotide
augaaauaaucuua

SEQ ID NO: 18043 - RNA, 14 nt, Artificial Sequence
  Description of Artificial Sequence: Synthetic oligonucleotide
uaugaaauaaucuu

SEQ ID NO: 18044 - RNA, 14 nt, Artificial Sequence
  Description of Artificial Sequence: Synthetic oligonucleotide
uuaugaaauaaucu

SEQ ID NO: 18045 - RNA, 14 nt, Artificial Sequence
  Description of Artificial Sequence: Synthetic oligonucleotide
auuaugaaauaauc

SEQ ID NO: 18046 - RNA, 14 nt, Artificial Sequence
  Description of Artificial Sequence: Synthetic oligonucleotide
gauuaugaaauaau

SEQ ID NO: 18047 - RNA, 14 nt, Artificial Sequence
  Description of Artificial Sequence: Synthetic oligonucleotide
ggauuaugaaauaa

SEQ ID NO: 18048 - RNA, 14 nt, Artificial Sequence
  Description of Artificial Sequence: Synthetic oligonucleotide
gggauuaugaaaua

SEQ ID NO: 18049 - RNA, 14 nt, Artificial Sequence
  Description of Artificial Sequence: Synthetic oligonucleotide
agggauuaugaaau

SEQ ID NO: 18050 - RNA, 14 nt, Artificial Sequence
  Description of Artificial Sequence: Synthetic oligonucleotide
aagggauuaugaaa

SEQ ID NO: 18051 - RNA, 14 nt, Artificial Sequence
  Description of Artificial Sequence: Synthetic oligonucleotide
uaagggauuaugaa

SEQ ID NO: 18052 - RNA, 14 nt, Artificial Sequence
  Description of Artificial Sequence: Synthetic oligonucleotide
auaagggauuauga

SEQ ID NO: 18053 - RNA, 14 nt, Artificial Sequence
  Description of Artificial Sequence: Synthetic oligonucleotide
uauaagggauuaug

SEQ ID NO: 18054 - RNA, 14 nt, Artificial Sequence
  Description of Artificial Sequence: Synthetic oligonucleotide
guauaagggauuau

SEQ ID NO: 18055 - RNA, 14 nt, Artificial Sequence
  Description of Artificial Sequence: Synthetic oligonucleotide
uguauaagggauua

SEQ ID NO: 18056 - RNA, 14 nt, Artificial Sequence
  Description of Artificial Sequence: Synthetic oligonucleotide
auguauaagggauu

SEQ ID NO: 18057 - RNA, 14 nt, Artificial Sequence
  Description of Artificial Sequence: Synthetic oligonucleotide
cauguauaagggau

SEQ ID NO: 18058 - RNA, 14 nt, Artificial Sequence
  Description of Artificial Sequence: Synthetic oligonucleotide
ucauguauaaggga

SEQ ID NO: 18059 - RNA, 14 nt, Artificial Sequence
  Description of Artificial Sequence: Synthetic oligonucleotide
cucauguauaaggg

SEQ ID NO: 18060 - RNA, 14 nt, Artificial Sequence
  Description of Artificial Sequence: Synthetic oligonucleotide
gcucauguauaagg

SEQ ID NO: 18061 - RNA, 14 nt, Artificial Sequence
  Description of Artificial Sequence: Synthetic oligonucleotide
ggcucauguauaag

SEQ ID NO: 18062 - RNA, 14 nt, Artificial Sequence
  Description of Artificial Sequence: Synthetic oligonucleotide
uggcucauguauaa

SEQ ID NO: 18063 - RNA, 14 nt, Artificial Sequence
  Description of Artificial Sequence: Synthetic oligonucleotide
uuggcucauguaua

SEQ ID NO: 18064 - RNA, 14 nt, Artificial Sequence
  Description of Artificial Sequence: Synthetic oligonucleotide
auuggcucauguau

SEQ ID NO: 18065 - RNA, 14 nt, Artificial Sequence
  Description of Artificial Sequence: Synthetic oligonucleotide
cauuggcucaugua

SEQ ID NO: 18066 - RNA, 14 nt, Artificial Sequence
  Description of Artificial Sequence: Synthetic oligonucleotide
ucauuggcucaugu

SEQ ID NO: 18067 - RNA, 14 nt, Artificial Sequence
  Description of Artificial Sequence: Synthetic oligonucleotide
uucauuggcucaug

SEQ ID NO: 18068 - RNA, 14 nt, Artificial Sequence
  Description of Artificial Sequence: Synthetic oligonucleotide
uuucauuggcucau

SEQ ID NO: 18069 - RNA, 14 nt, Artificial Sequence
  Description of Artificial Sequence: Synthetic oligonucleotide
auuucauuggcuca

SEQ ID NO: 18070 - RNA, 14 nt, Artificial Sequence
  Description of Artificial Sequence: Synthetic oligonucleotide
uauuucauuggcuc

SEQ ID NO: 18071 - RNA, 14 nt, Artificial Sequence
  Description of Artificial Sequence: Synthetic oligonucleotide
auauuucauuggcu

SEQ ID NO: 18072 - RNA, 14 nt, Artificial Sequence
  Description of Artificial Sequence: Synthetic oligonucleotide
aauauuucauuggc

SEQ ID NO: 18073 - RNA, 14 nt, Artificial Sequence
  Description of Artificial Sequence: Synthetic oligonucleotide
aaauauuucauugg

SEQ ID NO: 18074 - RNA, 14 nt, Artificial Sequence
  Description of Artificial Sequence: Synthetic oligonucleotide
aaaauauuucauug

SEQ ID NO: 18075 - RNA, 14 nt, Artificial Sequence
  Description of Artificial Sequence: Synthetic oligonucleotide
caaaauauuucauu

SEQ ID NO: 18076 - RNA, 14 nt, Artificial Sequence
  Description of Artificial Sequence: Synthetic oligonucleotide
ucaaaauauuucau

SEQ ID NO: 18077 - RNA, 14 nt, Artificial Sequence
  Description of Artificial Sequence: Synthetic oligonucleotide
cucaaaauauuuca

SEQ ID NO: 18078 - RNA, 14 nt, Artificial Sequence
  Description of Artificial Sequence: Synthetic oligonucleotide
gcucaaaauauuuc

SEQ ID NO: 18079 - RNA, 14 nt, Artificial Sequence
  Description of Artificial Sequence: Synthetic oligonucleotide
agcucaaaauauuu

SEQ ID NO: 18080 - RNA, 14 nt, Artificial Sequence
  Description of Artificial Sequence: Synthetic oligonucleotide
gagcucaaaauauu

SEQ ID NO: 18081 - RNA, 14 nt, Artificial Sequence
  Description of Artificial Sequence: Synthetic oligonucleotide
agagcucaaaauau

SEQ ID NO: 18082 - RNA, 14 nt, Artificial Sequence
  Description of Artificial Sequence: Synthetic oligonucleotide
uagagcucaaaaua

SEQ ID NO: 18083 - RNA, 14 nt, Artificial Sequence
  Description of Artificial Sequence: Synthetic oligonucleotide
guagagcucaaaau

SEQ ID NO: 18084 - RNA, 14 nt, Artificial Sequence
  Description of Artificial Sequence: Synthetic oligonucleotide
aguagagcucaaaa

SEQ ID NO: 18085 - RNA, 14 nt, Artificial Sequence
  Description of Artificial Sequence: Synthetic oligonucleotide
aaguagagcucaaa

SEQ ID NO: 18086 - RNA, 14 nt, Artificial Sequence
  Description of Artificial Sequence: Synthetic oligonucleotide
uaaguagagcucaa

SEQ ID NO: 18087 - RNA, 14 nt, Artificial Sequence
  Description of Artificial Sequence: Synthetic oligonucleotide
uuaaguagagcuca

SEQ ID NO: 18088 - RNA, 14 nt, Artificial Sequence
  Description of Artificial Sequence: Synthetic oligonucleotide
cuuaaguagagcuc

SEQ ID NO: 18089 - RNA, 14 nt, Artificial Sequence
  Description of Artificial Sequence: Synthetic oligonucleotide
ucuuaaguagagcu

SEQ ID NO: 18090 - RNA, 14 nt, Artificial Sequence
  Description of Artificial Sequence: Synthetic oligonucleotide
uucuuaaguagagc

SEQ ID NO: 18091 - RNA, 14 nt, Artificial Sequence
  Description of Artificial Sequence: Synthetic oligonucleotide
cuucuuaaguagag

SEQ ID NO: 18092 - RNA, 14 nt, Artificial Sequence
  Description of Artificial Sequence: Synthetic oligonucleotide
gcuucuuaaguaga

SEQ ID NO: 18093 - RNA, 14 nt, Artificial Sequence
  Description of Artificial Sequence: Synthetic oligonucleotide
ugcuucuuaaguag

SEQ ID NO: 18094 - RNA, 14 nt, Artificial Sequence
  Description of Artificial Sequence: Synthetic oligonucleotide
augcuucuuaagua

SEQ ID NO: 18095 - RNA, 14 nt, Artificial Sequence
  Description of Artificial Sequence: Synthetic oligonucleotide
caugcuucuuaagu

SEQ ID NO: 18096 - RNA, 14 nt, Artificial Sequence
  Description of Artificial Sequence: Synthetic oligonucleotide
ucaugcuucuuaag

SEQ ID NO: 18097 - RNA, 14 nt, Artificial Sequence
  Description of Artificial Sequence: Synthetic oligonucleotide
uucaugcuucuuaa

SEQ ID NO: 18098 - RNA, 14 nt, Artificial Sequence
  Description of Artificial Sequence: Synthetic oligonucleotide
cuucaugcuucuua

SEQ ID NO: 18099 - RNA, 14 nt, Artificial Sequence
  Description of Artificial Sequence: Synthetic oligonucleotide
acuucaugcuucuu

SEQ ID NO: 18100 - RNA, 14 nt, Artificial Sequence
  Description of Artificial Sequence: Synthetic oligonucleotide
gacuucaugcuucu

SEQ ID NO: 18101 - RNA, 14 nt, Artificial Sequence
  Description of Artificial Sequence: Synthetic oligonucleotide
agacuucaugcuuc

SEQ ID NO: 18102 - RNA, 14 nt, Artificial Sequence
  Description of Artificial Sequence: Synthetic oligonucleotide
uagacuucaugcuu

SEQ ID NO: 18103 - RNA, 14 nt, Artificial Sequence
  Description of Artificial Sequence: Synthetic oligonucleotide
auagacuucaugcu

SEQ ID NO: 18104 - RNA, 14 nt, Artificial Sequence
  Description of Artificial Sequence: Synthetic oligonucleotide
uauagacuucaugc

SEQ ID NO: 18105 - RNA, 14 nt, Artificial Sequence
  Description of Artificial Sequence: Synthetic oligonucleotide
auauagacuucaug

SEQ ID NO: 18106 - RNA, 14 nt, Artificial Sequence
  Description of Artificial Sequence: Synthetic oligonucleotide
aauauagacuucau

SEQ ID NO: 18107 - RNA, 14 nt, Artificial Sequence
  Description of Artificial Sequence: Synthetic oligonucleotide
uaauauagacuuca

SEQ ID NO: 18108 - RNA, 14 nt, Artificial Sequence
  Description of Artificial Sequence: Synthetic oligonucleotide
auaauauagacuuc

SEQ ID NO: 18109 - RNA, 14 nt, Artificial Sequence
  Description of Artificial Sequence: Synthetic oligonucleotide
uauaauauagacuu

SEQ ID NO: 18110 - RNA, 14 nt, Artificial Sequence
  Description of Artificial Sequence: Synthetic oligonucleotide
uuauaauauagacu

SEQ ID NO: 18111 - RNA, 14 nt, Artificial Sequence
  Description of Artificial Sequence: Synthetic oligonucleotide
uuuauaauauagac

SEQ ID NO: 18112 - RNA, 14 nt, Artificial Sequence
  Description of Artificial Sequence: Synthetic oligonucleotide
auuuauaauauaga

SEQ ID NO: 18113 - RNA, 14 nt, Artificial Sequence
  Description of Artificial Sequence: Synthetic oligonucleotide
gauuuauaauauag

SEQ ID NO: 18114 - RNA, 14 nt, Artificial Sequence
  Description of Artificial Sequence: Synthetic oligonucleotide
agauuuauaauaua

SEQ ID NO: 18115 - RNA, 14 nt, Artificial Sequence
  Description of Artificial Sequence: Synthetic oligonucleotide
uagauuuauaauau

SEQ ID NO: 18116 - RNA, 14 nt, Artificial Sequence
  Description of Artificial Sequence: Synthetic oligonucleotide
uuagauuuauaaua

SEQ ID NO: 18117 - RNA, 14 nt, Artificial Sequence
  Description of Artificial Sequence: Synthetic oligonucleotide
uuuagauuuauaau

SEQ ID NO: 18118 - RNA, 14 nt, Artificial Sequence
  Description of Artificial Sequence: Synthetic oligonucleotide
guuuagauuuauaa

SEQ ID NO: 18119 - RNA, 14 nt, Artificial Sequence
  Description of Artificial Sequence: Synthetic oligonucleotide
uguuuagauuuaua

SEQ ID NO: 18120 - RNA, 14 nt, Artificial Sequence
  Description of Artificial Sequence: Synthetic oligonucleotide
uuguuuagauuuau

SEQ ID NO: 18121 - RNA, 14 nt, Artificial Sequence
  Description of Artificial Sequence: Synthetic oligonucleotide
guuguuuagauuua

SEQ ID NO: 18122 - RNA, 14 nt, Artificial Sequence
  Description of Artificial Sequence: Synthetic oligonucleotide
uguuguuuagauuu

SEQ ID NO: 18123 - RNA, 14 nt, Artificial Sequence
  Description of Artificial Sequence: Synthetic oligonucleotide
uuguuguuuagauu

SEQ ID NO: 18124 - RNA, 14 nt, Artificial Sequence
  Description of Artificial Sequence: Synthetic oligonucleotide
uuuguuguuuagau

SEQ ID NO: 18125 - RNA, 14 nt, Artificial Sequence
  Description of Artificial Sequence: Synthetic oligonucleotide
uuuuguuguuuaga

SEQ ID NO: 18126 - RNA, 14 nt, Artificial Sequence
  Description of Artificial Sequence: Synthetic oligonucleotide
cuuuuguuguuuag

SEQ ID NO: 18127 - RNA, 14 nt, Artificial Sequence
  Description of Artificial Sequence: Synthetic oligonucleotide
gcuuuuguuguuua

SEQ ID NO: 18128 - RNA, 14 nt, Artificial Sequence
  Description of Artificial Sequence: Synthetic oligonucleotide
ugcuuuuguuguuu

SEQ ID NO: 18129 - RNA, 14 nt, Artificial Sequence
  Description of Artificial Sequence: Synthetic oligonucleotide
gugcuuuuguuguu

SEQ ID NO: 18130 - RNA, 14 nt, Artificial Sequence
  Description of Artificial Sequence: Synthetic oligonucleotide
agugcuuuuguugu

SEQ ID NO: 18131 - RNA, 14 nt, Artificial Sequence
  Description of Artificial Sequence: Synthetic oligonucleotide
aagugcuuuuguug

SEQ ID NO: 18132 - RNA, 14 nt, Artificial Sequence
  Description of Artificial Sequence: Synthetic oligonucleotide
caagugcuuuuguu

SEQ ID NO: 18133 - RNA, 14 nt, Artificial Sequence
  Description of Artificial Sequence: Synthetic oligonucleotide
acaagugcuuuugu

SEQ ID NO: 18134 - RNA, 14 nt, Artificial Sequence
  Description of Artificial Sequence: Synthetic oligonucleotide
uacaagugcuuuug

SEQ ID NO: 18135 - RNA, 14 nt, Artificial Sequence
  Description of Artificial Sequence: Synthetic oligonucleotide
uuacaagugcuuuu

SEQ ID NO: 18136 - RNA, 14 nt, Artificial Sequence
  Description of Artificial Sequence: Synthetic oligonucleotide
guuacaagugcuuu

SEQ ID NO: 18137 - RNA, 14 nt, Artificial Sequence
  Description of Artificial Sequence: Synthetic oligonucleotide
aguuacaagugcuu

SEQ ID NO: 18138 - RNA, 14 nt, Artificial Sequence
  Description of Artificial Sequence: Synthetic oligonucleotide
aaguuacaagugcu

SEQ ID NO: 18139 - RNA, 14 nt, Artificial Sequence
  Description of Artificial Sequence: Synthetic oligonucleotide
caaguuacaagugc

SEQ ID NO: 18140 - RNA, 14 nt, Artificial Sequence
  Description of Artificial Sequence: Synthetic oligonucleotide
acaaguuacaagug

SEQ ID NO: 18141 - RNA, 14 nt, Artificial Sequence
  Description of Artificial Sequence: Synthetic oligonucleotide
aacaaguuacaagu

SEQ ID NO: 18142 - RNA, 14 nt, Artificial Sequence
  Description of Artificial Sequence: Synthetic oligonucleotide
aaacaaguuacaag

SEQ ID NO: 18143 - RNA, 14 nt, Artificial Sequence
  Description of Artificial Sequence: Synthetic oligonucleotide
uaaacaaguuacaa

SEQ ID NO: 18144 - RNA, 14 nt, Artificial Sequence
  Description of Artificial Sequence: Synthetic oligonucleotide
cuaaacaaguuaca

SEQ ID NO: 18145 - RNA, 14 nt, Artificial Sequence
  Description of Artificial Sequence: Synthetic oligonucleotide
acuaaacaaguuac

SEQ ID NO: 18146 - RNA, 14 nt, Artificial Sequence
  Description of Artificial Sequence: Synthetic oligonucleotide
uacuaaacaaguua

SEQ ID NO: 18147 - RNA, 14 nt, Artificial Sequence
  Description of Artificial Sequence: Synthetic oligonucleotide
uuacuaaacaaguu

SEQ ID NO: 18148 - RNA, 14 nt, Artificial Sequence
  Description of Artificial Sequence: Synthetic oligonucleotide
uuuacuaaacaagu

SEQ ID NO: 18149 - RNA, 14 nt, Artificial Sequence
  Description of Artificial Sequence: Synthetic oligonucleotide
auuuacuaaacaag

SEQ ID NO: 18150 - RNA, 14 nt, Artificial Sequence
  Description of Artificial Sequence: Synthetic oligonucleotide
aauuuacuaaacaa

SEQ ID NO: 18151 - RNA, 14 nt, Artificial Sequence
  Description of Artificial Sequence: Synthetic oligonucleotide
gaauuuacuaaaca

SEQ ID NO: 18152 - RNA, 14 nt, Artificial Sequence
  Description of Artificial Sequence: Synthetic oligonucleotide
ggaauuuacuaaac

SEQ ID NO: 18153 - RNA, 14 nt, Artificial Sequence
  Description of Artificial Sequence: Synthetic oligonucleotide
uggaauuuacuaaa

SEQ ID NO: 18154 - RNA, 14 nt, Artificial Sequence
  Description of Artificial Sequence: Synthetic oligonucleotide
auggaauuuacuaa

SEQ ID NO: 18155 - RNA, 14 nt, Artificial Sequence
  Description of Artificial Sequence: Synthetic oligonucleotide
cauggaauuuacua

SEQ ID NO: 18156 - RNA, 14 nt, Artificial Sequence
  Description of Artificial Sequence: Synthetic oligonucleotide
gcauggaauuuacu

SEQ ID NO: 18157 - RNA, 14 nt, Artificial Sequence
  Description of Artificial Sequence: Synthetic oligonucleotide
ggcauggaauuuac

SEQ ID NO: 18158 - RNA, 14 nt, Artificial Sequence
  Description of Artificial Sequence: Synthetic oligonucleotide
aggcauggaauuua

SEQ ID NO: 18159 - RNA, 14 nt, Artificial Sequence
  Description of Artificial Sequence: Synthetic oligonucleotide
aaggcauggaauuu

SEQ ID NO: 18160 - RNA, 14 nt, Artificial Sequence
  Description of Artificial Sequence: Synthetic oligonucleotide
uaaggcauggaauu

SEQ ID NO: 18161 - RNA, 14 nt, Artificial Sequence
  Description of Artificial Sequence: Synthetic oligonucleotide
auaaggcauggaau

SEQ ID NO: 18162 - RNA, 14 nt, Artificial Sequence
  Description of Artificial Sequence: Synthetic oligonucleotide
aauaaggcauggaa

SEQ ID NO: 18163 - RNA, 14 nt, Artificial Sequence
  Description of Artificial Sequence: Synthetic oligonucleotide
aaauaaggcaugga

SEQ ID NO: 18164 - RNA, 14 nt, Artificial Sequence
  Description of Artificial Sequence: Synthetic oligonucleotide
aaaauaaggcaugg

SEQ ID NO: 18165 - RNA, 14 nt, Artificial Sequence
  Description of Artificial Sequence: Synthetic oligonucleotide
gaaaauaaggcaug

SEQ ID NO: 18166 - RNA, 14 nt, Artificial Sequence
  Description of Artificial Sequence: Synthetic oligonucleotide
ggaaaauaaggcau

SEQ ID NO: 18167 - RNA, 14 nt, Artificial Sequence
  Description of Artificial Sequence: Synthetic oligonucleotide
uggaaaauaaggca

SEQ ID NO: 18168 - RNA, 14 nt, Artificial Sequence
  Description of Artificial Sequence: Synthetic oligonucleotide
auggaaaauaaggc

SEQ ID NO: 18169 - RNA, 14 nt, Artificial Sequence
  Description of Artificial Sequence: Synthetic oligonucleotide
aauggaaaauaagg

SEQ ID NO: 18170 - RNA, 14 nt, Artificial Sequence
  Description of Artificial Sequence: Synthetic oligonucleotide
aaauggaaaauaag

SEQ ID NO: 18171 - RNA, 14 nt, Artificial Sequence
  Description of Artificial Sequence: Synthetic oligonucleotide
aaaauggaaaauaa

SEQ ID NO: 18172 - RNA, 14 nt, Artificial Sequence
  Description of Artificial Sequence: Synthetic oligonucleotide
aaaaauggaaaaua

SEQ ID NO: 18173 - RNA, 14 nt, Artificial Sequence
  Description of Artificial Sequence: Synthetic oligonucleotide
caaaaauggaaaau

SEQ ID NO: 18174 - RNA, 14 nt, Artificial Sequence
  Description of Artificial Sequence: Synthetic oligonucleotide
ucaaaaauggaaaa

SEQ ID NO: 18175 - RNA, 14 nt, Artificial Sequence
  Description of Artificial Sequence: Synthetic oligonucleotide
gucaaaaauggaaa

SEQ ID NO: 18176 - RNA, 14 nt, Artificial Sequence
  Description of Artificial Sequence: Synthetic oligonucleotide
ugucaaaaauggaa

SEQ ID NO: 18177 - RNA, 14 nt, Artificial Sequence
  Description of Artificial Sequence: Synthetic oligonucleotide
gugucaaaaaugga

SEQ ID NO: 18178 - RNA, 14 nt, Artificial Sequence
  Description of Artificial Sequence: Synthetic oligonucleotide
ggugucaaaaaugg

SEQ ID NO: 18179 - RNA, 14 nt, Artificial Sequence
  Description of Artificial Sequence: Synthetic oligonucleotide
cggugucaaaaaug

SEQ ID NO: 18180 - RNA, 14 nt, Artificial Sequence
  Description of Artificial Sequence: Synthetic oligonucleotide
acggugucaaaaau

SEQ ID NO: 18181 - RNA, 14 nt, Artificial Sequence
  Description of Artificial Sequence: Synthetic oligonucleotide
uacggugucaaaaa

SEQ ID NO: 18182 - RNA, 14 nt, Artificial Sequence
  Description of Artificial Sequence: Synthetic oligonucleotide
uuacggugucaaaa

SEQ ID NO: 18183 - RNA, 14 nt, Artificial Sequence
  Description of Artificial Sequence: Synthetic oligonucleotide
uuuacggugucaaa

SEQ ID NO: 18184 - RNA, 14 nt, Artificial Sequence
  Description of Artificial Sequence: Synthetic oligonucleotide
cuuuacggugucaa

SEQ ID NO: 18185 - RNA, 14 nt, Artificial Sequence
  Description of Artificial Sequence: Synthetic oligonucleotide
acuuuacgguguca

SEQ ID NO: 18186 - RNA, 14 nt, Artificial Sequence
  Description of Artificial Sequence: Synthetic oligonucleotide
cacuuuacgguguc

SEQ ID NO: 18187 - RNA, 14 nt, Artificial Sequence
  Description of Artificial Sequence: Synthetic oligonucleotide
gcacuuuacggugu

SEQ ID NO: 18188 - RNA, 14 nt, Artificial Sequence
  Description of Artificial Sequence: Synthetic oligonucleotide
ugcacuuuacggug

SEQ ID NO: 18189 - RNA, 14 nt, Artificial Sequence
  Description of Artificial Sequence: Synthetic oligonucleotide
augcacuuuacggu

SEQ ID NO: 18190 - RNA, 14 nt, Artificial Sequence
  Description of Artificial Sequence: Synthetic oligonucleotide
aaugcacuuuacgg

SEQ ID NO: 18191 - RNA, 14 nt, Artificial Sequence
  Description of Artificial Sequence: Synthetic oligonucleotide
aaaugcacuuuacg

SEQ ID NO: 18192 - RNA, 14 nt, Artificial Sequence
  Description of Artificial Sequence: Synthetic oligonucleotide
aaaaugcacuuuac

SEQ ID NO: 18193 - RNA, 14 nt, Artificial Sequence
  Description of Artificial Sequence: Synthetic oligonucleotide
gaaaaugcacuuua

SEQ ID NO: 18194 - RNA, 14 nt, Artificial Sequence
  Description of Artificial Sequence: Synthetic oligonucleotide
agaaaaugcacuuu

SEQ ID NO: 18195 - RNA, 14 nt, Artificial Sequence
  Description of Artificial Sequence: Synthetic oligonucleotide
cagaaaaugcacuu

SEQ ID NO: 18196 - RNA, 14 nt, Artificial Sequence
  Description of Artificial Sequence: Synthetic oligonucleotide
acagaaaaugcacu

SEQ ID NO: 18197 - RNA, 14 nt, Artificial Sequence
  Description of Artificial Sequence: Synthetic oligonucleotide
gacagaaaaugcac

SEQ ID NO: 18198 - RNA, 14 nt, Artificial Sequence
  Description of Artificial Sequence: Synthetic oligonucleotide
cgacagaaaaugca

SEQ ID NO: 18199 - RNA, 14 nt, Artificial Sequence
  Description of Artificial Sequence: Synthetic oligonucleotide
ucgacagaaaaugc

SEQ ID NO: 18200 - RNA, 14 nt, Artificial Sequence
  Description of Artificial Sequence: Synthetic oligonucleotide
gucgacagaaaaug

SEQ ID NO: 18201 - RNA, 14 nt, Artificial Sequence
  Description of Artificial Sequence: Synthetic oligonucleotide
agucgacagaaaau

SEQ ID NO: 18202 - RNA, 14 nt, Artificial Sequence
  Description of Artificial Sequence: Synthetic oligonucleotide
cagucgacagaaaa

SEQ ID NO: 18203 - RNA, 14 nt, Artificial Sequence
  Description of Artificial Sequence: Synthetic oligonucleotide
acagucgacagaaa

SEQ ID NO: 18204 - RNA, 14 nt, Artificial Sequence
  Description of Artificial Sequence: Synthetic oligonucleotide
cacagucgacagaa

SEQ ID NO: 18205 - RNA, 14 nt, Artificial Sequence
  Description of Artificial Sequence: Synthetic oligonucleotide
ucacagucgacaga

SEQ ID NO: 18206 - RNA, 14 nt, Artificial Sequence
  Description of Artificial Sequence: Synthetic oligonucleotide
cucacagucgacag

SEQ ID NO: 18207 - RNA, 14 nt, Artificial Sequence
  Description of Artificial Sequence: Synthetic oligonucleotide
gcucacagucgaca

SEQ ID NO: 18208 - RNA, 14 nt, Artificial Sequence
  Description of Artificial Sequence: Synthetic oligonucleotide
ugcucacagucgac

SEQ ID NO: 18209 - RNA, 14 nt, Artificial Sequence
  Description of Artificial Sequence: Synthetic oligonucleotide
uugcucacagucga

SEQ ID NO: 18210 - RNA, 14 nt, Artificial Sequence
  Description of Artificial Sequence: Synthetic oligonucleotide
uuugcucacagucg

SEQ ID NO: 18211 - RNA, 14 nt, Artificial Sequence
  Description of Artificial Sequence: Synthetic oligonucleotide
auuugcucacaguc

SEQ ID NO: 18212 - RNA, 14 nt, Artificial Sequence
  Description of Artificial Sequence: Synthetic oligonucleotide
aauuugcucacagu

SEQ ID NO: 18213 - RNA, 14 nt, Artificial Sequence
  Description of Artificial Sequence: Synthetic oligonucleotide
aaauuugcucacag

SEQ ID NO: 18214 - RNA, 14 nt, Artificial Sequence
  Description of Artificial Sequence: Synthetic oligonucleotide
gaaauuugcucaca

SEQ ID NO: 18215 - RNA, 14 nt, Artificial Sequence
  Description of Artificial Sequence: Synthetic oligonucleotide
ggaaauuugcucac

SEQ ID NO: 18216 - RNA, 14 nt, Artificial Sequence
  Description of Artificial Sequence: Synthetic oligonucleotide
gggaaauuugcuca

SEQ ID NO: 18217 - RNA, 14 nt, Artificial Sequence
  Description of Artificial Sequence: Synthetic oligonucleotide
agggaaauuugcuc

SEQ ID NO: 18218 - RNA, 14 nt, Artificial Sequence
  Description of Artificial Sequence: Synthetic oligonucleotide
aagggaaauuugcu

SEQ ID NO: 18219 - RNA, 14 nt, Artificial Sequence
  Description of Artificial Sequence: Synthetic oligonucleotide
aaagggaaauuugc

SEQ ID NO: 18220 - RNA, 14 nt, Artificial Sequence
  Description of Artificial Sequence: Synthetic oligonucleotide
aaaagggaaauuug

SEQ ID NO: 18221 - RNA, 14 nt, Artificial Sequence
  Description of Artificial Sequence: Synthetic oligonucleotide
caaaagggaaauuu

SEQ ID NO: 18222 - RNA, 14 nt, Artificial Sequence
  Description of Artificial Sequence: Synthetic oligonucleotide
gcaaaagggaaauu

SEQ ID NO: 18223 - RNA, 14 nt, Artificial Sequence
  Description of Artificial Sequence: Synthetic oligonucleotide
ggcaaaagggaaau

SEQ ID NO: 18224 - DNA, 14 bp, Artificial Sequence
  Description of Artificial Sequence: Synthetic oligonucleotide
aggcaaaagggaaa

SEQ ID NO: 18225 - DNA, 14 bp, Artificial Sequence
  Description of Artificial Sequence: Synthetic oligonucleotide
aaggcaaaagggaa

SEQ ID NO: 18226 - DNA, 14 bp, Artificial Sequence
  Description of Artificial Sequence: Synthetic oligonucleotide
aaaggcaaaaggga

SEQ ID NO: 18227 - RNA, 14 nt, Artificial Sequence
  Description of Artificial Sequence: Synthetic oligonucleotide
uaaaggcaaaaggg

SEQ ID NO: 18228 - RNA, 14 nt, Artificial Sequence
  Description of Artificial Sequence: Synthetic oligonucleotide
uuaaaggcaaaagg

SEQ ID NO: 18229 - RNA, 14 nt, Artificial Sequence
  Description of Artificial Sequence: Synthetic oligonucleotide
auuaaaggcaaaag

SEQ ID NO: 18230 - RNA, 14 nt, Artificial Sequence
  Description of Artificial Sequence: Synthetic oligonucleotide
cauuaaaggcaaaa

SEQ ID NO: 18231 - RNA, 14 nt, Artificial Sequence
  Description of Artificial Sequence: Synthetic oligonucleotide
ucauuaaaggcaaa

SEQ ID NO: 18232 - RNA, 14 nt, Artificial Sequence
  Description of Artificial Sequence: Synthetic oligonucleotide
uucauuaaaggcaa

SEQ ID NO: 18233 - RNA, 14 nt, Artificial Sequence
  Description of Artificial Sequence: Synthetic oligonucleotide
uuucauuaaaggca

SEQ ID NO: 18234 - RNA, 14 nt, Artificial Sequence
  Description of Artificial Sequence: Synthetic oligonucleotide
uuuucauuaaaggc

SEQ ID NO: 18235 - RNA, 14 nt, Artificial Sequence
  Description of Artificial Sequence: Synthetic oligonucleotide
auuuucauuaaagg

SEQ ID NO: 18236 - RNA, 14 nt, Artificial Sequence
  Description of Artificial Sequence: Synthetic oligonucleotide
uauuuucauuaaag

SEQ ID NO: 18237 - RNA, 14 nt, Artificial Sequence
  Description of Artificial Sequence: Synthetic oligonucleotide
cuauuuucauuaaa

SEQ ID NO: 18238 - RNA, 14 nt, Artificial Sequence
  Description of Artificial Sequence: Synthetic oligonucleotide
acuauuuucauuaa

SEQ ID NO: 18239 - RNA, 14 nt, Artificial Sequence
  Description of Artificial Sequence: Synthetic oligonucleotide
cacuauuuucauua

SEQ ID NO: 18240 - RNA, 14 nt, Artificial Sequence
  Description of Artificial Sequence: Synthetic oligonucleotide
gcacuauuuucauu

SEQ ID NO: 18241 - RNA, 14 nt, Artificial Sequence
  Description of Artificial Sequence: Synthetic oligonucleotide
ugcacuauuuucau

SEQ ID NO: 18242 - RNA, 14 nt, Artificial Sequence
  Description of Artificial Sequence: Synthetic oligonucleotide
augcacuauuuuca

SEQ ID NO: 18243 - RNA, 14 nt, Artificial Sequence
  Description of Artificial Sequence: Synthetic oligonucleotide
aaugcacuauuuuc

SEQ ID NO: 18244 - RNA, 14 nt, Artificial Sequence
  Description of Artificial Sequence: Synthetic oligonucleotide
uaaugcacuauuuu

SEQ ID NO: 18245 - RNA, 14 nt, Artificial Sequence
  Description of Artificial Sequence: Synthetic oligonucleotide
uuaaugcacuauuu

SEQ ID NO: 18246 - RNA, 14 nt, Artificial Sequence
  Description of Artificial Sequence: Synthetic oligonucleotide
cuuaaugcacuauu

SEQ ID NO: 18247 - RNA, 14 nt, Artificial Sequence
  Description of Artificial Sequence: Synthetic oligonucleotide
acuuaaugcacuau

SEQ ID NO: 18248 - RNA, 14 nt, Artificial Sequence
  Description of Artificial Sequence: Synthetic oligonucleotide
uacuuaaugcacua

SEQ ID NO: 18249 - RNA, 14 nt, Artificial Sequence
  Description of Artificial Sequence: Synthetic oligonucleotide
cuacuuaaugcacu

SEQ ID NO: 18250 - RNA, 14 nt, Artificial Sequence
  Description of Artificial Sequence: Synthetic oligonucleotide
gcuacuuaaugcac

SEQ ID NO: 18251 - RNA, 14 nt, Artificial Sequence
  Description of Artificial Sequence: Synthetic oligonucleotide
ggcuacuuaaugca

SEQ ID NO: 18252 - RNA, 14 nt, Artificial Sequence
  Description of Artificial Sequence: Synthetic oligonucleotide
uggcuacuuaaugc

SEQ ID NO: 18253 - RNA, 14 nt, Artificial Sequence
  Description of Artificial Sequence: Synthetic oligonucleotide
uuggcuacuuaaug

SEQ ID NO: 18254 - RNA, 14 nt, Artificial Sequence
  Description of Artificial Sequence: Synthetic oligonucleotide
auuggcuacuuaau

SEQ ID NO: 18255 - RNA, 14 nt, Artificial Sequence
  Description of Artificial Sequence: Synthetic oligonucleotide
aauuggcuacuuaa

SEQ ID NO: 18256 - RNA, 14 nt, Artificial Sequence
  Description of Artificial Sequence: Synthetic oligonucleotide
caauuggcuacuua

SEQ ID NO: 18257 - RNA, 14 nt, Artificial Sequence
  Description of Artificial Sequence: Synthetic oligonucleotide
gcaauuggcuacuu

SEQ ID NO: 18258 - RNA, 14 nt, Artificial Sequence
  Description of Artificial Sequence: Synthetic oligonucleotide
agcaauuggcuacu

SEQ ID NO: 18259 - RNA, 14 nt, Artificial Sequence
  Description of Artificial Sequence: Synthetic oligonucleotide
cagcaauuggcuac

SEQ ID NO: 18260 - RNA, 14 nt, Artificial Sequence
  Description of Artificial Sequence: Synthetic oligonucleotide
gcagcaauuggcua

SEQ ID NO: 18261 - RNA, 14 nt, Artificial Sequence
  Description of Artificial Sequence: Synthetic oligonucleotide
ugcagcaauuggcu

SEQ ID NO: 18262 - RNA, 14 nt, Artificial Sequence
  Description of Artificial Sequence: Synthetic oligonucleotide
cugcagcaauuggc

SEQ ID NO: 18263 - RNA, 14 nt, Artificial Sequence
  Description of Artificial Sequence: Synthetic oligonucleotide
ucugcagcaauugg

SEQ ID NO: 18264 - RNA, 14 nt, Artificial Sequence
  Description of Artificial Sequence: Synthetic oligonucleotide
uucugcagcaauug

SEQ ID NO: 18265 - RNA, 14 nt, Artificial Sequence
  Description of Artificial Sequence: Synthetic oligonucleotide
auucugcagcaauu

SEQ ID NO: 18266 - RNA, 14 nt, Artificial Sequence
  Description of Artificial Sequence: Synthetic oligonucleotide
aauucugcagcaau

SEQ ID NO: 18267 - RNA, 14 nt, Artificial Sequence
  Description of Artificial Sequence: Synthetic oligonucleotide
uaauucugcagcaa

SEQ ID NO: 18268 - RNA, 14 nt, Artificial Sequence
  Description of Artificial Sequence: Synthetic oligonucleotide
auaauucugcagca

SEQ ID NO: 18269 - RNA, 14 nt, Artificial Sequence
  Description of Artificial Sequence: Synthetic oligonucleotide
uauaauucugcagc

SEQ ID NO: 18270 - RNA, 14 nt, Artificial Sequence
  Description of Artificial Sequence: Synthetic oligonucleotide
uuauaauucugcag

SEQ ID NO: 18271 - RNA, 14 nt, Artificial Sequence
  Description of Artificial Sequence: Synthetic oligonucleotide
uuuauaauucugca

SEQ ID NO: 18272 - RNA, 14 nt, Artificial Sequence
  Description of Artificial Sequence: Synthetic oligonucleotide
cuuuauaauucugc

SEQ ID NO: 18273 - RNA, 14 nt, Artificial Sequence
  Description of Artificial Sequence: Synthetic oligonucleotide
gcuuuauaauucug

SEQ ID NO: 18274 - RNA, 14 nt, Artificial Sequence
  Description of Artificial Sequence: Synthetic oligonucleotide
ugcuuuauaauucu

SEQ ID NO: 18275 - RNA, 14 nt, Artificial Sequence
  Description of Artificial Sequence: Synthetic oligonucleotide
uugcuuuauaauuc

SEQ ID NO: 18276 - RNA, 14 nt, Artificial Sequence
  Description of Artificial Sequence: Synthetic oligonucleotide
uuugcuuuauaauu

SEQ ID NO: 18277 - RNA, 14 nt, Artificial Sequence
  Description of Artificial Sequence: Synthetic oligonucleotide
auuugcuuuauaau

SEQ ID NO: 18278 - RNA, 14 nt, Artificial Sequence
  Description of Artificial Sequence: Synthetic oligonucleotide
aauuugcuuuauaa

SEQ ID NO: 18279 - RNA, 14 nt, Artificial Sequence
  Description of Artificial Sequence: Synthetic oligonucleotide
uaauuugcuuuaua

SEQ ID NO: 18280 - RNA, 14 nt, Artificial Sequence
  Description of Artificial Sequence: Synthetic oligonucleotide
cuaauuugcuuuau

SEQ ID NO: 18281 - RNA, 14 nt, Artificial Sequence
  Description of Artificial Sequence: Synthetic oligonucleotide
gcuaauuugcuuua

SEQ ID NO: 18282 - RNA, 14 nt, Artificial Sequence
  Description of Artificial Sequence: Synthetic oligonucleotide
agcuaauuugcuuu

SEQ ID NO: 18283 - RNA, 14 nt, Artificial Sequence
  Description of Artificial Sequence: Synthetic oligonucleotide
uagcuaauuugcuu

SEQ ID NO: 18284 - RNA, 14 nt, Artificial Sequence
  Description of Artificial Sequence: Synthetic oligonucleotide
uuagcuaauuugcu

SEQ ID NO: 18285 - RNA, 14 nt, Artificial Sequence
  Description of Artificial Sequence: Synthetic oligonucleotide
guuagcuaauuugc

SEQ ID NO: 18286 - RNA, 14 nt, Artificial Sequence
  Description of Artificial Sequence: Synthetic oligonucleotide
uguuagcuaauuug

SEQ ID NO: 18287 - RNA, 14 nt, Artificial Sequence
  Description of Artificial Sequence: Synthetic oligonucleotide
cuguuagcuaauuu

SEQ ID NO: 18288 - RNA, 14 nt, Artificial Sequence
  Description of Artificial Sequence: Synthetic oligonucleotide
acuguuagcuaauu

SEQ ID NO: 18289 - RNA, 14 nt, Artificial Sequence
  Description of Artificial Sequence: Synthetic oligonucleotide
cacuguuagcuaau

SEQ ID NO: 18290 - RNA, 14 nt, Artificial Sequence
  Description of Artificial Sequence: Synthetic oligonucleotide
ccacuguuagcuaa

SEQ ID NO: 18291 - RNA, 14 nt, Artificial Sequence
  Description of Artificial Sequence: Synthetic oligonucleotide
cccacuguuagcua

SEQ ID NO: 18292 - RNA, 14 nt, Artificial Sequence
  Description of Artificial Sequence: Synthetic oligonucleotide
acccacuguuagcu

SEQ ID NO: 18293 - RNA, 14 nt, Artificial Sequence
  Description of Artificial Sequence: Synthetic oligonucleotide
gacccacuguuagc

SEQ ID NO: 18294 - RNA, 14 nt, Artificial Sequence
  Description of Artificial Sequence: Synthetic oligonucleotide
ugacccacuguuag

SEQ ID NO: 18295 - RNA, 14 nt, Artificial Sequence
  Description of Artificial Sequence: Synthetic oligonucleotide
gugacccacuguua

SEQ ID NO: 18296 - RNA, 14 nt, Artificial Sequence
  Description of Artificial Sequence: Synthetic oligonucleotide
ugugacccacuguu

SEQ ID NO: 18297 - RNA, 14 nt, Artificial Sequence
  Description of Artificial Sequence: Synthetic oligonucleotide
augugacccacugu

SEQ ID NO: 18298 - RNA, 14 nt, Artificial Sequence
  Description of Artificial Sequence: Synthetic oligonucleotide
aaugugacccacug

SEQ ID NO: 18299 - RNA, 14 nt, Artificial Sequence
  Description of Artificial Sequence: Synthetic oligonucleotide
caaugugacccacu

SEQ ID NO: 18300 - RNA, 14 nt, Artificial Sequence
  Description of Artificial Sequence: Synthetic oligonucleotide
ccaaugugacccac

SEQ ID NO: 18301 - RNA, 14 nt, Artificial Sequence
  Description of Artificial Sequence: Synthetic oligonucleotide
uccaaugugaccca

SEQ ID NO: 18302 - RNA, 14 nt, Artificial Sequence
  Description of Artificial Sequence: Synthetic oligonucleotide
guccaaugugaccc

SEQ ID NO: 18303 - RNA, 14 nt, Artificial Sequence
  Description of Artificial Sequence: Synthetic oligonucleotide
aguccaaugugacc

SEQ ID NO: 18304 - RNA, 14 nt, Artificial Sequence
  Description of Artificial Sequence: Synthetic oligonucleotide
uaguccaaugugac

SEQ ID NO: 18305 - RNA, 14 nt, Artificial Sequence
  Description of Artificial Sequence: Synthetic oligonucleotide
guaguccaauguga

SEQ ID NO: 18306 - RNA, 14 nt, Artificial Sequence
  Description of Artificial Sequence: Synthetic oligonucleotide
gguaguccaaugug

SEQ ID NO: 18307 - RNA, 14 nt, Artificial Sequence
  Description of Artificial Sequence: Synthetic oligonucleotide
ugguaguccaaugu

SEQ ID NO: 18308 - RNA, 14 nt, Artificial Sequence
  Description of Artificial Sequence: Synthetic oligonucleotide
gugguaguccaaug

SEQ ID NO: 18309 - RNA, 14 nt, Artificial Sequence
  Description of Artificial Sequence: Synthetic oligonucleotide
agugguaguccaau

SEQ ID NO: 18310 - RNA, 14 nt, Artificial Sequence
  Description of Artificial Sequence: Synthetic oligonucleotide
gagugguaguccaa

SEQ ID NO: 18311 - RNA, 14 nt, Artificial Sequence
  Description of Artificial Sequence: Synthetic oligonucleotide
ugagugguagucca

SEQ ID NO: 18312 - RNA, 14 nt, Artificial Sequence
  Description of Artificial Sequence: Synthetic oligonucleotide
uugagugguagucc

SEQ ID NO: 18313 - RNA, 14 nt, Artificial Sequence
  Description of Artificial Sequence: Synthetic oligonucleotide
uuugagugguaguc

SEQ ID NO: 18314 - RNA, 14 nt, Artificial Sequence
  Description of Artificial Sequence: Synthetic oligonucleotide
cuuugagugguagu

SEQ ID NO: 18315 - RNA, 14 nt, Artificial Sequence
  Description of Artificial Sequence: Synthetic oligonucleotide
ucuuugagugguag

SEQ ID NO: 18316 - RNA, 14 nt, Artificial Sequence
  Description of Artificial Sequence: Synthetic oligonucleotide
uucuuugaguggua

SEQ ID NO: 18317 - RNA, 14 nt, Artificial Sequence
  Description of Artificial Sequence: Synthetic oligonucleotide
uuucuuugaguggu

SEQ ID NO: 18318 - RNA, 14 nt, Artificial Sequence
  Description of Artificial Sequence: Synthetic oligonucleotide
guuucuuugagugg

SEQ ID NO: 18319 - RNA, 14 nt, Artificial Sequence
  Description of Artificial Sequence: Synthetic oligonucleotide
uguuucuuugagug

SEQ ID NO: 18320 - RNA, 14 nt, Artificial Sequence
  Description of Artificial Sequence: Synthetic oligonucleotide
uuguuucuuugagu

SEQ ID NO: 18321 - RNA, 14 nt, Artificial Sequence
  Description of Artificial Sequence: Synthetic oligonucleotide
cuuguuucuuugag

SEQ ID NO: 18322 - RNA, 14 nt, Artificial Sequence
  Description of Artificial Sequence: Synthetic oligonucleotide
ucuuguuucuuuga

SEQ ID NO: 18323 - RNA, 14 nt, Artificial Sequence
  Description of Artificial Sequence: Synthetic oligonucleotide
aucuuguuucuuug

SEQ ID NO: 18324 - RNA, 14 nt, Artificial Sequence
  Description of Artificial Sequence: Synthetic oligonucleotide
caucuuguuucuuu

SEQ ID NO: 18325 - RNA, 14 nt, Artificial Sequence
  Description of Artificial Sequence: Synthetic oligonucleotide
gcaucuuguuucuu

SEQ ID NO: 18326 - RNA, 14 nt, Artificial Sequence
  Description of Artificial Sequence: Synthetic oligonucleotide
ugcaucuuguuucu

SEQ ID NO: 18327 - RNA, 14 nt, Artificial Sequence
  Description of Artificial Sequence: Synthetic oligonucleotide
augcaucuuguuuc

SEQ ID NO: 18328 - RNA, 14 nt, Artificial Sequence
  Description of Artificial Sequence: Synthetic oligonucleotide
uaugcaucuuguuu

SEQ ID NO: 18329 - RNA, 14 nt, Artificial Sequence
  Description of Artificial Sequence: Synthetic oligonucleotide
uuaugcaucuuguu

SEQ ID NO: 18330 - RNA, 14 nt, Artificial Sequence
  Description of Artificial Sequence: Synthetic oligonucleotide
guuaugcaucuugu

SEQ ID NO: 18331 - RNA, 14 nt, Artificial Sequence
  Description of Artificial Sequence: Synthetic oligonucleotide
uguuaugcaucuug

SEQ ID NO: 18332 - RNA, 14 nt, Artificial Sequence
  Description of Artificial Sequence: Synthetic oligonucleotide
cuguuaugcaucuu

SEQ ID NO: 18333 - RNA, 14 nt, Artificial Sequence
  Description of Artificial Sequence: Synthetic oligonucleotide
ucuguuaugcaucu

SEQ ID NO: 18334 - RNA, 14 nt, Artificial Sequence
  Description of Artificial Sequence: Synthetic oligonucleotide
aucuguuaugcauc

SEQ ID NO: 18335 - RNA, 14 nt, Artificial Sequence
  Description of Artificial Sequence: Synthetic oligonucleotide
caucuguuaugcau

SEQ ID NO: 18336 - RNA, 14 nt, Artificial Sequence
  Description of Artificial Sequence: Synthetic oligonucleotide
ucaucuguuaugca

SEQ ID NO: 18337 - RNA, 14 nt, Artificial Sequence
  Description of Artificial Sequence: Synthetic oligonucleotide
aucaucuguuaugc

SEQ ID NO: 18338 - RNA, 14 nt, Artificial Sequence
  Description of Artificial Sequence: Synthetic oligonucleotide
caucaucuguuaug

SEQ ID NO: 18339 - RNA, 14 nt, Artificial Sequence
  Description of Artificial Sequence: Synthetic oligonucleotide
ccaucaucuguuau

SEQ ID NO: 18340 - RNA, 14 nt, Artificial Sequence
  Description of Artificial Sequence: Synthetic oligonucleotide
uccaucaucuguua

SEQ ID NO: 18341 - RNA, 14 nt, Artificial Sequence
  Description of Artificial Sequence: Synthetic oligonucleotide
uuccaucaucuguu

SEQ ID NO: 18342 - RNA, 14 nt, Artificial Sequence
  Description of Artificial Sequence: Synthetic oligonucleotide
cuuccaucaucugu

SEQ ID NO: 18343 - RNA, 14 nt, Artificial Sequence
  Description of Artificial Sequence: Synthetic oligonucleotide
ccuuccaucaucug

SEQ ID NO: 18344 - RNA, 14 nt, Artificial Sequence
  Description of Artificial Sequence: Synthetic oligonucleotide
accuuccaucaucu

SEQ ID NO: 18345 - RNA, 14 nt, Artificial Sequence
  Description of Artificial Sequence: Synthetic oligonucleotide
uaccuuccaucauc

SEQ ID NO: 18346 - RNA, 14 nt, Artificial Sequence
  Description of Artificial Sequence: Synthetic oligonucleotide
guaccuuccaucau

SEQ ID NO: 18347 - RNA, 14 nt, Artificial Sequence
  Description of Artificial Sequence: Synthetic oligonucleotide
uguaccuuccauca

SEQ ID NO: 18348 - RNA, 14 nt, Artificial Sequence
  Description of Artificial Sequence: Synthetic oligonucleotide
auguaccuuccauc

SEQ ID NO: 18349 - RNA, 14 nt, Artificial Sequence
  Description of Artificial Sequence: Synthetic oligonucleotide
cauguaccuuccau

SEQ ID NO: 18350 - RNA, 14 nt, Artificial Sequence
  Description of Artificial Sequence: Synthetic oligonucleotide
acauguaccuucca

SEQ ID NO: 18351 - RNA, 14 nt, Artificial Sequence
  Description of Artificial Sequence: Synthetic oligonucleotide
cacauguaccuucc

SEQ ID NO: 18352 - RNA, 14 nt, Artificial Sequence
  Description of Artificial Sequence: Synthetic oligonucleotide
ccacauguaccuuc

SEQ ID NO: 18353 - RNA, 14 nt, Artificial Sequence
  Description of Artificial Sequence: Synthetic oligonucleotide
accacauguaccuu

SEQ ID NO: 18354 - RNA, 14 nt, Artificial Sequence
  Description of Artificial Sequence: Synthetic oligonucleotide
caccacauguaccu

SEQ ID NO: 18355 - RNA, 14 nt, Artificial Sequence
  Description of Artificial Sequence: Synthetic oligonucleotide
acaccacauguacc

SEQ ID NO: 18356 - RNA, 14 nt, Artificial Sequence
  Description of Artificial Sequence: Synthetic oligonucleotide
cacaccacauguac

SEQ ID NO: 18357 - RNA, 14 nt, Artificial Sequence
  Description of Artificial Sequence: Synthetic oligonucleotide
ccacaccacaugua

SEQ ID NO: 18358 - RNA, 14 nt, Artificial Sequence
  Description of Artificial Sequence: Synthetic oligonucleotide
gccacaccacaugu

SEQ ID NO: 18359 - RNA, 14 nt, Artificial Sequence
  Description of Artificial Sequence: Synthetic oligonucleotide
agccacaccacaug

SEQ ID NO: 18360 - RNA, 14 nt, Artificial Sequence
  Description of Artificial Sequence: Synthetic oligonucleotide
aagccacaccacau

SEQ ID NO: 18361 - RNA, 14 nt, Artificial Sequence
  Description of Artificial Sequence: Synthetic oligonucleotide
uaagccacaccaca

SEQ ID NO: 18362 - RNA, 14 nt, Artificial Sequence
  Description of Artificial Sequence: Synthetic oligonucleotide
cuaagccacaccac

SEQ ID NO: 18363 - RNA, 14 nt, Artificial Sequence
  Description of Artificial Sequence: Synthetic oligonucleotide
ccuaagccacacca

SEQ ID NO: 18364 - RNA, 14 nt, Artificial Sequence
  Description of Artificial Sequence: Synthetic oligonucleotide
cccuaagccacacc

SEQ ID NO: 18365 - RNA, 14 nt, Artificial Sequence
  Description of Artificial Sequence: Synthetic oligonucleotide
ucccuaagccacac

SEQ ID NO: 18366 - RNA, 14 nt, Artificial Sequence
  Description of Artificial Sequence: Synthetic oligonucleotide
cucccuaagccaca

SEQ ID NO: 18367 - RNA, 14 nt, Artificial Sequence
  Description of Artificial Sequence: Synthetic oligonucleotide
ucucccuaagccac

SEQ ID NO: 18368 - RNA, 14 nt, Artificial Sequence
  Description of Artificial Sequence: Synthetic oligonucleotide
cucucccuaagcca

SEQ ID NO: 18369 - RNA, 14 nt, Artificial Sequence
  Description of Artificial Sequence: Synthetic oligonucleotide
gcucucccuaagcc

SEQ ID NO: 18370 - RNA, 14 nt, Artificial Sequence
  Description of Artificial Sequence: Synthetic oligonucleotide
cgcucucccuaagc

SEQ ID NO: 18371 - RNA, 14 nt, Artificial Sequence
  Description of Artificial Sequence: Synthetic oligonucleotide
gcgcucucccuaag

SEQ ID NO: 18372 - RNA, 14 nt, Artificial Sequence
  Description of Artificial Sequence: Synthetic oligonucleotide
ugcgcucucccuaa

SEQ ID NO: 18373 - RNA, 14 nt, Artificial Sequence
  Description of Artificial Sequence: Synthetic oligonucleotide
gugcgcucucccua

SEQ ID NO: 18374 - RNA, 14 nt, Artificial Sequence
  Description of Artificial Sequence: Synthetic oligonucleotide
ggugcgcucucccu

SEQ ID NO: 18375 - RNA, 14 nt, Artificial Sequence
  Description of Artificial Sequence: Synthetic oligonucleotide
aggugcgcucuccc

SEQ ID NO: 18376 - RNA, 14 nt, Artificial Sequence
  Description of Artificial Sequence: Synthetic oligonucleotide
caggugcgcucucc

SEQ ID NO: 18377 - RNA, 14 nt, Artificial Sequence
  Description of Artificial Sequence: Synthetic oligonucleotide
acaggugcgcucuc

SEQ ID NO: 18378 - RNA, 14 nt, Artificial Sequence
  Description of Artificial Sequence: Synthetic oligonucleotide
cacaggugcgcucu

SEQ ID NO: 18379 - RNA, 14 nt, Artificial Sequence
  Description of Artificial Sequence: Synthetic oligonucleotide
gcacaggugcgcuc

SEQ ID NO: 18380 - RNA, 14 nt, Artificial Sequence
  Description of Artificial Sequence: Synthetic oligonucleotide
ggcacaggugcgcu

SEQ ID NO: 18381 - RNA, 14 nt, Artificial Sequence
  Description of Artificial Sequence: Synthetic oligonucleotide
uggcacaggugcgc

SEQ ID NO: 18382 - RNA, 14 nt, Artificial Sequence
  Description of Artificial Sequence: Synthetic oligonucleotide
cuggcacaggugcg

SEQ ID NO: 18383 - RNA, 14 nt, Artificial Sequence
  Description of Artificial Sequence: Synthetic oligonucleotide
ucuggcacaggugc

SEQ ID NO: 18384 - RNA, 14 nt, Artificial Sequence
  Description of Artificial Sequence: Synthetic oligonucleotide
aucuggcacaggug

SEQ ID NO: 18385 - RNA, 14 nt, Artificial Sequence
  Description of Artificial Sequence: Synthetic oligonucleotide
caucuggcacaggu

SEQ ID NO: 18386 - RNA, 14 nt, Artificial Sequence
  Description of Artificial Sequence: Synthetic oligonucleotide
gcaucuggcacagg

SEQ ID NO: 18387 - RNA, 14 nt, Artificial Sequence
  Description of Artificial Sequence: Synthetic oligonucleotide
ugcaucuggcacag

SEQ ID NO: 18388 - RNA, 14 nt, Artificial Sequence
  Description of Artificial Sequence: Synthetic oligonucleotide
augcaucuggcaca

SEQ ID NO: 18389 - RNA, 14 nt, Artificial Sequence
  Description of Artificial Sequence: Synthetic oligonucleotide
caugcaucuggcac

SEQ ID NO: 18390 - RNA, 14 nt, Artificial Sequence
  Description of Artificial Sequence: Synthetic oligonucleotide
gcaugcaucuggca

SEQ ID NO: 18391 - RNA, 14 nt, Artificial Sequence
  Description of Artificial Sequence: Synthetic oligonucleotide
ggcaugcaucuggc

SEQ ID NO: 18392 - RNA, 14 nt, Artificial Sequence
  Description of Artificial Sequence: Synthetic oligonucleotide
uggcaugcaucugg

SEQ ID NO: 18393 - RNA, 14 nt, Artificial Sequence
  Description of Artificial Sequence: Synthetic oligonucleotide
guggcaugcaucug

SEQ ID NO: 18394 - RNA, 14 nt, Artificial Sequence
  Description of Artificial Sequence: Synthetic oligonucleotide
aguggcaugcaucu

SEQ ID NO: 18395 - RNA, 14 nt, Artificial Sequence
  Description of Artificial Sequence: Synthetic oligonucleotide
aaguggcaugcauc

SEQ ID NO: 18396 - RNA, 14 nt, Artificial Sequence
  Description of Artificial Sequence: Synthetic oligonucleotide
aaaguggcaugcau

SEQ ID NO: 18397 - RNA, 14 nt, Artificial Sequence
  Description of Artificial Sequence: Synthetic oligonucleotide
gaaaguggcaugca

SEQ ID NO: 18398 - RNA, 14 nt, Artificial Sequence
  Description of Artificial Sequence: Synthetic oligonucleotide
ugaaaguggcaugc

SEQ ID NO: 18399 - RNA, 14 nt, Artificial Sequence
  Description of Artificial Sequence: Synthetic oligonucleotide
cugaaaguggcaug

SEQ ID NO: 18400 - RNA, 14 nt, Artificial Sequence
  Description of Artificial Sequence: Synthetic oligonucleotide
acugaaaguggcau

SEQ ID NO: 18401 - RNA, 14 nt, Artificial Sequence
  Description of Artificial Sequence: Synthetic oligonucleotide
uacugaaaguggca

SEQ ID NO: 18402 - RNA, 14 nt, Artificial Sequence
  Description of Artificial Sequence: Synthetic oligonucleotide
cuacugaaaguggc

SEQ ID NO: 18403 - RNA, 14 nt, Artificial Sequence
  Description of Artificial Sequence: Synthetic oligonucleotide
gcuacugaaagugg

SEQ ID NO: 18404 - RNA, 14 nt, Artificial Sequence
  Description of Artificial Sequence: Synthetic oligonucleotide
agcuacugaaagug

SEQ ID NO: 18405 - RNA, 14 nt, Artificial Sequence
  Description of Artificial Sequence: Synthetic oligonucleotide
cagcuacugaaagu

SEQ ID NO: 18406 - RNA, 14 nt, Artificial Sequence
  Description of Artificial Sequence: Synthetic oligonucleotide
gcagcuacugaaag

SEQ ID NO: 18407 - RNA, 14 nt, Artificial Sequence
  Description of Artificial Sequence: Synthetic oligonucleotide
ggcagcuacugaaa

SEQ ID NO: 18408 - RNA, 14 nt, Artificial Sequence
  Description of Artificial Sequence: Synthetic oligonucleotide
uggcagcuacugaa

SEQ ID NO: 18409 - RNA, 14 nt, Artificial Sequence
  Description of Artificial Sequence: Synthetic oligonucleotide
uuggcagcuacuga

SEQ ID NO: 18410 - RNA, 14 nt, Artificial Sequence
  Description of Artificial Sequence: Synthetic oligonucleotide
uuuggcagcuacug

SEQ ID NO: 18411 - RNA, 14 nt, Artificial Sequence
  Description of Artificial Sequence: Synthetic oligonucleotide
auuuggcagcuacu

SEQ ID NO: 18412 - RNA, 14 nt, Artificial Sequence
  Description of Artificial Sequence: Synthetic oligonucleotide
cauuuggcagcuac

SEQ ID NO: 18413 - RNA, 14 nt, Artificial Sequence
  Description of Artificial Sequence: Synthetic oligonucleotide
acauuuggcagcua

SEQ ID NO: 18414 - RNA, 14 nt, Artificial Sequence
  Description of Artificial Sequence: Synthetic oligonucleotide
cacauuuggcagcu

SEQ ID NO: 18415 - RNA, 14 nt, Artificial Sequence
  Description of Artificial Sequence: Synthetic oligonucleotide
gcacauuuggcagc

SEQ ID NO: 18416 - RNA, 14 nt, Artificial Sequence
  Description of Artificial Sequence: Synthetic oligonucleotide
ggcacauuuggcag

SEQ ID NO: 18417 - RNA, 14 nt, Artificial Sequence
  Description of Artificial Sequence: Synthetic oligonucleotide
aggcacauuuggca

SEQ ID NO: 18418 - RNA, 14 nt, Artificial Sequence
  Description of Artificial Sequence: Synthetic oligonucleotide
aaggcacauuuggc

SEQ ID NO: 18419 - RNA, 14 nt, Artificial Sequence
  Description of Artificial Sequence: Synthetic oligonucleotide
aaaggcacauuugg

SEQ ID NO: 18420 - RNA, 14 nt, Artificial Sequence
  Description of Artificial Sequence: Synthetic oligonucleotide
uaaaggcacauuug

SEQ ID NO: 18421 - RNA, 14 nt, Artificial Sequence
  Description of Artificial Sequence: Synthetic oligonucleotide
uuaaaggcacauuu

SEQ ID NO: 18422 - RNA, 14 nt, Artificial Sequence
  Description of Artificial Sequence: Synthetic oligonucleotide
auuaaaggcacauu

SEQ ID NO: 18423 - RNA, 14 nt, Artificial Sequence
  Description of Artificial Sequence: Synthetic oligonucleotide
aauuaaaggcacau

SEQ ID NO: 18424 - RNA, 14 nt, Artificial Sequence
  Description of Artificial Sequence: Synthetic oligonucleotide
uaauuaaaggcaca

SEQ ID NO: 18425 - RNA, 14 nt, Artificial Sequence
  Description of Artificial Sequence: Synthetic oligonucleotide
uuaauuaaaggcac

SEQ ID NO: 18426 - RNA, 14 nt, Artificial Sequence
  Description of Artificial Sequence: Synthetic oligonucleotide
cuuaauuaaaggca

SEQ ID NO: 18427 - RNA, 14 nt, Artificial Sequence
  Description of Artificial Sequence: Synthetic oligonucleotide
ucuuaauuaaaggc

SEQ ID NO: 18428 - RNA, 14 nt, Artificial Sequence
  Description of Artificial Sequence: Synthetic oligonucleotide
uucuuaauuaaagg

SEQ ID NO: 18429 - RNA, 14 nt, Artificial Sequence
  Description of Artificial Sequence: Synthetic oligonucleotide
guucuuaauuaaag

SEQ ID NO: 18430 - RNA, 14 nt, Artificial Sequence
  Description of Artificial Sequence: Synthetic oligonucleotide
uguucuuaauuaaa

SEQ ID NO: 18431 - RNA, 14 nt, Artificial Sequence
  Description of Artificial Sequence: Synthetic oligonucleotide
auguucuuaauuaa

SEQ ID NO: 18432 - RNA, 14 nt, Artificial Sequence
  Description of Artificial Sequence: Synthetic oligonucleotide
gauguucuuaauua

SEQ ID NO: 18433 - RNA, 14 nt, Artificial Sequence
  Description of Artificial Sequence: Synthetic oligonucleotide
agauguucuuaauu

SEQ ID NO: 18434 - RNA, 14 nt, Artificial Sequence
  Description of Artificial Sequence: Synthetic oligonucleotide
gagauguucuuaau

SEQ ID NO: 18435 - RNA, 14 nt, Artificial Sequence
  Description of Artificial Sequence: Synthetic oligonucleotide
agagauguucuuaa

SEQ ID NO: 18436 - RNA, 14 nt, Artificial Sequence
  Description of Artificial Sequence: Synthetic oligonucleotide
uagagauguucuua

SEQ ID NO: 18437 - RNA, 14 nt, Artificial Sequence
  Description of Artificial Sequence: Synthetic oligonucleotide
uuagagauguucuu

SEQ ID NO: 18438 - RNA, 14 nt, Artificial Sequence
  Description of Artificial Sequence: Synthetic oligonucleotide
auuagagauguucu

SEQ ID NO: 18439 - RNA, 14 nt, Artificial Sequence
  Description of Artificial Sequence: Synthetic oligonucleotide
aauuagagauguuc

SEQ ID NO: 18440 - RNA, 14 nt, Artificial Sequence
  Description of Artificial Sequence: Synthetic oligonucleotide
aaauuagagauguu

SEQ ID NO: 18441 - RNA, 14 nt, Artificial Sequence
  Description of Artificial Sequence: Synthetic oligonucleotide
aaaauuagagaugu

SEQ ID NO: 18442 - RNA, 14 nt, Artificial Sequence
  Description of Artificial Sequence: Synthetic oligonucleotide
aaaaauuagagaug

SEQ ID NO: 18443 - RNA, 14 nt, Artificial Sequence
  Description of Artificial Sequence: Synthetic oligonucleotide
aaaaaauuagagau

SEQ ID NO: 18444 - RNA, 14 nt, Artificial Sequence
  Description of Artificial Sequence: Synthetic oligonucleotide
aaaaaaauuagaga

SEQ ID NO: 18445 - RNA, 14 nt, Artificial Sequence
  Description of Artificial Sequence: Synthetic oligonucleotide
gaaaaaaauuagag

SEQ ID NO: 18446 - RNA, 14 nt, Artificial Sequence
  Description of Artificial Sequence: Synthetic oligonucleotide
agaaaaaaauuaga

SEQ ID NO: 18447 - RNA, 14 nt, Artificial Sequence
  Description of Artificial Sequence: Synthetic oligonucleotide
aagaaaaaaauuag

SEQ ID NO: 18448 - RNA, 14 nt, Artificial Sequence
  Description of Artificial Sequence: Synthetic oligonucleotide
gaagaaaaaaauua

SEQ ID NO: 18449 - RNA, 14 nt, Artificial Sequence
  Description of Artificial Sequence: Synthetic oligonucleotide
ugaagaaaaaaauu

SEQ ID NO: 18450 - RNA, 14 nt, Artificial Sequence
  Description of Artificial Sequence: Synthetic oligonucleotide
cugaagaaaaaaau

SEQ ID NO: 18451 - RNA, 14 nt, Artificial Sequence
  Description of Artificial Sequence: Synthetic oligonucleotide
ucugaagaaaaaaa

SEQ ID NO: 18452 - RNA, 14 nt, Artificial Sequence
  Description of Artificial Sequence: Synthetic oligonucleotide
aucugaagaaaaaa

SEQ ID NO: 18453 - RNA, 14 nt, Artificial Sequence
  Description of Artificial Sequence: Synthetic oligonucleotide
gaucugaagaaaaa

SEQ ID NO: 18454 - RNA, 14 nt, Artificial Sequence
  Description of Artificial Sequence: Synthetic oligonucleotide
ugaucugaagaaaa

SEQ ID NO: 18455 - RNA, 14 nt, Artificial Sequence
  Description of Artificial Sequence: Synthetic oligonucleotide
uugaucugaagaaa

SEQ ID NO: 18456 - RNA, 14 nt, Artificial Sequence
  Description of Artificial Sequence: Synthetic oligonucleotide
cuugaucugaagaa

SEQ ID NO: 18457 - RNA, 14 nt, Artificial Sequence
  Description of Artificial Sequence: Synthetic oligonucleotide
acuugaucugaaga

SEQ ID NO: 18458 - RNA, 14 nt, Artificial Sequence
  Description of Artificial Sequence: Synthetic oligonucleotide
gacuugaucugaag

SEQ ID NO: 18459 - RNA, 14 nt, Artificial Sequence
  Description of Artificial Sequence: Synthetic oligonucleotide
ugacuugaucugaa

SEQ ID NO: 18460 - RNA, 14 nt, Artificial Sequence
  Description of Artificial Sequence: Synthetic oligonucleotide
cugacuugaucuga

SEQ ID NO: 18461 - RNA, 14 nt, Artificial Sequence
  Description of Artificial Sequence: Synthetic oligonucleotide
gcugacuugaucug

SEQ ID NO: 18462 - RNA, 14 nt, Artificial Sequence
  Description of Artificial Sequence: Synthetic oligonucleotide
ugcugacuugaucu

SEQ ID NO: 18463 - RNA, 14 nt, Artificial Sequence
  Description of Artificial Sequence: Synthetic oligonucleotide
augcugacuugauc

SEQ ID NO: 18464 - RNA, 14 nt, Artificial Sequence
  Description of Artificial Sequence: Synthetic oligonucleotide
aaugcugacuugau

SEQ ID NO: 18465 - RNA, 14 nt, Artificial Sequence
  Description of Artificial Sequence: Synthetic oligonucleotide
aaaugcugacuuga

SEQ ID NO: 18466 - RNA, 14 nt, Artificial Sequence
  Description of Artificial Sequence: Synthetic oligonucleotide
caaaugcugacuug

SEQ ID NO: 18467 - RNA, 14 nt, Artificial Sequence
  Description of Artificial Sequence: Synthetic oligonucleotide
ccaaaugcugacuu

SEQ ID NO: 18468 - RNA, 14 nt, Artificial Sequence
  Description of Artificial Sequence: Synthetic oligonucleotide
cccaaaugcugacu

SEQ ID NO: 18469 - RNA, 14 nt, Artificial Sequence
  Description of Artificial Sequence: Synthetic oligonucleotide
ccccaaaugcugac

SEQ ID NO: 18470 - RNA, 14 nt, Artificial Sequence
  Description of Artificial Sequence: Synthetic oligonucleotide
accccaaaugcuga

SEQ ID NO: 18471 - RNA, 14 nt, Artificial Sequence
  Description of Artificial Sequence: Synthetic oligonucleotide
gaccccaaaugcug

SEQ ID NO: 18472 - RNA, 14 nt, Artificial Sequence
  Description of Artificial Sequence: Synthetic oligonucleotide
cgaccccaaaugcu

SEQ ID NO: 18473 - RNA, 14 nt, Artificial Sequence
  Description of Artificial Sequence: Synthetic oligonucleotide
ccgaccccaaaugc

SEQ ID NO: 18474 - RNA, 14 nt, Artificial Sequence
  Description of Artificial Sequence: Synthetic oligonucleotide
cccgaccccaaaug

SEQ ID NO: 18475 - RNA, 14 nt, Artificial Sequence
  Description of Artificial Sequence: Synthetic oligonucleotide
ucccgaccccaaau

SEQ ID NO: 18476 - RNA, 14 nt, Artificial Sequence
  Description of Artificial Sequence: Synthetic oligonucleotide
aucccgaccccaaa

SEQ ID NO: 18477 - RNA, 14 nt, Artificial Sequence
  Description of Artificial Sequence: Synthetic oligonucleotide
aaucccgaccccaa

SEQ ID NO: 18478 - RNA, 14 nt, Artificial Sequence
  Description of Artificial Sequence: Synthetic oligonucleotide
aaaucccgacccca

SEQ ID NO: 18479 - RNA, 14 nt, Artificial Sequence
  Description of Artificial Sequence: Synthetic oligonucleotide
caaaucccgacccc

SEQ ID NO: 18480 - RNA, 14 nt, Artificial Sequence
  Description of Artificial Sequence: Synthetic oligonucleotide
ccaaaucccgaccc

SEQ ID NO: 18481 - RNA, 14 nt, Artificial Sequence
  Description of Artificial Sequence: Synthetic oligonucleotide
cccaaaucccgacc

SEQ ID NO: 18482 - RNA, 14 nt, Artificial Sequence
  Description of Artificial Sequence: Synthetic oligonucleotide
gcccaaaucccgac

SEQ ID NO: 18483 - RNA, 14 nt, Artificial Sequence
  Description of Artificial Sequence: Synthetic oligonucleotide
ugcccaaaucccga

SEQ ID NO: 18484 - RNA, 14 nt, Artificial Sequence
  Description of Artificial Sequence: Synthetic oligonucleotide
cugcccaaaucccg

SEQ ID NO: 18485 - RNA, 14 nt, Artificial Sequence
  Description of Artificial Sequence: Synthetic oligonucleotide
ccugcccaaauccc

SEQ ID NO: 18486 - RNA, 14 nt, Artificial Sequence
  Description of Artificial Sequence: Synthetic oligonucleotide
cccugcccaaaucc

SEQ ID NO: 18487 - RNA, 14 nt, Artificial Sequence
  Description of Artificial Sequence: Synthetic oligonucleotide
ucccugcccaaauc

SEQ ID NO: 18488 - RNA, 14 nt, Artificial Sequence
  Description of Artificial Sequence: Synthetic oligonucleotide
uucccugcccaaau

SEQ ID NO: 18489 - RNA, 14 nt, Artificial Sequence
  Description of Artificial Sequence: Synthetic oligonucleotide
guucccugcccaaa

SEQ ID NO: 18490 - RNA, 14 nt, Artificial Sequence
  Description of Artificial Sequence: Synthetic oligonucleotide
aguucccugcccaa

SEQ ID NO: 18491 - RNA, 14 nt, Artificial Sequence
  Description of Artificial Sequence: Synthetic oligonucleotide
aaguucccugccca

SEQ ID NO: 18492 - RNA, 14 nt, Artificial Sequence
  Description of Artificial Sequence: Synthetic oligonucleotide
aaaguucccugccc

SEQ ID NO: 18493 - RNA, 14 nt, Artificial Sequence
  Description of Artificial Sequence: Synthetic oligonucleotide
caaaguucccugcc

SEQ ID NO: 18494 - RNA, 14 nt, Artificial Sequence
  Description of Artificial Sequence: Synthetic oligonucleotide
ccaaaguucccugc

SEQ ID NO: 18495 - RNA, 14 nt, Artificial Sequence
  Description of Artificial Sequence: Synthetic oligonucleotide
cccaaaguucccug

SEQ ID NO: 18496 - RNA, 14 nt, Artificial Sequence
  Description of Artificial Sequence: Synthetic oligonucleotide
ccccaaaguucccu

SEQ ID NO: 18497 - RNA, 14 nt, Artificial Sequence
  Description of Artificial Sequence: Synthetic oligonucleotide
accccaaaguuccc

SEQ ID NO: 18498 - RNA, 14 nt, Artificial Sequence
  Description of Artificial Sequence: Synthetic oligonucleotide
caccccaaaguucc

SEQ ID NO: 18499 - RNA, 14 nt, Artificial Sequence
  Description of Artificial Sequence: Synthetic oligonucleotide
gcaccccaaaguuc

SEQ ID NO: 18500 - RNA, 14 nt, Artificial Sequence
  Description of Artificial Sequence: Synthetic oligonucleotide
ugcaccccaaaguu

SEQ ID NO: 18501 - RNA, 14 nt, Artificial Sequence
  Description of Artificial Sequence: Synthetic oligonucleotide
uugcaccccaaagu

SEQ ID NO: 18502 - RNA, 14 nt, Artificial Sequence
  Description of Artificial Sequence: Synthetic oligonucleotide
uuugcaccccaaag

SEQ ID NO: 18503 - RNA, 14 nt, Artificial Sequence
  Description of Artificial Sequence: Synthetic oligonucleotide
auuugcaccccaaa

SEQ ID NO: 18504 - RNA, 14 nt, Artificial Sequence
  Description of Artificial Sequence: Synthetic oligonucleotide
uauuugcaccccaa

SEQ ID NO: 18505 - RNA, 14 nt, Artificial Sequence
  Description of Artificial Sequence: Synthetic oligonucleotide
auauuugcacccca

SEQ ID NO: 18506 - RNA, 14 nt, Artificial Sequence
  Description of Artificial Sequence: Synthetic oligonucleotide
gauauuugcacccc

SEQ ID NO: 18507 - RNA, 14 nt, Artificial Sequence
  Description of Artificial Sequence: Synthetic oligonucleotide
agauauuugcaccc

SEQ ID NO: 18508 - RNA, 14 nt, Artificial Sequence
  Description of Artificial Sequence: Synthetic oligonucleotide
cagauauuugcacc

SEQ ID NO: 18509 - RNA, 14 nt, Artificial Sequence
  Description of Artificial Sequence: Synthetic oligonucleotide
ccagauauuugcac

SEQ ID NO: 18510 - RNA, 14 nt, Artificial Sequence
  Description of Artificial Sequence: Synthetic oligonucleotide
accagauauuugca

SEQ ID NO: 18511 - RNA, 14 nt, Artificial Sequence
  Description of Artificial Sequence: Synthetic oligonucleotide
caccagauauuugc

SEQ ID NO: 18512 - RNA, 14 nt, Artificial Sequence
  Description of Artificial Sequence: Synthetic oligonucleotide
ucaccagauauuug

SEQ ID NO: 18513 - RNA, 14 nt, Artificial Sequence
  Description of Artificial Sequence: Synthetic oligonucleotide
uucaccagauauuu

SEQ ID NO: 18514 - RNA, 14 nt, Artificial Sequence
  Description of Artificial Sequence: Synthetic oligonucleotide
uuucaccagauauu

SEQ ID NO: 18515 - RNA, 14 nt, Artificial Sequence
  Description of Artificial Sequence: Synthetic oligonucleotide
guuucaccagauau

SEQ ID NO: 18516 - RNA, 14 nt, Artificial Sequence
  Description of Artificial Sequence: Synthetic oligonucleotide
gguuucaccagaua

SEQ ID NO: 18517 - RNA, 14 nt, Artificial Sequence
  Description of Artificial Sequence: Synthetic oligonucleotide
ugguuucaccagau

SEQ ID NO: 18518 - RNA, 14 nt, Artificial Sequence
  Description of Artificial Sequence: Synthetic oligonucleotide
gugguuucaccaga

SEQ ID NO: 18519 - RNA, 14 nt, Artificial Sequence
  Description of Artificial Sequence: Synthetic oligonucleotide
ggugguuucaccag

SEQ ID NO: 18520 - RNA, 14 nt, Artificial Sequence
  Description of Artificial Sequence: Synthetic oligonucleotide
uggugguuucacca

SEQ ID NO: 18521 - RNA, 14 nt, Artificial Sequence
  Description of Artificial Sequence: Synthetic oligonucleotide
cuggugguuucacc

SEQ ID NO: 18522 - RNA, 14 nt, Artificial Sequence
  Description of Artificial Sequence: Synthetic oligonucleotide
ucuggugguuucac

SEQ ID NO: 18523 - RNA, 14 nt, Artificial Sequence
  Description of Artificial Sequence: Synthetic oligonucleotide
cucuggugguuuca

SEQ ID NO: 18524 - RNA, 14 nt, Artificial Sequence
  Description of Artificial Sequence: Synthetic oligonucleotide
ucucuggugguuuc

SEQ ID NO: 18525 - RNA, 14 nt, Artificial Sequence
  Description of Artificial Sequence: Synthetic oligonucleotide
uucucuggugguuu

SEQ ID NO: 18526 - RNA, 14 nt, Artificial Sequence
  Description of Artificial Sequence: Synthetic oligonucleotide
auucucuggugguu

SEQ ID NO: 18527 - RNA, 14 nt, Artificial Sequence
  Description of Artificial Sequence: Synthetic oligonucleotide
aauucucugguggu

SEQ ID NO: 18528 - RNA, 14 nt, Artificial Sequence
  Description of Artificial Sequence: Synthetic oligonucleotide
aaauucucuggugg

SEQ ID NO: 18529 - RNA, 14 nt, Artificial Sequence
  Description of Artificial Sequence: Synthetic oligonucleotide
caaauucucuggug

SEQ ID NO: 18530 - RNA, 14 nt, Artificial Sequence
  Description of Artificial Sequence: Synthetic oligonucleotide
acaaauucucuggu

SEQ ID NO: 18531 - RNA, 14 nt, Artificial Sequence
  Description of Artificial Sequence: Synthetic oligonucleotide
aacaaauucucugg

SEQ ID NO: 18532 - RNA, 14 nt, Artificial Sequence
  Description of Artificial Sequence: Synthetic oligonucleotide
aaacaaauucucug

SEQ ID NO: 18533 - RNA, 14 nt, Artificial Sequence
  Description of Artificial Sequence: Synthetic oligonucleotide
caaacaaauucucu

SEQ ID NO: 18534 - RNA, 14 nt, Artificial Sequence
  Description of Artificial Sequence: Synthetic oligonucleotide
acaaacaaauucuc

SEQ ID NO: 18535 - RNA, 14 nt, Artificial Sequence
  Description of Artificial Sequence: Synthetic oligonucleotide
gacaaacaaauucu

SEQ ID NO: 18536 - RNA, 14 nt, Artificial Sequence
  Description of Artificial Sequence: Synthetic oligonucleotide
ugacaaacaaauuc

SEQ ID NO: 18537 - RNA, 14 nt, Artificial Sequence
  Description of Artificial Sequence: Synthetic oligonucleotide
uugacaaacaaauu

SEQ ID NO: 18538 - RNA, 14 nt, Artificial Sequence
  Description of Artificial Sequence: Synthetic oligonucleotide
uuugacaaacaaau

SEQ ID NO: 18539 - RNA, 14 nt, Artificial Sequence
  Description of Artificial Sequence: Synthetic oligonucleotide
cuuugacaaacaaa

SEQ ID NO: 18540 - RNA, 14 nt, Artificial Sequence
  Description of Artificial Sequence: Synthetic oligonucleotide
acuuugacaaacaa

SEQ ID NO: 18541 - RNA, 14 nt, Artificial Sequence
  Description of Artificial Sequence: Synthetic oligonucleotide
cacuuugacaaaca

SEQ ID NO: 18542 - RNA, 14 nt, Artificial Sequence
  Description of Artificial Sequence: Synthetic oligonucleotide
ucacuuugacaaac

SEQ ID NO: 18543 - RNA, 14 nt, Artificial Sequence
  Description of Artificial Sequence: Synthetic oligonucleotide
gucacuuugacaaa

SEQ ID NO: 18544 - RNA, 14 nt, Artificial Sequence
  Description of Artificial Sequence: Synthetic oligonucleotide
ugucacuuugacaa

SEQ ID NO: 18545 - RNA, 14 nt, Artificial Sequence
  Description of Artificial Sequence: Synthetic oligonucleotide
augucacuuugaca

SEQ ID NO: 18546 - RNA, 14 nt, Artificial Sequence
  Description of Artificial Sequence: Synthetic oligonucleotide
caugucacuuugac

SEQ ID NO: 18547 - RNA, 14 nt, Artificial Sequence
  Description of Artificial Sequence: Synthetic oligonucleotide
acaugucacuuuga

SEQ ID NO: 18548 - RNA, 14 nt, Artificial Sequence
  Description of Artificial Sequence: Synthetic oligonucleotide
uacaugucacuuug

SEQ ID NO: 18549 - RNA, 14 nt, Artificial Sequence
  Description of Artificial Sequence: Synthetic oligonucleotide
auacaugucacuuu

SEQ ID NO: 18550 - RNA, 14 nt, Artificial Sequence
  Description of Artificial Sequence: Synthetic oligonucleotide
uauacaugucacuu

SEQ ID NO: 18551 - RNA, 14 nt, Artificial Sequence
  Description of Artificial Sequence: Synthetic oligonucleotide
uuauacaugucacu

SEQ ID NO: 18552 - RNA, 14 nt, Artificial Sequence
  Description of Artificial Sequence: Synthetic oligonucleotide
auuauacaugucac

SEQ ID NO: 18553 - RNA, 14 nt, Artificial Sequence
  Description of Artificial Sequence: Synthetic oligonucleotide
aauuauacauguca

SEQ ID NO: 18554 - RNA, 14 nt, Artificial Sequence
  Description of Artificial Sequence: Synthetic oligonucleotide
aaauuauacauguc

SEQ ID NO: 18555 - RNA, 14 nt, Artificial Sequence
  Description of Artificial Sequence: Synthetic oligonucleotide
aaaauuauacaugu

SEQ ID NO: 18556 - RNA, 14 nt, Artificial Sequence
  Description of Artificial Sequence: Synthetic oligonucleotide
uaaaauuauacaug

SEQ ID NO: 18557 - RNA, 14 nt, Artificial Sequence
  Description of Artificial Sequence: Synthetic oligonucleotide
cuaaaauuauacau

SEQ ID NO: 18558 - RNA, 14 nt, Artificial Sequence
  Description of Artificial Sequence: Synthetic oligonucleotide
acuaaaauuauaca

SEQ ID NO: 18559 - RNA, 14 nt, Artificial Sequence
  Description of Artificial Sequence: Synthetic oligonucleotide
aacuaaaauuauac

SEQ ID NO: 18560 - RNA, 14 nt, Artificial Sequence
  Description of Artificial Sequence: Synthetic oligonucleotide
caacuaaaauuaua

SEQ ID NO: 18561 - RNA, 14 nt, Artificial Sequence
  Description of Artificial Sequence: Synthetic oligonucleotide
ucaacuaaaauuau

SEQ ID NO: 18562 - RNA, 14 nt, Artificial Sequence
  Description of Artificial Sequence: Synthetic oligonucleotide
cucaacuaaaauua

SEQ ID NO: 18563 - RNA, 14 nt, Artificial Sequence
  Description of Artificial Sequence: Synthetic oligonucleotide
ucucaacuaaaauu

SEQ ID NO: 18564 - RNA, 14 nt, Artificial Sequence
  Description of Artificial Sequence: Synthetic oligonucleotide
gucucaacuaaaau

SEQ ID NO: 18565 - RNA, 14 nt, Artificial Sequence
  Description of Artificial Sequence: Synthetic oligonucleotide
cgucucaacuaaaa

SEQ ID NO: 18566 - RNA, 14 nt, Artificial Sequence
  Description of Artificial Sequence: Synthetic oligonucleotide
acgucucaacuaaa

SEQ ID NO: 18567 - RNA, 14 nt, Artificial Sequence
  Description of Artificial Sequence: Synthetic oligonucleotide
cacgucucaacuaa

SEQ ID NO: 18568 - RNA, 14 nt, Artificial Sequence
  Description of Artificial Sequence: Synthetic oligonucleotide
acacgucucaacua

SEQ ID NO: 18569 - RNA, 14 nt, Artificial Sequence
  Description of Artificial Sequence: Synthetic oligonucleotide
aacacgucucaacu

SEQ ID NO: 18570 - RNA, 14 nt, Artificial Sequence
  Description of Artificial Sequence: Synthetic oligonucleotide
aaacacgucucaac

SEQ ID NO: 18571 - RNA, 14 nt, Artificial Sequence
  Description of Artificial Sequence: Synthetic oligonucleotide
caaacacgucucaa

SEQ ID NO: 18572 - RNA, 14 nt, Artificial Sequence
  Description of Artificial Sequence: Synthetic oligonucleotide
acaaacacgucuca

SEQ ID NO: 18573 - RNA, 14 nt, Artificial Sequence
  Description of Artificial Sequence: Synthetic oligonucleotide
cacaaacacgucuc

SEQ ID NO: 18574 - RNA, 14 nt, Artificial Sequence
  Description of Artificial Sequence: Synthetic oligonucleotide
acacaaacacgucu

SEQ ID NO: 18575 - RNA, 14 nt, Artificial Sequence
  Description of Artificial Sequence: Synthetic oligonucleotide
uacacaaacacguc

SEQ ID NO: 18576 - RNA, 14 nt, Artificial Sequence
  Description of Artificial Sequence: Synthetic oligonucleotide
auacacaaacacgu

SEQ ID NO: 18577 - RNA, 14 nt, Artificial Sequence
  Description of Artificial Sequence: Synthetic oligonucleotide
uauacacaaacacg

SEQ ID NO: 18578 - RNA, 14 nt, Artificial Sequence
  Description of Artificial Sequence: Synthetic oligonucleotide
auauacacaaacac

SEQ ID NO: 18579 - RNA, 14 nt, Artificial Sequence
  Description of Artificial Sequence: Synthetic oligonucleotide
uauauacacaaaca

SEQ ID NO: 18580 - RNA, 14 nt, Artificial Sequence
  Description of Artificial Sequence: Synthetic oligonucleotide
auauauacacaaac

SEQ ID NO: 18581 - RNA, 14 nt, Artificial Sequence
  Description of Artificial Sequence: Synthetic oligonucleotide
cauauauacacaaa

SEQ ID NO: 18582 - RNA, 14 nt, Artificial Sequence
  Description of Artificial Sequence: Synthetic oligonucleotide
acauauauacacaa

SEQ ID NO: 18583 - RNA, 14 nt, Artificial Sequence
  Description of Artificial Sequence: Synthetic oligonucleotide
cacauauauacaca

SEQ ID NO: 18584 - RNA, 14 nt, Artificial Sequence
  Description of Artificial Sequence: Synthetic oligonucleotide
acacauauauacac

SEQ ID NO: 18585 - RNA, 14 nt, Artificial Sequence
  Description of Artificial Sequence: Synthetic oligonucleotide
uacacauauauaca

SEQ ID NO: 18586 - RNA, 14 nt, Artificial Sequence
  Description of Artificial Sequence: Synthetic oligonucleotide
auacacauauauac

SEQ ID NO: 18587 - RNA, 14 nt, Artificial Sequence
  Description of Artificial Sequence: Synthetic oligonucleotide
aauacacauauaua

SEQ ID NO: 18588 - RNA, 14 nt, Artificial Sequence
  Description of Artificial Sequence: Synthetic oligonucleotide
aaauacacauauau

SEQ ID NO: 18589 - RNA, 14 nt, Artificial Sequence
  Description of Artificial Sequence: Synthetic oligonucleotide
caaauacacauaua

SEQ ID NO: 18590 - RNA, 14 nt, Artificial Sequence
  Description of Artificial Sequence: Synthetic oligonucleotide
gcaaauacacauau

SEQ ID NO: 18591 - RNA, 14 nt, Artificial Sequence
  Description of Artificial Sequence: Synthetic oligonucleotide
ggcaaauacacaua

SEQ ID NO: 18592 - RNA, 14 nt, Artificial Sequence
  Description of Artificial Sequence: Synthetic oligonucleotide
aggcaaauacacau

SEQ ID NO: 18593 - RNA, 14 nt, Artificial Sequence
  Description of Artificial Sequence: Synthetic oligonucleotide
aaggcaaauacaca

SEQ ID NO: 18594 - RNA, 14 nt, Artificial Sequence
  Description of Artificial Sequence: Synthetic oligonucleotide
aaaggcaaauacac

SEQ ID NO: 18595 - RNA, 14 nt, Artificial Sequence
  Description of Artificial Sequence: Synthetic oligonucleotide
caaaggcaaauaca

SEQ ID NO: 18596 - RNA, 14 nt, Artificial Sequence
  Description of Artificial Sequence: Synthetic oligonucleotide
acaaaggcaaauac

SEQ ID NO: 18597 - RNA, 14 nt, Artificial Sequence
  Description of Artificial Sequence: Synthetic oligonucleotide
aacaaaggcaaaua

SEQ ID NO: 18598 - RNA, 14 nt, Artificial Sequence
  Description of Artificial Sequence: Synthetic oligonucleotide
aaacaaaggcaaau

SEQ ID NO: 18599 - RNA, 14 nt, Artificial Sequence
  Description of Artificial Sequence: Synthetic oligonucleotide
uaaacaaaggcaaa

SEQ ID NO: 18600 - RNA, 14 nt, Artificial Sequence
  Description of Artificial Sequence: Synthetic oligonucleotide
cuaaacaaaggcaa

SEQ ID NO: 18601 - RNA, 14 nt, Artificial Sequence
  Description of Artificial Sequence: Synthetic oligonucleotide
acuaaacaaaggca

SEQ ID NO: 18602 - RNA, 14 nt, Artificial Sequence
  Description of Artificial Sequence: Synthetic oligonucleotide
uacuaaacaaaggc

SEQ ID NO: 18603 - RNA, 14 nt, Artificial Sequence
  Description of Artificial Sequence: Synthetic oligonucleotide
cuacuaaacaaagg

SEQ ID NO: 18604 - RNA, 14 nt, Artificial Sequence
  Description of Artificial Sequence: Synthetic oligonucleotide
gcuacuaaacaaag

SEQ ID NO: 18605 - RNA, 14 nt, Artificial Sequence
  Description of Artificial Sequence: Synthetic oligonucleotide
ugcuacuaaacaaa

SEQ ID NO: 18606 - RNA, 14 nt, Artificial Sequence
  Description of Artificial Sequence: Synthetic oligonucleotide
gugcuacuaaacaa

SEQ ID NO: 18607 - RNA, 14 nt, Artificial Sequence
  Description of Artificial Sequence: Synthetic oligonucleotide
cgugcuacuaaaca

SEQ ID NO: 18608 - RNA, 14 nt, Artificial Sequence
  Description of Artificial Sequence: Synthetic oligonucleotide
ccgugcuacuaaac

SEQ ID NO: 18609 - RNA, 14 nt, Artificial Sequence
  Description of Artificial Sequence: Synthetic oligonucleotide
accgugcuacuaaa

SEQ ID NO: 18610 - RNA, 14 nt, Artificial Sequence
  Description of Artificial Sequence: Synthetic oligonucleotide
aaccgugcuacuaa

SEQ ID NO: 18611 - RNA, 14 nt, Artificial Sequence
  Description of Artificial Sequence: Synthetic oligonucleotide
uaaccgugcuacua

SEQ ID NO: 18612 - RNA, 14 nt, Artificial Sequence
  Description of Artificial Sequence: Synthetic oligonucleotide
auaaccgugcuacu

SEQ ID NO: 18613 - RNA, 14 nt, Artificial Sequence
  Description of Artificial Sequence: Synthetic oligonucleotide
aauaaccgugcuac

SEQ ID NO: 18614 - RNA, 14 nt, Artificial Sequence
  Description of Artificial Sequence: Synthetic oligonucleotide
aaauaaccgugcua

SEQ ID NO: 18615 - RNA, 14 nt, Artificial Sequence
  Description of Artificial Sequence: Synthetic oligonucleotide
caaauaaccgugcu

SEQ ID NO: 18616 - RNA, 14 nt, Artificial Sequence
  Description of Artificial Sequence: Synthetic oligonucleotide
gcaaauaaccgugc

SEQ ID NO: 18617 - RNA, 14 nt, Artificial Sequence
  Description of Artificial Sequence: Synthetic oligonucleotide
agcaaauaaccgug

SEQ ID NO: 18618 - RNA, 14 nt, Artificial Sequence
  Description of Artificial Sequence: Synthetic oligonucleotide
uagcaaauaaccgu

SEQ ID NO: 18619 - RNA, 14 nt, Artificial Sequence
  Description of Artificial Sequence: Synthetic oligonucleotide
uuagcaaauaaccg

SEQ ID NO: 18620 - RNA, 14 nt, Artificial Sequence
  Description of Artificial Sequence: Synthetic oligonucleotide
uuuagcaaauaacc

SEQ ID NO: 18621 - RNA, 14 nt, Artificial Sequence
  Description of Artificial Sequence: Synthetic oligonucleotide
uuuuagcaaauaac

SEQ ID NO: 18622 - RNA, 14 nt, Artificial Sequence
  Description of Artificial Sequence: Synthetic oligonucleotide
auuuuagcaaauaa

SEQ ID NO: 18623 - RNA, 14 nt, Artificial Sequence
  Description of Artificial Sequence: Synthetic oligonucleotide
uauuuuagcaaaua

SEQ ID NO: 18624 - RNA, 14 nt, Artificial Sequence
  Description of Artificial Sequence: Synthetic oligonucleotide
uuauuuuagcaaau

SEQ ID NO: 18625 - RNA, 14 nt, Artificial Sequence
  Description of Artificial Sequence: Synthetic oligonucleotide
auuauuuuagcaaa

SEQ ID NO: 18626 - RNA, 14 nt, Artificial Sequence
  Description of Artificial Sequence: Synthetic oligonucleotide
aauuauuuuagcaa

SEQ ID NO: 18627 - RNA, 14 nt, Artificial Sequence
  Description of Artificial Sequence: Synthetic oligonucleotide
caauuauuuuagca

SEQ ID NO: 18628 - RNA, 14 nt, Artificial Sequence
  Description of Artificial Sequence: Synthetic oligonucleotide
acaauuauuuuagc

SEQ ID NO: 18629 - RNA, 14 nt, Artificial Sequence
  Description of Artificial Sequence: Synthetic oligonucleotide
gacaauuauuuuag

SEQ ID NO: 18630 - RNA, 14 nt, Artificial Sequence
  Description of Artificial Sequence: Synthetic oligonucleotide
ugacaauuauuuua

SEQ ID NO: 18631 - RNA, 14 nt, Artificial Sequence
  Description of Artificial Sequence: Synthetic oligonucleotide
uugacaauuauuuu

SEQ ID NO: 18632 - RNA, 14 nt, Artificial Sequence
  Description of Artificial Sequence: Synthetic oligonucleotide
uuugacaauuauuu

SEQ ID NO: 18633 - RNA, 14 nt, Artificial Sequence
  Description of Artificial Sequence: Synthetic oligonucleotide
uuuugacaauuauu

SEQ ID NO: 18634 - RNA, 14 nt, Artificial Sequence
  Description of Artificial Sequence: Synthetic oligonucleotide
uuuuugacaauuau

SEQ ID NO: 18635 - RNA, 14 nt, Artificial Sequence
  Description of Artificial Sequence: Synthetic oligonucleotide
uuuuuugacaauua

SEQ ID NO: 18636 - RNA, 14 nt, Artificial Sequence
  Description of Artificial Sequence: Synthetic oligonucleotide
auuuuuugacaauu

SEQ ID NO: 18637 - RNA, 14 nt, Artificial Sequence
  Description of Artificial Sequence: Synthetic oligonucleotide
aauuuuuugacaau

SEQ ID NO: 18638 - RNA, 14 nt, Artificial Sequence
  Description of Artificial Sequence: Synthetic oligonucleotide
caauuuuuugacaa

SEQ ID NO: 18639 - RNA, 14 nt, Artificial Sequence
  Description of Artificial Sequence: Synthetic oligonucleotide
gcaauuuuuugaca

SEQ ID NO: 18640 - RNA, 14 nt, Artificial Sequence
  Description of Artificial Sequence: Synthetic oligonucleotide
agcaauuuuuugac

SEQ ID NO: 18641 - RNA, 14 nt, Artificial Sequence
  Description of Artificial Sequence: Synthetic oligonucleotide
gagcaauuuuuuga

SEQ ID NO: 18642 - RNA, 14 nt, Artificial Sequence
  Description of Artificial Sequence: Synthetic oligonucleotide
agagcaauuuuuug

SEQ ID NO: 18643 - RNA, 14 nt, Artificial Sequence
  Description of Artificial Sequence: Synthetic oligonucleotide
cagagcaauuuuuu

SEQ ID NO: 18644 - RNA, 14 nt, Artificial Sequence
  Description of Artificial Sequence: Synthetic oligonucleotide
acagagcaauuuuu

SEQ ID NO: 18645 - RNA, 14 nt, Artificial Sequence
  Description of Artificial Sequence: Synthetic oligonucleotide
gacagagcaauuuu

SEQ ID NO: 18646 - RNA, 14 nt, Artificial Sequence
  Description of Artificial Sequence: Synthetic oligonucleotide
cgacagagcaauuu

SEQ ID NO: 18647 - RNA, 14 nt, Artificial Sequence
  Description of Artificial Sequence: Synthetic oligonucleotide
ccgacagagcaauu

SEQ ID NO: 18648 - RNA, 14 nt, Artificial Sequence
  Description of Artificial Sequence: Synthetic oligonucleotide
accgacagagcaau

SEQ ID NO: 18649 - DNA, 14 bp, Artificial Sequence
  Description of Artificial Sequence: Synthetic oligonucleotide
gaccgacagagcaa

SEQ ID NO: 18650 - DNA, 14 bp, Artificial Sequence
  Description of Artificial Sequence: Synthetic oligonucleotide
cgaccgacagagca

SEQ ID NO: 18651 - DNA, 14 bp, Artificial Sequence
  Description of Artificial Sequence: Synthetic oligonucleotide
ccgaccgacagagc

SEQ ID NO: 18652 - DNA, 14 bp, Artificial Sequence
  Description of Artificial Sequence: Synthetic oligonucleotide
accgaccgacagag

SEQ ID NO: 18653 - DNA, 14 bp, Artificial Sequence
  Description of Artificial Sequence: Synthetic oligonucleotide
gaccgaccgacaga

SEQ ID NO: 18654 - DNA, 14 bp, Artificial Sequence
  Description of Artificial Sequence: Synthetic oligonucleotide
agaccgaccgacag

SEQ ID NO: 18655 - DNA, 14 bp, Artificial Sequence
  Description of Artificial Sequence: Synthetic oligonucleotide
aagaccgaccgaca

SEQ ID NO: 18656 - DNA, 14 bp, Artificial Sequence
  Description of Artificial Sequence: Synthetic oligonucleotide
aaagaccgaccgac

SEQ ID NO: 18657 - DNA, 14 bp, Artificial Sequence
  Description of Artificial Sequence: Synthetic oligonucleotide
caaagaccgaccga

SEQ ID NO: 18658 - RNA, 14 nt, Artificial Sequence
  Description of Artificial Sequence: Synthetic oligonucleotide
ucaaagaccgaccg

SEQ ID NO: 18659 - RNA, 14 nt, Artificial Sequence
  Description of Artificial Sequence: Synthetic oligonucleotide
aucaaagaccgacc

SEQ ID NO: 18660 - RNA, 14 nt, Artificial Sequence
  Description of Artificial Sequence: Synthetic oligonucleotide
caucaaagaccgac

SEQ ID NO: 18661 - RNA, 14 nt, Artificial Sequence
  Description of Artificial Sequence: Synthetic oligonucleotide
acaucaaagaccga

SEQ ID NO: 18662 - RNA, 14 nt, Artificial Sequence
  Description of Artificial Sequence: Synthetic oligonucleotide
uacaucaaagaccg

SEQ ID NO: 18663 - RNA, 14 nt, Artificial Sequence
  Description of Artificial Sequence: Synthetic oligonucleotide
uuacaucaaagacc

SEQ ID NO: 18664 - RNA, 14 nt, Artificial Sequence
  Description of Artificial Sequence: Synthetic oligonucleotide
cuuacaucaaagac

SEQ ID NO: 18665 - RNA, 14 nt, Artificial Sequence
  Description of Artificial Sequence: Synthetic oligonucleotide
ucuuacaucaaaga

SEQ ID NO: 18666 - RNA, 14 nt, Artificial Sequence
  Description of Artificial Sequence: Synthetic oligonucleotide
uucuuacaucaaag

SEQ ID NO: 18667 - RNA, 14 nt, Artificial Sequence
  Description of Artificial Sequence: Synthetic oligonucleotide
guucuuacaucaaa

SEQ ID NO: 18668 - RNA, 14 nt, Artificial Sequence
  Description of Artificial Sequence: Synthetic oligonucleotide
uguucuuacaucaa

SEQ ID NO: 18669 - RNA, 14 nt, Artificial Sequence
  Description of Artificial Sequence: Synthetic oligonucleotide
uuguucuuacauca

SEQ ID NO: 18670 - RNA, 14 nt, Artificial Sequence
  Description of Artificial Sequence: Synthetic oligonucleotide
uuuguucuuacauc

SEQ ID NO: 18671 - RNA, 14 nt, Artificial Sequence
  Description of Artificial Sequence: Synthetic oligonucleotide
cuuuguucuuacau

SEQ ID NO: 18672 - RNA, 14 nt, Artificial Sequence
  Description of Artificial Sequence: Synthetic oligonucleotide
acuuuguucuuaca

SEQ ID NO: 18673 - RNA, 14 nt, Artificial Sequence
  Description of Artificial Sequence: Synthetic oligonucleotide
cacuuuguucuuac

SEQ ID NO: 18674 - RNA, 14 nt, Artificial Sequence
  Description of Artificial Sequence: Synthetic oligonucleotide
acacuuuguucuua

SEQ ID NO: 18675 - RNA, 14 nt, Artificial Sequence
  Description of Artificial Sequence: Synthetic oligonucleotide
cacacuuuguucuu

SEQ ID NO: 18676 - RNA, 14 nt, Artificial Sequence
  Description of Artificial Sequence: Synthetic oligonucleotide
ccacacuuuguucu

SEQ ID NO: 18677 - RNA, 14 nt, Artificial Sequence
  Description of Artificial Sequence: Synthetic oligonucleotide
accacacuuuguuc

SEQ ID NO: 18678 - RNA, 14 nt, Artificial Sequence
  Description of Artificial Sequence: Synthetic oligonucleotide
gaccacacuuuguu

SEQ ID NO: 18679 - RNA, 14 nt, Artificial Sequence
  Description of Artificial Sequence: Synthetic oligonucleotide
agaccacacuuugu

SEQ ID NO: 18680 - RNA, 14 nt, Artificial Sequence
  Description of Artificial Sequence: Synthetic oligonucleotide
uagaccacacuuug

SEQ ID NO: 18681 - RNA, 14 nt, Artificial Sequence
  Description of Artificial Sequence: Synthetic oligonucleotide
auagaccacacuuu

SEQ ID NO: 18682 - RNA, 14 nt, Artificial Sequence
  Description of Artificial Sequence: Synthetic oligonucleotide
uauagaccacacuu

SEQ ID NO: 18683 - RNA, 14 nt, Artificial Sequence
  Description of Artificial Sequence: Synthetic oligonucleotide
guauagaccacacu

SEQ ID NO: 18684 - RNA, 14 nt, Artificial Sequence
  Description of Artificial Sequence: Synthetic oligonucleotide
uguauagaccacac

SEQ ID NO: 18685 - RNA, 14 nt, Artificial Sequence
  Description of Artificial Sequence: Synthetic oligonucleotide
auguauagaccaca

SEQ ID NO: 18686 - RNA, 14 nt, Artificial Sequence
  Description of Artificial Sequence: Synthetic oligonucleotide
gauguauagaccac

SEQ ID NO: 18687 - RNA, 14 nt, Artificial Sequence
  Description of Artificial Sequence: Synthetic oligonucleotide
agauguauagacca

SEQ ID NO: 18688 - RNA, 14 nt, Artificial Sequence
  Description of Artificial Sequence: Synthetic oligonucleotide
uagauguauagacc

SEQ ID NO: 18689 - RNA, 14 nt, Artificial Sequence
  Description of Artificial Sequence: Synthetic oligonucleotide
uuagauguauagac

SEQ ID NO: 18690 - RNA, 14 nt, Artificial Sequence
  Description of Artificial Sequence: Synthetic oligonucleotide
auuagauguauaga

SEQ ID NO: 18691 - RNA, 14 nt, Artificial Sequence
  Description of Artificial Sequence: Synthetic oligonucleotide
uauuagauguauag

SEQ ID NO: 18692 - RNA, 14 nt, Artificial Sequence
  Description of Artificial Sequence: Synthetic oligonucleotide
auauuagauguaua

SEQ ID NO: 18693 - RNA, 14 nt, Artificial Sequence
  Description of Artificial Sequence: Synthetic oligonucleotide
cauauuagauguau

SEQ ID NO: 18694 - RNA, 14 nt, Artificial Sequence
  Description of Artificial Sequence: Synthetic oligonucleotide
ccauauuagaugua

SEQ ID NO: 18695 - RNA, 14 nt, Artificial Sequence
  Description of Artificial Sequence: Synthetic oligonucleotide
gccauauuagaugu

SEQ ID NO: 18696 - RNA, 14 nt, Artificial Sequence
  Description of Artificial Sequence: Synthetic oligonucleotide
ggccauauuagaug

SEQ ID NO: 18697 - RNA, 14 nt, Artificial Sequence
  Description of Artificial Sequence: Synthetic oligonucleotide
aggccauauuagau

SEQ ID NO: 18698 - RNA, 14 nt, Artificial Sequence
  Description of Artificial Sequence: Synthetic oligonucleotide
aaggccauauuaga

SEQ ID NO: 18699 - RNA, 14 nt, Artificial Sequence
  Description of Artificial Sequence: Synthetic oligonucleotide
aaaggccauauuag

SEQ ID NO: 18700 - RNA, 14 nt, Artificial Sequence
  Description of Artificial Sequence: Synthetic oligonucleotide
caaaggccauauua

SEQ ID NO: 18701 - RNA, 14 nt, Artificial Sequence
  Description of Artificial Sequence: Synthetic oligonucleotide
acaaaggccauauu

SEQ ID NO: 18702 - RNA, 14 nt, Artificial Sequence
  Description of Artificial Sequence: Synthetic oligonucleotide
uacaaaggccauau

SEQ ID NO: 18703 - RNA, 14 nt, Artificial Sequence
  Description of Artificial Sequence: Synthetic oligonucleotide
guacaaaggccaua

SEQ ID NO: 18704 - RNA, 14 nt, Artificial Sequence
  Description of Artificial Sequence: Synthetic oligonucleotide
gguacaaaggccau

SEQ ID NO: 18705 - RNA, 14 nt, Artificial Sequence
  Description of Artificial Sequence: Synthetic oligonucleotide
agguacaaaggcca

SEQ ID NO: 18706 - RNA, 14 nt, Artificial Sequence
  Description of Artificial Sequence: Synthetic oligonucleotide
uagguacaaaggcc

SEQ ID NO: 18707 - RNA, 14 nt, Artificial Sequence
  Description of Artificial Sequence: Synthetic oligonucleotide
uuagguacaaaggc

SEQ ID NO: 18708 - RNA, 14 nt, Artificial Sequence
  Description of Artificial Sequence: Synthetic oligonucleotide
guuagguacaaagg

SEQ ID NO: 18709 - RNA, 14 nt, Artificial Sequence
  Description of Artificial Sequence: Synthetic oligonucleotide
gguuagguacaaag

SEQ ID NO: 18710 - RNA, 14 nt, Artificial Sequence
  Description of Artificial Sequence: Synthetic oligonucleotide
ugguuagguacaaa

SEQ ID NO: 18711 - RNA, 14 nt, Artificial Sequence
  Description of Artificial Sequence: Synthetic oligonucleotide
augguuagguacaa

SEQ ID NO: 18712 - RNA, 14 nt, Artificial Sequence
  Description of Artificial Sequence: Synthetic oligonucleotide
caugguuagguaca

SEQ ID NO: 18713 - RNA, 14 nt, Artificial Sequence
  Description of Artificial Sequence: Synthetic oligonucleotide
acaugguuagguac

SEQ ID NO: 18714 - RNA, 14 nt, Artificial Sequence
  Description of Artificial Sequence: Synthetic oligonucleotide
aacaugguuaggua

SEQ ID NO: 18715 - RNA, 14 nt, Artificial Sequence
  Description of Artificial Sequence: Synthetic oligonucleotide
gaacaugguuaggu

SEQ ID NO: 18716 - RNA, 14 nt, Artificial Sequence
  Description of Artificial Sequence: Synthetic oligonucleotide
ugaacaugguuagg

SEQ ID NO: 18717 - RNA, 14 nt, Artificial Sequence
  Description of Artificial Sequence: Synthetic oligonucleotide
augaacaugguuag

SEQ ID NO: 18718 - RNA, 14 nt, Artificial Sequence
  Description of Artificial Sequence: Synthetic oligonucleotide
uaugaacaugguua

SEQ ID NO: 18719 - RNA, 14 nt, Artificial Sequence
  Description of Artificial Sequence: Synthetic oligonucleotide
cuaugaacaugguu

SEQ ID NO: 18720 - RNA, 14 nt, Artificial Sequence
  Description of Artificial Sequence: Synthetic oligonucleotide
ccuaugaacauggu

SEQ ID NO: 18721 - RNA, 14 nt, Artificial Sequence
  Description of Artificial Sequence: Synthetic oligonucleotide
accuaugaacaugg

SEQ ID NO: 18722 - RNA, 14 nt, Artificial Sequence
  Description of Artificial Sequence: Synthetic oligonucleotide
uaccuaugaacaug

SEQ ID NO: 18723 - RNA, 14 nt, Artificial Sequence
  Description of Artificial Sequence: Synthetic oligonucleotide
uuaccuaugaacau

SEQ ID NO: 18724 - RNA, 14 nt, Artificial Sequence
  Description of Artificial Sequence: Synthetic oligonucleotide
auuaccuaugaaca

SEQ ID NO: 18725 - RNA, 14 nt, Artificial Sequence
  Description of Artificial Sequence: Synthetic oligonucleotide
gauuaccuaugaac

SEQ ID NO: 18726 - RNA, 14 nt, Artificial Sequence
  Description of Artificial Sequence: Synthetic oligonucleotide
agauuaccuaugaa

SEQ ID NO: 18727 - RNA, 14 nt, Artificial Sequence
  Description of Artificial Sequence: Synthetic oligonucleotide
aagauuaccuauga

SEQ ID NO: 18728 - RNA, 14 nt, Artificial Sequence
  Description of Artificial Sequence: Synthetic oligonucleotide
aaagauuaccuaug

SEQ ID NO: 18729 - RNA, 14 nt, Artificial Sequence
  Description of Artificial Sequence: Synthetic oligonucleotide
caaagauuaccuau

SEQ ID NO: 18730 - RNA, 14 nt, Artificial Sequence
  Description of Artificial Sequence: Synthetic oligonucleotide
acaaagauuaccua

SEQ ID NO: 18731 - RNA, 14 nt, Artificial Sequence
  Description of Artificial Sequence: Synthetic oligonucleotide
uacaaagauuaccu

SEQ ID NO: 18732 - RNA, 14 nt, Artificial Sequence
  Description of Artificial Sequence: Synthetic oligonucleotide
guacaaagauuacc

SEQ ID NO: 18733 - RNA, 14 nt, Artificial Sequence
  Description of Artificial Sequence: Synthetic oligonucleotide
aguacaaagauuac

SEQ ID NO: 18734 - RNA, 14 nt, Artificial Sequence
  Description of Artificial Sequence: Synthetic oligonucleotide
gaguacaaagauua

SEQ ID NO: 18735 - RNA, 14 nt, Artificial Sequence
  Description of Artificial Sequence: Synthetic oligonucleotide
agaguacaaagauu

SEQ ID NO: 18736 - RNA, 14 nt, Artificial Sequence
  Description of Artificial Sequence: Synthetic oligonucleotide
cagaguacaaagau

SEQ ID NO: 18737 - RNA, 14 nt, Artificial Sequence
  Description of Artificial Sequence: Synthetic oligonucleotide
acagaguacaaaga

SEQ ID NO: 18738 - RNA, 14 nt, Artificial Sequence
  Description of Artificial Sequence: Synthetic oligonucleotide
cacagaguacaaag

SEQ ID NO: 18739 - RNA, 14 nt, Artificial Sequence
  Description of Artificial Sequence: Synthetic oligonucleotide
acacagaguacaaa

SEQ ID NO: 18740 - RNA, 14 nt, Artificial Sequence
  Description of Artificial Sequence: Synthetic oligonucleotide
cacacagaguacaa

SEQ ID NO: 18741 - RNA, 14 nt, Artificial Sequence
  Description of Artificial Sequence: Synthetic oligonucleotide
gcacacagaguaca

SEQ ID NO: 18742 - RNA, 14 nt, Artificial Sequence
  Description of Artificial Sequence: Synthetic oligonucleotide
ugcacacagaguac

SEQ ID NO: 18743 - RNA, 14 nt, Artificial Sequence
  Description of Artificial Sequence: Synthetic oligonucleotide
cugcacacagagua

SEQ ID NO: 18744 - RNA, 14 nt, Artificial Sequence
  Description of Artificial Sequence: Synthetic oligonucleotide
gcugcacacagagu

SEQ ID NO: 18745 - RNA, 14 nt, Artificial Sequence
  Description of Artificial Sequence: Synthetic oligonucleotide
ugcugcacacagag

SEQ ID NO: 18746 - RNA, 14 nt, Artificial Sequence
  Description of Artificial Sequence: Synthetic oligonucleotide
cugcugcacacaga

SEQ ID NO: 18747 - RNA, 14 nt, Artificial Sequence
  Description of Artificial Sequence: Synthetic oligonucleotide
acugcugcacacag

SEQ ID NO: 18748 - RNA, 14 nt, Artificial Sequence
  Description of Artificial Sequence: Synthetic oligonucleotide
uacugcugcacaca

SEQ ID NO: 18749 - RNA, 14 nt, Artificial Sequence
  Description of Artificial Sequence: Synthetic oligonucleotide
auacugcugcacac

SEQ ID NO: 18750 - RNA, 14 nt, Artificial Sequence
  Description of Artificial Sequence: Synthetic oligonucleotide
aauacugcugcaca

SEQ ID NO: 18751 - RNA, 14 nt, Artificial Sequence
  Description of Artificial Sequence: Synthetic oligonucleotide
aaauacugcugcac

SEQ ID NO: 18752 - RNA, 14 nt, Artificial Sequence
  Description of Artificial Sequence: Synthetic oligonucleotide
caaauacugcugca

SEQ ID NO: 18753 - RNA, 14 nt, Artificial Sequence
  Description of Artificial Sequence: Synthetic oligonucleotide
ccaaauacugcugc

SEQ ID NO: 18754 - RNA, 14 nt, Artificial Sequence
  Description of Artificial Sequence: Synthetic oligonucleotide
accaaauacugcug

SEQ ID NO: 18755 - RNA, 14 nt, Artificial Sequence
  Description of Artificial Sequence: Synthetic oligonucleotide
aaccaaauacugcu

SEQ ID NO: 18756 - RNA, 14 nt, Artificial Sequence
  Description of Artificial Sequence: Synthetic oligonucleotide
aaaccaaauacugc

SEQ ID NO: 18757 - RNA, 14 nt, Artificial Sequence
  Description of Artificial Sequence: Synthetic oligonucleotide
caaaccaaauacug

SEQ ID NO: 18758 - RNA, 14 nt, Artificial Sequence
  Description of Artificial Sequence: Synthetic oligonucleotide
gcaaaccaaauacu

SEQ ID NO: 18759 - RNA, 14 nt, Artificial Sequence
  Description of Artificial Sequence: Synthetic oligonucleotide
ugcaaaccaaauac

SEQ ID NO: 18760 - RNA, 14 nt, Artificial Sequence
  Description of Artificial Sequence: Synthetic oligonucleotide
augcaaaccaaaua

SEQ ID NO: 18761 - RNA, 14 nt, Artificial Sequence
  Description of Artificial Sequence: Synthetic oligonucleotide
aaugcaaaccaaau

SEQ ID NO: 18762 - RNA, 14 nt, Artificial Sequence
  Description of Artificial Sequence: Synthetic oligonucleotide
aaaugcaaaccaaa

SEQ ID NO: 18763 - RNA, 14 nt, Artificial Sequence
  Description of Artificial Sequence: Synthetic oligonucleotide
uaaaugcaaaccaa

SEQ ID NO: 18764 - RNA, 14 nt, Artificial Sequence
  Description of Artificial Sequence: Synthetic oligonucleotide
uuaaaugcaaacca

SEQ ID NO: 18765 - RNA, 14 nt, Artificial Sequence
  Description of Artificial Sequence: Synthetic oligonucleotide
uuuaaaugcaaacc

SEQ ID NO: 18766 - RNA, 14 nt, Artificial Sequence
  Description of Artificial Sequence: Synthetic oligonucleotide
cuuuaaaugcaaac

SEQ ID NO: 18767 - RNA, 14 nt, Artificial Sequence
  Description of Artificial Sequence: Synthetic oligonucleotide
acuuuaaaugcaaa

SEQ ID NO: 18768 - RNA, 14 nt, Artificial Sequence
  Description of Artificial Sequence: Synthetic oligonucleotide
cacuuuaaaugcaa

SEQ ID NO: 18769 - RNA, 14 nt, Artificial Sequence
  Description of Artificial Sequence: Synthetic oligonucleotide
ucacuuuaaaugca

SEQ ID NO: 18770 - RNA, 14 nt, Artificial Sequence
  Description of Artificial Sequence: Synthetic oligonucleotide
uucacuuuaaaugc

SEQ ID NO: 18771 - RNA, 14 nt, Artificial Sequence
  Description of Artificial Sequence: Synthetic oligonucleotide
uuucacuuuaaaug

SEQ ID NO: 18772 - RNA, 14 nt, Artificial Sequence
  Description of Artificial Sequence: Synthetic oligonucleotide
uuuucacuuuaaau

SEQ ID NO: 18773 - RNA, 14 nt, Artificial Sequence
  Description of Artificial Sequence: Synthetic oligonucleotide
auuuucacuuuaaa

SEQ ID NO: 18774 - RNA, 14 nt, Artificial Sequence
  Description of Artificial Sequence: Synthetic oligonucleotide
uauuuucacuuuaa

SEQ ID NO: 18775 - RNA, 14 nt, Artificial Sequence
  Description of Artificial Sequence: Synthetic oligonucleotide
uuauuuucacuuua

SEQ ID NO: 18776 - RNA, 14 nt, Artificial Sequence
  Description of Artificial Sequence: Synthetic oligonucleotide
guuauuuucacuuu

SEQ ID NO: 18777 - RNA, 14 nt, Artificial Sequence
  Description of Artificial Sequence: Synthetic oligonucleotide
cguuauuuucacuu

SEQ ID NO: 18778 - RNA, 14 nt, Artificial Sequence
  Description of Artificial Sequence: Synthetic oligonucleotide
ccguuauuuucacu

SEQ ID NO: 18779 - RNA, 14 nt, Artificial Sequence
  Description of Artificial Sequence: Synthetic oligonucleotide
gccguuauuuucac

SEQ ID NO: 18780 - RNA, 14 nt, Artificial Sequence
  Description of Artificial Sequence: Synthetic oligonucleotide
agccguuauuuuca

SEQ ID NO: 18781 - RNA, 14 nt, Artificial Sequence
  Description of Artificial Sequence: Synthetic oligonucleotide
cagccguuauuuuc

SEQ ID NO: 18782 - RNA, 14 nt, Artificial Sequence
  Description of Artificial Sequence: Synthetic oligonucleotide
acagccguuauuuu

SEQ ID NO: 18783 - RNA, 14 nt, Artificial Sequence
  Description of Artificial Sequence: Synthetic oligonucleotide
aacagccguuauuu

SEQ ID NO: 18784 - RNA, 14 nt, Artificial Sequence
  Description of Artificial Sequence: Synthetic oligonucleotide
uaacagccguuauu

SEQ ID NO: 18785 - RNA, 14 nt, Artificial Sequence
  Description of Artificial Sequence: Synthetic oligonucleotide
auaacagccguuau

SEQ ID NO: 18786 - RNA, 14 nt, Artificial Sequence
  Description of Artificial Sequence: Synthetic oligonucleotide
aauaacagccguua

SEQ ID NO: 18787 - RNA, 14 nt, Artificial Sequence
  Description of Artificial Sequence: Synthetic oligonucleotide
aaauaacagccguu

SEQ ID NO: 18788 - RNA, 14 nt, Artificial Sequence
  Description of Artificial Sequence: Synthetic oligonucleotide
aaaauaacagccgu

SEQ ID NO: 18789 - RNA, 14 nt, Artificial Sequence
  Description of Artificial Sequence: Synthetic oligonucleotide
aaaaauaacagccg

SEQ ID NO: 18790 - RNA, 14 nt, Artificial Sequence
  Description of Artificial Sequence: Synthetic oligonucleotide
gaaaaauaacagcc

SEQ ID NO: 18791 - RNA, 14 nt, Artificial Sequence
  Description of Artificial Sequence: Synthetic oligonucleotide
agaaaaauaacagc

SEQ ID NO: 18792 - RNA, 14 nt, Artificial Sequence
  Description of Artificial Sequence: Synthetic oligonucleotide
cagaaaaauaacag

SEQ ID NO: 18793 - RNA, 14 nt, Artificial Sequence
  Description of Artificial Sequence: Synthetic oligonucleotide
ccagaaaaauaaca

SEQ ID NO: 18794 - RNA, 14 nt, Artificial Sequence
  Description of Artificial Sequence: Synthetic oligonucleotide
gccagaaaaauaac

SEQ ID NO: 18795 - RNA, 14 nt, Artificial Sequence
  Description of Artificial Sequence: Synthetic oligonucleotide
ugccagaaaaauaa

SEQ ID NO: 18796 - RNA, 14 nt, Artificial Sequence
  Description of Artificial Sequence: Synthetic oligonucleotide
augccagaaaaaua

SEQ ID NO: 18797 - RNA, 14 nt, Artificial Sequence
  Description of Artificial Sequence: Synthetic oligonucleotide
aaugccagaaaaau

SEQ ID NO: 18798 - RNA, 14 nt, Artificial Sequence
  Description of Artificial Sequence: Synthetic oligonucleotide
uaaugccagaaaaa

SEQ ID NO: 18799 - RNA, 14 nt, Artificial Sequence
  Description of Artificial Sequence: Synthetic oligonucleotide
guaaugccagaaaa

SEQ ID NO: 18800 - RNA, 14 nt, Artificial Sequence
  Description of Artificial Sequence: Synthetic oligonucleotide
aguaaugccagaaa

SEQ ID NO: 18801 - RNA, 14 nt, Artificial Sequence
  Description of Artificial Sequence: Synthetic oligonucleotide
uaguaaugccagaa

SEQ ID NO: 18802 - RNA, 14 nt, Artificial Sequence
  Description of Artificial Sequence: Synthetic oligonucleotide
uuaguaaugccaga

SEQ ID NO: 18803 - RNA, 14 nt, Artificial Sequence
  Description of Artificial Sequence: Synthetic oligonucleotide
cuuaguaaugccag

SEQ ID NO: 18804 - RNA, 14 nt, Artificial Sequence
  Description of Artificial Sequence: Synthetic oligonucleotide
ucuuaguaaugcca

SEQ ID NO: 18805 - RNA, 14 nt, Artificial Sequence
  Description of Artificial Sequence: Synthetic oligonucleotide
aucuuaguaaugcc

SEQ ID NO: 18806 - RNA, 14 nt, Artificial Sequence
  Description of Artificial Sequence: Synthetic oligonucleotide
uaucuuaguaaugc

SEQ ID NO: 18807 - RNA, 14 nt, Artificial Sequence
  Description of Artificial Sequence: Synthetic oligonucleotide
uuaucuuaguaaug

SEQ ID NO: 18808 - RNA, 14 nt, Artificial Sequence
  Description of Artificial Sequence: Synthetic oligonucleotide
uuuaucuuaguaau

SEQ ID NO: 18809 - RNA, 14 nt, Artificial Sequence
  Description of Artificial Sequence: Synthetic oligonucleotide
guuuaucuuaguaa

SEQ ID NO: 18810 - RNA, 14 nt, Artificial Sequence
  Description of Artificial Sequence: Synthetic oligonucleotide
aguuuaucuuagua

SEQ ID NO: 18811 - RNA, 14 nt, Artificial Sequence
  Description of Artificial Sequence: Synthetic oligonucleotide
caguuuaucuuagu

SEQ ID NO: 18812 - RNA, 14 nt, Artificial Sequence
  Description of Artificial Sequence: Synthetic oligonucleotide
ucaguuuaucuuag

SEQ ID NO: 18813 - RNA, 14 nt, Artificial Sequence
  Description of Artificial Sequence: Synthetic oligonucleotide
uucaguuuaucuua

SEQ ID NO: 18814 - RNA, 14 nt, Artificial Sequence
  Description of Artificial Sequence: Synthetic oligonucleotide
uuucaguuuaucuu

SEQ ID NO: 18815 - RNA, 14 nt, Artificial Sequence
  Description of Artificial Sequence: Synthetic oligonucleotide
uuuucaguuuaucu

SEQ ID NO: 18816 - RNA, 14 nt, Artificial Sequence
  Description of Artificial Sequence: Synthetic oligonucleotide
uuuuucaguuuauc

SEQ ID NO: 18817 - RNA, 14 nt, Artificial Sequence
  Description of Artificial Sequence: Synthetic oligonucleotide
auuuuucaguuuau

SEQ ID NO: 18818 - RNA, 14 nt, Artificial Sequence
  Description of Artificial Sequence: Synthetic oligonucleotide
uauuuuucaguuua

SEQ ID NO: 18819 - RNA, 14 nt, Artificial Sequence
  Description of Artificial Sequence: Synthetic oligonucleotide
uuauuuuucaguuu

SEQ ID NO: 18820 - RNA, 14 nt, Artificial Sequence
  Description of Artificial Sequence: Synthetic oligonucleotide
auuauuuuucaguu

SEQ ID NO: 18821 - RNA, 14 nt, Artificial Sequence
  Description of Artificial Sequence: Synthetic oligonucleotide
uauuauuuuucagu

SEQ ID NO: 18822 - RNA, 14 nt, Artificial Sequence
  Description of Artificial Sequence: Synthetic oligonucleotide
uuauuauuuuucag

SEQ ID NO: 18823 - RNA, 14 nt, Artificial Sequence
  Description of Artificial Sequence: Synthetic oligonucleotide
uuuauuauuuuuca

SEQ ID NO: 18824 - RNA, 14 nt, Artificial Sequence
  Description of Artificial Sequence: Synthetic oligonucleotide
cuuuauuauuuuuc

SEQ ID NO: 18825 - RNA, 14 nt, Artificial Sequence
  Description of Artificial Sequence: Synthetic oligonucleotide
ucuuuauuauuuuu

SEQ ID NO: 18826 - RNA, 14 nt, Artificial Sequence
  Description of Artificial Sequence: Synthetic oligonucleotide
uucuuuauuauuuu

SEQ ID NO: 18827 - RNA, 14 nt, Artificial Sequence
  Description of Artificial Sequence: Synthetic oligonucleotide
uuucuuuauuauuu

SEQ ID NO: 18828 - RNA, 14 nt, Artificial Sequence
  Description of Artificial Sequence: Synthetic oligonucleotide
uuuucuuuauuauu

SEQ ID NO: 18829 - RNA, 14 nt, Artificial Sequence
  Description of Artificial Sequence: Synthetic oligonucleotide
uuuuucuuuauuau

SEQ ID NO: 18830 - RNA, 14 nt, Artificial Sequence
  Description of Artificial Sequence: Synthetic oligonucleotide
auuuuucuuuauua

SEQ ID NO: 18831 - RNA, 14 nt, Artificial Sequence
  Description of Artificial Sequence: Synthetic oligonucleotide
cauuuuucuuuauu

SEQ ID NO: 18832 - RNA, 14 nt, Artificial Sequence
  Description of Artificial Sequence: Synthetic oligonucleotide
gcauuuuucuuuau

SEQ ID NO: 18833 - RNA, 14 nt, Artificial Sequence
  Description of Artificial Sequence: Synthetic oligonucleotide
ggcauuuuucuuua

SEQ ID NO: 18834 - RNA, 14 nt, Artificial Sequence
  Description of Artificial Sequence: Synthetic oligonucleotide
aggcauuuuucuuu

SEQ ID NO: 18835 - RNA, 14 nt, Artificial Sequence
  Description of Artificial Sequence: Synthetic oligonucleotide
aaggcauuuuucuu

SEQ ID NO: 18836 - RNA, 14 nt, Artificial Sequence
  Description of Artificial Sequence: Synthetic oligonucleotide
uaaggcauuuuucu

SEQ ID NO: 18837 - RNA, 14 nt, Artificial Sequence
  Description of Artificial Sequence: Synthetic oligonucleotide
guaaggcauuuuuc

SEQ ID NO: 18838 - RNA, 14 nt, Artificial Sequence
  Description of Artificial Sequence: Synthetic oligonucleotide
uguaaggcauuuuu

SEQ ID NO: 18839 - RNA, 14 nt, Artificial Sequence
  Description of Artificial Sequence: Synthetic oligonucleotide
auguaaggcauuuu

SEQ ID NO: 18840 - RNA, 14 nt, Artificial Sequence
  Description of Artificial Sequence: Synthetic oligonucleotide
uauguaaggcauuu

SEQ ID NO: 18841 - RNA, 14 nt, Artificial Sequence
  Description of Artificial Sequence: Synthetic oligonucleotide
cuauguaaggcauu

SEQ ID NO: 18842 - RNA, 14 nt, Artificial Sequence
  Description of Artificial Sequence: Synthetic oligonucleotide
gcuauguaaggcau

SEQ ID NO: 18843 - RNA, 14 nt, Artificial Sequence
  Description of Artificial Sequence: Synthetic oligonucleotide
ggcuauguaaggca

SEQ ID NO: 18844 - RNA, 14 nt, Artificial Sequence
  Description of Artificial Sequence: Synthetic oligonucleotide
gggcuauguaaggc

SEQ ID NO: 18845 - RNA, 14 nt, Artificial Sequence
  Description of Artificial Sequence: Synthetic oligonucleotide
ugggcuauguaagg

SEQ ID NO: 18846 - RNA, 14 nt, Artificial Sequence
  Description of Artificial Sequence: Synthetic oligonucleotide
gugggcuauguaag

SEQ ID NO: 18847 - RNA, 14 nt, Artificial Sequence
  Description of Artificial Sequence: Synthetic oligonucleotide
ugugggcuauguaa

SEQ ID NO: 18848-20000 - skipped (1153 entries)

SEQ ID NO: 20001 - DNA, 14 bp, Artificial Sequence
  Description of Artificial Sequence: Synthetic oligonucleotide
gctggcccgcttct

SEQ ID NO: 20002 - DNA, 14 bp, Artificial Sequence
  Description of Artificial Sequence: Synthetic oligonucleotide
cgctggcccgcttc

SEQ ID NO: 20003 - DNA, 14 bp, Artificial Sequence
  Description of Artificial Sequence: Synthetic oligonucleotide
gcgctggcccgctt

SEQ ID NO: 20004 - DNA, 14 bp, Artificial Sequence
  Description of Artificial Sequence: Synthetic oligonucleotide
ggcgctggcccgct

SEQ ID NO: 20005 - DNA, 14 bp, Artificial Sequence
  Description of Artificial Sequence: Synthetic oligonucleotide
cggcgctggcccgc

SEQ ID NO: 20006 - DNA, 14 bp, Artificial Sequence
  Description of Artificial Sequence: Synthetic oligonucleotide
gcggcgctggcccg

SEQ ID NO: 20007 - DNA, 14 bp, Artificial Sequence
  Description of Artificial Sequence: Synthetic oligonucleotide
ggcggcgctggccc

SEQ ID NO: 20008 - DNA, 14 bp, Artificial Sequence
  Description of Artificial Sequence: Synthetic oligonucleotide
cggcggcgctggcc

SEQ ID NO: 20009 - DNA, 14 bp, Artificial Sequence
  Description of Artificial Sequence: Synthetic oligonucleotide
ccggcggcgctggc

SEQ ID NO: 20010 - DNA, 14 bp, Artificial Sequence
  Description of Artificial Sequence: Synthetic oligonucleotide
cccggcggcgctgg

SEQ ID NO: 20011 - DNA, 14 bp, Artificial Sequence
  Description of Artificial Sequence: Synthetic oligonucleotide
tcccggcggcgctg

SEQ ID NO: 20012 - DNA, 14 bp, Artificial Sequence
  Description of Artificial Sequence: Synthetic oligonucleotide
ttcccggcggcgct

SEQ ID NO: 20013 - DNA, 14 bp, Artificial Sequence
  Description of Artificial Sequence: Synthetic oligonucleotide
tttcccggcggcgc

SEQ ID NO: 20014 - DNA, 14 bp, Artificial Sequence
  Description of Artificial Sequence: Synthetic oligonucleotide
ctttcccggcggcg

SEQ ID NO: 20015 - DNA, 14 bp, Artificial Sequence
  Description of Artificial Sequence: Synthetic oligonucleotide
cctttcccggcggc

SEQ ID NO: 20016 - DNA, 14 bp, Artificial Sequence
  Description of Artificial Sequence: Synthetic oligonucleotide
tcctttcccggcgg

SEQ ID NO: 20017 - DNA, 14 bp, Artificial Sequence
  Description of Artificial Sequence: Synthetic oligonucleotide
ctcctttcccggcg

SEQ ID NO: 20018 - DNA, 14 bp, Artificial Sequence
  Description of Artificial Sequence: Synthetic oligonucleotide
cctcctttcccggc

SEQ ID NO: 20019 - DNA, 14 bp, Artificial Sequence
  Description of Artificial Sequence: Synthetic oligonucleotide
acctcctttcccgg

SEQ ID NO: 20020 - DNA, 14 bp, Artificial Sequence
  Description of Artificial Sequence: Synthetic oligonucleotide
gacctcctttcccg

SEQ ID NO: 20021 - DNA, 14 bp, Artificial Sequence
  Description of Artificial Sequence: Synthetic oligonucleotide
cgacctcctttccc

SEQ ID NO: 20022 - DNA, 14 bp, Artificial Sequence
  Description of Artificial Sequence: Synthetic oligonucleotide
gcgacctcctttcc

SEQ ID NO: 20023 - DNA, 14 bp, Artificial Sequence
  Description of Artificial Sequence: Synthetic oligonucleotide
ggcgacctcctttc

SEQ ID NO: 20024 - DNA, 14 bp, Artificial Sequence
  Description of Artificial Sequence: Synthetic oligonucleotide
cggcgacctccttt

SEQ ID NO: 20025 - DNA, 14 bp, Artificial Sequence
  Description of Artificial Sequence: Synthetic oligonucleotide
gcggcgacctcctt

SEQ ID NO: 20026 - DNA, 14 bp, Artificial Sequence
  Description of Artificial Sequence: Synthetic oligonucleotide
ggcggcgacctcct

SEQ ID NO: 20027 - DNA, 14 bp, Artificial Sequence
  Description of Artificial Sequence: Synthetic oligonucleotide
gggcggcgacctcc

SEQ ID NO: 20028 - DNA, 14 bp, Artificial Sequence
  Description of Artificial Sequence: Synthetic oligonucleotide
cgggcggcgacctc

SEQ ID NO: 20029 - DNA, 14 bp, Artificial Sequence
  Description of Artificial Sequence: Synthetic oligonucleotide
ccgggcggcgacct

SEQ ID NO: 20030 - DNA, 14 bp, Artificial Sequence
  Description of Artificial Sequence: Synthetic oligonucleotide
cccgggcggcgacc

SEQ ID NO: 20031 - DNA, 14 bp, Artificial Sequence
  Description of Artificial Sequence: Synthetic oligonucleotide
ccccgggcggcgac

SEQ ID NO: 20032 - DNA, 14 bp, Artificial Sequence
  Description of Artificial Sequence: Synthetic oligonucleotide
accccgggcggcga

SEQ ID NO: 20033 - DNA, 14 bp, Artificial Sequence
  Description of Artificial Sequence: Synthetic oligonucleotide
gaccccgggcggcg

SEQ ID NO: 20034 - DNA, 14 bp, Artificial Sequence
  Description of Artificial Sequence: Synthetic oligonucleotide
cgaccccgggcggc

SEQ ID NO: 20035 - DNA, 14 bp, Artificial Sequence
  Description of Artificial Sequence: Synthetic oligonucleotide
gcgaccccgggcgg

SEQ ID NO: 20036 - DNA, 14 bp, Artificial Sequence
  Description of Artificial Sequence: Synthetic oligonucleotide
ggcgaccccgggcg

SEQ ID NO: 20037 - DNA, 14 bp, Artificial Sequence
  Description of Artificial Sequence: Synthetic oligonucleotide
gggcgaccccgggc

SEQ ID NO: 20038 - DNA, 14 bp, Artificial Sequence
  Description of Artificial Sequence: Synthetic oligonucleotide
cgggcgaccccggg

SEQ ID NO: 20039 - DNA, 14 bp, Artificial Sequence
  Description of Artificial Sequence: Synthetic oligonucleotide
ccgggcgaccccgg

SEQ ID NO: 20040 - DNA, 14 bp, Artificial Sequence
  Description of Artificial Sequence: Synthetic oligonucleotide
cccgggcgaccccg

SEQ ID NO: 20041 - DNA, 14 bp, Artificial Sequence
  Description of Artificial Sequence: Synthetic oligonucleotide
gcccgggcgacccc

SEQ ID NO: 20042 - DNA, 14 bp, Artificial Sequence
  Description of Artificial Sequence: Synthetic oligonucleotide
agcccgggcgaccc

SEQ ID NO: 20043 - DNA, 14 bp, Artificial Sequence
  Description of Artificial Sequence: Synthetic oligonucleotide
aagcccgggcgacc

SEQ ID NO: 20044 - DNA, 14 bp, Artificial Sequence
  Description of Artificial Sequence: Synthetic oligonucleotide
caagcccgggcgac

SEQ ID NO: 20045 - DNA, 14 bp, Artificial Sequence
  Description of Artificial Sequence: Synthetic oligonucleotide
gcaagcccgggcga

SEQ ID NO: 20046 - DNA, 14 bp, Artificial Sequence
  Description of Artificial Sequence: Synthetic oligonucleotide
cgcaagcccgggcg

SEQ ID NO: 20047 - DNA, 14 bp, Artificial Sequence
  Description of Artificial Sequence: Synthetic oligonucleotide
ccgcaagcccgggc

SEQ ID NO: 20048 - DNA, 14 bp, Artificial Sequence
  Description of Artificial Sequence: Synthetic oligonucleotide
cccgcaagcccggg

SEQ ID NO: 20049 - DNA, 14 bp, Artificial Sequence
  Description of Artificial Sequence: Synthetic oligonucleotide
acccgcaagcccgg

SEQ ID NO: 20050 - DNA, 14 bp, Artificial Sequence
  Description of Artificial Sequence: Synthetic oligonucleotide
gacccgcaagcccg

SEQ ID NO: 20051 - DNA, 14 bp, Artificial Sequence
  Description of Artificial Sequence: Synthetic oligonucleotide
cgacccgcaagccc

SEQ ID NO: 20052 - DNA, 14 bp, Artificial Sequence
  Description of Artificial Sequence: Synthetic oligonucleotide
gcgacccgcaagcc

SEQ ID NO: 20053 - DNA, 14 bp, Artificial Sequence
  Description of Artificial Sequence: Synthetic oligonucleotide
ggcgacccgcaagc

SEQ ID NO: 20054 - DNA, 14 bp, Artificial Sequence
  Description of Artificial Sequence: Synthetic oligonucleotide
cggcgacccgcaag

SEQ ID NO: 20055 - DNA, 14 bp, Artificial Sequence
  Description of Artificial Sequence: Synthetic oligonucleotide
gcggcgacccgcaa

SEQ ID NO: 20056 - DNA, 14 bp, Artificial Sequence
  Description of Artificial Sequence: Synthetic oligonucleotide
cgcggcgacccgca

SEQ ID NO: 20057 - DNA, 14 bp, Artificial Sequence
  Description of Artificial Sequence: Synthetic oligonucleotide
gcgcggcgacccgc

SEQ ID NO: 20058 - DNA, 14 bp, Artificial Sequence
  Description of Artificial Sequence: Synthetic oligonucleotide
agcgcggcgacccg

SEQ ID NO: 20059 - DNA, 14 bp, Artificial Sequence
  Description of Artificial Sequence: Synthetic oligonucleotide
aagcgcggcgaccc

SEQ ID NO: 20060 - DNA, 14 bp, Artificial Sequence
  Description of Artificial Sequence: Synthetic oligonucleotide
gaagcgcggcgacc

SEQ ID NO: 20061 - DNA, 14 bp, Artificial Sequence
  Description of Artificial Sequence: Synthetic oligonucleotide
ggaagcgcggcgac

SEQ ID NO: 20062 - DNA, 14 bp, Artificial Sequence
  Description of Artificial Sequence: Synthetic oligonucleotide
aggaagcgcggcga

SEQ ID NO: 20063 - DNA, 14 bp, Artificial Sequence
  Description of Artificial Sequence: Synthetic oligonucleotide
gaggaagcgcggcg

SEQ ID NO: 20064 - DNA, 14 bp, Artificial Sequence
  Description of Artificial Sequence: Synthetic oligonucleotide
agaggaagcgcggc

SEQ ID NO: 20065 - DNA, 14 bp, Artificial Sequence
  Description of Artificial Sequence: Synthetic oligonucleotide
cagaggaagcgcgg

SEQ ID NO: 20066 - DNA, 14 bp, Artificial Sequence
  Description of Artificial Sequence: Synthetic oligonucleotide
gcagaggaagcgcg

SEQ ID NO: 20067 - DNA, 14 bp, Artificial Sequence
  Description of Artificial Sequence: Synthetic oligonucleotide
cgcagaggaagcgc

SEQ ID NO: 20068 - DNA, 14 bp, Artificial Sequence
  Description of Artificial Sequence: Synthetic oligonucleotide
ccgcagaggaagcg

SEQ ID NO: 20069 - DNA, 14 bp, Artificial Sequence
  Description of Artificial Sequence: Synthetic oligonucleotide
cccgcagaggaagc

SEQ ID NO: 20070 - DNA, 14 bp, Artificial Sequence
  Description of Artificial Sequence: Synthetic oligonucleotide
gcccgcagaggaag

SEQ ID NO: 20071 - DNA, 14 bp, Artificial Sequence
  Description of Artificial Sequence: Synthetic oligonucleotide
cgcccgcagaggaa

SEQ ID NO: 20072 - DNA, 14 bp, Artificial Sequence
  Description of Artificial Sequence: Synthetic oligonucleotide
gcgcccgcagagga

SEQ ID NO: 20073 - DNA, 14 bp, Artificial Sequence
  Description of Artificial Sequence: Synthetic oligonucleotide
agcgcccgcagagg

SEQ ID NO: 20074 - DNA, 14 bp, Artificial Sequence
  Description of Artificial Sequence: Synthetic oligonucleotide
cagcgcccgcagag

SEQ ID NO: 20075 - DNA, 14 bp, Artificial Sequence
  Description of Artificial Sequence: Synthetic oligonucleotide
gcagcgcccgcaga

SEQ ID NO: 20076 - DNA, 14 bp, Artificial Sequence
  Description of Artificial Sequence: Synthetic oligonucleotide
cgcagcgcccgcag

SEQ ID NO: 20077 - DNA, 14 bp, Artificial Sequence
  Description of Artificial Sequence: Synthetic oligonucleotide
ccgcagcgcccgca

SEQ ID NO: 20078 - DNA, 14 bp, Artificial Sequence
  Description of Artificial Sequence: Synthetic oligonucleotide
cccgcagcgcccgc

SEQ ID NO: 20079 - DNA, 14 bp, Artificial Sequence
  Description of Artificial Sequence: Synthetic oligonucleotide
tcccgcagcgcccg

SEQ ID NO: 20080 - DNA, 14 bp, Artificial Sequence
  Description of Artificial Sequence: Synthetic oligonucleotide
ctcccgcagcgccc

SEQ ID NO: 20081 - DNA, 14 bp, Artificial Sequence
  Description of Artificial Sequence: Synthetic oligonucleotide
cctcccgcagcgcc

SEQ ID NO: 20082 - DNA, 14 bp, Artificial Sequence
  Description of Artificial Sequence: Synthetic oligonucleotide
gcctcccgcagcgc

SEQ ID NO: 20083 - DNA, 14 bp, Artificial Sequence
  Description of Artificial Sequence: Synthetic oligonucleotide
cgcctcccgcagcg

SEQ ID NO: 20084 - DNA, 14 bp, Artificial Sequence
  Description of Artificial Sequence: Synthetic oligonucleotide
tcgcctcccgcagc

SEQ ID NO: 20085 - DNA, 14 bp, Artificial Sequence
  Description of Artificial Sequence: Synthetic oligonucleotide
ctcgcctcccgcag

SEQ ID NO: 20086 - DNA, 14 bp, Artificial Sequence
  Description of Artificial Sequence: Synthetic oligonucleotide
cctcgcctcccgca

SEQ ID NO: 20087 - DNA, 14 bp, Artificial Sequence
  Description of Artificial Sequence: Synthetic oligonucleotide
ccctcgcctcccgc

SEQ ID NO: 20088 - DNA, 14 bp, Artificial Sequence
  Description of Artificial Sequence: Synthetic oligonucleotide
gccctcgcctcccg

SEQ ID NO: 20089 - DNA, 14 bp, Artificial Sequence
  Description of Artificial Sequence: Synthetic oligonucleotide
ggccctcgcctccc

SEQ ID NO: 20090 - DNA, 14 bp, Artificial Sequence
  Description of Artificial Sequence: Synthetic oligonucleotide
cggccctcgcctcc

SEQ ID NO: 20091 - DNA, 14 bp, Artificial Sequence
  Description of Artificial Sequence: Synthetic oligonucleotide
gcggccctcgcctc

SEQ ID NO: 20092 - DNA, 14 bp, Artificial Sequence
  Description of Artificial Sequence: Synthetic oligonucleotide
ggcggccctcgcct

SEQ ID NO: 20093 - DNA, 14 bp, Artificial Sequence
  Description of Artificial Sequence: Synthetic oligonucleotide
aggcggccctcgcc

SEQ ID NO: 20094 - DNA, 14 bp, Artificial Sequence
  Description of Artificial Sequence: Synthetic oligonucleotide
gaggcggccctcgc

SEQ ID NO: 20095 - DNA, 14 bp, Artificial Sequence
  Description of Artificial Sequence: Synthetic oligonucleotide
cgaggcggccctcg

SEQ ID NO: 20096 - DNA, 14 bp, Artificial Sequence
  Description of Artificial Sequence: Synthetic oligonucleotide
ccgaggcggccctc

SEQ ID NO: 20097 - DNA, 14 bp, Artificial Sequence
  Description of Artificial Sequence: Synthetic oligonucleotide
gccgaggcggccct

SEQ ID NO: 20098 - DNA, 14 bp, Artificial Sequence
  Description of Artificial Sequence: Synthetic oligonucleotide
cgccgaggcggccc

SEQ ID NO: 20099 - DNA, 14 bp, Artificial Sequence
  Description of Artificial Sequence: Synthetic oligonucleotide
ccgccgaggcggcc

SEQ ID NO: 20100 - DNA, 14 bp, Artificial Sequence
  Description of Artificial Sequence: Synthetic oligonucleotide
tccgccgaggcggc

SEQ ID NO: 20101 - DNA, 14 bp, Artificial Sequence
  Description of Artificial Sequence: Synthetic oligonucleotide
ctccgccgaggcgg

SEQ ID NO: 20102 - DNA, 14 bp, Artificial Sequence
  Description of Artificial Sequence: Synthetic oligonucleotide
cctccgccgaggcg

SEQ ID NO: 20103 - DNA, 14 bp, Artificial Sequence
  Description of Artificial Sequence: Synthetic oligonucleotide
tcctccgccgaggc

SEQ ID NO: 20104 - DNA, 14 bp, Artificial Sequence
  Description of Artificial Sequence: Synthetic oligonucleotide
ttcctccgccgagg

SEQ ID NO: 20105 - DNA, 14 bp, Artificial Sequence
  Description of Artificial Sequence: Synthetic oligonucleotide
cttcctccgccgag

SEQ ID NO: 20106 - DNA, 14 bp, Artificial Sequence
  Description of Artificial Sequence: Synthetic oligonucleotide
gcttcctccgccga

SEQ ID NO: 20107 - DNA, 14 bp, Artificial Sequence
  Description of Artificial Sequence: Synthetic oligonucleotide
ggcttcctccgccg

SEQ ID NO: 20108 - DNA, 14 bp, Artificial Sequence
  Description of Artificial Sequence: Synthetic oligonucleotide
cggcttcctccgcc

SEQ ID NO: 20109 - DNA, 14 bp, Artificial Sequence
  Description of Artificial Sequence: Synthetic oligonucleotide
tcggcttcctccgc

SEQ ID NO: 20110 - DNA, 14 bp, Artificial Sequence
  Description of Artificial Sequence: Synthetic oligonucleotide
gtcggcttcctccg

SEQ ID NO: 20111 - DNA, 14 bp, Artificial Sequence
  Description of Artificial Sequence: Synthetic oligonucleotide
ggtcggcttcctcc

SEQ ID NO: 20112 - DNA, 14 bp, Artificial Sequence
  Description of Artificial Sequence: Synthetic oligonucleotide
gggtcggcttcctc

SEQ ID NO: 20113 - DNA, 14 bp, Artificial Sequence
  Description of Artificial Sequence: Synthetic oligonucleotide
ggggtcggcttcct

SEQ ID NO: 20114 - DNA, 14 bp, Artificial Sequence
  Description of Artificial Sequence: Synthetic oligonucleotide
cggggtcggcttcc

SEQ ID NO: 20115 - DNA, 14 bp, Artificial Sequence
  Description of Artificial Sequence: Synthetic oligonucleotide
ccggggtcggcttc

SEQ ID NO: 20116 - DNA, 14 bp, Artificial Sequence
  Description of Artificial Sequence: Synthetic oligonucleotide
cccggggtcggctt

SEQ ID NO: 20117 - DNA, 14 bp, Artificial Sequence
  Description of Artificial Sequence: Synthetic oligonucleotide
ccccggggtcggct

SEQ ID NO: 20118 - DNA, 14 bp, Artificial Sequence
  Description of Artificial Sequence: Synthetic oligonucleotide
accccggggtcggc

SEQ ID NO: 20119 - DNA, 14 bp, Artificial Sequence
  Description of Artificial Sequence: Synthetic oligonucleotide
gaccccggggtcgg

SEQ ID NO: 20120 - DNA, 14 bp, Artificial Sequence
  Description of Artificial Sequence: Synthetic oligonucleotide
agaccccggggtcg

SEQ ID NO: 20121 - DNA, 14 bp, Artificial Sequence
  Description of Artificial Sequence: Synthetic oligonucleotide
gagaccccggggtc

SEQ ID NO: 20122 - DNA, 14 bp, Artificial Sequence
  Description of Artificial Sequence: Synthetic oligonucleotide
ggagaccccggggt

SEQ ID NO: 20123 - DNA, 14 bp, Artificial Sequence
  Description of Artificial Sequence: Synthetic oligonucleotide
cggagaccccgggg

SEQ ID NO: 20124 - DNA, 14 bp, Artificial Sequence
  Description of Artificial Sequence: Synthetic oligonucleotide
gcggagaccccggg

SEQ ID NO: 20125 - DNA, 14 bp, Artificial Sequence
  Description of Artificial Sequence: Synthetic oligonucleotide
ggcggagaccccgg

SEQ ID NO: 20126 - DNA, 14 bp, Artificial Sequence
  Description of Artificial Sequence: Synthetic oligonucleotide
tggcggagaccccg

SEQ ID NO: 20127 - DNA, 14 bp, Artificial Sequence
  Description of Artificial Sequence: Synthetic oligonucleotide
ctggcggagacccc

SEQ ID NO: 20128 - DNA, 14 bp, Artificial Sequence
  Description of Artificial Sequence: Synthetic oligonucleotide
gctggcggagaccc

SEQ ID NO: 20129 - DNA, 14 bp, Artificial Sequence
  Description of Artificial Sequence: Synthetic oligonucleotide
ggctggcggagacc

SEQ ID NO: 20130 - DNA, 14 bp, Artificial Sequence
  Description of Artificial Sequence: Synthetic oligonucleotide
gggctggcggagac

SEQ ID NO: 20131 - DNA, 14 bp, Artificial Sequence
  Description of Artificial Sequence: Synthetic oligonucleotide
cgggctggcggaga

SEQ ID NO: 20132 - DNA, 14 bp, Artificial Sequence
  Description of Artificial Sequence: Synthetic oligonucleotide
gcgggctggcggag

SEQ ID NO: 20133 - DNA, 14 bp, Artificial Sequence
  Description of Artificial Sequence: Synthetic oligonucleotide
ggcgggctggcgga

SEQ ID NO: 20134 - DNA, 14 bp, Artificial Sequence
  Description of Artificial Sequence: Synthetic oligonucleotide
cggcgggctggcgg

SEQ ID NO: 20135 - DNA, 14 bp, Artificial Sequence
  Description of Artificial Sequence: Synthetic oligonucleotide
ccggcgggctggcg

SEQ ID NO: 20136 - DNA, 14 bp, Artificial Sequence
  Description of Artificial Sequence: Synthetic oligonucleotide
gccggcgggctggc

SEQ ID NO: 20137 - DNA, 14 bp, Artificial Sequence
  Description of Artificial Sequence: Synthetic oligonucleotide
cgccggcgggctgg

SEQ ID NO: 20138 - DNA, 14 bp, Artificial Sequence
  Description of Artificial Sequence: Synthetic oligonucleotide
gcgccggcgggctg

SEQ ID NO: 20139 - DNA, 14 bp, Artificial Sequence
  Description of Artificial Sequence: Synthetic oligonucleotide
ggcgccggcgggct

SEQ ID NO: 20140 - DNA, 14 bp, Artificial Sequence
  Description of Artificial Sequence: Synthetic oligonucleotide
cggcgccggcgggc

SEQ ID NO: 20141 - DNA, 14 bp, Artificial Sequence
  Description of Artificial Sequence: Synthetic oligonucleotide
gcggcgccggcggg

SEQ ID NO: 20142 - DNA, 14 bp, Artificial Sequence
  Description of Artificial Sequence: Synthetic oligonucleotide
ggcggcgccggcgg

SEQ ID NO: 20143 - DNA, 14 bp, Artificial Sequence
  Description of Artificial Sequence: Synthetic oligonucleotide
aggcggcgccggcg

SEQ ID NO: 20144 - DNA, 14 bp, Artificial Sequence
  Description of Artificial Sequence: Synthetic oligonucleotide
gaggcggcgccggc

SEQ ID NO: 20145 - DNA, 14 bp, Artificial Sequence
  Description of Artificial Sequence: Synthetic oligonucleotide
ggaggcggcgccgg

SEQ ID NO: 20146 - DNA, 14 bp, Artificial Sequence
  Description of Artificial Sequence: Synthetic oligonucleotide
cggaggcggcgccg

SEQ ID NO: 20147 - DNA, 14 bp, Artificial Sequence
  Description of Artificial Sequence: Synthetic oligonucleotide
tcggaggcggcgcc

SEQ ID NO: 20148 - DNA, 14 bp, Artificial Sequence
  Description of Artificial Sequence: Synthetic oligonucleotide
ctcggaggcggcgc

SEQ ID NO: 20149 - DNA, 14 bp, Artificial Sequence
  Description of Artificial Sequence: Synthetic oligonucleotide
gctcggaggcggcg

SEQ ID NO: 20150 - DNA, 14 bp, Artificial Sequence
  Description of Artificial Sequence: Synthetic oligonucleotide
ggctcggaggcggc

SEQ ID NO: 20151 - DNA, 14 bp, Artificial Sequence
  Description of Artificial Sequence: Synthetic oligonucleotide
cggctcggaggcgg

SEQ ID NO: 20152 - DNA, 14 bp, Artificial Sequence
  Description of Artificial Sequence: Synthetic oligonucleotide
gcggctcggaggcg

SEQ ID NO: 20153 - DNA, 14 bp, Artificial Sequence
  Description of Artificial Sequence: Synthetic oligonucleotide
ggcggctcggaggc

SEQ ID NO: 20154 - DNA, 14 bp, Artificial Sequence
  Description of Artificial Sequence: Synthetic oligonucleotide
aggcggctcggagg

SEQ ID NO: 20155 - DNA, 14 bp, Artificial Sequence
  Description of Artificial Sequence: Synthetic oligonucleotide
gaggcggctcggag

SEQ ID NO: 20156 - DNA, 14 bp, Artificial Sequence
  Description of Artificial Sequence: Synthetic oligonucleotide
cgaggcggctcgga

SEQ ID NO: 20157 - DNA, 14 bp, Artificial Sequence
  Description of Artificial Sequence: Synthetic oligonucleotide
ccgaggcggctcgg

SEQ ID NO: 20158 - DNA, 14 bp, Artificial Sequence
  Description of Artificial Sequence: Synthetic oligonucleotide
gccgaggcggctcg

SEQ ID NO: 20159 - DNA, 14 bp, Artificial Sequence
  Description of Artificial Sequence: Synthetic oligonucleotide
ggccgaggcggctc

SEQ ID NO: 20160 - DNA, 14 bp, Artificial Sequence
  Description of Artificial Sequence: Synthetic oligonucleotide
cggccgaggcggct

SEQ ID NO: 20161 - DNA, 14 bp, Artificial Sequence
  Description of Artificial Sequence: Synthetic oligonucleotide
acggccgaggcggc

SEQ ID NO: 20162 - DNA, 14 bp, Artificial Sequence
  Description of Artificial Sequence: Synthetic oligonucleotide
tacggccgaggcgg

SEQ ID NO: 20163 - DNA, 14 bp, Artificial Sequence
  Description of Artificial Sequence: Synthetic oligonucleotide
ctacggccgaggcg

SEQ ID NO: 20164 - DNA, 14 bp, Artificial Sequence
  Description of Artificial Sequence: Synthetic oligonucleotide
gctacggccgaggc

SEQ ID NO: 20165 - DNA, 14 bp, Artificial Sequence
  Description of Artificial Sequence: Synthetic oligonucleotide
ggctacggccgagg

SEQ ID NO: 20166 - DNA, 14 bp, Artificial Sequence
  Description of Artificial Sequence: Synthetic oligonucleotide
aggctacggccgag

SEQ ID NO: 20167 - DNA, 14 bp, Artificial Sequence
  Description of Artificial Sequence: Synthetic oligonucleotide
gaggctacggccga

SEQ ID NO: 20168 - DNA, 14 bp, Artificial Sequence
  Description of Artificial Sequence: Synthetic oligonucleotide
cgaggctacggccg

SEQ ID NO: 20169 - DNA, 14 bp, Artificial Sequence
  Description of Artificial Sequence: Synthetic oligonucleotide
ccgaggctacggcc

SEQ ID NO: 20170 - DNA, 14 bp, Artificial Sequence
  Description of Artificial Sequence: Synthetic oligonucleotide
gccgaggctacggc

SEQ ID NO: 20171 - DNA, 14 bp, Artificial Sequence
  Description of Artificial Sequence: Synthetic oligonucleotide
ggccgaggctacgg

SEQ ID NO: 20172 - DNA, 14 bp, Artificial Sequence
  Description of Artificial Sequence: Synthetic oligonucleotide
gggccgaggctacg

SEQ ID NO: 20173 - DNA, 14 bp, Artificial Sequence
  Description of Artificial Sequence: Synthetic oligonucleotide
cgggccgaggctac

SEQ ID NO: 20174 - DNA, 14 bp, Artificial Sequence
  Description of Artificial Sequence: Synthetic oligonucleotide
ccgggccgaggcta

SEQ ID NO: 20175 - DNA, 14 bp, Artificial Sequence
  Description of Artificial Sequence: Synthetic oligonucleotide
cccgggccgaggct

SEQ ID NO: 20176 - DNA, 14 bp, Artificial Sequence
  Description of Artificial Sequence: Synthetic oligonucleotide
gcccgggccgaggc

SEQ ID NO: 20177 - DNA, 14 bp, Artificial Sequence
  Description of Artificial Sequence: Synthetic oligonucleotide
cgcccgggccgagg

SEQ ID NO: 20178 - DNA, 14 bp, Artificial Sequence
  Description of Artificial Sequence: Synthetic oligonucleotide
ccgcccgggccgag

SEQ ID NO: 20179 - DNA, 14 bp, Artificial Sequence
  Description of Artificial Sequence: Synthetic oligonucleotide
cccgcccgggccga

SEQ ID NO: 20180 - DNA, 14 bp, Artificial Sequence
  Description of Artificial Sequence: Synthetic oligonucleotide
tcccgcccgggccg

SEQ ID NO: 20181 - DNA, 14 bp, Artificial Sequence
  Description of Artificial Sequence: Synthetic oligonucleotide
ctcccgcccgggcc

SEQ ID NO: 20182 - DNA, 14 bp, Artificial Sequence
  Description of Artificial Sequence: Synthetic oligonucleotide
cctcccgcccgggc

SEQ ID NO: 20183 - DNA, 14 bp, Artificial Sequence
  Description of Artificial Sequence: Synthetic oligonucleotide
gcctcccgcccggg

SEQ ID NO: 20184 - DNA, 14 bp, Artificial Sequence
  Description of Artificial Sequence: Synthetic oligonucleotide
cgcctcccgcccgg

SEQ ID NO: 20185 - DNA, 14 bp, Artificial Sequence
  Description of Artificial Sequence: Synthetic oligonucleotide
ccgcctcccgcccg

SEQ ID NO: 20186 - DNA, 14 bp, Artificial Sequence
  Description of Artificial Sequence: Synthetic oligonucleotide
gccgcctcccgccc

SEQ ID NO: 20187 - DNA, 14 bp, Artificial Sequence
  Description of Artificial Sequence: Synthetic oligonucleotide
cgccgcctcccgcc

SEQ ID NO: 20188 - DNA, 14 bp, Artificial Sequence
  Description of Artificial Sequence: Synthetic oligonucleotide
ccgccgcctcccgc

SEQ ID NO: 20189 - DNA, 14 bp, Artificial Sequence
  Description of Artificial Sequence: Synthetic oligonucleotide
gccgccgcctcccg

SEQ ID NO: 20190 - DNA, 14 bp, Artificial Sequence
  Description of Artificial Sequence: Synthetic oligonucleotide
ggccgccgcctccc

SEQ ID NO: 20191 - DNA, 14 bp, Artificial Sequence
  Description of Artificial Sequence: Synthetic oligonucleotide
cggccgccgcctcc

SEQ ID NO: 20192 - DNA, 14 bp, Artificial Sequence
  Description of Artificial Sequence: Synthetic oligonucleotide
gcggccgccgcctc

SEQ ID NO: 20193 - DNA, 14 bp, Artificial Sequence
  Description of Artificial Sequence: Synthetic oligonucleotide
ggcggccgccgcct

SEQ ID NO: 20194 - DNA, 14 bp, Artificial Sequence
  Description of Artificial Sequence: Synthetic oligonucleotide
cggcggccgccgcc

SEQ ID NO: 20195 - DNA, 14 bp, Artificial Sequence
  Description of Artificial Sequence: Synthetic oligonucleotide
ccggcggccgccgc

SEQ ID NO: 20196 - DNA, 14 bp, Artificial Sequence
  Description of Artificial Sequence: Synthetic oligonucleotide
gccggcggccgccg

SEQ ID NO: 20197 - DNA, 14 bp, Artificial Sequence
  Description of Artificial Sequence: Synthetic oligonucleotide
cgccggcggccgcc

SEQ ID NO: 20198 - DNA, 14 bp, Artificial Sequence
  Description of Artificial Sequence: Synthetic oligonucleotide
tcgccggcggccgc

SEQ ID NO: 20199 - DNA, 14 bp, Artificial Sequence
  Description of Artificial Sequence: Synthetic oligonucleotide
ctcgccggcggccg

SEQ ID NO: 20200 - DNA, 14 bp, Artificial Sequence
  Description of Artificial Sequence: Synthetic oligonucleotide
cctcgccggcggcc

SEQ ID NO: 20201 - DNA, 14 bp, Artificial Sequence
  Description of Artificial Sequence: Synthetic oligonucleotide
gcctcgccggcggc

SEQ ID NO: 20202 - DNA, 14 bp, Artificial Sequence
  Description of Artificial Sequence: Synthetic oligonucleotide
cgcctcgccggcgg

SEQ ID NO: 20203 - DNA, 14 bp, Artificial Sequence
  Description of Artificial Sequence: Synthetic oligonucleotide
tcgcctcgccggcg

SEQ ID NO: 20204 - DNA, 14 bp, Artificial Sequence
  Description of Artificial Sequence: Synthetic oligonucleotide
ctcgcctcgccggc

SEQ ID NO: 20205 - DNA, 14 bp, Artificial Sequence
  Description of Artificial Sequence: Synthetic oligonucleotide
cctcgcctcgccgg

SEQ ID NO: 20206 - DNA, 14 bp, Artificial Sequence
  Description of Artificial Sequence: Synthetic oligonucleotide
gcctcgcctcgccg

SEQ ID NO: 20207 - DNA, 14 bp, Artificial Sequence
  Description of Artificial Sequence: Synthetic oligonucleotide
cgcctcgcctcgcc

SEQ ID NO: 20208 - DNA, 14 bp, Artificial Sequence
  Description of Artificial Sequence: Synthetic oligonucleotide
ccgcctcgcctcgc

SEQ ID NO: 20209 - DNA, 14 bp, Artificial Sequence
  Description of Artificial Sequence: Synthetic oligonucleotide
gccgcctcgcctcg

SEQ ID NO: 20210 - DNA, 14 bp, Artificial Sequence
  Description of Artificial Sequence: Synthetic oligonucleotide
ggccgcctcgcctc

SEQ ID NO: 20211 - DNA, 14 bp, Artificial Sequence
  Description of Artificial Sequence: Synthetic oligonucleotide
gggccgcctcgcct

SEQ ID NO: 20212 - DNA, 14 bp, Artificial Sequence
  Description of Artificial Sequence: Synthetic oligonucleotide
cgggccgcctcgcc

SEQ ID NO: 20213 - DNA, 14 bp, Artificial Sequence
  Description of Artificial Sequence: Synthetic oligonucleotide
gcgggccgcctcgc

SEQ ID NO: 20214 - DNA, 14 bp, Artificial Sequence
  Description of Artificial Sequence: Synthetic oligonucleotide
cgcgggccgcctcg

SEQ ID NO: 20215 - DNA, 14 bp, Artificial Sequence
  Description of Artificial Sequence: Synthetic oligonucleotide
gcgcgggccgcctc

SEQ ID NO: 20216 - DNA, 14 bp, Artificial Sequence
  Description of Artificial Sequence: Synthetic oligonucleotide
ggcgcgggccgcct

SEQ ID NO: 20217 - DNA, 14 bp, Artificial Sequence
  Description of Artificial Sequence: Synthetic oligonucleotide
gggcgcgggccgcc

SEQ ID NO: 20218 - DNA, 14 bp, Artificial Sequence
  Description of Artificial Sequence: Synthetic oligonucleotide
agggcgcgggccgc

SEQ ID NO: 20219 - DNA, 14 bp, Artificial Sequence
  Description of Artificial Sequence: Synthetic oligonucleotide
cagggcgcgggccg

SEQ ID NO: 20220 - DNA, 14 bp, Artificial Sequence
  Description of Artificial Sequence: Synthetic oligonucleotide
gcagggcgcgggcc

SEQ ID NO: 20221 - DNA, 14 bp, Artificial Sequence
  Description of Artificial Sequence: Synthetic oligonucleotide
ggcagggcgcgggc

SEQ ID NO: 20222 - DNA, 14 bp, Artificial Sequence
  Description of Artificial Sequence: Synthetic oligonucleotide
aggcagggcgcggg

SEQ ID NO: 20223 - DNA, 14 bp, Artificial Sequence
  Description of Artificial Sequence: Synthetic oligonucleotide
caggcagggcgcgg

SEQ ID NO: 20224 - DNA, 14 bp, Artificial Sequence
  Description of Artificial Sequence: Synthetic oligonucleotide
acaggcagggcgcg

SEQ ID NO: 20225 - DNA, 14 bp, Artificial Sequence
  Description of Artificial Sequence: Synthetic oligonucleotide
gacaggcagggcgc

SEQ ID NO: 20226 - DNA, 14 bp, Artificial Sequence
  Description of Artificial Sequence: Synthetic oligonucleotide
tgacaggcagggcg

SEQ ID NO: 20227 - DNA, 14 bp, Artificial Sequence
  Description of Artificial Sequence: Synthetic oligonucleotide
ctgacaggcagggc

SEQ ID NO: 20228 - DNA, 14 bp, Artificial Sequence
  Description of Artificial Sequence: Synthetic oligonucleotide
cctgacaggcaggg

SEQ ID NO: 20229 - DNA, 14 bp, Artificial Sequence
  Description of Artificial Sequence: Synthetic oligonucleotide
gcctgacaggcagg

SEQ ID NO: 20230 - DNA, 14 bp, Artificial Sequence
  Description of Artificial Sequence: Synthetic oligonucleotide
ggcctgacaggcag

SEQ ID NO: 20231 - DNA, 14 bp, Artificial Sequence
  Description of Artificial Sequence: Synthetic oligonucleotide
tggcctgacaggca

SEQ ID NO: 20232 - DNA, 14 bp, Artificial Sequence
  Description of Artificial Sequence: Synthetic oligonucleotide
gtggcctgacaggc

SEQ ID NO: 20233 - DNA, 14 bp, Artificial Sequence
  Description of Artificial Sequence: Synthetic oligonucleotide
ggtggcctgacagg

SEQ ID NO: 20234 - DNA, 14 bp, Artificial Sequence
  Description of Artificial Sequence: Synthetic oligonucleotide
cggtggcctgacag

SEQ ID NO: 20235 - DNA, 14 bp, Artificial Sequence
  Description of Artificial Sequence: Synthetic oligonucleotide
ccggtggcctgaca

SEQ ID NO: 20236 - DNA, 14 bp, Artificial Sequence
  Description of Artificial Sequence: Synthetic oligonucleotide
gccggtggcctgac

SEQ ID NO: 20237 - DNA, 14 bp, Artificial Sequence
  Description of Artificial Sequence: Synthetic oligonucleotide
ggccggtggcctga

SEQ ID NO: 20238 - DNA, 14 bp, Artificial Sequence
  Description of Artificial Sequence: Synthetic oligonucleotide
gggccggtggcctg

SEQ ID NO: 20239 - DNA, 14 bp, Artificial Sequence
  Description of Artificial Sequence: Synthetic oligonucleotide
cgggccggtggcct

SEQ ID NO: 20240 - DNA, 14 bp, Artificial Sequence
  Description of Artificial Sequence: Synthetic oligonucleotide
ccgggccggtggcc

SEQ ID NO: 20241 - DNA, 14 bp, Artificial Sequence
  Description of Artificial Sequence: Synthetic oligonucleotide
gccgggccggtggc

SEQ ID NO: 20242 - DNA, 14 bp, Artificial Sequence
  Description of Artificial Sequence: Synthetic oligonucleotide
ggccgggccggtgg

SEQ ID NO: 20243 - DNA, 14 bp, Artificial Sequence
  Description of Artificial Sequence: Synthetic oligonucleotide
gggccgggccggtg

SEQ ID NO: 20244 - DNA, 14 bp, Artificial Sequence
  Description of Artificial Sequence: Synthetic oligonucleotide
cgggccgggccggt

SEQ ID NO: 20245 - DNA, 14 bp, Artificial Sequence
  Description of Artificial Sequence: Synthetic oligonucleotide
gcgggccgggccgg

SEQ ID NO: 20246 - DNA, 14 bp, Artificial Sequence
  Description of Artificial Sequence: Synthetic oligonucleotide
cgcgggccgggccg

SEQ ID NO: 20247 - DNA, 14 bp, Artificial Sequence
  Description of Artificial Sequence: Synthetic oligonucleotide
ccgcgggccgggcc

SEQ ID NO: 20248 - DNA, 14 bp, Artificial Sequence
  Description of Artificial Sequence: Synthetic oligonucleotide
cccgcgggccgggc

SEQ ID NO: 20249 - DNA, 14 bp, Artificial Sequence
  Description of Artificial Sequence: Synthetic oligonucleotide
gcccgcgggccggg

SEQ ID NO: 20250 - DNA, 14 bp, Artificial Sequence
  Description of Artificial Sequence: Synthetic oligonucleotide
agcccgcgggccgg

SEQ ID NO: 20251 - DNA, 14 bp, Artificial Sequence
  Description of Artificial Sequence: Synthetic oligonucleotide
cagcccgcgggccg

SEQ ID NO: 20252 - DNA, 14 bp, Artificial Sequence
  Description of Artificial Sequence: Synthetic oligonucleotide
gcagcccgcgggcc

SEQ ID NO: 20253 - DNA, 14 bp, Artificial Sequence
  Description of Artificial Sequence: Synthetic oligonucleotide
ggcagcccgcgggc

SEQ ID NO: 20254 - DNA, 14 bp, Artificial Sequence
  Description of Artificial Sequence: Synthetic oligonucleotide
gggcagcccgcggg

SEQ ID NO: 20255 - DNA, 14 bp, Artificial Sequence
  Description of Artificial Sequence: Synthetic oligonucleotide
ggggcagcccgcgg

SEQ ID NO: 20256 - DNA, 14 bp, Artificial Sequence
  Description of Artificial Sequence: Synthetic oligonucleotide
gggggcagcccgcg

SEQ ID NO: 20257 - DNA, 14 bp, Artificial Sequence
  Description of Artificial Sequence: Synthetic oligonucleotide
cgggggcagcccgc

SEQ ID NO: 20258 - DNA, 14 bp, Artificial Sequence
  Description of Artificial Sequence: Synthetic oligonucleotide
tcgggggcagcccg

SEQ ID NO: 20259 - DNA, 14 bp, Artificial Sequence
  Description of Artificial Sequence: Synthetic oligonucleotide
atcgggggcagccc

SEQ ID NO: 20260 - DNA, 14 bp, Artificial Sequence
  Description of Artificial Sequence: Synthetic oligonucleotide
catcgggggcagcc

SEQ ID NO: 20261 - DNA, 14 bp, Artificial Sequence
  Description of Artificial Sequence: Synthetic oligonucleotide
gcatcgggggcagc

SEQ ID NO: 20262 - DNA, 14 bp, Artificial Sequence
  Description of Artificial Sequence: Synthetic oligonucleotide
cgcatcgggggcag

SEQ ID NO: 20263 - DNA, 14 bp, Artificial Sequence
  Description of Artificial Sequence: Synthetic oligonucleotide
ccgcatcgggggca

SEQ ID NO: 20264 - DNA, 14 bp, Artificial Sequence
  Description of Artificial Sequence: Synthetic oligonucleotide
tccgcatcgggggc

SEQ ID NO: 20265 - DNA, 14 bp, Artificial Sequence
  Description of Artificial Sequence: Synthetic oligonucleotide
ctccgcatcggggg

SEQ ID NO: 20266 - DNA, 14 bp, Artificial Sequence
  Description of Artificial Sequence: Synthetic oligonucleotide
cctccgcatcgggg

SEQ ID NO: 20267 - DNA, 14 bp, Artificial Sequence
  Description of Artificial Sequence: Synthetic oligonucleotide
gcctccgcatcggg

SEQ ID NO: 20268 - DNA, 14 bp, Artificial Sequence
  Description of Artificial Sequence: Synthetic oligonucleotide
cgcctccgcatcgg

SEQ ID NO: 20269 - DNA, 14 bp, Artificial Sequence
  Description of Artificial Sequence: Synthetic oligonucleotide
gcgcctccgcatcg

SEQ ID NO: 20270 - DNA, 14 bp, Artificial Sequence
  Description of Artificial Sequence: Synthetic oligonucleotide
agcgcctccgcatc

SEQ ID NO: 20271 - DNA, 14 bp, Artificial Sequence
  Description of Artificial Sequence: Synthetic oligonucleotide
cagcgcctccgcat

SEQ ID NO: 20272 - DNA, 14 bp, Artificial Sequence
  Description of Artificial Sequence: Synthetic oligonucleotide
acagcgcctccgca

SEQ ID NO: 20273 - DNA, 14 bp, Artificial Sequence
  Description of Artificial Sequence: Synthetic oligonucleotide
gacagcgcctccgc

SEQ ID NO: 20274 - DNA, 14 bp, Artificial Sequence
  Description of Artificial Sequence: Synthetic oligonucleotide
cgacagcgcctccg

SEQ ID NO: 20275 - DNA, 14 bp, Artificial Sequence
  Description of Artificial Sequence: Synthetic oligonucleotide
gcgacagcgcctcc

SEQ ID NO: 20276 - DNA, 14 bp, Artificial Sequence
  Description of Artificial Sequence: Synthetic oligonucleotide
ggcgacagcgcctc

SEQ ID NO: 20277 - DNA, 14 bp, Artificial Sequence
  Description of Artificial Sequence: Synthetic oligonucleotide
cggcgacagcgcct

SEQ ID NO: 20278 - DNA, 14 bp, Artificial Sequence
  Description of Artificial Sequence: Synthetic oligonucleotide
ccggcgacagcgcc

SEQ ID NO: 20279 - DNA, 14 bp, Artificial Sequence
  Description of Artificial Sequence: Synthetic oligonucleotide
cccggcgacagcgc

SEQ ID NO: 20280 - DNA, 14 bp, Artificial Sequence
  Description of Artificial Sequence: Synthetic oligonucleotide
ccccggcgacagcg

SEQ ID NO: 20281 - DNA, 14 bp, Artificial Sequence
  Description of Artificial Sequence: Synthetic oligonucleotide
gccccggcgacagc

SEQ ID NO: 20282 - DNA, 14 bp, Artificial Sequence
  Description of Artificial Sequence: Synthetic oligonucleotide
ggccccggcgacag

SEQ ID NO: 20283 - DNA, 14 bp, Artificial Sequence
  Description of Artificial Sequence: Synthetic oligonucleotide
tggccccggcgaca

SEQ ID NO: 20284 - DNA, 14 bp, Artificial Sequence
  Description of Artificial Sequence: Synthetic oligonucleotide
atggccccggcgac

SEQ ID NO: 20285 - DNA, 14 bp, Artificial Sequence
  Description of Artificial Sequence: Synthetic oligonucleotide
catggccccggcga

SEQ ID NO: 20286 - DNA, 14 bp, Artificial Sequence
  Description of Artificial Sequence: Synthetic oligonucleotide
gcatggccccggcg

SEQ ID NO: 20287 - DNA, 14 bp, Artificial Sequence
  Description of Artificial Sequence: Synthetic oligonucleotide
tgcatggccccggc

SEQ ID NO: 20288 - DNA, 14 bp, Artificial Sequence
  Description of Artificial Sequence: Synthetic oligonucleotide
ctgcatggccccgg

SEQ ID NO: 20289 - DNA, 14 bp, Artificial Sequence
  Description of Artificial Sequence: Synthetic oligonucleotide
gctgcatggccccg

SEQ ID NO: 20290 - DNA, 14 bp, Artificial Sequence
  Description of Artificial Sequence: Synthetic oligonucleotide
tgctgcatggcccc

SEQ ID NO: 20291 - DNA, 14 bp, Artificial Sequence
  Description of Artificial Sequence: Synthetic oligonucleotide
ctgctgcatggccc

SEQ ID NO: 20292 - DNA, 14 bp, Artificial Sequence
  Description of Artificial Sequence: Synthetic oligonucleotide
cctgctgcatggcc

SEQ ID NO: 20293 - DNA, 14 bp, Artificial Sequence
  Description of Artificial Sequence: Synthetic oligonucleotide
gcctgctgcatggc

SEQ ID NO: 20294 - DNA, 14 bp, Artificial Sequence
  Description of Artificial Sequence: Synthetic oligonucleotide
cgcctgctgcatgg

SEQ ID NO: 20295 - DNA, 14 bp, Artificial Sequence
  Description of Artificial Sequence: Synthetic oligonucleotide
gcgcctgctgcatg

SEQ ID NO: 20296 - DNA, 14 bp, Artificial Sequence
  Description of Artificial Sequence: Synthetic oligonucleotide
ggcgcctgctgcat

SEQ ID NO: 20297 - DNA, 14 bp, Artificial Sequence
  Description of Artificial Sequence: Synthetic oligonucleotide
cggcgcctgctgca

SEQ ID NO: 20298 - DNA, 14 bp, Artificial Sequence
  Description of Artificial Sequence: Synthetic oligonucleotide
gcggcgcctgctgc

SEQ ID NO: 20299 - DNA, 14 bp, Artificial Sequence
  Description of Artificial Sequence: Synthetic oligonucleotide
tgcggcgcctgctg

SEQ ID NO: 20300 - DNA, 14 bp, Artificial Sequence
  Description of Artificial Sequence: Synthetic oligonucleotide
ctgcggcgcctgct

SEQ ID NO: 20301 - DNA, 14 bp, Artificial Sequence
  Description of Artificial Sequence: Synthetic oligonucleotide
gctgcggcgcctgc

SEQ ID NO: 20302 - DNA, 14 bp, Artificial Sequence
  Description of Artificial Sequence: Synthetic oligonucleotide
ggctgcggcgcctg

SEQ ID NO: 20303 - DNA, 14 bp, Artificial Sequence
  Description of Artificial Sequence: Synthetic oligonucleotide
aggctgcggcgcct

SEQ ID NO: 20304 - DNA, 14 bp, Artificial Sequence
  Description of Artificial Sequence: Synthetic oligonucleotide
aaggctgcggcgcc

SEQ ID NO: 20305 - DNA, 14 bp, Artificial Sequence
  Description of Artificial Sequence: Synthetic oligonucleotide
taaggctgcggcgc

SEQ ID NO: 20306 - DNA, 14 bp, Artificial Sequence
  Description of Artificial Sequence: Synthetic oligonucleotide
gtaaggctgcggcg

SEQ ID NO: 20307 - DNA, 14 bp, Artificial Sequence
  Description of Artificial Sequence: Synthetic oligonucleotide
cgtaaggctgcggc

SEQ ID NO: 20308 - DNA, 14 bp, Artificial Sequence
  Description of Artificial Sequence: Synthetic oligonucleotide
tcgtaaggctgcgg

SEQ ID NO: 20309 - DNA, 14 bp, Artificial Sequence
  Description of Artificial Sequence: Synthetic oligonucleotide
ctcgtaaggctgcg

SEQ ID NO: 20310 - DNA, 14 bp, Artificial Sequence
  Description of Artificial Sequence: Synthetic oligonucleotide
actcgtaaggctgc

SEQ ID NO: 20311 - DNA, 14 bp, Artificial Sequence
  Description of Artificial Sequence: Synthetic oligonucleotide
aactcgtaaggctg

SEQ ID NO: 20312 - DNA, 14 bp, Artificial Sequence
  Description of Artificial Sequence: Synthetic oligonucleotide
gaactcgtaaggct

SEQ ID NO: 20313 - DNA, 14 bp, Artificial Sequence
  Description of Artificial Sequence: Synthetic oligonucleotide
agaactcgtaaggc

SEQ ID NO: 20314 - DNA, 14 bp, Artificial Sequence
  Description of Artificial Sequence: Synthetic oligonucleotide
aagaactcgtaagg

SEQ ID NO: 20315 - DNA, 14 bp, Artificial Sequence
  Description of Artificial Sequence: Synthetic oligonucleotide
gaagaactcgtaag

SEQ ID NO: 20316 - DNA, 14 bp, Artificial Sequence
  Description of Artificial Sequence: Synthetic oligonucleotide
tgaagaactcgtaa

SEQ ID NO: 20317 - DNA, 14 bp, Artificial Sequence
  Description of Artificial Sequence: Synthetic oligonucleotide
ctgaagaactcgta

SEQ ID NO: 20318 - DNA, 14 bp, Artificial Sequence
  Description of Artificial Sequence: Synthetic oligonucleotide
gctgaagaactcgt

SEQ ID NO: 20319 - DNA, 14 bp, Artificial Sequence
  Description of Artificial Sequence: Synthetic oligonucleotide
cgctgaagaactcg

SEQ ID NO: 20320 - DNA, 14 bp, Artificial Sequence
  Description of Artificial Sequence: Synthetic oligonucleotide
tcgctgaagaactc

SEQ ID NO: 20321 - DNA, 14 bp, Artificial Sequence
  Description of Artificial Sequence: Synthetic oligonucleotide
ctcgctgaagaact

SEQ ID NO: 20322 - DNA, 14 bp, Artificial Sequence
  Description of Artificial Sequence: Synthetic oligonucleotide
cctcgctgaagaac

SEQ ID NO: 20323 - DNA, 14 bp, Artificial Sequence
  Description of Artificial Sequence: Synthetic oligonucleotide
tcctcgctgaagaa

SEQ ID NO: 20324 - DNA, 14 bp, Artificial Sequence
  Description of Artificial Sequence: Synthetic oligonucleotide
ctcctcgctgaaga

SEQ ID NO: 20325 - DNA, 14 bp, Artificial Sequence
  Description of Artificial Sequence: Synthetic oligonucleotide
tctcctcgctgaag

SEQ ID NO: 20326 - DNA, 14 bp, Artificial Sequence
  Description of Artificial Sequence: Synthetic oligonucleotide
ttctcctcgctgaa

SEQ ID NO: 20327 - DNA, 14 bp, Artificial Sequence
  Description of Artificial Sequence: Synthetic oligonucleotide
gttctcctcgctga

SEQ ID NO: 20328 - DNA, 14 bp, Artificial Sequence
  Description of Artificial Sequence: Synthetic oligonucleotide
tgttctcctcgctg

SEQ ID NO: 20329 - DNA, 14 bp, Artificial Sequence
  Description of Artificial Sequence: Synthetic oligonucleotide
ctgttctcctcgct

SEQ ID NO: 20330 - DNA, 14 bp, Artificial Sequence
  Description of Artificial Sequence: Synthetic oligonucleotide
actgttctcctcgc

SEQ ID NO: 20331 - DNA, 14 bp, Artificial Sequence
  Description of Artificial Sequence: Synthetic oligonucleotide
gactgttctcctcg

SEQ ID NO: 20332 - DNA, 14 bp, Artificial Sequence
  Description of Artificial Sequence: Synthetic oligonucleotide
ggactgttctcctc

SEQ ID NO: 20333 - DNA, 14 bp, Artificial Sequence
  Description of Artificial Sequence: Synthetic oligonucleotide
cggactgttctcct

SEQ ID NO: 20334 - DNA, 14 bp, Artificial Sequence
  Description of Artificial Sequence: Synthetic oligonucleotide
tcggactgttctcc

SEQ ID NO: 20335 - DNA, 14 bp, Artificial Sequence
  Description of Artificial Sequence: Synthetic oligonucleotide
ttcggactgttctc

SEQ ID NO: 20336 - DNA, 14 bp, Artificial Sequence
  Description of Artificial Sequence: Synthetic oligonucleotide
tttcggactgttct

SEQ ID NO: 20337 - DNA, 14 bp, Artificial Sequence
  Description of Artificial Sequence: Synthetic oligonucleotide
atttcggactgttc

SEQ ID NO: 20338 - DNA, 14 bp, Artificial Sequence
  Description of Artificial Sequence: Synthetic oligonucleotide
catttcggactgtt

SEQ ID NO: 20339 - DNA, 14 bp, Artificial Sequence
  Description of Artificial Sequence: Synthetic oligonucleotide
ccatttcggactgt

SEQ ID NO: 20340 - DNA, 14 bp, Artificial Sequence
  Description of Artificial Sequence: Synthetic oligonucleotide
gccatttcggactg

SEQ ID NO: 20341 - DNA, 14 bp, Artificial Sequence
  Description of Artificial Sequence: Synthetic oligonucleotide
cgccatttcggact

SEQ ID NO: 20342 - DNA, 14 bp, Artificial Sequence
  Description of Artificial Sequence: Synthetic oligonucleotide
ccgccatttcggac

SEQ ID NO: 20343 - DNA, 14 bp, Artificial Sequence
  Description of Artificial Sequence: Synthetic oligonucleotide
cccgccatttcgga

SEQ ID NO: 20344 - DNA, 14 bp, Artificial Sequence
  Description of Artificial Sequence: Synthetic oligonucleotide
ccccgccatttcgg

SEQ ID NO: 20345 - DNA, 14 bp, Artificial Sequence
  Description of Artificial Sequence: Synthetic oligonucleotide
tccccgccatttcg

SEQ ID NO: 20346 - DNA, 14 bp, Artificial Sequence
  Description of Artificial Sequence: Synthetic oligonucleotide
gtccccgccatttc

SEQ ID NO: 20347 - DNA, 14 bp, Artificial Sequence
  Description of Artificial Sequence: Synthetic oligonucleotide
agtccccgccattt

SEQ ID NO: 20348 - DNA, 14 bp, Artificial Sequence
  Description of Artificial Sequence: Synthetic oligonucleotide
cagtccccgccatt

SEQ ID NO: 20349 - DNA, 14 bp, Artificial Sequence
  Description of Artificial Sequence: Synthetic oligonucleotide
acagtccccgccat

SEQ ID NO: 20350 - DNA, 14 bp, Artificial Sequence
  Description of Artificial Sequence: Synthetic oligonucleotide
aacagtccccgcca

SEQ ID NO: 20351 - DNA, 14 bp, Artificial Sequence
  Description of Artificial Sequence: Synthetic oligonucleotide
caacagtccccgcc

SEQ ID NO: 20352 - DNA, 14 bp, Artificial Sequence
  Description of Artificial Sequence: Synthetic oligonucleotide
ccaacagtccccgc

SEQ ID NO: 20353 - DNA, 14 bp, Artificial Sequence
  Description of Artificial Sequence: Synthetic oligonucleotide
accaacagtccccg

SEQ ID NO: 20354 - DNA, 14 bp, Artificial Sequence
  Description of Artificial Sequence: Synthetic oligonucleotide
gaccaacagtcccc

SEQ ID NO: 20355 - DNA, 14 bp, Artificial Sequence
  Description of Artificial Sequence: Synthetic oligonucleotide
agaccaacagtccc

SEQ ID NO: 20356 - DNA, 14 bp, Artificial Sequence
  Description of Artificial Sequence: Synthetic oligonucleotide
gagaccaacagtcc

SEQ ID NO: 20357 - DNA, 14 bp, Artificial Sequence
  Description of Artificial Sequence: Synthetic oligonucleotide
cgagaccaacagtc

SEQ ID NO: 20358 - DNA, 14 bp, Artificial Sequence
  Description of Artificial Sequence: Synthetic oligonucleotide
ccgagaccaacagt

SEQ ID NO: 20359 - DNA, 14 bp, Artificial Sequence
  Description of Artificial Sequence: Synthetic oligonucleotide
gccgagaccaacag

SEQ ID NO: 20360 - DNA, 14 bp, Artificial Sequence
  Description of Artificial Sequence: Synthetic oligonucleotide
ggccgagaccaaca

SEQ ID NO: 20361 - DNA, 14 bp, Artificial Sequence
  Description of Artificial Sequence: Synthetic oligonucleotide
gggccgagaccaac

SEQ ID NO: 20362 - DNA, 14 bp, Artificial Sequence
  Description of Artificial Sequence: Synthetic oligonucleotide
agggccgagaccaa

SEQ ID NO: 20363 - DNA, 14 bp, Artificial Sequence
  Description of Artificial Sequence: Synthetic oligonucleotide
cagggccgagacca

SEQ ID NO: 20364 - DNA, 14 bp, Artificial Sequence
  Description of Artificial Sequence: Synthetic oligonucleotide
gcagggccgagacc

SEQ ID NO: 20365 - DNA, 14 bp, Artificial Sequence
  Description of Artificial Sequence: Synthetic oligonucleotide
cgcagggccgagac

SEQ ID NO: 20366 - DNA, 14 bp, Artificial Sequence
  Description of Artificial Sequence: Synthetic oligonucleotide
ccgcagggccgaga

SEQ ID NO: 20367 - DNA, 14 bp, Artificial Sequence
  Description of Artificial Sequence: Synthetic oligonucleotide
tccgcagggccgag

SEQ ID NO: 20368 - DNA, 14 bp, Artificial Sequence
  Description of Artificial Sequence: Synthetic oligonucleotide
ttccgcagggccga

SEQ ID NO: 20369 - DNA, 14 bp, Artificial Sequence
  Description of Artificial Sequence: Synthetic oligonucleotide
cttccgcagggccg

SEQ ID NO: 20370 - DNA, 14 bp, Artificial Sequence
  Description of Artificial Sequence: Synthetic oligonucleotide
ccttccgcagggcc

SEQ ID NO: 20371 - DNA, 14 bp, Artificial Sequence
  Description of Artificial Sequence: Synthetic oligonucleotide
accttccgcagggc

SEQ ID NO: 20372 - DNA, 14 bp, Artificial Sequence
  Description of Artificial Sequence: Synthetic oligonucleotide
aaccttccgcaggg

SEQ ID NO: 20373 - DNA, 14 bp, Artificial Sequence
  Description of Artificial Sequence: Synthetic oligonucleotide
gaaccttccgcagg

SEQ ID NO: 20374 - DNA, 14 bp, Artificial Sequence
  Description of Artificial Sequence: Synthetic oligonucleotide
tgaaccttccgcag

SEQ ID NO: 20375 - DNA, 14 bp, Artificial Sequence
  Description of Artificial Sequence: Synthetic oligonucleotide
ctgaaccttccgca

SEQ ID NO: 20376 - DNA, 14 bp, Artificial Sequence
  Description of Artificial Sequence: Synthetic oligonucleotide
cctgaaccttccgc

SEQ ID NO: 20377 - DNA, 14 bp, Artificial Sequence
  Description of Artificial Sequence: Synthetic oligonucleotide
tcctgaaccttccg

SEQ ID NO: 20378 - DNA, 14 bp, Artificial Sequence
  Description of Artificial Sequence: Synthetic oligonucleotide
ttcctgaaccttcc

SEQ ID NO: 20379 - DNA, 14 bp, Artificial Sequence
  Description of Artificial Sequence: Synthetic oligonucleotide
gttcctgaaccttc

SEQ ID NO: 20380 - DNA, 14 bp, Artificial Sequence
  Description of Artificial Sequence: Synthetic oligonucleotide
tgttcctgaacctt

SEQ ID NO: 20381 - DNA, 14 bp, Artificial Sequence
  Description of Artificial Sequence: Synthetic oligonucleotide
ttgttcctgaacct

SEQ ID NO: 20382 - DNA, 14 bp, Artificial Sequence
  Description of Artificial Sequence: Synthetic oligonucleotide
cttgttcctgaacc

SEQ ID NO: 20383 - DNA, 14 bp, Artificial Sequence
  Description of Artificial Sequence: Synthetic oligonucleotide
acttgttcctgaac

SEQ ID NO: 20384 - DNA, 14 bp, Artificial Sequence
  Description of Artificial Sequence: Synthetic oligonucleotide
cacttgttcctgaa

SEQ ID NO: 20385 - DNA, 14 bp, Artificial Sequence
  Description of Artificial Sequence: Synthetic oligonucleotide
gcacttgttcctga

SEQ ID NO: 20386 - DNA, 14 bp, Artificial Sequence
  Description of Artificial Sequence: Synthetic oligonucleotide
tgcacttgttcctg

SEQ ID NO: 20387 - DNA, 14 bp, Artificial Sequence
  Description of Artificial Sequence: Synthetic oligonucleotide
atgcacttgttcct

SEQ ID NO: 20388 - DNA, 14 bp, Artificial Sequence
  Description of Artificial Sequence: Synthetic oligonucleotide
gatgcacttgttcc

SEQ ID NO: 20389 - DNA, 14 bp, Artificial Sequence
  Description of Artificial Sequence: Synthetic oligonucleotide
ggatgcacttgttc

SEQ ID NO: 20390 - DNA, 14 bp, Artificial Sequence
  Description of Artificial Sequence: Synthetic oligonucleotide
gggatgcacttgtt

SEQ ID NO: 20391 - DNA, 14 bp, Artificial Sequence
  Description of Artificial Sequence: Synthetic oligonucleotide
tgggatgcacttgt

SEQ ID NO: 20392 - DNA, 14 bp, Artificial Sequence
  Description of Artificial Sequence: Synthetic oligonucleotide
gtgggatgcacttg

SEQ ID NO: 20393 - DNA, 14 bp, Artificial Sequence
  Description of Artificial Sequence: Synthetic oligonucleotide
agtgggatgcactt

SEQ ID NO: 20394 - DNA, 14 bp, Artificial Sequence
  Description of Artificial Sequence: Synthetic oligonucleotide
gagtgggatgcact

SEQ ID NO: 20395 - DNA, 14 bp, Artificial Sequence
  Description of Artificial Sequence: Synthetic oligonucleotide
agagtgggatgcac

SEQ ID NO: 20396 - DNA, 14 bp, Artificial Sequence
  Description of Artificial Sequence: Synthetic oligonucleotide
gagagtgggatgca

SEQ ID NO: 20397 - DNA, 14 bp, Artificial Sequence
  Description of Artificial Sequence: Synthetic oligonucleotide
agagagtgggatgc

SEQ ID NO: 20398 - DNA, 14 bp, Artificial Sequence
  Description of Artificial Sequence: Synthetic oligonucleotide
gagagagtgggatg

SEQ ID NO: 20399 - DNA, 14 bp, Artificial Sequence
  Description of Artificial Sequence: Synthetic oligonucleotide
tgagagagtgggat

SEQ ID NO: 20400 - DNA, 14 bp, Artificial Sequence
  Description of Artificial Sequence: Synthetic oligonucleotide
ctgagagagtggga

SEQ ID NO: 20401 - DNA, 14 bp, Artificial Sequence
  Description of Artificial Sequence: Synthetic oligonucleotide
gctgagagagtggg

SEQ ID NO: 20402 - DNA, 14 bp, Artificial Sequence
  Description of Artificial Sequence: Synthetic oligonucleotide
agctgagagagtgg

SEQ ID NO: 20403 - DNA, 14 bp, Artificial Sequence
  Description of Artificial Sequence: Synthetic oligonucleotide
tagctgagagagtg

SEQ ID NO: 20404 - DNA, 14 bp, Artificial Sequence
  Description of Artificial Sequence: Synthetic oligonucleotide
ttagctgagagagt

SEQ ID NO: 20405 - DNA, 14 bp, Artificial Sequence
  Description of Artificial Sequence: Synthetic oligonucleotide
attagctgagagag

SEQ ID NO: 20406 - DNA, 14 bp, Artificial Sequence
  Description of Artificial Sequence: Synthetic oligonucleotide
cattagctgagaga

SEQ ID NO: 20407 - DNA, 14 bp, Artificial Sequence
  Description of Artificial Sequence: Synthetic oligonucleotide
tcattagctgagag

SEQ ID NO: 20408 - DNA, 14 bp, Artificial Sequence
  Description of Artificial Sequence: Synthetic oligonucleotide
ttcattagctgaga

SEQ ID NO: 20409 - DNA, 14 bp, Artificial Sequence
  Description of Artificial Sequence: Synthetic oligonucleotide
cttcattagctgag

SEQ ID NO: 20410 - DNA, 14 bp, Artificial Sequence
  Description of Artificial Sequence: Synthetic oligonucleotide
tcttcattagctga

SEQ ID NO: 20411 - DNA, 14 bp, Artificial Sequence
  Description of Artificial Sequence: Synthetic oligonucleotide
ctcttcattagctg

SEQ ID NO: 20412 - DNA, 14 bp, Artificial Sequence
  Description of Artificial Sequence: Synthetic oligonucleotide
actcttcattagct

SEQ ID NO: 20413 - DNA, 14 bp, Artificial Sequence
  Description of Artificial Sequence: Synthetic oligonucleotide
gactcttcattagc

SEQ ID NO: 20414 - DNA, 14 bp, Artificial Sequence
  Description of Artificial Sequence: Synthetic oligonucleotide
agactcttcattag

SEQ ID NO: 20415 - DNA, 14 bp, Artificial Sequence
  Description of Artificial Sequence: Synthetic oligonucleotide
gagactcttcatta

SEQ ID NO: 20416 - DNA, 14 bp, Artificial Sequence
  Description of Artificial Sequence: Synthetic oligonucleotide
agagactcttcatt

SEQ ID NO: 20417 - DNA, 14 bp, Artificial Sequence
  Description of Artificial Sequence: Synthetic oligonucleotide
gagagactcttcat

SEQ ID NO: 20418 - DNA, 14 bp, Artificial Sequence
  Description of Artificial Sequence: Synthetic oligonucleotide
agagagactcttca

SEQ ID NO: 20419 - DNA, 14 bp, Artificial Sequence
  Description of Artificial Sequence: Synthetic oligonucleotide
tagagagactcttc

SEQ ID NO: 20420 - DNA, 14 bp, Artificial Sequence
  Description of Artificial Sequence: Synthetic oligonucleotide
atagagagactctt

SEQ ID NO: 20421 - DNA, 14 bp, Artificial Sequence
  Description of Artificial Sequence: Synthetic oligonucleotide
aatagagagactct

SEQ ID NO: 20422 - DNA, 14 bp, Artificial Sequence
  Description of Artificial Sequence: Synthetic oligonucleotide
taatagagagactc

SEQ ID NO: 20423 - DNA, 14 bp, Artificial Sequence
  Description of Artificial Sequence: Synthetic oligonucleotide
ataatagagagact

SEQ ID NO: 20424 - DNA, 14 bp, Artificial Sequence
  Description of Artificial Sequence: Synthetic oligonucleotide
tataatagagagac

SEQ ID NO: 20425 - DNA, 14 bp, Artificial Sequence
  Description of Artificial Sequence: Synthetic oligonucleotide
atataatagagaga

SEQ ID NO: 20426 - DNA, 14 bp, Artificial Sequence
  Description of Artificial Sequence: Synthetic oligonucleotide
aatataatagagag

SEQ ID NO: 20427 - DNA, 14 bp, Artificial Sequence
  Description of Artificial Sequence: Synthetic oligonucleotide
caatataatagaga

SEQ ID NO: 20428 - DNA, 14 bp, Artificial Sequence
  Description of Artificial Sequence: Synthetic oligonucleotide
tcaatataatagag

SEQ ID NO: 20429 - DNA, 14 bp, Artificial Sequence
  Description of Artificial Sequence: Synthetic oligonucleotide
ttcaatataataga

SEQ ID NO: 20430 - DNA, 14 bp, Artificial Sequence
  Description of Artificial Sequence: Synthetic oligonucleotide
cttcaatataatag

SEQ ID NO: 20431 - DNA, 14 bp, Artificial Sequence
  Description of Artificial Sequence: Synthetic oligonucleotide
tcttcaatataata

SEQ ID NO: 20432 - DNA, 14 bp, Artificial Sequence
  Description of Artificial Sequence: Synthetic oligonucleotide
ctcttcaatataat

SEQ ID NO: 20433 - DNA, 14 bp, Artificial Sequence
  Description of Artificial Sequence: Synthetic oligonucleotide
gctcttcaatataa

SEQ ID NO: 20434 - DNA, 14 bp, Artificial Sequence
  Description of Artificial Sequence: Synthetic oligonucleotide
agctcttcaatata

SEQ ID NO: 20435 - DNA, 14 bp, Artificial Sequence
  Description of Artificial Sequence: Synthetic oligonucleotide
cagctcttcaatat

SEQ ID NO: 20436 - DNA, 14 bp, Artificial Sequence
  Description of Artificial Sequence: Synthetic oligonucleotide
tcagctcttcaata

SEQ ID NO: 20437 - DNA, 14 bp, Artificial Sequence
  Description of Artificial Sequence: Synthetic oligonucleotide
atcagctcttcaat

SEQ ID NO: 20438 - DNA, 14 bp, Artificial Sequence
  Description of Artificial Sequence: Synthetic oligonucleotide
aatcagctcttcaa

SEQ ID NO: 20439 - DNA, 14 bp, Artificial Sequence
  Description of Artificial Sequence: Synthetic oligonucleotide
aaatcagctcttca

SEQ ID NO: 20440 - DNA, 14 bp, Artificial Sequence
  Description of Artificial Sequence: Synthetic oligonucleotide
aaaatcagctcttc

SEQ ID NO: 20441 - DNA, 14 bp, Artificial Sequence
  Description of Artificial Sequence: Synthetic oligonucleotide
aaaaatcagctctt

SEQ ID NO: 20442 - DNA, 14 bp, Artificial Sequence
  Description of Artificial Sequence: Synthetic oligonucleotide
gaaaaatcagctct

SEQ ID NO: 20443 - DNA, 14 bp, Artificial Sequence
  Description of Artificial Sequence: Synthetic oligonucleotide
tgaaaaatcagctc

SEQ ID NO: 20444 - DNA, 14 bp, Artificial Sequence
  Description of Artificial Sequence: Synthetic oligonucleotide
ctgaaaaatcagct

SEQ ID NO: 20445 - DNA, 14 bp, Artificial Sequence
  Description of Artificial Sequence: Synthetic oligonucleotide
gctgaaaaatcagc

SEQ ID NO: 20446 - DNA, 14 bp, Artificial Sequence
  Description of Artificial Sequence: Synthetic oligonucleotide
agctgaaaaatcag

SEQ ID NO: 20447 - DNA, 14 bp, Artificial Sequence
  Description of Artificial Sequence: Synthetic oligonucleotide
cagctgaaaaatca

SEQ ID NO: 20448 - DNA, 14 bp, Artificial Sequence
  Description of Artificial Sequence: Synthetic oligonucleotide
gcagctgaaaaatc

SEQ ID NO: 20449 - DNA, 14 bp, Artificial Sequence
  Description of Artificial Sequence: Synthetic oligonucleotide
agcagctgaaaaat

SEQ ID NO: 20450 - DNA, 14 bp, Artificial Sequence
  Description of Artificial Sequence: Synthetic oligonucleotide
aagcagctgaaaaa

SEQ ID NO: 20451 - DNA, 14 bp, Artificial Sequence
  Description of Artificial Sequence: Synthetic oligonucleotide
taagcagctgaaaa

SEQ ID NO: 20452 - DNA, 14 bp, Artificial Sequence
  Description of Artificial Sequence: Synthetic oligonucleotide
ttaagcagctgaaa

SEQ ID NO: 20453 - DNA, 14 bp, Artificial Sequence
  Description of Artificial Sequence: Synthetic oligonucleotide
attaagcagctgaa

SEQ ID NO: 20454 - DNA, 14 bp, Artificial Sequence
  Description of Artificial Sequence: Synthetic oligonucleotide
tattaagcagctga

SEQ ID NO: 20455 - DNA, 14 bp, Artificial Sequence
  Description of Artificial Sequence: Synthetic oligonucleotide
ttattaagcagctg

SEQ ID NO: 20456 - DNA, 14 bp, Artificial Sequence
  Description of Artificial Sequence: Synthetic oligonucleotide
tttattaagcagct

SEQ ID NO: 20457 - DNA, 14 bp, Artificial Sequence
  Description of Artificial Sequence: Synthetic oligonucleotide
atttattaagcagc

SEQ ID NO: 20458 - DNA, 14 bp, Artificial Sequence
  Description of Artificial Sequence: Synthetic oligonucleotide
aatttattaagcag

SEQ ID NO: 20459 - DNA, 14 bp, Artificial Sequence
  Description of Artificial Sequence: Synthetic oligonucleotide
taatttattaagca

SEQ ID NO: 20460 - DNA, 14 bp, Artificial Sequence
  Description of Artificial Sequence: Synthetic oligonucleotide
ataatttattaagc

SEQ ID NO: 20461 - DNA, 14 bp, Artificial Sequence
  Description of Artificial Sequence: Synthetic oligonucleotide
cataatttattaag

SEQ ID NO: 20462 - DNA, 14 bp, Artificial Sequence
  Description of Artificial Sequence: Synthetic oligonucleotide
gcataatttattaa

SEQ ID NO: 20463 - DNA, 14 bp, Artificial Sequence
  Description of Artificial Sequence: Synthetic oligonucleotide
tgcataatttatta

SEQ ID NO: 20464 - DNA, 14 bp, Artificial Sequence
  Description of Artificial Sequence: Synthetic oligonucleotide
atgcataatttatt

SEQ ID NO: 20465 - DNA, 14 bp, Artificial Sequence
  Description of Artificial Sequence: Synthetic oligonucleotide
catgcataatttat

SEQ ID NO: 20466 - DNA, 14 bp, Artificial Sequence
  Description of Artificial Sequence: Synthetic oligonucleotide
ccatgcataattta

SEQ ID NO: 20467 - DNA, 14 bp, Artificial Sequence
  Description of Artificial Sequence: Synthetic oligonucleotide
gccatgcataattt

SEQ ID NO: 20468 - DNA, 14 bp, Artificial Sequence
  Description of Artificial Sequence: Synthetic oligonucleotide
ggccatgcataatt

SEQ ID NO: 20469 - DNA, 14 bp, Artificial Sequence
  Description of Artificial Sequence: Synthetic oligonucleotide
gggccatgcataat

SEQ ID NO: 20470 - DNA, 14 bp, Artificial Sequence
  Description of Artificial Sequence: Synthetic oligonucleotide
tgggccatgcataa

SEQ ID NO: 20471 - DNA, 14 bp, Artificial Sequence
  Description of Artificial Sequence: Synthetic oligonucleotide
ctgggccatgcata

SEQ ID NO: 20472 - DNA, 14 bp, Artificial Sequence
  Description of Artificial Sequence: Synthetic oligonucleotide
gctgggccatgcat

SEQ ID NO: 20473 - DNA, 14 bp, Artificial Sequence
  Description of Artificial Sequence: Synthetic oligonucleotide
ggctgggccatgca

SEQ ID NO: 20474 - DNA, 14 bp, Artificial Sequence
  Description of Artificial Sequence: Synthetic oligonucleotide
tggctgggccatgc

SEQ ID NO: 20475 - DNA, 14 bp, Artificial Sequence
  Description of Artificial Sequence: Synthetic oligonucleotide
ttggctgggccatg

SEQ ID NO: 20476 - DNA, 14 bp, Artificial Sequence
  Description of Artificial Sequence: Synthetic oligonucleotide
cttggctgggccat

SEQ ID NO: 20477 - DNA, 14 bp, Artificial Sequence
  Description of Artificial Sequence: Synthetic oligonucleotide
ccttggctgggcca

SEQ ID NO: 20478 - DNA, 14 bp, Artificial Sequence
  Description of Artificial Sequence: Synthetic oligonucleotide
tccttggctgggcc

SEQ ID NO: 20479 - DNA, 14 bp, Artificial Sequence
  Description of Artificial Sequence: Synthetic oligonucleotide
gtccttggctgggc

SEQ ID NO: 20480 - DNA, 14 bp, Artificial Sequence
  Description of Artificial Sequence: Synthetic oligonucleotide
agtccttggctggg

SEQ ID NO: 20481 - DNA, 14 bp, Artificial Sequence
  Description of Artificial Sequence: Synthetic oligonucleotide
cagtccttggctgg

SEQ ID NO: 20482 - DNA, 14 bp, Artificial Sequence
  Description of Artificial Sequence: Synthetic oligonucleotide
acagtccttggctg

SEQ ID NO: 20483 - DNA, 14 bp, Artificial Sequence
  Description of Artificial Sequence: Synthetic oligonucleotide
aacagtccttggct

SEQ ID NO: 20484 - DNA, 14 bp, Artificial Sequence
  Description of Artificial Sequence: Synthetic oligonucleotide
gaacagtccttggc

SEQ ID NO: 20485 - DNA, 14 bp, Artificial Sequence
  Description of Artificial Sequence: Synthetic oligonucleotide
tgaacagtccttgg

SEQ ID NO: 20486 - DNA, 14 bp, Artificial Sequence
  Description of Artificial Sequence: Synthetic oligonucleotide
ttgaacagtccttg

SEQ ID NO: 20487 - DNA, 14 bp, Artificial Sequence
  Description of Artificial Sequence: Synthetic oligonucleotide
cttgaacagtcctt

SEQ ID NO: 20488 - DNA, 14 bp, Artificial Sequence
  Description of Artificial Sequence: Synthetic oligonucleotide
tcttgaacagtcct

SEQ ID NO: 20489 - DNA, 14 bp, Artificial Sequence
  Description of Artificial Sequence: Synthetic oligonucleotide
atcttgaacagtcc

SEQ ID NO: 20490 - DNA, 14 bp, Artificial Sequence
  Description of Artificial Sequence: Synthetic oligonucleotide
catcttgaacagtc

SEQ ID NO: 20491 - DNA, 14 bp, Artificial Sequence
  Description of Artificial Sequence: Synthetic oligonucleotide
acatcttgaacagt

SEQ ID NO: 20492 - DNA, 14 bp, Artificial Sequence
  Description of Artificial Sequence: Synthetic oligonucleotide
tacatcttgaacag

SEQ ID NO: 20493 - DNA, 14 bp, Artificial Sequence
  Description of Artificial Sequence: Synthetic oligonucleotide
ctacatcttgaaca

SEQ ID NO: 20494 - DNA, 14 bp, Artificial Sequence
  Description of Artificial Sequence: Synthetic oligonucleotide
tctacatcttgaac

SEQ ID NO: 20495 - DNA, 14 bp, Artificial Sequence
  Description of Artificial Sequence: Synthetic oligonucleotide
ctctacatcttgaa

SEQ ID NO: 20496 - DNA, 14 bp, Artificial Sequence
  Description of Artificial Sequence: Synthetic oligonucleotide
cctctacatcttga

SEQ ID NO: 20497 - DNA, 14 bp, Artificial Sequence
  Description of Artificial Sequence: Synthetic oligonucleotide
tcctctacatcttg

SEQ ID NO: 20498 - DNA, 14 bp, Artificial Sequence
  Description of Artificial Sequence: Synthetic oligonucleotide
ctcctctacatctt

SEQ ID NO: 20499 - DNA, 14 bp, Artificial Sequence
  Description of Artificial Sequence: Synthetic oligonucleotide
gctcctctacatct

SEQ ID NO: 20500 - DNA, 14 bp, Artificial Sequence
  Description of Artificial Sequence: Synthetic oligonucleotide
cgctcctctacatc

SEQ ID NO: 20501 - DNA, 14 bp, Artificial Sequence
  Description of Artificial Sequence: Synthetic oligonucleotide
tcgctcctctacat

SEQ ID NO: 20502 - DNA, 14 bp, Artificial Sequence
  Description of Artificial Sequence: Synthetic oligonucleotide
ctcgctcctctaca

SEQ ID NO: 20503 - DNA, 14 bp, Artificial Sequence
  Description of Artificial Sequence: Synthetic oligonucleotide
actcgctcctctac

SEQ ID NO: 20504 - DNA, 14 bp, Artificial Sequence
  Description of Artificial Sequence: Synthetic oligonucleotide
aactcgctcctcta

SEQ ID NO: 20505 - DNA, 14 bp, Artificial Sequence
  Description of Artificial Sequence: Synthetic oligonucleotide
gaactcgctcctct

SEQ ID NO: 20506 - DNA, 14 bp, Artificial Sequence
  Description of Artificial Sequence: Synthetic oligonucleotide
tgaactcgctcctc

SEQ ID NO: 20507 - DNA, 14 bp, Artificial Sequence
  Description of Artificial Sequence: Synthetic oligonucleotide
ctgaactcgctcct

SEQ ID NO: 20508 - DNA, 14 bp, Artificial Sequence
  Description of Artificial Sequence: Synthetic oligonucleotide
tctgaactcgctcc

SEQ ID NO: 20509 - DNA, 14 bp, Artificial Sequence
  Description of Artificial Sequence: Synthetic oligonucleotide
ttctgaactcgctc

SEQ ID NO: 20510 - DNA, 14 bp, Artificial Sequence
  Description of Artificial Sequence: Synthetic oligonucleotide
cttctgaactcgct

SEQ ID NO: 20511 - DNA, 14 bp, Artificial Sequence
  Description of Artificial Sequence: Synthetic oligonucleotide
tcttctgaactcgc

SEQ ID NO: 20512 - DNA, 14 bp, Artificial Sequence
  Description of Artificial Sequence: Synthetic oligonucleotide
gtcttctgaactcg

SEQ ID NO: 20513 - DNA, 14 bp, Artificial Sequence
  Description of Artificial Sequence: Synthetic oligonucleotide
ggtcttctgaactc

SEQ ID NO: 20514 - DNA, 14 bp, Artificial Sequence
  Description of Artificial Sequence: Synthetic oligonucleotide
aggtcttctgaact

SEQ ID NO: 20515 - DNA, 14 bp, Artificial Sequence
  Description of Artificial Sequence: Synthetic oligonucleotide
aaggtcttctgaac

SEQ ID NO: 20516 - DNA, 14 bp, Artificial Sequence
  Description of Artificial Sequence: Synthetic oligonucleotide
aaaggtcttctgaa

SEQ ID NO: 20517 - DNA, 14 bp, Artificial Sequence
  Description of Artificial Sequence: Synthetic oligonucleotide
gaaaggtcttctga

SEQ ID NO: 20518 - DNA, 14 bp, Artificial Sequence
  Description of Artificial Sequence: Synthetic oligonucleotide
ggaaaggtcttctg

SEQ ID NO: 20519 - DNA, 14 bp, Artificial Sequence
  Description of Artificial Sequence: Synthetic oligonucleotide
aggaaaggtcttct

SEQ ID NO: 20520 - DNA, 14 bp, Artificial Sequence
  Description of Artificial Sequence: Synthetic oligonucleotide
gaggaaaggtcttc

SEQ ID NO: 20521 - DNA, 14 bp, Artificial Sequence
  Description of Artificial Sequence: Synthetic oligonucleotide
tgaggaaaggtctt

SEQ ID NO: 20522 - DNA, 14 bp, Artificial Sequence
  Description of Artificial Sequence: Synthetic oligonucleotide
gtgaggaaaggtct

SEQ ID NO: 20523 - DNA, 14 bp, Artificial Sequence
  Description of Artificial Sequence: Synthetic oligonucleotide
ggtgaggaaaggtc

SEQ ID NO: 20524 - DNA, 14 bp, Artificial Sequence
  Description of Artificial Sequence: Synthetic oligonucleotide
gggtgaggaaaggt

SEQ ID NO: 20525 - DNA, 14 bp, Artificial Sequence
  Description of Artificial Sequence: Synthetic oligonucleotide
tgggtgaggaaagg

SEQ ID NO: 20526 - DNA, 14 bp, Artificial Sequence
  Description of Artificial Sequence: Synthetic oligonucleotide
ttgggtgaggaaag

SEQ ID NO: 20527 - DNA, 14 bp, Artificial Sequence
  Description of Artificial Sequence: Synthetic oligonucleotide
attgggtgaggaaa

SEQ ID NO: 20528 - DNA, 14 bp, Artificial Sequence
  Description of Artificial Sequence: Synthetic oligonucleotide
aattgggtgaggaa

SEQ ID NO: 20529 - DNA, 14 bp, Artificial Sequence
  Description of Artificial Sequence: Synthetic oligonucleotide
caattgggtgagga

SEQ ID NO: 20530 - DNA, 14 bp, Artificial Sequence
  Description of Artificial Sequence: Synthetic oligonucleotide
tcaattgggtgagg

SEQ ID NO: 20531 - DNA, 14 bp, Artificial Sequence
  Description of Artificial Sequence: Synthetic oligonucleotide
atcaattgggtgag

SEQ ID NO: 20532 - DNA, 14 bp, Artificial Sequence
  Description of Artificial Sequence: Synthetic oligonucleotide
tatcaattgggtga

SEQ ID NO: 20533 - DNA, 14 bp, Artificial Sequence
  Description of Artificial Sequence: Synthetic oligonucleotide
ttatcaattgggtg

SEQ ID NO: 20534 - DNA, 14 bp, Artificial Sequence
  Description of Artificial Sequence: Synthetic oligonucleotide
tttatcaattgggt

SEQ ID NO: 20535 - DNA, 14 bp, Artificial Sequence
  Description of Artificial Sequence: Synthetic oligonucleotide
atttatcaattggg

SEQ ID NO: 20536 - DNA, 14 bp, Artificial Sequence
  Description of Artificial Sequence: Synthetic oligonucleotide
catttatcaattgg

SEQ ID NO: 20537 - DNA, 14 bp, Artificial Sequence
  Description of Artificial Sequence: Synthetic oligonucleotide
ccatttatcaattg

SEQ ID NO: 20538 - DNA, 14 bp, Artificial Sequence
  Description of Artificial Sequence: Synthetic oligonucleotide
cccatttatcaatt

SEQ ID NO: 20539 - DNA, 14 bp, Artificial Sequence
  Description of Artificial Sequence: Synthetic oligonucleotide
gcccatttatcaat

SEQ ID NO: 20540 - DNA, 14 bp, Artificial Sequence
  Description of Artificial Sequence: Synthetic oligonucleotide
ggcccatttatcaa

SEQ ID NO: 20541 - DNA, 14 bp, Artificial Sequence
  Description of Artificial Sequence: Synthetic oligonucleotide
tggcccatttatca

SEQ ID NO: 20542 - DNA, 14 bp, Artificial Sequence
  Description of Artificial Sequence: Synthetic oligonucleotide
atggcccatttatc

SEQ ID NO: 20543 - DNA, 14 bp, Artificial Sequence
  Description of Artificial Sequence: Synthetic oligonucleotide
aatggcccatttat

SEQ ID NO: 20544 - DNA, 14 bp, Artificial Sequence
  Description of Artificial Sequence: Synthetic oligonucleotide
caatggcccattta

SEQ ID NO: 20545 - DNA, 14 bp, Artificial Sequence
  Description of Artificial Sequence: Synthetic oligonucleotide
gcaatggcccattt

SEQ ID NO: 20546 - DNA, 14 bp, Artificial Sequence
  Description of Artificial Sequence: Synthetic oligonucleotide
agcaatggcccatt

SEQ ID NO: 20547 - DNA, 14 bp, Artificial Sequence
  Description of Artificial Sequence: Synthetic oligonucleotide
cagcaatggcccat

SEQ ID NO: 20548 - DNA, 14 bp, Artificial Sequence
  Description of Artificial Sequence: Synthetic oligonucleotide
tcagcaatggccca

SEQ ID NO: 20549 - DNA, 14 bp, Artificial Sequence
  Description of Artificial Sequence: Synthetic oligonucleotide
atcagcaatggccc

SEQ ID NO: 20550 - DNA, 14 bp, Artificial Sequence
  Description of Artificial Sequence: Synthetic oligonucleotide
catcagcaatggcc

SEQ ID NO: 20551 - DNA, 14 bp, Artificial Sequence
  Description of Artificial Sequence: Synthetic oligonucleotide
gcatcagcaatggc

SEQ ID NO: 20552 - DNA, 14 bp, Artificial Sequence
  Description of Artificial Sequence: Synthetic oligonucleotide
tgcatcagcaatgg

SEQ ID NO: 20553 - DNA, 14 bp, Artificial Sequence
  Description of Artificial Sequence: Synthetic oligonucleotide
gtgcatcagcaatg

SEQ ID NO: 20554 - DNA, 14 bp, Artificial Sequence
  Description of Artificial Sequence: Synthetic oligonucleotide
tgtgcatcagcaat

SEQ ID NO: 20555 - DNA, 14 bp, Artificial Sequence
  Description of Artificial Sequence: Synthetic oligonucleotide
ttgtgcatcagcaa

SEQ ID NO: 20556 - DNA, 14 bp, Artificial Sequence
  Description of Artificial Sequence: Synthetic oligonucleotide
attgtgcatcagca

SEQ ID NO: 20557 - DNA, 14 bp, Artificial Sequence
  Description of Artificial Sequence: Synthetic oligonucleotide
gattgtgcatcagc

SEQ ID NO: 20558 - DNA, 14 bp, Artificial Sequence
  Description of Artificial Sequence: Synthetic oligonucleotide
agattgtgcatcag

SEQ ID NO: 20559 - DNA, 14 bp, Artificial Sequence
  Description of Artificial Sequence: Synthetic oligonucleotide
cagattgtgcatca

SEQ ID NO: 20560 - DNA, 14 bp, Artificial Sequence
  Description of Artificial Sequence: Synthetic oligonucleotide
gcagattgtgcatc

SEQ ID NO: 20561 - DNA, 14 bp, Artificial Sequence
  Description of Artificial Sequence: Synthetic oligonucleotide
agcagattgtgcat

SEQ ID NO: 20562 - DNA, 14 bp, Artificial Sequence
  Description of Artificial Sequence: Synthetic oligonucleotide
tagcagattgtgca

SEQ ID NO: 20563 - DNA, 14 bp, Artificial Sequence
  Description of Artificial Sequence: Synthetic oligonucleotide
atagcagattgtgc

SEQ ID NO: 20564 - DNA, 14 bp, Artificial Sequence
  Description of Artificial Sequence: Synthetic oligonucleotide
tatagcagattgtg

SEQ ID NO: 20565 - DNA, 14 bp, Artificial Sequence
  Description of Artificial Sequence: Synthetic oligonucleotide
ctatagcagattgt

SEQ ID NO: 20566 - DNA, 14 bp, Artificial Sequence
  Description of Artificial Sequence: Synthetic oligonucleotide
tctatagcagattg

SEQ ID NO: 20567 - DNA, 14 bp, Artificial Sequence
  Description of Artificial Sequence: Synthetic oligonucleotide
ttctatagcagatt

SEQ ID NO: 20568 - DNA, 14 bp, Artificial Sequence
  Description of Artificial Sequence: Synthetic oligonucleotide
tttctatagcagat

SEQ ID NO: 20569 - DNA, 14 bp, Artificial Sequence
  Description of Artificial Sequence: Synthetic oligonucleotide
ttttctatagcaga

SEQ ID NO: 20570 - DNA, 14 bp, Artificial Sequence
  Description of Artificial Sequence: Synthetic oligonucleotide
tttttctatagcag

SEQ ID NO: 20571 - DNA, 14 bp, Artificial Sequence
  Description of Artificial Sequence: Synthetic oligonucleotide
gtttttctatagca

SEQ ID NO: 20572 - DNA, 14 bp, Artificial Sequence
  Description of Artificial Sequence: Synthetic oligonucleotide
cgtttttctatagc

SEQ ID NO: 20573 - DNA, 14 bp, Artificial Sequence
  Description of Artificial Sequence: Synthetic oligonucleotide
tcgtttttctatag

SEQ ID NO: 20574 - DNA, 14 bp, Artificial Sequence
  Description of Artificial Sequence: Synthetic oligonucleotide
ttcgtttttctata

SEQ ID NO: 20575 - DNA, 14 bp, Artificial Sequence
  Description of Artificial Sequence: Synthetic oligonucleotide
tttcgtttttctat

SEQ ID NO: 20576 - DNA, 14 bp, Artificial Sequence
  Description of Artificial Sequence: Synthetic oligonucleotide
ttttcgtttttcta

SEQ ID NO: 20577 - DNA, 14 bp, Artificial Sequence
  Description of Artificial Sequence: Synthetic oligonucleotide
gttttcgtttttct

SEQ ID NO: 20578 - DNA, 14 bp, Artificial Sequence
  Description of Artificial Sequence: Synthetic oligonucleotide
cgttttcgtttttc

SEQ ID NO: 20579 - DNA, 14 bp, Artificial Sequence
  Description of Artificial Sequence: Synthetic oligonucleotide
tcgttttcgttttt

SEQ ID NO: 20580 - DNA, 14 bp, Artificial Sequence
  Description of Artificial Sequence: Synthetic oligonucleotide
ttcgttttcgtttt

SEQ ID NO: 20581 - DNA, 14 bp, Artificial Sequence
  Description of Artificial Sequence: Synthetic oligonucleotide
cttcgttttcgttt

SEQ ID NO: 20582 - DNA, 14 bp, Artificial Sequence
  Description of Artificial Sequence: Synthetic oligonucleotide
tcttcgttttcgtt

SEQ ID NO: 20583 - DNA, 14 bp, Artificial Sequence
  Description of Artificial Sequence: Synthetic oligonucleotide
ttcttcgttttcgt

SEQ ID NO: 20584 - DNA, 14 bp, Artificial Sequence
  Description of Artificial Sequence: Synthetic oligonucleotide
tttcttcgttttcg

SEQ ID NO: 20585 - DNA, 14 bp, Artificial Sequence
  Description of Artificial Sequence: Synthetic oligonucleotide
atttcttcgttttc

SEQ ID NO: 20586 - DNA, 14 bp, Artificial Sequence
  Description of Artificial Sequence: Synthetic oligonucleotide
gatttcttcgtttt

SEQ ID NO: 20587 - DNA, 14 bp, Artificial Sequence
  Description of Artificial Sequence: Synthetic oligonucleotide
ggatttcttcgttt

SEQ ID NO: 20588 - DNA, 14 bp, Artificial Sequence
  Description of Artificial Sequence: Synthetic oligonucleotide
aggatttcttcgtt

SEQ ID NO: 20589 - DNA, 14 bp, Artificial Sequence
  Description of Artificial Sequence: Synthetic oligonucleotide
gaggatttcttcgt

SEQ ID NO: 20590 - DNA, 14 bp, Artificial Sequence
  Description of Artificial Sequence: Synthetic oligonucleotide
agaggatttcttcg

SEQ ID NO: 20591 - DNA, 14 bp, Artificial Sequence
  Description of Artificial Sequence: Synthetic oligonucleotide
aagaggatttcttc

SEQ ID NO: 20592 - DNA, 14 bp, Artificial Sequence
  Description of Artificial Sequence: Synthetic oligonucleotide
aaagaggatttctt

SEQ ID NO: 20593 - DNA, 14 bp, Artificial Sequence
  Description of Artificial Sequence: Synthetic oligonucleotide
aaaagaggatttct

SEQ ID NO: 20594 - DNA, 14 bp, Artificial Sequence
  Description of Artificial Sequence: Synthetic oligonucleotide
taaaagaggatttc

SEQ ID NO: 20595 - DNA, 14 bp, Artificial Sequence
  Description of Artificial Sequence: Synthetic oligonucleotide
gtaaaagaggattt

SEQ ID NO: 20596 - DNA, 14 bp, Artificial Sequence
  Description of Artificial Sequence: Synthetic oligonucleotide
agtaaaagaggatt

SEQ ID NO: 20597 - DNA, 14 bp, Artificial Sequence
  Description of Artificial Sequence: Synthetic oligonucleotide
cagtaaaagaggat

SEQ ID NO: 20598 - DNA, 14 bp, Artificial Sequence
  Description of Artificial Sequence: Synthetic oligonucleotide
gcagtaaaagagga

SEQ ID NO: 20599 - DNA, 14 bp, Artificial Sequence
  Description of Artificial Sequence: Synthetic oligonucleotide
ggcagtaaaagagg

SEQ ID NO: 20600 - DNA, 14 bp, Artificial Sequence
  Description of Artificial Sequence: Synthetic oligonucleotide
aggcagtaaaagag

SEQ ID NO: 20601 - DNA, 14 bp, Artificial Sequence
  Description of Artificial Sequence: Synthetic oligonucleotide
caggcagtaaaaga

SEQ ID NO: 20602 - DNA, 14 bp, Artificial Sequence
  Description of Artificial Sequence: Synthetic oligonucleotide
acaggcagtaaaag

SEQ ID NO: 20603 - DNA, 14 bp, Artificial Sequence
  Description of Artificial Sequence: Synthetic oligonucleotide
cacaggcagtaaaa

SEQ ID NO: 20604 - DNA, 14 bp, Artificial Sequence
  Description of Artificial Sequence: Synthetic oligonucleotide
ccacaggcagtaaa

SEQ ID NO: 20605 - DNA, 14 bp, Artificial Sequence
  Description of Artificial Sequence: Synthetic oligonucleotide
tccacaggcagtaa

SEQ ID NO: 20606 - DNA, 14 bp, Artificial Sequence
  Description of Artificial Sequence: Synthetic oligonucleotide
gtccacaggcagta

SEQ ID NO: 20607 - DNA, 14 bp, Artificial Sequence
  Description of Artificial Sequence: Synthetic oligonucleotide
tgtccacaggcagt

SEQ ID NO: 20608 - DNA, 14 bp, Artificial Sequence
  Description of Artificial Sequence: Synthetic oligonucleotide
ttgtccacaggcag

SEQ ID NO: 20609 - DNA, 14 bp, Artificial Sequence
  Description of Artificial Sequence: Synthetic oligonucleotide
tttgtccacaggca

SEQ ID NO: 20610 - DNA, 14 bp, Artificial Sequence
  Description of Artificial Sequence: Synthetic oligonucleotide
ttttgtccacaggc

SEQ ID NO: 20611 - DNA, 14 bp, Artificial Sequence
  Description of Artificial Sequence: Synthetic oligonucleotide
attttgtccacagg

SEQ ID NO: 20612 - DNA, 14 bp, Artificial Sequence
  Description of Artificial Sequence: Synthetic oligonucleotide
gattttgtccacag

SEQ ID NO: 20613 - DNA, 14 bp, Artificial Sequence
  Description of Artificial Sequence: Synthetic oligonucleotide
ggattttgtccaca

SEQ ID NO: 20614 - DNA, 14 bp, Artificial Sequence
  Description of Artificial Sequence: Synthetic oligonucleotide
tggattttgtccac

SEQ ID NO: 20615 - DNA, 14 bp, Artificial Sequence
  Description of Artificial Sequence: Synthetic oligonucleotide
atggattttgtcca

SEQ ID NO: 20616 - DNA, 14 bp, Artificial Sequence
  Description of Artificial Sequence: Synthetic oligonucleotide
gatggattttgtcc

SEQ ID NO: 20617 - DNA, 14 bp, Artificial Sequence
  Description of Artificial Sequence: Synthetic oligonucleotide
ggatggattttgtc

SEQ ID NO: 20618 - DNA, 14 bp, Artificial Sequence
  Description of Artificial Sequence: Synthetic oligonucleotide
aggatggattttgt

SEQ ID NO: 20619 - DNA, 14 bp, Artificial Sequence
  Description of Artificial Sequence: Synthetic oligonucleotide
aaggatggattttg

SEQ ID NO: 20620 - DNA, 14 bp, Artificial Sequence
  Description of Artificial Sequence: Synthetic oligonucleotide
gaaggatggatttt

SEQ ID NO: 20621 - DNA, 14 bp, Artificial Sequence
  Description of Artificial Sequence: Synthetic oligonucleotide
cgaaggatggattt

SEQ ID NO: 20622 - DNA, 14 bp, Artificial Sequence
  Description of Artificial Sequence: Synthetic oligonucleotide
acgaaggatggatt

SEQ ID NO: 20623 - DNA, 14 bp, Artificial Sequence
  Description of Artificial Sequence: Synthetic oligonucleotide
aacgaaggatggat

SEQ ID NO: 20624 - DNA, 14 bp, Artificial Sequence
  Description of Artificial Sequence: Synthetic oligonucleotide
caacgaaggatgga

SEQ ID NO: 20625 - DNA, 14 bp, Artificial Sequence
  Description of Artificial Sequence: Synthetic oligonucleotide
tcaacgaaggatgg

SEQ ID NO: 20626 - DNA, 14 bp, Artificial Sequence
  Description of Artificial Sequence: Synthetic oligonucleotide
ttcaacgaaggatg

SEQ ID NO: 20627 - DNA, 14 bp, Artificial Sequence
  Description of Artificial Sequence: Synthetic oligonucleotide
cttcaacgaaggat

SEQ ID NO: 20628 - DNA, 14 bp, Artificial Sequence
  Description of Artificial Sequence: Synthetic oligonucleotide
ccttcaacgaagga

SEQ ID NO: 20629 - DNA, 14 bp, Artificial Sequence
  Description of Artificial Sequence: Synthetic oligonucleotide
tccttcaacgaagg

SEQ ID NO: 20630 - DNA, 14 bp, Artificial Sequence
  Description of Artificial Sequence: Synthetic oligonucleotide
ttccttcaacgaag

SEQ ID NO: 20631 - DNA, 14 bp, Artificial Sequence
  Description of Artificial Sequence: Synthetic oligonucleotide
cttccttcaacgaa

SEQ ID NO: 20632 - DNA, 14 bp, Artificial Sequence
  Description of Artificial Sequence: Synthetic oligonucleotide
acttccttcaacga

SEQ ID NO: 20633 - DNA, 14 bp, Artificial Sequence
  Description of Artificial Sequence: Synthetic oligonucleotide
tacttccttcaacg

SEQ ID NO: 20634 - DNA, 14 bp, Artificial Sequence
  Description of Artificial Sequence: Synthetic oligonucleotide
atacttccttcaac

SEQ ID NO: 20635 - DNA, 14 bp, Artificial Sequence
  Description of Artificial Sequence: Synthetic oligonucleotide
aatacttccttcaa

SEQ ID NO: 20636 - DNA, 14 bp, Artificial Sequence
  Description of Artificial Sequence: Synthetic oligonucleotide
taatacttccttca

SEQ ID NO: 20637 - DNA, 14 bp, Artificial Sequence
  Description of Artificial Sequence: Synthetic oligonucleotide
ctaatacttccttc

SEQ ID NO: 20638 - DNA, 14 bp, Artificial Sequence
  Description of Artificial Sequence: Synthetic oligonucleotide
cctaatacttcctt

SEQ ID NO: 20639 - DNA, 14 bp, Artificial Sequence
  Description of Artificial Sequence: Synthetic oligonucleotide
ccctaatacttcct

SEQ ID NO: 20640 - DNA, 14 bp, Artificial Sequence
  Description of Artificial Sequence: Synthetic oligonucleotide
accctaatacttcc

SEQ ID NO: 20641 - DNA, 14 bp, Artificial Sequence
  Description of Artificial Sequence: Synthetic oligonucleotide
taccctaatacttc

SEQ ID NO: 20642 - DNA, 14 bp, Artificial Sequence
  Description of Artificial Sequence: Synthetic oligonucleotide
gtaccctaatactt

SEQ ID NO: 20643 - DNA, 14 bp, Artificial Sequence
  Description of Artificial Sequence: Synthetic oligonucleotide
tgtaccctaatact

SEQ ID NO: 20644 - DNA, 14 bp, Artificial Sequence
  Description of Artificial Sequence: Synthetic oligonucleotide
ttgtaccctaatac

SEQ ID NO: 20645 - DNA, 14 bp, Artificial Sequence
  Description of Artificial Sequence: Synthetic oligonucleotide
tttgtaccctaata

SEQ ID NO: 20646 - DNA, 14 bp, Artificial Sequence
  Description of Artificial Sequence: Synthetic oligonucleotide
ctttgtaccctaat

SEQ ID NO: 20647 - DNA, 14 bp, Artificial Sequence
  Description of Artificial Sequence: Synthetic oligonucleotide
actttgtaccctaa

SEQ ID NO: 20648 - DNA, 14 bp, Artificial Sequence
  Description of Artificial Sequence: Synthetic oligonucleotide
cactttgtacccta

SEQ ID NO: 20649 - DNA, 14 bp, Artificial Sequence
  Description of Artificial Sequence: Synthetic oligonucleotide
ccactttgtaccct

SEQ ID NO: 20650 - DNA, 14 bp, Artificial Sequence
  Description of Artificial Sequence: Synthetic oligonucleotide
tccactttgtaccc

SEQ ID NO: 20651 - DNA, 14 bp, Artificial Sequence
  Description of Artificial Sequence: Synthetic oligonucleotide
gtccactttgtacc

SEQ ID NO: 20652 - DNA, 14 bp, Artificial Sequence
  Description of Artificial Sequence: Synthetic oligonucleotide
agtccactttgtac

SEQ ID NO: 20653 - DNA, 14 bp, Artificial Sequence
  Description of Artificial Sequence: Synthetic oligonucleotide
tagtccactttgta

SEQ ID NO: 20654 - DNA, 14 bp, Artificial Sequence
  Description of Artificial Sequence: Synthetic oligonucleotide
gtagtccactttgt

SEQ ID NO: 20655 - DNA, 14 bp, Artificial Sequence
  Description of Artificial Sequence: Synthetic oligonucleotide
ggtagtccactttg

SEQ ID NO: 20656 - DNA, 14 bp, Artificial Sequence
  Description of Artificial Sequence: Synthetic oligonucleotide
tggtagtccacttt

SEQ ID NO: 20657 - DNA, 14 bp, Artificial Sequence
  Description of Artificial Sequence: Synthetic oligonucleotide
atggtagtccactt

SEQ ID NO: 20658 - DNA, 14 bp, Artificial Sequence
  Description of Artificial Sequence: Synthetic oligonucleotide
catggtagtccact

SEQ ID NO: 20659 - DNA, 14 bp, Artificial Sequence
  Description of Artificial Sequence: Synthetic oligonucleotide
acatggtagtccac

SEQ ID NO: 20660 - DNA, 14 bp, Artificial Sequence
  Description of Artificial Sequence: Synthetic oligonucleotide
tacatggtagtcca

SEQ ID NO: 20661 - DNA, 14 bp, Artificial Sequence
  Description of Artificial Sequence: Synthetic oligonucleotide
atacatggtagtcc

SEQ ID NO: 20662 - DNA, 14 bp, Artificial Sequence
  Description of Artificial Sequence: Synthetic oligonucleotide
gatacatggtagtc

SEQ ID NO: 20663 - DNA, 14 bp, Artificial Sequence
  Description of Artificial Sequence: Synthetic oligonucleotide
ggatacatggtagt

SEQ ID NO: 20664 - DNA, 14 bp, Artificial Sequence
  Description of Artificial Sequence: Synthetic oligonucleotide
gggatacatggtag

SEQ ID NO: 20665 - DNA, 14 bp, Artificial Sequence
  Description of Artificial Sequence: Synthetic oligonucleotide
agggatacatggta

SEQ ID NO: 20666 - DNA, 14 bp, Artificial Sequence
  Description of Artificial Sequence: Synthetic oligonucleotide
tagggatacatggt

SEQ ID NO: 20667 - DNA, 14 bp, Artificial Sequence
  Description of Artificial Sequence: Synthetic oligonucleotide
atagggatacatgg

SEQ ID NO: 20668 - DNA, 14 bp, Artificial Sequence
  Description of Artificial Sequence: Synthetic oligonucleotide
tatagggatacatg

SEQ ID NO: 20669 - DNA, 14 bp, Artificial Sequence
  Description of Artificial Sequence: Synthetic oligonucleotide
atatagggatacat

SEQ ID NO: 20670 - DNA, 14 bp, Artificial Sequence
  Description of Artificial Sequence: Synthetic oligonucleotide
tatatagggataca

SEQ ID NO: 20671 - DNA, 14 bp, Artificial Sequence
  Description of Artificial Sequence: Synthetic oligonucleotide
atatatagggatac

SEQ ID NO: 20672 - DNA, 14 bp, Artificial Sequence
  Description of Artificial Sequence: Synthetic oligonucleotide
aatatatagggata

SEQ ID NO: 20673 - DNA, 14 bp, Artificial Sequence
  Description of Artificial Sequence: Synthetic oligonucleotide
caatatatagggat

SEQ ID NO: 20674 - DNA, 14 bp, Artificial Sequence
  Description of Artificial Sequence: Synthetic oligonucleotide
acaatatataggga

SEQ ID NO: 20675 - DNA, 14 bp, Artificial Sequence
  Description of Artificial Sequence: Synthetic oligonucleotide
cacaatatataggg

SEQ ID NO: 20676 - DNA, 14 bp, Artificial Sequence
  Description of Artificial Sequence: Synthetic oligonucleotide
ccacaatatatagg

SEQ ID NO: 20677 - DNA, 14 bp, Artificial Sequence
  Description of Artificial Sequence: Synthetic oligonucleotide
gccacaatatatag

SEQ ID NO: 20678 - DNA, 14 bp, Artificial Sequence
  Description of Artificial Sequence: Synthetic oligonucleotide
agccacaatatata

SEQ ID NO: 20679 - DNA, 14 bp, Artificial Sequence
  Description of Artificial Sequence: Synthetic oligonucleotide
cagccacaatatat

SEQ ID NO: 20680 - DNA, 14 bp, Artificial Sequence
  Description of Artificial Sequence: Synthetic oligonucleotide
acagccacaatata

SEQ ID NO: 20681 - DNA, 14 bp, Artificial Sequence
  Description of Artificial Sequence: Synthetic oligonucleotide
tacagccacaatat

SEQ ID NO: 20682 - DNA, 14 bp, Artificial Sequence
  Description of Artificial Sequence: Synthetic oligonucleotide
gtacagccacaata

SEQ ID NO: 20683 - DNA, 14 bp, Artificial Sequence
  Description of Artificial Sequence: Synthetic oligonucleotide
agtacagccacaat

SEQ ID NO: 20684 - DNA, 14 bp, Artificial Sequence
  Description of Artificial Sequence: Synthetic oligonucleotide
tagtacagccacaa

SEQ ID NO: 20685 - DNA, 14 bp, Artificial Sequence
  Description of Artificial Sequence: Synthetic oligonucleotide
ctagtacagccaca

SEQ ID NO: 20686 - DNA, 14 bp, Artificial Sequence
  Description of Artificial Sequence: Synthetic oligonucleotide
tctagtacagccac

SEQ ID NO: 20687 - DNA, 14 bp, Artificial Sequence
  Description of Artificial Sequence: Synthetic oligonucleotide
ctctagtacagcca

SEQ ID NO: 20688 - DNA, 14 bp, Artificial Sequence
  Description of Artificial Sequence: Synthetic oligonucleotide
actctagtacagcc

SEQ ID NO: 20689 - DNA, 14 bp, Artificial Sequence
  Description of Artificial Sequence: Synthetic oligonucleotide
tactctagtacagc

SEQ ID NO: 20690 - DNA, 14 bp, Artificial Sequence
  Description of Artificial Sequence: Synthetic oligonucleotide
atactctagtacag

SEQ ID NO: 20691 - DNA, 14 bp, Artificial Sequence
  Description of Artificial Sequence: Synthetic oligonucleotide
tatactctagtaca

SEQ ID NO: 20692 - DNA, 14 bp, Artificial Sequence
  Description of Artificial Sequence: Synthetic oligonucleotide
atatactctagtac

SEQ ID NO: 20693 - DNA, 14 bp, Artificial Sequence
  Description of Artificial Sequence: Synthetic oligonucleotide
gatatactctagta

SEQ ID NO: 20694 - DNA, 14 bp, Artificial Sequence
  Description of Artificial Sequence: Synthetic oligonucleotide
agatatactctagt

SEQ ID NO: 20695 - DNA, 14 bp, Artificial Sequence
  Description of Artificial Sequence: Synthetic oligonucleotide
gagatatactctag

SEQ ID NO: 20696 - DNA, 14 bp, Artificial Sequence
  Description of Artificial Sequence: Synthetic oligonucleotide
tgagatatactcta

SEQ ID NO: 20697 - DNA, 14 bp, Artificial Sequence
  Description of Artificial Sequence: Synthetic oligonucleotide
ctgagatatactct

SEQ ID NO: 20698 - DNA, 14 bp, Artificial Sequence
  Description of Artificial Sequence: Synthetic oligonucleotide
gctgagatatactc

SEQ ID NO: 20699 - DNA, 14 bp, Artificial Sequence
  Description of Artificial Sequence: Synthetic oligonucleotide
agctgagatatact

SEQ ID NO: 20700 - DNA, 14 bp, Artificial Sequence
  Description of Artificial Sequence: Synthetic oligonucleotide
cagctgagatatac

SEQ ID NO: 20701 - DNA, 14 bp, Artificial Sequence
  Description of Artificial Sequence: Synthetic oligonucleotide
tcagctgagatata

SEQ ID NO: 20702 - DNA, 14 bp, Artificial Sequence
  Description of Artificial Sequence: Synthetic oligonucleotide
atcagctgagatat

SEQ ID NO: 20703 - DNA, 14 bp, Artificial Sequence
  Description of Artificial Sequence: Synthetic oligonucleotide
tatcagctgagata

SEQ ID NO: 20704 - DNA, 14 bp, Artificial Sequence
  Description of Artificial Sequence: Synthetic oligonucleotide
atatcagctgagat

SEQ ID NO: 20705 - DNA, 14 bp, Artificial Sequence
  Description of Artificial Sequence: Synthetic oligonucleotide
aatatcagctgaga

SEQ ID NO: 20706 - DNA, 14 bp, Artificial Sequence
  Description of Artificial Sequence: Synthetic oligonucleotide
aaatatcagctgag

SEQ ID NO: 20707 - DNA, 14 bp, Artificial Sequence
  Description of Artificial Sequence: Synthetic oligonucleotide
aaaatatcagctga

SEQ ID NO: 20708 - DNA, 14 bp, Artificial Sequence
  Description of Artificial Sequence: Synthetic oligonucleotide
taaaatatcagctg

SEQ ID NO: 20709 - DNA, 14 bp, Artificial Sequence
  Description of Artificial Sequence: Synthetic oligonucleotide
ttaaaatatcagct

SEQ ID NO: 20710 - DNA, 14 bp, Artificial Sequence
  Description of Artificial Sequence: Synthetic oligonucleotide
tttaaaatatcagc

SEQ ID NO: 20711 - DNA, 14 bp, Artificial Sequence
  Description of Artificial Sequence: Synthetic oligonucleotide
ttttaaaatatcag

SEQ ID NO: 20712 - DNA, 14 bp, Artificial Sequence
  Description of Artificial Sequence: Synthetic oligonucleotide
attttaaaatatca

SEQ ID NO: 20713 - DNA, 14 bp, Artificial Sequence
  Description of Artificial Sequence: Synthetic oligonucleotide
aattttaaaatatc

SEQ ID NO: 20714 - DNA, 14 bp, Artificial Sequence
  Description of Artificial Sequence: Synthetic oligonucleotide
caattttaaaatat

SEQ ID NO: 20715 - DNA, 14 bp, Artificial Sequence
  Description of Artificial Sequence: Synthetic oligonucleotide
ccaattttaaaata

SEQ ID NO: 20716 - DNA, 14 bp, Artificial Sequence
  Description of Artificial Sequence: Synthetic oligonucleotide
gccaattttaaaat

SEQ ID NO: 20717 - DNA, 14 bp, Artificial Sequence
  Description of Artificial Sequence: Synthetic oligonucleotide
agccaattttaaaa

SEQ ID NO: 20718 - DNA, 14 bp, Artificial Sequence
  Description of Artificial Sequence: Synthetic oligonucleotide
cagccaattttaaa

SEQ ID NO: 20719 - DNA, 14 bp, Artificial Sequence
  Description of Artificial Sequence: Synthetic oligonucleotide
ccagccaattttaa

SEQ ID NO: 20720 - DNA, 14 bp, Artificial Sequence
  Description of Artificial Sequence: Synthetic oligonucleotide
accagccaatttta

SEQ ID NO: 20721 - DNA, 14 bp, Artificial Sequence
  Description of Artificial Sequence: Synthetic oligonucleotide
taccagccaatttt

SEQ ID NO: 20722 - DNA, 14 bp, Artificial Sequence
  Description of Artificial Sequence: Synthetic oligonucleotide
ttaccagccaattt

SEQ ID NO: 20723 - DNA, 14 bp, Artificial Sequence
  Description of Artificial Sequence: Synthetic oligonucleotide
attaccagccaatt

SEQ ID NO: 20724 - DNA, 14 bp, Artificial Sequence
  Description of Artificial Sequence: Synthetic oligonucleotide
aattaccagccaat

SEQ ID NO: 20725 - DNA, 14 bp, Artificial Sequence
  Description of Artificial Sequence: Synthetic oligonucleotide
taattaccagccaa

SEQ ID NO: 20726 - DNA, 14 bp, Artificial Sequence
  Description of Artificial Sequence: Synthetic oligonucleotide
ataattaccagcca

SEQ ID NO: 20727 - DNA, 14 bp, Artificial Sequence
  Description of Artificial Sequence: Synthetic oligonucleotide
cataattaccagcc

SEQ ID NO: 20728 - DNA, 14 bp, Artificial Sequence
  Description of Artificial Sequence: Synthetic oligonucleotide
acataattaccagc

SEQ ID NO: 20729 - DNA, 14 bp, Artificial Sequence
  Description of Artificial Sequence: Synthetic oligonucleotide
aacataattaccag

SEQ ID NO: 20730 - DNA, 14 bp, Artificial Sequence
  Description of Artificial Sequence: Synthetic oligonucleotide
aaacataattacca

SEQ ID NO: 20731 - DNA, 14 bp, Artificial Sequence
  Description of Artificial Sequence: Synthetic oligonucleotide
aaaacataattacc

SEQ ID NO: 20732 - DNA, 14 bp, Artificial Sequence
  Description of Artificial Sequence: Synthetic oligonucleotide
aaaaacataattac

SEQ ID NO: 20733 - DNA, 14 bp, Artificial Sequence
  Description of Artificial Sequence: Synthetic oligonucleotide
taaaaacataatta

SEQ ID NO: 20734 - DNA, 14 bp, Artificial Sequence
  Description of Artificial Sequence: Synthetic oligonucleotide
ttaaaaacataatt

SEQ ID NO: 20735 - DNA, 14 bp, Artificial Sequence
  Description of Artificial Sequence: Synthetic oligonucleotide
attaaaaacataat

SEQ ID NO: 20736 - DNA, 14 bp, Artificial Sequence
  Description of Artificial Sequence: Synthetic oligonucleotide
tattaaaaacataa

SEQ ID NO: 20737 - DNA, 14 bp, Artificial Sequence
  Description of Artificial Sequence: Synthetic oligonucleotide
atattaaaaacata

SEQ ID NO: 20738 - DNA, 14 bp, Artificial Sequence
  Description of Artificial Sequence: Synthetic oligonucleotide
gatattaaaaacat

SEQ ID NO: 20739 - DNA, 14 bp, Artificial Sequence
  Description of Artificial Sequence: Synthetic oligonucleotide
ggatattaaaaaca

SEQ ID NO: 20740 - DNA, 14 bp, Artificial Sequence
  Description of Artificial Sequence: Synthetic oligonucleotide
cggatattaaaaac

SEQ ID NO: 20741 - DNA, 14 bp, Artificial Sequence
  Description of Artificial Sequence: Synthetic oligonucleotide
ccggatattaaaaa

SEQ ID NO: 20742 - DNA, 14 bp, Artificial Sequence
  Description of Artificial Sequence: Synthetic oligonucleotide
gccggatattaaaa

SEQ ID NO: 20743 - DNA, 14 bp, Artificial Sequence
  Description of Artificial Sequence: Synthetic oligonucleotide
tgccggatattaaa

SEQ ID NO: 20744 - DNA, 14 bp, Artificial Sequence
  Description of Artificial Sequence: Synthetic oligonucleotide
atgccggatattaa

SEQ ID NO: 20745 - DNA, 14 bp, Artificial Sequence
  Description of Artificial Sequence: Synthetic oligonucleotide
aatgccggatatta

SEQ ID NO: 20746 - DNA, 14 bp, Artificial Sequence
  Description of Artificial Sequence: Synthetic oligonucleotide
taatgccggatatt

SEQ ID NO: 20747 - DNA, 14 bp, Artificial Sequence
  Description of Artificial Sequence: Synthetic oligonucleotide
ataatgccggatat

SEQ ID NO: 20748 - DNA, 14 bp, Artificial Sequence
  Description of Artificial Sequence: Synthetic oligonucleotide
cataatgccggata

SEQ ID NO: 20749 - DNA, 14 bp, Artificial Sequence
  Description of Artificial Sequence: Synthetic oligonucleotide
tcataatgccggat

SEQ ID NO: 20750 - DNA, 14 bp, Artificial Sequence
  Description of Artificial Sequence: Synthetic oligonucleotide
ttcataatgccgga

SEQ ID NO: 20751 - DNA, 14 bp, Artificial Sequence
  Description of Artificial Sequence: Synthetic oligonucleotide
tttcataatgccgg

SEQ ID NO: 20752 - DNA, 14 bp, Artificial Sequence
  Description of Artificial Sequence: Synthetic oligonucleotide
atttcataatgccg

SEQ ID NO: 20753 - DNA, 14 bp, Artificial Sequence
  Description of Artificial Sequence: Synthetic oligonucleotide
tatttcataatgcc

SEQ ID NO: 20754 - DNA, 14 bp, Artificial Sequence
  Description of Artificial Sequence: Synthetic oligonucleotide
atatttcataatgc

SEQ ID NO: 20755 - DNA, 14 bp, Artificial Sequence
  Description of Artificial Sequence: Synthetic oligonucleotide
gatatttcataatg

SEQ ID NO: 20756 - DNA, 14 bp, Artificial Sequence
  Description of Artificial Sequence: Synthetic oligonucleotide
agatatttcataat

SEQ ID NO: 20757 - DNA, 14 bp, Artificial Sequence
  Description of Artificial Sequence: Synthetic oligonucleotide
gagatatttcataa

SEQ ID NO: 20758 - DNA, 14 bp, Artificial Sequence
  Description of Artificial Sequence: Synthetic oligonucleotide
tgagatatttcata

SEQ ID NO: 20759 - DNA, 14 bp, Artificial Sequence
  Description of Artificial Sequence: Synthetic oligonucleotide
ctgagatatttcat

SEQ ID NO: 20760 - DNA, 14 bp, Artificial Sequence
  Description of Artificial Sequence: Synthetic oligonucleotide
gctgagatatttca

SEQ ID NO: 20761 - DNA, 14 bp, Artificial Sequence
  Description of Artificial Sequence: Synthetic oligonucleotide
tgctgagatatttc

SEQ ID NO: 20762 - DNA, 14 bp, Artificial Sequence
  Description of Artificial Sequence: Synthetic oligonucleotide
ctgctgagatattt

SEQ ID NO: 20763 - DNA, 14 bp, Artificial Sequence
  Description of Artificial Sequence: Synthetic oligonucleotide
cctgctgagatatt

SEQ ID NO: 20764 - DNA, 14 bp, Artificial Sequence
  Description of Artificial Sequence: Synthetic oligonucleotide
tcctgctgagatat

SEQ ID NO: 20765 - DNA, 14 bp, Artificial Sequence
  Description of Artificial Sequence: Synthetic oligonucleotide
gtcctgctgagata

SEQ ID NO: 20766 - DNA, 14 bp, Artificial Sequence
  Description of Artificial Sequence: Synthetic oligonucleotide
tgtcctgctgagat

SEQ ID NO: 20767 - DNA, 14 bp, Artificial Sequence
  Description of Artificial Sequence: Synthetic oligonucleotide
atgtcctgctgaga

SEQ ID NO: 20768 - DNA, 14 bp, Artificial Sequence
  Description of Artificial Sequence: Synthetic oligonucleotide
aatgtcctgctgag

SEQ ID NO: 20769 - DNA, 14 bp, Artificial Sequence
  Description of Artificial Sequence: Synthetic oligonucleotide
taatgtcctgctga

SEQ ID NO: 20770 - DNA, 14 bp, Artificial Sequence
  Description of Artificial Sequence: Synthetic oligonucleotide
ttaatgtcctgctg

SEQ ID NO: 20771 - DNA, 14 bp, Artificial Sequence
  Description of Artificial Sequence: Synthetic oligonucleotide
tttaatgtcctgct

SEQ ID NO: 20772 - DNA, 14 bp, Artificial Sequence
  Description of Artificial Sequence: Synthetic oligonucleotide
ctttaatgtcctgc

SEQ ID NO: 20773 - DNA, 14 bp, Artificial Sequence
  Description of Artificial Sequence: Synthetic oligonucleotide
actttaatgtcctg

SEQ ID NO: 20774 - DNA, 14 bp, Artificial Sequence
  Description of Artificial Sequence: Synthetic oligonucleotide
cactttaatgtcct

SEQ ID NO: 20775 - DNA, 14 bp, Artificial Sequence
  Description of Artificial Sequence: Synthetic oligonucleotide
acactttaatgtcc

SEQ ID NO: 20776 - DNA, 14 bp, Artificial Sequence
  Description of Artificial Sequence: Synthetic oligonucleotide
gacactttaatgtc

SEQ ID NO: 20777 - DNA, 14 bp, Artificial Sequence
  Description of Artificial Sequence: Synthetic oligonucleotide
tgacactttaatgt

SEQ ID NO: 20778 - DNA, 14 bp, Artificial Sequence
  Description of Artificial Sequence: Synthetic oligonucleotide
ttgacactttaatg

SEQ ID NO: 20779 - DNA, 14 bp, Artificial Sequence
  Description of Artificial Sequence: Synthetic oligonucleotide
attgacactttaat

SEQ ID NO: 20780 - DNA, 14 bp, Artificial Sequence
  Description of Artificial Sequence: Synthetic oligonucleotide
cattgacactttaa

SEQ ID NO: 20781 - DNA, 14 bp, Artificial Sequence
  Description of Artificial Sequence: Synthetic oligonucleotide
acattgacacttta

SEQ ID NO: 20782 - DNA, 14 bp, Artificial Sequence
  Description of Artificial Sequence: Synthetic oligonucleotide
cacattgacacttt

SEQ ID NO: 20783 - DNA, 14 bp, Artificial Sequence
  Description of Artificial Sequence: Synthetic oligonucleotide
acacattgacactt

SEQ ID NO: 20784 - DNA, 14 bp, Artificial Sequence
  Description of Artificial Sequence: Synthetic oligonucleotide
cacacattgacact

SEQ ID NO: 20785 - DNA, 14 bp, Artificial Sequence
  Description of Artificial Sequence: Synthetic oligonucleotide
gcacacattgacac

SEQ ID NO: 20786 - DNA, 14 bp, Artificial Sequence
  Description of Artificial Sequence: Synthetic oligonucleotide
cgcacacattgaca

SEQ ID NO: 20787 - DNA, 14 bp, Artificial Sequence
  Description of Artificial Sequence: Synthetic oligonucleotide
ccgcacacattgac

SEQ ID NO: 20788 - DNA, 14 bp, Artificial Sequence
  Description of Artificial Sequence: Synthetic oligonucleotide
tccgcacacattga

SEQ ID NO: 20789 - DNA, 14 bp, Artificial Sequence
  Description of Artificial Sequence: Synthetic oligonucleotide
atccgcacacattg

SEQ ID NO: 20790 - DNA, 14 bp, Artificial Sequence
  Description of Artificial Sequence: Synthetic oligonucleotide
tatccgcacacatt

SEQ ID NO: 20791 - DNA, 14 bp, Artificial Sequence
  Description of Artificial Sequence: Synthetic oligonucleotide
ttatccgcacacat

SEQ ID NO: 20792 - DNA, 14 bp, Artificial Sequence
  Description of Artificial Sequence: Synthetic oligonucleotide
cttatccgcacaca

SEQ ID NO: 20793 - DNA, 14 bp, Artificial Sequence
  Description of Artificial Sequence: Synthetic oligonucleotide
ccttatccgcacac

SEQ ID NO: 20794 - DNA, 14 bp, Artificial Sequence
  Description of Artificial Sequence: Synthetic oligonucleotide
accttatccgcaca

SEQ ID NO: 20795 - DNA, 14 bp, Artificial Sequence
  Description of Artificial Sequence: Synthetic oligonucleotide
aaccttatccgcac

SEQ ID NO: 20796 - DNA, 14 bp, Artificial Sequence
  Description of Artificial Sequence: Synthetic oligonucleotide
aaaccttatccgca

SEQ ID NO: 20797 - DNA, 14 bp, Artificial Sequence
  Description of Artificial Sequence: Synthetic oligonucleotide
aaaaccttatccgc

SEQ ID NO: 20798 - DNA, 14 bp, Artificial Sequence
  Description of Artificial Sequence: Synthetic oligonucleotide
caaaaccttatccg

SEQ ID NO: 20799 - DNA, 14 bp, Artificial Sequence
  Description of Artificial Sequence: Synthetic oligonucleotide
tcaaaaccttatcc

SEQ ID NO: 20800 - DNA, 14 bp, Artificial Sequence
  Description of Artificial Sequence: Synthetic oligonucleotide
atcaaaaccttatc

SEQ ID NO: 20801 - DNA, 14 bp, Artificial Sequence
  Description of Artificial Sequence: Synthetic oligonucleotide
catcaaaaccttat

SEQ ID NO: 20802 - DNA, 14 bp, Artificial Sequence
  Description of Artificial Sequence: Synthetic oligonucleotide
ccatcaaaacctta

SEQ ID NO: 20803 - DNA, 14 bp, Artificial Sequence
  Description of Artificial Sequence: Synthetic oligonucleotide
tccatcaaaacctt

SEQ ID NO: 20804 - DNA, 14 bp, Artificial Sequence
  Description of Artificial Sequence: Synthetic oligonucleotide
gtccatcaaaacct

SEQ ID NO: 20805 - DNA, 14 bp, Artificial Sequence
  Description of Artificial Sequence: Synthetic oligonucleotide
tgtccatcaaaacc

SEQ ID NO: 20806 - DNA, 14 bp, Artificial Sequence
  Description of Artificial Sequence: Synthetic oligonucleotide
atgtccatcaaaac

SEQ ID NO: 20807 - DNA, 14 bp, Artificial Sequence
  Description of Artificial Sequence: Synthetic oligonucleotide
catgtccatcaaaa

SEQ ID NO: 20808 - DNA, 14 bp, Artificial Sequence
  Description of Artificial Sequence: Synthetic oligonucleotide
acatgtccatcaaa

SEQ ID NO: 20809 - DNA, 14 bp, Artificial Sequence
  Description of Artificial Sequence: Synthetic oligonucleotide
aacatgtccatcaa

SEQ ID NO: 20810 - DNA, 14 bp, Artificial Sequence
  Description of Artificial Sequence: Synthetic oligonucleotide
aaacatgtccatca

SEQ ID NO: 20811 - DNA, 14 bp, Artificial Sequence
  Description of Artificial Sequence: Synthetic oligonucleotide
caaacatgtccatc

SEQ ID NO: 20812 - DNA, 14 bp, Artificial Sequence
  Description of Artificial Sequence: Synthetic oligonucleotide
tcaaacatgtccat

SEQ ID NO: 20813 - DNA, 14 bp, Artificial Sequence
  Description of Artificial Sequence: Synthetic oligonucleotide
atcaaacatgtcca

SEQ ID NO: 20814 - DNA, 14 bp, Artificial Sequence
  Description of Artificial Sequence: Synthetic oligonucleotide
gatcaaacatgtcc

SEQ ID NO: 20815 - DNA, 14 bp, Artificial Sequence
  Description of Artificial Sequence: Synthetic oligonucleotide
tgatcaaacatgtc

SEQ ID NO: 20816 - DNA, 14 bp, Artificial Sequence
  Description of Artificial Sequence: Synthetic oligonucleotide
ctgatcaaacatgt

SEQ ID NO: 20817 - DNA, 14 bp, Artificial Sequence
  Description of Artificial Sequence: Synthetic oligonucleotide
cctgatcaaacatg

SEQ ID NO: 20818 - DNA, 14 bp, Artificial Sequence
  Description of Artificial Sequence: Synthetic oligonucleotide
tcctgatcaaacat

SEQ ID NO: 20819 - DNA, 14 bp, Artificial Sequence
  Description of Artificial Sequence: Synthetic oligonucleotide
atcctgatcaaaca

SEQ ID NO: 20820 - DNA, 14 bp, Artificial Sequence
  Description of Artificial Sequence: Synthetic oligonucleotide
catcctgatcaaac

SEQ ID NO: 20821 - DNA, 14 bp, Artificial Sequence
  Description of Artificial Sequence: Synthetic oligonucleotide
tcatcctgatcaaa

SEQ ID NO: 20822 - DNA, 14 bp, Artificial Sequence
  Description of Artificial Sequence: Synthetic oligonucleotide
gtcatcctgatcaa

SEQ ID NO: 20823 - DNA, 14 bp, Artificial Sequence
  Description of Artificial Sequence: Synthetic oligonucleotide
tgtcatcctgatca

SEQ ID NO: 20824 - DNA, 14 bp, Artificial Sequence
  Description of Artificial Sequence: Synthetic oligonucleotide
atgtcatcctgatc

SEQ ID NO: 20825 - DNA, 14 bp, Artificial Sequence
  Description of Artificial Sequence: Synthetic oligonucleotide
tatgtcatcctgat

SEQ ID NO: 20826 - DNA, 14 bp, Artificial Sequence
  Description of Artificial Sequence: Synthetic oligonucleotide
ctatgtcatcctga

SEQ ID NO: 20827 - DNA, 14 bp, Artificial Sequence
  Description of Artificial Sequence: Synthetic oligonucleotide
cctatgtcatcctg

SEQ ID NO: 20828 - DNA, 14 bp, Artificial Sequence
  Description of Artificial Sequence: Synthetic oligonucleotide
acctatgtcatcct

SEQ ID NO: 20829 - DNA, 14 bp, Artificial Sequence
  Description of Artificial Sequence: Synthetic oligonucleotide
aacctatgtcatcc

SEQ ID NO: 20830 - DNA, 14 bp, Artificial Sequence
  Description of Artificial Sequence: Synthetic oligonucleotide
aaacctatgtcatc

SEQ ID NO: 20831 - DNA, 14 bp, Artificial Sequence
  Description of Artificial Sequence: Synthetic oligonucleotide
caaacctatgtcat

SEQ ID NO: 20832 - DNA, 14 bp, Artificial Sequence
  Description of Artificial Sequence: Synthetic oligonucleotide
ccaaacctatgtca

SEQ ID NO: 20833 - DNA, 14 bp, Artificial Sequence
  Description of Artificial Sequence: Synthetic oligonucleotide
accaaacctatgtc

SEQ ID NO: 20834 - DNA, 14 bp, Artificial Sequence
  Description of Artificial Sequence: Synthetic oligonucleotide
aaccaaacctatgt

SEQ ID NO: 20835 - DNA, 14 bp, Artificial Sequence
  Description of Artificial Sequence: Synthetic oligonucleotide
aaaccaaacctatg

SEQ ID NO: 20836 - DNA, 14 bp, Artificial Sequence
  Description of Artificial Sequence: Synthetic oligonucleotide
gaaaccaaacctat

SEQ ID NO: 20837 - DNA, 14 bp, Artificial Sequence
  Description of Artificial Sequence: Synthetic oligonucleotide
agaaaccaaaccta

SEQ ID NO: 20838 - DNA, 14 bp, Artificial Sequence
  Description of Artificial Sequence: Synthetic oligonucleotide
gagaaaccaaacct

SEQ ID NO: 20839 - DNA, 14 bp, Artificial Sequence
  Description of Artificial Sequence: Synthetic oligonucleotide
agagaaaccaaacc

SEQ ID NO: 20840 - DNA, 14 bp, Artificial Sequence
  Description of Artificial Sequence: Synthetic oligonucleotide
gagagaaaccaaac

SEQ ID NO: 20841 - DNA, 14 bp, Artificial Sequence
  Description of Artificial Sequence: Synthetic oligonucleotide
agagagaaaccaaa

SEQ ID NO: 20842 - DNA, 14 bp, Artificial Sequence
  Description of Artificial Sequence: Synthetic oligonucleotide
cagagagaaaccaa

SEQ ID NO: 20843 - DNA, 14 bp, Artificial Sequence
  Description of Artificial Sequence: Synthetic oligonucleotide
acagagagaaacca

SEQ ID NO: 20844 - DNA, 14 bp, Artificial Sequence
  Description of Artificial Sequence: Synthetic oligonucleotide
cacagagagaaacc

SEQ ID NO: 20845 - DNA, 14 bp, Artificial Sequence
  Description of Artificial Sequence: Synthetic oligonucleotide
tcacagagagaaac

SEQ ID NO: 20846 - DNA, 14 bp, Artificial Sequence
  Description of Artificial Sequence: Synthetic oligonucleotide
ttcacagagagaaa

SEQ ID NO: 20847 - DNA, 14 bp, Artificial Sequence
  Description of Artificial Sequence: Synthetic oligonucleotide
cttcacagagagaa

SEQ ID NO: 20848 - DNA, 14 bp, Artificial Sequence
  Description of Artificial Sequence: Synthetic oligonucleotide
tcttcacagagaga

SEQ ID NO: 20849 - DNA, 14 bp, Artificial Sequence
  Description of Artificial Sequence: Synthetic oligonucleotide
atcttcacagagag

SEQ ID NO: 20850 - DNA, 14 bp, Artificial Sequence
  Description of Artificial Sequence: Synthetic oligonucleotide
catcttcacagaga

SEQ ID NO: 20851 - DNA, 14 bp, Artificial Sequence
  Description of Artificial Sequence: Synthetic oligonucleotide
tcatcttcacagag

SEQ ID NO: 20852 - DNA, 14 bp, Artificial Sequence
  Description of Artificial Sequence: Synthetic oligonucleotide
ttcatcttcacaga

SEQ ID NO: 20853 - DNA, 14 bp, Artificial Sequence
  Description of Artificial Sequence: Synthetic oligonucleotide
gttcatcttcacag

SEQ ID NO: 20854 - DNA, 14 bp, Artificial Sequence
  Description of Artificial Sequence: Synthetic oligonucleotide
ggttcatcttcaca

SEQ ID NO: 20855 - DNA, 14 bp, Artificial Sequence
  Description of Artificial Sequence: Synthetic oligonucleotide
aggttcatcttcac

SEQ ID NO: 20856 - DNA, 14 bp, Artificial Sequence
  Description of Artificial Sequence: Synthetic oligonucleotide
taggttcatcttca

SEQ ID NO: 20857 - DNA, 14 bp, Artificial Sequence
  Description of Artificial Sequence: Synthetic oligonucleotide
ctaggttcatcttc

SEQ ID NO: 20858 - DNA, 14 bp, Artificial Sequence
  Description of Artificial Sequence: Synthetic oligonucleotide
actaggttcatctt

SEQ ID NO: 20859 - DNA, 14 bp, Artificial Sequence
  Description of Artificial Sequence: Synthetic oligonucleotide
aactaggttcatct

SEQ ID NO: 20860 - DNA, 14 bp, Artificial Sequence
  Description of Artificial Sequence: Synthetic oligonucleotide
gaactaggttcatc

SEQ ID NO: 20861 - DNA, 14 bp, Artificial Sequence
  Description of Artificial Sequence: Synthetic oligonucleotide
agaactaggttcat

SEQ ID NO: 20862 - DNA, 14 bp, Artificial Sequence
  Description of Artificial Sequence: Synthetic oligonucleotide
aagaactaggttca

SEQ ID NO: 20863 - DNA, 14 bp, Artificial Sequence
  Description of Artificial Sequence: Synthetic oligonucleotide
gaagaactaggttc

SEQ ID NO: 20864 - DNA, 14 bp, Artificial Sequence
  Description of Artificial Sequence: Synthetic oligonucleotide
agaagaactaggtt

SEQ ID NO: 20865 - DNA, 14 bp, Artificial Sequence
  Description of Artificial Sequence: Synthetic oligonucleotide
cagaagaactaggt

SEQ ID NO: 20866 - DNA, 14 bp, Artificial Sequence
  Description of Artificial Sequence: Synthetic oligonucleotide
ccagaagaactagg

SEQ ID NO: 20867 - DNA, 14 bp, Artificial Sequence
  Description of Artificial Sequence: Synthetic oligonucleotide
accagaagaactag

SEQ ID NO: 20868 - DNA, 14 bp, Artificial Sequence
  Description of Artificial Sequence: Synthetic oligonucleotide
caccagaagaacta

SEQ ID NO: 20869 - DNA, 14 bp, Artificial Sequence
  Description of Artificial Sequence: Synthetic oligonucleotide
tcaccagaagaact

SEQ ID NO: 20870 - DNA, 14 bp, Artificial Sequence
  Description of Artificial Sequence: Synthetic oligonucleotide
ttcaccagaagaac

SEQ ID NO: 20871 - DNA, 14 bp, Artificial Sequence
  Description of Artificial Sequence: Synthetic oligonucleotide
attcaccagaagaa

SEQ ID NO: 20872 - DNA, 14 bp, Artificial Sequence
  Description of Artificial Sequence: Synthetic oligonucleotide
aattcaccagaaga

SEQ ID NO: 20873 - DNA, 14 bp, Artificial Sequence
  Description of Artificial Sequence: Synthetic oligonucleotide
taattcaccagaag

SEQ ID NO: 20874 - DNA, 14 bp, Artificial Sequence
  Description of Artificial Sequence: Synthetic oligonucleotide
ttaattcaccagaa

SEQ ID NO: 20875 - DNA, 14 bp, Artificial Sequence
  Description of Artificial Sequence: Synthetic oligonucleotide
tttaattcaccaga

SEQ ID NO: 20876 - DNA, 14 bp, Artificial Sequence
  Description of Artificial Sequence: Synthetic oligonucleotide
gtttaattcaccag

SEQ ID NO: 20877 - DNA, 14 bp, Artificial Sequence
  Description of Artificial Sequence: Synthetic oligonucleotide
agtttaattcacca

SEQ ID NO: 20878 - DNA, 14 bp, Artificial Sequence
  Description of Artificial Sequence: Synthetic oligonucleotide
tagtttaattcacc

SEQ ID NO: 20879 - DNA, 14 bp, Artificial Sequence
  Description of Artificial Sequence: Synthetic oligonucleotide
gtagtttaattcac

SEQ ID NO: 20880 - DNA, 14 bp, Artificial Sequence
  Description of Artificial Sequence: Synthetic oligonucleotide
agtagtttaattca

SEQ ID NO: 20881 - DNA, 14 bp, Artificial Sequence
  Description of Artificial Sequence: Synthetic oligonucleotide
tagtagtttaattc

SEQ ID NO: 20882 - DNA, 14 bp, Artificial Sequence
  Description of Artificial Sequence: Synthetic oligonucleotide
atagtagtttaatt

SEQ ID NO: 20883 - DNA, 14 bp, Artificial Sequence
  Description of Artificial Sequence: Synthetic oligonucleotide
catagtagtttaat

SEQ ID NO: 20884 - DNA, 14 bp, Artificial Sequence
  Description of Artificial Sequence: Synthetic oligonucleotide
tcatagtagtttaa

SEQ ID NO: 20885 - DNA, 14 bp, Artificial Sequence
  Description of Artificial Sequence: Synthetic oligonucleotide
atcatagtagttta

SEQ ID NO: 20886 - DNA, 14 bp, Artificial Sequence
  Description of Artificial Sequence: Synthetic oligonucleotide
gatcatagtagttt

SEQ ID NO: 20887 - DNA, 14 bp, Artificial Sequence
  Description of Artificial Sequence: Synthetic oligonucleotide
agatcatagtagtt

SEQ ID NO: 20888 - DNA, 14 bp, Artificial Sequence
  Description of Artificial Sequence: Synthetic oligonucleotide
aagatcatagtagt

SEQ ID NO: 20889 - DNA, 14 bp, Artificial Sequence
  Description of Artificial Sequence: Synthetic oligonucleotide
caagatcatagtag

SEQ ID NO: 20890 - DNA, 14 bp, Artificial Sequence
  Description of Artificial Sequence: Synthetic oligonucleotide
acaagatcatagta

SEQ ID NO: 20891 - DNA, 14 bp, Artificial Sequence
  Description of Artificial Sequence: Synthetic oligonucleotide
gacaagatcatagt

SEQ ID NO: 20892 - DNA, 14 bp, Artificial Sequence
  Description of Artificial Sequence: Synthetic oligonucleotide
tgacaagatcatag

SEQ ID NO: 20893 - DNA, 14 bp, Artificial Sequence
  Description of Artificial Sequence: Synthetic oligonucleotide
ctgacaagatcata

SEQ ID NO: 20894 - DNA, 14 bp, Artificial Sequence
  Description of Artificial Sequence: Synthetic oligonucleotide
tctgacaagatcat

SEQ ID NO: 20895 - DNA, 14 bp, Artificial Sequence
  Description of Artificial Sequence: Synthetic oligonucleotide
ttctgacaagatca

SEQ ID NO: 20896 - DNA, 14 bp, Artificial Sequence
  Description of Artificial Sequence: Synthetic oligonucleotide
gttctgacaagatc

SEQ ID NO: 20897 - DNA, 14 bp, Artificial Sequence
  Description of Artificial Sequence: Synthetic oligonucleotide
agttctgacaagat

SEQ ID NO: 20898 - DNA, 14 bp, Artificial Sequence
  Description of Artificial Sequence: Synthetic oligonucleotide
cagttctgacaaga

SEQ ID NO: 20899 - DNA, 14 bp, Artificial Sequence
  Description of Artificial Sequence: Synthetic oligonucleotide
tcagttctgacaag

SEQ ID NO: 20900 - DNA, 14 bp, Artificial Sequence
  Description of Artificial Sequence: Synthetic oligonucleotide
ttcagttctgacaa

SEQ ID NO: 20901 - DNA, 14 bp, Artificial Sequence
  Description of Artificial Sequence: Synthetic oligonucleotide
tttcagttctgaca

SEQ ID NO: 20902 - DNA, 14 bp, Artificial Sequence
  Description of Artificial Sequence: Synthetic oligonucleotide
atttcagttctgac

SEQ ID NO: 20903 - DNA, 14 bp, Artificial Sequence
  Description of Artificial Sequence: Synthetic oligonucleotide
gatttcagttctga

SEQ ID NO: 20904 - DNA, 14 bp, Artificial Sequence
  Description of Artificial Sequence: Synthetic oligonucleotide
cgatttcagttctg

SEQ ID NO: 20905 - DNA, 14 bp, Artificial Sequence
  Description of Artificial Sequence: Synthetic oligonucleotide
gcgatttcagttct

SEQ ID NO: 20906 - DNA, 14 bp, Artificial Sequence
  Description of Artificial Sequence: Synthetic oligonucleotide
tgcgatttcagttc

SEQ ID NO: 20907 - DNA, 14 bp, Artificial Sequence
  Description of Artificial Sequence: Synthetic oligonucleotide
ctgcgatttcagtt

SEQ ID NO: 20908 - DNA, 14 bp, Artificial Sequence
  Description of Artificial Sequence: Synthetic oligonucleotide
tctgcgatttcagt

SEQ ID NO: 20909 - DNA, 14 bp, Artificial Sequence
  Description of Artificial Sequence: Synthetic oligonucleotide
ttctgcgatttcag

SEQ ID NO: 20910 - DNA, 14 bp, Artificial Sequence
  Description of Artificial Sequence: Synthetic oligonucleotide
cttctgcgatttca

SEQ ID NO: 20911 - DNA, 14 bp, Artificial Sequence
  Description of Artificial Sequence: Synthetic oligonucleotide
tcttctgcgatttc

SEQ ID NO: 20912 - DNA, 14 bp, Artificial Sequence
  Description of Artificial Sequence: Synthetic oligonucleotide
ttcttctgcgattt

SEQ ID NO: 20913 - DNA, 14 bp, Artificial Sequence
  Description of Artificial Sequence: Synthetic oligonucleotide
tttcttctgcgatt

SEQ ID NO: 20914 - DNA, 14 bp, Artificial Sequence
  Description of Artificial Sequence: Synthetic oligonucleotide
ctttcttctgcgat

SEQ ID NO: 20915 - DNA, 14 bp, Artificial Sequence
  Description of Artificial Sequence: Synthetic oligonucleotide
tctttcttctgcga

SEQ ID NO: 20916 - DNA, 14 bp, Artificial Sequence
  Description of Artificial Sequence: Synthetic oligonucleotide
gtctttcttctgcg

SEQ ID NO: 20917 - DNA, 14 bp, Artificial Sequence
  Description of Artificial Sequence: Synthetic oligonucleotide
tgtctttcttctgc

SEQ ID NO: 20918 - DNA, 14 bp, Artificial Sequence
  Description of Artificial Sequence: Synthetic oligonucleotide
ctgtctttcttctg

SEQ ID NO: 20919 - DNA, 14 bp, Artificial Sequence
  Description of Artificial Sequence: Synthetic oligonucleotide
actgtctttcttct

SEQ ID NO: 20920 - DNA, 14 bp, Artificial Sequence
  Description of Artificial Sequence: Synthetic oligonucleotide
tactgtctttcttc

SEQ ID NO: 20921 - DNA, 14 bp, Artificial Sequence
  Description of Artificial Sequence: Synthetic oligonucleotide
atactgtctttctt

SEQ ID NO: 20922 - DNA, 14 bp, Artificial Sequence
  Description of Artificial Sequence: Synthetic oligonucleotide
gatactgtctttct

SEQ ID NO: 20923 - DNA, 14 bp, Artificial Sequence
  Description of Artificial Sequence: Synthetic oligonucleotide
agatactgtctttc

SEQ ID NO: 20924 - DNA, 14 bp, Artificial Sequence
  Description of Artificial Sequence: Synthetic oligonucleotide
tagatactgtcttt

SEQ ID NO: 20925 - DNA, 14 bp, Artificial Sequence
  Description of Artificial Sequence: Synthetic oligonucleotide
gtagatactgtctt

SEQ ID NO: 20926 - DNA, 14 bp, Artificial Sequence
  Description of Artificial Sequence: Synthetic oligonucleotide
cgtagatactgtct

SEQ ID NO: 20927 - DNA, 14 bp, Artificial Sequence
  Description of Artificial Sequence: Synthetic oligonucleotide
ccgtagatactgtc

SEQ ID NO: 20928 - DNA, 14 bp, Artificial Sequence
  Description of Artificial Sequence: Synthetic oligonucleotide
cccgtagatactgt

SEQ ID NO: 20929 - DNA, 14 bp, Artificial Sequence
  Description of Artificial Sequence: Synthetic oligonucleotide
tcccgtagatactg

SEQ ID NO: 20930 - DNA, 14 bp, Artificial Sequence
  Description of Artificial Sequence: Synthetic oligonucleotide
ttcccgtagatact

SEQ ID NO: 20931 - DNA, 14 bp, Artificial Sequence
  Description of Artificial Sequence: Synthetic oligonucleotide
attcccgtagatac

SEQ ID NO: 20932 - DNA, 14 bp, Artificial Sequence
  Description of Artificial Sequence: Synthetic oligonucleotide
aattcccgtagata

SEQ ID NO: 20933 - DNA, 14 bp, Artificial Sequence
  Description of Artificial Sequence: Synthetic oligonucleotide
taattcccgtagat

SEQ ID NO: 20934 - DNA, 14 bp, Artificial Sequence
  Description of Artificial Sequence: Synthetic oligonucleotide
ttaattcccgtaga

SEQ ID NO: 20935 - DNA, 14 bp, Artificial Sequence
  Description of Artificial Sequence: Synthetic oligonucleotide
tttaattcccgtag

SEQ ID NO: 20936 - DNA, 14 bp, Artificial Sequence
  Description of Artificial Sequence: Synthetic oligonucleotide
atttaattcccgta

SEQ ID NO: 20937 - DNA, 14 bp, Artificial Sequence
  Description of Artificial Sequence: Synthetic oligonucleotide
tatttaattcccgt

SEQ ID NO: 20938 - DNA, 14 bp, Artificial Sequence
  Description of Artificial Sequence: Synthetic oligonucleotide
atatttaattcccg

SEQ ID NO: 20939 - DNA, 14 bp, Artificial Sequence
  Description of Artificial Sequence: Synthetic oligonucleotide
catatttaattccc

SEQ ID NO: 20940 - DNA, 14 bp, Artificial Sequence
  Description of Artificial Sequence: Synthetic oligonucleotide
tcatatttaattcc

SEQ ID NO: 20941 - DNA, 14 bp, Artificial Sequence
  Description of Artificial Sequence: Synthetic oligonucleotide
atcatatttaattc

SEQ ID NO: 20942 - DNA, 14 bp, Artificial Sequence
  Description of Artificial Sequence: Synthetic oligonucleotide
gatcatatttaatt

SEQ ID NO: 20943 - DNA, 14 bp, Artificial Sequence
  Description of Artificial Sequence: Synthetic oligonucleotide
tgatcatatttaat

SEQ ID NO: 20944 - DNA, 14 bp, Artificial Sequence
  Description of Artificial Sequence: Synthetic oligonucleotide
atgatcatatttaa

SEQ ID NO: 20945 - DNA, 14 bp, Artificial Sequence
  Description of Artificial Sequence: Synthetic oligonucleotide
tatgatcatattta

SEQ ID NO: 20946 - DNA, 14 bp, Artificial Sequence
  Description of Artificial Sequence: Synthetic oligonucleotide
ttatgatcatattt

SEQ ID NO: 20947 - DNA, 14 bp, Artificial Sequence
  Description of Artificial Sequence: Synthetic oligonucleotide
tttatgatcatatt

SEQ ID NO: 20948 - DNA, 14 bp, Artificial Sequence
  Description of Artificial Sequence: Synthetic oligonucleotide
ttttatgatcatat

SEQ ID NO: 20949 - DNA, 14 bp, Artificial Sequence
  Description of Artificial Sequence: Synthetic oligonucleotide
cttttatgatcata

SEQ ID NO: 20950 - DNA, 14 bp, Artificial Sequence
  Description of Artificial Sequence: Synthetic oligonucleotide
acttttatgatcat

SEQ ID NO: 20951 - DNA, 14 bp, Artificial Sequence
  Description of Artificial Sequence: Synthetic oligonucleotide
cacttttatgatca

SEQ ID NO: 20952 - DNA, 14 bp, Artificial Sequence
  Description of Artificial Sequence: Synthetic oligonucleotide
acacttttatgatc

SEQ ID NO: 20953 - DNA, 14 bp, Artificial Sequence
  Description of Artificial Sequence: Synthetic oligonucleotide
aacacttttatgat

SEQ ID NO: 20954 - DNA, 14 bp, Artificial Sequence
  Description of Artificial Sequence: Synthetic oligonucleotide
aaacacttttatga

SEQ ID NO: 20955 - DNA, 14 bp, Artificial Sequence
  Description of Artificial Sequence: Synthetic oligonucleotide
gaaacacttttatg

SEQ ID NO: 20956 - DNA, 14 bp, Artificial Sequence
  Description of Artificial Sequence: Synthetic oligonucleotide
cgaaacacttttat

SEQ ID NO: 20957 - DNA, 14 bp, Artificial Sequence
  Description of Artificial Sequence: Synthetic oligonucleotide
tcgaaacactttta

SEQ ID NO: 20958 - DNA, 14 bp, Artificial Sequence
  Description of Artificial Sequence: Synthetic oligonucleotide
ctcgaaacactttt

SEQ ID NO: 20959 - DNA, 14 bp, Artificial Sequence
  Description of Artificial Sequence: Synthetic oligonucleotide
tctcgaaacacttt

SEQ ID NO: 20960 - DNA, 14 bp, Artificial Sequence
  Description of Artificial Sequence: Synthetic oligonucleotide
ttctcgaaacactt

SEQ ID NO: 20961 - DNA, 14 bp, Artificial Sequence
  Description of Artificial Sequence: Synthetic oligonucleotide
cttctcgaaacact

SEQ ID NO: 20962 - DNA, 14 bp, Artificial Sequence
  Description of Artificial Sequence: Synthetic oligonucleotide
gcttctcgaaacac

SEQ ID NO: 20963 - DNA, 14 bp, Artificial Sequence
  Description of Artificial Sequence: Synthetic oligonucleotide
ggcttctcgaaaca

SEQ ID NO: 20964 - DNA, 14 bp, Artificial Sequence
  Description of Artificial Sequence: Synthetic oligonucleotide
aggcttctcgaaac

SEQ ID NO: 20965 - DNA, 14 bp, Artificial Sequence
  Description of Artificial Sequence: Synthetic oligonucleotide
aaggcttctcgaaa

SEQ ID NO: 20966 - DNA, 14 bp, Artificial Sequence
  Description of Artificial Sequence: Synthetic oligonucleotide
aaaggcttctcgaa

SEQ ID NO: 20967 - DNA, 14 bp, Artificial Sequence
  Description of Artificial Sequence: Synthetic oligonucleotide
gaaaggcttctcga

SEQ ID NO: 20968 - DNA, 14 bp, Artificial Sequence
  Description of Artificial Sequence: Synthetic oligonucleotide
agaaaggcttctcg

SEQ ID NO: 20969 - DNA, 14 bp, Artificial Sequence
  Description of Artificial Sequence: Synthetic oligonucleotide
aagaaaggcttctc

SEQ ID NO: 20970 - DNA, 14 bp, Artificial Sequence
  Description of Artificial Sequence: Synthetic oligonucleotide
aaagaaaggcttct

SEQ ID NO: 20971 - DNA, 14 bp, Artificial Sequence
  Description of Artificial Sequence: Synthetic oligonucleotide
gaaagaaaggcttc

SEQ ID NO: 20972 - DNA, 14 bp, Artificial Sequence
  Description of Artificial Sequence: Synthetic oligonucleotide
agaaagaaaggctt

SEQ ID NO: 20973 - DNA, 14 bp, Artificial Sequence
  Description of Artificial Sequence: Synthetic oligonucleotide
cagaaagaaaggct

SEQ ID NO: 20974 - DNA, 14 bp, Artificial Sequence
  Description of Artificial Sequence: Synthetic oligonucleotide
tcagaaagaaaggc

SEQ ID NO: 20975 - DNA, 14 bp, Artificial Sequence
  Description of Artificial Sequence: Synthetic oligonucleotide
atcagaaagaaagg

SEQ ID NO: 20976 - DNA, 14 bp, Artificial Sequence
  Description of Artificial Sequence: Synthetic oligonucleotide
tatcagaaagaaag

SEQ ID NO: 20977 - DNA, 14 bp, Artificial Sequence
  Description of Artificial Sequence: Synthetic oligonucleotide
ctatcagaaagaaa

SEQ ID NO: 20978 - DNA, 14 bp, Artificial Sequence
  Description of Artificial Sequence: Synthetic oligonucleotide
tctatcagaaagaa

SEQ ID NO: 20979 - DNA, 14 bp, Artificial Sequence
  Description of Artificial Sequence: Synthetic oligonucleotide
ttctatcagaaaga

SEQ ID NO: 20980 - DNA, 14 bp, Artificial Sequence
  Description of Artificial Sequence: Synthetic oligonucleotide
tttctatcagaaag

SEQ ID NO: 20981 - DNA, 14 bp, Artificial Sequence
  Description of Artificial Sequence: Synthetic oligonucleotide
ctttctatcagaaa

SEQ ID NO: 20982 - DNA, 14 bp, Artificial Sequence
  Description of Artificial Sequence: Synthetic oligonucleotide
gctttctatcagaa

SEQ ID NO: 20983 - DNA, 14 bp, Artificial Sequence
  Description of Artificial Sequence: Synthetic oligonucleotide
agctttctatcaga

SEQ ID NO: 20984 - DNA, 14 bp, Artificial Sequence
  Description of Artificial Sequence: Synthetic oligonucleotide
cagctttctatcag

SEQ ID NO: 20985 - DNA, 14 bp, Artificial Sequence
  Description of Artificial Sequence: Synthetic oligonucleotide
acagctttctatca

SEQ ID NO: 20986 - DNA, 14 bp, Artificial Sequence
  Description of Artificial Sequence: Synthetic oligonucleotide
aacagctttctatc

SEQ ID NO: 20987 - DNA, 14 bp, Artificial Sequence
  Description of Artificial Sequence: Synthetic oligonucleotide
aaacagctttctat

SEQ ID NO: 20988 - DNA, 14 bp, Artificial Sequence
  Description of Artificial Sequence: Synthetic oligonucleotide
taaacagctttcta

SEQ ID NO: 20989 - DNA, 14 bp, Artificial Sequence
  Description of Artificial Sequence: Synthetic oligonucleotide
ttaaacagctttct

SEQ ID NO: 20990 - DNA, 14 bp, Artificial Sequence
  Description of Artificial Sequence: Synthetic oligonucleotide
tttaaacagctttc

SEQ ID NO: 20991 - DNA, 14 bp, Artificial Sequence
  Description of Artificial Sequence: Synthetic oligonucleotide
gtttaaacagcttt

SEQ ID NO: 20992 - DNA, 14 bp, Artificial Sequence
  Description of Artificial Sequence: Synthetic oligonucleotide
ggtttaaacagctt

SEQ ID NO: 20993 - DNA, 14 bp, Artificial Sequence
  Description of Artificial Sequence: Synthetic oligonucleotide
aggtttaaacagct

SEQ ID NO: 20994 - DNA, 14 bp, Artificial Sequence
  Description of Artificial Sequence: Synthetic oligonucleotide
aaggtttaaacagc

SEQ ID NO: 20995 - DNA, 14 bp, Artificial Sequence
  Description of Artificial Sequence: Synthetic oligonucleotide
gaaggtttaaacag

SEQ ID NO: 20996 - DNA, 14 bp, Artificial Sequence
  Description of Artificial Sequence: Synthetic oligonucleotide
agaaggtttaaaca

SEQ ID NO: 20997 - DNA, 14 bp, Artificial Sequence
  Description of Artificial Sequence: Synthetic oligonucleotide
cagaaggtttaaac

SEQ ID NO: 20998 - DNA, 14 bp, Artificial Sequence
  Description of Artificial Sequence: Synthetic oligonucleotide
tcagaaggtttaaa

SEQ ID NO: 20999 - DNA, 14 bp, Artificial Sequence
  Description of Artificial Sequence: Synthetic oligonucleotide
atcagaaggtttaa

SEQ ID NO: 21000 - DNA, 14 bp, Artificial Sequence
  Description of Artificial Sequence: Synthetic oligonucleotide
tatcagaaggttta

SEQ ID NO: 21001 - DNA, 14 bp, Artificial Sequence
  Description of Artificial Sequence: Synthetic oligonucleotide
atatcagaaggttt

SEQ ID NO: 21002 - DNA, 14 bp, Artificial Sequence
  Description of Artificial Sequence: Synthetic oligonucleotide
gatatcagaaggtt

SEQ ID NO: 21003 - DNA, 14 bp, Artificial Sequence
  Description of Artificial Sequence: Synthetic oligonucleotide
cgatatcagaaggt

SEQ ID NO: 21004 - DNA, 14 bp, Artificial Sequence
  Description of Artificial Sequence: Synthetic oligonucleotide
tcgatatcagaagg

SEQ ID NO: 21005 - DNA, 14 bp, Artificial Sequence
  Description of Artificial Sequence: Synthetic oligonucleotide
ttcgatatcagaag

SEQ ID NO: 21006 - DNA, 14 bp, Artificial Sequence
  Description of Artificial Sequence: Synthetic oligonucleotide
tttcgatatcagaa

SEQ ID NO: 21007 - DNA, 14 bp, Artificial Sequence
  Description of Artificial Sequence: Synthetic oligonucleotide
ttttcgatatcaga

SEQ ID NO: 21008 - DNA, 14 bp, Artificial Sequence
  Description of Artificial Sequence: Synthetic oligonucleotide
cttttcgatatcag

SEQ ID NO: 21009 - DNA, 14 bp, Artificial Sequence
  Description of Artificial Sequence: Synthetic oligonucleotide
tcttttcgatatca

SEQ ID NO: 21010 - DNA, 14 bp, Artificial Sequence
  Description of Artificial Sequence: Synthetic oligonucleotide
atcttttcgatatc

SEQ ID NO: 21011 - DNA, 14 bp, Artificial Sequence
  Description of Artificial Sequence: Synthetic oligonucleotide
aatcttttcgatat

SEQ ID NO: 21012 - DNA, 14 bp, Artificial Sequence
  Description of Artificial Sequence: Synthetic oligonucleotide
aaatcttttcgata

SEQ ID NO: 21013 - DNA, 14 bp, Artificial Sequence
  Description of Artificial Sequence: Synthetic oligonucleotide
aaaatcttttcgat

SEQ ID NO: 21014 - DNA, 14 bp, Artificial Sequence
  Description of Artificial Sequence: Synthetic oligonucleotide
aaaaatcttttcga

SEQ ID NO: 21015 - DNA, 14 bp, Artificial Sequence
  Description of Artificial Sequence: Synthetic oligonucleotide
taaaaatcttttcg

SEQ ID NO: 21016 - DNA, 14 bp, Artificial Sequence
  Description of Artificial Sequence: Synthetic oligonucleotide
ctaaaaatcttttc

SEQ ID NO: 21017 - DNA, 14 bp, Artificial Sequence
  Description of Artificial Sequence: Synthetic oligonucleotide
actaaaaatctttt

SEQ ID NO: 21018 - DNA, 14 bp, Artificial Sequence
  Description of Artificial Sequence: Synthetic oligonucleotide
tactaaaaatcttt

SEQ ID NO: 21019 - DNA, 14 bp, Artificial Sequence
  Description of Artificial Sequence: Synthetic oligonucleotide
ttactaaaaatctt

SEQ ID NO: 21020 - DNA, 14 bp, Artificial Sequence
  Description of Artificial Sequence: Synthetic oligonucleotide
gttactaaaaatct

SEQ ID NO: 21021 - DNA, 14 bp, Artificial Sequence
  Description of Artificial Sequence: Synthetic oligonucleotide
tgttactaaaaatc

SEQ ID NO: 21022 - DNA, 14 bp, Artificial Sequence
  Description of Artificial Sequence: Synthetic oligonucleotide
atgttactaaaaat

SEQ ID NO: 21023 - DNA, 14 bp, Artificial Sequence
  Description of Artificial Sequence: Synthetic oligonucleotide
aatgttactaaaaa

SEQ ID NO: 21024 - DNA, 14 bp, Artificial Sequence
  Description of Artificial Sequence: Synthetic oligonucleotide
aaatgttactaaaa

SEQ ID NO: 21025 - DNA, 14 bp, Artificial Sequence
  Description of Artificial Sequence: Synthetic oligonucleotide
gaaatgttactaaa

SEQ ID NO: 21026 - DNA, 14 bp, Artificial Sequence
  Description of Artificial Sequence: Synthetic oligonucleotide
tgaaatgttactaa

SEQ ID NO: 21027 - DNA, 14 bp, Artificial Sequence
  Description of Artificial Sequence: Synthetic oligonucleotide
ctgaaatgttacta

SEQ ID NO: 21028 - DNA, 14 bp, Artificial Sequence
  Description of Artificial Sequence: Synthetic oligonucleotide
tctgaaatgttact

SEQ ID NO: 21029 - DNA, 14 bp, Artificial Sequence
  Description of Artificial Sequence: Synthetic oligonucleotide
atctgaaatgttac

SEQ ID NO: 21030 - DNA, 14 bp, Artificial Sequence
  Description of Artificial Sequence: Synthetic oligonucleotide
tatctgaaatgtta

SEQ ID NO: 21031 - DNA, 14 bp, Artificial Sequence
  Description of Artificial Sequence: Synthetic oligonucleotide
atatctgaaatgtt

SEQ ID NO: 21032 - DNA, 14 bp, Artificial Sequence
  Description of Artificial Sequence: Synthetic oligonucleotide
tatatctgaaatgt

SEQ ID NO: 21033 - DNA, 14 bp, Artificial Sequence
  Description of Artificial Sequence: Synthetic oligonucleotide
gtatatctgaaatg

SEQ ID NO: 21034 - DNA, 14 bp, Artificial Sequence
  Description of Artificial Sequence: Synthetic oligonucleotide
tgtatatctgaaat

SEQ ID NO: 21035 - DNA, 14 bp, Artificial Sequence
  Description of Artificial Sequence: Synthetic oligonucleotide
atgtatatctgaaa

SEQ ID NO: 21036 - DNA, 14 bp, Artificial Sequence
  Description of Artificial Sequence: Synthetic oligonucleotide
catgtatatctgaa

SEQ ID NO: 21037 - DNA, 14 bp, Artificial Sequence
  Description of Artificial Sequence: Synthetic oligonucleotide
tcatgtatatctga

SEQ ID NO: 21038 - DNA, 14 bp, Artificial Sequence
  Description of Artificial Sequence: Synthetic oligonucleotide
ttcatgtatatctg

SEQ ID NO: 21039 - DNA, 14 bp, Artificial Sequence
  Description of Artificial Sequence: Synthetic oligonucleotide
attcatgtatatct

SEQ ID NO: 21040 - DNA, 14 bp, Artificial Sequence
  Description of Artificial Sequence: Synthetic oligonucleotide
aattcatgtatatc

SEQ ID NO: 21041 - DNA, 14 bp, Artificial Sequence
  Description of Artificial Sequence: Synthetic oligonucleotide
caattcatgtatat

SEQ ID NO: 21042 - DNA, 14 bp, Artificial Sequence
  Description of Artificial Sequence: Synthetic oligonucleotide
tcaattcatgtata

SEQ ID NO: 21043 - DNA, 14 bp, Artificial Sequence
  Description of Artificial Sequence: Synthetic oligonucleotide
gtcaattcatgtat

SEQ ID NO: 21044 - DNA, 14 bp, Artificial Sequence
  Description of Artificial Sequence: Synthetic oligonucleotide
agtcaattcatgta

SEQ ID NO: 21045 - DNA, 14 bp, Artificial Sequence
  Description of Artificial Sequence: Synthetic oligonucleotide
cagtcaattcatgt

SEQ ID NO: 21046 - DNA, 14 bp, Artificial Sequence
  Description of Artificial Sequence: Synthetic oligonucleotide
acagtcaattcatg

SEQ ID NO: 21047 - DNA, 14 bp, Artificial Sequence
  Description of Artificial Sequence: Synthetic oligonucleotide
cacagtcaattcat

SEQ ID NO: 21048 - DNA, 14 bp, Artificial Sequence
  Description of Artificial Sequence: Synthetic oligonucleotide
tcacagtcaattca

SEQ ID NO: 21049 - DNA, 14 bp, Artificial Sequence
  Description of Artificial Sequence: Synthetic oligonucleotide
ttcacagtcaattc

SEQ ID NO: 21050 - DNA, 14 bp, Artificial Sequence
  Description of Artificial Sequence: Synthetic oligonucleotide
tttcacagtcaatt

SEQ ID NO: 21051 - DNA, 14 bp, Artificial Sequence
  Description of Artificial Sequence: Synthetic oligonucleotide
gtttcacagtcaat

SEQ ID NO: 21052 - DNA, 14 bp, Artificial Sequence
  Description of Artificial Sequence: Synthetic oligonucleotide
agtttcacagtcaa

SEQ ID NO: 21053 - DNA, 14 bp, Artificial Sequence
  Description of Artificial Sequence: Synthetic oligonucleotide
aagtttcacagtca

SEQ ID NO: 21054 - DNA, 14 bp, Artificial Sequence
  Description of Artificial Sequence: Synthetic oligonucleotide
aaagtttcacagtc

SEQ ID NO: 21055 - DNA, 14 bp, Artificial Sequence
  Description of Artificial Sequence: Synthetic oligonucleotide
aaaagtttcacagt

SEQ ID NO: 21056 - DNA, 14 bp, Artificial Sequence
  Description of Artificial Sequence: Synthetic oligonucleotide
taaaagtttcacag

SEQ ID NO: 21057 - DNA, 14 bp, Artificial Sequence
  Description of Artificial Sequence: Synthetic oligonucleotide
ctaaaagtttcaca

SEQ ID NO: 21058 - DNA, 14 bp, Artificial Sequence
  Description of Artificial Sequence: Synthetic oligonucleotide
cctaaaagtttcac

SEQ ID NO: 21059 - DNA, 14 bp, Artificial Sequence
  Description of Artificial Sequence: Synthetic oligonucleotide
acctaaaagtttca

SEQ ID NO: 21060 - DNA, 14 bp, Artificial Sequence
  Description of Artificial Sequence: Synthetic oligonucleotide
aacctaaaagtttc

SEQ ID NO: 21061 - DNA, 14 bp, Artificial Sequence
  Description of Artificial Sequence: Synthetic oligonucleotide
aaacctaaaagttt

SEQ ID NO: 21062 - DNA, 14 bp, Artificial Sequence
  Description of Artificial Sequence: Synthetic oligonucleotide
caaacctaaaagtt

SEQ ID NO: 21063 - DNA, 14 bp, Artificial Sequence
  Description of Artificial Sequence: Synthetic oligonucleotide
tcaaacctaaaagt

SEQ ID NO: 21064 - DNA, 14 bp, Artificial Sequence
  Description of Artificial Sequence: Synthetic oligonucleotide
atcaaacctaaaag

SEQ ID NO: 21065 - DNA, 14 bp, Artificial Sequence
  Description of Artificial Sequence: Synthetic oligonucleotide
aatcaaacctaaaa

SEQ ID NO: 21066 - DNA, 14 bp, Artificial Sequence
  Description of Artificial Sequence: Synthetic oligonucleotide
caatcaaacctaaa

SEQ ID NO: 21067 - DNA, 14 bp, Artificial Sequence
  Description of Artificial Sequence: Synthetic oligonucleotide
tcaatcaaacctaa

SEQ ID NO: 21068 - DNA, 14 bp, Artificial Sequence
  Description of Artificial Sequence: Synthetic oligonucleotide
ttcaatcaaaccta

SEQ ID NO: 21069 - DNA, 14 bp, Artificial Sequence
  Description of Artificial Sequence: Synthetic oligonucleotide
cttcaatcaaacct

SEQ ID NO: 21070 - DNA, 14 bp, Artificial Sequence
  Description of Artificial Sequence: Synthetic oligonucleotide
tcttcaatcaaacc

SEQ ID NO: 21071 - DNA, 14 bp, Artificial Sequence
  Description of Artificial Sequence: Synthetic oligonucleotide
gtcttcaatcaaac

SEQ ID NO: 21072 - DNA, 14 bp, Artificial Sequence
  Description of Artificial Sequence: Synthetic oligonucleotide
tgtcttcaatcaaa

SEQ ID NO: 21073 - DNA, 14 bp, Artificial Sequence
  Description of Artificial Sequence: Synthetic oligonucleotide
gtgtcttcaatcaa

SEQ ID NO: 21074 - DNA, 14 bp, Artificial Sequence
  Description of Artificial Sequence: Synthetic oligonucleotide
tgtgtcttcaatca

SEQ ID NO: 21075 - DNA, 14 bp, Artificial Sequence
  Description of Artificial Sequence: Synthetic oligonucleotide
ctgtgtcttcaatc

SEQ ID NO: 21076 - DNA, 14 bp, Artificial Sequence
  Description of Artificial Sequence: Synthetic oligonucleotide
actgtgtcttcaat

SEQ ID NO: 21077 - DNA, 14 bp, Artificial Sequence
  Description of Artificial Sequence: Synthetic oligonucleotide
aactgtgtcttcaa

SEQ ID NO: 21078 - DNA, 14 bp, Artificial Sequence
  Description of Artificial Sequence: Synthetic oligonucleotide
caactgtgtcttca

SEQ ID NO: 21079 - DNA, 14 bp, Artificial Sequence
  Description of Artificial Sequence: Synthetic oligonucleotide
tcaactgtgtcttc

SEQ ID NO: 21080 - DNA, 14 bp, Artificial Sequence
  Description of Artificial Sequence: Synthetic oligonucleotide
ttcaactgtgtctt

SEQ ID NO: 21081 - DNA, 14 bp, Artificial Sequence
  Description of Artificial Sequence: Synthetic oligonucleotide
tttcaactgtgtct

SEQ ID NO: 21082 - DNA, 14 bp, Artificial Sequence
  Description of Artificial Sequence: Synthetic oligonucleotide
atttcaactgtgtc

SEQ ID NO: 21083 - DNA, 14 bp, Artificial Sequence
  Description of Artificial Sequence: Synthetic oligonucleotide
catttcaactgtgt

SEQ ID NO: 21084 - DNA, 14 bp, Artificial Sequence
  Description of Artificial Sequence: Synthetic oligonucleotide
tcatttcaactgtg

SEQ ID NO: 21085 - DNA, 14 bp, Artificial Sequence
  Description of Artificial Sequence: Synthetic oligonucleotide
gtcatttcaactgt

SEQ ID NO: 21086 - DNA, 14 bp, Artificial Sequence
  Description of Artificial Sequence: Synthetic oligonucleotide
agtcatttcaactg

SEQ ID NO: 21087 - DNA, 14 bp, Artificial Sequence
  Description of Artificial Sequence: Synthetic oligonucleotide
cagtcatttcaact

SEQ ID NO: 21088 - DNA, 14 bp, Artificial Sequence
  Description of Artificial Sequence: Synthetic oligonucleotide
tcagtcatttcaac

SEQ ID NO: 21089 - DNA, 14 bp, Artificial Sequence
  Description of Artificial Sequence: Synthetic oligonucleotide
atcagtcatttcaa

SEQ ID NO: 21090 - DNA, 14 bp, Artificial Sequence
  Description of Artificial Sequence: Synthetic oligonucleotide
catcagtcatttca

SEQ ID NO: 21091 - DNA, 14 bp, Artificial Sequence
  Description of Artificial Sequence: Synthetic oligonucleotide
tcatcagtcatttc

SEQ ID NO: 21092 - DNA, 14 bp, Artificial Sequence
  Description of Artificial Sequence: Synthetic oligonucleotide
ttcatcagtcattt

SEQ ID NO: 21093 - DNA, 14 bp, Artificial Sequence
  Description of Artificial Sequence: Synthetic oligonucleotide
tttcatcagtcatt

SEQ ID NO: 21094 - DNA, 14 bp, Artificial Sequence
  Description of Artificial Sequence: Synthetic oligonucleotide
ctttcatcagtcat

SEQ ID NO: 21095 - DNA, 14 bp, Artificial Sequence
  Description of Artificial Sequence: Synthetic oligonucleotide
gctttcatcagtca

SEQ ID NO: 21096 - DNA, 14 bp, Artificial Sequence
  Description of Artificial Sequence: Synthetic oligonucleotide
tgctttcatcagtc

SEQ ID NO: 21097 - DNA, 14 bp, Artificial Sequence
  Description of Artificial Sequence: Synthetic oligonucleotide
ctgctttcatcagt

SEQ ID NO: 21098 - DNA, 14 bp, Artificial Sequence
  Description of Artificial Sequence: Synthetic oligonucleotide
actgctttcatcag

SEQ ID NO: 21099 - DNA, 14 bp, Artificial Sequence
  Description of Artificial Sequence: Synthetic oligonucleotide
gactgctttcatca

SEQ ID NO: 21100 - DNA, 14 bp, Artificial Sequence
  Description of Artificial Sequence: Synthetic oligonucleotide
ggactgctttcatc

SEQ ID NO: 21101 - DNA, 14 bp, Artificial Sequence
  Description of Artificial Sequence: Synthetic oligonucleotide
aggactgctttcat

SEQ ID NO: 21102 - DNA, 14 bp, Artificial Sequence
  Description of Artificial Sequence: Synthetic oligonucleotide
gaggactgctttca

SEQ ID NO: 21103 - DNA, 14 bp, Artificial Sequence
  Description of Artificial Sequence: Synthetic oligonucleotide
tgaggactgctttc

SEQ ID NO: 21104 - DNA, 14 bp, Artificial Sequence
  Description of Artificial Sequence: Synthetic oligonucleotide
atgaggactgcttt

SEQ ID NO: 21105 - DNA, 14 bp, Artificial Sequence
  Description of Artificial Sequence: Synthetic oligonucleotide
gatgaggactgctt

SEQ ID NO: 21106 - DNA, 14 bp, Artificial Sequence
  Description of Artificial Sequence: Synthetic oligonucleotide
ggatgaggactgct

SEQ ID NO: 21107 - DNA, 14 bp, Artificial Sequence
  Description of Artificial Sequence: Synthetic oligonucleotide
gggatgaggactgc

SEQ ID NO: 21108 - DNA, 14 bp, Artificial Sequence
  Description of Artificial Sequence: Synthetic oligonucleotide
agggatgaggactg

SEQ ID NO: 21109 - DNA, 14 bp, Artificial Sequence
  Description of Artificial Sequence: Synthetic oligonucleotide
aagggatgaggact

SEQ ID NO: 21110 - DNA, 14 bp, Artificial Sequence
  Description of Artificial Sequence: Synthetic oligonucleotide
taagggatgaggac

SEQ ID NO: 21111 - DNA, 14 bp, Artificial Sequence
  Description of Artificial Sequence: Synthetic oligonucleotide
ctaagggatgagga

SEQ ID NO: 21112 - DNA, 14 bp, Artificial Sequence
  Description of Artificial Sequence: Synthetic oligonucleotide
gctaagggatgagg

SEQ ID NO: 21113 - DNA, 14 bp, Artificial Sequence
  Description of Artificial Sequence: Synthetic oligonucleotide
agctaagggatgag

SEQ ID NO: 21114 - DNA, 14 bp, Artificial Sequence
  Description of Artificial Sequence: Synthetic oligonucleotide
cagctaagggatga

SEQ ID NO: 21115 - DNA, 14 bp, Artificial Sequence
  Description of Artificial Sequence: Synthetic oligonucleotide
ccagctaagggatg

SEQ ID NO: 21116 - DNA, 14 bp, Artificial Sequence
  Description of Artificial Sequence: Synthetic oligonucleotide
gccagctaagggat

SEQ ID NO: 21117 - DNA, 14 bp, Artificial Sequence
  Description of Artificial Sequence: Synthetic oligonucleotide
tgccagctaaggga

SEQ ID NO: 21118 - DNA, 14 bp, Artificial Sequence
  Description of Artificial Sequence: Synthetic oligonucleotide
ctgccagctaaggg

SEQ ID NO: 21119 - DNA, 14 bp, Artificial Sequence
  Description of Artificial Sequence: Synthetic oligonucleotide
gctgccagctaagg

SEQ ID NO: 21120 - DNA, 14 bp, Artificial Sequence
  Description of Artificial Sequence: Synthetic oligonucleotide
agctgccagctaag

SEQ ID NO: 21121 - DNA, 14 bp, Artificial Sequence
  Description of Artificial Sequence: Synthetic oligonucleotide
cagctgccagctaa

SEQ ID NO: 21122 - DNA, 14 bp, Artificial Sequence
  Description of Artificial Sequence: Synthetic oligonucleotide
acagctgccagcta

SEQ ID NO: 21123 - DNA, 14 bp, Artificial Sequence
  Description of Artificial Sequence: Synthetic oligonucleotide
aacagctgccagct

SEQ ID NO: 21124 - DNA, 14 bp, Artificial Sequence
  Description of Artificial Sequence: Synthetic oligonucleotide
aaacagctgccagc

SEQ ID NO: 21125 - DNA, 14 bp, Artificial Sequence
  Description of Artificial Sequence: Synthetic oligonucleotide
aaaacagctgccag

SEQ ID NO: 21126 - DNA, 14 bp, Artificial Sequence
  Description of Artificial Sequence: Synthetic oligonucleotide
caaaacagctgcca

SEQ ID NO: 21127 - DNA, 14 bp, Artificial Sequence
  Description of Artificial Sequence: Synthetic oligonucleotide
tcaaaacagctgcc

SEQ ID NO: 21128 - DNA, 14 bp, Artificial Sequence
  Description of Artificial Sequence: Synthetic oligonucleotide
ttcaaaacagctgc

SEQ ID NO: 21129 - DNA, 14 bp, Artificial Sequence
  Description of Artificial Sequence: Synthetic oligonucleotide
cttcaaaacagctg

SEQ ID NO: 21130 - DNA, 14 bp, Artificial Sequence
  Description of Artificial Sequence: Synthetic oligonucleotide
tcttcaaaacagct

SEQ ID NO: 21131 - DNA, 14 bp, Artificial Sequence
  Description of Artificial Sequence: Synthetic oligonucleotide
atcttcaaaacagc

SEQ ID NO: 21132 - DNA, 14 bp, Artificial Sequence
  Description of Artificial Sequence: Synthetic oligonucleotide
aatcttcaaaacag

SEQ ID NO: 21133 - DNA, 14 bp, Artificial Sequence
  Description of Artificial Sequence: Synthetic oligonucleotide
aaatcttcaaaaca

SEQ ID NO: 21134 - DNA, 14 bp, Artificial Sequence
  Description of Artificial Sequence: Synthetic oligonucleotide
caaatcttcaaaac

SEQ ID NO: 21135 - DNA, 14 bp, Artificial Sequence
  Description of Artificial Sequence: Synthetic oligonucleotide
ccaaatcttcaaaa

SEQ ID NO: 21136 - DNA, 14 bp, Artificial Sequence
  Description of Artificial Sequence: Synthetic oligonucleotide
gccaaatcttcaaa

SEQ ID NO: 21137 - DNA, 14 bp, Artificial Sequence
  Description of Artificial Sequence: Synthetic oligonucleotide
tgccaaatcttcaa

SEQ ID NO: 21138 - DNA, 14 bp, Artificial Sequence
  Description of Artificial Sequence: Synthetic oligonucleotide
ctgccaaatcttca

SEQ ID NO: 21139 - DNA, 14 bp, Artificial Sequence
  Description of Artificial Sequence: Synthetic oligonucleotide
tctgccaaatcttc

SEQ ID NO: 21140 - DNA, 14 bp, Artificial Sequence
  Description of Artificial Sequence: Synthetic oligonucleotide
ttctgccaaatctt

SEQ ID NO: 21141 - DNA, 14 bp, Artificial Sequence
  Description of Artificial Sequence: Synthetic oligonucleotide
cttctgccaaatct

SEQ ID NO: 21142 - DNA, 14 bp, Artificial Sequence
  Description of Artificial Sequence: Synthetic oligonucleotide
tcttctgccaaatc

SEQ ID NO: 21143 - DNA, 14 bp, Artificial Sequence
  Description of Artificial Sequence: Synthetic oligonucleotide
ctcttctgccaaat

SEQ ID NO: 21144 - DNA, 14 bp, Artificial Sequence
  Description of Artificial Sequence: Synthetic oligonucleotide
gctcttctgccaaa

SEQ ID NO: 21145 - DNA, 14 bp, Artificial Sequence
  Description of Artificial Sequence: Synthetic oligonucleotide
tgctcttctgccaa

SEQ ID NO: 21146 - DNA, 14 bp, Artificial Sequence
  Description of Artificial Sequence: Synthetic oligonucleotide
ttgctcttctgcca

SEQ ID NO: 21147 - DNA, 14 bp, Artificial Sequence
  Description of Artificial Sequence: Synthetic oligonucleotide
cttgctcttctgcc

SEQ ID NO: 21148 - DNA, 14 bp, Artificial Sequence
  Description of Artificial Sequence: Synthetic oligonucleotide
gcttgctcttctgc

SEQ ID NO: 21149 - DNA, 14 bp, Artificial Sequence
  Description of Artificial Sequence: Synthetic oligonucleotide
tgcttgctcttctg

SEQ ID NO: 21150 - DNA, 14 bp, Artificial Sequence
  Description of Artificial Sequence: Synthetic oligonucleotide
atgcttgctcttct

SEQ ID NO: 21151 - DNA, 14 bp, Artificial Sequence
  Description of Artificial Sequence: Synthetic oligonucleotide
aatgcttgctcttc

SEQ ID NO: 21152 - DNA, 14 bp, Artificial Sequence
  Description of Artificial Sequence: Synthetic oligonucleotide
aaatgcttgctctt

SEQ ID NO: 21153 - DNA, 14 bp, Artificial Sequence
  Description of Artificial Sequence: Synthetic oligonucleotide
caaatgcttgctct

SEQ ID NO: 21154 - DNA, 14 bp, Artificial Sequence
  Description of Artificial Sequence: Synthetic oligonucleotide
tcaaatgcttgctc

SEQ ID NO: 21155 - DNA, 14 bp, Artificial Sequence
  Description of Artificial Sequence: Synthetic oligonucleotide
atcaaatgcttgct

SEQ ID NO: 21156 - DNA, 14 bp, Artificial Sequence
  Description of Artificial Sequence: Synthetic oligonucleotide
gatcaaatgcttgc

SEQ ID NO: 21157 - DNA, 14 bp, Artificial Sequence
  Description of Artificial Sequence: Synthetic oligonucleotide
ggatcaaatgcttg

SEQ ID NO: 21158 - DNA, 14 bp, Artificial Sequence
  Description of Artificial Sequence: Synthetic oligonucleotide
aggatcaaatgctt

SEQ ID NO: 21159 - DNA, 14 bp, Artificial Sequence
  Description of Artificial Sequence: Synthetic oligonucleotide
aaggatcaaatgct

SEQ ID NO: 21160 - DNA, 14 bp, Artificial Sequence
  Description of Artificial Sequence: Synthetic oligonucleotide
taaggatcaaatgc

SEQ ID NO: 21161 - DNA, 14 bp, Artificial Sequence
  Description of Artificial Sequence: Synthetic oligonucleotide
ataaggatcaaatg

SEQ ID NO: 21162 - DNA, 14 bp, Artificial Sequence
  Description of Artificial Sequence: Synthetic oligonucleotide
cataaggatcaaat

SEQ ID NO: 21163 - DNA, 14 bp, Artificial Sequence
  Description of Artificial Sequence: Synthetic oligonucleotide
tcataaggatcaaa

SEQ ID NO: 21164 - DNA, 14 bp, Artificial Sequence
  Description of Artificial Sequence: Synthetic oligonucleotide
ttcataaggatcaa

SEQ ID NO: 21165 - DNA, 14 bp, Artificial Sequence
  Description of Artificial Sequence: Synthetic oligonucleotide
tttcataaggatca

SEQ ID NO: 21166 - DNA, 14 bp, Artificial Sequence
  Description of Artificial Sequence: Synthetic oligonucleotide
gtttcataaggatc

SEQ ID NO: 21167 - DNA, 14 bp, Artificial Sequence
  Description of Artificial Sequence: Synthetic oligonucleotide
tgtttcataaggat

SEQ ID NO: 21168 - DNA, 14 bp, Artificial Sequence
  Description of Artificial Sequence: Synthetic oligonucleotide
atgtttcataagga

SEQ ID NO: 21169 - DNA, 14 bp, Artificial Sequence
  Description of Artificial Sequence: Synthetic oligonucleotide
aatgtttcataagg

SEQ ID NO: 21170 - DNA, 14 bp, Artificial Sequence
  Description of Artificial Sequence: Synthetic oligonucleotide
taatgtttcataag

SEQ ID NO: 21171 - DNA, 14 bp, Artificial Sequence
  Description of Artificial Sequence: Synthetic oligonucleotide
ataatgtttcataa

SEQ ID NO: 21172 - DNA, 14 bp, Artificial Sequence
  Description of Artificial Sequence: Synthetic oligonucleotide
gataatgtttcata

SEQ ID NO: 21173 - DNA, 14 bp, Artificial Sequence
  Description of Artificial Sequence: Synthetic oligonucleotide
tgataatgtttcat

SEQ ID NO: 21174 - DNA, 14 bp, Artificial Sequence
  Description of Artificial Sequence: Synthetic oligonucleotide
gtgataatgtttca

SEQ ID NO: 21175 - DNA, 14 bp, Artificial Sequence
  Description of Artificial Sequence: Synthetic oligonucleotide
tgtgataatgtttc

SEQ ID NO: 21176 - DNA, 14 bp, Artificial Sequence
  Description of Artificial Sequence: Synthetic oligonucleotide
ctgtgataatgttt

SEQ ID NO: 21177 - DNA, 14 bp, Artificial Sequence
  Description of Artificial Sequence: Synthetic oligonucleotide
cctgtgataatgtt

SEQ ID NO: 21178 - DNA, 14 bp, Artificial Sequence
  Description of Artificial Sequence: Synthetic oligonucleotide
tcctgtgataatgt

SEQ ID NO: 21179 - DNA, 14 bp, Artificial Sequence
  Description of Artificial Sequence: Synthetic oligonucleotide
gtcctgtgataatg

SEQ ID NO: 21180 - DNA, 14 bp, Artificial Sequence
  Description of Artificial Sequence: Synthetic oligonucleotide
tgtcctgtgataat

SEQ ID NO: 21181 - DNA, 14 bp, Artificial Sequence
  Description of Artificial Sequence: Synthetic oligonucleotide
atgtcctgtgataa

SEQ ID NO: 21182 - DNA, 14 bp, Artificial Sequence
  Description of Artificial Sequence: Synthetic oligonucleotide
aatgtcctgtgata

SEQ ID NO: 21183 - DNA, 14 bp, Artificial Sequence
  Description of Artificial Sequence: Synthetic oligonucleotide
gaatgtcctgtgat

SEQ ID NO: 21184 - DNA, 14 bp, Artificial Sequence
  Description of Artificial Sequence: Synthetic oligonucleotide
agaatgtcctgtga

SEQ ID NO: 21185 - DNA, 14 bp, Artificial Sequence
  Description of Artificial Sequence: Synthetic oligonucleotide
aagaatgtcctgtg

SEQ ID NO: 21186 - DNA, 14 bp, Artificial Sequence
  Description of Artificial Sequence: Synthetic oligonucleotide
aaagaatgtcctgt

SEQ ID NO: 21187 - DNA, 14 bp, Artificial Sequence
  Description of Artificial Sequence: Synthetic oligonucleotide
gaaagaatgtcctg

SEQ ID NO: 21188 - DNA, 14 bp, Artificial Sequence
  Description of Artificial Sequence: Synthetic oligonucleotide
tgaaagaatgtcct

SEQ ID NO: 21189 - DNA, 14 bp, Artificial Sequence
  Description of Artificial Sequence: Synthetic oligonucleotide
gtgaaagaatgtcc

SEQ ID NO: 21190 - DNA, 14 bp, Artificial Sequence
  Description of Artificial Sequence: Synthetic oligonucleotide
ggtgaaagaatgtc

SEQ ID NO: 21191 - DNA, 14 bp, Artificial Sequence
  Description of Artificial Sequence: Synthetic oligonucleotide
tggtgaaagaatgt

SEQ ID NO: 21192 - DNA, 14 bp, Artificial Sequence
  Description of Artificial Sequence: Synthetic oligonucleotide
ctggtgaaagaatg

SEQ ID NO: 21193 - DNA, 14 bp, Artificial Sequence
  Description of Artificial Sequence: Synthetic oligonucleotide
tctggtgaaagaat

SEQ ID NO: 21194 - DNA, 14 bp, Artificial Sequence
  Description of Artificial Sequence: Synthetic oligonucleotide
ctctggtgaaagaa

SEQ ID NO: 21195 - DNA, 14 bp, Artificial Sequence
  Description of Artificial Sequence: Synthetic oligonucleotide
actctggtgaaaga

SEQ ID NO: 21196 - DNA, 14 bp, Artificial Sequence
  Description of Artificial Sequence: Synthetic oligonucleotide
aactctggtgaaag

SEQ ID NO: 21197 - DNA, 14 bp, Artificial Sequence
  Description of Artificial Sequence: Synthetic oligonucleotide
aaactctggtgaaa

SEQ ID NO: 21198 - DNA, 14 bp, Artificial Sequence
  Description of Artificial Sequence: Synthetic oligonucleotide
gaaactctggtgaa

SEQ ID NO: 21199 - DNA, 14 bp, Artificial Sequence
  Description of Artificial Sequence: Synthetic oligonucleotide
tgaaactctggtga

SEQ ID NO: 21200 - DNA, 14 bp, Artificial Sequence
  Description of Artificial Sequence: Synthetic oligonucleotide
atgaaactctggtg

SEQ ID NO: 21201 - DNA, 14 bp, Artificial Sequence
  Description of Artificial Sequence: Synthetic oligonucleotide
catgaaactctggt

SEQ ID NO: 21202 - DNA, 14 bp, Artificial Sequence
  Description of Artificial Sequence: Synthetic oligonucleotide
tcatgaaactctgg

SEQ ID NO: 21203 - DNA, 14 bp, Artificial Sequence
  Description of Artificial Sequence: Synthetic oligonucleotide
ttcatgaaactctg

SEQ ID NO: 21204 - DNA, 14 bp, Artificial Sequence
  Description of Artificial Sequence: Synthetic oligonucleotide
gttcatgaaactct

SEQ ID NO: 21205 - DNA, 14 bp, Artificial Sequence
  Description of Artificial Sequence: Synthetic oligonucleotide
tgttcatgaaactc

SEQ ID NO: 21206 - DNA, 14 bp, Artificial Sequence
  Description of Artificial Sequence: Synthetic oligonucleotide
atgttcatgaaact

SEQ ID NO: 21207 - DNA, 14 bp, Artificial Sequence
  Description of Artificial Sequence: Synthetic oligonucleotide
aatgttcatgaaac

SEQ ID NO: 21208 - DNA, 14 bp, Artificial Sequence
  Description of Artificial Sequence: Synthetic oligonucleotide
aaatgttcatgaaa

SEQ ID NO: 21209 - DNA, 14 bp, Artificial Sequence
  Description of Artificial Sequence: Synthetic oligonucleotide
gaaatgttcatgaa

SEQ ID NO: 21210 - DNA, 14 bp, Artificial Sequence
  Description of Artificial Sequence: Synthetic oligonucleotide
tgaaatgttcatga

SEQ ID NO: 21211 - DNA, 14 bp, Artificial Sequence
  Description of Artificial Sequence: Synthetic oligonucleotide
ttgaaatgttcatg

SEQ ID NO: 21212 - DNA, 14 bp, Artificial Sequence
  Description of Artificial Sequence: Synthetic oligonucleotide
attgaaatgttcat

SEQ ID NO: 21213 - DNA, 14 bp, Artificial Sequence
  Description of Artificial Sequence: Synthetic oligonucleotide
tattgaaatgttca

SEQ ID NO: 21214 - DNA, 14 bp, Artificial Sequence
  Description of Artificial Sequence: Synthetic oligonucleotide
ttattgaaatgttc

SEQ ID NO: 21215 - DNA, 14 bp, Artificial Sequence
  Description of Artificial Sequence: Synthetic oligonucleotide
tttattgaaatgtt

SEQ ID NO: 21216 - DNA, 14 bp, Artificial Sequence
  Description of Artificial Sequence: Synthetic oligonucleotide
atttattgaaatgt

SEQ ID NO: 21217 - DNA, 14 bp, Artificial Sequence
  Description of Artificial Sequence: Synthetic oligonucleotide
aatttattgaaatg

SEQ ID NO: 21218 - DNA, 14 bp, Artificial Sequence
  Description of Artificial Sequence: Synthetic oligonucleotide
caatttattgaaat

SEQ ID NO: 21219 - DNA, 14 bp, Artificial Sequence
  Description of Artificial Sequence: Synthetic oligonucleotide
tcaatttattgaaa

SEQ ID NO: 21220 - DNA, 14 bp, Artificial Sequence
  Description of Artificial Sequence: Synthetic oligonucleotide
atcaatttattgaa

SEQ ID NO: 21221 - DNA, 14 bp, Artificial Sequence
  Description of Artificial Sequence: Synthetic oligonucleotide
catcaatttattga

SEQ ID NO: 21222 - DNA, 14 bp, Artificial Sequence
  Description of Artificial Sequence: Synthetic oligonucleotide
ccatcaatttattg

SEQ ID NO: 21223 - DNA, 14 bp, Artificial Sequence
  Description of Artificial Sequence: Synthetic oligonucleotide
gccatcaatttatt

SEQ ID NO: 21224 - DNA, 14 bp, Artificial Sequence
  Description of Artificial Sequence: Synthetic oligonucleotide
ggccatcaatttat

SEQ ID NO: 21225 - DNA, 14 bp, Artificial Sequence
  Description of Artificial Sequence: Synthetic oligonucleotide
tggccatcaattta

SEQ ID NO: 21226 - DNA, 14 bp, Artificial Sequence
  Description of Artificial Sequence: Synthetic oligonucleotide
ctggccatcaattt

SEQ ID NO: 21227 - DNA, 14 bp, Artificial Sequence
  Description of Artificial Sequence: Synthetic oligonucleotide
tctggccatcaatt

SEQ ID NO: 21228 - DNA, 14 bp, Artificial Sequence
  Description of Artificial Sequence: Synthetic oligonucleotide
gtctggccatcaat

SEQ ID NO: 21229 - DNA, 14 bp, Artificial Sequence
  Description of Artificial Sequence: Synthetic oligonucleotide
ggtctggccatcaa

SEQ ID NO: 21230 - DNA, 14 bp, Artificial Sequence
  Description of Artificial Sequence: Synthetic oligonucleotide
aggtctggccatca

SEQ ID NO: 21231 - DNA, 14 bp, Artificial Sequence
  Description of Artificial Sequence: Synthetic oligonucleotide
caggtctggccatc

SEQ ID NO: 21232 - DNA, 14 bp, Artificial Sequence
  Description of Artificial Sequence: Synthetic oligonucleotide
gcaggtctggccat

SEQ ID NO: 21233 - DNA, 14 bp, Artificial Sequence
  Description of Artificial Sequence: Synthetic oligonucleotide
tgcaggtctggcca

SEQ ID NO: 21234 - DNA, 14 bp, Artificial Sequence
  Description of Artificial Sequence: Synthetic oligonucleotide
ctgcaggtctggcc

SEQ ID NO: 21235 - DNA, 14 bp, Artificial Sequence
  Description of Artificial Sequence: Synthetic oligonucleotide
actgcaggtctggc

SEQ ID NO: 21236 - DNA, 14 bp, Artificial Sequence
  Description of Artificial Sequence: Synthetic oligonucleotide
aactgcaggtctgg

SEQ ID NO: 21237 - DNA, 14 bp, Artificial Sequence
  Description of Artificial Sequence: Synthetic oligonucleotide
caactgcaggtctg

SEQ ID NO: 21238 - DNA, 14 bp, Artificial Sequence
  Description of Artificial Sequence: Synthetic oligonucleotide
gcaactgcaggtct

SEQ ID NO: 21239 - DNA, 14 bp, Artificial Sequence
  Description of Artificial Sequence: Synthetic oligonucleotide
agcaactgcaggtc

SEQ ID NO: 21240 - DNA, 14 bp, Artificial Sequence
  Description of Artificial Sequence: Synthetic oligonucleotide
gagcaactgcaggt

SEQ ID NO: 21241 - DNA, 14 bp, Artificial Sequence
  Description of Artificial Sequence: Synthetic oligonucleotide
agagcaactgcagg

SEQ ID NO: 21242 - DNA, 14 bp, Artificial Sequence
  Description of Artificial Sequence: Synthetic oligonucleotide
tagagcaactgcag

SEQ ID NO: 21243 - DNA, 14 bp, Artificial Sequence
  Description of Artificial Sequence: Synthetic oligonucleotide
gtagagcaactgca

SEQ ID NO: 21244 - DNA, 14 bp, Artificial Sequence
  Description of Artificial Sequence: Synthetic oligonucleotide
tgtagagcaactgc

SEQ ID NO: 21245 - DNA, 14 bp, Artificial Sequence
  Description of Artificial Sequence: Synthetic oligonucleotide
gtgtagagcaactg

SEQ ID NO: 21246 - DNA, 14 bp, Artificial Sequence
  Description of Artificial Sequence: Synthetic oligonucleotide
agtgtagagcaact

SEQ ID NO: 21247 - DNA, 14 bp, Artificial Sequence
  Description of Artificial Sequence: Synthetic oligonucleotide
aagtgtagagcaac

SEQ ID NO: 21248 - DNA, 14 bp, Artificial Sequence
  Description of Artificial Sequence: Synthetic oligonucleotide
aaagtgtagagcaa

SEQ ID NO: 21249 - DNA, 14 bp, Artificial Sequence
  Description of Artificial Sequence: Synthetic oligonucleotide
gaaagtgtagagca

SEQ ID NO: 21250 - DNA, 14 bp, Artificial Sequence
  Description of Artificial Sequence: Synthetic oligonucleotide
tgaaagtgtagagc

SEQ ID NO: 21251 - DNA, 14 bp, Artificial Sequence
  Description of Artificial Sequence: Synthetic oligonucleotide
ctgaaagtgtagag

SEQ ID NO: 21252 - DNA, 14 bp, Artificial Sequence
  Description of Artificial Sequence: Synthetic oligonucleotide
actgaaagtgtaga

SEQ ID NO: 21253 - DNA, 14 bp, Artificial Sequence
  Description of Artificial Sequence: Synthetic oligonucleotide
gactgaaagtgtag

SEQ ID NO: 21254 - DNA, 14 bp, Artificial Sequence
  Description of Artificial Sequence: Synthetic oligonucleotide
ggactgaaagtgta

SEQ ID NO: 21255 - DNA, 14 bp, Artificial Sequence
  Description of Artificial Sequence: Synthetic oligonucleotide
tggactgaaagtgt

SEQ ID NO: 21256 - DNA, 14 bp, Artificial Sequence
  Description of Artificial Sequence: Synthetic oligonucleotide
atggactgaaagtg

SEQ ID NO: 21257 - DNA, 14 bp, Artificial Sequence
  Description of Artificial Sequence: Synthetic oligonucleotide
aatggactgaaagt

SEQ ID NO: 21258 - DNA, 14 bp, Artificial Sequence
  Description of Artificial Sequence: Synthetic oligonucleotide
caatggactgaaag

SEQ ID NO: 21259 - DNA, 14 bp, Artificial Sequence
  Description of Artificial Sequence: Synthetic oligonucleotide
gcaatggactgaaa

SEQ ID NO: 21260 - DNA, 14 bp, Artificial Sequence
  Description of Artificial Sequence: Synthetic oligonucleotide
agcaatggactgaa

SEQ ID NO: 21261 - DNA, 14 bp, Artificial Sequence
  Description of Artificial Sequence: Synthetic oligonucleotide
cagcaatggactga

SEQ ID NO: 21262 - DNA, 14 bp, Artificial Sequence
  Description of Artificial Sequence: Synthetic oligonucleotide
tcagcaatggactg

SEQ ID NO: 21263 - DNA, 14 bp, Artificial Sequence
  Description of Artificial Sequence: Synthetic oligonucleotide
atcagcaatggact

SEQ ID NO: 21264 - DNA, 14 bp, Artificial Sequence
  Description of Artificial Sequence: Synthetic oligonucleotide
catcagcaatggac

SEQ ID NO: 21265 - DNA, 14 bp, Artificial Sequence
  Description of Artificial Sequence: Synthetic oligonucleotide
ccatcagcaatgga

SEQ ID NO: 21266 - DNA, 14 bp, Artificial Sequence
  Description of Artificial Sequence: Synthetic oligonucleotide
accatcagcaatgg

SEQ ID NO: 21267 - DNA, 14 bp, Artificial Sequence
  Description of Artificial Sequence: Synthetic oligonucleotide
aaccatcagcaatg

SEQ ID NO: 21268 - DNA, 14 bp, Artificial Sequence
  Description of Artificial Sequence: Synthetic oligonucleotide
aaaccatcagcaat

SEQ ID NO: 21269 - DNA, 14 bp, Artificial Sequence
  Description of Artificial Sequence: Synthetic oligonucleotide
aaaaccatcagcaa

SEQ ID NO: 21270 - DNA, 14 bp, Artificial Sequence
  Description of Artificial Sequence: Synthetic oligonucleotide
taaaaccatcagca

SEQ ID NO: 21271 - DNA, 14 bp, Artificial Sequence
  Description of Artificial Sequence: Synthetic oligonucleotide
ttaaaaccatcagc

SEQ ID NO: 21272 - DNA, 14 bp, Artificial Sequence
  Description of Artificial Sequence: Synthetic oligonucleotide
tttaaaaccatcag

SEQ ID NO: 21273 - DNA, 14 bp, Artificial Sequence
  Description of Artificial Sequence: Synthetic oligonucleotide
ctttaaaaccatca

SEQ ID NO: 21274 - DNA, 14 bp, Artificial Sequence
  Description of Artificial Sequence: Synthetic oligonucleotide
tctttaaaaccatc

SEQ ID NO: 21275 - DNA, 14 bp, Artificial Sequence
  Description of Artificial Sequence: Synthetic oligonucleotide
ctctttaaaaccat

SEQ ID NO: 21276 - DNA, 14 bp, Artificial Sequence
  Description of Artificial Sequence: Synthetic oligonucleotide
cctctttaaaacca

SEQ ID NO: 21277 - DNA, 14 bp, Artificial Sequence
  Description of Artificial Sequence: Synthetic oligonucleotide
gcctctttaaaacc

SEQ ID NO: 21278 - DNA, 14 bp, Artificial Sequence
  Description of Artificial Sequence: Synthetic oligonucleotide
tgcctctttaaaac

SEQ ID NO: 21279 - DNA, 14 bp, Artificial Sequence
  Description of Artificial Sequence: Synthetic oligonucleotide
ctgcctctttaaaa

SEQ ID NO: 21280 - DNA, 14 bp, Artificial Sequence
  Description of Artificial Sequence: Synthetic oligonucleotide
actgcctctttaaa

SEQ ID NO: 21281 - DNA, 14 bp, Artificial Sequence
  Description of Artificial Sequence: Synthetic oligonucleotide
aactgcctctttaa

SEQ ID NO: 21282 - DNA, 14 bp, Artificial Sequence
  Description of Artificial Sequence: Synthetic oligonucleotide
gaactgcctcttta

SEQ ID NO: 21283 - DNA, 14 bp, Artificial Sequence
  Description of Artificial Sequence: Synthetic oligonucleotide
cgaactgcctcttt

SEQ ID NO: 21284 - DNA, 14 bp, Artificial Sequence
  Description of Artificial Sequence: Synthetic oligonucleotide
acgaactgcctctt

SEQ ID NO: 21285 - DNA, 14 bp, Artificial Sequence
  Description of Artificial Sequence: Synthetic oligonucleotide
aacgaactgcctct

SEQ ID NO: 21286 - DNA, 14 bp, Artificial Sequence
  Description of Artificial Sequence: Synthetic oligonucleotide
taacgaactgcctc

SEQ ID NO: 21287 - DNA, 14 bp, Artificial Sequence
  Description of Artificial Sequence: Synthetic oligonucleotide
ataacgaactgcct

SEQ ID NO: 21288 - DNA, 14 bp, Artificial Sequence
  Description of Artificial Sequence: Synthetic oligonucleotide
cataacgaactgcc

SEQ ID NO: 21289 - DNA, 14 bp, Artificial Sequence
  Description of Artificial Sequence: Synthetic oligonucleotide
acataacgaactgc

SEQ ID NO: 21290 - DNA, 14 bp, Artificial Sequence
  Description of Artificial Sequence: Synthetic oligonucleotide
gacataacgaactg

SEQ ID NO: 21291 - DNA, 14 bp, Artificial Sequence
  Description of Artificial Sequence: Synthetic oligonucleotide
ggacataacgaact

SEQ ID NO: 21292 - DNA, 14 bp, Artificial Sequence
  Description of Artificial Sequence: Synthetic oligonucleotide
aggacataacgaac

SEQ ID NO: 21293 - DNA, 14 bp, Artificial Sequence
  Description of Artificial Sequence: Synthetic oligonucleotide
aaggacataacgaa

SEQ ID NO: 21294 - DNA, 14 bp, Artificial Sequence
  Description of Artificial Sequence: Synthetic oligonucleotide
gaaggacataacga

SEQ ID NO: 21295 - DNA, 14 bp, Artificial Sequence
  Description of Artificial Sequence: Synthetic oligonucleotide
ggaaggacataacg

SEQ ID NO: 21296 - DNA, 14 bp, Artificial Sequence
  Description of Artificial Sequence: Synthetic oligonucleotide
tggaaggacataac

SEQ ID NO: 21297 - DNA, 14 bp, Artificial Sequence
  Description of Artificial Sequence: Synthetic oligonucleotide
gtggaaggacataa

SEQ ID NO: 21298 - DNA, 14 bp, Artificial Sequence
  Description of Artificial Sequence: Synthetic oligonucleotide
cgtggaaggacata

SEQ ID NO: 21299 - DNA, 14 bp, Artificial Sequence
  Description of Artificial Sequence: Synthetic oligonucleotide
acgtggaaggacat

SEQ ID NO: 21300 - DNA, 14 bp, Artificial Sequence
  Description of Artificial Sequence: Synthetic oligonucleotide
gacgtggaaggaca

SEQ ID NO: 21301 - DNA, 14 bp, Artificial Sequence
  Description of Artificial Sequence: Synthetic oligonucleotide
agacgtggaaggac

SEQ ID NO: 21302 - DNA, 14 bp, Artificial Sequence
  Description of Artificial Sequence: Synthetic oligonucleotide
aagacgtggaagga

SEQ ID NO: 21303 - DNA, 14 bp, Artificial Sequence
  Description of Artificial Sequence: Synthetic oligonucleotide
taagacgtggaagg

SEQ ID NO: 21304 - DNA, 14 bp, Artificial Sequence
  Description of Artificial Sequence: Synthetic oligonucleotide
ataagacgtggaag

SEQ ID NO: 21305 - DNA, 14 bp, Artificial Sequence
  Description of Artificial Sequence: Synthetic oligonucleotide
cataagacgtggaa

SEQ ID NO: 21306 - DNA, 14 bp, Artificial Sequence
  Description of Artificial Sequence: Synthetic oligonucleotide
gcataagacgtgga

SEQ ID NO: 21307 - DNA, 14 bp, Artificial Sequence
  Description of Artificial Sequence: Synthetic oligonucleotide
agcataagacgtgg

SEQ ID NO: 21308 - DNA, 14 bp, Artificial Sequence
  Description of Artificial Sequence: Synthetic oligonucleotide
cagcataagacgtg

SEQ ID NO: 21309 - DNA, 14 bp, Artificial Sequence
  Description of Artificial Sequence: Synthetic oligonucleotide
ccagcataagacgt

SEQ ID NO: 21310 - DNA, 14 bp, Artificial Sequence
  Description of Artificial Sequence: Synthetic oligonucleotide
accagcataagacg

SEQ ID NO: 21311 - DNA, 14 bp, Artificial Sequence
  Description of Artificial Sequence: Synthetic oligonucleotide
caccagcataagac

SEQ ID NO: 21312 - DNA, 14 bp, Artificial Sequence
  Description of Artificial Sequence: Synthetic oligonucleotide
gcaccagcataaga

SEQ ID NO: 21313 - DNA, 14 bp, Artificial Sequence
  Description of Artificial Sequence: Synthetic oligonucleotide
ggcaccagcataag

SEQ ID NO: 21314 - DNA, 14 bp, Artificial Sequence
  Description of Artificial Sequence: Synthetic oligonucleotide
tggcaccagcataa

SEQ ID NO: 21315 - DNA, 14 bp, Artificial Sequence
  Description of Artificial Sequence: Synthetic oligonucleotide
ctggcaccagcata

SEQ ID NO: 21316 - DNA, 14 bp, Artificial Sequence
  Description of Artificial Sequence: Synthetic oligonucleotide
actggcaccagcat

SEQ ID NO: 21317 - DNA, 14 bp, Artificial Sequence
  Description of Artificial Sequence: Synthetic oligonucleotide
cactggcaccagca

SEQ ID NO: 21318 - DNA, 14 bp, Artificial Sequence
  Description of Artificial Sequence: Synthetic oligonucleotide
acactggcaccagc

SEQ ID NO: 21319 - DNA, 14 bp, Artificial Sequence
  Description of Artificial Sequence: Synthetic oligonucleotide
tacactggcaccag

SEQ ID NO: 21320 - DNA, 14 bp, Artificial Sequence
  Description of Artificial Sequence: Synthetic oligonucleotide
atacactggcacca

SEQ ID NO: 21321 - DNA, 14 bp, Artificial Sequence
  Description of Artificial Sequence: Synthetic oligonucleotide
gatacactggcacc

SEQ ID NO: 21322 - DNA, 14 bp, Artificial Sequence
  Description of Artificial Sequence: Synthetic oligonucleotide
tgatacactggcac

SEQ ID NO: 21323 - DNA, 14 bp, Artificial Sequence
  Description of Artificial Sequence: Synthetic oligonucleotide
gtgatacactggca

SEQ ID NO: 21324 - DNA, 14 bp, Artificial Sequence
  Description of Artificial Sequence: Synthetic oligonucleotide
agtgatacactggc

SEQ ID NO: 21325 - DNA, 14 bp, Artificial Sequence
  Description of Artificial Sequence: Synthetic oligonucleotide
cagtgatacactgg

SEQ ID NO: 21326 - DNA, 14 bp, Artificial Sequence
  Description of Artificial Sequence: Synthetic oligonucleotide
acagtgatacactg

SEQ ID NO: 21327 - DNA, 14 bp, Artificial Sequence
  Description of Artificial Sequence: Synthetic oligonucleotide
aacagtgatacact

SEQ ID NO: 21328 - DNA, 14 bp, Artificial Sequence
  Description of Artificial Sequence: Synthetic oligonucleotide
caacagtgatacac

SEQ ID NO: 21329 - DNA, 14 bp, Artificial Sequence
  Description of Artificial Sequence: Synthetic oligonucleotide
ccaacagtgataca

SEQ ID NO: 21330 - DNA, 14 bp, Artificial Sequence
  Description of Artificial Sequence: Synthetic oligonucleotide
gccaacagtgatac

SEQ ID NO: 21331 - DNA, 14 bp, Artificial Sequence
  Description of Artificial Sequence: Synthetic oligonucleotide
tgccaacagtgata

SEQ ID NO: 21332 - DNA, 14 bp, Artificial Sequence
  Description of Artificial Sequence: Synthetic oligonucleotide
gtgccaacagtgat

SEQ ID NO: 21333 - DNA, 14 bp, Artificial Sequence
  Description of Artificial Sequence: Synthetic oligonucleotide
agtgccaacagtga

SEQ ID NO: 21334 - DNA, 14 bp, Artificial Sequence
  Description of Artificial Sequence: Synthetic oligonucleotide
tagtgccaacagtg

SEQ ID NO: 21335 - DNA, 14 bp, Artificial Sequence
  Description of Artificial Sequence: Synthetic oligonucleotide
gtagtgccaacagt

SEQ ID NO: 21336 - DNA, 14 bp, Artificial Sequence
  Description of Artificial Sequence: Synthetic oligonucleotide
agtagtgccaacag

SEQ ID NO: 21337 - DNA, 14 bp, Artificial Sequence
  Description of Artificial Sequence: Synthetic oligonucleotide
aagtagtgccaaca

SEQ ID NO: 21338 - DNA, 14 bp, Artificial Sequence
  Description of Artificial Sequence: Synthetic oligonucleotide
aaagtagtgccaac

SEQ ID NO: 21339 - DNA, 14 bp, Artificial Sequence
  Description of Artificial Sequence: Synthetic oligonucleotide
caaagtagtgccaa

SEQ ID NO: 21340 - DNA, 14 bp, Artificial Sequence
  Description of Artificial Sequence: Synthetic oligonucleotide
tcaaagtagtgcca

SEQ ID NO: 21341 - DNA, 14 bp, Artificial Sequence
  Description of Artificial Sequence: Synthetic oligonucleotide
ctcaaagtagtgcc

SEQ ID NO: 21342 - DNA, 14 bp, Artificial Sequence
  Description of Artificial Sequence: Synthetic oligonucleotide
actcaaagtagtgc

SEQ ID NO: 21343 - DNA, 14 bp, Artificial Sequence
  Description of Artificial Sequence: Synthetic oligonucleotide
aactcaaagtagtg

SEQ ID NO: 21344 - DNA, 14 bp, Artificial Sequence
  Description of Artificial Sequence: Synthetic oligonucleotide
taactcaaagtagt

SEQ ID NO: 21345 - DNA, 14 bp, Artificial Sequence
  Description of Artificial Sequence: Synthetic oligonucleotide
gtaactcaaagtag

SEQ ID NO: 21346 - DNA, 14 bp, Artificial Sequence
  Description of Artificial Sequence: Synthetic oligonucleotide
agtaactcaaagta

SEQ ID NO: 21347 - DNA, 14 bp, Artificial Sequence
  Description of Artificial Sequence: Synthetic oligonucleotide
tagtaactcaaagt

SEQ ID NO: 21348 - DNA, 14 bp, Artificial Sequence
  Description of Artificial Sequence: Synthetic oligonucleotide
ttagtaactcaaag

SEQ ID NO: 21349 - DNA, 14 bp, Artificial Sequence
  Description of Artificial Sequence: Synthetic oligonucleotide
tttagtaactcaaa

SEQ ID NO: 21350 - DNA, 14 bp, Artificial Sequence
  Description of Artificial Sequence: Synthetic oligonucleotide
ctttagtaactcaa

SEQ ID NO: 21351 - DNA, 14 bp, Artificial Sequence
  Description of Artificial Sequence: Synthetic oligonucleotide
gctttagtaactca

SEQ ID NO: 21352 - DNA, 14 bp, Artificial Sequence
  Description of Artificial Sequence: Synthetic oligonucleotide
tgctttagtaactc

SEQ ID NO: 21353 - DNA, 14 bp, Artificial Sequence
  Description of Artificial Sequence: Synthetic oligonucleotide
ttgctttagtaact

SEQ ID NO: 21354 - DNA, 14 bp, Artificial Sequence
  Description of Artificial Sequence: Synthetic oligonucleotide
attgctttagtaac

SEQ ID NO: 21355 - DNA, 14 bp, Artificial Sequence
  Description of Artificial Sequence: Synthetic oligonucleotide
aattgctttagtaa

SEQ ID NO: 21356 - DNA, 14 bp, Artificial Sequence
  Description of Artificial Sequence: Synthetic oligonucleotide
caattgctttagta

SEQ ID NO: 21357 - DNA, 14 bp, Artificial Sequence
  Description of Artificial Sequence: Synthetic oligonucleotide
tcaattgctttagt

SEQ ID NO: 21358 - DNA, 14 bp, Artificial Sequence
  Description of Artificial Sequence: Synthetic oligonucleotide
ttcaattgctttag

SEQ ID NO: 21359 - DNA, 14 bp, Artificial Sequence
  Description of Artificial Sequence: Synthetic oligonucleotide
tttcaattgcttta

SEQ ID NO: 21360 - DNA, 14 bp, Artificial Sequence
  Description of Artificial Sequence: Synthetic oligonucleotide
ctttcaattgcttt

SEQ ID NO: 21361 - DNA, 14 bp, Artificial Sequence
  Description of Artificial Sequence: Synthetic oligonucleotide
gctttcaattgctt

SEQ ID NO: 21362 - DNA, 14 bp, Artificial Sequence
  Description of Artificial Sequence: Synthetic oligonucleotide
tgctttcaattgct

SEQ ID NO: 21363 - DNA, 14 bp, Artificial Sequence
  Description of Artificial Sequence: Synthetic oligonucleotide
atgctttcaattgc

SEQ ID NO: 21364 - DNA, 14 bp, Artificial Sequence
  Description of Artificial Sequence: Synthetic oligonucleotide
catgctttcaattg

SEQ ID NO: 21365 - DNA, 14 bp, Artificial Sequence
  Description of Artificial Sequence: Synthetic oligonucleotide
acatgctttcaatt

SEQ ID NO: 21366 - DNA, 14 bp, Artificial Sequence
  Description of Artificial Sequence: Synthetic oligonucleotide
tacatgctttcaat

SEQ ID NO: 21367 - DNA, 14 bp, Artificial Sequence
  Description of Artificial Sequence: Synthetic oligonucleotide
ctacatgctttcaa

SEQ ID NO: 21368 - DNA, 14 bp, Artificial Sequence
  Description of Artificial Sequence: Synthetic oligonucleotide
actacatgctttca

SEQ ID NO: 21369 - DNA, 14 bp, Artificial Sequence
  Description of Artificial Sequence: Synthetic oligonucleotide
cactacatgctttc

SEQ ID NO: 21370 - DNA, 14 bp, Artificial Sequence
  Description of Artificial Sequence: Synthetic oligonucleotide
tcactacatgcttt

SEQ ID NO: 21371 - DNA, 14 bp, Artificial Sequence
  Description of Artificial Sequence: Synthetic oligonucleotide
ttcactacatgctt

SEQ ID NO: 21372 - DNA, 14 bp, Artificial Sequence
  Description of Artificial Sequence: Synthetic oligonucleotide
cttcactacatgct

SEQ ID NO: 21373 - DNA, 14 bp, Artificial Sequence
  Description of Artificial Sequence: Synthetic oligonucleotide
tcttcactacatgc

SEQ ID NO: 21374 - DNA, 14 bp, Artificial Sequence
  Description of Artificial Sequence: Synthetic oligonucleotide
ttcttcactacatg

SEQ ID NO: 21375 - DNA, 14 bp, Artificial Sequence
  Description of Artificial Sequence: Synthetic oligonucleotide
gttcttcactacat

SEQ ID NO: 21376 - DNA, 14 bp, Artificial Sequence
  Description of Artificial Sequence: Synthetic oligonucleotide
tgttcttcactaca

SEQ ID NO: 21377 - DNA, 14 bp, Artificial Sequence
  Description of Artificial Sequence: Synthetic oligonucleotide
ttgttcttcactac

SEQ ID NO: 21378 - DNA, 14 bp, Artificial Sequence
  Description of Artificial Sequence: Synthetic oligonucleotide
cttgttcttcacta

SEQ ID NO: 21379 - DNA, 14 bp, Artificial Sequence
  Description of Artificial Sequence: Synthetic oligonucleotide
tcttgttcttcact

SEQ ID NO: 21380 - DNA, 14 bp, Artificial Sequence
  Description of Artificial Sequence: Synthetic oligonucleotide
ttcttgttcttcac

SEQ ID NO: 21381 - DNA, 14 bp, Artificial Sequence
  Description of Artificial Sequence: Synthetic oligonucleotide
cttcttgttcttca

SEQ ID NO: 21382 - DNA, 14 bp, Artificial Sequence
  Description of Artificial Sequence: Synthetic oligonucleotide
tcttcttgttcttc

SEQ ID NO: 21383 - DNA, 14 bp, Artificial Sequence
  Description of Artificial Sequence: Synthetic oligonucleotide
gtcttcttgttctt

SEQ ID NO: 21384 - DNA, 14 bp, Artificial Sequence
  Description of Artificial Sequence: Synthetic oligonucleotide
tgtcttcttgttct

SEQ ID NO: 21385 - DNA, 14 bp, Artificial Sequence
  Description of Artificial Sequence: Synthetic oligonucleotide
ctgtcttcttgttc

SEQ ID NO: 21386 - DNA, 14 bp, Artificial Sequence
  Description of Artificial Sequence: Synthetic oligonucleotide
tctgtcttcttgtt

SEQ ID NO: 21387 - DNA, 14 bp, Artificial Sequence
  Description of Artificial Sequence: Synthetic oligonucleotide
ctctgtcttcttgt

SEQ ID NO: 21388 - DNA, 14 bp, Artificial Sequence
  Description of Artificial Sequence: Synthetic oligonucleotide
tctctgtcttcttg

SEQ ID NO: 21389 - DNA, 14 bp, Artificial Sequence
  Description of Artificial Sequence: Synthetic oligonucleotide
ttctctgtcttctt

SEQ ID NO: 21390 - DNA, 14 bp, Artificial Sequence
  Description of Artificial Sequence: Synthetic oligonucleotide
attctctgtcttct

SEQ ID NO: 21391 - DNA, 14 bp, Artificial Sequence
  Description of Artificial Sequence: Synthetic oligonucleotide
cattctctgtcttc

SEQ ID NO: 21392 - DNA, 14 bp, Artificial Sequence
  Description of Artificial Sequence: Synthetic oligonucleotide
acattctctgtctt

SEQ ID NO: 21393 - DNA, 14 bp, Artificial Sequence
  Description of Artificial Sequence: Synthetic oligonucleotide
aacattctctgtct

SEQ ID NO: 21394 - DNA, 14 bp, Artificial Sequence
  Description of Artificial Sequence: Synthetic oligonucleotide
aaacattctctgtc

SEQ ID NO: 21395 - DNA, 14 bp, Artificial Sequence
  Description of Artificial Sequence: Synthetic oligonucleotide
caaacattctctgt

SEQ ID NO: 21396 - DNA, 14 bp, Artificial Sequence
  Description of Artificial Sequence: Synthetic oligonucleotide
tcaaacattctctg

SEQ ID NO: 21397 - DNA, 14 bp, Artificial Sequence
  Description of Artificial Sequence: Synthetic oligonucleotide
ttcaaacattctct

SEQ ID NO: 21398 - DNA, 14 bp, Artificial Sequence
  Description of Artificial Sequence: Synthetic oligonucleotide
gttcaaacattctc

SEQ ID NO: 21399 - DNA, 14 bp, Artificial Sequence
  Description of Artificial Sequence: Synthetic oligonucleotide
ggttcaaacattct

SEQ ID NO: 21400 - DNA, 14 bp, Artificial Sequence
  Description of Artificial Sequence: Synthetic oligonucleotide
tggttcaaacattc

SEQ ID NO: 21401 - DNA, 14 bp, Artificial Sequence
  Description of Artificial Sequence: Synthetic oligonucleotide
ttggttcaaacatt

SEQ ID NO: 21402 - DNA, 14 bp, Artificial Sequence
  Description of Artificial Sequence: Synthetic oligonucleotide
cttggttcaaacat

SEQ ID NO: 21403 - DNA, 14 bp, Artificial Sequence
  Description of Artificial Sequence: Synthetic oligonucleotide
gcttggttcaaaca

SEQ ID NO: 21404 - DNA, 14 bp, Artificial Sequence
  Description of Artificial Sequence: Synthetic oligonucleotide
agcttggttcaaac

SEQ ID NO: 21405 - DNA, 14 bp, Artificial Sequence
  Description of Artificial Sequence: Synthetic oligonucleotide
tagcttggttcaaa

SEQ ID NO: 21406 - DNA, 14 bp, Artificial Sequence
  Description of Artificial Sequence: Synthetic oligonucleotide
atagcttggttcaa

SEQ ID NO: 21407 - DNA, 14 bp, Artificial Sequence
  Description of Artificial Sequence: Synthetic oligonucleotide
aatagcttggttca

SEQ ID NO: 21408 - DNA, 14 bp, Artificial Sequence
  Description of Artificial Sequence: Synthetic oligonucleotide
taatagcttggttc

SEQ ID NO: 21409 - DNA, 14 bp, Artificial Sequence
  Description of Artificial Sequence: Synthetic oligonucleotide
gtaatagcttggtt

SEQ ID NO: 21410 - DNA, 14 bp, Artificial Sequence
  Description of Artificial Sequence: Synthetic oligonucleotide
agtaatagcttggt

SEQ ID NO: 21411 - DNA, 14 bp, Artificial Sequence
  Description of Artificial Sequence: Synthetic oligonucleotide
cagtaatagcttgg

SEQ ID NO: 21412 - DNA, 14 bp, Artificial Sequence
  Description of Artificial Sequence: Synthetic oligonucleotide
gcagtaatagcttg

SEQ ID NO: 21413 - DNA, 14 bp, Artificial Sequence
  Description of Artificial Sequence: Synthetic oligonucleotide
agcagtaatagctt

SEQ ID NO: 21414 - DNA, 14 bp, Artificial Sequence
  Description of Artificial Sequence: Synthetic oligonucleotide
gagcagtaatagct

SEQ ID NO: 21415 - DNA, 14 bp, Artificial Sequence
  Description of Artificial Sequence: Synthetic oligonucleotide
agagcagtaatagc

SEQ ID NO: 21416 - DNA, 14 bp, Artificial Sequence
  Description of Artificial Sequence: Synthetic oligonucleotide
gagagcagtaatag

SEQ ID NO: 21417 - DNA, 14 bp, Artificial Sequence
  Description of Artificial Sequence: Synthetic oligonucleotide
tgagagcagtaata

SEQ ID NO: 21418 - DNA, 14 bp, Artificial Sequence
  Description of Artificial Sequence: Synthetic oligonucleotide
atgagagcagtaat

SEQ ID NO: 21419 - DNA, 14 bp, Artificial Sequence
  Description of Artificial Sequence: Synthetic oligonucleotide
catgagagcagtaa

SEQ ID NO: 21420 - DNA, 14 bp, Artificial Sequence
  Description of Artificial Sequence: Synthetic oligonucleotide
tcatgagagcagta

SEQ ID NO: 21421 - DNA, 14 bp, Artificial Sequence
  Description of Artificial Sequence: Synthetic oligonucleotide
ttcatgagagcagt

SEQ ID NO: 21422 - DNA, 14 bp, Artificial Sequence
  Description of Artificial Sequence: Synthetic oligonucleotide
attcatgagagcag

SEQ ID NO: 21423 - DNA, 14 bp, Artificial Sequence
  Description of Artificial Sequence: Synthetic oligonucleotide
gattcatgagagca

SEQ ID NO: 21424 - DNA, 14 bp, Artificial Sequence
  Description of Artificial Sequence: Synthetic oligonucleotide
agattcatgagagc

SEQ ID NO: 21425 - DNA, 14 bp, Artificial Sequence
  Description of Artificial Sequence: Synthetic oligonucleotide
gagattcatgagag

SEQ ID NO: 21426 - DNA, 14 bp, Artificial Sequence
  Description of Artificial Sequence: Synthetic oligonucleotide
ggagattcatgaga

SEQ ID NO: 21427 - DNA, 14 bp, Artificial Sequence
  Description of Artificial Sequence: Synthetic oligonucleotide
tggagattcatgag

SEQ ID NO: 21428 - DNA, 14 bp, Artificial Sequence
  Description of Artificial Sequence: Synthetic oligonucleotide
ttggagattcatga

SEQ ID NO: 21429 - DNA, 14 bp, Artificial Sequence
  Description of Artificial Sequence: Synthetic oligonucleotide
cttggagattcatg

SEQ ID NO: 21430 - DNA, 14 bp, Artificial Sequence
  Description of Artificial Sequence: Synthetic oligonucleotide
ccttggagattcat

SEQ ID NO: 21431 - DNA, 14 bp, Artificial Sequence
  Description of Artificial Sequence: Synthetic oligonucleotide
accttggagattca

SEQ ID NO: 21432 - DNA, 14 bp, Artificial Sequence
  Description of Artificial Sequence: Synthetic oligonucleotide
taccttggagattc

SEQ ID NO: 21433 - DNA, 14 bp, Artificial Sequence
  Description of Artificial Sequence: Synthetic oligonucleotide
ctaccttggagatt

SEQ ID NO: 21434 - DNA, 14 bp, Artificial Sequence
  Description of Artificial Sequence: Synthetic oligonucleotide
gctaccttggagat

SEQ ID NO: 21435 - DNA, 14 bp, Artificial Sequence
  Description of Artificial Sequence: Synthetic oligonucleotide
tgctaccttggaga

SEQ ID NO: 21436 - DNA, 14 bp, Artificial Sequence
  Description of Artificial Sequence: Synthetic oligonucleotide
atgctaccttggag

SEQ ID NO: 21437 - DNA, 14 bp, Artificial Sequence
  Description of Artificial Sequence: Synthetic oligonucleotide
catgctaccttgga

SEQ ID NO: 21438 - DNA, 14 bp, Artificial Sequence
  Description of Artificial Sequence: Synthetic oligonucleotide
ccatgctaccttgg

SEQ ID NO: 21439 - DNA, 14 bp, Artificial Sequence
  Description of Artificial Sequence: Synthetic oligonucleotide
tccatgctaccttg

SEQ ID NO: 21440 - DNA, 14 bp, Artificial Sequence
  Description of Artificial Sequence: Synthetic oligonucleotide
gtccatgctacctt

SEQ ID NO: 21441 - DNA, 14 bp, Artificial Sequence
  Description of Artificial Sequence: Synthetic oligonucleotide
ggtccatgctacct

SEQ ID NO: 21442 - DNA, 14 bp, Artificial Sequence
  Description of Artificial Sequence: Synthetic oligonucleotide
cggtccatgctacc

SEQ ID NO: 21443 - DNA, 14 bp, Artificial Sequence
  Description of Artificial Sequence: Synthetic oligonucleotide
tcggtccatgctac

SEQ ID NO: 21444 - DNA, 14 bp, Artificial Sequence
  Description of Artificial Sequence: Synthetic oligonucleotide
ttcggtccatgcta

SEQ ID NO: 21445 - DNA, 14 bp, Artificial Sequence
  Description of Artificial Sequence: Synthetic oligonucleotide
attcggtccatgct

SEQ ID NO: 21446 - DNA, 14 bp, Artificial Sequence
  Description of Artificial Sequence: Synthetic oligonucleotide
aattcggtccatgc

SEQ ID NO: 21447 - DNA, 14 bp, Artificial Sequence
  Description of Artificial Sequence: Synthetic oligonucleotide
aaattcggtccatg

SEQ ID NO: 21448 - DNA, 14 bp, Artificial Sequence
  Description of Artificial Sequence: Synthetic oligonucleotide
taaattcggtccat

SEQ ID NO: 21449 - DNA, 14 bp, Artificial Sequence
  Description of Artificial Sequence: Synthetic oligonucleotide
gtaaattcggtcca

SEQ ID NO: 21450 - DNA, 14 bp, Artificial Sequence
  Description of Artificial Sequence: Synthetic oligonucleotide
tgtaaattcggtcc

SEQ ID NO: 21451 - DNA, 14 bp, Artificial Sequence
  Description of Artificial Sequence: Synthetic oligonucleotide
ttgtaaattcggtc

SEQ ID NO: 21452 - DNA, 14 bp, Artificial Sequence
  Description of Artificial Sequence: Synthetic oligonucleotide
cttgtaaattcggt

SEQ ID NO: 21453 - DNA, 14 bp, Artificial Sequence
  Description of Artificial Sequence: Synthetic oligonucleotide
gcttgtaaattcgg

SEQ ID NO: 21454 - DNA, 14 bp, Artificial Sequence
  Description of Artificial Sequence: Synthetic oligonucleotide
tgcttgtaaattcg

SEQ ID NO: 21455 - DNA, 14 bp, Artificial Sequence
  Description of Artificial Sequence: Synthetic oligonucleotide
ctgcttgtaaattc

SEQ ID NO: 21456 - DNA, 14 bp, Artificial Sequence
  Description of Artificial Sequence: Synthetic oligonucleotide
actgcttgtaaatt

SEQ ID NO: 21457 - DNA, 14 bp, Artificial Sequence
  Description of Artificial Sequence: Synthetic oligonucleotide
tactgcttgtaaat

SEQ ID NO: 21458 - DNA, 14 bp, Artificial Sequence
  Description of Artificial Sequence: Synthetic oligonucleotide
atactgcttgtaaa

SEQ ID NO: 21459 - DNA, 14 bp, Artificial Sequence
  Description of Artificial Sequence: Synthetic oligonucleotide
aatactgcttgtaa

SEQ ID NO: 21460 - DNA, 14 bp, Artificial Sequence
  Description of Artificial Sequence: Synthetic oligonucleotide
gaatactgcttgta

SEQ ID NO: 21461 - DNA, 14 bp, Artificial Sequence
  Description of Artificial Sequence: Synthetic oligonucleotide
tgaatactgcttgt

SEQ ID NO: 21462 - DNA, 14 bp, Artificial Sequence
  Description of Artificial Sequence: Synthetic oligonucleotide
gtgaatactgcttg

SEQ ID NO: 21463 - DNA, 14 bp, Artificial Sequence
  Description of Artificial Sequence: Synthetic oligonucleotide
ggtgaatactgctt

SEQ ID NO: 21464 - DNA, 14 bp, Artificial Sequence
  Description of Artificial Sequence: Synthetic oligonucleotide
aggtgaatactgct

SEQ ID NO: 21465 - DNA, 14 bp, Artificial Sequence
  Description of Artificial Sequence: Synthetic oligonucleotide
taggtgaatactgc

SEQ ID NO: 21466 - DNA, 14 bp, Artificial Sequence
  Description of Artificial Sequence: Synthetic oligonucleotide
ctaggtgaatactg

SEQ ID NO: 21467 - DNA, 14 bp, Artificial Sequence
  Description of Artificial Sequence: Synthetic oligonucleotide
tctaggtgaatact

SEQ ID NO: 21468 - DNA, 14 bp, Artificial Sequence
  Description of Artificial Sequence: Synthetic oligonucleotide
gtctaggtgaatac

SEQ ID NO: 21469 - DNA, 14 bp, Artificial Sequence
  Description of Artificial Sequence: Synthetic oligonucleotide
cgtctaggtgaata

SEQ ID NO: 21470 - DNA, 14 bp, Artificial Sequence
  Description of Artificial Sequence: Synthetic oligonucleotide
acgtctaggtgaat

SEQ ID NO: 21471 - DNA, 14 bp, Artificial Sequence
  Description of Artificial Sequence: Synthetic oligonucleotide
gacgtctaggtgaa

SEQ ID NO: 21472 - DNA, 14 bp, Artificial Sequence
  Description of Artificial Sequence: Synthetic oligonucleotide
cgacgtctaggtga

SEQ ID NO: 21473 - DNA, 14 bp, Artificial Sequence
  Description of Artificial Sequence: Synthetic oligonucleotide
tcgacgtctaggtg

SEQ ID NO: 21474 - DNA, 14 bp, Artificial Sequence
  Description of Artificial Sequence: Synthetic oligonucleotide
gtcgacgtctaggt

SEQ ID NO: 21475 - DNA, 14 bp, Artificial Sequence
  Description of Artificial Sequence: Synthetic oligonucleotide
ggtcgacgtctagg

SEQ ID NO: 21476 - DNA, 14 bp, Artificial Sequence
  Description of Artificial Sequence: Synthetic oligonucleotide
aggtcgacgtctag

SEQ ID NO: 21477 - DNA, 14 bp, Artificial Sequence
  Description of Artificial Sequence: Synthetic oligonucleotide
caggtcgacgtcta

SEQ ID NO: 21478 - DNA, 14 bp, Artificial Sequence
  Description of Artificial Sequence: Synthetic oligonucleotide
ccaggtcgacgtct

SEQ ID NO: 21479 - DNA, 14 bp, Artificial Sequence
  Description of Artificial Sequence: Synthetic oligonucleotide
tccaggtcgacgtc

SEQ ID NO: 21480 - DNA, 14 bp, Artificial Sequence
  Description of Artificial Sequence: Synthetic oligonucleotide
ctccaggtcgacgt

SEQ ID NO: 21481 - DNA, 14 bp, Artificial Sequence
  Description of Artificial Sequence: Synthetic oligonucleotide
tctccaggtcgacg

SEQ ID NO: 21482 - DNA, 14 bp, Artificial Sequence
  Description of Artificial Sequence: Synthetic oligonucleotide
atctccaggtcgac

SEQ ID NO: 21483 - DNA, 14 bp, Artificial Sequence
  Description of Artificial Sequence: Synthetic oligonucleotide
gatctccaggtcga

SEQ ID NO: 21484 - DNA, 14 bp, Artificial Sequence
  Description of Artificial Sequence: Synthetic oligonucleotide
ggatctccaggtcg

SEQ ID NO: 21485 - DNA, 14 bp, Artificial Sequence
  Description of Artificial Sequence: Synthetic oligonucleotide
aggatctccaggtc

SEQ ID NO: 21486 - DNA, 14 bp, Artificial Sequence
  Description of Artificial Sequence: Synthetic oligonucleotide
caggatctccaggt

SEQ ID NO: 21487 - DNA, 14 bp, Artificial Sequence
  Description of Artificial Sequence: Synthetic oligonucleotide
acaggatctccagg

SEQ ID NO: 21488 - DNA, 14 bp, Artificial Sequence
  Description of Artificial Sequence: Synthetic oligonucleotide
aacaggatctccag

SEQ ID NO: 21489 - DNA, 14 bp, Artificial Sequence
  Description of Artificial Sequence: Synthetic oligonucleotide
aaacaggatctcca

SEQ ID NO: 21490 - DNA, 14 bp, Artificial Sequence
  Description of Artificial Sequence: Synthetic oligonucleotide
caaacaggatctcc

SEQ ID NO: 21491 - DNA, 14 bp, Artificial Sequence
  Description of Artificial Sequence: Synthetic oligonucleotide
gcaaacaggatctc

SEQ ID NO: 21492 - DNA, 14 bp, Artificial Sequence
  Description of Artificial Sequence: Synthetic oligonucleotide
ggcaaacaggatct

SEQ ID NO: 21493 - DNA, 14 bp, Artificial Sequence
  Description of Artificial Sequence: Synthetic oligonucleotide
gggcaaacaggatc

SEQ ID NO: 21494 - DNA, 14 bp, Artificial Sequence
  Description of Artificial Sequence: Synthetic oligonucleotide
agggcaaacaggat

SEQ ID NO: 21495 - DNA, 14 bp, Artificial Sequence
  Description of Artificial Sequence: Synthetic oligonucleotide
aagggcaaacagga

SEQ ID NO: 21496 - DNA, 14 bp, Artificial Sequence
  Description of Artificial Sequence: Synthetic oligonucleotide
aaagggcaaacagg

SEQ ID NO: 21497 - DNA, 14 bp, Artificial Sequence
  Description of Artificial Sequence: Synthetic oligonucleotide
aaaagggcaaacag

SEQ ID NO: 21498 - DNA, 14 bp, Artificial Sequence
  Description of Artificial Sequence: Synthetic oligonucleotide
aaaaagggcaaaca

SEQ ID NO: 21499 - DNA, 14 bp, Artificial Sequence
  Description of Artificial Sequence: Synthetic oligonucleotide
taaaaagggcaaac

SEQ ID NO: 21500 - DNA, 14 bp, Artificial Sequence
  Description of Artificial Sequence: Synthetic oligonucleotide
ataaaaagggcaaa

SEQ ID NO: 21501 - DNA, 14 bp, Artificial Sequence
  Description of Artificial Sequence: Synthetic oligonucleotide
tataaaaagggcaa

SEQ ID NO: 21502 - DNA, 14 bp, Artificial Sequence
  Description of Artificial Sequence: Synthetic oligonucleotide
ctataaaaagggca

SEQ ID NO: 21503 - DNA, 14 bp, Artificial Sequence
  Description of Artificial Sequence: Synthetic oligonucleotide
actataaaaagggc

SEQ ID NO: 21504 - DNA, 14 bp, Artificial Sequence
  Description of Artificial Sequence: Synthetic oligonucleotide
gactataaaaaggg

SEQ ID NO: 21505 - DNA, 14 bp, Artificial Sequence
  Description of Artificial Sequence: Synthetic oligonucleotide
tgactataaaaagg

SEQ ID NO: 21506 - DNA, 14 bp, Artificial Sequence
  Description of Artificial Sequence: Synthetic oligonucleotide
gtgactataaaaag

SEQ ID NO: 21507 - DNA, 14 bp, Artificial Sequence
  Description of Artificial Sequence: Synthetic oligonucleotide
ggtgactataaaaa

SEQ ID NO: 21508 - DNA, 14 bp, Artificial Sequence
  Description of Artificial Sequence: Synthetic oligonucleotide
tggtgactataaaa

SEQ ID NO: 21509 - DNA, 14 bp, Artificial Sequence
  Description of Artificial Sequence: Synthetic oligonucleotide
ttggtgactataaa

SEQ ID NO: 21510 - DNA, 14 bp, Artificial Sequence
  Description of Artificial Sequence: Synthetic oligonucleotide
attggtgactataa

SEQ ID NO: 21511 - DNA, 14 bp, Artificial Sequence
  Description of Artificial Sequence: Synthetic oligonucleotide
aattggtgactata

SEQ ID NO: 21512 - DNA, 14 bp, Artificial Sequence
  Description of Artificial Sequence: Synthetic oligonucleotide
taattggtgactat

SEQ ID NO: 21513 - DNA, 14 bp, Artificial Sequence
  Description of Artificial Sequence: Synthetic oligonucleotide
ttaattggtgacta

SEQ ID NO: 21514 - DNA, 14 bp, Artificial Sequence
  Description of Artificial Sequence: Synthetic oligonucleotide
cttaattggtgact

SEQ ID NO: 21515 - DNA, 14 bp, Artificial Sequence
  Description of Artificial Sequence: Synthetic oligonucleotide
tcttaattggtgac

SEQ ID NO: 21516 - DNA, 14 bp, Artificial Sequence
  Description of Artificial Sequence: Synthetic oligonucleotide
ttcttaattggtga

SEQ ID NO: 21517 - DNA, 14 bp, Artificial Sequence
  Description of Artificial Sequence: Synthetic oligonucleotide
cttcttaattggtg

SEQ ID NO: 21518 - DNA, 14 bp, Artificial Sequence
  Description of Artificial Sequence: Synthetic oligonucleotide
gcttcttaattggt

SEQ ID NO: 21519 - DNA, 14 bp, Artificial Sequence
  Description of Artificial Sequence: Synthetic oligonucleotide
tgcttcttaattgg

SEQ ID NO: 21520 - DNA, 14 bp, Artificial Sequence
  Description of Artificial Sequence: Synthetic oligonucleotide
ttgcttcttaattg

SEQ ID NO: 21521 - DNA, 14 bp, Artificial Sequence
  Description of Artificial Sequence: Synthetic oligonucleotide
tttgcttcttaatt

SEQ ID NO: 21522 - DNA, 14 bp, Artificial Sequence
  Description of Artificial Sequence: Synthetic oligonucleotide
gtttgcttcttaat

SEQ ID NO: 21523 - DNA, 14 bp, Artificial Sequence
  Description of Artificial Sequence: Synthetic oligonucleotide
tgtttgcttcttaa

SEQ ID NO: 21524 - DNA, 14 bp, Artificial Sequence
  Description of Artificial Sequence: Synthetic oligonucleotide
gtgtttgcttctta

SEQ ID NO: 21525 - DNA, 14 bp, Artificial Sequence
  Description of Artificial Sequence: Synthetic oligonucleotide
ggtgtttgcttctt

SEQ ID NO: 21526 - DNA, 14 bp, Artificial Sequence
  Description of Artificial Sequence: Synthetic oligonucleotide
aggtgtttgcttct

SEQ ID NO: 21527 - DNA, 14 bp, Artificial Sequence
  Description of Artificial Sequence: Synthetic oligonucleotide
caggtgtttgcttc

SEQ ID NO: 21528 - DNA, 14 bp, Artificial Sequence
  Description of Artificial Sequence: Synthetic oligonucleotide
ccaggtgtttgctt

SEQ ID NO: 21529 - DNA, 14 bp, Artificial Sequence
  Description of Artificial Sequence: Synthetic oligonucleotide
gccaggtgtttgct

SEQ ID NO: 21530 - DNA, 14 bp, Artificial Sequence
  Description of Artificial Sequence: Synthetic oligonucleotide
agccaggtgtttgc

SEQ ID NO: 21531 - DNA, 14 bp, Artificial Sequence
  Description of Artificial Sequence: Synthetic oligonucleotide
tagccaggtgtttg

SEQ ID NO: 21532 - DNA, 14 bp, Artificial Sequence
  Description of Artificial Sequence: Synthetic oligonucleotide
atagccaggtgttt

SEQ ID NO: 21533 - DNA, 14 bp, Artificial Sequence
  Description of Artificial Sequence: Synthetic oligonucleotide
gatagccaggtgtt

SEQ ID NO: 21534 - DNA, 14 bp, Artificial Sequence
  Description of Artificial Sequence: Synthetic oligonucleotide
tgatagccaggtgt

SEQ ID NO: 21535 - DNA, 14 bp, Artificial Sequence
  Description of Artificial Sequence: Synthetic oligonucleotide
ttgatagccaggtg

SEQ ID NO: 21536 - DNA, 14 bp, Artificial Sequence
  Description of Artificial Sequence: Synthetic oligonucleotide
tttgatagccaggt

SEQ ID NO: 21537 - DNA, 14 bp, Artificial Sequence
  Description of Artificial Sequence: Synthetic oligonucleotide
ttttgatagccagg

SEQ ID NO: 21538 - DNA, 14 bp, Artificial Sequence
  Description of Artificial Sequence: Synthetic oligonucleotide
tttttgatagccag

SEQ ID NO: 21539 - DNA, 14 bp, Artificial Sequence
  Description of Artificial Sequence: Synthetic oligonucleotide
ttttttgatagcca

SEQ ID NO: 21540 - DNA, 14 bp, Artificial Sequence
  Description of Artificial Sequence: Synthetic oligonucleotide
tttttttgatagcc

SEQ ID NO: 21541 - DNA, 14 bp, Artificial Sequence
  Description of Artificial Sequence: Synthetic oligonucleotide
atttttttgatagc

SEQ ID NO: 21542 - DNA, 14 bp, Artificial Sequence
  Description of Artificial Sequence: Synthetic oligonucleotide
catttttttgatag

SEQ ID NO: 21543 - DNA, 14 bp, Artificial Sequence
  Description of Artificial Sequence: Synthetic oligonucleotide
tcatttttttgata

SEQ ID NO: 21544 - DNA, 14 bp, Artificial Sequence
  Description of Artificial Sequence: Synthetic oligonucleotide
ttcatttttttgat

SEQ ID NO: 21545 - DNA, 14 bp, Artificial Sequence
  Description of Artificial Sequence: Synthetic oligonucleotide
attcatttttttga

SEQ ID NO: 21546 - DNA, 14 bp, Artificial Sequence
  Description of Artificial Sequence: Synthetic oligonucleotide
cattcatttttttg

SEQ ID NO: 21547 - DNA, 14 bp, Artificial Sequence
  Description of Artificial Sequence: Synthetic oligonucleotide
tcattcattttttt

SEQ ID NO: 21548 - DNA, 14 bp, Artificial Sequence
  Description of Artificial Sequence: Synthetic oligonucleotide
ttcattcatttttt

SEQ ID NO: 21549 - DNA, 14 bp, Artificial Sequence
  Description of Artificial Sequence: Synthetic oligonucleotide
tttcattcattttt

SEQ ID NO: 21550 - DNA, 14 bp, Artificial Sequence
  Description of Artificial Sequence: Synthetic oligonucleotide
atttcattcatttt

SEQ ID NO: 21551 - DNA, 14 bp, Artificial Sequence
  Description of Artificial Sequence: Synthetic oligonucleotide
aatttcattcattt

SEQ ID NO: 21552 - DNA, 14 bp, Artificial Sequence
  Description of Artificial Sequence: Synthetic oligonucleotide
gaatttcattcatt

SEQ ID NO: 21553 - DNA, 14 bp, Artificial Sequence
  Description of Artificial Sequence: Synthetic oligonucleotide
tgaatttcattcat

SEQ ID NO: 21554 - DNA, 14 bp, Artificial Sequence
  Description of Artificial Sequence: Synthetic oligonucleotide
ctgaatttcattca

SEQ ID NO: 21555 - DNA, 14 bp, Artificial Sequence
  Description of Artificial Sequence: Synthetic oligonucleotide
tctgaatttcattc

SEQ ID NO: 21556 - DNA, 14 bp, Artificial Sequence
  Description of Artificial Sequence: Synthetic oligonucleotide
ttctgaatttcatt

SEQ ID NO: 21557 - DNA, 14 bp, Artificial Sequence
  Description of Artificial Sequence: Synthetic oligonucleotide
tttctgaatttcat

SEQ ID NO: 21558 - DNA, 14 bp, Artificial Sequence
  Description of Artificial Sequence: Synthetic oligonucleotide
ttttctgaatttca

SEQ ID NO: 21559 - DNA, 14 bp, Artificial Sequence
  Description of Artificial Sequence: Synthetic oligonucleotide
tttttctgaatttc

SEQ ID NO: 21560 - DNA, 14 bp, Artificial Sequence
  Description of Artificial Sequence: Synthetic oligonucleotide
atttttctgaattt

SEQ ID NO: 21561 - DNA, 14 bp, Artificial Sequence
  Description of Artificial Sequence: Synthetic oligonucleotide
tatttttctgaatt

SEQ ID NO: 21562 - DNA, 14 bp, Artificial Sequence
  Description of Artificial Sequence: Synthetic oligonucleotide
atatttttctgaat

SEQ ID NO: 21563 - DNA, 14 bp, Artificial Sequence
  Description of Artificial Sequence: Synthetic oligonucleotide
gatatttttctgaa

SEQ ID NO: 21564 - DNA, 14 bp, Artificial Sequence
  Description of Artificial Sequence: Synthetic oligonucleotide
cgatatttttctga

SEQ ID NO: 21565 - DNA, 14 bp, Artificial Sequence
  Description of Artificial Sequence: Synthetic oligonucleotide
tcgatatttttctg

SEQ ID NO: 21566 - DNA, 14 bp, Artificial Sequence
  Description of Artificial Sequence: Synthetic oligonucleotide
atcgatatttttct

SEQ ID NO: 21567 - DNA, 14 bp, Artificial Sequence
  Description of Artificial Sequence: Synthetic oligonucleotide
catcgatatttttc

SEQ ID NO: 21568 - DNA, 14 bp, Artificial Sequence
  Description of Artificial Sequence: Synthetic oligonucleotide
ccatcgatattttt

SEQ ID NO: 21569 - DNA, 14 bp, Artificial Sequence
  Description of Artificial Sequence: Synthetic oligonucleotide
tccatcgatatttt

SEQ ID NO: 21570 - DNA, 14 bp, Artificial Sequence
  Description of Artificial Sequence: Synthetic oligonucleotide
atccatcgatattt

SEQ ID NO: 21571 - DNA, 14 bp, Artificial Sequence
  Description of Artificial Sequence: Synthetic oligonucleotide
catccatcgatatt

SEQ ID NO: 21572 - DNA, 14 bp, Artificial Sequence
  Description of Artificial Sequence: Synthetic oligonucleotide
ccatccatcgatat

SEQ ID NO: 21573 - DNA, 14 bp, Artificial Sequence
  Description of Artificial Sequence: Synthetic oligonucleotide
cccatccatcgata

SEQ ID NO: 21574 - DNA, 14 bp, Artificial Sequence
  Description of Artificial Sequence: Synthetic oligonucleotide
tcccatccatcgat

SEQ ID NO: 21575 - DNA, 14 bp, Artificial Sequence
  Description of Artificial Sequence: Synthetic oligonucleotide
ttcccatccatcga

SEQ ID NO: 21576 - DNA, 14 bp, Artificial Sequence
  Description of Artificial Sequence: Synthetic oligonucleotide
cttcccatccatcg

SEQ ID NO: 21577 - DNA, 14 bp, Artificial Sequence
  Description of Artificial Sequence: Synthetic oligonucleotide
ccttcccatccatc

SEQ ID NO: 21578 - DNA, 14 bp, Artificial Sequence
  Description of Artificial Sequence: Synthetic oligonucleotide
gccttcccatccat

SEQ ID NO: 21579 - DNA, 14 bp, Artificial Sequence
  Description of Artificial Sequence: Synthetic oligonucleotide
tgccttcccatcca

SEQ ID NO: 21580 - DNA, 14 bp, Artificial Sequence
  Description of Artificial Sequence: Synthetic oligonucleotide
ttgccttcccatcc

SEQ ID NO: 21581 - DNA, 14 bp, Artificial Sequence
  Description of Artificial Sequence: Synthetic oligonucleotide
tttgccttcccatc

SEQ ID NO: 21582 - DNA, 14 bp, Artificial Sequence
  Description of Artificial Sequence: Synthetic oligonucleotide
ctttgccttcccat

SEQ ID NO: 21583 - DNA, 14 bp, Artificial Sequence
  Description of Artificial Sequence: Synthetic oligonucleotide
tctttgccttccca

SEQ ID NO: 21584 - DNA, 14 bp, Artificial Sequence
  Description of Artificial Sequence: Synthetic oligonucleotide
atctttgccttccc

SEQ ID NO: 21585 - DNA, 14 bp, Artificial Sequence
  Description of Artificial Sequence: Synthetic oligonucleotide
tatctttgccttcc

SEQ ID NO: 21586 - DNA, 14 bp, Artificial Sequence
  Description of Artificial Sequence: Synthetic oligonucleotide
atatctttgccttc

SEQ ID NO: 21587 - DNA, 14 bp, Artificial Sequence
  Description of Artificial Sequence: Synthetic oligonucleotide
aatatctttgcctt

SEQ ID NO: 21588 - DNA, 14 bp, Artificial Sequence
  Description of Artificial Sequence: Synthetic oligonucleotide
caatatctttgcct

SEQ ID NO: 21589 - DNA, 14 bp, Artificial Sequence
  Description of Artificial Sequence: Synthetic oligonucleotide
ccaatatctttgcc

SEQ ID NO: 21590 - DNA, 14 bp, Artificial Sequence
  Description of Artificial Sequence: Synthetic oligonucleotide
tccaatatctttgc

SEQ ID NO: 21591 - DNA, 14 bp, Artificial Sequence
  Description of Artificial Sequence: Synthetic oligonucleotide
gtccaatatctttg

SEQ ID NO: 21592 - DNA, 14 bp, Artificial Sequence
  Description of Artificial Sequence: Synthetic oligonucleotide
tgtccaatatcttt

SEQ ID NO: 21593 - DNA, 14 bp, Artificial Sequence
  Description of Artificial Sequence: Synthetic oligonucleotide
ctgtccaatatctt

SEQ ID NO: 21594 - DNA, 14 bp, Artificial Sequence
  Description of Artificial Sequence: Synthetic oligonucleotide
actgtccaatatct

SEQ ID NO: 21595 - DNA, 14 bp, Artificial Sequence
  Description of Artificial Sequence: Synthetic oligonucleotide
cactgtccaatatc

SEQ ID NO: 21596 - DNA, 14 bp, Artificial Sequence
  Description of Artificial Sequence: Synthetic oligonucleotide
acactgtccaatat

SEQ ID NO: 21597 - DNA, 14 bp, Artificial Sequence
  Description of Artificial Sequence: Synthetic oligonucleotide
aacactgtccaata

SEQ ID NO: 21598 - DNA, 14 bp, Artificial Sequence
  Description of Artificial Sequence: Synthetic oligonucleotide
caacactgtccaat

SEQ ID NO: 21599 - DNA, 14 bp, Artificial Sequence
  Description of Artificial Sequence: Synthetic oligonucleotide
acaacactgtccaa

SEQ ID NO: 21600 - DNA, 14 bp, Artificial Sequence
  Description of Artificial Sequence: Synthetic oligonucleotide
tacaacactgtcca

SEQ ID NO: 21601 - DNA, 14 bp, Artificial Sequence
  Description of Artificial Sequence: Synthetic oligonucleotide
ttacaacactgtcc

SEQ ID NO: 21602 - DNA, 14 bp, Artificial Sequence
  Description of Artificial Sequence: Synthetic oligonucleotide
attacaacactgtc

SEQ ID NO: 21603 - DNA, 14 bp, Artificial Sequence
  Description of Artificial Sequence: Synthetic oligonucleotide
cattacaacactgt

SEQ ID NO: 21604 - DNA, 14 bp, Artificial Sequence
  Description of Artificial Sequence: Synthetic oligonucleotide
tcattacaacactg

SEQ ID NO: 21605 - DNA, 14 bp, Artificial Sequence
  Description of Artificial Sequence: Synthetic oligonucleotide
ttcattacaacact

SEQ ID NO: 21606 - DNA, 14 bp, Artificial Sequence
  Description of Artificial Sequence: Synthetic oligonucleotide
attcattacaacac

SEQ ID NO: 21607 - DNA, 14 bp, Artificial Sequence
  Description of Artificial Sequence: Synthetic oligonucleotide
aattcattacaaca

SEQ ID NO: 21608 - DNA, 14 bp, Artificial Sequence
  Description of Artificial Sequence: Synthetic oligonucleotide
gaattcattacaac

SEQ ID NO: 21609 - DNA, 14 bp, Artificial Sequence
  Description of Artificial Sequence: Synthetic oligonucleotide
tgaattcattacaa

SEQ ID NO: 21610 - DNA, 14 bp, Artificial Sequence
  Description of Artificial Sequence: Synthetic oligonucleotide
atgaattcattaca

SEQ ID NO: 21611 - DNA, 14 bp, Artificial Sequence
  Description of Artificial Sequence: Synthetic oligonucleotide
aatgaattcattac

SEQ ID NO: 21612 - DNA, 14 bp, Artificial Sequence
  Description of Artificial Sequence: Synthetic oligonucleotide
taatgaattcatta

SEQ ID NO: 21613 - DNA, 14 bp, Artificial Sequence
  Description of Artificial Sequence: Synthetic oligonucleotide
ataatgaattcatt

SEQ ID NO: 21614 - DNA, 14 bp, Artificial Sequence
  Description of Artificial Sequence: Synthetic oligonucleotide
cataatgaattcat

SEQ ID NO: 21615 - DNA, 14 bp, Artificial Sequence
  Description of Artificial Sequence: Synthetic oligonucleotide
ccataatgaattca

SEQ ID NO: 21616 - DNA, 14 bp, Artificial Sequence
  Description of Artificial Sequence: Synthetic oligonucleotide
tccataatgaattc

SEQ ID NO: 21617 - DNA, 14 bp, Artificial Sequence
  Description of Artificial Sequence: Synthetic oligonucleotide
ctccataatgaatt

SEQ ID NO: 21618 - DNA, 14 bp, Artificial Sequence
  Description of Artificial Sequence: Synthetic oligonucleotide
cctccataatgaat

SEQ ID NO: 21619 - DNA, 14 bp, Artificial Sequence
  Description of Artificial Sequence: Synthetic oligonucleotide
ccctccataatgaa

SEQ ID NO: 21620 - DNA, 14 bp, Artificial Sequence
  Description of Artificial Sequence: Synthetic oligonucleotide
tccctccataatga

SEQ ID NO: 21621 - DNA, 14 bp, Artificial Sequence
  Description of Artificial Sequence: Synthetic oligonucleotide
gtccctccataatg

SEQ ID NO: 21622 - DNA, 14 bp, Artificial Sequence
  Description of Artificial Sequence: Synthetic oligonucleotide
ggtccctccataat

SEQ ID NO: 21623 - DNA, 14 bp, Artificial Sequence
  Description of Artificial Sequence: Synthetic oligonucleotide
tggtccctccataa

SEQ ID NO: 21624 - DNA, 14 bp, Artificial Sequence
  Description of Artificial Sequence: Synthetic oligonucleotide
atggtccctccata

SEQ ID NO: 21625 - DNA, 14 bp, Artificial Sequence
  Description of Artificial Sequence: Synthetic oligonucleotide
aatggtccctccat

SEQ ID NO: 21626 - DNA, 14 bp, Artificial Sequence
  Description of Artificial Sequence: Synthetic oligonucleotide
caatggtccctcca

SEQ ID NO: 21627 - DNA, 14 bp, Artificial Sequence
  Description of Artificial Sequence: Synthetic oligonucleotide
tcaatggtccctcc

SEQ ID NO: 21628 - DNA, 14 bp, Artificial Sequence
  Description of Artificial Sequence: Synthetic oligonucleotide
gtcaatggtccctc

SEQ ID NO: 21629 - DNA, 14 bp, Artificial Sequence
  Description of Artificial Sequence: Synthetic oligonucleotide
tgtcaatggtccct

SEQ ID NO: 21630 - DNA, 14 bp, Artificial Sequence
  Description of Artificial Sequence: Synthetic oligonucleotide
ttgtcaatggtccc

SEQ ID NO: 21631 - DNA, 14 bp, Artificial Sequence
  Description of Artificial Sequence: Synthetic oligonucleotide
cttgtcaatggtcc

SEQ ID NO: 21632 - DNA, 14 bp, Artificial Sequence
  Description of Artificial Sequence: Synthetic oligonucleotide
tcttgtcaatggtc

SEQ ID NO: 21633 - DNA, 14 bp, Artificial Sequence
  Description of Artificial Sequence: Synthetic oligonucleotide
ttcttgtcaatggt

SEQ ID NO: 21634 - DNA, 14 bp, Artificial Sequence
  Description of Artificial Sequence: Synthetic oligonucleotide
attcttgtcaatgg

SEQ ID NO: 21635 - DNA, 14 bp, Artificial Sequence
  Description of Artificial Sequence: Synthetic oligonucleotide
gattcttgtcaatg

SEQ ID NO: 21636 - DNA, 14 bp, Artificial Sequence
  Description of Artificial Sequence: Synthetic oligonucleotide
cgattcttgtcaat

SEQ ID NO: 21637 - DNA, 14 bp, Artificial Sequence
  Description of Artificial Sequence: Synthetic oligonucleotide
ccgattcttgtcaa

SEQ ID NO: 21638 - DNA, 14 bp, Artificial Sequence
  Description of Artificial Sequence: Synthetic oligonucleotide
accgattcttgtca

SEQ ID NO: 21639 - DNA, 14 bp, Artificial Sequence
  Description of Artificial Sequence: Synthetic oligonucleotide
caccgattcttgtc

SEQ ID NO: 21640 - DNA, 14 bp, Artificial Sequence
  Description of Artificial Sequence: Synthetic oligonucleotide
gcaccgattcttgt

SEQ ID NO: 21641 - DNA, 14 bp, Artificial Sequence
  Description of Artificial Sequence: Synthetic oligonucleotide
ggcaccgattcttg

SEQ ID NO: 21642 - DNA, 14 bp, Artificial Sequence
  Description of Artificial Sequence: Synthetic oligonucleotide
tggcaccgattctt

SEQ ID NO: 21643 - DNA, 14 bp, Artificial Sequence
  Description of Artificial Sequence: Synthetic oligonucleotide
ttggcaccgattct

SEQ ID NO: 21644 - DNA, 14 bp, Artificial Sequence
  Description of Artificial Sequence: Synthetic oligonucleotide
tttggcaccgattc

SEQ ID NO: 21645 - DNA, 14 bp, Artificial Sequence
  Description of Artificial Sequence: Synthetic oligonucleotide
gtttggcaccgatt

SEQ ID NO: 21646 - DNA, 14 bp, Artificial Sequence
  Description of Artificial Sequence: Synthetic oligonucleotide
tgtttggcaccgat

SEQ ID NO: 21647 - DNA, 14 bp, Artificial Sequence
  Description of Artificial Sequence: Synthetic oligonucleotide
atgtttggcaccga

SEQ ID NO: 21648 - DNA, 14 bp, Artificial Sequence
  Description of Artificial Sequence: Synthetic oligonucleotide
catgtttggcaccg

SEQ ID NO: 21649 - DNA, 14 bp, Artificial Sequence
  Description of Artificial Sequence: Synthetic oligonucleotide
tcatgtttggcacc

SEQ ID NO: 21650 - DNA, 14 bp, Artificial Sequence
  Description of Artificial Sequence: Synthetic oligonucleotide
ttcatgtttggcac

SEQ ID NO: 21651 - DNA, 14 bp, Artificial Sequence
  Description of Artificial Sequence: Synthetic oligonucleotide
gttcatgtttggca

SEQ ID NO: 21652 - DNA, 14 bp, Artificial Sequence
  Description of Artificial Sequence: Synthetic oligonucleotide
cgttcatgtttggc

SEQ ID NO: 21653 - DNA, 14 bp, Artificial Sequence
  Description of Artificial Sequence: Synthetic oligonucleotide
ccgttcatgtttgg

SEQ ID NO: 21654 - DNA, 14 bp, Artificial Sequence
  Description of Artificial Sequence: Synthetic oligonucleotide
gccgttcatgtttg

SEQ ID NO: 21655 - DNA, 14 bp, Artificial Sequence
  Description of Artificial Sequence: Synthetic oligonucleotide
tgccgttcatgttt

SEQ ID NO: 21656 - DNA, 14 bp, Artificial Sequence
  Description of Artificial Sequence: Synthetic oligonucleotide
atgccgttcatgtt

SEQ ID NO: 21657 - DNA, 14 bp, Artificial Sequence
  Description of Artificial Sequence: Synthetic oligonucleotide
tatgccgttcatgt

SEQ ID NO: 21658 - DNA, 14 bp, Artificial Sequence
  Description of Artificial Sequence: Synthetic oligonucleotide
atatgccgttcatg

SEQ ID NO: 21659 - DNA, 14 bp, Artificial Sequence
  Description of Artificial Sequence: Synthetic oligonucleotide
aatatgccgttcat

SEQ ID NO: 21660 - DNA, 14 bp, Artificial Sequence
  Description of Artificial Sequence: Synthetic oligonucleotide
aaatatgccgttca

SEQ ID NO: 21661 - DNA, 14 bp, Artificial Sequence
  Description of Artificial Sequence: Synthetic oligonucleotide
aaaatatgccgttc

SEQ ID NO: 21662 - DNA, 14 bp, Artificial Sequence
  Description of Artificial Sequence: Synthetic oligonucleotide
aaaaatatgccgtt

SEQ ID NO: 21663 - DNA, 14 bp, Artificial Sequence
  Description of Artificial Sequence: Synthetic oligonucleotide
gaaaaatatgccgt

SEQ ID NO: 21664 - DNA, 14 bp, Artificial Sequence
  Description of Artificial Sequence: Synthetic oligonucleotide
agaaaaatatgccg

SEQ ID NO: 21665 - DNA, 14 bp, Artificial Sequence
  Description of Artificial Sequence: Synthetic oligonucleotide
cagaaaaatatgcc

SEQ ID NO: 21666 - DNA, 14 bp, Artificial Sequence
  Description of Artificial Sequence: Synthetic oligonucleotide
acagaaaaatatgc

SEQ ID NO: 21667 - DNA, 14 bp, Artificial Sequence
  Description of Artificial Sequence: Synthetic oligonucleotide
aacagaaaaatatg

SEQ ID NO: 21668 - DNA, 14 bp, Artificial Sequence
  Description of Artificial Sequence: Synthetic oligonucleotide
aaacagaaaaatat

SEQ ID NO: 21669 - DNA, 14 bp, Artificial Sequence
  Description of Artificial Sequence: Synthetic oligonucleotide
caaacagaaaaata

SEQ ID NO: 21670 - DNA, 14 bp, Artificial Sequence
  Description of Artificial Sequence: Synthetic oligonucleotide
tcaaacagaaaaat

SEQ ID NO: 21671 - DNA, 14 bp, Artificial Sequence
  Description of Artificial Sequence: Synthetic oligonucleotide
atcaaacagaaaaa

SEQ ID NO: 21672 - DNA, 14 bp, Artificial Sequence
  Description of Artificial Sequence: Synthetic oligonucleotide
catcaaacagaaaa

SEQ ID NO: 21673 - DNA, 14 bp, Artificial Sequence
  Description of Artificial Sequence: Synthetic oligonucleotide
ccatcaaacagaaa

SEQ ID NO: 21674 - DNA, 14 bp, Artificial Sequence
  Description of Artificial Sequence: Synthetic oligonucleotide
gccatcaaacagaa

SEQ ID NO: 21675 - DNA, 14 bp, Artificial Sequence
  Description of Artificial Sequence: Synthetic oligonucleotide
agccatcaaacaga

SEQ ID NO: 21676 - DNA, 14 bp, Artificial Sequence
  Description of Artificial Sequence: Synthetic oligonucleotide
aagccatcaaacag

SEQ ID NO: 21677 - DNA, 14 bp, Artificial Sequence
  Description of Artificial Sequence: Synthetic oligonucleotide
taagccatcaaaca

SEQ ID NO: 21678 - DNA, 14 bp, Artificial Sequence
  Description of Artificial Sequence: Synthetic oligonucleotide
ttaagccatcaaac

SEQ ID NO: 21679 - DNA, 14 bp, Artificial Sequence
  Description of Artificial Sequence: Synthetic oligonucleotide
attaagccatcaaa

SEQ ID NO: 21680 - DNA, 14 bp, Artificial Sequence
  Description of Artificial Sequence: Synthetic oligonucleotide
cattaagccatcaa

SEQ ID NO: 21681 - DNA, 14 bp, Artificial Sequence
  Description of Artificial Sequence: Synthetic oligonucleotide
tcattaagccatca

SEQ ID NO: 21682 - DNA, 14 bp, Artificial Sequence
  Description of Artificial Sequence: Synthetic oligonucleotide
atcattaagccatc

SEQ ID NO: 21683 - DNA, 14 bp, Artificial Sequence
  Description of Artificial Sequence: Synthetic oligonucleotide
gatcattaagccat

SEQ ID NO: 21684 - DNA, 14 bp, Artificial Sequence
  Description of Artificial Sequence: Synthetic oligonucleotide
tgatcattaagcca

SEQ ID NO: 21685 - DNA, 14 bp, Artificial Sequence
  Description of Artificial Sequence: Synthetic oligonucleotide
ctgatcattaagcc

SEQ ID NO: 21686 - DNA, 14 bp, Artificial Sequence
  Description of Artificial Sequence: Synthetic oligonucleotide
actgatcattaagc

SEQ ID NO: 21687 - DNA, 14 bp, Artificial Sequence
  Description of Artificial Sequence: Synthetic oligonucleotide
aactgatcattaag

SEQ ID NO: 21688 - DNA, 14 bp, Artificial Sequence
  Description of Artificial Sequence: Synthetic oligonucleotide
caactgatcattaa

SEQ ID NO: 21689 - DNA, 14 bp, Artificial Sequence
  Description of Artificial Sequence: Synthetic oligonucleotide
acaactgatcatta

SEQ ID NO: 21690 - DNA, 14 bp, Artificial Sequence
  Description of Artificial Sequence: Synthetic oligonucleotide
tacaactgatcatt

SEQ ID NO: 21691 - DNA, 14 bp, Artificial Sequence
  Description of Artificial Sequence: Synthetic oligonucleotide
ttacaactgatcat

SEQ ID NO: 21692 - DNA, 14 bp, Artificial Sequence
  Description of Artificial Sequence: Synthetic oligonucleotide
tttacaactgatca

SEQ ID NO: 21693 - DNA, 14 bp, Artificial Sequence
  Description of Artificial Sequence: Synthetic oligonucleotide
gtttacaactgatc

SEQ ID NO: 21694 - DNA, 14 bp, Artificial Sequence
  Description of Artificial Sequence: Synthetic oligonucleotide
ggtttacaactgat

SEQ ID NO: 21695 - DNA, 14 bp, Artificial Sequence
  Description of Artificial Sequence: Synthetic oligonucleotide
aggtttacaactga

SEQ ID NO: 21696 - DNA, 14 bp, Artificial Sequence
  Description of Artificial Sequence: Synthetic oligonucleotide
taggtttacaactg

SEQ ID NO: 21697 - DNA, 14 bp, Artificial Sequence
  Description of Artificial Sequence: Synthetic oligonucleotide
ttaggtttacaact

SEQ ID NO: 21698 - DNA, 14 bp, Artificial Sequence
  Description of Artificial Sequence: Synthetic oligonucleotide
attaggtttacaac

SEQ ID NO: 21699 - DNA, 14 bp, Artificial Sequence
  Description of Artificial Sequence: Synthetic oligonucleotide
gattaggtttacaa

SEQ ID NO: 21700 - DNA, 14 bp, Artificial Sequence
  Description of Artificial Sequence: Synthetic oligonucleotide
tgattaggtttaca

SEQ ID NO: 21701 - DNA, 14 bp, Artificial Sequence
  Description of Artificial Sequence: Synthetic oligonucleotide
atgattaggtttac

SEQ ID NO: 21702 - DNA, 14 bp, Artificial Sequence
  Description of Artificial Sequence: Synthetic oligonucleotide
catgattaggttta

SEQ ID NO: 21703 - DNA, 14 bp, Artificial Sequence
  Description of Artificial Sequence: Synthetic oligonucleotide
ccatgattaggttt

SEQ ID NO: 21704 - DNA, 14 bp, Artificial Sequence
  Description of Artificial Sequence: Synthetic oligonucleotide
gccatgattaggtt

SEQ ID NO: 21705 - DNA, 14 bp, Artificial Sequence
  Description of Artificial Sequence: Synthetic oligonucleotide
ggccatgattaggt

SEQ ID NO: 21706 - DNA, 14 bp, Artificial Sequence
  Description of Artificial Sequence: Synthetic oligonucleotide
tggccatgattagg

SEQ ID NO: 21707 - DNA, 14 bp, Artificial Sequence
  Description of Artificial Sequence: Synthetic oligonucleotide
ctggccatgattag

SEQ ID NO: 21708 - DNA, 14 bp, Artificial Sequence
  Description of Artificial Sequence: Synthetic oligonucleotide
tctggccatgatta

SEQ ID NO: 21709 - DNA, 14 bp, Artificial Sequence
  Description of Artificial Sequence: Synthetic oligonucleotide
gtctggccatgatt

SEQ ID NO: 21710 - DNA, 14 bp, Artificial Sequence
  Description of Artificial Sequence: Synthetic oligonucleotide
agtctggccatgat

SEQ ID NO: 21711 - DNA, 14 bp, Artificial Sequence
  Description of Artificial Sequence: Synthetic oligonucleotide
gagtctggccatga

SEQ ID NO: 21712 - DNA, 14 bp, Artificial Sequence
  Description of Artificial Sequence: Synthetic oligonucleotide
cgagtctggccatg

SEQ ID NO: 21713 - DNA, 14 bp, Artificial Sequence
  Description of Artificial Sequence: Synthetic oligonucleotide
ccgagtctggccat

SEQ ID NO: 21714 - DNA, 14 bp, Artificial Sequence
  Description of Artificial Sequence: Synthetic oligonucleotide
gccgagtctggcca

SEQ ID NO: 21715 - DNA, 14 bp, Artificial Sequence
  Description of Artificial Sequence: Synthetic oligonucleotide
agccgagtctggcc

SEQ ID NO: 21716 - DNA, 14 bp, Artificial Sequence
  Description of Artificial Sequence: Synthetic oligonucleotide
aagccgagtctggc

SEQ ID NO: 21717 - DNA, 14 bp, Artificial Sequence
  Description of Artificial Sequence: Synthetic oligonucleotide
gaagccgagtctgg

SEQ ID NO: 21718 - DNA, 14 bp, Artificial Sequence
  Description of Artificial Sequence: Synthetic oligonucleotide
ggaagccgagtctg

SEQ ID NO: 21719 - DNA, 14 bp, Artificial Sequence
  Description of Artificial Sequence: Synthetic oligonucleotide
tggaagccgagtct

SEQ ID NO: 21720 - DNA, 14 bp, Artificial Sequence
  Description of Artificial Sequence: Synthetic oligonucleotide
ctggaagccgagtc

SEQ ID NO: 21721 - DNA, 14 bp, Artificial Sequence
  Description of Artificial Sequence: Synthetic oligonucleotide
cctggaagccgagt

SEQ ID NO: 21722 - DNA, 14 bp, Artificial Sequence
  Description of Artificial Sequence: Synthetic oligonucleotide
acctggaagccgag

SEQ ID NO: 21723 - DNA, 14 bp, Artificial Sequence
  Description of Artificial Sequence: Synthetic oligonucleotide
aacctggaagccga

SEQ ID NO: 21724 - DNA, 14 bp, Artificial Sequence
  Description of Artificial Sequence: Synthetic oligonucleotide
taacctggaagccg

SEQ ID NO: 21725 - DNA, 14 bp, Artificial Sequence
  Description of Artificial Sequence: Synthetic oligonucleotide
gtaacctggaagcc

SEQ ID NO: 21726 - DNA, 14 bp, Artificial Sequence
  Description of Artificial Sequence: Synthetic oligonucleotide
tgtaacctggaagc

SEQ ID NO: 21727 - DNA, 14 bp, Artificial Sequence
  Description of Artificial Sequence: Synthetic oligonucleotide
ctgtaacctggaag

SEQ ID NO: 21728 - DNA, 14 bp, Artificial Sequence
  Description of Artificial Sequence: Synthetic oligonucleotide
actgtaacctggaa

SEQ ID NO: 21729 - DNA, 14 bp, Artificial Sequence
  Description of Artificial Sequence: Synthetic oligonucleotide
tactgtaacctgga

SEQ ID NO: 21730 - DNA, 14 bp, Artificial Sequence
  Description of Artificial Sequence: Synthetic oligonucleotide
ctactgtaacctgg

SEQ ID NO: 21731 - DNA, 14 bp, Artificial Sequence
  Description of Artificial Sequence: Synthetic oligonucleotide
actactgtaacctg

SEQ ID NO: 21732 - DNA, 14 bp, Artificial Sequence
  Description of Artificial Sequence: Synthetic oligonucleotide
cactactgtaacct

SEQ ID NO: 21733 - DNA, 14 bp, Artificial Sequence
  Description of Artificial Sequence: Synthetic oligonucleotide
gcactactgtaacc

SEQ ID NO: 21734 - DNA, 14 bp, Artificial Sequence
  Description of Artificial Sequence: Synthetic oligonucleotide
tgcactactgtaac

SEQ ID NO: 21735 - DNA, 14 bp, Artificial Sequence
  Description of Artificial Sequence: Synthetic oligonucleotide
ctgcactactgtaa

SEQ ID NO: 21736 - DNA, 14 bp, Artificial Sequence
  Description of Artificial Sequence: Synthetic oligonucleotide
tctgcactactgta

SEQ ID NO: 21737 - DNA, 14 bp, Artificial Sequence
  Description of Artificial Sequence: Synthetic oligonucleotide
ttctgcactactgt

SEQ ID NO: 21738 - DNA, 14 bp, Artificial Sequence
  Description of Artificial Sequence: Synthetic oligonucleotide
attctgcactactg

SEQ ID NO: 21739 - DNA, 14 bp, Artificial Sequence
  Description of Artificial Sequence: Synthetic oligonucleotide
tattctgcactact

SEQ ID NO: 21740 - DNA, 14 bp, Artificial Sequence
  Description of Artificial Sequence: Synthetic oligonucleotide
gtattctgcactac

SEQ ID NO: 21741 - DNA, 14 bp, Artificial Sequence
  Description of Artificial Sequence: Synthetic oligonucleotide
tgtattctgcacta

SEQ ID NO: 21742 - DNA, 14 bp, Artificial Sequence
  Description of Artificial Sequence: Synthetic oligonucleotide
ctgtattctgcact

SEQ ID NO: 21743 - DNA, 14 bp, Artificial Sequence
  Description of Artificial Sequence: Synthetic oligonucleotide
cctgtattctgcac

SEQ ID NO: 21744 - DNA, 14 bp, Artificial Sequence
  Description of Artificial Sequence: Synthetic oligonucleotide
acctgtattctgca

SEQ ID NO: 21745 - DNA, 14 bp, Artificial Sequence
  Description of Artificial Sequence: Synthetic oligonucleotide
aacctgtattctgc

SEQ ID NO: 21746 - DNA, 14 bp, Artificial Sequence
  Description of Artificial Sequence: Synthetic oligonucleotide
taacctgtattctg

SEQ ID NO: 21747 - DNA, 14 bp, Artificial Sequence
  Description of Artificial Sequence: Synthetic oligonucleotide
ttaacctgtattct

SEQ ID NO: 21748 - DNA, 14 bp, Artificial Sequence
  Description of Artificial Sequence: Synthetic oligonucleotide
tttaacctgtattc

SEQ ID NO: 21749 - DNA, 14 bp, Artificial Sequence
  Description of Artificial Sequence: Synthetic oligonucleotide
ttttaacctgtatt

SEQ ID NO: 21750 - DNA, 14 bp, Artificial Sequence
  Description of Artificial Sequence: Synthetic oligonucleotide
cttttaacctgtat

SEQ ID NO: 21751 - DNA, 14 bp, Artificial Sequence
  Description of Artificial Sequence: Synthetic oligonucleotide
tcttttaacctgta

SEQ ID NO: 21752 - DNA, 14 bp, Artificial Sequence
  Description of Artificial Sequence: Synthetic oligonucleotide
ttcttttaacctgt

SEQ ID NO: 21753 - DNA, 14 bp, Artificial Sequence
  Description of Artificial Sequence: Synthetic oligonucleotide
tttcttttaacctg

SEQ ID NO: 21754 - DNA, 14 bp, Artificial Sequence
  Description of Artificial Sequence: Synthetic oligonucleotide
ttttcttttaacct

SEQ ID NO: 21755 - DNA, 14 bp, Artificial Sequence
  Description of Artificial Sequence: Synthetic oligonucleotide
tttttcttttaacc

SEQ ID NO: 21756 - DNA, 14 bp, Artificial Sequence
  Description of Artificial Sequence: Synthetic oligonucleotide
atttttcttttaac

SEQ ID NO: 21757 - DNA, 14 bp, Artificial Sequence
  Description of Artificial Sequence: Synthetic oligonucleotide
aatttttcttttaa

SEQ ID NO: 21758 - DNA, 14 bp, Artificial Sequence
  Description of Artificial Sequence: Synthetic oligonucleotide
aaatttttctttta

SEQ ID NO: 21759 - DNA, 14 bp, Artificial Sequence
  Description of Artificial Sequence: Synthetic oligonucleotide
caaatttttctttt

SEQ ID NO: 21760 - DNA, 14 bp, Artificial Sequence
  Description of Artificial Sequence: Synthetic oligonucleotide
acaaatttttcttt

SEQ ID NO: 21761 - DNA, 14 bp, Artificial Sequence
  Description of Artificial Sequence: Synthetic oligonucleotide
gacaaatttttctt

SEQ ID NO: 21762 - DNA, 14 bp, Artificial Sequence
  Description of Artificial Sequence: Synthetic oligonucleotide
tgacaaatttttct

SEQ ID NO: 21763 - DNA, 14 bp, Artificial Sequence
  Description of Artificial Sequence: Synthetic oligonucleotide
atgacaaatttttc

SEQ ID NO: 21764 - DNA, 14 bp, Artificial Sequence
  Description of Artificial Sequence: Synthetic oligonucleotide
catgacaaattttt

SEQ ID NO: 21765 - DNA, 14 bp, Artificial Sequence
  Description of Artificial Sequence: Synthetic oligonucleotide
tcatgacaaatttt

SEQ ID NO: 21766 - DNA, 14 bp, Artificial Sequence
  Description of Artificial Sequence: Synthetic oligonucleotide
ctcatgacaaattt

SEQ ID NO: 21767 - DNA, 14 bp, Artificial Sequence
  Description of Artificial Sequence: Synthetic oligonucleotide
cctcatgacaaatt

SEQ ID NO: 21768 - DNA, 14 bp, Artificial Sequence
  Description of Artificial Sequence: Synthetic oligonucleotide
tcctcatgacaaat

SEQ ID NO: 21769 - DNA, 14 bp, Artificial Sequence
  Description of Artificial Sequence: Synthetic oligonucleotide
ttcctcatgacaaa

SEQ ID NO: 21770 - DNA, 14 bp, Artificial Sequence
  Description of Artificial Sequence: Synthetic oligonucleotide
tttcctcatgacaa

SEQ ID NO: 21771 - DNA, 14 bp, Artificial Sequence
  Description of Artificial Sequence: Synthetic oligonucleotide
ttttcctcatgaca

SEQ ID NO: 21772 - DNA, 14 bp, Artificial Sequence
  Description of Artificial Sequence: Synthetic oligonucleotide
attttcctcatgac

SEQ ID NO: 21773 - DNA, 14 bp, Artificial Sequence
  Description of Artificial Sequence: Synthetic oligonucleotide
tattttcctcatga

SEQ ID NO: 21774 - DNA, 14 bp, Artificial Sequence
  Description of Artificial Sequence: Synthetic oligonucleotide
gtattttcctcatg

SEQ ID NO: 21775 - DNA, 14 bp, Artificial Sequence
  Description of Artificial Sequence: Synthetic oligonucleotide
tgtattttcctcat

SEQ ID NO: 21776 - DNA, 14 bp, Artificial Sequence
  Description of Artificial Sequence: Synthetic oligonucleotide
ttgtattttcctca

SEQ ID NO: 21777 - DNA, 14 bp, Artificial Sequence
  Description of Artificial Sequence: Synthetic oligonucleotide
tttgtattttcctc

SEQ ID NO: 21778 - DNA, 14 bp, Artificial Sequence
  Description of Artificial Sequence: Synthetic oligonucleotide
atttgtattttcct

SEQ ID NO: 21779 - DNA, 14 bp, Artificial Sequence
  Description of Artificial Sequence: Synthetic oligonucleotide
aatttgtattttcc

SEQ ID NO: 21780 - DNA, 14 bp, Artificial Sequence
  Description of Artificial Sequence: Synthetic oligonucleotide
aaatttgtattttc

SEQ ID NO: 21781 - DNA, 14 bp, Artificial Sequence
  Description of Artificial Sequence: Synthetic oligonucleotide
caaatttgtatttt

SEQ ID NO: 21782 - DNA, 14 bp, Artificial Sequence
  Description of Artificial Sequence: Synthetic oligonucleotide
acaaatttgtattt

SEQ ID NO: 21783 - DNA, 14 bp, Artificial Sequence
  Description of Artificial Sequence: Synthetic oligonucleotide
cacaaatttgtatt

SEQ ID NO: 21784 - DNA, 14 bp, Artificial Sequence
  Description of Artificial Sequence: Synthetic oligonucleotide
tcacaaatttgtat

SEQ ID NO: 21785 - DNA, 14 bp, Artificial Sequence
  Description of Artificial Sequence: Synthetic oligonucleotide
atcacaaatttgta

SEQ ID NO: 21786 - DNA, 14 bp, Artificial Sequence
  Description of Artificial Sequence: Synthetic oligonucleotide
tatcacaaatttgt

SEQ ID NO: 21787 - DNA, 14 bp, Artificial Sequence
  Description of Artificial Sequence: Synthetic oligonucleotide
ttatcacaaatttg

SEQ ID NO: 21788 - DNA, 14 bp, Artificial Sequence
  Description of Artificial Sequence: Synthetic oligonucleotide
tttatcacaaattt

SEQ ID NO: 21789 - DNA, 14 bp, Artificial Sequence
  Description of Artificial Sequence: Synthetic oligonucleotide
ctttatcacaaatt

SEQ ID NO: 21790 - DNA, 14 bp, Artificial Sequence
  Description of Artificial Sequence: Synthetic oligonucleotide
tctttatcacaaat

SEQ ID NO: 21791 - DNA, 14 bp, Artificial Sequence
  Description of Artificial Sequence: Synthetic oligonucleotide
ttctttatcacaaa

SEQ ID NO: 21792 - DNA, 14 bp, Artificial Sequence
  Description of Artificial Sequence: Synthetic oligonucleotide
cttctttatcacaa

SEQ ID NO: 21793 - DNA, 14 bp, Artificial Sequence
  Description of Artificial Sequence: Synthetic oligonucleotide
tcttctttatcaca

SEQ ID NO: 21794 - DNA, 14 bp, Artificial Sequence
  Description of Artificial Sequence: Synthetic oligonucleotide
atcttctttatcac

SEQ ID NO: 21795 - DNA, 14 bp, Artificial Sequence
  Description of Artificial Sequence: Synthetic oligonucleotide
tatcttctttatca

SEQ ID NO: 21796 - DNA, 14 bp, Artificial Sequence
  Description of Artificial Sequence: Synthetic oligonucleotide
gtatcttctttatc

SEQ ID NO: 21797 - DNA, 14 bp, Artificial Sequence
  Description of Artificial Sequence: Synthetic oligonucleotide
agtatcttctttat

SEQ ID NO: 21798 - DNA, 14 bp, Artificial Sequence
  Description of Artificial Sequence: Synthetic oligonucleotide
aagtatcttcttta

SEQ ID NO: 21799 - DNA, 14 bp, Artificial Sequence
  Description of Artificial Sequence: Synthetic oligonucleotide
caagtatcttcttt

SEQ ID NO: 21800 - DNA, 14 bp, Artificial Sequence
  Description of Artificial Sequence: Synthetic oligonucleotide
acaagtatcttctt

SEQ ID NO: 21801 - DNA, 14 bp, Artificial Sequence
  Description of Artificial Sequence: Synthetic oligonucleotide
cacaagtatcttct

SEQ ID NO: 21802 - DNA, 14 bp, Artificial Sequence
  Description of Artificial Sequence: Synthetic oligonucleotide
tcacaagtatcttc

SEQ ID NO: 21803 - DNA, 14 bp, Artificial Sequence
  Description of Artificial Sequence: Synthetic oligonucleotide
ctcacaagtatctt

SEQ ID NO: 21804 - DNA, 14 bp, Artificial Sequence
  Description of Artificial Sequence: Synthetic oligonucleotide
gctcacaagtatct

SEQ ID NO: 21805 - DNA, 14 bp, Artificial Sequence
  Description of Artificial Sequence: Synthetic oligonucleotide
tgctcacaagtatc

SEQ ID NO: 21806 - DNA, 14 bp, Artificial Sequence
  Description of Artificial Sequence: Synthetic oligonucleotide
gtgctcacaagtat

SEQ ID NO: 21807 - DNA, 14 bp, Artificial Sequence
  Description of Artificial Sequence: Synthetic oligonucleotide
tgtgctcacaagta

SEQ ID NO: 21808 - DNA, 14 bp, Artificial Sequence
  Description of Artificial Sequence: Synthetic oligonucleotide
ttgtgctcacaagt

SEQ ID NO: 21809 - DNA, 14 bp, Artificial Sequence
  Description of Artificial Sequence: Synthetic oligonucleotide
cttgtgctcacaag

SEQ ID NO: 21810 - DNA, 14 bp, Artificial Sequence
  Description of Artificial Sequence: Synthetic oligonucleotide
gcttgtgctcacaa

SEQ ID NO: 21811 - DNA, 14 bp, Artificial Sequence
  Description of Artificial Sequence: Synthetic oligonucleotide
tgcttgtgctcaca

SEQ ID NO: 21812 - DNA, 14 bp, Artificial Sequence
  Description of Artificial Sequence: Synthetic oligonucleotide
atgcttgtgctcac

SEQ ID NO: 21813 - DNA, 14 bp, Artificial Sequence
  Description of Artificial Sequence: Synthetic oligonucleotide
catgcttgtgctca

SEQ ID NO: 21814 - DNA, 14 bp, Artificial Sequence
  Description of Artificial Sequence: Synthetic oligonucleotide
gcatgcttgtgctc

SEQ ID NO: 21815 - DNA, 14 bp, Artificial Sequence
  Description of Artificial Sequence: Synthetic oligonucleotide
tgcatgcttgtgct

SEQ ID NO: 21816 - DNA, 14 bp, Artificial Sequence
  Description of Artificial Sequence: Synthetic oligonucleotide
atgcatgcttgtgc

SEQ ID NO: 21817 - DNA, 14 bp, Artificial Sequence
  Description of Artificial Sequence: Synthetic oligonucleotide
aatgcatgcttgtg

SEQ ID NO: 21818 - DNA, 14 bp, Artificial Sequence
  Description of Artificial Sequence: Synthetic oligonucleotide
aaatgcatgcttgt

SEQ ID NO: 21819 - DNA, 14 bp, Artificial Sequence
  Description of Artificial Sequence: Synthetic oligonucleotide
caaatgcatgcttg

SEQ ID NO: 21820 - DNA, 14 bp, Artificial Sequence
  Description of Artificial Sequence: Synthetic oligonucleotide
tcaaatgcatgctt

SEQ ID NO: 21821 - DNA, 14 bp, Artificial Sequence
  Description of Artificial Sequence: Synthetic oligonucleotide
ttcaaatgcatgct

SEQ ID NO: 21822 - DNA, 14 bp, Artificial Sequence
  Description of Artificial Sequence: Synthetic oligonucleotide
attcaaatgcatgc

SEQ ID NO: 21823 - DNA, 14 bp, Artificial Sequence
  Description of Artificial Sequence: Synthetic oligonucleotide
aattcaaatgcatg

SEQ ID NO: 21824 - DNA, 14 bp, Artificial Sequence
  Description of Artificial Sequence: Synthetic oligonucleotide
taattcaaatgcat

SEQ ID NO: 21825 - DNA, 14 bp, Artificial Sequence
  Description of Artificial Sequence: Synthetic oligonucleotide
ctaattcaaatgca

SEQ ID NO: 21826 - DNA, 14 bp, Artificial Sequence
  Description of Artificial Sequence: Synthetic oligonucleotide
actaattcaaatgc

SEQ ID NO: 21827 - DNA, 14 bp, Artificial Sequence
  Description of Artificial Sequence: Synthetic oligonucleotide
tactaattcaaatg

SEQ ID NO: 21828 - DNA, 14 bp, Artificial Sequence
  Description of Artificial Sequence: Synthetic oligonucleotide
atactaattcaaat

SEQ ID NO: 21829 - DNA, 14 bp, Artificial Sequence
  Description of Artificial Sequence: Synthetic oligonucleotide
gatactaattcaaa

SEQ ID NO: 21830 - DNA, 14 bp, Artificial Sequence
  Description of Artificial Sequence: Synthetic oligonucleotide
ggatactaattcaa

SEQ ID NO: 21831 - DNA, 14 bp, Artificial Sequence
  Description of Artificial Sequence: Synthetic oligonucleotide
tggatactaattca

SEQ ID NO: 21832 - DNA, 14 bp, Artificial Sequence
  Description of Artificial Sequence: Synthetic oligonucleotide
ttggatactaattc

SEQ ID NO: 21833 - DNA, 14 bp, Artificial Sequence
  Description of Artificial Sequence: Synthetic oligonucleotide
tttggatactaatt

SEQ ID NO: 21834 - DNA, 14 bp, Artificial Sequence
  Description of Artificial Sequence: Synthetic oligonucleotide
ctttggatactaat

SEQ ID NO: 21835 - DNA, 14 bp, Artificial Sequence
  Description of Artificial Sequence: Synthetic oligonucleotide
tctttggatactaa

SEQ ID NO: 21836 - DNA, 14 bp, Artificial Sequence
  Description of Artificial Sequence: Synthetic oligonucleotide
atctttggatacta

SEQ ID NO: 21837 - DNA, 14 bp, Artificial Sequence
  Description of Artificial Sequence: Synthetic oligonucleotide
catctttggatact

SEQ ID NO: 21838 - DNA, 14 bp, Artificial Sequence
  Description of Artificial Sequence: Synthetic oligonucleotide
tcatctttggatac

SEQ ID NO: 21839 - DNA, 14 bp, Artificial Sequence
  Description of Artificial Sequence: Synthetic oligonucleotide
ctcatctttggata

SEQ ID NO: 21840 - DNA, 14 bp, Artificial Sequence
  Description of Artificial Sequence: Synthetic oligonucleotide
tctcatctttggat

SEQ ID NO: 21841 - DNA, 14 bp, Artificial Sequence
  Description of Artificial Sequence: Synthetic oligonucleotide
ttctcatctttgga

SEQ ID NO: 21842 - DNA, 14 bp, Artificial Sequence
  Description of Artificial Sequence: Synthetic oligonucleotide
gttctcatctttgg

SEQ ID NO: 21843 - DNA, 14 bp, Artificial Sequence
  Description of Artificial Sequence: Synthetic oligonucleotide
tgttctcatctttg

SEQ ID NO: 21844 - DNA, 14 bp, Artificial Sequence
  Description of Artificial Sequence: Synthetic oligonucleotide
ctgttctcatcttt

SEQ ID NO: 21845 - DNA, 14 bp, Artificial Sequence
  Description of Artificial Sequence: Synthetic oligonucleotide
gctgttctcatctt

SEQ ID NO: 21846 - DNA, 14 bp, Artificial Sequence
  Description of Artificial Sequence: Synthetic oligonucleotide
tgctgttctcatct

SEQ ID NO: 21847 - DNA, 14 bp, Artificial Sequence
  Description of Artificial Sequence: Synthetic oligonucleotide
atgctgttctcatc

SEQ ID NO: 21848 - DNA, 14 bp, Artificial Sequence
  Description of Artificial Sequence: Synthetic oligonucleotide
tatgctgttctcat

SEQ ID NO: 21849 - DNA, 14 bp, Artificial Sequence
  Description of Artificial Sequence: Synthetic oligonucleotide
ttatgctgttctca

SEQ ID NO: 21850 - DNA, 14 bp, Artificial Sequence
  Description of Artificial Sequence: Synthetic oligonucleotide
attatgctgttctc

SEQ ID NO: 21851 - DNA, 14 bp, Artificial Sequence
  Description of Artificial Sequence: Synthetic oligonucleotide
tattatgctgttct

SEQ ID NO: 21852 - DNA, 14 bp, Artificial Sequence
  Description of Artificial Sequence: Synthetic oligonucleotide
atattatgctgttc

SEQ ID NO: 21853 - DNA, 14 bp, Artificial Sequence
  Description of Artificial Sequence: Synthetic oligonucleotide
aatattatgctgtt

SEQ ID NO: 21854 - DNA, 14 bp, Artificial Sequence
  Description of Artificial Sequence: Synthetic oligonucleotide
aaatattatgctgt

SEQ ID NO: 21855 - DNA, 14 bp, Artificial Sequence
  Description of Artificial Sequence: Synthetic oligonucleotide
caaatattatgctg

SEQ ID NO: 21856 - DNA, 14 bp, Artificial Sequence
  Description of Artificial Sequence: Synthetic oligonucleotide
gcaaatattatgct

SEQ ID NO: 21857 - DNA, 14 bp, Artificial Sequence
  Description of Artificial Sequence: Synthetic oligonucleotide
agcaaatattatgc

SEQ ID NO: 21858 - DNA, 14 bp, Artificial Sequence
  Description of Artificial Sequence: Synthetic oligonucleotide
cagcaaatattatg

SEQ ID NO: 21859 - DNA, 14 bp, Artificial Sequence
  Description of Artificial Sequence: Synthetic oligonucleotide
gcagcaaatattat

SEQ ID NO: 21860 - DNA, 14 bp, Artificial Sequence
  Description of Artificial Sequence: Synthetic oligonucleotide
agcagcaaatatta

SEQ ID NO: 21861 - DNA, 14 bp, Artificial Sequence
  Description of Artificial Sequence: Synthetic oligonucleotide
tagcagcaaatatt

SEQ ID NO: 21862 - DNA, 14 bp, Artificial Sequence
  Description of Artificial Sequence: Synthetic oligonucleotide
ttagcagcaaatat

SEQ ID NO: 21863 - DNA, 14 bp, Artificial Sequence
  Description of Artificial Sequence: Synthetic oligonucleotide
cttagcagcaaata

SEQ ID NO: 21864 - DNA, 14 bp, Artificial Sequence
  Description of Artificial Sequence: Synthetic oligonucleotide
acttagcagcaaat

SEQ ID NO: 21865 - DNA, 14 bp, Artificial Sequence
  Description of Artificial Sequence: Synthetic oligonucleotide
gacttagcagcaaa

SEQ ID NO: 21866 - DNA, 14 bp, Artificial Sequence
  Description of Artificial Sequence: Synthetic oligonucleotide
agacttagcagcaa

SEQ ID NO: 21867 - DNA, 14 bp, Artificial Sequence
  Description of Artificial Sequence: Synthetic oligonucleotide
cagacttagcagca

SEQ ID NO: 21868 - DNA, 14 bp, Artificial Sequence
  Description of Artificial Sequence: Synthetic oligonucleotide
gcagacttagcagc

SEQ ID NO: 21869 - DNA, 14 bp, Artificial Sequence
  Description of Artificial Sequence: Synthetic oligonucleotide
agcagacttagcag

SEQ ID NO: 21870 - DNA, 14 bp, Artificial Sequence
  Description of Artificial Sequence: Synthetic oligonucleotide
cagcagacttagca

SEQ ID NO: 21871 - DNA, 14 bp, Artificial Sequence
  Description of Artificial Sequence: Synthetic oligonucleotide
tcagcagacttagc

SEQ ID NO: 21872 - DNA, 14 bp, Artificial Sequence
  Description of Artificial Sequence: Synthetic oligonucleotide
ttcagcagacttag

SEQ ID NO: 21873 - DNA, 14 bp, Artificial Sequence
  Description of Artificial Sequence: Synthetic oligonucleotide
cttcagcagactta

SEQ ID NO: 21874 - DNA, 14 bp, Artificial Sequence
  Description of Artificial Sequence: Synthetic oligonucleotide
tcttcagcagactt

SEQ ID NO: 21875 - DNA, 14 bp, Artificial Sequence
  Description of Artificial Sequence: Synthetic oligonucleotide
ttcttcagcagact

SEQ ID NO: 21876 - DNA, 14 bp, Artificial Sequence
  Description of Artificial Sequence: Synthetic oligonucleotide
tttcttcagcagac

SEQ ID NO: 21877 - DNA, 14 bp, Artificial Sequence
  Description of Artificial Sequence: Synthetic oligonucleotide
ttttcttcagcaga

SEQ ID NO: 21878 - DNA, 14 bp, Artificial Sequence
  Description of Artificial Sequence: Synthetic oligonucleotide
tttttcttcagcag

SEQ ID NO: 21879 - DNA, 14 bp, Artificial Sequence
  Description of Artificial Sequence: Synthetic oligonucleotide
ttttttcttcagca

SEQ ID NO: 21880 - DNA, 14 bp, Artificial Sequence
  Description of Artificial Sequence: Synthetic oligonucleotide
tttttttcttcagc

SEQ ID NO: 21881 - DNA, 14 bp, Artificial Sequence
  Description of Artificial Sequence: Synthetic oligonucleotide
gtttttttcttcag

SEQ ID NO: 21882 - DNA, 14 bp, Artificial Sequence
  Description of Artificial Sequence: Synthetic oligonucleotide
tgtttttttcttca

SEQ ID NO: 21883 - DNA, 14 bp, Artificial Sequence
  Description of Artificial Sequence: Synthetic oligonucleotide
ttgtttttttcttc

SEQ ID NO: 21884 - DNA, 14 bp, Artificial Sequence
  Description of Artificial Sequence: Synthetic oligonucleotide
gttgtttttttctt

SEQ ID NO: 21885 - DNA, 14 bp, Artificial Sequence
  Description of Artificial Sequence: Synthetic oligonucleotide
agttgtttttttct

SEQ ID NO: 21886 - DNA, 14 bp, Artificial Sequence
  Description of Artificial Sequence: Synthetic oligonucleotide
cagttgtttttttc

SEQ ID NO: 21887 - DNA, 14 bp, Artificial Sequence
  Description of Artificial Sequence: Synthetic oligonucleotide
ccagttgttttttt

SEQ ID NO: 21888 - DNA, 14 bp, Artificial Sequence
  Description of Artificial Sequence: Synthetic oligonucleotide
tccagttgtttttt

SEQ ID NO: 21889 - DNA, 14 bp, Artificial Sequence
  Description of Artificial Sequence: Synthetic oligonucleotide
atccagttgttttt

SEQ ID NO: 21890 - DNA, 14 bp, Artificial Sequence
  Description of Artificial Sequence: Synthetic oligonucleotide
catccagttgtttt

SEQ ID NO: 21891 - DNA, 14 bp, Artificial Sequence
  Description of Artificial Sequence: Synthetic oligonucleotide
ccatccagttgttt

SEQ ID NO: 21892 - DNA, 14 bp, Artificial Sequence
  Description of Artificial Sequence: Synthetic oligonucleotide
gccatccagttgtt

SEQ ID NO: 21893 - DNA, 14 bp, Artificial Sequence
  Description of Artificial Sequence: Synthetic oligonucleotide
tgccatccagttgt

SEQ ID NO: 21894 - DNA, 14 bp, Artificial Sequence
  Description of Artificial Sequence: Synthetic oligonucleotide
ctgccatccagttg

SEQ ID NO: 21895 - DNA, 14 bp, Artificial Sequence
  Description of Artificial Sequence: Synthetic oligonucleotide
gctgccatccagtt

SEQ ID NO: 21896 - DNA, 14 bp, Artificial Sequence
  Description of Artificial Sequence: Synthetic oligonucleotide
ggctgccatccagt

SEQ ID NO: 21897 - DNA, 14 bp, Artificial Sequence
  Description of Artificial Sequence: Synthetic oligonucleotide
gggctgccatccag

SEQ ID NO: 21898 - DNA, 14 bp, Artificial Sequence
  Description of Artificial Sequence: Synthetic oligonucleotide
agggctgccatcca

SEQ ID NO: 21899 - DNA, 14 bp, Artificial Sequence
  Description of Artificial Sequence: Synthetic oligonucleotide
aagggctgccatcc

SEQ ID NO: 21900 - DNA, 14 bp, Artificial Sequence
  Description of Artificial Sequence: Synthetic oligonucleotide
taagggctgccatc

SEQ ID NO: 21901 - DNA, 14 bp, Artificial Sequence
  Description of Artificial Sequence: Synthetic oligonucleotide
ataagggctgccat

SEQ ID NO: 21902 - DNA, 14 bp, Artificial Sequence
  Description of Artificial Sequence: Synthetic oligonucleotide
aataagggctgcca

SEQ ID NO: 21903 - DNA, 14 bp, Artificial Sequence
  Description of Artificial Sequence: Synthetic oligonucleotide
aaataagggctgcc

SEQ ID NO: 21904 - DNA, 14 bp, Artificial Sequence
  Description of Artificial Sequence: Synthetic oligonucleotide
gaaataagggctgc

SEQ ID NO: 21905 - DNA, 14 bp, Artificial Sequence
  Description of Artificial Sequence: Synthetic oligonucleotide
agaaataagggctg

SEQ ID NO: 21906 - DNA, 14 bp, Artificial Sequence
  Description of Artificial Sequence: Synthetic oligonucleotide
gagaaataagggct

SEQ ID NO: 21907 - DNA, 14 bp, Artificial Sequence
  Description of Artificial Sequence: Synthetic oligonucleotide
agagaaataagggc

SEQ ID NO: 21908 - DNA, 14 bp, Artificial Sequence
  Description of Artificial Sequence: Synthetic oligonucleotide
aagagaaataaggg

SEQ ID NO: 21909 - DNA, 14 bp, Artificial Sequence
  Description of Artificial Sequence: Synthetic oligonucleotide
gaagagaaataagg

SEQ ID NO: 21910 - DNA, 14 bp, Artificial Sequence
  Description of Artificial Sequence: Synthetic oligonucleotide
tgaagagaaataag

SEQ ID NO: 21911 - DNA, 14 bp, Artificial Sequence
  Description of Artificial Sequence: Synthetic oligonucleotide
atgaagagaaataa

SEQ ID NO: 21912 - DNA, 14 bp, Artificial Sequence
  Description of Artificial Sequence: Synthetic oligonucleotide
aatgaagagaaata

SEQ ID NO: 21913 - DNA, 14 bp, Artificial Sequence
  Description of Artificial Sequence: Synthetic oligonucleotide
taatgaagagaaat

SEQ ID NO: 21914 - DNA, 14 bp, Artificial Sequence
  Description of Artificial Sequence: Synthetic oligonucleotide
ataatgaagagaaa

SEQ ID NO: 21915 - DNA, 14 bp, Artificial Sequence
  Description of Artificial Sequence: Synthetic oligonucleotide
gataatgaagagaa

SEQ ID NO: 21916 - DNA, 14 bp, Artificial Sequence
  Description of Artificial Sequence: Synthetic oligonucleotide
cgataatgaagaga

SEQ ID NO: 21917 - DNA, 14 bp, Artificial Sequence
  Description of Artificial Sequence: Synthetic oligonucleotide
acgataatgaagag

SEQ ID NO: 21918 - DNA, 14 bp, Artificial Sequence
  Description of Artificial Sequence: Synthetic oligonucleotide
tacgataatgaaga

SEQ ID NO: 21919 - DNA, 14 bp, Artificial Sequence
  Description of Artificial Sequence: Synthetic oligonucleotide
ctacgataatgaag

SEQ ID NO: 21920 - DNA, 14 bp, Artificial Sequence
  Description of Artificial Sequence: Synthetic oligonucleotide
actacgataatgaa

SEQ ID NO: 21921 - DNA, 14 bp, Artificial Sequence
  Description of Artificial Sequence: Synthetic oligonucleotide
tactacgataatga

SEQ ID NO: 21922 - DNA, 14 bp, Artificial Sequence
  Description of Artificial Sequence: Synthetic oligonucleotide
gtactacgataatg

SEQ ID NO: 21923 - DNA, 14 bp, Artificial Sequence
  Description of Artificial Sequence: Synthetic oligonucleotide
agtactacgataat

SEQ ID NO: 21924 - DNA, 14 bp, Artificial Sequence
  Description of Artificial Sequence: Synthetic oligonucleotide
gagtactacgataa

SEQ ID NO: 21925 - DNA, 14 bp, Artificial Sequence
  Description of Artificial Sequence: Synthetic oligonucleotide
agagtactacgata

SEQ ID NO: 21926 - DNA, 14 bp, Artificial Sequence
  Description of Artificial Sequence: Synthetic oligonucleotide
tagagtactacgat

SEQ ID NO: 21927 - DNA, 14 bp, Artificial Sequence
  Description of Artificial Sequence: Synthetic oligonucleotide
ctagagtactacga

SEQ ID NO: 21928 - DNA, 14 bp, Artificial Sequence
  Description of Artificial Sequence: Synthetic oligonucleotide
tctagagtactacg

SEQ ID NO: 21929 - DNA, 14 bp, Artificial Sequence
  Description of Artificial Sequence: Synthetic oligonucleotide
atctagagtactac

SEQ ID NO: 21930 - DNA, 14 bp, Artificial Sequence
  Description of Artificial Sequence: Synthetic oligonucleotide
gatctagagtacta

SEQ ID NO: 21931 - DNA, 14 bp, Artificial Sequence
  Description of Artificial Sequence: Synthetic oligonucleotide
cgatctagagtact

SEQ ID NO: 21932 - DNA, 14 bp, Artificial Sequence
  Description of Artificial Sequence: Synthetic oligonucleotide
tcgatctagagtac

SEQ ID NO: 21933 - DNA, 14 bp, Artificial Sequence
  Description of Artificial Sequence: Synthetic oligonucleotide
ttcgatctagagta

SEQ ID NO: 21934 - DNA, 14 bp, Artificial Sequence
  Description of Artificial Sequence: Synthetic oligonucleotide
attcgatctagagt

SEQ ID NO: 21935 - DNA, 14 bp, Artificial Sequence
  Description of Artificial Sequence: Synthetic oligonucleotide
cattcgatctagag

SEQ ID NO: 21936 - DNA, 14 bp, Artificial Sequence
  Description of Artificial Sequence: Synthetic oligonucleotide
acattcgatctaga

SEQ ID NO: 21937 - DNA, 14 bp, Artificial Sequence
  Description of Artificial Sequence: Synthetic oligonucleotide
aacattcgatctag

SEQ ID NO: 21938 - DNA, 14 bp, Artificial Sequence
  Description of Artificial Sequence: Synthetic oligonucleotide
taacattcgatcta

SEQ ID NO: 21939 - DNA, 14 bp, Artificial Sequence
  Description of Artificial Sequence: Synthetic oligonucleotide
ctaacattcgatct

SEQ ID NO: 21940 - DNA, 14 bp, Artificial Sequence
  Description of Artificial Sequence: Synthetic oligonucleotide
tctaacattcgatc

SEQ ID NO: 21941 - DNA, 14 bp, Artificial Sequence
  Description of Artificial Sequence: Synthetic oligonucleotide
atctaacattcgat

SEQ ID NO: 21942 - DNA, 14 bp, Artificial Sequence
  Description of Artificial Sequence: Synthetic oligonucleotide
aatctaacattcga

SEQ ID NO: 21943 - DNA, 14 bp, Artificial Sequence
  Description of Artificial Sequence: Synthetic oligonucleotide
gaatctaacattcg

SEQ ID NO: 21944 - DNA, 14 bp, Artificial Sequence
  Description of Artificial Sequence: Synthetic oligonucleotide
tgaatctaacattc

SEQ ID NO: 21945 - DNA, 14 bp, Artificial Sequence
  Description of Artificial Sequence: Synthetic oligonucleotide
ctgaatctaacatt

SEQ ID NO: 21946 - DNA, 14 bp, Artificial Sequence
  Description of Artificial Sequence: Synthetic oligonucleotide
actgaatctaacat

SEQ ID NO: 21947 - DNA, 14 bp, Artificial Sequence
  Description of Artificial Sequence: Synthetic oligonucleotide
tactgaatctaaca

SEQ ID NO: 21948 - DNA, 14 bp, Artificial Sequence
  Description of Artificial Sequence: Synthetic oligonucleotide
atactgaatctaac

SEQ ID NO: 21949 - DNA, 14 bp, Artificial Sequence
  Description of Artificial Sequence: Synthetic oligonucleotide
aatactgaatctaa

SEQ ID NO: 21950 - DNA, 14 bp, Artificial Sequence
  Description of Artificial Sequence: Synthetic oligonucleotide
taatactgaatcta

SEQ ID NO: 21951 - DNA, 14 bp, Artificial Sequence
  Description of Artificial Sequence: Synthetic oligonucleotide
ataatactgaatct

SEQ ID NO: 21952 - DNA, 14 bp, Artificial Sequence
  Description of Artificial Sequence: Synthetic oligonucleotide
aataatactgaatc

SEQ ID NO: 21953 - DNA, 14 bp, Artificial Sequence
  Description of Artificial Sequence: Synthetic oligonucleotide
caataatactgaat

SEQ ID NO: 21954 - DNA, 14 bp, Artificial Sequence
  Description of Artificial Sequence: Synthetic oligonucleotide
tcaataatactgaa

SEQ ID NO: 21955 - DNA, 14 bp, Artificial Sequence
  Description of Artificial Sequence: Synthetic oligonucleotide
ttcaataatactga

SEQ ID NO: 21956 - DNA, 14 bp, Artificial Sequence
  Description of Artificial Sequence: Synthetic oligonucleotide
tttcaataatactg

SEQ ID NO: 21957 - DNA, 14 bp, Artificial Sequence
  Description of Artificial Sequence: Synthetic oligonucleotide
ctttcaataatact

SEQ ID NO: 21958 - DNA, 14 bp, Artificial Sequence
  Description of Artificial Sequence: Synthetic oligonucleotide
tctttcaataatac

SEQ ID NO: 21959 - DNA, 14 bp, Artificial Sequence
  Description of Artificial Sequence: Synthetic oligonucleotide
ttctttcaataata

SEQ ID NO: 21960 - DNA, 14 bp, Artificial Sequence
  Description of Artificial Sequence: Synthetic oligonucleotide
cttctttcaataat

SEQ ID NO: 21961 - DNA, 14 bp, Artificial Sequence
  Description of Artificial Sequence: Synthetic oligonucleotide
tcttctttcaataa

SEQ ID NO: 21962 - DNA, 14 bp, Artificial Sequence
  Description of Artificial Sequence: Synthetic oligonucleotide
ttcttctttcaata

SEQ ID NO: 21963 - DNA, 14 bp, Artificial Sequence
  Description of Artificial Sequence: Synthetic oligonucleotide
tttcttctttcaat

SEQ ID NO: 21964 - DNA, 14 bp, Artificial Sequence
  Description of Artificial Sequence: Synthetic oligonucleotide
ttttcttctttcaa

SEQ ID NO: 21965 - DNA, 14 bp, Artificial Sequence
  Description of Artificial Sequence: Synthetic oligonucleotide
attttcttctttca

SEQ ID NO: 21966 - DNA, 14 bp, Artificial Sequence
  Description of Artificial Sequence: Synthetic oligonucleotide
cattttcttctttc

SEQ ID NO: 21967 - DNA, 14 bp, Artificial Sequence
  Description of Artificial Sequence: Synthetic oligonucleotide
tcattttcttcttt

SEQ ID NO: 21968 - DNA, 14 bp, Artificial Sequence
  Description of Artificial Sequence: Synthetic oligonucleotide
ctcattttcttctt

SEQ ID NO: 21969 - DNA, 14 bp, Artificial Sequence
  Description of Artificial Sequence: Synthetic oligonucleotide
gctcattttcttct

SEQ ID NO: 21970 - DNA, 14 bp, Artificial Sequence
  Description of Artificial Sequence: Synthetic oligonucleotide
tgctcattttcttc

SEQ ID NO: 21971 - DNA, 14 bp, Artificial Sequence
  Description of Artificial Sequence: Synthetic oligonucleotide
ttgctcattttctt

SEQ ID NO: 21972 - DNA, 14 bp, Artificial Sequence
  Description of Artificial Sequence: Synthetic oligonucleotide
gttgctcattttct

SEQ ID NO: 21973 - DNA, 14 bp, Artificial Sequence
  Description of Artificial Sequence: Synthetic oligonucleotide
ggttgctcattttc

SEQ ID NO: 21974 - DNA, 14 bp, Artificial Sequence
  Description of Artificial Sequence: Synthetic oligonucleotide
tggttgctcatttt

SEQ ID NO: 21975 - DNA, 14 bp, Artificial Sequence
  Description of Artificial Sequence: Synthetic oligonucleotide
gtggttgctcattt

SEQ ID NO: 21976 - DNA, 14 bp, Artificial Sequence
  Description of Artificial Sequence: Synthetic oligonucleotide
agtggttgctcatt

SEQ ID NO: 21977 - DNA, 14 bp, Artificial Sequence
  Description of Artificial Sequence: Synthetic oligonucleotide
cagtggttgctcat

SEQ ID NO: 21978 - DNA, 14 bp, Artificial Sequence
  Description of Artificial Sequence: Synthetic oligonucleotide
tcagtggttgctca

SEQ ID NO: 21979 - DNA, 14 bp, Artificial Sequence
  Description of Artificial Sequence: Synthetic oligonucleotide
ctcagtggttgctc

SEQ ID NO: 21980 - DNA, 14 bp, Artificial Sequence
  Description of Artificial Sequence: Synthetic oligonucleotide
tctcagtggttgct

SEQ ID NO: 21981 - DNA, 14 bp, Artificial Sequence
  Description of Artificial Sequence: Synthetic oligonucleotide
atctcagtggttgc

SEQ ID NO: 21982 - DNA, 14 bp, Artificial Sequence
  Description of Artificial Sequence: Synthetic oligonucleotide
aatctcagtggttg

SEQ ID NO: 21983 - DNA, 14 bp, Artificial Sequence
  Description of Artificial Sequence: Synthetic oligonucleotide
taatctcagtggtt

SEQ ID NO: 21984 - DNA, 14 bp, Artificial Sequence
  Description of Artificial Sequence: Synthetic oligonucleotide
gtaatctcagtggt

SEQ ID NO: 21985 - DNA, 14 bp, Artificial Sequence
  Description of Artificial Sequence: Synthetic oligonucleotide
ggtaatctcagtgg

SEQ ID NO: 21986 - DNA, 14 bp, Artificial Sequence
  Description of Artificial Sequence: Synthetic oligonucleotide
tggtaatctcagtg

SEQ ID NO: 21987 - DNA, 14 bp, Artificial Sequence
  Description of Artificial Sequence: Synthetic oligonucleotide
ttggtaatctcagt

SEQ ID NO: 21988 - DNA, 14 bp, Artificial Sequence
  Description of Artificial Sequence: Synthetic oligonucleotide
cttggtaatctcag

SEQ ID NO: 21989 - DNA, 14 bp, Artificial Sequence
  Description of Artificial Sequence: Synthetic oligonucleotide
acttggtaatctca

SEQ ID NO: 21990 - DNA, 14 bp, Artificial Sequence
  Description of Artificial Sequence: Synthetic oligonucleotide
gacttggtaatctc

SEQ ID NO: 21991 - DNA, 14 bp, Artificial Sequence
  Description of Artificial Sequence: Synthetic oligonucleotide
ggacttggtaatct

SEQ ID NO: 21992 - DNA, 14 bp, Artificial Sequence
  Description of Artificial Sequence: Synthetic oligonucleotide
aggacttggtaatc

SEQ ID NO: 21993 - DNA, 14 bp, Artificial Sequence
  Description of Artificial Sequence: Synthetic oligonucleotide
caggacttggtaat

SEQ ID NO: 21994 - DNA, 14 bp, Artificial Sequence
  Description of Artificial Sequence: Synthetic oligonucleotide
tcaggacttggtaa

SEQ ID NO: 21995 - DNA, 14 bp, Artificial Sequence
  Description of Artificial Sequence: Synthetic oligonucleotide
ttcaggacttggta

SEQ ID NO: 21996 - DNA, 14 bp, Artificial Sequence
  Description of Artificial Sequence: Synthetic oligonucleotide
cttcaggacttggt

SEQ ID NO: 21997 - DNA, 14 bp, Artificial Sequence
  Description of Artificial Sequence: Synthetic oligonucleotide
acttcaggacttgg

SEQ ID NO: 21998 - DNA, 14 bp, Artificial Sequence
  Description of Artificial Sequence: Synthetic oligonucleotide
tacttcaggacttg

SEQ ID NO: 21999 - DNA, 14 bp, Artificial Sequence
  Description of Artificial Sequence: Synthetic oligonucleotide
atacttcaggactt

SEQ ID NO: 22000 - DNA, 14 bp, Artificial Sequence
  Description of Artificial Sequence: Synthetic oligonucleotide
tatacttcaggact

SEQ ID NO: 22001 - DNA, 14 bp, Artificial Sequence
  Description of Artificial Sequence: Synthetic oligonucleotide
atatacttcaggac

SEQ ID NO: 22002 - DNA, 14 bp, Artificial Sequence
  Description of Artificial Sequence: Synthetic oligonucleotide
gatatacttcagga

SEQ ID NO: 22003 - DNA, 14 bp, Artificial Sequence
  Description of Artificial Sequence: Synthetic oligonucleotide
cgatatacttcagg

SEQ ID NO: 22004 - DNA, 14 bp, Artificial Sequence
  Description of Artificial Sequence: Synthetic oligonucleotide
acgatatacttcag

SEQ ID NO: 22005 - DNA, 14 bp, Artificial Sequence
  Description of Artificial Sequence: Synthetic oligonucleotide
aacgatatacttca

SEQ ID NO: 22006 - DNA, 14 bp, Artificial Sequence
  Description of Artificial Sequence: Synthetic oligonucleotide
aaacgatatacttc

SEQ ID NO: 22007 - DNA, 14 bp, Artificial Sequence
  Description of Artificial Sequence: Synthetic oligonucleotide
aaaacgatatactt

SEQ ID NO: 22008 - DNA, 14 bp, Artificial Sequence
  Description of Artificial Sequence: Synthetic oligonucleotide
caaaacgatatact

SEQ ID NO: 22009 - DNA, 14 bp, Artificial Sequence
  Description of Artificial Sequence: Synthetic oligonucleotide
acaaaacgatatac

SEQ ID NO: 22010 - DNA, 14 bp, Artificial Sequence
  Description of Artificial Sequence: Synthetic oligonucleotide
tacaaaacgatata

SEQ ID NO: 22011 - DNA, 14 bp, Artificial Sequence
  Description of Artificial Sequence: Synthetic oligonucleotide
ctacaaaacgatat

SEQ ID NO: 22012 - DNA, 14 bp, Artificial Sequence
  Description of Artificial Sequence: Synthetic oligonucleotide
actacaaaacgata

SEQ ID NO: 22013 - DNA, 14 bp, Artificial Sequence
  Description of Artificial Sequence: Synthetic oligonucleotide
tactacaaaacgat

SEQ ID NO: 22014 - DNA, 14 bp, Artificial Sequence
  Description of Artificial Sequence: Synthetic oligonucleotide
ttactacaaaacga

SEQ ID NO: 22015 - DNA, 14 bp, Artificial Sequence
  Description of Artificial Sequence: Synthetic oligonucleotide
tttactacaaaacg

SEQ ID NO: 22016 - DNA, 14 bp, Artificial Sequence
  Description of Artificial Sequence: Synthetic oligonucleotide
ttttactacaaaac

SEQ ID NO: 22017 - DNA, 14 bp, Artificial Sequence
  Description of Artificial Sequence: Synthetic oligonucleotide
cttttactacaaaa

SEQ ID NO: 22018 - DNA, 14 bp, Artificial Sequence
  Description of Artificial Sequence: Synthetic oligonucleotide
tcttttactacaaa

SEQ ID NO: 22019 - DNA, 14 bp, Artificial Sequence
  Description of Artificial Sequence: Synthetic oligonucleotide
gtcttttactacaa

SEQ ID NO: 22020 - DNA, 14 bp, Artificial Sequence
  Description of Artificial Sequence: Synthetic oligonucleotide
agtcttttactaca

SEQ ID NO: 22021 - DNA, 14 bp, Artificial Sequence
  Description of Artificial Sequence: Synthetic oligonucleotide
gagtcttttactac

SEQ ID NO: 22022 - DNA, 14 bp, Artificial Sequence
  Description of Artificial Sequence: Synthetic oligonucleotide
agagtcttttacta

SEQ ID NO: 22023 - DNA, 14 bp, Artificial Sequence
  Description of Artificial Sequence: Synthetic oligonucleotide
cagagtcttttact

SEQ ID NO: 22024 - DNA, 14 bp, Artificial Sequence
  Description of Artificial Sequence: Synthetic oligonucleotide
tcagagtcttttac

SEQ ID NO: 22025 - DNA, 14 bp, Artificial Sequence
  Description of Artificial Sequence: Synthetic oligonucleotide
ctcagagtctttta

SEQ ID NO: 22026 - DNA, 14 bp, Artificial Sequence
  Description of Artificial Sequence: Synthetic oligonucleotide
cctcagagtctttt

SEQ ID NO: 22027 - DNA, 14 bp, Artificial Sequence
  Description of Artificial Sequence: Synthetic oligonucleotide
tcctcagagtcttt

SEQ ID NO: 22028 - DNA, 14 bp, Artificial Sequence
  Description of Artificial Sequence: Synthetic oligonucleotide
ttcctcagagtctt

SEQ ID NO: 22029 - DNA, 14 bp, Artificial Sequence
  Description of Artificial Sequence: Synthetic oligonucleotide
tttcctcagagtct

SEQ ID NO: 22030 - DNA, 14 bp, Artificial Sequence
  Description of Artificial Sequence: Synthetic oligonucleotide
ttttcctcagagtc

SEQ ID NO: 22031 - DNA, 14 bp, Artificial Sequence
  Description of Artificial Sequence: Synthetic oligonucleotide
gttttcctcagagt

SEQ ID NO: 22032 - DNA, 14 bp, Artificial Sequence
  Description of Artificial Sequence: Synthetic oligonucleotide
tgttttcctcagag

SEQ ID NO: 22033 - DNA, 14 bp, Artificial Sequence
  Description of Artificial Sequence: Synthetic oligonucleotide
atgttttcctcaga

SEQ ID NO: 22034 - DNA, 14 bp, Artificial Sequence
  Description of Artificial Sequence: Synthetic oligonucleotide
aatgttttcctcag

SEQ ID NO: 22035 - DNA, 14 bp, Artificial Sequence
  Description of Artificial Sequence: Synthetic oligonucleotide
caatgttttcctca

SEQ ID NO: 22036 - DNA, 14 bp, Artificial Sequence
  Description of Artificial Sequence: Synthetic oligonucleotide
acaatgttttcctc

SEQ ID NO: 22037 - DNA, 14 bp, Artificial Sequence
  Description of Artificial Sequence: Synthetic oligonucleotide
aacaatgttttcct

SEQ ID NO: 22038 - DNA, 14 bp, Artificial Sequence
  Description of Artificial Sequence: Synthetic oligonucleotide
aaacaatgttttcc

SEQ ID NO: 22039 - DNA, 14 bp, Artificial Sequence
  Description of Artificial Sequence: Synthetic oligonucleotide
aaaacaatgttttc

SEQ ID NO: 22040 - DNA, 14 bp, Artificial Sequence
  Description of Artificial Sequence: Synthetic oligonucleotide
aaaaacaatgtttt

SEQ ID NO: 22041 - DNA, 14 bp, Artificial Sequence
  Description of Artificial Sequence: Synthetic oligonucleotide
caaaaacaatgttt

SEQ ID NO: 22042 - DNA, 14 bp, Artificial Sequence
  Description of Artificial Sequence: Synthetic oligonucleotide
tcaaaaacaatgtt

SEQ ID NO: 22043 - DNA, 14 bp, Artificial Sequence
  Description of Artificial Sequence: Synthetic oligonucleotide
ttcaaaaacaatgt

SEQ ID NO: 22044 - DNA, 14 bp, Artificial Sequence
  Description of Artificial Sequence: Synthetic oligonucleotide
cttcaaaaacaatg

SEQ ID NO: 22045 - DNA, 14 bp, Artificial Sequence
  Description of Artificial Sequence: Synthetic oligonucleotide
tcttcaaaaacaat

SEQ ID NO: 22046 - DNA, 14 bp, Artificial Sequence
  Description of Artificial Sequence: Synthetic oligonucleotide
gtcttcaaaaacaa

SEQ ID NO: 22047 - DNA, 14 bp, Artificial Sequence
  Description of Artificial Sequence: Synthetic oligonucleotide
tgtcttcaaaaaca

SEQ ID NO: 22048 - DNA, 14 bp, Artificial Sequence
  Description of Artificial Sequence: Synthetic oligonucleotide
ttgtcttcaaaaac

SEQ ID NO: 22049 - DNA, 14 bp, Artificial Sequence
  Description of Artificial Sequence: Synthetic oligonucleotide
gttgtcttcaaaaa

SEQ ID NO: 22050 - DNA, 14 bp, Artificial Sequence
  Description of Artificial Sequence: Synthetic oligonucleotide
agttgtcttcaaaa

SEQ ID NO: 22051 - DNA, 14 bp, Artificial Sequence
  Description of Artificial Sequence: Synthetic oligonucleotide
aagttgtcttcaaa

SEQ ID NO: 22052 - DNA, 14 bp, Artificial Sequence
  Description of Artificial Sequence: Synthetic oligonucleotide
caagttgtcttcaa

SEQ ID NO: 22053 - DNA, 14 bp, Artificial Sequence
  Description of Artificial Sequence: Synthetic oligonucleotide
gcaagttgtcttca

SEQ ID NO: 22054 - DNA, 14 bp, Artificial Sequence
  Description of Artificial Sequence: Synthetic oligonucleotide
tgcaagttgtcttc

SEQ ID NO: 22055 - DNA, 14 bp, Artificial Sequence
  Description of Artificial Sequence: Synthetic oligonucleotide
ttgcaagttgtctt

SEQ ID NO: 22056 - DNA, 14 bp, Artificial Sequence
  Description of Artificial Sequence: Synthetic oligonucleotide
tttgcaagttgtct

SEQ ID NO: 22057 - DNA, 14 bp, Artificial Sequence
  Description of Artificial Sequence: Synthetic oligonucleotide
ctttgcaagttgtc

SEQ ID NO: 22058 - DNA, 14 bp, Artificial Sequence
  Description of Artificial Sequence: Synthetic oligonucleotide
actttgcaagttgt

SEQ ID NO: 22059 - DNA, 14 bp, Artificial Sequence
  Description of Artificial Sequence: Synthetic oligonucleotide
tactttgcaagttg

SEQ ID NO: 22060 - DNA, 14 bp, Artificial Sequence
  Description of Artificial Sequence: Synthetic oligonucleotide
ctactttgcaagtt

SEQ ID NO: 22061 - DNA, 14 bp, Artificial Sequence
  Description of Artificial Sequence: Synthetic oligonucleotide
tctactttgcaagt

SEQ ID NO: 22062 - DNA, 14 bp, Artificial Sequence
  Description of Artificial Sequence: Synthetic oligonucleotide
ttctactttgcaag

SEQ ID NO: 22063 - DNA, 14 bp, Artificial Sequence
  Description of Artificial Sequence: Synthetic oligonucleotide
cttctactttgcaa

SEQ ID NO: 22064 - DNA, 14 bp, Artificial Sequence
  Description of Artificial Sequence: Synthetic oligonucleotide
acttctactttgca

SEQ ID NO: 22065 - DNA, 14 bp, Artificial Sequence
  Description of Artificial Sequence: Synthetic oligonucleotide
cacttctactttgc

SEQ ID NO: 22066 - DNA, 14 bp, Artificial Sequence
  Description of Artificial Sequence: Synthetic oligonucleotide
ccacttctactttg

SEQ ID NO: 22067 - DNA, 14 bp, Artificial Sequence
  Description of Artificial Sequence: Synthetic oligonucleotide
gccacttctacttt

SEQ ID NO: 22068 - DNA, 14 bp, Artificial Sequence
  Description of Artificial Sequence: Synthetic oligonucleotide
tgccacttctactt

SEQ ID NO: 22069 - DNA, 14 bp, Artificial Sequence
  Description of Artificial Sequence: Synthetic oligonucleotide
atgccacttctact

SEQ ID NO: 22070 - DNA, 14 bp, Artificial Sequence
  Description of Artificial Sequence: Synthetic oligonucleotide
gatgccacttctac

SEQ ID NO: 22071 - DNA, 14 bp, Artificial Sequence
  Description of Artificial Sequence: Synthetic oligonucleotide
ggatgccacttcta

SEQ ID NO: 22072 - DNA, 14 bp, Artificial Sequence
  Description of Artificial Sequence: Synthetic oligonucleotide
gggatgccacttct

SEQ ID NO: 22073 - DNA, 14 bp, Artificial Sequence
  Description of Artificial Sequence: Synthetic oligonucleotide
ggggatgccacttc

SEQ ID NO: 22074 - DNA, 14 bp, Artificial Sequence
  Description of Artificial Sequence: Synthetic oligonucleotide
tggggatgccactt

SEQ ID NO: 22075 - DNA, 14 bp, Artificial Sequence
  Description of Artificial Sequence: Synthetic oligonucleotide
atggggatgccact

SEQ ID NO: 22076 - DNA, 14 bp, Artificial Sequence
  Description of Artificial Sequence: Synthetic oligonucleotide
aatggggatgccac

SEQ ID NO: 22077 - DNA, 14 bp, Artificial Sequence
  Description of Artificial Sequence: Synthetic oligonucleotide
taatggggatgcca

SEQ ID NO: 22078 - DNA, 14 bp, Artificial Sequence
  Description of Artificial Sequence: Synthetic oligonucleotide
ataatggggatgcc

SEQ ID NO: 22079 - DNA, 14 bp, Artificial Sequence
  Description of Artificial Sequence: Synthetic oligonucleotide
aataatggggatgc

SEQ ID NO: 22080 - DNA, 14 bp, Artificial Sequence
  Description of Artificial Sequence: Synthetic oligonucleotide
taataatggggatg

SEQ ID NO: 22081 - DNA, 14 bp, Artificial Sequence
  Description of Artificial Sequence: Synthetic oligonucleotide
ttaataatggggat

SEQ ID NO: 22082 - DNA, 14 bp, Artificial Sequence
  Description of Artificial Sequence: Synthetic oligonucleotide
tttaataatgggga

SEQ ID NO: 22083 - DNA, 14 bp, Artificial Sequence
  Description of Artificial Sequence: Synthetic oligonucleotide
ctttaataatgggg

SEQ ID NO: 22084 - DNA, 14 bp, Artificial Sequence
  Description of Artificial Sequence: Synthetic oligonucleotide
cctttaataatggg

SEQ ID NO: 22085 - DNA, 14 bp, Artificial Sequence
  Description of Artificial Sequence: Synthetic oligonucleotide
tcctttaataatgg

SEQ ID NO: 22086 - DNA, 14 bp, Artificial Sequence
  Description of Artificial Sequence: Synthetic oligonucleotide
ctcctttaataatg

SEQ ID NO: 22087 - DNA, 14 bp, Artificial Sequence
  Description of Artificial Sequence: Synthetic oligonucleotide
cctcctttaataat

SEQ ID NO: 22088 - DNA, 14 bp, Artificial Sequence
  Description of Artificial Sequence: Synthetic oligonucleotide
tcctcctttaataa

SEQ ID NO: 22089 - DNA, 14 bp, Artificial Sequence
  Description of Artificial Sequence: Synthetic oligonucleotide
ttcctcctttaata

SEQ ID NO: 22090 - DNA, 14 bp, Artificial Sequence
  Description of Artificial Sequence: Synthetic oligonucleotide
gttcctcctttaat

SEQ ID NO: 22091 - DNA, 14 bp, Artificial Sequence
  Description of Artificial Sequence: Synthetic oligonucleotide
agttcctcctttaa

SEQ ID NO: 22092 - DNA, 14 bp, Artificial Sequence
  Description of Artificial Sequence: Synthetic oligonucleotide
cagttcctccttta

SEQ ID NO: 22093 - DNA, 14 bp, Artificial Sequence
  Description of Artificial Sequence: Synthetic oligonucleotide
acagttcctccttt

SEQ ID NO: 22094 - DNA, 14 bp, Artificial Sequence
  Description of Artificial Sequence: Synthetic oligonucleotide
tacagttcctcctt

SEQ ID NO: 22095 - DNA, 14 bp, Artificial Sequence
  Description of Artificial Sequence: Synthetic oligonucleotide
ctacagttcctcct

SEQ ID NO: 22096 - DNA, 14 bp, Artificial Sequence
  Description of Artificial Sequence: Synthetic oligonucleotide
actacagttcctcc

SEQ ID NO: 22097 - DNA, 14 bp, Artificial Sequence
  Description of Artificial Sequence: Synthetic oligonucleotide
cactacagttcctc

SEQ ID NO: 22098 - DNA, 14 bp, Artificial Sequence
  Description of Artificial Sequence: Synthetic oligonucleotide
tcactacagttcct

SEQ ID NO: 22099 - DNA, 14 bp, Artificial Sequence
  Description of Artificial Sequence: Synthetic oligonucleotide
ttcactacagttcc

SEQ ID NO: 22100 - DNA, 14 bp, Artificial Sequence
  Description of Artificial Sequence: Synthetic oligonucleotide
tttcactacagttc

SEQ ID NO: 22101 - DNA, 14 bp, Artificial Sequence
  Description of Artificial Sequence: Synthetic oligonucleotide
atttcactacagtt

SEQ ID NO: 22102 - DNA, 14 bp, Artificial Sequence
  Description of Artificial Sequence: Synthetic oligonucleotide
aatttcactacagt

SEQ ID NO: 22103 - DNA, 14 bp, Artificial Sequence
  Description of Artificial Sequence: Synthetic oligonucleotide
taatttcactacag

SEQ ID NO: 22104 - DNA, 14 bp, Artificial Sequence
  Description of Artificial Sequence: Synthetic oligonucleotide
ttaatttcactaca

SEQ ID NO: 22105 - DNA, 14 bp, Artificial Sequence
  Description of Artificial Sequence: Synthetic oligonucleotide
attaatttcactac

SEQ ID NO: 22106 - DNA, 14 bp, Artificial Sequence
  Description of Artificial Sequence: Synthetic oligonucleotide
aattaatttcacta

SEQ ID NO: 22107 - DNA, 14 bp, Artificial Sequence
  Description of Artificial Sequence: Synthetic oligonucleotide
caattaatttcact

SEQ ID NO: 22108 - DNA, 14 bp, Artificial Sequence
  Description of Artificial Sequence: Synthetic oligonucleotide
tcaattaatttcac

SEQ ID NO: 22109 - DNA, 14 bp, Artificial Sequence
  Description of Artificial Sequence: Synthetic oligonucleotide
ttcaattaatttca

SEQ ID NO: 22110 - DNA, 14 bp, Artificial Sequence
  Description of Artificial Sequence: Synthetic oligonucleotide
tttcaattaatttc

SEQ ID NO: 22111 - DNA, 14 bp, Artificial Sequence
  Description of Artificial Sequence: Synthetic oligonucleotide
ctttcaattaattt

SEQ ID NO: 22112 - DNA, 14 bp, Artificial Sequence
  Description of Artificial Sequence: Synthetic oligonucleotide
cctttcaattaatt

SEQ ID NO: 22113 - DNA, 14 bp, Artificial Sequence
  Description of Artificial Sequence: Synthetic oligonucleotide
acctttcaattaat

SEQ ID NO: 22114 - DNA, 14 bp, Artificial Sequence
  Description of Artificial Sequence: Synthetic oligonucleotide
aacctttcaattaa

SEQ ID NO: 22115 - DNA, 14 bp, Artificial Sequence
  Description of Artificial Sequence: Synthetic oligonucleotide
taacctttcaatta

SEQ ID NO: 22116 - DNA, 14 bp, Artificial Sequence
  Description of Artificial Sequence: Synthetic oligonucleotide
ttaacctttcaatt

SEQ ID NO: 22117 - DNA, 14 bp, Artificial Sequence
  Description of Artificial Sequence: Synthetic oligonucleotide
gttaacctttcaat

SEQ ID NO: 22118 - DNA, 14 bp, Artificial Sequence
  Description of Artificial Sequence: Synthetic oligonucleotide
tgttaacctttcaa

SEQ ID NO: 22119 - DNA, 14 bp, Artificial Sequence
  Description of Artificial Sequence: Synthetic oligonucleotide
atgttaacctttca

SEQ ID NO: 22120 - DNA, 14 bp, Artificial Sequence
  Description of Artificial Sequence: Synthetic oligonucleotide
tatgttaacctttc

SEQ ID NO: 22121 - DNA, 14 bp, Artificial Sequence
  Description of Artificial Sequence: Synthetic oligonucleotide
atatgttaaccttt

SEQ ID NO: 22122 - DNA, 14 bp, Artificial Sequence
  Description of Artificial Sequence: Synthetic oligonucleotide
gatatgttaacctt

SEQ ID NO: 22123 - DNA, 14 bp, Artificial Sequence
  Description of Artificial Sequence: Synthetic oligonucleotide
tgatatgttaacct

SEQ ID NO: 22124 - DNA, 14 bp, Artificial Sequence
  Description of Artificial Sequence: Synthetic oligonucleotide
atgatatgttaacc

SEQ ID NO: 22125 - DNA, 14 bp, Artificial Sequence
  Description of Artificial Sequence: Synthetic oligonucleotide
tatgatatgttaac

SEQ ID NO: 22126 - DNA, 14 bp, Artificial Sequence
  Description of Artificial Sequence: Synthetic oligonucleotide
atatgatatgttaa

SEQ ID NO: 22127 - DNA, 14 bp, Artificial Sequence
  Description of Artificial Sequence: Synthetic oligonucleotide
catatgatatgtta

SEQ ID NO: 22128 - DNA, 14 bp, Artificial Sequence
  Description of Artificial Sequence: Synthetic oligonucleotide
acatatgatatgtt

SEQ ID NO: 22129 - DNA, 14 bp, Artificial Sequence
  Description of Artificial Sequence: Synthetic oligonucleotide
tacatatgatatgt

SEQ ID NO: 22130 - DNA, 14 bp, Artificial Sequence
  Description of Artificial Sequence: Synthetic oligonucleotide
atacatatgatatg

SEQ ID NO: 22131 - DNA, 14 bp, Artificial Sequence
  Description of Artificial Sequence: Synthetic oligonucleotide
catacatatgatat

SEQ ID NO: 22132 - DNA, 14 bp, Artificial Sequence
  Description of Artificial Sequence: Synthetic oligonucleotide
gcatacatatgata

SEQ ID NO: 22133 - DNA, 14 bp, Artificial Sequence
  Description of Artificial Sequence: Synthetic oligonucleotide
tgcatacatatgat

SEQ ID NO: 22134 - DNA, 14 bp, Artificial Sequence
  Description of Artificial Sequence: Synthetic oligonucleotide
ctgcatacatatga

SEQ ID NO: 22135 - DNA, 14 bp, Artificial Sequence
  Description of Artificial Sequence: Synthetic oligonucleotide
tctgcatacatatg

SEQ ID NO: 22136 - DNA, 14 bp, Artificial Sequence
  Description of Artificial Sequence: Synthetic oligonucleotide
atctgcatacatat

SEQ ID NO: 22137 - DNA, 14 bp, Artificial Sequence
  Description of Artificial Sequence: Synthetic oligonucleotide
gatctgcatacata

SEQ ID NO: 22138 - DNA, 14 bp, Artificial Sequence
  Description of Artificial Sequence: Synthetic oligonucleotide
ggatctgcatacat

SEQ ID NO: 22139 - DNA, 14 bp, Artificial Sequence
  Description of Artificial Sequence: Synthetic oligonucleotide
gggatctgcataca

SEQ ID NO: 22140 - DNA, 14 bp, Artificial Sequence
  Description of Artificial Sequence: Synthetic oligonucleotide
tgggatctgcatac

SEQ ID NO: 22141 - DNA, 14 bp, Artificial Sequence
  Description of Artificial Sequence: Synthetic oligonucleotide
ttgggatctgcata

SEQ ID NO: 22142 - DNA, 14 bp, Artificial Sequence
  Description of Artificial Sequence: Synthetic oligonucleotide
attgggatctgcat

SEQ ID NO: 22143 - DNA, 14 bp, Artificial Sequence
  Description of Artificial Sequence: Synthetic oligonucleotide
aattgggatctgca

SEQ ID NO: 22144 - DNA, 14 bp, Artificial Sequence
  Description of Artificial Sequence: Synthetic oligonucleotide
aaattgggatctgc

SEQ ID NO: 22145 - DNA, 14 bp, Artificial Sequence
  Description of Artificial Sequence: Synthetic oligonucleotide
aaaattgggatctg

SEQ ID NO: 22146 - DNA, 14 bp, Artificial Sequence
  Description of Artificial Sequence: Synthetic oligonucleotide
caaaattgggatct

SEQ ID NO: 22147 - DNA, 14 bp, Artificial Sequence
  Description of Artificial Sequence: Synthetic oligonucleotide
acaaaattgggatc

SEQ ID NO: 22148 - DNA, 14 bp, Artificial Sequence
  Description of Artificial Sequence: Synthetic oligonucleotide
aacaaaattgggat

SEQ ID NO: 22149 - DNA, 14 bp, Artificial Sequence
  Description of Artificial Sequence: Synthetic oligonucleotide
gaacaaaattggga

SEQ ID NO: 22150 - DNA, 14 bp, Artificial Sequence
  Description of Artificial Sequence: Synthetic oligonucleotide
cgaacaaaattggg

SEQ ID NO: 22151 - DNA, 14 bp, Artificial Sequence
  Description of Artificial Sequence: Synthetic oligonucleotide
acgaacaaaattgg

SEQ ID NO: 22152 - DNA, 14 bp, Artificial Sequence
  Description of Artificial Sequence: Synthetic oligonucleotide
tacgaacaaaattg

SEQ ID NO: 22153 - DNA, 14 bp, Artificial Sequence
  Description of Artificial Sequence: Synthetic oligonucleotide
gtacgaacaaaatt

SEQ ID NO: 22154 - DNA, 14 bp, Artificial Sequence
  Description of Artificial Sequence: Synthetic oligonucleotide
agtacgaacaaaat

SEQ ID NO: 22155 - DNA, 14 bp, Artificial Sequence
  Description of Artificial Sequence: Synthetic oligonucleotide
aagtacgaacaaaa

SEQ ID NO: 22156 - DNA, 14 bp, Artificial Sequence
  Description of Artificial Sequence: Synthetic oligonucleotide
aaagtacgaacaaa

SEQ ID NO: 22157 - DNA, 14 bp, Artificial Sequence
  Description of Artificial Sequence: Synthetic oligonucleotide
aaaagtacgaacaa

SEQ ID NO: 22158 - DNA, 14 bp, Artificial Sequence
  Description of Artificial Sequence: Synthetic oligonucleotide
gaaaagtacgaaca

SEQ ID NO: 22159 - DNA, 14 bp, Artificial Sequence
  Description of Artificial Sequence: Synthetic oligonucleotide
agaaaagtacgaac

SEQ ID NO: 22160 - DNA, 14 bp, Artificial Sequence
  Description of Artificial Sequence: Synthetic oligonucleotide
aagaaaagtacgaa

SEQ ID NO: 22161 - DNA, 14 bp, Artificial Sequence
  Description of Artificial Sequence: Synthetic oligonucleotide
taagaaaagtacga

SEQ ID NO: 22162 - DNA, 14 bp, Artificial Sequence
  Description of Artificial Sequence: Synthetic oligonucleotide
gtaagaaaagtacg

SEQ ID NO: 22163 - DNA, 14 bp, Artificial Sequence
  Description of Artificial Sequence: Synthetic oligonucleotide
ggtaagaaaagtac

SEQ ID NO: 22164 - DNA, 14 bp, Artificial Sequence
  Description of Artificial Sequence: Synthetic oligonucleotide
tggtaagaaaagta

SEQ ID NO: 22165 - DNA, 14 bp, Artificial Sequence
  Description of Artificial Sequence: Synthetic oligonucleotide
gtggtaagaaaagt

SEQ ID NO: 22166 - DNA, 14 bp, Artificial Sequence
  Description of Artificial Sequence: Synthetic oligonucleotide
tgtggtaagaaaag

SEQ ID NO: 22167 - DNA, 14 bp, Artificial Sequence
  Description of Artificial Sequence: Synthetic oligonucleotide
atgtggtaagaaaa

SEQ ID NO: 22168 - DNA, 14 bp, Artificial Sequence
  Description of Artificial Sequence: Synthetic oligonucleotide
tatgtggtaagaaa

SEQ ID NO: 22169 - DNA, 14 bp, Artificial Sequence
  Description of Artificial Sequence: Synthetic oligonucleotide
atatgtggtaagaa

SEQ ID NO: 22170 - DNA, 14 bp, Artificial Sequence
  Description of Artificial Sequence: Synthetic oligonucleotide
gatatgtggtaaga

SEQ ID NO: 22171 - DNA, 14 bp, Artificial Sequence
  Description of Artificial Sequence: Synthetic oligonucleotide
cgatatgtggtaag

SEQ ID NO: 22172 - DNA, 14 bp, Artificial Sequence
  Description of Artificial Sequence: Synthetic oligonucleotide
acgatatgtggtaa

SEQ ID NO: 22173 - DNA, 14 bp, Artificial Sequence
  Description of Artificial Sequence: Synthetic oligonucleotide
aacgatatgtggta

SEQ ID NO: 22174 - DNA, 14 bp, Artificial Sequence
  Description of Artificial Sequence: Synthetic oligonucleotide
gaacgatatgtggt

SEQ ID NO: 22175 - DNA, 14 bp, Artificial Sequence
  Description of Artificial Sequence: Synthetic oligonucleotide
tgaacgatatgtgg

SEQ ID NO: 22176 - DNA, 14 bp, Artificial Sequence
  Description of Artificial Sequence: Synthetic oligonucleotide
atgaacgatatgtg

SEQ ID NO: 22177 - DNA, 14 bp, Artificial Sequence
  Description of Artificial Sequence: Synthetic oligonucleotide
aatgaacgatatgt

SEQ ID NO: 22178 - DNA, 14 bp, Artificial Sequence
  Description of Artificial Sequence: Synthetic oligonucleotide
aaatgaacgatatg

SEQ ID NO: 22179 - DNA, 14 bp, Artificial Sequence
  Description of Artificial Sequence: Synthetic oligonucleotide
aaaatgaacgatat

SEQ ID NO: 22180 - DNA, 14 bp, Artificial Sequence
  Description of Artificial Sequence: Synthetic oligonucleotide
caaaatgaacgata

SEQ ID NO: 22181 - DNA, 14 bp, Artificial Sequence
  Description of Artificial Sequence: Synthetic oligonucleotide
acaaaatgaacgat

SEQ ID NO: 22182 - DNA, 14 bp, Artificial Sequence
  Description of Artificial Sequence: Synthetic oligonucleotide
tacaaaatgaacga

SEQ ID NO: 22183 - DNA, 14 bp, Artificial Sequence
  Description of Artificial Sequence: Synthetic oligonucleotide
ttacaaaatgaacg

SEQ ID NO: 22184 - DNA, 14 bp, Artificial Sequence
  Description of Artificial Sequence: Synthetic oligonucleotide
tttacaaaatgaac

SEQ ID NO: 22185 - DNA, 14 bp, Artificial Sequence
  Description of Artificial Sequence: Synthetic oligonucleotide
gtttacaaaatgaa

SEQ ID NO: 22186 - DNA, 14 bp, Artificial Sequence
  Description of Artificial Sequence: Synthetic oligonucleotide
ggtttacaaaatga

SEQ ID NO: 22187 - DNA, 14 bp, Artificial Sequence
  Description of Artificial Sequence: Synthetic oligonucleotide
tggtttacaaaatg

SEQ ID NO: 22188 - DNA, 14 bp, Artificial Sequence
  Description of Artificial Sequence: Synthetic oligonucleotide
gtggtttacaaaat

SEQ ID NO: 22189 - DNA, 14 bp, Artificial Sequence
  Description of Artificial Sequence: Synthetic oligonucleotide
tgtggtttacaaaa

SEQ ID NO: 22190 - DNA, 14 bp, Artificial Sequence
  Description of Artificial Sequence: Synthetic oligonucleotide
ctgtggtttacaaa

SEQ ID NO: 22191 - DNA, 14 bp, Artificial Sequence
  Description of Artificial Sequence: Synthetic oligonucleotide
cctgtggtttacaa

SEQ ID NO: 22192 - DNA, 14 bp, Artificial Sequence
  Description of Artificial Sequence: Synthetic oligonucleotide
tcctgtggtttaca

SEQ ID NO: 22193 - DNA, 14 bp, Artificial Sequence
  Description of Artificial Sequence: Synthetic oligonucleotide
ttcctgtggtttac

SEQ ID NO: 22194 - DNA, 14 bp, Artificial Sequence
  Description of Artificial Sequence: Synthetic oligonucleotide
attcctgtggttta

SEQ ID NO: 22195 - DNA, 14 bp, Artificial Sequence
  Description of Artificial Sequence: Synthetic oligonucleotide
aattcctgtggttt

SEQ ID NO: 22196 - DNA, 14 bp, Artificial Sequence
  Description of Artificial Sequence: Synthetic oligonucleotide
caattcctgtggtt

SEQ ID NO: 22197 - DNA, 14 bp, Artificial Sequence
  Description of Artificial Sequence: Synthetic oligonucleotide
gcaattcctgtggt

SEQ ID NO: 22198 - DNA, 14 bp, Artificial Sequence
  Description of Artificial Sequence: Synthetic oligonucleotide
agcaattcctgtgg

SEQ ID NO: 22199 - DNA, 14 bp, Artificial Sequence
  Description of Artificial Sequence: Synthetic oligonucleotide
cagcaattcctgtg

SEQ ID NO: 22200 - DNA, 14 bp, Artificial Sequence
  Description of Artificial Sequence: Synthetic oligonucleotide
tcagcaattcctgt

SEQ ID NO: 22201 - DNA, 14 bp, Artificial Sequence
  Description of Artificial Sequence: Synthetic oligonucleotide
ctcagcaattcctg

SEQ ID NO: 22202 - DNA, 14 bp, Artificial Sequence
  Description of Artificial Sequence: Synthetic oligonucleotide
gctcagcaattcct

SEQ ID NO: 22203 - DNA, 14 bp, Artificial Sequence
  Description of Artificial Sequence: Synthetic oligonucleotide
agctcagcaattcc

SEQ ID NO: 22204 - DNA, 14 bp, Artificial Sequence
  Description of Artificial Sequence: Synthetic oligonucleotide
aagctcagcaattc

SEQ ID NO: 22205 - DNA, 14 bp, Artificial Sequence
  Description of Artificial Sequence: Synthetic oligonucleotide
taagctcagcaatt

SEQ ID NO: 22206 - DNA, 14 bp, Artificial Sequence
  Description of Artificial Sequence: Synthetic oligonucleotide
gtaagctcagcaat

SEQ ID NO: 22207 - DNA, 14 bp, Artificial Sequence
  Description of Artificial Sequence: Synthetic oligonucleotide
agtaagctcagcaa

SEQ ID NO: 22208 - DNA, 14 bp, Artificial Sequence
  Description of Artificial Sequence: Synthetic oligonucleotide
cagtaagctcagca

SEQ ID NO: 22209 - DNA, 14 bp, Artificial Sequence
  Description of Artificial Sequence: Synthetic oligonucleotide
tcagtaagctcagc

SEQ ID NO: 22210 - DNA, 14 bp, Artificial Sequence
  Description of Artificial Sequence: Synthetic oligonucleotide
atcagtaagctcag

SEQ ID NO: 22211 - DNA, 14 bp, Artificial Sequence
  Description of Artificial Sequence: Synthetic oligonucleotide
aatcagtaagctca

SEQ ID NO: 22212 - DNA, 14 bp, Artificial Sequence
  Description of Artificial Sequence: Synthetic oligonucleotide
caatcagtaagctc

SEQ ID NO: 22213 - DNA, 14 bp, Artificial Sequence
  Description of Artificial Sequence: Synthetic oligonucleotide
tcaatcagtaagct

SEQ ID NO: 22214 - DNA, 14 bp, Artificial Sequence
  Description of Artificial Sequence: Synthetic oligonucleotide
ttcaatcagtaagc

SEQ ID NO: 22215 - DNA, 14 bp, Artificial Sequence
  Description of Artificial Sequence: Synthetic oligonucleotide
gttcaatcagtaag

SEQ ID NO: 22216 - DNA, 14 bp, Artificial Sequence
  Description of Artificial Sequence: Synthetic oligonucleotide
cgttcaatcagtaa

SEQ ID NO: 22217 - DNA, 14 bp, Artificial Sequence
  Description of Artificial Sequence: Synthetic oligonucleotide
ccgttcaatcagta

SEQ ID NO: 22218 - DNA, 14 bp, Artificial Sequence
  Description of Artificial Sequence: Synthetic oligonucleotide
accgttcaatcagt

SEQ ID NO: 22219 - DNA, 14 bp, Artificial Sequence
  Description of Artificial Sequence: Synthetic oligonucleotide
aaccgttcaatcag

SEQ ID NO: 22220 - DNA, 14 bp, Artificial Sequence
  Description of Artificial Sequence: Synthetic oligonucleotide
aaaccgttcaatca

SEQ ID NO: 22221 - DNA, 14 bp, Artificial Sequence
  Description of Artificial Sequence: Synthetic oligonucleotide
caaaccgttcaatc

SEQ ID NO: 22222 - DNA, 14 bp, Artificial Sequence
  Description of Artificial Sequence: Synthetic oligonucleotide
tcaaaccgttcaat

SEQ ID NO: 22223 - DNA, 14 bp, Artificial Sequence
  Description of Artificial Sequence: Synthetic oligonucleotide
ttcaaaccgttcaa

SEQ ID NO: 22224 - DNA, 14 bp, Artificial Sequence
  Description of Artificial Sequence: Synthetic oligonucleotide
tttcaaaccgttca

SEQ ID NO: 22225 - DNA, 14 bp, Artificial Sequence
  Description of Artificial Sequence: Synthetic oligonucleotide
atttcaaaccgttc

SEQ ID NO: 22226 - DNA, 14 bp, Artificial Sequence
  Description of Artificial Sequence: Synthetic oligonucleotide
aatttcaaaccgtt

SEQ ID NO: 22227 - DNA, 14 bp, Artificial Sequence
  Description of Artificial Sequence: Synthetic oligonucleotide
gaatttcaaaccgt

SEQ ID NO: 22228 - DNA, 14 bp, Artificial Sequence
  Description of Artificial Sequence: Synthetic oligonucleotide
ggaatttcaaaccg

SEQ ID NO: 22229 - DNA, 14 bp, Artificial Sequence
  Description of Artificial Sequence: Synthetic oligonucleotide
tggaatttcaaacc

SEQ ID NO: 22230 - DNA, 14 bp, Artificial Sequence
  Description of Artificial Sequence: Synthetic oligonucleotide
ctggaatttcaaac

SEQ ID NO: 22231 - DNA, 14 bp, Artificial Sequence
  Description of Artificial Sequence: Synthetic oligonucleotide
tctggaatttcaaa

SEQ ID NO: 22232 - DNA, 14 bp, Artificial Sequence
  Description of Artificial Sequence: Synthetic oligonucleotide
ctctggaatttcaa

SEQ ID NO: 22233 - DNA, 14 bp, Artificial Sequence
  Description of Artificial Sequence: Synthetic oligonucleotide
gctctggaatttca

SEQ ID NO: 22234 - DNA, 14 bp, Artificial Sequence
  Description of Artificial Sequence: Synthetic oligonucleotide
ggctctggaatttc

SEQ ID NO: 22235 - DNA, 14 bp, Artificial Sequence
  Description of Artificial Sequence: Synthetic oligonucleotide
tggctctggaattt

SEQ ID NO: 22236 - DNA, 14 bp, Artificial Sequence
  Description of Artificial Sequence: Synthetic oligonucleotide
ctggctctggaatt

SEQ ID NO: 22237 - DNA, 14 bp, Artificial Sequence
  Description of Artificial Sequence: Synthetic oligonucleotide
tctggctctggaat

SEQ ID NO: 22238 - DNA, 14 bp, Artificial Sequence
  Description of Artificial Sequence: Synthetic oligonucleotide
ttctggctctggaa

SEQ ID NO: 22239 - DNA, 14 bp, Artificial Sequence
  Description of Artificial Sequence: Synthetic oligonucleotide
gttctggctctgga

SEQ ID NO: 22240 - DNA, 14 bp, Artificial Sequence
  Description of Artificial Sequence: Synthetic oligonucleotide
ggttctggctctgg

SEQ ID NO: 22241 - DNA, 14 bp, Artificial Sequence
  Description of Artificial Sequence: Synthetic oligonucleotide
aggttctggctctg

SEQ ID NO: 22242 - DNA, 14 bp, Artificial Sequence
  Description of Artificial Sequence: Synthetic oligonucleotide
taggttctggctct

SEQ ID NO: 22243 - DNA, 14 bp, Artificial Sequence
  Description of Artificial Sequence: Synthetic oligonucleotide
gtaggttctggctc

SEQ ID NO: 22244 - DNA, 14 bp, Artificial Sequence
  Description of Artificial Sequence: Synthetic oligonucleotide
agtaggttctggct

SEQ ID NO: 22245 - DNA, 14 bp, Artificial Sequence
  Description of Artificial Sequence: Synthetic oligonucleotide
cagtaggttctggc

SEQ ID NO: 22246 - DNA, 14 bp, Artificial Sequence
  Description of Artificial Sequence: Synthetic oligonucleotide
tcagtaggttctgg

SEQ ID NO: 22247 - DNA, 14 bp, Artificial Sequence
  Description of Artificial Sequence: Synthetic oligonucleotide
gtcagtaggttctg

SEQ ID NO: 22248 - DNA, 14 bp, Artificial Sequence
  Description of Artificial Sequence: Synthetic oligonucleotide
cgtcagtaggttct

SEQ ID NO: 22249 - DNA, 14 bp, Artificial Sequence
  Description of Artificial Sequence: Synthetic oligonucleotide
gcgtcagtaggttc

SEQ ID NO: 22250 - DNA, 14 bp, Artificial Sequence
  Description of Artificial Sequence: Synthetic oligonucleotide
tgcgtcagtaggtt

SEQ ID NO: 22251 - DNA, 14 bp, Artificial Sequence
  Description of Artificial Sequence: Synthetic oligonucleotide
ctgcgtcagtaggt

SEQ ID NO: 22252 - DNA, 14 bp, Artificial Sequence
  Description of Artificial Sequence: Synthetic oligonucleotide
tctgcgtcagtagg

SEQ ID NO: 22253 - DNA, 14 bp, Artificial Sequence
  Description of Artificial Sequence: Synthetic oligonucleotide
gtctgcgtcagtag

SEQ ID NO: 22254 - DNA, 14 bp, Artificial Sequence
  Description of Artificial Sequence: Synthetic oligonucleotide
tgtctgcgtcagta

SEQ ID NO: 22255 - DNA, 14 bp, Artificial Sequence
  Description of Artificial Sequence: Synthetic oligonucleotide
ttgtctgcgtcagt

SEQ ID NO: 22256 - DNA, 14 bp, Artificial Sequence
  Description of Artificial Sequence: Synthetic oligonucleotide
tttgtctgcgtcag

SEQ ID NO: 22257 - DNA, 14 bp, Artificial Sequence
  Description of Artificial Sequence: Synthetic oligonucleotide
atttgtctgcgtca

SEQ ID NO: 22258 - DNA, 14 bp, Artificial Sequence
  Description of Artificial Sequence: Synthetic oligonucleotide
aatttgtctgcgtc

SEQ ID NO: 22259 - DNA, 14 bp, Artificial Sequence
  Description of Artificial Sequence: Synthetic oligonucleotide
caatttgtctgcgt

SEQ ID NO: 22260 - DNA, 14 bp, Artificial Sequence
  Description of Artificial Sequence: Synthetic oligonucleotide
ccaatttgtctgcg

SEQ ID NO: 22261 - DNA, 14 bp, Artificial Sequence
  Description of Artificial Sequence: Synthetic oligonucleotide
gccaatttgtctgc

SEQ ID NO: 22262 - DNA, 14 bp, Artificial Sequence
  Description of Artificial Sequence: Synthetic oligonucleotide
tgccaatttgtctg

SEQ ID NO: 22263 - DNA, 14 bp, Artificial Sequence
  Description of Artificial Sequence: Synthetic oligonucleotide
ttgccaatttgtct

SEQ ID NO: 22264 - DNA, 14 bp, Artificial Sequence
  Description of Artificial Sequence: Synthetic oligonucleotide
attgccaatttgtc

SEQ ID NO: 22265 - DNA, 14 bp, Artificial Sequence
  Description of Artificial Sequence: Synthetic oligonucleotide
tattgccaatttgt

SEQ ID NO: 22266 - DNA, 14 bp, Artificial Sequence
  Description of Artificial Sequence: Synthetic oligonucleotide
ctattgccaatttg

SEQ ID NO: 22267 - DNA, 14 bp, Artificial Sequence
  Description of Artificial Sequence: Synthetic oligonucleotide
tctattgccaattt

SEQ ID NO: 22268 - DNA, 14 bp, Artificial Sequence
  Description of Artificial Sequence: Synthetic oligonucleotide
ctctattgccaatt

SEQ ID NO: 22269 - DNA, 14 bp, Artificial Sequence
  Description of Artificial Sequence: Synthetic oligonucleotide
tctctattgccaat

SEQ ID NO: 22270 - DNA, 14 bp, Artificial Sequence
  Description of Artificial Sequence: Synthetic oligonucleotide
ttctctattgccaa

SEQ ID NO: 22271 - DNA, 14 bp, Artificial Sequence
  Description of Artificial Sequence: Synthetic oligonucleotide
tttctctattgcca

SEQ ID NO: 22272 - DNA, 14 bp, Artificial Sequence
  Description of Artificial Sequence: Synthetic oligonucleotide
ctttctctattgcc

SEQ ID NO: 22273 - DNA, 14 bp, Artificial Sequence
  Description of Artificial Sequence: Synthetic oligonucleotide
cctttctctattgc

SEQ ID NO: 22274 - DNA, 14 bp, Artificial Sequence
  Description of Artificial Sequence: Synthetic oligonucleotide
gcctttctctattg

SEQ ID NO: 22275 - DNA, 14 bp, Artificial Sequence
  Description of Artificial Sequence: Synthetic oligonucleotide
cgcctttctctatt

SEQ ID NO: 22276 - DNA, 14 bp, Artificial Sequence
  Description of Artificial Sequence: Synthetic oligonucleotide
tcgcctttctctat

SEQ ID NO: 22277 - DNA, 14 bp, Artificial Sequence
  Description of Artificial Sequence: Synthetic oligonucleotide
ctcgcctttctcta

SEQ ID NO: 22278 - DNA, 14 bp, Artificial Sequence
  Description of Artificial Sequence: Synthetic oligonucleotide
gctcgcctttctct

SEQ ID NO: 22279 - DNA, 14 bp, Artificial Sequence
  Description of Artificial Sequence: Synthetic oligonucleotide
tgctcgcctttctc

SEQ ID NO: 22280 - DNA, 14 bp, Artificial Sequence
  Description of Artificial Sequence: Synthetic oligonucleotide
ctgctcgcctttct

SEQ ID NO: 22281 - DNA, 14 bp, Artificial Sequence
  Description of Artificial Sequence: Synthetic oligonucleotide
gctgctcgcctttc

SEQ ID NO: 22282 - DNA, 14 bp, Artificial Sequence
  Description of Artificial Sequence: Synthetic oligonucleotide
ggctgctcgccttt

SEQ ID NO: 22283 - DNA, 14 bp, Artificial Sequence
  Description of Artificial Sequence: Synthetic oligonucleotide
tggctgctcgcctt

SEQ ID NO: 22284 - DNA, 14 bp, Artificial Sequence
  Description of Artificial Sequence: Synthetic oligonucleotide
ttggctgctcgcct

SEQ ID NO: 22285 - DNA, 14 bp, Artificial Sequence
  Description of Artificial Sequence: Synthetic oligonucleotide
attggctgctcgcc

SEQ ID NO: 22286 - DNA, 14 bp, Artificial Sequence
  Description of Artificial Sequence: Synthetic oligonucleotide
gattggctgctcgc

SEQ ID NO: 22287 - DNA, 14 bp, Artificial Sequence
  Description of Artificial Sequence: Synthetic oligonucleotide
tgattggctgctcg

SEQ ID NO: 22288 - DNA, 14 bp, Artificial Sequence
  Description of Artificial Sequence: Synthetic oligonucleotide
ctgattggctgctc

SEQ ID NO: 22289 - DNA, 14 bp, Artificial Sequence
  Description of Artificial Sequence: Synthetic oligonucleotide
actgattggctgct

SEQ ID NO: 22290 - DNA, 14 bp, Artificial Sequence
  Description of Artificial Sequence: Synthetic oligonucleotide
cactgattggctgc

SEQ ID NO: 22291 - DNA, 14 bp, Artificial Sequence
  Description of Artificial Sequence: Synthetic oligonucleotide
gcactgattggctg

SEQ ID NO: 22292 - DNA, 14 bp, Artificial Sequence
  Description of Artificial Sequence: Synthetic oligonucleotide
tgcactgattggct

SEQ ID NO: 22293 - DNA, 14 bp, Artificial Sequence
  Description of Artificial Sequence: Synthetic oligonucleotide
ctgcactgattggc

SEQ ID NO: 22294 - DNA, 14 bp, Artificial Sequence
  Description of Artificial Sequence: Synthetic oligonucleotide
tctgcactgattgg

SEQ ID NO: 22295 - DNA, 14 bp, Artificial Sequence
  Description of Artificial Sequence: Synthetic oligonucleotide
gtctgcactgattg

SEQ ID NO: 22296 - DNA, 14 bp, Artificial Sequence
  Description of Artificial Sequence: Synthetic oligonucleotide
ggtctgcactgatt

SEQ ID NO: 22297 - DNA, 14 bp, Artificial Sequence
  Description of Artificial Sequence: Synthetic oligonucleotide
aggtctgcactgat

SEQ ID NO: 22298 - DNA, 14 bp, Artificial Sequence
  Description of Artificial Sequence: Synthetic oligonucleotide
aaggtctgcactga

SEQ ID NO: 22299 - DNA, 14 bp, Artificial Sequence
  Description of Artificial Sequence: Synthetic oligonucleotide
taaggtctgcactg

SEQ ID NO: 22300 - DNA, 14 bp, Artificial Sequence
  Description of Artificial Sequence: Synthetic oligonucleotide
ttaaggtctgcact

SEQ ID NO: 22301 - DNA, 14 bp, Artificial Sequence
  Description of Artificial Sequence: Synthetic oligonucleotide
tttaaggtctgcac

SEQ ID NO: 22302 - DNA, 14 bp, Artificial Sequence
  Description of Artificial Sequence: Synthetic oligonucleotide
ttttaaggtctgca

SEQ ID NO: 22303 - DNA, 14 bp, Artificial Sequence
  Description of Artificial Sequence: Synthetic oligonucleotide
cttttaaggtctgc

SEQ ID NO: 22304 - DNA, 14 bp, Artificial Sequence
  Description of Artificial Sequence: Synthetic oligonucleotide
tcttttaaggtctg

SEQ ID NO: 22305 - DNA, 14 bp, Artificial Sequence
  Description of Artificial Sequence: Synthetic oligonucleotide
atcttttaaggtct

SEQ ID NO: 22306 - DNA, 14 bp, Artificial Sequence
  Description of Artificial Sequence: Synthetic oligonucleotide
aatcttttaaggtc

SEQ ID NO: 22307 - DNA, 14 bp, Artificial Sequence
  Description of Artificial Sequence: Synthetic oligonucleotide
aaatcttttaaggt

SEQ ID NO: 22308 - DNA, 14 bp, Artificial Sequence
  Description of Artificial Sequence: Synthetic oligonucleotide
gaaatcttttaagg

SEQ ID NO: 22309 - DNA, 14 bp, Artificial Sequence
  Description of Artificial Sequence: Synthetic oligonucleotide
cgaaatcttttaag

SEQ ID NO: 22310 - DNA, 14 bp, Artificial Sequence
  Description of Artificial Sequence: Synthetic oligonucleotide
gcgaaatcttttaa

SEQ ID NO: 22311 - DNA, 14 bp, Artificial Sequence
  Description of Artificial Sequence: Synthetic oligonucleotide
tgcgaaatctttta

SEQ ID NO: 22312 - DNA, 14 bp, Artificial Sequence
  Description of Artificial Sequence: Synthetic oligonucleotide
ttgcgaaatctttt

SEQ ID NO: 22313 - DNA, 14 bp, Artificial Sequence
  Description of Artificial Sequence: Synthetic oligonucleotide
cttgcgaaatcttt

SEQ ID NO: 22314 - DNA, 14 bp, Artificial Sequence
  Description of Artificial Sequence: Synthetic oligonucleotide
ccttgcgaaatctt

SEQ ID NO: 22315 - DNA, 14 bp, Artificial Sequence
  Description of Artificial Sequence: Synthetic oligonucleotide
tccttgcgaaatct

SEQ ID NO: 22316 - DNA, 14 bp, Artificial Sequence
  Description of Artificial Sequence: Synthetic oligonucleotide
ttccttgcgaaatc

SEQ ID NO: 22317 - DNA, 14 bp, Artificial Sequence
  Description of Artificial Sequence: Synthetic oligonucleotide
attccttgcgaaat

SEQ ID NO: 22318 - DNA, 14 bp, Artificial Sequence
  Description of Artificial Sequence: Synthetic oligonucleotide
tattccttgcgaaa

SEQ ID NO: 22319 - DNA, 14 bp, Artificial Sequence
  Description of Artificial Sequence: Synthetic oligonucleotide
atattccttgcgaa

SEQ ID NO: 22320 - DNA, 14 bp, Artificial Sequence
  Description of Artificial Sequence: Synthetic oligonucleotide
catattccttgcga

SEQ ID NO: 22321 - DNA, 14 bp, Artificial Sequence
  Description of Artificial Sequence: Synthetic oligonucleotide
acatattccttgcg

SEQ ID NO: 22322 - DNA, 14 bp, Artificial Sequence
  Description of Artificial Sequence: Synthetic oligonucleotide
gacatattccttgc

SEQ ID NO: 22323 - DNA, 14 bp, Artificial Sequence
  Description of Artificial Sequence: Synthetic oligonucleotide
ggacatattccttg

SEQ ID NO: 22324 - DNA, 14 bp, Artificial Sequence
  Description of Artificial Sequence: Synthetic oligonucleotide
tggacatattcctt

SEQ ID NO: 22325 - DNA, 14 bp, Artificial Sequence
  Description of Artificial Sequence: Synthetic oligonucleotide
ttggacatattcct

SEQ ID NO: 22326 - DNA, 14 bp, Artificial Sequence
  Description of Artificial Sequence: Synthetic oligonucleotide
gttggacatattcc

SEQ ID NO: 22327 - DNA, 14 bp, Artificial Sequence
  Description of Artificial Sequence: Synthetic oligonucleotide
ggttggacatattc

SEQ ID NO: 22328 - DNA, 14 bp, Artificial Sequence
  Description of Artificial Sequence: Synthetic oligonucleotide
tggttggacatatt

SEQ ID NO: 22329 - DNA, 14 bp, Artificial Sequence
  Description of Artificial Sequence: Synthetic oligonucleotide
ctggttggacatat

SEQ ID NO: 22330 - DNA, 14 bp, Artificial Sequence
  Description of Artificial Sequence: Synthetic oligonucleotide
ataatctgtaaact

SEQ ID NO: 22331 - DNA, 14 bp, Artificial Sequence
  Description of Artificial Sequence: Synthetic oligonucleotide
tactggttggacat

SEQ ID NO: 22332 - DNA, 14 bp, Artificial Sequence
  Description of Artificial Sequence: Synthetic oligonucleotide
gtactggttggaca

SEQ ID NO: 22333 - DNA, 14 bp, Artificial Sequence
  Description of Artificial Sequence: Synthetic oligonucleotide
tgtactggttggac

SEQ ID NO: 22334 - DNA, 14 bp, Artificial Sequence
  Description of Artificial Sequence: Synthetic oligonucleotide
ttgtactggttgga

SEQ ID NO: 22335 - DNA, 14 bp, Artificial Sequence
  Description of Artificial Sequence: Synthetic oligonucleotide
gttgtactggttgg

SEQ ID NO: 22336 - DNA, 14 bp, Artificial Sequence
  Description of Artificial Sequence: Synthetic oligonucleotide
agttgtactggttg

SEQ ID NO: 22337 - DNA, 14 bp, Artificial Sequence
  Description of Artificial Sequence: Synthetic oligonucleotide
aagttgtactggtt

SEQ ID NO: 22338 - DNA, 14 bp, Artificial Sequence
  Description of Artificial Sequence: Synthetic oligonucleotide
taagttgtactggt

SEQ ID NO: 22339 - DNA, 14 bp, Artificial Sequence
  Description of Artificial Sequence: Synthetic oligonucleotide
ctaagttgtactgg

SEQ ID NO: 22340 - DNA, 14 bp, Artificial Sequence
  Description of Artificial Sequence: Synthetic oligonucleotide
cctaagttgtactg

SEQ ID NO: 22341 - DNA, 14 bp, Artificial Sequence
  Description of Artificial Sequence: Synthetic oligonucleotide
tcctaagttgtact

SEQ ID NO: 22342 - DNA, 14 bp, Artificial Sequence
  Description of Artificial Sequence: Synthetic oligonucleotide
atcctaagttgtac

SEQ ID NO: 22343 - DNA, 14 bp, Artificial Sequence
  Description of Artificial Sequence: Synthetic oligonucleotide
gatcctaagttgta

SEQ ID NO: 22344 - DNA, 14 bp, Artificial Sequence
  Description of Artificial Sequence: Synthetic oligonucleotide
agatcctaagttgt

SEQ ID NO: 22345 - DNA, 14 bp, Artificial Sequence
  Description of Artificial Sequence: Synthetic oligonucleotide
aagatcctaagttg

SEQ ID NO: 22346 - DNA, 14 bp, Artificial Sequence
  Description of Artificial Sequence: Synthetic oligonucleotide
taagatcctaagtt

SEQ ID NO: 22347 - DNA, 14 bp, Artificial Sequence
  Description of Artificial Sequence: Synthetic oligonucleotide
ttaagatcctaagt

SEQ ID NO: 22348 - DNA, 14 bp, Artificial Sequence
  Description of Artificial Sequence: Synthetic oligonucleotide
tttaagatcctaag

SEQ ID NO: 22349 - DNA, 14 bp, Artificial Sequence
  Description of Artificial Sequence: Synthetic oligonucleotide
atttaagatcctaa

SEQ ID NO: 22350 - DNA, 14 bp, Artificial Sequence
  Description of Artificial Sequence: Synthetic oligonucleotide
catttaagatccta

SEQ ID NO: 22351 - DNA, 14 bp, Artificial Sequence
  Description of Artificial Sequence: Synthetic oligonucleotide
acatttaagatcct

SEQ ID NO: 22352 - DNA, 14 bp, Artificial Sequence
  Description of Artificial Sequence: Synthetic oligonucleotide
tacatttaagatcc

SEQ ID NO: 22353 - DNA, 14 bp, Artificial Sequence
  Description of Artificial Sequence: Synthetic oligonucleotide
atacatttaagatc

SEQ ID NO: 22354 - DNA, 14 bp, Artificial Sequence
  Description of Artificial Sequence: Synthetic oligonucleotide
aatacatttaagat

SEQ ID NO: 22355 - DNA, 14 bp, Artificial Sequence
  Description of Artificial Sequence: Synthetic oligonucleotide
aaatacatttaaga

SEQ ID NO: 22356 - DNA, 14 bp, Artificial Sequence
  Description of Artificial Sequence: Synthetic oligonucleotide
gaaatacatttaag

SEQ ID NO: 22357 - DNA, 14 bp, Artificial Sequence
  Description of Artificial Sequence: Synthetic oligonucleotide
cgaaatacatttaa

SEQ ID NO: 22358 - DNA, 14 bp, Artificial Sequence
  Description of Artificial Sequence: Synthetic oligonucleotide
ccgaaatacattta

SEQ ID NO: 22359 - DNA, 14 bp, Artificial Sequence
  Description of Artificial Sequence: Synthetic oligonucleotide
gccgaaatacattt

SEQ ID NO: 22360 - DNA, 14 bp, Artificial Sequence
  Description of Artificial Sequence: Synthetic oligonucleotide
tgccgaaatacatt

SEQ ID NO: 22361 - DNA, 14 bp, Artificial Sequence
  Description of Artificial Sequence: Synthetic oligonucleotide
atgccgaaatacat

SEQ ID NO: 22362 - DNA, 14 bp, Artificial Sequence
  Description of Artificial Sequence: Synthetic oligonucleotide
aatgccgaaataca

SEQ ID NO: 22363 - DNA, 14 bp, Artificial Sequence
  Description of Artificial Sequence: Synthetic oligonucleotide
caatgccgaaatac

SEQ ID NO: 22364 - DNA, 14 bp, Artificial Sequence
  Description of Artificial Sequence: Synthetic oligonucleotide
ccaatgccgaaata

SEQ ID NO: 22365 - DNA, 14 bp, Artificial Sequence
  Description of Artificial Sequence: Synthetic oligonucleotide
cccaatgccgaaat

SEQ ID NO: 22366 - DNA, 14 bp, Artificial Sequence
  Description of Artificial Sequence: Synthetic oligonucleotide
acccaatgccgaaa

SEQ ID NO: 22367 - DNA, 14 bp, Artificial Sequence
  Description of Artificial Sequence: Synthetic oligonucleotide
aacccaatgccgaa

SEQ ID NO: 22368 - DNA, 14 bp, Artificial Sequence
  Description of Artificial Sequence: Synthetic oligonucleotide
caacccaatgccga

SEQ ID NO: 22369 - DNA, 14 bp, Artificial Sequence
  Description of Artificial Sequence: Synthetic oligonucleotide
tcaacccaatgccg

SEQ ID NO: 22370 - DNA, 14 bp, Artificial Sequence
  Description of Artificial Sequence: Synthetic oligonucleotide
ttcaacccaatgcc

SEQ ID NO: 22371 - DNA, 14 bp, Artificial Sequence
  Description of Artificial Sequence: Synthetic oligonucleotide
gttcaacccaatgc

SEQ ID NO: 22372 - DNA, 14 bp, Artificial Sequence
  Description of Artificial Sequence: Synthetic oligonucleotide
tgttcaacccaatg

SEQ ID NO: 22373 - DNA, 14 bp, Artificial Sequence
  Description of Artificial Sequence: Synthetic oligonucleotide
atgttcaacccaat

SEQ ID NO: 22374 - DNA, 14 bp, Artificial Sequence
  Description of Artificial Sequence: Synthetic oligonucleotide
gatgttcaacccaa

SEQ ID NO: 22375 - DNA, 14 bp, Artificial Sequence
  Description of Artificial Sequence: Synthetic oligonucleotide
tgatgttcaaccca

SEQ ID NO: 22376 - DNA, 14 bp, Artificial Sequence
  Description of Artificial Sequence: Synthetic oligonucleotide
atgatgttcaaccc

SEQ ID NO: 22377 - DNA, 14 bp, Artificial Sequence
  Description of Artificial Sequence: Synthetic oligonucleotide
aatgatgttcaacc

SEQ ID NO: 22378 - DNA, 14 bp, Artificial Sequence
  Description of Artificial Sequence: Synthetic oligonucleotide
aaatgatgttcaac

SEQ ID NO: 22379 - DNA, 14 bp, Artificial Sequence
  Description of Artificial Sequence: Synthetic oligonucleotide
aaaatgatgttcaa

SEQ ID NO: 22380 - DNA, 14 bp, Artificial Sequence
  Description of Artificial Sequence: Synthetic oligonucleotide
aaaaatgatgttca

SEQ ID NO: 22381 - DNA, 14 bp, Artificial Sequence
  Description of Artificial Sequence: Synthetic oligonucleotide
taaaaatgatgttc

SEQ ID NO: 22382 - DNA, 14 bp, Artificial Sequence
  Description of Artificial Sequence: Synthetic oligonucleotide
ataaaaatgatgtt

SEQ ID NO: 22383 - DNA, 14 bp, Artificial Sequence
  Description of Artificial Sequence: Synthetic oligonucleotide
cataaaaatgatgt

SEQ ID NO: 22384 - DNA, 14 bp, Artificial Sequence
  Description of Artificial Sequence: Synthetic oligonucleotide
tcataaaaatgatg

SEQ ID NO: 22385 - DNA, 14 bp, Artificial Sequence
  Description of Artificial Sequence: Synthetic oligonucleotide
gtcataaaaatgat

SEQ ID NO: 22386 - DNA, 14 bp, Artificial Sequence
  Description of Artificial Sequence: Synthetic oligonucleotide
agtcataaaaatga

SEQ ID NO: 22387 - DNA, 14 bp, Artificial Sequence
  Description of Artificial Sequence: Synthetic oligonucleotide
aagtcataaaaatg

SEQ ID NO: 22388 - DNA, 14 bp, Artificial Sequence
  Description of Artificial Sequence: Synthetic oligonucleotide
aaagtcataaaaat

SEQ ID NO: 22389 - DNA, 14 bp, Artificial Sequence
  Description of Artificial Sequence: Synthetic oligonucleotide
caaagtcataaaaa

SEQ ID NO: 22390 - DNA, 14 bp, Artificial Sequence
  Description of Artificial Sequence: Synthetic oligonucleotide
tcaaagtcataaaa

SEQ ID NO: 22391 - DNA, 14 bp, Artificial Sequence
  Description of Artificial Sequence: Synthetic oligonucleotide
ttcaaagtcataaa

SEQ ID NO: 22392 - DNA, 14 bp, Artificial Sequence
  Description of Artificial Sequence: Synthetic oligonucleotide
tttcaaagtcataa

SEQ ID NO: 22393 - DNA, 14 bp, Artificial Sequence
  Description of Artificial Sequence: Synthetic oligonucleotide
ctttcaaagtcata

SEQ ID NO: 22394 - DNA, 14 bp, Artificial Sequence
  Description of Artificial Sequence: Synthetic oligonucleotide
tctttcaaagtcat

SEQ ID NO: 22395 - DNA, 14 bp, Artificial Sequence
  Description of Artificial Sequence: Synthetic oligonucleotide
ctctttcaaagtca

SEQ ID NO: 22396 - DNA, 14 bp, Artificial Sequence
  Description of Artificial Sequence: Synthetic oligonucleotide
tctctttcaaagtc

SEQ ID NO: 22397 - DNA, 14 bp, Artificial Sequence
  Description of Artificial Sequence: Synthetic oligonucleotide
gtctctttcaaagt

SEQ ID NO: 22398 - DNA, 14 bp, Artificial Sequence
  Description of Artificial Sequence: Synthetic oligonucleotide
agtctctttcaaag

SEQ ID NO: 22399 - DNA, 14 bp, Artificial Sequence
  Description of Artificial Sequence: Synthetic oligonucleotide
aagtctctttcaaa

SEQ ID NO: 22400 - DNA, 14 bp, Artificial Sequence
  Description of Artificial Sequence: Synthetic oligonucleotide
caagtctctttcaa

SEQ ID NO: 22401 - DNA, 14 bp, Artificial Sequence
  Description of Artificial Sequence: Synthetic oligonucleotide
ccaagtctctttca

SEQ ID NO: 22402 - DNA, 14 bp, Artificial Sequence
  Description of Artificial Sequence: Synthetic oligonucleotide
tccaagtctctttc

SEQ ID NO: 22403 - DNA, 14 bp, Artificial Sequence
  Description of Artificial Sequence: Synthetic oligonucleotide
ttccaagtctcttt

SEQ ID NO: 22404 - DNA, 14 bp, Artificial Sequence
  Description of Artificial Sequence: Synthetic oligonucleotide
attccaagtctctt

SEQ ID NO: 22405 - DNA, 14 bp, Artificial Sequence
  Description of Artificial Sequence: Synthetic oligonucleotide
aattccaagtctct

SEQ ID NO: 22406 - DNA, 14 bp, Artificial Sequence
  Description of Artificial Sequence: Synthetic oligonucleotide
caattccaagtctc

SEQ ID NO: 22407 - DNA, 14 bp, Artificial Sequence
  Description of Artificial Sequence: Synthetic oligonucleotide
gcaattccaagtct

SEQ ID NO: 22408 - DNA, 14 bp, Artificial Sequence
  Description of Artificial Sequence: Synthetic oligonucleotide
agcaattccaagtc

SEQ ID NO: 22409 - DNA, 14 bp, Artificial Sequence
  Description of Artificial Sequence: Synthetic oligonucleotide
aagcaattccaagt

SEQ ID NO: 22410 - DNA, 14 bp, Artificial Sequence
  Description of Artificial Sequence: Synthetic oligonucleotide
caagcaattccaag

SEQ ID NO: 22411 - DNA, 14 bp, Artificial Sequence
  Description of Artificial Sequence: Synthetic oligonucleotide
tcaagcaattccaa

SEQ ID NO: 22412 - DNA, 14 bp, Artificial Sequence
  Description of Artificial Sequence: Synthetic oligonucleotide
ttcaagcaattcca

SEQ ID NO: 22413 - DNA, 14 bp, Artificial Sequence
  Description of Artificial Sequence: Synthetic oligonucleotide
tttcaagcaattcc

SEQ ID NO: 22414 - DNA, 14 bp, Artificial Sequence
  Description of Artificial Sequence: Synthetic oligonucleotide
ctttcaagcaattc

SEQ ID NO: 22415 - DNA, 14 bp, Artificial Sequence
  Description of Artificial Sequence: Synthetic oligonucleotide
tctttcaagcaatt

SEQ ID NO: 22416 - DNA, 14 bp, Artificial Sequence
  Description of Artificial Sequence: Synthetic oligonucleotide
gtctttcaagcaat

SEQ ID NO: 22417 - DNA, 14 bp, Artificial Sequence
  Description of Artificial Sequence: Synthetic oligonucleotide
agtctttcaagcaa

SEQ ID NO: 22418 - DNA, 14 bp, Artificial Sequence
  Description of Artificial Sequence: Synthetic oligonucleotide
tagtctttcaagca

SEQ ID NO: 22419 - DNA, 14 bp, Artificial Sequence
  Description of Artificial Sequence: Synthetic oligonucleotide
ctagtctttcaagc

SEQ ID NO: 22420 - DNA, 14 bp, Artificial Sequence
  Description of Artificial Sequence: Synthetic oligonucleotide
tctagtctttcaag

SEQ ID NO: 22421 - DNA, 14 bp, Artificial Sequence
  Description of Artificial Sequence: Synthetic oligonucleotide
ttctagtctttcaa

SEQ ID NO: 22422 - DNA, 14 bp, Artificial Sequence
  Description of Artificial Sequence: Synthetic oligonucleotide
attctagtctttca

SEQ ID NO: 22423 - DNA, 14 bp, Artificial Sequence
  Description of Artificial Sequence: Synthetic oligonucleotide
gattctagtctttc

SEQ ID NO: 22424 - DNA, 14 bp, Artificial Sequence
  Description of Artificial Sequence: Synthetic oligonucleotide
ggattctagtcttt

SEQ ID NO: 22425 - DNA, 14 bp, Artificial Sequence
  Description of Artificial Sequence: Synthetic oligonucleotide
aggattctagtctt

SEQ ID NO: 22426 - DNA, 14 bp, Artificial Sequence
  Description of Artificial Sequence: Synthetic oligonucleotide
aaggattctagtct

SEQ ID NO: 22427 - DNA, 14 bp, Artificial Sequence
  Description of Artificial Sequence: Synthetic oligonucleotide
gaaggattctagtc

SEQ ID NO: 22428 - DNA, 14 bp, Artificial Sequence
  Description of Artificial Sequence: Synthetic oligonucleotide
tgaaggattctagt

SEQ ID NO: 22429 - DNA, 14 bp, Artificial Sequence
  Description of Artificial Sequence: Synthetic oligonucleotide
atgaaggattctag

SEQ ID NO: 22430 - DNA, 14 bp, Artificial Sequence
  Description of Artificial Sequence: Synthetic oligonucleotide
aatgaaggattcta

SEQ ID NO: 22431 - DNA, 14 bp, Artificial Sequence
  Description of Artificial Sequence: Synthetic oligonucleotide
aaatgaaggattct

SEQ ID NO: 22432 - DNA, 14 bp, Artificial Sequence
  Description of Artificial Sequence: Synthetic oligonucleotide
gaaatgaaggattc

SEQ ID NO: 22433 - DNA, 14 bp, Artificial Sequence
  Description of Artificial Sequence: Synthetic oligonucleotide
tgaaatgaaggatt

SEQ ID NO: 22434 - DNA, 14 bp, Artificial Sequence
  Description of Artificial Sequence: Synthetic oligonucleotide
ttgaaatgaaggat

SEQ ID NO: 22435 - DNA, 14 bp, Artificial Sequence
  Description of Artificial Sequence: Synthetic oligonucleotide
cttgaaatgaagga

SEQ ID NO: 22436 - DNA, 14 bp, Artificial Sequence
  Description of Artificial Sequence: Synthetic oligonucleotide
acttgaaatgaagg

SEQ ID NO: 22437 - DNA, 14 bp, Artificial Sequence
  Description of Artificial Sequence: Synthetic oligonucleotide
cacttgaaatgaag

SEQ ID NO: 22438 - DNA, 14 bp, Artificial Sequence
  Description of Artificial Sequence: Synthetic oligonucleotide
acacttgaaatgaa

SEQ ID NO: 22439 - DNA, 14 bp, Artificial Sequence
  Description of Artificial Sequence: Synthetic oligonucleotide
tacacttgaaatga

SEQ ID NO: 22440 - DNA, 14 bp, Artificial Sequence
  Description of Artificial Sequence: Synthetic oligonucleotide
ttacacttgaaatg

SEQ ID NO: 22441 - DNA, 14 bp, Artificial Sequence
  Description of Artificial Sequence: Synthetic oligonucleotide
cttacacttgaaat

SEQ ID NO: 22442 - DNA, 14 bp, Artificial Sequence
  Description of Artificial Sequence: Synthetic oligonucleotide
tcttacacttgaaa

SEQ ID NO: 22443 - DNA, 14 bp, Artificial Sequence
  Description of Artificial Sequence: Synthetic oligonucleotide
ctcttacacttgaa

SEQ ID NO: 22444 - DNA, 14 bp, Artificial Sequence
  Description of Artificial Sequence: Synthetic oligonucleotide
cctcttacacttga

SEQ ID NO: 22445 - DNA, 14 bp, Artificial Sequence
  Description of Artificial Sequence: Synthetic oligonucleotide
ccctcttacacttg

SEQ ID NO: 22446 - DNA, 14 bp, Artificial Sequence
  Description of Artificial Sequence: Synthetic oligonucleotide
tccctcttacactt

SEQ ID NO: 22447 - DNA, 14 bp, Artificial Sequence
  Description of Artificial Sequence: Synthetic oligonucleotide
ttccctcttacact

SEQ ID NO: 22448 - DNA, 14 bp, Artificial Sequence
  Description of Artificial Sequence: Synthetic oligonucleotide
tttccctcttacac

SEQ ID NO: 22449 - DNA, 14 bp, Artificial Sequence
  Description of Artificial Sequence: Synthetic oligonucleotide
ctttccctcttaca

SEQ ID NO: 22450 - DNA, 14 bp, Artificial Sequence
  Description of Artificial Sequence: Synthetic oligonucleotide
gctttccctcttac

SEQ ID NO: 22451 - DNA, 14 bp, Artificial Sequence
  Description of Artificial Sequence: Synthetic oligonucleotide
agctttccctctta

SEQ ID NO: 22452 - DNA, 14 bp, Artificial Sequence
  Description of Artificial Sequence: Synthetic oligonucleotide
tagctttccctctt

SEQ ID NO: 22453 - DNA, 14 bp, Artificial Sequence
  Description of Artificial Sequence: Synthetic oligonucleotide
atagctttccctct

SEQ ID NO: 22454 - DNA, 14 bp, Artificial Sequence
  Description of Artificial Sequence: Synthetic oligonucleotide
catagctttccctc

SEQ ID NO: 22455 - DNA, 14 bp, Artificial Sequence
  Description of Artificial Sequence: Synthetic oligonucleotide
tcatagctttccct

SEQ ID NO: 22456 - DNA, 14 bp, Artificial Sequence
  Description of Artificial Sequence: Synthetic oligonucleotide
ttcatagctttccc

SEQ ID NO: 22457 - DNA, 14 bp, Artificial Sequence
  Description of Artificial Sequence: Synthetic oligonucleotide
tttcatagctttcc

SEQ ID NO: 22458 - DNA, 14 bp, Artificial Sequence
  Description of Artificial Sequence: Synthetic oligonucleotide
ttttcatagctttc

SEQ ID NO: 22459 - DNA, 14 bp, Artificial Sequence
  Description of Artificial Sequence: Synthetic oligonucleotide
tttttcatagcttt

SEQ ID NO: 22460 - DNA, 14 bp, Artificial Sequence
  Description of Artificial Sequence: Synthetic oligonucleotide
ttttttcatagctt

SEQ ID NO: 22461 - DNA, 14 bp, Artificial Sequence
  Description of Artificial Sequence: Synthetic oligonucleotide
attttttcatagct

SEQ ID NO: 22462 - DNA, 14 bp, Artificial Sequence
  Description of Artificial Sequence: Synthetic oligonucleotide
cattttttcatagc

SEQ ID NO: 22463 - DNA, 14 bp, Artificial Sequence
  Description of Artificial Sequence: Synthetic oligonucleotide
ccattttttcatag

SEQ ID NO: 22464 - DNA, 14 bp, Artificial Sequence
  Description of Artificial Sequence: Synthetic oligonucleotide
cccattttttcata

SEQ ID NO: 22465 - DNA, 14 bp, Artificial Sequence
  Description of Artificial Sequence: Synthetic oligonucleotide
acccattttttcat

SEQ ID NO: 22466 - DNA, 14 bp, Artificial Sequence
  Description of Artificial Sequence: Synthetic oligonucleotide
tacccattttttca

SEQ ID NO: 22467 - DNA, 14 bp, Artificial Sequence
  Description of Artificial Sequence: Synthetic oligonucleotide
ctacccattttttc

SEQ ID NO: 22468 - DNA, 14 bp, Artificial Sequence
  Description of Artificial Sequence: Synthetic oligonucleotide
tctacccatttttt

SEQ ID NO: 22469 - DNA, 14 bp, Artificial Sequence
  Description of Artificial Sequence: Synthetic oligonucleotide
ctctacccattttt

SEQ ID NO: 22470 - DNA, 14 bp, Artificial Sequence
  Description of Artificial Sequence: Synthetic oligonucleotide
actctacccatttt

SEQ ID NO: 22471 - DNA, 14 bp, Artificial Sequence
  Description of Artificial Sequence: Synthetic oligonucleotide
gactctacccattt

SEQ ID NO: 22472 - DNA, 14 bp, Artificial Sequence
  Description of Artificial Sequence: Synthetic oligonucleotide
tgactctacccatt

SEQ ID NO: 22473 - DNA, 14 bp, Artificial Sequence
  Description of Artificial Sequence: Synthetic oligonucleotide
ttgactctacccat

SEQ ID NO: 22474 - DNA, 14 bp, Artificial Sequence
  Description of Artificial Sequence: Synthetic oligonucleotide
attgactctaccca

SEQ ID NO: 22475 - DNA, 14 bp, Artificial Sequence
  Description of Artificial Sequence: Synthetic oligonucleotide
aattgactctaccc

SEQ ID NO: 22476 - DNA, 14 bp, Artificial Sequence
  Description of Artificial Sequence: Synthetic oligonucleotide
caattgactctacc

SEQ ID NO: 22477 - DNA, 14 bp, Artificial Sequence
  Description of Artificial Sequence: Synthetic oligonucleotide
gcaattgactctac

SEQ ID NO: 22478 - DNA, 14 bp, Artificial Sequence
  Description of Artificial Sequence: Synthetic oligonucleotide
agcaattgactcta

SEQ ID NO: 22479 - DNA, 14 bp, Artificial Sequence
  Description of Artificial Sequence: Synthetic oligonucleotide
tagcaattgactct

SEQ ID NO: 22480 - DNA, 14 bp, Artificial Sequence
  Description of Artificial Sequence: Synthetic oligonucleotide
ttagcaattgactc

SEQ ID NO: 22481 - DNA, 14 bp, Artificial Sequence
  Description of Artificial Sequence: Synthetic oligonucleotide
cttagcaattgact

SEQ ID NO: 22482 - DNA, 14 bp, Artificial Sequence
  Description of Artificial Sequence: Synthetic oligonucleotide
tcttagcaattgac

SEQ ID NO: 22483 - DNA, 14 bp, Artificial Sequence
  Description of Artificial Sequence: Synthetic oligonucleotide
atcttagcaattga

SEQ ID NO: 22484 - DNA, 14 bp, Artificial Sequence
  Description of Artificial Sequence: Synthetic oligonucleotide
gatcttagcaattg

SEQ ID NO: 22485 - DNA, 14 bp, Artificial Sequence
  Description of Artificial Sequence: Synthetic oligonucleotide
tgatcttagcaatt

SEQ ID NO: 22486 - DNA, 14 bp, Artificial Sequence
  Description of Artificial Sequence: Synthetic oligonucleotide
atgatcttagcaat

SEQ ID NO: 22487 - DNA, 14 bp, Artificial Sequence
  Description of Artificial Sequence: Synthetic oligonucleotide
gatgatcttagcaa

SEQ ID NO: 22488 - DNA, 14 bp, Artificial Sequence
  Description of Artificial Sequence: Synthetic oligonucleotide
tgatgatcttagca

SEQ ID NO: 22489 - DNA, 14 bp, Artificial Sequence
  Description of Artificial Sequence: Synthetic oligonucleotide
ctgatgatcttagc

SEQ ID NO: 22490 - DNA, 14 bp, Artificial Sequence
  Description of Artificial Sequence: Synthetic oligonucleotide
cctgatgatcttag

SEQ ID NO: 22491 - DNA, 14 bp, Artificial Sequence
  Description of Artificial Sequence: Synthetic oligonucleotide
tcctgatgatctta

SEQ ID NO: 22492 - DNA, 14 bp, Artificial Sequence
  Description of Artificial Sequence: Synthetic oligonucleotide
ctcctgatgatctt

SEQ ID NO: 22493 - DNA, 14 bp, Artificial Sequence
  Description of Artificial Sequence: Synthetic oligonucleotide
cctcctgatgatct

SEQ ID NO: 22494 - DNA, 14 bp, Artificial Sequence
  Description of Artificial Sequence: Synthetic oligonucleotide
tcctcctgatgatc

SEQ ID NO: 22495 - DNA, 14 bp, Artificial Sequence
  Description of Artificial Sequence: Synthetic oligonucleotide
ttcctcctgatgat

SEQ ID NO: 22496 - DNA, 14 bp, Artificial Sequence
  Description of Artificial Sequence: Synthetic oligonucleotide
cttcctcctgatga

SEQ ID NO: 22497 - DNA, 14 bp, Artificial Sequence
  Description of Artificial Sequence: Synthetic oligonucleotide
tcttcctcctgatg

SEQ ID NO: 22498 - DNA, 14 bp, Artificial Sequence
  Description of Artificial Sequence: Synthetic oligonucleotide
ttcttcctcctgat

SEQ ID NO: 22499 - DNA, 14 bp, Artificial Sequence
  Description of Artificial Sequence: Synthetic oligonucleotide
cttcttcctcctga

SEQ ID NO: 22500 - DNA, 14 bp, Artificial Sequence
  Description of Artificial Sequence: Synthetic oligonucleotide
gcttcttcctcctg

SEQ ID NO: 22501 - DNA, 14 bp, Artificial Sequence
  Description of Artificial Sequence: Synthetic oligonucleotide
tgcttcttcctcct

SEQ ID NO: 22502 - DNA, 14 bp, Artificial Sequence
  Description of Artificial Sequence: Synthetic oligonucleotide
ttgcttcttcctcc

SEQ ID NO: 22503 - DNA, 14 bp, Artificial Sequence
  Description of Artificial Sequence: Synthetic oligonucleotide
cttgcttcttcctc

SEQ ID NO: 22504 - DNA, 14 bp, Artificial Sequence
  Description of Artificial Sequence: Synthetic oligonucleotide
gcttgcttcttcct

SEQ ID NO: 22505 - DNA, 14 bp, Artificial Sequence
  Description of Artificial Sequence: Synthetic oligonucleotide
agcttgcttcttcc

SEQ ID NO: 22506 - DNA, 14 bp, Artificial Sequence
  Description of Artificial Sequence: Synthetic oligonucleotide
gagcttgcttcttc

SEQ ID NO: 22507 - DNA, 14 bp, Artificial Sequence
  Description of Artificial Sequence: Synthetic oligonucleotide
tgagcttgcttctt

SEQ ID NO: 22508 - DNA, 14 bp, Artificial Sequence
  Description of Artificial Sequence: Synthetic oligonucleotide
ctgagcttgcttct

SEQ ID NO: 22509 - DNA, 14 bp, Artificial Sequence
  Description of Artificial Sequence: Synthetic oligonucleotide
cctgagcttgcttc

SEQ ID NO: 22510 - DNA, 14 bp, Artificial Sequence
  Description of Artificial Sequence: Synthetic oligonucleotide
gcctgagcttgctt

SEQ ID NO: 22511 - DNA, 14 bp, Artificial Sequence
  Description of Artificial Sequence: Synthetic oligonucleotide
tgcctgagcttgct

SEQ ID NO: 22512 - DNA, 14 bp, Artificial Sequence
  Description of Artificial Sequence: Synthetic oligonucleotide
ttgcctgagcttgc

SEQ ID NO: 22513 - DNA, 14 bp, Artificial Sequence
  Description of Artificial Sequence: Synthetic oligonucleotide
tttgcctgagcttg

SEQ ID NO: 22514 - DNA, 14 bp, Artificial Sequence
  Description of Artificial Sequence: Synthetic oligonucleotide
gtttgcctgagctt

SEQ ID NO: 22515 - DNA, 14 bp, Artificial Sequence
  Description of Artificial Sequence: Synthetic oligonucleotide
cgtttgcctgagct

SEQ ID NO: 22516 - DNA, 14 bp, Artificial Sequence
  Description of Artificial Sequence: Synthetic oligonucleotide
ccgtttgcctgagc

SEQ ID NO: 22517 - DNA, 14 bp, Artificial Sequence
  Description of Artificial Sequence: Synthetic oligonucleotide
tccgtttgcctgag

SEQ ID NO: 22518 - DNA, 14 bp, Artificial Sequence
  Description of Artificial Sequence: Synthetic oligonucleotide
ctccgtttgcctga

SEQ ID NO: 22519 - DNA, 14 bp, Artificial Sequence
  Description of Artificial Sequence: Synthetic oligonucleotide
actccgtttgcctg

SEQ ID NO: 22520 - DNA, 14 bp, Artificial Sequence
  Description of Artificial Sequence: Synthetic oligonucleotide
tactccgtttgcct

SEQ ID NO: 22521 - DNA, 14 bp, Artificial Sequence
  Description of Artificial Sequence: Synthetic oligonucleotide
ttactccgtttgcc

SEQ ID NO: 22522 - DNA, 14 bp, Artificial Sequence
  Description of Artificial Sequence: Synthetic oligonucleotide
cttactccgtttgc

SEQ ID NO: 22523 - DNA, 14 bp, Artificial Sequence
  Description of Artificial Sequence: Synthetic oligonucleotide
gcttactccgtttg

SEQ ID NO: 22524 - DNA, 14 bp, Artificial Sequence
  Description of Artificial Sequence: Synthetic oligonucleotide
ggcttactccgttt

SEQ ID NO: 22525 - DNA, 14 bp, Artificial Sequence
  Description of Artificial Sequence: Synthetic oligonucleotide
tggcttactccgtt

SEQ ID NO: 22526 - DNA, 14 bp, Artificial Sequence
  Description of Artificial Sequence: Synthetic oligonucleotide
atggcttactccgt

SEQ ID NO: 22527 - DNA, 14 bp, Artificial Sequence
  Description of Artificial Sequence: Synthetic oligonucleotide
tatggcttactccg

SEQ ID NO: 22528 - DNA, 14 bp, Artificial Sequence
  Description of Artificial Sequence: Synthetic oligonucleotide
ttatggcttactcc

SEQ ID NO: 22529 - DNA, 14 bp, Artificial Sequence
  Description of Artificial Sequence: Synthetic oligonucleotide
attatggcttactc

SEQ ID NO: 22530 - DNA, 14 bp, Artificial Sequence
  Description of Artificial Sequence: Synthetic oligonucleotide
tattatggcttact

SEQ ID NO: 22531 - DNA, 14 bp, Artificial Sequence
  Description of Artificial Sequence: Synthetic oligonucleotide
atattatggcttac

SEQ ID NO: 22532 - DNA, 14 bp, Artificial Sequence
  Description of Artificial Sequence: Synthetic oligonucleotide
aatattatggctta

SEQ ID NO: 22533 - DNA, 14 bp, Artificial Sequence
  Description of Artificial Sequence: Synthetic oligonucleotide
taatattatggctt

SEQ ID NO: 22534 - DNA, 14 bp, Artificial Sequence
  Description of Artificial Sequence: Synthetic oligonucleotide
gtaatattatggct

SEQ ID NO: 22535 - DNA, 14 bp, Artificial Sequence
  Description of Artificial Sequence: Synthetic oligonucleotide
ggtaatattatggc

SEQ ID NO: 22536 - DNA, 14 bp, Artificial Sequence
  Description of Artificial Sequence: Synthetic oligonucleotide
aggtaatattatgg

SEQ ID NO: 22537 - DNA, 14 bp, Artificial Sequence
  Description of Artificial Sequence: Synthetic oligonucleotide
aaggtaatattatg

SEQ ID NO: 22538 - DNA, 14 bp, Artificial Sequence
  Description of Artificial Sequence: Synthetic oligonucleotide
aaaggtaatattat

SEQ ID NO: 22539 - DNA, 14 bp, Artificial Sequence
  Description of Artificial Sequence: Synthetic oligonucleotide
caaaggtaatatta

SEQ ID NO: 22540 - DNA, 14 bp, Artificial Sequence
  Description of Artificial Sequence: Synthetic oligonucleotide
tcaaaggtaatatt

SEQ ID NO: 22541 - DNA, 14 bp, Artificial Sequence
  Description of Artificial Sequence: Synthetic oligonucleotide
ttcaaaggtaatat

SEQ ID NO: 22542 - DNA, 14 bp, Artificial Sequence
  Description of Artificial Sequence: Synthetic oligonucleotide
tttcaaaggtaata

SEQ ID NO: 22543 - DNA, 14 bp, Artificial Sequence
  Description of Artificial Sequence: Synthetic oligonucleotide
ctttcaaaggtaat

SEQ ID NO: 22544 - DNA, 14 bp, Artificial Sequence
  Description of Artificial Sequence: Synthetic oligonucleotide
actttcaaaggtaa

SEQ ID NO: 22545 - DNA, 14 bp, Artificial Sequence
  Description of Artificial Sequence: Synthetic oligonucleotide
gactttcaaaggta

SEQ ID NO: 22546 - DNA, 14 bp, Artificial Sequence
  Description of Artificial Sequence: Synthetic oligonucleotide
ggactttcaaaggt

SEQ ID NO: 22547 - DNA, 14 bp, Artificial Sequence
  Description of Artificial Sequence: Synthetic oligonucleotide
tggactttcaaagg

SEQ ID NO: 22548 - DNA, 14 bp, Artificial Sequence
  Description of Artificial Sequence: Synthetic oligonucleotide
gtggactttcaaag

SEQ ID NO: 22549 - DNA, 14 bp, Artificial Sequence
  Description of Artificial Sequence: Synthetic oligonucleotide
ggtggactttcaaa

SEQ ID NO: 22550 - DNA, 14 bp, Artificial Sequence
  Description of Artificial Sequence: Synthetic oligonucleotide
aggtggactttcaa

SEQ ID NO: 22551 - DNA, 14 bp, Artificial Sequence
  Description of Artificial Sequence: Synthetic oligonucleotide
gaggtggactttca

SEQ ID NO: 22552 - DNA, 14 bp, Artificial Sequence
  Description of Artificial Sequence: Synthetic oligonucleotide
ggaggtggactttc

SEQ ID NO: 22553 - DNA, 14 bp, Artificial Sequence
  Description of Artificial Sequence: Synthetic oligonucleotide
tggaggtggacttt

SEQ ID NO: 22554 - DNA, 14 bp, Artificial Sequence
  Description of Artificial Sequence: Synthetic oligonucleotide
gtggaggtggactt

SEQ ID NO: 22555 - DNA, 14 bp, Artificial Sequence
  Description of Artificial Sequence: Synthetic oligonucleotide
ggtggaggtggact

SEQ ID NO: 22556 - DNA, 14 bp, Artificial Sequence
  Description of Artificial Sequence: Synthetic oligonucleotide
tggtggaggtggac

SEQ ID NO: 22557 - DNA, 14 bp, Artificial Sequence
  Description of Artificial Sequence: Synthetic oligonucleotide
ttggtggaggtgga

SEQ ID NO: 22558 - DNA, 14 bp, Artificial Sequence
  Description of Artificial Sequence: Synthetic oligonucleotide
attggtggaggtgg

SEQ ID NO: 22559 - DNA, 14 bp, Artificial Sequence
  Description of Artificial Sequence: Synthetic oligonucleotide
aattggtggaggtg

SEQ ID NO: 22560 - DNA, 14 bp, Artificial Sequence
  Description of Artificial Sequence: Synthetic oligonucleotide
caattggtggaggt

SEQ ID NO: 22561 - DNA, 14 bp, Artificial Sequence
  Description of Artificial Sequence: Synthetic oligonucleotide
tcaattggtggagg

SEQ ID NO: 22562 - DNA, 14 bp, Artificial Sequence
  Description of Artificial Sequence: Synthetic oligonucleotide
ttcaattggtggag

SEQ ID NO: 22563 - DNA, 14 bp, Artificial Sequence
  Description of Artificial Sequence: Synthetic oligonucleotide
attcaattggtgga

SEQ ID NO: 22564 - DNA, 14 bp, Artificial Sequence
  Description of Artificial Sequence: Synthetic oligonucleotide
cattcaattggtgg

SEQ ID NO: 22565 - DNA, 14 bp, Artificial Sequence
  Description of Artificial Sequence: Synthetic oligonucleotide
ccattcaattggtg

SEQ ID NO: 22566 - DNA, 14 bp, Artificial Sequence
  Description of Artificial Sequence: Synthetic oligonucleotide
gccattcaattggt

SEQ ID NO: 22567 - DNA, 14 bp, Artificial Sequence
  Description of Artificial Sequence: Synthetic oligonucleotide
tgccattcaattgg

SEQ ID NO: 22568 - DNA, 14 bp, Artificial Sequence
  Description of Artificial Sequence: Synthetic oligonucleotide
atgccattcaattg

SEQ ID NO: 22569 - DNA, 14 bp, Artificial Sequence
  Description of Artificial Sequence: Synthetic oligonucleotide
tatgccattcaatt

SEQ ID NO: 22570 - DNA, 14 bp, Artificial Sequence
  Description of Artificial Sequence: Synthetic oligonucleotide
atatgccattcaat

SEQ ID NO: 22571 - DNA, 14 bp, Artificial Sequence
  Description of Artificial Sequence: Synthetic oligonucleotide
gatatgccattcaa

SEQ ID NO: 22572 - DNA, 14 bp, Artificial Sequence
  Description of Artificial Sequence: Synthetic oligonucleotide
tgatatgccattca

SEQ ID NO: 22573 - DNA, 14 bp, Artificial Sequence
  Description of Artificial Sequence: Synthetic oligonucleotide
ctgatatgccattc

SEQ ID NO: 22574 - DNA, 14 bp, Artificial Sequence
  Description of Artificial Sequence: Synthetic oligonucleotide
gctgatatgccatt

SEQ ID NO: 22575 - DNA, 14 bp, Artificial Sequence
  Description of Artificial Sequence: Synthetic oligonucleotide
tgctgatatgccat

SEQ ID NO: 22576 - DNA, 14 bp, Artificial Sequence
  Description of Artificial Sequence: Synthetic oligonucleotide
ttgctgatatgcca

SEQ ID NO: 22577 - DNA, 14 bp, Artificial Sequence
  Description of Artificial Sequence: Synthetic oligonucleotide
tttgctgatatgcc

SEQ ID NO: 22578 - DNA, 14 bp, Artificial Sequence
  Description of Artificial Sequence: Synthetic oligonucleotide
gtttgctgatatgc

SEQ ID NO: 22579 - DNA, 14 bp, Artificial Sequence
  Description of Artificial Sequence: Synthetic oligonucleotide
ggtttgctgatatg

SEQ ID NO: 22580 - DNA, 14 bp, Artificial Sequence
  Description of Artificial Sequence: Synthetic oligonucleotide
tggtttgctgatat

SEQ ID NO: 22581 - DNA, 14 bp, Artificial Sequence
  Description of Artificial Sequence: Synthetic oligonucleotide
ctggtttgctgata

SEQ ID NO: 22582 - DNA, 14 bp, Artificial Sequence
  Description of Artificial Sequence: Synthetic oligonucleotide
cctggtttgctgat

SEQ ID NO: 22583 - DNA, 14 bp, Artificial Sequence
  Description of Artificial Sequence: Synthetic oligonucleotide
tcctggtttgctga

SEQ ID NO: 22584 - DNA, 14 bp, Artificial Sequence
  Description of Artificial Sequence: Synthetic oligonucleotide
gtcctggtttgctg

SEQ ID NO: 22585 - DNA, 14 bp, Artificial Sequence
  Description of Artificial Sequence: Synthetic oligonucleotide
tgtcctggtttgct

SEQ ID NO: 22586 - DNA, 14 bp, Artificial Sequence
  Description of Artificial Sequence: Synthetic oligonucleotide
ctgtcctggtttgc

SEQ ID NO: 22587 - DNA, 14 bp, Artificial Sequence
  Description of Artificial Sequence: Synthetic oligonucleotide
actgtcctggtttg

SEQ ID NO: 22588 - DNA, 14 bp, Artificial Sequence
  Description of Artificial Sequence: Synthetic oligonucleotide
aactgtcctggttt

SEQ ID NO: 22589 - DNA, 14 bp, Artificial Sequence
  Description of Artificial Sequence: Synthetic oligonucleotide
aaactgtcctggtt

SEQ ID NO: 22590 - DNA, 14 bp, Artificial Sequence
  Description of Artificial Sequence: Synthetic oligonucleotide
caaactgtcctggt

SEQ ID NO: 22591 - DNA, 14 bp, Artificial Sequence
  Description of Artificial Sequence: Synthetic oligonucleotide
tcaaactgtcctgg

SEQ ID NO: 22592 - DNA, 14 bp, Artificial Sequence
  Description of Artificial Sequence: Synthetic oligonucleotide
ttcaaactgtcctg

SEQ ID NO: 22593 - DNA, 14 bp, Artificial Sequence
  Description of Artificial Sequence: Synthetic oligonucleotide
tttcaaactgtcct

SEQ ID NO: 22594 - DNA, 14 bp, Artificial Sequence
  Description of Artificial Sequence: Synthetic oligonucleotide
gtttcaaactgtcc

SEQ ID NO: 22595 - DNA, 14 bp, Artificial Sequence
  Description of Artificial Sequence: Synthetic oligonucleotide
tgtttcaaactgtc

SEQ ID NO: 22596 - DNA, 14 bp, Artificial Sequence
  Description of Artificial Sequence: Synthetic oligonucleotide
atgtttcaaactgt

SEQ ID NO: 22597 - DNA, 14 bp, Artificial Sequence
  Description of Artificial Sequence: Synthetic oligonucleotide
aatgtttcaaactg

SEQ ID NO: 22598 - DNA, 14 bp, Artificial Sequence
  Description of Artificial Sequence: Synthetic oligonucleotide
aaatgtttcaaact

SEQ ID NO: 22599 - DNA, 14 bp, Artificial Sequence
  Description of Artificial Sequence: Synthetic oligonucleotide
caaatgtttcaaac

SEQ ID NO: 22600 - DNA, 14 bp, Artificial Sequence
  Description of Artificial Sequence: Synthetic oligonucleotide
tcaaatgtttcaaa

SEQ ID NO: 22601 - DNA, 14 bp, Artificial Sequence
  Description of Artificial Sequence: Synthetic oligonucleotide
atcaaatgtttcaa

SEQ ID NO: 22602 - DNA, 14 bp, Artificial Sequence
  Description of Artificial Sequence: Synthetic oligonucleotide
gatcaaatgtttca

SEQ ID NO: 22603 - DNA, 14 bp, Artificial Sequence
  Description of Artificial Sequence: Synthetic oligonucleotide
agatcaaatgtttc

SEQ ID NO: 22604 - DNA, 14 bp, Artificial Sequence
  Description of Artificial Sequence: Synthetic oligonucleotide
gagatcaaatgttt

SEQ ID NO: 22605 - DNA, 14 bp, Artificial Sequence
  Description of Artificial Sequence: Synthetic oligonucleotide
tgagatcaaatgtt

SEQ ID NO: 22606 - DNA, 14 bp, Artificial Sequence
  Description of Artificial Sequence: Synthetic oligonucleotide
atgagatcaaatgt

SEQ ID NO: 22607 - DNA, 14 bp, Artificial Sequence
  Description of Artificial Sequence: Synthetic oligonucleotide
catgagatcaaatg

SEQ ID NO: 22608 - DNA, 14 bp, Artificial Sequence
  Description of Artificial Sequence: Synthetic oligonucleotide
tcatgagatcaaat

SEQ ID NO: 22609 - DNA, 14 bp, Artificial Sequence
  Description of Artificial Sequence: Synthetic oligonucleotide
gtcatgagatcaaa

SEQ ID NO: 22610 - DNA, 14 bp, Artificial Sequence
  Description of Artificial Sequence: Synthetic oligonucleotide
tgtcatgagatcaa

SEQ ID NO: 22611 - DNA, 14 bp, Artificial Sequence
  Description of Artificial Sequence: Synthetic oligonucleotide
gtgtcatgagatca

SEQ ID NO: 22612 - DNA, 14 bp, Artificial Sequence
  Description of Artificial Sequence: Synthetic oligonucleotide
agtgtcatgagatc

SEQ ID NO: 22613 - DNA, 14 bp, Artificial Sequence
  Description of Artificial Sequence: Synthetic oligonucleotide
aagtgtcatgagat

SEQ ID NO: 22614 - DNA, 14 bp, Artificial Sequence
  Description of Artificial Sequence: Synthetic oligonucleotide
gaagtgtcatgaga

SEQ ID NO: 22615 - DNA, 14 bp, Artificial Sequence
  Description of Artificial Sequence: Synthetic oligonucleotide
tgaagtgtcatgag

SEQ ID NO: 22616 - DNA, 14 bp, Artificial Sequence
  Description of Artificial Sequence: Synthetic oligonucleotide
atgaagtgtcatga

SEQ ID NO: 22617 - DNA, 14 bp, Artificial Sequence
  Description of Artificial Sequence: Synthetic oligonucleotide
gatgaagtgtcatg

SEQ ID NO: 22618 - DNA, 14 bp, Artificial Sequence
  Description of Artificial Sequence: Synthetic oligonucleotide
ggatgaagtgtcat

SEQ ID NO: 22619 - DNA, 14 bp, Artificial Sequence
  Description of Artificial Sequence: Synthetic oligonucleotide
tggatgaagtgtca

SEQ ID NO: 22620 - DNA, 14 bp, Artificial Sequence
  Description of Artificial Sequence: Synthetic oligonucleotide
ttggatgaagtgtc

SEQ ID NO: 22621 - DNA, 14 bp, Artificial Sequence
  Description of Artificial Sequence: Synthetic oligonucleotide
attggatgaagtgt

SEQ ID NO: 22622 - DNA, 14 bp, Artificial Sequence
  Description of Artificial Sequence: Synthetic oligonucleotide
tattggatgaagtg

SEQ ID NO: 22623 - DNA, 14 bp, Artificial Sequence
  Description of Artificial Sequence: Synthetic oligonucleotide
ctattggatgaagt

SEQ ID NO: 22624 - DNA, 14 bp, Artificial Sequence
  Description of Artificial Sequence: Synthetic oligonucleotide
tctattggatgaag

SEQ ID NO: 22625 - DNA, 14 bp, Artificial Sequence
  Description of Artificial Sequence: Synthetic oligonucleotide
ttctattggatgaa

SEQ ID NO: 22626 - DNA, 14 bp, Artificial Sequence
  Description of Artificial Sequence: Synthetic oligonucleotide
tttctattggatga

SEQ ID NO: 22627 - DNA, 14 bp, Artificial Sequence
  Description of Artificial Sequence: Synthetic oligonucleotide
atttctattggatg

SEQ ID NO: 22628 - DNA, 14 bp, Artificial Sequence
  Description of Artificial Sequence: Synthetic oligonucleotide
aatttctattggat

SEQ ID NO: 22629 - DNA, 14 bp, Artificial Sequence
  Description of Artificial Sequence: Synthetic oligonucleotide
caatttctattgga

SEQ ID NO: 22630 - DNA, 14 bp, Artificial Sequence
  Description of Artificial Sequence: Synthetic oligonucleotide
gcaatttctattgg

SEQ ID NO: 22631 - DNA, 14 bp, Artificial Sequence
  Description of Artificial Sequence: Synthetic oligonucleotide
tgcaatttctattg

SEQ ID NO: 22632 - DNA, 14 bp, Artificial Sequence
  Description of Artificial Sequence: Synthetic oligonucleotide
gtgcaatttctatt

SEQ ID NO: 22633 - DNA, 14 bp, Artificial Sequence
  Description of Artificial Sequence: Synthetic oligonucleotide
cgtgcaatttctat

SEQ ID NO: 22634 - DNA, 14 bp, Artificial Sequence
  Description of Artificial Sequence: Synthetic oligonucleotide
acgtgcaatttcta

SEQ ID NO: 22635 - DNA, 14 bp, Artificial Sequence
  Description of Artificial Sequence: Synthetic oligonucleotide
gacgtgcaatttct

SEQ ID NO: 22636 - DNA, 14 bp, Artificial Sequence
  Description of Artificial Sequence: Synthetic oligonucleotide
tgacgtgcaatttc

SEQ ID NO: 22637 - DNA, 14 bp, Artificial Sequence
  Description of Artificial Sequence: Synthetic oligonucleotide
ctgacgtgcaattt

SEQ ID NO: 22638 - DNA, 14 bp, Artificial Sequence
  Description of Artificial Sequence: Synthetic oligonucleotide
gctgacgtgcaatt

SEQ ID NO: 22639 - DNA, 14 bp, Artificial Sequence
  Description of Artificial Sequence: Synthetic oligonucleotide
agctgacgtgcaat

SEQ ID NO: 22640 - DNA, 14 bp, Artificial Sequence
  Description of Artificial Sequence: Synthetic oligonucleotide
cagctgacgtgcaa

SEQ ID NO: 22641 - DNA, 14 bp, Artificial Sequence
  Description of Artificial Sequence: Synthetic oligonucleotide
tcagctgacgtgca

SEQ ID NO: 22642 - DNA, 14 bp, Artificial Sequence
  Description of Artificial Sequence: Synthetic oligonucleotide
gtcagctgacgtgc

SEQ ID NO: 22643 - DNA, 14 bp, Artificial Sequence
  Description of Artificial Sequence: Synthetic oligonucleotide
tgtcagctgacgtg

SEQ ID NO: 22644 - DNA, 14 bp, Artificial Sequence
  Description of Artificial Sequence: Synthetic oligonucleotide
gtgtcagctgacgt

SEQ ID NO: 22645 - DNA, 14 bp, Artificial Sequence
  Description of Artificial Sequence: Synthetic oligonucleotide
agtgtcagctgacg

SEQ ID NO: 22646 - DNA, 14 bp, Artificial Sequence
  Description of Artificial Sequence: Synthetic oligonucleotide
aagtgtcagctgac

SEQ ID NO: 22647 - DNA, 14 bp, Artificial Sequence
  Description of Artificial Sequence: Synthetic oligonucleotide
aaagtgtcagctga

SEQ ID NO: 22648 - DNA, 14 bp, Artificial Sequence
  Description of Artificial Sequence: Synthetic oligonucleotide
aaaagtgtcagctg

SEQ ID NO: 22649 - DNA, 14 bp, Artificial Sequence
  Description of Artificial Sequence: Synthetic oligonucleotide
caaaagtgtcagct

SEQ ID NO: 22650 - DNA, 14 bp, Artificial Sequence
  Description of Artificial Sequence: Synthetic oligonucleotide
ccaaaagtgtcagc

SEQ ID NO: 22651 - DNA, 14 bp, Artificial Sequence
  Description of Artificial Sequence: Synthetic oligonucleotide
tccaaaagtgtcag

SEQ ID NO: 22652 - DNA, 14 bp, Artificial Sequence
  Description of Artificial Sequence: Synthetic oligonucleotide
ctccaaaagtgtca

SEQ ID NO: 22653 - DNA, 14 bp, Artificial Sequence
  Description of Artificial Sequence: Synthetic oligonucleotide
actccaaaagtgtc

SEQ ID NO: 22654 - DNA, 14 bp, Artificial Sequence
  Description of Artificial Sequence: Synthetic oligonucleotide
gactccaaaagtgt

SEQ ID NO: 22655 - DNA, 14 bp, Artificial Sequence
  Description of Artificial Sequence: Synthetic oligonucleotide
agactccaaaagtg

SEQ ID NO: 22656 - DNA, 14 bp, Artificial Sequence
  Description of Artificial Sequence: Synthetic oligonucleotide
cagactccaaaagt

SEQ ID NO: 22657 - DNA, 14 bp, Artificial Sequence
  Description of Artificial Sequence: Synthetic oligonucleotide
tcagactccaaaag

SEQ ID NO: 22658 - DNA, 14 bp, Artificial Sequence
  Description of Artificial Sequence: Synthetic oligonucleotide
atcagactccaaaa

SEQ ID NO: 22659 - DNA, 14 bp, Artificial Sequence
  Description of Artificial Sequence: Synthetic oligonucleotide
gatcagactccaaa

SEQ ID NO: 22660 - DNA, 14 bp, Artificial Sequence
  Description of Artificial Sequence: Synthetic oligonucleotide
agatcagactccaa

SEQ ID NO: 22661 - DNA, 14 bp, Artificial Sequence
  Description of Artificial Sequence: Synthetic oligonucleotide
aagatcagactcca

SEQ ID NO: 22662 - DNA, 14 bp, Artificial Sequence
  Description of Artificial Sequence: Synthetic oligonucleotide
aaagatcagactcc

SEQ ID NO: 22663 - DNA, 14 bp, Artificial Sequence
  Description of Artificial Sequence: Synthetic oligonucleotide
taaagatcagactc

SEQ ID NO: 22664 - DNA, 14 bp, Artificial Sequence
  Description of Artificial Sequence: Synthetic oligonucleotide
gtaaagatcagact

SEQ ID NO: 22665 - DNA, 14 bp, Artificial Sequence
  Description of Artificial Sequence: Synthetic oligonucleotide
tgtaaagatcagac

SEQ ID NO: 22666 - DNA, 14 bp, Artificial Sequence
  Description of Artificial Sequence: Synthetic oligonucleotide
ctgtaaagatcaga

SEQ ID NO: 22667 - DNA, 14 bp, Artificial Sequence
  Description of Artificial Sequence: Synthetic oligonucleotide
cctgtaaagatcag

SEQ ID NO: 22668 - DNA, 14 bp, Artificial Sequence
  Description of Artificial Sequence: Synthetic oligonucleotide
tcctgtaaagatca

SEQ ID NO: 22669 - DNA, 14 bp, Artificial Sequence
  Description of Artificial Sequence: Synthetic oligonucleotide
ttcctgtaaagatc

SEQ ID NO: 22670 - DNA, 14 bp, Artificial Sequence
  Description of Artificial Sequence: Synthetic oligonucleotide
tttcctgtaaagat

SEQ ID NO: 22671 - DNA, 14 bp, Artificial Sequence
  Description of Artificial Sequence: Synthetic oligonucleotide
ctttcctgtaaaga

SEQ ID NO: 22672 - DNA, 14 bp, Artificial Sequence
  Description of Artificial Sequence: Synthetic oligonucleotide
actttcctgtaaag

SEQ ID NO: 22673 - DNA, 14 bp, Artificial Sequence
  Description of Artificial Sequence: Synthetic oligonucleotide
aactttcctgtaaa

SEQ ID NO: 22674 - DNA, 14 bp, Artificial Sequence
  Description of Artificial Sequence: Synthetic oligonucleotide
gaactttcctgtaa

SEQ ID NO: 22675 - DNA, 14 bp, Artificial Sequence
  Description of Artificial Sequence: Synthetic oligonucleotide
tgaactttcctgta

SEQ ID NO: 22676 - DNA, 14 bp, Artificial Sequence
  Description of Artificial Sequence: Synthetic oligonucleotide
ttgaactttcctgt

SEQ ID NO: 22677 - DNA, 14 bp, Artificial Sequence
  Description of Artificial Sequence: Synthetic oligonucleotide
gttgaactttcctg

SEQ ID NO: 22678 - DNA, 14 bp, Artificial Sequence
  Description of Artificial Sequence: Synthetic oligonucleotide
ggttgaactttcct

SEQ ID NO: 22679 - DNA, 14 bp, Artificial Sequence
  Description of Artificial Sequence: Synthetic oligonucleotide
cggttgaactttcc

SEQ ID NO: 22680 - DNA, 14 bp, Artificial Sequence
  Description of Artificial Sequence: Synthetic oligonucleotide
acggttgaactttc

SEQ ID NO: 22681 - DNA, 14 bp, Artificial Sequence
  Description of Artificial Sequence: Synthetic oligonucleotide
gacggttgaacttt

SEQ ID NO: 22682 - DNA, 14 bp, Artificial Sequence
  Description of Artificial Sequence: Synthetic oligonucleotide
agacggttgaactt

SEQ ID NO: 22683 - DNA, 14 bp, Artificial Sequence
  Description of Artificial Sequence: Synthetic oligonucleotide
cagacggttgaact

SEQ ID NO: 22684 - DNA, 14 bp, Artificial Sequence
  Description of Artificial Sequence: Synthetic oligonucleotide
tcagacggttgaac

SEQ ID NO: 22685 - DNA, 14 bp, Artificial Sequence
  Description of Artificial Sequence: Synthetic oligonucleotide
ttcagacggttgaa

SEQ ID NO: 22686 - DNA, 14 bp, Artificial Sequence
  Description of Artificial Sequence: Synthetic oligonucleotide
gttcagacggttga

SEQ ID NO: 22687 - DNA, 14 bp, Artificial Sequence
  Description of Artificial Sequence: Synthetic oligonucleotide
agttcagacggttg

SEQ ID NO: 22688 - DNA, 14 bp, Artificial Sequence
  Description of Artificial Sequence: Synthetic oligonucleotide
aagttcagacggtt

SEQ ID NO: 22689 - DNA, 14 bp, Artificial Sequence
  Description of Artificial Sequence: Synthetic oligonucleotide
caagttcagacggt

SEQ ID NO: 22690 - DNA, 14 bp, Artificial Sequence
  Description of Artificial Sequence: Synthetic oligonucleotide
acaagttcagacgg

SEQ ID NO: 22691 - DNA, 14 bp, Artificial Sequence
  Description of Artificial Sequence: Synthetic oligonucleotide
tacaagttcagacg

SEQ ID NO: 22692 - DNA, 14 bp, Artificial Sequence
  Description of Artificial Sequence: Synthetic oligonucleotide
ctacaagttcagac

SEQ ID NO: 22693 - DNA, 14 bp, Artificial Sequence
  Description of Artificial Sequence: Synthetic oligonucleotide
cctacaagttcaga

SEQ ID NO: 22694 - DNA, 14 bp, Artificial Sequence
  Description of Artificial Sequence: Synthetic oligonucleotide
ccctacaagttcag

SEQ ID NO: 22695 - DNA, 14 bp, Artificial Sequence
  Description of Artificial Sequence: Synthetic oligonucleotide
tccctacaagttca

SEQ ID NO: 22696 - DNA, 14 bp, Artificial Sequence
  Description of Artificial Sequence: Synthetic oligonucleotide
ctccctacaagttc

SEQ ID NO: 22697 - DNA, 14 bp, Artificial Sequence
  Description of Artificial Sequence: Synthetic oligonucleotide
actccctacaagtt

SEQ ID NO: 22698 - DNA, 14 bp, Artificial Sequence
  Description of Artificial Sequence: Synthetic oligonucleotide
cactccctacaagt

SEQ ID NO: 22699 - DNA, 14 bp, Artificial Sequence
  Description of Artificial Sequence: Synthetic oligonucleotide
acactccctacaag

SEQ ID NO: 22700 - DNA, 14 bp, Artificial Sequence
  Description of Artificial Sequence: Synthetic oligonucleotide
cacactccctacaa

SEQ ID NO: 22701 - DNA, 14 bp, Artificial Sequence
  Description of Artificial Sequence: Synthetic oligonucleotide
acacactccctaca

SEQ ID NO: 22702 - DNA, 14 bp, Artificial Sequence
  Description of Artificial Sequence: Synthetic oligonucleotide
cacacactccctac

SEQ ID NO: 22703 - DNA, 14 bp, Artificial Sequence
  Description of Artificial Sequence: Synthetic oligonucleotide
ccacacactcccta

SEQ ID NO: 22704 - DNA, 14 bp, Artificial Sequence
  Description of Artificial Sequence: Synthetic oligonucleotide
tccacacactccct

SEQ ID NO: 22705 - DNA, 14 bp, Artificial Sequence
  Description of Artificial Sequence: Synthetic oligonucleotide
gtccacacactccc

SEQ ID NO: 22706 - DNA, 14 bp, Artificial Sequence
  Description of Artificial Sequence: Synthetic oligonucleotide
ggtccacacactcc

SEQ ID NO: 22707 - DNA, 14 bp, Artificial Sequence
  Description of Artificial Sequence: Synthetic oligonucleotide
tggtccacacactc

SEQ ID NO: 22708 - DNA, 14 bp, Artificial Sequence
  Description of Artificial Sequence: Synthetic oligonucleotide
ttggtccacacact

SEQ ID NO: 22709 - DNA, 14 bp, Artificial Sequence
  Description of Artificial Sequence: Synthetic oligonucleotide
tttggtccacacac

SEQ ID NO: 22710 - DNA, 14 bp, Artificial Sequence
  Description of Artificial Sequence: Synthetic oligonucleotide
ctttggtccacaca

SEQ ID NO: 22711 - DNA, 14 bp, Artificial Sequence
  Description of Artificial Sequence: Synthetic oligonucleotide
tctttggtccacac

SEQ ID NO: 22712 - DNA, 14 bp, Artificial Sequence
  Description of Artificial Sequence: Synthetic oligonucleotide
ttctttggtccaca

SEQ ID NO: 22713 - DNA, 14 bp, Artificial Sequence
  Description of Artificial Sequence: Synthetic oligonucleotide
cttctttggtccac

SEQ ID NO: 22714 - DNA, 14 bp, Artificial Sequence
  Description of Artificial Sequence: Synthetic oligonucleotide
tcttctttggtcca

SEQ ID NO: 22715 - DNA, 14 bp, Artificial Sequence
  Description of Artificial Sequence: Synthetic oligonucleotide
atcttctttggtcc

SEQ ID NO: 22716 - DNA, 14 bp, Artificial Sequence
  Description of Artificial Sequence: Synthetic oligonucleotide
tatcttctttggtc

SEQ ID NO: 22717 - DNA, 14 bp, Artificial Sequence
  Description of Artificial Sequence: Synthetic oligonucleotide
ttatcttctttggt

SEQ ID NO: 22718 - DNA, 14 bp, Artificial Sequence
  Description of Artificial Sequence: Synthetic oligonucleotide
tttatcttctttgg

SEQ ID NO: 22719 - DNA, 14 bp, Artificial Sequence
  Description of Artificial Sequence: Synthetic oligonucleotide
ctttatcttctttg

SEQ ID NO: 22720 - DNA, 14 bp, Artificial Sequence
  Description of Artificial Sequence: Synthetic oligonucleotide
tctttatcttcttt

SEQ ID NO: 22721 - DNA, 14 bp, Artificial Sequence
  Description of Artificial Sequence: Synthetic oligonucleotide
ttctttatcttctt

SEQ ID NO: 22722 - DNA, 14 bp, Artificial Sequence
  Description of Artificial Sequence: Synthetic oligonucleotide
tttctttatcttct

SEQ ID NO: 22723 - DNA, 14 bp, Artificial Sequence
  Description of Artificial Sequence: Synthetic oligonucleotide
atttctttatcttc

SEQ ID NO: 22724 - DNA, 14 bp, Artificial Sequence
  Description of Artificial Sequence: Synthetic oligonucleotide
tatttctttatctt

SEQ ID NO: 22725 - DNA, 14 bp, Artificial Sequence
  Description of Artificial Sequence: Synthetic oligonucleotide
ttatttctttatct

SEQ ID NO: 22726 - DNA, 14 bp, Artificial Sequence
  Description of Artificial Sequence: Synthetic oligonucleotide
tttatttctttatc

SEQ ID NO: 22727 - DNA, 14 bp, Artificial Sequence
  Description of Artificial Sequence: Synthetic oligonucleotide
atttatttctttat

SEQ ID NO: 22728 - DNA, 14 bp, Artificial Sequence
  Description of Artificial Sequence: Synthetic oligonucleotide
aatttatttcttta

SEQ ID NO: 22729 - DNA, 14 bp, Artificial Sequence
  Description of Artificial Sequence: Synthetic oligonucleotide
gaatttatttcttt

SEQ ID NO: 22730 - DNA, 14 bp, Artificial Sequence
  Description of Artificial Sequence: Synthetic oligonucleotide
agaatttatttctt

SEQ ID NO: 22731 - DNA, 14 bp, Artificial Sequence
  Description of Artificial Sequence: Synthetic oligonucleotide
gagaatttatttct

SEQ ID NO: 22732 - DNA, 14 bp, Artificial Sequence
  Description of Artificial Sequence: Synthetic oligonucleotide
ggagaatttatttc

SEQ ID NO: 22733 - DNA, 14 bp, Artificial Sequence
  Description of Artificial Sequence: Synthetic oligonucleotide
tggagaatttattt

SEQ ID NO: 22734 - DNA, 14 bp, Artificial Sequence
  Description of Artificial Sequence: Synthetic oligonucleotide
ttggagaatttatt

SEQ ID NO: 22735 - DNA, 14 bp, Artificial Sequence
  Description of Artificial Sequence: Synthetic oligonucleotide
tttggagaatttat

SEQ ID NO: 22736 - DNA, 14 bp, Artificial Sequence
  Description of Artificial Sequence: Synthetic oligonucleotide
atttggagaattta

SEQ ID NO: 22737 - DNA, 14 bp, Artificial Sequence
  Description of Artificial Sequence: Synthetic oligonucleotide
aatttggagaattt

SEQ ID NO: 22738 - DNA, 14 bp, Artificial Sequence
  Description of Artificial Sequence: Synthetic oligonucleotide
aaatttggagaatt

SEQ ID NO: 22739 - DNA, 14 bp, Artificial Sequence
  Description of Artificial Sequence: Synthetic oligonucleotide
taaatttggagaat

SEQ ID NO: 22740 - DNA, 14 bp, Artificial Sequence
  Description of Artificial Sequence: Synthetic oligonucleotide
ataaatttggagaa

SEQ ID NO: 22741 - DNA, 14 bp, Artificial Sequence
  Description of Artificial Sequence: Synthetic oligonucleotide
aataaatttggaga

SEQ ID NO: 22742 - DNA, 14 bp, Artificial Sequence
  Description of Artificial Sequence: Synthetic oligonucleotide
taataaatttggag

SEQ ID NO: 22743 - DNA, 14 bp, Artificial Sequence
  Description of Artificial Sequence: Synthetic oligonucleotide
ttaataaatttgga

SEQ ID NO: 22744 - DNA, 14 bp, Artificial Sequence
  Description of Artificial Sequence: Synthetic oligonucleotide
tttaataaatttgg

SEQ ID NO: 22745 - DNA, 14 bp, Artificial Sequence
  Description of Artificial Sequence: Synthetic oligonucleotide
ttttaataaatttg

SEQ ID NO: 22746 - DNA, 14 bp, Artificial Sequence
  Description of Artificial Sequence: Synthetic oligonucleotide
tttttaataaattt

SEQ ID NO: 22747 - DNA, 14 bp, Artificial Sequence
  Description of Artificial Sequence: Synthetic oligonucleotide
atttttaataaatt

SEQ ID NO: 22748 - DNA, 14 bp, Artificial Sequence
  Description of Artificial Sequence: Synthetic oligonucleotide
catttttaataaat

SEQ ID NO: 22749 - DNA, 14 bp, Artificial Sequence
  Description of Artificial Sequence: Synthetic oligonucleotide
tcatttttaataaa

SEQ ID NO: 22750 - DNA, 14 bp, Artificial Sequence
  Description of Artificial Sequence: Synthetic oligonucleotide
atcatttttaataa

SEQ ID NO: 22751 - DNA, 14 bp, Artificial Sequence
  Description of Artificial Sequence: Synthetic oligonucleotide
aatcatttttaata

SEQ ID NO: 22752 - DNA, 14 bp, Artificial Sequence
  Description of Artificial Sequence: Synthetic oligonucleotide
gaatcatttttaat

SEQ ID NO: 22753 - DNA, 14 bp, Artificial Sequence
  Description of Artificial Sequence: Synthetic oligonucleotide
cgaatcatttttaa

SEQ ID NO: 22754 - DNA, 14 bp, Artificial Sequence
  Description of Artificial Sequence: Synthetic oligonucleotide
gcgaatcattttta

SEQ ID NO: 22755 - DNA, 14 bp, Artificial Sequence
  Description of Artificial Sequence: Synthetic oligonucleotide
ggcgaatcattttt

SEQ ID NO: 22756 - DNA, 14 bp, Artificial Sequence
  Description of Artificial Sequence: Synthetic oligonucleotide
tggcgaatcatttt

SEQ ID NO: 22757 - DNA, 14 bp, Artificial Sequence
  Description of Artificial Sequence: Synthetic oligonucleotide
atggcgaatcattt

SEQ ID NO: 22758 - DNA, 14 bp, Artificial Sequence
  Description of Artificial Sequence: Synthetic oligonucleotide
tatggcgaatcatt

SEQ ID NO: 22759 - DNA, 14 bp, Artificial Sequence
  Description of Artificial Sequence: Synthetic oligonucleotide
gtatggcgaatcat

SEQ ID NO: 22760 - DNA, 14 bp, Artificial Sequence
  Description of Artificial Sequence: Synthetic oligonucleotide
ggtatggcgaatca

SEQ ID NO: 22761 - DNA, 14 bp, Artificial Sequence
  Description of Artificial Sequence: Synthetic oligonucleotide
tggtatggcgaatc

SEQ ID NO: 22762 - DNA, 14 bp, Artificial Sequence
  Description of Artificial Sequence: Synthetic oligonucleotide
gtggtatggcgaat

SEQ ID NO: 22763 - DNA, 14 bp, Artificial Sequence
  Description of Artificial Sequence: Synthetic oligonucleotide
tgtggtatggcgaa

SEQ ID NO: 22764 - DNA, 14 bp, Artificial Sequence
  Description of Artificial Sequence: Synthetic oligonucleotide
ttgtggtatggcga

SEQ ID NO: 22765 - DNA, 14 bp, Artificial Sequence
  Description of Artificial Sequence: Synthetic oligonucleotide
tttgtggtatggcg

SEQ ID NO: 22766 - DNA, 14 bp, Artificial Sequence
  Description of Artificial Sequence: Synthetic oligonucleotide
atttgtggtatggc

SEQ ID NO: 22767 - DNA, 14 bp, Artificial Sequence
  Description of Artificial Sequence: Synthetic oligonucleotide
gatttgtggtatgg

SEQ ID NO: 22768 - DNA, 14 bp, Artificial Sequence
  Description of Artificial Sequence: Synthetic oligonucleotide
agatttgtggtatg

SEQ ID NO: 22769 - DNA, 14 bp, Artificial Sequence
  Description of Artificial Sequence: Synthetic oligonucleotide
gagatttgtggtat

SEQ ID NO: 22770 - DNA, 14 bp, Artificial Sequence
  Description of Artificial Sequence: Synthetic oligonucleotide
tgagatttgtggta

SEQ ID NO: 22771 - DNA, 14 bp, Artificial Sequence
  Description of Artificial Sequence: Synthetic oligonucleotide
gtgagatttgtggt

SEQ ID NO: 22772 - DNA, 14 bp, Artificial Sequence
  Description of Artificial Sequence: Synthetic oligonucleotide
ggtgagatttgtgg

SEQ ID NO: 22773 - DNA, 14 bp, Artificial Sequence
  Description of Artificial Sequence: Synthetic oligonucleotide
gggtgagatttgtg

SEQ ID NO: 22774 - DNA, 14 bp, Artificial Sequence
  Description of Artificial Sequence: Synthetic oligonucleotide
agggtgagatttgt

SEQ ID NO: 22775 - DNA, 14 bp, Artificial Sequence
  Description of Artificial Sequence: Synthetic oligonucleotide
gagggtgagatttg

SEQ ID NO: 22776 - DNA, 14 bp, Artificial Sequence
  Description of Artificial Sequence: Synthetic oligonucleotide
agagggtgagattt

SEQ ID NO: 22777 - DNA, 14 bp, Artificial Sequence
  Description of Artificial Sequence: Synthetic oligonucleotide
cagagggtgagatt

SEQ ID NO: 22778 - DNA, 14 bp, Artificial Sequence
  Description of Artificial Sequence: Synthetic oligonucleotide
ccagagggtgagat

SEQ ID NO: 22779 - DNA, 14 bp, Artificial Sequence
  Description of Artificial Sequence: Synthetic oligonucleotide
accagagggtgaga

SEQ ID NO: 22780 - DNA, 14 bp, Artificial Sequence
  Description of Artificial Sequence: Synthetic oligonucleotide
aaccagagggtgag

SEQ ID NO: 22781 - DNA, 14 bp, Artificial Sequence
  Description of Artificial Sequence: Synthetic oligonucleotide
aaaccagagggtga

SEQ ID NO: 22782 - DNA, 14 bp, Artificial Sequence
  Description of Artificial Sequence: Synthetic oligonucleotide
caaaccagagggtg

SEQ ID NO: 22783 - DNA, 14 bp, Artificial Sequence
  Description of Artificial Sequence: Synthetic oligonucleotide
tcaaaccagagggt

SEQ ID NO: 22784 - DNA, 14 bp, Artificial Sequence
  Description of Artificial Sequence: Synthetic oligonucleotide
ttcaaaccagaggg

SEQ ID NO: 22785 - DNA, 14 bp, Artificial Sequence
  Description of Artificial Sequence: Synthetic oligonucleotide
tttcaaaccagagg

SEQ ID NO: 22786 - DNA, 14 bp, Artificial Sequence
  Description of Artificial Sequence: Synthetic oligonucleotide
ttttcaaaccagag

SEQ ID NO: 22787 - DNA, 14 bp, Artificial Sequence
  Description of Artificial Sequence: Synthetic oligonucleotide
tttttcaaaccaga

SEQ ID NO: 22788 - DNA, 14 bp, Artificial Sequence
  Description of Artificial Sequence: Synthetic oligonucleotide
atttttcaaaccag

SEQ ID NO: 22789 - DNA, 14 bp, Artificial Sequence
  Description of Artificial Sequence: Synthetic oligonucleotide
catttttcaaacca

SEQ ID NO: 22790 - DNA, 14 bp, Artificial Sequence
  Description of Artificial Sequence: Synthetic oligonucleotide
gcatttttcaaacc

SEQ ID NO: 22791 - DNA, 14 bp, Artificial Sequence
  Description of Artificial Sequence: Synthetic oligonucleotide
tgcatttttcaaac

SEQ ID NO: 22792 - DNA, 14 bp, Artificial Sequence
  Description of Artificial Sequence: Synthetic oligonucleotide
atgcatttttcaaa

SEQ ID NO: 22793 - DNA, 14 bp, Artificial Sequence
  Description of Artificial Sequence: Synthetic oligonucleotide
aatgcatttttcaa

SEQ ID NO: 22794 - DNA, 14 bp, Artificial Sequence
  Description of Artificial Sequence: Synthetic oligonucleotide
caatgcatttttca

SEQ ID NO: 22795 - DNA, 14 bp, Artificial Sequence
  Description of Artificial Sequence: Synthetic oligonucleotide
acaatgcatttttc

SEQ ID NO: 22796 - DNA, 14 bp, Artificial Sequence
  Description of Artificial Sequence: Synthetic oligonucleotide
cacaatgcattttt

SEQ ID NO: 22797 - DNA, 14 bp, Artificial Sequence
  Description of Artificial Sequence: Synthetic oligonucleotide
ccacaatgcatttt

SEQ ID NO: 22798 - DNA, 14 bp, Artificial Sequence
  Description of Artificial Sequence: Synthetic oligonucleotide
tccacaatgcattt

SEQ ID NO: 22799 - DNA, 14 bp, Artificial Sequence
  Description of Artificial Sequence: Synthetic oligonucleotide
ttccacaatgcatt

SEQ ID NO: 22800 - DNA, 14 bp, Artificial Sequence
  Description of Artificial Sequence: Synthetic oligonucleotide
cttccacaatgcat

SEQ ID NO: 22801 - DNA, 14 bp, Artificial Sequence
  Description of Artificial Sequence: Synthetic oligonucleotide
gcttccacaatgca

SEQ ID NO: 22802 - DNA, 14 bp, Artificial Sequence
  Description of Artificial Sequence: Synthetic oligonucleotide
tgcttccacaatgc

SEQ ID NO: 22803 - DNA, 14 bp, Artificial Sequence
  Description of Artificial Sequence: Synthetic oligonucleotide
ctgcttccacaatg

SEQ ID NO: 22804 - DNA, 14 bp, Artificial Sequence
  Description of Artificial Sequence: Synthetic oligonucleotide
tctgcttccacaat

SEQ ID NO: 22805 - DNA, 14 bp, Artificial Sequence
  Description of Artificial Sequence: Synthetic oligonucleotide
ttctgcttccacaa

SEQ ID NO: 22806 - DNA, 14 bp, Artificial Sequence
  Description of Artificial Sequence: Synthetic oligonucleotide
tttctgcttccaca

SEQ ID NO: 22807 - DNA, 14 bp, Artificial Sequence
  Description of Artificial Sequence: Synthetic oligonucleotide
ttttctgcttccac

SEQ ID NO: 22808 - DNA, 14 bp, Artificial Sequence
  Description of Artificial Sequence: Synthetic oligonucleotide
attttctgcttcca

SEQ ID NO: 22809 - DNA, 14 bp, Artificial Sequence
  Description of Artificial Sequence: Synthetic oligonucleotide
aattttctgcttcc

SEQ ID NO: 22810 - DNA, 14 bp, Artificial Sequence
  Description of Artificial Sequence: Synthetic oligonucleotide
aaattttctgcttc

SEQ ID NO: 22811 - DNA, 14 bp, Artificial Sequence
  Description of Artificial Sequence: Synthetic oligonucleotide
aaaattttctgctt

SEQ ID NO: 22812 - DNA, 14 bp, Artificial Sequence
  Description of Artificial Sequence: Synthetic oligonucleotide
caaaattttctgct

SEQ ID NO: 22813 - DNA, 14 bp, Artificial Sequence
  Description of Artificial Sequence: Synthetic oligonucleotide
tcaaaattttctgc

SEQ ID NO: 22814 - DNA, 14 bp, Artificial Sequence
  Description of Artificial Sequence: Synthetic oligonucleotide
ttcaaaattttctg

SEQ ID NO: 22815 - DNA, 14 bp, Artificial Sequence
  Description of Artificial Sequence: Synthetic oligonucleotide
cttcaaaattttct

SEQ ID NO: 22816 - DNA, 14 bp, Artificial Sequence
  Description of Artificial Sequence: Synthetic oligonucleotide
tcttcaaaattttc

SEQ ID NO: 22817 - DNA, 14 bp, Artificial Sequence
  Description of Artificial Sequence: Synthetic oligonucleotide
ttcttcaaaatttt

SEQ ID NO: 22818 - DNA, 14 bp, Artificial Sequence
  Description of Artificial Sequence: Synthetic oligonucleotide
gttcttcaaaattt

SEQ ID NO: 22819 - DNA, 14 bp, Artificial Sequence
  Description of Artificial Sequence: Synthetic oligonucleotide
cgttcttcaaaatt

SEQ ID NO: 22820 - DNA, 14 bp, Artificial Sequence
  Description of Artificial Sequence: Synthetic oligonucleotide
ccgttcttcaaaat

SEQ ID NO: 22821 - DNA, 14 bp, Artificial Sequence
  Description of Artificial Sequence: Synthetic oligonucleotide
cccgttcttcaaaa

SEQ ID NO: 22822 - DNA, 14 bp, Artificial Sequence
  Description of Artificial Sequence: Synthetic oligonucleotide
acccgttcttcaaa

SEQ ID NO: 22823 - DNA, 14 bp, Artificial Sequence
  Description of Artificial Sequence: Synthetic oligonucleotide
cacccgttcttcaa

SEQ ID NO: 22824 - DNA, 14 bp, Artificial Sequence
  Description of Artificial Sequence: Synthetic oligonucleotide
ccacccgttcttca

SEQ ID NO: 22825 - DNA, 14 bp, Artificial Sequence
  Description of Artificial Sequence: Synthetic oligonucleotide
gccacccgttcttc

SEQ ID NO: 22826 - DNA, 14 bp, Artificial Sequence
  Description of Artificial Sequence: Synthetic oligonucleotide
tgccacccgttctt

SEQ ID NO: 22827 - DNA, 14 bp, Artificial Sequence
  Description of Artificial Sequence: Synthetic oligonucleotide
ctgccacccgttct

SEQ ID NO: 22828 - DNA, 14 bp, Artificial Sequence
  Description of Artificial Sequence: Synthetic oligonucleotide
actgccacccgttc

SEQ ID NO: 22829 - DNA, 14 bp, Artificial Sequence
  Description of Artificial Sequence: Synthetic oligonucleotide
tactgccacccgtt

SEQ ID NO: 22830 - DNA, 14 bp, Artificial Sequence
  Description of Artificial Sequence: Synthetic oligonucleotide
gtactgccacccgt

SEQ ID NO: 22831 - DNA, 14 bp, Artificial Sequence
  Description of Artificial Sequence: Synthetic oligonucleotide
agtactgccacccg

SEQ ID NO: 22832 - DNA, 14 bp, Artificial Sequence
  Description of Artificial Sequence: Synthetic oligonucleotide
tagtactgccaccc

SEQ ID NO: 22833 - DNA, 14 bp, Artificial Sequence
  Description of Artificial Sequence: Synthetic oligonucleotide
ttagtactgccacc

SEQ ID NO: 22834 - DNA, 14 bp, Artificial Sequence
  Description of Artificial Sequence: Synthetic oligonucleotide
cttagtactgccac

SEQ ID NO: 22835 - DNA, 14 bp, Artificial Sequence
  Description of Artificial Sequence: Synthetic oligonucleotide
acttagtactgcca

SEQ ID NO: 22836 - DNA, 14 bp, Artificial Sequence
  Description of Artificial Sequence: Synthetic oligonucleotide
tacttagtactgcc

SEQ ID NO: 22837 - DNA, 14 bp, Artificial Sequence
  Description of Artificial Sequence: Synthetic oligonucleotide
ctacttagtactgc

SEQ ID NO: 22838 - DNA, 14 bp, Artificial Sequence
  Description of Artificial Sequence: Synthetic oligonucleotide
tctacttagtactg

SEQ ID NO: 22839 - DNA, 14 bp, Artificial Sequence
  Description of Artificial Sequence: Synthetic oligonucleotide
ttctacttagtact

SEQ ID NO: 22840 - DNA, 14 bp, Artificial Sequence
  Description of Artificial Sequence: Synthetic oligonucleotide
attctacttagtac

SEQ ID NO: 22841 - DNA, 14 bp, Artificial Sequence
  Description of Artificial Sequence: Synthetic oligonucleotide
aattctacttagta

SEQ ID NO: 22842 - DNA, 14 bp, Artificial Sequence
  Description of Artificial Sequence: Synthetic oligonucleotide
taattctacttagt

SEQ ID NO: 22843 - DNA, 14 bp, Artificial Sequence
  Description of Artificial Sequence: Synthetic oligonucleotide
ataattctacttag

SEQ ID NO: 22844 - DNA, 14 bp, Artificial Sequence
  Description of Artificial Sequence: Synthetic oligonucleotide
tataattctactta

SEQ ID NO: 22845 - DNA, 14 bp, Artificial Sequence
  Description of Artificial Sequence: Synthetic oligonucleotide
ctataattctactt

SEQ ID NO: 22846 - DNA, 14 bp, Artificial Sequence
  Description of Artificial Sequence: Synthetic oligonucleotide
tctataattctact

SEQ ID NO: 22847 - DNA, 14 bp, Artificial Sequence
  Description of Artificial Sequence: Synthetic oligonucleotide
ttctataattctac

SEQ ID NO: 22848 - DNA, 14 bp, Artificial Sequence
  Description of Artificial Sequence: Synthetic oligonucleotide
tttctataattcta

SEQ ID NO: 22849 - DNA, 14 bp, Artificial Sequence
  Description of Artificial Sequence: Synthetic oligonucleotide
atttctataattct

SEQ ID NO: 22850 - DNA, 14 bp, Artificial Sequence
  Description of Artificial Sequence: Synthetic oligonucleotide
aatttctataattc

SEQ ID NO: 22851 - DNA, 14 bp, Artificial Sequence
  Description of Artificial Sequence: Synthetic oligonucleotide
gaatttctataatt

SEQ ID NO: 22852 - DNA, 14 bp, Artificial Sequence
  Description of Artificial Sequence: Synthetic oligonucleotide
agaatttctataat

SEQ ID NO: 22853 - DNA, 14 bp, Artificial Sequence
  Description of Artificial Sequence: Synthetic oligonucleotide
cagaatttctataa

SEQ ID NO: 22854 - DNA, 14 bp, Artificial Sequence
  Description of Artificial Sequence: Synthetic oligonucleotide
gcagaatttctata

SEQ ID NO: 22855 - DNA, 14 bp, Artificial Sequence
  Description of Artificial Sequence: Synthetic oligonucleotide
tgcagaatttctat

SEQ ID NO: 22856 - DNA, 14 bp, Artificial Sequence
  Description of Artificial Sequence: Synthetic oligonucleotide
ttgcagaatttcta

SEQ ID NO: 22857 - DNA, 14 bp, Artificial Sequence
  Description of Artificial Sequence: Synthetic oligonucleotide
cttgcagaatttct

SEQ ID NO: 22858 - DNA, 14 bp, Artificial Sequence
  Description of Artificial Sequence: Synthetic oligonucleotide
acttgcagaatttc

SEQ ID NO: 22859 - DNA, 14 bp, Artificial Sequence
  Description of Artificial Sequence: Synthetic oligonucleotide
aacttgcagaattt

SEQ ID NO: 22860 - DNA, 14 bp, Artificial Sequence
  Description of Artificial Sequence: Synthetic oligonucleotide
aaacttgcagaatt

SEQ ID NO: 22861 - DNA, 14 bp, Artificial Sequence
  Description of Artificial Sequence: Synthetic oligonucleotide
aaaacttgcagaat

SEQ ID NO: 22862 - DNA, 14 bp, Artificial Sequence
  Description of Artificial Sequence: Synthetic oligonucleotide
aaaaacttgcagaa

SEQ ID NO: 22863 - DNA, 14 bp, Artificial Sequence
  Description of Artificial Sequence: Synthetic oligonucleotide
gaaaaacttgcaga

SEQ ID NO: 22864 - DNA, 14 bp, Artificial Sequence
  Description of Artificial Sequence: Synthetic oligonucleotide
tgaaaaacttgcag

SEQ ID NO: 22865 - DNA, 14 bp, Artificial Sequence
  Description of Artificial Sequence: Synthetic oligonucleotide
ttgaaaaacttgca

SEQ ID NO: 22866 - DNA, 14 bp, Artificial Sequence
  Description of Artificial Sequence: Synthetic oligonucleotide
cttgaaaaacttgc

SEQ ID NO: 22867 - DNA, 14 bp, Artificial Sequence
  Description of Artificial Sequence: Synthetic oligonucleotide
tcttgaaaaacttg

SEQ ID NO: 22868 - DNA, 14 bp, Artificial Sequence
  Description of Artificial Sequence: Synthetic oligonucleotide
atcttgaaaaactt

SEQ ID NO: 22869 - DNA, 14 bp, Artificial Sequence
  Description of Artificial Sequence: Synthetic oligonucleotide
aatcttgaaaaact

SEQ ID NO: 22870 - DNA, 14 bp, Artificial Sequence
  Description of Artificial Sequence: Synthetic oligonucleotide
aaatcttgaaaaac

SEQ ID NO: 22871 - DNA, 14 bp, Artificial Sequence
  Description of Artificial Sequence: Synthetic oligonucleotide
caaatcttgaaaaa

SEQ ID NO: 22872 - DNA, 14 bp, Artificial Sequence
  Description of Artificial Sequence: Synthetic oligonucleotide
tcaaatcttgaaaa

SEQ ID NO: 22873 - DNA, 14 bp, Artificial Sequence
  Description of Artificial Sequence: Synthetic oligonucleotide
ttcaaatcttgaaa

SEQ ID NO: 22874 - DNA, 14 bp, Artificial Sequence
  Description of Artificial Sequence: Synthetic oligonucleotide
attcaaatcttgaa

SEQ ID NO: 22875 - DNA, 14 bp, Artificial Sequence
  Description of Artificial Sequence: Synthetic oligonucleotide
tattcaaatcttga

SEQ ID NO: 22876 - DNA, 14 bp, Artificial Sequence
  Description of Artificial Sequence: Synthetic oligonucleotide
ttattcaaatcttg

SEQ ID NO: 22877 - DNA, 14 bp, Artificial Sequence
  Description of Artificial Sequence: Synthetic oligonucleotide
attattcaaatctt

SEQ ID NO: 22878 - DNA, 14 bp, Artificial Sequence
  Description of Artificial Sequence: Synthetic oligonucleotide
aattattcaaatct

SEQ ID NO: 22879 - DNA, 14 bp, Artificial Sequence
  Description of Artificial Sequence: Synthetic oligonucleotide
aaattattcaaatc

SEQ ID NO: 22880 - DNA, 14 bp, Artificial Sequence
  Description of Artificial Sequence: Synthetic oligonucleotide
gaaattattcaaat

SEQ ID NO: 22881 - DNA, 14 bp, Artificial Sequence
  Description of Artificial Sequence: Synthetic oligonucleotide
tgaaattattcaaa

SEQ ID NO: 22882 - DNA, 14 bp, Artificial Sequence
  Description of Artificial Sequence: Synthetic oligonucleotide
ttgaaattattcaa

SEQ ID NO: 22883 - DNA, 14 bp, Artificial Sequence
  Description of Artificial Sequence: Synthetic oligonucleotide
attgaaattattca

SEQ ID NO: 22884 - DNA, 14 bp, Artificial Sequence
  Description of Artificial Sequence: Synthetic oligonucleotide
cattgaaattattc

SEQ ID NO: 22885 - DNA, 14 bp, Artificial Sequence
  Description of Artificial Sequence: Synthetic oligonucleotide
ccattgaaattatt

SEQ ID NO: 22886 - DNA, 14 bp, Artificial Sequence
  Description of Artificial Sequence: Synthetic oligonucleotide
gccattgaaattat

SEQ ID NO: 22887 - DNA, 14 bp, Artificial Sequence
  Description of Artificial Sequence: Synthetic oligonucleotide
cgccattgaaatta

SEQ ID NO: 22888 - DNA, 14 bp, Artificial Sequence
  Description of Artificial Sequence: Synthetic oligonucleotide
acgccattgaaatt

SEQ ID NO: 22889 - DNA, 14 bp, Artificial Sequence
  Description of Artificial Sequence: Synthetic oligonucleotide
tacgccattgaaat

SEQ ID NO: 22890 - DNA, 14 bp, Artificial Sequence
  Description of Artificial Sequence: Synthetic oligonucleotide
atacgccattgaaa

SEQ ID NO: 22891 - DNA, 14 bp, Artificial Sequence
  Description of Artificial Sequence: Synthetic oligonucleotide
aatacgccattgaa

SEQ ID NO: 22892 - DNA, 14 bp, Artificial Sequence
  Description of Artificial Sequence: Synthetic oligonucleotide
caatacgccattga

SEQ ID NO: 22893 - DNA, 14 bp, Artificial Sequence
  Description of Artificial Sequence: Synthetic oligonucleotide
ccaatacgccattg

SEQ ID NO: 22894 - DNA, 14 bp, Artificial Sequence
  Description of Artificial Sequence: Synthetic oligonucleotide
tccaatacgccatt

SEQ ID NO: 22895 - DNA, 14 bp, Artificial Sequence
  Description of Artificial Sequence: Synthetic oligonucleotide
ctccaatacgccat

SEQ ID NO: 22896 - DNA, 14 bp, Artificial Sequence
  Description of Artificial Sequence: Synthetic oligonucleotide
tctccaatacgcca

SEQ ID NO: 22897 - DNA, 14 bp, Artificial Sequence
  Description of Artificial Sequence: Synthetic oligonucleotide
atctccaatacgcc

SEQ ID NO: 22898 - DNA, 14 bp, Artificial Sequence
  Description of Artificial Sequence: Synthetic oligonucleotide
tatctccaatacgc

SEQ ID NO: 22899 - DNA, 14 bp, Artificial Sequence
  Description of Artificial Sequence: Synthetic oligonucleotide
ctatctccaatacg

SEQ ID NO: 22900 - DNA, 14 bp, Artificial Sequence
  Description of Artificial Sequence: Synthetic oligonucleotide
actatctccaatac

SEQ ID NO: 22901 - DNA, 14 bp, Artificial Sequence
  Description of Artificial Sequence: Synthetic oligonucleotide
gactatctccaata

SEQ ID NO: 22902 - DNA, 14 bp, Artificial Sequence
  Description of Artificial Sequence: Synthetic oligonucleotide
tgactatctccaat

SEQ ID NO: 22903 - DNA, 14 bp, Artificial Sequence
  Description of Artificial Sequence: Synthetic oligonucleotide
ctgactatctccaa

SEQ ID NO: 22904 - DNA, 14 bp, Artificial Sequence
  Description of Artificial Sequence: Synthetic oligonucleotide
actgactatctcca

SEQ ID NO: 22905 - DNA, 14 bp, Artificial Sequence
  Description of Artificial Sequence: Synthetic oligonucleotide
cactgactatctcc

SEQ ID NO: 22906 - DNA, 14 bp, Artificial Sequence
  Description of Artificial Sequence: Synthetic oligonucleotide
gcactgactatctc

SEQ ID NO: 22907 - DNA, 14 bp, Artificial Sequence
  Description of Artificial Sequence: Synthetic oligonucleotide
tgcactgactatct

SEQ ID NO: 22908 - DNA, 14 bp, Artificial Sequence
  Description of Artificial Sequence: Synthetic oligonucleotide
ctgcactgactatc

SEQ ID NO: 22909 - DNA, 14 bp, Artificial Sequence
  Description of Artificial Sequence: Synthetic oligonucleotide
actgcactgactat

SEQ ID NO: 22910 - DNA, 14 bp, Artificial Sequence
  Description of Artificial Sequence: Synthetic oligonucleotide
tactgcactgacta

SEQ ID NO: 22911 - DNA, 14 bp, Artificial Sequence
  Description of Artificial Sequence: Synthetic oligonucleotide
ttactgcactgact

SEQ ID NO: 22912 - DNA, 14 bp, Artificial Sequence
  Description of Artificial Sequence: Synthetic oligonucleotide
tttactgcactgac

SEQ ID NO: 22913 - DNA, 14 bp, Artificial Sequence
  Description of Artificial Sequence: Synthetic oligonucleotide
atttactgcactga

SEQ ID NO: 22914 - DNA, 14 bp, Artificial Sequence
  Description of Artificial Sequence: Synthetic oligonucleotide
aatttactgcactg

SEQ ID NO: 22915 - DNA, 14 bp, Artificial Sequence
  Description of Artificial Sequence: Synthetic oligonucleotide
gaatttactgcact

SEQ ID NO: 22916 - DNA, 14 bp, Artificial Sequence
  Description of Artificial Sequence: Synthetic oligonucleotide
tgaatttactgcac

SEQ ID NO: 22917 - DNA, 14 bp, Artificial Sequence
  Description of Artificial Sequence: Synthetic oligonucleotide
ctgaatttactgca

SEQ ID NO: 22918 - DNA, 14 bp, Artificial Sequence
  Description of Artificial Sequence: Synthetic oligonucleotide
actgaatttactgc

SEQ ID NO: 22919 - DNA, 14 bp, Artificial Sequence
  Description of Artificial Sequence: Synthetic oligonucleotide
cactgaatttactg

SEQ ID NO: 22920 - DNA, 14 bp, Artificial Sequence
  Description of Artificial Sequence: Synthetic oligonucleotide
acactgaatttact

SEQ ID NO: 22921 - DNA, 14 bp, Artificial Sequence
  Description of Artificial Sequence: Synthetic oligonucleotide
gacactgaatttac

SEQ ID NO: 22922 - DNA, 14 bp, Artificial Sequence
  Description of Artificial Sequence: Synthetic oligonucleotide
tgacactgaattta

SEQ ID NO: 22923 - DNA, 14 bp, Artificial Sequence
  Description of Artificial Sequence: Synthetic oligonucleotide
ctgacactgaattt

SEQ ID NO: 22924 - DNA, 14 bp, Artificial Sequence
  Description of Artificial Sequence: Synthetic oligonucleotide
actgacactgaatt

SEQ ID NO: 22925 - DNA, 14 bp, Artificial Sequence
  Description of Artificial Sequence: Synthetic oligonucleotide
tactgacactgaat

SEQ ID NO: 22926 - DNA, 14 bp, Artificial Sequence
  Description of Artificial Sequence: Synthetic oligonucleotide
atactgacactgaa

SEQ ID NO: 22927 - DNA, 14 bp, Artificial Sequence
  Description of Artificial Sequence: Synthetic oligonucleotide
tatactgacactga

SEQ ID NO: 22928 - DNA, 14 bp, Artificial Sequence
  Description of Artificial Sequence: Synthetic oligonucleotide
gtatactgacactg

SEQ ID NO: 22929 - DNA, 14 bp, Artificial Sequence
  Description of Artificial Sequence: Synthetic oligonucleotide
tgtatactgacact

SEQ ID NO: 22930 - DNA, 14 bp, Artificial Sequence
  Description of Artificial Sequence: Synthetic oligonucleotide
ctgtatactgacac

SEQ ID NO: 22931 - DNA, 14 bp, Artificial Sequence
  Description of Artificial Sequence: Synthetic oligonucleotide
tctgtatactgaca

SEQ ID NO: 22932 - DNA, 14 bp, Artificial Sequence
  Description of Artificial Sequence: Synthetic oligonucleotide
gtctgtatactgac

SEQ ID NO: 22933 - DNA, 14 bp, Artificial Sequence
  Description of Artificial Sequence: Synthetic oligonucleotide
agtctgtatactga

SEQ ID NO: 22934 - DNA, 14 bp, Artificial Sequence
  Description of Artificial Sequence: Synthetic oligonucleotide
tagtctgtatactg

SEQ ID NO: 22935 - DNA, 14 bp, Artificial Sequence
  Description of Artificial Sequence: Synthetic oligonucleotide
ctagtctgtatact

SEQ ID NO: 22936 - DNA, 14 bp, Artificial Sequence
  Description of Artificial Sequence: Synthetic oligonucleotide
tctagtctgtatac

SEQ ID NO: 22937 - DNA, 14 bp, Artificial Sequence
  Description of Artificial Sequence: Synthetic oligonucleotide
gtctagtctgtata

SEQ ID NO: 22938 - DNA, 14 bp, Artificial Sequence
  Description of Artificial Sequence: Synthetic oligonucleotide
ggtctagtctgtat

SEQ ID NO: 22939 - DNA, 14 bp, Artificial Sequence
  Description of Artificial Sequence: Synthetic oligonucleotide
tggtctagtctgta

SEQ ID NO: 22940 - DNA, 14 bp, Artificial Sequence
  Description of Artificial Sequence: Synthetic oligonucleotide
atggtctagtctgt

SEQ ID NO: 22941 - DNA, 14 bp, Artificial Sequence
  Description of Artificial Sequence: Synthetic oligonucleotide
tatggtctagtctg

SEQ ID NO: 22942 - DNA, 14 bp, Artificial Sequence
  Description of Artificial Sequence: Synthetic oligonucleotide
gtatggtctagtct

SEQ ID NO: 22943 - DNA, 14 bp, Artificial Sequence
  Description of Artificial Sequence: Synthetic oligonucleotide
ggtatggtctagtc

SEQ ID NO: 22944 - DNA, 14 bp, Artificial Sequence
  Description of Artificial Sequence: Synthetic oligonucleotide
aggtatggtctagt

SEQ ID NO: 22945 - DNA, 14 bp, Artificial Sequence
  Description of Artificial Sequence: Synthetic oligonucleotide
aaggtatggtctag

SEQ ID NO: 22946 - DNA, 14 bp, Artificial Sequence
  Description of Artificial Sequence: Synthetic oligonucleotide
aaaggtatggtcta

SEQ ID NO: 22947 - DNA, 14 bp, Artificial Sequence
  Description of Artificial Sequence: Synthetic oligonucleotide
caaaggtatggtct

SEQ ID NO: 22948 - DNA, 14 bp, Artificial Sequence
  Description of Artificial Sequence: Synthetic oligonucleotide
tcaaaggtatggtc

SEQ ID NO: 22949 - DNA, 14 bp, Artificial Sequence
  Description of Artificial Sequence: Synthetic oligonucleotide
ctcaaaggtatggt

SEQ ID NO: 22950 - DNA, 14 bp, Artificial Sequence
  Description of Artificial Sequence: Synthetic oligonucleotide
cctcaaaggtatgg

SEQ ID NO: 22951 - DNA, 14 bp, Artificial Sequence
  Description of Artificial Sequence: Synthetic oligonucleotide
gcctcaaaggtatg

SEQ ID NO: 22952 - DNA, 14 bp, Artificial Sequence
  Description of Artificial Sequence: Synthetic oligonucleotide
tgcctcaaaggtat

SEQ ID NO: 22953 - DNA, 14 bp, Artificial Sequence
  Description of Artificial Sequence: Synthetic oligonucleotide
gtgcctcaaaggta

SEQ ID NO: 22954 - DNA, 14 bp, Artificial Sequence
  Description of Artificial Sequence: Synthetic oligonucleotide
agtgcctcaaaggt

SEQ ID NO: 22955 - DNA, 14 bp, Artificial Sequence
  Description of Artificial Sequence: Synthetic oligonucleotide
cagtgcctcaaagg

SEQ ID NO: 22956 - DNA, 14 bp, Artificial Sequence
  Description of Artificial Sequence: Synthetic oligonucleotide
gcagtgcctcaaag

SEQ ID NO: 22957 - DNA, 14 bp, Artificial Sequence
  Description of Artificial Sequence: Synthetic oligonucleotide
tgcagtgcctcaaa

SEQ ID NO: 22958 - DNA, 14 bp, Artificial Sequence
  Description of Artificial Sequence: Synthetic oligonucleotide
ctgcagtgcctcaa

SEQ ID NO: 22959 - DNA, 14 bp, Artificial Sequence
  Description of Artificial Sequence: Synthetic oligonucleotide
cctgcagtgcctca

SEQ ID NO: 22960 - DNA, 14 bp, Artificial Sequence
  Description of Artificial Sequence: Synthetic oligonucleotide
tcctgcagtgcctc

SEQ ID NO: 22961 - DNA, 14 bp, Artificial Sequence
  Description of Artificial Sequence: Synthetic oligonucleotide
ttcctgcagtgcct

SEQ ID NO: 22962 - DNA, 14 bp, Artificial Sequence
  Description of Artificial Sequence: Synthetic oligonucleotide
tttcctgcagtgcc

SEQ ID NO: 22963 - DNA, 14 bp, Artificial Sequence
  Description of Artificial Sequence: Synthetic oligonucleotide
ctttcctgcagtgc

SEQ ID NO: 22964 - DNA, 14 bp, Artificial Sequence
  Description of Artificial Sequence: Synthetic oligonucleotide
cctttcctgcagtg

SEQ ID NO: 22965 - DNA, 14 bp, Artificial Sequence
  Description of Artificial Sequence: Synthetic oligonucleotide
tcctttcctgcagt

SEQ ID NO: 22966 - DNA, 14 bp, Artificial Sequence
  Description of Artificial Sequence: Synthetic oligonucleotide
ttcctttcctgcag

SEQ ID NO: 22967 - DNA, 14 bp, Artificial Sequence
  Description of Artificial Sequence: Synthetic oligonucleotide
tttcctttcctgca

SEQ ID NO: 22968 - DNA, 14 bp, Artificial Sequence
  Description of Artificial Sequence: Synthetic oligonucleotide
ttttcctttcctgc

SEQ ID NO: 22969 - DNA, 14 bp, Artificial Sequence
  Description of Artificial Sequence: Synthetic oligonucleotide
cttttcctttcctg

SEQ ID NO: 22970 - DNA, 14 bp, Artificial Sequence
  Description of Artificial Sequence: Synthetic oligonucleotide
ccttttcctttcct

SEQ ID NO: 22971 - DNA, 14 bp, Artificial Sequence
  Description of Artificial Sequence: Synthetic oligonucleotide
tccttttcctttcc

SEQ ID NO: 22972 - DNA, 14 bp, Artificial Sequence
  Description of Artificial Sequence: Synthetic oligonucleotide
ttccttttcctttc

SEQ ID NO: 22973 - DNA, 14 bp, Artificial Sequence
  Description of Artificial Sequence: Synthetic oligonucleotide
tttccttttccttt

SEQ ID NO: 22974 - DNA, 14 bp, Artificial Sequence
  Description of Artificial Sequence: Synthetic oligonucleotide
ttttccttttcctt

SEQ ID NO: 22975 - DNA, 14 bp, Artificial Sequence
  Description of Artificial Sequence: Synthetic oligonucleotide
attttccttttcct

SEQ ID NO: 22976 - DNA, 14 bp, Artificial Sequence
  Description of Artificial Sequence: Synthetic oligonucleotide
aattttccttttcc

SEQ ID NO: 22977 - DNA, 14 bp, Artificial Sequence
  Description of Artificial Sequence: Synthetic oligonucleotide
aaattttccttttc

SEQ ID NO: 22978 - DNA, 14 bp, Artificial Sequence
  Description of Artificial Sequence: Synthetic oligonucleotide
aaaattttcctttt

SEQ ID NO: 22979 - DNA, 14 bp, Artificial Sequence
  Description of Artificial Sequence: Synthetic oligonucleotide
caaaattttccttt

SEQ ID NO: 22980 - DNA, 14 bp, Artificial Sequence
  Description of Artificial Sequence: Synthetic oligonucleotide
ccaaaattttcctt

SEQ ID NO: 22981 - DNA, 14 bp, Artificial Sequence
  Description of Artificial Sequence: Synthetic oligonucleotide
tccaaaattttcct

SEQ ID NO: 22982 - DNA, 14 bp, Artificial Sequence
  Description of Artificial Sequence: Synthetic oligonucleotide
gtccaaaattttcc

SEQ ID NO: 22983 - DNA, 14 bp, Artificial Sequence
  Description of Artificial Sequence: Synthetic oligonucleotide
cgtccaaaattttc

SEQ ID NO: 22984 - DNA, 14 bp, Artificial Sequence
  Description of Artificial Sequence: Synthetic oligonucleotide
tcgtccaaaatttt

SEQ ID NO: 22985 - DNA, 14 bp, Artificial Sequence
  Description of Artificial Sequence: Synthetic oligonucleotide
ttcgtccaaaattt

SEQ ID NO: 22986 - DNA, 14 bp, Artificial Sequence
  Description of Artificial Sequence: Synthetic oligonucleotide
cttcgtccaaaatt

SEQ ID NO: 22987 - DNA, 14 bp, Artificial Sequence
  Description of Artificial Sequence: Synthetic oligonucleotide
gcttcgtccaaaat

SEQ ID NO: 22988 - DNA, 14 bp, Artificial Sequence
  Description of Artificial Sequence: Synthetic oligonucleotide
agcttcgtccaaaa

SEQ ID NO: 22989 - DNA, 14 bp, Artificial Sequence
  Description of Artificial Sequence: Synthetic oligonucleotide
cagcttcgtccaaa

SEQ ID NO: 22990 - DNA, 14 bp, Artificial Sequence
  Description of Artificial Sequence: Synthetic oligonucleotide
acagcttcgtccaa

SEQ ID NO: 22991 - DNA, 14 bp, Artificial Sequence
  Description of Artificial Sequence: Synthetic oligonucleotide
cacagcttcgtcca

SEQ ID NO: 22992 - DNA, 14 bp, Artificial Sequence
  Description of Artificial Sequence: Synthetic oligonucleotide
ccacagcttcgtcc

SEQ ID NO: 22993 - DNA, 14 bp, Artificial Sequence
  Description of Artificial Sequence: Synthetic oligonucleotide
tccacagcttcgtc

SEQ ID NO: 22994 - DNA, 14 bp, Artificial Sequence
  Description of Artificial Sequence: Synthetic oligonucleotide
ttccacagcttcgt

SEQ ID NO: 22995 - DNA, 14 bp, Artificial Sequence
  Description of Artificial Sequence: Synthetic oligonucleotide
attccacagcttcg

SEQ ID NO: 22996 - DNA, 14 bp, Artificial Sequence
  Description of Artificial Sequence: Synthetic oligonucleotide
aattccacagcttc

SEQ ID NO: 22997 - DNA, 14 bp, Artificial Sequence
  Description of Artificial Sequence: Synthetic oligonucleotide
taattccacagctt

SEQ ID NO: 22998 - DNA, 14 bp, Artificial Sequence
  Description of Artificial Sequence: Synthetic oligonucleotide
ttaattccacagct

SEQ ID NO: 22999 - DNA, 14 bp, Artificial Sequence
  Description of Artificial Sequence: Synthetic oligonucleotide
cttaattccacagc

SEQ ID NO: 23000 - DNA, 14 bp, Artificial Sequence
  Description of Artificial Sequence: Synthetic oligonucleotide
acttaattccacag

SEQ ID NO: 23001 - DNA, 14 bp, Artificial Sequence
  Description of Artificial Sequence: Synthetic oligonucleotide
gacttaattccaca

SEQ ID NO: 23002 - DNA, 14 bp, Artificial Sequence
  Description of Artificial Sequence: Synthetic oligonucleotide
tgacttaattccac

SEQ ID NO: 23003 - DNA, 14 bp, Artificial Sequence
  Description of Artificial Sequence: Synthetic oligonucleotide
ttgacttaattcca

SEQ ID NO: 23004 - DNA, 14 bp, Artificial Sequence
  Description of Artificial Sequence: Synthetic oligonucleotide
cttgacttaattcc

SEQ ID NO: 23005 - DNA, 14 bp, Artificial Sequence
  Description of Artificial Sequence: Synthetic oligonucleotide
tcttgacttaattc

SEQ ID NO: 23006 - DNA, 14 bp, Artificial Sequence
  Description of Artificial Sequence: Synthetic oligonucleotide
atcttgacttaatt

SEQ ID NO: 23007 - DNA, 14 bp, Artificial Sequence
  Description of Artificial Sequence: Synthetic oligonucleotide
gatcttgacttaat

SEQ ID NO: 23008 - DNA, 14 bp, Artificial Sequence
  Description of Artificial Sequence: Synthetic oligonucleotide
tgatcttgacttaa

SEQ ID NO: 23009 - DNA, 14 bp, Artificial Sequence
  Description of Artificial Sequence: Synthetic oligonucleotide
gtgatcttgactta

SEQ ID NO: 23010 - DNA, 14 bp, Artificial Sequence
  Description of Artificial Sequence: Synthetic oligonucleotide
agtgatcttgactt

SEQ ID NO: 23011 - DNA, 14 bp, Artificial Sequence
  Description of Artificial Sequence: Synthetic oligonucleotide
aagtgatcttgact

SEQ ID NO: 23012 - DNA, 14 bp, Artificial Sequence
  Description of Artificial Sequence: Synthetic oligonucleotide
aaagtgatcttgac

SEQ ID NO: 23013 - DNA, 14 bp, Artificial Sequence
  Description of Artificial Sequence: Synthetic oligonucleotide
taaagtgatcttga

SEQ ID NO: 23014 - DNA, 14 bp, Artificial Sequence
  Description of Artificial Sequence: Synthetic oligonucleotide
ttaaagtgatcttg

SEQ ID NO: 23015 - DNA, 14 bp, Artificial Sequence
  Description of Artificial Sequence: Synthetic oligonucleotide
tttaaagtgatctt

SEQ ID NO: 23016 - DNA, 14 bp, Artificial Sequence
  Description of Artificial Sequence: Synthetic oligonucleotide
ttttaaagtgatct

SEQ ID NO: 23017 - DNA, 14 bp, Artificial Sequence
  Description of Artificial Sequence: Synthetic oligonucleotide
tttttaaagtgatc

SEQ ID NO: 23018 - DNA, 14 bp, Artificial Sequence
  Description of Artificial Sequence: Synthetic oligonucleotide
ttttttaaagtgat

SEQ ID NO: 23019 - DNA, 14 bp, Artificial Sequence
  Description of Artificial Sequence: Synthetic oligonucleotide
attttttaaagtga

SEQ ID NO: 23020 - DNA, 14 bp, Artificial Sequence
  Description of Artificial Sequence: Synthetic oligonucleotide
tattttttaaagtg

SEQ ID NO: 23021 - DNA, 14 bp, Artificial Sequence
  Description of Artificial Sequence: Synthetic oligonucleotide
gtattttttaaagt

SEQ ID NO: 23022 - DNA, 14 bp, Artificial Sequence
  Description of Artificial Sequence: Synthetic oligonucleotide
ggtattttttaaag

SEQ ID NO: 23023 - DNA, 14 bp, Artificial Sequence
  Description of Artificial Sequence: Synthetic oligonucleotide
aggtattttttaaa

SEQ ID NO: 23024 - DNA, 14 bp, Artificial Sequence
  Description of Artificial Sequence: Synthetic oligonucleotide
taggtattttttaa

SEQ ID NO: 23025 - DNA, 14 bp, Artificial Sequence
  Description of Artificial Sequence: Synthetic oligonucleotide
ctaggtatttttta

SEQ ID NO: 23026 - DNA, 14 bp, Artificial Sequence
  Description of Artificial Sequence: Synthetic oligonucleotide
actaggtatttttt

SEQ ID NO: 23027 - DNA, 14 bp, Artificial Sequence
  Description of Artificial Sequence: Synthetic oligonucleotide
tactaggtattttt

SEQ ID NO: 23028 - DNA, 14 bp, Artificial Sequence
  Description of Artificial Sequence: Synthetic oligonucleotide
ttactaggtatttt

SEQ ID NO: 23029 - DNA, 14 bp, Artificial Sequence
  Description of Artificial Sequence: Synthetic oligonucleotide
tttactaggtattt

SEQ ID NO: 23030 - DNA, 14 bp, Artificial Sequence
  Description of Artificial Sequence: Synthetic oligonucleotide
ttttactaggtatt

SEQ ID NO: 23031 - DNA, 14 bp, Artificial Sequence
  Description of Artificial Sequence: Synthetic oligonucleotide
gttttactaggtat

SEQ ID NO: 23032 - DNA, 14 bp, Artificial Sequence
  Description of Artificial Sequence: Synthetic oligonucleotide
agttttactaggta

SEQ ID NO: 23033 - DNA, 14 bp, Artificial Sequence
  Description of Artificial Sequence: Synthetic oligonucleotide
aagttttactaggt

SEQ ID NO: 23034 - DNA, 14 bp, Artificial Sequence
  Description of Artificial Sequence: Synthetic oligonucleotide
taagttttactagg

SEQ ID NO: 23035 - DNA, 14 bp, Artificial Sequence
  Description of Artificial Sequence: Synthetic oligonucleotide
ttaagttttactag

SEQ ID NO: 23036 - DNA, 14 bp, Artificial Sequence
  Description of Artificial Sequence: Synthetic oligonucleotide
cttaagttttacta

SEQ ID NO: 23037 - DNA, 14 bp, Artificial Sequence
  Description of Artificial Sequence: Synthetic oligonucleotide
acttaagttttact

SEQ ID NO: 23038 - DNA, 14 bp, Artificial Sequence
  Description of Artificial Sequence: Synthetic oligonucleotide
gacttaagttttac

SEQ ID NO: 23039 - DNA, 14 bp, Artificial Sequence
  Description of Artificial Sequence: Synthetic oligonucleotide
tgacttaagtttta

SEQ ID NO: 23040 - DNA, 14 bp, Artificial Sequence
  Description of Artificial Sequence: Synthetic oligonucleotide
ttgacttaagtttt

SEQ ID NO: 23041 - DNA, 14 bp, Artificial Sequence
  Description of Artificial Sequence: Synthetic oligonucleotide
attgacttaagttt

SEQ ID NO: 23042 - DNA, 14 bp, Artificial Sequence
  Description of Artificial Sequence: Synthetic oligonucleotide
gattgacttaagtt

SEQ ID NO: 23043 - DNA, 14 bp, Artificial Sequence
  Description of Artificial Sequence: Synthetic oligonucleotide
tgattgacttaagt

SEQ ID NO: 23044 - DNA, 14 bp, Artificial Sequence
  Description of Artificial Sequence: Synthetic oligonucleotide
ttgattgacttaag

SEQ ID NO: 23045 - DNA, 14 bp, Artificial Sequence
  Description of Artificial Sequence: Synthetic oligonucleotide
attgattgacttaa

SEQ ID NO: 23046 - DNA, 14 bp, Artificial Sequence
  Description of Artificial Sequence: Synthetic oligonucleotide
gattgattgactta

SEQ ID NO: 23047 - DNA, 14 bp, Artificial Sequence
  Description of Artificial Sequence: Synthetic oligonucleotide
ggattgattgactt

SEQ ID NO: 23048 - DNA, 14 bp, Artificial Sequence
  Description of Artificial Sequence: Synthetic oligonucleotide
tggattgattgact

SEQ ID NO: 23049 - DNA, 14 bp, Artificial Sequence
  Description of Artificial Sequence: Synthetic oligonucleotide
gtggattgattgac

SEQ ID NO: 23050 - DNA, 14 bp, Artificial Sequence
  Description of Artificial Sequence: Synthetic oligonucleotide
ggtggattgattga

SEQ ID NO: 23051 - DNA, 14 bp, Artificial Sequence
  Description of Artificial Sequence: Synthetic oligonucleotide
aggtggattgattg

SEQ ID NO: 23052 - DNA, 14 bp, Artificial Sequence
  Description of Artificial Sequence: Synthetic oligonucleotide
aaggtggattgatt

SEQ ID NO: 23053 - DNA, 14 bp, Artificial Sequence
  Description of Artificial Sequence: Synthetic oligonucleotide
caaggtggattgat

SEQ ID NO: 23054 - DNA, 14 bp, Artificial Sequence
  Description of Artificial Sequence: Synthetic oligonucleotide
acaaggtggattga

SEQ ID NO: 23055 - DNA, 14 bp, Artificial Sequence
  Description of Artificial Sequence: Synthetic oligonucleotide
cacaaggtggattg

SEQ ID NO: 23056 - DNA, 14 bp, Artificial Sequence
  Description of Artificial Sequence: Synthetic oligonucleotide
acacaaggtggatt

SEQ ID NO: 23057 - DNA, 14 bp, Artificial Sequence
  Description of Artificial Sequence: Synthetic oligonucleotide
cacacaaggtggat

SEQ ID NO: 23058 - DNA, 14 bp, Artificial Sequence
  Description of Artificial Sequence: Synthetic oligonucleotide
gcacacaaggtgga

SEQ ID NO: 23059 - DNA, 14 bp, Artificial Sequence
  Description of Artificial Sequence: Synthetic oligonucleotide
ggcacacaaggtgg

SEQ ID NO: 23060 - DNA, 14 bp, Artificial Sequence
  Description of Artificial Sequence: Synthetic oligonucleotide
aggcacacaaggtg

SEQ ID NO: 23061 - DNA, 14 bp, Artificial Sequence
  Description of Artificial Sequence: Synthetic oligonucleotide
aaggcacacaaggt

SEQ ID NO: 23062 - DNA, 14 bp, Artificial Sequence
  Description of Artificial Sequence: Synthetic oligonucleotide
aaaggcacacaagg

SEQ ID NO: 23063 - DNA, 14 bp, Artificial Sequence
  Description of Artificial Sequence: Synthetic oligonucleotide
aaaaggcacacaag

SEQ ID NO: 23064 - DNA, 14 bp, Artificial Sequence
  Description of Artificial Sequence: Synthetic oligonucleotide
aaaaaggcacacaa

SEQ ID NO: 23065 - DNA, 14 bp, Artificial Sequence
  Description of Artificial Sequence: Synthetic oligonucleotide
aaaaaaggcacaca

SEQ ID NO: 23066 - DNA, 14 bp, Artificial Sequence
  Description of Artificial Sequence: Synthetic oligonucleotide
aaaaaaaggcacac

SEQ ID NO: 23067 - DNA, 14 bp, Artificial Sequence
  Description of Artificial Sequence: Synthetic oligonucleotide
caaaaaaaggcaca

SEQ ID NO: 23068 - DNA, 14 bp, Artificial Sequence
  Description of Artificial Sequence: Synthetic oligonucleotide
ccaaaaaaaggcac

SEQ ID NO: 23069 - DNA, 14 bp, Artificial Sequence
  Description of Artificial Sequence: Synthetic oligonucleotide
tccaaaaaaaggca

SEQ ID NO: 23070 - DNA, 14 bp, Artificial Sequence
  Description of Artificial Sequence: Synthetic oligonucleotide
ttccaaaaaaaggc

SEQ ID NO: 23071 - DNA, 14 bp, Artificial Sequence
  Description of Artificial Sequence: Synthetic oligonucleotide
attccaaaaaaagg

SEQ ID NO: 23072 - DNA, 14 bp, Artificial Sequence
  Description of Artificial Sequence: Synthetic oligonucleotide
tattccaaaaaaag

SEQ ID NO: 23073 - DNA, 14 bp, Artificial Sequence
  Description of Artificial Sequence: Synthetic oligonucleotide
atattccaaaaaaa

SEQ ID NO: 23074 - DNA, 14 bp, Artificial Sequence
  Description of Artificial Sequence: Synthetic oligonucleotide
tatattccaaaaaa

SEQ ID NO: 23075 - DNA, 14 bp, Artificial Sequence
  Description of Artificial Sequence: Synthetic oligonucleotide
atatattccaaaaa

SEQ ID NO: 23076 - DNA, 14 bp, Artificial Sequence
  Description of Artificial Sequence: Synthetic oligonucleotide
aatatattccaaaa

SEQ ID NO: 23077 - DNA, 14 bp, Artificial Sequence
  Description of Artificial Sequence: Synthetic oligonucleotide
aaatatattccaaa

SEQ ID NO: 23078 - DNA, 14 bp, Artificial Sequence
  Description of Artificial Sequence: Synthetic oligonucleotide
taaatatattccaa

SEQ ID NO: 23079 - DNA, 14 bp, Artificial Sequence
  Description of Artificial Sequence: Synthetic oligonucleotide
ttaaatatattcca

SEQ ID NO: 23080 - DNA, 14 bp, Artificial Sequence
  Description of Artificial Sequence: Synthetic oligonucleotide
gttaaatatattcc

SEQ ID NO: 23081 - DNA, 14 bp, Artificial Sequence
  Description of Artificial Sequence: Synthetic oligonucleotide
tgttaaatatattc

SEQ ID NO: 23082 - DNA, 14 bp, Artificial Sequence
  Description of Artificial Sequence: Synthetic oligonucleotide
ttgttaaatatatt

SEQ ID NO: 23083 - DNA, 14 bp, Artificial Sequence
  Description of Artificial Sequence: Synthetic oligonucleotide
tttgttaaatatat

SEQ ID NO: 23084 - DNA, 14 bp, Artificial Sequence
  Description of Artificial Sequence: Synthetic oligonucleotide
atttgttaaatata

SEQ ID NO: 23085 - DNA, 14 bp, Artificial Sequence
  Description of Artificial Sequence: Synthetic oligonucleotide
tatttgttaaatat

SEQ ID NO: 23086 - DNA, 14 bp, Artificial Sequence
  Description of Artificial Sequence: Synthetic oligonucleotide
atatttgttaaata

SEQ ID NO: 23087 - DNA, 14 bp, Artificial Sequence
  Description of Artificial Sequence: Synthetic oligonucleotide
aatatttgttaaat

SEQ ID NO: 23088 - DNA, 14 bp, Artificial Sequence
  Description of Artificial Sequence: Synthetic oligonucleotide
gaatatttgttaaa

SEQ ID NO: 23089 - DNA, 14 bp, Artificial Sequence
  Description of Artificial Sequence: Synthetic oligonucleotide
agaatatttgttaa

SEQ ID NO: 23090 - DNA, 14 bp, Artificial Sequence
  Description of Artificial Sequence: Synthetic oligonucleotide
cagaatatttgtta

SEQ ID NO: 23091 - DNA, 14 bp, Artificial Sequence
  Description of Artificial Sequence: Synthetic oligonucleotide
tcagaatatttgtt

SEQ ID NO: 23092 - DNA, 14 bp, Artificial Sequence
  Description of Artificial Sequence: Synthetic oligonucleotide
ttcagaatatttgt

SEQ ID NO: 23093 - DNA, 14 bp, Artificial Sequence
  Description of Artificial Sequence: Synthetic oligonucleotide
cttcagaatatttg

SEQ ID NO: 23094 - DNA, 14 bp, Artificial Sequence
  Description of Artificial Sequence: Synthetic oligonucleotide
tcttcagaatattt

SEQ ID NO: 23095 - DNA, 14 bp, Artificial Sequence
  Description of Artificial Sequence: Synthetic oligonucleotide
gtcttcagaatatt

SEQ ID NO: 23096 - DNA, 14 bp, Artificial Sequence
  Description of Artificial Sequence: Synthetic oligonucleotide
ggtcttcagaatat

SEQ ID NO: 23097 - DNA, 14 bp, Artificial Sequence
  Description of Artificial Sequence: Synthetic oligonucleotide
cggtcttcagaata

SEQ ID NO: 23098 - DNA, 14 bp, Artificial Sequence
  Description of Artificial Sequence: Synthetic oligonucleotide
tcggtcttcagaat

SEQ ID NO: 23099 - DNA, 14 bp, Artificial Sequence
  Description of Artificial Sequence: Synthetic oligonucleotide
ttcggtcttcagaa

SEQ ID NO: 23100 - DNA, 14 bp, Artificial Sequence
  Description of Artificial Sequence: Synthetic oligonucleotide
cttcggtcttcaga

SEQ ID NO: 23101 - DNA, 14 bp, Artificial Sequence
  Description of Artificial Sequence: Synthetic oligonucleotide
tcttcggtcttcag

SEQ ID NO: 23102 - DNA, 14 bp, Artificial Sequence
  Description of Artificial Sequence: Synthetic oligonucleotide
ttcttcggtcttca

SEQ ID NO: 23103 - DNA, 14 bp, Artificial Sequence
  Description of Artificial Sequence: Synthetic oligonucleotide
cttcttcggtcttc

SEQ ID NO: 23104 - DNA, 14 bp, Artificial Sequence
  Description of Artificial Sequence: Synthetic oligonucleotide
ccttcttcggtctt

SEQ ID NO: 23105 - DNA, 14 bp, Artificial Sequence
  Description of Artificial Sequence: Synthetic oligonucleotide
cccttcttcggtct

SEQ ID NO: 23106 - DNA, 14 bp, Artificial Sequence
  Description of Artificial Sequence: Synthetic oligonucleotide
tcccttcttcggtc

SEQ ID NO: 23107 - DNA, 14 bp, Artificial Sequence
  Description of Artificial Sequence: Synthetic oligonucleotide
ttcccttcttcggt

SEQ ID NO: 23108 - DNA, 14 bp, Artificial Sequence
  Description of Artificial Sequence: Synthetic oligonucleotide
attcccttcttcgg

SEQ ID NO: 23109 - DNA, 14 bp, Artificial Sequence
  Description of Artificial Sequence: Synthetic oligonucleotide
tattcccttcttcg

SEQ ID NO: 23110 - DNA, 14 bp, Artificial Sequence
  Description of Artificial Sequence: Synthetic oligonucleotide
ttattcccttcttc

SEQ ID NO: 23111 - DNA, 14 bp, Artificial Sequence
  Description of Artificial Sequence: Synthetic oligonucleotide
attattcccttctt

SEQ ID NO: 23112 - DNA, 14 bp, Artificial Sequence
  Description of Artificial Sequence: Synthetic oligonucleotide
cattattcccttct

SEQ ID NO: 23113 - DNA, 14 bp, Artificial Sequence
  Description of Artificial Sequence: Synthetic oligonucleotide
tcattattcccttc

SEQ ID NO: 23114 - DNA, 14 bp, Artificial Sequence
  Description of Artificial Sequence: Synthetic oligonucleotide
atcattattccctt

SEQ ID NO: 23115 - DNA, 14 bp, Artificial Sequence
  Description of Artificial Sequence: Synthetic oligonucleotide
aatcattattccct

SEQ ID NO: 23116 - DNA, 14 bp, Artificial Sequence
  Description of Artificial Sequence: Synthetic oligonucleotide
aaatcattattccc

SEQ ID NO: 23117 - DNA, 14 bp, Artificial Sequence
  Description of Artificial Sequence: Synthetic oligonucleotide
aaaatcattattcc

SEQ ID NO: 23118 - DNA, 14 bp, Artificial Sequence
  Description of Artificial Sequence: Synthetic oligonucleotide
aaaaatcattattc

SEQ ID NO: 23119 - DNA, 14 bp, Artificial Sequence
  Description of Artificial Sequence: Synthetic oligonucleotide
aaaaaatcattatt

SEQ ID NO: 23120 - DNA, 14 bp, Artificial Sequence
  Description of Artificial Sequence: Synthetic oligonucleotide
taaaaaatcattat

SEQ ID NO: 23121 - DNA, 14 bp, Artificial Sequence
  Description of Artificial Sequence: Synthetic oligonucleotide
ttaaaaaatcatta

SEQ ID NO: 23122 - DNA, 14 bp, Artificial Sequence
  Description of Artificial Sequence: Synthetic oligonucleotide
tttaaaaaatcatt

SEQ ID NO: 23123 - DNA, 14 bp, Artificial Sequence
  Description of Artificial Sequence: Synthetic oligonucleotide
ttttaaaaaatcat

SEQ ID NO: 23124 - DNA, 14 bp, Artificial Sequence
  Description of Artificial Sequence: Synthetic oligonucleotide
tttttaaaaaatca

SEQ ID NO: 23125 - DNA, 14 bp, Artificial Sequence
  Description of Artificial Sequence: Synthetic oligonucleotide
ttttttaaaaaatc

SEQ ID NO: 23126 - DNA, 14 bp, Artificial Sequence
  Description of Artificial Sequence: Synthetic oligonucleotide
cttttttaaaaaat

SEQ ID NO: 23127 - DNA, 14 bp, Artificial Sequence
  Description of Artificial Sequence: Synthetic oligonucleotide
tcttttttaaaaaa

SEQ ID NO: 23128 - DNA, 14 bp, Artificial Sequence
  Description of Artificial Sequence: Synthetic oligonucleotide
ttcttttttaaaaa

SEQ ID NO: 23129 - DNA, 14 bp, Artificial Sequence
  Description of Artificial Sequence: Synthetic oligonucleotide
tttcttttttaaaa

SEQ ID NO: 23130 - DNA, 14 bp, Artificial Sequence
  Description of Artificial Sequence: Synthetic oligonucleotide
ctttcttttttaaa

SEQ ID NO: 23131 - DNA, 14 bp, Artificial Sequence
  Description of Artificial Sequence: Synthetic oligonucleotide
cctttcttttttaa

SEQ ID NO: 23132 - DNA, 14 bp, Artificial Sequence
  Description of Artificial Sequence: Synthetic oligonucleotide
ccctttctttttta

SEQ ID NO: 23133 - DNA, 14 bp, Artificial Sequence
  Description of Artificial Sequence: Synthetic oligonucleotide
tccctttctttttt

SEQ ID NO: 23134 - DNA, 14 bp, Artificial Sequence
  Description of Artificial Sequence: Synthetic oligonucleotide
ttccctttcttttt

SEQ ID NO: 23135 - DNA, 14 bp, Artificial Sequence
  Description of Artificial Sequence: Synthetic oligonucleotide
tttccctttctttt

SEQ ID NO: 23136 - DNA, 14 bp, Artificial Sequence
  Description of Artificial Sequence: Synthetic oligonucleotide
ctttccctttcttt

SEQ ID NO: 23137 - DNA, 14 bp, Artificial Sequence
  Description of Artificial Sequence: Synthetic oligonucleotide
tctttccctttctt

SEQ ID NO: 23138 - DNA, 14 bp, Artificial Sequence
  Description of Artificial Sequence: Synthetic oligonucleotide
atctttccctttct

SEQ ID NO: 23139 - DNA, 14 bp, Artificial Sequence
  Description of Artificial Sequence: Synthetic oligonucleotide
aatctttccctttc

SEQ ID NO: 23140 - DNA, 14 bp, Artificial Sequence
  Description of Artificial Sequence: Synthetic oligonucleotide
aaatctttcccttt

SEQ ID NO: 23141 - DNA, 14 bp, Artificial Sequence
  Description of Artificial Sequence: Synthetic oligonucleotide
taaatctttccctt

SEQ ID NO: 23142 - DNA, 14 bp, Artificial Sequence
  Description of Artificial Sequence: Synthetic oligonucleotide
ttaaatctttccct

SEQ ID NO: 23143 - DNA, 14 bp, Artificial Sequence
  Description of Artificial Sequence: Synthetic oligonucleotide
attaaatctttccc

SEQ ID NO: 23144 - DNA, 14 bp, Artificial Sequence
  Description of Artificial Sequence: Synthetic oligonucleotide
gattaaatctttcc

SEQ ID NO: 23145 - DNA, 14 bp, Artificial Sequence
  Description of Artificial Sequence: Synthetic oligonucleotide
tgattaaatctttc

SEQ ID NO: 23146 - DNA, 14 bp, Artificial Sequence
  Description of Artificial Sequence: Synthetic oligonucleotide
ttgattaaatcttt

SEQ ID NO: 23147 - DNA, 14 bp, Artificial Sequence
  Description of Artificial Sequence: Synthetic oligonucleotide
attgattaaatctt

SEQ ID NO: 23148 - DNA, 14 bp, Artificial Sequence
  Description of Artificial Sequence: Synthetic oligonucleotide
aattgattaaatct

SEQ ID NO: 23149 - DNA, 14 bp, Artificial Sequence
  Description of Artificial Sequence: Synthetic oligonucleotide
aaattgattaaatc

SEQ ID NO: 23150 - DNA, 14 bp, Artificial Sequence
  Description of Artificial Sequence: Synthetic oligonucleotide
gaaattgattaaat

SEQ ID NO: 23151 - DNA, 14 bp, Artificial Sequence
  Description of Artificial Sequence: Synthetic oligonucleotide
tgaaattgattaaa

SEQ ID NO: 23152 - DNA, 14 bp, Artificial Sequence
  Description of Artificial Sequence: Synthetic oligonucleotide
ctgaaattgattaa

SEQ ID NO: 23153 - DNA, 14 bp, Artificial Sequence
  Description of Artificial Sequence: Synthetic oligonucleotide
actgaaattgatta

SEQ ID NO: 23154 - DNA, 14 bp, Artificial Sequence
  Description of Artificial Sequence: Synthetic oligonucleotide
tactgaaattgatt

SEQ ID NO: 23155 - DNA, 14 bp, Artificial Sequence
  Description of Artificial Sequence: Synthetic oligonucleotide
ttactgaaattgat

SEQ ID NO: 23156 - DNA, 14 bp, Artificial Sequence
  Description of Artificial Sequence: Synthetic oligonucleotide
cttactgaaattga

SEQ ID NO: 23157 - DNA, 14 bp, Artificial Sequence
  Description of Artificial Sequence: Synthetic oligonucleotide
tcttactgaaattg

SEQ ID NO: 23158 - DNA, 14 bp, Artificial Sequence
  Description of Artificial Sequence: Synthetic oligonucleotide
ctcttactgaaatt

SEQ ID NO: 23159 - DNA, 14 bp, Artificial Sequence
  Description of Artificial Sequence: Synthetic oligonucleotide
cctcttactgaaat

SEQ ID NO: 23160 - DNA, 14 bp, Artificial Sequence
  Description of Artificial Sequence: Synthetic oligonucleotide
tcctcttactgaaa

SEQ ID NO: 23161 - DNA, 14 bp, Artificial Sequence
  Description of Artificial Sequence: Synthetic oligonucleotide
ctcctcttactgaa

SEQ ID NO: 23162 - DNA, 14 bp, Artificial Sequence
  Description of Artificial Sequence: Synthetic oligonucleotide
cctcctcttactga

SEQ ID NO: 23163 - DNA, 14 bp, Artificial Sequence
  Description of Artificial Sequence: Synthetic oligonucleotide
tcctcctcttactg

SEQ ID NO: 23164 - DNA, 14 bp, Artificial Sequence
  Description of Artificial Sequence: Synthetic oligonucleotide
ttcctcctcttact

SEQ ID NO: 23165 - DNA, 14 bp, Artificial Sequence
  Description of Artificial Sequence: Synthetic oligonucleotide
tttcctcctcttac

SEQ ID NO: 23166 - DNA, 14 bp, Artificial Sequence
  Description of Artificial Sequence: Synthetic oligonucleotide
ctttcctcctctta

SEQ ID NO: 23167 - DNA, 14 bp, Artificial Sequence
  Description of Artificial Sequence: Synthetic oligonucleotide
actttcctcctctt

SEQ ID NO: 23168 - DNA, 14 bp, Artificial Sequence
  Description of Artificial Sequence: Synthetic oligonucleotide
tactttcctcctct

SEQ ID NO: 23169 - DNA, 14 bp, Artificial Sequence
  Description of Artificial Sequence: Synthetic oligonucleotide
ctactttcctcctc

SEQ ID NO: 23170 - DNA, 14 bp, Artificial Sequence
  Description of Artificial Sequence: Synthetic oligonucleotide
gctactttcctcct

SEQ ID NO: 23171 - DNA, 14 bp, Artificial Sequence
  Description of Artificial Sequence: Synthetic oligonucleotide
agctactttcctcc

SEQ ID NO: 23172 - DNA, 14 bp, Artificial Sequence
  Description of Artificial Sequence: Synthetic oligonucleotide
cagctactttcctc

SEQ ID NO: 23173 - DNA, 14 bp, Artificial Sequence
  Description of Artificial Sequence: Synthetic oligonucleotide
tcagctactttcct

SEQ ID NO: 23174 - DNA, 14 bp, Artificial Sequence
  Description of Artificial Sequence: Synthetic oligonucleotide
ttcagctactttcc

SEQ ID NO: 23175 - DNA, 14 bp, Artificial Sequence
  Description of Artificial Sequence: Synthetic oligonucleotide
tttcagctactttc

SEQ ID NO: 23176 - DNA, 14 bp, Artificial Sequence
  Description of Artificial Sequence: Synthetic oligonucleotide
atttcagctacttt

SEQ ID NO: 23177 - DNA, 14 bp, Artificial Sequence
  Description of Artificial Sequence: Synthetic oligonucleotide
aatttcagctactt

SEQ ID NO: 23178 - DNA, 14 bp, Artificial Sequence
  Description of Artificial Sequence: Synthetic oligonucleotide
taatttcagctact

SEQ ID NO: 23179 - DNA, 14 bp, Artificial Sequence
  Description of Artificial Sequence: Synthetic oligonucleotide
gtaatttcagctac

SEQ ID NO: 23180 - DNA, 14 bp, Artificial Sequence
  Description of Artificial Sequence: Synthetic oligonucleotide
agtaatttcagcta

SEQ ID NO: 23181 - DNA, 14 bp, Artificial Sequence
  Description of Artificial Sequence: Synthetic oligonucleotide
cagtaatttcagct

SEQ ID NO: 23182 - DNA, 14 bp, Artificial Sequence
  Description of Artificial Sequence: Synthetic oligonucleotide
ccagtaatttcagc

SEQ ID NO: 23183 - DNA, 14 bp, Artificial Sequence
  Description of Artificial Sequence: Synthetic oligonucleotide
tccagtaatttcag

SEQ ID NO: 23184 - DNA, 14 bp, Artificial Sequence
  Description of Artificial Sequence: Synthetic oligonucleotide
ctccagtaatttca

SEQ ID NO: 23185 - DNA, 14 bp, Artificial Sequence
  Description of Artificial Sequence: Synthetic oligonucleotide
tctccagtaatttc

SEQ ID NO: 23186 - DNA, 14 bp, Artificial Sequence
  Description of Artificial Sequence: Synthetic oligonucleotide
ttctccagtaattt

SEQ ID NO: 23187 - DNA, 14 bp, Artificial Sequence
  Description of Artificial Sequence: Synthetic oligonucleotide
tttctccagtaatt

SEQ ID NO: 23188 - DNA, 14 bp, Artificial Sequence
  Description of Artificial Sequence: Synthetic oligonucleotide
atttctccagtaat

SEQ ID NO: 23189 - DNA, 14 bp, Artificial Sequence
  Description of Artificial Sequence: Synthetic oligonucleotide
aatttctccagtaa

SEQ ID NO: 23190 - DNA, 14 bp, Artificial Sequence
  Description of Artificial Sequence: Synthetic oligonucleotide
gaatttctccagta

SEQ ID NO: 23191 - DNA, 14 bp, Artificial Sequence
  Description of Artificial Sequence: Synthetic oligonucleotide
tgaatttctccagt

SEQ ID NO: 23192 - DNA, 14 bp, Artificial Sequence
  Description of Artificial Sequence: Synthetic oligonucleotide
ctgaatttctccag

SEQ ID NO: 23193 - DNA, 14 bp, Artificial Sequence
  Description of Artificial Sequence: Synthetic oligonucleotide
gctgaatttctcca

SEQ ID NO: 23194 - DNA, 14 bp, Artificial Sequence
  Description of Artificial Sequence: Synthetic oligonucleotide
tgctgaatttctcc

SEQ ID NO: 23195 - DNA, 14 bp, Artificial Sequence
  Description of Artificial Sequence: Synthetic oligonucleotide
ctgctgaatttctc

SEQ ID NO: 23196 - DNA, 14 bp, Artificial Sequence
  Description of Artificial Sequence: Synthetic oligonucleotide
actgctgaatttct

SEQ ID NO: 23197 - DNA, 14 bp, Artificial Sequence
  Description of Artificial Sequence: Synthetic oligonucleotide
tactgctgaatttc

SEQ ID NO: 23198 - DNA, 14 bp, Artificial Sequence
  Description of Artificial Sequence: Synthetic oligonucleotide
atactgctgaattt

SEQ ID NO: 23199 - DNA, 14 bp, Artificial Sequence
  Description of Artificial Sequence: Synthetic oligonucleotide
gatactgctgaatt

SEQ ID NO: 23200 - DNA, 14 bp, Artificial Sequence
  Description of Artificial Sequence: Synthetic oligonucleotide
tgatactgctgaat

SEQ ID NO: 23201 - DNA, 14 bp, Artificial Sequence
  Description of Artificial Sequence: Synthetic oligonucleotide
ctgatactgctgaa

SEQ ID NO: 23202 - DNA, 14 bp, Artificial Sequence
  Description of Artificial Sequence: Synthetic oligonucleotide
tctgatactgctga

SEQ ID NO: 23203 - DNA, 14 bp, Artificial Sequence
  Description of Artificial Sequence: Synthetic oligonucleotide
ttctgatactgctg

SEQ ID NO: 23204 - DNA, 14 bp, Artificial Sequence
  Description of Artificial Sequence: Synthetic oligonucleotide
attctgatactgct

SEQ ID NO: 23205 - DNA, 14 bp, Artificial Sequence
  Description of Artificial Sequence: Synthetic oligonucleotide
gattctgatactgc

SEQ ID NO: 23206 - DNA, 14 bp, Artificial Sequence
  Description of Artificial Sequence: Synthetic oligonucleotide
tgattctgatactg

SEQ ID NO: 23207 - DNA, 14 bp, Artificial Sequence
  Description of Artificial Sequence: Synthetic oligonucleotide
ctgattctgatact

SEQ ID NO: 23208 - DNA, 14 bp, Artificial Sequence
  Description of Artificial Sequence: Synthetic oligonucleotide
gctgattctgatac

SEQ ID NO: 23209 - DNA, 14 bp, Artificial Sequence
  Description of Artificial Sequence: Synthetic oligonucleotide
ggctgattctgata

SEQ ID NO: 23210 - DNA, 14 bp, Artificial Sequence
  Description of Artificial Sequence: Synthetic oligonucleotide
aggctgattctgat

SEQ ID NO: 23211 - DNA, 14 bp, Artificial Sequence
  Description of Artificial Sequence: Synthetic oligonucleotide
aaggctgattctga

SEQ ID NO: 23212 - DNA, 14 bp, Artificial Sequence
  Description of Artificial Sequence: Synthetic oligonucleotide
taaggctgattctg

SEQ ID NO: 23213 - DNA, 14 bp, Artificial Sequence
  Description of Artificial Sequence: Synthetic oligonucleotide
gtaaggctgattct

SEQ ID NO: 23214 - DNA, 14 bp, Artificial Sequence
  Description of Artificial Sequence: Synthetic oligonucleotide
agtaaggctgattc

SEQ ID NO: 23215 - DNA, 14 bp, Artificial Sequence
  Description of Artificial Sequence: Synthetic oligonucleotide
cagtaaggctgatt

SEQ ID NO: 23216 - DNA, 14 bp, Artificial Sequence
  Description of Artificial Sequence: Synthetic oligonucleotide
acagtaaggctgat

SEQ ID NO: 23217 - DNA, 14 bp, Artificial Sequence
  Description of Artificial Sequence: Synthetic oligonucleotide
aacagtaaggctga

SEQ ID NO: 23218 - DNA, 14 bp, Artificial Sequence
  Description of Artificial Sequence: Synthetic oligonucleotide
aaacagtaaggctg

SEQ ID NO: 23219 - DNA, 14 bp, Artificial Sequence
  Description of Artificial Sequence: Synthetic oligonucleotide
taaacagtaaggct

SEQ ID NO: 23220 - DNA, 14 bp, Artificial Sequence
  Description of Artificial Sequence: Synthetic oligonucleotide
gtaaacagtaaggc

SEQ ID NO: 23221 - DNA, 14 bp, Artificial Sequence
  Description of Artificial Sequence: Synthetic oligonucleotide
cgtaaacagtaagg

SEQ ID NO: 23222 - DNA, 14 bp, Artificial Sequence
  Description of Artificial Sequence: Synthetic oligonucleotide
ccgtaaacagtaag

SEQ ID NO: 23223 - DNA, 14 bp, Artificial Sequence
  Description of Artificial Sequence: Synthetic oligonucleotide
tccgtaaacagtaa

SEQ ID NO: 23224 - DNA, 14 bp, Artificial Sequence
  Description of Artificial Sequence: Synthetic oligonucleotide
atccgtaaacagta

SEQ ID NO: 23225 - DNA, 14 bp, Artificial Sequence
  Description of Artificial Sequence: Synthetic oligonucleotide
tatccgtaaacagt

SEQ ID NO: 23226 - DNA, 14 bp, Artificial Sequence
  Description of Artificial Sequence: Synthetic oligonucleotide
ctatccgtaaacag

SEQ ID NO: 23227 - DNA, 14 bp, Artificial Sequence
  Description of Artificial Sequence: Synthetic oligonucleotide
tctatccgtaaaca

SEQ ID NO: 23228 - DNA, 14 bp, Artificial Sequence
  Description of Artificial Sequence: Synthetic oligonucleotide
ttctatccgtaaac

SEQ ID NO: 23229 - DNA, 14 bp, Artificial Sequence
  Description of Artificial Sequence: Synthetic oligonucleotide
gttctatccgtaaa

SEQ ID NO: 23230 - DNA, 14 bp, Artificial Sequence
  Description of Artificial Sequence: Synthetic oligonucleotide
ggttctatccgtaa

SEQ ID NO: 23231 - DNA, 14 bp, Artificial Sequence
  Description of Artificial Sequence: Synthetic oligonucleotide
tggttctatccgta

SEQ ID NO: 23232 - DNA, 14 bp, Artificial Sequence
  Description of Artificial Sequence: Synthetic oligonucleotide
ctggttctatccgt

SEQ ID NO: 23233 - DNA, 14 bp, Artificial Sequence
  Description of Artificial Sequence: Synthetic oligonucleotide
tctggttctatccg

SEQ ID NO: 23234 - DNA, 14 bp, Artificial Sequence
  Description of Artificial Sequence: Synthetic oligonucleotide
atctggttctatcc

SEQ ID NO: 23235 - DNA, 14 bp, Artificial Sequence
  Description of Artificial Sequence: Synthetic oligonucleotide
tatctggttctatc

SEQ ID NO: 23236 - DNA, 14 bp, Artificial Sequence
  Description of Artificial Sequence: Synthetic oligonucleotide
atatctggttctat

SEQ ID NO: 23237 - DNA, 14 bp, Artificial Sequence
  Description of Artificial Sequence: Synthetic oligonucleotide
catatctggttcta

SEQ ID NO: 23238 - DNA, 14 bp, Artificial Sequence
  Description of Artificial Sequence: Synthetic oligonucleotide
tcatatctggttct

SEQ ID NO: 23239 - DNA, 14 bp, Artificial Sequence
  Description of Artificial Sequence: Synthetic oligonucleotide
ctcatatctggttc

SEQ ID NO: 23240 - DNA, 14 bp, Artificial Sequence
  Description of Artificial Sequence: Synthetic oligonucleotide
cctcatatctggtt

SEQ ID NO: 23241 - DNA, 14 bp, Artificial Sequence
  Description of Artificial Sequence: Synthetic oligonucleotide
tcctcatatctggt

SEQ ID NO: 23242 - DNA, 14 bp, Artificial Sequence
  Description of Artificial Sequence: Synthetic oligonucleotide
ctcctcatatctgg

SEQ ID NO: 23243 - DNA, 14 bp, Artificial Sequence
  Description of Artificial Sequence: Synthetic oligonucleotide
tctcctcatatctg

SEQ ID NO: 23244 - DNA, 14 bp, Artificial Sequence
  Description of Artificial Sequence: Synthetic oligonucleotide
atctcctcatatct

SEQ ID NO: 23245 - DNA, 14 bp, Artificial Sequence
  Description of Artificial Sequence: Synthetic oligonucleotide
aatctcctcatatc

SEQ ID NO: 23246 - DNA, 14 bp, Artificial Sequence
  Description of Artificial Sequence: Synthetic oligonucleotide
gaatctcctcatat

SEQ ID NO: 23247 - DNA, 14 bp, Artificial Sequence
  Description of Artificial Sequence: Synthetic oligonucleotide
agaatctcctcata

SEQ ID NO: 23248 - DNA, 14 bp, Artificial Sequence
  Description of Artificial Sequence: Synthetic oligonucleotide
aagaatctcctcat

SEQ ID NO: 23249 - DNA, 14 bp, Artificial Sequence
  Description of Artificial Sequence: Synthetic oligonucleotide
aaagaatctcctca

SEQ ID NO: 23250 - DNA, 14 bp, Artificial Sequence
  Description of Artificial Sequence: Synthetic oligonucleotide
caaagaatctcctc

SEQ ID NO: 23251 - DNA, 14 bp, Artificial Sequence
  Description of Artificial Sequence: Synthetic oligonucleotide
tcaaagaatctcct

SEQ ID NO: 23252 - DNA, 14 bp, Artificial Sequence
  Description of Artificial Sequence: Synthetic oligonucleotide
ttcaaagaatctcc

SEQ ID NO: 23253 - DNA, 14 bp, Artificial Sequence
  Description of Artificial Sequence: Synthetic oligonucleotide
tttcaaagaatctc

SEQ ID NO: 23254 - DNA, 14 bp, Artificial Sequence
  Description of Artificial Sequence: Synthetic oligonucleotide
ttttcaaagaatct

SEQ ID NO: 23255 - DNA, 14 bp, Artificial Sequence
  Description of Artificial Sequence: Synthetic oligonucleotide
gttttcaaagaatc

SEQ ID NO: 23256 - DNA, 14 bp, Artificial Sequence
  Description of Artificial Sequence: Synthetic oligonucleotide
ggttttcaaagaat

SEQ ID NO: 23257 - DNA, 14 bp, Artificial Sequence
  Description of Artificial Sequence: Synthetic oligonucleotide
aggttttcaaagaa

SEQ ID NO: 23258 - DNA, 14 bp, Artificial Sequence
  Description of Artificial Sequence: Synthetic oligonucleotide
aaggttttcaaaga

SEQ ID NO: 23259 - DNA, 14 bp, Artificial Sequence
  Description of Artificial Sequence: Synthetic oligonucleotide
taaggttttcaaag

SEQ ID NO: 23260 - DNA, 14 bp, Artificial Sequence
  Description of Artificial Sequence: Synthetic oligonucleotide
ttaaggttttcaaa

SEQ ID NO: 23261 - DNA, 14 bp, Artificial Sequence
  Description of Artificial Sequence: Synthetic oligonucleotide
gttaaggttttcaa

SEQ ID NO: 23262 - DNA, 14 bp, Artificial Sequence
  Description of Artificial Sequence: Synthetic oligonucleotide
ggttaaggttttca

SEQ ID NO: 23263 - DNA, 14 bp, Artificial Sequence
  Description of Artificial Sequence: Synthetic oligonucleotide
gggttaaggttttc

SEQ ID NO: 23264 - DNA, 14 bp, Artificial Sequence
  Description of Artificial Sequence: Synthetic oligonucleotide
ggggttaaggtttt

SEQ ID NO: 23265 - DNA, 14 bp, Artificial Sequence
  Description of Artificial Sequence: Synthetic oligonucleotide
tggggttaaggttt

SEQ ID NO: 23266 - DNA, 14 bp, Artificial Sequence
  Description of Artificial Sequence: Synthetic oligonucleotide
atggggttaaggtt

SEQ ID NO: 23267 - DNA, 14 bp, Artificial Sequence
  Description of Artificial Sequence: Synthetic oligonucleotide
catggggttaaggt

SEQ ID NO: 23268 - DNA, 14 bp, Artificial Sequence
  Description of Artificial Sequence: Synthetic oligonucleotide
ccatggggttaagg

SEQ ID NO: 23269 - DNA, 14 bp, Artificial Sequence
  Description of Artificial Sequence: Synthetic oligonucleotide
cccatggggttaag

SEQ ID NO: 23270 - DNA, 14 bp, Artificial Sequence
  Description of Artificial Sequence: Synthetic oligonucleotide
tcccatggggttaa

SEQ ID NO: 23271 - DNA, 14 bp, Artificial Sequence
  Description of Artificial Sequence: Synthetic oligonucleotide
ttcccatggggtta

SEQ ID NO: 23272 - DNA, 14 bp, Artificial Sequence
  Description of Artificial Sequence: Synthetic oligonucleotide
cttcccatggggtt

SEQ ID NO: 23273 - DNA, 14 bp, Artificial Sequence
  Description of Artificial Sequence: Synthetic oligonucleotide
acttcccatggggt

SEQ ID NO: 23274 - DNA, 14 bp, Artificial Sequence
  Description of Artificial Sequence: Synthetic oligonucleotide
cacttcccatgggg

SEQ ID NO: 23275 - DNA, 14 bp, Artificial Sequence
  Description of Artificial Sequence: Synthetic oligonucleotide
gcacttcccatggg

SEQ ID NO: 23276 - DNA, 14 bp, Artificial Sequence
  Description of Artificial Sequence: Synthetic oligonucleotide
tgcacttcccatgg

SEQ ID NO: 23277 - DNA, 14 bp, Artificial Sequence
  Description of Artificial Sequence: Synthetic oligonucleotide
atgcacttcccatg

SEQ ID NO: 23278 - DNA, 14 bp, Artificial Sequence
  Description of Artificial Sequence: Synthetic oligonucleotide
gatgcacttcccat

SEQ ID NO: 23279 - DNA, 14 bp, Artificial Sequence
  Description of Artificial Sequence: Synthetic oligonucleotide
agatgcacttccca

SEQ ID NO: 23280 - DNA, 14 bp, Artificial Sequence
  Description of Artificial Sequence: Synthetic oligonucleotide
cagatgcacttccc

SEQ ID NO: 23281 - DNA, 14 bp, Artificial Sequence
  Description of Artificial Sequence: Synthetic oligonucleotide
tcagatgcacttcc

SEQ ID NO: 23282 - DNA, 14 bp, Artificial Sequence
  Description of Artificial Sequence: Synthetic oligonucleotide
ttcagatgcacttc

SEQ ID NO: 23283 - DNA, 14 bp, Artificial Sequence
  Description of Artificial Sequence: Synthetic oligonucleotide
tttcagatgcactt

SEQ ID NO: 23284 - DNA, 14 bp, Artificial Sequence
  Description of Artificial Sequence: Synthetic oligonucleotide
ttttcagatgcact

SEQ ID NO: 23285 - DNA, 14 bp, Artificial Sequence
  Description of Artificial Sequence: Synthetic oligonucleotide
tttttcagatgcac

SEQ ID NO: 23286 - DNA, 14 bp, Artificial Sequence
  Description of Artificial Sequence: Synthetic oligonucleotide
ctttttcagatgca

SEQ ID NO: 23287 - DNA, 14 bp, Artificial Sequence
  Description of Artificial Sequence: Synthetic oligonucleotide
tctttttcagatgc

SEQ ID NO: 23288 - DNA, 14 bp, Artificial Sequence
  Description of Artificial Sequence: Synthetic oligonucleotide
ctctttttcagatg

SEQ ID NO: 23289 - DNA, 14 bp, Artificial Sequence
  Description of Artificial Sequence: Synthetic oligonucleotide
actctttttcagat

SEQ ID NO: 23290 - DNA, 14 bp, Artificial Sequence
  Description of Artificial Sequence: Synthetic oligonucleotide
aactctttttcaga

SEQ ID NO: 23291 - DNA, 14 bp, Artificial Sequence
  Description of Artificial Sequence: Synthetic oligonucleotide
aaactctttttcag

SEQ ID NO: 23292 - DNA, 14 bp, Artificial Sequence
  Description of Artificial Sequence: Synthetic oligonucleotide
taaactctttttca

SEQ ID NO: 23293 - DNA, 14 bp, Artificial Sequence
  Description of Artificial Sequence: Synthetic oligonucleotide
gtaaactctttttc

SEQ ID NO: 23294 - DNA, 14 bp, Artificial Sequence
  Description of Artificial Sequence: Synthetic oligonucleotide
tgtaaactcttttt

SEQ ID NO: 23295 - DNA, 14 bp, Artificial Sequence
  Description of Artificial Sequence: Synthetic oligonucleotide
ctgtaaactctttt

SEQ ID NO: 23296 - DNA, 14 bp, Artificial Sequence
  Description of Artificial Sequence: Synthetic oligonucleotide
tctgtaaactcttt

SEQ ID NO: 23297 - DNA, 14 bp, Artificial Sequence
  Description of Artificial Sequence: Synthetic oligonucleotide
atctgtaaactctt

SEQ ID NO: 23298 - DNA, 14 bp, Artificial Sequence
  Description of Artificial Sequence: Synthetic oligonucleotide
aatctgtaaactct

SEQ ID NO: 23299 - DNA, 14 bp, Artificial Sequence
  Description of Artificial Sequence: Synthetic oligonucleotide
taatctgtaaactc

SEQ ID NO: 23300 - DNA, 14 bp, Artificial Sequence
  Description of Artificial Sequence: Synthetic oligonucleotide
ataatctgtaaact

SEQ ID NO: 23301 - DNA, 14 bp, Artificial Sequence
  Description of Artificial Sequence: Synthetic oligonucleotide
aataatctgtaaac

SEQ ID NO: 23302 - DNA, 14 bp, Artificial Sequence
  Description of Artificial Sequence: Synthetic oligonucleotide
aaataatctgtaaa

SEQ ID NO: 23303 - DNA, 14 bp, Artificial Sequence
  Description of Artificial Sequence: Synthetic oligonucleotide
caaataatctgtaa

SEQ ID NO: 23304 - DNA, 14 bp, Artificial Sequence
  Description of Artificial Sequence: Synthetic oligonucleotide
acaaataatctgta

SEQ ID NO: 23305 - DNA, 14 bp, Artificial Sequence
  Description of Artificial Sequence: Synthetic oligonucleotide
aacaaataatctgt

SEQ ID NO: 23306 - DNA, 14 bp, Artificial Sequence
  Description of Artificial Sequence: Synthetic oligonucleotide
gaacaaataatctg

SEQ ID NO: 23307 - DNA, 14 bp, Artificial Sequence
  Description of Artificial Sequence: Synthetic oligonucleotide
tgaacaaataatct

SEQ ID NO: 23308 - DNA, 14 bp, Artificial Sequence
  Description of Artificial Sequence: Synthetic oligonucleotide
ttgaacaaataatc

SEQ ID NO: 23309 - DNA, 14 bp, Artificial Sequence
  Description of Artificial Sequence: Synthetic oligonucleotide
gttgaacaaataat

SEQ ID NO: 23310 - DNA, 14 bp, Artificial Sequence
  Description of Artificial Sequence: Synthetic oligonucleotide
tgttgaacaaataa

SEQ ID NO: 23311 - DNA, 14 bp, Artificial Sequence
  Description of Artificial Sequence: Synthetic oligonucleotide
ttgttgaacaaata

SEQ ID NO: 23312 - DNA, 14 bp, Artificial Sequence
  Description of Artificial Sequence: Synthetic oligonucleotide
cttgttgaacaaat

SEQ ID NO: 23313 - DNA, 14 bp, Artificial Sequence
  Description of Artificial Sequence: Synthetic oligonucleotide
acttgttgaacaaa

SEQ ID NO: 23314 - DNA, 14 bp, Artificial Sequence
  Description of Artificial Sequence: Synthetic oligonucleotide
gacttgttgaacaa

SEQ ID NO: 23315 - DNA, 14 bp, Artificial Sequence
  Description of Artificial Sequence: Synthetic oligonucleotide
tgacttgttgaaca

SEQ ID NO: 23316 - DNA, 14 bp, Artificial Sequence
  Description of Artificial Sequence: Synthetic oligonucleotide
gtgacttgttgaac

SEQ ID NO: 23317 - DNA, 14 bp, Artificial Sequence
  Description of Artificial Sequence: Synthetic oligonucleotide
agtgacttgttgaa

SEQ ID NO: 23318 - DNA, 14 bp, Artificial Sequence
  Description of Artificial Sequence: Synthetic oligonucleotide
tagtgacttgttga

SEQ ID NO: 23319 - DNA, 14 bp, Artificial Sequence
  Description of Artificial Sequence: Synthetic oligonucleotide
ctagtgacttgttg

SEQ ID NO: 23320 - DNA, 14 bp, Artificial Sequence
  Description of Artificial Sequence: Synthetic oligonucleotide
tctagtgacttgtt

SEQ ID NO: 23321 - DNA, 14 bp, Artificial Sequence
  Description of Artificial Sequence: Synthetic oligonucleotide
ttctagtgacttgt

SEQ ID NO: 23322 - DNA, 14 bp, Artificial Sequence
  Description of Artificial Sequence: Synthetic oligonucleotide
tttctagtgacttg

SEQ ID NO: 23323 - DNA, 14 bp, Artificial Sequence
  Description of Artificial Sequence: Synthetic oligonucleotide
atttctagtgactt

SEQ ID NO: 23324 - DNA, 14 bp, Artificial Sequence
  Description of Artificial Sequence: Synthetic oligonucleotide
aatttctagtgact

SEQ ID NO: 23325 - DNA, 14 bp, Artificial Sequence
  Description of Artificial Sequence: Synthetic oligonucleotide
caatttctagtgac

SEQ ID NO: 23326 - DNA, 14 bp, Artificial Sequence
  Description of Artificial Sequence: Synthetic oligonucleotide
tcaatttctagtga

SEQ ID NO: 23327 - DNA, 14 bp, Artificial Sequence
  Description of Artificial Sequence: Synthetic oligonucleotide
ttcaatttctagtg

SEQ ID NO: 23328 - DNA, 14 bp, Artificial Sequence
  Description of Artificial Sequence: Synthetic oligonucleotide
gttcaatttctagt

SEQ ID NO: 23329 - DNA, 14 bp, Artificial Sequence
  Description of Artificial Sequence: Synthetic oligonucleotide
ggttcaatttctag

SEQ ID NO: 23330 - DNA, 14 bp, Artificial Sequence
  Description of Artificial Sequence: Synthetic oligonucleotide
aggttcaatttcta

SEQ ID NO: 23331 - DNA, 14 bp, Artificial Sequence
  Description of Artificial Sequence: Synthetic oligonucleotide
gaggttcaatttct

SEQ ID NO: 23332 - DNA, 14 bp, Artificial Sequence
  Description of Artificial Sequence: Synthetic oligonucleotide
cgaggttcaatttc

SEQ ID NO: 23333 - DNA, 14 bp, Artificial Sequence
  Description of Artificial Sequence: Synthetic oligonucleotide
tcgaggttcaattt

SEQ ID NO: 23334 - DNA, 14 bp, Artificial Sequence
  Description of Artificial Sequence: Synthetic oligonucleotide
ttcgaggttcaatt

SEQ ID NO: 23335 - DNA, 14 bp, Artificial Sequence
  Description of Artificial Sequence: Synthetic oligonucleotide
tttcgaggttcaat

SEQ ID NO: 23336 - DNA, 14 bp, Artificial Sequence
  Description of Artificial Sequence: Synthetic oligonucleotide
gtttcgaggttcaa

SEQ ID NO: 23337 - DNA, 14 bp, Artificial Sequence
  Description of Artificial Sequence: Synthetic oligonucleotide
agtttcgaggttca

SEQ ID NO: 23338 - DNA, 14 bp, Artificial Sequence
  Description of Artificial Sequence: Synthetic oligonucleotide
cagtttcgaggttc

SEQ ID NO: 23339 - DNA, 14 bp, Artificial Sequence
  Description of Artificial Sequence: Synthetic oligonucleotide
gcagtttcgaggtt

SEQ ID NO: 23340 - DNA, 14 bp, Artificial Sequence
  Description of Artificial Sequence: Synthetic oligonucleotide
tgcagtttcgaggt

SEQ ID NO: 23341 - DNA, 14 bp, Artificial Sequence
  Description of Artificial Sequence: Synthetic oligonucleotide
ttgcagtttcgagg

SEQ ID NO: 23342 - DNA, 14 bp, Artificial Sequence
  Description of Artificial Sequence: Synthetic oligonucleotide
tttgcagtttcgag

SEQ ID NO: 23343 - DNA, 14 bp, Artificial Sequence
  Description of Artificial Sequence: Synthetic oligonucleotide
gtttgcagtttcga

SEQ ID NO: 23344 - DNA, 14 bp, Artificial Sequence
  Description of Artificial Sequence: Synthetic oligonucleotide
tgtttgcagtttcg

SEQ ID NO: 23345 - DNA, 14 bp, Artificial Sequence
  Description of Artificial Sequence: Synthetic oligonucleotide
ctgtttgcagtttc

SEQ ID NO: 23346 - DNA, 14 bp, Artificial Sequence
  Description of Artificial Sequence: Synthetic oligonucleotide
gctgtttgcagttt

SEQ ID NO: 23347 - DNA, 14 bp, Artificial Sequence
  Description of Artificial Sequence: Synthetic oligonucleotide
ggctgtttgcagtt

SEQ ID NO: 23348 - DNA, 14 bp, Artificial Sequence
  Description of Artificial Sequence: Synthetic oligonucleotide
tggctgtttgcagt

SEQ ID NO: 23349 - DNA, 14 bp, Artificial Sequence
  Description of Artificial Sequence: Synthetic oligonucleotide
gtggctgtttgcag

SEQ ID NO: 23350 - DNA, 14 bp, Artificial Sequence
  Description of Artificial Sequence: Synthetic oligonucleotide
ggtggctgtttgca

SEQ ID NO: 23351 - DNA, 14 bp, Artificial Sequence
  Description of Artificial Sequence: Synthetic oligonucleotide
aggtggctgtttgc

SEQ ID NO: 23352 - DNA, 14 bp, Artificial Sequence
  Description of Artificial Sequence: Synthetic oligonucleotide
gaggtggctgtttg

SEQ ID NO: 23353 - DNA, 14 bp, Artificial Sequence
  Description of Artificial Sequence: Synthetic oligonucleotide
cgaggtggctgttt

SEQ ID NO: 23354 - DNA, 14 bp, Artificial Sequence
  Description of Artificial Sequence: Synthetic oligonucleotide
tcgaggtggctgtt

SEQ ID NO: 23355 - DNA, 14 bp, Artificial Sequence
  Description of Artificial Sequence: Synthetic oligonucleotide
atcgaggtggctgt

SEQ ID NO: 23356 - DNA, 14 bp, Artificial Sequence
  Description of Artificial Sequence: Synthetic oligonucleotide
aatcgaggtggctg

SEQ ID NO: 23357 - DNA, 14 bp, Artificial Sequence
  Description of Artificial Sequence: Synthetic oligonucleotide
aaatcgaggtggct

SEQ ID NO: 23358 - DNA, 14 bp, Artificial Sequence
  Description of Artificial Sequence: Synthetic oligonucleotide
gaaatcgaggtggc

SEQ ID NO: 23359 - DNA, 14 bp, Artificial Sequence
  Description of Artificial Sequence: Synthetic oligonucleotide
ggaaatcgaggtgg

SEQ ID NO: 23360 - DNA, 14 bp, Artificial Sequence
  Description of Artificial Sequence: Synthetic oligonucleotide
aggaaatcgaggtg

SEQ ID NO: 23361 - DNA, 14 bp, Artificial Sequence
  Description of Artificial Sequence: Synthetic oligonucleotide
taggaaatcgaggt

SEQ ID NO: 23362 - DNA, 14 bp, Artificial Sequence
  Description of Artificial Sequence: Synthetic oligonucleotide
ctaggaaatcgagg

SEQ ID NO: 23363 - DNA, 14 bp, Artificial Sequence
  Description of Artificial Sequence: Synthetic oligonucleotide
cctaggaaatcgag

SEQ ID NO: 23364 - DNA, 14 bp, Artificial Sequence
  Description of Artificial Sequence: Synthetic oligonucleotide
tcctaggaaatcga

SEQ ID NO: 23365 - DNA, 14 bp, Artificial Sequence
  Description of Artificial Sequence: Synthetic oligonucleotide
ttcctaggaaatcg

SEQ ID NO: 23366 - DNA, 14 bp, Artificial Sequence
  Description of Artificial Sequence: Synthetic oligonucleotide
tttcctaggaaatc

SEQ ID NO: 23367 - DNA, 14 bp, Artificial Sequence
  Description of Artificial Sequence: Synthetic oligonucleotide
atttcctaggaaat

SEQ ID NO: 23368 - DNA, 14 bp, Artificial Sequence
  Description of Artificial Sequence: Synthetic oligonucleotide
gatttcctaggaaa

SEQ ID NO: 23369 - DNA, 14 bp, Artificial Sequence
  Description of Artificial Sequence: Synthetic oligonucleotide
tgatttcctaggaa

SEQ ID NO: 23370 - DNA, 14 bp, Artificial Sequence
  Description of Artificial Sequence: Synthetic oligonucleotide
ttgatttcctagga

SEQ ID NO: 23371 - DNA, 14 bp, Artificial Sequence
  Description of Artificial Sequence: Synthetic oligonucleotide
gttgatttcctagg

SEQ ID NO: 23372 - DNA, 14 bp, Artificial Sequence
  Description of Artificial Sequence: Synthetic oligonucleotide
agttgatttcctag

SEQ ID NO: 23373 - DNA, 14 bp, Artificial Sequence
  Description of Artificial Sequence: Synthetic oligonucleotide
aagttgatttccta

SEQ ID NO: 23374 - DNA, 14 bp, Artificial Sequence
  Description of Artificial Sequence: Synthetic oligonucleotide
aaagttgatttcct

SEQ ID NO: 23375 - DNA, 14 bp, Artificial Sequence
  Description of Artificial Sequence: Synthetic oligonucleotide
aaaagttgatttcc

SEQ ID NO: 23376 - DNA, 14 bp, Artificial Sequence
  Description of Artificial Sequence: Synthetic oligonucleotide
aaaaagttgatttc

SEQ ID NO: 23377 - DNA, 14 bp, Artificial Sequence
  Description of Artificial Sequence: Synthetic oligonucleotide
gaaaaagttgattt

SEQ ID NO: 23378 - DNA, 14 bp, Artificial Sequence
  Description of Artificial Sequence: Synthetic oligonucleotide
ggaaaaagttgatt

SEQ ID NO: 23379 - DNA, 14 bp, Artificial Sequence
  Description of Artificial Sequence: Synthetic oligonucleotide
aggaaaaagttgat

SEQ ID NO: 23380 - DNA, 14 bp, Artificial Sequence
  Description of Artificial Sequence: Synthetic oligonucleotide
aaggaaaaagttga

SEQ ID NO: 23381 - DNA, 14 bp, Artificial Sequence
  Description of Artificial Sequence: Synthetic oligonucleotide
taaggaaaaagttg

SEQ ID NO: 23382 - DNA, 14 bp, Artificial Sequence
  Description of Artificial Sequence: Synthetic oligonucleotide
ttaaggaaaaagtt

SEQ ID NO: 23383 - DNA, 14 bp, Artificial Sequence
  Description of Artificial Sequence: Synthetic oligonucleotide
tttaaggaaaaagt

SEQ ID NO: 23384 - DNA, 14 bp, Artificial Sequence
  Description of Artificial Sequence: Synthetic oligonucleotide
ttttaaggaaaaag

SEQ ID NO: 23385 - DNA, 14 bp, Artificial Sequence
  Description of Artificial Sequence: Synthetic oligonucleotide
attttaaggaaaaa

SEQ ID NO: 23386 - DNA, 14 bp, Artificial Sequence
  Description of Artificial Sequence: Synthetic oligonucleotide
gattttaaggaaaa

SEQ ID NO: 23387 - DNA, 14 bp, Artificial Sequence
  Description of Artificial Sequence: Synthetic oligonucleotide
agattttaaggaaa

SEQ ID NO: 23388 - DNA, 14 bp, Artificial Sequence
  Description of Artificial Sequence: Synthetic oligonucleotide
gagattttaaggaa

SEQ ID NO: 23389 - DNA, 14 bp, Artificial Sequence
  Description of Artificial Sequence: Synthetic oligonucleotide
ggagattttaagga

SEQ ID NO: 23390 - DNA, 14 bp, Artificial Sequence
  Description of Artificial Sequence: Synthetic oligonucleotide
aggagattttaagg

SEQ ID NO: 23391 - DNA, 14 bp, Artificial Sequence
  Description of Artificial Sequence: Synthetic oligonucleotide
caggagattttaag

SEQ ID NO: 23392 - DNA, 14 bp, Artificial Sequence
  Description of Artificial Sequence: Synthetic oligonucleotide
ccaggagattttaa

SEQ ID NO: 23393 - DNA, 14 bp, Artificial Sequence
  Description of Artificial Sequence: Synthetic oligonucleotide
tccaggagatttta

SEQ ID NO: 23394 - DNA, 14 bp, Artificial Sequence
  Description of Artificial Sequence: Synthetic oligonucleotide
ttccaggagatttt

SEQ ID NO: 23395 - DNA, 14 bp, Artificial Sequence
  Description of Artificial Sequence: Synthetic oligonucleotide
attccaggagattt

SEQ ID NO: 23396 - DNA, 14 bp, Artificial Sequence
  Description of Artificial Sequence: Synthetic oligonucleotide
tattccaggagatt

SEQ ID NO: 23397 - DNA, 14 bp, Artificial Sequence
  Description of Artificial Sequence: Synthetic oligonucleotide
ttattccaggagat

SEQ ID NO: 23398 - DNA, 14 bp, Artificial Sequence
  Description of Artificial Sequence: Synthetic oligonucleotide
cttattccaggaga

SEQ ID NO: 23399 - DNA, 14 bp, Artificial Sequence
  Description of Artificial Sequence: Synthetic oligonucleotide
ccttattccaggag

SEQ ID NO: 23400 - DNA, 14 bp, Artificial Sequence
  Description of Artificial Sequence: Synthetic oligonucleotide
gccttattccagga

SEQ ID NO: 23401 - DNA, 14 bp, Artificial Sequence
  Description of Artificial Sequence: Synthetic oligonucleotide
ggccttattccagg

SEQ ID NO: 23402 - DNA, 14 bp, Artificial Sequence
  Description of Artificial Sequence: Synthetic oligonucleotide
aggccttattccag

SEQ ID NO: 23403 - DNA, 14 bp, Artificial Sequence
  Description of Artificial Sequence: Synthetic oligonucleotide
taggccttattcca

SEQ ID NO: 23404 - DNA, 14 bp, Artificial Sequence
  Description of Artificial Sequence: Synthetic oligonucleotide
ttaggccttattcc

SEQ ID NO: 23405 - DNA, 14 bp, Artificial Sequence
  Description of Artificial Sequence: Synthetic oligonucleotide
gttaggccttattc

SEQ ID NO: 23406 - DNA, 14 bp, Artificial Sequence
  Description of Artificial Sequence: Synthetic oligonucleotide
tgttaggccttatt

SEQ ID NO: 23407 - DNA, 14 bp, Artificial Sequence
  Description of Artificial Sequence: Synthetic oligonucleotide
gtgttaggccttat

SEQ ID NO: 23408 - DNA, 14 bp, Artificial Sequence
  Description of Artificial Sequence: Synthetic oligonucleotide
tgtgttaggcctta

SEQ ID NO: 23409 - DNA, 14 bp, Artificial Sequence
  Description of Artificial Sequence: Synthetic oligonucleotide
ctgtgttaggcctt

SEQ ID NO: 23410 - DNA, 14 bp, Artificial Sequence
  Description of Artificial Sequence: Synthetic oligonucleotide
cctgtgttaggcct

SEQ ID NO: 23411 - DNA, 14 bp, Artificial Sequence
  Description of Artificial Sequence: Synthetic oligonucleotide
gcctgtgttaggcc

SEQ ID NO: 23412 - DNA, 14 bp, Artificial Sequence
  Description of Artificial Sequence: Synthetic oligonucleotide
ggcctgtgttaggc

SEQ ID NO: 23413 - DNA, 14 bp, Artificial Sequence
  Description of Artificial Sequence: Synthetic oligonucleotide
cggcctgtgttagg

SEQ ID NO: 23414 - DNA, 14 bp, Artificial Sequence
  Description of Artificial Sequence: Synthetic oligonucleotide
tcggcctgtgttag

SEQ ID NO: 23415 - DNA, 14 bp, Artificial Sequence
  Description of Artificial Sequence: Synthetic oligonucleotide
gtcggcctgtgtta

SEQ ID NO: 23416 - DNA, 14 bp, Artificial Sequence
  Description of Artificial Sequence: Synthetic oligonucleotide
tgtcggcctgtgtt

SEQ ID NO: 23417 - DNA, 14 bp, Artificial Sequence
  Description of Artificial Sequence: Synthetic oligonucleotide
atgtcggcctgtgt

SEQ ID NO: 23418 - DNA, 14 bp, Artificial Sequence
  Description of Artificial Sequence: Synthetic oligonucleotide
catgtcggcctgtg

SEQ ID NO: 23419 - DNA, 14 bp, Artificial Sequence
  Description of Artificial Sequence: Synthetic oligonucleotide
ccatgtcggcctgt

SEQ ID NO: 23420 - DNA, 14 bp, Artificial Sequence
  Description of Artificial Sequence: Synthetic oligonucleotide
gccatgtcggcctg

SEQ ID NO: 23421 - DNA, 14 bp, Artificial Sequence
  Description of Artificial Sequence: Synthetic oligonucleotide
agccatgtcggcct

SEQ ID NO: 23422 - DNA, 14 bp, Artificial Sequence
  Description of Artificial Sequence: Synthetic oligonucleotide
gagccatgtcggcc

SEQ ID NO: 23423 - DNA, 14 bp, Artificial Sequence
  Description of Artificial Sequence: Synthetic oligonucleotide
agagccatgtcggc

SEQ ID NO: 23424 - DNA, 14 bp, Artificial Sequence
  Description of Artificial Sequence: Synthetic oligonucleotide
tagagccatgtcgg

SEQ ID NO: 23425 - DNA, 14 bp, Artificial Sequence
  Description of Artificial Sequence: Synthetic oligonucleotide
gtagagccatgtcg

SEQ ID NO: 23426 - DNA, 14 bp, Artificial Sequence
  Description of Artificial Sequence: Synthetic oligonucleotide
ggtagagccatgtc

SEQ ID NO: 23427 - DNA, 14 bp, Artificial Sequence
  Description of Artificial Sequence: Synthetic oligonucleotide
aggtagagccatgt

SEQ ID NO: 23428 - DNA, 14 bp, Artificial Sequence
  Description of Artificial Sequence: Synthetic oligonucleotide
gaggtagagccatg

SEQ ID NO: 23429 - DNA, 14 bp, Artificial Sequence
  Description of Artificial Sequence: Synthetic oligonucleotide
tgaggtagagccat

SEQ ID NO: 23430 - DNA, 14 bp, Artificial Sequence
  Description of Artificial Sequence: Synthetic oligonucleotide
ctgaggtagagcca

SEQ ID NO: 23431 - DNA, 14 bp, Artificial Sequence
  Description of Artificial Sequence: Synthetic oligonucleotide
cctgaggtagagcc

SEQ ID NO: 23432 - DNA, 14 bp, Artificial Sequence
  Description of Artificial Sequence: Synthetic oligonucleotide
acctgaggtagagc

SEQ ID NO: 23433 - DNA, 14 bp, Artificial Sequence
  Description of Artificial Sequence: Synthetic oligonucleotide
tacctgaggtagag

SEQ ID NO: 23434 - DNA, 14 bp, Artificial Sequence
  Description of Artificial Sequence: Synthetic oligonucleotide
gtacctgaggtaga

SEQ ID NO: 23435 - DNA, 14 bp, Artificial Sequence
  Description of Artificial Sequence: Synthetic oligonucleotide
agtacctgaggtag

SEQ ID NO: 23436 - DNA, 14 bp, Artificial Sequence
  Description of Artificial Sequence: Synthetic oligonucleotide
aagtacctgaggta

SEQ ID NO: 23437 - DNA, 14 bp, Artificial Sequence
  Description of Artificial Sequence: Synthetic oligonucleotide
aaagtacctgaggt

SEQ ID NO: 23438 - DNA, 14 bp, Artificial Sequence
  Description of Artificial Sequence: Synthetic oligonucleotide
taaagtacctgagg

SEQ ID NO: 23439 - DNA, 14 bp, Artificial Sequence
  Description of Artificial Sequence: Synthetic oligonucleotide
gtaaagtacctgag

SEQ ID NO: 23440 - DNA, 14 bp, Artificial Sequence
  Description of Artificial Sequence: Synthetic oligonucleotide
cgtaaagtacctga

SEQ ID NO: 23441 - DNA, 14 bp, Artificial Sequence
  Description of Artificial Sequence: Synthetic oligonucleotide
tcgtaaagtacctg

SEQ ID NO: 23442 - DNA, 14 bp, Artificial Sequence
  Description of Artificial Sequence: Synthetic oligonucleotide
ctcgtaaagtacct

SEQ ID NO: 23443 - DNA, 14 bp, Artificial Sequence
  Description of Artificial Sequence: Synthetic oligonucleotide
cctcgtaaagtacc

SEQ ID NO: 23444 - DNA, 14 bp, Artificial Sequence
  Description of Artificial Sequence: Synthetic oligonucleotide
acctcgtaaagtac

SEQ ID NO: 23445 - DNA, 14 bp, Artificial Sequence
  Description of Artificial Sequence: Synthetic oligonucleotide
gacctcgtaaagta

SEQ ID NO: 23446 - DNA, 14 bp, Artificial Sequence
  Description of Artificial Sequence: Synthetic oligonucleotide
tgacctcgtaaagt

SEQ ID NO: 23447 - DNA, 14 bp, Artificial Sequence
  Description of Artificial Sequence: Synthetic oligonucleotide
gtgacctcgtaaag

SEQ ID NO: 23448 - DNA, 14 bp, Artificial Sequence
  Description of Artificial Sequence: Synthetic oligonucleotide
ggtgacctcgtaaa

SEQ ID NO: 23449 - DNA, 14 bp, Artificial Sequence
  Description of Artificial Sequence: Synthetic oligonucleotide
gggtgacctcgtaa

SEQ ID NO: 23450 - DNA, 14 bp, Artificial Sequence
  Description of Artificial Sequence: Synthetic oligonucleotide
tgggtgacctcgta

SEQ ID NO: 23451 - DNA, 14 bp, Artificial Sequence
  Description of Artificial Sequence: Synthetic oligonucleotide
ttgggtgacctcgt

SEQ ID NO: 23452 - DNA, 14 bp, Artificial Sequence
  Description of Artificial Sequence: Synthetic oligonucleotide
gttgggtgacctcg

SEQ ID NO: 23453 - DNA, 14 bp, Artificial Sequence
  Description of Artificial Sequence: Synthetic oligonucleotide
tgttgggtgacctc

SEQ ID NO: 23454 - DNA, 14 bp, Artificial Sequence
  Description of Artificial Sequence: Synthetic oligonucleotide
gtgttgggtgacct

SEQ ID NO: 23455 - DNA, 14 bp, Artificial Sequence
  Description of Artificial Sequence: Synthetic oligonucleotide
ggtgttgggtgacc

SEQ ID NO: 23456 - DNA, 14 bp, Artificial Sequence
  Description of Artificial Sequence: Synthetic oligonucleotide
tggtgttgggtgac

SEQ ID NO: 23457 - DNA, 14 bp, Artificial Sequence
  Description of Artificial Sequence: Synthetic oligonucleotide
atggtgttgggtga

SEQ ID NO: 23458 - DNA, 14 bp, Artificial Sequence
  Description of Artificial Sequence: Synthetic oligonucleotide
aatggtgttgggtg

SEQ ID NO: 23459 - DNA, 14 bp, Artificial Sequence
  Description of Artificial Sequence: Synthetic oligonucleotide
taatggtgttgggt

SEQ ID NO: 23460 - DNA, 14 bp, Artificial Sequence
  Description of Artificial Sequence: Synthetic oligonucleotide
ctaatggtgttggg

SEQ ID NO: 23461 - DNA, 14 bp, Artificial Sequence
  Description of Artificial Sequence: Synthetic oligonucleotide
tctaatggtgttgg

SEQ ID NO: 23462 - DNA, 14 bp, Artificial Sequence
  Description of Artificial Sequence: Synthetic oligonucleotide
ttctaatggtgttg

SEQ ID NO: 23463 - DNA, 14 bp, Artificial Sequence
  Description of Artificial Sequence: Synthetic oligonucleotide
tttctaatggtgtt

SEQ ID NO: 23464 - DNA, 14 bp, Artificial Sequence
  Description of Artificial Sequence: Synthetic oligonucleotide
ctttctaatggtgt

SEQ ID NO: 23465 - DNA, 14 bp, Artificial Sequence
  Description of Artificial Sequence: Synthetic oligonucleotide
tctttctaatggtg

SEQ ID NO: 23466 - DNA, 14 bp, Artificial Sequence
  Description of Artificial Sequence: Synthetic oligonucleotide
ctctttctaatggt

SEQ ID NO: 23467 - DNA, 14 bp, Artificial Sequence
  Description of Artificial Sequence: Synthetic oligonucleotide
tctctttctaatgg

SEQ ID NO: 23468 - DNA, 14 bp, Artificial Sequence
  Description of Artificial Sequence: Synthetic oligonucleotide
ttctctttctaatg

SEQ ID NO: 23469 - DNA, 14 bp, Artificial Sequence
  Description of Artificial Sequence: Synthetic oligonucleotide
gttctctttctaat

SEQ ID NO: 23470 - DNA, 14 bp, Artificial Sequence
  Description of Artificial Sequence: Synthetic oligonucleotide
ggttctctttctaa

SEQ ID NO: 23471 - DNA, 14 bp, Artificial Sequence
  Description of Artificial Sequence: Synthetic oligonucleotide
tggttctctttcta

SEQ ID NO: 23472 - DNA, 14 bp, Artificial Sequence
  Description of Artificial Sequence: Synthetic oligonucleotide
atggttctctttct

SEQ ID NO: 23473 - DNA, 14 bp, Artificial Sequence
  Description of Artificial Sequence: Synthetic oligonucleotide
catggttctctttc

SEQ ID NO: 23474 - DNA, 14 bp, Artificial Sequence
  Description of Artificial Sequence: Synthetic oligonucleotide
acatggttctcttt

SEQ ID NO: 23475 - DNA, 14 bp, Artificial Sequence
  Description of Artificial Sequence: Synthetic oligonucleotide
tacatggttctctt

SEQ ID NO: 23476 - DNA, 14 bp, Artificial Sequence
  Description of Artificial Sequence: Synthetic oligonucleotide
ttacatggttctct

SEQ ID NO: 23477 - DNA, 14 bp, Artificial Sequence
  Description of Artificial Sequence: Synthetic oligonucleotide
tttacatggttctc

SEQ ID NO: 23478 - DNA, 14 bp, Artificial Sequence
  Description of Artificial Sequence: Synthetic oligonucleotide
ttttacatggttct

SEQ ID NO: 23479 - DNA, 14 bp, Artificial Sequence
  Description of Artificial Sequence: Synthetic oligonucleotide
attttacatggttc

SEQ ID NO: 23480 - DNA, 14 bp, Artificial Sequence
  Description of Artificial Sequence: Synthetic oligonucleotide
tattttacatggtt

SEQ ID NO: 23481 - DNA, 14 bp, Artificial Sequence
  Description of Artificial Sequence: Synthetic oligonucleotide
ttattttacatggt

SEQ ID NO: 23482 - DNA, 14 bp, Artificial Sequence
  Description of Artificial Sequence: Synthetic oligonucleotide
cttattttacatgg

SEQ ID NO: 23483 - DNA, 14 bp, Artificial Sequence
  Description of Artificial Sequence: Synthetic oligonucleotide
gcttattttacatg

SEQ ID NO: 23484 - DNA, 14 bp, Artificial Sequence
  Description of Artificial Sequence: Synthetic oligonucleotide
agcttattttacat

SEQ ID NO: 23485 - DNA, 14 bp, Artificial Sequence
  Description of Artificial Sequence: Synthetic oligonucleotide
aagcttattttaca

SEQ ID NO: 23486 - DNA, 14 bp, Artificial Sequence
  Description of Artificial Sequence: Synthetic oligonucleotide
aaagcttattttac

SEQ ID NO: 23487 - DNA, 14 bp, Artificial Sequence
  Description of Artificial Sequence: Synthetic oligonucleotide
taaagcttatttta

SEQ ID NO: 23488 - DNA, 14 bp, Artificial Sequence
  Description of Artificial Sequence: Synthetic oligonucleotide
ctaaagcttatttt

SEQ ID NO: 23489 - DNA, 14 bp, Artificial Sequence
  Description of Artificial Sequence: Synthetic oligonucleotide
actaaagcttattt

SEQ ID NO: 23490 - DNA, 14 bp, Artificial Sequence
  Description of Artificial Sequence: Synthetic oligonucleotide
gactaaagcttatt

SEQ ID NO: 23491 - DNA, 14 bp, Artificial Sequence
  Description of Artificial Sequence: Synthetic oligonucleotide
cgactaaagcttat

SEQ ID NO: 23492 - DNA, 14 bp, Artificial Sequence
  Description of Artificial Sequence: Synthetic oligonucleotide
ccgactaaagctta

SEQ ID NO: 23493 - DNA, 14 bp, Artificial Sequence
  Description of Artificial Sequence: Synthetic oligonucleotide
tccgactaaagctt

SEQ ID NO: 23494 - DNA, 14 bp, Artificial Sequence
  Description of Artificial Sequence: Synthetic oligonucleotide
atccgactaaagct

SEQ ID NO: 23495 - DNA, 14 bp, Artificial Sequence
  Description of Artificial Sequence: Synthetic oligonucleotide
aatccgactaaagc

SEQ ID NO: 23496 - DNA, 14 bp, Artificial Sequence
  Description of Artificial Sequence: Synthetic oligonucleotide
caatccgactaaag

SEQ ID NO: 23497 - DNA, 14 bp, Artificial Sequence
  Description of Artificial Sequence: Synthetic oligonucleotide
gcaatccgactaaa

SEQ ID NO: 23498 - DNA, 14 bp, Artificial Sequence
  Description of Artificial Sequence: Synthetic oligonucleotide
agcaatccgactaa

SEQ ID NO: 23499 - DNA, 14 bp, Artificial Sequence
  Description of Artificial Sequence: Synthetic oligonucleotide
cagcaatccgacta

SEQ ID NO: 23500 - DNA, 14 bp, Artificial Sequence
  Description of Artificial Sequence: Synthetic oligonucleotide
tcagcaatccgact

SEQ ID NO: 23501 - DNA, 14 bp, Artificial Sequence
  Description of Artificial Sequence: Synthetic oligonucleotide
ttcagcaatccgac

SEQ ID NO: 23502 - DNA, 14 bp, Artificial Sequence
  Description of Artificial Sequence: Synthetic oligonucleotide
tttcagcaatccga

SEQ ID NO: 23503 - DNA, 14 bp, Artificial Sequence
  Description of Artificial Sequence: Synthetic oligonucleotide
gtttcagcaatccg

SEQ ID NO: 23504 - DNA, 14 bp, Artificial Sequence
  Description of Artificial Sequence: Synthetic oligonucleotide
agtttcagcaatcc

SEQ ID NO: 23505 - DNA, 14 bp, Artificial Sequence
  Description of Artificial Sequence: Synthetic oligonucleotide
cagtttcagcaatc

SEQ ID NO: 23506 - DNA, 14 bp, Artificial Sequence
  Description of Artificial Sequence: Synthetic oligonucleotide
tcagtttcagcaat

SEQ ID NO: 23507 - DNA, 14 bp, Artificial Sequence
  Description of Artificial Sequence: Synthetic oligonucleotide
ctcagtttcagcaa

SEQ ID NO: 23508 - DNA, 14 bp, Artificial Sequence
  Description of Artificial Sequence: Synthetic oligonucleotide
gctcagtttcagca

SEQ ID NO: 23509 - DNA, 14 bp, Artificial Sequence
  Description of Artificial Sequence: Synthetic oligonucleotide
agctcagtttcagc

SEQ ID NO: 23510 - DNA, 14 bp, Artificial Sequence
  Description of Artificial Sequence: Synthetic oligonucleotide
cagctcagtttcag

SEQ ID NO: 23511 - DNA, 14 bp, Artificial Sequence
  Description of Artificial Sequence: Synthetic oligonucleotide
ccagctcagtttca

SEQ ID NO: 23512 - DNA, 14 bp, Artificial Sequence
  Description of Artificial Sequence: Synthetic oligonucleotide
tccagctcagtttc

SEQ ID NO: 23513 - DNA, 14 bp, Artificial Sequence
  Description of Artificial Sequence: Synthetic oligonucleotide
ttccagctcagttt

SEQ ID NO: 23514 - DNA, 14 bp, Artificial Sequence
  Description of Artificial Sequence: Synthetic oligonucleotide
attccagctcagtt

SEQ ID NO: 23515 - DNA, 14 bp, Artificial Sequence
  Description of Artificial Sequence: Synthetic oligonucleotide
gattccagctcagt

SEQ ID NO: 23516 - DNA, 14 bp, Artificial Sequence
  Description of Artificial Sequence: Synthetic oligonucleotide
tgattccagctcag

SEQ ID NO: 23517 - DNA, 14 bp, Artificial Sequence
  Description of Artificial Sequence: Synthetic oligonucleotide
ttgattccagctca

SEQ ID NO: 23518 - DNA, 14 bp, Artificial Sequence
  Description of Artificial Sequence: Synthetic oligonucleotide
gttgattccagctc

SEQ ID NO: 23519 - DNA, 14 bp, Artificial Sequence
  Description of Artificial Sequence: Synthetic oligonucleotide
tgttgattccagct

SEQ ID NO: 23520 - DNA, 14 bp, Artificial Sequence
  Description of Artificial Sequence: Synthetic oligonucleotide
ctgttgattccagc

SEQ ID NO: 23521 - DNA, 14 bp, Artificial Sequence
  Description of Artificial Sequence: Synthetic oligonucleotide
actgttgattccag

SEQ ID NO: 23522 - DNA, 14 bp, Artificial Sequence
  Description of Artificial Sequence: Synthetic oligonucleotide
cactgttgattcca

SEQ ID NO: 23523 - DNA, 14 bp, Artificial Sequence
  Description of Artificial Sequence: Synthetic oligonucleotide
acactgttgattcc

SEQ ID NO: 23524 - DNA, 14 bp, Artificial Sequence
  Description of Artificial Sequence: Synthetic oligonucleotide
gacactgttgattc

SEQ ID NO: 23525 - DNA, 14 bp, Artificial Sequence
  Description of Artificial Sequence: Synthetic oligonucleotide
tgacactgttgatt

SEQ ID NO: 23526 - DNA, 14 bp, Artificial Sequence
  Description of Artificial Sequence: Synthetic oligonucleotide
ctgacactgttgat

SEQ ID NO: 23527 - DNA, 14 bp, Artificial Sequence
  Description of Artificial Sequence: Synthetic oligonucleotide
gctgacactgttga

SEQ ID NO: 23528 - DNA, 14 bp, Artificial Sequence
  Description of Artificial Sequence: Synthetic oligonucleotide
tgctgacactgttg

SEQ ID NO: 23529 - DNA, 14 bp, Artificial Sequence
  Description of Artificial Sequence: Synthetic oligonucleotide
gtgctgacactgtt

SEQ ID NO: 23530 - DNA, 14 bp, Artificial Sequence
  Description of Artificial Sequence: Synthetic oligonucleotide
ggtgctgacactgt

SEQ ID NO: 23531 - DNA, 14 bp, Artificial Sequence
  Description of Artificial Sequence: Synthetic oligonucleotide
tggtgctgacactg

SEQ ID NO: 23532 - DNA, 14 bp, Artificial Sequence
  Description of Artificial Sequence: Synthetic oligonucleotide
ttggtgctgacact

SEQ ID NO: 23533 - DNA, 14 bp, Artificial Sequence
  Description of Artificial Sequence: Synthetic oligonucleotide
gttggtgctgacac

SEQ ID NO: 23534 - DNA, 14 bp, Artificial Sequence
  Description of Artificial Sequence: Synthetic oligonucleotide
ggttggtgctgaca

SEQ ID NO: 23535 - DNA, 14 bp, Artificial Sequence
  Description of Artificial Sequence: Synthetic oligonucleotide
aggttggtgctgac

SEQ ID NO: 23536 - DNA, 14 bp, Artificial Sequence
  Description of Artificial Sequence: Synthetic oligonucleotide
gaggttggtgctga

SEQ ID NO: 23537 - DNA, 14 bp, Artificial Sequence
  Description of Artificial Sequence: Synthetic oligonucleotide
agaggttggtgctg

SEQ ID NO: 23538 - DNA, 14 bp, Artificial Sequence
  Description of Artificial Sequence: Synthetic oligonucleotide
gagaggttggtgct

SEQ ID NO: 23539 - DNA, 14 bp, Artificial Sequence
  Description of Artificial Sequence: Synthetic oligonucleotide
ggagaggttggtgc

SEQ ID NO: 23540 - DNA, 14 bp, Artificial Sequence
  Description of Artificial Sequence: Synthetic oligonucleotide
tggagaggttggtg

SEQ ID NO: 23541 - DNA, 14 bp, Artificial Sequence
  Description of Artificial Sequence: Synthetic oligonucleotide
ttggagaggttggt

SEQ ID NO: 23542 - DNA, 14 bp, Artificial Sequence
  Description of Artificial Sequence: Synthetic oligonucleotide
tttggagaggttgg

SEQ ID NO: 23543 - DNA, 14 bp, Artificial Sequence
  Description of Artificial Sequence: Synthetic oligonucleotide
atttggagaggttg

SEQ ID NO: 23544 - DNA, 14 bp, Artificial Sequence
  Description of Artificial Sequence: Synthetic oligonucleotide
tatttggagaggtt

SEQ ID NO: 23545 - DNA, 14 bp, Artificial Sequence
  Description of Artificial Sequence: Synthetic oligonucleotide
gtatttggagaggt

SEQ ID NO: 23546 - DNA, 14 bp, Artificial Sequence
  Description of Artificial Sequence: Synthetic oligonucleotide
tgtatttggagagg

SEQ ID NO: 23547 - DNA, 14 bp, Artificial Sequence
  Description of Artificial Sequence: Synthetic oligonucleotide
gtgtatttggagag

SEQ ID NO: 23548 - DNA, 14 bp, Artificial Sequence
  Description of Artificial Sequence: Synthetic oligonucleotide
ggtgtatttggaga

SEQ ID NO: 23549 - DNA, 14 bp, Artificial Sequence
  Description of Artificial Sequence: Synthetic oligonucleotide
tggtgtatttggag

SEQ ID NO: 23550 - DNA, 14 bp, Artificial Sequence
  Description of Artificial Sequence: Synthetic oligonucleotide
atggtgtatttgga

SEQ ID NO: 23551 - DNA, 14 bp, Artificial Sequence
  Description of Artificial Sequence: Synthetic oligonucleotide
gatggtgtatttgg

SEQ ID NO: 23552 - DNA, 14 bp, Artificial Sequence
  Description of Artificial Sequence: Synthetic oligonucleotide
agatggtgtatttg

SEQ ID NO: 23553 - DNA, 14 bp, Artificial Sequence
  Description of Artificial Sequence: Synthetic oligonucleotide
tagatggtgtattt

SEQ ID NO: 23554 - DNA, 14 bp, Artificial Sequence
  Description of Artificial Sequence: Synthetic oligonucleotide
gtagatggtgtatt

SEQ ID NO: 23555 - DNA, 14 bp, Artificial Sequence
  Description of Artificial Sequence: Synthetic oligonucleotide
agtagatggtgtat

SEQ ID NO: 23556 - DNA, 14 bp, Artificial Sequence
  Description of Artificial Sequence: Synthetic oligonucleotide
gagtagatggtgta

SEQ ID NO: 23557 - DNA, 14 bp, Artificial Sequence
  Description of Artificial Sequence: Synthetic oligonucleotide
ggagtagatggtgt

SEQ ID NO: 23558 - DNA, 14 bp, Artificial Sequence
  Description of Artificial Sequence: Synthetic oligonucleotide
tggagtagatggtg

SEQ ID NO: 23559 - DNA, 14 bp, Artificial Sequence
  Description of Artificial Sequence: Synthetic oligonucleotide
gtggagtagatggt

SEQ ID NO: 23560 - DNA, 14 bp, Artificial Sequence
  Description of Artificial Sequence: Synthetic oligonucleotide
ggtggagtagatgg

SEQ ID NO: 23561 - DNA, 14 bp, Artificial Sequence
  Description of Artificial Sequence: Synthetic oligonucleotide
tggtggagtagatg

SEQ ID NO: 23562 - DNA, 14 bp, Artificial Sequence
  Description of Artificial Sequence: Synthetic oligonucleotide
ctggtggagtagat

SEQ ID NO: 23563 - DNA, 14 bp, Artificial Sequence
  Description of Artificial Sequence: Synthetic oligonucleotide
actggtggagtaga

SEQ ID NO: 23564 - DNA, 14 bp, Artificial Sequence
  Description of Artificial Sequence: Synthetic oligonucleotide
tactggtggagtag

SEQ ID NO: 23565 - DNA, 14 bp, Artificial Sequence
  Description of Artificial Sequence: Synthetic oligonucleotide
atactggtggagta

SEQ ID NO: 23566 - DNA, 14 bp, Artificial Sequence
  Description of Artificial Sequence: Synthetic oligonucleotide
gatactggtggagt

SEQ ID NO: 23567 - DNA, 14 bp, Artificial Sequence
  Description of Artificial Sequence: Synthetic oligonucleotide
agatactggtggag

SEQ ID NO: 23568 - DNA, 14 bp, Artificial Sequence
  Description of Artificial Sequence: Synthetic oligonucleotide
cagatactggtgga

SEQ ID NO: 23569 - DNA, 14 bp, Artificial Sequence
  Description of Artificial Sequence: Synthetic oligonucleotide
gcagatactggtgg

SEQ ID NO: 23570 - DNA, 14 bp, Artificial Sequence
  Description of Artificial Sequence: Synthetic oligonucleotide
agcagatactggtg

SEQ ID NO: 23571 - DNA, 14 bp, Artificial Sequence
  Description of Artificial Sequence: Synthetic oligonucleotide
aagcagatactggt

SEQ ID NO: 23572 - DNA, 14 bp, Artificial Sequence
  Description of Artificial Sequence: Synthetic oligonucleotide
gaagcagatactgg

SEQ ID NO: 23573 - DNA, 14 bp, Artificial Sequence
  Description of Artificial Sequence: Synthetic oligonucleotide
agaagcagatactg

SEQ ID NO: 23574 - DNA, 14 bp, Artificial Sequence
  Description of Artificial Sequence: Synthetic oligonucleotide
aagaagcagatact

SEQ ID NO: 23575 - DNA, 14 bp, Artificial Sequence
  Description of Artificial Sequence: Synthetic oligonucleotide
gaagaagcagatac

SEQ ID NO: 23576 - DNA, 14 bp, Artificial Sequence
  Description of Artificial Sequence: Synthetic oligonucleotide
tgaagaagcagata

SEQ ID NO: 23577 - DNA, 14 bp, Artificial Sequence
  Description of Artificial Sequence: Synthetic oligonucleotide
ctgaagaagcagat

SEQ ID NO: 23578 - DNA, 14 bp, Artificial Sequence
  Description of Artificial Sequence: Synthetic oligonucleotide
tctgaagaagcaga

SEQ ID NO: 23579 - DNA, 14 bp, Artificial Sequence
  Description of Artificial Sequence: Synthetic oligonucleotide
gtctgaagaagcag

SEQ ID NO: 23580 - DNA, 14 bp, Artificial Sequence
  Description of Artificial Sequence: Synthetic oligonucleotide
ggtctgaagaagca

SEQ ID NO: 23581 - DNA, 14 bp, Artificial Sequence
  Description of Artificial Sequence: Synthetic oligonucleotide
aggtctgaagaagc

SEQ ID NO: 23582 - DNA, 14 bp, Artificial Sequence
  Description of Artificial Sequence: Synthetic oligonucleotide
aaggtctgaagaag

SEQ ID NO: 23583 - DNA, 14 bp, Artificial Sequence
  Description of Artificial Sequence: Synthetic oligonucleotide
taaggtctgaagaa

SEQ ID NO: 23584 - DNA, 14 bp, Artificial Sequence
  Description of Artificial Sequence: Synthetic oligonucleotide
ctaaggtctgaaga

SEQ ID NO: 23585 - DNA, 14 bp, Artificial Sequence
  Description of Artificial Sequence: Synthetic oligonucleotide
actaaggtctgaag

SEQ ID NO: 23586 - DNA, 14 bp, Artificial Sequence
  Description of Artificial Sequence: Synthetic oligonucleotide
cactaaggtctgaa

SEQ ID NO: 23587 - DNA, 14 bp, Artificial Sequence
  Description of Artificial Sequence: Synthetic oligonucleotide
acactaaggtctga

SEQ ID NO: 23588 - DNA, 14 bp, Artificial Sequence
  Description of Artificial Sequence: Synthetic oligonucleotide
tacactaaggtctg

SEQ ID NO: 23589 - DNA, 14 bp, Artificial Sequence
  Description of Artificial Sequence: Synthetic oligonucleotide
atacactaaggtct

SEQ ID NO: 23590 - DNA, 14 bp, Artificial Sequence
  Description of Artificial Sequence: Synthetic oligonucleotide
aatacactaaggtc

SEQ ID NO: 23591 - DNA, 14 bp, Artificial Sequence
  Description of Artificial Sequence: Synthetic oligonucleotide
aaatacactaaggt

SEQ ID NO: 23592 - DNA, 14 bp, Artificial Sequence
  Description of Artificial Sequence: Synthetic oligonucleotide
aaaatacactaagg

SEQ ID NO: 23593 - DNA, 14 bp, Artificial Sequence
  Description of Artificial Sequence: Synthetic oligonucleotide
aaaaatacactaag

SEQ ID NO: 23594 - DNA, 14 bp, Artificial Sequence
  Description of Artificial Sequence: Synthetic oligonucleotide
taaaaatacactaa

SEQ ID NO: 23595 - DNA, 14 bp, Artificial Sequence
  Description of Artificial Sequence: Synthetic oligonucleotide
ctaaaaatacacta

SEQ ID NO: 23596 - DNA, 14 bp, Artificial Sequence
  Description of Artificial Sequence: Synthetic oligonucleotide
tctaaaaatacact

SEQ ID NO: 23597 - DNA, 14 bp, Artificial Sequence
  Description of Artificial Sequence: Synthetic oligonucleotide
atctaaaaatacac

SEQ ID NO: 23598 - DNA, 14 bp, Artificial Sequence
  Description of Artificial Sequence: Synthetic oligonucleotide
catctaaaaataca

SEQ ID NO: 23599 - DNA, 14 bp, Artificial Sequence
  Description of Artificial Sequence: Synthetic oligonucleotide
acatctaaaaatac

SEQ ID NO: 23600 - DNA, 14 bp, Artificial Sequence
  Description of Artificial Sequence: Synthetic oligonucleotide
cacatctaaaaata

SEQ ID NO: 23601 - DNA, 14 bp, Artificial Sequence
  Description of Artificial Sequence: Synthetic oligonucleotide
ccacatctaaaaat

SEQ ID NO: 23602 - DNA, 14 bp, Artificial Sequence
  Description of Artificial Sequence: Synthetic oligonucleotide
tccacatctaaaaa

SEQ ID NO: 23603 - DNA, 14 bp, Artificial Sequence
  Description of Artificial Sequence: Synthetic oligonucleotide
atccacatctaaaa

SEQ ID NO: 23604 - DNA, 14 bp, Artificial Sequence
  Description of Artificial Sequence: Synthetic oligonucleotide
gatccacatctaaa

SEQ ID NO: 23605 - DNA, 14 bp, Artificial Sequence
  Description of Artificial Sequence: Synthetic oligonucleotide
agatccacatctaa

SEQ ID NO: 23606 - DNA, 14 bp, Artificial Sequence
  Description of Artificial Sequence: Synthetic oligonucleotide
gagatccacatcta

SEQ ID NO: 23607 - DNA, 14 bp, Artificial Sequence
  Description of Artificial Sequence: Synthetic oligonucleotide
tgagatccacatct

SEQ ID NO: 23608 - DNA, 14 bp, Artificial Sequence
  Description of Artificial Sequence: Synthetic oligonucleotide
ttgagatccacatc

SEQ ID NO: 23609 - DNA, 14 bp, Artificial Sequence
  Description of Artificial Sequence: Synthetic oligonucleotide
gttgagatccacat

SEQ ID NO: 23610 - DNA, 14 bp, Artificial Sequence
  Description of Artificial Sequence: Synthetic oligonucleotide
tgttgagatccaca

SEQ ID NO: 23611 - DNA, 14 bp, Artificial Sequence
  Description of Artificial Sequence: Synthetic oligonucleotide
ctgttgagatccac

SEQ ID NO: 23612 - DNA, 14 bp, Artificial Sequence
  Description of Artificial Sequence: Synthetic oligonucleotide
gctgttgagatcca

SEQ ID NO: 23613 - DNA, 14 bp, Artificial Sequence
  Description of Artificial Sequence: Synthetic oligonucleotide
agctgttgagatcc

SEQ ID NO: 23614 - DNA, 14 bp, Artificial Sequence
  Description of Artificial Sequence: Synthetic oligonucleotide
gagctgttgagatc

SEQ ID NO: 23615 - DNA, 14 bp, Artificial Sequence
  Description of Artificial Sequence: Synthetic oligonucleotide
ggagctgttgagat

SEQ ID NO: 23616 - DNA, 14 bp, Artificial Sequence
  Description of Artificial Sequence: Synthetic oligonucleotide
aggagctgttgaga

SEQ ID NO: 23617 - DNA, 14 bp, Artificial Sequence
  Description of Artificial Sequence: Synthetic oligonucleotide
caggagctgttgag

SEQ ID NO: 23618 - DNA, 14 bp, Artificial Sequence
  Description of Artificial Sequence: Synthetic oligonucleotide
acaggagctgttga

SEQ ID NO: 23619 - DNA, 14 bp, Artificial Sequence
  Description of Artificial Sequence: Synthetic oligonucleotide
cacaggagctgttg

SEQ ID NO: 23620 - DNA, 14 bp, Artificial Sequence
  Description of Artificial Sequence: Synthetic oligonucleotide
ccacaggagctgtt

SEQ ID NO: 23621 - DNA, 14 bp, Artificial Sequence
  Description of Artificial Sequence: Synthetic oligonucleotide
gccacaggagctgt

SEQ ID NO: 23622 - DNA, 14 bp, Artificial Sequence
  Description of Artificial Sequence: Synthetic oligonucleotide
tgccacaggagctg

SEQ ID NO: 23623 - DNA, 14 bp, Artificial Sequence
  Description of Artificial Sequence: Synthetic oligonucleotide
ctgccacaggagct

SEQ ID NO: 23624 - DNA, 14 bp, Artificial Sequence
  Description of Artificial Sequence: Synthetic oligonucleotide
gctgccacaggagc

SEQ ID NO: 23625 - DNA, 14 bp, Artificial Sequence
  Description of Artificial Sequence: Synthetic oligonucleotide
tgctgccacaggag

SEQ ID NO: 23626 - DNA, 14 bp, Artificial Sequence
  Description of Artificial Sequence: Synthetic oligonucleotide
ttgctgccacagga

SEQ ID NO: 23627 - DNA, 14 bp, Artificial Sequence
  Description of Artificial Sequence: Synthetic oligonucleotide
attgctgccacagg

SEQ ID NO: 23628 - DNA, 14 bp, Artificial Sequence
  Description of Artificial Sequence: Synthetic oligonucleotide
tattgctgccacag

SEQ ID NO: 23629 - DNA, 14 bp, Artificial Sequence
  Description of Artificial Sequence: Synthetic oligonucleotide
ctattgctgccaca

SEQ ID NO: 23630 - DNA, 14 bp, Artificial Sequence
  Description of Artificial Sequence: Synthetic oligonucleotide
gctattgctgccac

SEQ ID NO: 23631 - DNA, 14 bp, Artificial Sequence
  Description of Artificial Sequence: Synthetic oligonucleotide
tgctattgctgcca

SEQ ID NO: 23632 - DNA, 14 bp, Artificial Sequence
  Description of Artificial Sequence: Synthetic oligonucleotide
atgctattgctgcc

SEQ ID NO: 23633 - DNA, 14 bp, Artificial Sequence
  Description of Artificial Sequence: Synthetic oligonucleotide
gatgctattgctgc

SEQ ID NO: 23634 - DNA, 14 bp, Artificial Sequence
  Description of Artificial Sequence: Synthetic oligonucleotide
agatgctattgctg

SEQ ID NO: 23635 - DNA, 14 bp, Artificial Sequence
  Description of Artificial Sequence: Synthetic oligonucleotide
aagatgctattgct

SEQ ID NO: 23636 - DNA, 14 bp, Artificial Sequence
  Description of Artificial Sequence: Synthetic oligonucleotide
aaagatgctattgc

SEQ ID NO: 23637 - DNA, 14 bp, Artificial Sequence
  Description of Artificial Sequence: Synthetic oligonucleotide
caaagatgctattg

SEQ ID NO: 23638 - DNA, 14 bp, Artificial Sequence
  Description of Artificial Sequence: Synthetic oligonucleotide
gcaaagatgctatt

SEQ ID NO: 23639 - DNA, 14 bp, Artificial Sequence
  Description of Artificial Sequence: Synthetic oligonucleotide
agcaaagatgctat

SEQ ID NO: 23640 - DNA, 14 bp, Artificial Sequence
  Description of Artificial Sequence: Synthetic oligonucleotide
gagcaaagatgcta

SEQ ID NO: 23641 - DNA, 14 bp, Artificial Sequence
  Description of Artificial Sequence: Synthetic oligonucleotide
ggagcaaagatgct

SEQ ID NO: 23642 - DNA, 14 bp, Artificial Sequence
  Description of Artificial Sequence: Synthetic oligonucleotide
tggagcaaagatgc

SEQ ID NO: 23643 - DNA, 14 bp, Artificial Sequence
  Description of Artificial Sequence: Synthetic oligonucleotide
ctggagcaaagatg

SEQ ID NO: 23644 - DNA, 14 bp, Artificial Sequence
  Description of Artificial Sequence: Synthetic oligonucleotide
actggagcaaagat

SEQ ID NO: 23645 - DNA, 14 bp, Artificial Sequence
  Description of Artificial Sequence: Synthetic oligonucleotide
cactggagcaaaga

SEQ ID NO: 23646 - DNA, 14 bp, Artificial Sequence
  Description of Artificial Sequence: Synthetic oligonucleotide
gcactggagcaaag

SEQ ID NO: 23647 - DNA, 14 bp, Artificial Sequence
  Description of Artificial Sequence: Synthetic oligonucleotide
agcactggagcaaa

SEQ ID NO: 23648 - DNA, 14 bp, Artificial Sequence
  Description of Artificial Sequence: Synthetic oligonucleotide
aagcactggagcaa

SEQ ID NO: 23649 - DNA, 14 bp, Artificial Sequence
  Description of Artificial Sequence: Synthetic oligonucleotide
aaagcactggagca

SEQ ID NO: 23650 - DNA, 14 bp, Artificial Sequence
  Description of Artificial Sequence: Synthetic oligonucleotide
aaaagcactggagc

SEQ ID NO: 23651 - DNA, 14 bp, Artificial Sequence
  Description of Artificial Sequence: Synthetic oligonucleotide
caaaagcactggag

SEQ ID NO: 23652 - DNA, 14 bp, Artificial Sequence
  Description of Artificial Sequence: Synthetic oligonucleotide
gcaaaagcactgga

SEQ ID NO: 23653 - DNA, 14 bp, Artificial Sequence
  Description of Artificial Sequence: Synthetic oligonucleotide
ggcaaaagcactgg

SEQ ID NO: 23654 - DNA, 14 bp, Artificial Sequence
  Description of Artificial Sequence: Synthetic oligonucleotide
tggcaaaagcactg

SEQ ID NO: 23655 - DNA, 14 bp, Artificial Sequence
  Description of Artificial Sequence: Synthetic oligonucleotide
gtggcaaaagcact

SEQ ID NO: 23656 - DNA, 14 bp, Artificial Sequence
  Description of Artificial Sequence: Synthetic oligonucleotide
tgtggcaaaagcac

SEQ ID NO: 23657 - DNA, 14 bp, Artificial Sequence
  Description of Artificial Sequence: Synthetic oligonucleotide
atgtggcaaaagca

SEQ ID NO: 23658 - DNA, 14 bp, Artificial Sequence
  Description of Artificial Sequence: Synthetic oligonucleotide
aatgtggcaaaagc

SEQ ID NO: 23659 - DNA, 14 bp, Artificial Sequence
  Description of Artificial Sequence: Synthetic oligonucleotide
gaatgtggcaaaag

SEQ ID NO: 23660 - DNA, 14 bp, Artificial Sequence
  Description of Artificial Sequence: Synthetic oligonucleotide
tgaatgtggcaaaa

SEQ ID NO: 23661 - DNA, 14 bp, Artificial Sequence
  Description of Artificial Sequence: Synthetic oligonucleotide
ttgaatgtggcaaa

SEQ ID NO: 23662 - DNA, 14 bp, Artificial Sequence
  Description of Artificial Sequence: Synthetic oligonucleotide
tttgaatgtggcaa

SEQ ID NO: 23663 - DNA, 14 bp, Artificial Sequence
  Description of Artificial Sequence: Synthetic oligonucleotide
ctttgaatgtggca

SEQ ID NO: 23664 - DNA, 14 bp, Artificial Sequence
  Description of Artificial Sequence: Synthetic oligonucleotide
actttgaatgtggc

SEQ ID NO: 23665 - DNA, 14 bp, Artificial Sequence
  Description of Artificial Sequence: Synthetic oligonucleotide
gactttgaatgtgg

SEQ ID NO: 23666 - DNA, 14 bp, Artificial Sequence
  Description of Artificial Sequence: Synthetic oligonucleotide
agactttgaatgtg

SEQ ID NO: 23667 - DNA, 14 bp, Artificial Sequence
  Description of Artificial Sequence: Synthetic oligonucleotide
aagactttgaatgt

SEQ ID NO: 23668 - DNA, 14 bp, Artificial Sequence
  Description of Artificial Sequence: Synthetic oligonucleotide
aaagactttgaatg

SEQ ID NO: 23669 - DNA, 14 bp, Artificial Sequence
  Description of Artificial Sequence: Synthetic oligonucleotide
gaaagactttgaat

SEQ ID NO: 23670 - DNA, 14 bp, Artificial Sequence
  Description of Artificial Sequence: Synthetic oligonucleotide
agaaagactttgaa

SEQ ID NO: 23671 - DNA, 14 bp, Artificial Sequence
  Description of Artificial Sequence: Synthetic oligonucleotide
aagaaagactttga

SEQ ID NO: 23672 - DNA, 14 bp, Artificial Sequence
  Description of Artificial Sequence: Synthetic oligonucleotide
aaagaaagactttg

SEQ ID NO: 23673 - DNA, 14 bp, Artificial Sequence
  Description of Artificial Sequence: Synthetic oligonucleotide
taaagaaagacttt

SEQ ID NO: 23674 - DNA, 14 bp, Artificial Sequence
  Description of Artificial Sequence: Synthetic oligonucleotide
ctaaagaaagactt

SEQ ID NO: 23675 - DNA, 14 bp, Artificial Sequence
  Description of Artificial Sequence: Synthetic oligonucleotide
actaaagaaagact

SEQ ID NO: 23676 - DNA, 14 bp, Artificial Sequence
  Description of Artificial Sequence: Synthetic oligonucleotide
aactaaagaaagac

SEQ ID NO: 23677 - DNA, 14 bp, Artificial Sequence
  Description of Artificial Sequence: Synthetic oligonucleotide
gaactaaagaaaga

SEQ ID NO: 23678 - DNA, 14 bp, Artificial Sequence
  Description of Artificial Sequence: Synthetic oligonucleotide
tgaactaaagaaag

SEQ ID NO: 23679 - DNA, 14 bp, Artificial Sequence
  Description of Artificial Sequence: Synthetic oligonucleotide
atgaactaaagaaa

SEQ ID NO: 23680 - DNA, 14 bp, Artificial Sequence
  Description of Artificial Sequence: Synthetic oligonucleotide
catgaactaaagaa

SEQ ID NO: 23681 - DNA, 14 bp, Artificial Sequence
  Description of Artificial Sequence: Synthetic oligonucleotide
acatgaactaaaga

SEQ ID NO: 23682 - DNA, 14 bp, Artificial Sequence
  Description of Artificial Sequence: Synthetic oligonucleotide
cacatgaactaaag

SEQ ID NO: 23683 - DNA, 14 bp, Artificial Sequence
  Description of Artificial Sequence: Synthetic oligonucleotide
ccacatgaactaaa

SEQ ID NO: 23684 - DNA, 14 bp, Artificial Sequence
  Description of Artificial Sequence: Synthetic oligonucleotide
accacatgaactaa

SEQ ID NO: 23685 - DNA, 14 bp, Artificial Sequence
  Description of Artificial Sequence: Synthetic oligonucleotide
taccacatgaacta

SEQ ID NO: 23686 - DNA, 14 bp, Artificial Sequence
  Description of Artificial Sequence: Synthetic oligonucleotide
ctaccacatgaact

SEQ ID NO: 23687 - DNA, 14 bp, Artificial Sequence
  Description of Artificial Sequence: Synthetic oligonucleotide
actaccacatgaac

SEQ ID NO: 23688 - DNA, 14 bp, Artificial Sequence
  Description of Artificial Sequence: Synthetic oligonucleotide
aactaccacatgaa

SEQ ID NO: 23689 - DNA, 14 bp, Artificial Sequence
  Description of Artificial Sequence: Synthetic oligonucleotide
aaactaccacatga

SEQ ID NO: 23690 - DNA, 14 bp, Artificial Sequence
  Description of Artificial Sequence: Synthetic oligonucleotide
taaactaccacatg

SEQ ID NO: 23691 - DNA, 14 bp, Artificial Sequence
  Description of Artificial Sequence: Synthetic oligonucleotide
gtaaactaccacat

SEQ ID NO: 23692 - DNA, 14 bp, Artificial Sequence
  Description of Artificial Sequence: Synthetic oligonucleotide
tgtaaactaccaca

SEQ ID NO: 23693 - DNA, 14 bp, Artificial Sequence
  Description of Artificial Sequence: Synthetic oligonucleotide
atgtaaactaccac

SEQ ID NO: 23694 - DNA, 14 bp, Artificial Sequence
  Description of Artificial Sequence: Synthetic oligonucleotide
tatgtaaactacca

SEQ ID NO: 23695 - DNA, 14 bp, Artificial Sequence
  Description of Artificial Sequence: Synthetic oligonucleotide
ttatgtaaactacc

SEQ ID NO: 23696 - DNA, 14 bp, Artificial Sequence
  Description of Artificial Sequence: Synthetic oligonucleotide
tttatgtaaactac

SEQ ID NO: 23697 - DNA, 14 bp, Artificial Sequence
  Description of Artificial Sequence: Synthetic oligonucleotide
gtttatgtaaacta

SEQ ID NO: 23698 - DNA, 14 bp, Artificial Sequence
  Description of Artificial Sequence: Synthetic oligonucleotide
agtttatgtaaact

SEQ ID NO: 23699 - DNA, 14 bp, Artificial Sequence
  Description of Artificial Sequence: Synthetic oligonucleotide
tagtttatgtaaac

SEQ ID NO: 23700 - DNA, 14 bp, Artificial Sequence
  Description of Artificial Sequence: Synthetic oligonucleotide
ttagtttatgtaaa

SEQ ID NO: 23701 - DNA, 14 bp, Artificial Sequence
  Description of Artificial Sequence: Synthetic oligonucleotide
cttagtttatgtaa

SEQ ID NO: 23702 - DNA, 14 bp, Artificial Sequence
  Description of Artificial Sequence: Synthetic oligonucleotide
acttagtttatgta

SEQ ID NO: 23703 - DNA, 14 bp, Artificial Sequence
  Description of Artificial Sequence: Synthetic oligonucleotide
cacttagtttatgt

SEQ ID NO: 23704 - DNA, 14 bp, Artificial Sequence
  Description of Artificial Sequence: Synthetic oligonucleotide
tcacttagtttatg

SEQ ID NO: 23705 - DNA, 14 bp, Artificial Sequence
  Description of Artificial Sequence: Synthetic oligonucleotide
ttcacttagtttat

SEQ ID NO: 23706 - DNA, 14 bp, Artificial Sequence
  Description of Artificial Sequence: Synthetic oligonucleotide
cttcacttagttta

SEQ ID NO: 23707 - DNA, 14 bp, Artificial Sequence
  Description of Artificial Sequence: Synthetic oligonucleotide
tcttcacttagttt

SEQ ID NO: 23708 - DNA, 14 bp, Artificial Sequence
  Description of Artificial Sequence: Synthetic oligonucleotide
ctcttcacttagtt

SEQ ID NO: 23709 - DNA, 14 bp, Artificial Sequence
  Description of Artificial Sequence: Synthetic oligonucleotide
gctcttcacttagt

SEQ ID NO: 23710 - DNA, 14 bp, Artificial Sequence
  Description of Artificial Sequence: Synthetic oligonucleotide
ggctcttcacttag

SEQ ID NO: 23711 - DNA, 14 bp, Artificial Sequence
  Description of Artificial Sequence: Synthetic oligonucleotide
gggctcttcactta

SEQ ID NO: 23712 - DNA, 14 bp, Artificial Sequence
  Description of Artificial Sequence: Synthetic oligonucleotide
ggggctcttcactt

SEQ ID NO: 23713 - DNA, 14 bp, Artificial Sequence
  Description of Artificial Sequence: Synthetic oligonucleotide
aggggctcttcact

SEQ ID NO: 23714 - DNA, 14 bp, Artificial Sequence
  Description of Artificial Sequence: Synthetic oligonucleotide
caggggctcttcac

SEQ ID NO: 23715 - DNA, 14 bp, Artificial Sequence
  Description of Artificial Sequence: Synthetic oligonucleotide
tcaggggctcttca

SEQ ID NO: 23716 - DNA, 14 bp, Artificial Sequence
  Description of Artificial Sequence: Synthetic oligonucleotide
atcaggggctcttc

SEQ ID NO: 23717 - DNA, 14 bp, Artificial Sequence
  Description of Artificial Sequence: Synthetic oligonucleotide
aatcaggggctctt

SEQ ID NO: 23718 - DNA, 14 bp, Artificial Sequence
  Description of Artificial Sequence: Synthetic oligonucleotide
gaatcaggggctct

SEQ ID NO: 23719 - DNA, 14 bp, Artificial Sequence
  Description of Artificial Sequence: Synthetic oligonucleotide
ggaatcaggggctc

SEQ ID NO: 23720 - DNA, 14 bp, Artificial Sequence
  Description of Artificial Sequence: Synthetic oligonucleotide
aggaatcaggggct

SEQ ID NO: 23721 - DNA, 14 bp, Artificial Sequence
  Description of Artificial Sequence: Synthetic oligonucleotide
gaggaatcaggggc

SEQ ID NO: 23722 - DNA, 14 bp, Artificial Sequence
  Description of Artificial Sequence: Synthetic oligonucleotide
ggaggaatcagggg

SEQ ID NO: 23723 - DNA, 14 bp, Artificial Sequence
  Description of Artificial Sequence: Synthetic oligonucleotide
aggaggaatcaggg

SEQ ID NO: 23724 - DNA, 14 bp, Artificial Sequence
  Description of Artificial Sequence: Synthetic oligonucleotide
gaggaggaatcagg

SEQ ID NO: 23725 - DNA, 14 bp, Artificial Sequence
  Description of Artificial Sequence: Synthetic oligonucleotide
ggaggaggaatcag

SEQ ID NO: 23726 - DNA, 14 bp, Artificial Sequence
  Description of Artificial Sequence: Synthetic oligonucleotide
aggaggaggaatca

SEQ ID NO: 23727 - DNA, 14 bp, Artificial Sequence
  Description of Artificial Sequence: Synthetic oligonucleotide
gaggaggaggaatc

SEQ ID NO: 23728 - DNA, 14 bp, Artificial Sequence
  Description of Artificial Sequence: Synthetic oligonucleotide
agaggaggaggaat

SEQ ID NO: 23729 - DNA, 14 bp, Artificial Sequence
  Description of Artificial Sequence: Synthetic oligonucleotide
aagaggaggaggaa

SEQ ID NO: 23730 - DNA, 14 bp, Artificial Sequence
  Description of Artificial Sequence: Synthetic oligonucleotide
gaagaggaggagga

SEQ ID NO: 23731 - DNA, 14 bp, Artificial Sequence
  Description of Artificial Sequence: Synthetic oligonucleotide
ggaagaggaggagg

SEQ ID NO: 23732 - DNA, 14 bp, Artificial Sequence
  Description of Artificial Sequence: Synthetic oligonucleotide
aggaagaggaggag

SEQ ID NO: 23733 - DNA, 14 bp, Artificial Sequence
  Description of Artificial Sequence: Synthetic oligonucleotide
gaggaagaggagga

SEQ ID NO: 23734 - DNA, 14 bp, Artificial Sequence
  Description of Artificial Sequence: Synthetic oligonucleotide
ggaggaagaggagg

SEQ ID NO: 23735 - DNA, 14 bp, Artificial Sequence
  Description of Artificial Sequence: Synthetic oligonucleotide
aggaggaagaggag

SEQ ID NO: 23736 - DNA, 14 bp, Artificial Sequence
  Description of Artificial Sequence: Synthetic oligonucleotide
gaggaggaagagga

SEQ ID NO: 23737 - DNA, 14 bp, Artificial Sequence
  Description of Artificial Sequence: Synthetic oligonucleotide
cgaggaggaagagg

SEQ ID NO: 23738 - DNA, 14 bp, Artificial Sequence
  Description of Artificial Sequence: Synthetic oligonucleotide
tcgaggaggaagag

SEQ ID NO: 23739 - DNA, 14 bp, Artificial Sequence
  Description of Artificial Sequence: Synthetic oligonucleotide
ttcgaggaggaaga

SEQ ID NO: 23740 - DNA, 14 bp, Artificial Sequence
  Description of Artificial Sequence: Synthetic oligonucleotide
tttcgaggaggaag

SEQ ID NO: 23741 - DNA, 14 bp, Artificial Sequence
  Description of Artificial Sequence: Synthetic oligonucleotide
ttttcgaggaggaa

SEQ ID NO: 23742 - DNA, 14 bp, Artificial Sequence
  Description of Artificial Sequence: Synthetic oligonucleotide
tttttcgaggagga

SEQ ID NO: 23743 - DNA, 14 bp, Artificial Sequence
  Description of Artificial Sequence: Synthetic oligonucleotide
ttttttcgaggagg

SEQ ID NO: 23744 - DNA, 14 bp, Artificial Sequence
  Description of Artificial Sequence: Synthetic oligonucleotide
cttttttcgaggag

SEQ ID NO: 23745 - DNA, 14 bp, Artificial Sequence
  Description of Artificial Sequence: Synthetic oligonucleotide
acttttttcgagga

SEQ ID NO: 23746 - DNA, 14 bp, Artificial Sequence
  Description of Artificial Sequence: Synthetic oligonucleotide
aacttttttcgagg

SEQ ID NO: 23747 - DNA, 14 bp, Artificial Sequence
  Description of Artificial Sequence: Synthetic oligonucleotide
aaacttttttcgag

SEQ ID NO: 23748 - DNA, 14 bp, Artificial Sequence
  Description of Artificial Sequence: Synthetic oligonucleotide
caaacttttttcga

SEQ ID NO: 23749 - DNA, 14 bp, Artificial Sequence
  Description of Artificial Sequence: Synthetic oligonucleotide
tcaaacttttttcg

SEQ ID NO: 23750 - DNA, 14 bp, Artificial Sequence
  Description of Artificial Sequence: Synthetic oligonucleotide
atcaaacttttttc

SEQ ID NO: 23751 - DNA, 14 bp, Artificial Sequence
  Description of Artificial Sequence: Synthetic oligonucleotide
gatcaaactttttt

SEQ ID NO: 23752 - DNA, 14 bp, Artificial Sequence
  Description of Artificial Sequence: Synthetic oligonucleotide
tgatcaaacttttt

SEQ ID NO: 23753 - DNA, 14 bp, Artificial Sequence
  Description of Artificial Sequence: Synthetic oligonucleotide
atgatcaaactttt

SEQ ID NO: 23754 - DNA, 14 bp, Artificial Sequence
  Description of Artificial Sequence: Synthetic oligonucleotide
catgatcaaacttt

SEQ ID NO: 23755 - DNA, 14 bp, Artificial Sequence
  Description of Artificial Sequence: Synthetic oligonucleotide
tcatgatcaaactt

SEQ ID NO: 23756 - DNA, 14 bp, Artificial Sequence
  Description of Artificial Sequence: Synthetic oligonucleotide
atcatgatcaaact

SEQ ID NO: 23757 - DNA, 14 bp, Artificial Sequence
  Description of Artificial Sequence: Synthetic oligonucleotide
catcatgatcaaac

SEQ ID NO: 23758 - DNA, 14 bp, Artificial Sequence
  Description of Artificial Sequence: Synthetic oligonucleotide
gcatcatgatcaaa

SEQ ID NO: 23759 - DNA, 14 bp, Artificial Sequence
  Description of Artificial Sequence: Synthetic oligonucleotide
agcatcatgatcaa

SEQ ID NO: 23760 - DNA, 14 bp, Artificial Sequence
  Description of Artificial Sequence: Synthetic oligonucleotide
aagcatcatgatca

SEQ ID NO: 23761 - DNA, 14 bp, Artificial Sequence
  Description of Artificial Sequence: Synthetic oligonucleotide
gaagcatcatgatc

SEQ ID NO: 23762 - DNA, 14 bp, Artificial Sequence
  Description of Artificial Sequence: Synthetic oligonucleotide
tgaagcatcatgat

SEQ ID NO: 23763 - DNA, 14 bp, Artificial Sequence
  Description of Artificial Sequence: Synthetic oligonucleotide
ttgaagcatcatga

SEQ ID NO: 23764 - DNA, 14 bp, Artificial Sequence
  Description of Artificial Sequence: Synthetic oligonucleotide
tttgaagcatcatg

SEQ ID NO: 23765 - DNA, 14 bp, Artificial Sequence
  Description of Artificial Sequence: Synthetic oligonucleotide
atttgaagcatcat

SEQ ID NO: 23766 - DNA, 14 bp, Artificial Sequence
  Description of Artificial Sequence: Synthetic oligonucleotide
aatttgaagcatca

SEQ ID NO: 23767 - DNA, 14 bp, Artificial Sequence
  Description of Artificial Sequence: Synthetic oligonucleotide
gaatttgaagcatc

SEQ ID NO: 23768 - DNA, 14 bp, Artificial Sequence
  Description of Artificial Sequence: Synthetic oligonucleotide
ggaatttgaagcat

SEQ ID NO: 23769 - DNA, 14 bp, Artificial Sequence
  Description of Artificial Sequence: Synthetic oligonucleotide
tggaatttgaagca

SEQ ID NO: 23770 - DNA, 14 bp, Artificial Sequence
  Description of Artificial Sequence: Synthetic oligonucleotide
ttggaatttgaagc

SEQ ID NO: 23771 - DNA, 14 bp, Artificial Sequence
  Description of Artificial Sequence: Synthetic oligonucleotide
cttggaatttgaag

SEQ ID NO: 23772 - DNA, 14 bp, Artificial Sequence
  Description of Artificial Sequence: Synthetic oligonucleotide
ccttggaatttgaa

SEQ ID NO: 23773 - DNA, 14 bp, Artificial Sequence
  Description of Artificial Sequence: Synthetic oligonucleotide
cccttggaatttga

SEQ ID NO: 23774 - DNA, 14 bp, Artificial Sequence
  Description of Artificial Sequence: Synthetic oligonucleotide
tcccttggaatttg

SEQ ID NO: 23775 - DNA, 14 bp, Artificial Sequence
  Description of Artificial Sequence: Synthetic oligonucleotide
ttcccttggaattt

SEQ ID NO: 23776 - DNA, 14 bp, Artificial Sequence
  Description of Artificial Sequence: Synthetic oligonucleotide
tttcccttggaatt

SEQ ID NO: 23777 - DNA, 14 bp, Artificial Sequence
  Description of Artificial Sequence: Synthetic oligonucleotide
atttcccttggaat

SEQ ID NO: 23778 - DNA, 14 bp, Artificial Sequence
  Description of Artificial Sequence: Synthetic oligonucleotide
tatttcccttggaa

SEQ ID NO: 23779 - DNA, 14 bp, Artificial Sequence
  Description of Artificial Sequence: Synthetic oligonucleotide
atatttcccttgga

SEQ ID NO: 23780 - DNA, 14 bp, Artificial Sequence
  Description of Artificial Sequence: Synthetic oligonucleotide
catatttcccttgg

SEQ ID NO: 23781 - DNA, 14 bp, Artificial Sequence
  Description of Artificial Sequence: Synthetic oligonucleotide
tcatatttcccttg

SEQ ID NO: 23782 - DNA, 14 bp, Artificial Sequence
  Description of Artificial Sequence: Synthetic oligonucleotide
ttcatatttccctt

SEQ ID NO: 23783 - DNA, 14 bp, Artificial Sequence
  Description of Artificial Sequence: Synthetic oligonucleotide
tttcatatttccct

SEQ ID NO: 23784 - DNA, 14 bp, Artificial Sequence
  Description of Artificial Sequence: Synthetic oligonucleotide
atttcatatttccc

SEQ ID NO: 23785 - DNA, 14 bp, Artificial Sequence
  Description of Artificial Sequence: Synthetic oligonucleotide
gatttcatatttcc

SEQ ID NO: 23786 - DNA, 14 bp, Artificial Sequence
  Description of Artificial Sequence: Synthetic oligonucleotide
agatttcatatttc

SEQ ID NO: 23787 - DNA, 14 bp, Artificial Sequence
  Description of Artificial Sequence: Synthetic oligonucleotide
cagatttcatattt

SEQ ID NO: 23788 - DNA, 14 bp, Artificial Sequence
  Description of Artificial Sequence: Synthetic oligonucleotide
tcagatttcatatt

SEQ ID NO: 23789 - DNA, 14 bp, Artificial Sequence
  Description of Artificial Sequence: Synthetic oligonucleotide
atcagatttcatat

SEQ ID NO: 23790 - DNA, 14 bp, Artificial Sequence
  Description of Artificial Sequence: Synthetic oligonucleotide
catcagatttcata

SEQ ID NO: 23791 - DNA, 14 bp, Artificial Sequence
  Description of Artificial Sequence: Synthetic oligonucleotide
tcatcagatttcat

SEQ ID NO: 23792 - DNA, 14 bp, Artificial Sequence
  Description of Artificial Sequence: Synthetic oligonucleotide
atcatcagatttca

SEQ ID NO: 23793 - DNA, 14 bp, Artificial Sequence
  Description of Artificial Sequence: Synthetic oligonucleotide
catcatcagatttc

SEQ ID NO: 23794 - DNA, 14 bp, Artificial Sequence
  Description of Artificial Sequence: Synthetic oligonucleotide
tcatcatcagattt

SEQ ID NO: 23795 - DNA, 14 bp, Artificial Sequence
  Description of Artificial Sequence: Synthetic oligonucleotide
atcatcatcagatt

SEQ ID NO: 23796 - DNA, 14 bp, Artificial Sequence
  Description of Artificial Sequence: Synthetic oligonucleotide
gatcatcatcagat

SEQ ID NO: 23797 - DNA, 14 bp, Artificial Sequence
  Description of Artificial Sequence: Synthetic oligonucleotide
ggatcatcatcaga

SEQ ID NO: 23798 - DNA, 14 bp, Artificial Sequence
  Description of Artificial Sequence: Synthetic oligonucleotide
aggatcatcatcag

SEQ ID NO: 23799 - DNA, 14 bp, Artificial Sequence
  Description of Artificial Sequence: Synthetic oligonucleotide
gaggatcatcatca

SEQ ID NO: 23800 - DNA, 14 bp, Artificial Sequence
  Description of Artificial Sequence: Synthetic oligonucleotide
ggaggatcatcatc

SEQ ID NO: 23801 - DNA, 14 bp, Artificial Sequence
  Description of Artificial Sequence: Synthetic oligonucleotide
aggaggatcatcat

SEQ ID NO: 23802 - DNA, 14 bp, Artificial Sequence
  Description of Artificial Sequence: Synthetic oligonucleotide
caggaggatcatca

SEQ ID NO: 23803 - DNA, 14 bp, Artificial Sequence
  Description of Artificial Sequence: Synthetic oligonucleotide
gcaggaggatcatc

SEQ ID NO: 23804 - DNA, 14 bp, Artificial Sequence
  Description of Artificial Sequence: Synthetic oligonucleotide
agcaggaggatcat

SEQ ID NO: 23805 - DNA, 14 bp, Artificial Sequence
  Description of Artificial Sequence: Synthetic oligonucleotide
tagcaggaggatca

SEQ ID NO: 23806 - DNA, 14 bp, Artificial Sequence
  Description of Artificial Sequence: Synthetic oligonucleotide
atagcaggaggatc

SEQ ID NO: 23807 - DNA, 14 bp, Artificial Sequence
  Description of Artificial Sequence: Synthetic oligonucleotide
aatagcaggaggat

SEQ ID NO: 23808 - DNA, 14 bp, Artificial Sequence
  Description of Artificial Sequence: Synthetic oligonucleotide
gaatagcaggagga

SEQ ID NO: 23809 - DNA, 14 bp, Artificial Sequence
  Description of Artificial Sequence: Synthetic oligonucleotide
ggaatagcaggagg

SEQ ID NO: 23810 - DNA, 14 bp, Artificial Sequence
  Description of Artificial Sequence: Synthetic oligonucleotide
tggaatagcaggag

SEQ ID NO: 23811 - DNA, 14 bp, Artificial Sequence
  Description of Artificial Sequence: Synthetic oligonucleotide
gtggaatagcagga

SEQ ID NO: 23812 - DNA, 14 bp, Artificial Sequence
  Description of Artificial Sequence: Synthetic oligonucleotide
ggtggaatagcagg

SEQ ID NO: 23813 - DNA, 14 bp, Artificial Sequence
  Description of Artificial Sequence: Synthetic oligonucleotide
cggtggaatagcag

SEQ ID NO: 23814 - DNA, 14 bp, Artificial Sequence
  Description of Artificial Sequence: Synthetic oligonucleotide
tcggtggaatagca

SEQ ID NO: 23815 - DNA, 14 bp, Artificial Sequence
  Description of Artificial Sequence: Synthetic oligonucleotide
ctcggtggaatagc

SEQ ID NO: 23816 - DNA, 14 bp, Artificial Sequence
  Description of Artificial Sequence: Synthetic oligonucleotide
tctcggtggaatag

SEQ ID NO: 23817 - DNA, 14 bp, Artificial Sequence
  Description of Artificial Sequence: Synthetic oligonucleotide
gtctcggtggaata

SEQ ID NO: 23818 - DNA, 14 bp, Artificial Sequence
  Description of Artificial Sequence: Synthetic oligonucleotide
tgtctcggtggaat

SEQ ID NO: 23819 - DNA, 14 bp, Artificial Sequence
  Description of Artificial Sequence: Synthetic oligonucleotide
ctgtctcggtggaa

SEQ ID NO: 23820 - DNA, 14 bp, Artificial Sequence
  Description of Artificial Sequence: Synthetic oligonucleotide
gctgtctcggtgga

SEQ ID NO: 23821 - DNA, 14 bp, Artificial Sequence
  Description of Artificial Sequence: Synthetic oligonucleotide
ggctgtctcggtgg

SEQ ID NO: 23822 - DNA, 14 bp, Artificial Sequence
  Description of Artificial Sequence: Synthetic oligonucleotide
aggctgtctcggtg

SEQ ID NO: 23823 - DNA, 14 bp, Artificial Sequence
  Description of Artificial Sequence: Synthetic oligonucleotide
gaggctgtctcggt

SEQ ID NO: 23824 - DNA, 14 bp, Artificial Sequence
  Description of Artificial Sequence: Synthetic oligonucleotide
ggaggctgtctcgg

SEQ ID NO: 23825 - DNA, 14 bp, Artificial Sequence
  Description of Artificial Sequence: Synthetic oligonucleotide
aggaggctgtctcg

SEQ ID NO: 23826 - DNA, 14 bp, Artificial Sequence
  Description of Artificial Sequence: Synthetic oligonucleotide
gaggaggctgtctc

SEQ ID NO: 23827 - DNA, 14 bp, Artificial Sequence
  Description of Artificial Sequence: Synthetic oligonucleotide
ggaggaggctgtct

SEQ ID NO: 23828 - DNA, 14 bp, Artificial Sequence
  Description of Artificial Sequence: Synthetic oligonucleotide
aggaggaggctgtc

SEQ ID NO: 23829 - DNA, 14 bp, Artificial Sequence
  Description of Artificial Sequence: Synthetic oligonucleotide
gaggaggaggctgt

SEQ ID NO: 23830 - DNA, 14 bp, Artificial Sequence
  Description of Artificial Sequence: Synthetic oligonucleotide
ggaggaggaggctg

SEQ ID NO: 23831 - DNA, 14 bp, Artificial Sequence
  Description of Artificial Sequence: Synthetic oligonucleotide
tggaggaggaggct

SEQ ID NO: 23832 - DNA, 14 bp, Artificial Sequence
  Description of Artificial Sequence: Synthetic oligonucleotide
ttggaggaggaggc

SEQ ID NO: 23833 - DNA, 14 bp, Artificial Sequence
  Description of Artificial Sequence: Synthetic oligonucleotide
tttggaggaggagg

SEQ ID NO: 23834 - DNA, 14 bp, Artificial Sequence
  Description of Artificial Sequence: Synthetic oligonucleotide
ctttggaggaggag

SEQ ID NO: 23835 - DNA, 14 bp, Artificial Sequence
  Description of Artificial Sequence: Synthetic oligonucleotide
cctttggaggagga

SEQ ID NO: 23836 - DNA, 14 bp, Artificial Sequence
  Description of Artificial Sequence: Synthetic oligonucleotide
acctttggaggagg

SEQ ID NO: 23837 - DNA, 14 bp, Artificial Sequence
  Description of Artificial Sequence: Synthetic oligonucleotide
tacctttggaggag

SEQ ID NO: 23838 - DNA, 14 bp, Artificial Sequence
  Description of Artificial Sequence: Synthetic oligonucleotide
ttacctttggagga

SEQ ID NO: 23839 - DNA, 14 bp, Artificial Sequence
  Description of Artificial Sequence: Synthetic oligonucleotide
tttacctttggagg

SEQ ID NO: 23840 - DNA, 14 bp, Artificial Sequence
  Description of Artificial Sequence: Synthetic oligonucleotide
ttttacctttggag

SEQ ID NO: 23841 - DNA, 14 bp, Artificial Sequence
  Description of Artificial Sequence: Synthetic oligonucleotide
gttttacctttgga

SEQ ID NO: 23842 - DNA, 14 bp, Artificial Sequence
  Description of Artificial Sequence: Synthetic oligonucleotide
ggttttacctttgg

SEQ ID NO: 23843 - DNA, 14 bp, Artificial Sequence
  Description of Artificial Sequence: Synthetic oligonucleotide
gggttttacctttg

SEQ ID NO: 23844 - DNA, 14 bp, Artificial Sequence
  Description of Artificial Sequence: Synthetic oligonucleotide
tgggttttaccttt

SEQ ID NO: 23845 - DNA, 14 bp, Artificial Sequence
  Description of Artificial Sequence: Synthetic oligonucleotide
ctgggttttacctt

SEQ ID NO: 23846 - DNA, 14 bp, Artificial Sequence
  Description of Artificial Sequence: Synthetic oligonucleotide
tctgggttttacct

SEQ ID NO: 23847 - DNA, 14 bp, Artificial Sequence
  Description of Artificial Sequence: Synthetic oligonucleotide
ctctgggttttacc

SEQ ID NO: 23848 - DNA, 14 bp, Artificial Sequence
  Description of Artificial Sequence: Synthetic oligonucleotide
actctgggttttac

SEQ ID NO: 23849 - DNA, 14 bp, Artificial Sequence
  Description of Artificial Sequence: Synthetic oligonucleotide
aactctgggtttta

SEQ ID NO: 23850 - DNA, 14 bp, Artificial Sequence
  Description of Artificial Sequence: Synthetic oligonucleotide
gaactctgggtttt

SEQ ID NO: 23851 - DNA, 14 bp, Artificial Sequence
  Description of Artificial Sequence: Synthetic oligonucleotide
ggaactctgggttt

SEQ ID NO: 23852 - DNA, 14 bp, Artificial Sequence
  Description of Artificial Sequence: Synthetic oligonucleotide
aggaactctgggtt

SEQ ID NO: 23853 - DNA, 14 bp, Artificial Sequence
  Description of Artificial Sequence: Synthetic oligonucleotide
caggaactctgggt

SEQ ID NO: 23854 - DNA, 14 bp, Artificial Sequence
  Description of Artificial Sequence: Synthetic oligonucleotide
acaggaactctggg

SEQ ID NO: 23855 - DNA, 14 bp, Artificial Sequence
  Description of Artificial Sequence: Synthetic oligonucleotide
aacaggaactctgg

SEQ ID NO: 23856 - DNA, 14 bp, Artificial Sequence
  Description of Artificial Sequence: Synthetic oligonucleotide
gaacaggaactctg

SEQ ID NO: 23857 - DNA, 14 bp, Artificial Sequence
  Description of Artificial Sequence: Synthetic oligonucleotide
ggaacaggaactct

SEQ ID NO: 23858 - DNA, 14 bp, Artificial Sequence
  Description of Artificial Sequence: Synthetic oligonucleotide
aggaacaggaactc

SEQ ID NO: 23859 - DNA, 14 bp, Artificial Sequence
  Description of Artificial Sequence: Synthetic oligonucleotide
taggaacaggaact

SEQ ID NO: 23860 - DNA, 14 bp, Artificial Sequence
  Description of Artificial Sequence: Synthetic oligonucleotide
gtaggaacaggaac

SEQ ID NO: 23861 - DNA, 14 bp, Artificial Sequence
  Description of Artificial Sequence: Synthetic oligonucleotide
agtaggaacaggaa

SEQ ID NO: 23862 - DNA, 14 bp, Artificial Sequence
  Description of Artificial Sequence: Synthetic oligonucleotide
cagtaggaacagga

SEQ ID NO: 23863 - DNA, 14 bp, Artificial Sequence
  Description of Artificial Sequence: Synthetic oligonucleotide
ccagtaggaacagg

SEQ ID NO: 23864 - DNA, 14 bp, Artificial Sequence
  Description of Artificial Sequence: Synthetic oligonucleotide
accagtaggaacag

SEQ ID NO: 23865 - DNA, 14 bp, Artificial Sequence
  Description of Artificial Sequence: Synthetic oligonucleotide
caccagtaggaaca

SEQ ID NO: 23866 - DNA, 14 bp, Artificial Sequence
  Description of Artificial Sequence: Synthetic oligonucleotide
gcaccagtaggaac

SEQ ID NO: 23867 - DNA, 14 bp, Artificial Sequence
  Description of Artificial Sequence: Synthetic oligonucleotide
tgcaccagtaggaa

SEQ ID NO: 23868 - DNA, 14 bp, Artificial Sequence
  Description of Artificial Sequence: Synthetic oligonucleotide
atgcaccagtagga

SEQ ID NO: 23869 - DNA, 14 bp, Artificial Sequence
  Description of Artificial Sequence: Synthetic oligonucleotide
aatgcaccagtagg

SEQ ID NO: 23870 - DNA, 14 bp, Artificial Sequence
  Description of Artificial Sequence: Synthetic oligonucleotide
aaatgcaccagtag

SEQ ID NO: 23871 - DNA, 14 bp, Artificial Sequence
  Description of Artificial Sequence: Synthetic oligonucleotide
caaatgcaccagta

SEQ ID NO: 23872 - DNA, 14 bp, Artificial Sequence
  Description of Artificial Sequence: Synthetic oligonucleotide
tcaaatgcaccagt

SEQ ID NO: 23873 - DNA, 14 bp, Artificial Sequence
  Description of Artificial Sequence: Synthetic oligonucleotide
atcaaatgcaccag

SEQ ID NO: 23874 - DNA, 14 bp, Artificial Sequence
  Description of Artificial Sequence: Synthetic oligonucleotide
catcaaatgcacca

SEQ ID NO: 23875 - DNA, 14 bp, Artificial Sequence
  Description of Artificial Sequence: Synthetic oligonucleotide
ccatcaaatgcacc

SEQ ID NO: 23876 - DNA, 14 bp, Artificial Sequence
  Description of Artificial Sequence: Synthetic oligonucleotide
cccatcaaatgcac

SEQ ID NO: 23877 - DNA, 14 bp, Artificial Sequence
  Description of Artificial Sequence: Synthetic oligonucleotide
gcccatcaaatgca

SEQ ID NO: 23878 - DNA, 14 bp, Artificial Sequence
  Description of Artificial Sequence: Synthetic oligonucleotide
ggcccatcaaatgc

SEQ ID NO: 23879 - DNA, 14 bp, Artificial Sequence
  Description of Artificial Sequence: Synthetic oligonucleotide
aggcccatcaaatg

SEQ ID NO: 23880 - DNA, 14 bp, Artificial Sequence
  Description of Artificial Sequence: Synthetic oligonucleotide
gaggcccatcaaat

SEQ ID NO: 23881 - DNA, 14 bp, Artificial Sequence
  Description of Artificial Sequence: Synthetic oligonucleotide
agaggcccatcaaa

SEQ ID NO: 23882 - DNA, 14 bp, Artificial Sequence
  Description of Artificial Sequence: Synthetic oligonucleotide
cagaggcccatcaa

SEQ ID NO: 23883 - DNA, 14 bp, Artificial Sequence
  Description of Artificial Sequence: Synthetic oligonucleotide
gcagaggcccatca

SEQ ID NO: 23884 - DNA, 14 bp, Artificial Sequence
  Description of Artificial Sequence: Synthetic oligonucleotide
tgcagaggcccatc

SEQ ID NO: 23885 - DNA, 14 bp, Artificial Sequence
  Description of Artificial Sequence: Synthetic oligonucleotide
atgcagaggcccat

SEQ ID NO: 23886 - DNA, 14 bp, Artificial Sequence
  Description of Artificial Sequence: Synthetic oligonucleotide
tatgcagaggccca

SEQ ID NO: 23887 - DNA, 14 bp, Artificial Sequence
  Description of Artificial Sequence: Synthetic oligonucleotide
ctatgcagaggccc

SEQ ID NO: 23888 - DNA, 14 bp, Artificial Sequence
  Description of Artificial Sequence: Synthetic oligonucleotide
actatgcagaggcc

SEQ ID NO: 23889 - DNA, 14 bp, Artificial Sequence
  Description of Artificial Sequence: Synthetic oligonucleotide
gactatgcagaggc

SEQ ID NO: 23890 - DNA, 14 bp, Artificial Sequence
  Description of Artificial Sequence: Synthetic oligonucleotide
ggactatgcagagg

SEQ ID NO: 23891 - DNA, 14 bp, Artificial Sequence
  Description of Artificial Sequence: Synthetic oligonucleotide
tggactatgcagag

SEQ ID NO: 23892 - DNA, 14 bp, Artificial Sequence
  Description of Artificial Sequence: Synthetic oligonucleotide
gtggactatgcaga

SEQ ID NO: 23893 - DNA, 14 bp, Artificial Sequence
  Description of Artificial Sequence: Synthetic oligonucleotide
ggtggactatgcag

SEQ ID NO: 23894 - DNA, 14 bp, Artificial Sequence
  Description of Artificial Sequence: Synthetic oligonucleotide
aggtggactatgca

SEQ ID NO: 23895 - DNA, 14 bp, Artificial Sequence
  Description of Artificial Sequence: Synthetic oligonucleotide
gaggtggactatgc

SEQ ID NO: 23896 - DNA, 14 bp, Artificial Sequence
  Description of Artificial Sequence: Synthetic oligonucleotide
ggaggtggactatg

SEQ ID NO: 23897 - DNA, 14 bp, Artificial Sequence
  Description of Artificial Sequence: Synthetic oligonucleotide
cggaggtggactat

SEQ ID NO: 23898 - DNA, 14 bp, Artificial Sequence
  Description of Artificial Sequence: Synthetic oligonucleotide
gcggaggtggacta

SEQ ID NO: 23899 - DNA, 14 bp, Artificial Sequence
  Description of Artificial Sequence: Synthetic oligonucleotide
ggcggaggtggact

SEQ ID NO: 23900 - DNA, 14 bp, Artificial Sequence
  Description of Artificial Sequence: Synthetic oligonucleotide
tggcggaggtggac

SEQ ID NO: 23901 - DNA, 14 bp, Artificial Sequence
  Description of Artificial Sequence: Synthetic oligonucleotide
gtggcggaggtgga

SEQ ID NO: 23902 - DNA, 14 bp, Artificial Sequence
  Description of Artificial Sequence: Synthetic oligonucleotide
ggtggcggaggtgg

SEQ ID NO: 23903 - DNA, 14 bp, Artificial Sequence
  Description of Artificial Sequence: Synthetic oligonucleotide
tggtggcggaggtg

SEQ ID NO: 23904 - DNA, 14 bp, Artificial Sequence
  Description of Artificial Sequence: Synthetic oligonucleotide
gtggtggcggaggt

SEQ ID NO: 23905 - DNA, 14 bp, Artificial Sequence
  Description of Artificial Sequence: Synthetic oligonucleotide
ggtggtggcggagg

SEQ ID NO: 23906 - DNA, 14 bp, Artificial Sequence
  Description of Artificial Sequence: Synthetic oligonucleotide
tggtggtggcggag

SEQ ID NO: 23907 - DNA, 14 bp, Artificial Sequence
  Description of Artificial Sequence: Synthetic oligonucleotide
ttggtggtggcgga

SEQ ID NO: 23908 - DNA, 14 bp, Artificial Sequence
  Description of Artificial Sequence: Synthetic oligonucleotide
cttggtggtggcgg

SEQ ID NO: 23909 - DNA, 14 bp, Artificial Sequence
  Description of Artificial Sequence: Synthetic oligonucleotide
tcttggtggtggcg

SEQ ID NO: 23910 - DNA, 14 bp, Artificial Sequence
  Description of Artificial Sequence: Synthetic oligonucleotide
ctcttggtggtggc

SEQ ID NO: 23911 - DNA, 14 bp, Artificial Sequence
  Description of Artificial Sequence: Synthetic oligonucleotide
tctcttggtggtgg

SEQ ID NO: 23912 - DNA, 14 bp, Artificial Sequence
  Description of Artificial Sequence: Synthetic oligonucleotide
atctcttggtggtg

SEQ ID NO: 23913 - DNA, 14 bp, Artificial Sequence
  Description of Artificial Sequence: Synthetic oligonucleotide
gatctcttggtggt

SEQ ID NO: 23914 - DNA, 14 bp, Artificial Sequence
  Description of Artificial Sequence: Synthetic oligonucleotide
ggatctcttggtgg

SEQ ID NO: 23915 - DNA, 14 bp, Artificial Sequence
  Description of Artificial Sequence: Synthetic oligonucleotide
aggatctcttggtg

SEQ ID NO: 23916 - DNA, 14 bp, Artificial Sequence
  Description of Artificial Sequence: Synthetic oligonucleotide
gaggatctcttggt

SEQ ID NO: 23917 - DNA, 14 bp, Artificial Sequence
  Description of Artificial Sequence: Synthetic oligonucleotide
agaggatctcttgg

SEQ ID NO: 23918 - DNA, 14 bp, Artificial Sequence
  Description of Artificial Sequence: Synthetic oligonucleotide
aagaggatctcttg

SEQ ID NO: 23919 - DNA, 14 bp, Artificial Sequence
  Description of Artificial Sequence: Synthetic oligonucleotide
gaagaggatctctt

SEQ ID NO: 23920 - DNA, 14 bp, Artificial Sequence
  Description of Artificial Sequence: Synthetic oligonucleotide
ggaagaggatctct

SEQ ID NO: 23921 - DNA, 14 bp, Artificial Sequence
  Description of Artificial Sequence: Synthetic oligonucleotide
aggaagaggatctc

SEQ ID NO: 23922 - DNA, 14 bp, Artificial Sequence
  Description of Artificial Sequence: Synthetic oligonucleotide
caggaagaggatct

SEQ ID NO: 23923 - DNA, 14 bp, Artificial Sequence
  Description of Artificial Sequence: Synthetic oligonucleotide
tcaggaagaggatc

SEQ ID NO: 23924 - DNA, 14 bp, Artificial Sequence
  Description of Artificial Sequence: Synthetic oligonucleotide
atcaggaagaggat

SEQ ID NO: 23925 - DNA, 14 bp, Artificial Sequence
  Description of Artificial Sequence: Synthetic oligonucleotide
tatcaggaagagga

SEQ ID NO: 23926 - DNA, 14 bp, Artificial Sequence
  Description of Artificial Sequence: Synthetic oligonucleotide
gtatcaggaagagg

SEQ ID NO: 23927 - DNA, 14 bp, Artificial Sequence
  Description of Artificial Sequence: Synthetic oligonucleotide
ggtatcaggaagag

SEQ ID NO: 23928 - DNA, 14 bp, Artificial Sequence
  Description of Artificial Sequence: Synthetic oligonucleotide
gggtatcaggaaga

SEQ ID NO: 23929 - DNA, 14 bp, Artificial Sequence
  Description of Artificial Sequence: Synthetic oligonucleotide
ggggtatcaggaag

SEQ ID NO: 23930 - DNA, 14 bp, Artificial Sequence
  Description of Artificial Sequence: Synthetic oligonucleotide
aggggtatcaggaa

SEQ ID NO: 23931 - DNA, 14 bp, Artificial Sequence
  Description of Artificial Sequence: Synthetic oligonucleotide
gaggggtatcagga

SEQ ID NO: 23932 - DNA, 14 bp, Artificial Sequence
  Description of Artificial Sequence: Synthetic oligonucleotide
ggaggggtatcagg

SEQ ID NO: 23933 - DNA, 14 bp, Artificial Sequence
  Description of Artificial Sequence: Synthetic oligonucleotide
tggaggggtatcag

SEQ ID NO: 23934 - DNA, 14 bp, Artificial Sequence
  Description of Artificial Sequence: Synthetic oligonucleotide
gtggaggggtatca

SEQ ID NO: 23935 - DNA, 14 bp, Artificial Sequence
  Description of Artificial Sequence: Synthetic oligonucleotide
ggtggaggggtatc

SEQ ID NO: 23936 - DNA, 14 bp, Artificial Sequence
  Description of Artificial Sequence: Synthetic oligonucleotide
tggtggaggggtat

SEQ ID NO: 23937 - DNA, 14 bp, Artificial Sequence
  Description of Artificial Sequence: Synthetic oligonucleotide
ctggtggaggggta

SEQ ID NO: 23938 - DNA, 14 bp, Artificial Sequence
  Description of Artificial Sequence: Synthetic oligonucleotide
actggtggaggggt

SEQ ID NO: 23939 - DNA, 14 bp, Artificial Sequence
  Description of Artificial Sequence: Synthetic oligonucleotide
aactggtggagggg

SEQ ID NO: 23940 - DNA, 14 bp, Artificial Sequence
  Description of Artificial Sequence: Synthetic oligonucleotide
gaactggtggaggg

SEQ ID NO: 23941 - DNA, 14 bp, Artificial Sequence
  Description of Artificial Sequence: Synthetic oligonucleotide
ggaactggtggagg

SEQ ID NO: 23942 - DNA, 14 bp, Artificial Sequence
  Description of Artificial Sequence: Synthetic oligonucleotide
gggaactggtggag

SEQ ID NO: 23943 - DNA, 14 bp, Artificial Sequence
  Description of Artificial Sequence: Synthetic oligonucleotide
ggggaactggtgga

SEQ ID NO: 23944 - DNA, 14 bp, Artificial Sequence
  Description of Artificial Sequence: Synthetic oligonucleotide
aggggaactggtgg

SEQ ID NO: 23945 - DNA, 14 bp, Artificial Sequence
  Description of Artificial Sequence: Synthetic oligonucleotide
aaggggaactggtg

SEQ ID NO: 23946 - DNA, 14 bp, Artificial Sequence
  Description of Artificial Sequence: Synthetic oligonucleotide
gaaggggaactggt

SEQ ID NO: 23947 - DNA, 14 bp, Artificial Sequence
  Description of Artificial Sequence: Synthetic oligonucleotide
cgaaggggaactgg

SEQ ID NO: 23948 - DNA, 14 bp, Artificial Sequence
  Description of Artificial Sequence: Synthetic oligonucleotide
ccgaaggggaactg

SEQ ID NO: 23949 - DNA, 14 bp, Artificial Sequence
  Description of Artificial Sequence: Synthetic oligonucleotide
gccgaaggggaact

SEQ ID NO: 23950 - DNA, 14 bp, Artificial Sequence
  Description of Artificial Sequence: Synthetic oligonucleotide
ggccgaaggggaac

SEQ ID NO: 23951 - DNA, 14 bp, Artificial Sequence
  Description of Artificial Sequence: Synthetic oligonucleotide
aggccgaaggggaa

SEQ ID NO: 23952 - DNA, 14 bp, Artificial Sequence
  Description of Artificial Sequence: Synthetic oligonucleotide
gaggccgaagggga

SEQ ID NO: 23953 - DNA, 14 bp, Artificial Sequence
  Description of Artificial Sequence: Synthetic oligonucleotide
ggaggccgaagggg

SEQ ID NO: 23954 - DNA, 14 bp, Artificial Sequence
  Description of Artificial Sequence: Synthetic oligonucleotide
tggaggccgaaggg

SEQ ID NO: 23955 - DNA, 14 bp, Artificial Sequence
  Description of Artificial Sequence: Synthetic oligonucleotide
ctggaggccgaagg

SEQ ID NO: 23956 - DNA, 14 bp, Artificial Sequence
  Description of Artificial Sequence: Synthetic oligonucleotide
tctggaggccgaag

SEQ ID NO: 23957 - DNA, 14 bp, Artificial Sequence
  Description of Artificial Sequence: Synthetic oligonucleotide
ttctggaggccgaa

SEQ ID NO: 23958 - DNA, 14 bp, Artificial Sequence
  Description of Artificial Sequence: Synthetic oligonucleotide
gttctggaggccga

SEQ ID NO: 23959 - DNA, 14 bp, Artificial Sequence
  Description of Artificial Sequence: Synthetic oligonucleotide
tgttctggaggccg

SEQ ID NO: 23960 - DNA, 14 bp, Artificial Sequence
  Description of Artificial Sequence: Synthetic oligonucleotide
gtgttctggaggcc

SEQ ID NO: 23961 - DNA, 14 bp, Artificial Sequence
  Description of Artificial Sequence: Synthetic oligonucleotide
agtgttctggaggc

SEQ ID NO: 23962 - DNA, 14 bp, Artificial Sequence
  Description of Artificial Sequence: Synthetic oligonucleotide
aagtgttctggagg

SEQ ID NO: 23963 - DNA, 14 bp, Artificial Sequence
  Description of Artificial Sequence: Synthetic oligonucleotide
aaagtgttctggag

SEQ ID NO: 23964 - DNA, 14 bp, Artificial Sequence
  Description of Artificial Sequence: Synthetic oligonucleotide
taaagtgttctgga

SEQ ID NO: 23965 - DNA, 14 bp, Artificial Sequence
  Description of Artificial Sequence: Synthetic oligonucleotide
ataaagtgttctgg

SEQ ID NO: 23966 - DNA, 14 bp, Artificial Sequence
  Description of Artificial Sequence: Synthetic oligonucleotide
tataaagtgttctg

SEQ ID NO: 23967 - DNA, 14 bp, Artificial Sequence
  Description of Artificial Sequence: Synthetic oligonucleotide
ttataaagtgttct

SEQ ID NO: 23968 - DNA, 14 bp, Artificial Sequence
  Description of Artificial Sequence: Synthetic oligonucleotide
tttataaagtgttc

SEQ ID NO: 23969 - DNA, 14 bp, Artificial Sequence
  Description of Artificial Sequence: Synthetic oligonucleotide
gtttataaagtgtt

SEQ ID NO: 23970 - DNA, 14 bp, Artificial Sequence
  Description of Artificial Sequence: Synthetic oligonucleotide
agtttataaagtgt

SEQ ID NO: 23971 - DNA, 14 bp, Artificial Sequence
  Description of Artificial Sequence: Synthetic oligonucleotide
cagtttataaagtg

SEQ ID NO: 23972 - DNA, 14 bp, Artificial Sequence
  Description of Artificial Sequence: Synthetic oligonucleotide
acagtttataaagt

SEQ ID NO: 23973 - DNA, 14 bp, Artificial Sequence
  Description of Artificial Sequence: Synthetic oligonucleotide
gacagtttataaag

SEQ ID NO: 23974 - DNA, 14 bp, Artificial Sequence
  Description of Artificial Sequence: Synthetic oligonucleotide
ggacagtttataaa

SEQ ID NO: 23975 - DNA, 14 bp, Artificial Sequence
  Description of Artificial Sequence: Synthetic oligonucleotide
tggacagtttataa

SEQ ID NO: 23976 - DNA, 14 bp, Artificial Sequence
  Description of Artificial Sequence: Synthetic oligonucleotide
atggacagtttata

SEQ ID NO: 23977 - DNA, 14 bp, Artificial Sequence
  Description of Artificial Sequence: Synthetic oligonucleotide
aatggacagtttat

SEQ ID NO: 23978 - DNA, 14 bp, Artificial Sequence
  Description of Artificial Sequence: Synthetic oligonucleotide
aaatggacagttta

SEQ ID NO: 23979 - DNA, 14 bp, Artificial Sequence
  Description of Artificial Sequence: Synthetic oligonucleotide
taaatggacagttt

SEQ ID NO: 23980 - DNA, 14 bp, Artificial Sequence
  Description of Artificial Sequence: Synthetic oligonucleotide
ttaaatggacagtt

SEQ ID NO: 23981 - DNA, 14 bp, Artificial Sequence
  Description of Artificial Sequence: Synthetic oligonucleotide
attaaatggacagt

SEQ ID NO: 23982 - DNA, 14 bp, Artificial Sequence
  Description of Artificial Sequence: Synthetic oligonucleotide
gattaaatggacag

SEQ ID NO: 23983 - DNA, 14 bp, Artificial Sequence
  Description of Artificial Sequence: Synthetic oligonucleotide
agattaaatggaca

SEQ ID NO: 23984 - DNA, 14 bp, Artificial Sequence
  Description of Artificial Sequence: Synthetic oligonucleotide
aagattaaatggac

SEQ ID NO: 23985 - DNA, 14 bp, Artificial Sequence
  Description of Artificial Sequence: Synthetic oligonucleotide
gaagattaaatgga

SEQ ID NO: 23986 - DNA, 14 bp, Artificial Sequence
  Description of Artificial Sequence: Synthetic oligonucleotide
tgaagattaaatgg

SEQ ID NO: 23987 - DNA, 14 bp, Artificial Sequence
  Description of Artificial Sequence: Synthetic oligonucleotide
ctgaagattaaatg

SEQ ID NO: 23988 - DNA, 14 bp, Artificial Sequence
  Description of Artificial Sequence: Synthetic oligonucleotide
gctgaagattaaat

SEQ ID NO: 23989 - DNA, 14 bp, Artificial Sequence
  Description of Artificial Sequence: Synthetic oligonucleotide
ggctgaagattaaa

SEQ ID NO: 23990 - DNA, 14 bp, Artificial Sequence
  Description of Artificial Sequence: Synthetic oligonucleotide
tggctgaagattaa

SEQ ID NO: 23991 - DNA, 14 bp, Artificial Sequence
  Description of Artificial Sequence: Synthetic oligonucleotide
gtggctgaagatta

SEQ ID NO: 23992 - DNA, 14 bp, Artificial Sequence
  Description of Artificial Sequence: Synthetic oligonucleotide
ggtggctgaagatt

SEQ ID NO: 23993 - DNA, 14 bp, Artificial Sequence
  Description of Artificial Sequence: Synthetic oligonucleotide
aggtggctgaagat

SEQ ID NO: 23994 - DNA, 14 bp, Artificial Sequence
  Description of Artificial Sequence: Synthetic oligonucleotide
gaggtggctgaaga

SEQ ID NO: 23995 - DNA, 14 bp, Artificial Sequence
  Description of Artificial Sequence: Synthetic oligonucleotide
ggaggtggctgaag

SEQ ID NO: 23996 - DNA, 14 bp, Artificial Sequence
  Description of Artificial Sequence: Synthetic oligonucleotide
tggaggtggctgaa

SEQ ID NO: 23997 - DNA, 14 bp, Artificial Sequence
  Description of Artificial Sequence: Synthetic oligonucleotide
gtggaggtggctga

SEQ ID NO: 23998 - DNA, 14 bp, Artificial Sequence
  Description of Artificial Sequence: Synthetic oligonucleotide
agtggaggtggctg

SEQ ID NO: 23999 - DNA, 14 bp, Artificial Sequence
  Description of Artificial Sequence: Synthetic oligonucleotide
cagtggaggtggct

SEQ ID NO: 24000 - DNA, 14 bp, Artificial Sequence
  Description of Artificial Sequence: Synthetic oligonucleotide
ccagtggaggtggc

SEQ ID NO: 24001 - DNA, 14 bp, Artificial Sequence
  Description of Artificial Sequence: Synthetic oligonucleotide
cccagtggaggtgg

SEQ ID NO: 24002 - DNA, 14 bp, Artificial Sequence
  Description of Artificial Sequence: Synthetic oligonucleotide
ccccagtggaggtg

SEQ ID NO: 24003 - DNA, 14 bp, Artificial Sequence
  Description of Artificial Sequence: Synthetic oligonucleotide
gccccagtggaggt

SEQ ID NO: 24004 - DNA, 14 bp, Artificial Sequence
  Description of Artificial Sequence: Synthetic oligonucleotide
tgccccagtggagg

SEQ ID NO: 24005 - DNA, 14 bp, Artificial Sequence
  Description of Artificial Sequence: Synthetic oligonucleotide
atgccccagtggag

SEQ ID NO: 24006 - DNA, 14 bp, Artificial Sequence
  Description of Artificial Sequence: Synthetic oligonucleotide
gatgccccagtgga

SEQ ID NO: 24007 - DNA, 14 bp, Artificial Sequence
  Description of Artificial Sequence: Synthetic oligonucleotide
agatgccccagtgg

SEQ ID NO: 24008 - DNA, 14 bp, Artificial Sequence
  Description of Artificial Sequence: Synthetic oligonucleotide
aagatgccccagtg

SEQ ID NO: 24009 - DNA, 14 bp, Artificial Sequence
  Description of Artificial Sequence: Synthetic oligonucleotide
gaagatgccccagt

SEQ ID NO: 24010 - DNA, 14 bp, Artificial Sequence
  Description of Artificial Sequence: Synthetic oligonucleotide
tgaagatgccccag

SEQ ID NO: 24011 - DNA, 14 bp, Artificial Sequence
  Description of Artificial Sequence: Synthetic oligonucleotide
gtgaagatgcccca

SEQ ID NO: 24012 - DNA, 14 bp, Artificial Sequence
  Description of Artificial Sequence: Synthetic oligonucleotide
tgtgaagatgcccc

SEQ ID NO: 24013 - DNA, 14 bp, Artificial Sequence
  Description of Artificial Sequence: Synthetic oligonucleotide
ctgtgaagatgccc

SEQ ID NO: 24014 - DNA, 14 bp, Artificial Sequence
  Description of Artificial Sequence: Synthetic oligonucleotide
tctgtgaagatgcc

SEQ ID NO: 24015 - DNA, 14 bp, Artificial Sequence
  Description of Artificial Sequence: Synthetic oligonucleotide
ctctgtgaagatgc

SEQ ID NO: 24016 - DNA, 14 bp, Artificial Sequence
  Description of Artificial Sequence: Synthetic oligonucleotide
tctctgtgaagatg

SEQ ID NO: 24017 - DNA, 14 bp, Artificial Sequence
  Description of Artificial Sequence: Synthetic oligonucleotide
atctctgtgaagat

SEQ ID NO: 24018 - DNA, 14 bp, Artificial Sequence
  Description of Artificial Sequence: Synthetic oligonucleotide
aatctctgtgaaga

SEQ ID NO: 24019 - DNA, 14 bp, Artificial Sequence
  Description of Artificial Sequence: Synthetic oligonucleotide
gaatctctgtgaag

SEQ ID NO: 24020 - DNA, 14 bp, Artificial Sequence
  Description of Artificial Sequence: Synthetic oligonucleotide
tgaatctctgtgaa

SEQ ID NO: 24021 - DNA, 14 bp, Artificial Sequence
  Description of Artificial Sequence: Synthetic oligonucleotide
ctgaatctctgtga

SEQ ID NO: 24022 - DNA, 14 bp, Artificial Sequence
  Description of Artificial Sequence: Synthetic oligonucleotide
tctgaatctctgtg

SEQ ID NO: 24023 - DNA, 14 bp, Artificial Sequence
  Description of Artificial Sequence: Synthetic oligonucleotide
gtctgaatctctgt

SEQ ID NO: 24024 - DNA, 14 bp, Artificial Sequence
  Description of Artificial Sequence: Synthetic oligonucleotide
agtctgaatctctg

SEQ ID NO: 24025 - DNA, 14 bp, Artificial Sequence
  Description of Artificial Sequence: Synthetic oligonucleotide
cagtctgaatctct

SEQ ID NO: 24026 - DNA, 14 bp, Artificial Sequence
  Description of Artificial Sequence: Synthetic oligonucleotide
ccagtctgaatctc

SEQ ID NO: 24027 - DNA, 14 bp, Artificial Sequence
  Description of Artificial Sequence: Synthetic oligonucleotide
gccagtctgaatct

SEQ ID NO: 24028 - DNA, 14 bp, Artificial Sequence
  Description of Artificial Sequence: Synthetic oligonucleotide
agccagtctgaatc

SEQ ID NO: 24029 - DNA, 14 bp, Artificial Sequence
  Description of Artificial Sequence: Synthetic oligonucleotide
gagccagtctgaat

SEQ ID NO: 24030 - DNA, 14 bp, Artificial Sequence
  Description of Artificial Sequence: Synthetic oligonucleotide
tgagccagtctgaa

SEQ ID NO: 24031 - DNA, 14 bp, Artificial Sequence
  Description of Artificial Sequence: Synthetic oligonucleotide
ctgagccagtctga

SEQ ID NO: 24032 - DNA, 14 bp, Artificial Sequence
  Description of Artificial Sequence: Synthetic oligonucleotide
tctgagccagtctg

SEQ ID NO: 24033 - DNA, 14 bp, Artificial Sequence
  Description of Artificial Sequence: Synthetic oligonucleotide
ctctgagccagtct

SEQ ID NO: 24034 - DNA, 14 bp, Artificial Sequence
  Description of Artificial Sequence: Synthetic oligonucleotide
tctctgagccagtc

SEQ ID NO: 24035 - DNA, 14 bp, Artificial Sequence
  Description of Artificial Sequence: Synthetic oligonucleotide
gtctctgagccagt

SEQ ID NO: 24036 - DNA, 14 bp, Artificial Sequence
  Description of Artificial Sequence: Synthetic oligonucleotide
tgtctctgagccag

SEQ ID NO: 24037 - DNA, 14 bp, Artificial Sequence
  Description of Artificial Sequence: Synthetic oligonucleotide
atgtctctgagcca

SEQ ID NO: 24038 - DNA, 14 bp, Artificial Sequence
  Description of Artificial Sequence: Synthetic oligonucleotide
aatgtctctgagcc

SEQ ID NO: 24039 - DNA, 14 bp, Artificial Sequence
  Description of Artificial Sequence: Synthetic oligonucleotide
taatgtctctgagc

SEQ ID NO: 24040 - DNA, 14 bp, Artificial Sequence
  Description of Artificial Sequence: Synthetic oligonucleotide
ctaatgtctctgag

SEQ ID NO: 24041 - DNA, 14 bp, Artificial Sequence
  Description of Artificial Sequence: Synthetic oligonucleotide
actaatgtctctga

SEQ ID NO: 24042 - DNA, 14 bp, Artificial Sequence
  Description of Artificial Sequence: Synthetic oligonucleotide
tactaatgtctctg

SEQ ID NO: 24043 - DNA, 14 bp, Artificial Sequence
  Description of Artificial Sequence: Synthetic oligonucleotide
gtactaatgtctct

SEQ ID NO: 24044 - DNA, 14 bp, Artificial Sequence
  Description of Artificial Sequence: Synthetic oligonucleotide
cgtactaatgtctc

SEQ ID NO: 24045 - DNA, 14 bp, Artificial Sequence
  Description of Artificial Sequence: Synthetic oligonucleotide
acgtactaatgtct

SEQ ID NO: 24046 - DNA, 14 bp, Artificial Sequence
  Description of Artificial Sequence: Synthetic oligonucleotide
cacgtactaatgtc

SEQ ID NO: 24047 - DNA, 14 bp, Artificial Sequence
  Description of Artificial Sequence: Synthetic oligonucleotide
acacgtactaatgt

SEQ ID NO: 24048 - DNA, 14 bp, Artificial Sequence
  Description of Artificial Sequence: Synthetic oligonucleotide
gacacgtactaatg

SEQ ID NO: 24049 - DNA, 14 bp, Artificial Sequence
  Description of Artificial Sequence: Synthetic oligonucleotide
ggacacgtactaat

SEQ ID NO: 24050 - DNA, 14 bp, Artificial Sequence
  Description of Artificial Sequence: Synthetic oligonucleotide
tggacacgtactaa

SEQ ID NO: 24051 - DNA, 14 bp, Artificial Sequence
  Description of Artificial Sequence: Synthetic oligonucleotide
ttggacacgtacta

SEQ ID NO: 24052 - DNA, 14 bp, Artificial Sequence
  Description of Artificial Sequence: Synthetic oligonucleotide
tttggacacgtact

SEQ ID NO: 24053 - DNA, 14 bp, Artificial Sequence
  Description of Artificial Sequence: Synthetic oligonucleotide
atttggacacgtac

SEQ ID NO: 24054 - DNA, 14 bp, Artificial Sequence
  Description of Artificial Sequence: Synthetic oligonucleotide
aatttggacacgta

SEQ ID NO: 24055 - DNA, 14 bp, Artificial Sequence
  Description of Artificial Sequence: Synthetic oligonucleotide
gaatttggacacgt

SEQ ID NO: 24056 - DNA, 14 bp, Artificial Sequence
  Description of Artificial Sequence: Synthetic oligonucleotide
cgaatttggacacg

SEQ ID NO: 24057 - DNA, 14 bp, Artificial Sequence
  Description of Artificial Sequence: Synthetic oligonucleotide
gcgaatttggacac

SEQ ID NO: 24058 - DNA, 14 bp, Artificial Sequence
  Description of Artificial Sequence: Synthetic oligonucleotide
ggcgaatttggaca

SEQ ID NO: 24059 - DNA, 14 bp, Artificial Sequence
  Description of Artificial Sequence: Synthetic oligonucleotide
tggcgaatttggac

SEQ ID NO: 24060 - DNA, 14 bp, Artificial Sequence
  Description of Artificial Sequence: Synthetic oligonucleotide
ttggcgaatttgga

SEQ ID NO: 24061 - DNA, 14 bp, Artificial Sequence
  Description of Artificial Sequence: Synthetic oligonucleotide
cttggcgaatttgg

SEQ ID NO: 24062 - DNA, 14 bp, Artificial Sequence
  Description of Artificial Sequence: Synthetic oligonucleotide
gcttggcgaatttg

SEQ ID NO: 24063 - DNA, 14 bp, Artificial Sequence
  Description of Artificial Sequence: Synthetic oligonucleotide
tgcttggcgaattt

SEQ ID NO: 24064 - DNA, 14 bp, Artificial Sequence
  Description of Artificial Sequence: Synthetic oligonucleotide
gtgcttggcgaatt

SEQ ID NO: 24065 - DNA, 14 bp, Artificial Sequence
  Description of Artificial Sequence: Synthetic oligonucleotide
agtgcttggcgaat

SEQ ID NO: 24066 - DNA, 14 bp, Artificial Sequence
  Description of Artificial Sequence: Synthetic oligonucleotide
gagtgcttggcgaa

SEQ ID NO: 24067 - DNA, 14 bp, Artificial Sequence
  Description of Artificial Sequence: Synthetic oligonucleotide
ggagtgcttggcga

SEQ ID NO: 24068 - DNA, 14 bp, Artificial Sequence
  Description of Artificial Sequence: Synthetic oligonucleotide
aggagtgcttggcg

SEQ ID NO: 24069 - DNA, 14 bp, Artificial Sequence
  Description of Artificial Sequence: Synthetic oligonucleotide
gaggagtgcttggc

SEQ ID NO: 24070 - DNA, 14 bp, Artificial Sequence
  Description of Artificial Sequence: Synthetic oligonucleotide
ggaggagtgcttgg

SEQ ID NO: 24071 - DNA, 14 bp, Artificial Sequence
  Description of Artificial Sequence: Synthetic oligonucleotide
aggaggagtgcttg

SEQ ID NO: 24072 - DNA, 14 bp, Artificial Sequence
  Description of Artificial Sequence: Synthetic oligonucleotide
taggaggagtgctt

SEQ ID NO: 24073 - DNA, 14 bp, Artificial Sequence
  Description of Artificial Sequence: Synthetic oligonucleotide
ctaggaggagtgct

SEQ ID NO: 24074 - DNA, 14 bp, Artificial Sequence
  Description of Artificial Sequence: Synthetic oligonucleotide
gctaggaggagtgc

SEQ ID NO: 24075 - DNA, 14 bp, Artificial Sequence
  Description of Artificial Sequence: Synthetic oligonucleotide
tgctaggaggagtg

SEQ ID NO: 24076 - DNA, 14 bp, Artificial Sequence
  Description of Artificial Sequence: Synthetic oligonucleotide
gtgctaggaggagt

SEQ ID NO: 24077 - DNA, 14 bp, Artificial Sequence
  Description of Artificial Sequence: Synthetic oligonucleotide
tgtgctaggaggag

SEQ ID NO: 24078 - DNA, 14 bp, Artificial Sequence
  Description of Artificial Sequence: Synthetic oligonucleotide
gtgtgctaggagga

SEQ ID NO: 24079 - DNA, 14 bp, Artificial Sequence
  Description of Artificial Sequence: Synthetic oligonucleotide
ggtgtgctaggagg

SEQ ID NO: 24080 - DNA, 14 bp, Artificial Sequence
  Description of Artificial Sequence: Synthetic oligonucleotide
gggtgtgctaggag

SEQ ID NO: 24081 - DNA, 14 bp, Artificial Sequence
  Description of Artificial Sequence: Synthetic oligonucleotide
agggtgtgctagga

SEQ ID NO: 24082 - DNA, 14 bp, Artificial Sequence
  Description of Artificial Sequence: Synthetic oligonucleotide
gagggtgtgctagg

SEQ ID NO: 24083 - DNA, 14 bp, Artificial Sequence
  Description of Artificial Sequence: Synthetic oligonucleotide
agagggtgtgctag

SEQ ID NO: 24084 - DNA, 14 bp, Artificial Sequence
  Description of Artificial Sequence: Synthetic oligonucleotide
gagagggtgtgcta

SEQ ID NO: 24085 - DNA, 14 bp, Artificial Sequence
  Description of Artificial Sequence: Synthetic oligonucleotide
ggagagggtgtgct

SEQ ID NO: 24086 - DNA, 14 bp, Artificial Sequence
  Description of Artificial Sequence: Synthetic oligonucleotide
tggagagggtgtgc

SEQ ID NO: 24087 - DNA, 14 bp, Artificial Sequence
  Description of Artificial Sequence: Synthetic oligonucleotide
ttggagagggtgtg

SEQ ID NO: 24088 - DNA, 14 bp, Artificial Sequence
  Description of Artificial Sequence: Synthetic oligonucleotide
cttggagagggtgt

SEQ ID NO: 24089 - DNA, 14 bp, Artificial Sequence
  Description of Artificial Sequence: Synthetic oligonucleotide
ccttggagagggtg

SEQ ID NO: 24090 - DNA, 14 bp, Artificial Sequence
  Description of Artificial Sequence: Synthetic oligonucleotide
cccttggagagggt

SEQ ID NO: 24091 - DNA, 14 bp, Artificial Sequence
  Description of Artificial Sequence: Synthetic oligonucleotide
acccttggagaggg

SEQ ID NO: 24092 - DNA, 14 bp, Artificial Sequence
  Description of Artificial Sequence: Synthetic oligonucleotide
tacccttggagagg

SEQ ID NO: 24093 - DNA, 14 bp, Artificial Sequence
  Description of Artificial Sequence: Synthetic oligonucleotide
gtacccttggagag

SEQ ID NO: 24094 - DNA, 14 bp, Artificial Sequence
  Description of Artificial Sequence: Synthetic oligonucleotide
ggtacccttggaga

SEQ ID NO: 24095 - DNA, 14 bp, Artificial Sequence
  Description of Artificial Sequence: Synthetic oligonucleotide
cggtacccttggag

SEQ ID NO: 24096 - DNA, 14 bp, Artificial Sequence
  Description of Artificial Sequence: Synthetic oligonucleotide
gcggtacccttgga

SEQ ID NO: 24097 - DNA, 14 bp, Artificial Sequence
  Description of Artificial Sequence: Synthetic oligonucleotide
cgcggtacccttgg

SEQ ID NO: 24098 - DNA, 14 bp, Artificial Sequence
  Description of Artificial Sequence: Synthetic oligonucleotide
acgcggtacccttg

SEQ ID NO: 24099 - DNA, 14 bp, Artificial Sequence
  Description of Artificial Sequence: Synthetic oligonucleotide
gacgcggtaccctt

SEQ ID NO: 24100 - DNA, 14 bp, Artificial Sequence
  Description of Artificial Sequence: Synthetic oligonucleotide
cgacgcggtaccct

SEQ ID NO: 24101 - DNA, 14 bp, Artificial Sequence
  Description of Artificial Sequence: Synthetic oligonucleotide
tcgacgcggtaccc

SEQ ID NO: 24102 - DNA, 14 bp, Artificial Sequence
  Description of Artificial Sequence: Synthetic oligonucleotide
atcgacgcggtacc

SEQ ID NO: 24103 - DNA, 14 bp, Artificial Sequence
  Description of Artificial Sequence: Synthetic oligonucleotide
catcgacgcggtac

SEQ ID NO: 24104 - DNA, 14 bp, Artificial Sequence
  Description of Artificial Sequence: Synthetic oligonucleotide
gcatcgacgcggta

SEQ ID NO: 24105 - DNA, 14 bp, Artificial Sequence
  Description of Artificial Sequence: Synthetic oligonucleotide
agcatcgacgcggt

SEQ ID NO: 24106 - DNA, 14 bp, Artificial Sequence
  Description of Artificial Sequence: Synthetic oligonucleotide
tagcatcgacgcgg

SEQ ID NO: 24107 - DNA, 14 bp, Artificial Sequence
  Description of Artificial Sequence: Synthetic oligonucleotide
atagcatcgacgcg

SEQ ID NO: 24108 - DNA, 14 bp, Artificial Sequence
  Description of Artificial Sequence: Synthetic oligonucleotide
catagcatcgacgc

SEQ ID NO: 24109 - DNA, 14 bp, Artificial Sequence
  Description of Artificial Sequence: Synthetic oligonucleotide
acatagcatcgacg

SEQ ID NO: 24110 - DNA, 14 bp, Artificial Sequence
  Description of Artificial Sequence: Synthetic oligonucleotide
cacatagcatcgac

SEQ ID NO: 24111 - DNA, 14 bp, Artificial Sequence
  Description of Artificial Sequence: Synthetic oligonucleotide
gcacatagcatcga

SEQ ID NO: 24112 - DNA, 14 bp, Artificial Sequence
  Description of Artificial Sequence: Synthetic oligonucleotide
agcacatagcatcg

SEQ ID NO: 24113 - DNA, 14 bp, Artificial Sequence
  Description of Artificial Sequence: Synthetic oligonucleotide
gagcacatagcatc

SEQ ID NO: 24114 - DNA, 14 bp, Artificial Sequence
  Description of Artificial Sequence: Synthetic oligonucleotide
tgagcacatagcat

SEQ ID NO: 24115 - DNA, 14 bp, Artificial Sequence
  Description of Artificial Sequence: Synthetic oligonucleotide
ctgagcacatagca

SEQ ID NO: 24116 - DNA, 14 bp, Artificial Sequence
  Description of Artificial Sequence: Synthetic oligonucleotide
actgagcacatagc

SEQ ID NO: 24117 - DNA, 14 bp, Artificial Sequence
  Description of Artificial Sequence: Synthetic oligonucleotide
aactgagcacatag

SEQ ID NO: 24118 - DNA, 14 bp, Artificial Sequence
  Description of Artificial Sequence: Synthetic oligonucleotide
gaactgagcacata

SEQ ID NO: 24119 - DNA, 14 bp, Artificial Sequence
  Description of Artificial Sequence: Synthetic oligonucleotide
agaactgagcacat

SEQ ID NO: 24120 - DNA, 14 bp, Artificial Sequence
  Description of Artificial Sequence: Synthetic oligonucleotide
tagaactgagcaca

SEQ ID NO: 24121 - DNA, 14 bp, Artificial Sequence
  Description of Artificial Sequence: Synthetic oligonucleotide
ctagaactgagcac

SEQ ID NO: 24122 - DNA, 14 bp, Artificial Sequence
  Description of Artificial Sequence: Synthetic oligonucleotide
actagaactgagca

SEQ ID NO: 24123 - DNA, 14 bp, Artificial Sequence
  Description of Artificial Sequence: Synthetic oligonucleotide
gactagaactgagc

SEQ ID NO: 24124 - DNA, 14 bp, Artificial Sequence
  Description of Artificial Sequence: Synthetic oligonucleotide
tgactagaactgag

SEQ ID NO: 24125 - DNA, 14 bp, Artificial Sequence
  Description of Artificial Sequence: Synthetic oligonucleotide
ctgactagaactga

SEQ ID NO: 24126 - DNA, 14 bp, Artificial Sequence
  Description of Artificial Sequence: Synthetic oligonucleotide
tctgactagaactg

SEQ ID NO: 24127 - DNA, 14 bp, Artificial Sequence
  Description of Artificial Sequence: Synthetic oligonucleotide
ttctgactagaact

SEQ ID NO: 24128 - DNA, 14 bp, Artificial Sequence
  Description of Artificial Sequence: Synthetic oligonucleotide
attctgactagaac

SEQ ID NO: 24129 - DNA, 14 bp, Artificial Sequence
  Description of Artificial Sequence: Synthetic oligonucleotide
tattctgactagaa

SEQ ID NO: 24130 - DNA, 14 bp, Artificial Sequence
  Description of Artificial Sequence: Synthetic oligonucleotide
ttattctgactaga

SEQ ID NO: 24131 - DNA, 14 bp, Artificial Sequence
  Description of Artificial Sequence: Synthetic oligonucleotide
attattctgactag

SEQ ID NO: 24132 - DNA, 14 bp, Artificial Sequence
  Description of Artificial Sequence: Synthetic oligonucleotide
gattattctgacta

SEQ ID NO: 24133 - DNA, 14 bp, Artificial Sequence
  Description of Artificial Sequence: Synthetic oligonucleotide
agattattctgact

SEQ ID NO: 24134 - DNA, 14 bp, Artificial Sequence
  Description of Artificial Sequence: Synthetic oligonucleotide
aagattattctgac

SEQ ID NO: 24135 - DNA, 14 bp, Artificial Sequence
  Description of Artificial Sequence: Synthetic oligonucleotide
caagattattctga

SEQ ID NO: 24136 - DNA, 14 bp, Artificial Sequence
  Description of Artificial Sequence: Synthetic oligonucleotide
gcaagattattctg

SEQ ID NO: 24137 - DNA, 14 bp, Artificial Sequence
  Description of Artificial Sequence: Synthetic oligonucleotide
agcaagattattct

SEQ ID NO: 24138 - DNA, 14 bp, Artificial Sequence
  Description of Artificial Sequence: Synthetic oligonucleotide
gagcaagattattc

SEQ ID NO: 24139 - DNA, 14 bp, Artificial Sequence
  Description of Artificial Sequence: Synthetic oligonucleotide
tgagcaagattatt

SEQ ID NO: 24140 - DNA, 14 bp, Artificial Sequence
  Description of Artificial Sequence: Synthetic oligonucleotide
atgagcaagattat

SEQ ID NO: 24141 - DNA, 14 bp, Artificial Sequence
  Description of Artificial Sequence: Synthetic oligonucleotide
gatgagcaagatta

SEQ ID NO: 24142 - DNA, 14 bp, Artificial Sequence
  Description of Artificial Sequence: Synthetic oligonucleotide
ggatgagcaagatt

SEQ ID NO: 24143 - DNA, 14 bp, Artificial Sequence
  Description of Artificial Sequence: Synthetic oligonucleotide
aggatgagcaagat

SEQ ID NO: 24144 - DNA, 14 bp, Artificial Sequence
  Description of Artificial Sequence: Synthetic oligonucleotide
gaggatgagcaaga

SEQ ID NO: 24145 - DNA, 14 bp, Artificial Sequence
  Description of Artificial Sequence: Synthetic oligonucleotide
ggaggatgagcaag

SEQ ID NO: 24146 - DNA, 14 bp, Artificial Sequence
  Description of Artificial Sequence: Synthetic oligonucleotide
tggaggatgagcaa

SEQ ID NO: 24147 - DNA, 14 bp, Artificial Sequence
  Description of Artificial Sequence: Synthetic oligonucleotide
ctggaggatgagca

SEQ ID NO: 24148 - DNA, 14 bp, Artificial Sequence
  Description of Artificial Sequence: Synthetic oligonucleotide
gctggaggatgagc

SEQ ID NO: 24149 - DNA, 14 bp, Artificial Sequence
  Description of Artificial Sequence: Synthetic oligonucleotide
agctggaggatgag

SEQ ID NO: 24150 - DNA, 14 bp, Artificial Sequence
  Description of Artificial Sequence: Synthetic oligonucleotide
gagctggaggatga

SEQ ID NO: 24151 - DNA, 14 bp, Artificial Sequence
  Description of Artificial Sequence: Synthetic oligonucleotide
ggagctggaggatg

SEQ ID NO: 24152 - DNA, 14 bp, Artificial Sequence
  Description of Artificial Sequence: Synthetic oligonucleotide
gggagctggaggat

SEQ ID NO: 24153 - DNA, 14 bp, Artificial Sequence
  Description of Artificial Sequence: Synthetic oligonucleotide
ggggagctggagga

SEQ ID NO: 24154 - DNA, 14 bp, Artificial Sequence
  Description of Artificial Sequence: Synthetic oligonucleotide
gggggagctggagg

SEQ ID NO: 24155 - DNA, 14 bp, Artificial Sequence
  Description of Artificial Sequence: Synthetic oligonucleotide
agggggagctggag

SEQ ID NO: 24156 - DNA, 14 bp, Artificial Sequence
  Description of Artificial Sequence: Synthetic oligonucleotide
cagggggagctgga

SEQ ID NO: 24157 - DNA, 14 bp, Artificial Sequence
  Description of Artificial Sequence: Synthetic oligonucleotide
acagggggagctgg

SEQ ID NO: 24158 - DNA, 14 bp, Artificial Sequence
  Description of Artificial Sequence: Synthetic oligonucleotide
aacagggggagctg

SEQ ID NO: 24159 - DNA, 14 bp, Artificial Sequence
  Description of Artificial Sequence: Synthetic oligonucleotide
gaacagggggagct

SEQ ID NO: 24160 - DNA, 14 bp, Artificial Sequence
  Description of Artificial Sequence: Synthetic oligonucleotide
ggaacagggggagc

SEQ ID NO: 24161 - DNA, 14 bp, Artificial Sequence
  Description of Artificial Sequence: Synthetic oligonucleotide
tggaacagggggag

SEQ ID NO: 24162 - DNA, 14 bp, Artificial Sequence
  Description of Artificial Sequence: Synthetic oligonucleotide
gtggaacaggggga

SEQ ID NO: 24163 - DNA, 14 bp, Artificial Sequence
  Description of Artificial Sequence: Synthetic oligonucleotide
ggtggaacaggggg

SEQ ID NO: 24164 - DNA, 14 bp, Artificial Sequence
  Description of Artificial Sequence: Synthetic oligonucleotide
tggtggaacagggg

SEQ ID NO: 24165 - DNA, 14 bp, Artificial Sequence
  Description of Artificial Sequence: Synthetic oligonucleotide
ttggtggaacaggg

SEQ ID NO: 24166 - DNA, 14 bp, Artificial Sequence
  Description of Artificial Sequence: Synthetic oligonucleotide
cttggtggaacagg

SEQ ID NO: 24167 - DNA, 14 bp, Artificial Sequence
  Description of Artificial Sequence: Synthetic oligonucleotide
ccttggtggaacag

SEQ ID NO: 24168 - DNA, 14 bp, Artificial Sequence
  Description of Artificial Sequence: Synthetic oligonucleotide
gccttggtggaaca

SEQ ID NO: 24169 - DNA, 14 bp, Artificial Sequence
  Description of Artificial Sequence: Synthetic oligonucleotide
tgccttggtggaac

SEQ ID NO: 24170 - DNA, 14 bp, Artificial Sequence
  Description of Artificial Sequence: Synthetic oligonucleotide
ctgccttggtggaa

SEQ ID NO: 24171 - DNA, 14 bp, Artificial Sequence
  Description of Artificial Sequence: Synthetic oligonucleotide
tctgccttggtgga

SEQ ID NO: 24172 - DNA, 14 bp, Artificial Sequence
  Description of Artificial Sequence: Synthetic oligonucleotide
ttctgccttggtgg

SEQ ID NO: 24173 - DNA, 14 bp, Artificial Sequence
  Description of Artificial Sequence: Synthetic oligonucleotide
attctgccttggtg

SEQ ID NO: 24174 - DNA, 14 bp, Artificial Sequence
  Description of Artificial Sequence: Synthetic oligonucleotide
aattctgccttggt

SEQ ID NO: 24175 - DNA, 14 bp, Artificial Sequence
  Description of Artificial Sequence: Synthetic oligonucleotide
gaattctgccttgg

SEQ ID NO: 24176 - DNA, 14 bp, Artificial Sequence
  Description of Artificial Sequence: Synthetic oligonucleotide
tgaattctgccttg

SEQ ID NO: 24177 - DNA, 14 bp, Artificial Sequence
  Description of Artificial Sequence: Synthetic oligonucleotide
ttgaattctgcctt

SEQ ID NO: 24178 - DNA, 14 bp, Artificial Sequence
  Description of Artificial Sequence: Synthetic oligonucleotide
cttgaattctgcct

SEQ ID NO: 24179 - DNA, 14 bp, Artificial Sequence
  Description of Artificial Sequence: Synthetic oligonucleotide
gcttgaattctgcc

SEQ ID NO: 24180 - DNA, 14 bp, Artificial Sequence
  Description of Artificial Sequence: Synthetic oligonucleotide
ggcttgaattctgc

SEQ ID NO: 24181 - DNA, 14 bp, Artificial Sequence
  Description of Artificial Sequence: Synthetic oligonucleotide
gggcttgaattctg

SEQ ID NO: 24182 - DNA, 14 bp, Artificial Sequence
  Description of Artificial Sequence: Synthetic oligonucleotide
agggcttgaattct

SEQ ID NO: 24183 - DNA, 14 bp, Artificial Sequence
  Description of Artificial Sequence: Synthetic oligonucleotide
gagggcttgaattc

SEQ ID NO: 24184 - DNA, 14 bp, Artificial Sequence
  Description of Artificial Sequence: Synthetic oligonucleotide
tgagggcttgaatt

SEQ ID NO: 24185 - DNA, 14 bp, Artificial Sequence
  Description of Artificial Sequence: Synthetic oligonucleotide
atgagggcttgaat

SEQ ID NO: 24186 - DNA, 14 bp, Artificial Sequence
  Description of Artificial Sequence: Synthetic oligonucleotide
gatgagggcttgaa

SEQ ID NO: 24187 - DNA, 14 bp, Artificial Sequence
  Description of Artificial Sequence: Synthetic oligonucleotide
agatgagggcttga

SEQ ID NO: 24188 - DNA, 14 bp, Artificial Sequence
  Description of Artificial Sequence: Synthetic oligonucleotide
cagatgagggcttg

SEQ ID NO: 24189 - DNA, 14 bp, Artificial Sequence
  Description of Artificial Sequence: Synthetic oligonucleotide
gcagatgagggctt

SEQ ID NO: 24190 - DNA, 14 bp, Artificial Sequence
  Description of Artificial Sequence: Synthetic oligonucleotide
ggcagatgagggct

SEQ ID NO: 24191 - DNA, 14 bp, Artificial Sequence
  Description of Artificial Sequence: Synthetic oligonucleotide
tggcagatgagggc

SEQ ID NO: 24192 - DNA, 14 bp, Artificial Sequence
  Description of Artificial Sequence: Synthetic oligonucleotide
ttggcagatgaggg

SEQ ID NO: 24193 - DNA, 14 bp, Artificial Sequence
  Description of Artificial Sequence: Synthetic oligonucleotide
tttggcagatgagg

SEQ ID NO: 24194 - DNA, 14 bp, Artificial Sequence
  Description of Artificial Sequence: Synthetic oligonucleotide
ttttggcagatgag

SEQ ID NO: 24195 - DNA, 14 bp, Artificial Sequence
  Description of Artificial Sequence: Synthetic oligonucleotide
gttttggcagatga

SEQ ID NO: 24196 - DNA, 14 bp, Artificial Sequence
  Description of Artificial Sequence: Synthetic oligonucleotide
agttttggcagatg

SEQ ID NO: 24197 - DNA, 14 bp, Artificial Sequence
  Description of Artificial Sequence: Synthetic oligonucleotide
cagttttggcagat

SEQ ID NO: 24198 - DNA, 14 bp, Artificial Sequence
  Description of Artificial Sequence: Synthetic oligonucleotide
gcagttttggcaga

SEQ ID NO: 24199 - DNA, 14 bp, Artificial Sequence
  Description of Artificial Sequence: Synthetic oligonucleotide
ggcagttttggcag

SEQ ID NO: 24200 - DNA, 14 bp, Artificial Sequence
  Description of Artificial Sequence: Synthetic oligonucleotide
tggcagttttggca

SEQ ID NO: 24201 - DNA, 14 bp, Artificial Sequence
  Description of Artificial Sequence: Synthetic oligonucleotide
gtggcagttttggc

SEQ ID NO: 24202 - DNA, 14 bp, Artificial Sequence
  Description of Artificial Sequence: Synthetic oligonucleotide
ggtggcagttttgg

SEQ ID NO: 24203 - DNA, 14 bp, Artificial Sequence
  Description of Artificial Sequence: Synthetic oligonucleotide
tggtggcagttttg

SEQ ID NO: 24204 - DNA, 14 bp, Artificial Sequence
  Description of Artificial Sequence: Synthetic oligonucleotide
ttggtggcagtttt

SEQ ID NO: 24205 - DNA, 14 bp, Artificial Sequence
  Description of Artificial Sequence: Synthetic oligonucleotide
tttggtggcagttt

SEQ ID NO: 24206 - DNA, 14 bp, Artificial Sequence
  Description of Artificial Sequence: Synthetic oligonucleotide
ctttggtggcagtt

SEQ ID NO: 24207 - DNA, 14 bp, Artificial Sequence
  Description of Artificial Sequence: Synthetic oligonucleotide
tctttggtggcagt

SEQ ID NO: 24208 - DNA, 14 bp, Artificial Sequence
  Description of Artificial Sequence: Synthetic oligonucleotide
gtctttggtggcag

SEQ ID NO: 24209 - DNA, 14 bp, Artificial Sequence
  Description of Artificial Sequence: Synthetic oligonucleotide
agtctttggtggca

SEQ ID NO: 24210 - DNA, 14 bp, Artificial Sequence
  Description of Artificial Sequence: Synthetic oligonucleotide
aagtctttggtggc

SEQ ID NO: 24211 - DNA, 14 bp, Artificial Sequence
  Description of Artificial Sequence: Synthetic oligonucleotide
taagtctttggtgg

SEQ ID NO: 24212 - DNA, 14 bp, Artificial Sequence
  Description of Artificial Sequence: Synthetic oligonucleotide
gtaagtctttggtg

SEQ ID NO: 24213 - DNA, 14 bp, Artificial Sequence
  Description of Artificial Sequence: Synthetic oligonucleotide
tgtaagtctttggt

SEQ ID NO: 24214 - DNA, 14 bp, Artificial Sequence
  Description of Artificial Sequence: Synthetic oligonucleotide
ttgtaagtctttgg

SEQ ID NO: 24215 - DNA, 14 bp, Artificial Sequence
  Description of Artificial Sequence: Synthetic oligonucleotide
tttgtaagtctttg

SEQ ID NO: 24216 - DNA, 14 bp, Artificial Sequence
  Description of Artificial Sequence: Synthetic oligonucleotide
gtttgtaagtcttt

SEQ ID NO: 24217 - DNA, 14 bp, Artificial Sequence
  Description of Artificial Sequence: Synthetic oligonucleotide
cgtttgtaagtctt

SEQ ID NO: 24218 - DNA, 14 bp, Artificial Sequence
  Description of Artificial Sequence: Synthetic oligonucleotide
ccgtttgtaagtct

SEQ ID NO: 24219 - DNA, 14 bp, Artificial Sequence
  Description of Artificial Sequence: Synthetic oligonucleotide
cccgtttgtaagtc

SEQ ID NO: 24220 - DNA, 14 bp, Artificial Sequence
  Description of Artificial Sequence: Synthetic oligonucleotide
tcccgtttgtaagt

SEQ ID NO: 24221 - DNA, 14 bp, Artificial Sequence
  Description of Artificial Sequence: Synthetic oligonucleotide
ctcccgtttgtaag

SEQ ID NO: 24222 - DNA, 14 bp, Artificial Sequence
  Description of Artificial Sequence: Synthetic oligonucleotide
gctcccgtttgtaa

SEQ ID NO: 24223 - DNA, 14 bp, Artificial Sequence
  Description of Artificial Sequence: Synthetic oligonucleotide
agctcccgtttgta

SEQ ID NO: 24224 - DNA, 14 bp, Artificial Sequence
  Description of Artificial Sequence: Synthetic oligonucleotide
aagctcccgtttgt

SEQ ID NO: 24225 - DNA, 14 bp, Artificial Sequence
  Description of Artificial Sequence: Synthetic oligonucleotide
aaagctcccgtttg

SEQ ID NO: 24226 - DNA, 14 bp, Artificial Sequence
  Description of Artificial Sequence: Synthetic oligonucleotide
gaaagctcccgttt

SEQ ID NO: 24227 - DNA, 14 bp, Artificial Sequence
  Description of Artificial Sequence: Synthetic oligonucleotide
cgaaagctcccgtt

SEQ ID NO: 24228 - DNA, 14 bp, Artificial Sequence
  Description of Artificial Sequence: Synthetic oligonucleotide
gcgaaagctcccgt

SEQ ID NO: 24229 - DNA, 14 bp, Artificial Sequence
  Description of Artificial Sequence: Synthetic oligonucleotide
tgcgaaagctcccg

SEQ ID NO: 24230 - DNA, 14 bp, Artificial Sequence
  Description of Artificial Sequence: Synthetic oligonucleotide
gtgcgaaagctccc

SEQ ID NO: 24231 - DNA, 14 bp, Artificial Sequence
  Description of Artificial Sequence: Synthetic oligonucleotide
ggtgcgaaagctcc

SEQ ID NO: 24232 - DNA, 14 bp, Artificial Sequence
  Description of Artificial Sequence: Synthetic oligonucleotide
gggtgcgaaagctc

SEQ ID NO: 24233 - DNA, 14 bp, Artificial Sequence
  Description of Artificial Sequence: Synthetic oligonucleotide
ggggtgcgaaagct

SEQ ID NO: 24234 - DNA, 14 bp, Artificial Sequence
  Description of Artificial Sequence: Synthetic oligonucleotide
gggggtgcgaaagc

SEQ ID NO: 24235 - DNA, 14 bp, Artificial Sequence
  Description of Artificial Sequence: Synthetic oligonucleotide
ggggggtgcgaaag

SEQ ID NO: 24236 - DNA, 14 bp, Artificial Sequence
  Description of Artificial Sequence: Synthetic oligonucleotide
tggggggtgcgaaa

SEQ ID NO: 24237 - DNA, 14 bp, Artificial Sequence
  Description of Artificial Sequence: Synthetic oligonucleotide
atggggggtgcgaa

SEQ ID NO: 24238 - DNA, 14 bp, Artificial Sequence
  Description of Artificial Sequence: Synthetic oligonucleotide
aatggggggtgcga

SEQ ID NO: 24239 - DNA, 14 bp, Artificial Sequence
  Description of Artificial Sequence: Synthetic oligonucleotide
caatggggggtgcg

SEQ ID NO: 24240 - DNA, 14 bp, Artificial Sequence
  Description of Artificial Sequence: Synthetic oligonucleotide
acaatggggggtgc

SEQ ID NO: 24241 - DNA, 14 bp, Artificial Sequence
  Description of Artificial Sequence: Synthetic oligonucleotide
tacaatggggggtg

SEQ ID NO: 24242 - DNA, 14 bp, Artificial Sequence
  Description of Artificial Sequence: Synthetic oligonucleotide
gtacaatggggggt

SEQ ID NO: 24243 - DNA, 14 bp, Artificial Sequence
  Description of Artificial Sequence: Synthetic oligonucleotide
tgtacaatgggggg

SEQ ID NO: 24244 - DNA, 14 bp, Artificial Sequence
  Description of Artificial Sequence: Synthetic oligonucleotide
ctgtacaatggggg

SEQ ID NO: 24245 - DNA, 14 bp, Artificial Sequence
  Description of Artificial Sequence: Synthetic oligonucleotide
tctgtacaatgggg

SEQ ID NO: 24246 - DNA, 14 bp, Artificial Sequence
  Description of Artificial Sequence: Synthetic oligonucleotide
gtctgtacaatggg

SEQ ID NO: 24247 - DNA, 14 bp, Artificial Sequence
  Description of Artificial Sequence: Synthetic oligonucleotide
agtctgtacaatgg

SEQ ID NO: 24248 - DNA, 14 bp, Artificial Sequence
  Description of Artificial Sequence: Synthetic oligonucleotide
cagtctgtacaatg

SEQ ID NO: 24249 - DNA, 14 bp, Artificial Sequence
  Description of Artificial Sequence: Synthetic oligonucleotide
gcagtctgtacaat

SEQ ID NO: 24250 - DNA, 14 bp, Artificial Sequence
  Description of Artificial Sequence: Synthetic oligonucleotide
ggcagtctgtacaa

SEQ ID NO: 24251 - DNA, 14 bp, Artificial Sequence
  Description of Artificial Sequence: Synthetic oligonucleotide
aggcagtctgtaca

SEQ ID NO: 24252 - DNA, 14 bp, Artificial Sequence
  Description of Artificial Sequence: Synthetic oligonucleotide
aaggcagtctgtac

SEQ ID NO: 24253 - DNA, 14 bp, Artificial Sequence
  Description of Artificial Sequence: Synthetic oligonucleotide
aaaggcagtctgta

SEQ ID NO: 24254 - DNA, 14 bp, Artificial Sequence
  Description of Artificial Sequence: Synthetic oligonucleotide
caaaggcagtctgt

SEQ ID NO: 24255 - DNA, 14 bp, Artificial Sequence
  Description of Artificial Sequence: Synthetic oligonucleotide
gcaaaggcagtctg

SEQ ID NO: 24256 - DNA, 14 bp, Artificial Sequence
  Description of Artificial Sequence: Synthetic oligonucleotide
agcaaaggcagtct

SEQ ID NO: 24257 - DNA, 14 bp, Artificial Sequence
  Description of Artificial Sequence: Synthetic oligonucleotide
tagcaaaggcagtc

SEQ ID NO: 24258 - DNA, 14 bp, Artificial Sequence
  Description of Artificial Sequence: Synthetic oligonucleotide
ctagcaaaggcagt

SEQ ID NO: 24259 - DNA, 14 bp, Artificial Sequence
  Description of Artificial Sequence: Synthetic oligonucleotide
tctagcaaaggcag

SEQ ID NO: 24260 - DNA, 14 bp, Artificial Sequence
  Description of Artificial Sequence: Synthetic oligonucleotide
ttctagcaaaggca

SEQ ID NO: 24261 - DNA, 14 bp, Artificial Sequence
  Description of Artificial Sequence: Synthetic oligonucleotide
tttctagcaaaggc

SEQ ID NO: 24262 - DNA, 14 bp, Artificial Sequence
  Description of Artificial Sequence: Synthetic oligonucleotide
ttttctagcaaagg

SEQ ID NO: 24263 - DNA, 14 bp, Artificial Sequence
  Description of Artificial Sequence: Synthetic oligonucleotide
attttctagcaaag

SEQ ID NO: 24264 - DNA, 14 bp, Artificial Sequence
  Description of Artificial Sequence: Synthetic oligonucleotide
cattttctagcaaa

SEQ ID NO: 24265 - DNA, 14 bp, Artificial Sequence
  Description of Artificial Sequence: Synthetic oligonucleotide
gcattttctagcaa

SEQ ID NO: 24266 - DNA, 14 bp, Artificial Sequence
  Description of Artificial Sequence: Synthetic oligonucleotide
tgcattttctagca

SEQ ID NO: 24267 - DNA, 14 bp, Artificial Sequence
  Description of Artificial Sequence: Synthetic oligonucleotide
ctgcattttctagc

SEQ ID NO: 24268 - DNA, 14 bp, Artificial Sequence
  Description of Artificial Sequence: Synthetic oligonucleotide
tctgcattttctag

SEQ ID NO: 24269 - DNA, 14 bp, Artificial Sequence
  Description of Artificial Sequence: Synthetic oligonucleotide
ttctgcattttcta

SEQ ID NO: 24270 - DNA, 14 bp, Artificial Sequence
  Description of Artificial Sequence: Synthetic oligonucleotide
tttctgcattttct

SEQ ID NO: 24271 - DNA, 14 bp, Artificial Sequence
  Description of Artificial Sequence: Synthetic oligonucleotide
gtttctgcattttc

SEQ ID NO: 24272 - DNA, 14 bp, Artificial Sequence
  Description of Artificial Sequence: Synthetic oligonucleotide
agtttctgcatttt

SEQ ID NO: 24273 - DNA, 14 bp, Artificial Sequence
  Description of Artificial Sequence: Synthetic oligonucleotide
gagtttctgcattt

SEQ ID NO: 24274 - DNA, 14 bp, Artificial Sequence
  Description of Artificial Sequence: Synthetic oligonucleotide
ggagtttctgcatt

SEQ ID NO: 24275 - DNA, 14 bp, Artificial Sequence
  Description of Artificial Sequence: Synthetic oligonucleotide
gggagtttctgcat

SEQ ID NO: 24276 - DNA, 14 bp, Artificial Sequence
  Description of Artificial Sequence: Synthetic oligonucleotide
ggggagtttctgca

SEQ ID NO: 24277 - DNA, 14 bp, Artificial Sequence
  Description of Artificial Sequence: Synthetic oligonucleotide
tggggagtttctgc

SEQ ID NO: 24278 - DNA, 14 bp, Artificial Sequence
  Description of Artificial Sequence: Synthetic oligonucleotide
ttggggagtttctg

SEQ ID NO: 24279 - DNA, 14 bp, Artificial Sequence
  Description of Artificial Sequence: Synthetic oligonucleotide
attggggagtttct

SEQ ID NO: 24280 - DNA, 14 bp, Artificial Sequence
  Description of Artificial Sequence: Synthetic oligonucleotide
cattggggagtttc

SEQ ID NO: 24281 - DNA, 14 bp, Artificial Sequence
  Description of Artificial Sequence: Synthetic oligonucleotide
tcattggggagttt

SEQ ID NO: 24282 - DNA, 14 bp, Artificial Sequence
  Description of Artificial Sequence: Synthetic oligonucleotide
gtcattggggagtt

SEQ ID NO: 24283 - DNA, 14 bp, Artificial Sequence
  Description of Artificial Sequence: Synthetic oligonucleotide
ggtcattggggagt

SEQ ID NO: 24284 - DNA, 14 bp, Artificial Sequence
  Description of Artificial Sequence: Synthetic oligonucleotide
aggtcattggggag

SEQ ID NO: 24285 - DNA, 14 bp, Artificial Sequence
  Description of Artificial Sequence: Synthetic oligonucleotide
aaggtcattgggga

SEQ ID NO: 24286 - DNA, 14 bp, Artificial Sequence
  Description of Artificial Sequence: Synthetic oligonucleotide
taaggtcattgggg

SEQ ID NO: 24287 - DNA, 14 bp, Artificial Sequence
  Description of Artificial Sequence: Synthetic oligonucleotide
ctaaggtcattggg

SEQ ID NO: 24288 - DNA, 14 bp, Artificial Sequence
  Description of Artificial Sequence: Synthetic oligonucleotide
gctaaggtcattgg

SEQ ID NO: 24289 - DNA, 14 bp, Artificial Sequence
  Description of Artificial Sequence: Synthetic oligonucleotide
ggctaaggtcattg

SEQ ID NO: 24290 - DNA, 14 bp, Artificial Sequence
  Description of Artificial Sequence: Synthetic oligonucleotide
tggctaaggtcatt

SEQ ID NO: 24291 - DNA, 14 bp, Artificial Sequence
  Description of Artificial Sequence: Synthetic oligonucleotide
atggctaaggtcat

SEQ ID NO: 24292 - DNA, 14 bp, Artificial Sequence
  Description of Artificial Sequence: Synthetic oligonucleotide
tatggctaaggtca

SEQ ID NO: 24293 - DNA, 14 bp, Artificial Sequence
  Description of Artificial Sequence: Synthetic oligonucleotide
atatggctaaggtc

SEQ ID NO: 24294 - DNA, 14 bp, Artificial Sequence
  Description of Artificial Sequence: Synthetic oligonucleotide
catatggctaaggt

SEQ ID NO: 24295 - DNA, 14 bp, Artificial Sequence
  Description of Artificial Sequence: Synthetic oligonucleotide
acatatggctaagg

SEQ ID NO: 24296 - DNA, 14 bp, Artificial Sequence
  Description of Artificial Sequence: Synthetic oligonucleotide
tacatatggctaag

SEQ ID NO: 24297 - DNA, 14 bp, Artificial Sequence
  Description of Artificial Sequence: Synthetic oligonucleotide
ctacatatggctaa

SEQ ID NO: 24298 - DNA, 14 bp, Artificial Sequence
  Description of Artificial Sequence: Synthetic oligonucleotide
actacatatggcta

SEQ ID NO: 24299 - DNA, 14 bp, Artificial Sequence
  Description of Artificial Sequence: Synthetic oligonucleotide
gactacatatggct

SEQ ID NO: 24300 - DNA, 14 bp, Artificial Sequence
  Description of Artificial Sequence: Synthetic oligonucleotide
tgactacatatggc

SEQ ID NO: 24301 - DNA, 14 bp, Artificial Sequence
  Description of Artificial Sequence: Synthetic oligonucleotide
atgactacatatgg

SEQ ID NO: 24302 - DNA, 14 bp, Artificial Sequence
  Description of Artificial Sequence: Synthetic oligonucleotide
aatgactacatatg

SEQ ID NO: 24303 - DNA, 14 bp, Artificial Sequence
  Description of Artificial Sequence: Synthetic oligonucleotide
caatgactacatat

SEQ ID NO: 24304 - DNA, 14 bp, Artificial Sequence
  Description of Artificial Sequence: Synthetic oligonucleotide
tcaatgactacata

SEQ ID NO: 24305 - DNA, 14 bp, Artificial Sequence
  Description of Artificial Sequence: Synthetic oligonucleotide
gtcaatgactacat

SEQ ID NO: 24306 - DNA, 14 bp, Artificial Sequence
  Description of Artificial Sequence: Synthetic oligonucleotide
tgtcaatgactaca

SEQ ID NO: 24307 - DNA, 14 bp, Artificial Sequence
  Description of Artificial Sequence: Synthetic oligonucleotide
gtgtcaatgactac

SEQ ID NO: 24308 - DNA, 14 bp, Artificial Sequence
  Description of Artificial Sequence: Synthetic oligonucleotide
agtgtcaatgacta

SEQ ID NO: 24309 - DNA, 14 bp, Artificial Sequence
  Description of Artificial Sequence: Synthetic oligonucleotide
cagtgtcaatgact

SEQ ID NO: 24310 - DNA, 14 bp, Artificial Sequence
  Description of Artificial Sequence: Synthetic oligonucleotide
ccagtgtcaatgac

SEQ ID NO: 24311 - DNA, 14 bp, Artificial Sequence
  Description of Artificial Sequence: Synthetic oligonucleotide
tccagtgtcaatga

SEQ ID NO: 24312 - DNA, 14 bp, Artificial Sequence
  Description of Artificial Sequence: Synthetic oligonucleotide
ttccagtgtcaatg

SEQ ID NO: 24313 - DNA, 14 bp, Artificial Sequence
  Description of Artificial Sequence: Synthetic oligonucleotide
attccagtgtcaat

SEQ ID NO: 24314 - DNA, 14 bp, Artificial Sequence
  Description of Artificial Sequence: Synthetic oligonucleotide
cattccagtgtcaa

SEQ ID NO: 24315 - DNA, 14 bp, Artificial Sequence
  Description of Artificial Sequence: Synthetic oligonucleotide
ccattccagtgtca

SEQ ID NO: 24316 - DNA, 14 bp, Artificial Sequence
  Description of Artificial Sequence: Synthetic oligonucleotide
accattccagtgtc

SEQ ID NO: 24317 - DNA, 14 bp, Artificial Sequence
  Description of Artificial Sequence: Synthetic oligonucleotide
taccattccagtgt

SEQ ID NO: 24318 - DNA, 14 bp, Artificial Sequence
  Description of Artificial Sequence: Synthetic oligonucleotide
ataccattccagtg

SEQ ID NO: 24319 - DNA, 14 bp, Artificial Sequence
  Description of Artificial Sequence: Synthetic oligonucleotide
aataccattccagt

SEQ ID NO: 24320 - DNA, 14 bp, Artificial Sequence
  Description of Artificial Sequence: Synthetic oligonucleotide
aaataccattccag

SEQ ID NO: 24321 - DNA, 14 bp, Artificial Sequence
  Description of Artificial Sequence: Synthetic oligonucleotide
caaataccattcca

SEQ ID NO: 24322 - DNA, 14 bp, Artificial Sequence
  Description of Artificial Sequence: Synthetic oligonucleotide
acaaataccattcc

SEQ ID NO: 24323 - DNA, 14 bp, Artificial Sequence
  Description of Artificial Sequence: Synthetic oligonucleotide
tacaaataccattc

SEQ ID NO: 24324 - DNA, 14 bp, Artificial Sequence
  Description of Artificial Sequence: Synthetic oligonucleotide
ttacaaataccatt

SEQ ID NO: 24325 - DNA, 14 bp, Artificial Sequence
  Description of Artificial Sequence: Synthetic oligonucleotide
tttacaaataccat

SEQ ID NO: 24326 - DNA, 14 bp, Artificial Sequence
  Description of Artificial Sequence: Synthetic oligonucleotide
ctttacaaatacca

SEQ ID NO: 24327 - DNA, 14 bp, Artificial Sequence
  Description of Artificial Sequence: Synthetic oligonucleotide
actttacaaatacc

SEQ ID NO: 24328 - DNA, 14 bp, Artificial Sequence
  Description of Artificial Sequence: Synthetic oligonucleotide
aactttacaaatac

SEQ ID NO: 24329 - DNA, 14 bp, Artificial Sequence
  Description of Artificial Sequence: Synthetic oligonucleotide
aaactttacaaata

SEQ ID NO: 24330 - DNA, 14 bp, Artificial Sequence
  Description of Artificial Sequence: Synthetic oligonucleotide
aaaactttacaaat

SEQ ID NO: 24331 - DNA, 14 bp, Artificial Sequence
  Description of Artificial Sequence: Synthetic oligonucleotide
aaaaactttacaaa

SEQ ID NO: 24332 - DNA, 14 bp, Artificial Sequence
  Description of Artificial Sequence: Synthetic oligonucleotide
aaaaaactttacaa

SEQ ID NO: 24333 - DNA, 14 bp, Artificial Sequence
  Description of Artificial Sequence: Synthetic oligonucleotide
aaaaaaactttaca

SEQ ID NO: 24334 - DNA, 14 bp, Artificial Sequence
  Description of Artificial Sequence: Synthetic oligonucleotide
aaaaaaaactttac

SEQ ID NO: 24335 - DNA, 14 bp, Artificial Sequence
  Description of Artificial Sequence: Synthetic oligonucleotide
aaaaaaaaacttta

SEQ ID NO: 24336 - DNA, 14 bp, Artificial Sequence
  Description of Artificial Sequence: Synthetic oligonucleotide
aaaaaaaaaacttt

SEQ ID NO: 24337 - DNA, 14 bp, Artificial Sequence
  Description of Artificial Sequence: Synthetic oligonucleotide
taaaaaaaaaactt

SEQ ID NO: 24338 - DNA, 14 bp, Artificial Sequence
  Description of Artificial Sequence: Synthetic oligonucleotide
ttaaaaaaaaaact

SEQ ID NO: 24339 - DNA, 14 bp, Artificial Sequence
  Description of Artificial Sequence: Synthetic oligonucleotide
attaaaaaaaaaac

SEQ ID NO: 24340 - DNA, 14 bp, Artificial Sequence
  Description of Artificial Sequence: Synthetic oligonucleotide
aattaaaaaaaaaa

SEQ ID NO: 24341 - DNA, 14 bp, Artificial Sequence
  Description of Artificial Sequence: Synthetic oligonucleotide
aaattaaaaaaaaa

SEQ ID NO: 24342 - DNA, 14 bp, Artificial Sequence
  Description of Artificial Sequence: Synthetic oligonucleotide
taaattaaaaaaaa

SEQ ID NO: 24343 - DNA, 14 bp, Artificial Sequence
  Description of Artificial Sequence: Synthetic oligonucleotide
ataaattaaaaaaa

SEQ ID NO: 24344 - DNA, 14 bp, Artificial Sequence
  Description of Artificial Sequence: Synthetic oligonucleotide
aataaattaaaaaa

SEQ ID NO: 24345 - DNA, 14 bp, Artificial Sequence
  Description of Artificial Sequence: Synthetic oligonucleotide
gaataaattaaaaa

SEQ ID NO: 24346 - DNA, 14 bp, Artificial Sequence
  Description of Artificial Sequence: Synthetic oligonucleotide
tgaataaattaaaa

SEQ ID NO: 24347 - DNA, 14 bp, Artificial Sequence
  Description of Artificial Sequence: Synthetic oligonucleotide
ttgaataaattaaa

SEQ ID NO: 24348 - DNA, 14 bp, Artificial Sequence
  Description of Artificial Sequence: Synthetic oligonucleotide
tttgaataaattaa

SEQ ID NO: 24349 - DNA, 14 bp, Artificial Sequence
  Description of Artificial Sequence: Synthetic oligonucleotide
ttttgaataaatta

SEQ ID NO: 24350 - DNA, 14 bp, Artificial Sequence
  Description of Artificial Sequence: Synthetic oligonucleotide
tttttgaataaatt

SEQ ID NO: 24351 - DNA, 14 bp, Artificial Sequence
  Description of Artificial Sequence: Synthetic oligonucleotide
ttttttgaataaat

SEQ ID NO: 24352 - DNA, 14 bp, Artificial Sequence
  Description of Artificial Sequence: Synthetic oligonucleotide
tttttttgaataaa

SEQ ID NO: 24353 - DNA, 14 bp, Artificial Sequence
  Description of Artificial Sequence: Synthetic oligonucleotide
ctttttttgaataa

SEQ ID NO: 24354 - DNA, 14 bp, Artificial Sequence
  Description of Artificial Sequence: Synthetic oligonucleotide
tctttttttgaata

SEQ ID NO: 24355 - DNA, 14 bp, Artificial Sequence
  Description of Artificial Sequence: Synthetic oligonucleotide
gtctttttttgaat

SEQ ID NO: 24356 - DNA, 14 bp, Artificial Sequence
  Description of Artificial Sequence: Synthetic oligonucleotide
tgtctttttttgaa

SEQ ID NO: 24357 - DNA, 14 bp, Artificial Sequence
  Description of Artificial Sequence: Synthetic oligonucleotide
atgtctttttttga

SEQ ID NO: 24358 - DNA, 14 bp, Artificial Sequence
  Description of Artificial Sequence: Synthetic oligonucleotide
tatgtctttttttg

SEQ ID NO: 24359 - DNA, 14 bp, Artificial Sequence
  Description of Artificial Sequence: Synthetic oligonucleotide
ctatgtcttttttt

SEQ ID NO: 24360 - DNA, 14 bp, Artificial Sequence
  Description of Artificial Sequence: Synthetic oligonucleotide
actatgtctttttt

SEQ ID NO: 24361 - DNA, 14 bp, Artificial Sequence
  Description of Artificial Sequence: Synthetic oligonucleotide
tactatgtcttttt

SEQ ID NO: 24362 - DNA, 14 bp, Artificial Sequence
  Description of Artificial Sequence: Synthetic oligonucleotide
atactatgtctttt

SEQ ID NO: 24363 - DNA, 14 bp, Artificial Sequence
  Description of Artificial Sequence: Synthetic oligonucleotide
aatactatgtcttt

SEQ ID NO: 24364 - DNA, 14 bp, Artificial Sequence
  Description of Artificial Sequence: Synthetic oligonucleotide
aaatactatgtctt

SEQ ID NO: 24365 - DNA, 14 bp, Artificial Sequence
  Description of Artificial Sequence: Synthetic oligonucleotide
aaaatactatgtct

SEQ ID NO: 24366 - DNA, 14 bp, Artificial Sequence
  Description of Artificial Sequence: Synthetic oligonucleotide
taaaatactatgtc

SEQ ID NO: 24367 - DNA, 14 bp, Artificial Sequence
  Description of Artificial Sequence: Synthetic oligonucleotide
ctaaaatactatgt

SEQ ID NO: 24368 - DNA, 14 bp, Artificial Sequence
  Description of Artificial Sequence: Synthetic oligonucleotide
actaaaatactatg

SEQ ID NO: 24369 - DNA, 14 bp, Artificial Sequence
  Description of Artificial Sequence: Synthetic oligonucleotide
tactaaaatactat

SEQ ID NO: 24370 - DNA, 14 bp, Artificial Sequence
  Description of Artificial Sequence: Synthetic oligonucleotide
gtactaaaatacta

SEQ ID NO: 24371 - DNA, 14 bp, Artificial Sequence
  Description of Artificial Sequence: Synthetic oligonucleotide
agtactaaaatact

SEQ ID NO: 24372 - DNA, 14 bp, Artificial Sequence
  Description of Artificial Sequence: Synthetic oligonucleotide
aagtactaaaatac

SEQ ID NO: 24373 - DNA, 14 bp, Artificial Sequence
  Description of Artificial Sequence: Synthetic oligonucleotide
aaagtactaaaata

SEQ ID NO: 24374 - DNA, 14 bp, Artificial Sequence
  Description of Artificial Sequence: Synthetic oligonucleotide
aaaagtactaaaat

SEQ ID NO: 24375 - DNA, 14 bp, Artificial Sequence
  Description of Artificial Sequence: Synthetic oligonucleotide
aaaaagtactaaaa

SEQ ID NO: 24376 - DNA, 14 bp, Artificial Sequence
  Description of Artificial Sequence: Synthetic oligonucleotide
taaaaagtactaaa

SEQ ID NO: 24377 - DNA, 14 bp, Artificial Sequence
  Description of Artificial Sequence: Synthetic oligonucleotide
gtaaaaagtactaa

SEQ ID NO: 24378 - DNA, 14 bp, Artificial Sequence
  Description of Artificial Sequence: Synthetic oligonucleotide
tgtaaaaagtacta

SEQ ID NO: 24379 - DNA, 14 bp, Artificial Sequence
  Description of Artificial Sequence: Synthetic oligonucleotide
ttgtaaaaagtact

SEQ ID NO: 24380 - DNA, 14 bp, Artificial Sequence
  Description of Artificial Sequence: Synthetic oligonucleotide
tttgtaaaaagtac

SEQ ID NO: 24381 - DNA, 14 bp, Artificial Sequence
  Description of Artificial Sequence: Synthetic oligonucleotide
atttgtaaaaagta

SEQ ID NO: 24382 - DNA, 14 bp, Artificial Sequence
  Description of Artificial Sequence: Synthetic oligonucleotide
tatttgtaaaaagt

SEQ ID NO: 24383 - DNA, 14 bp, Artificial Sequence
  Description of Artificial Sequence: Synthetic oligonucleotide
ttatttgtaaaaag

SEQ ID NO: 24384 - DNA, 14 bp, Artificial Sequence
  Description of Artificial Sequence: Synthetic oligonucleotide
attatttgtaaaaa

SEQ ID NO: 24385 - DNA, 14 bp, Artificial Sequence
  Description of Artificial Sequence: Synthetic oligonucleotide
cattatttgtaaaa

SEQ ID NO: 24386 - DNA, 14 bp, Artificial Sequence
  Description of Artificial Sequence: Synthetic oligonucleotide
gcattatttgtaaa

SEQ ID NO: 24387 - DNA, 14 bp, Artificial Sequence
  Description of Artificial Sequence: Synthetic oligonucleotide
agcattatttgtaa

SEQ ID NO: 24388 - DNA, 14 bp, Artificial Sequence
  Description of Artificial Sequence: Synthetic oligonucleotide
gagcattatttgta

SEQ ID NO: 24389 - DNA, 14 bp, Artificial Sequence
  Description of Artificial Sequence: Synthetic oligonucleotide
agagcattatttgt

SEQ ID NO: 24390 - DNA, 14 bp, Artificial Sequence
  Description of Artificial Sequence: Synthetic oligonucleotide
aagagcattatttg

SEQ ID NO: 24391 - DNA, 14 bp, Artificial Sequence
  Description of Artificial Sequence: Synthetic oligonucleotide
taagagcattattt

SEQ ID NO: 24392 - DNA, 14 bp, Artificial Sequence
  Description of Artificial Sequence: Synthetic oligonucleotide
gtaagagcattatt

SEQ ID NO: 24393 - DNA, 14 bp, Artificial Sequence
  Description of Artificial Sequence: Synthetic oligonucleotide
tgtaagagcattat

SEQ ID NO: 24394 - DNA, 14 bp, Artificial Sequence
  Description of Artificial Sequence: Synthetic oligonucleotide
ttgtaagagcatta

SEQ ID NO: 24395 - DNA, 14 bp, Artificial Sequence
  Description of Artificial Sequence: Synthetic oligonucleotide
tttgtaagagcatt

SEQ ID NO: 24396 - DNA, 14 bp, Artificial Sequence
  Description of Artificial Sequence: Synthetic oligonucleotide
ttttgtaagagcat

SEQ ID NO: 24397 - DNA, 14 bp, Artificial Sequence
  Description of Artificial Sequence: Synthetic oligonucleotide
tttttgtaagagca

SEQ ID NO: 24398 - DNA, 14 bp, Artificial Sequence
  Description of Artificial Sequence: Synthetic oligonucleotide
atttttgtaagagc

SEQ ID NO: 24399 - DNA, 14 bp, Artificial Sequence
  Description of Artificial Sequence: Synthetic oligonucleotide
catttttgtaagag

SEQ ID NO: 24400 - DNA, 14 bp, Artificial Sequence
  Description of Artificial Sequence: Synthetic oligonucleotide
gcatttttgtaaga

SEQ ID NO: 24401 - DNA, 14 bp, Artificial Sequence
  Description of Artificial Sequence: Synthetic oligonucleotide
agcatttttgtaag

SEQ ID NO: 24402 - DNA, 14 bp, Artificial Sequence
  Description of Artificial Sequence: Synthetic oligonucleotide
tagcatttttgtaa

SEQ ID NO: 24403 - DNA, 14 bp, Artificial Sequence
  Description of Artificial Sequence: Synthetic oligonucleotide
gtagcatttttgta

SEQ ID NO: 24404 - DNA, 14 bp, Artificial Sequence
  Description of Artificial Sequence: Synthetic oligonucleotide
agtagcatttttgt

SEQ ID NO: 24405 - DNA, 14 bp, Artificial Sequence
  Description of Artificial Sequence: Synthetic oligonucleotide
cagtagcatttttg

SEQ ID NO: 24406 - DNA, 14 bp, Artificial Sequence
  Description of Artificial Sequence: Synthetic oligonucleotide
tcagtagcattttt

SEQ ID NO: 24407 - DNA, 14 bp, Artificial Sequence
  Description of Artificial Sequence: Synthetic oligonucleotide
atcagtagcatttt

SEQ ID NO: 24408 - DNA, 14 bp, Artificial Sequence
  Description of Artificial Sequence: Synthetic oligonucleotide
gatcagtagcattt

SEQ ID NO: 24409 - DNA, 14 bp, Artificial Sequence
  Description of Artificial Sequence: Synthetic oligonucleotide
tgatcagtagcatt

SEQ ID NO: 24410 - DNA, 14 bp, Artificial Sequence
  Description of Artificial Sequence: Synthetic oligonucleotide
ttgatcagtagcat

SEQ ID NO: 24411 - DNA, 14 bp, Artificial Sequence
  Description of Artificial Sequence: Synthetic oligonucleotide
tttgatcagtagca

SEQ ID NO: 24412 - DNA, 14 bp, Artificial Sequence
  Description of Artificial Sequence: Synthetic oligonucleotide
atttgatcagtagc

SEQ ID NO: 24413 - DNA, 14 bp, Artificial Sequence
  Description of Artificial Sequence: Synthetic oligonucleotide
tatttgatcagtag

SEQ ID NO: 24414 - DNA, 14 bp, Artificial Sequence
  Description of Artificial Sequence: Synthetic oligonucleotide
ttatttgatcagta

SEQ ID NO: 24415 - DNA, 14 bp, Artificial Sequence
  Description of Artificial Sequence: Synthetic oligonucleotide
cttatttgatcagt

SEQ ID NO: 24416 - DNA, 14 bp, Artificial Sequence
  Description of Artificial Sequence: Synthetic oligonucleotide
gcttatttgatcag

SEQ ID NO: 24417 - DNA, 14 bp, Artificial Sequence
  Description of Artificial Sequence: Synthetic oligonucleotide
agcttatttgatca

SEQ ID NO: 24418 - DNA, 14 bp, Artificial Sequence
  Description of Artificial Sequence: Synthetic oligonucleotide
aagcttatttgatc

SEQ ID NO: 24419 - DNA, 14 bp, Artificial Sequence
  Description of Artificial Sequence: Synthetic oligonucleotide
aaagcttatttgat

SEQ ID NO: 24420 - DNA, 14 bp, Artificial Sequence
  Description of Artificial Sequence: Synthetic oligonucleotide
aaaagcttatttga

SEQ ID NO: 24421 - DNA, 14 bp, Artificial Sequence
  Description of Artificial Sequence: Synthetic oligonucleotide
taaaagcttatttg

SEQ ID NO: 24422 - DNA, 14 bp, Artificial Sequence
  Description of Artificial Sequence: Synthetic oligonucleotide
ttaaaagcttattt

SEQ ID NO: 24423 - DNA, 14 bp, Artificial Sequence
  Description of Artificial Sequence: Synthetic oligonucleotide
cttaaaagcttatt

SEQ ID NO: 24424 - DNA, 14 bp, Artificial Sequence
  Description of Artificial Sequence: Synthetic oligonucleotide
tcttaaaagcttat

SEQ ID NO: 24425 - DNA, 14 bp, Artificial Sequence
  Description of Artificial Sequence: Synthetic oligonucleotide
ttcttaaaagctta

SEQ ID NO: 24426 - DNA, 14 bp, Artificial Sequence
  Description of Artificial Sequence: Synthetic oligonucleotide
attcttaaaagctt

SEQ ID NO: 24427 - DNA, 14 bp, Artificial Sequence
  Description of Artificial Sequence: Synthetic oligonucleotide
aattcttaaaagct

SEQ ID NO: 24428 - DNA, 14 bp, Artificial Sequence
  Description of Artificial Sequence: Synthetic oligonucleotide
caattcttaaaagc

SEQ ID NO: 24429 - DNA, 14 bp, Artificial Sequence
  Description of Artificial Sequence: Synthetic oligonucleotide
ccaattcttaaaag

SEQ ID NO: 24430 - DNA, 14 bp, Artificial Sequence
  Description of Artificial Sequence: Synthetic oligonucleotide
tccaattcttaaaa

SEQ ID NO: 24431 - DNA, 14 bp, Artificial Sequence
  Description of Artificial Sequence: Synthetic oligonucleotide
ttccaattcttaaa

SEQ ID NO: 24432 - DNA, 14 bp, Artificial Sequence
  Description of Artificial Sequence: Synthetic oligonucleotide
tttccaattcttaa

SEQ ID NO: 24433 - DNA, 14 bp, Artificial Sequence
  Description of Artificial Sequence: Synthetic oligonucleotide
ttttccaattctta

SEQ ID NO: 24434 - DNA, 14 bp, Artificial Sequence
  Description of Artificial Sequence: Synthetic oligonucleotide
tttttccaattctt

SEQ ID NO: 24435 - DNA, 14 bp, Artificial Sequence
  Description of Artificial Sequence: Synthetic oligonucleotide
atttttccaattct

SEQ ID NO: 24436 - DNA, 14 bp, Artificial Sequence
  Description of Artificial Sequence: Synthetic oligonucleotide
tatttttccaattc

SEQ ID NO: 24437 - DNA, 14 bp, Artificial Sequence
  Description of Artificial Sequence: Synthetic oligonucleotide
ttatttttccaatt

SEQ ID NO: 24438 - DNA, 14 bp, Artificial Sequence
  Description of Artificial Sequence: Synthetic oligonucleotide
tttatttttccaat

SEQ ID NO: 24439 - DNA, 14 bp, Artificial Sequence
  Description of Artificial Sequence: Synthetic oligonucleotide
ttttatttttccaa

SEQ ID NO: 24440 - DNA, 14 bp, Artificial Sequence
  Description of Artificial Sequence: Synthetic oligonucleotide
tttttatttttcca

SEQ ID NO: 24441 - DNA, 14 bp, Artificial Sequence
  Description of Artificial Sequence: Synthetic oligonucleotide
atttttatttttcc

SEQ ID NO: 24442 - DNA, 14 bp, Artificial Sequence
  Description of Artificial Sequence: Synthetic oligonucleotide
tatttttatttttc

SEQ ID NO: 24443 - DNA, 14 bp, Artificial Sequence
  Description of Artificial Sequence: Synthetic oligonucleotide
gtatttttattttt

SEQ ID NO: 24444 - DNA, 14 bp, Artificial Sequence
  Description of Artificial Sequence: Synthetic oligonucleotide
tgtatttttatttt

SEQ ID NO: 24445 - DNA, 14 bp, Artificial Sequence
  Description of Artificial Sequence: Synthetic oligonucleotide
ttgtatttttattt

SEQ ID NO: 24446 - DNA, 14 bp, Artificial Sequence
  Description of Artificial Sequence: Synthetic oligonucleotide
tttgtatttttatt

SEQ ID NO: 24447 - DNA, 14 bp, Artificial Sequence
  Description of Artificial Sequence: Synthetic oligonucleotide
ttttgtatttttat

SEQ ID NO: 24448 - DNA, 14 bp, Artificial Sequence
  Description of Artificial Sequence: Synthetic oligonucleotide
cttttgtattttta

SEQ ID NO: 24449 - DNA, 14 bp, Artificial Sequence
  Description of Artificial Sequence: Synthetic oligonucleotide
acttttgtattttt

SEQ ID NO: 24450 - DNA, 14 bp, Artificial Sequence
  Description of Artificial Sequence: Synthetic oligonucleotide
gacttttgtatttt

SEQ ID NO: 24451 - DNA, 14 bp, Artificial Sequence
  Description of Artificial Sequence: Synthetic oligonucleotide
ggacttttgtattt

SEQ ID NO: 24452 - DNA, 14 bp, Artificial Sequence
  Description of Artificial Sequence: Synthetic oligonucleotide
aggacttttgtatt

SEQ ID NO: 24453 - DNA, 14 bp, Artificial Sequence
  Description of Artificial Sequence: Synthetic oligonucleotide
aaggacttttgtat

SEQ ID NO: 24454 - DNA, 14 bp, Artificial Sequence
  Description of Artificial Sequence: Synthetic oligonucleotide
gaaggacttttgta

SEQ ID NO: 24455 - DNA, 14 bp, Artificial Sequence
  Description of Artificial Sequence: Synthetic oligonucleotide
tgaaggacttttgt

SEQ ID NO: 24456 - DNA, 14 bp, Artificial Sequence
  Description of Artificial Sequence: Synthetic oligonucleotide
gtgaaggacttttg

SEQ ID NO: 24457 - DNA, 14 bp, Artificial Sequence
  Description of Artificial Sequence: Synthetic oligonucleotide
ggtgaaggactttt

SEQ ID NO: 24458 - DNA, 14 bp, Artificial Sequence
  Description of Artificial Sequence: Synthetic oligonucleotide
tggtgaaggacttt

SEQ ID NO: 24459 - DNA, 14 bp, Artificial Sequence
  Description of Artificial Sequence: Synthetic oligonucleotide
atggtgaaggactt

SEQ ID NO: 24460 - DNA, 14 bp, Artificial Sequence
  Description of Artificial Sequence: Synthetic oligonucleotide
aatggtgaaggact

SEQ ID NO: 24461 - DNA, 14 bp, Artificial Sequence
  Description of Artificial Sequence: Synthetic oligonucleotide
taatggtgaaggac

SEQ ID NO: 24462 - DNA, 14 bp, Artificial Sequence
  Description of Artificial Sequence: Synthetic oligonucleotide
ataatggtgaagga

SEQ ID NO: 24463 - DNA, 14 bp, Artificial Sequence
  Description of Artificial Sequence: Synthetic oligonucleotide
gataatggtgaagg

SEQ ID NO: 24464 - DNA, 14 bp, Artificial Sequence
  Description of Artificial Sequence: Synthetic oligonucleotide
ggataatggtgaag

SEQ ID NO: 24465 - DNA, 14 bp, Artificial Sequence
  Description of Artificial Sequence: Synthetic oligonucleotide
aggataatggtgaa

SEQ ID NO: 24466 - DNA, 14 bp, Artificial Sequence
  Description of Artificial Sequence: Synthetic oligonucleotide
gaggataatggtga

SEQ ID NO: 24467 - DNA, 14 bp, Artificial Sequence
  Description of Artificial Sequence: Synthetic oligonucleotide
tgaggataatggtg

SEQ ID NO: 24468 - DNA, 14 bp, Artificial Sequence
  Description of Artificial Sequence: Synthetic oligonucleotide
ctgaggataatggt

SEQ ID NO: 24469 - DNA, 14 bp, Artificial Sequence
  Description of Artificial Sequence: Synthetic oligonucleotide
cctgaggataatgg

SEQ ID NO: 24470 - DNA, 14 bp, Artificial Sequence
  Description of Artificial Sequence: Synthetic oligonucleotide
acctgaggataatg

SEQ ID NO: 24471 - DNA, 14 bp, Artificial Sequence
  Description of Artificial Sequence: Synthetic oligonucleotide
cacctgaggataat

SEQ ID NO: 24472 - DNA, 14 bp, Artificial Sequence
  Description of Artificial Sequence: Synthetic oligonucleotide
tcacctgaggataa

SEQ ID NO: 24473 - DNA, 14 bp, Artificial Sequence
  Description of Artificial Sequence: Synthetic oligonucleotide
atcacctgaggata

SEQ ID NO: 24474 - DNA, 14 bp, Artificial Sequence
  Description of Artificial Sequence: Synthetic oligonucleotide
gatcacctgaggat

SEQ ID NO: 24475 - DNA, 14 bp, Artificial Sequence
  Description of Artificial Sequence: Synthetic oligonucleotide
tgatcacctgagga

SEQ ID NO: 24476 - DNA, 14 bp, Artificial Sequence
  Description of Artificial Sequence: Synthetic oligonucleotide
ctgatcacctgagg

SEQ ID NO: 24477 - DNA, 14 bp, Artificial Sequence
  Description of Artificial Sequence: Synthetic oligonucleotide
actgatcacctgag

SEQ ID NO: 24478 - DNA, 14 bp, Artificial Sequence
  Description of Artificial Sequence: Synthetic oligonucleotide
tactgatcacctga

SEQ ID NO: 24479 - DNA, 14 bp, Artificial Sequence
  Description of Artificial Sequence: Synthetic oligonucleotide
ctactgatcacctg

SEQ ID NO: 24480 - DNA, 14 bp, Artificial Sequence
  Description of Artificial Sequence: Synthetic oligonucleotide
gctactgatcacct

SEQ ID NO: 24481 - DNA, 14 bp, Artificial Sequence
  Description of Artificial Sequence: Synthetic oligonucleotide
tgctactgatcacc

SEQ ID NO: 24482 - DNA, 14 bp, Artificial Sequence
  Description of Artificial Sequence: Synthetic oligonucleotide
atgctactgatcac

SEQ ID NO: 24483 - DNA, 14 bp, Artificial Sequence
  Description of Artificial Sequence: Synthetic oligonucleotide
aatgctactgatca

SEQ ID NO: 24484 - DNA, 14 bp, Artificial Sequence
  Description of Artificial Sequence: Synthetic oligonucleotide
caatgctactgatc

SEQ ID NO: 24485 - DNA, 14 bp, Artificial Sequence
  Description of Artificial Sequence: Synthetic oligonucleotide
gcaatgctactgat

SEQ ID NO: 24486 - DNA, 14 bp, Artificial Sequence
  Description of Artificial Sequence: Synthetic oligonucleotide
ggcaatgctactga

SEQ ID NO: 24487 - DNA, 14 bp, Artificial Sequence
  Description of Artificial Sequence: Synthetic oligonucleotide
aggcaatgctactg

SEQ ID NO: 24488 - DNA, 14 bp, Artificial Sequence
  Description of Artificial Sequence: Synthetic oligonucleotide
aaggcaatgctact

SEQ ID NO: 24489 - DNA, 14 bp, Artificial Sequence
  Description of Artificial Sequence: Synthetic oligonucleotide
caaggcaatgctac

SEQ ID NO: 24490 - DNA, 14 bp, Artificial Sequence
  Description of Artificial Sequence: Synthetic oligonucleotide
acaaggcaatgcta

SEQ ID NO: 24491 - DNA, 14 bp, Artificial Sequence
  Description of Artificial Sequence: Synthetic oligonucleotide
gacaaggcaatgct

SEQ ID NO: 24492 - DNA, 14 bp, Artificial Sequence
  Description of Artificial Sequence: Synthetic oligonucleotide
agacaaggcaatgc

SEQ ID NO: 24493 - DNA, 14 bp, Artificial Sequence
  Description of Artificial Sequence: Synthetic oligonucleotide
aagacaaggcaatg

SEQ ID NO: 24494 - DNA, 14 bp, Artificial Sequence
  Description of Artificial Sequence: Synthetic oligonucleotide
caagacaaggcaat

SEQ ID NO: 24495 - DNA, 14 bp, Artificial Sequence
  Description of Artificial Sequence: Synthetic oligonucleotide
ccaagacaaggcaa

SEQ ID NO: 24496 - DNA, 14 bp, Artificial Sequence
  Description of Artificial Sequence: Synthetic oligonucleotide
tccaagacaaggca

SEQ ID NO: 24497 - DNA, 14 bp, Artificial Sequence
  Description of Artificial Sequence: Synthetic oligonucleotide
atccaagacaaggc

SEQ ID NO: 24498 - DNA, 14 bp, Artificial Sequence
  Description of Artificial Sequence: Synthetic oligonucleotide
gatccaagacaagg

SEQ ID NO: 24499 - DNA, 14 bp, Artificial Sequence
  Description of Artificial Sequence: Synthetic oligonucleotide
ggatccaagacaag

SEQ ID NO: 24500 - DNA, 14 bp, Artificial Sequence
  Description of Artificial Sequence: Synthetic oligonucleotide
aggatccaagacaa

SEQ ID NO: 24501 - DNA, 14 bp, Artificial Sequence
  Description of Artificial Sequence: Synthetic oligonucleotide
gaggatccaagaca

SEQ ID NO: 24502 - DNA, 14 bp, Artificial Sequence
  Description of Artificial Sequence: Synthetic oligonucleotide
tgaggatccaagac

SEQ ID NO: 24503 - DNA, 14 bp, Artificial Sequence
  Description of Artificial Sequence: Synthetic oligonucleotide
ctgaggatccaaga

SEQ ID NO: 24504 - DNA, 14 bp, Artificial Sequence
  Description of Artificial Sequence: Synthetic oligonucleotide
actgaggatccaag

SEQ ID NO: 24505 - DNA, 14 bp, Artificial Sequence
  Description of Artificial Sequence: Synthetic oligonucleotide
cactgaggatccaa

SEQ ID NO: 24506 - DNA, 14 bp, Artificial Sequence
  Description of Artificial Sequence: Synthetic oligonucleotide
gcactgaggatcca

SEQ ID NO: 24507 - DNA, 14 bp, Artificial Sequence
  Description of Artificial Sequence: Synthetic oligonucleotide
agcactgaggatcc

SEQ ID NO: 24508 - DNA, 14 bp, Artificial Sequence
  Description of Artificial Sequence: Synthetic oligonucleotide
cagcactgaggatc

SEQ ID NO: 24509 - DNA, 14 bp, Artificial Sequence
  Description of Artificial Sequence: Synthetic oligonucleotide
gcagcactgaggat

SEQ ID NO: 24510 - DNA, 14 bp, Artificial Sequence
  Description of Artificial Sequence: Synthetic oligonucleotide
ggcagcactgagga

SEQ ID NO: 24511 - DNA, 14 bp, Artificial Sequence
  Description of Artificial Sequence: Synthetic oligonucleotide
tggcagcactgagg

SEQ ID NO: 24512 - DNA, 14 bp, Artificial Sequence
  Description of Artificial Sequence: Synthetic oligonucleotide
ttggcagcactgag

SEQ ID NO: 24513 - DNA, 14 bp, Artificial Sequence
  Description of Artificial Sequence: Synthetic oligonucleotide
tttggcagcactga

SEQ ID NO: 24514 - DNA, 14 bp, Artificial Sequence
  Description of Artificial Sequence: Synthetic oligonucleotide
ttttggcagcactg

SEQ ID NO: 24515 - DNA, 14 bp, Artificial Sequence
  Description of Artificial Sequence: Synthetic oligonucleotide
cttttggcagcact

SEQ ID NO: 24516 - DNA, 14 bp, Artificial Sequence
  Description of Artificial Sequence: Synthetic oligonucleotide
ccttttggcagcac

SEQ ID NO: 24517 - DNA, 14 bp, Artificial Sequence
  Description of Artificial Sequence: Synthetic oligonucleotide
gccttttggcagca

SEQ ID NO: 24518 - DNA, 14 bp, Artificial Sequence
  Description of Artificial Sequence: Synthetic oligonucleotide
ggccttttggcagc

SEQ ID NO: 24519 - DNA, 14 bp, Artificial Sequence
  Description of Artificial Sequence: Synthetic oligonucleotide
tggccttttggcag

SEQ ID NO: 24520 - DNA, 14 bp, Artificial Sequence
  Description of Artificial Sequence: Synthetic oligonucleotide
ctggccttttggca

SEQ ID NO: 24521 - DNA, 14 bp, Artificial Sequence
  Description of Artificial Sequence: Synthetic oligonucleotide
actggccttttggc

SEQ ID NO: 24522 - DNA, 14 bp, Artificial Sequence
  Description of Artificial Sequence: Synthetic oligonucleotide
tactggccttttgg

SEQ ID NO: 24523 - DNA, 14 bp, Artificial Sequence
  Description of Artificial Sequence: Synthetic oligonucleotide
atactggccttttg

SEQ ID NO: 24524 - DNA, 14 bp, Artificial Sequence
  Description of Artificial Sequence: Synthetic oligonucleotide
tatactggcctttt

SEQ ID NO: 24525 - DNA, 14 bp, Artificial Sequence
  Description of Artificial Sequence: Synthetic oligonucleotide
ttatactggccttt

SEQ ID NO: 24526 - DNA, 14 bp, Artificial Sequence
  Description of Artificial Sequence: Synthetic oligonucleotide
tttatactggcctt

SEQ ID NO: 24527 - DNA, 14 bp, Artificial Sequence
  Description of Artificial Sequence: Synthetic oligonucleotide
ctttatactggcct

SEQ ID NO: 24528 - DNA, 14 bp, Artificial Sequence
  Description of Artificial Sequence: Synthetic oligonucleotide
tctttatactggcc

SEQ ID NO: 24529 - DNA, 14 bp, Artificial Sequence
  Description of Artificial Sequence: Synthetic oligonucleotide
ttctttatactggc

SEQ ID NO: 24530 - DNA, 14 bp, Artificial Sequence
  Description of Artificial Sequence: Synthetic oligonucleotide
attctttatactgg

SEQ ID NO: 24531 - DNA, 14 bp, Artificial Sequence
  Description of Artificial Sequence: Synthetic oligonucleotide
aattctttatactg

SEQ ID NO: 24532 - DNA, 14 bp, Artificial Sequence
  Description of Artificial Sequence: Synthetic oligonucleotide
aaattctttatact

SEQ ID NO: 24533 - DNA, 14 bp, Artificial Sequence
  Description of Artificial Sequence: Synthetic oligonucleotide
taaattctttatac

SEQ ID NO: 24534 - DNA, 14 bp, Artificial Sequence
  Description of Artificial Sequence: Synthetic oligonucleotide
ataaattctttata

SEQ ID NO: 24535 - DNA, 14 bp, Artificial Sequence
  Description of Artificial Sequence: Synthetic oligonucleotide
tataaattctttat

SEQ ID NO: 24536 - DNA, 14 bp, Artificial Sequence
  Description of Artificial Sequence: Synthetic oligonucleotide
atataaattcttta

SEQ ID NO: 24537 - DNA, 14 bp, Artificial Sequence
  Description of Artificial Sequence: Synthetic oligonucleotide
aatataaattcttt

SEQ ID NO: 24538 - DNA, 14 bp, Artificial Sequence
  Description of Artificial Sequence: Synthetic oligonucleotide
aaatataaattctt

SEQ ID NO: 24539 - DNA, 14 bp, Artificial Sequence
  Description of Artificial Sequence: Synthetic oligonucleotide
caaatataaattct

SEQ ID NO: 24540 - DNA, 14 bp, Artificial Sequence
  Description of Artificial Sequence: Synthetic oligonucleotide
gcaaatataaattc

SEQ ID NO: 24541 - DNA, 14 bp, Artificial Sequence
  Description of Artificial Sequence: Synthetic oligonucleotide
tgcaaatataaatt

SEQ ID NO: 24542 - DNA, 14 bp, Artificial Sequence
  Description of Artificial Sequence: Synthetic oligonucleotide
gtgcaaatataaat

SEQ ID NO: 24543 - DNA, 14 bp, Artificial Sequence
  Description of Artificial Sequence: Synthetic oligonucleotide
agtgcaaatataaa

SEQ ID NO: 24544 - DNA, 14 bp, Artificial Sequence
  Description of Artificial Sequence: Synthetic oligonucleotide
cagtgcaaatataa

SEQ ID NO: 24545 - DNA, 14 bp, Artificial Sequence
  Description of Artificial Sequence: Synthetic oligonucleotide
acagtgcaaatata

SEQ ID NO: 24546 - DNA, 14 bp, Artificial Sequence
  Description of Artificial Sequence: Synthetic oligonucleotide
tacagtgcaaatat

SEQ ID NO: 24547 - DNA, 14 bp, Artificial Sequence
  Description of Artificial Sequence: Synthetic oligonucleotide
ttacagtgcaaata

SEQ ID NO: 24548 - DNA, 14 bp, Artificial Sequence
  Description of Artificial Sequence: Synthetic oligonucleotide
tttacagtgcaaat

SEQ ID NO: 24549 - DNA, 14 bp, Artificial Sequence
  Description of Artificial Sequence: Synthetic oligonucleotide
gtttacagtgcaaa

SEQ ID NO: 24550 - DNA, 14 bp, Artificial Sequence
  Description of Artificial Sequence: Synthetic oligonucleotide
agtttacagtgcaa

SEQ ID NO: 24551 - DNA, 14 bp, Artificial Sequence
  Description of Artificial Sequence: Synthetic oligonucleotide
gagtttacagtgca

SEQ ID NO: 24552 - DNA, 14 bp, Artificial Sequence
  Description of Artificial Sequence: Synthetic oligonucleotide
agagtttacagtgc

SEQ ID NO: 24553 - DNA, 14 bp, Artificial Sequence
  Description of Artificial Sequence: Synthetic oligonucleotide
cagagtttacagtg

SEQ ID NO: 24554 - DNA, 14 bp, Artificial Sequence
  Description of Artificial Sequence: Synthetic oligonucleotide
gcagagtttacagt

SEQ ID NO: 24555 - DNA, 14 bp, Artificial Sequence
  Description of Artificial Sequence: Synthetic oligonucleotide
tgcagagtttacag

SEQ ID NO: 24556 - DNA, 14 bp, Artificial Sequence
  Description of Artificial Sequence: Synthetic oligonucleotide
ttgcagagtttaca

SEQ ID NO: 24557 - DNA, 14 bp, Artificial Sequence
  Description of Artificial Sequence: Synthetic oligonucleotide
tttgcagagtttac

SEQ ID NO: 24558 - DNA, 14 bp, Artificial Sequence
  Description of Artificial Sequence: Synthetic oligonucleotide
ttttgcagagttta

SEQ ID NO: 24559 - DNA, 14 bp, Artificial Sequence
  Description of Artificial Sequence: Synthetic oligonucleotide
tttttgcagagttt

SEQ ID NO: 24560 - DNA, 14 bp, Artificial Sequence
  Description of Artificial Sequence: Synthetic oligonucleotide
atttttgcagagtt

SEQ ID NO: 24561 - DNA, 14 bp, Artificial Sequence
  Description of Artificial Sequence: Synthetic oligonucleotide
tatttttgcagagt

SEQ ID NO: 24562 - DNA, 14 bp, Artificial Sequence
  Description of Artificial Sequence: Synthetic oligonucleotide
atatttttgcagag

SEQ ID NO: 24563 - DNA, 14 bp, Artificial Sequence
  Description of Artificial Sequence: Synthetic oligonucleotide
catatttttgcaga

SEQ ID NO: 24564 - DNA, 14 bp, Artificial Sequence
  Description of Artificial Sequence: Synthetic oligonucleotide
ccatatttttgcag

SEQ ID NO: 24565 - DNA, 14 bp, Artificial Sequence
  Description of Artificial Sequence: Synthetic oligonucleotide
accatatttttgca

SEQ ID NO: 24566 - DNA, 14 bp, Artificial Sequence
  Description of Artificial Sequence: Synthetic oligonucleotide
aaccatatttttgc

SEQ ID NO: 24567 - DNA, 14 bp, Artificial Sequence
  Description of Artificial Sequence: Synthetic oligonucleotide
aaaccatatttttg

SEQ ID NO: 24568 - DNA, 14 bp, Artificial Sequence
  Description of Artificial Sequence: Synthetic oligonucleotide
taaaccatattttt

SEQ ID NO: 24569 - DNA, 14 bp, Artificial Sequence
  Description of Artificial Sequence: Synthetic oligonucleotide
ttaaaccatatttt

SEQ ID NO: 24570 - DNA, 14 bp, Artificial Sequence
  Description of Artificial Sequence: Synthetic oligonucleotide
tttaaaccatattt

SEQ ID NO: 24571 - DNA, 14 bp, Artificial Sequence
  Description of Artificial Sequence: Synthetic oligonucleotide
ctttaaaccatatt

SEQ ID NO: 24572 - DNA, 14 bp, Artificial Sequence
  Description of Artificial Sequence: Synthetic oligonucleotide
actttaaaccatat

SEQ ID NO: 24573 - DNA, 14 bp, Artificial Sequence
  Description of Artificial Sequence: Synthetic oligonucleotide
cactttaaaccata

SEQ ID NO: 24574 - DNA, 14 bp, Artificial Sequence
  Description of Artificial Sequence: Synthetic oligonucleotide
tcactttaaaccat

SEQ ID NO: 24575 - DNA, 14 bp, Artificial Sequence
  Description of Artificial Sequence: Synthetic oligonucleotide
gtcactttaaacca

SEQ ID NO: 24576 - DNA, 14 bp, Artificial Sequence
  Description of Artificial Sequence: Synthetic oligonucleotide
tgtcactttaaacc

SEQ ID NO: 24577 - DNA, 14 bp, Artificial Sequence
  Description of Artificial Sequence: Synthetic oligonucleotide
atgtcactttaaac

SEQ ID NO: 24578 - DNA, 14 bp, Artificial Sequence
  Description of Artificial Sequence: Synthetic oligonucleotide
catgtcactttaaa

SEQ ID NO: 24579 - DNA, 14 bp, Artificial Sequence
  Description of Artificial Sequence: Synthetic oligonucleotide
tcatgtcactttaa

SEQ ID NO: 24580 - DNA, 14 bp, Artificial Sequence
  Description of Artificial Sequence: Synthetic oligonucleotide
atcatgtcacttta

SEQ ID NO: 24581 - DNA, 14 bp, Artificial Sequence
  Description of Artificial Sequence: Synthetic oligonucleotide
aatcatgtcacttt

SEQ ID NO: 24582 - DNA, 14 bp, Artificial Sequence
  Description of Artificial Sequence: Synthetic oligonucleotide
caatcatgtcactt

SEQ ID NO: 24583 - DNA, 14 bp, Artificial Sequence
  Description of Artificial Sequence: Synthetic oligonucleotide
gcaatcatgtcact

SEQ ID NO: 24584 - DNA, 14 bp, Artificial Sequence
  Description of Artificial Sequence: Synthetic oligonucleotide
tgcaatcatgtcac

SEQ ID NO: 24585 - DNA, 14 bp, Artificial Sequence
  Description of Artificial Sequence: Synthetic oligonucleotide
gtgcaatcatgtca

SEQ ID NO: 24586 - DNA, 14 bp, Artificial Sequence
  Description of Artificial Sequence: Synthetic oligonucleotide
agtgcaatcatgtc

SEQ ID NO: 24587 - DNA, 14 bp, Artificial Sequence
  Description of Artificial Sequence: Synthetic oligonucleotide
cagtgcaatcatgt

SEQ ID NO: 24588 - DNA, 14 bp, Artificial Sequence
  Description of Artificial Sequence: Synthetic oligonucleotide
tcagtgcaatcatg

SEQ ID NO: 24589 - DNA, 14 bp, Artificial Sequence
  Description of Artificial Sequence: Synthetic oligonucleotide
ttcagtgcaatcat

SEQ ID NO: 24590 - DNA, 14 bp, Artificial Sequence
  Description of Artificial Sequence: Synthetic oligonucleotide
tttcagtgcaatca

SEQ ID NO: 24591 - DNA, 14 bp, Artificial Sequence
  Description of Artificial Sequence: Synthetic oligonucleotide
ttttcagtgcaatc

SEQ ID NO: 24592 - DNA, 14 bp, Artificial Sequence
  Description of Artificial Sequence: Synthetic oligonucleotide
cttttcagtgcaat

SEQ ID NO: 24593 - DNA, 14 bp, Artificial Sequence
  Description of Artificial Sequence: Synthetic oligonucleotide
ccttttcagtgcaa

SEQ ID NO: 24594 - DNA, 14 bp, Artificial Sequence
  Description of Artificial Sequence: Synthetic oligonucleotide
cccttttcagtgca

SEQ ID NO: 24595 - DNA, 14 bp, Artificial Sequence
  Description of Artificial Sequence: Synthetic oligonucleotide
tcccttttcagtgc

SEQ ID NO: 24596 - DNA, 14 bp, Artificial Sequence
  Description of Artificial Sequence: Synthetic oligonucleotide
atcccttttcagtg

SEQ ID NO: 24597 - DNA, 14 bp, Artificial Sequence
  Description of Artificial Sequence: Synthetic oligonucleotide
tatcccttttcagt

SEQ ID NO: 24598 - DNA, 14 bp, Artificial Sequence
  Description of Artificial Sequence: Synthetic oligonucleotide
ctatcccttttcag

SEQ ID NO: 24599 - DNA, 14 bp, Artificial Sequence
  Description of Artificial Sequence: Synthetic oligonucleotide
actatcccttttca

SEQ ID NO: 24600 - DNA, 14 bp, Artificial Sequence
  Description of Artificial Sequence: Synthetic oligonucleotide
cactatcccttttc

SEQ ID NO: 24601 - DNA, 14 bp, Artificial Sequence
  Description of Artificial Sequence: Synthetic oligonucleotide
gcactatccctttt

SEQ ID NO: 24602 - DNA, 14 bp, Artificial Sequence
  Description of Artificial Sequence: Synthetic oligonucleotide
agcactatcccttt

SEQ ID NO: 24603 - DNA, 14 bp, Artificial Sequence
  Description of Artificial Sequence: Synthetic oligonucleotide
aagcactatccctt

SEQ ID NO: 24604 - DNA, 14 bp, Artificial Sequence
  Description of Artificial Sequence: Synthetic oligonucleotide
aaagcactatccct

SEQ ID NO: 24605 - DNA, 14 bp, Artificial Sequence
  Description of Artificial Sequence: Synthetic oligonucleotide
aaaagcactatccc

SEQ ID NO: 24606 - DNA, 14 bp, Artificial Sequence
  Description of Artificial Sequence: Synthetic oligonucleotide
caaaagcactatcc

SEQ ID NO: 24607 - DNA, 14 bp, Artificial Sequence
  Description of Artificial Sequence: Synthetic oligonucleotide
acaaaagcactatc

SEQ ID NO: 24608 - DNA, 14 bp, Artificial Sequence
  Description of Artificial Sequence: Synthetic oligonucleotide
cacaaaagcactat

SEQ ID NO: 24609 - DNA, 14 bp, Artificial Sequence
  Description of Artificial Sequence: Synthetic oligonucleotide
tcacaaaagcacta

SEQ ID NO: 24610 - DNA, 14 bp, Artificial Sequence
  Description of Artificial Sequence: Synthetic oligonucleotide
ttcacaaaagcact

SEQ ID NO: 24611 - DNA, 14 bp, Artificial Sequence
  Description of Artificial Sequence: Synthetic oligonucleotide
tttcacaaaagcac

SEQ ID NO: 24612 - DNA, 14 bp, Artificial Sequence
  Description of Artificial Sequence: Synthetic oligonucleotide
atttcacaaaagca

SEQ ID NO: 24613 - DNA, 14 bp, Artificial Sequence
  Description of Artificial Sequence: Synthetic oligonucleotide
aatttcacaaaagc

SEQ ID NO: 24614 - DNA, 14 bp, Artificial Sequence
  Description of Artificial Sequence: Synthetic oligonucleotide
aaatttcacaaaag

SEQ ID NO: 24615 - DNA, 14 bp, Artificial Sequence
  Description of Artificial Sequence: Synthetic oligonucleotide
aaaatttcacaaaa

SEQ ID NO: 24616 - DNA, 14 bp, Artificial Sequence
  Description of Artificial Sequence: Synthetic oligonucleotide
aaaaatttcacaaa

SEQ ID NO: 24617 - DNA, 14 bp, Artificial Sequence
  Description of Artificial Sequence: Synthetic oligonucleotide
gaaaaatttcacaa

SEQ ID NO: 24618 - DNA, 14 bp, Artificial Sequence
  Description of Artificial Sequence: Synthetic oligonucleotide
tgaaaaatttcaca

SEQ ID NO: 24619 - DNA, 14 bp, Artificial Sequence
  Description of Artificial Sequence: Synthetic oligonucleotide
ttgaaaaatttcac

SEQ ID NO: 24620 - DNA, 14 bp, Artificial Sequence
  Description of Artificial Sequence: Synthetic oligonucleotide
tttgaaaaatttca

SEQ ID NO: 24621 - DNA, 14 bp, Artificial Sequence
  Description of Artificial Sequence: Synthetic oligonucleotide
atttgaaaaatttc

SEQ ID NO: 24622 - DNA, 14 bp, Artificial Sequence
  Description of Artificial Sequence: Synthetic oligonucleotide
aatttgaaaaattt

SEQ ID NO: 24623 - DNA, 14 bp, Artificial Sequence
  Description of Artificial Sequence: Synthetic oligonucleotide
aaatttgaaaaatt

SEQ ID NO: 24624 - DNA, 14 bp, Artificial Sequence
  Description of Artificial Sequence: Synthetic oligonucleotide
caaatttgaaaaat

SEQ ID NO: 24625 - DNA, 14 bp, Artificial Sequence
  Description of Artificial Sequence: Synthetic oligonucleotide
tcaaatttgaaaaa

SEQ ID NO: 24626 - DNA, 14 bp, Artificial Sequence
  Description of Artificial Sequence: Synthetic oligonucleotide
ctcaaatttgaaaa

SEQ ID NO: 24627 - DNA, 14 bp, Artificial Sequence
  Description of Artificial Sequence: Synthetic oligonucleotide
actcaaatttgaaa

SEQ ID NO: 24628 - DNA, 14 bp, Artificial Sequence
  Description of Artificial Sequence: Synthetic oligonucleotide
tactcaaatttgaa

SEQ ID NO: 24629 - DNA, 14 bp, Artificial Sequence
  Description of Artificial Sequence: Synthetic oligonucleotide
ttactcaaatttga

SEQ ID NO: 24630 - DNA, 14 bp, Artificial Sequence
  Description of Artificial Sequence: Synthetic oligonucleotide
attactcaaatttg

SEQ ID NO: 24631 - DNA, 14 bp, Artificial Sequence
  Description of Artificial Sequence: Synthetic oligonucleotide
tattactcaaattt

SEQ ID NO: 24632 - DNA, 14 bp, Artificial Sequence
  Description of Artificial Sequence: Synthetic oligonucleotide
ctattactcaaatt

SEQ ID NO: 24633 - DNA, 14 bp, Artificial Sequence
  Description of Artificial Sequence: Synthetic oligonucleotide
tctattactcaaat

SEQ ID NO: 24634 - DNA, 14 bp, Artificial Sequence
  Description of Artificial Sequence: Synthetic oligonucleotide
atctattactcaaa

SEQ ID NO: 24635 - DNA, 14 bp, Artificial Sequence
  Description of Artificial Sequence: Synthetic oligonucleotide
catctattactcaa

SEQ ID NO: 24636 - DNA, 14 bp, Artificial Sequence
  Description of Artificial Sequence: Synthetic oligonucleotide
gcatctattactca

SEQ ID NO: 24637 - DNA, 14 bp, Artificial Sequence
  Description of Artificial Sequence: Synthetic oligonucleotide
ggcatctattactc

SEQ ID NO: 24638 - DNA, 14 bp, Artificial Sequence
  Description of Artificial Sequence: Synthetic oligonucleotide
aggcatctattact

SEQ ID NO: 24639 - DNA, 14 bp, Artificial Sequence
  Description of Artificial Sequence: Synthetic oligonucleotide
aaggcatctattac

SEQ ID NO: 24640 - DNA, 14 bp, Artificial Sequence
  Description of Artificial Sequence: Synthetic oligonucleotide
aaaggcatctatta

SEQ ID NO: 24641 - DNA, 14 bp, Artificial Sequence
  Description of Artificial Sequence: Synthetic oligonucleotide
aaaaggcatctatt

SEQ ID NO: 24642 - DNA, 14 bp, Artificial Sequence
  Description of Artificial Sequence: Synthetic oligonucleotide
aaaaaggcatctat

SEQ ID NO: 24643 - DNA, 14 bp, Artificial Sequence
  Description of Artificial Sequence: Synthetic oligonucleotide
taaaaaggcatcta

SEQ ID NO: 24644 - DNA, 14 bp, Artificial Sequence
  Description of Artificial Sequence: Synthetic oligonucleotide
ttaaaaaggcatct

SEQ ID NO: 24645 - DNA, 14 bp, Artificial Sequence
  Description of Artificial Sequence: Synthetic oligonucleotide
cttaaaaaggcatc

SEQ ID NO: 24646 - DNA, 14 bp, Artificial Sequence
  Description of Artificial Sequence: Synthetic oligonucleotide
ccttaaaaaggcat

SEQ ID NO: 24647 - DNA, 14 bp, Artificial Sequence
  Description of Artificial Sequence: Synthetic oligonucleotide
gccttaaaaaggca

SEQ ID NO: 24648 - DNA, 14 bp, Artificial Sequence
  Description of Artificial Sequence: Synthetic oligonucleotide
tgccttaaaaaggc

SEQ ID NO: 24649 - DNA, 14 bp, Artificial Sequence
  Description of Artificial Sequence: Synthetic oligonucleotide
ctgccttaaaaagg

SEQ ID NO: 24650 - DNA, 14 bp, Artificial Sequence
  Description of Artificial Sequence: Synthetic oligonucleotide
actgccttaaaaag

SEQ ID NO: 24651 - DNA, 14 bp, Artificial Sequence
  Description of Artificial Sequence: Synthetic oligonucleotide
cactgccttaaaaa

SEQ ID NO: 24652 - DNA, 14 bp, Artificial Sequence
  Description of Artificial Sequence: Synthetic oligonucleotide
tcactgccttaaaa

SEQ ID NO: 24653 - DNA, 14 bp, Artificial Sequence
  Description of Artificial Sequence: Synthetic oligonucleotide
ttcactgccttaaa

SEQ ID NO: 24654 - DNA, 14 bp, Artificial Sequence
  Description of Artificial Sequence: Synthetic oligonucleotide
attcactgccttaa

SEQ ID NO: 24655 - DNA, 14 bp, Artificial Sequence
  Description of Artificial Sequence: Synthetic oligonucleotide
aattcactgcctta

SEQ ID NO: 24656 - DNA, 14 bp, Artificial Sequence
  Description of Artificial Sequence: Synthetic oligonucleotide
aaattcactgcctt

SEQ ID NO: 24657 - DNA, 14 bp, Artificial Sequence
  Description of Artificial Sequence: Synthetic oligonucleotide
taaattcactgcct

SEQ ID NO: 24658 - DNA, 14 bp, Artificial Sequence
  Description of Artificial Sequence: Synthetic oligonucleotide
gtaaattcactgcc

SEQ ID NO: 24659 - DNA, 14 bp, Artificial Sequence
  Description of Artificial Sequence: Synthetic oligonucleotide
tgtaaattcactgc

SEQ ID NO: 24660 - DNA, 14 bp, Artificial Sequence
  Description of Artificial Sequence: Synthetic oligonucleotide
gtgtaaattcactg

SEQ ID NO: 24661 - DNA, 14 bp, Artificial Sequence
  Description of Artificial Sequence: Synthetic oligonucleotide
tgtgtaaattcact

SEQ ID NO: 24662 - DNA, 14 bp, Artificial Sequence
  Description of Artificial Sequence: Synthetic oligonucleotide
ttgtgtaaattcac

SEQ ID NO: 24663 - DNA, 14 bp, Artificial Sequence
  Description of Artificial Sequence: Synthetic oligonucleotide
tttgtgtaaattca

SEQ ID NO: 24664 - DNA, 14 bp, Artificial Sequence
  Description of Artificial Sequence: Synthetic oligonucleotide
atttgtgtaaattc

SEQ ID NO: 24665 - DNA, 14 bp, Artificial Sequence
  Description of Artificial Sequence: Synthetic oligonucleotide
tatttgtgtaaatt

SEQ ID NO: 24666 - DNA, 14 bp, Artificial Sequence
  Description of Artificial Sequence: Synthetic oligonucleotide
atatttgtgtaaat

SEQ ID NO: 24667 - DNA, 14 bp, Artificial Sequence
  Description of Artificial Sequence: Synthetic oligonucleotide
catatttgtgtaaa

SEQ ID NO: 24668 - DNA, 14 bp, Artificial Sequence
  Description of Artificial Sequence: Synthetic oligonucleotide
ccatatttgtgtaa

SEQ ID NO: 24669 - DNA, 14 bp, Artificial Sequence
  Description of Artificial Sequence: Synthetic oligonucleotide
cccatatttgtgta

SEQ ID NO: 24670 - DNA, 14 bp, Artificial Sequence
  Description of Artificial Sequence: Synthetic oligonucleotide
tcccatatttgtgt

SEQ ID NO: 24671 - DNA, 14 bp, Artificial Sequence
  Description of Artificial Sequence: Synthetic oligonucleotide
ctcccatatttgtg

SEQ ID NO: 24672 - DNA, 14 bp, Artificial Sequence
  Description of Artificial Sequence: Synthetic oligonucleotide
cctcccatatttgt

SEQ ID NO: 24673 - DNA, 14 bp, Artificial Sequence
  Description of Artificial Sequence: Synthetic oligonucleotide
ccctcccatatttg

SEQ ID NO: 24674 - DNA, 14 bp, Artificial Sequence
  Description of Artificial Sequence: Synthetic oligonucleotide
cccctcccatattt

SEQ ID NO: 24675 - DNA, 14 bp, Artificial Sequence
  Description of Artificial Sequence: Synthetic oligonucleotide
acccctcccatatt

SEQ ID NO: 24676 - DNA, 14 bp, Artificial Sequence
  Description of Artificial Sequence: Synthetic oligonucleotide
tacccctcccatat

SEQ ID NO: 24677 - DNA, 14 bp, Artificial Sequence
  Description of Artificial Sequence: Synthetic oligonucleotide
atacccctcccata

SEQ ID NO: 24678 - DNA, 14 bp, Artificial Sequence
  Description of Artificial Sequence: Synthetic oligonucleotide
tatacccctcccat

SEQ ID NO: 24679 - DNA, 14 bp, Artificial Sequence
  Description of Artificial Sequence: Synthetic oligonucleotide
atatacccctccca

SEQ ID NO: 24680 - DNA, 14 bp, Artificial Sequence
  Description of Artificial Sequence: Synthetic oligonucleotide
catatacccctccc

SEQ ID NO: 24681 - DNA, 14 bp, Artificial Sequence
  Description of Artificial Sequence: Synthetic oligonucleotide
ccatatacccctcc

SEQ ID NO: 24682 - DNA, 14 bp, Artificial Sequence
  Description of Artificial Sequence: Synthetic oligonucleotide
accatatacccctc

SEQ ID NO: 24683 - DNA, 14 bp, Artificial Sequence
  Description of Artificial Sequence: Synthetic oligonucleotide
caccatatacccct

SEQ ID NO: 24684 - DNA, 14 bp, Artificial Sequence
  Description of Artificial Sequence: Synthetic oligonucleotide
acaccatatacccc

SEQ ID NO: 24685 - DNA, 14 bp, Artificial Sequence
  Description of Artificial Sequence: Synthetic oligonucleotide
aacaccatataccc

SEQ ID NO: 24686 - DNA, 14 bp, Artificial Sequence
  Description of Artificial Sequence: Synthetic oligonucleotide
taacaccatatacc

SEQ ID NO: 24687 - DNA, 14 bp, Artificial Sequence
  Description of Artificial Sequence: Synthetic oligonucleotide
gtaacaccatatac

SEQ ID NO: 24688 - DNA, 14 bp, Artificial Sequence
  Description of Artificial Sequence: Synthetic oligonucleotide
agtaacaccatata

SEQ ID NO: 24689 - DNA, 14 bp, Artificial Sequence
  Description of Artificial Sequence: Synthetic oligonucleotide
cagtaacaccatat

SEQ ID NO: 24690 - DNA, 14 bp, Artificial Sequence
  Description of Artificial Sequence: Synthetic oligonucleotide
tcagtaacaccata

SEQ ID NO: 24691 - DNA, 14 bp, Artificial Sequence
  Description of Artificial Sequence: Synthetic oligonucleotide
atcagtaacaccat

SEQ ID NO: 24692 - DNA, 14 bp, Artificial Sequence
  Description of Artificial Sequence: Synthetic oligonucleotide
aatcagtaacacca

SEQ ID NO: 24693 - DNA, 14 bp, Artificial Sequence
  Description of Artificial Sequence: Synthetic oligonucleotide
aaatcagtaacacc

SEQ ID NO: 24694 - DNA, 14 bp, Artificial Sequence
  Description of Artificial Sequence: Synthetic oligonucleotide
aaaatcagtaacac

SEQ ID NO: 24695 - DNA, 14 bp, Artificial Sequence
  Description of Artificial Sequence: Synthetic oligonucleotide
aaaaatcagtaaca

SEQ ID NO: 24696 - DNA, 14 bp, Artificial Sequence
  Description of Artificial Sequence: Synthetic oligonucleotide
taaaaatcagtaac

SEQ ID NO: 24697 - DNA, 14 bp, Artificial Sequence
  Description of Artificial Sequence: Synthetic oligonucleotide
ttaaaaatcagtaa

SEQ ID NO: 24698 - DNA, 14 bp, Artificial Sequence
  Description of Artificial Sequence: Synthetic oligonucleotide
tttaaaaatcagta

SEQ ID NO: 24699 - DNA, 14 bp, Artificial Sequence
  Description of Artificial Sequence: Synthetic oligonucleotide
gtttaaaaatcagt

SEQ ID NO: 24700 - DNA, 14 bp, Artificial Sequence
  Description of Artificial Sequence: Synthetic oligonucleotide
ggtttaaaaatcag

SEQ ID NO: 24701 - DNA, 14 bp, Artificial Sequence
  Description of Artificial Sequence: Synthetic oligonucleotide
aggtttaaaaatca

SEQ ID NO: 24702 - DNA, 14 bp, Artificial Sequence
  Description of Artificial Sequence: Synthetic oligonucleotide
gaggtttaaaaatc

SEQ ID NO: 24703 - DNA, 14 bp, Artificial Sequence
  Description of Artificial Sequence: Synthetic oligonucleotide
agaggtttaaaaat

SEQ ID NO: 24704 - DNA, 14 bp, Artificial Sequence
  Description of Artificial Sequence: Synthetic oligonucleotide
aagaggtttaaaaa

SEQ ID NO: 24705 - DNA, 14 bp, Artificial Sequence
  Description of Artificial Sequence: Synthetic oligonucleotide
aaagaggtttaaaa

SEQ ID NO: 24706 - DNA, 14 bp, Artificial Sequence
  Description of Artificial Sequence: Synthetic oligonucleotide
caaagaggtttaaa

SEQ ID NO: 24707 - DNA, 14 bp, Artificial Sequence
  Description of Artificial Sequence: Synthetic oligonucleotide
tcaaagaggtttaa

SEQ ID NO: 24708 - DNA, 14 bp, Artificial Sequence
  Description of Artificial Sequence: Synthetic oligonucleotide
gtcaaagaggttta

SEQ ID NO: 24709 - DNA, 14 bp, Artificial Sequence
  Description of Artificial Sequence: Synthetic oligonucleotide
ggtcaaagaggttt

SEQ ID NO: 24710 - DNA, 14 bp, Artificial Sequence
  Description of Artificial Sequence: Synthetic oligonucleotide
tggtcaaagaggtt

SEQ ID NO: 24711 - DNA, 14 bp, Artificial Sequence
  Description of Artificial Sequence: Synthetic oligonucleotide
atggtcaaagaggt

SEQ ID NO: 24712 - DNA, 14 bp, Artificial Sequence
  Description of Artificial Sequence: Synthetic oligonucleotide
gatggtcaaagagg

SEQ ID NO: 24713 - DNA, 14 bp, Artificial Sequence
  Description of Artificial Sequence: Synthetic oligonucleotide
agatggtcaaagag

SEQ ID NO: 24714 - DNA, 14 bp, Artificial Sequence
  Description of Artificial Sequence: Synthetic oligonucleotide
aagatggtcaaaga

SEQ ID NO: 24715 - DNA, 14 bp, Artificial Sequence
  Description of Artificial Sequence: Synthetic oligonucleotide
gaagatggtcaaag

SEQ ID NO: 24716 - DNA, 14 bp, Artificial Sequence
  Description of Artificial Sequence: Synthetic oligonucleotide
agaagatggtcaaa

SEQ ID NO: 24717 - DNA, 14 bp, Artificial Sequence
  Description of Artificial Sequence: Synthetic oligonucleotide
tagaagatggtcaa

SEQ ID NO: 24718 - DNA, 14 bp, Artificial Sequence
  Description of Artificial Sequence: Synthetic oligonucleotide
ctagaagatggtca

SEQ ID NO: 24719 - DNA, 14 bp, Artificial Sequence
  Description of Artificial Sequence: Synthetic oligonucleotide
actagaagatggtc

SEQ ID NO: 24720 - DNA, 14 bp, Artificial Sequence
  Description of Artificial Sequence: Synthetic oligonucleotide
aactagaagatggt

SEQ ID NO: 24721 - DNA, 14 bp, Artificial Sequence
  Description of Artificial Sequence: Synthetic oligonucleotide
aaactagaagatgg

SEQ ID NO: 24722 - DNA, 14 bp, Artificial Sequence
  Description of Artificial Sequence: Synthetic oligonucleotide
aaaactagaagatg

SEQ ID NO: 24723 - DNA, 14 bp, Artificial Sequence
  Description of Artificial Sequence: Synthetic oligonucleotide
aaaaactagaagat

SEQ ID NO: 24724 - DNA, 14 bp, Artificial Sequence
  Description of Artificial Sequence: Synthetic oligonucleotide
taaaaactagaaga

SEQ ID NO: 24725 - DNA, 14 bp, Artificial Sequence
  Description of Artificial Sequence: Synthetic oligonucleotide
gtaaaaactagaag

SEQ ID NO: 24726 - DNA, 14 bp, Artificial Sequence
  Description of Artificial Sequence: Synthetic oligonucleotide
agtaaaaactagaa

SEQ ID NO: 24727 - DNA, 14 bp, Artificial Sequence
  Description of Artificial Sequence: Synthetic oligonucleotide
aagtaaaaactaga

SEQ ID NO: 24728 - DNA, 14 bp, Artificial Sequence
  Description of Artificial Sequence: Synthetic oligonucleotide
gaagtaaaaactag

SEQ ID NO: 24729 - DNA, 14 bp, Artificial Sequence
  Description of Artificial Sequence: Synthetic oligonucleotide
agaagtaaaaacta

SEQ ID NO: 24730 - DNA, 14 bp, Artificial Sequence
  Description of Artificial Sequence: Synthetic oligonucleotide
tagaagtaaaaact

SEQ ID NO: 24731 - DNA, 14 bp, Artificial Sequence
  Description of Artificial Sequence: Synthetic oligonucleotide
ctagaagtaaaaac

SEQ ID NO: 24732 - DNA, 14 bp, Artificial Sequence
  Description of Artificial Sequence: Synthetic oligonucleotide
actagaagtaaaaa

SEQ ID NO: 24733 - DNA, 14 bp, Artificial Sequence
  Description of Artificial Sequence: Synthetic oligonucleotide
aactagaagtaaaa

SEQ ID NO: 24734 - DNA, 14 bp, Artificial Sequence
  Description of Artificial Sequence: Synthetic oligonucleotide
aaactagaagtaaa

SEQ ID NO: 24735 - DNA, 14 bp, Artificial Sequence
  Description of Artificial Sequence: Synthetic oligonucleotide
aaaactagaagtaa

SEQ ID NO: 24736 - DNA, 14 bp, Artificial Sequence
  Description of Artificial Sequence: Synthetic oligonucleotide
aaaaactagaagta

SEQ ID NO: 24737 - DNA, 14 bp, Artificial Sequence
  Description of Artificial Sequence: Synthetic oligonucleotide
taaaaactagaagt

SEQ ID NO: 24738 - skipped

SEQ ID NO: 24739 - DNA, 14 bp, Artificial Sequence
  Description of Artificial Sequence: Synthetic oligonucleotide
tgtaaaaactagaa

SEQ ID NO: 24740 - DNA, 14 bp, Artificial Sequence
  Description of Artificial Sequence: Synthetic oligonucleotide
atgtaaaaactaga

SEQ ID NO: 24741 - DNA, 14 bp, Artificial Sequence
  Description of Artificial Sequence: Synthetic oligonucleotide
gatgtaaaaactag

SEQ ID NO: 24742 - DNA, 14 bp, Artificial Sequence
  Description of Artificial Sequence: Synthetic oligonucleotide
agatgtaaaaacta

SEQ ID NO: 24743 - DNA, 14 bp, Artificial Sequence
  Description of Artificial Sequence: Synthetic oligonucleotide
tagatgtaaaaact

SEQ ID NO: 24744 - DNA, 14 bp, Artificial Sequence
  Description of Artificial Sequence: Synthetic oligonucleotide
ctagatgtaaaaac

SEQ ID NO: 24745 - DNA, 14 bp, Artificial Sequence
  Description of Artificial Sequence: Synthetic oligonucleotide
cctagatgtaaaaa

SEQ ID NO: 24746 - DNA, 14 bp, Artificial Sequence
  Description of Artificial Sequence: Synthetic oligonucleotide
tcctagatgtaaaa

SEQ ID NO: 24747 - DNA, 14 bp, Artificial Sequence
  Description of Artificial Sequence: Synthetic oligonucleotide
ctcctagatgtaaa

SEQ ID NO: 24748 - DNA, 14 bp, Artificial Sequence
  Description of Artificial Sequence: Synthetic oligonucleotide
tctcctagatgtaa

SEQ ID NO: 24749 - DNA, 14 bp, Artificial Sequence
  Description of Artificial Sequence: Synthetic oligonucleotide
ttctcctagatgta

SEQ ID NO: 24750 - DNA, 14 bp, Artificial Sequence
  Description of Artificial Sequence: Synthetic oligonucleotide
attctcctagatgt

SEQ ID NO: 24751 - DNA, 14 bp, Artificial Sequence
  Description of Artificial Sequence: Synthetic oligonucleotide
aattctcctagatg

SEQ ID NO: 24752 - DNA, 14 bp, Artificial Sequence
  Description of Artificial Sequence: Synthetic oligonucleotide
caattctcctagat

SEQ ID NO: 24753 - DNA, 14 bp, Artificial Sequence
  Description of Artificial Sequence: Synthetic oligonucleotide
acaattctcctaga

SEQ ID NO: 24754 - DNA, 14 bp, Artificial Sequence
  Description of Artificial Sequence: Synthetic oligonucleotide
cacaattctcctag

SEQ ID NO: 24755 - DNA, 14 bp, Artificial Sequence
  Description of Artificial Sequence: Synthetic oligonucleotide
tcacaattctccta

SEQ ID NO: 24756 - DNA, 14 bp, Artificial Sequence
  Description of Artificial Sequence: Synthetic oligonucleotide
ttcacaattctcct

SEQ ID NO: 24757 - DNA, 14 bp, Artificial Sequence
  Description of Artificial Sequence: Synthetic oligonucleotide
attcacaattctcc

SEQ ID NO: 24758 - DNA, 14 bp, Artificial Sequence
  Description of Artificial Sequence: Synthetic oligonucleotide
tattcacaattctc

SEQ ID NO: 24759 - DNA, 14 bp, Artificial Sequence
  Description of Artificial Sequence: Synthetic oligonucleotide
ttattcacaattct

SEQ ID NO: 24760 - DNA, 14 bp, Artificial Sequence
  Description of Artificial Sequence: Synthetic oligonucleotide
gttattcacaattc

SEQ ID NO: 24761 - DNA, 14 bp, Artificial Sequence
  Description of Artificial Sequence: Synthetic oligonucleotide
tgttattcacaatt

SEQ ID NO: 24762 - DNA, 14 bp, Artificial Sequence
  Description of Artificial Sequence: Synthetic oligonucleotide
gtgttattcacaat

SEQ ID NO: 24763 - DNA, 14 bp, Artificial Sequence
  Description of Artificial Sequence: Synthetic oligonucleotide
ggtgttattcacaa

SEQ ID NO: 24764 - DNA, 14 bp, Artificial Sequence
  Description of Artificial Sequence: Synthetic oligonucleotide
tggtgttattcaca

SEQ ID NO: 24765 - DNA, 14 bp, Artificial Sequence
  Description of Artificial Sequence: Synthetic oligonucleotide
ttggtgttattcac

SEQ ID NO: 24766 - DNA, 14 bp, Artificial Sequence
  Description of Artificial Sequence: Synthetic oligonucleotide
gttggtgttattca

SEQ ID NO: 24767 - DNA, 14 bp, Artificial Sequence
  Description of Artificial Sequence: Synthetic oligonucleotide
agttggtgttattc

SEQ ID NO: 24768 - DNA, 14 bp, Artificial Sequence
  Description of Artificial Sequence: Synthetic oligonucleotide
cagttggtgttatt

SEQ ID NO: 24769 - DNA, 14 bp, Artificial Sequence
  Description of Artificial Sequence: Synthetic oligonucleotide
acagttggtgttat

SEQ ID NO: 24770 - DNA, 14 bp, Artificial Sequence
  Description of Artificial Sequence: Synthetic oligonucleotide
aacagttggtgtta

SEQ ID NO: 24771 - DNA, 14 bp, Artificial Sequence
  Description of Artificial Sequence: Synthetic oligonucleotide
gaacagttggtgtt

SEQ ID NO: 24772 - DNA, 14 bp, Artificial Sequence
  Description of Artificial Sequence: Synthetic oligonucleotide
agaacagttggtgt

SEQ ID NO: 24773 - DNA, 14 bp, Artificial Sequence
  Description of Artificial Sequence: Synthetic oligonucleotide
aagaacagttggtg

SEQ ID NO: 24774 - DNA, 14 bp, Artificial Sequence
  Description of Artificial Sequence: Synthetic oligonucleotide
taagaacagttggt

SEQ ID NO: 24775 - DNA, 14 bp, Artificial Sequence
  Description of Artificial Sequence: Synthetic oligonucleotide
ttaagaacagttgg

SEQ ID NO: 24776 - DNA, 14 bp, Artificial Sequence
  Description of Artificial Sequence: Synthetic oligonucleotide
tttaagaacagttg

SEQ ID NO: 24777 - DNA, 14 bp, Artificial Sequence
  Description of Artificial Sequence: Synthetic oligonucleotide
gtttaagaacagtt

SEQ ID NO: 24778 - DNA, 14 bp, Artificial Sequence
  Description of Artificial Sequence: Synthetic oligonucleotide
agtttaagaacagt

SEQ ID NO: 24779 - DNA, 14 bp, Artificial Sequence
  Description of Artificial Sequence: Synthetic oligonucleotide
gagtttaagaacag

SEQ ID NO: 24780 - DNA, 14 bp, Artificial Sequence
  Description of Artificial Sequence: Synthetic oligonucleotide
agagtttaagaaca

SEQ ID NO: 24781 - DNA, 14 bp, Artificial Sequence
  Description of Artificial Sequence: Synthetic oligonucleotide
aagagtttaagaac

SEQ ID NO: 24782 - DNA, 14 bp, Artificial Sequence
  Description of Artificial Sequence: Synthetic oligonucleotide
aaagagtttaagaa

SEQ ID NO: 24783 - DNA, 14 bp, Artificial Sequence
  Description of Artificial Sequence: Synthetic oligonucleotide
taaagagtttaaga

SEQ ID NO: 24784 - DNA, 14 bp, Artificial Sequence
  Description of Artificial Sequence: Synthetic oligonucleotide
ttaaagagtttaag

SEQ ID NO: 24785 - DNA, 14 bp, Artificial Sequence
  Description of Artificial Sequence: Synthetic oligonucleotide
attaaagagtttaa

SEQ ID NO: 24786 - DNA, 14 bp, Artificial Sequence
  Description of Artificial Sequence: Synthetic oligonucleotide
cattaaagagttta

SEQ ID NO: 24787 - DNA, 14 bp, Artificial Sequence
  Description of Artificial Sequence: Synthetic oligonucleotide
gcattaaagagttt

SEQ ID NO: 24788 - DNA, 14 bp, Artificial Sequence
  Description of Artificial Sequence: Synthetic oligonucleotide
ggcattaaagagtt

SEQ ID NO: 24789 - DNA, 14 bp, Artificial Sequence
  Description of Artificial Sequence: Synthetic oligonucleotide
tggcattaaagagt

SEQ ID NO: 24790 - DNA, 14 bp, Artificial Sequence
  Description of Artificial Sequence: Synthetic oligonucleotide
atggcattaaagag

SEQ ID NO: 24791 - DNA, 14 bp, Artificial Sequence
  Description of Artificial Sequence: Synthetic oligonucleotide
catggcattaaaga

SEQ ID NO: 24792 - DNA, 14 bp, Artificial Sequence
  Description of Artificial Sequence: Synthetic oligonucleotide
acatggcattaaag

SEQ ID NO: 24793 - DNA, 14 bp, Artificial Sequence
  Description of Artificial Sequence: Synthetic oligonucleotide
gacatggcattaaa

SEQ ID NO: 24794 - DNA, 14 bp, Artificial Sequence
  Description of Artificial Sequence: Synthetic oligonucleotide
agacatggcattaa

SEQ ID NO: 24795 - DNA, 14 bp, Artificial Sequence
  Description of Artificial Sequence: Synthetic oligonucleotide
aagacatggcatta

SEQ ID NO: 24796 - DNA, 14 bp, Artificial Sequence
  Description of Artificial Sequence: Synthetic oligonucleotide
taagacatggcatt

SEQ ID NO: 24797 - DNA, 14 bp, Artificial Sequence
  Description of Artificial Sequence: Synthetic oligonucleotide
ttaagacatggcat

SEQ ID NO: 24798 - DNA, 14 bp, Artificial Sequence
  Description of Artificial Sequence: Synthetic oligonucleotide
tttaagacatggca

SEQ ID NO: 24799 - DNA, 14 bp, Artificial Sequence
  Description of Artificial Sequence: Synthetic oligonucleotide
atttaagacatggc

SEQ ID NO: 24800 - DNA, 14 bp, Artificial Sequence
  Description of Artificial Sequence: Synthetic oligonucleotide
catttaagacatgg

SEQ ID NO: 24801 - DNA, 14 bp, Artificial Sequence
  Description of Artificial Sequence: Synthetic oligonucleotide
gcatttaagacatg

SEQ ID NO: 24802 - DNA, 14 bp, Artificial Sequence
  Description of Artificial Sequence: Synthetic oligonucleotide
ggcatttaagacat

SEQ ID NO: 24803 - DNA, 14 bp, Artificial Sequence
  Description of Artificial Sequence: Synthetic oligonucleotide
cggcatttaagaca

SEQ ID NO: 24804 - DNA, 14 bp, Artificial Sequence
  Description of Artificial Sequence: Synthetic oligonucleotide
ccggcatttaagac

SEQ ID NO: 24805 - DNA, 14 bp, Artificial Sequence
  Description of Artificial Sequence: Synthetic oligonucleotide
accggcatttaaga

SEQ ID NO: 24806 - DNA, 14 bp, Artificial Sequence
  Description of Artificial Sequence: Synthetic oligonucleotide
taccggcatttaag

SEQ ID NO: 24807 - DNA, 14 bp, Artificial Sequence
  Description of Artificial Sequence: Synthetic oligonucleotide
ataccggcatttaa

SEQ ID NO: 24808 - DNA, 14 bp, Artificial Sequence
  Description of Artificial Sequence: Synthetic oligonucleotide
aataccggcattta

SEQ ID NO: 24809 - DNA, 14 bp, Artificial Sequence
  Description of Artificial Sequence: Synthetic oligonucleotide
aaataccggcattt

SEQ ID NO: 24810 - DNA, 14 bp, Artificial Sequence
  Description of Artificial Sequence: Synthetic oligonucleotide
caaataccggcatt

SEQ ID NO: 24811 - DNA, 14 bp, Artificial Sequence
  Description of Artificial Sequence: Synthetic oligonucleotide
gcaaataccggcat

SEQ ID NO: 24812 - DNA, 14 bp, Artificial Sequence
  Description of Artificial Sequence: Synthetic oligonucleotide
agcaaataccggca

SEQ ID NO: 24813 - DNA, 14 bp, Artificial Sequence
  Description of Artificial Sequence: Synthetic oligonucleotide
cagcaaataccggc

SEQ ID NO: 24814 - DNA, 14 bp, Artificial Sequence
  Description of Artificial Sequence: Synthetic oligonucleotide
gcagcaaataccgg

SEQ ID NO: 24815 - DNA, 14 bp, Artificial Sequence
  Description of Artificial Sequence: Synthetic oligonucleotide
agcagcaaataccg

SEQ ID NO: 24816 - DNA, 14 bp, Artificial Sequence
  Description of Artificial Sequence: Synthetic oligonucleotide
cagcagcaaatacc

SEQ ID NO: 24817 - DNA, 14 bp, Artificial Sequence
  Description of Artificial Sequence: Synthetic oligonucleotide
tcagcagcaaatac

SEQ ID NO: 24818 - DNA, 14 bp, Artificial Sequence
  Description of Artificial Sequence: Synthetic oligonucleotide
ttcagcagcaaata

SEQ ID NO: 24819 - DNA, 14 bp, Artificial Sequence
  Description of Artificial Sequence: Synthetic oligonucleotide
cttcagcagcaaat

SEQ ID NO: 24820 - DNA, 14 bp, Artificial Sequence
  Description of Artificial Sequence: Synthetic oligonucleotide
tcttcagcagcaaa

SEQ ID NO: 24821 - DNA, 14 bp, Artificial Sequence
  Description of Artificial Sequence: Synthetic oligonucleotide
gtcttcagcagcaa

SEQ ID NO: 24822 - DNA, 14 bp, Artificial Sequence
  Description of Artificial Sequence: Synthetic oligonucleotide
tgtcttcagcagca

SEQ ID NO: 24823 - DNA, 14 bp, Artificial Sequence
  Description of Artificial Sequence: Synthetic oligonucleotide
ttgtcttcagcagc

SEQ ID NO: 24824 - DNA, 14 bp, Artificial Sequence
  Description of Artificial Sequence: Synthetic oligonucleotide
tttgtcttcagcag

SEQ ID NO: 24825 - DNA, 14 bp, Artificial Sequence
  Description of Artificial Sequence: Synthetic oligonucleotide
ttttgtcttcagca

SEQ ID NO: 24826 - DNA, 14 bp, Artificial Sequence
  Description of Artificial Sequence: Synthetic oligonucleotide
tttttgtcttcagc

SEQ ID NO: 24827 - DNA, 14 bp, Artificial Sequence
  Description of Artificial Sequence: Synthetic oligonucleotide
atttttgtcttcag

SEQ ID NO: 24828 - DNA, 14 bp, Artificial Sequence
  Description of Artificial Sequence: Synthetic oligonucleotide
catttttgtcttca

SEQ ID NO: 24829 - DNA, 14 bp, Artificial Sequence
  Description of Artificial Sequence: Synthetic oligonucleotide
tcatttttgtcttc

SEQ ID NO: 24830 - DNA, 14 bp, Artificial Sequence
  Description of Artificial Sequence: Synthetic oligonucleotide
ttcatttttgtctt

SEQ ID NO: 24831 - DNA, 14 bp, Artificial Sequence
  Description of Artificial Sequence: Synthetic oligonucleotide
tttcatttttgtct

SEQ ID NO: 24832 - DNA, 14 bp, Artificial Sequence
  Description of Artificial Sequence: Synthetic oligonucleotide
ttttcatttttgtc

SEQ ID NO: 24833 - DNA, 14 bp, Artificial Sequence
  Description of Artificial Sequence: Synthetic oligonucleotide
cttttcatttttgt

SEQ ID NO: 24834 - DNA, 14 bp, Artificial Sequence
  Description of Artificial Sequence: Synthetic oligonucleotide
acttttcatttttg

SEQ ID NO: 24835 - DNA, 14 bp, Artificial Sequence
  Description of Artificial Sequence: Synthetic oligonucleotide
tacttttcattttt

SEQ ID NO: 24836 - DNA, 14 bp, Artificial Sequence
  Description of Artificial Sequence: Synthetic oligonucleotide
ctacttttcatttt

SEQ ID NO: 24837 - DNA, 14 bp, Artificial Sequence
  Description of Artificial Sequence: Synthetic oligonucleotide
cctacttttcattt

SEQ ID NO: 24838 - DNA, 14 bp, Artificial Sequence
  Description of Artificial Sequence: Synthetic oligonucleotide
tcctacttttcatt

SEQ ID NO: 24839 - DNA, 14 bp, Artificial Sequence
  Description of Artificial Sequence: Synthetic oligonucleotide
atcctacttttcat

SEQ ID NO: 24840 - DNA, 14 bp, Artificial Sequence
  Description of Artificial Sequence: Synthetic oligonucleotide
catcctacttttca

SEQ ID NO: 24841 - DNA, 14 bp, Artificial Sequence
  Description of Artificial Sequence: Synthetic oligonucleotide
tcatcctacttttc

SEQ ID NO: 24842 - DNA, 14 bp, Artificial Sequence
  Description of Artificial Sequence: Synthetic oligonucleotide
ttcatcctactttt

SEQ ID NO: 24843 - DNA, 14 bp, Artificial Sequence
  Description of Artificial Sequence: Synthetic oligonucleotide
tttcatcctacttt

SEQ ID NO: 24844 - DNA, 14 bp, Artificial Sequence
  Description of Artificial Sequence: Synthetic oligonucleotide
ttttcatcctactt

SEQ ID NO: 24845 - DNA, 14 bp, Artificial Sequence
  Description of Artificial Sequence: Synthetic oligonucleotide
attttcatcctact

SEQ ID NO: 24846 - DNA, 14 bp, Artificial Sequence
  Description of Artificial Sequence: Synthetic oligonucleotide
tattttcatcctac

SEQ ID NO: 24847 - DNA, 14 bp, Artificial Sequence
  Description of Artificial Sequence: Synthetic oligonucleotide
ttattttcatccta

SEQ ID NO: 24848 - DNA, 14 bp, Artificial Sequence
  Description of Artificial Sequence: Synthetic oligonucleotide
attattttcatcct

SEQ ID NO: 24849 - DNA, 14 bp, Artificial Sequence
  Description of Artificial Sequence: Synthetic oligonucleotide
tattattttcatcc

SEQ ID NO: 24850 - DNA, 14 bp, Artificial Sequence
  Description of Artificial Sequence: Synthetic oligonucleotide
ctattattttcatc

SEQ ID NO: 24851 - DNA, 14 bp, Artificial Sequence
  Description of Artificial Sequence: Synthetic oligonucleotide
tctattattttcat

SEQ ID NO: 24852 - DNA, 14 bp, Artificial Sequence
  Description of Artificial Sequence: Synthetic oligonucleotide
ttctattattttca

SEQ ID NO: 24853 - DNA, 14 bp, Artificial Sequence
  Description of Artificial Sequence: Synthetic oligonucleotide
attctattattttc

SEQ ID NO: 24854 - DNA, 14 bp, Artificial Sequence
  Description of Artificial Sequence: Synthetic oligonucleotide
cattctattatttt

SEQ ID NO: 24855 - DNA, 14 bp, Artificial Sequence
  Description of Artificial Sequence: Synthetic oligonucleotide
ccattctattattt

SEQ ID NO: 24856 - DNA, 14 bp, Artificial Sequence
  Description of Artificial Sequence: Synthetic oligonucleotide
gccattctattatt

SEQ ID NO: 24857 - DNA, 14 bp, Artificial Sequence
  Description of Artificial Sequence: Synthetic oligonucleotide
tgccattctattat

SEQ ID NO: 24858 - DNA, 14 bp, Artificial Sequence
  Description of Artificial Sequence: Synthetic oligonucleotide
gtgccattctatta

SEQ ID NO: 24859 - DNA, 14 bp, Artificial Sequence
  Description of Artificial Sequence: Synthetic oligonucleotide
agtgccattctatt

SEQ ID NO: 24860 - DNA, 14 bp, Artificial Sequence
  Description of Artificial Sequence: Synthetic oligonucleotide
cagtgccattctat

SEQ ID NO: 24861 - DNA, 14 bp, Artificial Sequence
  Description of Artificial Sequence: Synthetic oligonucleotide
acagtgccattcta

SEQ ID NO: 24862 - DNA, 14 bp, Artificial Sequence
  Description of Artificial Sequence: Synthetic oligonucleotide
tacagtgccattct

SEQ ID NO: 24863 - DNA, 14 bp, Artificial Sequence
  Description of Artificial Sequence: Synthetic oligonucleotide
ttacagtgccattc

SEQ ID NO: 24864 - DNA, 14 bp, Artificial Sequence
  Description of Artificial Sequence: Synthetic oligonucleotide
cttacagtgccatt

SEQ ID NO: 24865 - DNA, 14 bp, Artificial Sequence
  Description of Artificial Sequence: Synthetic oligonucleotide
acttacagtgccat

SEQ ID NO: 24866 - DNA, 14 bp, Artificial Sequence
  Description of Artificial Sequence: Synthetic oligonucleotide
cacttacagtgcca

SEQ ID NO: 24867 - DNA, 14 bp, Artificial Sequence
  Description of Artificial Sequence: Synthetic oligonucleotide
acacttacagtgcc

SEQ ID NO: 24868 - DNA, 14 bp, Artificial Sequence
  Description of Artificial Sequence: Synthetic oligonucleotide
aacacttacagtgc

SEQ ID NO: 24869 - DNA, 14 bp, Artificial Sequence
  Description of Artificial Sequence: Synthetic oligonucleotide
aaacacttacagtg

SEQ ID NO: 24870 - DNA, 14 bp, Artificial Sequence
  Description of Artificial Sequence: Synthetic oligonucleotide
taaacacttacagt

SEQ ID NO: 24871 - DNA, 14 bp, Artificial Sequence
  Description of Artificial Sequence: Synthetic oligonucleotide
ataaacacttacag

SEQ ID NO: 24872 - DNA, 14 bp, Artificial Sequence
  Description of Artificial Sequence: Synthetic oligonucleotide
aataaacacttaca

SEQ ID NO: 24873 - DNA, 14 bp, Artificial Sequence
  Description of Artificial Sequence: Synthetic oligonucleotide
taataaacacttac

SEQ ID NO: 24874 - DNA, 14 bp, Artificial Sequence
  Description of Artificial Sequence: Synthetic oligonucleotide
ataataaacactta

SEQ ID NO: 24875 - DNA, 14 bp, Artificial Sequence
  Description of Artificial Sequence: Synthetic oligonucleotide
aataataaacactt

SEQ ID NO: 24876 - DNA, 14 bp, Artificial Sequence
  Description of Artificial Sequence: Synthetic oligonucleotide
aaataataaacact

SEQ ID NO: 24877 - DNA, 14 bp, Artificial Sequence
  Description of Artificial Sequence: Synthetic oligonucleotide
aaaataataaacac

SEQ ID NO: 24878 - DNA, 14 bp, Artificial Sequence
  Description of Artificial Sequence: Synthetic oligonucleotide
caaaataataaaca

SEQ ID NO: 24879 - DNA, 14 bp, Artificial Sequence
  Description of Artificial Sequence: Synthetic oligonucleotide
acaaaataataaac

SEQ ID NO: 24880 - DNA, 14 bp, Artificial Sequence
  Description of Artificial Sequence: Synthetic oligonucleotide
gacaaaataataaa

SEQ ID NO: 24881 - DNA, 14 bp, Artificial Sequence
  Description of Artificial Sequence: Synthetic oligonucleotide
tgacaaaataataa

SEQ ID NO: 24882 - DNA, 14 bp, Artificial Sequence
  Description of Artificial Sequence: Synthetic oligonucleotide
ttgacaaaataata

SEQ ID NO: 24883 - DNA, 14 bp, Artificial Sequence
  Description of Artificial Sequence: Synthetic oligonucleotide
tttgacaaaataat

SEQ ID NO: 24884 - DNA, 14 bp, Artificial Sequence
  Description of Artificial Sequence: Synthetic oligonucleotide
ttttgacaaaataa

SEQ ID NO: 24885 - DNA, 14 bp, Artificial Sequence
  Description of Artificial Sequence: Synthetic oligonucleotide
attttgacaaaata

SEQ ID NO: 24886 - DNA, 14 bp, Artificial Sequence
  Description of Artificial Sequence: Synthetic oligonucleotide
cattttgacaaaat

SEQ ID NO: 24887 - DNA, 14 bp, Artificial Sequence
  Description of Artificial Sequence: Synthetic oligonucleotide
acattttgacaaaa

SEQ ID NO: 24888 - DNA, 14 bp, Artificial Sequence
  Description of Artificial Sequence: Synthetic oligonucleotide
tacattttgacaaa

SEQ ID NO: 24889 - DNA, 14 bp, Artificial Sequence
  Description of Artificial Sequence: Synthetic oligonucleotide
ttacattttgacaa

SEQ ID NO: 24890 - DNA, 14 bp, Artificial Sequence
  Description of Artificial Sequence: Synthetic oligonucleotide
tttacattttgaca

SEQ ID NO: 24891 - DNA, 14 bp, Artificial Sequence
  Description of Artificial Sequence: Synthetic oligonucleotide
gtttacattttgac

SEQ ID NO: 24892 - DNA, 14 bp, Artificial Sequence
  Description of Artificial Sequence: Synthetic oligonucleotide
tgtttacattttga

SEQ ID NO: 24893 - DNA, 14 bp, Artificial Sequence
  Description of Artificial Sequence: Synthetic oligonucleotide
ttgtttacattttg

SEQ ID NO: 24894 - DNA, 14 bp, Artificial Sequence
  Description of Artificial Sequence: Synthetic oligonucleotide
tttgtttacatttt

SEQ ID NO: 24895 - DNA, 14 bp, Artificial Sequence
  Description of Artificial Sequence: Synthetic oligonucleotide
ctttgtttacattt

SEQ ID NO: 24896 - DNA, 14 bp, Artificial Sequence
  Description of Artificial Sequence: Synthetic oligonucleotide
tctttgtttacatt

SEQ ID NO: 24897 - DNA, 14 bp, Artificial Sequence
  Description of Artificial Sequence: Synthetic oligonucleotide
gtctttgtttacat

SEQ ID NO: 24898 - DNA, 14 bp, Artificial Sequence
  Description of Artificial Sequence: Synthetic oligonucleotide
agtctttgtttaca

SEQ ID NO: 24899 - DNA, 14 bp, Artificial Sequence
  Description of Artificial Sequence: Synthetic oligonucleotide
tagtctttgtttac

SEQ ID NO: 24900 - DNA, 14 bp, Artificial Sequence
  Description of Artificial Sequence: Synthetic oligonucleotide
gtagtctttgttta

SEQ ID NO: 24901 - DNA, 14 bp, Artificial Sequence
  Description of Artificial Sequence: Synthetic oligonucleotide
tgtagtctttgttt

SEQ ID NO: 24902 - DNA, 14 bp, Artificial Sequence
  Description of Artificial Sequence: Synthetic oligonucleotide
atgtagtctttgtt

SEQ ID NO: 24903 - DNA, 14 bp, Artificial Sequence
  Description of Artificial Sequence: Synthetic oligonucleotide
tatgtagtctttgt

SEQ ID NO: 24904 - DNA, 14 bp, Artificial Sequence
  Description of Artificial Sequence: Synthetic oligonucleotide
ttatgtagtctttg

SEQ ID NO: 24905 - DNA, 14 bp, Artificial Sequence
  Description of Artificial Sequence: Synthetic oligonucleotide
gttatgtagtcttt

SEQ ID NO: 24906 - DNA, 14 bp, Artificial Sequence
  Description of Artificial Sequence: Synthetic oligonucleotide
ggttatgtagtctt

SEQ ID NO: 24907 - DNA, 14 bp, Artificial Sequence
  Description of Artificial Sequence: Synthetic oligonucleotide
gggttatgtagtct

SEQ ID NO: 24908 - DNA, 14 bp, Artificial Sequence
  Description of Artificial Sequence: Synthetic oligonucleotide
tgggttatgtagtc

SEQ ID NO: 24909 - DNA, 14 bp, Artificial Sequence
  Description of Artificial Sequence: Synthetic oligonucleotide
ttgggttatgtagt

SEQ ID NO: 24910 - DNA, 14 bp, Artificial Sequence
  Description of Artificial Sequence: Synthetic oligonucleotide
attgggttatgtag

SEQ ID NO: 24911 - DNA, 14 bp, Artificial Sequence
  Description of Artificial Sequence: Synthetic oligonucleotide
cattgggttatgta

SEQ ID NO: 24912 - DNA, 14 bp, Artificial Sequence
  Description of Artificial Sequence: Synthetic oligonucleotide
tcattgggttatgt

SEQ ID NO: 24913 - DNA, 14 bp, Artificial Sequence
  Description of Artificial Sequence: Synthetic oligonucleotide
atcattgggttatg

SEQ ID NO: 24914 - DNA, 14 bp, Artificial Sequence
  Description of Artificial Sequence: Synthetic oligonucleotide
catcattgggttat

SEQ ID NO: 24915 - DNA, 14 bp, Artificial Sequence
  Description of Artificial Sequence: Synthetic oligonucleotide
ccatcattgggtta

SEQ ID NO: 24916 - DNA, 14 bp, Artificial Sequence
  Description of Artificial Sequence: Synthetic oligonucleotide
tccatcattgggtt

SEQ ID NO: 24917 - DNA, 14 bp, Artificial Sequence
  Description of Artificial Sequence: Synthetic oligonucleotide
ctccatcattgggt

SEQ ID NO: 24918 - DNA, 14 bp, Artificial Sequence
  Description of Artificial Sequence: Synthetic oligonucleotide
cctccatcattggg

SEQ ID NO: 24919 - DNA, 14 bp, Artificial Sequence
  Description of Artificial Sequence: Synthetic oligonucleotide
ccctccatcattgg

SEQ ID NO: 24920 - DNA, 14 bp, Artificial Sequence
  Description of Artificial Sequence: Synthetic oligonucleotide
tccctccatcattg

SEQ ID NO: 24921 - DNA, 14 bp, Artificial Sequence
  Description of Artificial Sequence: Synthetic oligonucleotide
ttccctccatcatt

SEQ ID NO: 24922 - DNA, 14 bp, Artificial Sequence
  Description of Artificial Sequence: Synthetic oligonucleotide
tttccctccatcat

SEQ ID NO: 24923 - DNA, 14 bp, Artificial Sequence
  Description of Artificial Sequence: Synthetic oligonucleotide
ttttccctccatca

SEQ ID NO: 24924 - DNA, 14 bp, Artificial Sequence
  Description of Artificial Sequence: Synthetic oligonucleotide
tttttccctccatc

SEQ ID NO: 24925 - DNA, 14 bp, Artificial Sequence
  Description of Artificial Sequence: Synthetic oligonucleotide
ctttttccctccat

SEQ ID NO: 24926 - DNA, 14 bp, Artificial Sequence
  Description of Artificial Sequence: Synthetic oligonucleotide
cctttttccctcca

SEQ ID NO: 24927 - DNA, 14 bp, Artificial Sequence
  Description of Artificial Sequence: Synthetic oligonucleotide
ccctttttccctcc

SEQ ID NO: 24928 - DNA, 14 bp, Artificial Sequence
  Description of Artificial Sequence: Synthetic oligonucleotide
gccctttttccctc

SEQ ID NO: 24929 - DNA, 14 bp, Artificial Sequence
  Description of Artificial Sequence: Synthetic oligonucleotide
tgccctttttccct

SEQ ID NO: 24930 - DNA, 14 bp, Artificial Sequence
  Description of Artificial Sequence: Synthetic oligonucleotide
atgccctttttccc

SEQ ID NO: 24931 - DNA, 14 bp, Artificial Sequence
  Description of Artificial Sequence: Synthetic oligonucleotide
catgccctttttcc

SEQ ID NO: 24932 - DNA, 14 bp, Artificial Sequence
  Description of Artificial Sequence: Synthetic oligonucleotide
acatgccctttttc

SEQ ID NO: 24933 - DNA, 14 bp, Artificial Sequence
  Description of Artificial Sequence: Synthetic oligonucleotide
tacatgcccttttt

SEQ ID NO: 24934 - DNA, 14 bp, Artificial Sequence
  Description of Artificial Sequence: Synthetic oligonucleotide
atacatgccctttt

SEQ ID NO: 24935 - DNA, 14 bp, Artificial Sequence
  Description of Artificial Sequence: Synthetic oligonucleotide
gatacatgcccttt

SEQ ID NO: 24936 - DNA, 14 bp, Artificial Sequence
  Description of Artificial Sequence: Synthetic oligonucleotide
agatacatgccctt

SEQ ID NO: 24937 - DNA, 14 bp, Artificial Sequence
  Description of Artificial Sequence: Synthetic oligonucleotide
gagatacatgccct

SEQ ID NO: 24938 - DNA, 14 bp, Artificial Sequence
  Description of Artificial Sequence: Synthetic oligonucleotide
tgagatacatgccc

SEQ ID NO: 24939 - DNA, 14 bp, Artificial Sequence
  Description of Artificial Sequence: Synthetic oligonucleotide
atgagatacatgcc

SEQ ID NO: 24940 - DNA, 14 bp, Artificial Sequence
  Description of Artificial Sequence: Synthetic oligonucleotide
aatgagatacatgc

SEQ ID NO: 24941 - DNA, 14 bp, Artificial Sequence
  Description of Artificial Sequence: Synthetic oligonucleotide
gaatgagatacatg

SEQ ID NO: 24942 - DNA, 14 bp, Artificial Sequence
  Description of Artificial Sequence: Synthetic oligonucleotide
tgaatgagatacat

SEQ ID NO: 24943 - DNA, 14 bp, Artificial Sequence
  Description of Artificial Sequence: Synthetic oligonucleotide
ctgaatgagataca

SEQ ID NO: 24944 - DNA, 14 bp, Artificial Sequence
  Description of Artificial Sequence: Synthetic oligonucleotide
tctgaatgagatac

SEQ ID NO: 24945 - DNA, 14 bp, Artificial Sequence
  Description of Artificial Sequence: Synthetic oligonucleotide
atctgaatgagata

SEQ ID NO: 24946 - DNA, 14 bp, Artificial Sequence
  Description of Artificial Sequence: Synthetic oligonucleotide
catctgaatgagat

SEQ ID NO: 24947 - DNA, 14 bp, Artificial Sequence
  Description of Artificial Sequence: Synthetic oligonucleotide
acatctgaatgaga

SEQ ID NO: 24948 - DNA, 14 bp, Artificial Sequence
  Description of Artificial Sequence: Synthetic oligonucleotide
cacatctgaatgag

SEQ ID NO: 24949 - DNA, 14 bp, Artificial Sequence
  Description of Artificial Sequence: Synthetic oligonucleotide
gcacatctgaatga

SEQ ID NO: 24950 - DNA, 14 bp, Artificial Sequence
  Description of Artificial Sequence: Synthetic oligonucleotide
ggcacatctgaatg

SEQ ID NO: 24951 - DNA, 14 bp, Artificial Sequence
  Description of Artificial Sequence: Synthetic oligonucleotide
aggcacatctgaat

SEQ ID NO: 24952 - DNA, 14 bp, Artificial Sequence
  Description of Artificial Sequence: Synthetic oligonucleotide
aaggcacatctgaa

SEQ ID NO: 24953 - DNA, 14 bp, Artificial Sequence
  Description of Artificial Sequence: Synthetic oligonucleotide
aaaggcacatctga

SEQ ID NO: 24954 - DNA, 14 bp, Artificial Sequence
  Description of Artificial Sequence: Synthetic oligonucleotide
aaaaggcacatctg

SEQ ID NO: 24955 - DNA, 14 bp, Artificial Sequence
  Description of Artificial Sequence: Synthetic oligonucleotide
caaaaggcacatct

SEQ ID NO: 24956 - DNA, 14 bp, Artificial Sequence
  Description of Artificial Sequence: Synthetic oligonucleotide
acaaaaggcacatc

SEQ ID NO: 24957 - DNA, 14 bp, Artificial Sequence
  Description of Artificial Sequence: Synthetic oligonucleotide
aacaaaaggcacat

SEQ ID NO: 24958 - DNA, 14 bp, Artificial Sequence
  Description of Artificial Sequence: Synthetic oligonucleotide
aaacaaaaggcaca

SEQ ID NO: 24959 - DNA, 14 bp, Artificial Sequence
  Description of Artificial Sequence: Synthetic oligonucleotide
aaaacaaaaggcac

SEQ ID NO: 24960 - DNA, 14 bp, Artificial Sequence
  Description of Artificial Sequence: Synthetic oligonucleotide
aaaaacaaaaggca

SEQ ID NO: 24961 - DNA, 14 bp, Artificial Sequence
  Description of Artificial Sequence: Synthetic oligonucleotide
caaaaacaaaaggc

SEQ ID NO: 24962 - DNA, 14 bp, Artificial Sequence
  Description of Artificial Sequence: Synthetic oligonucleotide
gcaaaaacaaaagg

SEQ ID NO: 24963 - DNA, 14 bp, Artificial Sequence
  Description of Artificial Sequence: Synthetic oligonucleotide
tgcaaaaacaaaag

SEQ ID NO: 24964 - DNA, 14 bp, Artificial Sequence
  Description of Artificial Sequence: Synthetic oligonucleotide
ctgcaaaaacaaaa

SEQ ID NO: 24965 - DNA, 14 bp, Artificial Sequence
  Description of Artificial Sequence: Synthetic oligonucleotide
tctgcaaaaacaaa

SEQ ID NO: 24966 - DNA, 14 bp, Artificial Sequence
  Description of Artificial Sequence: Synthetic oligonucleotide
gtctgcaaaaacaa

SEQ ID NO: 24967 - DNA, 14 bp, Artificial Sequence
  Description of Artificial Sequence: Synthetic oligonucleotide
agtctgcaaaaaca

SEQ ID NO: 24968 - DNA, 14 bp, Artificial Sequence
  Description of Artificial Sequence: Synthetic oligonucleotide
tagtctgcaaaaac

SEQ ID NO: 24969 - DNA, 14 bp, Artificial Sequence
  Description of Artificial Sequence: Synthetic oligonucleotide
atagtctgcaaaaa

SEQ ID NO: 24970 - DNA, 14 bp, Artificial Sequence
  Description of Artificial Sequence: Synthetic oligonucleotide
catagtctgcaaaa

SEQ ID NO: 24971 - DNA, 14 bp, Artificial Sequence
  Description of Artificial Sequence: Synthetic oligonucleotide
tcatagtctgcaaa

SEQ ID NO: 24972 - DNA, 14 bp, Artificial Sequence
  Description of Artificial Sequence: Synthetic oligonucleotide
gtcatagtctgcaa

SEQ ID NO: 24973 - DNA, 14 bp, Artificial Sequence
  Description of Artificial Sequence: Synthetic oligonucleotide
cgtcatagtctgca

SEQ ID NO: 24974 - DNA, 14 bp, Artificial Sequence
  Description of Artificial Sequence: Synthetic oligonucleotide
acgtcatagtctgc

SEQ ID NO: 24975 - DNA, 14 bp, Artificial Sequence
  Description of Artificial Sequence: Synthetic oligonucleotide
gacgtcatagtctg

SEQ ID NO: 24976 - DNA, 14 bp, Artificial Sequence
  Description of Artificial Sequence: Synthetic oligonucleotide
agacgtcatagtct

SEQ ID NO: 24977 - DNA, 14 bp, Artificial Sequence
  Description of Artificial Sequence: Synthetic oligonucleotide
aagacgtcatagtc

SEQ ID NO: 24978 - DNA, 14 bp, Artificial Sequence
  Description of Artificial Sequence: Synthetic oligonucleotide
aaagacgtcatagt

SEQ ID NO: 24979 - DNA, 14 bp, Artificial Sequence
  Description of Artificial Sequence: Synthetic oligonucleotide
taaagacgtcatag

SEQ ID NO: 24980 - DNA, 14 bp, Artificial Sequence
  Description of Artificial Sequence: Synthetic oligonucleotide
ctaaagacgtcata

SEQ ID NO: 24981 - DNA, 14 bp, Artificial Sequence
  Description of Artificial Sequence: Synthetic oligonucleotide
gctaaagacgtcat

SEQ ID NO: 24982 - DNA, 14 bp, Artificial Sequence
  Description of Artificial Sequence: Synthetic oligonucleotide
agctaaagacgtca

SEQ ID NO: 24983 - DNA, 14 bp, Artificial Sequence
  Description of Artificial Sequence: Synthetic oligonucleotide
tagctaaagacgtc

SEQ ID NO: 24984 - DNA, 14 bp, Artificial Sequence
  Description of Artificial Sequence: Synthetic oligonucleotide
ttagctaaagacgt

SEQ ID NO: 24985 - DNA, 14 bp, Artificial Sequence
  Description of Artificial Sequence: Synthetic oligonucleotide
attagctaaagacg

SEQ ID NO: 24986 - DNA, 14 bp, Artificial Sequence
  Description of Artificial Sequence: Synthetic oligonucleotide
cattagctaaagac

SEQ ID NO: 24987 - DNA, 14 bp, Artificial Sequence
  Description of Artificial Sequence: Synthetic oligonucleotide
tcattagctaaaga

SEQ ID NO: 24988 - DNA, 14 bp, Artificial Sequence
  Description of Artificial Sequence: Synthetic oligonucleotide
ttcattagctaaag

SEQ ID NO: 24989 - DNA, 14 bp, Artificial Sequence
  Description of Artificial Sequence: Synthetic oligonucleotide
attcattagctaaa

SEQ ID NO: 24990 - DNA, 14 bp, Artificial Sequence
  Description of Artificial Sequence: Synthetic oligonucleotide
aattcattagctaa

SEQ ID NO: 24991 - DNA, 14 bp, Artificial Sequence
  Description of Artificial Sequence: Synthetic oligonucleotide
caattcattagcta

SEQ ID NO: 24992 - DNA, 14 bp, Artificial Sequence
  Description of Artificial Sequence: Synthetic oligonucleotide
gcaattcattagct

SEQ ID NO: 24993 - DNA, 14 bp, Artificial Sequence
  Description of Artificial Sequence: Synthetic oligonucleotide
ggcaattcattagc

SEQ ID NO: 24994 - DNA, 14 bp, Artificial Sequence
  Description of Artificial Sequence: Synthetic oligonucleotide
aggcaattcattag

SEQ ID NO: 24995 - DNA, 14 bp, Artificial Sequence
  Description of Artificial Sequence: Synthetic oligonucleotide
taggcaattcatta

SEQ ID NO: 24996 - DNA, 14 bp, Artificial Sequence
  Description of Artificial Sequence: Synthetic oligonucleotide
ataggcaattcatt

SEQ ID NO: 24997 - DNA, 14 bp, Artificial Sequence
  Description of Artificial Sequence: Synthetic oligonucleotide
aataggcaattcat

SEQ ID NO: 24998 - DNA, 14 bp, Artificial Sequence
  Description of Artificial Sequence: Synthetic oligonucleotide
caataggcaattca

SEQ ID NO: 24999 - DNA, 14 bp, Artificial Sequence
  Description of Artificial Sequence: Synthetic oligonucleotide
acaataggcaattc

SEQ ID NO: 25000 - DNA, 14 bp, Artificial Sequence
  Description of Artificial Sequence: Synthetic oligonucleotide
aacaataggcaatt

SEQ ID NO: 25001 - DNA, 14 bp, Artificial Sequence
  Description of Artificial Sequence: Synthetic oligonucleotide
taacaataggcaat

SEQ ID NO: 25002 - DNA, 14 bp, Artificial Sequence
  Description of Artificial Sequence: Synthetic oligonucleotide
ataacaataggcaa

SEQ ID NO: 25003 - DNA, 14 bp, Artificial Sequence
  Description of Artificial Sequence: Synthetic oligonucleotide
cataacaataggca

SEQ ID NO: 25004 - DNA, 14 bp, Artificial Sequence
  Description of Artificial Sequence: Synthetic oligonucleotide
ccataacaataggc

SEQ ID NO: 25005 - DNA, 14 bp, Artificial Sequence
  Description of Artificial Sequence: Synthetic oligonucleotide
tccataacaatagg

SEQ ID NO: 25006 - DNA, 14 bp, Artificial Sequence
  Description of Artificial Sequence: Synthetic oligonucleotide
ttccataacaatag

SEQ ID NO: 25007 - DNA, 14 bp, Artificial Sequence
  Description of Artificial Sequence: Synthetic oligonucleotide
tttccataacaata

SEQ ID NO: 25008 - DNA, 14 bp, Artificial Sequence
  Description of Artificial Sequence: Synthetic oligonucleotide
ttttccataacaat

SEQ ID NO: 25009 - DNA, 14 bp, Artificial Sequence
  Description of Artificial Sequence: Synthetic oligonucleotide
gttttccataacaa

SEQ ID NO: 25010 - DNA, 14 bp, Artificial Sequence
  Description of Artificial Sequence: Synthetic oligonucleotide
tgttttccataaca

SEQ ID NO: 25011 - DNA, 14 bp, Artificial Sequence
  Description of Artificial Sequence: Synthetic oligonucleotide
ctgttttccataac

SEQ ID NO: 25012 - DNA, 14 bp, Artificial Sequence
  Description of Artificial Sequence: Synthetic oligonucleotide
actgttttccataa

SEQ ID NO: 25013 - DNA, 14 bp, Artificial Sequence
  Description of Artificial Sequence: Synthetic oligonucleotide
aactgttttccata

SEQ ID NO: 25014 - DNA, 14 bp, Artificial Sequence
  Description of Artificial Sequence: Synthetic oligonucleotide
taactgttttccat

SEQ ID NO: 25015 - DNA, 14 bp, Artificial Sequence
  Description of Artificial Sequence: Synthetic oligonucleotide
ttaactgttttcca

SEQ ID NO: 25016 - DNA, 14 bp, Artificial Sequence
  Description of Artificial Sequence: Synthetic oligonucleotide
attaactgttttcc

SEQ ID NO: 25017 - DNA, 14 bp, Artificial Sequence
  Description of Artificial Sequence: Synthetic oligonucleotide
tattaactgttttc

SEQ ID NO: 25018 - DNA, 14 bp, Artificial Sequence
  Description of Artificial Sequence: Synthetic oligonucleotide
atattaactgtttt

SEQ ID NO: 25019 - DNA, 14 bp, Artificial Sequence
  Description of Artificial Sequence: Synthetic oligonucleotide
catattaactgttt

SEQ ID NO: 25020 - DNA, 14 bp, Artificial Sequence
  Description of Artificial Sequence: Synthetic oligonucleotide
gcatattaactgtt

SEQ ID NO: 25021 - DNA, 14 bp, Artificial Sequence
  Description of Artificial Sequence: Synthetic oligonucleotide
ggcatattaactgt

SEQ ID NO: 25022 - DNA, 14 bp, Artificial Sequence
  Description of Artificial Sequence: Synthetic oligonucleotide
tggcatattaactg

SEQ ID NO: 25023 - DNA, 14 bp, Artificial Sequence
  Description of Artificial Sequence: Synthetic oligonucleotide
atggcatattaact

SEQ ID NO: 25024 - DNA, 14 bp, Artificial Sequence
  Description of Artificial Sequence: Synthetic oligonucleotide
catggcatattaac

SEQ ID NO: 25025 - DNA, 14 bp, Artificial Sequence
  Description of Artificial Sequence: Synthetic oligonucleotide
acatggcatattaa

SEQ ID NO: 25026 - DNA, 14 bp, Artificial Sequence
  Description of Artificial Sequence: Synthetic oligonucleotide
tacatggcatatta

SEQ ID NO: 25027 - DNA, 14 bp, Artificial Sequence
  Description of Artificial Sequence: Synthetic oligonucleotide
atacatggcatatt

SEQ ID NO: 25028 - DNA, 14 bp, Artificial Sequence
  Description of Artificial Sequence: Synthetic oligonucleotide
catacatggcatat

SEQ ID NO: 25029 - DNA, 14 bp, Artificial Sequence
  Description of Artificial Sequence: Synthetic oligonucleotide
acatacatggcata

SEQ ID NO: 25030 - DNA, 14 bp, Artificial Sequence
  Description of Artificial Sequence: Synthetic oligonucleotide
tacatacatggcat

SEQ ID NO: 25031 - DNA, 14 bp, Artificial Sequence
  Description of Artificial Sequence: Synthetic oligonucleotide
gtacatacatggca

SEQ ID NO: 25032 - DNA, 14 bp, Artificial Sequence
  Description of Artificial Sequence: Synthetic oligonucleotide
tgtacatacatggc

SEQ ID NO: 25033 - DNA, 14 bp, Artificial Sequence
  Description of Artificial Sequence: Synthetic oligonucleotide
ctgtacatacatgg

SEQ ID NO: 25034 - DNA, 14 bp, Artificial Sequence
  Description of Artificial Sequence: Synthetic oligonucleotide
actgtacatacatg

SEQ ID NO: 25035 - DNA, 14 bp, Artificial Sequence
  Description of Artificial Sequence: Synthetic oligonucleotide
aactgtacatacat

SEQ ID NO: 25036 - DNA, 14 bp, Artificial Sequence
  Description of Artificial Sequence: Synthetic oligonucleotide
aaactgtacataca

SEQ ID NO: 25037 - DNA, 14 bp, Artificial Sequence
  Description of Artificial Sequence: Synthetic oligonucleotide
aaaactgtacatac

SEQ ID NO: 25038 - DNA, 14 bp, Artificial Sequence
  Description of Artificial Sequence: Synthetic oligonucleotide
caaaactgtacata

SEQ ID NO: 25039 - DNA, 14 bp, Artificial Sequence
  Description of Artificial Sequence: Synthetic oligonucleotide
acaaaactgtacat

SEQ ID NO: 25040 - DNA, 14 bp, Artificial Sequence
  Description of Artificial Sequence: Synthetic oligonucleotide
aacaaaactgtaca

SEQ ID NO: 25041 - DNA, 14 bp, Artificial Sequence
  Description of Artificial Sequence: Synthetic oligonucleotide
aaacaaaactgtac

SEQ ID NO: 25042 - DNA, 14 bp, Artificial Sequence
  Description of Artificial Sequence: Synthetic oligonucleotide
taaacaaaactgta

SEQ ID NO: 25043 - DNA, 14 bp, Artificial Sequence
  Description of Artificial Sequence: Synthetic oligonucleotide
ataaacaaaactgt

SEQ ID NO: 25044 - DNA, 14 bp, Artificial Sequence
  Description of Artificial Sequence: Synthetic oligonucleotide
tataaacaaaactg

SEQ ID NO: 25045 - DNA, 14 bp, Artificial Sequence
  Description of Artificial Sequence: Synthetic oligonucleotide
atataaacaaaact

SEQ ID NO: 25046 - DNA, 14 bp, Artificial Sequence
  Description of Artificial Sequence: Synthetic oligonucleotide
aatataaacaaaac

SEQ ID NO: 25047 - DNA, 14 bp, Artificial Sequence
  Description of Artificial Sequence: Synthetic oligonucleotide
caatataaacaaaa

SEQ ID NO: 25048 - DNA, 14 bp, Artificial Sequence
  Description of Artificial Sequence: Synthetic oligonucleotide
acaatataaacaaa

SEQ ID NO: 25049 - DNA, 14 bp, Artificial Sequence
  Description of Artificial Sequence: Synthetic oligonucleotide
tacaatataaacaa

SEQ ID NO: 25050 - DNA, 14 bp, Artificial Sequence
  Description of Artificial Sequence: Synthetic oligonucleotide
atacaatataaaca

SEQ ID NO: 25051 - DNA, 14 bp, Artificial Sequence
  Description of Artificial Sequence: Synthetic oligonucleotide
tatacaatataaac

SEQ ID NO: 25052 - DNA, 14 bp, Artificial Sequence
  Description of Artificial Sequence: Synthetic oligonucleotide
atatacaatataaa

SEQ ID NO: 25053 - DNA, 14 bp, Artificial Sequence
  Description of Artificial Sequence: Synthetic oligonucleotide
aatatacaatataa

SEQ ID NO: 25054 - DNA, 14 bp, Artificial Sequence
  Description of Artificial Sequence: Synthetic oligonucleotide
aaatatacaatata

SEQ ID NO: 25055 - DNA, 14 bp, Artificial Sequence
  Description of Artificial Sequence: Synthetic oligonucleotide
taaatatacaatat

SEQ ID NO: 25056 - DNA, 14 bp, Artificial Sequence
  Description of Artificial Sequence: Synthetic oligonucleotide
ttaaatatacaata

SEQ ID NO: 25057 - DNA, 14 bp, Artificial Sequence
  Description of Artificial Sequence: Synthetic oligonucleotide
tttaaatatacaat

SEQ ID NO: 25058 - DNA, 14 bp, Artificial Sequence
  Description of Artificial Sequence: Synthetic oligonucleotide
ctttaaatatacaa

SEQ ID NO: 25059 - DNA, 14 bp, Artificial Sequence
  Description of Artificial Sequence: Synthetic oligonucleotide
tctttaaatataca

SEQ ID NO: 25060 - DNA, 14 bp, Artificial Sequence
  Description of Artificial Sequence: Synthetic oligonucleotide
atctttaaatatac

SEQ ID NO: 25061 - DNA, 14 bp, Artificial Sequence
  Description of Artificial Sequence: Synthetic oligonucleotide
tatctttaaatata

SEQ ID NO: 25062 - DNA, 14 bp, Artificial Sequence
  Description of Artificial Sequence: Synthetic oligonucleotide
gtatctttaaatat

SEQ ID NO: 25063 - DNA, 14 bp, Artificial Sequence
  Description of Artificial Sequence: Synthetic oligonucleotide
agtatctttaaata

SEQ ID NO: 25064 - DNA, 14 bp, Artificial Sequence
  Description of Artificial Sequence: Synthetic oligonucleotide
cagtatctttaaat

SEQ ID NO: 25065 - DNA, 14 bp, Artificial Sequence
  Description of Artificial Sequence: Synthetic oligonucleotide
gcagtatctttaaa

SEQ ID NO: 25066 - DNA, 14 bp, Artificial Sequence
  Description of Artificial Sequence: Synthetic oligonucleotide
agcagtatctttaa

SEQ ID NO: 25067 - DNA, 14 bp, Artificial Sequence
  Description of Artificial Sequence: Synthetic oligonucleotide
tagcagtatcttta

SEQ ID NO: 25068 - DNA, 14 bp, Artificial Sequence
  Description of Artificial Sequence: Synthetic oligonucleotide
ttagcagtatcttt

SEQ ID NO: 25069 - DNA, 14 bp, Artificial Sequence
  Description of Artificial Sequence: Synthetic oligonucleotide
attagcagtatctt

SEQ ID NO: 25070 - DNA, 14 bp, Artificial Sequence
  Description of Artificial Sequence: Synthetic oligonucleotide
tattagcagtatct

SEQ ID NO: 25071 - DNA, 14 bp, Artificial Sequence
  Description of Artificial Sequence: Synthetic oligonucleotide
ttattagcagtatc

SEQ ID NO: 25072 - DNA, 14 bp, Artificial Sequence
  Description of Artificial Sequence: Synthetic oligonucleotide
gttattagcagtat

SEQ ID NO: 25073 - DNA, 14 bp, Artificial Sequence
  Description of Artificial Sequence: Synthetic oligonucleotide
ggttattagcagta

SEQ ID NO: 25074 - DNA, 14 bp, Artificial Sequence
  Description of Artificial Sequence: Synthetic oligonucleotide
aggttattagcagt

SEQ ID NO: 25075 - DNA, 14 bp, Artificial Sequence
  Description of Artificial Sequence: Synthetic oligonucleotide
taggttattagcag

SEQ ID NO: 25076 - DNA, 14 bp, Artificial Sequence
  Description of Artificial Sequence: Synthetic oligonucleotide
ataggttattagca

SEQ ID NO: 25077 - DNA, 14 bp, Artificial Sequence
  Description of Artificial Sequence: Synthetic oligonucleotide
tataggttattagc

SEQ ID NO: 25078 - DNA, 14 bp, Artificial Sequence
  Description of Artificial Sequence: Synthetic oligonucleotide
atataggttattag

SEQ ID NO: 25079 - DNA, 14 bp, Artificial Sequence
  Description of Artificial Sequence: Synthetic oligonucleotide
tatataggttatta

SEQ ID NO: 25080 - DNA, 14 bp, Artificial Sequence
  Description of Artificial Sequence: Synthetic oligonucleotide
ttatataggttatt

SEQ ID NO: 25081 - DNA, 14 bp, Artificial Sequence
  Description of Artificial Sequence: Synthetic oligonucleotide
tttatataggttat

SEQ ID NO: 25082 - DNA, 14 bp, Artificial Sequence
  Description of Artificial Sequence: Synthetic oligonucleotide
atttatataggtta

SEQ ID NO: 25083 - DNA, 14 bp, Artificial Sequence
  Description of Artificial Sequence: Synthetic oligonucleotide
aatttatataggtt

SEQ ID NO: 25084 - DNA, 14 bp, Artificial Sequence
  Description of Artificial Sequence: Synthetic oligonucleotide
aaatttatataggt

SEQ ID NO: 25085 - DNA, 14 bp, Artificial Sequence
  Description of Artificial Sequence: Synthetic oligonucleotide
taaatttatatagg

SEQ ID NO: 25086 - DNA, 14 bp, Artificial Sequence
  Description of Artificial Sequence: Synthetic oligonucleotide
ttaaatttatatag

SEQ ID NO: 25087 - DNA, 14 bp, Artificial Sequence
  Description of Artificial Sequence: Synthetic oligonucleotide
cttaaatttatata

SEQ ID NO: 25088 - DNA, 14 bp, Artificial Sequence
  Description of Artificial Sequence: Synthetic oligonucleotide
acttaaatttatat

SEQ ID NO: 25089 - DNA, 14 bp, Artificial Sequence
  Description of Artificial Sequence: Synthetic oligonucleotide
cacttaaatttata

SEQ ID NO: 25090 - DNA, 14 bp, Artificial Sequence
  Description of Artificial Sequence: Synthetic oligonucleotide
tcacttaaatttat

SEQ ID NO: 25091 - DNA, 14 bp, Artificial Sequence
  Description of Artificial Sequence: Synthetic oligonucleotide
gtcacttaaattta

SEQ ID NO: 25092 - DNA, 14 bp, Artificial Sequence
  Description of Artificial Sequence: Synthetic oligonucleotide
agtcacttaaattt

SEQ ID NO: 25093 - DNA, 14 bp, Artificial Sequence
  Description of Artificial Sequence: Synthetic oligonucleotide
aagtcacttaaatt

SEQ ID NO: 25094 - DNA, 14 bp, Artificial Sequence
  Description of Artificial Sequence: Synthetic oligonucleotide
caagtcacttaaat

SEQ ID NO: 25095 - DNA, 14 bp, Artificial Sequence
  Description of Artificial Sequence: Synthetic oligonucleotide
tcaagtcacttaaa

SEQ ID NO: 25096 - DNA, 14 bp, Artificial Sequence
  Description of Artificial Sequence: Synthetic oligonucleotide
ctcaagtcacttaa

SEQ ID NO: 25097 - DNA, 14 bp, Artificial Sequence
  Description of Artificial Sequence: Synthetic oligonucleotide
cctcaagtcactta

SEQ ID NO: 25098 - DNA, 14 bp, Artificial Sequence
  Description of Artificial Sequence: Synthetic oligonucleotide
gcctcaagtcactt

SEQ ID NO: 25099 - DNA, 14 bp, Artificial Sequence
  Description of Artificial Sequence: Synthetic oligonucleotide
ggcctcaagtcact

SEQ ID NO: 25100 - DNA, 14 bp, Artificial Sequence
  Description of Artificial Sequence: Synthetic oligonucleotide
aggcctcaagtcac

SEQ ID NO: 25101 - DNA, 14 bp, Artificial Sequence
  Description of Artificial Sequence: Synthetic oligonucleotide
taggcctcaagtca

SEQ ID NO: 25102 - DNA, 14 bp, Artificial Sequence
  Description of Artificial Sequence: Synthetic oligonucleotide
ataggcctcaagtc

SEQ ID NO: 25103 - DNA, 14 bp, Artificial Sequence
  Description of Artificial Sequence: Synthetic oligonucleotide
tataggcctcaagt

SEQ ID NO: 25104 - DNA, 14 bp, Artificial Sequence
  Description of Artificial Sequence: Synthetic oligonucleotide
ttataggcctcaag

SEQ ID NO: 25105 - DNA, 14 bp, Artificial Sequence
  Description of Artificial Sequence: Synthetic oligonucleotide
attataggcctcaa

SEQ ID NO: 25106 - DNA, 14 bp, Artificial Sequence
  Description of Artificial Sequence: Synthetic oligonucleotide
tattataggcctca

SEQ ID NO: 25107 - DNA, 14 bp, Artificial Sequence
  Description of Artificial Sequence: Synthetic oligonucleotide
gtattataggcctc

SEQ ID NO: 25108 - DNA, 14 bp, Artificial Sequence
  Description of Artificial Sequence: Synthetic oligonucleotide
tgtattataggcct

SEQ ID NO: 25109 - DNA, 14 bp, Artificial Sequence
  Description of Artificial Sequence: Synthetic oligonucleotide
ttgtattataggcc

SEQ ID NO: 25110 - DNA, 14 bp, Artificial Sequence
  Description of Artificial Sequence: Synthetic oligonucleotide
attgtattataggc

SEQ ID NO: 25111 - DNA, 14 bp, Artificial Sequence
  Description of Artificial Sequence: Synthetic oligonucleotide
gattgtattatagg

SEQ ID NO: 25112 - DNA, 14 bp, Artificial Sequence
  Description of Artificial Sequence: Synthetic oligonucleotide
agattgtattatag

SEQ ID NO: 25113 - DNA, 14 bp, Artificial Sequence
  Description of Artificial Sequence: Synthetic oligonucleotide
cagattgtattata

SEQ ID NO: 25114 - DNA, 14 bp, Artificial Sequence
  Description of Artificial Sequence: Synthetic oligonucleotide
gcagattgtattat

SEQ ID NO: 25115 - DNA, 14 bp, Artificial Sequence
  Description of Artificial Sequence: Synthetic oligonucleotide
agcagattgtatta

SEQ ID NO: 25116 - DNA, 14 bp, Artificial Sequence
  Description of Artificial Sequence: Synthetic oligonucleotide
tagcagattgtatt

SEQ ID NO: 25117 - DNA, 14 bp, Artificial Sequence
  Description of Artificial Sequence: Synthetic oligonucleotide
gtagcagattgtat

SEQ ID NO: 25118 - DNA, 14 bp, Artificial Sequence
  Description of Artificial Sequence: Synthetic oligonucleotide
agtagcagattgta

SEQ ID NO: 25119 - DNA, 14 bp, Artificial Sequence
  Description of Artificial Sequence: Synthetic oligonucleotide
aagtagcagattgt

SEQ ID NO: 25120 - DNA, 14 bp, Artificial Sequence
  Description of Artificial Sequence: Synthetic oligonucleotide
aaagtagcagattg

SEQ ID NO: 25121 - DNA, 14 bp, Artificial Sequence
  Description of Artificial Sequence: Synthetic oligonucleotide
taaagtagcagatt

SEQ ID NO: 25122 - DNA, 14 bp, Artificial Sequence
  Description of Artificial Sequence: Synthetic oligonucleotide
gtaaagtagcagat

SEQ ID NO: 25123 - DNA, 14 bp, Artificial Sequence
  Description of Artificial Sequence: Synthetic oligonucleotide
agtaaagtagcaga

SEQ ID NO: 25124 - DNA, 14 bp, Artificial Sequence
  Description of Artificial Sequence: Synthetic oligonucleotide
tagtaaagtagcag

SEQ ID NO: 25125 - DNA, 14 bp, Artificial Sequence
  Description of Artificial Sequence: Synthetic oligonucleotide
ttagtaaagtagca

SEQ ID NO: 25126 - DNA, 14 bp, Artificial Sequence
  Description of Artificial Sequence: Synthetic oligonucleotide
attagtaaagtagc

SEQ ID NO: 25127 - DNA, 14 bp, Artificial Sequence
  Description of Artificial Sequence: Synthetic oligonucleotide
aattagtaaagtag

SEQ ID NO: 25128 - DNA, 14 bp, Artificial Sequence
  Description of Artificial Sequence: Synthetic oligonucleotide
gaattagtaaagta

SEQ ID NO: 25129 - DNA, 14 bp, Artificial Sequence
  Description of Artificial Sequence: Synthetic oligonucleotide
tgaattagtaaagt

SEQ ID NO: 25130 - DNA, 14 bp, Artificial Sequence
  Description of Artificial Sequence: Synthetic oligonucleotide
atgaattagtaaag

SEQ ID NO: 25131 - DNA, 14 bp, Artificial Sequence
  Description of Artificial Sequence: Synthetic oligonucleotide
tatgaattagtaaa

SEQ ID NO: 25132 - DNA, 14 bp, Artificial Sequence
  Description of Artificial Sequence: Synthetic oligonucleotide
ttatgaattagtaa

SEQ ID NO: 25133 - DNA, 14 bp, Artificial Sequence
  Description of Artificial Sequence: Synthetic oligonucleotide
tttatgaattagta

SEQ ID NO: 25134 - DNA, 14 bp, Artificial Sequence
  Description of Artificial Sequence: Synthetic oligonucleotide
atttatgaattagt

SEQ ID NO: 25135 - DNA, 14 bp, Artificial Sequence
  Description of Artificial Sequence: Synthetic oligonucleotide
aatttatgaattag

SEQ ID NO: 25136 - DNA, 14 bp, Artificial Sequence
  Description of Artificial Sequence: Synthetic oligonucleotide
gaatttatgaatta

SEQ ID NO: 25137 - DNA, 14 bp, Artificial Sequence
  Description of Artificial Sequence: Synthetic oligonucleotide
tgaatttatgaatt

SEQ ID NO: 25138 - DNA, 14 bp, Artificial Sequence
  Description of Artificial Sequence: Synthetic oligonucleotide
ttgaatttatgaat

SEQ ID NO: 25139 - DNA, 14 bp, Artificial Sequence
  Description of Artificial Sequence: Synthetic oligonucleotide
tttgaatttatgaa

SEQ ID NO: 25140 - DNA, 14 bp, Artificial Sequence
  Description of Artificial Sequence: Synthetic oligonucleotide
ttttgaatttatga

SEQ ID NO: 25141 - DNA, 14 bp, Artificial Sequence
  Description of Artificial Sequence: Synthetic oligonucleotide
tttttgaatttatg

SEQ ID NO: 25142 - DNA, 14 bp, Artificial Sequence
  Description of Artificial Sequence: Synthetic oligonucleotide
ttttttgaatttat

SEQ ID NO: 25143 - DNA, 14 bp, Artificial Sequence
  Description of Artificial Sequence: Synthetic oligonucleotide
tttttttgaattta

SEQ ID NO: 25144 - DNA, 14 bp, Artificial Sequence
  Description of Artificial Sequence: Synthetic oligonucleotide
ttttttttgaattt

SEQ ID NO: 25145 - DNA, 14 bp, Artificial Sequence
  Description of Artificial Sequence: Synthetic oligonucleotide
attttttttgaatt

SEQ ID NO: 25146 - DNA, 14 bp, Artificial Sequence
  Description of Artificial Sequence: Synthetic oligonucleotide
aattttttttgaat

SEQ ID NO: 25147 - DNA, 14 bp, Artificial Sequence
  Description of Artificial Sequence: Synthetic oligonucleotide
gaattttttttgaa

SEQ ID NO: 25148 - DNA, 14 bp, Artificial Sequence
  Description of Artificial Sequence: Synthetic oligonucleotide
agaattttttttga

SEQ ID NO: 25149 - DNA, 14 bp, Artificial Sequence
  Description of Artificial Sequence: Synthetic oligonucleotide
tagaattttttttg

SEQ ID NO: 25150 - DNA, 14 bp, Artificial Sequence
  Description of Artificial Sequence: Synthetic oligonucleotide
atagaatttttttt

SEQ ID NO: 25151 - DNA, 14 bp, Artificial Sequence
  Description of Artificial Sequence: Synthetic oligonucleotide
catagaattttttt

SEQ ID NO: 25152 - DNA, 14 bp, Artificial Sequence
  Description of Artificial Sequence: Synthetic oligonucleotide
ccatagaatttttt

SEQ ID NO: 25153 - DNA, 14 bp, Artificial Sequence
  Description of Artificial Sequence: Synthetic oligonucleotide
gccatagaattttt

SEQ ID NO: 25154 - DNA, 14 bp, Artificial Sequence
  Description of Artificial Sequence: Synthetic oligonucleotide
tgccatagaatttt

SEQ ID NO: 25155 - DNA, 14 bp, Artificial Sequence
  Description of Artificial Sequence: Synthetic oligonucleotide
atgccatagaattt

SEQ ID NO: 25156 - DNA, 14 bp, Artificial Sequence
  Description of Artificial Sequence: Synthetic oligonucleotide
tatgccatagaatt

SEQ ID NO: 25157 - DNA, 14 bp, Artificial Sequence
  Description of Artificial Sequence: Synthetic oligonucleotide
ctatgccatagaat

SEQ ID NO: 25158 - DNA, 14 bp, Artificial Sequence
  Description of Artificial Sequence: Synthetic oligonucleotide
cctatgccatagaa

SEQ ID NO: 25159 - DNA, 14 bp, Artificial Sequence
  Description of Artificial Sequence: Synthetic oligonucleotide
tcctatgccataga

SEQ ID NO: 25160 - DNA, 14 bp, Artificial Sequence
  Description of Artificial Sequence: Synthetic oligonucleotide
ttcctatgccatag

SEQ ID NO: 25161 - DNA, 14 bp, Artificial Sequence
  Description of Artificial Sequence: Synthetic oligonucleotide
gttcctatgccata

SEQ ID NO: 25162 - DNA, 14 bp, Artificial Sequence
  Description of Artificial Sequence: Synthetic oligonucleotide
ggttcctatgccat

SEQ ID NO: 25163 - DNA, 14 bp, Artificial Sequence
  Description of Artificial Sequence: Synthetic oligonucleotide
tggttcctatgcca

SEQ ID NO: 25164 - DNA, 14 bp, Artificial Sequence
  Description of Artificial Sequence: Synthetic oligonucleotide
ttggttcctatgcc

SEQ ID NO: 25165 - DNA, 14 bp, Artificial Sequence
  Description of Artificial Sequence: Synthetic oligonucleotide
gttggttcctatgc

SEQ ID NO: 25166 - DNA, 14 bp, Artificial Sequence
  Description of Artificial Sequence: Synthetic oligonucleotide
agttggttcctatg

SEQ ID NO: 25167 - DNA, 14 bp, Artificial Sequence
  Description of Artificial Sequence: Synthetic oligonucleotide
cagttggttcctat

SEQ ID NO: 25168 - DNA, 14 bp, Artificial Sequence
  Description of Artificial Sequence: Synthetic oligonucleotide
gcagttggttccta

SEQ ID NO: 25169 - DNA, 14 bp, Artificial Sequence
  Description of Artificial Sequence: Synthetic oligonucleotide
ggcagttggttcct

SEQ ID NO: 25170 - DNA, 14 bp, Artificial Sequence
  Description of Artificial Sequence: Synthetic oligonucleotide
aggcagttggttcc

SEQ ID NO: 25171 - DNA, 14 bp, Artificial Sequence
  Description of Artificial Sequence: Synthetic oligonucleotide
aaggcagttggttc

SEQ ID NO: 25172 - DNA, 14 bp, Artificial Sequence
  Description of Artificial Sequence: Synthetic oligonucleotide
caaggcagttggtt

SEQ ID NO: 25173 - DNA, 14 bp, Artificial Sequence
  Description of Artificial Sequence: Synthetic oligonucleotide
gcaaggcagttggt

SEQ ID NO: 25174 - DNA, 14 bp, Artificial Sequence
  Description of Artificial Sequence: Synthetic oligonucleotide
ggcaaggcagttgg

SEQ ID NO: 25175 - DNA, 14 bp, Artificial Sequence
  Description of Artificial Sequence: Synthetic oligonucleotide
aggcaaggcagttg

SEQ ID NO: 25176 - DNA, 14 bp, Artificial Sequence
  Description of Artificial Sequence: Synthetic oligonucleotide
aaggcaaggcagtt

SEQ ID NO: 25177 - DNA, 14 bp, Artificial Sequence
  Description of Artificial Sequence: Synthetic oligonucleotide
gaaggcaaggcagt

SEQ ID NO: 25178 - DNA, 14 bp, Artificial Sequence
  Description of Artificial Sequence: Synthetic oligonucleotide
tgaaggcaaggcag

SEQ ID NO: 25179 - DNA, 14 bp, Artificial Sequence
  Description of Artificial Sequence: Synthetic oligonucleotide
ttgaaggcaaggca

SEQ ID NO: 25180 - DNA, 14 bp, Artificial Sequence
  Description of Artificial Sequence: Synthetic oligonucleotide
cttgaaggcaaggc

SEQ ID NO: 25181 - DNA, 14 bp, Artificial Sequence
  Description of Artificial Sequence: Synthetic oligonucleotide
tcttgaaggcaagg

SEQ ID NO: 25182 - DNA, 14 bp, Artificial Sequence
  Description of Artificial Sequence: Synthetic oligonucleotide
gtcttgaaggcaag

SEQ ID NO: 25183 - DNA, 14 bp, Artificial Sequence
  Description of Artificial Sequence: Synthetic oligonucleotide
ggtcttgaaggcaa

SEQ ID NO: 25184 - DNA, 14 bp, Artificial Sequence
  Description of Artificial Sequence: Synthetic oligonucleotide
aggtcttgaaggca

SEQ ID NO: 25185 - DNA, 14 bp, Artificial Sequence
  Description of Artificial Sequence: Synthetic oligonucleotide
taggtcttgaaggc

SEQ ID NO: 25186 - DNA, 14 bp, Artificial Sequence
  Description of Artificial Sequence: Synthetic oligonucleotide
ctaggtcttgaagg

SEQ ID NO: 25187 - DNA, 14 bp, Artificial Sequence
  Description of Artificial Sequence: Synthetic oligonucleotide
actaggtcttgaag

SEQ ID NO: 25188 - DNA, 14 bp, Artificial Sequence
  Description of Artificial Sequence: Synthetic oligonucleotide
tactaggtcttgaa

SEQ ID NO: 25189 - DNA, 14 bp, Artificial Sequence
  Description of Artificial Sequence: Synthetic oligonucleotide
ttactaggtcttga

SEQ ID NO: 25190 - DNA, 14 bp, Artificial Sequence
  Description of Artificial Sequence: Synthetic oligonucleotide
gttactaggtcttg

SEQ ID NO: 25191 - DNA, 14 bp, Artificial Sequence
  Description of Artificial Sequence: Synthetic oligonucleotide
agttactaggtctt

SEQ ID NO: 25192 - DNA, 14 bp, Artificial Sequence
  Description of Artificial Sequence: Synthetic oligonucleotide
aagttactaggtct

SEQ ID NO: 25193 - DNA, 14 bp, Artificial Sequence
  Description of Artificial Sequence: Synthetic oligonucleotide
aaagttactaggtc

SEQ ID NO: 25194 - DNA, 14 bp, Artificial Sequence
  Description of Artificial Sequence: Synthetic oligonucleotide
gaaagttactaggt

SEQ ID NO: 25195 - DNA, 14 bp, Artificial Sequence
  Description of Artificial Sequence: Synthetic oligonucleotide
agaaagttactagg

SEQ ID NO: 25196 - DNA, 14 bp, Artificial Sequence
  Description of Artificial Sequence: Synthetic oligonucleotide
gagaaagttactag

SEQ ID NO: 25197 - DNA, 14 bp, Artificial Sequence
  Description of Artificial Sequence: Synthetic oligonucleotide
agagaaagttacta

SEQ ID NO: 25198 - DNA, 14 bp, Artificial Sequence
  Description of Artificial Sequence: Synthetic oligonucleotide
tagagaaagttact

SEQ ID NO: 25199 - DNA, 14 bp, Artificial Sequence
  Description of Artificial Sequence: Synthetic oligonucleotide
atagagaaagttac

SEQ ID NO: 25200 - DNA, 14 bp, Artificial Sequence
  Description of Artificial Sequence: Synthetic oligonucleotide
tatagagaaagtta

SEQ ID NO: 25201 - DNA, 14 bp, Artificial Sequence
  Description of Artificial Sequence: Synthetic oligonucleotide
ttatagagaaagtt

SEQ ID NO: 25202 - DNA, 14 bp, Artificial Sequence
  Description of Artificial Sequence: Synthetic oligonucleotide
tttatagagaaagt

SEQ ID NO: 25203 - DNA, 14 bp, Artificial Sequence
  Description of Artificial Sequence: Synthetic oligonucleotide
atttatagagaaag

SEQ ID NO: 25204 - DNA, 14 bp, Artificial Sequence
  Description of Artificial Sequence: Synthetic oligonucleotide
gatttatagagaaa

SEQ ID NO: 25205 - DNA, 14 bp, Artificial Sequence
  Description of Artificial Sequence: Synthetic oligonucleotide
agatttatagagaa

SEQ ID NO: 25206 - DNA, 14 bp, Artificial Sequence
  Description of Artificial Sequence: Synthetic oligonucleotide
gagatttatagaga

SEQ ID NO: 25207 - DNA, 14 bp, Artificial Sequence
  Description of Artificial Sequence: Synthetic oligonucleotide
cgagatttatagag

SEQ ID NO: 25208 - DNA, 14 bp, Artificial Sequence
  Description of Artificial Sequence: Synthetic oligonucleotide
acgagatttataga

SEQ ID NO: 25209 - DNA, 14 bp, Artificial Sequence
  Description of Artificial Sequence: Synthetic oligonucleotide
cacgagatttatag

SEQ ID NO: 25210 - DNA, 14 bp, Artificial Sequence
  Description of Artificial Sequence: Synthetic oligonucleotide
acacgagatttata

SEQ ID NO: 25211 - DNA, 14 bp, Artificial Sequence
  Description of Artificial Sequence: Synthetic oligonucleotide
aacacgagatttat

SEQ ID NO: 25212 - DNA, 14 bp, Artificial Sequence
  Description of Artificial Sequence: Synthetic oligonucleotide
taacacgagattta

SEQ ID NO: 25213 - DNA, 14 bp, Artificial Sequence
  Description of Artificial Sequence: Synthetic oligonucleotide
ttaacacgagattt

SEQ ID NO: 25214 - DNA, 14 bp, Artificial Sequence
  Description of Artificial Sequence: Synthetic oligonucleotide
gttaacacgagatt

SEQ ID NO: 25215 - DNA, 14 bp, Artificial Sequence
  Description of Artificial Sequence: Synthetic oligonucleotide
agttaacacgagat

SEQ ID NO: 25216 - DNA, 14 bp, Artificial Sequence
  Description of Artificial Sequence: Synthetic oligonucleotide
cagttaacacgaga

SEQ ID NO: 25217 - DNA, 14 bp, Artificial Sequence
  Description of Artificial Sequence: Synthetic oligonucleotide
tcagttaacacgag

SEQ ID NO: 25218 - DNA, 14 bp, Artificial Sequence
  Description of Artificial Sequence: Synthetic oligonucleotide
ttcagttaacacga

SEQ ID NO: 25219 - DNA, 14 bp, Artificial Sequence
  Description of Artificial Sequence: Synthetic oligonucleotide
tttcagttaacacg

SEQ ID NO: 25220 - DNA, 14 bp, Artificial Sequence
  Description of Artificial Sequence: Synthetic oligonucleotide
atttcagttaacac

SEQ ID NO: 25221 - DNA, 14 bp, Artificial Sequence
  Description of Artificial Sequence: Synthetic oligonucleotide
aatttcagttaaca

SEQ ID NO: 25222 - DNA, 14 bp, Artificial Sequence
  Description of Artificial Sequence: Synthetic oligonucleotide
aaatttcagttaac

SEQ ID NO: 25223 - DNA, 14 bp, Artificial Sequence
  Description of Artificial Sequence: Synthetic oligonucleotide
aaaatttcagttaa

SEQ ID NO: 25224 - DNA, 14 bp, Artificial Sequence
  Description of Artificial Sequence: Synthetic oligonucleotide
aaaaatttcagtta

SEQ ID NO: 25225 - DNA, 14 bp, Artificial Sequence
  Description of Artificial Sequence: Synthetic oligonucleotide
aaaaaatttcagtt

SEQ ID NO: 25226 - DNA, 14 bp, Artificial Sequence
  Description of Artificial Sequence: Synthetic oligonucleotide
aaaaaaatttcagt

SEQ ID NO: 25227 - DNA, 14 bp, Artificial Sequence
  Description of Artificial Sequence: Synthetic oligonucleotide
aaaaaaaatttcag

SEQ ID NO: 25228 - DNA, 14 bp, Artificial Sequence
  Description of Artificial Sequence: Synthetic oligonucleotide
taaaaaaaatttca

SEQ ID NO: 25229 - DNA, 14 bp, Artificial Sequence
  Description of Artificial Sequence: Synthetic oligonucleotide
ttaaaaaaaatttc

SEQ ID NO: 25230 - DNA, 14 bp, Artificial Sequence
  Description of Artificial Sequence: Synthetic oligonucleotide
tttaaaaaaaattt

SEQ ID NO: 25231 - DNA, 14 bp, Artificial Sequence
  Description of Artificial Sequence: Synthetic oligonucleotide
atttaaaaaaaatt

SEQ ID NO: 25232 - DNA, 14 bp, Artificial Sequence
  Description of Artificial Sequence: Synthetic oligonucleotide
tatttaaaaaaaat

SEQ ID NO: 25233 - DNA, 14 bp, Artificial Sequence
  Description of Artificial Sequence: Synthetic oligonucleotide
atatttaaaaaaaa

SEQ ID NO: 25234 - DNA, 14 bp, Artificial Sequence
  Description of Artificial Sequence: Synthetic oligonucleotide
tatatttaaaaaaa

SEQ ID NO: 25235 - DNA, 14 bp, Artificial Sequence
  Description of Artificial Sequence: Synthetic oligonucleotide
atatatttaaaaaa

SEQ ID NO: 25236 - DNA, 14 bp, Artificial Sequence
  Description of Artificial Sequence: Synthetic oligonucleotide
aatatatttaaaaa

SEQ ID NO: 25237 - DNA, 14 bp, Artificial Sequence
  Description of Artificial Sequence: Synthetic oligonucleotide
aaatatatttaaaa

SEQ ID NO: 25238 - DNA, 14 bp, Artificial Sequence
  Description of Artificial Sequence: Synthetic oligonucleotide
aaaatatatttaaa

SEQ ID NO: 25239 - DNA, 14 bp, Artificial Sequence
  Description of Artificial Sequence: Synthetic oligonucleotide
aaaaatatatttaa

SEQ ID NO: 25240 - DNA, 14 bp, Artificial Sequence
  Description of Artificial Sequence: Synthetic oligonucleotide
aaaaaatatattta

SEQ ID NO: 25241 - DNA, 14 bp, Artificial Sequence
  Description of Artificial Sequence: Synthetic oligonucleotide
taaaaaatatattt

SEQ ID NO: 25242 - DNA, 14 bp, Artificial Sequence
  Description of Artificial Sequence: Synthetic oligonucleotide
ctaaaaaatatatt

SEQ ID NO: 25243 - DNA, 14 bp, Artificial Sequence
  Description of Artificial Sequence: Synthetic oligonucleotide
tctaaaaaatatat

SEQ ID NO: 25244 - DNA, 14 bp, Artificial Sequence
  Description of Artificial Sequence: Synthetic oligonucleotide
atctaaaaaatata

SEQ ID NO: 25245 - DNA, 14 bp, Artificial Sequence
  Description of Artificial Sequence: Synthetic oligonucleotide
aatctaaaaaatat

SEQ ID NO: 25246 - DNA, 14 bp, Artificial Sequence
  Description of Artificial Sequence: Synthetic oligonucleotide
caatctaaaaaata

SEQ ID NO: 25247 - DNA, 14 bp, Artificial Sequence
  Description of Artificial Sequence: Synthetic oligonucleotide
ccaatctaaaaaat

SEQ ID NO: 25248 - DNA, 14 bp, Artificial Sequence
  Description of Artificial Sequence: Synthetic oligonucleotide
accaatctaaaaaa

SEQ ID NO: 25249 - DNA, 14 bp, Artificial Sequence
  Description of Artificial Sequence: Synthetic oligonucleotide
taccaatctaaaaa

SEQ ID NO: 25250 - DNA, 14 bp, Artificial Sequence
  Description of Artificial Sequence: Synthetic oligonucleotide
ttaccaatctaaaa

SEQ ID NO: 25251 - DNA, 14 bp, Artificial Sequence
  Description of Artificial Sequence: Synthetic oligonucleotide
attaccaatctaaa

SEQ ID NO: 25252 - DNA, 14 bp, Artificial Sequence
  Description of Artificial Sequence: Synthetic oligonucleotide
tattaccaatctaa

SEQ ID NO: 25253 - DNA, 14 bp, Artificial Sequence
  Description of Artificial Sequence: Synthetic oligonucleotide
atattaccaatcta

SEQ ID NO: 25254 - DNA, 14 bp, Artificial Sequence
  Description of Artificial Sequence: Synthetic oligonucleotide
aatattaccaatct

SEQ ID NO: 25255 - DNA, 14 bp, Artificial Sequence
  Description of Artificial Sequence: Synthetic oligonucleotide
aaatattaccaatc

SEQ ID NO: 25256 - DNA, 14 bp, Artificial Sequence
  Description of Artificial Sequence: Synthetic oligonucleotide
taaatattaccaat

SEQ ID NO: 25257 - DNA, 14 bp, Artificial Sequence
  Description of Artificial Sequence: Synthetic oligonucleotide
ttaaatattaccaa

SEQ ID NO: 25258 - DNA, 14 bp, Artificial Sequence
  Description of Artificial Sequence: Synthetic oligonucleotide
tttaaatattacca

SEQ ID NO: 25259 - DNA, 14 bp, Artificial Sequence
  Description of Artificial Sequence: Synthetic oligonucleotide
gtttaaatattacc

SEQ ID NO: 25260 - DNA, 14 bp, Artificial Sequence
  Description of Artificial Sequence: Synthetic oligonucleotide
ggtttaaatattac

SEQ ID NO: 25261 - DNA, 14 bp, Artificial Sequence
  Description of Artificial Sequence: Synthetic oligonucleotide
tggtttaaatatta

SEQ ID NO: 25262 - DNA, 14 bp, Artificial Sequence
  Description of Artificial Sequence: Synthetic oligonucleotide
ctggtttaaatatt

SEQ ID NO: 25263 - DNA, 14 bp, Artificial Sequence
  Description of Artificial Sequence: Synthetic oligonucleotide
gctggtttaaatat

SEQ ID NO: 25264 - DNA, 14 bp, Artificial Sequence
  Description of Artificial Sequence: Synthetic oligonucleotide
tgctggtttaaata

SEQ ID NO: 25265 - DNA, 14 bp, Artificial Sequence
  Description of Artificial Sequence: Synthetic oligonucleotide
ttgctggtttaaat

SEQ ID NO: 25266 - DNA, 14 bp, Artificial Sequence
  Description of Artificial Sequence: Synthetic oligonucleotide
tttgctggtttaaa

SEQ ID NO: 25267 - DNA, 14 bp, Artificial Sequence
  Description of Artificial Sequence: Synthetic oligonucleotide
atttgctggtttaa

SEQ ID NO: 25268 - DNA, 14 bp, Artificial Sequence
  Description of Artificial Sequence: Synthetic oligonucleotide
tatttgctggttta

SEQ ID NO: 25269 - DNA, 14 bp, Artificial Sequence
  Description of Artificial Sequence: Synthetic oligonucleotide
gtatttgctggttt

SEQ ID NO: 25270 - DNA, 14 bp, Artificial Sequence
  Description of Artificial Sequence: Synthetic oligonucleotide
agtatttgctggtt

SEQ ID NO: 25271 - DNA, 14 bp, Artificial Sequence
  Description of Artificial Sequence: Synthetic oligonucleotide
aagtatttgctggt

SEQ ID NO: 25272 - DNA, 14 bp, Artificial Sequence
  Description of Artificial Sequence: Synthetic oligonucleotide
taagtatttgctgg

SEQ ID NO: 25273 - DNA, 14 bp, Artificial Sequence
  Description of Artificial Sequence: Synthetic oligonucleotide
ttaagtatttgctg

SEQ ID NO: 25274 - DNA, 14 bp, Artificial Sequence
  Description of Artificial Sequence: Synthetic oligonucleotide
tttaagtatttgct

SEQ ID NO: 25275 - DNA, 14 bp, Artificial Sequence
  Description of Artificial Sequence: Synthetic oligonucleotide
ctttaagtatttgc

SEQ ID NO: 25276 - DNA, 14 bp, Artificial Sequence
  Description of Artificial Sequence: Synthetic oligonucleotide
gctttaagtatttg

SEQ ID NO: 25277 - DNA, 14 bp, Artificial Sequence
  Description of Artificial Sequence: Synthetic oligonucleotide
agctttaagtattt

SEQ ID NO: 25278 - DNA, 14 bp, Artificial Sequence
  Description of Artificial Sequence: Synthetic oligonucleotide
aagctttaagtatt

SEQ ID NO: 25279 - DNA, 14 bp, Artificial Sequence
  Description of Artificial Sequence: Synthetic oligonucleotide
aaagctttaagtat

SEQ ID NO: 25280 - DNA, 14 bp, Artificial Sequence
  Description of Artificial Sequence: Synthetic oligonucleotide
taaagctttaagta

SEQ ID NO: 25281 - DNA, 14 bp, Artificial Sequence
  Description of Artificial Sequence: Synthetic oligonucleotide
ataaagctttaagt

SEQ ID NO: 25282 - DNA, 14 bp, Artificial Sequence
  Description of Artificial Sequence: Synthetic oligonucleotide
aataaagctttaag

SEQ ID NO: 25283 - DNA, 14 bp, Artificial Sequence
  Description of Artificial Sequence: Synthetic oligonucleotide
taataaagctttaa

SEQ ID NO: 25284 - DNA, 14 bp, Artificial Sequence
  Description of Artificial Sequence: Synthetic oligonucleotide
ttaataaagcttta

SEQ ID NO: 25285 - DNA, 14 bp, Artificial Sequence
  Description of Artificial Sequence: Synthetic oligonucleotide
tttaataaagcttt

SEQ ID NO: 25286 - DNA, 14 bp, Artificial Sequence
  Description of Artificial Sequence: Synthetic oligonucleotide
gtttaataaagctt

SEQ ID NO: 25287 - DNA, 14 bp, Artificial Sequence
  Description of Artificial Sequence: Synthetic oligonucleotide
tgtttaataaagct

SEQ ID NO: 25288 - DNA, 14 bp, Artificial Sequence
  Description of Artificial Sequence: Synthetic oligonucleotide
atgtttaataaagc

SEQ ID NO: 25289 - DNA, 14 bp, Artificial Sequence
  Description of Artificial Sequence: Synthetic oligonucleotide
aatgtttaataaag

SEQ ID NO: 25290 - DNA, 14 bp, Artificial Sequence
  Description of Artificial Sequence: Synthetic oligonucleotide
aaatgtttaataaa

SEQ ID NO: 25291 - DNA, 14 bp, Artificial Sequence
  Description of Artificial Sequence: Synthetic oligonucleotide
aaaatgtttaataa

SEQ ID NO: 25292 - DNA, 14 bp, Artificial Sequence
  Description of Artificial Sequence: Synthetic oligonucleotide
taaaatgtttaata

SEQ ID NO: 25293 - DNA, 14 bp, Artificial Sequence
  Description of Artificial Sequence: Synthetic oligonucleotide
ttaaaatgtttaat

SEQ ID NO: 25294 - DNA, 14 bp, Artificial Sequence
  Description of Artificial Sequence: Synthetic oligonucleotide
attaaaatgtttaa

SEQ ID NO: 25295 - DNA, 14 bp, Artificial Sequence
  Description of Artificial Sequence: Synthetic oligonucleotide
gattaaaatgttta

SEQ ID NO: 25296 - DNA, 14 bp, Artificial Sequence
  Description of Artificial Sequence: Synthetic oligonucleotide
tgattaaaatgttt

SEQ ID NO: 25297 - DNA, 14 bp, Artificial Sequence
  Description of Artificial Sequence: Synthetic oligonucleotide
ctgattaaaatgtt

SEQ ID NO: 25298 - DNA, 14 bp, Artificial Sequence
  Description of Artificial Sequence: Synthetic oligonucleotide
tctgattaaaatgt

SEQ ID NO: 25299 - DNA, 14 bp, Artificial Sequence
  Description of Artificial Sequence: Synthetic oligonucleotide
atctgattaaaatg

SEQ ID NO: 25300 - DNA, 14 bp, Artificial Sequence
  Description of Artificial Sequence: Synthetic oligonucleotide
tatctgattaaaat

SEQ ID NO: 25301 - DNA, 14 bp, Artificial Sequence
  Description of Artificial Sequence: Synthetic oligonucleotide
ttatctgattaaaa

SEQ ID NO: 25302 - DNA, 14 bp, Artificial Sequence
  Description of Artificial Sequence: Synthetic oligonucleotide
cttatctgattaaa

SEQ ID NO: 25303 - DNA, 14 bp, Artificial Sequence
  Description of Artificial Sequence: Synthetic oligonucleotide
acttatctgattaa

SEQ ID NO: 25304 - DNA, 14 bp, Artificial Sequence
  Description of Artificial Sequence: Synthetic oligonucleotide
cacttatctgatta

SEQ ID NO: 25305 - DNA, 14 bp, Artificial Sequence
  Description of Artificial Sequence: Synthetic oligonucleotide
tcacttatctgatt

SEQ ID NO: 25306 - DNA, 14 bp, Artificial Sequence
  Description of Artificial Sequence: Synthetic oligonucleotide
ctcacttatctgat

SEQ ID NO: 25307 - DNA, 14 bp, Artificial Sequence
  Description of Artificial Sequence: Synthetic oligonucleotide
actcacttatctga

SEQ ID NO: 25308 - DNA, 14 bp, Artificial Sequence
  Description of Artificial Sequence: Synthetic oligonucleotide
tactcacttatctg

SEQ ID NO: 25309 - DNA, 14 bp, Artificial Sequence
  Description of Artificial Sequence: Synthetic oligonucleotide
ttactcacttatct

SEQ ID NO: 25310 - DNA, 14 bp, Artificial Sequence
  Description of Artificial Sequence: Synthetic oligonucleotide
tttactcacttatc

SEQ ID NO: 25311 - DNA, 14 bp, Artificial Sequence
  Description of Artificial Sequence: Synthetic oligonucleotide
ctttactcacttat

SEQ ID NO: 25312 - DNA, 14 bp, Artificial Sequence
  Description of Artificial Sequence: Synthetic oligonucleotide
gctttactcactta

SEQ ID NO: 25313 - DNA, 14 bp, Artificial Sequence
  Description of Artificial Sequence: Synthetic oligonucleotide
agctttactcactt

SEQ ID NO: 25314 - DNA, 14 bp, Artificial Sequence
  Description of Artificial Sequence: Synthetic oligonucleotide
aagctttactcact

SEQ ID NO: 25315 - DNA, 14 bp, Artificial Sequence
  Description of Artificial Sequence: Synthetic oligonucleotide
aaagctttactcac

SEQ ID NO: 25316 - DNA, 14 bp, Artificial Sequence
  Description of Artificial Sequence: Synthetic oligonucleotide
aaaagctttactca

SEQ ID NO: 25317 - DNA, 14 bp, Artificial Sequence
  Description of Artificial Sequence: Synthetic oligonucleotide
taaaagctttactc

SEQ ID NO: 25318 - DNA, 14 bp, Artificial Sequence
  Description of Artificial Sequence: Synthetic oligonucleotide
ataaaagctttact

SEQ ID NO: 25319 - DNA, 14 bp, Artificial Sequence
  Description of Artificial Sequence: Synthetic oligonucleotide
aataaaagctttac

SEQ ID NO: 25320 - DNA, 14 bp, Artificial Sequence
  Description of Artificial Sequence: Synthetic oligonucleotide
aaataaaagcttta

SEQ ID NO: 25321 - DNA, 14 bp, Artificial Sequence
  Description of Artificial Sequence: Synthetic oligonucleotide
caaataaaagcttt

SEQ ID NO: 25322 - DNA, 14 bp, Artificial Sequence
  Description of Artificial Sequence: Synthetic oligonucleotide
gcaaataaaagctt

SEQ ID NO: 25323 - DNA, 14 bp, Artificial Sequence
  Description of Artificial Sequence: Synthetic oligonucleotide
ggcaaataaaagct

SEQ ID NO: 25324 - DNA, 14 bp, Artificial Sequence
  Description of Artificial Sequence: Synthetic oligonucleotide
tggcaaataaaagc

SEQ ID NO: 25325 - DNA, 14 bp, Artificial Sequence
  Description of Artificial Sequence: Synthetic oligonucleotide
atggcaaataaaag

SEQ ID NO: 25326 - DNA, 14 bp, Artificial Sequence
  Description of Artificial Sequence: Synthetic oligonucleotide
aatggcaaataaaa

SEQ ID NO: 25327 - DNA, 14 bp, Artificial Sequence
  Description of Artificial Sequence: Synthetic oligonucleotide
aaatggcaaataaa

SEQ ID NO: 25328 - DNA, 14 bp, Artificial Sequence
  Description of Artificial Sequence: Synthetic oligonucleotide
caaatggcaaataa

SEQ ID NO: 25329 - DNA, 14 bp, Artificial Sequence
  Description of Artificial Sequence: Synthetic oligonucleotide
ccaaatggcaaata

SEQ ID NO: 25330 - DNA, 14 bp, Artificial Sequence
  Description of Artificial Sequence: Synthetic oligonucleotide
tccaaatggcaaat

SEQ ID NO: 25331 - DNA, 14 bp, Artificial Sequence
  Description of Artificial Sequence: Synthetic oligonucleotide
atccaaatggcaaa

SEQ ID NO: 25332 - DNA, 14 bp, Artificial Sequence
  Description of Artificial Sequence: Synthetic oligonucleotide
catccaaatggcaa

SEQ ID NO: 25333 - DNA, 14 bp, Artificial Sequence
  Description of Artificial Sequence: Synthetic oligonucleotide
gcatccaaatggca

SEQ ID NO: 25334 - DNA, 14 bp, Artificial Sequence
  Description of Artificial Sequence: Synthetic oligonucleotide
ggcatccaaatggc

SEQ ID NO: 25335 - DNA, 14 bp, Artificial Sequence
  Description of Artificial Sequence: Synthetic oligonucleotide
aggcatccaaatgg

SEQ ID NO: 25336 - DNA, 14 bp, Artificial Sequence
  Description of Artificial Sequence: Synthetic oligonucleotide
aaggcatccaaatg

SEQ ID NO: 25337 - DNA, 14 bp, Artificial Sequence
  Description of Artificial Sequence: Synthetic oligonucleotide
gaaggcatccaaat

SEQ ID NO: 25338 - DNA, 14 bp, Artificial Sequence
  Description of Artificial Sequence: Synthetic oligonucleotide
cgaaggcatccaaa

SEQ ID NO: 25339 - DNA, 14 bp, Artificial Sequence
  Description of Artificial Sequence: Synthetic oligonucleotide
acgaaggcatccaa

SEQ ID NO: 25340 - DNA, 14 bp, Artificial Sequence
  Description of Artificial Sequence: Synthetic oligonucleotide
aacgaaggcatcca

SEQ ID NO: 25341 - DNA, 14 bp, Artificial Sequence
  Description of Artificial Sequence: Synthetic oligonucleotide
gaacgaaggcatcc

SEQ ID NO: 25342 - DNA, 14 bp, Artificial Sequence
  Description of Artificial Sequence: Synthetic oligonucleotide
tgaacgaaggcatc

SEQ ID NO: 25343 - DNA, 14 bp, Artificial Sequence
  Description of Artificial Sequence: Synthetic oligonucleotide
ttgaacgaaggcat

SEQ ID NO: 25344 - DNA, 14 bp, Artificial Sequence
  Description of Artificial Sequence: Synthetic oligonucleotide
tttgaacgaaggca

SEQ ID NO: 25345 - DNA, 14 bp, Artificial Sequence
  Description of Artificial Sequence: Synthetic oligonucleotide
ctttgaacgaaggc

SEQ ID NO: 25346 - DNA, 14 bp, Artificial Sequence
  Description of Artificial Sequence: Synthetic oligonucleotide
actttgaacgaagg

SEQ ID NO: 25347 - DNA, 14 bp, Artificial Sequence
  Description of Artificial Sequence: Synthetic oligonucleotide
cactttgaacgaag

SEQ ID NO: 25348 - DNA, 14 bp, Artificial Sequence
  Description of Artificial Sequence: Synthetic oligonucleotide
tcactttgaacgaa

SEQ ID NO: 25349 - DNA, 14 bp, Artificial Sequence
  Description of Artificial Sequence: Synthetic oligonucleotide
atcactttgaacga

SEQ ID NO: 25350 - DNA, 14 bp, Artificial Sequence
  Description of Artificial Sequence: Synthetic oligonucleotide
tatcactttgaacg

SEQ ID NO: 25351 - DNA, 14 bp, Artificial Sequence
  Description of Artificial Sequence: Synthetic oligonucleotide
ctatcactttgaac

SEQ ID NO: 25352 - DNA, 14 bp, Artificial Sequence
  Description of Artificial Sequence: Synthetic oligonucleotide
tctatcactttgaa

SEQ ID NO: 25353 - DNA, 14 bp, Artificial Sequence
  Description of Artificial Sequence: Synthetic oligonucleotide
ctctatcactttga

SEQ ID NO: 25354 - DNA, 14 bp, Artificial Sequence
  Description of Artificial Sequence: Synthetic oligonucleotide
actctatcactttg

SEQ ID NO: 25355 - DNA, 14 bp, Artificial Sequence
  Description of Artificial Sequence: Synthetic oligonucleotide
cactctatcacttt

SEQ ID NO: 25356 - DNA, 14 bp, Artificial Sequence
  Description of Artificial Sequence: Synthetic oligonucleotide
acactctatcactt

SEQ ID NO: 25357 - DNA, 14 bp, Artificial Sequence
  Description of Artificial Sequence: Synthetic oligonucleotide
aacactctatcact

SEQ ID NO: 25358 - DNA, 14 bp, Artificial Sequence
  Description of Artificial Sequence: Synthetic oligonucleotide
aaacactctatcac

SEQ ID NO: 25359 - DNA, 14 bp, Artificial Sequence
  Description of Artificial Sequence: Synthetic oligonucleotide
aaaacactctatca

SEQ ID NO: 25360 - DNA, 14 bp, Artificial Sequence
  Description of Artificial Sequence: Synthetic oligonucleotide
caaaacactctatc

SEQ ID NO: 25361 - DNA, 14 bp, Artificial Sequence
  Description of Artificial Sequence: Synthetic oligonucleotide
gcaaaacactctat

SEQ ID NO: 25362 - DNA, 14 bp, Artificial Sequence
  Description of Artificial Sequence: Synthetic oligonucleotide
agcaaaacactcta

SEQ ID NO: 25363 - DNA, 14 bp, Artificial Sequence
  Description of Artificial Sequence: Synthetic oligonucleotide
cagcaaaacactct

SEQ ID NO: 25364 - DNA, 14 bp, Artificial Sequence
  Description of Artificial Sequence: Synthetic oligonucleotide
tcagcaaaacactc

SEQ ID NO: 25365 - DNA, 14 bp, Artificial Sequence
  Description of Artificial Sequence: Synthetic oligonucleotide
atcagcaaaacact

SEQ ID NO: 25366 - DNA, 14 bp, Artificial Sequence
  Description of Artificial Sequence: Synthetic oligonucleotide
tatcagcaaaacac

SEQ ID NO: 25367 - DNA, 14 bp, Artificial Sequence
  Description of Artificial Sequence: Synthetic oligonucleotide
ctatcagcaaaaca

SEQ ID NO: 25368 - DNA, 14 bp, Artificial Sequence
  Description of Artificial Sequence: Synthetic oligonucleotide
actatcagcaaaac

SEQ ID NO: 25369 - DNA, 14 bp, Artificial Sequence
  Description of Artificial Sequence: Synthetic oligonucleotide
cactatcagcaaaa

SEQ ID NO: 25370 - DNA, 14 bp, Artificial Sequence
  Description of Artificial Sequence: Synthetic oligonucleotide
gcactatcagcaaa

SEQ ID NO: 25371 - DNA, 14 bp, Artificial Sequence
  Description of Artificial Sequence: Synthetic oligonucleotide
agcactatcagcaa

SEQ ID NO: 25372 - DNA, 14 bp, Artificial Sequence
  Description of Artificial Sequence: Synthetic oligonucleotide
cagcactatcagca

SEQ ID NO: 25373 - DNA, 14 bp, Artificial Sequence
  Description of Artificial Sequence: Synthetic oligonucleotide
acagcactatcagc

SEQ ID NO: 25374 - DNA, 14 bp, Artificial Sequence
  Description of Artificial Sequence: Synthetic oligonucleotide
tacagcactatcag

SEQ ID NO: 25375 - DNA, 14 bp, Artificial Sequence
  Description of Artificial Sequence: Synthetic oligonucleotide
ctacagcactatca

SEQ ID NO: 25376 - DNA, 14 bp, Artificial Sequence
  Description of Artificial Sequence: Synthetic oligonucleotide
gctacagcactatc

SEQ ID NO: 25377 - DNA, 14 bp, Artificial Sequence
  Description of Artificial Sequence: Synthetic oligonucleotide
tgctacagcactat

SEQ ID NO: 25378 - DNA, 14 bp, Artificial Sequence
  Description of Artificial Sequence: Synthetic oligonucleotide
ctgctacagcacta

SEQ ID NO: 25379 - DNA, 14 bp, Artificial Sequence
  Description of Artificial Sequence: Synthetic oligonucleotide
gctgctacagcact

SEQ ID NO: 25380 - DNA, 14 bp, Artificial Sequence
  Description of Artificial Sequence: Synthetic oligonucleotide
tgctgctacagcac

SEQ ID NO: 25381 - DNA, 14 bp, Artificial Sequence
  Description of Artificial Sequence: Synthetic oligonucleotide
ctgctgctacagca

SEQ ID NO: 25382 - DNA, 14 bp, Artificial Sequence
  Description of Artificial Sequence: Synthetic oligonucleotide
actgctgctacagc

SEQ ID NO: 25383 - DNA, 14 bp, Artificial Sequence
  Description of Artificial Sequence: Synthetic oligonucleotide
aactgctgctacag

SEQ ID NO: 25384 - DNA, 14 bp, Artificial Sequence
  Description of Artificial Sequence: Synthetic oligonucleotide
caactgctgctaca

SEQ ID NO: 25385 - DNA, 14 bp, Artificial Sequence
  Description of Artificial Sequence: Synthetic oligonucleotide
acaactgctgctac

SEQ ID NO: 25386 - DNA, 14 bp, Artificial Sequence
  Description of Artificial Sequence: Synthetic oligonucleotide
tacaactgctgcta

SEQ ID NO: 25387 - DNA, 14 bp, Artificial Sequence
  Description of Artificial Sequence: Synthetic oligonucleotide
ttacaactgctgct

SEQ ID NO: 25388 - DNA, 14 bp, Artificial Sequence
  Description of Artificial Sequence: Synthetic oligonucleotide
tttacaactgctgc

SEQ ID NO: 25389 - DNA, 14 bp, Artificial Sequence
  Description of Artificial Sequence: Synthetic oligonucleotide
ctttacaactgctg

SEQ ID NO: 25390 - DNA, 14 bp, Artificial Sequence
  Description of Artificial Sequence: Synthetic oligonucleotide
actttacaactgct

SEQ ID NO: 25391 - DNA, 14 bp, Artificial Sequence
  Description of Artificial Sequence: Synthetic oligonucleotide
tactttacaactgc

SEQ ID NO: 25392 - DNA, 14 bp, Artificial Sequence
  Description of Artificial Sequence: Synthetic oligonucleotide
ctactttacaactg

SEQ ID NO: 25393 - DNA, 14 bp, Artificial Sequence
  Description of Artificial Sequence: Synthetic oligonucleotide
gctactttacaact

SEQ ID NO: 25394 - DNA, 14 bp, Artificial Sequence
  Description of Artificial Sequence: Synthetic oligonucleotide
ggctactttacaac

SEQ ID NO: 25395 - DNA, 14 bp, Artificial Sequence
  Description of Artificial Sequence: Synthetic oligonucleotide
tggctactttacaa

SEQ ID NO: 25396 - DNA, 14 bp, Artificial Sequence
  Description of Artificial Sequence: Synthetic oligonucleotide
ttggctactttaca

SEQ ID NO: 25397 - DNA, 14 bp, Artificial Sequence
  Description of Artificial Sequence: Synthetic oligonucleotide
tttggctactttac

SEQ ID NO: 25398 - DNA, 14 bp, Artificial Sequence
  Description of Artificial Sequence: Synthetic oligonucleotide
ttttggctacttta

SEQ ID NO: 25399 - DNA, 14 bp, Artificial Sequence
  Description of Artificial Sequence: Synthetic oligonucleotide
cttttggctacttt

SEQ ID NO: 25400 - DNA, 14 bp, Artificial Sequence
  Description of Artificial Sequence: Synthetic oligonucleotide
gcttttggctactt

SEQ ID NO: 25401 - DNA, 14 bp, Artificial Sequence
  Description of Artificial Sequence: Synthetic oligonucleotide
ggcttttggctact

SEQ ID NO: 25402 - DNA, 14 bp, Artificial Sequence
  Description of Artificial Sequence: Synthetic oligonucleotide
tggcttttggctac

SEQ ID NO: 25403 - DNA, 14 bp, Artificial Sequence
  Description of Artificial Sequence: Synthetic oligonucleotide
gtggcttttggcta

SEQ ID NO: 25404 - DNA, 14 bp, Artificial Sequence
  Description of Artificial Sequence: Synthetic oligonucleotide
cgtggcttttggct

SEQ ID NO: 25405 - DNA, 14 bp, Artificial Sequence
  Description of Artificial Sequence: Synthetic oligonucleotide
acgtggcttttggc

SEQ ID NO: 25406 - DNA, 14 bp, Artificial Sequence
  Description of Artificial Sequence: Synthetic oligonucleotide
aacgtggcttttgg

SEQ ID NO: 25407 - DNA, 14 bp, Artificial Sequence
  Description of Artificial Sequence: Synthetic oligonucleotide
caacgtggcttttg

SEQ ID NO: 25408 - DNA, 14 bp, Artificial Sequence
  Description of Artificial Sequence: Synthetic oligonucleotide
acaacgtggctttt

SEQ ID NO: 25409 - DNA, 14 bp, Artificial Sequence
  Description of Artificial Sequence: Synthetic oligonucleotide
aacaacgtggcttt

SEQ ID NO: 25410 - DNA, 14 bp, Artificial Sequence
  Description of Artificial Sequence: Synthetic oligonucleotide
aaacaacgtggctt

SEQ ID NO: 25411 - DNA, 14 bp, Artificial Sequence
  Description of Artificial Sequence: Synthetic oligonucleotide
taaacaacgtggct

SEQ ID NO: 25412 - DNA, 14 bp, Artificial Sequence
  Description of Artificial Sequence: Synthetic oligonucleotide
ataaacaacgtggc

SEQ ID NO: 25413 - DNA, 14 bp, Artificial Sequence
  Description of Artificial Sequence: Synthetic oligonucleotide
aataaacaacgtgg

SEQ ID NO: 25414 - DNA, 14 bp, Artificial Sequence
  Description of Artificial Sequence: Synthetic oligonucleotide
aaataaacaacgtg

SEQ ID NO: 25415 - DNA, 14 bp, Artificial Sequence
  Description of Artificial Sequence: Synthetic oligonucleotide
taaataaacaacgt

SEQ ID NO: 25416 - DNA, 14 bp, Artificial Sequence
  Description of Artificial Sequence: Synthetic oligonucleotide
gtaaataaacaacg

SEQ ID NO: 25417 - DNA, 14 bp, Artificial Sequence
  Description of Artificial Sequence: Synthetic oligonucleotide
agtaaataaacaac

SEQ ID NO: 25418 - DNA, 14 bp, Artificial Sequence
  Description of Artificial Sequence: Synthetic oligonucleotide
cagtaaataaacaa

SEQ ID NO: 25419 - DNA, 14 bp, Artificial Sequence
  Description of Artificial Sequence: Synthetic oligonucleotide
ccagtaaataaaca

SEQ ID NO: 25420 - DNA, 14 bp, Artificial Sequence
  Description of Artificial Sequence: Synthetic oligonucleotide
accagtaaataaac

SEQ ID NO: 25421 - DNA, 14 bp, Artificial Sequence
  Description of Artificial Sequence: Synthetic oligonucleotide
aaccagtaaataaa

SEQ ID NO: 25422 - DNA, 14 bp, Artificial Sequence
  Description of Artificial Sequence: Synthetic oligonucleotide
aaaccagtaaataa

SEQ ID NO: 25423 - DNA, 14 bp, Artificial Sequence
  Description of Artificial Sequence: Synthetic oligonucleotide
caaaccagtaaata

SEQ ID NO: 25424 - DNA, 14 bp, Artificial Sequence
  Description of Artificial Sequence: Synthetic oligonucleotide
acaaaccagtaaat

SEQ ID NO: 25425 - DNA, 14 bp, Artificial Sequence
  Description of Artificial Sequence: Synthetic oligonucleotide
cacaaaccagtaaa

SEQ ID NO: 25426 - DNA, 14 bp, Artificial Sequence
  Description of Artificial Sequence: Synthetic oligonucleotide
ccacaaaccagtaa

SEQ ID NO: 25427 - DNA, 14 bp, Artificial Sequence
  Description of Artificial Sequence: Synthetic oligonucleotide
gccacaaaccagta

SEQ ID NO: 25428 - DNA, 14 bp, Artificial Sequence
  Description of Artificial Sequence: Synthetic oligonucleotide
ggccacaaaccagt

SEQ ID NO: 25429 - DNA, 14 bp, Artificial Sequence
  Description of Artificial Sequence: Synthetic oligonucleotide
aggccacaaaccag

SEQ ID NO: 25430 - DNA, 14 bp, Artificial Sequence
  Description of Artificial Sequence: Synthetic oligonucleotide
aaggccacaaacca

SEQ ID NO: 25431 - DNA, 14 bp, Artificial Sequence
  Description of Artificial Sequence: Synthetic oligonucleotide
aaaggccacaaacc

SEQ ID NO: 25432 - DNA, 14 bp, Artificial Sequence
  Description of Artificial Sequence: Synthetic oligonucleotide
aaaaggccacaaac

SEQ ID NO: 25433 - DNA, 14 bp, Artificial Sequence
  Description of Artificial Sequence: Synthetic oligonucleotide
taaaaggccacaaa

SEQ ID NO: 25434 - DNA, 14 bp, Artificial Sequence
  Description of Artificial Sequence: Synthetic oligonucleotide
gtaaaaggccacaa

SEQ ID NO: 25435 - DNA, 14 bp, Artificial Sequence
  Description of Artificial Sequence: Synthetic oligonucleotide
agtaaaaggccaca

SEQ ID NO: 25436 - DNA, 14 bp, Artificial Sequence
  Description of Artificial Sequence: Synthetic oligonucleotide
cagtaaaaggccac

SEQ ID NO: 25437 - DNA, 14 bp, Artificial Sequence
  Description of Artificial Sequence: Synthetic oligonucleotide
acagtaaaaggcca

SEQ ID NO: 25438 - DNA, 14 bp, Artificial Sequence
  Description of Artificial Sequence: Synthetic oligonucleotide
cacagtaaaaggcc

SEQ ID NO: 25439 - DNA, 14 bp, Artificial Sequence
  Description of Artificial Sequence: Synthetic oligonucleotide
gcacagtaaaaggc

SEQ ID NO: 25440 - DNA, 14 bp, Artificial Sequence
  Description of Artificial Sequence: Synthetic oligonucleotide
agcacagtaaaagg

SEQ ID NO: 25441 - DNA, 14 bp, Artificial Sequence
  Description of Artificial Sequence: Synthetic oligonucleotide
aagcacagtaaaag

SEQ ID NO: 25442 - DNA, 14 bp, Artificial Sequence
  Description of Artificial Sequence: Synthetic oligonucleotide
aaagcacagtaaaa

SEQ ID NO: 25443 - DNA, 14 bp, Artificial Sequence
  Description of Artificial Sequence: Synthetic oligonucleotide
caaagcacagtaaa

SEQ ID NO: 25444 - DNA, 14 bp, Artificial Sequence
  Description of Artificial Sequence: Synthetic oligonucleotide
acaaagcacagtaa

SEQ ID NO: 25445 - DNA, 14 bp, Artificial Sequence
  Description of Artificial Sequence: Synthetic oligonucleotide
tacaaagcacagta

SEQ ID NO: 25446 - DNA, 14 bp, Artificial Sequence
  Description of Artificial Sequence: Synthetic oligonucleotide
atacaaagcacagt

SEQ ID NO: 25447 - DNA, 14 bp, Artificial Sequence
  Description of Artificial Sequence: Synthetic oligonucleotide
gatacaaagcacag

SEQ ID NO: 25448 - DNA, 14 bp, Artificial Sequence
  Description of Artificial Sequence: Synthetic oligonucleotide
tgatacaaagcaca

SEQ ID NO: 25449 - DNA, 14 bp, Artificial Sequence
  Description of Artificial Sequence: Synthetic oligonucleotide
ctgatacaaagcac

SEQ ID NO: 25450 - DNA, 14 bp, Artificial Sequence
  Description of Artificial Sequence: Synthetic oligonucleotide
tctgatacaaagca

SEQ ID NO: 25451 - DNA, 14 bp, Artificial Sequence
  Description of Artificial Sequence: Synthetic oligonucleotide
ctctgatacaaagc

SEQ ID NO: 25452 - DNA, 14 bp, Artificial Sequence
  Description of Artificial Sequence: Synthetic oligonucleotide
actctgatacaaag

SEQ ID NO: 25453 - DNA, 14 bp, Artificial Sequence
  Description of Artificial Sequence: Synthetic oligonucleotide
aactctgatacaaa

SEQ ID NO: 25454 - DNA, 14 bp, Artificial Sequence
  Description of Artificial Sequence: Synthetic oligonucleotide
gaactctgatacaa

SEQ ID NO: 25455 - DNA, 14 bp, Artificial Sequence
  Description of Artificial Sequence: Synthetic oligonucleotide
agaactctgataca

SEQ ID NO: 25456 - DNA, 14 bp, Artificial Sequence
  Description of Artificial Sequence: Synthetic oligonucleotide
aagaactctgatac

SEQ ID NO: 25457 - DNA, 14 bp, Artificial Sequence
  Description of Artificial Sequence: Synthetic oligonucleotide
taagaactctgata

SEQ ID NO: 25458 - DNA, 14 bp, Artificial Sequence
  Description of Artificial Sequence: Synthetic oligonucleotide
ttaagaactctgat

SEQ ID NO: 25459 - DNA, 14 bp, Artificial Sequence
  Description of Artificial Sequence: Synthetic oligonucleotide
gttaagaactctga

SEQ ID NO: 25460 - DNA, 14 bp, Artificial Sequence
  Description of Artificial Sequence: Synthetic oligonucleotide
tgttaagaactctg

SEQ ID NO: 25461 - DNA, 14 bp, Artificial Sequence
  Description of Artificial Sequence: Synthetic oligonucleotide
ttgttaagaactct

SEQ ID NO: 25462 - DNA, 14 bp, Artificial Sequence
  Description of Artificial Sequence: Synthetic oligonucleotide
cttgttaagaactc

SEQ ID NO: 25463 - DNA, 14 bp, Artificial Sequence
  Description of Artificial Sequence: Synthetic oligonucleotide
tcttgttaagaact

SEQ ID NO: 25464 - DNA, 14 bp, Artificial Sequence
  Description of Artificial Sequence: Synthetic oligonucleotide
atcttgttaagaac

SEQ ID NO: 25465 - DNA, 14 bp, Artificial Sequence
  Description of Artificial Sequence: Synthetic oligonucleotide
aatcttgttaagaa

SEQ ID NO: 25466 - DNA, 14 bp, Artificial Sequence
  Description of Artificial Sequence: Synthetic oligonucleotide
taatcttgttaaga

SEQ ID NO: 25467 - DNA, 14 bp, Artificial Sequence
  Description of Artificial Sequence: Synthetic oligonucleotide
ttaatcttgttaag

SEQ ID NO: 25468 - DNA, 14 bp, Artificial Sequence
  Description of Artificial Sequence: Synthetic oligonucleotide
attaatcttgttaa

SEQ ID NO: 25469 - DNA, 14 bp, Artificial Sequence
  Description of Artificial Sequence: Synthetic oligonucleotide
tattaatcttgtta

SEQ ID NO: 25470 - DNA, 14 bp, Artificial Sequence
  Description of Artificial Sequence: Synthetic oligonucleotide
ttattaatcttgtt

SEQ ID NO: 25471 - DNA, 14 bp, Artificial Sequence
  Description of Artificial Sequence: Synthetic oligonucleotide
tttattaatcttgt

SEQ ID NO: 25472 - DNA, 14 bp, Artificial Sequence
  Description of Artificial Sequence: Synthetic oligonucleotide
atttattaatcttg

SEQ ID NO: 25473 - DNA, 14 bp, Artificial Sequence
  Description of Artificial Sequence: Synthetic oligonucleotide
gatttattaatctt

SEQ ID NO: 25474 - DNA, 14 bp, Artificial Sequence
  Description of Artificial Sequence: Synthetic oligonucleotide
tgatttattaatct

SEQ ID NO: 25475 - DNA, 14 bp, Artificial Sequence
  Description of Artificial Sequence: Synthetic oligonucleotide
gtgatttattaatc

SEQ ID NO: 25476 - DNA, 14 bp, Artificial Sequence
  Description of Artificial Sequence: Synthetic oligonucleotide
ggtgatttattaat

SEQ ID NO: 25477 - DNA, 14 bp, Artificial Sequence
  Description of Artificial Sequence: Synthetic oligonucleotide
gggtgatttattaa

SEQ ID NO: 25478 - DNA, 14 bp, Artificial Sequence
  Description of Artificial Sequence: Synthetic oligonucleotide
ggggtgatttatta

SEQ ID NO: 25479 - DNA, 14 bp, Artificial Sequence
  Description of Artificial Sequence: Synthetic oligonucleotide
tggggtgatttatt

SEQ ID NO: 25480 - DNA, 14 bp, Artificial Sequence
  Description of Artificial Sequence: Synthetic oligonucleotide
ctggggtgatttat

SEQ ID NO: 25481 - DNA, 14 bp, Artificial Sequence
  Description of Artificial Sequence: Synthetic oligonucleotide
actggggtgattta

SEQ ID NO: 25482 - DNA, 14 bp, Artificial Sequence
  Description of Artificial Sequence: Synthetic oligonucleotide
gactggggtgattt

SEQ ID NO: 25483 - DNA, 14 bp, Artificial Sequence
  Description of Artificial Sequence: Synthetic oligonucleotide
agactggggtgatt

SEQ ID NO: 25484 - DNA, 14 bp, Artificial Sequence
  Description of Artificial Sequence: Synthetic oligonucleotide
aagactggggtgat

SEQ ID NO: 25485 - DNA, 14 bp, Artificial Sequence
  Description of Artificial Sequence: Synthetic oligonucleotide
taagactggggtga

SEQ ID NO: 25486 - DNA, 14 bp, Artificial Sequence
  Description of Artificial Sequence: Synthetic oligonucleotide
ttaagactggggtg

SEQ ID NO: 25487 - DNA, 14 bp, Artificial Sequence
  Description of Artificial Sequence: Synthetic oligonucleotide
attaagactggggt

SEQ ID NO: 25488 - DNA, 14 bp, Artificial Sequence
  Description of Artificial Sequence: Synthetic oligonucleotide
aattaagactgggg

SEQ ID NO: 25489 - DNA, 14 bp, Artificial Sequence
  Description of Artificial Sequence: Synthetic oligonucleotide
aaattaagactggg

SEQ ID NO: 25490 - DNA, 14 bp, Artificial Sequence
  Description of Artificial Sequence: Synthetic oligonucleotide
aaaattaagactgg

SEQ ID NO: 25491 - DNA, 14 bp, Artificial Sequence
  Description of Artificial Sequence: Synthetic oligonucleotide
aaaaattaagactg

SEQ ID NO: 25492 - DNA, 14 bp, Artificial Sequence
  Description of Artificial Sequence: Synthetic oligonucleotide
taaaaattaagact

SEQ ID NO: 25493 - DNA, 14 bp, Artificial Sequence
  Description of Artificial Sequence: Synthetic oligonucleotide
ttaaaaattaagac

SEQ ID NO: 25494 - DNA, 14 bp, Artificial Sequence
  Description of Artificial Sequence: Synthetic oligonucleotide
tttaaaaattaaga

SEQ ID NO: 25495-30000 - skipped (4506 entries)

SEQ ID NO: 30001 - RNA, 14 nt, Artificial Sequence
  Description of Artificial Sequence: Synthetic oligonucleotide
gcuggcccgcuucu

SEQ ID NO: 30002 - RNA, 14 nt, Artificial Sequence
  Description of Artificial Sequence: Synthetic oligonucleotide
cgcuggcccgcuuc

SEQ ID NO: 30003 - RNA, 14 nt, Artificial Sequence
  Description of Artificial Sequence: Synthetic oligonucleotide
gcgcuggcccgcuu

SEQ ID NO: 30004 - RNA, 14 nt, Artificial Sequence
  Description of Artificial Sequence: Synthetic oligonucleotide
ggcgcuggcccgcu

SEQ ID NO: 30005 - RNA, 14 nt, Artificial Sequence
  Description of Artificial Sequence: Synthetic oligonucleotide
cggcgcuggcccgc

SEQ ID NO: 30006 - RNA, 14 nt, Artificial Sequence
  Description of Artificial Sequence: Synthetic oligonucleotide
gcggcgcuggcccg

SEQ ID NO: 30007 - RNA, 14 nt, Artificial Sequence
  Description of Artificial Sequence: Synthetic oligonucleotide
ggcggcgcuggccc

SEQ ID NO: 30008 - RNA, 14 nt, Artificial Sequence
  Description of Artificial Sequence: Synthetic oligonucleotide
cggcggcgcuggcc

SEQ ID NO: 30009 - RNA, 14 nt, Artificial Sequence
  Description of Artificial Sequence: Synthetic oligonucleotide
ccggcggcgcuggc

SEQ ID NO: 30010 - RNA, 14 nt, Artificial Sequence
  Description of Artificial Sequence: Synthetic oligonucleotide
cccggcggcgcugg

SEQ ID NO: 30011 - RNA, 14 nt, Artificial Sequence
  Description of Artificial Sequence: Synthetic oligonucleotide
ucccggcggcgcug

SEQ ID NO: 30012 - RNA, 14 nt, Artificial Sequence
  Description of Artificial Sequence: Synthetic oligonucleotide
uucccggcggcgcu

SEQ ID NO: 30013 - RNA, 14 nt, Artificial Sequence
  Description of Artificial Sequence: Synthetic oligonucleotide
uuucccggcggcgc

SEQ ID NO: 30014 - RNA, 14 nt, Artificial Sequence
  Description of Artificial Sequence: Synthetic oligonucleotide
cuuucccggcggcg

SEQ ID NO: 30015 - RNA, 14 nt, Artificial Sequence
  Description of Artificial Sequence: Synthetic oligonucleotide
ccuuucccggcggc

SEQ ID NO: 30016 - RNA, 14 nt, Artificial Sequence
  Description of Artificial Sequence: Synthetic oligonucleotide
uccuuucccggcgg

SEQ ID NO: 30017 - RNA, 14 nt, Artificial Sequence
  Description of Artificial Sequence: Synthetic oligonucleotide
cuccuuucccggcg

SEQ ID NO: 30018 - RNA, 14 nt, Artificial Sequence
  Description of Artificial Sequence: Synthetic oligonucleotide
ccuccuuucccggc

SEQ ID NO: 30019 - RNA, 14 nt, Artificial Sequence
  Description of Artificial Sequence: Synthetic oligonucleotide
accuccuuucccgg

SEQ ID NO: 30020 - RNA, 14 nt, Artificial Sequence
  Description of Artificial Sequence: Synthetic oligonucleotide
gaccuccuuucccg

SEQ ID NO: 30021 - RNA, 14 nt, Artificial Sequence
  Description of Artificial Sequence: Synthetic oligonucleotide
cgaccuccuuuccc

SEQ ID NO: 30022 - RNA, 14 nt, Artificial Sequence
  Description of Artificial Sequence: Synthetic oligonucleotide
gcgaccuccuuucc

SEQ ID NO: 30023 - RNA, 14 nt, Artificial Sequence
  Description of Artificial Sequence: Synthetic oligonucleotide
ggcgaccuccuuuc

SEQ ID NO: 30024 - RNA, 14 nt, Artificial Sequence
  Description of Artificial Sequence: Synthetic oligonucleotide
cggcgaccuccuuu

SEQ ID NO: 30025 - RNA, 14 nt, Artificial Sequence
  Description of Artificial Sequence: Synthetic oligonucleotide
gcggcgaccuccuu

SEQ ID NO: 30026 - RNA, 14 nt, Artificial Sequence
  Description of Artificial Sequence: Synthetic oligonucleotide
ggcggcgaccuccu

SEQ ID NO: 30027 - RNA, 14 nt, Artificial Sequence
  Description of Artificial Sequence: Synthetic oligonucleotide
gggcggcgaccucc

SEQ ID NO: 30028 - RNA, 14 nt, Artificial Sequence
  Description of Artificial Sequence: Synthetic oligonucleotide
cgggcggcgaccuc

SEQ ID NO: 30029 - RNA, 14 nt, Artificial Sequence
  Description of Artificial Sequence: Synthetic oligonucleotide
ccgggcggcgaccu

SEQ ID NO: 30030 - DNA, 14 bp, Artificial Sequence
  Description of Artificial Sequence: Synthetic oligonucleotide
cccgggcggcgacc

SEQ ID NO: 30031 - DNA, 14 bp, Artificial Sequence
  Description of Artificial Sequence: Synthetic oligonucleotide
ccccgggcggcgac

SEQ ID NO: 30032 - DNA, 14 bp, Artificial Sequence
  Description of Artificial Sequence: Synthetic oligonucleotide
accccgggcggcga

SEQ ID NO: 30033 - DNA, 14 bp, Artificial Sequence
  Description of Artificial Sequence: Synthetic oligonucleotide
gaccccgggcggcg

SEQ ID NO: 30034 - DNA, 14 bp, Artificial Sequence
  Description of Artificial Sequence: Synthetic oligonucleotide
cgaccccgggcggc

SEQ ID NO: 30035 - DNA, 14 bp, Artificial Sequence
  Description of Artificial Sequence: Synthetic oligonucleotide
gcgaccccgggcgg

SEQ ID NO: 30036 - DNA, 14 bp, Artificial Sequence
  Description of Artificial Sequence: Synthetic oligonucleotide
ggcgaccccgggcg

SEQ ID NO: 30037 - DNA, 14 bp, Artificial Sequence
  Description of Artificial Sequence: Synthetic oligonucleotide
gggcgaccccgggc

SEQ ID NO: 30038 - DNA, 14 bp, Artificial Sequence
  Description of Artificial Sequence: Synthetic oligonucleotide
cgggcgaccccggg

SEQ ID NO: 30039 - DNA, 14 bp, Artificial Sequence
  Description of Artificial Sequence: Synthetic oligonucleotide
ccgggcgaccccgg

SEQ ID NO: 30040 - DNA, 14 bp, Artificial Sequence
  Description of Artificial Sequence: Synthetic oligonucleotide
cccgggcgaccccg

SEQ ID NO: 30041 - DNA, 14 bp, Artificial Sequence
  Description of Artificial Sequence: Synthetic oligonucleotide
gcccgggcgacccc

SEQ ID NO: 30042 - DNA, 14 bp, Artificial Sequence
  Description of Artificial Sequence: Synthetic oligonucleotide
agcccgggcgaccc

SEQ ID NO: 30043 - DNA, 14 bp, Artificial Sequence
  Description of Artificial Sequence: Synthetic oligonucleotide
aagcccgggcgacc

SEQ ID NO: 30044 - DNA, 14 bp, Artificial Sequence
  Description of Artificial Sequence: Synthetic oligonucleotide
caagcccgggcgac

SEQ ID NO: 30045 - DNA, 14 bp, Artificial Sequence
  Description of Artificial Sequence: Synthetic oligonucleotide
gcaagcccgggcga

SEQ ID NO: 30046 - DNA, 14 bp, Artificial Sequence
  Description of Artificial Sequence: Synthetic oligonucleotide
cgcaagcccgggcg

SEQ ID NO: 30047 - DNA, 14 bp, Artificial Sequence
  Description of Artificial Sequence: Synthetic oligonucleotide
ccgcaagcccgggc

SEQ ID NO: 30048 - DNA, 14 bp, Artificial Sequence
  Description of Artificial Sequence: Synthetic oligonucleotide
cccgcaagcccggg

SEQ ID NO: 30049 - DNA, 14 bp, Artificial Sequence
  Description of Artificial Sequence: Synthetic oligonucleotide
acccgcaagcccgg

SEQ ID NO: 30050 - DNA, 14 bp, Artificial Sequence
  Description of Artificial Sequence: Synthetic oligonucleotide
gacccgcaagcccg

SEQ ID NO: 30051 - DNA, 14 bp, Artificial Sequence
  Description of Artificial Sequence: Synthetic oligonucleotide
cgacccgcaagccc

SEQ ID NO: 30052 - DNA, 14 bp, Artificial Sequence
  Description of Artificial Sequence: Synthetic oligonucleotide
gcgacccgcaagcc

SEQ ID NO: 30053 - DNA, 14 bp, Artificial Sequence
  Description of Artificial Sequence: Synthetic oligonucleotide
ggcgacccgcaagc

SEQ ID NO: 30054 - DNA, 14 bp, Artificial Sequence
  Description of Artificial Sequence: Synthetic oligonucleotide
cggcgacccgcaag

SEQ ID NO: 30055 - DNA, 14 bp, Artificial Sequence
  Description of Artificial Sequence: Synthetic oligonucleotide
gcggcgacccgcaa

SEQ ID NO: 30056 - DNA, 14 bp, Artificial Sequence
  Description of Artificial Sequence: Synthetic oligonucleotide
cgcggcgacccgca

SEQ ID NO: 30057 - DNA, 14 bp, Artificial Sequence
  Description of Artificial Sequence: Synthetic oligonucleotide
gcgcggcgacccgc

SEQ ID NO: 30058 - DNA, 14 bp, Artificial Sequence
  Description of Artificial Sequence: Synthetic oligonucleotide
agcgcggcgacccg

SEQ ID NO: 30059 - DNA, 14 bp, Artificial Sequence
  Description of Artificial Sequence: Synthetic oligonucleotide
aagcgcggcgaccc

SEQ ID NO: 30060 - DNA, 14 bp, Artificial Sequence
  Description of Artificial Sequence: Synthetic oligonucleotide
gaagcgcggcgacc

SEQ ID NO: 30061 - DNA, 14 bp, Artificial Sequence
  Description of Artificial Sequence: Synthetic oligonucleotide
ggaagcgcggcgac

SEQ ID NO: 30062 - DNA, 14 bp, Artificial Sequence
  Description of Artificial Sequence: Synthetic oligonucleotide
aggaagcgcggcga

SEQ ID NO: 30063 - DNA, 14 bp, Artificial Sequence
  Description of Artificial Sequence: Synthetic oligonucleotide
gaggaagcgcggcg

SEQ ID NO: 30064 - DNA, 14 bp, Artificial Sequence
  Description of Artificial Sequence: Synthetic oligonucleotide
agaggaagcgcggc

SEQ ID NO: 30065 - DNA, 14 bp, Artificial Sequence
  Description of Artificial Sequence: Synthetic oligonucleotide
cagaggaagcgcgg

SEQ ID NO: 30066 - DNA, 14 bp, Artificial Sequence
  Description of Artificial Sequence: Synthetic oligonucleotide
gcagaggaagcgcg

SEQ ID NO: 30067 - DNA, 14 bp, Artificial Sequence
  Description of Artificial Sequence: Synthetic oligonucleotide
cgcagaggaagcgc

SEQ ID NO: 30068 - DNA, 14 bp, Artificial Sequence
  Description of Artificial Sequence: Synthetic oligonucleotide
ccgcagaggaagcg

SEQ ID NO: 30069 - DNA, 14 bp, Artificial Sequence
  Description of Artificial Sequence: Synthetic oligonucleotide
cccgcagaggaagc

SEQ ID NO: 30070 - DNA, 14 bp, Artificial Sequence
  Description of Artificial Sequence: Synthetic oligonucleotide
gcccgcagaggaag

SEQ ID NO: 30071 - DNA, 14 bp, Artificial Sequence
  Description of Artificial Sequence: Synthetic oligonucleotide
cgcccgcagaggaa

SEQ ID NO: 30072 - DNA, 14 bp, Artificial Sequence
  Description of Artificial Sequence: Synthetic oligonucleotide
gcgcccgcagagga

SEQ ID NO: 30073 - DNA, 14 bp, Artificial Sequence
  Description of Artificial Sequence: Synthetic oligonucleotide
agcgcccgcagagg

SEQ ID NO: 30074 - DNA, 14 bp, Artificial Sequence
  Description of Artificial Sequence: Synthetic oligonucleotide
cagcgcccgcagag

SEQ ID NO: 30075 - DNA, 14 bp, Artificial Sequence
  Description of Artificial Sequence: Synthetic oligonucleotide
gcagcgcccgcaga

SEQ ID NO: 30076 - DNA, 14 bp, Artificial Sequence
  Description of Artificial Sequence: Synthetic oligonucleotide
cgcagcgcccgcag

SEQ ID NO: 30077 - DNA, 14 bp, Artificial Sequence
  Description of Artificial Sequence: Synthetic oligonucleotide
ccgcagcgcccgca

SEQ ID NO: 30078 - DNA, 14 bp, Artificial Sequence
  Description of Artificial Sequence: Synthetic oligonucleotide
cccgcagcgcccgc

SEQ ID NO: 30079 - RNA, 14 nt, Artificial Sequence
  Description of Artificial Sequence: Synthetic oligonucleotide
ucccgcagcgcccg

SEQ ID NO: 30080 - RNA, 14 nt, Artificial Sequence
  Description of Artificial Sequence: Synthetic oligonucleotide
cucccgcagcgccc

SEQ ID NO: 30081 - RNA, 14 nt, Artificial Sequence
  Description of Artificial Sequence: Synthetic oligonucleotide
ccucccgcagcgcc

SEQ ID NO: 30082 - RNA, 14 nt, Artificial Sequence
  Description of Artificial Sequence: Synthetic oligonucleotide
gccucccgcagcgc

SEQ ID NO: 30083 - RNA, 14 nt, Artificial Sequence
  Description of Artificial Sequence: Synthetic oligonucleotide
cgccucccgcagcg

SEQ ID NO: 30084 - RNA, 14 nt, Artificial Sequence
  Description of Artificial Sequence: Synthetic oligonucleotide
ucgccucccgcagc

SEQ ID NO: 30085 - RNA, 14 nt, Artificial Sequence
  Description of Artificial Sequence: Synthetic oligonucleotide
cucgccucccgcag

SEQ ID NO: 30086 - RNA, 14 nt, Artificial Sequence
  Description of Artificial Sequence: Synthetic oligonucleotide
ccucgccucccgca

SEQ ID NO: 30087 - RNA, 14 nt, Artificial Sequence
  Description of Artificial Sequence: Synthetic oligonucleotide
cccucgccucccgc

SEQ ID NO: 30088 - RNA, 14 nt, Artificial Sequence
  Description of Artificial Sequence: Synthetic oligonucleotide
gcccucgccucccg

SEQ ID NO: 30089 - RNA, 14 nt, Artificial Sequence
  Description of Artificial Sequence: Synthetic oligonucleotide
ggcccucgccuccc

SEQ ID NO: 30090 - RNA, 14 nt, Artificial Sequence
  Description of Artificial Sequence: Synthetic oligonucleotide
cggcccucgccucc

SEQ ID NO: 30091 - RNA, 14 nt, Artificial Sequence
  Description of Artificial Sequence: Synthetic oligonucleotide
gcggcccucgccuc

SEQ ID NO: 30092 - RNA, 14 nt, Artificial Sequence
  Description of Artificial Sequence: Synthetic oligonucleotide
ggcggcccucgccu

SEQ ID NO: 30093 - RNA, 14 nt, Artificial Sequence
  Description of Artificial Sequence: Synthetic oligonucleotide
aggcggcccucgcc

SEQ ID NO: 30094 - RNA, 14 nt, Artificial Sequence
  Description of Artificial Sequence: Synthetic oligonucleotide
gaggcggcccucgc

SEQ ID NO: 30095 - RNA, 14 nt, Artificial Sequence
  Description of Artificial Sequence: Synthetic oligonucleotide
cgaggcggcccucg

SEQ ID NO: 30096 - RNA, 14 nt, Artificial Sequence
  Description of Artificial Sequence: Synthetic oligonucleotide
ccgaggcggcccuc

SEQ ID NO: 30097 - RNA, 14 nt, Artificial Sequence
  Description of Artificial Sequence: Synthetic oligonucleotide
gccgaggcggcccu

SEQ ID NO: 30098 - DNA, 14 bp, Artificial Sequence
  Description of Artificial Sequence: Synthetic oligonucleotide
cgccgaggcggccc

SEQ ID NO: 30099 - DNA, 14 bp, Artificial Sequence
  Description of Artificial Sequence: Synthetic oligonucleotide
ccgccgaggcggcc

SEQ ID NO: 30100 - RNA, 14 nt, Artificial Sequence
  Description of Artificial Sequence: Synthetic oligonucleotide
uccgccgaggcggc

SEQ ID NO: 30101 - RNA, 14 nt, Artificial Sequence
  Description of Artificial Sequence: Synthetic oligonucleotide
cuccgccgaggcgg

SEQ ID NO: 30102 - RNA, 14 nt, Artificial Sequence
  Description of Artificial Sequence: Synthetic oligonucleotide
ccuccgccgaggcg

SEQ ID NO: 30103 - RNA, 14 nt, Artificial Sequence
  Description of Artificial Sequence: Synthetic oligonucleotide
uccuccgccgaggc

SEQ ID NO: 30104 - RNA, 14 nt, Artificial Sequence
  Description of Artificial Sequence: Synthetic oligonucleotide
uuccuccgccgagg

SEQ ID NO: 30105 - RNA, 14 nt, Artificial Sequence
  Description of Artificial Sequence: Synthetic oligonucleotide
cuuccuccgccgag

SEQ ID NO: 30106 - RNA, 14 nt, Artificial Sequence
  Description of Artificial Sequence: Synthetic oligonucleotide
gcuuccuccgccga

SEQ ID NO: 30107 - RNA, 14 nt, Artificial Sequence
  Description of Artificial Sequence: Synthetic oligonucleotide
ggcuuccuccgccg

SEQ ID NO: 30108 - RNA, 14 nt, Artificial Sequence
  Description of Artificial Sequence: Synthetic oligonucleotide
cggcuuccuccgcc

SEQ ID NO: 30109 - RNA, 14 nt, Artificial Sequence
  Description of Artificial Sequence: Synthetic oligonucleotide
ucggcuuccuccgc

SEQ ID NO: 30110 - RNA, 14 nt, Artificial Sequence
  Description of Artificial Sequence: Synthetic oligonucleotide
gucggcuuccuccg

SEQ ID NO: 30111 - RNA, 14 nt, Artificial Sequence
  Description of Artificial Sequence: Synthetic oligonucleotide
ggucggcuuccucc

SEQ ID NO: 30112 - RNA, 14 nt, Artificial Sequence
  Description of Artificial Sequence: Synthetic oligonucleotide
gggucggcuuccuc

SEQ ID NO: 30113 - RNA, 14 nt, Artificial Sequence
  Description of Artificial Sequence: Synthetic oligonucleotide
ggggucggcuuccu

SEQ ID NO: 30114 - RNA, 14 nt, Artificial Sequence
  Description of Artificial Sequence: Synthetic oligonucleotide
cggggucggcuucc

SEQ ID NO: 30115 - RNA, 14 nt, Artificial Sequence
  Description of Artificial Sequence: Synthetic oligonucleotide
ccggggucggcuuc

SEQ ID NO: 30116 - RNA, 14 nt, Artificial Sequence
  Description of Artificial Sequence: Synthetic oligonucleotide
cccggggucggcuu

SEQ ID NO: 30117 - RNA, 14 nt, Artificial Sequence
  Description of Artificial Sequence: Synthetic oligonucleotide
ccccggggucggcu

SEQ ID NO: 30118 - RNA, 14 nt, Artificial Sequence
  Description of Artificial Sequence: Synthetic oligonucleotide
accccggggucggc

SEQ ID NO: 30119 - RNA, 14 nt, Artificial Sequence
  Description of Artificial Sequence: Synthetic oligonucleotide
gaccccggggucgg

SEQ ID NO: 30120 - RNA, 14 nt, Artificial Sequence
  Description of Artificial Sequence: Synthetic oligonucleotide
agaccccggggucg

SEQ ID NO: 30121 - RNA, 14 nt, Artificial Sequence
  Description of Artificial Sequence: Synthetic oligonucleotide
gagaccccgggguc

SEQ ID NO: 30122 - RNA, 14 nt, Artificial Sequence
  Description of Artificial Sequence: Synthetic oligonucleotide
ggagaccccggggu

SEQ ID NO: 30123 - DNA, 14 bp, Artificial Sequence
  Description of Artificial Sequence: Synthetic oligonucleotide
cggagaccccgggg

SEQ ID NO: 30124 - DNA, 14 bp, Artificial Sequence
  Description of Artificial Sequence: Synthetic oligonucleotide
gcggagaccccggg

SEQ ID NO: 30125 - DNA, 14 bp, Artificial Sequence
  Description of Artificial Sequence: Synthetic oligonucleotide
ggcggagaccccgg

SEQ ID NO: 30126 - RNA, 14 nt, Artificial Sequence
  Description of Artificial Sequence: Synthetic oligonucleotide
uggcggagaccccg

SEQ ID NO: 30127 - RNA, 14 nt, Artificial Sequence
  Description of Artificial Sequence: Synthetic oligonucleotide
cuggcggagacccc

SEQ ID NO: 30128 - RNA, 14 nt, Artificial Sequence
  Description of Artificial Sequence: Synthetic oligonucleotide
gcuggcggagaccc

SEQ ID NO: 30129 - RNA, 14 nt, Artificial Sequence
  Description of Artificial Sequence: Synthetic oligonucleotide
ggcuggcggagacc

SEQ ID NO: 30130 - RNA, 14 nt, Artificial Sequence
  Description of Artificial Sequence: Synthetic oligonucleotide
gggcuggcggagac

SEQ ID NO: 30131 - RNA, 14 nt, Artificial Sequence
  Description of Artificial Sequence: Synthetic oligonucleotide
cgggcuggcggaga

SEQ ID NO: 30132 - RNA, 14 nt, Artificial Sequence
  Description of Artificial Sequence: Synthetic oligonucleotide
gcgggcuggcggag

SEQ ID NO: 30133 - RNA, 14 nt, Artificial Sequence
  Description of Artificial Sequence: Synthetic oligonucleotide
ggcgggcuggcgga

SEQ ID NO: 30134 - RNA, 14 nt, Artificial Sequence
  Description of Artificial Sequence: Synthetic oligonucleotide
cggcgggcuggcgg

SEQ ID NO: 30135 - RNA, 14 nt, Artificial Sequence
  Description of Artificial Sequence: Synthetic oligonucleotide
ccggcgggcuggcg

SEQ ID NO: 30136 - RNA, 14 nt, Artificial Sequence
  Description of Artificial Sequence: Synthetic oligonucleotide
gccggcgggcuggc

SEQ ID NO: 30137 - RNA, 14 nt, Artificial Sequence
  Description of Artificial Sequence: Synthetic oligonucleotide
cgccggcgggcugg

SEQ ID NO: 30138 - RNA, 14 nt, Artificial Sequence
  Description of Artificial Sequence: Synthetic oligonucleotide
gcgccggcgggcug

SEQ ID NO: 30139 - RNA, 14 nt, Artificial Sequence
  Description of Artificial Sequence: Synthetic oligonucleotide
ggcgccggcgggcu

SEQ ID NO: 30140 - DNA, 14 bp, Artificial Sequence
  Description of Artificial Sequence: Synthetic oligonucleotide
cggcgccggcgggc

SEQ ID NO: 30141 - DNA, 14 bp, Artificial Sequence
  Description of Artificial Sequence: Synthetic oligonucleotide
gcggcgccggcggg

SEQ ID NO: 30142 - DNA, 14 bp, Artificial Sequence
  Description of Artificial Sequence: Synthetic oligonucleotide
ggcggcgccggcgg

SEQ ID NO: 30143 - DNA, 14 bp, Artificial Sequence
  Description of Artificial Sequence: Synthetic oligonucleotide
aggcggcgccggcg

SEQ ID NO: 30144 - DNA, 14 bp, Artificial Sequence
  Description of Artificial Sequence: Synthetic oligonucleotide
gaggcggcgccggc

SEQ ID NO: 30145 - DNA, 14 bp, Artificial Sequence
  Description of Artificial Sequence: Synthetic oligonucleotide
ggaggcggcgccgg

SEQ ID NO: 30146 - DNA, 14 bp, Artificial Sequence
  Description of Artificial Sequence: Synthetic oligonucleotide
cggaggcggcgccg

SEQ ID NO: 30147 - RNA, 14 nt, Artificial Sequence
  Description of Artificial Sequence: Synthetic oligonucleotide
ucggaggcggcgcc

SEQ ID NO: 30148 - RNA, 14 nt, Artificial Sequence
  Description of Artificial Sequence: Synthetic oligonucleotide
cucggaggcggcgc

SEQ ID NO: 30149 - RNA, 14 nt, Artificial Sequence
  Description of Artificial Sequence: Synthetic oligonucleotide
gcucggaggcggcg

SEQ ID NO: 30150 - RNA, 14 nt, Artificial Sequence
  Description of Artificial Sequence: Synthetic oligonucleotide
ggcucggaggcggc

SEQ ID NO: 30151 - RNA, 14 nt, Artificial Sequence
  Description of Artificial Sequence: Synthetic oligonucleotide
cggcucggaggcgg

SEQ ID NO: 30152 - RNA, 14 nt, Artificial Sequence
  Description of Artificial Sequence: Synthetic oligonucleotide
gcggcucggaggcg

SEQ ID NO: 30153 - RNA, 14 nt, Artificial Sequence
  Description of Artificial Sequence: Synthetic oligonucleotide
ggcggcucggaggc

SEQ ID NO: 30154 - RNA, 14 nt, Artificial Sequence
  Description of Artificial Sequence: Synthetic oligonucleotide
aggcggcucggagg

SEQ ID NO: 30155 - RNA, 14 nt, Artificial Sequence
  Description of Artificial Sequence: Synthetic oligonucleotide
gaggcggcucggag

SEQ ID NO: 30156 - RNA, 14 nt, Artificial Sequence
  Description of Artificial Sequence: Synthetic oligonucleotide
cgaggcggcucgga

SEQ ID NO: 30157 - RNA, 14 nt, Artificial Sequence
  Description of Artificial Sequence: Synthetic oligonucleotide
ccgaggcggcucgg

SEQ ID NO: 30158 - RNA, 14 nt, Artificial Sequence
  Description of Artificial Sequence: Synthetic oligonucleotide
gccgaggcggcucg

SEQ ID NO: 30159 - RNA, 14 nt, Artificial Sequence
  Description of Artificial Sequence: Synthetic oligonucleotide
ggccgaggcggcuc

SEQ ID NO: 30160 - RNA, 14 nt, Artificial Sequence
  Description of Artificial Sequence: Synthetic oligonucleotide
cggccgaggcggcu

SEQ ID NO: 30161 - DNA, 14 bp, Artificial Sequence
  Description of Artificial Sequence: Synthetic oligonucleotide
acggccgaggcggc

SEQ ID NO: 30162 - RNA, 14 nt, Artificial Sequence
  Description of Artificial Sequence: Synthetic oligonucleotide
uacggccgaggcgg

SEQ ID NO: 30163 - RNA, 14 nt, Artificial Sequence
  Description of Artificial Sequence: Synthetic oligonucleotide
cuacggccgaggcg

SEQ ID NO: 30164 - RNA, 14 nt, Artificial Sequence
  Description of Artificial Sequence: Synthetic oligonucleotide
gcuacggccgaggc

SEQ ID NO: 30165 - RNA, 14 nt, Artificial Sequence
  Description of Artificial Sequence: Synthetic oligonucleotide
ggcuacggccgagg

SEQ ID NO: 30166 - RNA, 14 nt, Artificial Sequence
  Description of Artificial Sequence: Synthetic oligonucleotide
aggcuacggccgag

SEQ ID NO: 30167 - RNA, 14 nt, Artificial Sequence
  Description of Artificial Sequence: Synthetic oligonucleotide
gaggcuacggccga

SEQ ID NO: 30168 - RNA, 14 nt, Artificial Sequence
  Description of Artificial Sequence: Synthetic oligonucleotide
cgaggcuacggccg

SEQ ID NO: 30169 - RNA, 14 nt, Artificial Sequence
  Description of Artificial Sequence: Synthetic oligonucleotide
ccgaggcuacggcc

SEQ ID NO: 30170 - RNA, 14 nt, Artificial Sequence
  Description of Artificial Sequence: Synthetic oligonucleotide
gccgaggcuacggc

SEQ ID NO: 30171 - RNA, 14 nt, Artificial Sequence
  Description of Artificial Sequence: Synthetic oligonucleotide
ggccgaggcuacgg

SEQ ID NO: 30172 - RNA, 14 nt, Artificial Sequence
  Description of Artificial Sequence: Synthetic oligonucleotide
gggccgaggcuacg

SEQ ID NO: 30173 - RNA, 14 nt, Artificial Sequence
  Description of Artificial Sequence: Synthetic oligonucleotide
cgggccgaggcuac

SEQ ID NO: 30174 - RNA, 14 nt, Artificial Sequence
  Description of Artificial Sequence: Synthetic oligonucleotide
ccgggccgaggcua

SEQ ID NO: 30175 - RNA, 14 nt, Artificial Sequence
  Description of Artificial Sequence: Synthetic oligonucleotide
cccgggccgaggcu

SEQ ID NO: 30176 - DNA, 14 bp, Artificial Sequence
  Description of Artificial Sequence: Synthetic oligonucleotide
gcccgggccgaggc

SEQ ID NO: 30177 - DNA, 14 bp, Artificial Sequence
  Description of Artificial Sequence: Synthetic oligonucleotide
cgcccgggccgagg

SEQ ID NO: 30178 - DNA, 14 bp, Artificial Sequence
  Description of Artificial Sequence: Synthetic oligonucleotide
ccgcccgggccgag

SEQ ID NO: 30179 - DNA, 14 bp, Artificial Sequence
  Description of Artificial Sequence: Synthetic oligonucleotide
cccgcccgggccga

SEQ ID NO: 30180 - RNA, 14 nt, Artificial Sequence
  Description of Artificial Sequence: Synthetic oligonucleotide
ucccgcccgggccg

SEQ ID NO: 30181 - RNA, 14 nt, Artificial Sequence
  Description of Artificial Sequence: Synthetic oligonucleotide
cucccgcccgggcc

SEQ ID NO: 30182 - RNA, 14 nt, Artificial Sequence
  Description of Artificial Sequence: Synthetic oligonucleotide
ccucccgcccgggc

SEQ ID NO: 30183 - RNA, 14 nt, Artificial Sequence
  Description of Artificial Sequence: Synthetic oligonucleotide
gccucccgcccggg

SEQ ID NO: 30184 - RNA, 14 nt, Artificial Sequence
  Description of Artificial Sequence: Synthetic oligonucleotide
cgccucccgcccgg

SEQ ID NO: 30185 - RNA, 14 nt, Artificial Sequence
  Description of Artificial Sequence: Synthetic oligonucleotide
ccgccucccgcccg

SEQ ID NO: 30186 - RNA, 14 nt, Artificial Sequence
  Description of Artificial Sequence: Synthetic oligonucleotide
gccgccucccgccc

SEQ ID NO: 30187 - RNA, 14 nt, Artificial Sequence
  Description of Artificial Sequence: Synthetic oligonucleotide
cgccgccucccgcc

SEQ ID NO: 30188 - RNA, 14 nt, Artificial Sequence
  Description of Artificial Sequence: Synthetic oligonucleotide
ccgccgccucccgc

SEQ ID NO: 30189 - RNA, 14 nt, Artificial Sequence
  Description of Artificial Sequence: Synthetic oligonucleotide
gccgccgccucccg

SEQ ID NO: 30190 - RNA, 14 nt, Artificial Sequence
  Description of Artificial Sequence: Synthetic oligonucleotide
ggccgccgccuccc

SEQ ID NO: 30191 - RNA, 14 nt, Artificial Sequence
  Description of Artificial Sequence: Synthetic oligonucleotide
cggccgccgccucc

SEQ ID NO: 30192 - RNA, 14 nt, Artificial Sequence
  Description of Artificial Sequence: Synthetic oligonucleotide
gcggccgccgccuc

SEQ ID NO: 30193 - RNA, 14 nt, Artificial Sequence
  Description of Artificial Sequence: Synthetic oligonucleotide
ggcggccgccgccu

SEQ ID NO: 30194 - DNA, 14 bp, Artificial Sequence
  Description of Artificial Sequence: Synthetic oligonucleotide
cggcggccgccgcc

SEQ ID NO: 30195 - DNA, 14 bp, Artificial Sequence
  Description of Artificial Sequence: Synthetic oligonucleotide
ccggcggccgccgc

SEQ ID NO: 30196 - DNA, 14 bp, Artificial Sequence
  Description of Artificial Sequence: Synthetic oligonucleotide
gccggcggccgccg

SEQ ID NO: 30197 - DNA, 14 bp, Artificial Sequence
  Description of Artificial Sequence: Synthetic oligonucleotide
cgccggcggccgcc

SEQ ID NO: 30198 - RNA, 14 nt, Artificial Sequence
  Description of Artificial Sequence: Synthetic oligonucleotide
ucgccggcggccgc

SEQ ID NO: 30199 - RNA, 14 nt, Artificial Sequence
  Description of Artificial Sequence: Synthetic oligonucleotide
cucgccggcggccg

SEQ ID NO: 30200 - RNA, 14 nt, Artificial Sequence
  Description of Artificial Sequence: Synthetic oligonucleotide
ccucgccggcggcc

SEQ ID NO: 30201 - RNA, 14 nt, Artificial Sequence
  Description of Artificial Sequence: Synthetic oligonucleotide
gccucgccggcggc

SEQ ID NO: 30202 - RNA, 14 nt, Artificial Sequence
  Description of Artificial Sequence: Synthetic oligonucleotide
cgccucgccggcgg

SEQ ID NO: 30203 - RNA, 14 nt, Artificial Sequence
  Description of Artificial Sequence: Synthetic oligonucleotide
ucgccucgccggcg

SEQ ID NO: 30204 - RNA, 14 nt, Artificial Sequence
  Description of Artificial Sequence: Synthetic oligonucleotide
cucgccucgccggc

SEQ ID NO: 30205 - RNA, 14 nt, Artificial Sequence
  Description of Artificial Sequence: Synthetic oligonucleotide
ccucgccucgccgg

SEQ ID NO: 30206 - RNA, 14 nt, Artificial Sequence
  Description of Artificial Sequence: Synthetic oligonucleotide
gccucgccucgccg

SEQ ID NO: 30207 - RNA, 14 nt, Artificial Sequence
  Description of Artificial Sequence: Synthetic oligonucleotide
cgccucgccucgcc

SEQ ID NO: 30208 - RNA, 14 nt, Artificial Sequence
  Description of Artificial Sequence: Synthetic oligonucleotide
ccgccucgccucgc

SEQ ID NO: 30209 - RNA, 14 nt, Artificial Sequence
  Description of Artificial Sequence: Synthetic oligonucleotide
gccgccucgccucg

SEQ ID NO: 30210 - RNA, 14 nt, Artificial Sequence
  Description of Artificial Sequence: Synthetic oligonucleotide
ggccgccucgccuc

SEQ ID NO: 30211 - RNA, 14 nt, Artificial Sequence
  Description of Artificial Sequence: Synthetic oligonucleotide
gggccgccucgccu

SEQ ID NO: 30212 - RNA, 14 nt, Artificial Sequence
  Description of Artificial Sequence: Synthetic oligonucleotide
cgggccgccucgcc

SEQ ID NO: 30213 - RNA, 14 nt, Artificial Sequence
  Description of Artificial Sequence: Synthetic oligonucleotide
gcgggccgccucgc

SEQ ID NO: 30214 - RNA, 14 nt, Artificial Sequence
  Description of Artificial Sequence: Synthetic oligonucleotide
cgcgggccgccucg

SEQ ID NO: 30215 - RNA, 14 nt, Artificial Sequence
  Description of Artificial Sequence: Synthetic oligonucleotide
gcgcgggccgccuc

SEQ ID NO: 30216 - RNA, 14 nt, Artificial Sequence
  Description of Artificial Sequence: Synthetic oligonucleotide
ggcgcgggccgccu

SEQ ID NO: 30217 - DNA, 14 bp, Artificial Sequence
  Description of Artificial Sequence: Synthetic oligonucleotide
gggcgcgggccgcc

SEQ ID NO: 30218 - DNA, 14 bp, Artificial Sequence
  Description of Artificial Sequence: Synthetic oligonucleotide
agggcgcgggccgc

SEQ ID NO: 30219 - DNA, 14 bp, Artificial Sequence
  Description of Artificial Sequence: Synthetic oligonucleotide
cagggcgcgggccg

SEQ ID NO: 30220 - DNA, 14 bp, Artificial Sequence
  Description of Artificial Sequence: Synthetic oligonucleotide
gcagggcgcgggcc

SEQ ID NO: 30221 - DNA, 14 bp, Artificial Sequence
  Description of Artificial Sequence: Synthetic oligonucleotide
ggcagggcgcgggc

SEQ ID NO: 30222 - DNA, 14 bp, Artificial Sequence
  Description of Artificial Sequence: Synthetic oligonucleotide
aggcagggcgcggg

SEQ ID NO: 30223 - DNA, 14 bp, Artificial Sequence
  Description of Artificial Sequence: Synthetic oligonucleotide
caggcagggcgcgg

SEQ ID NO: 30224 - DNA, 14 bp, Artificial Sequence
  Description of Artificial Sequence: Synthetic oligonucleotide
acaggcagggcgcg

SEQ ID NO: 30225 - DNA, 14 bp, Artificial Sequence
  Description of Artificial Sequence: Synthetic oligonucleotide
gacaggcagggcgc

SEQ ID NO: 30226 - RNA, 14 nt, Artificial Sequence
  Description of Artificial Sequence: Synthetic oligonucleotide
ugacaggcagggcg

SEQ ID NO: 30227 - RNA, 14 nt, Artificial Sequence
  Description of Artificial Sequence: Synthetic oligonucleotide
cugacaggcagggc

SEQ ID NO: 30228 - RNA, 14 nt, Artificial Sequence
  Description of Artificial Sequence: Synthetic oligonucleotide
ccugacaggcaggg

SEQ ID NO: 30229 - RNA, 14 nt, Artificial Sequence
  Description of Artificial Sequence: Synthetic oligonucleotide
gccugacaggcagg

SEQ ID NO: 30230 - RNA, 14 nt, Artificial Sequence
  Description of Artificial Sequence: Synthetic oligonucleotide
ggccugacaggcag

SEQ ID NO: 30231 - RNA, 14 nt, Artificial Sequence
  Description of Artificial Sequence: Synthetic oligonucleotide
uggccugacaggca

SEQ ID NO: 30232 - RNA, 14 nt, Artificial Sequence
  Description of Artificial Sequence: Synthetic oligonucleotide
guggccugacaggc

SEQ ID NO: 30233 - RNA, 14 nt, Artificial Sequence
  Description of Artificial Sequence: Synthetic oligonucleotide
gguggccugacagg

SEQ ID NO: 30234 - RNA, 14 nt, Artificial Sequence
  Description of Artificial Sequence: Synthetic oligonucleotide
cgguggccugacag

SEQ ID NO: 30235 - RNA, 14 nt, Artificial Sequence
  Description of Artificial Sequence: Synthetic oligonucleotide
ccgguggccugaca

SEQ ID NO: 30236 - RNA, 14 nt, Artificial Sequence
  Description of Artificial Sequence: Synthetic oligonucleotide
gccgguggccugac

SEQ ID NO: 30237 - RNA, 14 nt, Artificial Sequence
  Description of Artificial Sequence: Synthetic oligonucleotide
ggccgguggccuga

SEQ ID NO: 30238 - RNA, 14 nt, Artificial Sequence
  Description of Artificial Sequence: Synthetic oligonucleotide
gggccgguggccug

SEQ ID NO: 30239 - RNA, 14 nt, Artificial Sequence
  Description of Artificial Sequence: Synthetic oligonucleotide
cgggccgguggccu

SEQ ID NO: 30240 - RNA, 14 nt, Artificial Sequence
  Description of Artificial Sequence: Synthetic oligonucleotide
ccgggccgguggcc

SEQ ID NO: 30241 - RNA, 14 nt, Artificial Sequence
  Description of Artificial Sequence: Synthetic oligonucleotide
gccgggccgguggc

SEQ ID NO: 30242 - RNA, 14 nt, Artificial Sequence
  Description of Artificial Sequence: Synthetic oligonucleotide
ggccgggccggugg

SEQ ID NO: 30243 - RNA, 14 nt, Artificial Sequence
  Description of Artificial Sequence: Synthetic oligonucleotide
gggccgggccggug

SEQ ID NO: 30244 - RNA, 14 nt, Artificial Sequence
  Description of Artificial Sequence: Synthetic oligonucleotide
cgggccgggccggu

SEQ ID NO: 30245 - DNA, 14 bp, Artificial Sequence
  Description of Artificial Sequence: Synthetic oligonucleotide
gcgggccgggccgg

SEQ ID NO: 30246 - DNA, 14 bp, Artificial Sequence
  Description of Artificial Sequence: Synthetic oligonucleotide
cgcgggccgggccg

SEQ ID NO: 30247 - DNA, 14 bp, Artificial Sequence
  Description of Artificial Sequence: Synthetic oligonucleotide
ccgcgggccgggcc

SEQ ID NO: 30248 - DNA, 14 bp, Artificial Sequence
  Description of Artificial Sequence: Synthetic oligonucleotide
cccgcgggccgggc

SEQ ID NO: 30249 - DNA, 14 bp, Artificial Sequence
  Description of Artificial Sequence: Synthetic oligonucleotide
gcccgcgggccggg

SEQ ID NO: 30250 - DNA, 14 bp, Artificial Sequence
  Description of Artificial Sequence: Synthetic oligonucleotide
agcccgcgggccgg

SEQ ID NO: 30251 - DNA, 14 bp, Artificial Sequence
  Description of Artificial Sequence: Synthetic oligonucleotide
cagcccgcgggccg

SEQ ID NO: 30252 - DNA, 14 bp, Artificial Sequence
  Description of Artificial Sequence: Synthetic oligonucleotide
gcagcccgcgggcc

SEQ ID NO: 30253 - DNA, 14 bp, Artificial Sequence
  Description of Artificial Sequence: Synthetic oligonucleotide
ggcagcccgcgggc

SEQ ID NO: 30254 - DNA, 14 bp, Artificial Sequence
  Description of Artificial Sequence: Synthetic oligonucleotide
gggcagcccgcggg

SEQ ID NO: 30255 - DNA, 14 bp, Artificial Sequence
  Description of Artificial Sequence: Synthetic oligonucleotide
ggggcagcccgcgg

SEQ ID NO: 30256 - DNA, 14 bp, Artificial Sequence
  Description of Artificial Sequence: Synthetic oligonucleotide
gggggcagcccgcg

SEQ ID NO: 30257 - DNA, 14 bp, Artificial Sequence
  Description of Artificial Sequence: Synthetic oligonucleotide
cgggggcagcccgc

SEQ ID NO: 30258 - RNA, 14 nt, Artificial Sequence
  Description of Artificial Sequence: Synthetic oligonucleotide
ucgggggcagcccg

SEQ ID NO: 30259 - RNA, 14 nt, Artificial Sequence
  Description of Artificial Sequence: Synthetic oligonucleotide
aucgggggcagccc

SEQ ID NO: 30260 - RNA, 14 nt, Artificial Sequence
  Description of Artificial Sequence: Synthetic oligonucleotide
caucgggggcagcc

SEQ ID NO: 30261 - RNA, 14 nt, Artificial Sequence
  Description of Artificial Sequence: Synthetic oligonucleotide
gcaucgggggcagc

SEQ ID NO: 30262 - RNA, 14 nt, Artificial Sequence
  Description of Artificial Sequence: Synthetic oligonucleotide
cgcaucgggggcag

SEQ ID NO: 30263 - RNA, 14 nt, Artificial Sequence
  Description of Artificial Sequence: Synthetic oligonucleotide
ccgcaucgggggca

SEQ ID NO: 30264 - RNA, 14 nt, Artificial Sequence
  Description of Artificial Sequence: Synthetic oligonucleotide
uccgcaucgggggc

SEQ ID NO: 30265 - RNA, 14 nt, Artificial Sequence
  Description of Artificial Sequence: Synthetic oligonucleotide
cuccgcaucggggg

SEQ ID NO: 30266 - RNA, 14 nt, Artificial Sequence
  Description of Artificial Sequence: Synthetic oligonucleotide
ccuccgcaucgggg

SEQ ID NO: 30267 - RNA, 14 nt, Artificial Sequence
  Description of Artificial Sequence: Synthetic oligonucleotide
gccuccgcaucggg

SEQ ID NO: 30268 - RNA, 14 nt, Artificial Sequence
  Description of Artificial Sequence: Synthetic oligonucleotide
cgccuccgcaucgg

SEQ ID NO: 30269 - RNA, 14 nt, Artificial Sequence
  Description of Artificial Sequence: Synthetic oligonucleotide
gcgccuccgcaucg

SEQ ID NO: 30270 - RNA, 14 nt, Artificial Sequence
  Description of Artificial Sequence: Synthetic oligonucleotide
agcgccuccgcauc

SEQ ID NO: 30271 - RNA, 14 nt, Artificial Sequence
  Description of Artificial Sequence: Synthetic oligonucleotide
cagcgccuccgcau

SEQ ID NO: 30272 - RNA, 14 nt, Artificial Sequence
  Description of Artificial Sequence: Synthetic oligonucleotide
acagcgccuccgca

SEQ ID NO: 30273 - RNA, 14 nt, Artificial Sequence
  Description of Artificial Sequence: Synthetic oligonucleotide
gacagcgccuccgc

SEQ ID NO: 30274 - RNA, 14 nt, Artificial Sequence
  Description of Artificial Sequence: Synthetic oligonucleotide
cgacagcgccuccg

SEQ ID NO: 30275 - RNA, 14 nt, Artificial Sequence
  Description of Artificial Sequence: Synthetic oligonucleotide
gcgacagcgccucc

SEQ ID NO: 30276 - RNA, 14 nt, Artificial Sequence
  Description of Artificial Sequence: Synthetic oligonucleotide
ggcgacagcgccuc

SEQ ID NO: 30277 - RNA, 14 nt, Artificial Sequence
  Description of Artificial Sequence: Synthetic oligonucleotide
cggcgacagcgccu

SEQ ID NO: 30278 - DNA, 14 bp, Artificial Sequence
  Description of Artificial Sequence: Synthetic oligonucleotide
ccggcgacagcgcc

SEQ ID NO: 30279 - DNA, 14 bp, Artificial Sequence
  Description of Artificial Sequence: Synthetic oligonucleotide
cccggcgacagcgc

SEQ ID NO: 30280 - DNA, 14 bp, Artificial Sequence
  Description of Artificial Sequence: Synthetic oligonucleotide
ccccggcgacagcg

SEQ ID NO: 30281 - DNA, 14 bp, Artificial Sequence
  Description of Artificial Sequence: Synthetic oligonucleotide
gccccggcgacagc

SEQ ID NO: 30282 - DNA, 14 bp, Artificial Sequence
  Description of Artificial Sequence: Synthetic oligonucleotide
ggccccggcgacag

SEQ ID NO: 30283 - RNA, 14 nt, Artificial Sequence
  Description of Artificial Sequence: Synthetic oligonucleotide
uggccccggcgaca

SEQ ID NO: 30284 - RNA, 14 nt, Artificial Sequence
  Description of Artificial Sequence: Synthetic oligonucleotide
auggccccggcgac

SEQ ID NO: 30285 - RNA, 14 nt, Artificial Sequence
  Description of Artificial Sequence: Synthetic oligonucleotide
cauggccccggcga

SEQ ID NO: 30286 - RNA, 14 nt, Artificial Sequence
  Description of Artificial Sequence: Synthetic oligonucleotide
gcauggccccggcg

SEQ ID NO: 30287 - RNA, 14 nt, Artificial Sequence
  Description of Artificial Sequence: Synthetic oligonucleotide
ugcauggccccggc

SEQ ID NO: 30288 - RNA, 14 nt, Artificial Sequence
  Description of Artificial Sequence: Synthetic oligonucleotide
cugcauggccccgg

SEQ ID NO: 30289 - RNA, 14 nt, Artificial Sequence
  Description of Artificial Sequence: Synthetic oligonucleotide
gcugcauggccccg

SEQ ID NO: 30290 - RNA, 14 nt, Artificial Sequence
  Description of Artificial Sequence: Synthetic oligonucleotide
ugcugcauggcccc

SEQ ID NO: 30291 - RNA, 14 nt, Artificial Sequence
  Description of Artificial Sequence: Synthetic oligonucleotide
cugcugcauggccc

SEQ ID NO: 30292 - RNA, 14 nt, Artificial Sequence
  Description of Artificial Sequence: Synthetic oligonucleotide
ccugcugcauggcc

SEQ ID NO: 30293 - RNA, 14 nt, Artificial Sequence
  Description of Artificial Sequence: Synthetic oligonucleotide
gccugcugcauggc

SEQ ID NO: 30294 - RNA, 14 nt, Artificial Sequence
  Description of Artificial Sequence: Synthetic oligonucleotide
cgccugcugcaugg

SEQ ID NO: 30295 - RNA, 14 nt, Artificial Sequence
  Description of Artificial Sequence: Synthetic oligonucleotide
gcgccugcugcaug

SEQ ID NO: 30296 - RNA, 14 nt, Artificial Sequence
  Description of Artificial Sequence: Synthetic oligonucleotide
ggcgccugcugcau

SEQ ID NO: 30297 - RNA, 14 nt, Artificial Sequence
  Description of Artificial Sequence: Synthetic oligonucleotide
cggcgccugcugca

SEQ ID NO: 30298 - RNA, 14 nt, Artificial Sequence
  Description of Artificial Sequence: Synthetic oligonucleotide
gcggcgccugcugc

SEQ ID NO: 30299 - RNA, 14 nt, Artificial Sequence
  Description of Artificial Sequence: Synthetic oligonucleotide
ugcggcgccugcug

SEQ ID NO: 30300 - RNA, 14 nt, Artificial Sequence
  Description of Artificial Sequence: Synthetic oligonucleotide
cugcggcgccugcu

SEQ ID NO: 30301 - RNA, 14 nt, Artificial Sequence
  Description of Artificial Sequence: Synthetic oligonucleotide
gcugcggcgccugc

SEQ ID NO: 30302 - RNA, 14 nt, Artificial Sequence
  Description of Artificial Sequence: Synthetic oligonucleotide
ggcugcggcgccug

SEQ ID NO: 30303 - RNA, 14 nt, Artificial Sequence
  Description of Artificial Sequence: Synthetic oligonucleotide
aggcugcggcgccu

SEQ ID NO: 30304 - RNA, 14 nt, Artificial Sequence
  Description of Artificial Sequence: Synthetic oligonucleotide
aaggcugcggcgcc

SEQ ID NO: 30305 - RNA, 14 nt, Artificial Sequence
  Description of Artificial Sequence: Synthetic oligonucleotide
uaaggcugcggcgc

SEQ ID NO: 30306 - RNA, 14 nt, Artificial Sequence
  Description of Artificial Sequence: Synthetic oligonucleotide
guaaggcugcggcg

SEQ ID NO: 30307 - RNA, 14 nt, Artificial Sequence
  Description of Artificial Sequence: Synthetic oligonucleotide
cguaaggcugcggc

SEQ ID NO: 30308 - RNA, 14 nt, Artificial Sequence
  Description of Artificial Sequence: Synthetic oligonucleotide
ucguaaggcugcgg

SEQ ID NO: 30309 - RNA, 14 nt, Artificial Sequence
  Description of Artificial Sequence: Synthetic oligonucleotide
cucguaaggcugcg

SEQ ID NO: 30310 - RNA, 14 nt, Artificial Sequence
  Description of Artificial Sequence: Synthetic oligonucleotide
acucguaaggcugc

SEQ ID NO: 30311 - RNA, 14 nt, Artificial Sequence
  Description of Artificial Sequence: Synthetic oligonucleotide
aacucguaaggcug

SEQ ID NO: 30312 - RNA, 14 nt, Artificial Sequence
  Description of Artificial Sequence: Synthetic oligonucleotide
gaacucguaaggcu

SEQ ID NO: 30313 - RNA, 14 nt, Artificial Sequence
  Description of Artificial Sequence: Synthetic oligonucleotide
agaacucguaaggc

SEQ ID NO: 30314 - RNA, 14 nt, Artificial Sequence
  Description of Artificial Sequence: Synthetic oligonucleotide
aagaacucguaagg

SEQ ID NO: 30315 - RNA, 14 nt, Artificial Sequence
  Description of Artificial Sequence: Synthetic oligonucleotide
gaagaacucguaag

SEQ ID NO: 30316 - RNA, 14 nt, Artificial Sequence
  Description of Artificial Sequence: Synthetic oligonucleotide
ugaagaacucguaa

SEQ ID NO: 30317 - RNA, 14 nt, Artificial Sequence
  Description of Artificial Sequence: Synthetic oligonucleotide
cugaagaacucgua

SEQ ID NO: 30318 - RNA, 14 nt, Artificial Sequence
  Description of Artificial Sequence: Synthetic oligonucleotide
gcugaagaacucgu

SEQ ID NO: 30319 - RNA, 14 nt, Artificial Sequence
  Description of Artificial Sequence: Synthetic oligonucleotide
cgcugaagaacucg

SEQ ID NO: 30320 - RNA, 14 nt, Artificial Sequence
  Description of Artificial Sequence: Synthetic oligonucleotide
ucgcugaagaacuc

SEQ ID NO: 30321 - RNA, 14 nt, Artificial Sequence
  Description of Artificial Sequence: Synthetic oligonucleotide
cucgcugaagaacu

SEQ ID NO: 30322 - RNA, 14 nt, Artificial Sequence
  Description of Artificial Sequence: Synthetic oligonucleotide
ccucgcugaagaac

SEQ ID NO: 30323 - RNA, 14 nt, Artificial Sequence
  Description of Artificial Sequence: Synthetic oligonucleotide
uccucgcugaagaa

SEQ ID NO: 30324 - RNA, 14 nt, Artificial Sequence
  Description of Artificial Sequence: Synthetic oligonucleotide
cuccucgcugaaga

SEQ ID NO: 30325 - RNA, 14 nt, Artificial Sequence
  Description of Artificial Sequence: Synthetic oligonucleotide
ucuccucgcugaag

SEQ ID NO: 30326 - RNA, 14 nt, Artificial Sequence
  Description of Artificial Sequence: Synthetic oligonucleotide
uucuccucgcugaa

SEQ ID NO: 30327 - RNA, 14 nt, Artificial Sequence
  Description of Artificial Sequence: Synthetic oligonucleotide
guucuccucgcuga

SEQ ID NO: 30328 - RNA, 14 nt, Artificial Sequence
  Description of Artificial Sequence: Synthetic oligonucleotide
uguucuccucgcug

SEQ ID NO: 30329 - RNA, 14 nt, Artificial Sequence
  Description of Artificial Sequence: Synthetic oligonucleotide
cuguucuccucgcu

SEQ ID NO: 30330 - RNA, 14 nt, Artificial Sequence
  Description of Artificial Sequence: Synthetic oligonucleotide
acuguucuccucgc

SEQ ID NO: 30331 - RNA, 14 nt, Artificial Sequence
  Description of Artificial Sequence: Synthetic oligonucleotide
gacuguucuccucg

SEQ ID NO: 30332 - RNA, 14 nt, Artificial Sequence
  Description of Artificial Sequence: Synthetic oligonucleotide
ggacuguucuccuc

SEQ ID NO: 30333 - RNA, 14 nt, Artificial Sequence
  Description of Artificial Sequence: Synthetic oligonucleotide
cggacuguucuccu

SEQ ID NO: 30334 - RNA, 14 nt, Artificial Sequence
  Description of Artificial Sequence: Synthetic oligonucleotide
ucggacuguucucc

SEQ ID NO: 30335 - RNA, 14 nt, Artificial Sequence
  Description of Artificial Sequence: Synthetic oligonucleotide
uucggacuguucuc

SEQ ID NO: 30336 - RNA, 14 nt, Artificial Sequence
  Description of Artificial Sequence: Synthetic oligonucleotide
uuucggacuguucu

SEQ ID NO: 30337 - RNA, 14 nt, Artificial Sequence
  Description of Artificial Sequence: Synthetic oligonucleotide
auuucggacuguuc

SEQ ID NO: 30338 - RNA, 14 nt, Artificial Sequence
  Description of Artificial Sequence: Synthetic oligonucleotide
cauuucggacuguu

SEQ ID NO: 30339 - RNA, 14 nt, Artificial Sequence
  Description of Artificial Sequence: Synthetic oligonucleotide
ccauuucggacugu

SEQ ID NO: 30340 - RNA, 14 nt, Artificial Sequence
  Description of Artificial Sequence: Synthetic oligonucleotide
gccauuucggacug

SEQ ID NO: 30341 - RNA, 14 nt, Artificial Sequence
  Description of Artificial Sequence: Synthetic oligonucleotide
cgccauuucggacu

SEQ ID NO: 30342 - RNA, 14 nt, Artificial Sequence
  Description of Artificial Sequence: Synthetic oligonucleotide
ccgccauuucggac

SEQ ID NO: 30343 - RNA, 14 nt, Artificial Sequence
  Description of Artificial Sequence: Synthetic oligonucleotide
cccgccauuucgga

SEQ ID NO: 30344 - RNA, 14 nt, Artificial Sequence
  Description of Artificial Sequence: Synthetic oligonucleotide
ccccgccauuucgg

SEQ ID NO: 30345 - RNA, 14 nt, Artificial Sequence
  Description of Artificial Sequence: Synthetic oligonucleotide
uccccgccauuucg

SEQ ID NO: 30346 - RNA, 14 nt, Artificial Sequence
  Description of Artificial Sequence: Synthetic oligonucleotide
guccccgccauuuc

SEQ ID NO: 30347 - RNA, 14 nt, Artificial Sequence
  Description of Artificial Sequence: Synthetic oligonucleotide
aguccccgccauuu

SEQ ID NO: 30348 - RNA, 14 nt, Artificial Sequence
  Description of Artificial Sequence: Synthetic oligonucleotide
caguccccgccauu

SEQ ID NO: 30349 - RNA, 14 nt, Artificial Sequence
  Description of Artificial Sequence: Synthetic oligonucleotide
acaguccccgccau

SEQ ID NO: 30350 - RNA, 14 nt, Artificial Sequence
  Description of Artificial Sequence: Synthetic oligonucleotide
aacaguccccgcca

SEQ ID NO: 30351 - RNA, 14 nt, Artificial Sequence
  Description of Artificial Sequence: Synthetic oligonucleotide
caacaguccccgcc

SEQ ID NO: 30352 - RNA, 14 nt, Artificial Sequence
  Description of Artificial Sequence: Synthetic oligonucleotide
ccaacaguccccgc

SEQ ID NO: 30353 - RNA, 14 nt, Artificial Sequence
  Description of Artificial Sequence: Synthetic oligonucleotide
accaacaguccccg

SEQ ID NO: 30354 - RNA, 14 nt, Artificial Sequence
  Description of Artificial Sequence: Synthetic oligonucleotide
gaccaacagucccc

SEQ ID NO: 30355 - RNA, 14 nt, Artificial Sequence
  Description of Artificial Sequence: Synthetic oligonucleotide
agaccaacaguccc

SEQ ID NO: 30356 - RNA, 14 nt, Artificial Sequence
  Description of Artificial Sequence: Synthetic oligonucleotide
gagaccaacagucc

SEQ ID NO: 30357 - RNA, 14 nt, Artificial Sequence
  Description of Artificial Sequence: Synthetic oligonucleotide
cgagaccaacaguc

SEQ ID NO: 30358 - RNA, 14 nt, Artificial Sequence
  Description of Artificial Sequence: Synthetic oligonucleotide
ccgagaccaacagu

SEQ ID NO: 30359 - DNA, 14 bp, Artificial Sequence
  Description of Artificial Sequence: Synthetic oligonucleotide
gccgagaccaacag

SEQ ID NO: 30360 - DNA, 14 bp, Artificial Sequence
  Description of Artificial Sequence: Synthetic oligonucleotide
ggccgagaccaaca

SEQ ID NO: 30361 - DNA, 14 bp, Artificial Sequence
  Description of Artificial Sequence: Synthetic oligonucleotide
gggccgagaccaac

SEQ ID NO: 30362 - DNA, 14 bp, Artificial Sequence
  Description of Artificial Sequence: Synthetic oligonucleotide
agggccgagaccaa

SEQ ID NO: 30363 - DNA, 14 bp, Artificial Sequence
  Description of Artificial Sequence: Synthetic oligonucleotide
cagggccgagacca

SEQ ID NO: 30364 - DNA, 14 bp, Artificial Sequence
  Description of Artificial Sequence: Synthetic oligonucleotide
gcagggccgagacc

SEQ ID NO: 30365 - DNA, 14 bp, Artificial Sequence
  Description of Artificial Sequence: Synthetic oligonucleotide
cgcagggccgagac

SEQ ID NO: 30366 - DNA, 14 bp, Artificial Sequence
  Description of Artificial Sequence: Synthetic oligonucleotide
ccgcagggccgaga

SEQ ID NO: 30367 - RNA, 14 nt, Artificial Sequence
  Description of Artificial Sequence: Synthetic oligonucleotide
uccgcagggccgag

SEQ ID NO: 30368 - RNA, 14 nt, Artificial Sequence
  Description of Artificial Sequence: Synthetic oligonucleotide
uuccgcagggccga

SEQ ID NO: 30369 - RNA, 14 nt, Artificial Sequence
  Description of Artificial Sequence: Synthetic oligonucleotide
cuuccgcagggccg

SEQ ID NO: 30370 - RNA, 14 nt, Artificial Sequence
  Description of Artificial Sequence: Synthetic oligonucleotide
ccuuccgcagggcc

SEQ ID NO: 30371 - RNA, 14 nt, Artificial Sequence
  Description of Artificial Sequence: Synthetic oligonucleotide
accuuccgcagggc

SEQ ID NO: 30372 - RNA, 14 nt, Artificial Sequence
  Description of Artificial Sequence: Synthetic oligonucleotide
aaccuuccgcaggg

SEQ ID NO: 30373 - RNA, 14 nt, Artificial Sequence
  Description of Artificial Sequence: Synthetic oligonucleotide
gaaccuuccgcagg

SEQ ID NO: 30374 - RNA, 14 nt, Artificial Sequence
  Description of Artificial Sequence: Synthetic oligonucleotide
ugaaccuuccgcag

SEQ ID NO: 30375 - RNA, 14 nt, Artificial Sequence
  Description of Artificial Sequence: Synthetic oligonucleotide
cugaaccuuccgca

SEQ ID NO: 30376 - RNA, 14 nt, Artificial Sequence
  Description of Artificial Sequence: Synthetic oligonucleotide
ccugaaccuuccgc

SEQ ID NO: 30377 - RNA, 14 nt, Artificial Sequence
  Description of Artificial Sequence: Synthetic oligonucleotide
uccugaaccuuccg

SEQ ID NO: 30378 - RNA, 14 nt, Artificial Sequence
  Description of Artificial Sequence: Synthetic oligonucleotide
uuccugaaccuucc

SEQ ID NO: 30379 - RNA, 14 nt, Artificial Sequence
  Description of Artificial Sequence: Synthetic oligonucleotide
guuccugaaccuuc

SEQ ID NO: 30380 - RNA, 14 nt, Artificial Sequence
  Description of Artificial Sequence: Synthetic oligonucleotide
uguuccugaaccuu

SEQ ID NO: 30381 - RNA, 14 nt, Artificial Sequence
  Description of Artificial Sequence: Synthetic oligonucleotide
uuguuccugaaccu

SEQ ID NO: 30382 - RNA, 14 nt, Artificial Sequence
  Description of Artificial Sequence: Synthetic oligonucleotide
cuuguuccugaacc

SEQ ID NO: 30383 - RNA, 14 nt, Artificial Sequence
  Description of Artificial Sequence: Synthetic oligonucleotide
acuuguuccugaac

SEQ ID NO: 30384 - RNA, 14 nt, Artificial Sequence
  Description of Artificial Sequence: Synthetic oligonucleotide
cacuuguuccugaa

SEQ ID NO: 30385 - RNA, 14 nt, Artificial Sequence
  Description of Artificial Sequence: Synthetic oligonucleotide
gcacuuguuccuga

SEQ ID NO: 30386 - RNA, 14 nt, Artificial Sequence
  Description of Artificial Sequence: Synthetic oligonucleotide
ugcacuuguuccug

SEQ ID NO: 30387 - RNA, 14 nt, Artificial Sequence
  Description of Artificial Sequence: Synthetic oligonucleotide
augcacuuguuccu

SEQ ID NO: 30388 - RNA, 14 nt, Artificial Sequence
  Description of Artificial Sequence: Synthetic oligonucleotide
gaugcacuuguucc

SEQ ID NO: 30389 - RNA, 14 nt, Artificial Sequence
  Description of Artificial Sequence: Synthetic oligonucleotide
ggaugcacuuguuc

SEQ ID NO: 30390 - RNA, 14 nt, Artificial Sequence
  Description of Artificial Sequence: Synthetic oligonucleotide
gggaugcacuuguu

SEQ ID NO: 30391 - RNA, 14 nt, Artificial Sequence
  Description of Artificial Sequence: Synthetic oligonucleotide
ugggaugcacuugu

SEQ ID NO: 30392 - RNA, 14 nt, Artificial Sequence
  Description of Artificial Sequence: Synthetic oligonucleotide
gugggaugcacuug

SEQ ID NO: 30393 - RNA, 14 nt, Artificial Sequence
  Description of Artificial Sequence: Synthetic oligonucleotide
agugggaugcacuu

SEQ ID NO: 30394 - RNA, 14 nt, Artificial Sequence
  Description of Artificial Sequence: Synthetic oligonucleotide
gagugggaugcacu

SEQ ID NO: 30395 - RNA, 14 nt, Artificial Sequence
  Description of Artificial Sequence: Synthetic oligonucleotide
agagugggaugcac

SEQ ID NO: 30396 - RNA, 14 nt, Artificial Sequence
  Description of Artificial Sequence: Synthetic oligonucleotide
gagagugggaugca

SEQ ID NO: 30397 - RNA, 14 nt, Artificial Sequence
  Description of Artificial Sequence: Synthetic oligonucleotide
agagagugggaugc

SEQ ID NO: 30398 - RNA, 14 nt, Artificial Sequence
  Description of Artificial Sequence: Synthetic oligonucleotide
gagagagugggaug

SEQ ID NO: 30399 - RNA, 14 nt, Artificial Sequence
  Description of Artificial Sequence: Synthetic oligonucleotide
ugagagagugggau

SEQ ID NO: 30400 - RNA, 14 nt, Artificial Sequence
  Description of Artificial Sequence: Synthetic oligonucleotide
cugagagaguggga

SEQ ID NO: 30401 - RNA, 14 nt, Artificial Sequence
  Description of Artificial Sequence: Synthetic oligonucleotide
gcugagagaguggg

SEQ ID NO: 30402 - RNA, 14 nt, Artificial Sequence
  Description of Artificial Sequence: Synthetic oligonucleotide
agcugagagagugg

SEQ ID NO: 30403 - RNA, 14 nt, Artificial Sequence
  Description of Artificial Sequence: Synthetic oligonucleotide
uagcugagagagug

SEQ ID NO: 30404 - RNA, 14 nt, Artificial Sequence
  Description of Artificial Sequence: Synthetic oligonucleotide
uuagcugagagagu

SEQ ID NO: 30405 - RNA, 14 nt, Artificial Sequence
  Description of Artificial Sequence: Synthetic oligonucleotide
auuagcugagagag

SEQ ID NO: 30406 - RNA, 14 nt, Artificial Sequence
  Description of Artificial Sequence: Synthetic oligonucleotide
cauuagcugagaga

SEQ ID NO: 30407 - RNA, 14 nt, Artificial Sequence
  Description of Artificial Sequence: Synthetic oligonucleotide
ucauuagcugagag

SEQ ID NO: 30408 - RNA, 14 nt, Artificial Sequence
  Description of Artificial Sequence: Synthetic oligonucleotide
uucauuagcugaga

SEQ ID NO: 30409 - RNA, 14 nt, Artificial Sequence
  Description of Artificial Sequence: Synthetic oligonucleotide
cuucauuagcugag

SEQ ID NO: 30410 - RNA, 14 nt, Artificial Sequence
  Description of Artificial Sequence: Synthetic oligonucleotide
ucuucauuagcuga

SEQ ID NO: 30411 - RNA, 14 nt, Artificial Sequence
  Description of Artificial Sequence: Synthetic oligonucleotide
cucuucauuagcug

SEQ ID NO: 30412 - RNA, 14 nt, Artificial Sequence
  Description of Artificial Sequence: Synthetic oligonucleotide
acucuucauuagcu

SEQ ID NO: 30413 - RNA, 14 nt, Artificial Sequence
  Description of Artificial Sequence: Synthetic oligonucleotide
gacucuucauuagc

SEQ ID NO: 30414 - RNA, 14 nt, Artificial Sequence
  Description of Artificial Sequence: Synthetic oligonucleotide
agacucuucauuag

SEQ ID NO: 30415 - RNA, 14 nt, Artificial Sequence
  Description of Artificial Sequence: Synthetic oligonucleotide
gagacucuucauua

SEQ ID NO: 30416 - RNA, 14 nt, Artificial Sequence
  Description of Artificial Sequence: Synthetic oligonucleotide
agagacucuucauu

SEQ ID NO: 30417 - RNA, 14 nt, Artificial Sequence
  Description of Artificial Sequence: Synthetic oligonucleotide
gagagacucuucau

SEQ ID NO: 30418 - RNA, 14 nt, Artificial Sequence
  Description of Artificial Sequence: Synthetic oligonucleotide
agagagacucuuca

SEQ ID NO: 30419 - RNA, 14 nt, Artificial Sequence
  Description of Artificial Sequence: Synthetic oligonucleotide
uagagagacucuuc

SEQ ID NO: 30420 - RNA, 14 nt, Artificial Sequence
  Description of Artificial Sequence: Synthetic oligonucleotide
auagagagacucuu

SEQ ID NO: 30421 - RNA, 14 nt, Artificial Sequence
  Description of Artificial Sequence: Synthetic oligonucleotide
aauagagagacucu

SEQ ID NO: 30422 - RNA, 14 nt, Artificial Sequence
  Description of Artificial Sequence: Synthetic oligonucleotide
uaauagagagacuc

SEQ ID NO: 30423 - RNA, 14 nt, Artificial Sequence
  Description of Artificial Sequence: Synthetic oligonucleotide
auaauagagagacu

SEQ ID NO: 30424 - RNA, 14 nt, Artificial Sequence
  Description of Artificial Sequence: Synthetic oligonucleotide
uauaauagagagac

SEQ ID NO: 30425 - RNA, 14 nt, Artificial Sequence
  Description of Artificial Sequence: Synthetic oligonucleotide
auauaauagagaga

SEQ ID NO: 30426 - RNA, 14 nt, Artificial Sequence
  Description of Artificial Sequence: Synthetic oligonucleotide
aauauaauagagag

SEQ ID NO: 30427 - RNA, 14 nt, Artificial Sequence
  Description of Artificial Sequence: Synthetic oligonucleotide
caauauaauagaga

SEQ ID NO: 30428 - RNA, 14 nt, Artificial Sequence
  Description of Artificial Sequence: Synthetic oligonucleotide
ucaauauaauagag

SEQ ID NO: 30429 - RNA, 14 nt, Artificial Sequence
  Description of Artificial Sequence: Synthetic oligonucleotide
uucaauauaauaga

SEQ ID NO: 30430 - RNA, 14 nt, Artificial Sequence
  Description of Artificial Sequence: Synthetic oligonucleotide
cuucaauauaauag

SEQ ID NO: 30431 - RNA, 14 nt, Artificial Sequence
  Description of Artificial Sequence: Synthetic oligonucleotide
ucuucaauauaaua

SEQ ID NO: 30432 - RNA, 14 nt, Artificial Sequence
  Description of Artificial Sequence: Synthetic oligonucleotide
cucuucaauauaau

SEQ ID NO: 30433 - RNA, 14 nt, Artificial Sequence
  Description of Artificial Sequence: Synthetic oligonucleotide
gcucuucaauauaa

SEQ ID NO: 30434 - RNA, 14 nt, Artificial Sequence
  Description of Artificial Sequence: Synthetic oligonucleotide
agcucuucaauaua

SEQ ID NO: 30435 - RNA, 14 nt, Artificial Sequence
  Description of Artificial Sequence: Synthetic oligonucleotide
cagcucuucaauau

SEQ ID NO: 30436 - RNA, 14 nt, Artificial Sequence
  Description of Artificial Sequence: Synthetic oligonucleotide
ucagcucuucaaua

SEQ ID NO: 30437 - RNA, 14 nt, Artificial Sequence
  Description of Artificial Sequence: Synthetic oligonucleotide
aucagcucuucaau

SEQ ID NO: 30438 - RNA, 14 nt, Artificial Sequence
  Description of Artificial Sequence: Synthetic oligonucleotide
aaucagcucuucaa

SEQ ID NO: 30439 - RNA, 14 nt, Artificial Sequence
  Description of Artificial Sequence: Synthetic oligonucleotide
aaaucagcucuuca

SEQ ID NO: 30440 - RNA, 14 nt, Artificial Sequence
  Description of Artificial Sequence: Synthetic oligonucleotide
aaaaucagcucuuc

SEQ ID NO: 30441 - RNA, 14 nt, Artificial Sequence
  Description of Artificial Sequence: Synthetic oligonucleotide
aaaaaucagcucuu

SEQ ID NO: 30442 - RNA, 14 nt, Artificial Sequence
  Description of Artificial Sequence: Synthetic oligonucleotide
gaaaaaucagcucu

SEQ ID NO: 30443 - RNA, 14 nt, Artificial Sequence
  Description of Artificial Sequence: Synthetic oligonucleotide
ugaaaaaucagcuc

SEQ ID NO: 30444 - RNA, 14 nt, Artificial Sequence
  Description of Artificial Sequence: Synthetic oligonucleotide
cugaaaaaucagcu

SEQ ID NO: 30445 - RNA, 14 nt, Artificial Sequence
  Description of Artificial Sequence: Synthetic oligonucleotide
gcugaaaaaucagc

SEQ ID NO: 30446 - RNA, 14 nt, Artificial Sequence
  Description of Artificial Sequence: Synthetic oligonucleotide
agcugaaaaaucag

SEQ ID NO: 30447 - RNA, 14 nt, Artificial Sequence
  Description of Artificial Sequence: Synthetic oligonucleotide
cagcugaaaaauca

SEQ ID NO: 30448 - RNA, 14 nt, Artificial Sequence
  Description of Artificial Sequence: Synthetic oligonucleotide
gcagcugaaaaauc

SEQ ID NO: 30449 - RNA, 14 nt, Artificial Sequence
  Description of Artificial Sequence: Synthetic oligonucleotide
agcagcugaaaaau

SEQ ID NO: 30450 - RNA, 14 nt, Artificial Sequence
  Description of Artificial Sequence: Synthetic oligonucleotide
aagcagcugaaaaa

SEQ ID NO: 30451 - RNA, 14 nt, Artificial Sequence
  Description of Artificial Sequence: Synthetic oligonucleotide
uaagcagcugaaaa

SEQ ID NO: 30452 - RNA, 14 nt, Artificial Sequence
  Description of Artificial Sequence: Synthetic oligonucleotide
uuaagcagcugaaa

SEQ ID NO: 30453 - RNA, 14 nt, Artificial Sequence
  Description of Artificial Sequence: Synthetic oligonucleotide
auuaagcagcugaa

SEQ ID NO: 30454 - RNA, 14 nt, Artificial Sequence
  Description of Artificial Sequence: Synthetic oligonucleotide
uauuaagcagcuga

SEQ ID NO: 30455 - RNA, 14 nt, Artificial Sequence
  Description of Artificial Sequence: Synthetic oligonucleotide
uuauuaagcagcug

SEQ ID NO: 30456 - RNA, 14 nt, Artificial Sequence
  Description of Artificial Sequence: Synthetic oligonucleotide
uuuauuaagcagcu

SEQ ID NO: 30457 - RNA, 14 nt, Artificial Sequence
  Description of Artificial Sequence: Synthetic oligonucleotide
auuuauuaagcagc

SEQ ID NO: 30458 - RNA, 14 nt, Artificial Sequence
  Description of Artificial Sequence: Synthetic oligonucleotide
aauuuauuaagcag

SEQ ID NO: 30459 - RNA, 14 nt, Artificial Sequence
  Description of Artificial Sequence: Synthetic oligonucleotide
uaauuuauuaagca

SEQ ID NO: 30460 - RNA, 14 nt, Artificial Sequence
  Description of Artificial Sequence: Synthetic oligonucleotide
auaauuuauuaagc

SEQ ID NO: 30461 - RNA, 14 nt, Artificial Sequence
  Description of Artificial Sequence: Synthetic oligonucleotide
cauaauuuauuaag

SEQ ID NO: 30462 - RNA, 14 nt, Artificial Sequence
  Description of Artificial Sequence: Synthetic oligonucleotide
gcauaauuuauuaa

SEQ ID NO: 30463 - RNA, 14 nt, Artificial Sequence
  Description of Artificial Sequence: Synthetic oligonucleotide
ugcauaauuuauua

SEQ ID NO: 30464 - RNA, 14 nt, Artificial Sequence
  Description of Artificial Sequence: Synthetic oligonucleotide
augcauaauuuauu

SEQ ID NO: 30465 - RNA, 14 nt, Artificial Sequence
  Description of Artificial Sequence: Synthetic oligonucleotide
caugcauaauuuau

SEQ ID NO: 30466 - RNA, 14 nt, Artificial Sequence
  Description of Artificial Sequence: Synthetic oligonucleotide
ccaugcauaauuua

SEQ ID NO: 30467 - RNA, 14 nt, Artificial Sequence
  Description of Artificial Sequence: Synthetic oligonucleotide
gccaugcauaauuu

SEQ ID NO: 30468 - RNA, 14 nt, Artificial Sequence
  Description of Artificial Sequence: Synthetic oligonucleotide
ggccaugcauaauu

SEQ ID NO: 30469 - RNA, 14 nt, Artificial Sequence
  Description of Artificial Sequence: Synthetic oligonucleotide
gggccaugcauaau

SEQ ID NO: 30470 - RNA, 14 nt, Artificial Sequence
  Description of Artificial Sequence: Synthetic oligonucleotide
ugggccaugcauaa

SEQ ID NO: 30471 - RNA, 14 nt, Artificial Sequence
  Description of Artificial Sequence: Synthetic oligonucleotide
cugggccaugcaua

SEQ ID NO: 30472 - RNA, 14 nt, Artificial Sequence
  Description of Artificial Sequence: Synthetic oligonucleotide
gcugggccaugcau

SEQ ID NO: 30473 - RNA, 14 nt, Artificial Sequence
  Description of Artificial Sequence: Synthetic oligonucleotide
ggcugggccaugca

SEQ ID NO: 30474 - RNA, 14 nt, Artificial Sequence
  Description of Artificial Sequence: Synthetic oligonucleotide
uggcugggccaugc

SEQ ID NO: 30475 - RNA, 14 nt, Artificial Sequence
  Description of Artificial Sequence: Synthetic oligonucleotide
uuggcugggccaug

SEQ ID NO: 30476 - RNA, 14 nt, Artificial Sequence
  Description of Artificial Sequence: Synthetic oligonucleotide
cuuggcugggccau

SEQ ID NO: 30477 - RNA, 14 nt, Artificial Sequence
  Description of Artificial Sequence: Synthetic oligonucleotide
ccuuggcugggcca

SEQ ID NO: 30478 - RNA, 14 nt, Artificial Sequence
  Description of Artificial Sequence: Synthetic oligonucleotide
uccuuggcugggcc

SEQ ID NO: 30479 - RNA, 14 nt, Artificial Sequence
  Description of Artificial Sequence: Synthetic oligonucleotide
guccuuggcugggc

SEQ ID NO: 30480 - RNA, 14 nt, Artificial Sequence
  Description of Artificial Sequence: Synthetic oligonucleotide
aguccuuggcuggg

SEQ ID NO: 30481 - RNA, 14 nt, Artificial Sequence
  Description of Artificial Sequence: Synthetic oligonucleotide
caguccuuggcugg

SEQ ID NO: 30482 - RNA, 14 nt, Artificial Sequence
  Description of Artificial Sequence: Synthetic oligonucleotide
acaguccuuggcug

SEQ ID NO: 30483 - RNA, 14 nt, Artificial Sequence
  Description of Artificial Sequence: Synthetic oligonucleotide
aacaguccuuggcu

SEQ ID NO: 30484 - RNA, 14 nt, Artificial Sequence
  Description of Artificial Sequence: Synthetic oligonucleotide
gaacaguccuuggc

SEQ ID NO: 30485 - RNA, 14 nt, Artificial Sequence
  Description of Artificial Sequence: Synthetic oligonucleotide
ugaacaguccuugg

SEQ ID NO: 30486 - RNA, 14 nt, Artificial Sequence
  Description of Artificial Sequence: Synthetic oligonucleotide
uugaacaguccuug

SEQ ID NO: 30487 - RNA, 14 nt, Artificial Sequence
  Description of Artificial Sequence: Synthetic oligonucleotide
cuugaacaguccuu

SEQ ID NO: 30488 - RNA, 14 nt, Artificial Sequence
  Description of Artificial Sequence: Synthetic oligonucleotide
ucuugaacaguccu

SEQ ID NO: 30489 - RNA, 14 nt, Artificial Sequence
  Description of Artificial Sequence: Synthetic oligonucleotide
aucuugaacagucc

SEQ ID NO: 30490 - RNA, 14 nt, Artificial Sequence
  Description of Artificial Sequence: Synthetic oligonucleotide
caucuugaacaguc

SEQ ID NO: 30491 - RNA, 14 nt, Artificial Sequence
  Description of Artificial Sequence: Synthetic oligonucleotide
acaucuugaacagu

SEQ ID NO: 30492 - RNA, 14 nt, Artificial Sequence
  Description of Artificial Sequence: Synthetic oligonucleotide
uacaucuugaacag

SEQ ID NO: 30493 - RNA, 14 nt, Artificial Sequence
  Description of Artificial Sequence: Synthetic oligonucleotide
cuacaucuugaaca

SEQ ID NO: 30494 - RNA, 14 nt, Artificial Sequence
  Description of Artificial Sequence: Synthetic oligonucleotide
ucuacaucuugaac

SEQ ID NO: 30495 - RNA, 14 nt, Artificial Sequence
  Description of Artificial Sequence: Synthetic oligonucleotide
cucuacaucuugaa

SEQ ID NO: 30496 - RNA, 14 nt, Artificial Sequence
  Description of Artificial Sequence: Synthetic oligonucleotide
ccucuacaucuuga

SEQ ID NO: 30497 - RNA, 14 nt, Artificial Sequence
  Description of Artificial Sequence: Synthetic oligonucleotide
uccucuacaucuug

SEQ ID NO: 30498 - RNA, 14 nt, Artificial Sequence
  Description of Artificial Sequence: Synthetic oligonucleotide
cuccucuacaucuu

SEQ ID NO: 30499 - RNA, 14 nt, Artificial Sequence
  Description of Artificial Sequence: Synthetic oligonucleotide
gcuccucuacaucu

SEQ ID NO: 30500 - RNA, 14 nt, Artificial Sequence
  Description of Artificial Sequence: Synthetic oligonucleotide
cgcuccucuacauc

SEQ ID NO: 30501 - RNA, 14 nt, Artificial Sequence
  Description of Artificial Sequence: Synthetic oligonucleotide
ucgcuccucuacau

SEQ ID NO: 30502 - RNA, 14 nt, Artificial Sequence
  Description of Artificial Sequence: Synthetic oligonucleotide
cucgcuccucuaca

SEQ ID NO: 30503 - RNA, 14 nt, Artificial Sequence
  Description of Artificial Sequence: Synthetic oligonucleotide
acucgcuccucuac

SEQ ID NO: 30504 - RNA, 14 nt, Artificial Sequence
  Description of Artificial Sequence: Synthetic oligonucleotide
aacucgcuccucua

SEQ ID NO: 30505 - RNA, 14 nt, Artificial Sequence
  Description of Artificial Sequence: Synthetic oligonucleotide
gaacucgcuccucu

SEQ ID NO: 30506 - RNA, 14 nt, Artificial Sequence
  Description of Artificial Sequence: Synthetic oligonucleotide
ugaacucgcuccuc

SEQ ID NO: 30507 - RNA, 14 nt, Artificial Sequence
  Description of Artificial Sequence: Synthetic oligonucleotide
cugaacucgcuccu

SEQ ID NO: 30508 - RNA, 14 nt, Artificial Sequence
  Description of Artificial Sequence: Synthetic oligonucleotide
ucugaacucgcucc

SEQ ID NO: 30509 - RNA, 14 nt, Artificial Sequence
  Description of Artificial Sequence: Synthetic oligonucleotide
uucugaacucgcuc

SEQ ID NO: 30510 - RNA, 14 nt, Artificial Sequence
  Description of Artificial Sequence: Synthetic oligonucleotide
cuucugaacucgcu

SEQ ID NO: 30511 - RNA, 14 nt, Artificial Sequence
  Description of Artificial Sequence: Synthetic oligonucleotide
ucuucugaacucgc

SEQ ID NO: 30512 - RNA, 14 nt, Artificial Sequence
  Description of Artificial Sequence: Synthetic oligonucleotide
gucuucugaacucg

SEQ ID NO: 30513 - RNA, 14 nt, Artificial Sequence
  Description of Artificial Sequence: Synthetic oligonucleotide
ggucuucugaacuc

SEQ ID NO: 30514 - RNA, 14 nt, Artificial Sequence
  Description of Artificial Sequence: Synthetic oligonucleotide
aggucuucugaacu

SEQ ID NO: 30515 - RNA, 14 nt, Artificial Sequence
  Description of Artificial Sequence: Synthetic oligonucleotide
aaggucuucugaac

SEQ ID NO: 30516 - RNA, 14 nt, Artificial Sequence
  Description of Artificial Sequence: Synthetic oligonucleotide
aaaggucuucugaa

SEQ ID NO: 30517 - RNA, 14 nt, Artificial Sequence
  Description of Artificial Sequence: Synthetic oligonucleotide
gaaaggucuucuga

SEQ ID NO: 30518 - RNA, 14 nt, Artificial Sequence
  Description of Artificial Sequence: Synthetic oligonucleotide
ggaaaggucuucug

SEQ ID NO: 30519 - RNA, 14 nt, Artificial Sequence
  Description of Artificial Sequence: Synthetic oligonucleotide
aggaaaggucuucu

SEQ ID NO: 30520 - RNA, 14 nt, Artificial Sequence
  Description of Artificial Sequence: Synthetic oligonucleotide
gaggaaaggucuuc

SEQ ID NO: 30521 - RNA, 14 nt, Artificial Sequence
  Description of Artificial Sequence: Synthetic oligonucleotide
ugaggaaaggucuu

SEQ ID NO: 30522 - RNA, 14 nt, Artificial Sequence
  Description of Artificial Sequence: Synthetic oligonucleotide
gugaggaaaggucu

SEQ ID NO: 30523 - RNA, 14 nt, Artificial Sequence
  Description of Artificial Sequence: Synthetic oligonucleotide
ggugaggaaagguc

SEQ ID NO: 30524 - RNA, 14 nt, Artificial Sequence
  Description of Artificial Sequence: Synthetic oligonucleotide
gggugaggaaaggu

SEQ ID NO: 30525 - RNA, 14 nt, Artificial Sequence
  Description of Artificial Sequence: Synthetic oligonucleotide
ugggugaggaaagg

SEQ ID NO: 30526 - RNA, 14 nt, Artificial Sequence
  Description of Artificial Sequence: Synthetic oligonucleotide
uugggugaggaaag

SEQ ID NO: 30527 - RNA, 14 nt, Artificial Sequence
  Description of Artificial Sequence: Synthetic oligonucleotide
auugggugaggaaa

SEQ ID NO: 30528 - RNA, 14 nt, Artificial Sequence
  Description of Artificial Sequence: Synthetic oligonucleotide
aauugggugaggaa

SEQ ID NO: 30529 - RNA, 14 nt, Artificial Sequence
  Description of Artificial Sequence: Synthetic oligonucleotide
caauugggugagga

SEQ ID NO: 30530 - RNA, 14 nt, Artificial Sequence
  Description of Artificial Sequence: Synthetic oligonucleotide
ucaauugggugagg

SEQ ID NO: 30531 - RNA, 14 nt, Artificial Sequence
  Description of Artificial Sequence: Synthetic oligonucleotide
aucaauugggugag

SEQ ID NO: 30532 - RNA, 14 nt, Artificial Sequence
  Description of Artificial Sequence: Synthetic oligonucleotide
uaucaauuggguga

SEQ ID NO: 30533 - RNA, 14 nt, Artificial Sequence
  Description of Artificial Sequence: Synthetic oligonucleotide
uuaucaauugggug

SEQ ID NO: 30534 - RNA, 14 nt, Artificial Sequence
  Description of Artificial Sequence: Synthetic oligonucleotide
uuuaucaauugggu

SEQ ID NO: 30535 - RNA, 14 nt, Artificial Sequence
  Description of Artificial Sequence: Synthetic oligonucleotide
auuuaucaauuggg

SEQ ID NO: 30536 - RNA, 14 nt, Artificial Sequence
  Description of Artificial Sequence: Synthetic oligonucleotide
cauuuaucaauugg

SEQ ID NO: 30537 - RNA, 14 nt, Artificial Sequence
  Description of Artificial Sequence: Synthetic oligonucleotide
ccauuuaucaauug

SEQ ID NO: 30538 - RNA, 14 nt, Artificial Sequence
  Description of Artificial Sequence: Synthetic oligonucleotide
cccauuuaucaauu

SEQ ID NO: 30539 - RNA, 14 nt, Artificial Sequence
  Description of Artificial Sequence: Synthetic oligonucleotide
gcccauuuaucaau

SEQ ID NO: 30540 - RNA, 14 nt, Artificial Sequence
  Description of Artificial Sequence: Synthetic oligonucleotide
ggcccauuuaucaa

SEQ ID NO: 30541 - RNA, 14 nt, Artificial Sequence
  Description of Artificial Sequence: Synthetic oligonucleotide
uggcccauuuauca

SEQ ID NO: 30542 - RNA, 14 nt, Artificial Sequence
  Description of Artificial Sequence: Synthetic oligonucleotide
auggcccauuuauc

SEQ ID NO: 30543 - RNA, 14 nt, Artificial Sequence
  Description of Artificial Sequence: Synthetic oligonucleotide
aauggcccauuuau

SEQ ID NO: 30544 - RNA, 14 nt, Artificial Sequence
  Description of Artificial Sequence: Synthetic oligonucleotide
caauggcccauuua

SEQ ID NO: 30545 - RNA, 14 nt, Artificial Sequence
  Description of Artificial Sequence: Synthetic oligonucleotide
gcaauggcccauuu

SEQ ID NO: 30546 - RNA, 14 nt, Artificial Sequence
  Description of Artificial Sequence: Synthetic oligonucleotide
agcaauggcccauu

SEQ ID NO: 30547 - RNA, 14 nt, Artificial Sequence
  Description of Artificial Sequence: Synthetic oligonucleotide
cagcaauggcccau

SEQ ID NO: 30548 - RNA, 14 nt, Artificial Sequence
  Description of Artificial Sequence: Synthetic oligonucleotide
ucagcaauggccca

SEQ ID NO: 30549 - RNA, 14 nt, Artificial Sequence
  Description of Artificial Sequence: Synthetic oligonucleotide
aucagcaauggccc

SEQ ID NO: 30550 - RNA, 14 nt, Artificial Sequence
  Description of Artificial Sequence: Synthetic oligonucleotide
caucagcaauggcc

SEQ ID NO: 30551 - RNA, 14 nt, Artificial Sequence
  Description of Artificial Sequence: Synthetic oligonucleotide
gcaucagcaauggc

SEQ ID NO: 30552 - RNA, 14 nt, Artificial Sequence
  Description of Artificial Sequence: Synthetic oligonucleotide
ugcaucagcaaugg

SEQ ID NO: 30553 - RNA, 14 nt, Artificial Sequence
  Description of Artificial Sequence: Synthetic oligonucleotide
gugcaucagcaaug

SEQ ID NO: 30554 - RNA, 14 nt, Artificial Sequence
  Description of Artificial Sequence: Synthetic oligonucleotide
ugugcaucagcaau

SEQ ID NO: 30555 - RNA, 14 nt, Artificial Sequence
  Description of Artificial Sequence: Synthetic oligonucleotide
uugugcaucagcaa

SEQ ID NO: 30556 - RNA, 14 nt, Artificial Sequence
  Description of Artificial Sequence: Synthetic oligonucleotide
auugugcaucagca

SEQ ID NO: 30557 - RNA, 14 nt, Artificial Sequence
  Description of Artificial Sequence: Synthetic oligonucleotide
gauugugcaucagc

SEQ ID NO: 30558 - RNA, 14 nt, Artificial Sequence
  Description of Artificial Sequence: Synthetic oligonucleotide
agauugugcaucag

SEQ ID NO: 30559 - RNA, 14 nt, Artificial Sequence
  Description of Artificial Sequence: Synthetic oligonucleotide
cagauugugcauca

SEQ ID NO: 30560 - RNA, 14 nt, Artificial Sequence
  Description of Artificial Sequence: Synthetic oligonucleotide
gcagauugugcauc

SEQ ID NO: 30561 - RNA, 14 nt, Artificial Sequence
  Description of Artificial Sequence: Synthetic oligonucleotide
agcagauugugcau

SEQ ID NO: 30562 - RNA, 14 nt, Artificial Sequence
  Description of Artificial Sequence: Synthetic oligonucleotide
uagcagauugugca

SEQ ID NO: 30563 - RNA, 14 nt, Artificial Sequence
  Description of Artificial Sequence: Synthetic oligonucleotide
auagcagauugugc

SEQ ID NO: 30564 - RNA, 14 nt, Artificial Sequence
  Description of Artificial Sequence: Synthetic oligonucleotide
uauagcagauugug

SEQ ID NO: 30565 - RNA, 14 nt, Artificial Sequence
  Description of Artificial Sequence: Synthetic oligonucleotide
cuauagcagauugu

SEQ ID NO: 30566 - RNA, 14 nt, Artificial Sequence
  Description of Artificial Sequence: Synthetic oligonucleotide
ucuauagcagauug

SEQ ID NO: 30567 - RNA, 14 nt, Artificial Sequence
  Description of Artificial Sequence: Synthetic oligonucleotide
uucuauagcagauu

SEQ ID NO: 30568 - RNA, 14 nt, Artificial Sequence
  Description of Artificial Sequence: Synthetic oligonucleotide
uuucuauagcagau

SEQ ID NO: 30569 - RNA, 14 nt, Artificial Sequence
  Description of Artificial Sequence: Synthetic oligonucleotide
uuuucuauagcaga

SEQ ID NO: 30570 - RNA, 14 nt, Artificial Sequence
  Description of Artificial Sequence: Synthetic oligonucleotide
uuuuucuauagcag

SEQ ID NO: 30571 - RNA, 14 nt, Artificial Sequence
  Description of Artificial Sequence: Synthetic oligonucleotide
guuuuucuauagca

SEQ ID NO: 30572 - RNA, 14 nt, Artificial Sequence
  Description of Artificial Sequence: Synthetic oligonucleotide
cguuuuucuauagc

SEQ ID NO: 30573 - RNA, 14 nt, Artificial Sequence
  Description of Artificial Sequence: Synthetic oligonucleotide
ucguuuuucuauag

SEQ ID NO: 30574 - RNA, 14 nt, Artificial Sequence
  Description of Artificial Sequence: Synthetic oligonucleotide
uucguuuuucuaua

SEQ ID NO: 30575 - RNA, 14 nt, Artificial Sequence
  Description of Artificial Sequence: Synthetic oligonucleotide
uuucguuuuucuau

SEQ ID NO: 30576 - RNA, 14 nt, Artificial Sequence
  Description of Artificial Sequence: Synthetic oligonucleotide
uuuucguuuuucua

SEQ ID NO: 30577 - RNA, 14 nt, Artificial Sequence
  Description of Artificial Sequence: Synthetic oligonucleotide
guuuucguuuuucu

SEQ ID NO: 30578 - RNA, 14 nt, Artificial Sequence
  Description of Artificial Sequence: Synthetic oligonucleotide
cguuuucguuuuuc

SEQ ID NO: 30579 - RNA, 14 nt, Artificial Sequence
  Description of Artificial Sequence: Synthetic oligonucleotide
ucguuuucguuuuu

SEQ ID NO: 30580 - RNA, 14 nt, Artificial Sequence
  Description of Artificial Sequence: Synthetic oligonucleotide
uucguuuucguuuu

SEQ ID NO: 30581 - RNA, 14 nt, Artificial Sequence
  Description of Artificial Sequence: Synthetic oligonucleotide
cuucguuuucguuu

SEQ ID NO: 30582 - RNA, 14 nt, Artificial Sequence
  Description of Artificial Sequence: Synthetic oligonucleotide
ucuucguuuucguu

SEQ ID NO: 30583 - RNA, 14 nt, Artificial Sequence
  Description of Artificial Sequence: Synthetic oligonucleotide
uucuucguuuucgu

SEQ ID NO: 30584 - RNA, 14 nt, Artificial Sequence
  Description of Artificial Sequence: Synthetic oligonucleotide
uuucuucguuuucg

SEQ ID NO: 30585 - RNA, 14 nt, Artificial Sequence
  Description of Artificial Sequence: Synthetic oligonucleotide
auuucuucguuuuc

SEQ ID NO: 30586 - RNA, 14 nt, Artificial Sequence
  Description of Artificial Sequence: Synthetic oligonucleotide
gauuucuucguuuu

SEQ ID NO: 30587 - RNA, 14 nt, Artificial Sequence
  Description of Artificial Sequence: Synthetic oligonucleotide
ggauuucuucguuu

SEQ ID NO: 30588 - RNA, 14 nt, Artificial Sequence
  Description of Artificial Sequence: Synthetic oligonucleotide
aggauuucuucguu

SEQ ID NO: 30589 - RNA, 14 nt, Artificial Sequence
  Description of Artificial Sequence: Synthetic oligonucleotide
gaggauuucuucgu

SEQ ID NO: 30590 - RNA, 14 nt, Artificial Sequence
  Description of Artificial Sequence: Synthetic oligonucleotide
agaggauuucuucg

SEQ ID NO: 30591 - RNA, 14 nt, Artificial Sequence
  Description of Artificial Sequence: Synthetic oligonucleotide
aagaggauuucuuc

SEQ ID NO: 30592 - RNA, 14 nt, Artificial Sequence
  Description of Artificial Sequence: Synthetic oligonucleotide
aaagaggauuucuu

SEQ ID NO: 30593 - RNA, 14 nt, Artificial Sequence
  Description of Artificial Sequence: Synthetic oligonucleotide
aaaagaggauuucu

SEQ ID NO: 30594 - RNA, 14 nt, Artificial Sequence
  Description of Artificial Sequence: Synthetic oligonucleotide
uaaaagaggauuuc

SEQ ID NO: 30595 - RNA, 14 nt, Artificial Sequence
  Description of Artificial Sequence: Synthetic oligonucleotide
guaaaagaggauuu

SEQ ID NO: 30596 - RNA, 14 nt, Artificial Sequence
  Description of Artificial Sequence: Synthetic oligonucleotide
aguaaaagaggauu

SEQ ID NO: 30597 - RNA, 14 nt, Artificial Sequence
  Description of Artificial Sequence: Synthetic oligonucleotide
caguaaaagaggau

SEQ ID NO: 30598 - RNA, 14 nt, Artificial Sequence
  Description of Artificial Sequence: Synthetic oligonucleotide
gcaguaaaagagga

SEQ ID NO: 30599 - RNA, 14 nt, Artificial Sequence
  Description of Artificial Sequence: Synthetic oligonucleotide
ggcaguaaaagagg

SEQ ID NO: 30600 - RNA, 14 nt, Artificial Sequence
  Description of Artificial Sequence: Synthetic oligonucleotide
aggcaguaaaagag

SEQ ID NO: 30601 - RNA, 14 nt, Artificial Sequence
  Description of Artificial Sequence: Synthetic oligonucleotide
caggcaguaaaaga

SEQ ID NO: 30602 - RNA, 14 nt, Artificial Sequence
  Description of Artificial Sequence: Synthetic oligonucleotide
acaggcaguaaaag

SEQ ID NO: 30603 - RNA, 14 nt, Artificial Sequence
  Description of Artificial Sequence: Synthetic oligonucleotide
cacaggcaguaaaa

SEQ ID NO: 30604 - RNA, 14 nt, Artificial Sequence
  Description of Artificial Sequence: Synthetic oligonucleotide
ccacaggcaguaaa

SEQ ID NO: 30605 - RNA, 14 nt, Artificial Sequence
  Description of Artificial Sequence: Synthetic oligonucleotide
uccacaggcaguaa

SEQ ID NO: 30606 - RNA, 14 nt, Artificial Sequence
  Description of Artificial Sequence: Synthetic oligonucleotide
guccacaggcagua

SEQ ID NO: 30607 - RNA, 14 nt, Artificial Sequence
  Description of Artificial Sequence: Synthetic oligonucleotide
uguccacaggcagu

SEQ ID NO: 30608 - RNA, 14 nt, Artificial Sequence
  Description of Artificial Sequence: Synthetic oligonucleotide
uuguccacaggcag

SEQ ID NO: 30609 - RNA, 14 nt, Artificial Sequence
  Description of Artificial Sequence: Synthetic oligonucleotide
uuuguccacaggca

SEQ ID NO: 30610 - RNA, 14 nt, Artificial Sequence
  Description of Artificial Sequence: Synthetic oligonucleotide
uuuuguccacaggc

SEQ ID NO: 30611 - RNA, 14 nt, Artificial Sequence
  Description of Artificial Sequence: Synthetic oligonucleotide
auuuuguccacagg

SEQ ID NO: 30612 - RNA, 14 nt, Artificial Sequence
  Description of Artificial Sequence: Synthetic oligonucleotide
gauuuuguccacag

SEQ ID NO: 30613 - RNA, 14 nt, Artificial Sequence
  Description of Artificial Sequence: Synthetic oligonucleotide
ggauuuuguccaca

SEQ ID NO: 30614 - RNA, 14 nt, Artificial Sequence
  Description of Artificial Sequence: Synthetic oligonucleotide
uggauuuuguccac

SEQ ID NO: 30615 - RNA, 14 nt, Artificial Sequence
  Description of Artificial Sequence: Synthetic oligonucleotide
auggauuuugucca

SEQ ID NO: 30616 - RNA, 14 nt, Artificial Sequence
  Description of Artificial Sequence: Synthetic oligonucleotide
gauggauuuugucc

SEQ ID NO: 30617 - RNA, 14 nt, Artificial Sequence
  Description of Artificial Sequence: Synthetic oligonucleotide
ggauggauuuuguc

SEQ ID NO: 30618 - RNA, 14 nt, Artificial Sequence
  Description of Artificial Sequence: Synthetic oligonucleotide
aggauggauuuugu

SEQ ID NO: 30619 - RNA, 14 nt, Artificial Sequence
  Description of Artificial Sequence: Synthetic oligonucleotide
aaggauggauuuug

SEQ ID NO: 30620 - RNA, 14 nt, Artificial Sequence
  Description of Artificial Sequence: Synthetic oligonucleotide
gaaggauggauuuu

SEQ ID NO: 30621 - RNA, 14 nt, Artificial Sequence
  Description of Artificial Sequence: Synthetic oligonucleotide
cgaaggauggauuu

SEQ ID NO: 30622 - RNA, 14 nt, Artificial Sequence
  Description of Artificial Sequence: Synthetic oligonucleotide
acgaaggauggauu

SEQ ID NO: 30623 - RNA, 14 nt, Artificial Sequence
  Description of Artificial Sequence: Synthetic oligonucleotide
aacgaaggauggau

SEQ ID NO: 30624 - RNA, 14 nt, Artificial Sequence
  Description of Artificial Sequence: Synthetic oligonucleotide
caacgaaggaugga

SEQ ID NO: 30625 - RNA, 14 nt, Artificial Sequence
  Description of Artificial Sequence: Synthetic oligonucleotide
ucaacgaaggaugg

SEQ ID NO: 30626 - RNA, 14 nt, Artificial Sequence
  Description of Artificial Sequence: Synthetic oligonucleotide
uucaacgaaggaug

SEQ ID NO: 30627 - RNA, 14 nt, Artificial Sequence
  Description of Artificial Sequence: Synthetic oligonucleotide
cuucaacgaaggau

SEQ ID NO: 30628 - RNA, 14 nt, Artificial Sequence
  Description of Artificial Sequence: Synthetic oligonucleotide
ccuucaacgaagga

SEQ ID NO: 30629 - RNA, 14 nt, Artificial Sequence
  Description of Artificial Sequence: Synthetic oligonucleotide
uccuucaacgaagg

SEQ ID NO: 30630 - RNA, 14 nt, Artificial Sequence
  Description of Artificial Sequence: Synthetic oligonucleotide
uuccuucaacgaag

SEQ ID NO: 30631 - RNA, 14 nt, Artificial Sequence
  Description of Artificial Sequence: Synthetic oligonucleotide
cuuccuucaacgaa

SEQ ID NO: 30632 - RNA, 14 nt, Artificial Sequence
  Description of Artificial Sequence: Synthetic oligonucleotide
acuuccuucaacga

SEQ ID NO: 30633 - RNA, 14 nt, Artificial Sequence
  Description of Artificial Sequence: Synthetic oligonucleotide
uacuuccuucaacg

SEQ ID NO: 30634 - RNA, 14 nt, Artificial Sequence
  Description of Artificial Sequence: Synthetic oligonucleotide
auacuuccuucaac

SEQ ID NO: 30635 - RNA, 14 nt, Artificial Sequence
  Description of Artificial Sequence: Synthetic oligonucleotide
aauacuuccuucaa

SEQ ID NO: 30636 - RNA, 14 nt, Artificial Sequence
  Description of Artificial Sequence: Synthetic oligonucleotide
uaauacuuccuuca

SEQ ID NO: 30637 - RNA, 14 nt, Artificial Sequence
  Description of Artificial Sequence: Synthetic oligonucleotide
cuaauacuuccuuc

SEQ ID NO: 30638 - RNA, 14 nt, Artificial Sequence
  Description of Artificial Sequence: Synthetic oligonucleotide
ccuaauacuuccuu

SEQ ID NO: 30639 - RNA, 14 nt, Artificial Sequence
  Description of Artificial Sequence: Synthetic oligonucleotide
cccuaauacuuccu

SEQ ID NO: 30640 - RNA, 14 nt, Artificial Sequence
  Description of Artificial Sequence: Synthetic oligonucleotide
acccuaauacuucc

SEQ ID NO: 30641 - RNA, 14 nt, Artificial Sequence
  Description of Artificial Sequence: Synthetic oligonucleotide
uacccuaauacuuc

SEQ ID NO: 30642 - RNA, 14 nt, Artificial Sequence
  Description of Artificial Sequence: Synthetic oligonucleotide
guacccuaauacuu

SEQ ID NO: 30643 - RNA, 14 nt, Artificial Sequence
  Description of Artificial Sequence: Synthetic oligonucleotide
uguacccuaauacu

SEQ ID NO: 30644 - RNA, 14 nt, Artificial Sequence
  Description of Artificial Sequence: Synthetic oligonucleotide
uuguacccuaauac

SEQ ID NO: 30645 - RNA, 14 nt, Artificial Sequence
  Description of Artificial Sequence: Synthetic oligonucleotide
uuuguacccuaaua

SEQ ID NO: 30646 - RNA, 14 nt, Artificial Sequence
  Description of Artificial Sequence: Synthetic oligonucleotide
cuuuguacccuaau

SEQ ID NO: 30647 - RNA, 14 nt, Artificial Sequence
  Description of Artificial Sequence: Synthetic oligonucleotide
acuuuguacccuaa

SEQ ID NO: 30648 - RNA, 14 nt, Artificial Sequence
  Description of Artificial Sequence: Synthetic oligonucleotide
cacuuuguacccua

SEQ ID NO: 30649 - RNA, 14 nt, Artificial Sequence
  Description of Artificial Sequence: Synthetic oligonucleotide
ccacuuuguacccu

SEQ ID NO: 30650 - RNA, 14 nt, Artificial Sequence
  Description of Artificial Sequence: Synthetic oligonucleotide
uccacuuuguaccc

SEQ ID NO: 30651 - RNA, 14 nt, Artificial Sequence
  Description of Artificial Sequence: Synthetic oligonucleotide
guccacuuuguacc

SEQ ID NO: 30652 - RNA, 14 nt, Artificial Sequence
  Description of Artificial Sequence: Synthetic oligonucleotide
aguccacuuuguac

SEQ ID NO: 30653 - RNA, 14 nt, Artificial Sequence
  Description of Artificial Sequence: Synthetic oligonucleotide
uaguccacuuugua

SEQ ID NO: 30654 - RNA, 14 nt, Artificial Sequence
  Description of Artificial Sequence: Synthetic oligonucleotide
guaguccacuuugu

SEQ ID NO: 30655 - RNA, 14 nt, Artificial Sequence
  Description of Artificial Sequence: Synthetic oligonucleotide
gguaguccacuuug

SEQ ID NO: 30656 - RNA, 14 nt, Artificial Sequence
  Description of Artificial Sequence: Synthetic oligonucleotide
ugguaguccacuuu

SEQ ID NO: 30657 - RNA, 14 nt, Artificial Sequence
  Description of Artificial Sequence: Synthetic oligonucleotide
augguaguccacuu

SEQ ID NO: 30658 - RNA, 14 nt, Artificial Sequence
  Description of Artificial Sequence: Synthetic oligonucleotide
caugguaguccacu

SEQ ID NO: 30659 - RNA, 14 nt, Artificial Sequence
  Description of Artificial Sequence: Synthetic oligonucleotide
acaugguaguccac

SEQ ID NO: 30660 - RNA, 14 nt, Artificial Sequence
  Description of Artificial Sequence: Synthetic oligonucleotide
uacaugguagucca

SEQ ID NO: 30661 - RNA, 14 nt, Artificial Sequence
  Description of Artificial Sequence: Synthetic oligonucleotide
auacaugguagucc

SEQ ID NO: 30662 - RNA, 14 nt, Artificial Sequence
  Description of Artificial Sequence: Synthetic oligonucleotide
gauacaugguaguc

SEQ ID NO: 30663 - RNA, 14 nt, Artificial Sequence
  Description of Artificial Sequence: Synthetic oligonucleotide
ggauacaugguagu

SEQ ID NO: 30664 - RNA, 14 nt, Artificial Sequence
  Description of Artificial Sequence: Synthetic oligonucleotide
gggauacaugguag

SEQ ID NO: 30665 - RNA, 14 nt, Artificial Sequence
  Description of Artificial Sequence: Synthetic oligonucleotide
agggauacauggua

SEQ ID NO: 30666 - RNA, 14 nt, Artificial Sequence
  Description of Artificial Sequence: Synthetic oligonucleotide
uagggauacauggu

SEQ ID NO: 30667 - RNA, 14 nt, Artificial Sequence
  Description of Artificial Sequence: Synthetic oligonucleotide
auagggauacaugg

SEQ ID NO: 30668 - RNA, 14 nt, Artificial Sequence
  Description of Artificial Sequence: Synthetic oligonucleotide
uauagggauacaug

SEQ ID NO: 30669 - RNA, 14 nt, Artificial Sequence
  Description of Artificial Sequence: Synthetic oligonucleotide
auauagggauacau

SEQ ID NO: 30670 - RNA, 14 nt, Artificial Sequence
  Description of Artificial Sequence: Synthetic oligonucleotide
uauauagggauaca

SEQ ID NO: 30671 - RNA, 14 nt, Artificial Sequence
  Description of Artificial Sequence: Synthetic oligonucleotide
auauauagggauac

SEQ ID NO: 30672 - RNA, 14 nt, Artificial Sequence
  Description of Artificial Sequence: Synthetic oligonucleotide
aauauauagggaua

SEQ ID NO: 30673 - RNA, 14 nt, Artificial Sequence
  Description of Artificial Sequence: Synthetic oligonucleotide
caauauauagggau

SEQ ID NO: 30674 - RNA, 14 nt, Artificial Sequence
  Description of Artificial Sequence: Synthetic oligonucleotide
acaauauauaggga

SEQ ID NO: 30675 - RNA, 14 nt, Artificial Sequence
  Description of Artificial Sequence: Synthetic oligonucleotide
cacaauauauaggg

SEQ ID NO: 30676 - RNA, 14 nt, Artificial Sequence
  Description of Artificial Sequence: Synthetic oligonucleotide
ccacaauauauagg

SEQ ID NO: 30677 - RNA, 14 nt, Artificial Sequence
  Description of Artificial Sequence: Synthetic oligonucleotide
gccacaauauauag

SEQ ID NO: 30678 - RNA, 14 nt, Artificial Sequence
  Description of Artificial Sequence: Synthetic oligonucleotide
agccacaauauaua

SEQ ID NO: 30679 - RNA, 14 nt, Artificial Sequence
  Description of Artificial Sequence: Synthetic oligonucleotide
cagccacaauauau

SEQ ID NO: 30680 - RNA, 14 nt, Artificial Sequence
  Description of Artificial Sequence: Synthetic oligonucleotide
acagccacaauaua

SEQ ID NO: 30681 - RNA, 14 nt, Artificial Sequence
  Description of Artificial Sequence: Synthetic oligonucleotide
uacagccacaauau

SEQ ID NO: 30682 - RNA, 14 nt, Artificial Sequence
  Description of Artificial Sequence: Synthetic oligonucleotide
guacagccacaaua

SEQ ID NO: 30683 - RNA, 14 nt, Artificial Sequence
  Description of Artificial Sequence: Synthetic oligonucleotide
aguacagccacaau

SEQ ID NO: 30684 - RNA, 14 nt, Artificial Sequence
  Description of Artificial Sequence: Synthetic oligonucleotide
uaguacagccacaa

SEQ ID NO: 30685 - RNA, 14 nt, Artificial Sequence
  Description of Artificial Sequence: Synthetic oligonucleotide
cuaguacagccaca

SEQ ID NO: 30686 - RNA, 14 nt, Artificial Sequence
  Description of Artificial Sequence: Synthetic oligonucleotide
ucuaguacagccac

SEQ ID NO: 30687 - RNA, 14 nt, Artificial Sequence
  Description of Artificial Sequence: Synthetic oligonucleotide
cucuaguacagcca

SEQ ID NO: 30688 - RNA, 14 nt, Artificial Sequence
  Description of Artificial Sequence: Synthetic oligonucleotide
acucuaguacagcc

SEQ ID NO: 30689 - RNA, 14 nt, Artificial Sequence
  Description of Artificial Sequence: Synthetic oligonucleotide
uacucuaguacagc

SEQ ID NO: 30690 - RNA, 14 nt, Artificial Sequence
  Description of Artificial Sequence: Synthetic oligonucleotide
auacucuaguacag

SEQ ID NO: 30691 - RNA, 14 nt, Artificial Sequence
  Description of Artificial Sequence: Synthetic oligonucleotide
uauacucuaguaca

SEQ ID NO: 30692 - RNA, 14 nt, Artificial Sequence
  Description of Artificial Sequence: Synthetic oligonucleotide
auauacucuaguac

SEQ ID NO: 30693 - RNA, 14 nt, Artificial Sequence
  Description of Artificial Sequence: Synthetic oligonucleotide
gauauacucuagua

SEQ ID NO: 30694 - RNA, 14 nt, Artificial Sequence
  Description of Artificial Sequence: Synthetic oligonucleotide
agauauacucuagu

SEQ ID NO: 30695 - RNA, 14 nt, Artificial Sequence
  Description of Artificial Sequence: Synthetic oligonucleotide
gagauauacucuag

SEQ ID NO: 30696 - RNA, 14 nt, Artificial Sequence
  Description of Artificial Sequence: Synthetic oligonucleotide
ugagauauacucua

SEQ ID NO: 30697 - RNA, 14 nt, Artificial Sequence
  Description of Artificial Sequence: Synthetic oligonucleotide
cugagauauacucu

SEQ ID NO: 30698 - RNA, 14 nt, Artificial Sequence
  Description of Artificial Sequence: Synthetic oligonucleotide
gcugagauauacuc

SEQ ID NO: 30699 - RNA, 14 nt, Artificial Sequence
  Description of Artificial Sequence: Synthetic oligonucleotide
agcugagauauacu

SEQ ID NO: 30700 - RNA, 14 nt, Artificial Sequence
  Description of Artificial Sequence: Synthetic oligonucleotide
cagcugagauauac

SEQ ID NO: 30701 - RNA, 14 nt, Artificial Sequence
  Description of Artificial Sequence: Synthetic oligonucleotide
ucagcugagauaua

SEQ ID NO: 30702 - RNA, 14 nt, Artificial Sequence
  Description of Artificial Sequence: Synthetic oligonucleotide
aucagcugagauau

SEQ ID NO: 30703 - RNA, 14 nt, Artificial Sequence
  Description of Artificial Sequence: Synthetic oligonucleotide
uaucagcugagaua

SEQ ID NO: 30704 - RNA, 14 nt, Artificial Sequence
  Description of Artificial Sequence: Synthetic oligonucleotide
auaucagcugagau

SEQ ID NO: 30705 - RNA, 14 nt, Artificial Sequence
  Description of Artificial Sequence: Synthetic oligonucleotide
aauaucagcugaga

SEQ ID NO: 30706 - RNA, 14 nt, Artificial Sequence
  Description of Artificial Sequence: Synthetic oligonucleotide
aaauaucagcugag

SEQ ID NO: 30707 - RNA, 14 nt, Artificial Sequence
  Description of Artificial Sequence: Synthetic oligonucleotide
aaaauaucagcuga

SEQ ID NO: 30708 - RNA, 14 nt, Artificial Sequence
  Description of Artificial Sequence: Synthetic oligonucleotide
uaaaauaucagcug

SEQ ID NO: 30709 - RNA, 14 nt, Artificial Sequence
  Description of Artificial Sequence: Synthetic oligonucleotide
uuaaaauaucagcu

SEQ ID NO: 30710 - RNA, 14 nt, Artificial Sequence
  Description of Artificial Sequence: Synthetic oligonucleotide
uuuaaaauaucagc

SEQ ID NO: 30711 - RNA, 14 nt, Artificial Sequence
  Description of Artificial Sequence: Synthetic oligonucleotide
uuuuaaaauaucag

SEQ ID NO: 30712 - RNA, 14 nt, Artificial Sequence
  Description of Artificial Sequence: Synthetic oligonucleotide
auuuuaaaauauca

SEQ ID NO: 30713 - RNA, 14 nt, Artificial Sequence
  Description of Artificial Sequence: Synthetic oligonucleotide
aauuuuaaaauauc

SEQ ID NO: 30714 - RNA, 14 nt, Artificial Sequence
  Description of Artificial Sequence: Synthetic oligonucleotide
caauuuuaaaauau

SEQ ID NO: 30715 - RNA, 14 nt, Artificial Sequence
  Description of Artificial Sequence: Synthetic oligonucleotide
ccaauuuuaaaaua

SEQ ID NO: 30716 - RNA, 14 nt, Artificial Sequence
  Description of Artificial Sequence: Synthetic oligonucleotide
gccaauuuuaaaau

SEQ ID NO: 30717 - RNA, 14 nt, Artificial Sequence
  Description of Artificial Sequence: Synthetic oligonucleotide
agccaauuuuaaaa

SEQ ID NO: 30718 - RNA, 14 nt, Artificial Sequence
  Description of Artificial Sequence: Synthetic oligonucleotide
cagccaauuuuaaa

SEQ ID NO: 30719 - RNA, 14 nt, Artificial Sequence
  Description of Artificial Sequence: Synthetic oligonucleotide
ccagccaauuuuaa

SEQ ID NO: 30720 - RNA, 14 nt, Artificial Sequence
  Description of Artificial Sequence: Synthetic oligonucleotide
accagccaauuuua

SEQ ID NO: 30721 - RNA, 14 nt, Artificial Sequence
  Description of Artificial Sequence: Synthetic oligonucleotide
uaccagccaauuuu

SEQ ID NO: 30722 - RNA, 14 nt, Artificial Sequence
  Description of Artificial Sequence: Synthetic oligonucleotide
uuaccagccaauuu

SEQ ID NO: 30723 - RNA, 14 nt, Artificial Sequence
  Description of Artificial Sequence: Synthetic oligonucleotide
auuaccagccaauu

SEQ ID NO: 30724 - RNA, 14 nt, Artificial Sequence
  Description of Artificial Sequence: Synthetic oligonucleotide
aauuaccagccaau

SEQ ID NO: 30725 - RNA, 14 nt, Artificial Sequence
  Description of Artificial Sequence: Synthetic oligonucleotide
uaauuaccagccaa

SEQ ID NO: 30726 - RNA, 14 nt, Artificial Sequence
  Description of Artificial Sequence: Synthetic oligonucleotide
auaauuaccagcca

SEQ ID NO: 30727 - RNA, 14 nt, Artificial Sequence
  Description of Artificial Sequence: Synthetic oligonucleotide
cauaauuaccagcc

SEQ ID NO: 30728 - RNA, 14 nt, Artificial Sequence
  Description of Artificial Sequence: Synthetic oligonucleotide
acauaauuaccagc

SEQ ID NO: 30729 - RNA, 14 nt, Artificial Sequence
  Description of Artificial Sequence: Synthetic oligonucleotide
aacauaauuaccag

SEQ ID NO: 30730 - RNA, 14 nt, Artificial Sequence
  Description of Artificial Sequence: Synthetic oligonucleotide
aaacauaauuacca

SEQ ID NO: 30731 - RNA, 14 nt, Artificial Sequence
  Description of Artificial Sequence: Synthetic oligonucleotide
aaaacauaauuacc

SEQ ID NO: 30732 - RNA, 14 nt, Artificial Sequence
  Description of Artificial Sequence: Synthetic oligonucleotide
aaaaacauaauuac

SEQ ID NO: 30733 - RNA, 14 nt, Artificial Sequence
  Description of Artificial Sequence: Synthetic oligonucleotide
uaaaaacauaauua

SEQ ID NO: 30734 - RNA, 14 nt, Artificial Sequence
  Description of Artificial Sequence: Synthetic oligonucleotide
uuaaaaacauaauu

SEQ ID NO: 30735 - RNA, 14 nt, Artificial Sequence
  Description of Artificial Sequence: Synthetic oligonucleotide
auuaaaaacauaau

SEQ ID NO: 30736 - RNA, 14 nt, Artificial Sequence
  Description of Artificial Sequence: Synthetic oligonucleotide
uauuaaaaacauaa

SEQ ID NO: 30737 - RNA, 14 nt, Artificial Sequence
  Description of Artificial Sequence: Synthetic oligonucleotide
auauuaaaaacaua

SEQ ID NO: 30738 - RNA, 14 nt, Artificial Sequence
  Description of Artificial Sequence: Synthetic oligonucleotide
gauauuaaaaacau

SEQ ID NO: 30739 - RNA, 14 nt, Artificial Sequence
  Description of Artificial Sequence: Synthetic oligonucleotide
ggauauuaaaaaca

SEQ ID NO: 30740 - RNA, 14 nt, Artificial Sequence
  Description of Artificial Sequence: Synthetic oligonucleotide
cggauauuaaaaac

SEQ ID NO: 30741 - RNA, 14 nt, Artificial Sequence
  Description of Artificial Sequence: Synthetic oligonucleotide
ccggauauuaaaaa

SEQ ID NO: 30742 - RNA, 14 nt, Artificial Sequence
  Description of Artificial Sequence: Synthetic oligonucleotide
gccggauauuaaaa

SEQ ID NO: 30743 - RNA, 14 nt, Artificial Sequence
  Description of Artificial Sequence: Synthetic oligonucleotide
ugccggauauuaaa

SEQ ID NO: 30744 - RNA, 14 nt, Artificial Sequence
  Description of Artificial Sequence: Synthetic oligonucleotide
augccggauauuaa

SEQ ID NO: 30745 - RNA, 14 nt, Artificial Sequence
  Description of Artificial Sequence: Synthetic oligonucleotide
aaugccggauauua

SEQ ID NO: 30746 - RNA, 14 nt, Artificial Sequence
  Description of Artificial Sequence: Synthetic oligonucleotide
uaaugccggauauu

SEQ ID NO: 30747 - RNA, 14 nt, Artificial Sequence
  Description of Artificial Sequence: Synthetic oligonucleotide
auaaugccggauau

SEQ ID NO: 30748 - RNA, 14 nt, Artificial Sequence
  Description of Artificial Sequence: Synthetic oligonucleotide
cauaaugccggaua

SEQ ID NO: 30749 - RNA, 14 nt, Artificial Sequence
  Description of Artificial Sequence: Synthetic oligonucleotide
ucauaaugccggau

SEQ ID NO: 30750 - RNA, 14 nt, Artificial Sequence
  Description of Artificial Sequence: Synthetic oligonucleotide
uucauaaugccgga

SEQ ID NO: 30751 - RNA, 14 nt, Artificial Sequence
  Description of Artificial Sequence: Synthetic oligonucleotide
uuucauaaugccgg

SEQ ID NO: 30752 - RNA, 14 nt, Artificial Sequence
  Description of Artificial Sequence: Synthetic oligonucleotide
auuucauaaugccg

SEQ ID NO: 30753 - RNA, 14 nt, Artificial Sequence
  Description of Artificial Sequence: Synthetic oligonucleotide
uauuucauaaugcc

SEQ ID NO: 30754 - RNA, 14 nt, Artificial Sequence
  Description of Artificial Sequence: Synthetic oligonucleotide
auauuucauaaugc

SEQ ID NO: 30755 - RNA, 14 nt, Artificial Sequence
  Description of Artificial Sequence: Synthetic oligonucleotide
gauauuucauaaug

SEQ ID NO: 30756 - RNA, 14 nt, Artificial Sequence
  Description of Artificial Sequence: Synthetic oligonucleotide
agauauuucauaau

SEQ ID NO: 30757 - RNA, 14 nt, Artificial Sequence
  Description of Artificial Sequence: Synthetic oligonucleotide
gagauauuucauaa

SEQ ID NO: 30758 - RNA, 14 nt, Artificial Sequence
  Description of Artificial Sequence: Synthetic oligonucleotide
ugagauauuucaua

SEQ ID NO: 30759 - RNA, 14 nt, Artificial Sequence
  Description of Artificial Sequence: Synthetic oligonucleotide
cugagauauuucau

SEQ ID NO: 30760 - RNA, 14 nt, Artificial Sequence
  Description of Artificial Sequence: Synthetic oligonucleotide
gcugagauauuuca

SEQ ID NO: 30761 - RNA, 14 nt, Artificial Sequence
  Description of Artificial Sequence: Synthetic oligonucleotide
ugcugagauauuuc

SEQ ID NO: 30762 - RNA, 14 nt, Artificial Sequence
  Description of Artificial Sequence: Synthetic oligonucleotide
cugcugagauauuu

SEQ ID NO: 30763 - RNA, 14 nt, Artificial Sequence
  Description of Artificial Sequence: Synthetic oligonucleotide
ccugcugagauauu

SEQ ID NO: 30764 - RNA, 14 nt, Artificial Sequence
  Description of Artificial Sequence: Synthetic oligonucleotide
uccugcugagauau

SEQ ID NO: 30765 - RNA, 14 nt, Artificial Sequence
  Description of Artificial Sequence: Synthetic oligonucleotide
guccugcugagaua

SEQ ID NO: 30766 - RNA, 14 nt, Artificial Sequence
  Description of Artificial Sequence: Synthetic oligonucleotide
uguccugcugagau

SEQ ID NO: 30767 - RNA, 14 nt, Artificial Sequence
  Description of Artificial Sequence: Synthetic oligonucleotide
auguccugcugaga

SEQ ID NO: 30768 - RNA, 14 nt, Artificial Sequence
  Description of Artificial Sequence: Synthetic oligonucleotide
aauguccugcugag

SEQ ID NO: 30769 - RNA, 14 nt, Artificial Sequence
  Description of Artificial Sequence: Synthetic oligonucleotide
uaauguccugcuga

SEQ ID NO: 30770 - RNA, 14 nt, Artificial Sequence
  Description of Artificial Sequence: Synthetic oligonucleotide
uuaauguccugcug

SEQ ID NO: 30771 - RNA, 14 nt, Artificial Sequence
  Description of Artificial Sequence: Synthetic oligonucleotide
uuuaauguccugcu

SEQ ID NO: 30772 - RNA, 14 nt, Artificial Sequence
  Description of Artificial Sequence: Synthetic oligonucleotide
cuuuaauguccugc

SEQ ID NO: 30773 - RNA, 14 nt, Artificial Sequence
  Description of Artificial Sequence: Synthetic oligonucleotide
acuuuaauguccug

SEQ ID NO: 30774 - RNA, 14 nt, Artificial Sequence
  Description of Artificial Sequence: Synthetic oligonucleotide
cacuuuaauguccu

SEQ ID NO: 30775 - RNA, 14 nt, Artificial Sequence
  Description of Artificial Sequence: Synthetic oligonucleotide
acacuuuaaugucc

SEQ ID NO: 30776 - RNA, 14 nt, Artificial Sequence
  Description of Artificial Sequence: Synthetic oligonucleotide
gacacuuuaauguc

SEQ ID NO: 30777 - RNA, 14 nt, Artificial Sequence
  Description of Artificial Sequence: Synthetic oligonucleotide
ugacacuuuaaugu

SEQ ID NO: 30778 - RNA, 14 nt, Artificial Sequence
  Description of Artificial Sequence: Synthetic oligonucleotide
uugacacuuuaaug

SEQ ID NO: 30779 - RNA, 14 nt, Artificial Sequence
  Description of Artificial Sequence: Synthetic oligonucleotide
auugacacuuuaau

SEQ ID NO: 30780 - RNA, 14 nt, Artificial Sequence
  Description of Artificial Sequence: Synthetic oligonucleotide
cauugacacuuuaa

SEQ ID NO: 30781 - RNA, 14 nt, Artificial Sequence
  Description of Artificial Sequence: Synthetic oligonucleotide
acauugacacuuua

SEQ ID NO: 30782 - RNA, 14 nt, Artificial Sequence
  Description of Artificial Sequence: Synthetic oligonucleotide
cacauugacacuuu

SEQ ID NO: 30783 - RNA, 14 nt, Artificial Sequence
  Description of Artificial Sequence: Synthetic oligonucleotide
acacauugacacuu

SEQ ID NO: 30784 - RNA, 14 nt, Artificial Sequence
  Description of Artificial Sequence: Synthetic oligonucleotide
cacacauugacacu

SEQ ID NO: 30785 - RNA, 14 nt, Artificial Sequence
  Description of Artificial Sequence: Synthetic oligonucleotide
gcacacauugacac

SEQ ID NO: 30786 - RNA, 14 nt, Artificial Sequence
  Description of Artificial Sequence: Synthetic oligonucleotide
cgcacacauugaca

SEQ ID NO: 30787 - RNA, 14 nt, Artificial Sequence
  Description of Artificial Sequence: Synthetic oligonucleotide
ccgcacacauugac

SEQ ID NO: 30788 - RNA, 14 nt, Artificial Sequence
  Description of Artificial Sequence: Synthetic oligonucleotide
uccgcacacauuga

SEQ ID NO: 30789 - RNA, 14 nt, Artificial Sequence
  Description of Artificial Sequence: Synthetic oligonucleotide
auccgcacacauug

SEQ ID NO: 30790 - RNA, 14 nt, Artificial Sequence
  Description of Artificial Sequence: Synthetic oligonucleotide
uauccgcacacauu

SEQ ID NO: 30791 - RNA, 14 nt, Artificial Sequence
  Description of Artificial Sequence: Synthetic oligonucleotide
uuauccgcacacau

SEQ ID NO: 30792 - RNA, 14 nt, Artificial Sequence
  Description of Artificial Sequence: Synthetic oligonucleotide
cuuauccgcacaca

SEQ ID NO: 30793 - RNA, 14 nt, Artificial Sequence
  Description of Artificial Sequence: Synthetic oligonucleotide
ccuuauccgcacac

SEQ ID NO: 30794 - RNA, 14 nt, Artificial Sequence
  Description of Artificial Sequence: Synthetic oligonucleotide
accuuauccgcaca

SEQ ID NO: 30795 - RNA, 14 nt, Artificial Sequence
  Description of Artificial Sequence: Synthetic oligonucleotide
aaccuuauccgcac

SEQ ID NO: 30796 - RNA, 14 nt, Artificial Sequence
  Description of Artificial Sequence: Synthetic oligonucleotide
aaaccuuauccgca

SEQ ID NO: 30797 - RNA, 14 nt, Artificial Sequence
  Description of Artificial Sequence: Synthetic oligonucleotide
aaaaccuuauccgc

SEQ ID NO: 30798 - RNA, 14 nt, Artificial Sequence
  Description of Artificial Sequence: Synthetic oligonucleotide
caaaaccuuauccg

SEQ ID NO: 30799 - RNA, 14 nt, Artificial Sequence
  Description of Artificial Sequence: Synthetic oligonucleotide
ucaaaaccuuaucc

SEQ ID NO: 30800 - RNA, 14 nt, Artificial Sequence
  Description of Artificial Sequence: Synthetic oligonucleotide
aucaaaaccuuauc

SEQ ID NO: 30801 - RNA, 14 nt, Artificial Sequence
  Description of Artificial Sequence: Synthetic oligonucleotide
caucaaaaccuuau

SEQ ID NO: 30802 - RNA, 14 nt, Artificial Sequence
  Description of Artificial Sequence: Synthetic oligonucleotide
ccaucaaaaccuua

SEQ ID NO: 30803 - RNA, 14 nt, Artificial Sequence
  Description of Artificial Sequence: Synthetic oligonucleotide
uccaucaaaaccuu

SEQ ID NO: 30804 - RNA, 14 nt, Artificial Sequence
  Description of Artificial Sequence: Synthetic oligonucleotide
guccaucaaaaccu

SEQ ID NO: 30805 - RNA, 14 nt, Artificial Sequence
  Description of Artificial Sequence: Synthetic oligonucleotide
uguccaucaaaacc

SEQ ID NO: 30806 - RNA, 14 nt, Artificial Sequence
  Description of Artificial Sequence: Synthetic oligonucleotide
auguccaucaaaac

SEQ ID NO: 30807 - RNA, 14 nt, Artificial Sequence
  Description of Artificial Sequence: Synthetic oligonucleotide
cauguccaucaaaa

SEQ ID NO: 30808 - RNA, 14 nt, Artificial Sequence
  Description of Artificial Sequence: Synthetic oligonucleotide
acauguccaucaaa

SEQ ID NO: 30809 - RNA, 14 nt, Artificial Sequence
  Description of Artificial Sequence: Synthetic oligonucleotide
aacauguccaucaa

SEQ ID NO: 30810 - RNA, 14 nt, Artificial Sequence
  Description of Artificial Sequence: Synthetic oligonucleotide
aaacauguccauca

SEQ ID NO: 30811 - RNA, 14 nt, Artificial Sequence
  Description of Artificial Sequence: Synthetic oligonucleotide
caaacauguccauc

SEQ ID NO: 30812 - RNA, 14 nt, Artificial Sequence
  Description of Artificial Sequence: Synthetic oligonucleotide
ucaaacauguccau

SEQ ID NO: 30813 - RNA, 14 nt, Artificial Sequence
  Description of Artificial Sequence: Synthetic oligonucleotide
aucaaacaugucca

SEQ ID NO: 30814 - RNA, 14 nt, Artificial Sequence
  Description of Artificial Sequence: Synthetic oligonucleotide
gaucaaacaugucc

SEQ ID NO: 30815 - RNA, 14 nt, Artificial Sequence
  Description of Artificial Sequence: Synthetic oligonucleotide
ugaucaaacauguc

SEQ ID NO: 30816 - RNA, 14 nt, Artificial Sequence
  Description of Artificial Sequence: Synthetic oligonucleotide
cugaucaaacaugu

SEQ ID NO: 30817 - RNA, 14 nt, Artificial Sequence
  Description of Artificial Sequence: Synthetic oligonucleotide
ccugaucaaacaug

SEQ ID NO: 30818 - RNA, 14 nt, Artificial Sequence
  Description of Artificial Sequence: Synthetic oligonucleotide
uccugaucaaacau

SEQ ID NO: 30819 - RNA, 14 nt, Artificial Sequence
  Description of Artificial Sequence: Synthetic oligonucleotide
auccugaucaaaca

SEQ ID NO: 30820 - RNA, 14 nt, Artificial Sequence
  Description of Artificial Sequence: Synthetic oligonucleotide
cauccugaucaaac

SEQ ID NO: 30821 - RNA, 14 nt, Artificial Sequence
  Description of Artificial Sequence: Synthetic oligonucleotide
ucauccugaucaaa

SEQ ID NO: 30822 - RNA, 14 nt, Artificial Sequence
  Description of Artificial Sequence: Synthetic oligonucleotide
gucauccugaucaa

SEQ ID NO: 30823 - RNA, 14 nt, Artificial Sequence
  Description of Artificial Sequence: Synthetic oligonucleotide
ugucauccugauca

SEQ ID NO: 30824 - RNA, 14 nt, Artificial Sequence
  Description of Artificial Sequence: Synthetic oligonucleotide
augucauccugauc

SEQ ID NO: 30825 - RNA, 14 nt, Artificial Sequence
  Description of Artificial Sequence: Synthetic oligonucleotide
uaugucauccugau

SEQ ID NO: 30826 - RNA, 14 nt, Artificial Sequence
  Description of Artificial Sequence: Synthetic oligonucleotide
cuaugucauccuga

SEQ ID NO: 30827 - RNA, 14 nt, Artificial Sequence
  Description of Artificial Sequence: Synthetic oligonucleotide
ccuaugucauccug

SEQ ID NO: 30828 - RNA, 14 nt, Artificial Sequence
  Description of Artificial Sequence: Synthetic oligonucleotide
accuaugucauccu

SEQ ID NO: 30829 - RNA, 14 nt, Artificial Sequence
  Description of Artificial Sequence: Synthetic oligonucleotide
aaccuaugucaucc

SEQ ID NO: 30830 - RNA, 14 nt, Artificial Sequence
  Description of Artificial Sequence: Synthetic oligonucleotide
aaaccuaugucauc

SEQ ID NO: 30831 - RNA, 14 nt, Artificial Sequence
  Description of Artificial Sequence: Synthetic oligonucleotide
caaaccuaugucau

SEQ ID NO: 30832 - RNA, 14 nt, Artificial Sequence
  Description of Artificial Sequence: Synthetic oligonucleotide
ccaaaccuauguca

SEQ ID NO: 30833 - RNA, 14 nt, Artificial Sequence
  Description of Artificial Sequence: Synthetic oligonucleotide
accaaaccuauguc

SEQ ID NO: 30834 - RNA, 14 nt, Artificial Sequence
  Description of Artificial Sequence: Synthetic oligonucleotide
aaccaaaccuaugu

SEQ ID NO: 30835 - RNA, 14 nt, Artificial Sequence
  Description of Artificial Sequence: Synthetic oligonucleotide
aaaccaaaccuaug

SEQ ID NO: 30836 - RNA, 14 nt, Artificial Sequence
  Description of Artificial Sequence: Synthetic oligonucleotide
gaaaccaaaccuau

SEQ ID NO: 30837 - RNA, 14 nt, Artificial Sequence
  Description of Artificial Sequence: Synthetic oligonucleotide
agaaaccaaaccua

SEQ ID NO: 30838 - RNA, 14 nt, Artificial Sequence
  Description of Artificial Sequence: Synthetic oligonucleotide
gagaaaccaaaccu

SEQ ID NO: 30839 - DNA, 14 bp, Artificial Sequence
  Description of Artificial Sequence: Synthetic oligonucleotide
agagaaaccaaacc

SEQ ID NO: 30840 - DNA, 14 bp, Artificial Sequence
  Description of Artificial Sequence: Synthetic oligonucleotide
gagagaaaccaaac

SEQ ID NO: 30841 - DNA, 14 bp, Artificial Sequence
  Description of Artificial Sequence: Synthetic oligonucleotide
agagagaaaccaaa

SEQ ID NO: 30842 - DNA, 14 bp, Artificial Sequence
  Description of Artificial Sequence: Synthetic oligonucleotide
cagagagaaaccaa

SEQ ID NO: 30843 - DNA, 14 bp, Artificial Sequence
  Description of Artificial Sequence: Synthetic oligonucleotide
acagagagaaacca

SEQ ID NO: 30844 - DNA, 14 bp, Artificial Sequence
  Description of Artificial Sequence: Synthetic oligonucleotide
cacagagagaaacc

SEQ ID NO: 30845 - RNA, 14 nt, Artificial Sequence
  Description of Artificial Sequence: Synthetic oligonucleotide
ucacagagagaaac

SEQ ID NO: 30846 - RNA, 14 nt, Artificial Sequence
  Description of Artificial Sequence: Synthetic oligonucleotide
uucacagagagaaa

SEQ ID NO: 30847 - RNA, 14 nt, Artificial Sequence
  Description of Artificial Sequence: Synthetic oligonucleotide
cuucacagagagaa

SEQ ID NO: 30848 - RNA, 14 nt, Artificial Sequence
  Description of Artificial Sequence: Synthetic oligonucleotide
ucuucacagagaga

SEQ ID NO: 30849 - RNA, 14 nt, Artificial Sequence
  Description of Artificial Sequence: Synthetic oligonucleotide
aucuucacagagag

SEQ ID NO: 30850 - RNA, 14 nt, Artificial Sequence
  Description of Artificial Sequence: Synthetic oligonucleotide
caucuucacagaga

SEQ ID NO: 30851 - RNA, 14 nt, Artificial Sequence
  Description of Artificial Sequence: Synthetic oligonucleotide
ucaucuucacagag

SEQ ID NO: 30852 - RNA, 14 nt, Artificial Sequence
  Description of Artificial Sequence: Synthetic oligonucleotide
uucaucuucacaga

SEQ ID NO: 30853 - RNA, 14 nt, Artificial Sequence
  Description of Artificial Sequence: Synthetic oligonucleotide
guucaucuucacag

SEQ ID NO: 30854 - RNA, 14 nt, Artificial Sequence
  Description of Artificial Sequence: Synthetic oligonucleotide
gguucaucuucaca

SEQ ID NO: 30855 - RNA, 14 nt, Artificial Sequence
  Description of Artificial Sequence: Synthetic oligonucleotide
agguucaucuucac

SEQ ID NO: 30856 - RNA, 14 nt, Artificial Sequence
  Description of Artificial Sequence: Synthetic oligonucleotide
uagguucaucuuca

SEQ ID NO: 30857 - RNA, 14 nt, Artificial Sequence
  Description of Artificial Sequence: Synthetic oligonucleotide
cuagguucaucuuc

SEQ ID NO: 30858 - RNA, 14 nt, Artificial Sequence
  Description of Artificial Sequence: Synthetic oligonucleotide
acuagguucaucuu

SEQ ID NO: 30859 - RNA, 14 nt, Artificial Sequence
  Description of Artificial Sequence: Synthetic oligonucleotide
aacuagguucaucu

SEQ ID NO: 30860 - RNA, 14 nt, Artificial Sequence
  Description of Artificial Sequence: Synthetic oligonucleotide
gaacuagguucauc

SEQ ID NO: 30861 - RNA, 14 nt, Artificial Sequence
  Description of Artificial Sequence: Synthetic oligonucleotide
agaacuagguucau

SEQ ID NO: 30862 - RNA, 14 nt, Artificial Sequence
  Description of Artificial Sequence: Synthetic oligonucleotide
aagaacuagguuca

SEQ ID NO: 30863 - RNA, 14 nt, Artificial Sequence
  Description of Artificial Sequence: Synthetic oligonucleotide
gaagaacuagguuc

SEQ ID NO: 30864 - RNA, 14 nt, Artificial Sequence
  Description of Artificial Sequence: Synthetic oligonucleotide
agaagaacuagguu

SEQ ID NO: 30865 - RNA, 14 nt, Artificial Sequence
  Description of Artificial Sequence: Synthetic oligonucleotide
cagaagaacuaggu

SEQ ID NO: 30866 - RNA, 14 nt, Artificial Sequence
  Description of Artificial Sequence: Synthetic oligonucleotide
ccagaagaacuagg

SEQ ID NO: 30867 - RNA, 14 nt, Artificial Sequence
  Description of Artificial Sequence: Synthetic oligonucleotide
accagaagaacuag

SEQ ID NO: 30868 - RNA, 14 nt, Artificial Sequence
  Description of Artificial Sequence: Synthetic oligonucleotide
caccagaagaacua

SEQ ID NO: 30869 - RNA, 14 nt, Artificial Sequence
  Description of Artificial Sequence: Synthetic oligonucleotide
ucaccagaagaacu

SEQ ID NO: 30870 - RNA, 14 nt, Artificial Sequence
  Description of Artificial Sequence: Synthetic oligonucleotide
uucaccagaagaac

SEQ ID NO: 30871 - RNA, 14 nt, Artificial Sequence
  Description of Artificial Sequence: Synthetic oligonucleotide
auucaccagaagaa

SEQ ID NO: 30872 - RNA, 14 nt, Artificial Sequence
  Description of Artificial Sequence: Synthetic oligonucleotide
aauucaccagaaga

SEQ ID NO: 30873 - RNA, 14 nt, Artificial Sequence
  Description of Artificial Sequence: Synthetic oligonucleotide
uaauucaccagaag

SEQ ID NO: 30874 - RNA, 14 nt, Artificial Sequence
  Description of Artificial Sequence: Synthetic oligonucleotide
uuaauucaccagaa

SEQ ID NO: 30875 - RNA, 14 nt, Artificial Sequence
  Description of Artificial Sequence: Synthetic oligonucleotide
uuuaauucaccaga

SEQ ID NO: 30876 - RNA, 14 nt, Artificial Sequence
  Description of Artificial Sequence: Synthetic oligonucleotide
guuuaauucaccag

SEQ ID NO: 30877 - RNA, 14 nt, Artificial Sequence
  Description of Artificial Sequence: Synthetic oligonucleotide
aguuuaauucacca

SEQ ID NO: 30878 - RNA, 14 nt, Artificial Sequence
  Description of Artificial Sequence: Synthetic oligonucleotide
uaguuuaauucacc

SEQ ID NO: 30879 - RNA, 14 nt, Artificial Sequence
  Description of Artificial Sequence: Synthetic oligonucleotide
guaguuuaauucac

SEQ ID NO: 30880 - RNA, 14 nt, Artificial Sequence
  Description of Artificial Sequence: Synthetic oligonucleotide
aguaguuuaauuca

SEQ ID NO: 30881 - RNA, 14 nt, Artificial Sequence
  Description of Artificial Sequence: Synthetic oligonucleotide
uaguaguuuaauuc

SEQ ID NO: 30882 - RNA, 14 nt, Artificial Sequence
  Description of Artificial Sequence: Synthetic oligonucleotide
auaguaguuuaauu

SEQ ID NO: 30883 - RNA, 14 nt, Artificial Sequence
  Description of Artificial Sequence: Synthetic oligonucleotide
cauaguaguuuaau

SEQ ID NO: 30884 - RNA, 14 nt, Artificial Sequence
  Description of Artificial Sequence: Synthetic oligonucleotide
ucauaguaguuuaa

SEQ ID NO: 30885 - RNA, 14 nt, Artificial Sequence
  Description of Artificial Sequence: Synthetic oligonucleotide
aucauaguaguuua

SEQ ID NO: 30886 - RNA, 14 nt, Artificial Sequence
  Description of Artificial Sequence: Synthetic oligonucleotide
gaucauaguaguuu

SEQ ID NO: 30887 - RNA, 14 nt, Artificial Sequence
  Description of Artificial Sequence: Synthetic oligonucleotide
agaucauaguaguu

SEQ ID NO: 30888 - RNA, 14 nt, Artificial Sequence
  Description of Artificial Sequence: Synthetic oligonucleotide
aagaucauaguagu

SEQ ID NO: 30889 - RNA, 14 nt, Artificial Sequence
  Description of Artificial Sequence: Synthetic oligonucleotide
caagaucauaguag

SEQ ID NO: 30890 - RNA, 14 nt, Artificial Sequence
  Description of Artificial Sequence: Synthetic oligonucleotide
acaagaucauagua

SEQ ID NO: 30891 - RNA, 14 nt, Artificial Sequence
  Description of Artificial Sequence: Synthetic oligonucleotide
gacaagaucauagu

SEQ ID NO: 30892 - RNA, 14 nt, Artificial Sequence
  Description of Artificial Sequence: Synthetic oligonucleotide
ugacaagaucauag

SEQ ID NO: 30893 - RNA, 14 nt, Artificial Sequence
  Description of Artificial Sequence: Synthetic oligonucleotide
cugacaagaucaua

SEQ ID NO: 30894 - RNA, 14 nt, Artificial Sequence
  Description of Artificial Sequence: Synthetic oligonucleotide
ucugacaagaucau

SEQ ID NO: 30895 - RNA, 14 nt, Artificial Sequence
  Description of Artificial Sequence: Synthetic oligonucleotide
uucugacaagauca

SEQ ID NO: 30896 - RNA, 14 nt, Artificial Sequence
  Description of Artificial Sequence: Synthetic oligonucleotide
guucugacaagauc

SEQ ID NO: 30897 - RNA, 14 nt, Artificial Sequence
  Description of Artificial Sequence: Synthetic oligonucleotide
aguucugacaagau

SEQ ID NO: 30898 - RNA, 14 nt, Artificial Sequence
  Description of Artificial Sequence: Synthetic oligonucleotide
caguucugacaaga

SEQ ID NO: 30899 - RNA, 14 nt, Artificial Sequence
  Description of Artificial Sequence: Synthetic oligonucleotide
ucaguucugacaag

SEQ ID NO: 30900 - RNA, 14 nt, Artificial Sequence
  Description of Artificial Sequence: Synthetic oligonucleotide
uucaguucugacaa

SEQ ID NO: 30901 - RNA, 14 nt, Artificial Sequence
  Description of Artificial Sequence: Synthetic oligonucleotide
uuucaguucugaca

SEQ ID NO: 30902 - RNA, 14 nt, Artificial Sequence
  Description of Artificial Sequence: Synthetic oligonucleotide
auuucaguucugac

SEQ ID NO: 30903 - RNA, 14 nt, Artificial Sequence
  Description of Artificial Sequence: Synthetic oligonucleotide
gauuucaguucuga

SEQ ID NO: 30904 - RNA, 14 nt, Artificial Sequence
  Description of Artificial Sequence: Synthetic oligonucleotide
cgauuucaguucug

SEQ ID NO: 30905 - RNA, 14 nt, Artificial Sequence
  Description of Artificial Sequence: Synthetic oligonucleotide
gcgauuucaguucu

SEQ ID NO: 30906 - RNA, 14 nt, Artificial Sequence
  Description of Artificial Sequence: Synthetic oligonucleotide
ugcgauuucaguuc

SEQ ID NO: 30907 - RNA, 14 nt, Artificial Sequence
  Description of Artificial Sequence: Synthetic oligonucleotide
cugcgauuucaguu

SEQ ID NO: 30908 - RNA, 14 nt, Artificial Sequence
  Description of Artificial Sequence: Synthetic oligonucleotide
ucugcgauuucagu

SEQ ID NO: 30909 - RNA, 14 nt, Artificial Sequence
  Description of Artificial Sequence: Synthetic oligonucleotide
uucugcgauuucag

SEQ ID NO: 30910 - RNA, 14 nt, Artificial Sequence
  Description of Artificial Sequence: Synthetic oligonucleotide
cuucugcgauuuca

SEQ ID NO: 30911 - RNA, 14 nt, Artificial Sequence
  Description of Artificial Sequence: Synthetic oligonucleotide
ucuucugcgauuuc

SEQ ID NO: 30912 - RNA, 14 nt, Artificial Sequence
  Description of Artificial Sequence: Synthetic oligonucleotide
uucuucugcgauuu

SEQ ID NO: 30913 - RNA, 14 nt, Artificial Sequence
  Description of Artificial Sequence: Synthetic oligonucleotide
uuucuucugcgauu

SEQ ID NO: 30914 - RNA, 14 nt, Artificial Sequence
  Description of Artificial Sequence: Synthetic oligonucleotide
cuuucuucugcgau

SEQ ID NO: 30915 - RNA, 14 nt, Artificial Sequence
  Description of Artificial Sequence: Synthetic oligonucleotide
ucuuucuucugcga

SEQ ID NO: 30916 - RNA, 14 nt, Artificial Sequence
  Description of Artificial Sequence: Synthetic oligonucleotide
gucuuucuucugcg

SEQ ID NO: 30917 - RNA, 14 nt, Artificial Sequence
  Description of Artificial Sequence: Synthetic oligonucleotide
ugucuuucuucugc

SEQ ID NO: 30918 - RNA, 14 nt, Artificial Sequence
  Description of Artificial Sequence: Synthetic oligonucleotide
cugucuuucuucug

SEQ ID NO: 30919 - RNA, 14 nt, Artificial Sequence
  Description of Artificial Sequence: Synthetic oligonucleotide
acugucuuucuucu

SEQ ID NO: 30920 - RNA, 14 nt, Artificial Sequence
  Description of Artificial Sequence: Synthetic oligonucleotide
uacugucuuucuuc

SEQ ID NO: 30921 - RNA, 14 nt, Artificial Sequence
  Description of Artificial Sequence: Synthetic oligonucleotide
auacugucuuucuu

SEQ ID NO: 30922 - RNA, 14 nt, Artificial Sequence
  Description of Artificial Sequence: Synthetic oligonucleotide
gauacugucuuucu

SEQ ID NO: 30923 - RNA, 14 nt, Artificial Sequence
  Description of Artificial Sequence: Synthetic oligonucleotide
agauacugucuuuc

SEQ ID NO: 30924 - RNA, 14 nt, Artificial Sequence
  Description of Artificial Sequence: Synthetic oligonucleotide
uagauacugucuuu

SEQ ID NO: 30925 - RNA, 14 nt, Artificial Sequence
  Description of Artificial Sequence: Synthetic oligonucleotide
guagauacugucuu

SEQ ID NO: 30926 - RNA, 14 nt, Artificial Sequence
  Description of Artificial Sequence: Synthetic oligonucleotide
cguagauacugucu

SEQ ID NO: 30927 - RNA, 14 nt, Artificial Sequence
  Description of Artificial Sequence: Synthetic oligonucleotide
ccguagauacuguc

SEQ ID NO: 30928 - RNA, 14 nt, Artificial Sequence
  Description of Artificial Sequence: Synthetic oligonucleotide
cccguagauacugu

SEQ ID NO: 30929 - RNA, 14 nt, Artificial Sequence
  Description of Artificial Sequence: Synthetic oligonucleotide
ucccguagauacug

SEQ ID NO: 30930 - RNA, 14 nt, Artificial Sequence
  Description of Artificial Sequence: Synthetic oligonucleotide
uucccguagauacu

SEQ ID NO: 30931 - RNA, 14 nt, Artificial Sequence
  Description of Artificial Sequence: Synthetic oligonucleotide
auucccguagauac

SEQ ID NO: 30932 - RNA, 14 nt, Artificial Sequence
  Description of Artificial Sequence: Synthetic oligonucleotide
aauucccguagaua

SEQ ID NO: 30933 - RNA, 14 nt, Artificial Sequence
  Description of Artificial Sequence: Synthetic oligonucleotide
uaauucccguagau

SEQ ID NO: 30934 - RNA, 14 nt, Artificial Sequence
  Description of Artificial Sequence: Synthetic oligonucleotide
uuaauucccguaga

SEQ ID NO: 30935 - RNA, 14 nt, Artificial Sequence
  Description of Artificial Sequence: Synthetic oligonucleotide
uuuaauucccguag

SEQ ID NO: 30936 - RNA, 14 nt, Artificial Sequence
  Description of Artificial Sequence: Synthetic oligonucleotide
auuuaauucccgua

SEQ ID NO: 30937 - RNA, 14 nt, Artificial Sequence
  Description of Artificial Sequence: Synthetic oligonucleotide
uauuuaauucccgu

SEQ ID NO: 30938 - RNA, 14 nt, Artificial Sequence
  Description of Artificial Sequence: Synthetic oligonucleotide
auauuuaauucccg

SEQ ID NO: 30939 - RNA, 14 nt, Artificial Sequence
  Description of Artificial Sequence: Synthetic oligonucleotide
cauauuuaauuccc

SEQ ID NO: 30940 - RNA, 14 nt, Artificial Sequence
  Description of Artificial Sequence: Synthetic oligonucleotide
ucauauuuaauucc

SEQ ID NO: 30941 - RNA, 14 nt, Artificial Sequence
  Description of Artificial Sequence: Synthetic oligonucleotide
aucauauuuaauuc

SEQ ID NO: 30942 - RNA, 14 nt, Artificial Sequence
  Description of Artificial Sequence: Synthetic oligonucleotide
gaucauauuuaauu

SEQ ID NO: 30943 - RNA, 14 nt, Artificial Sequence
  Description of Artificial Sequence: Synthetic oligonucleotide
ugaucauauuuaau

SEQ ID NO: 30944 - RNA, 14 nt, Artificial Sequence
  Description of Artificial Sequence: Synthetic oligonucleotide
augaucauauuuaa

SEQ ID NO: 30945 - RNA, 14 nt, Artificial Sequence
  Description of Artificial Sequence: Synthetic oligonucleotide
uaugaucauauuua

SEQ ID NO: 30946 - RNA, 14 nt, Artificial Sequence
  Description of Artificial Sequence: Synthetic oligonucleotide
uuaugaucauauuu

SEQ ID NO: 30947 - RNA, 14 nt, Artificial Sequence
  Description of Artificial Sequence: Synthetic oligonucleotide
uuuaugaucauauu

SEQ ID NO: 30948 - RNA, 14 nt, Artificial Sequence
  Description of Artificial Sequence: Synthetic oligonucleotide
uuuuaugaucauau

SEQ ID NO: 30949 - RNA, 14 nt, Artificial Sequence
  Description of Artificial Sequence: Synthetic oligonucleotide
cuuuuaugaucaua

SEQ ID NO: 30950 - RNA, 14 nt, Artificial Sequence
  Description of Artificial Sequence: Synthetic oligonucleotide
acuuuuaugaucau

SEQ ID NO: 30951 - RNA, 14 nt, Artificial Sequence
  Description of Artificial Sequence: Synthetic oligonucleotide
cacuuuuaugauca

SEQ ID NO: 30952 - RNA, 14 nt, Artificial Sequence
  Description of Artificial Sequence: Synthetic oligonucleotide
acacuuuuaugauc

SEQ ID NO: 30953 - RNA, 14 nt, Artificial Sequence
  Description of Artificial Sequence: Synthetic oligonucleotide
aacacuuuuaugau

SEQ ID NO: 30954 - RNA, 14 nt, Artificial Sequence
  Description of Artificial Sequence: Synthetic oligonucleotide
aaacacuuuuauga

SEQ ID NO: 30955 - RNA, 14 nt, Artificial Sequence
  Description of Artificial Sequence: Synthetic oligonucleotide
gaaacacuuuuaug

SEQ ID NO: 30956 - RNA, 14 nt, Artificial Sequence
  Description of Artificial Sequence: Synthetic oligonucleotide
cgaaacacuuuuau

SEQ ID NO: 30957 - RNA, 14 nt, Artificial Sequence
  Description of Artificial Sequence: Synthetic oligonucleotide
ucgaaacacuuuua

SEQ ID NO: 30958 - RNA, 14 nt, Artificial Sequence
  Description of Artificial Sequence: Synthetic oligonucleotide
cucgaaacacuuuu

SEQ ID NO: 30959 - RNA, 14 nt, Artificial Sequence
  Description of Artificial Sequence: Synthetic oligonucleotide
ucucgaaacacuuu

SEQ ID NO: 30960 - RNA, 14 nt, Artificial Sequence
  Description of Artificial Sequence: Synthetic oligonucleotide
uucucgaaacacuu

SEQ ID NO: 30961 - RNA, 14 nt, Artificial Sequence
  Description of Artificial Sequence: Synthetic oligonucleotide
cuucucgaaacacu

SEQ ID NO: 30962 - RNA, 14 nt, Artificial Sequence
  Description of Artificial Sequence: Synthetic oligonucleotide
gcuucucgaaacac

SEQ ID NO: 30963 - RNA, 14 nt, Artificial Sequence
  Description of Artificial Sequence: Synthetic oligonucleotide
ggcuucucgaaaca

SEQ ID NO: 30964 - RNA, 14 nt, Artificial Sequence
  Description of Artificial Sequence: Synthetic oligonucleotide
aggcuucucgaaac

SEQ ID NO: 30965 - RNA, 14 nt, Artificial Sequence
  Description of Artificial Sequence: Synthetic oligonucleotide
aaggcuucucgaaa

SEQ ID NO: 30966 - RNA, 14 nt, Artificial Sequence
  Description of Artificial Sequence: Synthetic oligonucleotide
aaaggcuucucgaa

SEQ ID NO: 30967 - RNA, 14 nt, Artificial Sequence
  Description of Artificial Sequence: Synthetic oligonucleotide
gaaaggcuucucga

SEQ ID NO: 30968 - RNA, 14 nt, Artificial Sequence
  Description of Artificial Sequence: Synthetic oligonucleotide
agaaaggcuucucg

SEQ ID NO: 30969 - RNA, 14 nt, Artificial Sequence
  Description of Artificial Sequence: Synthetic oligonucleotide
aagaaaggcuucuc

SEQ ID NO: 30970 - RNA, 14 nt, Artificial Sequence
  Description of Artificial Sequence: Synthetic oligonucleotide
aaagaaaggcuucu

SEQ ID NO: 30971 - RNA, 14 nt, Artificial Sequence
  Description of Artificial Sequence: Synthetic oligonucleotide
gaaagaaaggcuuc

SEQ ID NO: 30972 - RNA, 14 nt, Artificial Sequence
  Description of Artificial Sequence: Synthetic oligonucleotide
agaaagaaaggcuu

SEQ ID NO: 30973 - RNA, 14 nt, Artificial Sequence
  Description of Artificial Sequence: Synthetic oligonucleotide
cagaaagaaaggcu

SEQ ID NO: 30974 - RNA, 14 nt, Artificial Sequence
  Description of Artificial Sequence: Synthetic oligonucleotide
ucagaaagaaaggc

SEQ ID NO: 30975 - RNA, 14 nt, Artificial Sequence
  Description of Artificial Sequence: Synthetic oligonucleotide
aucagaaagaaagg

SEQ ID NO: 30976 - RNA, 14 nt, Artificial Sequence
  Description of Artificial Sequence: Synthetic oligonucleotide
uaucagaaagaaag

SEQ ID NO: 30977 - RNA, 14 nt, Artificial Sequence
  Description of Artificial Sequence: Synthetic oligonucleotide
cuaucagaaagaaa

SEQ ID NO: 30978 - RNA, 14 nt, Artificial Sequence
  Description of Artificial Sequence: Synthetic oligonucleotide
ucuaucagaaagaa

SEQ ID NO: 30979 - RNA, 14 nt, Artificial Sequence
  Description of Artificial Sequence: Synthetic oligonucleotide
uucuaucagaaaga

SEQ ID NO: 30980 - RNA, 14 nt, Artificial Sequence
  Description of Artificial Sequence: Synthetic oligonucleotide
uuucuaucagaaag

SEQ ID NO: 30981 - RNA, 14 nt, Artificial Sequence
  Description of Artificial Sequence: Synthetic oligonucleotide
cuuucuaucagaaa

SEQ ID NO: 30982 - RNA, 14 nt, Artificial Sequence
  Description of Artificial Sequence: Synthetic oligonucleotide
gcuuucuaucagaa

SEQ ID NO: 30983 - RNA, 14 nt, Artificial Sequence
  Description of Artificial Sequence: Synthetic oligonucleotide
agcuuucuaucaga

SEQ ID NO: 30984 - RNA, 14 nt, Artificial Sequence
  Description of Artificial Sequence: Synthetic oligonucleotide
cagcuuucuaucag

SEQ ID NO: 30985 - RNA, 14 nt, Artificial Sequence
  Description of Artificial Sequence: Synthetic oligonucleotide
acagcuuucuauca

SEQ ID NO: 30986 - RNA, 14 nt, Artificial Sequence
  Description of Artificial Sequence: Synthetic oligonucleotide
aacagcuuucuauc

SEQ ID NO: 30987 - RNA, 14 nt, Artificial Sequence
  Description of Artificial Sequence: Synthetic oligonucleotide
aaacagcuuucuau

SEQ ID NO: 30988 - RNA, 14 nt, Artificial Sequence
  Description of Artificial Sequence: Synthetic oligonucleotide
uaaacagcuuucua

SEQ ID NO: 30989 - RNA, 14 nt, Artificial Sequence
  Description of Artificial Sequence: Synthetic oligonucleotide
uuaaacagcuuucu

SEQ ID NO: 30990 - RNA, 14 nt, Artificial Sequence
  Description of Artificial Sequence: Synthetic oligonucleotide
uuuaaacagcuuuc

SEQ ID NO: 30991 - RNA, 14 nt, Artificial Sequence
  Description of Artificial Sequence: Synthetic oligonucleotide
guuuaaacagcuuu

SEQ ID NO: 30992 - RNA, 14 nt, Artificial Sequence
  Description of Artificial Sequence: Synthetic oligonucleotide
gguuuaaacagcuu

SEQ ID NO: 30993 - RNA, 14 nt, Artificial Sequence
  Description of Artificial Sequence: Synthetic oligonucleotide
agguuuaaacagcu

SEQ ID NO: 30994 - RNA, 14 nt, Artificial Sequence
  Description of Artificial Sequence: Synthetic oligonucleotide
aagguuuaaacagc

SEQ ID NO: 30995 - RNA, 14 nt, Artificial Sequence
  Description of Artificial Sequence: Synthetic oligonucleotide
gaagguuuaaacag

SEQ ID NO: 30996 - RNA, 14 nt, Artificial Sequence
  Description of Artificial Sequence: Synthetic oligonucleotide
agaagguuuaaaca

SEQ ID NO: 30997 - RNA, 14 nt, Artificial Sequence
  Description of Artificial Sequence: Synthetic oligonucleotide
cagaagguuuaaac

SEQ ID NO: 30998 - RNA, 14 nt, Artificial Sequence
  Description of Artificial Sequence: Synthetic oligonucleotide
ucagaagguuuaaa

SEQ ID NO: 30999 - RNA, 14 nt, Artificial Sequence
  Description of Artificial Sequence: Synthetic oligonucleotide
aucagaagguuuaa

SEQ ID NO: 31000 - RNA, 14 nt, Artificial Sequence
  Description of Artificial Sequence: Synthetic oligonucleotide
uaucagaagguuua

SEQ ID NO: 31001 - RNA, 14 nt, Artificial Sequence
  Description of Artificial Sequence: Synthetic oligonucleotide
auaucagaagguuu

SEQ ID NO: 31002 - RNA, 14 nt, Artificial Sequence
  Description of Artificial Sequence: Synthetic oligonucleotide
gauaucagaagguu

SEQ ID NO: 31003 - RNA, 14 nt, Artificial Sequence
  Description of Artificial Sequence: Synthetic oligonucleotide
cgauaucagaaggu

SEQ ID NO: 31004 - RNA, 14 nt, Artificial Sequence
  Description of Artificial Sequence: Synthetic oligonucleotide
ucgauaucagaagg

SEQ ID NO: 31005 - RNA, 14 nt, Artificial Sequence
  Description of Artificial Sequence: Synthetic oligonucleotide
uucgauaucagaag

SEQ ID NO: 31006 - RNA, 14 nt, Artificial Sequence
  Description of Artificial Sequence: Synthetic oligonucleotide
uuucgauaucagaa

SEQ ID NO: 31007 - RNA, 14 nt, Artificial Sequence
  Description of Artificial Sequence: Synthetic oligonucleotide
uuuucgauaucaga

SEQ ID NO: 31008 - RNA, 14 nt, Artificial Sequence
  Description of Artificial Sequence: Synthetic oligonucleotide
cuuuucgauaucag

SEQ ID NO: 31009 - RNA, 14 nt, Artificial Sequence
  Description of Artificial Sequence: Synthetic oligonucleotide
ucuuuucgauauca

SEQ ID NO: 31010 - RNA, 14 nt, Artificial Sequence
  Description of Artificial Sequence: Synthetic oligonucleotide
aucuuuucgauauc

SEQ ID NO: 31011 - RNA, 14 nt, Artificial Sequence
  Description of Artificial Sequence: Synthetic oligonucleotide
aaucuuuucgauau

SEQ ID NO: 31012 - RNA, 14 nt, Artificial Sequence
  Description of Artificial Sequence: Synthetic oligonucleotide
aaaucuuuucgaua

SEQ ID NO: 31013 - RNA, 14 nt, Artificial Sequence
  Description of Artificial Sequence: Synthetic oligonucleotide
aaaaucuuuucgau

SEQ ID NO: 31014 - RNA, 14 nt, Artificial Sequence
  Description of Artificial Sequence: Synthetic oligonucleotide
aaaaaucuuuucga

SEQ ID NO: 31015 - RNA, 14 nt, Artificial Sequence
  Description of Artificial Sequence: Synthetic oligonucleotide
uaaaaaucuuuucg

SEQ ID NO: 31016 - RNA, 14 nt, Artificial Sequence
  Description of Artificial Sequence: Synthetic oligonucleotide
cuaaaaaucuuuuc

SEQ ID NO: 31017 - RNA, 14 nt, Artificial Sequence
  Description of Artificial Sequence: Synthetic oligonucleotide
acuaaaaaucuuuu

SEQ ID NO: 31018 - RNA, 14 nt, Artificial Sequence
  Description of Artificial Sequence: Synthetic oligonucleotide
uacuaaaaaucuuu

SEQ ID NO: 31019 - RNA, 14 nt, Artificial Sequence
  Description of Artificial Sequence: Synthetic oligonucleotide
uuacuaaaaaucuu

SEQ ID NO: 31020 - RNA, 14 nt, Artificial Sequence
  Description of Artificial Sequence: Synthetic oligonucleotide
guuacuaaaaaucu

SEQ ID NO: 31021 - RNA, 14 nt, Artificial Sequence
  Description of Artificial Sequence: Synthetic oligonucleotide
uguuacuaaaaauc

SEQ ID NO: 31022 - RNA, 14 nt, Artificial Sequence
  Description of Artificial Sequence: Synthetic oligonucleotide
auguuacuaaaaau

SEQ ID NO: 31023 - RNA, 14 nt, Artificial Sequence
  Description of Artificial Sequence: Synthetic oligonucleotide
aauguuacuaaaaa

SEQ ID NO: 31024 - RNA, 14 nt, Artificial Sequence
  Description of Artificial Sequence: Synthetic oligonucleotide
aaauguuacuaaaa

SEQ ID NO: 31025 - RNA, 14 nt, Artificial Sequence
  Description of Artificial Sequence: Synthetic oligonucleotide
gaaauguuacuaaa

SEQ ID NO: 31026 - RNA, 14 nt, Artificial Sequence
  Description of Artificial Sequence: Synthetic oligonucleotide
ugaaauguuacuaa

SEQ ID NO: 31027 - RNA, 14 nt, Artificial Sequence
  Description of Artificial Sequence: Synthetic oligonucleotide
cugaaauguuacua

SEQ ID NO: 31028 - RNA, 14 nt, Artificial Sequence
  Description of Artificial Sequence: Synthetic oligonucleotide
ucugaaauguuacu

SEQ ID NO: 31029 - RNA, 14 nt, Artificial Sequence
  Description of Artificial Sequence: Synthetic oligonucleotide
aucugaaauguuac

SEQ ID NO: 31030 - RNA, 14 nt, Artificial Sequence
  Description of Artificial Sequence: Synthetic oligonucleotide
uaucugaaauguua

SEQ ID NO: 31031 - RNA, 14 nt, Artificial Sequence
  Description of Artificial Sequence: Synthetic oligonucleotide
auaucugaaauguu

SEQ ID NO: 31032 - RNA, 14 nt, Artificial Sequence
  Description of Artificial Sequence: Synthetic oligonucleotide
uauaucugaaaugu

SEQ ID NO: 31033 - RNA, 14 nt, Artificial Sequence
  Description of Artificial Sequence: Synthetic oligonucleotide
guauaucugaaaug

SEQ ID NO: 31034 - RNA, 14 nt, Artificial Sequence
  Description of Artificial Sequence: Synthetic oligonucleotide
uguauaucugaaau

SEQ ID NO: 31035 - RNA, 14 nt, Artificial Sequence
  Description of Artificial Sequence: Synthetic oligonucleotide
auguauaucugaaa

SEQ ID NO: 31036 - RNA, 14 nt, Artificial Sequence
  Description of Artificial Sequence: Synthetic oligonucleotide
cauguauaucugaa

SEQ ID NO: 31037 - RNA, 14 nt, Artificial Sequence
  Description of Artificial Sequence: Synthetic oligonucleotide
ucauguauaucuga

SEQ ID NO: 31038 - RNA, 14 nt, Artificial Sequence
  Description of Artificial Sequence: Synthetic oligonucleotide
uucauguauaucug

SEQ ID NO: 31039 - RNA, 14 nt, Artificial Sequence
  Description of Artificial Sequence: Synthetic oligonucleotide
auucauguauaucu

SEQ ID NO: 31040 - RNA, 14 nt, Artificial Sequence
  Description of Artificial Sequence: Synthetic oligonucleotide
aauucauguauauc

SEQ ID NO: 31041 - RNA, 14 nt, Artificial Sequence
  Description of Artificial Sequence: Synthetic oligonucleotide
caauucauguauau

SEQ ID NO: 31042 - RNA, 14 nt, Artificial Sequence
  Description of Artificial Sequence: Synthetic oligonucleotide
ucaauucauguaua

SEQ ID NO: 31043 - RNA, 14 nt, Artificial Sequence
  Description of Artificial Sequence: Synthetic oligonucleotide
gucaauucauguau

SEQ ID NO: 31044 - RNA, 14 nt, Artificial Sequence
  Description of Artificial Sequence: Synthetic oligonucleotide
agucaauucaugua

SEQ ID NO: 31045 - RNA, 14 nt, Artificial Sequence
  Description of Artificial Sequence: Synthetic oligonucleotide
cagucaauucaugu

SEQ ID NO: 31046 - RNA, 14 nt, Artificial Sequence
  Description of Artificial Sequence: Synthetic oligonucleotide
acagucaauucaug

SEQ ID NO: 31047 - RNA, 14 nt, Artificial Sequence
  Description of Artificial Sequence: Synthetic oligonucleotide
cacagucaauucau

SEQ ID NO: 31048 - RNA, 14 nt, Artificial Sequence
  Description of Artificial Sequence: Synthetic oligonucleotide
ucacagucaauuca

SEQ ID NO: 31049 - RNA, 14 nt, Artificial Sequence
  Description of Artificial Sequence: Synthetic oligonucleotide
uucacagucaauuc

SEQ ID NO: 31050 - RNA, 14 nt, Artificial Sequence
  Description of Artificial Sequence: Synthetic oligonucleotide
uuucacagucaauu

SEQ ID NO: 31051 - RNA, 14 nt, Artificial Sequence
  Description of Artificial Sequence: Synthetic oligonucleotide
guuucacagucaau

SEQ ID NO: 31052 - RNA, 14 nt, Artificial Sequence
  Description of Artificial Sequence: Synthetic oligonucleotide
aguuucacagucaa

SEQ ID NO: 31053 - RNA, 14 nt, Artificial Sequence
  Description of Artificial Sequence: Synthetic oligonucleotide
aaguuucacaguca

SEQ ID NO: 31054 - RNA, 14 nt, Artificial Sequence
  Description of Artificial Sequence: Synthetic oligonucleotide
aaaguuucacaguc

SEQ ID NO: 31055 - RNA, 14 nt, Artificial Sequence
  Description of Artificial Sequence: Synthetic oligonucleotide
aaaaguuucacagu

SEQ ID NO: 31056 - RNA, 14 nt, Artificial Sequence
  Description of Artificial Sequence: Synthetic oligonucleotide
uaaaaguuucacag

SEQ ID NO: 31057 - RNA, 14 nt, Artificial Sequence
  Description of Artificial Sequence: Synthetic oligonucleotide
cuaaaaguuucaca

SEQ ID NO: 31058 - RNA, 14 nt, Artificial Sequence
  Description of Artificial Sequence: Synthetic oligonucleotide
ccuaaaaguuucac

SEQ ID NO: 31059 - RNA, 14 nt, Artificial Sequence
  Description of Artificial Sequence: Synthetic oligonucleotide
accuaaaaguuuca

SEQ ID NO: 31060 - RNA, 14 nt, Artificial Sequence
  Description of Artificial Sequence: Synthetic oligonucleotide
aaccuaaaaguuuc

SEQ ID NO: 31061 - RNA, 14 nt, Artificial Sequence
  Description of Artificial Sequence: Synthetic oligonucleotide
aaaccuaaaaguuu

SEQ ID NO: 31062 - RNA, 14 nt, Artificial Sequence
  Description of Artificial Sequence: Synthetic oligonucleotide
caaaccuaaaaguu

SEQ ID NO: 31063 - RNA, 14 nt, Artificial Sequence
  Description of Artificial Sequence: Synthetic oligonucleotide
ucaaaccuaaaagu

SEQ ID NO: 31064 - RNA, 14 nt, Artificial Sequence
  Description of Artificial Sequence: Synthetic oligonucleotide
aucaaaccuaaaag

SEQ ID NO: 31065 - RNA, 14 nt, Artificial Sequence
  Description of Artificial Sequence: Synthetic oligonucleotide
aaucaaaccuaaaa

SEQ ID NO: 31066 - RNA, 14 nt, Artificial Sequence
  Description of Artificial Sequence: Synthetic oligonucleotide
caaucaaaccuaaa

SEQ ID NO: 31067 - RNA, 14 nt, Artificial Sequence
  Description of Artificial Sequence: Synthetic oligonucleotide
ucaaucaaaccuaa

SEQ ID NO: 31068 - RNA, 14 nt, Artificial Sequence
  Description of Artificial Sequence: Synthetic oligonucleotide
uucaaucaaaccua

SEQ ID NO: 31069 - RNA, 14 nt, Artificial Sequence
  Description of Artificial Sequence: Synthetic oligonucleotide
cuucaaucaaaccu

SEQ ID NO: 31070 - RNA, 14 nt, Artificial Sequence
  Description of Artificial Sequence: Synthetic oligonucleotide
ucuucaaucaaacc

SEQ ID NO: 31071 - RNA, 14 nt, Artificial Sequence
  Description of Artificial Sequence: Synthetic oligonucleotide
gucuucaaucaaac

SEQ ID NO: 31072 - RNA, 14 nt, Artificial Sequence
  Description of Artificial Sequence: Synthetic oligonucleotide
ugucuucaaucaaa

SEQ ID NO: 31073 - RNA, 14 nt, Artificial Sequence
  Description of Artificial Sequence: Synthetic oligonucleotide
gugucuucaaucaa

SEQ ID NO: 31074 - RNA, 14 nt, Artificial Sequence
  Description of Artificial Sequence: Synthetic oligonucleotide
ugugucuucaauca

SEQ ID NO: 31075 - RNA, 14 nt, Artificial Sequence
  Description of Artificial Sequence: Synthetic oligonucleotide
cugugucuucaauc

SEQ ID NO: 31076 - RNA, 14 nt, Artificial Sequence
  Description of Artificial Sequence: Synthetic oligonucleotide
acugugucuucaau

SEQ ID NO: 31077 - RNA, 14 nt, Artificial Sequence
  Description of Artificial Sequence: Synthetic oligonucleotide
aacugugucuucaa

SEQ ID NO: 31078 - RNA, 14 nt, Artificial Sequence
  Description of Artificial Sequence: Synthetic oligonucleotide
caacugugucuuca

SEQ ID NO: 31079 - RNA, 14 nt, Artificial Sequence
  Description of Artificial Sequence: Synthetic oligonucleotide
ucaacugugucuuc

SEQ ID NO: 31080 - RNA, 14 nt, Artificial Sequence
  Description of Artificial Sequence: Synthetic oligonucleotide
uucaacugugucuu

SEQ ID NO: 31081 - RNA, 14 nt, Artificial Sequence
  Description of Artificial Sequence: Synthetic oligonucleotide
uuucaacugugucu

SEQ ID NO: 31082 - RNA, 14 nt, Artificial Sequence
  Description of Artificial Sequence: Synthetic oligonucleotide
auuucaacuguguc

SEQ ID NO: 31083 - RNA, 14 nt, Artificial Sequence
  Description of Artificial Sequence: Synthetic oligonucleotide
cauuucaacugugu

SEQ ID NO: 31084 - RNA, 14 nt, Artificial Sequence
  Description of Artificial Sequence: Synthetic oligonucleotide
ucauuucaacugug

SEQ ID NO: 31085 - RNA, 14 nt, Artificial Sequence
  Description of Artificial Sequence: Synthetic oligonucleotide
gucauuucaacugu

SEQ ID NO: 31086 - RNA, 14 nt, Artificial Sequence
  Description of Artificial Sequence: Synthetic oligonucleotide
agucauuucaacug

SEQ ID NO: 31087 - RNA, 14 nt, Artificial Sequence
  Description of Artificial Sequence: Synthetic oligonucleotide
cagucauuucaacu

SEQ ID NO: 31088 - RNA, 14 nt, Artificial Sequence
  Description of Artificial Sequence: Synthetic oligonucleotide
ucagucauuucaac

SEQ ID NO: 31089 - RNA, 14 nt, Artificial Sequence
  Description of Artificial Sequence: Synthetic oligonucleotide
aucagucauuucaa

SEQ ID NO: 31090 - RNA, 14 nt, Artificial Sequence
  Description of Artificial Sequence: Synthetic oligonucleotide
caucagucauuuca

SEQ ID NO: 31091 - RNA, 14 nt, Artificial Sequence
  Description of Artificial Sequence: Synthetic oligonucleotide
ucaucagucauuuc

SEQ ID NO: 31092 - RNA, 14 nt, Artificial Sequence
  Description of Artificial Sequence: Synthetic oligonucleotide
uucaucagucauuu

SEQ ID NO: 31093 - RNA, 14 nt, Artificial Sequence
  Description of Artificial Sequence: Synthetic oligonucleotide
uuucaucagucauu

SEQ ID NO: 31094 - RNA, 14 nt, Artificial Sequence
  Description of Artificial Sequence: Synthetic oligonucleotide
cuuucaucagucau

SEQ ID NO: 31095 - RNA, 14 nt, Artificial Sequence
  Description of Artificial Sequence: Synthetic oligonucleotide
gcuuucaucaguca

SEQ ID NO: 31096 - RNA, 14 nt, Artificial Sequence
  Description of Artificial Sequence: Synthetic oligonucleotide
ugcuuucaucaguc

SEQ ID NO: 31097 - RNA, 14 nt, Artificial Sequence
  Description of Artificial Sequence: Synthetic oligonucleotide
cugcuuucaucagu

SEQ ID NO: 31098 - RNA, 14 nt, Artificial Sequence
  Description of Artificial Sequence: Synthetic oligonucleotide
acugcuuucaucag

SEQ ID NO: 31099 - RNA, 14 nt, Artificial Sequence
  Description of Artificial Sequence: Synthetic oligonucleotide
gacugcuuucauca

SEQ ID NO: 31100 - RNA, 14 nt, Artificial Sequence
  Description of Artificial Sequence: Synthetic oligonucleotide
ggacugcuuucauc

SEQ ID NO: 31101 - RNA, 14 nt, Artificial Sequence
  Description of Artificial Sequence: Synthetic oligonucleotide
aggacugcuuucau

SEQ ID NO: 31102 - RNA, 14 nt, Artificial Sequence
  Description of Artificial Sequence: Synthetic oligonucleotide
gaggacugcuuuca

SEQ ID NO: 31103 - RNA, 14 nt, Artificial Sequence
  Description of Artificial Sequence: Synthetic oligonucleotide
ugaggacugcuuuc

SEQ ID NO: 31104 - RNA, 14 nt, Artificial Sequence
  Description of Artificial Sequence: Synthetic oligonucleotide
augaggacugcuuu

SEQ ID NO: 31105 - RNA, 14 nt, Artificial Sequence
  Description of Artificial Sequence: Synthetic oligonucleotide
gaugaggacugcuu

SEQ ID NO: 31106 - RNA, 14 nt, Artificial Sequence
  Description of Artificial Sequence: Synthetic oligonucleotide
ggaugaggacugcu

SEQ ID NO: 31107 - RNA, 14 nt, Artificial Sequence
  Description of Artificial Sequence: Synthetic oligonucleotide
gggaugaggacugc

SEQ ID NO: 31108 - RNA, 14 nt, Artificial Sequence
  Description of Artificial Sequence: Synthetic oligonucleotide
agggaugaggacug

SEQ ID NO: 31109 - RNA, 14 nt, Artificial Sequence
  Description of Artificial Sequence: Synthetic oligonucleotide
aagggaugaggacu

SEQ ID NO: 31110 - RNA, 14 nt, Artificial Sequence
  Description of Artificial Sequence: Synthetic oligonucleotide
uaagggaugaggac

SEQ ID NO: 31111 - RNA, 14 nt, Artificial Sequence
  Description of Artificial Sequence: Synthetic oligonucleotide
cuaagggaugagga

SEQ ID NO: 31112 - RNA, 14 nt, Artificial Sequence
  Description of Artificial Sequence: Synthetic oligonucleotide
gcuaagggaugagg

SEQ ID NO: 31113 - RNA, 14 nt, Artificial Sequence
  Description of Artificial Sequence: Synthetic oligonucleotide
agcuaagggaugag

SEQ ID NO: 31114 - RNA, 14 nt, Artificial Sequence
  Description of Artificial Sequence: Synthetic oligonucleotide
cagcuaagggauga

SEQ ID NO: 31115 - RNA, 14 nt, Artificial Sequence
  Description of Artificial Sequence: Synthetic oligonucleotide
ccagcuaagggaug

SEQ ID NO: 31116 - RNA, 14 nt, Artificial Sequence
  Description of Artificial Sequence: Synthetic oligonucleotide
gccagcuaagggau

SEQ ID NO: 31117 - RNA, 14 nt, Artificial Sequence
  Description of Artificial Sequence: Synthetic oligonucleotide
ugccagcuaaggga

SEQ ID NO: 31118 - RNA, 14 nt, Artificial Sequence
  Description of Artificial Sequence: Synthetic oligonucleotide
cugccagcuaaggg

SEQ ID NO: 31119 - RNA, 14 nt, Artificial Sequence
  Description of Artificial Sequence: Synthetic oligonucleotide
gcugccagcuaagg

SEQ ID NO: 31120 - RNA, 14 nt, Artificial Sequence
  Description of Artificial Sequence: Synthetic oligonucleotide
agcugccagcuaag

SEQ ID NO: 31121 - RNA, 14 nt, Artificial Sequence
  Description of Artificial Sequence: Synthetic oligonucleotide
cagcugccagcuaa

SEQ ID NO: 31122 - RNA, 14 nt, Artificial Sequence
  Description of Artificial Sequence: Synthetic oligonucleotide
acagcugccagcua

SEQ ID NO: 31123 - RNA, 14 nt, Artificial Sequence
  Description of Artificial Sequence: Synthetic oligonucleotide
aacagcugccagcu

SEQ ID NO: 31124 - RNA, 14 nt, Artificial Sequence
  Description of Artificial Sequence: Synthetic oligonucleotide
aaacagcugccagc

SEQ ID NO: 31125 - RNA, 14 nt, Artificial Sequence
  Description of Artificial Sequence: Synthetic oligonucleotide
aaaacagcugccag

SEQ ID NO: 31126 - RNA, 14 nt, Artificial Sequence
  Description of Artificial Sequence: Synthetic oligonucleotide
caaaacagcugcca

SEQ ID NO: 31127 - RNA, 14 nt, Artificial Sequence
  Description of Artificial Sequence: Synthetic oligonucleotide
ucaaaacagcugcc

SEQ ID NO: 31128 - RNA, 14 nt, Artificial Sequence
  Description of Artificial Sequence: Synthetic oligonucleotide
uucaaaacagcugc

SEQ ID NO: 31129 - RNA, 14 nt, Artificial Sequence
  Description of Artificial Sequence: Synthetic oligonucleotide
cuucaaaacagcug

SEQ ID NO: 31130 - RNA, 14 nt, Artificial Sequence
  Description of Artificial Sequence: Synthetic oligonucleotide
ucuucaaaacagcu

SEQ ID NO: 31131 - RNA, 14 nt, Artificial Sequence
  Description of Artificial Sequence: Synthetic oligonucleotide
aucuucaaaacagc

SEQ ID NO: 31132 - RNA, 14 nt, Artificial Sequence
  Description of Artificial Sequence: Synthetic oligonucleotide
aaucuucaaaacag

SEQ ID NO: 31133 - RNA, 14 nt, Artificial Sequence
  Description of Artificial Sequence: Synthetic oligonucleotide
aaaucuucaaaaca

SEQ ID NO: 31134 - RNA, 14 nt, Artificial Sequence
  Description of Artificial Sequence: Synthetic oligonucleotide
caaaucuucaaaac

SEQ ID NO: 31135 - RNA, 14 nt, Artificial Sequence
  Description of Artificial Sequence: Synthetic oligonucleotide
ccaaaucuucaaaa

SEQ ID NO: 31136 - RNA, 14 nt, Artificial Sequence
  Description of Artificial Sequence: Synthetic oligonucleotide
gccaaaucuucaaa

SEQ ID NO: 31137 - RNA, 14 nt, Artificial Sequence
  Description of Artificial Sequence: Synthetic oligonucleotide
ugccaaaucuucaa

SEQ ID NO: 31138 - RNA, 14 nt, Artificial Sequence
  Description of Artificial Sequence: Synthetic oligonucleotide
cugccaaaucuuca

SEQ ID NO: 31139 - RNA, 14 nt, Artificial Sequence
  Description of Artificial Sequence: Synthetic oligonucleotide
ucugccaaaucuuc

SEQ ID NO: 31140 - RNA, 14 nt, Artificial Sequence
  Description of Artificial Sequence: Synthetic oligonucleotide
uucugccaaaucuu

SEQ ID NO: 31141 - RNA, 14 nt, Artificial Sequence
  Description of Artificial Sequence: Synthetic oligonucleotide
cuucugccaaaucu

SEQ ID NO: 31142 - RNA, 14 nt, Artificial Sequence
  Description of Artificial Sequence: Synthetic oligonucleotide
ucuucugccaaauc

SEQ ID NO: 31143 - RNA, 14 nt, Artificial Sequence
  Description of Artificial Sequence: Synthetic oligonucleotide
cucuucugccaaau

SEQ ID NO: 31144 - RNA, 14 nt, Artificial Sequence
  Description of Artificial Sequence: Synthetic oligonucleotide
gcucuucugccaaa

SEQ ID NO: 31145 - RNA, 14 nt, Artificial Sequence
  Description of Artificial Sequence: Synthetic oligonucleotide
ugcucuucugccaa

SEQ ID NO: 31146 - RNA, 14 nt, Artificial Sequence
  Description of Artificial Sequence: Synthetic oligonucleotide
uugcucuucugcca

SEQ ID NO: 31147 - RNA, 14 nt, Artificial Sequence
  Description of Artificial Sequence: Synthetic oligonucleotide
cuugcucuucugcc

SEQ ID NO: 31148 - RNA, 14 nt, Artificial Sequence
  Description of Artificial Sequence: Synthetic oligonucleotide
gcuugcucuucugc

SEQ ID NO: 31149 - RNA, 14 nt, Artificial Sequence
  Description of Artificial Sequence: Synthetic oligonucleotide
ugcuugcucuucug

SEQ ID NO: 31150 - RNA, 14 nt, Artificial Sequence
  Description of Artificial Sequence: Synthetic oligonucleotide
augcuugcucuucu

SEQ ID NO: 31151 - RNA, 14 nt, Artificial Sequence
  Description of Artificial Sequence: Synthetic oligonucleotide
aaugcuugcucuuc

SEQ ID NO: 31152 - RNA, 14 nt, Artificial Sequence
  Description of Artificial Sequence: Synthetic oligonucleotide
aaaugcuugcucuu

SEQ ID NO: 31153 - RNA, 14 nt, Artificial Sequence
  Description of Artificial Sequence: Synthetic oligonucleotide
caaaugcuugcucu

SEQ ID NO: 31154 - RNA, 14 nt, Artificial Sequence
  Description of Artificial Sequence: Synthetic oligonucleotide
ucaaaugcuugcuc

SEQ ID NO: 31155 - RNA, 14 nt, Artificial Sequence
  Description of Artificial Sequence: Synthetic oligonucleotide
aucaaaugcuugcu

SEQ ID NO: 31156 - RNA, 14 nt, Artificial Sequence
  Description of Artificial Sequence: Synthetic oligonucleotide
gaucaaaugcuugc

SEQ ID NO: 31157 - RNA, 14 nt, Artificial Sequence
  Description of Artificial Sequence: Synthetic oligonucleotide
ggaucaaaugcuug

SEQ ID NO: 31158 - RNA, 14 nt, Artificial Sequence
  Description of Artificial Sequence: Synthetic oligonucleotide
aggaucaaaugcuu

SEQ ID NO: 31159 - RNA, 14 nt, Artificial Sequence
  Description of Artificial Sequence: Synthetic oligonucleotide
aaggaucaaaugcu

SEQ ID NO: 31160 - RNA, 14 nt, Artificial Sequence
  Description of Artificial Sequence: Synthetic oligonucleotide
uaaggaucaaaugc

SEQ ID NO: 31161 - RNA, 14 nt, Artificial Sequence
  Description of Artificial Sequence: Synthetic oligonucleotide
auaaggaucaaaug

SEQ ID NO: 31162 - RNA, 14 nt, Artificial Sequence
  Description of Artificial Sequence: Synthetic oligonucleotide
cauaaggaucaaau

SEQ ID NO: 31163 - RNA, 14 nt, Artificial Sequence
  Description of Artificial Sequence: Synthetic oligonucleotide
ucauaaggaucaaa

SEQ ID NO: 31164 - RNA, 14 nt, Artificial Sequence
  Description of Artificial Sequence: Synthetic oligonucleotide
uucauaaggaucaa

SEQ ID NO: 31165 - RNA, 14 nt, Artificial Sequence
  Description of Artificial Sequence: Synthetic oligonucleotide
uuucauaaggauca

SEQ ID NO: 31166 - RNA, 14 nt, Artificial Sequence
  Description of Artificial Sequence: Synthetic oligonucleotide
guuucauaaggauc

SEQ ID NO: 31167 - RNA, 14 nt, Artificial Sequence
  Description of Artificial Sequence: Synthetic oligonucleotide
uguuucauaaggau

SEQ ID NO: 31168 - RNA, 14 nt, Artificial Sequence
  Description of Artificial Sequence: Synthetic oligonucleotide
auguuucauaagga

SEQ ID NO: 31169 - RNA, 14 nt, Artificial Sequence
  Description of Artificial Sequence: Synthetic oligonucleotide
aauguuucauaagg

SEQ ID NO: 31170 - RNA, 14 nt, Artificial Sequence
  Description of Artificial Sequence: Synthetic oligonucleotide
uaauguuucauaag

SEQ ID NO: 31171 - RNA, 14 nt, Artificial Sequence
  Description of Artificial Sequence: Synthetic oligonucleotide
auaauguuucauaa

SEQ ID NO: 31172 - RNA, 14 nt, Artificial Sequence
  Description of Artificial Sequence: Synthetic oligonucleotide
gauaauguuucaua

SEQ ID NO: 31173 - RNA, 14 nt, Artificial Sequence
  Description of Artificial Sequence: Synthetic oligonucleotide
ugauaauguuucau

SEQ ID NO: 31174 - RNA, 14 nt, Artificial Sequence
  Description of Artificial Sequence: Synthetic oligonucleotide
gugauaauguuuca

SEQ ID NO: 31175 - RNA, 14 nt, Artificial Sequence
  Description of Artificial Sequence: Synthetic oligonucleotide
ugugauaauguuuc

SEQ ID NO: 31176 - RNA, 14 nt, Artificial Sequence
  Description of Artificial Sequence: Synthetic oligonucleotide
cugugauaauguuu

SEQ ID NO: 31177 - RNA, 14 nt, Artificial Sequence
  Description of Artificial Sequence: Synthetic oligonucleotide
ccugugauaauguu

SEQ ID NO: 31178 - RNA, 14 nt, Artificial Sequence
  Description of Artificial Sequence: Synthetic oligonucleotide
uccugugauaaugu

SEQ ID NO: 31179 - RNA, 14 nt, Artificial Sequence
  Description of Artificial Sequence: Synthetic oligonucleotide
guccugugauaaug

SEQ ID NO: 31180 - RNA, 14 nt, Artificial Sequence
  Description of Artificial Sequence: Synthetic oligonucleotide
uguccugugauaau

SEQ ID NO: 31181 - RNA, 14 nt, Artificial Sequence
  Description of Artificial Sequence: Synthetic oligonucleotide
auguccugugauaa

SEQ ID NO: 31182 - RNA, 14 nt, Artificial Sequence
  Description of Artificial Sequence: Synthetic oligonucleotide
aauguccugugaua

SEQ ID NO: 31183 - RNA, 14 nt, Artificial Sequence
  Description of Artificial Sequence: Synthetic oligonucleotide
gaauguccugugau

SEQ ID NO: 31184 - RNA, 14 nt, Artificial Sequence
  Description of Artificial Sequence: Synthetic oligonucleotide
agaauguccuguga

SEQ ID NO: 31185 - RNA, 14 nt, Artificial Sequence
  Description of Artificial Sequence: Synthetic oligonucleotide
aagaauguccugug

SEQ ID NO: 31186 - RNA, 14 nt, Artificial Sequence
  Description of Artificial Sequence: Synthetic oligonucleotide
aaagaauguccugu

SEQ ID NO: 31187 - RNA, 14 nt, Artificial Sequence
  Description of Artificial Sequence: Synthetic oligonucleotide
gaaagaauguccug

SEQ ID NO: 31188 - RNA, 14 nt, Artificial Sequence
  Description of Artificial Sequence: Synthetic oligonucleotide
ugaaagaauguccu

SEQ ID NO: 31189 - RNA, 14 nt, Artificial Sequence
  Description of Artificial Sequence: Synthetic oligonucleotide
gugaaagaaugucc

SEQ ID NO: 31190 - RNA, 14 nt, Artificial Sequence
  Description of Artificial Sequence: Synthetic oligonucleotide
ggugaaagaauguc

SEQ ID NO: 31191 - RNA, 14 nt, Artificial Sequence
  Description of Artificial Sequence: Synthetic oligonucleotide
uggugaaagaaugu

SEQ ID NO: 31192 - RNA, 14 nt, Artificial Sequence
  Description of Artificial Sequence: Synthetic oligonucleotide
cuggugaaagaaug

SEQ ID NO: 31193 - RNA, 14 nt, Artificial Sequence
  Description of Artificial Sequence: Synthetic oligonucleotide
ucuggugaaagaau

SEQ ID NO: 31194 - RNA, 14 nt, Artificial Sequence
  Description of Artificial Sequence: Synthetic oligonucleotide
cucuggugaaagaa

SEQ ID NO: 31195 - RNA, 14 nt, Artificial Sequence
  Description of Artificial Sequence: Synthetic oligonucleotide
acucuggugaaaga

SEQ ID NO: 31196 - RNA, 14 nt, Artificial Sequence
  Description of Artificial Sequence: Synthetic oligonucleotide
aacucuggugaaag

SEQ ID NO: 31197 - RNA, 14 nt, Artificial Sequence
  Description of Artificial Sequence: Synthetic oligonucleotide
aaacucuggugaaa

SEQ ID NO: 31198 - RNA, 14 nt, Artificial Sequence
  Description of Artificial Sequence: Synthetic oligonucleotide
gaaacucuggugaa

SEQ ID NO: 31199 - RNA, 14 nt, Artificial Sequence
  Description of Artificial Sequence: Synthetic oligonucleotide
ugaaacucugguga

SEQ ID NO: 31200 - RNA, 14 nt, Artificial Sequence
  Description of Artificial Sequence: Synthetic oligonucleotide
augaaacucuggug

SEQ ID NO: 31201 - RNA, 14 nt, Artificial Sequence
  Description of Artificial Sequence: Synthetic oligonucleotide
caugaaacucuggu

SEQ ID NO: 31202 - RNA, 14 nt, Artificial Sequence
  Description of Artificial Sequence: Synthetic oligonucleotide
ucaugaaacucugg

SEQ ID NO: 31203 - RNA, 14 nt, Artificial Sequence
  Description of Artificial Sequence: Synthetic oligonucleotide
uucaugaaacucug

SEQ ID NO: 31204 - RNA, 14 nt, Artificial Sequence
  Description of Artificial Sequence: Synthetic oligonucleotide
guucaugaaacucu

SEQ ID NO: 31205 - RNA, 14 nt, Artificial Sequence
  Description of Artificial Sequence: Synthetic oligonucleotide
uguucaugaaacuc

SEQ ID NO: 31206 - RNA, 14 nt, Artificial Sequence
  Description of Artificial Sequence: Synthetic oligonucleotide
auguucaugaaacu

SEQ ID NO: 31207 - RNA, 14 nt, Artificial Sequence
  Description of Artificial Sequence: Synthetic oligonucleotide
aauguucaugaaac

SEQ ID NO: 31208 - RNA, 14 nt, Artificial Sequence
  Description of Artificial Sequence: Synthetic oligonucleotide
aaauguucaugaaa

SEQ ID NO: 31209 - RNA, 14 nt, Artificial Sequence
  Description of Artificial Sequence: Synthetic oligonucleotide
gaaauguucaugaa

SEQ ID NO: 31210 - RNA, 14 nt, Artificial Sequence
  Description of Artificial Sequence: Synthetic oligonucleotide
ugaaauguucauga

SEQ ID NO: 31211 - RNA, 14 nt, Artificial Sequence
  Description of Artificial Sequence: Synthetic oligonucleotide
uugaaauguucaug

SEQ ID NO: 31212 - RNA, 14 nt, Artificial Sequence
  Description of Artificial Sequence: Synthetic oligonucleotide
auugaaauguucau

SEQ ID NO: 31213 - RNA, 14 nt, Artificial Sequence
  Description of Artificial Sequence: Synthetic oligonucleotide
uauugaaauguuca

SEQ ID NO: 31214 - RNA, 14 nt, Artificial Sequence
  Description of Artificial Sequence: Synthetic oligonucleotide
uuauugaaauguuc

SEQ ID NO: 31215 - RNA, 14 nt, Artificial Sequence
  Description of Artificial Sequence: Synthetic oligonucleotide
uuuauugaaauguu

SEQ ID NO: 31216 - RNA, 14 nt, Artificial Sequence
  Description of Artificial Sequence: Synthetic oligonucleotide
auuuauugaaaugu

SEQ ID NO: 31217 - RNA, 14 nt, Artificial Sequence
  Description of Artificial Sequence: Synthetic oligonucleotide
aauuuauugaaaug

SEQ ID NO: 31218 - RNA, 14 nt, Artificial Sequence
  Description of Artificial Sequence: Synthetic oligonucleotide
caauuuauugaaau

SEQ ID NO: 31219 - RNA, 14 nt, Artificial Sequence
  Description of Artificial Sequence: Synthetic oligonucleotide
ucaauuuauugaaa

SEQ ID NO: 31220 - RNA, 14 nt, Artificial Sequence
  Description of Artificial Sequence: Synthetic oligonucleotide
aucaauuuauugaa

SEQ ID NO: 31221 - RNA, 14 nt, Artificial Sequence
  Description of Artificial Sequence: Synthetic oligonucleotide
caucaauuuauuga

SEQ ID NO: 31222 - RNA, 14 nt, Artificial Sequence
  Description of Artificial Sequence: Synthetic oligonucleotide
ccaucaauuuauug

SEQ ID NO: 31223 - RNA, 14 nt, Artificial Sequence
  Description of Artificial Sequence: Synthetic oligonucleotide
gccaucaauuuauu

SEQ ID NO: 31224 - RNA, 14 nt, Artificial Sequence
  Description of Artificial Sequence: Synthetic oligonucleotide
ggccaucaauuuau

SEQ ID NO: 31225 - RNA, 14 nt, Artificial Sequence
  Description of Artificial Sequence: Synthetic oligonucleotide
uggccaucaauuua

SEQ ID NO: 31226 - RNA, 14 nt, Artificial Sequence
  Description of Artificial Sequence: Synthetic oligonucleotide
cuggccaucaauuu

SEQ ID NO: 31227 - RNA, 14 nt, Artificial Sequence
  Description of Artificial Sequence: Synthetic oligonucleotide
ucuggccaucaauu

SEQ ID NO: 31228 - RNA, 14 nt, Artificial Sequence
  Description of Artificial Sequence: Synthetic oligonucleotide
gucuggccaucaau

SEQ ID NO: 31229 - RNA, 14 nt, Artificial Sequence
  Description of Artificial Sequence: Synthetic oligonucleotide
ggucuggccaucaa

SEQ ID NO: 31230 - RNA, 14 nt, Artificial Sequence
  Description of Artificial Sequence: Synthetic oligonucleotide
aggucuggccauca

SEQ ID NO: 31231 - RNA, 14 nt, Artificial Sequence
  Description of Artificial Sequence: Synthetic oligonucleotide
caggucuggccauc

SEQ ID NO: 31232 - RNA, 14 nt, Artificial Sequence
  Description of Artificial Sequence: Synthetic oligonucleotide
gcaggucuggccau

SEQ ID NO: 31233 - RNA, 14 nt, Artificial Sequence
  Description of Artificial Sequence: Synthetic oligonucleotide
ugcaggucuggcca

SEQ ID NO: 31234 - RNA, 14 nt, Artificial Sequence
  Description of Artificial Sequence: Synthetic oligonucleotide
cugcaggucuggcc

SEQ ID NO: 31235 - RNA, 14 nt, Artificial Sequence
  Description of Artificial Sequence: Synthetic oligonucleotide
acugcaggucuggc

SEQ ID NO: 31236 - RNA, 14 nt, Artificial Sequence
  Description of Artificial Sequence: Synthetic oligonucleotide
aacugcaggucugg

SEQ ID NO: 31237 - RNA, 14 nt, Artificial Sequence
  Description of Artificial Sequence: Synthetic oligonucleotide
caacugcaggucug

SEQ ID NO: 31238 - RNA, 14 nt, Artificial Sequence
  Description of Artificial Sequence: Synthetic oligonucleotide
gcaacugcaggucu

SEQ ID NO: 31239 - RNA, 14 nt, Artificial Sequence
  Description of Artificial Sequence: Synthetic oligonucleotide
agcaacugcagguc

SEQ ID NO: 31240 - RNA, 14 nt, Artificial Sequence
  Description of Artificial Sequence: Synthetic oligonucleotide
gagcaacugcaggu

SEQ ID NO: 31241 - RNA, 14 nt, Artificial Sequence
  Description of Artificial Sequence: Synthetic oligonucleotide
agagcaacugcagg

SEQ ID NO: 31242 - RNA, 14 nt, Artificial Sequence
  Description of Artificial Sequence: Synthetic oligonucleotide
uagagcaacugcag

SEQ ID NO: 31243 - RNA, 14 nt, Artificial Sequence
  Description of Artificial Sequence: Synthetic oligonucleotide
guagagcaacugca

SEQ ID NO: 31244 - RNA, 14 nt, Artificial Sequence
  Description of Artificial Sequence: Synthetic oligonucleotide
uguagagcaacugc

SEQ ID NO: 31245 - RNA, 14 nt, Artificial Sequence
  Description of Artificial Sequence: Synthetic oligonucleotide
guguagagcaacug

SEQ ID NO: 31246 - RNA, 14 nt, Artificial Sequence
  Description of Artificial Sequence: Synthetic oligonucleotide
aguguagagcaacu

SEQ ID NO: 31247 - RNA, 14 nt, Artificial Sequence
  Description of Artificial Sequence: Synthetic oligonucleotide
aaguguagagcaac

SEQ ID NO: 31248 - RNA, 14 nt, Artificial Sequence
  Description of Artificial Sequence: Synthetic oligonucleotide
aaaguguagagcaa

SEQ ID NO: 31249 - RNA, 14 nt, Artificial Sequence
  Description of Artificial Sequence: Synthetic oligonucleotide
gaaaguguagagca

SEQ ID NO: 31250 - RNA, 14 nt, Artificial Sequence
  Description of Artificial Sequence: Synthetic oligonucleotide
ugaaaguguagagc

SEQ ID NO: 31251 - RNA, 14 nt, Artificial Sequence
  Description of Artificial Sequence: Synthetic oligonucleotide
cugaaaguguagag

SEQ ID NO: 31252 - RNA, 14 nt, Artificial Sequence
  Description of Artificial Sequence: Synthetic oligonucleotide
acugaaaguguaga

SEQ ID NO: 31253 - RNA, 14 nt, Artificial Sequence
  Description of Artificial Sequence: Synthetic oligonucleotide
gacugaaaguguag

SEQ ID NO: 31254 - RNA, 14 nt, Artificial Sequence
  Description of Artificial Sequence: Synthetic oligonucleotide
ggacugaaagugua

SEQ ID NO: 31255 - RNA, 14 nt, Artificial Sequence
  Description of Artificial Sequence: Synthetic oligonucleotide
uggacugaaagugu

SEQ ID NO: 31256 - RNA, 14 nt, Artificial Sequence
  Description of Artificial Sequence: Synthetic oligonucleotide
auggacugaaagug

SEQ ID NO: 31257 - RNA, 14 nt, Artificial Sequence
  Description of Artificial Sequence: Synthetic oligonucleotide
aauggacugaaagu

SEQ ID NO: 31258 - RNA, 14 nt, Artificial Sequence
  Description of Artificial Sequence: Synthetic oligonucleotide
caauggacugaaag

SEQ ID NO: 31259 - RNA, 14 nt, Artificial Sequence
  Description of Artificial Sequence: Synthetic oligonucleotide
gcaauggacugaaa

SEQ ID NO: 31260 - RNA, 14 nt, Artificial Sequence
  Description of Artificial Sequence: Synthetic oligonucleotide
agcaauggacugaa

SEQ ID NO: 31261 - RNA, 14 nt, Artificial Sequence
  Description of Artificial Sequence: Synthetic oligonucleotide
cagcaauggacuga

SEQ ID NO: 31262 - RNA, 14 nt, Artificial Sequence
  Description of Artificial Sequence: Synthetic oligonucleotide
ucagcaauggacug

SEQ ID NO: 31263 - RNA, 14 nt, Artificial Sequence
  Description of Artificial Sequence: Synthetic oligonucleotide
aucagcaauggacu

SEQ ID NO: 31264 - RNA, 14 nt, Artificial Sequence
  Description of Artificial Sequence: Synthetic oligonucleotide
caucagcaauggac

SEQ ID NO: 31265 - RNA, 14 nt, Artificial Sequence
  Description of Artificial Sequence: Synthetic oligonucleotide
ccaucagcaaugga

SEQ ID NO: 31266 - RNA, 14 nt, Artificial Sequence
  Description of Artificial Sequence: Synthetic oligonucleotide
accaucagcaaugg

SEQ ID NO: 31267 - RNA, 14 nt, Artificial Sequence
  Description of Artificial Sequence: Synthetic oligonucleotide
aaccaucagcaaug

SEQ ID NO: 31268 - RNA, 14 nt, Artificial Sequence
  Description of Artificial Sequence: Synthetic oligonucleotide
aaaccaucagcaau

SEQ ID NO: 31269 - RNA, 14 nt, Artificial Sequence
  Description of Artificial Sequence: Synthetic oligonucleotide
aaaaccaucagcaa

SEQ ID NO: 31270 - RNA, 14 nt, Artificial Sequence
  Description of Artificial Sequence: Synthetic oligonucleotide
uaaaaccaucagca

SEQ ID NO: 31271 - RNA, 14 nt, Artificial Sequence
  Description of Artificial Sequence: Synthetic oligonucleotide
uuaaaaccaucagc

SEQ ID NO: 31272 - RNA, 14 nt, Artificial Sequence
  Description of Artificial Sequence: Synthetic oligonucleotide
uuuaaaaccaucag

SEQ ID NO: 31273 - RNA, 14 nt, Artificial Sequence
  Description of Artificial Sequence: Synthetic oligonucleotide
cuuuaaaaccauca

SEQ ID NO: 31274 - RNA, 14 nt, Artificial Sequence
  Description of Artificial Sequence: Synthetic oligonucleotide
ucuuuaaaaccauc

SEQ ID NO: 31275 - RNA, 14 nt, Artificial Sequence
  Description of Artificial Sequence: Synthetic oligonucleotide
cucuuuaaaaccau

SEQ ID NO: 31276 - RNA, 14 nt, Artificial Sequence
  Description of Artificial Sequence: Synthetic oligonucleotide
ccucuuuaaaacca

SEQ ID NO: 31277 - RNA, 14 nt, Artificial Sequence
  Description of Artificial Sequence: Synthetic oligonucleotide
gccucuuuaaaacc

SEQ ID NO: 31278 - RNA, 14 nt, Artificial Sequence
  Description of Artificial Sequence: Synthetic oligonucleotide
ugccucuuuaaaac

SEQ ID NO: 31279 - RNA, 14 nt, Artificial Sequence
  Description of Artificial Sequence: Synthetic oligonucleotide
cugccucuuuaaaa

SEQ ID NO: 31280 - RNA, 14 nt, Artificial Sequence
  Description of Artificial Sequence: Synthetic oligonucleotide
acugccucuuuaaa

SEQ ID NO: 31281 - RNA, 14 nt, Artificial Sequence
  Description of Artificial Sequence: Synthetic oligonucleotide
aacugccucuuuaa

SEQ ID NO: 31282 - RNA, 14 nt, Artificial Sequence
  Description of Artificial Sequence: Synthetic oligonucleotide
gaacugccucuuua

SEQ ID NO: 31283 - RNA, 14 nt, Artificial Sequence
  Description of Artificial Sequence: Synthetic oligonucleotide
cgaacugccucuuu

SEQ ID NO: 31284 - RNA, 14 nt, Artificial Sequence
  Description of Artificial Sequence: Synthetic oligonucleotide
acgaacugccucuu

SEQ ID NO: 31285 - RNA, 14 nt, Artificial Sequence
  Description of Artificial Sequence: Synthetic oligonucleotide
aacgaacugccucu

SEQ ID NO: 31286 - RNA, 14 nt, Artificial Sequence
  Description of Artificial Sequence: Synthetic oligonucleotide
uaacgaacugccuc

SEQ ID NO: 31287 - RNA, 14 nt, Artificial Sequence
  Description of Artificial Sequence: Synthetic oligonucleotide
auaacgaacugccu

SEQ ID NO: 31288 - RNA, 14 nt, Artificial Sequence
  Description of Artificial Sequence: Synthetic oligonucleotide
cauaacgaacugcc

SEQ ID NO: 31289 - RNA, 14 nt, Artificial Sequence
  Description of Artificial Sequence: Synthetic oligonucleotide
acauaacgaacugc

SEQ ID NO: 31290 - RNA, 14 nt, Artificial Sequence
  Description of Artificial Sequence: Synthetic oligonucleotide
gacauaacgaacug

SEQ ID NO: 31291 - RNA, 14 nt, Artificial Sequence
  Description of Artificial Sequence: Synthetic oligonucleotide
ggacauaacgaacu

SEQ ID NO: 31292 - RNA, 14 nt, Artificial Sequence
  Description of Artificial Sequence: Synthetic oligonucleotide
aggacauaacgaac

SEQ ID NO: 31293 - RNA, 14 nt, Artificial Sequence
  Description of Artificial Sequence: Synthetic oligonucleotide
aaggacauaacgaa

SEQ ID NO: 31294 - RNA, 14 nt, Artificial Sequence
  Description of Artificial Sequence: Synthetic oligonucleotide
gaaggacauaacga

SEQ ID NO: 31295 - RNA, 14 nt, Artificial Sequence
  Description of Artificial Sequence: Synthetic oligonucleotide
ggaaggacauaacg

SEQ ID NO: 31296 - RNA, 14 nt, Artificial Sequence
  Description of Artificial Sequence: Synthetic oligonucleotide
uggaaggacauaac

SEQ ID NO: 31297 - RNA, 14 nt, Artificial Sequence
  Description of Artificial Sequence: Synthetic oligonucleotide
guggaaggacauaa

SEQ ID NO: 31298 - RNA, 14 nt, Artificial Sequence
  Description of Artificial Sequence: Synthetic oligonucleotide
cguggaaggacaua

SEQ ID NO: 31299 - RNA, 14 nt, Artificial Sequence
  Description of Artificial Sequence: Synthetic oligonucleotide
acguggaaggacau

SEQ ID NO: 31300 - RNA, 14 nt, Artificial Sequence
  Description of Artificial Sequence: Synthetic oligonucleotide
gacguggaaggaca

SEQ ID NO: 31301 - RNA, 14 nt, Artificial Sequence
  Description of Artificial Sequence: Synthetic oligonucleotide
agacguggaaggac

SEQ ID NO: 31302 - RNA, 14 nt, Artificial Sequence
  Description of Artificial Sequence: Synthetic oligonucleotide
aagacguggaagga

SEQ ID NO: 31303 - RNA, 14 nt, Artificial Sequence
  Description of Artificial Sequence: Synthetic oligonucleotide
uaagacguggaagg

SEQ ID NO: 31304 - RNA, 14 nt, Artificial Sequence
  Description of Artificial Sequence: Synthetic oligonucleotide
auaagacguggaag

SEQ ID NO: 31305 - RNA, 14 nt, Artificial Sequence
  Description of Artificial Sequence: Synthetic oligonucleotide
cauaagacguggaa

SEQ ID NO: 31306 - RNA, 14 nt, Artificial Sequence
  Description of Artificial Sequence: Synthetic oligonucleotide
gcauaagacgugga

SEQ ID NO: 31307 - RNA, 14 nt, Artificial Sequence
  Description of Artificial Sequence: Synthetic oligonucleotide
agcauaagacgugg

SEQ ID NO: 31308 - RNA, 14 nt, Artificial Sequence
  Description of Artificial Sequence: Synthetic oligonucleotide
cagcauaagacgug

SEQ ID NO: 31309 - RNA, 14 nt, Artificial Sequence
  Description of Artificial Sequence: Synthetic oligonucleotide
ccagcauaagacgu

SEQ ID NO: 31310 - RNA, 14 nt, Artificial Sequence
  Description of Artificial Sequence: Synthetic oligonucleotide
accagcauaagacg

SEQ ID NO: 31311 - RNA, 14 nt, Artificial Sequence
  Description of Artificial Sequence: Synthetic oligonucleotide
caccagcauaagac

SEQ ID NO: 31312 - RNA, 14 nt, Artificial Sequence
  Description of Artificial Sequence: Synthetic oligonucleotide
gcaccagcauaaga

SEQ ID NO: 31313 - RNA, 14 nt, Artificial Sequence
  Description of Artificial Sequence: Synthetic oligonucleotide
ggcaccagcauaag

SEQ ID NO: 31314 - RNA, 14 nt, Artificial Sequence
  Description of Artificial Sequence: Synthetic oligonucleotide
uggcaccagcauaa

SEQ ID NO: 31315 - RNA, 14 nt, Artificial Sequence
  Description of Artificial Sequence: Synthetic oligonucleotide
cuggcaccagcaua

SEQ ID NO: 31316 - RNA, 14 nt, Artificial Sequence
  Description of Artificial Sequence: Synthetic oligonucleotide
acuggcaccagcau

SEQ ID NO: 31317 - RNA, 14 nt, Artificial Sequence
  Description of Artificial Sequence: Synthetic oligonucleotide
cacuggcaccagca

SEQ ID NO: 31318 - RNA, 14 nt, Artificial Sequence
  Description of Artificial Sequence: Synthetic oligonucleotide
acacuggcaccagc

SEQ ID NO: 31319 - RNA, 14 nt, Artificial Sequence
  Description of Artificial Sequence: Synthetic oligonucleotide
uacacuggcaccag

SEQ ID NO: 31320 - RNA, 14 nt, Artificial Sequence
  Description of Artificial Sequence: Synthetic oligonucleotide
auacacuggcacca

SEQ ID NO: 31321 - RNA, 14 nt, Artificial Sequence
  Description of Artificial Sequence: Synthetic oligonucleotide
gauacacuggcacc

SEQ ID NO: 31322 - RNA, 14 nt, Artificial Sequence
  Description of Artificial Sequence: Synthetic oligonucleotide
ugauacacuggcac

SEQ ID NO: 31323 - RNA, 14 nt, Artificial Sequence
  Description of Artificial Sequence: Synthetic oligonucleotide
gugauacacuggca

SEQ ID NO: 31324 - RNA, 14 nt, Artificial Sequence
  Description of Artificial Sequence: Synthetic oligonucleotide
agugauacacuggc

SEQ ID NO: 31325 - RNA, 14 nt, Artificial Sequence
  Description of Artificial Sequence: Synthetic oligonucleotide
cagugauacacugg

SEQ ID NO: 31326 - RNA, 14 nt, Artificial Sequence
  Description of Artificial Sequence: Synthetic oligonucleotide
acagugauacacug

SEQ ID NO: 31327 - RNA, 14 nt, Artificial Sequence
  Description of Artificial Sequence: Synthetic oligonucleotide
aacagugauacacu

SEQ ID NO: 31328 - RNA, 14 nt, Artificial Sequence
  Description of Artificial Sequence: Synthetic oligonucleotide
caacagugauacac

SEQ ID NO: 31329 - RNA, 14 nt, Artificial Sequence
  Description of Artificial Sequence: Synthetic oligonucleotide
ccaacagugauaca

SEQ ID NO: 31330 - RNA, 14 nt, Artificial Sequence
  Description of Artificial Sequence: Synthetic oligonucleotide
gccaacagugauac

SEQ ID NO: 31331 - RNA, 14 nt, Artificial Sequence
  Description of Artificial Sequence: Synthetic oligonucleotide
ugccaacagugaua

SEQ ID NO: 31332 - RNA, 14 nt, Artificial Sequence
  Description of Artificial Sequence: Synthetic oligonucleotide
gugccaacagugau

SEQ ID NO: 31333 - RNA, 14 nt, Artificial Sequence
  Description of Artificial Sequence: Synthetic oligonucleotide
agugccaacaguga

SEQ ID NO: 31334 - RNA, 14 nt, Artificial Sequence
  Description of Artificial Sequence: Synthetic oligonucleotide
uagugccaacagug

SEQ ID NO: 31335 - RNA, 14 nt, Artificial Sequence
  Description of Artificial Sequence: Synthetic oligonucleotide
guagugccaacagu

SEQ ID NO: 31336 - RNA, 14 nt, Artificial Sequence
  Description of Artificial Sequence: Synthetic oligonucleotide
aguagugccaacag

SEQ ID NO: 31337 - RNA, 14 nt, Artificial Sequence
  Description of Artificial Sequence: Synthetic oligonucleotide
aaguagugccaaca

SEQ ID NO: 31338 - RNA, 14 nt, Artificial Sequence
  Description of Artificial Sequence: Synthetic oligonucleotide
aaaguagugccaac

SEQ ID NO: 31339 - RNA, 14 nt, Artificial Sequence
  Description of Artificial Sequence: Synthetic oligonucleotide
caaaguagugccaa

SEQ ID NO: 31340 - RNA, 14 nt, Artificial Sequence
  Description of Artificial Sequence: Synthetic oligonucleotide
ucaaaguagugcca

SEQ ID NO: 31341 - RNA, 14 nt, Artificial Sequence
  Description of Artificial Sequence: Synthetic oligonucleotide
cucaaaguagugcc

SEQ ID NO: 31342 - RNA, 14 nt, Artificial Sequence
  Description of Artificial Sequence: Synthetic oligonucleotide
acucaaaguagugc

SEQ ID NO: 31343 - RNA, 14 nt, Artificial Sequence
  Description of Artificial Sequence: Synthetic oligonucleotide
aacucaaaguagug

SEQ ID NO: 31344 - RNA, 14 nt, Artificial Sequence
  Description of Artificial Sequence: Synthetic oligonucleotide
uaacucaaaguagu

SEQ ID NO: 31345 - RNA, 14 nt, Artificial Sequence
  Description of Artificial Sequence: Synthetic oligonucleotide
guaacucaaaguag

SEQ ID NO: 31346 - RNA, 14 nt, Artificial Sequence
  Description of Artificial Sequence: Synthetic oligonucleotide
aguaacucaaagua

SEQ ID NO: 31347 - RNA, 14 nt, Artificial Sequence
  Description of Artificial Sequence: Synthetic oligonucleotide
uaguaacucaaagu

SEQ ID NO: 31348 - RNA, 14 nt, Artificial Sequence
  Description of Artificial Sequence: Synthetic oligonucleotide
uuaguaacucaaag

SEQ ID NO: 31349 - RNA, 14 nt, Artificial Sequence
  Description of Artificial Sequence: Synthetic oligonucleotide
uuuaguaacucaaa

SEQ ID NO: 31350 - RNA, 14 nt, Artificial Sequence
  Description of Artificial Sequence: Synthetic oligonucleotide
cuuuaguaacucaa

SEQ ID NO: 31351 - RNA, 14 nt, Artificial Sequence
  Description of Artificial Sequence: Synthetic oligonucleotide
gcuuuaguaacuca

SEQ ID NO: 31352 - RNA, 14 nt, Artificial Sequence
  Description of Artificial Sequence: Synthetic oligonucleotide
ugcuuuaguaacuc

SEQ ID NO: 31353 - RNA, 14 nt, Artificial Sequence
  Description of Artificial Sequence: Synthetic oligonucleotide
uugcuuuaguaacu

SEQ ID NO: 31354 - RNA, 14 nt, Artificial Sequence
  Description of Artificial Sequence: Synthetic oligonucleotide
auugcuuuaguaac

SEQ ID NO: 31355 - RNA, 14 nt, Artificial Sequence
  Description of Artificial Sequence: Synthetic oligonucleotide
aauugcuuuaguaa

SEQ ID NO: 31356 - RNA, 14 nt, Artificial Sequence
  Description of Artificial Sequence: Synthetic oligonucleotide
caauugcuuuagua

SEQ ID NO: 31357 - RNA, 14 nt, Artificial Sequence
  Description of Artificial Sequence: Synthetic oligonucleotide
ucaauugcuuuagu

SEQ ID NO: 31358 - RNA, 14 nt, Artificial Sequence
  Description of Artificial Sequence: Synthetic oligonucleotide
uucaauugcuuuag

SEQ ID NO: 31359 - RNA, 14 nt, Artificial Sequence
  Description of Artificial Sequence: Synthetic oligonucleotide
uuucaauugcuuua

SEQ ID NO: 31360 - RNA, 14 nt, Artificial Sequence
  Description of Artificial Sequence: Synthetic oligonucleotide
cuuucaauugcuuu

SEQ ID NO: 31361 - RNA, 14 nt, Artificial Sequence
  Description of Artificial Sequence: Synthetic oligonucleotide
gcuuucaauugcuu

SEQ ID NO: 31362 - RNA, 14 nt, Artificial Sequence
  Description of Artificial Sequence: Synthetic oligonucleotide
ugcuuucaauugcu

SEQ ID NO: 31363 - RNA, 14 nt, Artificial Sequence
  Description of Artificial Sequence: Synthetic oligonucleotide
augcuuucaauugc

SEQ ID NO: 31364 - RNA, 14 nt, Artificial Sequence
  Description of Artificial Sequence: Synthetic oligonucleotide
caugcuuucaauug

SEQ ID NO: 31365 - RNA, 14 nt, Artificial Sequence
  Description of Artificial Sequence: Synthetic oligonucleotide
acaugcuuucaauu

SEQ ID NO: 31366 - RNA, 14 nt, Artificial Sequence
  Description of Artificial Sequence: Synthetic oligonucleotide
uacaugcuuucaau

SEQ ID NO: 31367 - RNA, 14 nt, Artificial Sequence
  Description of Artificial Sequence: Synthetic oligonucleotide
cuacaugcuuucaa

SEQ ID NO: 31368 - RNA, 14 nt, Artificial Sequence
  Description of Artificial Sequence: Synthetic oligonucleotide
acuacaugcuuuca

SEQ ID NO: 31369 - RNA, 14 nt, Artificial Sequence
  Description of Artificial Sequence: Synthetic oligonucleotide
cacuacaugcuuuc

SEQ ID NO: 31370 - RNA, 14 nt, Artificial Sequence
  Description of Artificial Sequence: Synthetic oligonucleotide
ucacuacaugcuuu

SEQ ID NO: 31371 - RNA, 14 nt, Artificial Sequence
  Description of Artificial Sequence: Synthetic oligonucleotide
uucacuacaugcuu

SEQ ID NO: 31372 - RNA, 14 nt, Artificial Sequence
  Description of Artificial Sequence: Synthetic oligonucleotide
cuucacuacaugcu

SEQ ID NO: 31373 - RNA, 14 nt, Artificial Sequence
  Description of Artificial Sequence: Synthetic oligonucleotide
ucuucacuacaugc

SEQ ID NO: 31374 - RNA, 14 nt, Artificial Sequence
  Description of Artificial Sequence: Synthetic oligonucleotide
uucuucacuacaug

SEQ ID NO: 31375 - RNA, 14 nt, Artificial Sequence
  Description of Artificial Sequence: Synthetic oligonucleotide
guucuucacuacau

SEQ ID NO: 31376 - RNA, 14 nt, Artificial Sequence
  Description of Artificial Sequence: Synthetic oligonucleotide
uguucuucacuaca

SEQ ID NO: 31377 - RNA, 14 nt, Artificial Sequence
  Description of Artificial Sequence: Synthetic oligonucleotide
uuguucuucacuac

SEQ ID NO: 31378 - RNA, 14 nt, Artificial Sequence
  Description of Artificial Sequence: Synthetic oligonucleotide
cuuguucuucacua

SEQ ID NO: 31379 - RNA, 14 nt, Artificial Sequence
  Description of Artificial Sequence: Synthetic oligonucleotide
ucuuguucuucacu

SEQ ID NO: 31380 - RNA, 14 nt, Artificial Sequence
  Description of Artificial Sequence: Synthetic oligonucleotide
uucuuguucuucac

SEQ ID NO: 31381 - RNA, 14 nt, Artificial Sequence
  Description of Artificial Sequence: Synthetic oligonucleotide
cuucuuguucuuca

SEQ ID NO: 31382 - RNA, 14 nt, Artificial Sequence
  Description of Artificial Sequence: Synthetic oligonucleotide
ucuucuuguucuuc

SEQ ID NO: 31383 - RNA, 14 nt, Artificial Sequence
  Description of Artificial Sequence: Synthetic oligonucleotide
gucuucuuguucuu

SEQ ID NO: 31384 - RNA, 14 nt, Artificial Sequence
  Description of Artificial Sequence: Synthetic oligonucleotide
ugucuucuuguucu

SEQ ID NO: 31385 - RNA, 14 nt, Artificial Sequence
  Description of Artificial Sequence: Synthetic oligonucleotide
cugucuucuuguuc

SEQ ID NO: 31386 - RNA, 14 nt, Artificial Sequence
  Description of Artificial Sequence: Synthetic oligonucleotide
ucugucuucuuguu

SEQ ID NO: 31387 - RNA, 14 nt, Artificial Sequence
  Description of Artificial Sequence: Synthetic oligonucleotide
cucugucuucuugu

SEQ ID NO: 31388 - RNA, 14 nt, Artificial Sequence
  Description of Artificial Sequence: Synthetic oligonucleotide
ucucugucuucuug

SEQ ID NO: 31389 - RNA, 14 nt, Artificial Sequence
  Description of Artificial Sequence: Synthetic oligonucleotide
uucucugucuucuu

SEQ ID NO: 31390 - RNA, 14 nt, Artificial Sequence
  Description of Artificial Sequence: Synthetic oligonucleotide
auucucugucuucu

SEQ ID NO: 31391 - RNA, 14 nt, Artificial Sequence
  Description of Artificial Sequence: Synthetic oligonucleotide
cauucucugucuuc

SEQ ID NO: 31392 - RNA, 14 nt, Artificial Sequence
  Description of Artificial Sequence: Synthetic oligonucleotide
acauucucugucuu

SEQ ID NO: 31393 - RNA, 14 nt, Artificial Sequence
  Description of Artificial Sequence: Synthetic oligonucleotide
aacauucucugucu

SEQ ID NO: 31394 - RNA, 14 nt, Artificial Sequence
  Description of Artificial Sequence: Synthetic oligonucleotide
aaacauucucuguc

SEQ ID NO: 31395 - RNA, 14 nt, Artificial Sequence
  Description of Artificial Sequence: Synthetic oligonucleotide
caaacauucucugu

SEQ ID NO: 31396 - RNA, 14 nt, Artificial Sequence
  Description of Artificial Sequence: Synthetic oligonucleotide
ucaaacauucucug

SEQ ID NO: 31397 - RNA, 14 nt, Artificial Sequence
  Description of Artificial Sequence: Synthetic oligonucleotide
uucaaacauucucu

SEQ ID NO: 31398 - RNA, 14 nt, Artificial Sequence
  Description of Artificial Sequence: Synthetic oligonucleotide
guucaaacauucuc

SEQ ID NO: 31399 - RNA, 14 nt, Artificial Sequence
  Description of Artificial Sequence: Synthetic oligonucleotide
gguucaaacauucu

SEQ ID NO: 31400 - RNA, 14 nt, Artificial Sequence
  Description of Artificial Sequence: Synthetic oligonucleotide
ugguucaaacauuc

SEQ ID NO: 31401 - RNA, 14 nt, Artificial Sequence
  Description of Artificial Sequence: Synthetic oligonucleotide
uugguucaaacauu

SEQ ID NO: 31402 - RNA, 14 nt, Artificial Sequence
  Description of Artificial Sequence: Synthetic oligonucleotide
cuugguucaaacau

SEQ ID NO: 31403 - RNA, 14 nt, Artificial Sequence
  Description of Artificial Sequence: Synthetic oligonucleotide
gcuugguucaaaca

SEQ ID NO: 31404 - RNA, 14 nt, Artificial Sequence
  Description of Artificial Sequence: Synthetic oligonucleotide
agcuugguucaaac

SEQ ID NO: 31405 - RNA, 14 nt, Artificial Sequence
  Description of Artificial Sequence: Synthetic oligonucleotide
uagcuugguucaaa

SEQ ID NO: 31406 - RNA, 14 nt, Artificial Sequence
  Description of Artificial Sequence: Synthetic oligonucleotide
auagcuugguucaa

SEQ ID NO: 31407 - RNA, 14 nt, Artificial Sequence
  Description of Artificial Sequence: Synthetic oligonucleotide
aauagcuugguuca

SEQ ID NO: 31408 - RNA, 14 nt, Artificial Sequence
  Description of Artificial Sequence: Synthetic oligonucleotide
uaauagcuugguuc

SEQ ID NO: 31409 - RNA, 14 nt, Artificial Sequence
  Description of Artificial Sequence: Synthetic oligonucleotide
guaauagcuugguu

SEQ ID NO: 31410 - RNA, 14 nt, Artificial Sequence
  Description of Artificial Sequence: Synthetic oligonucleotide
aguaauagcuuggu

SEQ ID NO: 31411 - RNA, 14 nt, Artificial Sequence
  Description of Artificial Sequence: Synthetic oligonucleotide
caguaauagcuugg

SEQ ID NO: 31412 - RNA, 14 nt, Artificial Sequence
  Description of Artificial Sequence: Synthetic oligonucleotide
gcaguaauagcuug

SEQ ID NO: 31413 - RNA, 14 nt, Artificial Sequence
  Description of Artificial Sequence: Synthetic oligonucleotide
agcaguaauagcuu

SEQ ID NO: 31414 - RNA, 14 nt, Artificial Sequence
  Description of Artificial Sequence: Synthetic oligonucleotide
gagcaguaauagcu

SEQ ID NO: 31415 - RNA, 14 nt, Artificial Sequence
  Description of Artificial Sequence: Synthetic oligonucleotide
agagcaguaauagc

SEQ ID NO: 31416 - RNA, 14 nt, Artificial Sequence
  Description of Artificial Sequence: Synthetic oligonucleotide
gagagcaguaauag

SEQ ID NO: 31417 - RNA, 14 nt, Artificial Sequence
  Description of Artificial Sequence: Synthetic oligonucleotide
ugagagcaguaaua

SEQ ID NO: 31418 - RNA, 14 nt, Artificial Sequence
  Description of Artificial Sequence: Synthetic oligonucleotide
augagagcaguaau

SEQ ID NO: 31419 - RNA, 14 nt, Artificial Sequence
  Description of Artificial Sequence: Synthetic oligonucleotide
caugagagcaguaa

SEQ ID NO: 31420 - RNA, 14 nt, Artificial Sequence
  Description of Artificial Sequence: Synthetic oligonucleotide
ucaugagagcagua

SEQ ID NO: 31421 - RNA, 14 nt, Artificial Sequence
  Description of Artificial Sequence: Synthetic oligonucleotide
uucaugagagcagu

SEQ ID NO: 31422 - RNA, 14 nt, Artificial Sequence
  Description of Artificial Sequence: Synthetic oligonucleotide
auucaugagagcag

SEQ ID NO: 31423 - RNA, 14 nt, Artificial Sequence
  Description of Artificial Sequence: Synthetic oligonucleotide
gauucaugagagca

SEQ ID NO: 31424 - RNA, 14 nt, Artificial Sequence
  Description of Artificial Sequence: Synthetic oligonucleotide
agauucaugagagc

SEQ ID NO: 31425 - RNA, 14 nt, Artificial Sequence
  Description of Artificial Sequence: Synthetic oligonucleotide
gagauucaugagag

SEQ ID NO: 31426 - RNA, 14 nt, Artificial Sequence
  Description of Artificial Sequence: Synthetic oligonucleotide
ggagauucaugaga

SEQ ID NO: 31427 - RNA, 14 nt, Artificial Sequence
  Description of Artificial Sequence: Synthetic oligonucleotide
uggagauucaugag

SEQ ID NO: 31428 - RNA, 14 nt, Artificial Sequence
  Description of Artificial Sequence: Synthetic oligonucleotide
uuggagauucauga

SEQ ID NO: 31429 - RNA, 14 nt, Artificial Sequence
  Description of Artificial Sequence: Synthetic oligonucleotide
cuuggagauucaug

SEQ ID NO: 31430 - RNA, 14 nt, Artificial Sequence
  Description of Artificial Sequence: Synthetic oligonucleotide
ccuuggagauucau

SEQ ID NO: 31431 - RNA, 14 nt, Artificial Sequence
  Description of Artificial Sequence: Synthetic oligonucleotide
accuuggagauuca

SEQ ID NO: 31432 - RNA, 14 nt, Artificial Sequence
  Description of Artificial Sequence: Synthetic oligonucleotide
uaccuuggagauuc

SEQ ID NO: 31433 - RNA, 14 nt, Artificial Sequence
  Description of Artificial Sequence: Synthetic oligonucleotide
cuaccuuggagauu

SEQ ID NO: 31434 - RNA, 14 nt, Artificial Sequence
  Description of Artificial Sequence: Synthetic oligonucleotide
gcuaccuuggagau

SEQ ID NO: 31435 - RNA, 14 nt, Artificial Sequence
  Description of Artificial Sequence: Synthetic oligonucleotide
ugcuaccuuggaga

SEQ ID NO: 31436 - RNA, 14 nt, Artificial Sequence
  Description of Artificial Sequence: Synthetic oligonucleotide
augcuaccuuggag

SEQ ID NO: 31437 - RNA, 14 nt, Artificial Sequence
  Description of Artificial Sequence: Synthetic oligonucleotide
caugcuaccuugga

SEQ ID NO: 31438 - RNA, 14 nt, Artificial Sequence
  Description of Artificial Sequence: Synthetic oligonucleotide
ccaugcuaccuugg

SEQ ID NO: 31439 - RNA, 14 nt, Artificial Sequence
  Description of Artificial Sequence: Synthetic oligonucleotide
uccaugcuaccuug

SEQ ID NO: 31440 - RNA, 14 nt, Artificial Sequence
  Description of Artificial Sequence: Synthetic oligonucleotide
guccaugcuaccuu

SEQ ID NO: 31441 - RNA, 14 nt, Artificial Sequence
  Description of Artificial Sequence: Synthetic oligonucleotide
gguccaugcuaccu

SEQ ID NO: 31442 - RNA, 14 nt, Artificial Sequence
  Description of Artificial Sequence: Synthetic oligonucleotide
cgguccaugcuacc

SEQ ID NO: 31443 - RNA, 14 nt, Artificial Sequence
  Description of Artificial Sequence: Synthetic oligonucleotide
ucgguccaugcuac

SEQ ID NO: 31444 - RNA, 14 nt, Artificial Sequence
  Description of Artificial Sequence: Synthetic oligonucleotide
uucgguccaugcua

SEQ ID NO: 31445 - RNA, 14 nt, Artificial Sequence
  Description of Artificial Sequence: Synthetic oligonucleotide
auucgguccaugcu

SEQ ID NO: 31446 - RNA, 14 nt, Artificial Sequence
  Description of Artificial Sequence: Synthetic oligonucleotide
aauucgguccaugc

SEQ ID NO: 31447 - RNA, 14 nt, Artificial Sequence
  Description of Artificial Sequence: Synthetic oligonucleotide
aaauucgguccaug

SEQ ID NO: 31448 - RNA, 14 nt, Artificial Sequence
  Description of Artificial Sequence: Synthetic oligonucleotide
uaaauucgguccau

SEQ ID NO: 31449 - RNA, 14 nt, Artificial Sequence
  Description of Artificial Sequence: Synthetic oligonucleotide
guaaauucggucca

SEQ ID NO: 31450 - RNA, 14 nt, Artificial Sequence
  Description of Artificial Sequence: Synthetic oligonucleotide
uguaaauucggucc

SEQ ID NO: 31451 - RNA, 14 nt, Artificial Sequence
  Description of Artificial Sequence: Synthetic oligonucleotide
uuguaaauucgguc

SEQ ID NO: 31452 - RNA, 14 nt, Artificial Sequence
  Description of Artificial Sequence: Synthetic oligonucleotide
cuuguaaauucggu

SEQ ID NO: 31453 - RNA, 14 nt, Artificial Sequence
  Description of Artificial Sequence: Synthetic oligonucleotide
gcuuguaaauucgg

SEQ ID NO: 31454 - RNA, 14 nt, Artificial Sequence
  Description of Artificial Sequence: Synthetic oligonucleotide
ugcuuguaaauucg

SEQ ID NO: 31455 - RNA, 14 nt, Artificial Sequence
  Description of Artificial Sequence: Synthetic oligonucleotide
cugcuuguaaauuc

SEQ ID NO: 31456 - RNA, 14 nt, Artificial Sequence
  Description of Artificial Sequence: Synthetic oligonucleotide
acugcuuguaaauu

SEQ ID NO: 31457 - RNA, 14 nt, Artificial Sequence
  Description of Artificial Sequence: Synthetic oligonucleotide
uacugcuuguaaau

SEQ ID NO: 31458 - RNA, 14 nt, Artificial Sequence
  Description of Artificial Sequence: Synthetic oligonucleotide
auacugcuuguaaa

SEQ ID NO: 31459 - RNA, 14 nt, Artificial Sequence
  Description of Artificial Sequence: Synthetic oligonucleotide
aauacugcuuguaa

SEQ ID NO: 31460 - RNA, 14 nt, Artificial Sequence
  Description of Artificial Sequence: Synthetic oligonucleotide
gaauacugcuugua

SEQ ID NO: 31461 - RNA, 14 nt, Artificial Sequence
  Description of Artificial Sequence: Synthetic oligonucleotide
ugaauacugcuugu

SEQ ID NO: 31462 - RNA, 14 nt, Artificial Sequence
  Description of Artificial Sequence: Synthetic oligonucleotide
gugaauacugcuug

SEQ ID NO: 31463 - RNA, 14 nt, Artificial Sequence
  Description of Artificial Sequence: Synthetic oligonucleotide
ggugaauacugcuu

SEQ ID NO: 31464 - RNA, 14 nt, Artificial Sequence
  Description of Artificial Sequence: Synthetic oligonucleotide
aggugaauacugcu

SEQ ID NO: 31465 - RNA, 14 nt, Artificial Sequence
  Description of Artificial Sequence: Synthetic oligonucleotide
uaggugaauacugc

SEQ ID NO: 31466 - RNA, 14 nt, Artificial Sequence
  Description of Artificial Sequence: Synthetic oligonucleotide
cuaggugaauacug

SEQ ID NO: 31467 - RNA, 14 nt, Artificial Sequence
  Description of Artificial Sequence: Synthetic oligonucleotide
ucuaggugaauacu

SEQ ID NO: 31468 - RNA, 14 nt, Artificial Sequence
  Description of Artificial Sequence: Synthetic oligonucleotide
gucuaggugaauac

SEQ ID NO: 31469 - RNA, 14 nt, Artificial Sequence
  Description of Artificial Sequence: Synthetic oligonucleotide
cgucuaggugaaua

SEQ ID NO: 31470 - RNA, 14 nt, Artificial Sequence
  Description of Artificial Sequence: Synthetic oligonucleotide
acgucuaggugaau

SEQ ID NO: 31471 - RNA, 14 nt, Artificial Sequence
  Description of Artificial Sequence: Synthetic oligonucleotide
gacgucuaggugaa

SEQ ID NO: 31472 - RNA, 14 nt, Artificial Sequence
  Description of Artificial Sequence: Synthetic oligonucleotide
cgacgucuagguga

SEQ ID NO: 31473 - RNA, 14 nt, Artificial Sequence
  Description of Artificial Sequence: Synthetic oligonucleotide
ucgacgucuaggug

SEQ ID NO: 31474 - RNA, 14 nt, Artificial Sequence
  Description of Artificial Sequence: Synthetic oligonucleotide
gucgacgucuaggu

SEQ ID NO: 31475 - RNA, 14 nt, Artificial Sequence
  Description of Artificial Sequence: Synthetic oligonucleotide
ggucgacgucuagg

SEQ ID NO: 31476 - RNA, 14 nt, Artificial Sequence
  Description of Artificial Sequence: Synthetic oligonucleotide
aggucgacgucuag

SEQ ID NO: 31477 - RNA, 14 nt, Artificial Sequence
  Description of Artificial Sequence: Synthetic oligonucleotide
caggucgacgucua

SEQ ID NO: 31478 - RNA, 14 nt, Artificial Sequence
  Description of Artificial Sequence: Synthetic oligonucleotide
ccaggucgacgucu

SEQ ID NO: 31479 - RNA, 14 nt, Artificial Sequence
  Description of Artificial Sequence: Synthetic oligonucleotide
uccaggucgacguc

SEQ ID NO: 31480 - RNA, 14 nt, Artificial Sequence
  Description of Artificial Sequence: Synthetic oligonucleotide
cuccaggucgacgu

SEQ ID NO: 31481 - RNA, 14 nt, Artificial Sequence
  Description of Artificial Sequence: Synthetic oligonucleotide
ucuccaggucgacg

SEQ ID NO: 31482 - RNA, 14 nt, Artificial Sequence
  Description of Artificial Sequence: Synthetic oligonucleotide
aucuccaggucgac

SEQ ID NO: 31483 - RNA, 14 nt, Artificial Sequence
  Description of Artificial Sequence: Synthetic oligonucleotide
gaucuccaggucga

SEQ ID NO: 31484 - RNA, 14 nt, Artificial Sequence
  Description of Artificial Sequence: Synthetic oligonucleotide
ggaucuccaggucg

SEQ ID NO: 31485 - RNA, 14 nt, Artificial Sequence
  Description of Artificial Sequence: Synthetic oligonucleotide
aggaucuccagguc

SEQ ID NO: 31486 - RNA, 14 nt, Artificial Sequence
  Description of Artificial Sequence: Synthetic oligonucleotide
caggaucuccaggu

SEQ ID NO: 31487 - RNA, 14 nt, Artificial Sequence
  Description of Artificial Sequence: Synthetic oligonucleotide
acaggaucuccagg

SEQ ID NO: 31488 - RNA, 14 nt, Artificial Sequence
  Description of Artificial Sequence: Synthetic oligonucleotide
aacaggaucuccag

SEQ ID NO: 31489 - RNA, 14 nt, Artificial Sequence
  Description of Artificial Sequence: Synthetic oligonucleotide
aaacaggaucucca

SEQ ID NO: 31490 - RNA, 14 nt, Artificial Sequence
  Description of Artificial Sequence: Synthetic oligonucleotide
caaacaggaucucc

SEQ ID NO: 31491 - RNA, 14 nt, Artificial Sequence
  Description of Artificial Sequence: Synthetic oligonucleotide
gcaaacaggaucuc

SEQ ID NO: 31492 - RNA, 14 nt, Artificial Sequence
  Description of Artificial Sequence: Synthetic oligonucleotide
ggcaaacaggaucu

SEQ ID NO: 31493 - RNA, 14 nt, Artificial Sequence
  Description of Artificial Sequence: Synthetic oligonucleotide
gggcaaacaggauc

SEQ ID NO: 31494 - RNA, 14 nt, Artificial Sequence
  Description of Artificial Sequence: Synthetic oligonucleotide
agggcaaacaggau

SEQ ID NO: 31495 - DNA, 14 bp, Artificial Sequence
  Description of Artificial Sequence: Synthetic oligonucleotide
aagggcaaacagga

SEQ ID NO: 31496 - DNA, 14 bp, Artificial Sequence
  Description of Artificial Sequence: Synthetic oligonucleotide
aaagggcaaacagg

SEQ ID NO: 31497 - DNA, 14 bp, Artificial Sequence
  Description of Artificial Sequence: Synthetic oligonucleotide
aaaagggcaaacag

SEQ ID NO: 31498 - DNA, 14 bp, Artificial Sequence
  Description of Artificial Sequence: Synthetic oligonucleotide
aaaaagggcaaaca

SEQ ID NO: 31499 - RNA, 14 nt, Artificial Sequence
  Description of Artificial Sequence: Synthetic oligonucleotide
uaaaaagggcaaac

SEQ ID NO: 31500 - RNA, 14 nt, Artificial Sequence
  Description of Artificial Sequence: Synthetic oligonucleotide
auaaaaagggcaaa

SEQ ID NO: 31501 - RNA, 14 nt, Artificial Sequence
  Description of Artificial Sequence: Synthetic oligonucleotide
uauaaaaagggcaa

SEQ ID NO: 31502 - RNA, 14 nt, Artificial Sequence
  Description of Artificial Sequence: Synthetic oligonucleotide
cuauaaaaagggca

SEQ ID NO: 31503 - RNA, 14 nt, Artificial Sequence
  Description of Artificial Sequence: Synthetic oligonucleotide
acuauaaaaagggc

SEQ ID NO: 31504 - RNA, 14 nt, Artificial Sequence
  Description of Artificial Sequence: Synthetic oligonucleotide
gacuauaaaaaggg

SEQ ID NO: 31505 - RNA, 14 nt, Artificial Sequence
  Description of Artificial Sequence: Synthetic oligonucleotide
ugacuauaaaaagg

SEQ ID NO: 31506 - RNA, 14 nt, Artificial Sequence
  Description of Artificial Sequence: Synthetic oligonucleotide
gugacuauaaaaag

SEQ ID NO: 31507 - RNA, 14 nt, Artificial Sequence
  Description of Artificial Sequence: Synthetic oligonucleotide
ggugacuauaaaaa

SEQ ID NO: 31508 - RNA, 14 nt, Artificial Sequence
  Description of Artificial Sequence: Synthetic oligonucleotide
uggugacuauaaaa

SEQ ID NO: 31509 - RNA, 14 nt, Artificial Sequence
  Description of Artificial Sequence: Synthetic oligonucleotide
uuggugacuauaaa

SEQ ID NO: 31510 - RNA, 14 nt, Artificial Sequence
  Description of Artificial Sequence: Synthetic oligonucleotide
auuggugacuauaa

SEQ ID NO: 31511 - RNA, 14 nt, Artificial Sequence
  Description of Artificial Sequence: Synthetic oligonucleotide
aauuggugacuaua

SEQ ID NO: 31512 - RNA, 14 nt, Artificial Sequence
  Description of Artificial Sequence: Synthetic oligonucleotide
uaauuggugacuau

SEQ ID NO: 31513 - RNA, 14 nt, Artificial Sequence
  Description of Artificial Sequence: Synthetic oligonucleotide
uuaauuggugacua

SEQ ID NO: 31514 - RNA, 14 nt, Artificial Sequence
  Description of Artificial Sequence: Synthetic oligonucleotide
cuuaauuggugacu

SEQ ID NO: 31515 - RNA, 14 nt, Artificial Sequence
  Description of Artificial Sequence: Synthetic oligonucleotide
ucuuaauuggugac

SEQ ID NO: 31516 - RNA, 14 nt, Artificial Sequence
  Description of Artificial Sequence: Synthetic oligonucleotide
uucuuaauugguga

SEQ ID NO: 31517 - RNA, 14 nt, Artificial Sequence
  Description of Artificial Sequence: Synthetic oligonucleotide
cuucuuaauuggug

SEQ ID NO: 31518 - RNA, 14 nt, Artificial Sequence
  Description of Artificial Sequence: Synthetic oligonucleotide
gcuucuuaauuggu

SEQ ID NO: 31519 - RNA, 14 nt, Artificial Sequence
  Description of Artificial Sequence: Synthetic oligonucleotide
ugcuucuuaauugg

SEQ ID NO: 31520 - RNA, 14 nt, Artificial Sequence
  Description of Artificial Sequence: Synthetic oligonucleotide
uugcuucuuaauug

SEQ ID NO: 31521 - RNA, 14 nt, Artificial Sequence
  Description of Artificial Sequence: Synthetic oligonucleotide
uuugcuucuuaauu

SEQ ID NO: 31522 - RNA, 14 nt, Artificial Sequence
  Description of Artificial Sequence: Synthetic oligonucleotide
guuugcuucuuaau

SEQ ID NO: 31523 - RNA, 14 nt, Artificial Sequence
  Description of Artificial Sequence: Synthetic oligonucleotide
uguuugcuucuuaa

SEQ ID NO: 31524 - RNA, 14 nt, Artificial Sequence
  Description of Artificial Sequence: Synthetic oligonucleotide
guguuugcuucuua

SEQ ID NO: 31525 - RNA, 14 nt, Artificial Sequence
  Description of Artificial Sequence: Synthetic oligonucleotide
gguguuugcuucuu

SEQ ID NO: 31526 - RNA, 14 nt, Artificial Sequence
  Description of Artificial Sequence: Synthetic oligonucleotide
agguguuugcuucu

SEQ ID NO: 31527 - RNA, 14 nt, Artificial Sequence
  Description of Artificial Sequence: Synthetic oligonucleotide
cagguguuugcuuc

SEQ ID NO: 31528 - RNA, 14 nt, Artificial Sequence
  Description of Artificial Sequence: Synthetic oligonucleotide
ccagguguuugcuu

SEQ ID NO: 31529 - RNA, 14 nt, Artificial Sequence
  Description of Artificial Sequence: Synthetic oligonucleotide
gccagguguuugcu

SEQ ID NO: 31530 - RNA, 14 nt, Artificial Sequence
  Description of Artificial Sequence: Synthetic oligonucleotide
agccagguguuugc

SEQ ID NO: 31531 - RNA, 14 nt, Artificial Sequence
  Description of Artificial Sequence: Synthetic oligonucleotide
uagccagguguuug

SEQ ID NO: 31532 - RNA, 14 nt, Artificial Sequence
  Description of Artificial Sequence: Synthetic oligonucleotide
auagccagguguuu

SEQ ID NO: 31533 - RNA, 14 nt, Artificial Sequence
  Description of Artificial Sequence: Synthetic oligonucleotide
gauagccagguguu

SEQ ID NO: 31534 - RNA, 14 nt, Artificial Sequence
  Description of Artificial Sequence: Synthetic oligonucleotide
ugauagccaggugu

SEQ ID NO: 31535 - RNA, 14 nt, Artificial Sequence
  Description of Artificial Sequence: Synthetic oligonucleotide
uugauagccaggug

SEQ ID NO: 31536 - RNA, 14 nt, Artificial Sequence
  Description of Artificial Sequence: Synthetic oligonucleotide
uuugauagccaggu

SEQ ID NO: 31537 - RNA, 14 nt, Artificial Sequence
  Description of Artificial Sequence: Synthetic oligonucleotide
uuuugauagccagg

SEQ ID NO: 31538 - RNA, 14 nt, Artificial Sequence
  Description of Artificial Sequence: Synthetic oligonucleotide
uuuuugauagccag

SEQ ID NO: 31539 - RNA, 14 nt, Artificial Sequence
  Description of Artificial Sequence: Synthetic oligonucleotide
uuuuuugauagcca

SEQ ID NO: 31540 - RNA, 14 nt, Artificial Sequence
  Description of Artificial Sequence: Synthetic oligonucleotide
uuuuuuugauagcc

SEQ ID NO: 31541 - RNA, 14 nt, Artificial Sequence
  Description of Artificial Sequence: Synthetic oligonucleotide
auuuuuuugauagc

SEQ ID NO: 31542 - RNA, 14 nt, Artificial Sequence
  Description of Artificial Sequence: Synthetic oligonucleotide
cauuuuuuugauag

SEQ ID NO: 31543 - RNA, 14 nt, Artificial Sequence
  Description of Artificial Sequence: Synthetic oligonucleotide
ucauuuuuuugaua

SEQ ID NO: 31544 - RNA, 14 nt, Artificial Sequence
  Description of Artificial Sequence: Synthetic oligonucleotide
uucauuuuuuugau

SEQ ID NO: 31545 - RNA, 14 nt, Artificial Sequence
  Description of Artificial Sequence: Synthetic oligonucleotide
auucauuuuuuuga

SEQ ID NO: 31546 - RNA, 14 nt, Artificial Sequence
  Description of Artificial Sequence: Synthetic oligonucleotide
cauucauuuuuuug

SEQ ID NO: 31547 - RNA, 14 nt, Artificial Sequence
  Description of Artificial Sequence: Synthetic oligonucleotide
ucauucauuuuuuu

SEQ ID NO: 31548 - RNA, 14 nt, Artificial Sequence
  Description of Artificial Sequence: Synthetic oligonucleotide
uucauucauuuuuu

SEQ ID NO: 31549 - RNA, 14 nt, Artificial Sequence
  Description of Artificial Sequence: Synthetic oligonucleotide
uuucauucauuuuu

SEQ ID NO: 31550 - RNA, 14 nt, Artificial Sequence
  Description of Artificial Sequence: Synthetic oligonucleotide
auuucauucauuuu

SEQ ID NO: 31551 - RNA, 14 nt, Artificial Sequence
  Description of Artificial Sequence: Synthetic oligonucleotide
aauuucauucauuu

SEQ ID NO: 31552 - RNA, 14 nt, Artificial Sequence
  Description of Artificial Sequence: Synthetic oligonucleotide
gaauuucauucauu

SEQ ID NO: 31553 - RNA, 14 nt, Artificial Sequence
  Description of Artificial Sequence: Synthetic oligonucleotide
ugaauuucauucau

SEQ ID NO: 31554 - RNA, 14 nt, Artificial Sequence
  Description of Artificial Sequence: Synthetic oligonucleotide
cugaauuucauuca

SEQ ID NO: 31555 - RNA, 14 nt, Artificial Sequence
  Description of Artificial Sequence: Synthetic oligonucleotide
ucugaauuucauuc

SEQ ID NO: 31556 - RNA, 14 nt, Artificial Sequence
  Description of Artificial Sequence: Synthetic oligonucleotide
uucugaauuucauu

SEQ ID NO: 31557 - RNA, 14 nt, Artificial Sequence
  Description of Artificial Sequence: Synthetic oligonucleotide
uuucugaauuucau

SEQ ID NO: 31558 - RNA, 14 nt, Artificial Sequence
  Description of Artificial Sequence: Synthetic oligonucleotide
uuuucugaauuuca

SEQ ID NO: 31559 - RNA, 14 nt, Artificial Sequence
  Description of Artificial Sequence: Synthetic oligonucleotide
uuuuucugaauuuc

SEQ ID NO: 31560 - RNA, 14 nt, Artificial Sequence
  Description of Artificial Sequence: Synthetic oligonucleotide
auuuuucugaauuu

SEQ ID NO: 31561 - RNA, 14 nt, Artificial Sequence
  Description of Artificial Sequence: Synthetic oligonucleotide
uauuuuucugaauu

SEQ ID NO: 31562 - RNA, 14 nt, Artificial Sequence
  Description of Artificial Sequence: Synthetic oligonucleotide
auauuuuucugaau

SEQ ID NO: 31563 - RNA, 14 nt, Artificial Sequence
  Description of Artificial Sequence: Synthetic oligonucleotide
gauauuuuucugaa

SEQ ID NO: 31564 - RNA, 14 nt, Artificial Sequence
  Description of Artificial Sequence: Synthetic oligonucleotide
cgauauuuuucuga

SEQ ID NO: 31565 - RNA, 14 nt, Artificial Sequence
  Description of Artificial Sequence: Synthetic oligonucleotide
ucgauauuuuucug

SEQ ID NO: 31566 - RNA, 14 nt, Artificial Sequence
  Description of Artificial Sequence: Synthetic oligonucleotide
aucgauauuuuucu

SEQ ID NO: 31567 - RNA, 14 nt, Artificial Sequence
  Description of Artificial Sequence: Synthetic oligonucleotide
caucgauauuuuuc

SEQ ID NO: 31568 - RNA, 14 nt, Artificial Sequence
  Description of Artificial Sequence: Synthetic oligonucleotide
ccaucgauauuuuu

SEQ ID NO: 31569 - RNA, 14 nt, Artificial Sequence
  Description of Artificial Sequence: Synthetic oligonucleotide
uccaucgauauuuu

SEQ ID NO: 31570 - RNA, 14 nt, Artificial Sequence
  Description of Artificial Sequence: Synthetic oligonucleotide
auccaucgauauuu

SEQ ID NO: 31571 - RNA, 14 nt, Artificial Sequence
  Description of Artificial Sequence: Synthetic oligonucleotide
cauccaucgauauu

SEQ ID NO: 31572 - RNA, 14 nt, Artificial Sequence
  Description of Artificial Sequence: Synthetic oligonucleotide
ccauccaucgauau

SEQ ID NO: 31573 - RNA, 14 nt, Artificial Sequence
  Description of Artificial Sequence: Synthetic oligonucleotide
cccauccaucgaua

SEQ ID NO: 31574 - RNA, 14 nt, Artificial Sequence
  Description of Artificial Sequence: Synthetic oligonucleotide
ucccauccaucgau

SEQ ID NO: 31575 - RNA, 14 nt, Artificial Sequence
  Description of Artificial Sequence: Synthetic oligonucleotide
uucccauccaucga

SEQ ID NO: 31576 - RNA, 14 nt, Artificial Sequence
  Description of Artificial Sequence: Synthetic oligonucleotide
cuucccauccaucg

SEQ ID NO: 31577 - RNA, 14 nt, Artificial Sequence
  Description of Artificial Sequence: Synthetic oligonucleotide
ccuucccauccauc

SEQ ID NO: 31578 - RNA, 14 nt, Artificial Sequence
  Description of Artificial Sequence: Synthetic oligonucleotide
gccuucccauccau

SEQ ID NO: 31579 - RNA, 14 nt, Artificial Sequence
  Description of Artificial Sequence: Synthetic oligonucleotide
ugccuucccaucca

SEQ ID NO: 31580 - RNA, 14 nt, Artificial Sequence
  Description of Artificial Sequence: Synthetic oligonucleotide
uugccuucccaucc

SEQ ID NO: 31581 - RNA, 14 nt, Artificial Sequence
  Description of Artificial Sequence: Synthetic oligonucleotide
uuugccuucccauc

SEQ ID NO: 31582 - RNA, 14 nt, Artificial Sequence
  Description of Artificial Sequence: Synthetic oligonucleotide
cuuugccuucccau

SEQ ID NO: 31583 - RNA, 14 nt, Artificial Sequence
  Description of Artificial Sequence: Synthetic oligonucleotide
ucuuugccuuccca

SEQ ID NO: 31584 - RNA, 14 nt, Artificial Sequence
  Description of Artificial Sequence: Synthetic oligonucleotide
aucuuugccuuccc

SEQ ID NO: 31585 - RNA, 14 nt, Artificial Sequence
  Description of Artificial Sequence: Synthetic oligonucleotide
uaucuuugccuucc

SEQ ID NO: 31586 - RNA, 14 nt, Artificial Sequence
  Description of Artificial Sequence: Synthetic oligonucleotide
auaucuuugccuuc

SEQ ID NO: 31587 - RNA, 14 nt, Artificial Sequence
  Description of Artificial Sequence: Synthetic oligonucleotide
aauaucuuugccuu

SEQ ID NO: 31588 - RNA, 14 nt, Artificial Sequence
  Description of Artificial Sequence: Synthetic oligonucleotide
caauaucuuugccu

SEQ ID NO: 31589 - RNA, 14 nt, Artificial Sequence
  Description of Artificial Sequence: Synthetic oligonucleotide
ccaauaucuuugcc

SEQ ID NO: 31590 - RNA, 14 nt, Artificial Sequence
  Description of Artificial Sequence: Synthetic oligonucleotide
uccaauaucuuugc

SEQ ID NO: 31591 - RNA, 14 nt, Artificial Sequence
  Description of Artificial Sequence: Synthetic oligonucleotide
guccaauaucuuug

SEQ ID NO: 31592 - RNA, 14 nt, Artificial Sequence
  Description of Artificial Sequence: Synthetic oligonucleotide
uguccaauaucuuu

SEQ ID NO: 31593 - RNA, 14 nt, Artificial Sequence
  Description of Artificial Sequence: Synthetic oligonucleotide
cuguccaauaucuu

SEQ ID NO: 31594 - RNA, 14 nt, Artificial Sequence
  Description of Artificial Sequence: Synthetic oligonucleotide
acuguccaauaucu

SEQ ID NO: 31595 - RNA, 14 nt, Artificial Sequence
  Description of Artificial Sequence: Synthetic oligonucleotide
cacuguccaauauc

SEQ ID NO: 31596 - RNA, 14 nt, Artificial Sequence
  Description of Artificial Sequence: Synthetic oligonucleotide
acacuguccaauau

SEQ ID NO: 31597 - RNA, 14 nt, Artificial Sequence
  Description of Artificial Sequence: Synthetic oligonucleotide
aacacuguccaaua

SEQ ID NO: 31598 - RNA, 14 nt, Artificial Sequence
  Description of Artificial Sequence: Synthetic oligonucleotide
caacacuguccaau

SEQ ID NO: 31599 - RNA, 14 nt, Artificial Sequence
  Description of Artificial Sequence: Synthetic oligonucleotide
acaacacuguccaa

SEQ ID NO: 31600 - RNA, 14 nt, Artificial Sequence
  Description of Artificial Sequence: Synthetic oligonucleotide
uacaacacugucca

SEQ ID NO: 31601 - RNA, 14 nt, Artificial Sequence
  Description of Artificial Sequence: Synthetic oligonucleotide
uuacaacacugucc

SEQ ID NO: 31602 - RNA, 14 nt, Artificial Sequence
  Description of Artificial Sequence: Synthetic oligonucleotide
auuacaacacuguc

SEQ ID NO: 31603 - RNA, 14 nt, Artificial Sequence
  Description of Artificial Sequence: Synthetic oligonucleotide
cauuacaacacugu

SEQ ID NO: 31604 - RNA, 14 nt, Artificial Sequence
  Description of Artificial Sequence: Synthetic oligonucleotide
ucauuacaacacug

SEQ ID NO: 31605 - RNA, 14 nt, Artificial Sequence
  Description of Artificial Sequence: Synthetic oligonucleotide
uucauuacaacacu

SEQ ID NO: 31606 - RNA, 14 nt, Artificial Sequence
  Description of Artificial Sequence: Synthetic oligonucleotide
auucauuacaacac

SEQ ID NO: 31607 - RNA, 14 nt, Artificial Sequence
  Description of Artificial Sequence: Synthetic oligonucleotide
aauucauuacaaca

SEQ ID NO: 31608 - RNA, 14 nt, Artificial Sequence
  Description of Artificial Sequence: Synthetic oligonucleotide
gaauucauuacaac

SEQ ID NO: 31609 - RNA, 14 nt, Artificial Sequence
  Description of Artificial Sequence: Synthetic oligonucleotide
ugaauucauuacaa

SEQ ID NO: 31610 - RNA, 14 nt, Artificial Sequence
  Description of Artificial Sequence: Synthetic oligonucleotide
augaauucauuaca

SEQ ID NO: 31611 - RNA, 14 nt, Artificial Sequence
  Description of Artificial Sequence: Synthetic oligonucleotide
aaugaauucauuac

SEQ ID NO: 31612 - RNA, 14 nt, Artificial Sequence
  Description of Artificial Sequence: Synthetic oligonucleotide
uaaugaauucauua

SEQ ID NO: 31613 - RNA, 14 nt, Artificial Sequence
  Description of Artificial Sequence: Synthetic oligonucleotide
auaaugaauucauu

SEQ ID NO: 31614 - RNA, 14 nt, Artificial Sequence
  Description of Artificial Sequence: Synthetic oligonucleotide
cauaaugaauucau

SEQ ID NO: 31615 - RNA, 14 nt, Artificial Sequence
  Description of Artificial Sequence: Synthetic oligonucleotide
ccauaaugaauuca

SEQ ID NO: 31616 - RNA, 14 nt, Artificial Sequence
  Description of Artificial Sequence: Synthetic oligonucleotide
uccauaaugaauuc

SEQ ID NO: 31617 - RNA, 14 nt, Artificial Sequence
  Description of Artificial Sequence: Synthetic oligonucleotide
cuccauaaugaauu

SEQ ID NO: 31618 - RNA, 14 nt, Artificial Sequence
  Description of Artificial Sequence: Synthetic oligonucleotide
ccuccauaaugaau

SEQ ID NO: 31619 - RNA, 14 nt, Artificial Sequence
  Description of Artificial Sequence: Synthetic oligonucleotide
cccuccauaaugaa

SEQ ID NO: 31620 - RNA, 14 nt, Artificial Sequence
  Description of Artificial Sequence: Synthetic oligonucleotide
ucccuccauaauga

SEQ ID NO: 31621 - RNA, 14 nt, Artificial Sequence
  Description of Artificial Sequence: Synthetic oligonucleotide
gucccuccauaaug

SEQ ID NO: 31622 - RNA, 14 nt, Artificial Sequence
  Description of Artificial Sequence: Synthetic oligonucleotide
ggucccuccauaau

SEQ ID NO: 31623 - RNA, 14 nt, Artificial Sequence
  Description of Artificial Sequence: Synthetic oligonucleotide
uggucccuccauaa

SEQ ID NO: 31624 - RNA, 14 nt, Artificial Sequence
  Description of Artificial Sequence: Synthetic oligonucleotide
auggucccuccaua

SEQ ID NO: 31625 - RNA, 14 nt, Artificial Sequence
  Description of Artificial Sequence: Synthetic oligonucleotide
aauggucccuccau

SEQ ID NO: 31626 - RNA, 14 nt, Artificial Sequence
  Description of Artificial Sequence: Synthetic oligonucleotide
caauggucccucca

SEQ ID NO: 31627 - RNA, 14 nt, Artificial Sequence
  Description of Artificial Sequence: Synthetic oligonucleotide
ucaauggucccucc

SEQ ID NO: 31628 - RNA, 14 nt, Artificial Sequence
  Description of Artificial Sequence: Synthetic oligonucleotide
gucaauggucccuc

SEQ ID NO: 31629 - RNA, 14 nt, Artificial Sequence
  Description of Artificial Sequence: Synthetic oligonucleotide
ugucaauggucccu

SEQ ID NO: 31630 - RNA, 14 nt, Artificial Sequence
  Description of Artificial Sequence: Synthetic oligonucleotide
uugucaaugguccc

SEQ ID NO: 31631 - RNA, 14 nt, Artificial Sequence
  Description of Artificial Sequence: Synthetic oligonucleotide
cuugucaauggucc

SEQ ID NO: 31632 - RNA, 14 nt, Artificial Sequence
  Description of Artificial Sequence: Synthetic oligonucleotide
ucuugucaaugguc

SEQ ID NO: 31633 - RNA, 14 nt, Artificial Sequence
  Description of Artificial Sequence: Synthetic oligonucleotide
uucuugucaauggu

SEQ ID NO: 31634 - RNA, 14 nt, Artificial Sequence
  Description of Artificial Sequence: Synthetic oligonucleotide
auucuugucaaugg

SEQ ID NO: 31635 - RNA, 14 nt, Artificial Sequence
  Description of Artificial Sequence: Synthetic oligonucleotide
gauucuugucaaug

SEQ ID NO: 31636 - RNA, 14 nt, Artificial Sequence
  Description of Artificial Sequence: Synthetic oligonucleotide
cgauucuugucaau

SEQ ID NO: 31637 - RNA, 14 nt, Artificial Sequence
  Description of Artificial Sequence: Synthetic oligonucleotide
ccgauucuugucaa

SEQ ID NO: 31638 - RNA, 14 nt, Artificial Sequence
  Description of Artificial Sequence: Synthetic oligonucleotide
accgauucuuguca

SEQ ID NO: 31639 - RNA, 14 nt, Artificial Sequence
  Description of Artificial Sequence: Synthetic oligonucleotide
caccgauucuuguc

SEQ ID NO: 31640 - RNA, 14 nt, Artificial Sequence
  Description of Artificial Sequence: Synthetic oligonucleotide
gcaccgauucuugu

SEQ ID NO: 31641 - RNA, 14 nt, Artificial Sequence
  Description of Artificial Sequence: Synthetic oligonucleotide
ggcaccgauucuug

SEQ ID NO: 31642 - RNA, 14 nt, Artificial Sequence
  Description of Artificial Sequence: Synthetic oligonucleotide
uggcaccgauucuu

SEQ ID NO: 31643 - RNA, 14 nt, Artificial Sequence
  Description of Artificial Sequence: Synthetic oligonucleotide
uuggcaccgauucu

SEQ ID NO: 31644 - RNA, 14 nt, Artificial Sequence
  Description of Artificial Sequence: Synthetic oligonucleotide
uuuggcaccgauuc

SEQ ID NO: 31645 - RNA, 14 nt, Artificial Sequence
  Description of Artificial Sequence: Synthetic oligonucleotide
guuuggcaccgauu

SEQ ID NO: 31646 - RNA, 14 nt, Artificial Sequence
  Description of Artificial Sequence: Synthetic oligonucleotide
uguuuggcaccgau

SEQ ID NO: 31647 - RNA, 14 nt, Artificial Sequence
  Description of Artificial Sequence: Synthetic oligonucleotide
auguuuggcaccga

SEQ ID NO: 31648 - RNA, 14 nt, Artificial Sequence
  Description of Artificial Sequence: Synthetic oligonucleotide
cauguuuggcaccg

SEQ ID NO: 31649 - RNA, 14 nt, Artificial Sequence
  Description of Artificial Sequence: Synthetic oligonucleotide
ucauguuuggcacc

SEQ ID NO: 31650 - RNA, 14 nt, Artificial Sequence
  Description of Artificial Sequence: Synthetic oligonucleotide
uucauguuuggcac

SEQ ID NO: 31651 - RNA, 14 nt, Artificial Sequence
  Description of Artificial Sequence: Synthetic oligonucleotide
guucauguuuggca

SEQ ID NO: 31652 - RNA, 14 nt, Artificial Sequence
  Description of Artificial Sequence: Synthetic oligonucleotide
cguucauguuuggc

SEQ ID NO: 31653 - RNA, 14 nt, Artificial Sequence
  Description of Artificial Sequence: Synthetic oligonucleotide
ccguucauguuugg

SEQ ID NO: 31654 - RNA, 14 nt, Artificial Sequence
  Description of Artificial Sequence: Synthetic oligonucleotide
gccguucauguuug

SEQ ID NO: 31655 - RNA, 14 nt, Artificial Sequence
  Description of Artificial Sequence: Synthetic oligonucleotide
ugccguucauguuu

SEQ ID NO: 31656 - RNA, 14 nt, Artificial Sequence
  Description of Artificial Sequence: Synthetic oligonucleotide
augccguucauguu

SEQ ID NO: 31657 - RNA, 14 nt, Artificial Sequence
  Description of Artificial Sequence: Synthetic oligonucleotide
uaugccguucaugu

SEQ ID NO: 31658 - RNA, 14 nt, Artificial Sequence
  Description of Artificial Sequence: Synthetic oligonucleotide
auaugccguucaug

SEQ ID NO: 31659 - RNA, 14 nt, Artificial Sequence
  Description of Artificial Sequence: Synthetic oligonucleotide
aauaugccguucau

SEQ ID NO: 31660 - RNA, 14 nt, Artificial Sequence
  Description of Artificial Sequence: Synthetic oligonucleotide
aaauaugccguuca

SEQ ID NO: 31661 - RNA, 14 nt, Artificial Sequence
  Description of Artificial Sequence: Synthetic oligonucleotide
aaaauaugccguuc

SEQ ID NO: 31662 - RNA, 14 nt, Artificial Sequence
  Description of Artificial Sequence: Synthetic oligonucleotide
aaaaauaugccguu

SEQ ID NO: 31663 - RNA, 14 nt, Artificial Sequence
  Description of Artificial Sequence: Synthetic oligonucleotide
gaaaaauaugccgu

SEQ ID NO: 31664 - RNA, 14 nt, Artificial Sequence
  Description of Artificial Sequence: Synthetic oligonucleotide
agaaaaauaugccg

SEQ ID NO: 31665 - RNA, 14 nt, Artificial Sequence
  Description of Artificial Sequence: Synthetic oligonucleotide
cagaaaaauaugcc

SEQ ID NO: 31666 - RNA, 14 nt, Artificial Sequence
  Description of Artificial Sequence: Synthetic oligonucleotide
acagaaaaauaugc

SEQ ID NO: 31667 - RNA, 14 nt, Artificial Sequence
  Description of Artificial Sequence: Synthetic oligonucleotide
aacagaaaaauaug

SEQ ID NO: 31668 - RNA, 14 nt, Artificial Sequence
  Description of Artificial Sequence: Synthetic oligonucleotide
aaacagaaaaauau

SEQ ID NO: 31669 - RNA, 14 nt, Artificial Sequence
  Description of Artificial Sequence: Synthetic oligonucleotide
caaacagaaaaaua

SEQ ID NO: 31670 - RNA, 14 nt, Artificial Sequence
  Description of Artificial Sequence: Synthetic oligonucleotide
ucaaacagaaaaau

SEQ ID NO: 31671 - RNA, 14 nt, Artificial Sequence
  Description of Artificial Sequence: Synthetic oligonucleotide
aucaaacagaaaaa

SEQ ID NO: 31672 - RNA, 14 nt, Artificial Sequence
  Description of Artificial Sequence: Synthetic oligonucleotide
caucaaacagaaaa

SEQ ID NO: 31673 - RNA, 14 nt, Artificial Sequence
  Description of Artificial Sequence: Synthetic oligonucleotide
ccaucaaacagaaa

SEQ ID NO: 31674 - RNA, 14 nt, Artificial Sequence
  Description of Artificial Sequence: Synthetic oligonucleotide
gccaucaaacagaa

SEQ ID NO: 31675 - RNA, 14 nt, Artificial Sequence
  Description of Artificial Sequence: Synthetic oligonucleotide
agccaucaaacaga

SEQ ID NO: 31676 - RNA, 14 nt, Artificial Sequence
  Description of Artificial Sequence: Synthetic oligonucleotide
aagccaucaaacag

SEQ ID NO: 31677 - RNA, 14 nt, Artificial Sequence
  Description of Artificial Sequence: Synthetic oligonucleotide
uaagccaucaaaca

SEQ ID NO: 31678 - RNA, 14 nt, Artificial Sequence
  Description of Artificial Sequence: Synthetic oligonucleotide
uuaagccaucaaac

SEQ ID NO: 31679 - RNA, 14 nt, Artificial Sequence
  Description of Artificial Sequence: Synthetic oligonucleotide
auuaagccaucaaa

SEQ ID NO: 31680 - RNA, 14 nt, Artificial Sequence
  Description of Artificial Sequence: Synthetic oligonucleotide
cauuaagccaucaa

SEQ ID NO: 31681 - RNA, 14 nt, Artificial Sequence
  Description of Artificial Sequence: Synthetic oligonucleotide
ucauuaagccauca

SEQ ID NO: 31682 - RNA, 14 nt, Artificial Sequence
  Description of Artificial Sequence: Synthetic oligonucleotide
aucauuaagccauc

SEQ ID NO: 31683 - RNA, 14 nt, Artificial Sequence
  Description of Artificial Sequence: Synthetic oligonucleotide
gaucauuaagccau

SEQ ID NO: 31684 - RNA, 14 nt, Artificial Sequence
  Description of Artificial Sequence: Synthetic oligonucleotide
ugaucauuaagcca

SEQ ID NO: 31685 - RNA, 14 nt, Artificial Sequence
  Description of Artificial Sequence: Synthetic oligonucleotide
cugaucauuaagcc

SEQ ID NO: 31686 - RNA, 14 nt, Artificial Sequence
  Description of Artificial Sequence: Synthetic oligonucleotide
acugaucauuaagc

SEQ ID NO: 31687 - RNA, 14 nt, Artificial Sequence
  Description of Artificial Sequence: Synthetic oligonucleotide
aacugaucauuaag

SEQ ID NO: 31688 - RNA, 14 nt, Artificial Sequence
  Description of Artificial Sequence: Synthetic oligonucleotide
caacugaucauuaa

SEQ ID NO: 31689 - RNA, 14 nt, Artificial Sequence
  Description of Artificial Sequence: Synthetic oligonucleotide
acaacugaucauua

SEQ ID NO: 31690 - RNA, 14 nt, Artificial Sequence
  Description of Artificial Sequence: Synthetic oligonucleotide
uacaacugaucauu

SEQ ID NO: 31691 - RNA, 14 nt, Artificial Sequence
  Description of Artificial Sequence: Synthetic oligonucleotide
uuacaacugaucau

SEQ ID NO: 31692 - RNA, 14 nt, Artificial Sequence
  Description of Artificial Sequence: Synthetic oligonucleotide
uuuacaacugauca

SEQ ID NO: 31693 - RNA, 14 nt, Artificial Sequence
  Description of Artificial Sequence: Synthetic oligonucleotide
guuuacaacugauc

SEQ ID NO: 31694 - RNA, 14 nt, Artificial Sequence
  Description of Artificial Sequence: Synthetic oligonucleotide
gguuuacaacugau

SEQ ID NO: 31695 - RNA, 14 nt, Artificial Sequence
  Description of Artificial Sequence: Synthetic oligonucleotide
agguuuacaacuga

SEQ ID NO: 31696 - RNA, 14 nt, Artificial Sequence
  Description of Artificial Sequence: Synthetic oligonucleotide
uagguuuacaacug

SEQ ID NO: 31697 - RNA, 14 nt, Artificial Sequence
  Description of Artificial Sequence: Synthetic oligonucleotide
uuagguuuacaacu

SEQ ID NO: 31698 - RNA, 14 nt, Artificial Sequence
  Description of Artificial Sequence: Synthetic oligonucleotide
auuagguuuacaac

SEQ ID NO: 31699 - RNA, 14 nt, Artificial Sequence
  Description of Artificial Sequence: Synthetic oligonucleotide
gauuagguuuacaa

SEQ ID NO: 31700 - RNA, 14 nt, Artificial Sequence
  Description of Artificial Sequence: Synthetic oligonucleotide
ugauuagguuuaca

SEQ ID NO: 31701 - RNA, 14 nt, Artificial Sequence
  Description of Artificial Sequence: Synthetic oligonucleotide
augauuagguuuac

SEQ ID NO: 31702 - RNA, 14 nt, Artificial Sequence
  Description of Artificial Sequence: Synthetic oligonucleotide
caugauuagguuua

SEQ ID NO: 31703 - RNA, 14 nt, Artificial Sequence
  Description of Artificial Sequence: Synthetic oligonucleotide
ccaugauuagguuu

SEQ ID NO: 31704 - RNA, 14 nt, Artificial Sequence
  Description of Artificial Sequence: Synthetic oligonucleotide
gccaugauuagguu

SEQ ID NO: 31705 - RNA, 14 nt, Artificial Sequence
  Description of Artificial Sequence: Synthetic oligonucleotide
ggccaugauuaggu

SEQ ID NO: 31706 - RNA, 14 nt, Artificial Sequence
  Description of Artificial Sequence: Synthetic oligonucleotide
uggccaugauuagg

SEQ ID NO: 31707 - RNA, 14 nt, Artificial Sequence
  Description of Artificial Sequence: Synthetic oligonucleotide
cuggccaugauuag

SEQ ID NO: 31708 - RNA, 14 nt, Artificial Sequence
  Description of Artificial Sequence: Synthetic oligonucleotide
ucuggccaugauua

SEQ ID NO: 31709 - RNA, 14 nt, Artificial Sequence
  Description of Artificial Sequence: Synthetic oligonucleotide
gucuggccaugauu

SEQ ID NO: 31710 - RNA, 14 nt, Artificial Sequence
  Description of Artificial Sequence: Synthetic oligonucleotide
agucuggccaugau

SEQ ID NO: 31711 - RNA, 14 nt, Artificial Sequence
  Description of Artificial Sequence: Synthetic oligonucleotide
gagucuggccauga

SEQ ID NO: 31712 - RNA, 14 nt, Artificial Sequence
  Description of Artificial Sequence: Synthetic oligonucleotide
cgagucuggccaug

SEQ ID NO: 31713 - RNA, 14 nt, Artificial Sequence
  Description of Artificial Sequence: Synthetic oligonucleotide
ccgagucuggccau

SEQ ID NO: 31714 - RNA, 14 nt, Artificial Sequence
  Description of Artificial Sequence: Synthetic oligonucleotide
gccgagucuggcca

SEQ ID NO: 31715 - RNA, 14 nt, Artificial Sequence
  Description of Artificial Sequence: Synthetic oligonucleotide
agccgagucuggcc

SEQ ID NO: 31716 - RNA, 14 nt, Artificial Sequence
  Description of Artificial Sequence: Synthetic oligonucleotide
aagccgagucuggc

SEQ ID NO: 31717 - RNA, 14 nt, Artificial Sequence
  Description of Artificial Sequence: Synthetic oligonucleotide
gaagccgagucugg

SEQ ID NO: 31718 - RNA, 14 nt, Artificial Sequence
  Description of Artificial Sequence: Synthetic oligonucleotide
ggaagccgagucug

SEQ ID NO: 31719 - RNA, 14 nt, Artificial Sequence
  Description of Artificial Sequence: Synthetic oligonucleotide
uggaagccgagucu

SEQ ID NO: 31720 - RNA, 14 nt, Artificial Sequence
  Description of Artificial Sequence: Synthetic oligonucleotide
cuggaagccgaguc

SEQ ID NO: 31721 - RNA, 14 nt, Artificial Sequence
  Description of Artificial Sequence: Synthetic oligonucleotide
ccuggaagccgagu

SEQ ID NO: 31722 - RNA, 14 nt, Artificial Sequence
  Description of Artificial Sequence: Synthetic oligonucleotide
accuggaagccgag

SEQ ID NO: 31723 - RNA, 14 nt, Artificial Sequence
  Description of Artificial Sequence: Synthetic oligonucleotide
aaccuggaagccga

SEQ ID NO: 31724 - RNA, 14 nt, Artificial Sequence
  Description of Artificial Sequence: Synthetic oligonucleotide
uaaccuggaagccg

SEQ ID NO: 31725 - RNA, 14 nt, Artificial Sequence
  Description of Artificial Sequence: Synthetic oligonucleotide
guaaccuggaagcc

SEQ ID NO: 31726 - RNA, 14 nt, Artificial Sequence
  Description of Artificial Sequence: Synthetic oligonucleotide
uguaaccuggaagc

SEQ ID NO: 31727 - RNA, 14 nt, Artificial Sequence
  Description of Artificial Sequence: Synthetic oligonucleotide
cuguaaccuggaag

SEQ ID NO: 31728 - RNA, 14 nt, Artificial Sequence
  Description of Artificial Sequence: Synthetic oligonucleotide
acuguaaccuggaa

SEQ ID NO: 31729 - RNA, 14 nt, Artificial Sequence
  Description of Artificial Sequence: Synthetic oligonucleotide
uacuguaaccugga

SEQ ID NO: 31730 - RNA, 14 nt, Artificial Sequence
  Description of Artificial Sequence: Synthetic oligonucleotide
cuacuguaaccugg

SEQ ID NO: 31731 - RNA, 14 nt, Artificial Sequence
  Description of Artificial Sequence: Synthetic oligonucleotide
acuacuguaaccug

SEQ ID NO: 31732 - RNA, 14 nt, Artificial Sequence
  Description of Artificial Sequence: Synthetic oligonucleotide
cacuacuguaaccu

SEQ ID NO: 31733 - RNA, 14 nt, Artificial Sequence
  Description of Artificial Sequence: Synthetic oligonucleotide
gcacuacuguaacc

SEQ ID NO: 31734 - RNA, 14 nt, Artificial Sequence
  Description of Artificial Sequence: Synthetic oligonucleotide
ugcacuacuguaac

SEQ ID NO: 31735 - RNA, 14 nt, Artificial Sequence
  Description of Artificial Sequence: Synthetic oligonucleotide
cugcacuacuguaa

SEQ ID NO: 31736 - RNA, 14 nt, Artificial Sequence
  Description of Artificial Sequence: Synthetic oligonucleotide
ucugcacuacugua

SEQ ID NO: 31737 - RNA, 14 nt, Artificial Sequence
  Description of Artificial Sequence: Synthetic oligonucleotide
uucugcacuacugu

SEQ ID NO: 31738 - RNA, 14 nt, Artificial Sequence
  Description of Artificial Sequence: Synthetic oligonucleotide
auucugcacuacug

SEQ ID NO: 31739 - RNA, 14 nt, Artificial Sequence
  Description of Artificial Sequence: Synthetic oligonucleotide
uauucugcacuacu

SEQ ID NO: 31740 - RNA, 14 nt, Artificial Sequence
  Description of Artificial Sequence: Synthetic oligonucleotide
guauucugcacuac

SEQ ID NO: 31741 - RNA, 14 nt, Artificial Sequence
  Description of Artificial Sequence: Synthetic oligonucleotide
uguauucugcacua

SEQ ID NO: 31742 - RNA, 14 nt, Artificial Sequence
  Description of Artificial Sequence: Synthetic oligonucleotide
cuguauucugcacu

SEQ ID NO: 31743 - RNA, 14 nt, Artificial Sequence
  Description of Artificial Sequence: Synthetic oligonucleotide
ccuguauucugcac

SEQ ID NO: 31744 - RNA, 14 nt, Artificial Sequence
  Description of Artificial Sequence: Synthetic oligonucleotide
accuguauucugca

SEQ ID NO: 31745 - RNA, 14 nt, Artificial Sequence
  Description of Artificial Sequence: Synthetic oligonucleotide
aaccuguauucugc

SEQ ID NO: 31746 - RNA, 14 nt, Artificial Sequence
  Description of Artificial Sequence: Synthetic oligonucleotide
uaaccuguauucug

SEQ ID NO: 31747 - RNA, 14 nt, Artificial Sequence
  Description of Artificial Sequence: Synthetic oligonucleotide
uuaaccuguauucu

SEQ ID NO: 31748 - RNA, 14 nt, Artificial Sequence
  Description of Artificial Sequence: Synthetic oligonucleotide
uuuaaccuguauuc

SEQ ID NO: 31749 - RNA, 14 nt, Artificial Sequence
  Description of Artificial Sequence: Synthetic oligonucleotide
uuuuaaccuguauu

SEQ ID NO: 31750 - RNA, 14 nt, Artificial Sequence
  Description of Artificial Sequence: Synthetic oligonucleotide
cuuuuaaccuguau

SEQ ID NO: 31751 - RNA, 14 nt, Artificial Sequence
  Description of Artificial Sequence: Synthetic oligonucleotide
ucuuuuaaccugua

SEQ ID NO: 31752 - RNA, 14 nt, Artificial Sequence
  Description of Artificial Sequence: Synthetic oligonucleotide
uucuuuuaaccugu

SEQ ID NO: 31753 - RNA, 14 nt, Artificial Sequence
  Description of Artificial Sequence: Synthetic oligonucleotide
uuucuuuuaaccug

SEQ ID NO: 31754 - RNA, 14 nt, Artificial Sequence
  Description of Artificial Sequence: Synthetic oligonucleotide
uuuucuuuuaaccu

SEQ ID NO: 31755 - RNA, 14 nt, Artificial Sequence
  Description of Artificial Sequence: Synthetic oligonucleotide
uuuuucuuuuaacc

SEQ ID NO: 31756 - RNA, 14 nt, Artificial Sequence
  Description of Artificial Sequence: Synthetic oligonucleotide
auuuuucuuuuaac

SEQ ID NO: 31757 - RNA, 14 nt, Artificial Sequence
  Description of Artificial Sequence: Synthetic oligonucleotide
aauuuuucuuuuaa

SEQ ID NO: 31758 - RNA, 14 nt, Artificial Sequence
  Description of Artificial Sequence: Synthetic oligonucleotide
aaauuuuucuuuua

SEQ ID NO: 31759 - RNA, 14 nt, Artificial Sequence
  Description of Artificial Sequence: Synthetic oligonucleotide
caaauuuuucuuuu

SEQ ID NO: 31760 - RNA, 14 nt, Artificial Sequence
  Description of Artificial Sequence: Synthetic oligonucleotide
acaaauuuuucuuu

SEQ ID NO: 31761 - RNA, 14 nt, Artificial Sequence
  Description of Artificial Sequence: Synthetic oligonucleotide
gacaaauuuuucuu

SEQ ID NO: 31762 - RNA, 14 nt, Artificial Sequence
  Description of Artificial Sequence: Synthetic oligonucleotide
ugacaaauuuuucu

SEQ ID NO: 31763 - RNA, 14 nt, Artificial Sequence
  Description of Artificial Sequence: Synthetic oligonucleotide
augacaaauuuuuc

SEQ ID NO: 31764 - RNA, 14 nt, Artificial Sequence
  Description of Artificial Sequence: Synthetic oligonucleotide
caugacaaauuuuu

SEQ ID NO: 31765 - RNA, 14 nt, Artificial Sequence
  Description of Artificial Sequence: Synthetic oligonucleotide
ucaugacaaauuuu

SEQ ID NO: 31766 - RNA, 14 nt, Artificial Sequence
  Description of Artificial Sequence: Synthetic oligonucleotide
cucaugacaaauuu

SEQ ID NO: 31767 - RNA, 14 nt, Artificial Sequence
  Description of Artificial Sequence: Synthetic oligonucleotide
ccucaugacaaauu

SEQ ID NO: 31768 - RNA, 14 nt, Artificial Sequence
  Description of Artificial Sequence: Synthetic oligonucleotide
uccucaugacaaau

SEQ ID NO: 31769 - RNA, 14 nt, Artificial Sequence
  Description of Artificial Sequence: Synthetic oligonucleotide
uuccucaugacaaa

SEQ ID NO: 31770 - RNA, 14 nt, Artificial Sequence
  Description of Artificial Sequence: Synthetic oligonucleotide
uuuccucaugacaa

SEQ ID NO: 31771 - RNA, 14 nt, Artificial Sequence
  Description of Artificial Sequence: Synthetic oligonucleotide
uuuuccucaugaca

SEQ ID NO: 31772 - RNA, 14 nt, Artificial Sequence
  Description of Artificial Sequence: Synthetic oligonucleotide
auuuuccucaugac

SEQ ID NO: 31773 - RNA, 14 nt, Artificial Sequence
  Description of Artificial Sequence: Synthetic oligonucleotide
uauuuuccucauga

SEQ ID NO: 31774 - RNA, 14 nt, Artificial Sequence
  Description of Artificial Sequence: Synthetic oligonucleotide
guauuuuccucaug

SEQ ID NO: 31775 - RNA, 14 nt, Artificial Sequence
  Description of Artificial Sequence: Synthetic oligonucleotide
uguauuuuccucau

SEQ ID NO: 31776 - RNA, 14 nt, Artificial Sequence
  Description of Artificial Sequence: Synthetic oligonucleotide
uuguauuuuccuca

SEQ ID NO: 31777 - RNA, 14 nt, Artificial Sequence
  Description of Artificial Sequence: Synthetic oligonucleotide
uuuguauuuuccuc

SEQ ID NO: 31778 - RNA, 14 nt, Artificial Sequence
  Description of Artificial Sequence: Synthetic oligonucleotide
auuuguauuuuccu

SEQ ID NO: 31779 - RNA, 14 nt, Artificial Sequence
  Description of Artificial Sequence: Synthetic oligonucleotide
aauuuguauuuucc

SEQ ID NO: 31780 - RNA, 14 nt, Artificial Sequence
  Description of Artificial Sequence: Synthetic oligonucleotide
aaauuuguauuuuc

SEQ ID NO: 31781 - RNA, 14 nt, Artificial Sequence
  Description of Artificial Sequence: Synthetic oligonucleotide
caaauuuguauuuu

SEQ ID NO: 31782 - RNA, 14 nt, Artificial Sequence
  Description of Artificial Sequence: Synthetic oligonucleotide
acaaauuuguauuu

SEQ ID NO: 31783 - RNA, 14 nt, Artificial Sequence
  Description of Artificial Sequence: Synthetic oligonucleotide
cacaaauuuguauu

SEQ ID NO: 31784 - RNA, 14 nt, Artificial Sequence
  Description of Artificial Sequence: Synthetic oligonucleotide
ucacaaauuuguau

SEQ ID NO: 31785 - RNA, 14 nt, Artificial Sequence
  Description of Artificial Sequence: Synthetic oligonucleotide
aucacaaauuugua

SEQ ID NO: 31786 - RNA, 14 nt, Artificial Sequence
  Description of Artificial Sequence: Synthetic oligonucleotide
uaucacaaauuugu

SEQ ID NO: 31787 - RNA, 14 nt, Artificial Sequence
  Description of Artificial Sequence: Synthetic oligonucleotide
uuaucacaaauuug

SEQ ID NO: 31788 - RNA, 14 nt, Artificial Sequence
  Description of Artificial Sequence: Synthetic oligonucleotide
uuuaucacaaauuu

SEQ ID NO: 31789 - RNA, 14 nt, Artificial Sequence
  Description of Artificial Sequence: Synthetic oligonucleotide
cuuuaucacaaauu

SEQ ID NO: 31790 - RNA, 14 nt, Artificial Sequence
  Description of Artificial Sequence: Synthetic oligonucleotide
ucuuuaucacaaau

SEQ ID NO: 31791 - RNA, 14 nt, Artificial Sequence
  Description of Artificial Sequence: Synthetic oligonucleotide
uucuuuaucacaaa

SEQ ID NO: 31792 - RNA, 14 nt, Artificial Sequence
  Description of Artificial Sequence: Synthetic oligonucleotide
cuucuuuaucacaa

SEQ ID NO: 31793 - RNA, 14 nt, Artificial Sequence
  Description of Artificial Sequence: Synthetic oligonucleotide
ucuucuuuaucaca

SEQ ID NO: 31794 - RNA, 14 nt, Artificial Sequence
  Description of Artificial Sequence: Synthetic oligonucleotide
aucuucuuuaucac

SEQ ID NO: 31795 - RNA, 14 nt, Artificial Sequence
  Description of Artificial Sequence: Synthetic oligonucleotide
uaucuucuuuauca

SEQ ID NO: 31796 - RNA, 14 nt, Artificial Sequence
  Description of Artificial Sequence: Synthetic oligonucleotide
guaucuucuuuauc

SEQ ID NO: 31797 - RNA, 14 nt, Artificial Sequence
  Description of Artificial Sequence: Synthetic oligonucleotide
aguaucuucuuuau

SEQ ID NO: 31798 - RNA, 14 nt, Artificial Sequence
  Description of Artificial Sequence: Synthetic oligonucleotide
aaguaucuucuuua

SEQ ID NO: 31799 - RNA, 14 nt, Artificial Sequence
  Description of Artificial Sequence: Synthetic oligonucleotide
caaguaucuucuuu

SEQ ID NO: 31800 - RNA, 14 nt, Artificial Sequence
  Description of Artificial Sequence: Synthetic oligonucleotide
acaaguaucuucuu

SEQ ID NO: 31801 - RNA, 14 nt, Artificial Sequence
  Description of Artificial Sequence: Synthetic oligonucleotide
cacaaguaucuucu

SEQ ID NO: 31802 - RNA, 14 nt, Artificial Sequence
  Description of Artificial Sequence: Synthetic oligonucleotide
ucacaaguaucuuc

SEQ ID NO: 31803 - RNA, 14 nt, Artificial Sequence
  Description of Artificial Sequence: Synthetic oligonucleotide
cucacaaguaucuu

SEQ ID NO: 31804 - RNA, 14 nt, Artificial Sequence
  Description of Artificial Sequence: Synthetic oligonucleotide
gcucacaaguaucu

SEQ ID NO: 31805 - RNA, 14 nt, Artificial Sequence
  Description of Artificial Sequence: Synthetic oligonucleotide
ugcucacaaguauc

SEQ ID NO: 31806 - RNA, 14 nt, Artificial Sequence
  Description of Artificial Sequence: Synthetic oligonucleotide
gugcucacaaguau

SEQ ID NO: 31807 - RNA, 14 nt, Artificial Sequence
  Description of Artificial Sequence: Synthetic oligonucleotide
ugugcucacaagua

SEQ ID NO: 31808 - RNA, 14 nt, Artificial Sequence
  Description of Artificial Sequence: Synthetic oligonucleotide
uugugcucacaagu

SEQ ID NO: 31809 - RNA, 14 nt, Artificial Sequence
  Description of Artificial Sequence: Synthetic oligonucleotide
cuugugcucacaag

SEQ ID NO: 31810 - RNA, 14 nt, Artificial Sequence
  Description of Artificial Sequence: Synthetic oligonucleotide
gcuugugcucacaa

SEQ ID NO: 31811 - RNA, 14 nt, Artificial Sequence
  Description of Artificial Sequence: Synthetic oligonucleotide
ugcuugugcucaca

SEQ ID NO: 31812 - RNA, 14 nt, Artificial Sequence
  Description of Artificial Sequence: Synthetic oligonucleotide
augcuugugcucac

SEQ ID NO: 31813 - RNA, 14 nt, Artificial Sequence
  Description of Artificial Sequence: Synthetic oligonucleotide
caugcuugugcuca

SEQ ID NO: 31814 - RNA, 14 nt, Artificial Sequence
  Description of Artificial Sequence: Synthetic oligonucleotide
gcaugcuugugcuc

SEQ ID NO: 31815 - RNA, 14 nt, Artificial Sequence
  Description of Artificial Sequence: Synthetic oligonucleotide
ugcaugcuugugcu

SEQ ID NO: 31816 - RNA, 14 nt, Artificial Sequence
  Description of Artificial Sequence: Synthetic oligonucleotide
augcaugcuugugc

SEQ ID NO: 31817 - RNA, 14 nt, Artificial Sequence
  Description of Artificial Sequence: Synthetic oligonucleotide
aaugcaugcuugug

SEQ ID NO: 31818 - RNA, 14 nt, Artificial Sequence
  Description of Artificial Sequence: Synthetic oligonucleotide
aaaugcaugcuugu

SEQ ID NO: 31819 - RNA, 14 nt, Artificial Sequence
  Description of Artificial Sequence: Synthetic oligonucleotide
caaaugcaugcuug

SEQ ID NO: 31820 - RNA, 14 nt, Artificial Sequence
  Description of Artificial Sequence: Synthetic oligonucleotide
ucaaaugcaugcuu

SEQ ID NO: 31821 - RNA, 14 nt, Artificial Sequence
  Description of Artificial Sequence: Synthetic oligonucleotide
uucaaaugcaugcu

SEQ ID NO: 31822 - RNA, 14 nt, Artificial Sequence
  Description of Artificial Sequence: Synthetic oligonucleotide
auucaaaugcaugc

SEQ ID NO: 31823 - RNA, 14 nt, Artificial Sequence
  Description of Artificial Sequence: Synthetic oligonucleotide
aauucaaaugcaug

SEQ ID NO: 31824 - RNA, 14 nt, Artificial Sequence
  Description of Artificial Sequence: Synthetic oligonucleotide
uaauucaaaugcau

SEQ ID NO: 31825 - RNA, 14 nt, Artificial Sequence
  Description of Artificial Sequence: Synthetic oligonucleotide
cuaauucaaaugca

SEQ ID NO: 31826 - RNA, 14 nt, Artificial Sequence
  Description of Artificial Sequence: Synthetic oligonucleotide
acuaauucaaaugc

SEQ ID NO: 31827 - RNA, 14 nt, Artificial Sequence
  Description of Artificial Sequence: Synthetic oligonucleotide
uacuaauucaaaug

SEQ ID NO: 31828 - RNA, 14 nt, Artificial Sequence
  Description of Artificial Sequence: Synthetic oligonucleotide
auacuaauucaaau

SEQ ID NO: 31829 - RNA, 14 nt, Artificial Sequence
  Description of Artificial Sequence: Synthetic oligonucleotide
gauacuaauucaaa

SEQ ID NO: 31830 - RNA, 14 nt, Artificial Sequence
  Description of Artificial Sequence: Synthetic oligonucleotide
ggauacuaauucaa

SEQ ID NO: 31831 - RNA, 14 nt, Artificial Sequence
  Description of Artificial Sequence: Synthetic oligonucleotide
uggauacuaauuca

SEQ ID NO: 31832 - RNA, 14 nt, Artificial Sequence
  Description of Artificial Sequence: Synthetic oligonucleotide
uuggauacuaauuc

SEQ ID NO: 31833 - RNA, 14 nt, Artificial Sequence
  Description of Artificial Sequence: Synthetic oligonucleotide
uuuggauacuaauu

SEQ ID NO: 31834 - RNA, 14 nt, Artificial Sequence
  Description of Artificial Sequence: Synthetic oligonucleotide
cuuuggauacuaau

SEQ ID NO: 31835 - RNA, 14 nt, Artificial Sequence
  Description of Artificial Sequence: Synthetic oligonucleotide
ucuuuggauacuaa

SEQ ID NO: 31836 - RNA, 14 nt, Artificial Sequence
  Description of Artificial Sequence: Synthetic oligonucleotide
aucuuuggauacua

SEQ ID NO: 31837 - RNA, 14 nt, Artificial Sequence
  Description of Artificial Sequence: Synthetic oligonucleotide
caucuuuggauacu

SEQ ID NO: 31838 - RNA, 14 nt, Artificial Sequence
  Description of Artificial Sequence: Synthetic oligonucleotide
ucaucuuuggauac

SEQ ID NO: 31839 - RNA, 14 nt, Artificial Sequence
  Description of Artificial Sequence: Synthetic oligonucleotide
cucaucuuuggaua

SEQ ID NO: 31840 - RNA, 14 nt, Artificial Sequence
  Description of Artificial Sequence: Synthetic oligonucleotide
ucucaucuuuggau

SEQ ID NO: 31841 - RNA, 14 nt, Artificial Sequence
  Description of Artificial Sequence: Synthetic oligonucleotide
uucucaucuuugga

SEQ ID NO: 31842 - RNA, 14 nt, Artificial Sequence
  Description of Artificial Sequence: Synthetic oligonucleotide
guucucaucuuugg

SEQ ID NO: 31843 - RNA, 14 nt, Artificial Sequence
  Description of Artificial Sequence: Synthetic oligonucleotide
uguucucaucuuug

SEQ ID NO: 31844 - RNA, 14 nt, Artificial Sequence
  Description of Artificial Sequence: Synthetic oligonucleotide
cuguucucaucuuu

SEQ ID NO: 31845 - RNA, 14 nt, Artificial Sequence
  Description of Artificial Sequence: Synthetic oligonucleotide
gcuguucucaucuu

SEQ ID NO: 31846 - RNA, 14 nt, Artificial Sequence
  Description of Artificial Sequence: Synthetic oligonucleotide
ugcuguucucaucu

SEQ ID NO: 31847 - RNA, 14 nt, Artificial Sequence
  Description of Artificial Sequence: Synthetic oligonucleotide
augcuguucucauc

SEQ ID NO: 31848 - RNA, 14 nt, Artificial Sequence
  Description of Artificial Sequence: Synthetic oligonucleotide
uaugcuguucucau

SEQ ID NO: 31849 - RNA, 14 nt, Artificial Sequence
  Description of Artificial Sequence: Synthetic oligonucleotide
uuaugcuguucuca

SEQ ID NO: 31850 - RNA, 14 nt, Artificial Sequence
  Description of Artificial Sequence: Synthetic oligonucleotide
auuaugcuguucuc

SEQ ID NO: 31851 - RNA, 14 nt, Artificial Sequence
  Description of Artificial Sequence: Synthetic oligonucleotide
uauuaugcuguucu

SEQ ID NO: 31852 - RNA, 14 nt, Artificial Sequence
  Description of Artificial Sequence: Synthetic oligonucleotide
auauuaugcuguuc

SEQ ID NO: 31853 - RNA, 14 nt, Artificial Sequence
  Description of Artificial Sequence: Synthetic oligonucleotide
aauauuaugcuguu

SEQ ID NO: 31854 - RNA, 14 nt, Artificial Sequence
  Description of Artificial Sequence: Synthetic oligonucleotide
aaauauuaugcugu

SEQ ID NO: 31855 - RNA, 14 nt, Artificial Sequence
  Description of Artificial Sequence: Synthetic oligonucleotide
caaauauuaugcug

SEQ ID NO: 31856 - RNA, 14 nt, Artificial Sequence
  Description of Artificial Sequence: Synthetic oligonucleotide
gcaaauauuaugcu

SEQ ID NO: 31857 - RNA, 14 nt, Artificial Sequence
  Description of Artificial Sequence: Synthetic oligonucleotide
agcaaauauuaugc

SEQ ID NO: 31858 - RNA, 14 nt, Artificial Sequence
  Description of Artificial Sequence: Synthetic oligonucleotide
cagcaaauauuaug

SEQ ID NO: 31859 - RNA, 14 nt, Artificial Sequence
  Description of Artificial Sequence: Synthetic oligonucleotide
gcagcaaauauuau

SEQ ID NO: 31860 - RNA, 14 nt, Artificial Sequence
  Description of Artificial Sequence: Synthetic oligonucleotide
agcagcaaauauua

SEQ ID NO: 31861 - RNA, 14 nt, Artificial Sequence
  Description of Artificial Sequence: Synthetic oligonucleotide
uagcagcaaauauu

SEQ ID NO: 31862 - RNA, 14 nt, Artificial Sequence
  Description of Artificial Sequence: Synthetic oligonucleotide
uuagcagcaaauau

SEQ ID NO: 31863 - RNA, 14 nt, Artificial Sequence
  Description of Artificial Sequence: Synthetic oligonucleotide
cuuagcagcaaaua

SEQ ID NO: 31864 - RNA, 14 nt, Artificial Sequence
  Description of Artificial Sequence: Synthetic oligonucleotide
acuuagcagcaaau

SEQ ID NO: 31865 - RNA, 14 nt, Artificial Sequence
  Description of Artificial Sequence: Synthetic oligonucleotide
gacuuagcagcaaa

SEQ ID NO: 31866 - RNA, 14 nt, Artificial Sequence
  Description of Artificial Sequence: Synthetic oligonucleotide
agacuuagcagcaa

SEQ ID NO: 31867 - RNA, 14 nt, Artificial Sequence
  Description of Artificial Sequence: Synthetic oligonucleotide
cagacuuagcagca

SEQ ID NO: 31868 - RNA, 14 nt, Artificial Sequence
  Description of Artificial Sequence: Synthetic oligonucleotide
gcagacuuagcagc

SEQ ID NO: 31869 - RNA, 14 nt, Artificial Sequence
  Description of Artificial Sequence: Synthetic oligonucleotide
agcagacuuagcag

SEQ ID NO: 31870 - RNA, 14 nt, Artificial Sequence
  Description of Artificial Sequence: Synthetic oligonucleotide
cagcagacuuagca

SEQ ID NO: 31871 - RNA, 14 nt, Artificial Sequence
  Description of Artificial Sequence: Synthetic oligonucleotide
ucagcagacuuagc

SEQ ID NO: 31872 - RNA, 14 nt, Artificial Sequence
  Description of Artificial Sequence: Synthetic oligonucleotide
uucagcagacuuag

SEQ ID NO: 31873 - RNA, 14 nt, Artificial Sequence
  Description of Artificial Sequence: Synthetic oligonucleotide
cuucagcagacuua

SEQ ID NO: 31874 - RNA, 14 nt, Artificial Sequence
  Description of Artificial Sequence: Synthetic oligonucleotide
ucuucagcagacuu

SEQ ID NO: 31875 - RNA, 14 nt, Artificial Sequence
  Description of Artificial Sequence: Synthetic oligonucleotide
uucuucagcagacu

SEQ ID NO: 31876 - RNA, 14 nt, Artificial Sequence
  Description of Artificial Sequence: Synthetic oligonucleotide
uuucuucagcagac

SEQ ID NO: 31877 - RNA, 14 nt, Artificial Sequence
  Description of Artificial Sequence: Synthetic oligonucleotide
uuuucuucagcaga

SEQ ID NO: 31878 - RNA, 14 nt, Artificial Sequence
  Description of Artificial Sequence: Synthetic oligonucleotide
uuuuucuucagcag

SEQ ID NO: 31879 - RNA, 14 nt, Artificial Sequence
  Description of Artificial Sequence: Synthetic oligonucleotide
uuuuuucuucagca

SEQ ID NO: 31880 - RNA, 14 nt, Artificial Sequence
  Description of Artificial Sequence: Synthetic oligonucleotide
uuuuuuucuucagc

SEQ ID NO: 31881 - RNA, 14 nt, Artificial Sequence
  Description of Artificial Sequence: Synthetic oligonucleotide
guuuuuuucuucag

SEQ ID NO: 31882 - RNA, 14 nt, Artificial Sequence
  Description of Artificial Sequence: Synthetic oligonucleotide
uguuuuuuucuuca

SEQ ID NO: 31883 - RNA, 14 nt, Artificial Sequence
  Description of Artificial Sequence: Synthetic oligonucleotide
uuguuuuuuucuuc

SEQ ID NO: 31884 - RNA, 14 nt, Artificial Sequence
  Description of Artificial Sequence: Synthetic oligonucleotide
guuguuuuuuucuu

SEQ ID NO: 31885 - RNA, 14 nt, Artificial Sequence
  Description of Artificial Sequence: Synthetic oligonucleotide
aguuguuuuuuucu

SEQ ID NO: 31886 - RNA, 14 nt, Artificial Sequence
  Description of Artificial Sequence: Synthetic oligonucleotide
caguuguuuuuuuc

SEQ ID NO: 31887 - RNA, 14 nt, Artificial Sequence
  Description of Artificial Sequence: Synthetic oligonucleotide
ccaguuguuuuuuu

SEQ ID NO: 31888 - RNA, 14 nt, Artificial Sequence
  Description of Artificial Sequence: Synthetic oligonucleotide
uccaguuguuuuuu

SEQ ID NO: 31889 - RNA, 14 nt, Artificial Sequence
  Description of Artificial Sequence: Synthetic oligonucleotide
auccaguuguuuuu

SEQ ID NO: 31890 - RNA, 14 nt, Artificial Sequence
  Description of Artificial Sequence: Synthetic oligonucleotide
cauccaguuguuuu

SEQ ID NO: 31891 - RNA, 14 nt, Artificial Sequence
  Description of Artificial Sequence: Synthetic oligonucleotide
ccauccaguuguuu

SEQ ID NO: 31892 - RNA, 14 nt, Artificial Sequence
  Description of Artificial Sequence: Synthetic oligonucleotide
gccauccaguuguu

SEQ ID NO: 31893 - RNA, 14 nt, Artificial Sequence
  Description of Artificial Sequence: Synthetic oligonucleotide
ugccauccaguugu

SEQ ID NO: 31894 - RNA, 14 nt, Artificial Sequence
  Description of Artificial Sequence: Synthetic oligonucleotide
cugccauccaguug

SEQ ID NO: 31895 - RNA, 14 nt, Artificial Sequence
  Description of Artificial Sequence: Synthetic oligonucleotide
gcugccauccaguu

SEQ ID NO: 31896 - RNA, 14 nt, Artificial Sequence
  Description of Artificial Sequence: Synthetic oligonucleotide
ggcugccauccagu

SEQ ID NO: 31897 - RNA, 14 nt, Artificial Sequence
  Description of Artificial Sequence: Synthetic oligonucleotide
gggcugccauccag

SEQ ID NO: 31898 - RNA, 14 nt, Artificial Sequence
  Description of Artificial Sequence: Synthetic oligonucleotide
agggcugccaucca

SEQ ID NO: 31899 - RNA, 14 nt, Artificial Sequence
  Description of Artificial Sequence: Synthetic oligonucleotide
aagggcugccaucc

SEQ ID NO: 31900 - RNA, 14 nt, Artificial Sequence
  Description of Artificial Sequence: Synthetic oligonucleotide
uaagggcugccauc

SEQ ID NO: 31901 - RNA, 14 nt, Artificial Sequence
  Description of Artificial Sequence: Synthetic oligonucleotide
auaagggcugccau

SEQ ID NO: 31902 - RNA, 14 nt, Artificial Sequence
  Description of Artificial Sequence: Synthetic oligonucleotide
aauaagggcugcca

SEQ ID NO: 31903 - RNA, 14 nt, Artificial Sequence
  Description of Artificial Sequence: Synthetic oligonucleotide
aaauaagggcugcc

SEQ ID NO: 31904 - RNA, 14 nt, Artificial Sequence
  Description of Artificial Sequence: Synthetic oligonucleotide
gaaauaagggcugc

SEQ ID NO: 31905 - RNA, 14 nt, Artificial Sequence
  Description of Artificial Sequence: Synthetic oligonucleotide
agaaauaagggcug

SEQ ID NO: 31906 - RNA, 14 nt, Artificial Sequence
  Description of Artificial Sequence: Synthetic oligonucleotide
gagaaauaagggcu

SEQ ID NO: 31907 - RNA, 14 nt, Artificial Sequence
  Description of Artificial Sequence: Synthetic oligonucleotide
agagaaauaagggc

SEQ ID NO: 31908 - RNA, 14 nt, Artificial Sequence
  Description of Artificial Sequence: Synthetic oligonucleotide
aagagaaauaaggg

SEQ ID NO: 31909 - RNA, 14 nt, Artificial Sequence
  Description of Artificial Sequence: Synthetic oligonucleotide
gaagagaaauaagg

SEQ ID NO: 31910 - RNA, 14 nt, Artificial Sequence
  Description of Artificial Sequence: Synthetic oligonucleotide
ugaagagaaauaag

SEQ ID NO: 31911 - RNA, 14 nt, Artificial Sequence
  Description of Artificial Sequence: Synthetic oligonucleotide
augaagagaaauaa

SEQ ID NO: 31912 - RNA, 14 nt, Artificial Sequence
  Description of Artificial Sequence: Synthetic oligonucleotide
aaugaagagaaaua

SEQ ID NO: 31913 - RNA, 14 nt, Artificial Sequence
  Description of Artificial Sequence: Synthetic oligonucleotide
uaaugaagagaaau

SEQ ID NO: 31914 - RNA, 14 nt, Artificial Sequence
  Description of Artificial Sequence: Synthetic oligonucleotide
auaaugaagagaaa

SEQ ID NO: 31915 - RNA, 14 nt, Artificial Sequence
  Description of Artificial Sequence: Synthetic oligonucleotide
gauaaugaagagaa

SEQ ID NO: 31916 - RNA, 14 nt, Artificial Sequence
  Description of Artificial Sequence: Synthetic oligonucleotide
cgauaaugaagaga

SEQ ID NO: 31917 - RNA, 14 nt, Artificial Sequence
  Description of Artificial Sequence: Synthetic oligonucleotide
acgauaaugaagag

SEQ ID NO: 31918 - RNA, 14 nt, Artificial Sequence
  Description of Artificial Sequence: Synthetic oligonucleotide
uacgauaaugaaga

SEQ ID NO: 31919 - RNA, 14 nt, Artificial Sequence
  Description of Artificial Sequence: Synthetic oligonucleotide
cuacgauaaugaag

SEQ ID NO: 31920 - RNA, 14 nt, Artificial Sequence
  Description of Artificial Sequence: Synthetic oligonucleotide
acuacgauaaugaa

SEQ ID NO: 31921 - RNA, 14 nt, Artificial Sequence
  Description of Artificial Sequence: Synthetic oligonucleotide
uacuacgauaauga

SEQ ID NO: 31922 - RNA, 14 nt, Artificial Sequence
  Description of Artificial Sequence: Synthetic oligonucleotide
guacuacgauaaug

SEQ ID NO: 31923 - RNA, 14 nt, Artificial Sequence
  Description of Artificial Sequence: Synthetic oligonucleotide
aguacuacgauaau

SEQ ID NO: 31924 - RNA, 14 nt, Artificial Sequence
  Description of Artificial Sequence: Synthetic oligonucleotide
gaguacuacgauaa

SEQ ID NO: 31925 - RNA, 14 nt, Artificial Sequence
  Description of Artificial Sequence: Synthetic oligonucleotide
agaguacuacgaua

SEQ ID NO: 31926 - RNA, 14 nt, Artificial Sequence
  Description of Artificial Sequence: Synthetic oligonucleotide
uagaguacuacgau

SEQ ID NO: 31927 - RNA, 14 nt, Artificial Sequence
  Description of Artificial Sequence: Synthetic oligonucleotide
cuagaguacuacga

SEQ ID NO: 31928 - RNA, 14 nt, Artificial Sequence
  Description of Artificial Sequence: Synthetic oligonucleotide
ucuagaguacuacg

SEQ ID NO: 31929 - RNA, 14 nt, Artificial Sequence
  Description of Artificial Sequence: Synthetic oligonucleotide
aucuagaguacuac

SEQ ID NO: 31930 - RNA, 14 nt, Artificial Sequence
  Description of Artificial Sequence: Synthetic oligonucleotide
gaucuagaguacua

SEQ ID NO: 31931 - RNA, 14 nt, Artificial Sequence
  Description of Artificial Sequence: Synthetic oligonucleotide
cgaucuagaguacu

SEQ ID NO: 31932 - RNA, 14 nt, Artificial Sequence
  Description of Artificial Sequence: Synthetic oligonucleotide
ucgaucuagaguac

SEQ ID NO: 31933 - RNA, 14 nt, Artificial Sequence
  Description of Artificial Sequence: Synthetic oligonucleotide
uucgaucuagagua

SEQ ID NO: 31934 - RNA, 14 nt, Artificial Sequence
  Description of Artificial Sequence: Synthetic oligonucleotide
auucgaucuagagu

SEQ ID NO: 31935 - RNA, 14 nt, Artificial Sequence
  Description of Artificial Sequence: Synthetic oligonucleotide
cauucgaucuagag

SEQ ID NO: 31936 - RNA, 14 nt, Artificial Sequence
  Description of Artificial Sequence: Synthetic oligonucleotide
acauucgaucuaga

SEQ ID NO: 31937 - RNA, 14 nt, Artificial Sequence
  Description of Artificial Sequence: Synthetic oligonucleotide
aacauucgaucuag

SEQ ID NO: 31938 - RNA, 14 nt, Artificial Sequence
  Description of Artificial Sequence: Synthetic oligonucleotide
uaacauucgaucua

SEQ ID NO: 31939 - RNA, 14 nt, Artificial Sequence
  Description of Artificial Sequence: Synthetic oligonucleotide
cuaacauucgaucu

SEQ ID NO: 31940 - RNA, 14 nt, Artificial Sequence
  Description of Artificial Sequence: Synthetic oligonucleotide
ucuaacauucgauc

SEQ ID NO: 31941 - RNA, 14 nt, Artificial Sequence
  Description of Artificial Sequence: Synthetic oligonucleotide
aucuaacauucgau

SEQ ID NO: 31942 - RNA, 14 nt, Artificial Sequence
  Description of Artificial Sequence: Synthetic oligonucleotide
aaucuaacauucga

SEQ ID NO: 31943 - RNA, 14 nt, Artificial Sequence
  Description of Artificial Sequence: Synthetic oligonucleotide
gaaucuaacauucg

SEQ ID NO: 31944 - RNA, 14 nt, Artificial Sequence
  Description of Artificial Sequence: Synthetic oligonucleotide
ugaaucuaacauuc

SEQ ID NO: 31945 - RNA, 14 nt, Artificial Sequence
  Description of Artificial Sequence: Synthetic oligonucleotide
cugaaucuaacauu

SEQ ID NO: 31946 - RNA, 14 nt, Artificial Sequence
  Description of Artificial Sequence: Synthetic oligonucleotide
acugaaucuaacau

SEQ ID NO: 31947 - RNA, 14 nt, Artificial Sequence
  Description of Artificial Sequence: Synthetic oligonucleotide
uacugaaucuaaca

SEQ ID NO: 31948 - RNA, 14 nt, Artificial Sequence
  Description of Artificial Sequence: Synthetic oligonucleotide
auacugaaucuaac

SEQ ID NO: 31949 - RNA, 14 nt, Artificial Sequence
  Description of Artificial Sequence: Synthetic oligonucleotide
aauacugaaucuaa

SEQ ID NO: 31950 - RNA, 14 nt, Artificial Sequence
  Description of Artificial Sequence: Synthetic oligonucleotide
uaauacugaaucua

SEQ ID NO: 31951 - RNA, 14 nt, Artificial Sequence
  Description of Artificial Sequence: Synthetic oligonucleotide
auaauacugaaucu

SEQ ID NO: 31952 - RNA, 14 nt, Artificial Sequence
  Description of Artificial Sequence: Synthetic oligonucleotide
aauaauacugaauc

SEQ ID NO: 31953 - RNA, 14 nt, Artificial Sequence
  Description of Artificial Sequence: Synthetic oligonucleotide
caauaauacugaau

SEQ ID NO: 31954 - RNA, 14 nt, Artificial Sequence
  Description of Artificial Sequence: Synthetic oligonucleotide
ucaauaauacugaa

SEQ ID NO: 31955 - RNA, 14 nt, Artificial Sequence
  Description of Artificial Sequence: Synthetic oligonucleotide
uucaauaauacuga

SEQ ID NO: 31956 - RNA, 14 nt, Artificial Sequence
  Description of Artificial Sequence: Synthetic oligonucleotide
uuucaauaauacug

SEQ ID NO: 31957 - RNA, 14 nt, Artificial Sequence
  Description of Artificial Sequence: Synthetic oligonucleotide
cuuucaauaauacu

SEQ ID NO: 31958 - RNA, 14 nt, Artificial Sequence
  Description of Artificial Sequence: Synthetic oligonucleotide
ucuuucaauaauac

SEQ ID NO: 31959 - RNA, 14 nt, Artificial Sequence
  Description of Artificial Sequence: Synthetic oligonucleotide
uucuuucaauaaua

SEQ ID NO: 31960 - RNA, 14 nt, Artificial Sequence
  Description of Artificial Sequence: Synthetic oligonucleotide
cuucuuucaauaau

SEQ ID NO: 31961 - RNA, 14 nt, Artificial Sequence
  Description of Artificial Sequence: Synthetic oligonucleotide
ucuucuuucaauaa

SEQ ID NO: 31962 - RNA, 14 nt, Artificial Sequence
  Description of Artificial Sequence: Synthetic oligonucleotide
uucuucuuucaaua

SEQ ID NO: 31963 - RNA, 14 nt, Artificial Sequence
  Description of Artificial Sequence: Synthetic oligonucleotide
uuucuucuuucaau

SEQ ID NO: 31964 - RNA, 14 nt, Artificial Sequence
  Description of Artificial Sequence: Synthetic oligonucleotide
uuuucuucuuucaa

SEQ ID NO: 31965 - RNA, 14 nt, Artificial Sequence
  Description of Artificial Sequence: Synthetic oligonucleotide
auuuucuucuuuca

SEQ ID NO: 31966 - RNA, 14 nt, Artificial Sequence
  Description of Artificial Sequence: Synthetic oligonucleotide
cauuuucuucuuuc

SEQ ID NO: 31967 - RNA, 14 nt, Artificial Sequence
  Description of Artificial Sequence: Synthetic oligonucleotide
ucauuuucuucuuu

SEQ ID NO: 31968 - RNA, 14 nt, Artificial Sequence
  Description of Artificial Sequence: Synthetic oligonucleotide
cucauuuucuucuu

SEQ ID NO: 31969 - RNA, 14 nt, Artificial Sequence
  Description of Artificial Sequence: Synthetic oligonucleotide
gcucauuuucuucu

SEQ ID NO: 31970 - RNA, 14 nt, Artificial Sequence
  Description of Artificial Sequence: Synthetic oligonucleotide
ugcucauuuucuuc

SEQ ID NO: 31971 - RNA, 14 nt, Artificial Sequence
  Description of Artificial Sequence: Synthetic oligonucleotide
uugcucauuuucuu

SEQ ID NO: 31972 - RNA, 14 nt, Artificial Sequence
  Description of Artificial Sequence: Synthetic oligonucleotide
guugcucauuuucu

SEQ ID NO: 31973 - RNA, 14 nt, Artificial Sequence
  Description of Artificial Sequence: Synthetic oligonucleotide
gguugcucauuuuc

SEQ ID NO: 31974 - RNA, 14 nt, Artificial Sequence
  Description of Artificial Sequence: Synthetic oligonucleotide
ugguugcucauuuu

SEQ ID NO: 31975 - RNA, 14 nt, Artificial Sequence
  Description of Artificial Sequence: Synthetic oligonucleotide
gugguugcucauuu

SEQ ID NO: 31976 - RNA, 14 nt, Artificial Sequence
  Description of Artificial Sequence: Synthetic oligonucleotide
agugguugcucauu

SEQ ID NO: 31977 - RNA, 14 nt, Artificial Sequence
  Description of Artificial Sequence: Synthetic oligonucleotide
cagugguugcucau

SEQ ID NO: 31978 - RNA, 14 nt, Artificial Sequence
  Description of Artificial Sequence: Synthetic oligonucleotide
ucagugguugcuca

SEQ ID NO: 31979 - RNA, 14 nt, Artificial Sequence
  Description of Artificial Sequence: Synthetic oligonucleotide
cucagugguugcuc

SEQ ID NO: 31980 - RNA, 14 nt, Artificial Sequence
  Description of Artificial Sequence: Synthetic oligonucleotide
ucucagugguugcu

SEQ ID NO: 31981 - RNA, 14 nt, Artificial Sequence
  Description of Artificial Sequence: Synthetic oligonucleotide
aucucagugguugc

SEQ ID NO: 31982 - RNA, 14 nt, Artificial Sequence
  Description of Artificial Sequence: Synthetic oligonucleotide
aaucucagugguug

SEQ ID NO: 31983 - RNA, 14 nt, Artificial Sequence
  Description of Artificial Sequence: Synthetic oligonucleotide
uaaucucagugguu

SEQ ID NO: 31984 - RNA, 14 nt, Artificial Sequence
  Description of Artificial Sequence: Synthetic oligonucleotide
guaaucucaguggu

SEQ ID NO: 31985 - RNA, 14 nt, Artificial Sequence
  Description of Artificial Sequence: Synthetic oligonucleotide
gguaaucucagugg

SEQ ID NO: 31986 - RNA, 14 nt, Artificial Sequence
  Description of Artificial Sequence: Synthetic oligonucleotide
ugguaaucucagug

SEQ ID NO: 31987 - RNA, 14 nt, Artificial Sequence
  Description of Artificial Sequence: Synthetic oligonucleotide
uugguaaucucagu

SEQ ID NO: 31988 - RNA, 14 nt, Artificial Sequence
  Description of Artificial Sequence: Synthetic oligonucleotide
cuugguaaucucag

SEQ ID NO: 31989 - RNA, 14 nt, Artificial Sequence
  Description of Artificial Sequence: Synthetic oligonucleotide
acuugguaaucuca

SEQ ID NO: 31990 - RNA, 14 nt, Artificial Sequence
  Description of Artificial Sequence: Synthetic oligonucleotide
gacuugguaaucuc

SEQ ID NO: 31991 - RNA, 14 nt, Artificial Sequence
  Description of Artificial Sequence: Synthetic oligonucleotide
ggacuugguaaucu

SEQ ID NO: 31992 - RNA, 14 nt, Artificial Sequence
  Description of Artificial Sequence: Synthetic oligonucleotide
aggacuugguaauc

SEQ ID NO: 31993 - RNA, 14 nt, Artificial Sequence
  Description of Artificial Sequence: Synthetic oligonucleotide
caggacuugguaau

SEQ ID NO: 31994 - RNA, 14 nt, Artificial Sequence
  Description of Artificial Sequence: Synthetic oligonucleotide
ucaggacuugguaa

SEQ ID NO: 31995 - RNA, 14 nt, Artificial Sequence
  Description of Artificial Sequence: Synthetic oligonucleotide
uucaggacuuggua

SEQ ID NO: 31996 - RNA, 14 nt, Artificial Sequence
  Description of Artificial Sequence: Synthetic oligonucleotide
cuucaggacuuggu

SEQ ID NO: 31997 - RNA, 14 nt, Artificial Sequence
  Description of Artificial Sequence: Synthetic oligonucleotide
acuucaggacuugg

SEQ ID NO: 31998 - RNA, 14 nt, Artificial Sequence
  Description of Artificial Sequence: Synthetic oligonucleotide
uacuucaggacuug

SEQ ID NO: 31999 - RNA, 14 nt, Artificial Sequence
  Description of Artificial Sequence: Synthetic oligonucleotide
auacuucaggacuu

SEQ ID NO: 32000 - RNA, 14 nt, Artificial Sequence
  Description of Artificial Sequence: Synthetic oligonucleotide
uauacuucaggacu

SEQ ID NO: 32001 - RNA, 14 nt, Artificial Sequence
  Description of Artificial Sequence: Synthetic oligonucleotide
auauacuucaggac

SEQ ID NO: 32002 - RNA, 14 nt, Artificial Sequence
  Description of Artificial Sequence: Synthetic oligonucleotide
gauauacuucagga

SEQ ID NO: 32003 - RNA, 14 nt, Artificial Sequence
  Description of Artificial Sequence: Synthetic oligonucleotide
cgauauacuucagg

SEQ ID NO: 32004 - RNA, 14 nt, Artificial Sequence
  Description of Artificial Sequence: Synthetic oligonucleotide
acgauauacuucag

SEQ ID NO: 32005 - RNA, 14 nt, Artificial Sequence
  Description of Artificial Sequence: Synthetic oligonucleotide
aacgauauacuuca

SEQ ID NO: 32006 - RNA, 14 nt, Artificial Sequence
  Description of Artificial Sequence: Synthetic oligonucleotide
aaacgauauacuuc

SEQ ID NO: 32007 - RNA, 14 nt, Artificial Sequence
  Description of Artificial Sequence: Synthetic oligonucleotide
aaaacgauauacuu

SEQ ID NO: 32008 - RNA, 14 nt, Artificial Sequence
  Description of Artificial Sequence: Synthetic oligonucleotide
caaaacgauauacu

SEQ ID NO: 32009 - RNA, 14 nt, Artificial Sequence
  Description of Artificial Sequence: Synthetic oligonucleotide
acaaaacgauauac

SEQ ID NO: 32010 - RNA, 14 nt, Artificial Sequence
  Description of Artificial Sequence: Synthetic oligonucleotide
uacaaaacgauaua

SEQ ID NO: 32011 - RNA, 14 nt, Artificial Sequence
  Description of Artificial Sequence: Synthetic oligonucleotide
cuacaaaacgauau

SEQ ID NO: 32012 - RNA, 14 nt, Artificial Sequence
  Description of Artificial Sequence: Synthetic oligonucleotide
acuacaaaacgaua

SEQ ID NO: 32013 - RNA, 14 nt, Artificial Sequence
  Description of Artificial Sequence: Synthetic oligonucleotide
uacuacaaaacgau

SEQ ID NO: 32014 - RNA, 14 nt, Artificial Sequence
  Description of Artificial Sequence: Synthetic oligonucleotide
uuacuacaaaacga

SEQ ID NO: 32015 - RNA, 14 nt, Artificial Sequence
  Description of Artificial Sequence: Synthetic oligonucleotide
uuuacuacaaaacg

SEQ ID NO: 32016 - RNA, 14 nt, Artificial Sequence
  Description of Artificial Sequence: Synthetic oligonucleotide
uuuuacuacaaaac

SEQ ID NO: 32017 - RNA, 14 nt, Artificial Sequence
  Description of Artificial Sequence: Synthetic oligonucleotide
cuuuuacuacaaaa

SEQ ID NO: 32018 - RNA, 14 nt, Artificial Sequence
  Description of Artificial Sequence: Synthetic oligonucleotide
ucuuuuacuacaaa

SEQ ID NO: 32019 - RNA, 14 nt, Artificial Sequence
  Description of Artificial Sequence: Synthetic oligonucleotide
gucuuuuacuacaa

SEQ ID NO: 32020 - RNA, 14 nt, Artificial Sequence
  Description of Artificial Sequence: Synthetic oligonucleotide
agucuuuuacuaca

SEQ ID NO: 32021 - RNA, 14 nt, Artificial Sequence
  Description of Artificial Sequence: Synthetic oligonucleotide
gagucuuuuacuac

SEQ ID NO: 32022 - RNA, 14 nt, Artificial Sequence
  Description of Artificial Sequence: Synthetic oligonucleotide
agagucuuuuacua

SEQ ID NO: 32023 - RNA, 14 nt, Artificial Sequence
  Description of Artificial Sequence: Synthetic oligonucleotide
cagagucuuuuacu

SEQ ID NO: 32024 - RNA, 14 nt, Artificial Sequence
  Description of Artificial Sequence: Synthetic oligonucleotide
ucagagucuuuuac

SEQ ID NO: 32025 - RNA, 14 nt, Artificial Sequence
  Description of Artificial Sequence: Synthetic oligonucleotide
cucagagucuuuua

SEQ ID NO: 32026 - RNA, 14 nt, Artificial Sequence
  Description of Artificial Sequence: Synthetic oligonucleotide
ccucagagucuuuu

SEQ ID NO: 32027 - RNA, 14 nt, Artificial Sequence
  Description of Artificial Sequence: Synthetic oligonucleotide
uccucagagucuuu

SEQ ID NO: 32028 - RNA, 14 nt, Artificial Sequence
  Description of Artificial Sequence: Synthetic oligonucleotide
uuccucagagucuu

SEQ ID NO: 32029 - RNA, 14 nt, Artificial Sequence
  Description of Artificial Sequence: Synthetic oligonucleotide
uuuccucagagucu

SEQ ID NO: 32030 - RNA, 14 nt, Artificial Sequence
  Description of Artificial Sequence: Synthetic oligonucleotide
uuuuccucagaguc

SEQ ID NO: 32031 - RNA, 14 nt, Artificial Sequence
  Description of Artificial Sequence: Synthetic oligonucleotide
guuuuccucagagu

SEQ ID NO: 32032 - RNA, 14 nt, Artificial Sequence
  Description of Artificial Sequence: Synthetic oligonucleotide
uguuuuccucagag

SEQ ID NO: 32033 - RNA, 14 nt, Artificial Sequence
  Description of Artificial Sequence: Synthetic oligonucleotide
auguuuuccucaga

SEQ ID NO: 32034 - RNA, 14 nt, Artificial Sequence
  Description of Artificial Sequence: Synthetic oligonucleotide
aauguuuuccucag

SEQ ID NO: 32035 - RNA, 14 nt, Artificial Sequence
  Description of Artificial Sequence: Synthetic oligonucleotide
caauguuuuccuca

SEQ ID NO: 32036 - RNA, 14 nt, Artificial Sequence
  Description of Artificial Sequence: Synthetic oligonucleotide
acaauguuuuccuc

SEQ ID NO: 32037 - RNA, 14 nt, Artificial Sequence
  Description of Artificial Sequence: Synthetic oligonucleotide
aacaauguuuuccu

SEQ ID NO: 32038 - RNA, 14 nt, Artificial Sequence
  Description of Artificial Sequence: Synthetic oligonucleotide
aaacaauguuuucc

SEQ ID NO: 32039 - RNA, 14 nt, Artificial Sequence
  Description of Artificial Sequence: Synthetic oligonucleotide
aaaacaauguuuuc

SEQ ID NO: 32040 - RNA, 14 nt, Artificial Sequence
  Description of Artificial Sequence: Synthetic oligonucleotide
aaaaacaauguuuu

SEQ ID NO: 32041 - RNA, 14 nt, Artificial Sequence
  Description of Artificial Sequence: Synthetic oligonucleotide
caaaaacaauguuu

SEQ ID NO: 32042 - RNA, 14 nt, Artificial Sequence
  Description of Artificial Sequence: Synthetic oligonucleotide
ucaaaaacaauguu

SEQ ID NO: 32043 - RNA, 14 nt, Artificial Sequence
  Description of Artificial Sequence: Synthetic oligonucleotide
uucaaaaacaaugu

SEQ ID NO: 32044 - RNA, 14 nt, Artificial Sequence
  Description of Artificial Sequence: Synthetic oligonucleotide
cuucaaaaacaaug

SEQ ID NO: 32045 - RNA, 14 nt, Artificial Sequence
  Description of Artificial Sequence: Synthetic oligonucleotide
ucuucaaaaacaau

SEQ ID NO: 32046 - RNA, 14 nt, Artificial Sequence
  Description of Artificial Sequence: Synthetic oligonucleotide
gucuucaaaaacaa

SEQ ID NO: 32047 - RNA, 14 nt, Artificial Sequence
  Description of Artificial Sequence: Synthetic oligonucleotide
ugucuucaaaaaca

SEQ ID NO: 32048 - RNA, 14 nt, Artificial Sequence
  Description of Artificial Sequence: Synthetic oligonucleotide
uugucuucaaaaac

SEQ ID NO: 32049 - RNA, 14 nt, Artificial Sequence
  Description of Artificial Sequence: Synthetic oligonucleotide
guugucuucaaaaa

SEQ ID NO: 32050 - RNA, 14 nt, Artificial Sequence
  Description of Artificial Sequence: Synthetic oligonucleotide
aguugucuucaaaa

SEQ ID NO: 32051 - RNA, 14 nt, Artificial Sequence
  Description of Artificial Sequence: Synthetic oligonucleotide
aaguugucuucaaa

SEQ ID NO: 32052 - RNA, 14 nt, Artificial Sequence
  Description of Artificial Sequence: Synthetic oligonucleotide
caaguugucuucaa

SEQ ID NO: 32053 - RNA, 14 nt, Artificial Sequence
  Description of Artificial Sequence: Synthetic oligonucleotide
gcaaguugucuuca

SEQ ID NO: 32054 - RNA, 14 nt, Artificial Sequence
  Description of Artificial Sequence: Synthetic oligonucleotide
ugcaaguugucuuc

SEQ ID NO: 32055 - RNA, 14 nt, Artificial Sequence
  Description of Artificial Sequence: Synthetic oligonucleotide
uugcaaguugucuu

SEQ ID NO: 32056 - RNA, 14 nt, Artificial Sequence
  Description of Artificial Sequence: Synthetic oligonucleotide
uuugcaaguugucu

SEQ ID NO: 32057 - RNA, 14 nt, Artificial Sequence
  Description of Artificial Sequence: Synthetic oligonucleotide
cuuugcaaguuguc

SEQ ID NO: 32058 - RNA, 14 nt, Artificial Sequence
  Description of Artificial Sequence: Synthetic oligonucleotide
acuuugcaaguugu

SEQ ID NO: 32059 - RNA, 14 nt, Artificial Sequence
  Description of Artificial Sequence: Synthetic oligonucleotide
uacuuugcaaguug

SEQ ID NO: 32060 - RNA, 14 nt, Artificial Sequence
  Description of Artificial Sequence: Synthetic oligonucleotide
cuacuuugcaaguu

SEQ ID NO: 32061 - RNA, 14 nt, Artificial Sequence
  Description of Artificial Sequence: Synthetic oligonucleotide
ucuacuuugcaagu

SEQ ID NO: 32062 - RNA, 14 nt, Artificial Sequence
  Description of Artificial Sequence: Synthetic oligonucleotide
uucuacuuugcaag

SEQ ID NO: 32063 - RNA, 14 nt, Artificial Sequence
  Description of Artificial Sequence: Synthetic oligonucleotide
cuucuacuuugcaa

SEQ ID NO: 32064 - RNA, 14 nt, Artificial Sequence
  Description of Artificial Sequence: Synthetic oligonucleotide
acuucuacuuugca

SEQ ID NO: 32065 - RNA, 14 nt, Artificial Sequence
  Description of Artificial Sequence: Synthetic oligonucleotide
cacuucuacuuugc

SEQ ID NO: 32066 - RNA, 14 nt, Artificial Sequence
  Description of Artificial Sequence: Synthetic oligonucleotide
ccacuucuacuuug

SEQ ID NO: 32067 - RNA, 14 nt, Artificial Sequence
  Description of Artificial Sequence: Synthetic oligonucleotide
gccacuucuacuuu

SEQ ID NO: 32068 - RNA, 14 nt, Artificial Sequence
  Description of Artificial Sequence: Synthetic oligonucleotide
ugccacuucuacuu

SEQ ID NO: 32069 - RNA, 14 nt, Artificial Sequence
  Description of Artificial Sequence: Synthetic oligonucleotide
augccacuucuacu

SEQ ID NO: 32070 - RNA, 14 nt, Artificial Sequence
  Description of Artificial Sequence: Synthetic oligonucleotide
gaugccacuucuac

SEQ ID NO: 32071 - RNA, 14 nt, Artificial Sequence
  Description of Artificial Sequence: Synthetic oligonucleotide
ggaugccacuucua

SEQ ID NO: 32072 - RNA, 14 nt, Artificial Sequence
  Description of Artificial Sequence: Synthetic oligonucleotide
gggaugccacuucu

SEQ ID NO: 32073 - RNA, 14 nt, Artificial Sequence
  Description of Artificial Sequence: Synthetic oligonucleotide
ggggaugccacuuc

SEQ ID NO: 32074 - RNA, 14 nt, Artificial Sequence
  Description of Artificial Sequence: Synthetic oligonucleotide
uggggaugccacuu

SEQ ID NO: 32075 - RNA, 14 nt, Artificial Sequence
  Description of Artificial Sequence: Synthetic oligonucleotide
auggggaugccacu

SEQ ID NO: 32076 - RNA, 14 nt, Artificial Sequence
  Description of Artificial Sequence: Synthetic oligonucleotide
aauggggaugccac

SEQ ID NO: 32077 - RNA, 14 nt, Artificial Sequence
  Description of Artificial Sequence: Synthetic oligonucleotide
uaauggggaugcca

SEQ ID NO: 32078 - RNA, 14 nt, Artificial Sequence
  Description of Artificial Sequence: Synthetic oligonucleotide
auaauggggaugcc

SEQ ID NO: 32079 - RNA, 14 nt, Artificial Sequence
  Description of Artificial Sequence: Synthetic oligonucleotide
aauaauggggaugc

SEQ ID NO: 32080 - RNA, 14 nt, Artificial Sequence
  Description of Artificial Sequence: Synthetic oligonucleotide
uaauaauggggaug

SEQ ID NO: 32081 - RNA, 14 nt, Artificial Sequence
  Description of Artificial Sequence: Synthetic oligonucleotide
uuaauaauggggau

SEQ ID NO: 32082 - RNA, 14 nt, Artificial Sequence
  Description of Artificial Sequence: Synthetic oligonucleotide
uuuaauaaugggga

SEQ ID NO: 32083 - RNA, 14 nt, Artificial Sequence
  Description of Artificial Sequence: Synthetic oligonucleotide
cuuuaauaaugggg

SEQ ID NO: 32084 - RNA, 14 nt, Artificial Sequence
  Description of Artificial Sequence: Synthetic oligonucleotide
ccuuuaauaauggg

SEQ ID NO: 32085 - RNA, 14 nt, Artificial Sequence
  Description of Artificial Sequence: Synthetic oligonucleotide
uccuuuaauaaugg

SEQ ID NO: 32086 - RNA, 14 nt, Artificial Sequence
  Description of Artificial Sequence: Synthetic oligonucleotide
cuccuuuaauaaug

SEQ ID NO: 32087 - RNA, 14 nt, Artificial Sequence
  Description of Artificial Sequence: Synthetic oligonucleotide
ccuccuuuaauaau

SEQ ID NO: 32088 - RNA, 14 nt, Artificial Sequence
  Description of Artificial Sequence: Synthetic oligonucleotide
uccuccuuuaauaa

SEQ ID NO: 32089 - RNA, 14 nt, Artificial Sequence
  Description of Artificial Sequence: Synthetic oligonucleotide
uuccuccuuuaaua

SEQ ID NO: 32090 - RNA, 14 nt, Artificial Sequence
  Description of Artificial Sequence: Synthetic oligonucleotide
guuccuccuuuaau

SEQ ID NO: 32091 - RNA, 14 nt, Artificial Sequence
  Description of Artificial Sequence: Synthetic oligonucleotide
aguuccuccuuuaa

SEQ ID NO: 32092 - RNA, 14 nt, Artificial Sequence
  Description of Artificial Sequence: Synthetic oligonucleotide
caguuccuccuuua

SEQ ID NO: 32093 - RNA, 14 nt, Artificial Sequence
  Description of Artificial Sequence: Synthetic oligonucleotide
acaguuccuccuuu

SEQ ID NO: 32094 - RNA, 14 nt, Artificial Sequence
  Description of Artificial Sequence: Synthetic oligonucleotide
uacaguuccuccuu

SEQ ID NO: 32095 - RNA, 14 nt, Artificial Sequence
  Description of Artificial Sequence: Synthetic oligonucleotide
cuacaguuccuccu

SEQ ID NO: 32096 - RNA, 14 nt, Artificial Sequence
  Description of Artificial Sequence: Synthetic oligonucleotide
acuacaguuccucc

SEQ ID NO: 32097 - RNA, 14 nt, Artificial Sequence
  Description of Artificial Sequence: Synthetic oligonucleotide
cacuacaguuccuc

SEQ ID NO: 32098 - RNA, 14 nt, Artificial Sequence
  Description of Artificial Sequence: Synthetic oligonucleotide
ucacuacaguuccu

SEQ ID NO: 32099 - RNA, 14 nt, Artificial Sequence
  Description of Artificial Sequence: Synthetic oligonucleotide
uucacuacaguucc

SEQ ID NO: 32100 - RNA, 14 nt, Artificial Sequence
  Description of Artificial Sequence: Synthetic oligonucleotide
uuucacuacaguuc

SEQ ID NO: 32101 - RNA, 14 nt, Artificial Sequence
  Description of Artificial Sequence: Synthetic oligonucleotide
auuucacuacaguu

SEQ ID NO: 32102 - RNA, 14 nt, Artificial Sequence
  Description of Artificial Sequence: Synthetic oligonucleotide
aauuucacuacagu

SEQ ID NO: 32103 - RNA, 14 nt, Artificial Sequence
  Description of Artificial Sequence: Synthetic oligonucleotide
uaauuucacuacag

SEQ ID NO: 32104 - RNA, 14 nt, Artificial Sequence
  Description of Artificial Sequence: Synthetic oligonucleotide
uuaauuucacuaca

SEQ ID NO: 32105 - RNA, 14 nt, Artificial Sequence
  Description of Artificial Sequence: Synthetic oligonucleotide
auuaauuucacuac

SEQ ID NO: 32106 - RNA, 14 nt, Artificial Sequence
  Description of Artificial Sequence: Synthetic oligonucleotide
aauuaauuucacua

SEQ ID NO: 32107 - RNA, 14 nt, Artificial Sequence
  Description of Artificial Sequence: Synthetic oligonucleotide
caauuaauuucacu

SEQ ID NO: 32108 - RNA, 14 nt, Artificial Sequence
  Description of Artificial Sequence: Synthetic oligonucleotide
ucaauuaauuucac

SEQ ID NO: 32109 - RNA, 14 nt, Artificial Sequence
  Description of Artificial Sequence: Synthetic oligonucleotide
uucaauuaauuuca

SEQ ID NO: 32110 - RNA, 14 nt, Artificial Sequence
  Description of Artificial Sequence: Synthetic oligonucleotide
uuucaauuaauuuc

SEQ ID NO: 32111 - RNA, 14 nt, Artificial Sequence
  Description of Artificial Sequence: Synthetic oligonucleotide
cuuucaauuaauuu

SEQ ID NO: 32112 - RNA, 14 nt, Artificial Sequence
  Description of Artificial Sequence: Synthetic oligonucleotide
ccuuucaauuaauu

SEQ ID NO: 32113 - RNA, 14 nt, Artificial Sequence
  Description of Artificial Sequence: Synthetic oligonucleotide
accuuucaauuaau

SEQ ID NO: 32114 - RNA, 14 nt, Artificial Sequence
  Description of Artificial Sequence: Synthetic oligonucleotide
aaccuuucaauuaa

SEQ ID NO: 32115 - RNA, 14 nt, Artificial Sequence
  Description of Artificial Sequence: Synthetic oligonucleotide
uaaccuuucaauua

SEQ ID NO: 32116 - RNA, 14 nt, Artificial Sequence
  Description of Artificial Sequence: Synthetic oligonucleotide
uuaaccuuucaauu

SEQ ID NO: 32117 - RNA, 14 nt, Artificial Sequence
  Description of Artificial Sequence: Synthetic oligonucleotide
guuaaccuuucaau

SEQ ID NO: 32118 - RNA, 14 nt, Artificial Sequence
  Description of Artificial Sequence: Synthetic oligonucleotide
uguuaaccuuucaa

SEQ ID NO: 32119 - RNA, 14 nt, Artificial Sequence
  Description of Artificial Sequence: Synthetic oligonucleotide
auguuaaccuuuca

SEQ ID NO: 32120 - RNA, 14 nt, Artificial Sequence
  Description of Artificial Sequence: Synthetic oligonucleotide
uauguuaaccuuuc

SEQ ID NO: 32121 - RNA, 14 nt, Artificial Sequence
  Description of Artificial Sequence: Synthetic oligonucleotide
auauguuaaccuuu

SEQ ID NO: 32122 - RNA, 14 nt, Artificial Sequence
  Description of Artificial Sequence: Synthetic oligonucleotide
gauauguuaaccuu

SEQ ID NO: 32123 - RNA, 14 nt, Artificial Sequence
  Description of Artificial Sequence: Synthetic oligonucleotide
ugauauguuaaccu

SEQ ID NO: 32124 - RNA, 14 nt, Artificial Sequence
  Description of Artificial Sequence: Synthetic oligonucleotide
augauauguuaacc

SEQ ID NO: 32125 - RNA, 14 nt, Artificial Sequence
  Description of Artificial Sequence: Synthetic oligonucleotide
uaugauauguuaac

SEQ ID NO: 32126 - RNA, 14 nt, Artificial Sequence
  Description of Artificial Sequence: Synthetic oligonucleotide
auaugauauguuaa

SEQ ID NO: 32127 - RNA, 14 nt, Artificial Sequence
  Description of Artificial Sequence: Synthetic oligonucleotide
cauaugauauguua

SEQ ID NO: 32128 - RNA, 14 nt, Artificial Sequence
  Description of Artificial Sequence: Synthetic oligonucleotide
acauaugauauguu

SEQ ID NO: 32129 - RNA, 14 nt, Artificial Sequence
  Description of Artificial Sequence: Synthetic oligonucleotide
uacauaugauaugu

SEQ ID NO: 32130 - RNA, 14 nt, Artificial Sequence
  Description of Artificial Sequence: Synthetic oligonucleotide
auacauaugauaug

SEQ ID NO: 32131 - RNA, 14 nt, Artificial Sequence
  Description of Artificial Sequence: Synthetic oligonucleotide
cauacauaugauau

SEQ ID NO: 32132 - RNA, 14 nt, Artificial Sequence
  Description of Artificial Sequence: Synthetic oligonucleotide
gcauacauaugaua

SEQ ID NO: 32133 - RNA, 14 nt, Artificial Sequence
  Description of Artificial Sequence: Synthetic oligonucleotide
ugcauacauaugau

SEQ ID NO: 32134 - RNA, 14 nt, Artificial Sequence
  Description of Artificial Sequence: Synthetic oligonucleotide
cugcauacauauga

SEQ ID NO: 32135 - RNA, 14 nt, Artificial Sequence
  Description of Artificial Sequence: Synthetic oligonucleotide
ucugcauacauaug

SEQ ID NO: 32136 - RNA, 14 nt, Artificial Sequence
  Description of Artificial Sequence: Synthetic oligonucleotide
aucugcauacauau

SEQ ID NO: 32137 - RNA, 14 nt, Artificial Sequence
  Description of Artificial Sequence: Synthetic oligonucleotide
gaucugcauacaua

SEQ ID NO: 32138 - RNA, 14 nt, Artificial Sequence
  Description of Artificial Sequence: Synthetic oligonucleotide
ggaucugcauacau

SEQ ID NO: 32139 - RNA, 14 nt, Artificial Sequence
  Description of Artificial Sequence: Synthetic oligonucleotide
gggaucugcauaca

SEQ ID NO: 32140 - RNA, 14 nt, Artificial Sequence
  Description of Artificial Sequence: Synthetic oligonucleotide
ugggaucugcauac

SEQ ID NO: 32141 - RNA, 14 nt, Artificial Sequence
  Description of Artificial Sequence: Synthetic oligonucleotide
uugggaucugcaua

SEQ ID NO: 32142 - RNA, 14 nt, Artificial Sequence
  Description of Artificial Sequence: Synthetic oligonucleotide
auugggaucugcau

SEQ ID NO: 32143 - RNA, 14 nt, Artificial Sequence
  Description of Artificial Sequence: Synthetic oligonucleotide
aauugggaucugca

SEQ ID NO: 32144 - RNA, 14 nt, Artificial Sequence
  Description of Artificial Sequence: Synthetic oligonucleotide
aaauugggaucugc

SEQ ID NO: 32145 - RNA, 14 nt, Artificial Sequence
  Description of Artificial Sequence: Synthetic oligonucleotide
aaaauugggaucug

SEQ ID NO: 32146 - RNA, 14 nt, Artificial Sequence
  Description of Artificial Sequence: Synthetic oligonucleotide
caaaauugggaucu

SEQ ID NO: 32147 - RNA, 14 nt, Artificial Sequence
  Description of Artificial Sequence: Synthetic oligonucleotide
acaaaauugggauc

SEQ ID NO: 32148 - RNA, 14 nt, Artificial Sequence
  Description of Artificial Sequence: Synthetic oligonucleotide
aacaaaauugggau

SEQ ID NO: 32149 - RNA, 14 nt, Artificial Sequence
  Description of Artificial Sequence: Synthetic oligonucleotide
gaacaaaauuggga

SEQ ID NO: 32150 - RNA, 14 nt, Artificial Sequence
  Description of Artificial Sequence: Synthetic oligonucleotide
cgaacaaaauuggg

SEQ ID NO: 32151 - RNA, 14 nt, Artificial Sequence
  Description of Artificial Sequence: Synthetic oligonucleotide
acgaacaaaauugg

SEQ ID NO: 32152 - RNA, 14 nt, Artificial Sequence
  Description of Artificial Sequence: Synthetic oligonucleotide
uacgaacaaaauug

SEQ ID NO: 32153 - RNA, 14 nt, Artificial Sequence
  Description of Artificial Sequence: Synthetic oligonucleotide
guacgaacaaaauu

SEQ ID NO: 32154 - RNA, 14 nt, Artificial Sequence
  Description of Artificial Sequence: Synthetic oligonucleotide
aguacgaacaaaau

SEQ ID NO: 32155 - RNA, 14 nt, Artificial Sequence
  Description of Artificial Sequence: Synthetic oligonucleotide
aaguacgaacaaaa

SEQ ID NO: 32156 - RNA, 14 nt, Artificial Sequence
  Description of Artificial Sequence: Synthetic oligonucleotide
aaaguacgaacaaa

SEQ ID NO: 32157 - RNA, 14 nt, Artificial Sequence
  Description of Artificial Sequence: Synthetic oligonucleotide
aaaaguacgaacaa

SEQ ID NO: 32158 - RNA, 14 nt, Artificial Sequence
  Description of Artificial Sequence: Synthetic oligonucleotide
gaaaaguacgaaca

SEQ ID NO: 32159 - RNA, 14 nt, Artificial Sequence
  Description of Artificial Sequence: Synthetic oligonucleotide
agaaaaguacgaac

SEQ ID NO: 32160 - RNA, 14 nt, Artificial Sequence
  Description of Artificial Sequence: Synthetic oligonucleotide
aagaaaaguacgaa

SEQ ID NO: 32161 - RNA, 14 nt, Artificial Sequence
  Description of Artificial Sequence: Synthetic oligonucleotide
uaagaaaaguacga

SEQ ID NO: 32162 - RNA, 14 nt, Artificial Sequence
  Description of Artificial Sequence: Synthetic oligonucleotide
guaagaaaaguacg

SEQ ID NO: 32163 - RNA, 14 nt, Artificial Sequence
  Description of Artificial Sequence: Synthetic oligonucleotide
gguaagaaaaguac

SEQ ID NO: 32164 - RNA, 14 nt, Artificial Sequence
  Description of Artificial Sequence: Synthetic oligonucleotide
ugguaagaaaagua

SEQ ID NO: 32165 - RNA, 14 nt, Artificial Sequence
  Description of Artificial Sequence: Synthetic oligonucleotide
gugguaagaaaagu

SEQ ID NO: 32166 - RNA, 14 nt, Artificial Sequence
  Description of Artificial Sequence: Synthetic oligonucleotide
ugugguaagaaaag

SEQ ID NO: 32167 - RNA, 14 nt, Artificial Sequence
  Description of Artificial Sequence: Synthetic oligonucleotide
augugguaagaaaa

SEQ ID NO: 32168 - RNA, 14 nt, Artificial Sequence
  Description of Artificial Sequence: Synthetic oligonucleotide
uaugugguaagaaa

SEQ ID NO: 32169 - RNA, 14 nt, Artificial Sequence
  Description of Artificial Sequence: Synthetic oligonucleotide
auaugugguaagaa

SEQ ID NO: 32170 - RNA, 14 nt, Artificial Sequence
  Description of Artificial Sequence: Synthetic oligonucleotide
gauaugugguaaga

SEQ ID NO: 32171 - RNA, 14 nt, Artificial Sequence
  Description of Artificial Sequence: Synthetic oligonucleotide
cgauaugugguaag

SEQ ID NO: 32172 - RNA, 14 nt, Artificial Sequence
  Description of Artificial Sequence: Synthetic oligonucleotide
acgauaugugguaa

SEQ ID NO: 32173 - RNA, 14 nt, Artificial Sequence
  Description of Artificial Sequence: Synthetic oligonucleotide
aacgauauguggua

SEQ ID NO: 32174 - RNA, 14 nt, Artificial Sequence
  Description of Artificial Sequence: Synthetic oligonucleotide
gaacgauauguggu

SEQ ID NO: 32175 - RNA, 14 nt, Artificial Sequence
  Description of Artificial Sequence: Synthetic oligonucleotide
ugaacgauaugugg

SEQ ID NO: 32176 - RNA, 14 nt, Artificial Sequence
  Description of Artificial Sequence: Synthetic oligonucleotide
augaacgauaugug

SEQ ID NO: 32177 - RNA, 14 nt, Artificial Sequence
  Description of Artificial Sequence: Synthetic oligonucleotide
aaugaacgauaugu

SEQ ID NO: 32178 - RNA, 14 nt, Artificial Sequence
  Description of Artificial Sequence: Synthetic oligonucleotide
aaaugaacgauaug

SEQ ID NO: 32179 - RNA, 14 nt, Artificial Sequence
  Description of Artificial Sequence: Synthetic oligonucleotide
aaaaugaacgauau

SEQ ID NO: 32180 - RNA, 14 nt, Artificial Sequence
  Description of Artificial Sequence: Synthetic oligonucleotide
caaaaugaacgaua

SEQ ID NO: 32181 - RNA, 14 nt, Artificial Sequence
  Description of Artificial Sequence: Synthetic oligonucleotide
acaaaaugaacgau

SEQ ID NO: 32182 - RNA, 14 nt, Artificial Sequence
  Description of Artificial Sequence: Synthetic oligonucleotide
uacaaaaugaacga

SEQ ID NO: 32183 - RNA, 14 nt, Artificial Sequence
  Description of Artificial Sequence: Synthetic oligonucleotide
uuacaaaaugaacg

SEQ ID NO: 32184 - RNA, 14 nt, Artificial Sequence
  Description of Artificial Sequence: Synthetic oligonucleotide
uuuacaaaaugaac

SEQ ID NO: 32185 - RNA, 14 nt, Artificial Sequence
  Description of Artificial Sequence: Synthetic oligonucleotide
guuuacaaaaugaa

SEQ ID NO: 32186 - RNA, 14 nt, Artificial Sequence
  Description of Artificial Sequence: Synthetic oligonucleotide
gguuuacaaaauga

SEQ ID NO: 32187 - RNA, 14 nt, Artificial Sequence
  Description of Artificial Sequence: Synthetic oligonucleotide
ugguuuacaaaaug

SEQ ID NO: 32188 - RNA, 14 nt, Artificial Sequence
  Description of Artificial Sequence: Synthetic oligonucleotide
gugguuuacaaaau

SEQ ID NO: 32189 - RNA, 14 nt, Artificial Sequence
  Description of Artificial Sequence: Synthetic oligonucleotide
ugugguuuacaaaa

SEQ ID NO: 32190 - RNA, 14 nt, Artificial Sequence
  Description of Artificial Sequence: Synthetic oligonucleotide
cugugguuuacaaa

SEQ ID NO: 32191 - RNA, 14 nt, Artificial Sequence
  Description of Artificial Sequence: Synthetic oligonucleotide
ccugugguuuacaa

SEQ ID NO: 32192 - RNA, 14 nt, Artificial Sequence
  Description of Artificial Sequence: Synthetic oligonucleotide
uccugugguuuaca

SEQ ID NO: 32193 - RNA, 14 nt, Artificial Sequence
  Description of Artificial Sequence: Synthetic oligonucleotide
uuccugugguuuac

SEQ ID NO: 32194 - RNA, 14 nt, Artificial Sequence
  Description of Artificial Sequence: Synthetic oligonucleotide
auuccugugguuua

SEQ ID NO: 32195 - RNA, 14 nt, Artificial Sequence
  Description of Artificial Sequence: Synthetic oligonucleotide
aauuccugugguuu

SEQ ID NO: 32196 - RNA, 14 nt, Artificial Sequence
  Description of Artificial Sequence: Synthetic oligonucleotide
caauuccugugguu

SEQ ID NO: 32197 - RNA, 14 nt, Artificial Sequence
  Description of Artificial Sequence: Synthetic oligonucleotide
gcaauuccuguggu

SEQ ID NO: 32198 - RNA, 14 nt, Artificial Sequence
  Description of Artificial Sequence: Synthetic oligonucleotide
agcaauuccugugg

SEQ ID NO: 32199 - RNA, 14 nt, Artificial Sequence
  Description of Artificial Sequence: Synthetic oligonucleotide
cagcaauuccugug

SEQ ID NO: 32200 - RNA, 14 nt, Artificial Sequence
  Description of Artificial Sequence: Synthetic oligonucleotide
ucagcaauuccugu

SEQ ID NO: 32201 - RNA, 14 nt, Artificial Sequence
  Description of Artificial Sequence: Synthetic oligonucleotide
cucagcaauuccug

SEQ ID NO: 32202 - RNA, 14 nt, Artificial Sequence
  Description of Artificial Sequence: Synthetic oligonucleotide
gcucagcaauuccu

SEQ ID NO: 32203 - RNA, 14 nt, Artificial Sequence
  Description of Artificial Sequence: Synthetic oligonucleotide
agcucagcaauucc

SEQ ID NO: 32204 - RNA, 14 nt, Artificial Sequence
  Description of Artificial Sequence: Synthetic oligonucleotide
aagcucagcaauuc

SEQ ID NO: 32205 - RNA, 14 nt, Artificial Sequence
  Description of Artificial Sequence: Synthetic oligonucleotide
uaagcucagcaauu

SEQ ID NO: 32206 - RNA, 14 nt, Artificial Sequence
  Description of Artificial Sequence: Synthetic oligonucleotide
guaagcucagcaau

SEQ ID NO: 32207 - RNA, 14 nt, Artificial Sequence
  Description of Artificial Sequence: Synthetic oligonucleotide
aguaagcucagcaa

SEQ ID NO: 32208 - RNA, 14 nt, Artificial Sequence
  Description of Artificial Sequence: Synthetic oligonucleotide
caguaagcucagca

SEQ ID NO: 32209 - RNA, 14 nt, Artificial Sequence
  Description of Artificial Sequence: Synthetic oligonucleotide
ucaguaagcucagc

SEQ ID NO: 32210 - RNA, 14 nt, Artificial Sequence
  Description of Artificial Sequence: Synthetic oligonucleotide
aucaguaagcucag

SEQ ID NO: 32211 - RNA, 14 nt, Artificial Sequence
  Description of Artificial Sequence: Synthetic oligonucleotide
aaucaguaagcuca

SEQ ID NO: 32212 - RNA, 14 nt, Artificial Sequence
  Description of Artificial Sequence: Synthetic oligonucleotide
caaucaguaagcuc

SEQ ID NO: 32213 - RNA, 14 nt, Artificial Sequence
  Description of Artificial Sequence: Synthetic oligonucleotide
ucaaucaguaagcu

SEQ ID NO: 32214 - RNA, 14 nt, Artificial Sequence
  Description of Artificial Sequence: Synthetic oligonucleotide
uucaaucaguaagc

SEQ ID NO: 32215 - RNA, 14 nt, Artificial Sequence
  Description of Artificial Sequence: Synthetic oligonucleotide
guucaaucaguaag

SEQ ID NO: 32216 - RNA, 14 nt, Artificial Sequence
  Description of Artificial Sequence: Synthetic oligonucleotide
cguucaaucaguaa

SEQ ID NO: 32217 - RNA, 14 nt, Artificial Sequence
  Description of Artificial Sequence: Synthetic oligonucleotide
ccguucaaucagua

SEQ ID NO: 32218 - RNA, 14 nt, Artificial Sequence
  Description of Artificial Sequence: Synthetic oligonucleotide
accguucaaucagu

SEQ ID NO: 32219 - RNA, 14 nt, Artificial Sequence
  Description of Artificial Sequence: Synthetic oligonucleotide
aaccguucaaucag

SEQ ID NO: 32220 - RNA, 14 nt, Artificial Sequence
  Description of Artificial Sequence: Synthetic oligonucleotide
aaaccguucaauca

SEQ ID NO: 32221 - RNA, 14 nt, Artificial Sequence
  Description of Artificial Sequence: Synthetic oligonucleotide
caaaccguucaauc

SEQ ID NO: 32222 - RNA, 14 nt, Artificial Sequence
  Description of Artificial Sequence: Synthetic oligonucleotide
ucaaaccguucaau

SEQ ID NO: 32223 - RNA, 14 nt, Artificial Sequence
  Description of Artificial Sequence: Synthetic oligonucleotide
uucaaaccguucaa

SEQ ID NO: 32224 - RNA, 14 nt, Artificial Sequence
  Description of Artificial Sequence: Synthetic oligonucleotide
uuucaaaccguuca

SEQ ID NO: 32225 - RNA, 14 nt, Artificial Sequence
  Description of Artificial Sequence: Synthetic oligonucleotide
auuucaaaccguuc

SEQ ID NO: 32226 - RNA, 14 nt, Artificial Sequence
  Description of Artificial Sequence: Synthetic oligonucleotide
aauuucaaaccguu

SEQ ID NO: 32227 - RNA, 14 nt, Artificial Sequence
  Description of Artificial Sequence: Synthetic oligonucleotide
gaauuucaaaccgu

SEQ ID NO: 32228 - RNA, 14 nt, Artificial Sequence
  Description of Artificial Sequence: Synthetic oligonucleotide
ggaauuucaaaccg

SEQ ID NO: 32229 - RNA, 14 nt, Artificial Sequence
  Description of Artificial Sequence: Synthetic oligonucleotide
uggaauuucaaacc

SEQ ID NO: 32230 - RNA, 14 nt, Artificial Sequence
  Description of Artificial Sequence: Synthetic oligonucleotide
cuggaauuucaaac

SEQ ID NO: 32231 - RNA, 14 nt, Artificial Sequence
  Description of Artificial Sequence: Synthetic oligonucleotide
ucuggaauuucaaa

SEQ ID NO: 32232 - RNA, 14 nt, Artificial Sequence
  Description of Artificial Sequence: Synthetic oligonucleotide
cucuggaauuucaa

SEQ ID NO: 32233 - RNA, 14 nt, Artificial Sequence
  Description of Artificial Sequence: Synthetic oligonucleotide
gcucuggaauuuca

SEQ ID NO: 32234 - RNA, 14 nt, Artificial Sequence
  Description of Artificial Sequence: Synthetic oligonucleotide
ggcucuggaauuuc

SEQ ID NO: 32235 - RNA, 14 nt, Artificial Sequence
  Description of Artificial Sequence: Synthetic oligonucleotide
uggcucuggaauuu

SEQ ID NO: 32236 - RNA, 14 nt, Artificial Sequence
  Description of Artificial Sequence: Synthetic oligonucleotide
cuggcucuggaauu

SEQ ID NO: 32237 - RNA, 14 nt, Artificial Sequence
  Description of Artificial Sequence: Synthetic oligonucleotide
ucuggcucuggaau

SEQ ID NO: 32238 - RNA, 14 nt, Artificial Sequence
  Description of Artificial Sequence: Synthetic oligonucleotide
uucuggcucuggaa

SEQ ID NO: 32239 - RNA, 14 nt, Artificial Sequence
  Description of Artificial Sequence: Synthetic oligonucleotide
guucuggcucugga

SEQ ID NO: 32240 - RNA, 14 nt, Artificial Sequence
  Description of Artificial Sequence: Synthetic oligonucleotide
gguucuggcucugg

SEQ ID NO: 32241 - RNA, 14 nt, Artificial Sequence
  Description of Artificial Sequence: Synthetic oligonucleotide
agguucuggcucug

SEQ ID NO: 32242 - RNA, 14 nt, Artificial Sequence
  Description of Artificial Sequence: Synthetic oligonucleotide
uagguucuggcucu

SEQ ID NO: 32243 - RNA, 14 nt, Artificial Sequence
  Description of Artificial Sequence: Synthetic oligonucleotide
guagguucuggcuc

SEQ ID NO: 32244 - RNA, 14 nt, Artificial Sequence
  Description of Artificial Sequence: Synthetic oligonucleotide
aguagguucuggcu

SEQ ID NO: 32245 - RNA, 14 nt, Artificial Sequence
  Description of Artificial Sequence: Synthetic oligonucleotide
caguagguucuggc

SEQ ID NO: 32246 - RNA, 14 nt, Artificial Sequence
  Description of Artificial Sequence: Synthetic oligonucleotide
ucaguagguucugg

SEQ ID NO: 32247 - RNA, 14 nt, Artificial Sequence
  Description of Artificial Sequence: Synthetic oligonucleotide
gucaguagguucug

SEQ ID NO: 32248 - RNA, 14 nt, Artificial Sequence
  Description of Artificial Sequence: Synthetic oligonucleotide
cgucaguagguucu

SEQ ID NO: 32249 - RNA, 14 nt, Artificial Sequence
  Description of Artificial Sequence: Synthetic oligonucleotide
gcgucaguagguuc

SEQ ID NO: 32250 - RNA, 14 nt, Artificial Sequence
  Description of Artificial Sequence: Synthetic oligonucleotide
ugcgucaguagguu

SEQ ID NO: 32251 - RNA, 14 nt, Artificial Sequence
  Description of Artificial Sequence: Synthetic oligonucleotide
cugcgucaguaggu

SEQ ID NO: 32252 - RNA, 14 nt, Artificial Sequence
  Description of Artificial Sequence: Synthetic oligonucleotide
ucugcgucaguagg

SEQ ID NO: 32253 - RNA, 14 nt, Artificial Sequence
  Description of Artificial Sequence: Synthetic oligonucleotide
gucugcgucaguag

SEQ ID NO: 32254 - RNA, 14 nt, Artificial Sequence
  Description of Artificial Sequence: Synthetic oligonucleotide
ugucugcgucagua

SEQ ID NO: 32255 - RNA, 14 nt, Artificial Sequence
  Description of Artificial Sequence: Synthetic oligonucleotide
uugucugcgucagu

SEQ ID NO: 32256 - RNA, 14 nt, Artificial Sequence
  Description of Artificial Sequence: Synthetic oligonucleotide
uuugucugcgucag

SEQ ID NO: 32257 - RNA, 14 nt, Artificial Sequence
  Description of Artificial Sequence: Synthetic oligonucleotide
auuugucugcguca

SEQ ID NO: 32258 - RNA, 14 nt, Artificial Sequence
  Description of Artificial Sequence: Synthetic oligonucleotide
aauuugucugcguc

SEQ ID NO: 32259 - RNA, 14 nt, Artificial Sequence
  Description of Artificial Sequence: Synthetic oligonucleotide
caauuugucugcgu

SEQ ID NO: 32260 - RNA, 14 nt, Artificial Sequence
  Description of Artificial Sequence: Synthetic oligonucleotide
ccaauuugucugcg

SEQ ID NO: 32261 - RNA, 14 nt, Artificial Sequence
  Description of Artificial Sequence: Synthetic oligonucleotide
gccaauuugucugc

SEQ ID NO: 32262 - RNA, 14 nt, Artificial Sequence
  Description of Artificial Sequence: Synthetic oligonucleotide
ugccaauuugucug

SEQ ID NO: 32263 - RNA, 14 nt, Artificial Sequence
  Description of Artificial Sequence: Synthetic oligonucleotide
uugccaauuugucu

SEQ ID NO: 32264 - RNA, 14 nt, Artificial Sequence
  Description of Artificial Sequence: Synthetic oligonucleotide
auugccaauuuguc

SEQ ID NO: 32265 - RNA, 14 nt, Artificial Sequence
  Description of Artificial Sequence: Synthetic oligonucleotide
uauugccaauuugu

SEQ ID NO: 32266 - RNA, 14 nt, Artificial Sequence
  Description of Artificial Sequence: Synthetic oligonucleotide
cuauugccaauuug

SEQ ID NO: 32267 - RNA, 14 nt, Artificial Sequence
  Description of Artificial Sequence: Synthetic oligonucleotide
ucuauugccaauuu

SEQ ID NO: 32268 - RNA, 14 nt, Artificial Sequence
  Description of Artificial Sequence: Synthetic oligonucleotide
cucuauugccaauu

SEQ ID NO: 32269 - RNA, 14 nt, Artificial Sequence
  Description of Artificial Sequence: Synthetic oligonucleotide
ucucuauugccaau

SEQ ID NO: 32270 - RNA, 14 nt, Artificial Sequence
  Description of Artificial Sequence: Synthetic oligonucleotide
uucucuauugccaa

SEQ ID NO: 32271 - RNA, 14 nt, Artificial Sequence
  Description of Artificial Sequence: Synthetic oligonucleotide
uuucucuauugcca

SEQ ID NO: 32272 - RNA, 14 nt, Artificial Sequence
  Description of Artificial Sequence: Synthetic oligonucleotide
cuuucucuauugcc

SEQ ID NO: 32273 - RNA, 14 nt, Artificial Sequence
  Description of Artificial Sequence: Synthetic oligonucleotide
ccuuucucuauugc

SEQ ID NO: 32274 - RNA, 14 nt, Artificial Sequence
  Description of Artificial Sequence: Synthetic oligonucleotide
gccuuucucuauug

SEQ ID NO: 32275 - RNA, 14 nt, Artificial Sequence
  Description of Artificial Sequence: Synthetic oligonucleotide
cgccuuucucuauu

SEQ ID NO: 32276 - RNA, 14 nt, Artificial Sequence
  Description of Artificial Sequence: Synthetic oligonucleotide
ucgccuuucucuau

SEQ ID NO: 32277 - RNA, 14 nt, Artificial Sequence
  Description of Artificial Sequence: Synthetic oligonucleotide
cucgccuuucucua

SEQ ID NO: 32278 - RNA, 14 nt, Artificial Sequence
  Description of Artificial Sequence: Synthetic oligonucleotide
gcucgccuuucucu

SEQ ID NO: 32279 - RNA, 14 nt, Artificial Sequence
  Description of Artificial Sequence: Synthetic oligonucleotide
ugcucgccuuucuc

SEQ ID NO: 32280 - RNA, 14 nt, Artificial Sequence
  Description of Artificial Sequence: Synthetic oligonucleotide
cugcucgccuuucu

SEQ ID NO: 32281 - RNA, 14 nt, Artificial Sequence
  Description of Artificial Sequence: Synthetic oligonucleotide
gcugcucgccuuuc

SEQ ID NO: 32282 - RNA, 14 nt, Artificial Sequence
  Description of Artificial Sequence: Synthetic oligonucleotide
ggcugcucgccuuu

SEQ ID NO: 32283 - RNA, 14 nt, Artificial Sequence
  Description of Artificial Sequence: Synthetic oligonucleotide
uggcugcucgccuu

SEQ ID NO: 32284 - RNA, 14 nt, Artificial Sequence
  Description of Artificial Sequence: Synthetic oligonucleotide
uuggcugcucgccu

SEQ ID NO: 32285 - RNA, 14 nt, Artificial Sequence
  Description of Artificial Sequence: Synthetic oligonucleotide
auuggcugcucgcc

SEQ ID NO: 32286 - RNA, 14 nt, Artificial Sequence
  Description of Artificial Sequence: Synthetic oligonucleotide
gauuggcugcucgc

SEQ ID NO: 32287 - RNA, 14 nt, Artificial Sequence
  Description of Artificial Sequence: Synthetic oligonucleotide
ugauuggcugcucg

SEQ ID NO: 32288 - RNA, 14 nt, Artificial Sequence
  Description of Artificial Sequence: Synthetic oligonucleotide
cugauuggcugcuc

SEQ ID NO: 32289 - RNA, 14 nt, Artificial Sequence
  Description of Artificial Sequence: Synthetic oligonucleotide
acugauuggcugcu

SEQ ID NO: 32290 - RNA, 14 nt, Artificial Sequence
  Description of Artificial Sequence: Synthetic oligonucleotide
cacugauuggcugc

SEQ ID NO: 32291 - RNA, 14 nt, Artificial Sequence
  Description of Artificial Sequence: Synthetic oligonucleotide
gcacugauuggcug

SEQ ID NO: 32292 - RNA, 14 nt, Artificial Sequence
  Description of Artificial Sequence: Synthetic oligonucleotide
ugcacugauuggcu

SEQ ID NO: 32293 - RNA, 14 nt, Artificial Sequence
  Description of Artificial Sequence: Synthetic oligonucleotide
cugcacugauuggc

SEQ ID NO: 32294 - RNA, 14 nt, Artificial Sequence
  Description of Artificial Sequence: Synthetic oligonucleotide
ucugcacugauugg

SEQ ID NO: 32295 - RNA, 14 nt, Artificial Sequence
  Description of Artificial Sequence: Synthetic oligonucleotide
gucugcacugauug

SEQ ID NO: 32296 - RNA, 14 nt, Artificial Sequence
  Description of Artificial Sequence: Synthetic oligonucleotide
ggucugcacugauu

SEQ ID NO: 32297 - RNA, 14 nt, Artificial Sequence
  Description of Artificial Sequence: Synthetic oligonucleotide
aggucugcacugau

SEQ ID NO: 32298 - RNA, 14 nt, Artificial Sequence
  Description of Artificial Sequence: Synthetic oligonucleotide
aaggucugcacuga

SEQ ID NO: 32299 - RNA, 14 nt, Artificial Sequence
  Description of Artificial Sequence: Synthetic oligonucleotide
uaaggucugcacug

SEQ ID NO: 32300 - RNA, 14 nt, Artificial Sequence
  Description of Artificial Sequence: Synthetic oligonucleotide
uuaaggucugcacu

SEQ ID NO: 32301 - RNA, 14 nt, Artificial Sequence
  Description of Artificial Sequence: Synthetic oligonucleotide
uuuaaggucugcac

SEQ ID NO: 32302 - RNA, 14 nt, Artificial Sequence
  Description of Artificial Sequence: Synthetic oligonucleotide
uuuuaaggucugca

SEQ ID NO: 32303 - RNA, 14 nt, Artificial Sequence
  Description of Artificial Sequence: Synthetic oligonucleotide
cuuuuaaggucugc

SEQ ID NO: 32304 - RNA, 14 nt, Artificial Sequence
  Description of Artificial Sequence: Synthetic oligonucleotide
ucuuuuaaggucug

SEQ ID NO: 32305 - RNA, 14 nt, Artificial Sequence
  Description of Artificial Sequence: Synthetic oligonucleotide
aucuuuuaaggucu

SEQ ID NO: 32306 - RNA, 14 nt, Artificial Sequence
  Description of Artificial Sequence: Synthetic oligonucleotide
aaucuuuuaagguc

SEQ ID NO: 32307 - RNA, 14 nt, Artificial Sequence
  Description of Artificial Sequence: Synthetic oligonucleotide
aaaucuuuuaaggu

SEQ ID NO: 32308 - RNA, 14 nt, Artificial Sequence
  Description of Artificial Sequence: Synthetic oligonucleotide
gaaaucuuuuaagg

SEQ ID NO: 32309 - RNA, 14 nt, Artificial Sequence
  Description of Artificial Sequence: Synthetic oligonucleotide
cgaaaucuuuuaag

SEQ ID NO: 32310 - RNA, 14 nt, Artificial Sequence
  Description of Artificial Sequence: Synthetic oligonucleotide
gcgaaaucuuuuaa

SEQ ID NO: 32311 - RNA, 14 nt, Artificial Sequence
  Description of Artificial Sequence: Synthetic oligonucleotide
ugcgaaaucuuuua

SEQ ID NO: 32312 - RNA, 14 nt, Artificial Sequence
  Description of Artificial Sequence: Synthetic oligonucleotide
uugcgaaaucuuuu

SEQ ID NO: 32313 - RNA, 14 nt, Artificial Sequence
  Description of Artificial Sequence: Synthetic oligonucleotide
cuugcgaaaucuuu

SEQ ID NO: 32314 - RNA, 14 nt, Artificial Sequence
  Description of Artificial Sequence: Synthetic oligonucleotide
ccuugcgaaaucuu

SEQ ID NO: 32315 - RNA, 14 nt, Artificial Sequence
  Description of Artificial Sequence: Synthetic oligonucleotide
caguaaggcugauu

SEQ ID NO: 32316 - RNA, 14 nt, Artificial Sequence
  Description of Artificial Sequence: Synthetic oligonucleotide
uuccuugcgaaauc

SEQ ID NO: 32317 - RNA, 14 nt, Artificial Sequence
  Description of Artificial Sequence: Synthetic oligonucleotide
auuccuugcgaaau

SEQ ID NO: 32318 - RNA, 14 nt, Artificial Sequence
  Description of Artificial Sequence: Synthetic oligonucleotide
uauuccuugcgaaa

SEQ ID NO: 32319 - RNA, 14 nt, Artificial Sequence
  Description of Artificial Sequence: Synthetic oligonucleotide
auauuccuugcgaa

SEQ ID NO: 32320 - RNA, 14 nt, Artificial Sequence
  Description of Artificial Sequence: Synthetic oligonucleotide
cauauuccuugcga

SEQ ID NO: 32321 - RNA, 14 nt, Artificial Sequence
  Description of Artificial Sequence: Synthetic oligonucleotide
acauauuccuugcg

SEQ ID NO: 32322 - RNA, 14 nt, Artificial Sequence
  Description of Artificial Sequence: Synthetic oligonucleotide
gacauauuccuugc

SEQ ID NO: 32323 - RNA, 14 nt, Artificial Sequence
  Description of Artificial Sequence: Synthetic oligonucleotide
ggacauauuccuug

SEQ ID NO: 32324 - RNA, 14 nt, Artificial Sequence
  Description of Artificial Sequence: Synthetic oligonucleotide
uggacauauuccuu

SEQ ID NO: 32325 - RNA, 14 nt, Artificial Sequence
  Description of Artificial Sequence: Synthetic oligonucleotide
uuggacauauuccu

SEQ ID NO: 32326 - RNA, 14 nt, Artificial Sequence
  Description of Artificial Sequence: Synthetic oligonucleotide
guuggacauauucc

SEQ ID NO: 32327 - RNA, 14 nt, Artificial Sequence
  Description of Artificial Sequence: Synthetic oligonucleotide
gguuggacauauuc

SEQ ID NO: 32328 - RNA, 14 nt, Artificial Sequence
  Description of Artificial Sequence: Synthetic oligonucleotide
ugguuggacauauu

SEQ ID NO: 32329 - RNA, 14 nt, Artificial Sequence
  Description of Artificial Sequence: Synthetic oligonucleotide
cugguuggacauau

SEQ ID NO: 32330 - RNA, 14 nt, Artificial Sequence
  Description of Artificial Sequence: Synthetic oligonucleotide
auaaucuguaaacu

SEQ ID NO: 32331 - RNA, 14 nt, Artificial Sequence
  Description of Artificial Sequence: Synthetic oligonucleotide
uacugguuggacau

SEQ ID NO: 32332 - RNA, 14 nt, Artificial Sequence
  Description of Artificial Sequence: Synthetic oligonucleotide
guacugguuggaca

SEQ ID NO: 32333 - RNA, 14 nt, Artificial Sequence
  Description of Artificial Sequence: Synthetic oligonucleotide
uguacugguuggac

SEQ ID NO: 32334 - RNA, 14 nt, Artificial Sequence
  Description of Artificial Sequence: Synthetic oligonucleotide
uuguacugguugga

SEQ ID NO: 32335 - RNA, 14 nt, Artificial Sequence
  Description of Artificial Sequence: Synthetic oligonucleotide
guuguacugguugg

SEQ ID NO: 32336 - RNA, 14 nt, Artificial Sequence
  Description of Artificial Sequence: Synthetic oligonucleotide
aguuguacugguug

SEQ ID NO: 32337 - RNA, 14 nt, Artificial Sequence
  Description of Artificial Sequence: Synthetic oligonucleotide
aaguuguacugguu

SEQ ID NO: 32338 - RNA, 14 nt, Artificial Sequence
  Description of Artificial Sequence: Synthetic oligonucleotide
uaaguuguacuggu

SEQ ID NO: 32339 - RNA, 14 nt, Artificial Sequence
  Description of Artificial Sequence: Synthetic oligonucleotide
cuaaguuguacugg

SEQ ID NO: 32340 - RNA, 14 nt, Artificial Sequence
  Description of Artificial Sequence: Synthetic oligonucleotide
ccuaaguuguacug

SEQ ID NO: 32341 - RNA, 14 nt, Artificial Sequence
  Description of Artificial Sequence: Synthetic oligonucleotide
uccuaaguuguacu

SEQ ID NO: 32342 - RNA, 14 nt, Artificial Sequence
  Description of Artificial Sequence: Synthetic oligonucleotide
auccuaaguuguac

SEQ ID NO: 32343 - RNA, 14 nt, Artificial Sequence
  Description of Artificial Sequence: Synthetic oligonucleotide
gauccuaaguugua

SEQ ID NO: 32344 - RNA, 14 nt, Artificial Sequence
  Description of Artificial Sequence: Synthetic oligonucleotide
agauccuaaguugu

SEQ ID NO: 32345 - RNA, 14 nt, Artificial Sequence
  Description of Artificial Sequence: Synthetic oligonucleotide
aagauccuaaguug

SEQ ID NO: 32346 - RNA, 14 nt, Artificial Sequence
  Description of Artificial Sequence: Synthetic oligonucleotide
uaagauccuaaguu

SEQ ID NO: 32347 - RNA, 14 nt, Artificial Sequence
  Description of Artificial Sequence: Synthetic oligonucleotide
uuaagauccuaagu

SEQ ID NO: 32348 - RNA, 14 nt, Artificial Sequence
  Description of Artificial Sequence: Synthetic oligonucleotide
uuuaagauccuaag

SEQ ID NO: 32349 - RNA, 14 nt, Artificial Sequence
  Description of Artificial Sequence: Synthetic oligonucleotide
auuuaagauccuaa

SEQ ID NO: 32350 - RNA, 14 nt, Artificial Sequence
  Description of Artificial Sequence: Synthetic oligonucleotide
cauuuaagauccua

SEQ ID NO: 32351 - RNA, 14 nt, Artificial Sequence
  Description of Artificial Sequence: Synthetic oligonucleotide
acauuuaagauccu

SEQ ID NO: 32352 - RNA, 14 nt, Artificial Sequence
  Description of Artificial Sequence: Synthetic oligonucleotide
uacauuuaagaucc

SEQ ID NO: 32353 - RNA, 14 nt, Artificial Sequence
  Description of Artificial Sequence: Synthetic oligonucleotide
auacauuuaagauc

SEQ ID NO: 32354 - RNA, 14 nt, Artificial Sequence
  Description of Artificial Sequence: Synthetic oligonucleotide
aauacauuuaagau

SEQ ID NO: 32355 - RNA, 14 nt, Artificial Sequence
  Description of Artificial Sequence: Synthetic oligonucleotide
aaauacauuuaaga

SEQ ID NO: 32356 - RNA, 14 nt, Artificial Sequence
  Description of Artificial Sequence: Synthetic oligonucleotide
gaaauacauuuaag

SEQ ID NO: 32357 - RNA, 14 nt, Artificial Sequence
  Description of Artificial Sequence: Synthetic oligonucleotide
cgaaauacauuuaa

SEQ ID NO: 32358 - RNA, 14 nt, Artificial Sequence
  Description of Artificial Sequence: Synthetic oligonucleotide
ccgaaauacauuua

SEQ ID NO: 32359 - RNA, 14 nt, Artificial Sequence
  Description of Artificial Sequence: Synthetic oligonucleotide
gccgaaauacauuu

SEQ ID NO: 32360 - RNA, 14 nt, Artificial Sequence
  Description of Artificial Sequence: Synthetic oligonucleotide
ugccgaaauacauu

SEQ ID NO: 32361 - RNA, 14 nt, Artificial Sequence
  Description of Artificial Sequence: Synthetic oligonucleotide
augccgaaauacau

SEQ ID NO: 32362 - RNA, 14 nt, Artificial Sequence
  Description of Artificial Sequence: Synthetic oligonucleotide
aaugccgaaauaca

SEQ ID NO: 32363 - RNA, 14 nt, Artificial Sequence
  Description of Artificial Sequence: Synthetic oligonucleotide
caaugccgaaauac

SEQ ID NO: 32364 - RNA, 14 nt, Artificial Sequence
  Description of Artificial Sequence: Synthetic oligonucleotide
ccaaugccgaaaua

SEQ ID NO: 32365 - RNA, 14 nt, Artificial Sequence
  Description of Artificial Sequence: Synthetic oligonucleotide
cccaaugccgaaau

SEQ ID NO: 32366 - RNA, 14 nt, Artificial Sequence
  Description of Artificial Sequence: Synthetic oligonucleotide
acccaaugccgaaa

SEQ ID NO: 32367 - RNA, 14 nt, Artificial Sequence
  Description of Artificial Sequence: Synthetic oligonucleotide
aacccaaugccgaa

SEQ ID NO: 32368 - RNA, 14 nt, Artificial Sequence
  Description of Artificial Sequence: Synthetic oligonucleotide
caacccaaugccga

SEQ ID NO: 32369 - RNA, 14 nt, Artificial Sequence
  Description of Artificial Sequence: Synthetic oligonucleotide
ucaacccaaugccg

SEQ ID NO: 32370 - RNA, 14 nt, Artificial Sequence
  Description of Artificial Sequence: Synthetic oligonucleotide
uucaacccaaugcc

SEQ ID NO: 32371 - RNA, 14 nt, Artificial Sequence
  Description of Artificial Sequence: Synthetic oligonucleotide
guucaacccaaugc

SEQ ID NO: 32372 - RNA, 14 nt, Artificial Sequence
  Description of Artificial Sequence: Synthetic oligonucleotide
uguucaacccaaug

SEQ ID NO: 32373 - RNA, 14 nt, Artificial Sequence
  Description of Artificial Sequence: Synthetic oligonucleotide
auguucaacccaau

SEQ ID NO: 32374 - RNA, 14 nt, Artificial Sequence
  Description of Artificial Sequence: Synthetic oligonucleotide
gauguucaacccaa

SEQ ID NO: 32375 - RNA, 14 nt, Artificial Sequence
  Description of Artificial Sequence: Synthetic oligonucleotide
ugauguucaaccca

SEQ ID NO: 32376 - RNA, 14 nt, Artificial Sequence
  Description of Artificial Sequence: Synthetic oligonucleotide
augauguucaaccc

SEQ ID NO: 32377 - RNA, 14 nt, Artificial Sequence
  Description of Artificial Sequence: Synthetic oligonucleotide
aaugauguucaacc

SEQ ID NO: 32378 - RNA, 14 nt, Artificial Sequence
  Description of Artificial Sequence: Synthetic oligonucleotide
aaaugauguucaac

SEQ ID NO: 32379 - RNA, 14 nt, Artificial Sequence
  Description of Artificial Sequence: Synthetic oligonucleotide
aaaaugauguucaa

SEQ ID NO: 32380 - RNA, 14 nt, Artificial Sequence
  Description of Artificial Sequence: Synthetic oligonucleotide
aaaaaugauguuca

SEQ ID NO: 32381 - RNA, 14 nt, Artificial Sequence
  Description of Artificial Sequence: Synthetic oligonucleotide
uaaaaaugauguuc

SEQ ID NO: 32382 - RNA, 14 nt, Artificial Sequence
  Description of Artificial Sequence: Synthetic oligonucleotide
auaaaaaugauguu

SEQ ID NO: 32383 - RNA, 14 nt, Artificial Sequence
  Description of Artificial Sequence: Synthetic oligonucleotide
cauaaaaaugaugu

SEQ ID NO: 32384 - RNA, 14 nt, Artificial Sequence
  Description of Artificial Sequence: Synthetic oligonucleotide
ucauaaaaaugaug

SEQ ID NO: 32385 - RNA, 14 nt, Artificial Sequence
  Description of Artificial Sequence: Synthetic oligonucleotide
gucauaaaaaugau

SEQ ID NO: 32386 - RNA, 14 nt, Artificial Sequence
  Description of Artificial Sequence: Synthetic oligonucleotide
agucauaaaaauga

SEQ ID NO: 32387 - RNA, 14 nt, Artificial Sequence
  Description of Artificial Sequence: Synthetic oligonucleotide
aagucauaaaaaug

SEQ ID NO: 32388 - RNA, 14 nt, Artificial Sequence
  Description of Artificial Sequence: Synthetic oligonucleotide
aaagucauaaaaau

SEQ ID NO: 32389 - RNA, 14 nt, Artificial Sequence
  Description of Artificial Sequence: Synthetic oligonucleotide
caaagucauaaaaa

SEQ ID NO: 32390 - RNA, 14 nt, Artificial Sequence
  Description of Artificial Sequence: Synthetic oligonucleotide
ucaaagucauaaaa

SEQ ID NO: 32391 - RNA, 14 nt, Artificial Sequence
  Description of Artificial Sequence: Synthetic oligonucleotide
uucaaagucauaaa

SEQ ID NO: 32392 - RNA, 14 nt, Artificial Sequence
  Description of Artificial Sequence: Synthetic oligonucleotide
uuucaaagucauaa

SEQ ID NO: 32393 - RNA, 14 nt, Artificial Sequence
  Description of Artificial Sequence: Synthetic oligonucleotide
cuuucaaagucaua

SEQ ID NO: 32394 - RNA, 14 nt, Artificial Sequence
  Description of Artificial Sequence: Synthetic oligonucleotide
ucuuucaaagucau

SEQ ID NO: 32395 - RNA, 14 nt, Artificial Sequence
  Description of Artificial Sequence: Synthetic oligonucleotide
cucuuucaaaguca

SEQ ID NO: 32396 - RNA, 14 nt, Artificial Sequence
  Description of Artificial Sequence: Synthetic oligonucleotide
ucucuuucaaaguc

SEQ ID NO: 32397 - RNA, 14 nt, Artificial Sequence
  Description of Artificial Sequence: Synthetic oligonucleotide
gucucuuucaaagu

SEQ ID NO: 32398 - RNA, 14 nt, Artificial Sequence
  Description of Artificial Sequence: Synthetic oligonucleotide
agucucuuucaaag

SEQ ID NO: 32399 - RNA, 14 nt, Artificial Sequence
  Description of Artificial Sequence: Synthetic oligonucleotide
aagucucuuucaaa

SEQ ID NO: 32400 - RNA, 14 nt, Artificial Sequence
  Description of Artificial Sequence: Synthetic oligonucleotide
caagucucuuucaa

SEQ ID NO: 32401 - RNA, 14 nt, Artificial Sequence
  Description of Artificial Sequence: Synthetic oligonucleotide
ccaagucucuuuca

SEQ ID NO: 32402 - RNA, 14 nt, Artificial Sequence
  Description of Artificial Sequence: Synthetic oligonucleotide
uccaagucucuuuc

SEQ ID NO: 32403 - RNA, 14 nt, Artificial Sequence
  Description of Artificial Sequence: Synthetic oligonucleotide
uuccaagucucuuu

SEQ ID NO: 32404 - RNA, 14 nt, Artificial Sequence
  Description of Artificial Sequence: Synthetic oligonucleotide
auuccaagucucuu

SEQ ID NO: 32405 - RNA, 14 nt, Artificial Sequence
  Description of Artificial Sequence: Synthetic oligonucleotide
aauuccaagucucu

SEQ ID NO: 32406 - RNA, 14 nt, Artificial Sequence
  Description of Artificial Sequence: Synthetic oligonucleotide
caauuccaagucuc

SEQ ID NO: 32407 - RNA, 14 nt, Artificial Sequence
  Description of Artificial Sequence: Synthetic oligonucleotide
gcaauuccaagucu

SEQ ID NO: 32408 - RNA, 14 nt, Artificial Sequence
  Description of Artificial Sequence: Synthetic oligonucleotide
agcaauuccaaguc

SEQ ID NO: 32409 - RNA, 14 nt, Artificial Sequence
  Description of Artificial Sequence: Synthetic oligonucleotide
aagcaauuccaagu

SEQ ID NO: 32410 - RNA, 14 nt, Artificial Sequence
  Description of Artificial Sequence: Synthetic oligonucleotide
caagcaauuccaag

SEQ ID NO: 32411 - RNA, 14 nt, Artificial Sequence
  Description of Artificial Sequence: Synthetic oligonucleotide
ucaagcaauuccaa

SEQ ID NO: 32412 - RNA, 14 nt, Artificial Sequence
  Description of Artificial Sequence: Synthetic oligonucleotide
uucaagcaauucca

SEQ ID NO: 32413 - RNA, 14 nt, Artificial Sequence
  Description of Artificial Sequence: Synthetic oligonucleotide
uuucaagcaauucc

SEQ ID NO: 32414 - RNA, 14 nt, Artificial Sequence
  Description of Artificial Sequence: Synthetic oligonucleotide
cuuucaagcaauuc

SEQ ID NO: 32415 - RNA, 14 nt, Artificial Sequence
  Description of Artificial Sequence: Synthetic oligonucleotide
ucuuucaagcaauu

SEQ ID NO: 32416 - RNA, 14 nt, Artificial Sequence
  Description of Artificial Sequence: Synthetic oligonucleotide
gucuuucaagcaau

SEQ ID NO: 32417 - RNA, 14 nt, Artificial Sequence
  Description of Artificial Sequence: Synthetic oligonucleotide
agucuuucaagcaa

SEQ ID NO: 32418 - RNA, 14 nt, Artificial Sequence
  Description of Artificial Sequence: Synthetic oligonucleotide
uagucuuucaagca

SEQ ID NO: 32419 - RNA, 14 nt, Artificial Sequence
  Description of Artificial Sequence: Synthetic oligonucleotide
cuagucuuucaagc

SEQ ID NO: 32420 - RNA, 14 nt, Artificial Sequence
  Description of Artificial Sequence: Synthetic oligonucleotide
ucuagucuuucaag

SEQ ID NO: 32421 - RNA, 14 nt, Artificial Sequence
  Description of Artificial Sequence: Synthetic oligonucleotide
uucuagucuuucaa

SEQ ID NO: 32422 - RNA, 14 nt, Artificial Sequence
  Description of Artificial Sequence: Synthetic oligonucleotide
auucuagucuuuca

SEQ ID NO: 32423 - RNA, 14 nt, Artificial Sequence
  Description of Artificial Sequence: Synthetic oligonucleotide
gauucuagucuuuc

SEQ ID NO: 32424 - RNA, 14 nt, Artificial Sequence
  Description of Artificial Sequence: Synthetic oligonucleotide
ggauucuagucuuu

SEQ ID NO: 32425 - RNA, 14 nt, Artificial Sequence
  Description of Artificial Sequence: Synthetic oligonucleotide
aggauucuagucuu

SEQ ID NO: 32426 - RNA, 14 nt, Artificial Sequence
  Description of Artificial Sequence: Synthetic oligonucleotide
aaggauucuagucu

SEQ ID NO: 32427 - RNA, 14 nt, Artificial Sequence
  Description of Artificial Sequence: Synthetic oligonucleotide
gaaggauucuaguc

SEQ ID NO: 32428 - RNA, 14 nt, Artificial Sequence
  Description of Artificial Sequence: Synthetic oligonucleotide
ugaaggauucuagu

SEQ ID NO: 32429 - RNA, 14 nt, Artificial Sequence
  Description of Artificial Sequence: Synthetic oligonucleotide
augaaggauucuag

SEQ ID NO: 32430 - RNA, 14 nt, Artificial Sequence
  Description of Artificial Sequence: Synthetic oligonucleotide
aaugaaggauucua

SEQ ID NO: 32431 - RNA, 14 nt, Artificial Sequence
  Description of Artificial Sequence: Synthetic oligonucleotide
aaaugaaggauucu

SEQ ID NO: 32432 - RNA, 14 nt, Artificial Sequence
  Description of Artificial Sequence: Synthetic oligonucleotide
gaaaugaaggauuc

SEQ ID NO: 32433 - RNA, 14 nt, Artificial Sequence
  Description of Artificial Sequence: Synthetic oligonucleotide
ugaaaugaaggauu

SEQ ID NO: 32434 - RNA, 14 nt, Artificial Sequence
  Description of Artificial Sequence: Synthetic oligonucleotide
uugaaaugaaggau

SEQ ID NO: 32435 - RNA, 14 nt, Artificial Sequence
  Description of Artificial Sequence: Synthetic oligonucleotide
cuugaaaugaagga

SEQ ID NO: 32436 - RNA, 14 nt, Artificial Sequence
  Description of Artificial Sequence: Synthetic oligonucleotide
acuugaaaugaagg

SEQ ID NO: 32437 - RNA, 14 nt, Artificial Sequence
  Description of Artificial Sequence: Synthetic oligonucleotide
cacuugaaaugaag

SEQ ID NO: 32438 - RNA, 14 nt, Artificial Sequence
  Description of Artificial Sequence: Synthetic oligonucleotide
acacuugaaaugaa

SEQ ID NO: 32439 - RNA, 14 nt, Artificial Sequence
  Description of Artificial Sequence: Synthetic oligonucleotide
uacacuugaaauga

SEQ ID NO: 32440 - RNA, 14 nt, Artificial Sequence
  Description of Artificial Sequence: Synthetic oligonucleotide
uuacacuugaaaug

SEQ ID NO: 32441 - RNA, 14 nt, Artificial Sequence
  Description of Artificial Sequence: Synthetic oligonucleotide
cuuacacuugaaau

SEQ ID NO: 32442 - RNA, 14 nt, Artificial Sequence
  Description of Artificial Sequence: Synthetic oligonucleotide
ucuuacacuugaaa

SEQ ID NO: 32443 - RNA, 14 nt, Artificial Sequence
  Description of Artificial Sequence: Synthetic oligonucleotide
cucuuacacuugaa

SEQ ID NO: 32444 - RNA, 14 nt, Artificial Sequence
  Description of Artificial Sequence: Synthetic oligonucleotide
ccucuuacacuuga

SEQ ID NO: 32445 - RNA, 14 nt, Artificial Sequence
  Description of Artificial Sequence: Synthetic oligonucleotide
cccucuuacacuug

SEQ ID NO: 32446 - RNA, 14 nt, Artificial Sequence
  Description of Artificial Sequence: Synthetic oligonucleotide
ucccucuuacacuu

SEQ ID NO: 32447 - RNA, 14 nt, Artificial Sequence
  Description of Artificial Sequence: Synthetic oligonucleotide
uucccucuuacacu

SEQ ID NO: 32448 - RNA, 14 nt, Artificial Sequence
  Description of Artificial Sequence: Synthetic oligonucleotide
uuucccucuuacac

SEQ ID NO: 32449 - RNA, 14 nt, Artificial Sequence
  Description of Artificial Sequence: Synthetic oligonucleotide
cuuucccucuuaca

SEQ ID NO: 32450 - RNA, 14 nt, Artificial Sequence
  Description of Artificial Sequence: Synthetic oligonucleotide
gcuuucccucuuac

SEQ ID NO: 32451 - RNA, 14 nt, Artificial Sequence
  Description of Artificial Sequence: Synthetic oligonucleotide
agcuuucccucuua

SEQ ID NO: 32452 - RNA, 14 nt, Artificial Sequence
  Description of Artificial Sequence: Synthetic oligonucleotide
uagcuuucccucuu

SEQ ID NO: 32453 - RNA, 14 nt, Artificial Sequence
  Description of Artificial Sequence: Synthetic oligonucleotide
auagcuuucccucu

SEQ ID NO: 32454 - RNA, 14 nt, Artificial Sequence
  Description of Artificial Sequence: Synthetic oligonucleotide
cauagcuuucccuc

SEQ ID NO: 32455 - RNA, 14 nt, Artificial Sequence
  Description of Artificial Sequence: Synthetic oligonucleotide
ucauagcuuucccu

SEQ ID NO: 32456 - RNA, 14 nt, Artificial Sequence
  Description of Artificial Sequence: Synthetic oligonucleotide
uucauagcuuuccc

SEQ ID NO: 32457 - RNA, 14 nt, Artificial Sequence
  Description of Artificial Sequence: Synthetic oligonucleotide
uuucauagcuuucc

SEQ ID NO: 32458 - RNA, 14 nt, Artificial Sequence
  Description of Artificial Sequence: Synthetic oligonucleotide
uuuucauagcuuuc

SEQ ID NO: 32459 - RNA, 14 nt, Artificial Sequence
  Description of Artificial Sequence: Synthetic oligonucleotide
uuuuucauagcuuu

SEQ ID NO: 32460 - RNA, 14 nt, Artificial Sequence
  Description of Artificial Sequence: Synthetic oligonucleotide
uuuuuucauagcuu

SEQ ID NO: 32461 - RNA, 14 nt, Artificial Sequence
  Description of Artificial Sequence: Synthetic oligonucleotide
auuuuuucauagcu

SEQ ID NO: 32462 - RNA, 14 nt, Artificial Sequence
  Description of Artificial Sequence: Synthetic oligonucleotide
cauuuuuucauagc

SEQ ID NO: 32463 - RNA, 14 nt, Artificial Sequence
  Description of Artificial Sequence: Synthetic oligonucleotide
ccauuuuuucauag

SEQ ID NO: 32464 - RNA, 14 nt, Artificial Sequence
  Description of Artificial Sequence: Synthetic oligonucleotide
cccauuuuuucaua

SEQ ID NO: 32465 - RNA, 14 nt, Artificial Sequence
  Description of Artificial Sequence: Synthetic oligonucleotide
acccauuuuuucau

SEQ ID NO: 32466 - RNA, 14 nt, Artificial Sequence
  Description of Artificial Sequence: Synthetic oligonucleotide
uacccauuuuuuca

SEQ ID NO: 32467 - RNA, 14 nt, Artificial Sequence
  Description of Artificial Sequence: Synthetic oligonucleotide
cuacccauuuuuuc

SEQ ID NO: 32468 - RNA, 14 nt, Artificial Sequence
  Description of Artificial Sequence: Synthetic oligonucleotide
ucuacccauuuuuu

SEQ ID NO: 32469 - RNA, 14 nt, Artificial Sequence
  Description of Artificial Sequence: Synthetic oligonucleotide
cucuacccauuuuu

SEQ ID NO: 32470 - RNA, 14 nt, Artificial Sequence
  Description of Artificial Sequence: Synthetic oligonucleotide
acucuacccauuuu

SEQ ID NO: 32471 - RNA, 14 nt, Artificial Sequence
  Description of Artificial Sequence: Synthetic oligonucleotide
gacucuacccauuu

SEQ ID NO: 32472 - RNA, 14 nt, Artificial Sequence
  Description of Artificial Sequence: Synthetic oligonucleotide
ugacucuacccauu

SEQ ID NO: 32473 - RNA, 14 nt, Artificial Sequence
  Description of Artificial Sequence: Synthetic oligonucleotide
uugacucuacccau

SEQ ID NO: 32474 - RNA, 14 nt, Artificial Sequence
  Description of Artificial Sequence: Synthetic oligonucleotide
auugacucuaccca

SEQ ID NO: 32475 - RNA, 14 nt, Artificial Sequence
  Description of Artificial Sequence: Synthetic oligonucleotide
aauugacucuaccc

SEQ ID NO: 32476 - RNA, 14 nt, Artificial Sequence
  Description of Artificial Sequence: Synthetic oligonucleotide
caauugacucuacc

SEQ ID NO: 32477 - RNA, 14 nt, Artificial Sequence
  Description of Artificial Sequence: Synthetic oligonucleotide
gcaauugacucuac

SEQ ID NO: 32478 - RNA, 14 nt, Artificial Sequence
  Description of Artificial Sequence: Synthetic oligonucleotide
agcaauugacucua

SEQ ID NO: 32479 - RNA, 14 nt, Artificial Sequence
  Description of Artificial Sequence: Synthetic oligonucleotide
uagcaauugacucu

SEQ ID NO: 32480 - RNA, 14 nt, Artificial Sequence
  Description of Artificial Sequence: Synthetic oligonucleotide
uuagcaauugacuc

SEQ ID NO: 32481 - RNA, 14 nt, Artificial Sequence
  Description of Artificial Sequence: Synthetic oligonucleotide
cuuagcaauugacu

SEQ ID NO: 32482 - RNA, 14 nt, Artificial Sequence
  Description of Artificial Sequence: Synthetic oligonucleotide
ucuuagcaauugac

SEQ ID NO: 32483 - RNA, 14 nt, Artificial Sequence
  Description of Artificial Sequence: Synthetic oligonucleotide
aucuuagcaauuga

SEQ ID NO: 32484 - RNA, 14 nt, Artificial Sequence
  Description of Artificial Sequence: Synthetic oligonucleotide
gaucuuagcaauug

SEQ ID NO: 32485 - RNA, 14 nt, Artificial Sequence
  Description of Artificial Sequence: Synthetic oligonucleotide
ugaucuuagcaauu

SEQ ID NO: 32486 - RNA, 14 nt, Artificial Sequence
  Description of Artificial Sequence: Synthetic oligonucleotide
augaucuuagcaau

SEQ ID NO: 32487 - RNA, 14 nt, Artificial Sequence
  Description of Artificial Sequence: Synthetic oligonucleotide
gaugaucuuagcaa

SEQ ID NO: 32488 - RNA, 14 nt, Artificial Sequence
  Description of Artificial Sequence: Synthetic oligonucleotide
ugaugaucuuagca

SEQ ID NO: 32489 - RNA, 14 nt, Artificial Sequence
  Description of Artificial Sequence: Synthetic oligonucleotide
cugaugaucuuagc

SEQ ID NO: 32490 - RNA, 14 nt, Artificial Sequence
  Description of Artificial Sequence: Synthetic oligonucleotide
ccugaugaucuuag

SEQ ID NO: 32491 - RNA, 14 nt, Artificial Sequence
  Description of Artificial Sequence: Synthetic oligonucleotide
uccugaugaucuua

SEQ ID NO: 32492 - RNA, 14 nt, Artificial Sequence
  Description of Artificial Sequence: Synthetic oligonucleotide
cuccugaugaucuu

SEQ ID NO: 32493 - RNA, 14 nt, Artificial Sequence
  Description of Artificial Sequence: Synthetic oligonucleotide
ccuccugaugaucu

SEQ ID NO: 32494 - RNA, 14 nt, Artificial Sequence
  Description of Artificial Sequence: Synthetic oligonucleotide
uccuccugaugauc

SEQ ID NO: 32495 - RNA, 14 nt, Artificial Sequence
  Description of Artificial Sequence: Synthetic oligonucleotide
uuccuccugaugau

SEQ ID NO: 32496 - RNA, 14 nt, Artificial Sequence
  Description of Artificial Sequence: Synthetic oligonucleotide
cuuccuccugauga

SEQ ID NO: 32497 - RNA, 14 nt, Artificial Sequence
  Description of Artificial Sequence: Synthetic oligonucleotide
ucuuccuccugaug

SEQ ID NO: 32498 - RNA, 14 nt, Artificial Sequence
  Description of Artificial Sequence: Synthetic oligonucleotide
uucuuccuccugau

SEQ ID NO: 32499 - RNA, 14 nt, Artificial Sequence
  Description of Artificial Sequence: Synthetic oligonucleotide
cuucuuccuccuga

SEQ ID NO: 32500 - RNA, 14 nt, Artificial Sequence
  Description of Artificial Sequence: Synthetic oligonucleotide
gcuucuuccuccug

SEQ ID NO: 32501 - RNA, 14 nt, Artificial Sequence
  Description of Artificial Sequence: Synthetic oligonucleotide
ugcuucuuccuccu

SEQ ID NO: 32502 - RNA, 14 nt, Artificial Sequence
  Description of Artificial Sequence: Synthetic oligonucleotide
uugcuucuuccucc

SEQ ID NO: 32503 - RNA, 14 nt, Artificial Sequence
  Description of Artificial Sequence: Synthetic oligonucleotide
cuugcuucuuccuc

SEQ ID NO: 32504 - RNA, 14 nt, Artificial Sequence
  Description of Artificial Sequence: Synthetic oligonucleotide
gcuugcuucuuccu

SEQ ID NO: 32505 - RNA, 14 nt, Artificial Sequence
  Description of Artificial Sequence: Synthetic oligonucleotide
agcuugcuucuucc

SEQ ID NO: 32506 - RNA, 14 nt, Artificial Sequence
  Description of Artificial Sequence: Synthetic oligonucleotide
gagcuugcuucuuc

SEQ ID NO: 32507 - RNA, 14 nt, Artificial Sequence
  Description of Artificial Sequence: Synthetic oligonucleotide
ugagcuugcuucuu

SEQ ID NO: 32508 - RNA, 14 nt, Artificial Sequence
  Description of Artificial Sequence: Synthetic oligonucleotide
cugagcuugcuucu

SEQ ID NO: 32509 - RNA, 14 nt, Artificial Sequence
  Description of Artificial Sequence: Synthetic oligonucleotide
ccugagcuugcuuc

SEQ ID NO: 32510 - RNA, 14 nt, Artificial Sequence
  Description of Artificial Sequence: Synthetic oligonucleotide
gccugagcuugcuu

SEQ ID NO: 32511 - RNA, 14 nt, Artificial Sequence
  Description of Artificial Sequence: Synthetic oligonucleotide
ugccugagcuugcu

SEQ ID NO: 32512 - RNA, 14 nt, Artificial Sequence
  Description of Artificial Sequence: Synthetic oligonucleotide
uugccugagcuugc

SEQ ID NO: 32513 - RNA, 14 nt, Artificial Sequence
  Description of Artificial Sequence: Synthetic oligonucleotide
uuugccugagcuug

SEQ ID NO: 32514 - RNA, 14 nt, Artificial Sequence
  Description of Artificial Sequence: Synthetic oligonucleotide
guuugccugagcuu

SEQ ID NO: 32515 - RNA, 14 nt, Artificial Sequence
  Description of Artificial Sequence: Synthetic oligonucleotide
cguuugccugagcu

SEQ ID NO: 32516 - RNA, 14 nt, Artificial Sequence
  Description of Artificial Sequence: Synthetic oligonucleotide
ccguuugccugagc

SEQ ID NO: 32517 - RNA, 14 nt, Artificial Sequence
  Description of Artificial Sequence: Synthetic oligonucleotide
uccguuugccugag

SEQ ID NO: 32518 - RNA, 14 nt, Artificial Sequence
  Description of Artificial Sequence: Synthetic oligonucleotide
cuccguuugccuga

SEQ ID NO: 32519 - RNA, 14 nt, Artificial Sequence
  Description of Artificial Sequence: Synthetic oligonucleotide
acuccguuugccug

SEQ ID NO: 32520 - RNA, 14 nt, Artificial Sequence
  Description of Artificial Sequence: Synthetic oligonucleotide
uacuccguuugccu

SEQ ID NO: 32521 - RNA, 14 nt, Artificial Sequence
  Description of Artificial Sequence: Synthetic oligonucleotide
uuacuccguuugcc

SEQ ID NO: 32522 - RNA, 14 nt, Artificial Sequence
  Description of Artificial Sequence: Synthetic oligonucleotide
cuuacuccguuugc

SEQ ID NO: 32523 - RNA, 14 nt, Artificial Sequence
  Description of Artificial Sequence: Synthetic oligonucleotide
gcuuacuccguuug

SEQ ID NO: 32524 - RNA, 14 nt, Artificial Sequence
  Description of Artificial Sequence: Synthetic oligonucleotide
ggcuuacuccguuu

SEQ ID NO: 32525 - RNA, 14 nt, Artificial Sequence
  Description of Artificial Sequence: Synthetic oligonucleotide
uggcuuacuccguu

SEQ ID NO: 32526 - RNA, 14 nt, Artificial Sequence
  Description of Artificial Sequence: Synthetic oligonucleotide
auggcuuacuccgu

SEQ ID NO: 32527 - RNA, 14 nt, Artificial Sequence
  Description of Artificial Sequence: Synthetic oligonucleotide
uauggcuuacuccg

SEQ ID NO: 32528 - RNA, 14 nt, Artificial Sequence
  Description of Artificial Sequence: Synthetic oligonucleotide
uuauggcuuacucc

SEQ ID NO: 32529 - RNA, 14 nt, Artificial Sequence
  Description of Artificial Sequence: Synthetic oligonucleotide
auuauggcuuacuc

SEQ ID NO: 32530 - RNA, 14 nt, Artificial Sequence
  Description of Artificial Sequence: Synthetic oligonucleotide
uauuauggcuuacu

SEQ ID NO: 32531 - RNA, 14 nt, Artificial Sequence
  Description of Artificial Sequence: Synthetic oligonucleotide
auauuauggcuuac

SEQ ID NO: 32532 - RNA, 14 nt, Artificial Sequence
  Description of Artificial Sequence: Synthetic oligonucleotide
aauauuauggcuua

SEQ ID NO: 32533 - RNA, 14 nt, Artificial Sequence
  Description of Artificial Sequence: Synthetic oligonucleotide
uaauauuauggcuu

SEQ ID NO: 32534 - RNA, 14 nt, Artificial Sequence
  Description of Artificial Sequence: Synthetic oligonucleotide
guaauauuauggcu

SEQ ID NO: 32535 - RNA, 14 nt, Artificial Sequence
  Description of Artificial Sequence: Synthetic oligonucleotide
gguaauauuauggc

SEQ ID NO: 32536 - RNA, 14 nt, Artificial Sequence
  Description of Artificial Sequence: Synthetic oligonucleotide
agguaauauuaugg

SEQ ID NO: 32537 - RNA, 14 nt, Artificial Sequence
  Description of Artificial Sequence: Synthetic oligonucleotide
aagguaauauuaug

SEQ ID NO: 32538 - RNA, 14 nt, Artificial Sequence
  Description of Artificial Sequence: Synthetic oligonucleotide
aaagguaauauuau

SEQ ID NO: 32539 - RNA, 14 nt, Artificial Sequence
  Description of Artificial Sequence: Synthetic oligonucleotide
caaagguaauauua

SEQ ID NO: 32540 - RNA, 14 nt, Artificial Sequence
  Description of Artificial Sequence: Synthetic oligonucleotide
ucaaagguaauauu

SEQ ID NO: 32541 - RNA, 14 nt, Artificial Sequence
  Description of Artificial Sequence: Synthetic oligonucleotide
uucaaagguaauau

SEQ ID NO: 32542 - RNA, 14 nt, Artificial Sequence
  Description of Artificial Sequence: Synthetic oligonucleotide
uuucaaagguaaua

SEQ ID NO: 32543 - RNA, 14 nt, Artificial Sequence
  Description of Artificial Sequence: Synthetic oligonucleotide
cuuucaaagguaau

SEQ ID NO: 32544 - RNA, 14 nt, Artificial Sequence
  Description of Artificial Sequence: Synthetic oligonucleotide
acuuucaaagguaa

SEQ ID NO: 32545 - RNA, 14 nt, Artificial Sequence
  Description of Artificial Sequence: Synthetic oligonucleotide
gacuuucaaaggua

SEQ ID NO: 32546 - RNA, 14 nt, Artificial Sequence
  Description of Artificial Sequence: Synthetic oligonucleotide
ggacuuucaaaggu

SEQ ID NO: 32547 - RNA, 14 nt, Artificial Sequence
  Description of Artificial Sequence: Synthetic oligonucleotide
uggacuuucaaagg

SEQ ID NO: 32548 - RNA, 14 nt, Artificial Sequence
  Description of Artificial Sequence: Synthetic oligonucleotide
guggacuuucaaag

SEQ ID NO: 32549 - RNA, 14 nt, Artificial Sequence
  Description of Artificial Sequence: Synthetic oligonucleotide
gguggacuuucaaa

SEQ ID NO: 32550 - RNA, 14 nt, Artificial Sequence
  Description of Artificial Sequence: Synthetic oligonucleotide
agguggacuuucaa

SEQ ID NO: 32551 - RNA, 14 nt, Artificial Sequence
  Description of Artificial Sequence: Synthetic oligonucleotide
gagguggacuuuca

SEQ ID NO: 32552 - RNA, 14 nt, Artificial Sequence
  Description of Artificial Sequence: Synthetic oligonucleotide
ggagguggacuuuc

SEQ ID NO: 32553 - RNA, 14 nt, Artificial Sequence
  Description of Artificial Sequence: Synthetic oligonucleotide
uggagguggacuuu

SEQ ID NO: 32554 - RNA, 14 nt, Artificial Sequence
  Description of Artificial Sequence: Synthetic oligonucleotide
guggagguggacuu

SEQ ID NO: 32555 - RNA, 14 nt, Artificial Sequence
  Description of Artificial Sequence: Synthetic oligonucleotide
gguggagguggacu

SEQ ID NO: 32556 - RNA, 14 nt, Artificial Sequence
  Description of Artificial Sequence: Synthetic oligonucleotide
ugguggagguggac

SEQ ID NO: 32557 - RNA, 14 nt, Artificial Sequence
  Description of Artificial Sequence: Synthetic oligonucleotide
uugguggaggugga

SEQ ID NO: 32558 - RNA, 14 nt, Artificial Sequence
  Description of Artificial Sequence: Synthetic oligonucleotide
auugguggaggugg

SEQ ID NO: 32559 - RNA, 14 nt, Artificial Sequence
  Description of Artificial Sequence: Synthetic oligonucleotide
aauugguggaggug

SEQ ID NO: 32560 - RNA, 14 nt, Artificial Sequence
  Description of Artificial Sequence: Synthetic oligonucleotide
caauugguggaggu

SEQ ID NO: 32561 - RNA, 14 nt, Artificial Sequence
  Description of Artificial Sequence: Synthetic oligonucleotide
ucaauugguggagg

SEQ ID NO: 32562 - RNA, 14 nt, Artificial Sequence
  Description of Artificial Sequence: Synthetic oligonucleotide
uucaauugguggag

SEQ ID NO: 32563 - RNA, 14 nt, Artificial Sequence
  Description of Artificial Sequence: Synthetic oligonucleotide
auucaauuggugga

SEQ ID NO: 32564 - RNA, 14 nt, Artificial Sequence
  Description of Artificial Sequence: Synthetic oligonucleotide
cauucaauuggugg

SEQ ID NO: 32565 - RNA, 14 nt, Artificial Sequence
  Description of Artificial Sequence: Synthetic oligonucleotide
ccauucaauuggug

SEQ ID NO: 32566 - RNA, 14 nt, Artificial Sequence
  Description of Artificial Sequence: Synthetic oligonucleotide
gccauucaauuggu

SEQ ID NO: 32567 - RNA, 14 nt, Artificial Sequence
  Description of Artificial Sequence: Synthetic oligonucleotide
ugccauucaauugg

SEQ ID NO: 32568 - RNA, 14 nt, Artificial Sequence
  Description of Artificial Sequence: Synthetic oligonucleotide
augccauucaauug

SEQ ID NO: 32569 - RNA, 14 nt, Artificial Sequence
  Description of Artificial Sequence: Synthetic oligonucleotide
uaugccauucaauu

SEQ ID NO: 32570 - RNA, 14 nt, Artificial Sequence
  Description of Artificial Sequence: Synthetic oligonucleotide
auaugccauucaau

SEQ ID NO: 32571 - RNA, 14 nt, Artificial Sequence
  Description of Artificial Sequence: Synthetic oligonucleotide
gauaugccauucaa

SEQ ID NO: 32572 - RNA, 14 nt, Artificial Sequence
  Description of Artificial Sequence: Synthetic oligonucleotide
ugauaugccauuca

SEQ ID NO: 32573 - RNA, 14 nt, Artificial Sequence
  Description of Artificial Sequence: Synthetic oligonucleotide
cugauaugccauuc

SEQ ID NO: 32574 - RNA, 14 nt, Artificial Sequence
  Description of Artificial Sequence: Synthetic oligonucleotide
gcugauaugccauu

SEQ ID NO: 32575 - RNA, 14 nt, Artificial Sequence
  Description of Artificial Sequence: Synthetic oligonucleotide
ugcugauaugccau

SEQ ID NO: 32576 - RNA, 14 nt, Artificial Sequence
  Description of Artificial Sequence: Synthetic oligonucleotide
uugcugauaugcca

SEQ ID NO: 32577 - RNA, 14 nt, Artificial Sequence
  Description of Artificial Sequence: Synthetic oligonucleotide
uuugcugauaugcc

SEQ ID NO: 32578 - RNA, 14 nt, Artificial Sequence
  Description of Artificial Sequence: Synthetic oligonucleotide
guuugcugauaugc

SEQ ID NO: 32579 - RNA, 14 nt, Artificial Sequence
  Description of Artificial Sequence: Synthetic oligonucleotide
gguuugcugauaug

SEQ ID NO: 32580 - RNA, 14 nt, Artificial Sequence
  Description of Artificial Sequence: Synthetic oligonucleotide
ugguuugcugauau

SEQ ID NO: 32581 - RNA, 14 nt, Artificial Sequence
  Description of Artificial Sequence: Synthetic oligonucleotide
cugguuugcugaua

SEQ ID NO: 32582 - RNA, 14 nt, Artificial Sequence
  Description of Artificial Sequence: Synthetic oligonucleotide
ccugguuugcugau

SEQ ID NO: 32583 - RNA, 14 nt, Artificial Sequence
  Description of Artificial Sequence: Synthetic oligonucleotide
uccugguuugcuga

SEQ ID NO: 32584 - RNA, 14 nt, Artificial Sequence
  Description of Artificial Sequence: Synthetic oligonucleotide
guccugguuugcug

SEQ ID NO: 32585 - RNA, 14 nt, Artificial Sequence
  Description of Artificial Sequence: Synthetic oligonucleotide
uguccugguuugcu

SEQ ID NO: 32586 - RNA, 14 nt, Artificial Sequence
  Description of Artificial Sequence: Synthetic oligonucleotide
cuguccugguuugc

SEQ ID NO: 32587 - RNA, 14 nt, Artificial Sequence
  Description of Artificial Sequence: Synthetic oligonucleotide
acuguccugguuug

SEQ ID NO: 32588 - RNA, 14 nt, Artificial Sequence
  Description of Artificial Sequence: Synthetic oligonucleotide
aacuguccugguuu

SEQ ID NO: 32589 - RNA, 14 nt, Artificial Sequence
  Description of Artificial Sequence: Synthetic oligonucleotide
aaacuguccugguu

SEQ ID NO: 32590 - RNA, 14 nt, Artificial Sequence
  Description of Artificial Sequence: Synthetic oligonucleotide
caaacuguccuggu

SEQ ID NO: 32591 - RNA, 14 nt, Artificial Sequence
  Description of Artificial Sequence: Synthetic oligonucleotide
ucaaacuguccugg

SEQ ID NO: 32592 - RNA, 14 nt, Artificial Sequence
  Description of Artificial Sequence: Synthetic oligonucleotide
uucaaacuguccug

SEQ ID NO: 32593 - RNA, 14 nt, Artificial Sequence
  Description of Artificial Sequence: Synthetic oligonucleotide
uuucaaacuguccu

SEQ ID NO: 32594 - RNA, 14 nt, Artificial Sequence
  Description of Artificial Sequence: Synthetic oligonucleotide
guuucaaacugucc

SEQ ID NO: 32595 - RNA, 14 nt, Artificial Sequence
  Description of Artificial Sequence: Synthetic oligonucleotide
uguuucaaacuguc

SEQ ID NO: 32596 - RNA, 14 nt, Artificial Sequence
  Description of Artificial Sequence: Synthetic oligonucleotide
auguuucaaacugu

SEQ ID NO: 32597 - RNA, 14 nt, Artificial Sequence
  Description of Artificial Sequence: Synthetic oligonucleotide
aauguuucaaacug

SEQ ID NO: 32598 - RNA, 14 nt, Artificial Sequence
  Description of Artificial Sequence: Synthetic oligonucleotide
aaauguuucaaacu

SEQ ID NO: 32599 - RNA, 14 nt, Artificial Sequence
  Description of Artificial Sequence: Synthetic oligonucleotide
caaauguuucaaac

SEQ ID NO: 32600 - RNA, 14 nt, Artificial Sequence
  Description of Artificial Sequence: Synthetic oligonucleotide
ucaaauguuucaaa

SEQ ID NO: 32601 - RNA, 14 nt, Artificial Sequence
  Description of Artificial Sequence: Synthetic oligonucleotide
aucaaauguuucaa

SEQ ID NO: 32602 - RNA, 14 nt, Artificial Sequence
  Description of Artificial Sequence: Synthetic oligonucleotide
gaucaaauguuuca

SEQ ID NO: 32603 - RNA, 14 nt, Artificial Sequence
  Description of Artificial Sequence: Synthetic oligonucleotide
agaucaaauguuuc

SEQ ID NO: 32604 - RNA, 14 nt, Artificial Sequence
  Description of Artificial Sequence: Synthetic oligonucleotide
gagaucaaauguuu

SEQ ID NO: 32605 - RNA, 14 nt, Artificial Sequence
  Description of Artificial Sequence: Synthetic oligonucleotide
ugagaucaaauguu

SEQ ID NO: 32606 - RNA, 14 nt, Artificial Sequence
  Description of Artificial Sequence: Synthetic oligonucleotide
augagaucaaaugu

SEQ ID NO: 32607 - RNA, 14 nt, Artificial Sequence
  Description of Artificial Sequence: Synthetic oligonucleotide
caugagaucaaaug

SEQ ID NO: 32608 - RNA, 14 nt, Artificial Sequence
  Description of Artificial Sequence: Synthetic oligonucleotide
ucaugagaucaaau

SEQ ID NO: 32609 - RNA, 14 nt, Artificial Sequence
  Description of Artificial Sequence: Synthetic oligonucleotide
gucaugagaucaaa

SEQ ID NO: 32610 - RNA, 14 nt, Artificial Sequence
  Description of Artificial Sequence: Synthetic oligonucleotide
ugucaugagaucaa

SEQ ID NO: 32611 - RNA, 14 nt, Artificial Sequence
  Description of Artificial Sequence: Synthetic oligonucleotide
gugucaugagauca

SEQ ID NO: 32612 - RNA, 14 nt, Artificial Sequence
  Description of Artificial Sequence: Synthetic oligonucleotide
agugucaugagauc

SEQ ID NO: 32613 - RNA, 14 nt, Artificial Sequence
  Description of Artificial Sequence: Synthetic oligonucleotide
aagugucaugagau

SEQ ID NO: 32614 - RNA, 14 nt, Artificial Sequence
  Description of Artificial Sequence: Synthetic oligonucleotide
gaagugucaugaga

SEQ ID NO: 32615 - RNA, 14 nt, Artificial Sequence
  Description of Artificial Sequence: Synthetic oligonucleotide
ugaagugucaugag

SEQ ID NO: 32616 - RNA, 14 nt, Artificial Sequence
  Description of Artificial Sequence: Synthetic oligonucleotide
augaagugucauga

SEQ ID NO: 32617 - RNA, 14 nt, Artificial Sequence
  Description of Artificial Sequence: Synthetic oligonucleotide
gaugaagugucaug

SEQ ID NO: 32618 - RNA, 14 nt, Artificial Sequence
  Description of Artificial Sequence: Synthetic oligonucleotide
ggaugaagugucau

SEQ ID NO: 32619 - RNA, 14 nt, Artificial Sequence
  Description of Artificial Sequence: Synthetic oligonucleotide
uggaugaaguguca

SEQ ID NO: 32620 - RNA, 14 nt, Artificial Sequence
  Description of Artificial Sequence: Synthetic oligonucleotide
uuggaugaaguguc

SEQ ID NO: 32621 - RNA, 14 nt, Artificial Sequence
  Description of Artificial Sequence: Synthetic oligonucleotide
auuggaugaagugu

SEQ ID NO: 32622 - RNA, 14 nt, Artificial Sequence
  Description of Artificial Sequence: Synthetic oligonucleotide
uauuggaugaagug

SEQ ID NO: 32623 - RNA, 14 nt, Artificial Sequence
  Description of Artificial Sequence: Synthetic oligonucleotide
cuauuggaugaagu

SEQ ID NO: 32624 - RNA, 14 nt, Artificial Sequence
  Description of Artificial Sequence: Synthetic oligonucleotide
ucuauuggaugaag

SEQ ID NO: 32625 - RNA, 14 nt, Artificial Sequence
  Description of Artificial Sequence: Synthetic oligonucleotide
uucuauuggaugaa

SEQ ID NO: 32626 - RNA, 14 nt, Artificial Sequence
  Description of Artificial Sequence: Synthetic oligonucleotide
uuucuauuggauga

SEQ ID NO: 32627 - RNA, 14 nt, Artificial Sequence
  Description of Artificial Sequence: Synthetic oligonucleotide
auuucuauuggaug

SEQ ID NO: 32628 - RNA, 14 nt, Artificial Sequence
  Description of Artificial Sequence: Synthetic oligonucleotide
aauuucuauuggau

SEQ ID NO: 32629 - RNA, 14 nt, Artificial Sequence
  Description of Artificial Sequence: Synthetic oligonucleotide
caauuucuauugga

SEQ ID NO: 32630 - RNA, 14 nt, Artificial Sequence
  Description of Artificial Sequence: Synthetic oligonucleotide
gcaauuucuauugg

SEQ ID NO: 32631 - RNA, 14 nt, Artificial Sequence
  Description of Artificial Sequence: Synthetic oligonucleotide
ugcaauuucuauug

SEQ ID NO: 32632 - RNA, 14 nt, Artificial Sequence
  Description of Artificial Sequence: Synthetic oligonucleotide
gugcaauuucuauu

SEQ ID NO: 32633 - RNA, 14 nt, Artificial Sequence
  Description of Artificial Sequence: Synthetic oligonucleotide
cgugcaauuucuau

SEQ ID NO: 32634 - RNA, 14 nt, Artificial Sequence
  Description of Artificial Sequence: Synthetic oligonucleotide
acgugcaauuucua

SEQ ID NO: 32635 - RNA, 14 nt, Artificial Sequence
  Description of Artificial Sequence: Synthetic oligonucleotide
gacgugcaauuucu

SEQ ID NO: 32636 - RNA, 14 nt, Artificial Sequence
  Description of Artificial Sequence: Synthetic oligonucleotide
ugacgugcaauuuc

SEQ ID NO: 32637 - RNA, 14 nt, Artificial Sequence
  Description of Artificial Sequence: Synthetic oligonucleotide
cugacgugcaauuu

SEQ ID NO: 32638 - RNA, 14 nt, Artificial Sequence
  Description of Artificial Sequence: Synthetic oligonucleotide
gcugacgugcaauu

SEQ ID NO: 32639 - RNA, 14 nt, Artificial Sequence
  Description of Artificial Sequence: Synthetic oligonucleotide
agcugacgugcaau

SEQ ID NO: 32640 - RNA, 14 nt, Artificial Sequence
  Description of Artificial Sequence: Synthetic oligonucleotide
cagcugacgugcaa

SEQ ID NO: 32641 - RNA, 14 nt, Artificial Sequence
  Description of Artificial Sequence: Synthetic oligonucleotide
ucagcugacgugca

SEQ ID NO: 32642 - RNA, 14 nt, Artificial Sequence
  Description of Artificial Sequence: Synthetic oligonucleotide
gucagcugacgugc

SEQ ID NO: 32643 - RNA, 14 nt, Artificial Sequence
  Description of Artificial Sequence: Synthetic oligonucleotide
ugucagcugacgug

SEQ ID NO: 32644 - RNA, 14 nt, Artificial Sequence
  Description of Artificial Sequence: Synthetic oligonucleotide
gugucagcugacgu

SEQ ID NO: 32645 - RNA, 14 nt, Artificial Sequence
  Description of Artificial Sequence: Synthetic oligonucleotide
agugucagcugacg

SEQ ID NO: 32646 - RNA, 14 nt, Artificial Sequence
  Description of Artificial Sequence: Synthetic oligonucleotide
aagugucagcugac

SEQ ID NO: 32647 - RNA, 14 nt, Artificial Sequence
  Description of Artificial Sequence: Synthetic oligonucleotide
aaagugucagcuga

SEQ ID NO: 32648 - RNA, 14 nt, Artificial Sequence
  Description of Artificial Sequence: Synthetic oligonucleotide
aaaagugucagcug

SEQ ID NO: 32649 - RNA, 14 nt, Artificial Sequence
  Description of Artificial Sequence: Synthetic oligonucleotide
caaaagugucagcu

SEQ ID NO: 32650 - RNA, 14 nt, Artificial Sequence
  Description of Artificial Sequence: Synthetic oligonucleotide
ccaaaagugucagc

SEQ ID NO: 32651 - RNA, 14 nt, Artificial Sequence
  Description of Artificial Sequence: Synthetic oligonucleotide
uccaaaagugucag

SEQ ID NO: 32652 - RNA, 14 nt, Artificial Sequence
  Description of Artificial Sequence: Synthetic oligonucleotide
cuccaaaaguguca

SEQ ID NO: 32653 - RNA, 14 nt, Artificial Sequence
  Description of Artificial Sequence: Synthetic oligonucleotide
acuccaaaaguguc

SEQ ID NO: 32654 - RNA, 14 nt, Artificial Sequence
  Description of Artificial Sequence: Synthetic oligonucleotide
gacuccaaaagugu

SEQ ID NO: 32655 - RNA, 14 nt, Artificial Sequence
  Description of Artificial Sequence: Synthetic oligonucleotide
agacuccaaaagug

SEQ ID NO: 32656 - RNA, 14 nt, Artificial Sequence
  Description of Artificial Sequence: Synthetic oligonucleotide
cagacuccaaaagu

SEQ ID NO: 32657 - RNA, 14 nt, Artificial Sequence
  Description of Artificial Sequence: Synthetic oligonucleotide
ucagacuccaaaag

SEQ ID NO: 32658 - RNA, 14 nt, Artificial Sequence
  Description of Artificial Sequence: Synthetic oligonucleotide
aucagacuccaaaa

SEQ ID NO: 32659 - RNA, 14 nt, Artificial Sequence
  Description of Artificial Sequence: Synthetic oligonucleotide
gaucagacuccaaa

SEQ ID NO: 32660 - RNA, 14 nt, Artificial Sequence
  Description of Artificial Sequence: Synthetic oligonucleotide
agaucagacuccaa

SEQ ID NO: 32661 - RNA, 14 nt, Artificial Sequence
  Description of Artificial Sequence: Synthetic oligonucleotide
aagaucagacucca

SEQ ID NO: 32662 - RNA, 14 nt, Artificial Sequence
  Description of Artificial Sequence: Synthetic oligonucleotide
aaagaucagacucc

SEQ ID NO: 32663 - RNA, 14 nt, Artificial Sequence
  Description of Artificial Sequence: Synthetic oligonucleotide
uaaagaucagacuc

SEQ ID NO: 32664 - RNA, 14 nt, Artificial Sequence
  Description of Artificial Sequence: Synthetic oligonucleotide
guaaagaucagacu

SEQ ID NO: 32665 - RNA, 14 nt, Artificial Sequence
  Description of Artificial Sequence: Synthetic oligonucleotide
uguaaagaucagac

SEQ ID NO: 32666 - RNA, 14 nt, Artificial Sequence
  Description of Artificial Sequence: Synthetic oligonucleotide
cuguaaagaucaga

SEQ ID NO: 32667 - RNA, 14 nt, Artificial Sequence
  Description of Artificial Sequence: Synthetic oligonucleotide
ccuguaaagaucag

SEQ ID NO: 32668 - RNA, 14 nt, Artificial Sequence
  Description of Artificial Sequence: Synthetic oligonucleotide
uccuguaaagauca

SEQ ID NO: 32669 - RNA, 14 nt, Artificial Sequence
  Description of Artificial Sequence: Synthetic oligonucleotide
uuccuguaaagauc

SEQ ID NO: 32670 - RNA, 14 nt, Artificial Sequence
  Description of Artificial Sequence: Synthetic oligonucleotide
uuuccuguaaagau

SEQ ID NO: 32671 - RNA, 14 nt, Artificial Sequence
  Description of Artificial Sequence: Synthetic oligonucleotide
cuuuccuguaaaga

SEQ ID NO: 32672 - RNA, 14 nt, Artificial Sequence
  Description of Artificial Sequence: Synthetic oligonucleotide
acuuuccuguaaag

SEQ ID NO: 32673 - RNA, 14 nt, Artificial Sequence
  Description of Artificial Sequence: Synthetic oligonucleotide
aacuuuccuguaaa

SEQ ID NO: 32674 - RNA, 14 nt, Artificial Sequence
  Description of Artificial Sequence: Synthetic oligonucleotide
gaacuuuccuguaa

SEQ ID NO: 32675 - RNA, 14 nt, Artificial Sequence
  Description of Artificial Sequence: Synthetic oligonucleotide
ugaacuuuccugua

SEQ ID NO: 32676 - RNA, 14 nt, Artificial Sequence
  Description of Artificial Sequence: Synthetic oligonucleotide
uugaacuuuccugu

SEQ ID NO: 32677 - RNA, 14 nt, Artificial Sequence
  Description of Artificial Sequence: Synthetic oligonucleotide
guugaacuuuccug

SEQ ID NO: 32678 - RNA, 14 nt, Artificial Sequence
  Description of Artificial Sequence: Synthetic oligonucleotide
gguugaacuuuccu

SEQ ID NO: 32679 - RNA, 14 nt, Artificial Sequence
  Description of Artificial Sequence: Synthetic oligonucleotide
cgguugaacuuucc

SEQ ID NO: 32680 - RNA, 14 nt, Artificial Sequence
  Description of Artificial Sequence: Synthetic oligonucleotide
acgguugaacuuuc

SEQ ID NO: 32681 - RNA, 14 nt, Artificial Sequence
  Description of Artificial Sequence: Synthetic oligonucleotide
gacgguugaacuuu

SEQ ID NO: 32682 - RNA, 14 nt, Artificial Sequence
  Description of Artificial Sequence: Synthetic oligonucleotide
agacgguugaacuu

SEQ ID NO: 32683 - RNA, 14 nt, Artificial Sequence
  Description of Artificial Sequence: Synthetic oligonucleotide
cagacgguugaacu

SEQ ID NO: 32684 - RNA, 14 nt, Artificial Sequence
  Description of Artificial Sequence: Synthetic oligonucleotide
ucagacgguugaac

SEQ ID NO: 32685 - RNA, 14 nt, Artificial Sequence
  Description of Artificial Sequence: Synthetic oligonucleotide
uucagacgguugaa

SEQ ID NO: 32686 - RNA, 14 nt, Artificial Sequence
  Description of Artificial Sequence: Synthetic oligonucleotide
guucagacgguuga

SEQ ID NO: 32687 - RNA, 14 nt, Artificial Sequence
  Description of Artificial Sequence: Synthetic oligonucleotide
aguucagacgguug

SEQ ID NO: 32688 - RNA, 14 nt, Artificial Sequence
  Description of Artificial Sequence: Synthetic oligonucleotide
aaguucagacgguu

SEQ ID NO: 32689 - RNA, 14 nt, Artificial Sequence
  Description of Artificial Sequence: Synthetic oligonucleotide
caaguucagacggu

SEQ ID NO: 32690 - RNA, 14 nt, Artificial Sequence
  Description of Artificial Sequence: Synthetic oligonucleotide
acaaguucagacgg

SEQ ID NO: 32691 - RNA, 14 nt, Artificial Sequence
  Description of Artificial Sequence: Synthetic oligonucleotide
uacaaguucagacg

SEQ ID NO: 32692 - RNA, 14 nt, Artificial Sequence
  Description of Artificial Sequence: Synthetic oligonucleotide
cuacaaguucagac

SEQ ID NO: 32693 - RNA, 14 nt, Artificial Sequence
  Description of Artificial Sequence: Synthetic oligonucleotide
ccuacaaguucaga

SEQ ID NO: 32694 - RNA, 14 nt, Artificial Sequence
  Description of Artificial Sequence: Synthetic oligonucleotide
cccuacaaguucag

SEQ ID NO: 32695 - RNA, 14 nt, Artificial Sequence
  Description of Artificial Sequence: Synthetic oligonucleotide
ucccuacaaguuca

SEQ ID NO: 32696 - RNA, 14 nt, Artificial Sequence
  Description of Artificial Sequence: Synthetic oligonucleotide
cucccuacaaguuc

SEQ ID NO: 32697 - RNA, 14 nt, Artificial Sequence
  Description of Artificial Sequence: Synthetic oligonucleotide
acucccuacaaguu

SEQ ID NO: 32698 - RNA, 14 nt, Artificial Sequence
  Description of Artificial Sequence: Synthetic oligonucleotide
cacucccuacaagu

SEQ ID NO: 32699 - RNA, 14 nt, Artificial Sequence
  Description of Artificial Sequence: Synthetic oligonucleotide
acacucccuacaag

SEQ ID NO: 32700 - RNA, 14 nt, Artificial Sequence
  Description of Artificial Sequence: Synthetic oligonucleotide
cacacucccuacaa

SEQ ID NO: 32701 - RNA, 14 nt, Artificial Sequence
  Description of Artificial Sequence: Synthetic oligonucleotide
acacacucccuaca

SEQ ID NO: 32702 - RNA, 14 nt, Artificial Sequence
  Description of Artificial Sequence: Synthetic oligonucleotide
cacacacucccuac

SEQ ID NO: 32703 - RNA, 14 nt, Artificial Sequence
  Description of Artificial Sequence: Synthetic oligonucleotide
ccacacacucccua

SEQ ID NO: 32704 - RNA, 14 nt, Artificial Sequence
  Description of Artificial Sequence: Synthetic oligonucleotide
uccacacacucccu

SEQ ID NO: 32705 - RNA, 14 nt, Artificial Sequence
  Description of Artificial Sequence: Synthetic oligonucleotide
guccacacacuccc

SEQ ID NO: 32706 - RNA, 14 nt, Artificial Sequence
  Description of Artificial Sequence: Synthetic oligonucleotide
gguccacacacucc

SEQ ID NO: 32707 - RNA, 14 nt, Artificial Sequence
  Description of Artificial Sequence: Synthetic oligonucleotide
ugguccacacacuc

SEQ ID NO: 32708 - RNA, 14 nt, Artificial Sequence
  Description of Artificial Sequence: Synthetic oligonucleotide
uugguccacacacu

SEQ ID NO: 32709 - RNA, 14 nt, Artificial Sequence
  Description of Artificial Sequence: Synthetic oligonucleotide
uuugguccacacac

SEQ ID NO: 32710 - RNA, 14 nt, Artificial Sequence
  Description of Artificial Sequence: Synthetic oligonucleotide
cuuugguccacaca

SEQ ID NO: 32711 - RNA, 14 nt, Artificial Sequence
  Description of Artificial Sequence: Synthetic oligonucleotide
ucuuugguccacac

SEQ ID NO: 32712 - RNA, 14 nt, Artificial Sequence
  Description of Artificial Sequence: Synthetic oligonucleotide
uucuuugguccaca

SEQ ID NO: 32713 - RNA, 14 nt, Artificial Sequence
  Description of Artificial Sequence: Synthetic oligonucleotide
cuucuuugguccac

SEQ ID NO: 32714 - RNA, 14 nt, Artificial Sequence
  Description of Artificial Sequence: Synthetic oligonucleotide
ucuucuuuggucca

SEQ ID NO: 32715 - RNA, 14 nt, Artificial Sequence
  Description of Artificial Sequence: Synthetic oligonucleotide
aucuucuuuggucc

SEQ ID NO: 32716 - RNA, 14 nt, Artificial Sequence
  Description of Artificial Sequence: Synthetic oligonucleotide
uaucuucuuugguc

SEQ ID NO: 32717 - RNA, 14 nt, Artificial Sequence
  Description of Artificial Sequence: Synthetic oligonucleotide
uuaucuucuuuggu

SEQ ID NO: 32718 - RNA, 14 nt, Artificial Sequence
  Description of Artificial Sequence: Synthetic oligonucleotide
uuuaucuucuuugg

SEQ ID NO: 32719 - RNA, 14 nt, Artificial Sequence
  Description of Artificial Sequence: Synthetic oligonucleotide
cuuuaucuucuuug

SEQ ID NO: 32720 - RNA, 14 nt, Artificial Sequence
  Description of Artificial Sequence: Synthetic oligonucleotide
ucuuuaucuucuuu

SEQ ID NO: 32721 - RNA, 14 nt, Artificial Sequence
  Description of Artificial Sequence: Synthetic oligonucleotide
uucuuuaucuucuu

SEQ ID NO: 32722 - RNA, 14 nt, Artificial Sequence
  Description of Artificial Sequence: Synthetic oligonucleotide
uuucuuuaucuucu

SEQ ID NO: 32723 - RNA, 14 nt, Artificial Sequence
  Description of Artificial Sequence: Synthetic oligonucleotide
auuucuuuaucuuc

SEQ ID NO: 32724 - RNA, 14 nt, Artificial Sequence
  Description of Artificial Sequence: Synthetic oligonucleotide
uauuucuuuaucuu

SEQ ID NO: 32725 - RNA, 14 nt, Artificial Sequence
  Description of Artificial Sequence: Synthetic oligonucleotide
uuauuucuuuaucu

SEQ ID NO: 32726 - RNA, 14 nt, Artificial Sequence
  Description of Artificial Sequence: Synthetic oligonucleotide
uuuauuucuuuauc

SEQ ID NO: 32727 - RNA, 14 nt, Artificial Sequence
  Description of Artificial Sequence: Synthetic oligonucleotide
auuuauuucuuuau

SEQ ID NO: 32728 - RNA, 14 nt, Artificial Sequence
  Description of Artificial Sequence: Synthetic oligonucleotide
aauuuauuucuuua

SEQ ID NO: 32729 - RNA, 14 nt, Artificial Sequence
  Description of Artificial Sequence: Synthetic oligonucleotide
gaauuuauuucuuu

SEQ ID NO: 32730 - RNA, 14 nt, Artificial Sequence
  Description of Artificial Sequence: Synthetic oligonucleotide
agaauuuauuucuu

SEQ ID NO: 32731 - RNA, 14 nt, Artificial Sequence
  Description of Artificial Sequence: Synthetic oligonucleotide
gagaauuuauuucu

SEQ ID NO: 32732 - RNA, 14 nt, Artificial Sequence
  Description of Artificial Sequence: Synthetic oligonucleotide
ggagaauuuauuuc

SEQ ID NO: 32733 - RNA, 14 nt, Artificial Sequence
  Description of Artificial Sequence: Synthetic oligonucleotide
uggagaauuuauuu

SEQ ID NO: 32734 - RNA, 14 nt, Artificial Sequence
  Description of Artificial Sequence: Synthetic oligonucleotide
uuggagaauuuauu

SEQ ID NO: 32735 - RNA, 14 nt, Artificial Sequence
  Description of Artificial Sequence: Synthetic oligonucleotide
uuuggagaauuuau

SEQ ID NO: 32736 - RNA, 14 nt, Artificial Sequence
  Description of Artificial Sequence: Synthetic oligonucleotide
auuuggagaauuua

SEQ ID NO: 32737 - RNA, 14 nt, Artificial Sequence
  Description of Artificial Sequence: Synthetic oligonucleotide
aauuuggagaauuu

SEQ ID NO: 32738 - RNA, 14 nt, Artificial Sequence
  Description of Artificial Sequence: Synthetic oligonucleotide
aaauuuggagaauu

SEQ ID NO: 32739 - RNA, 14 nt, Artificial Sequence
  Description of Artificial Sequence: Synthetic oligonucleotide
uaaauuuggagaau

SEQ ID NO: 32740 - RNA, 14 nt, Artificial Sequence
  Description of Artificial Sequence: Synthetic oligonucleotide
auaaauuuggagaa

SEQ ID NO: 32741 - RNA, 14 nt, Artificial Sequence
  Description of Artificial Sequence: Synthetic oligonucleotide
aauaaauuuggaga

SEQ ID NO: 32742 - RNA, 14 nt, Artificial Sequence
  Description of Artificial Sequence: Synthetic oligonucleotide
uaauaaauuuggag

SEQ ID NO: 32743 - RNA, 14 nt, Artificial Sequence
  Description of Artificial Sequence: Synthetic oligonucleotide
uuaauaaauuugga

SEQ ID NO: 32744 - RNA, 14 nt, Artificial Sequence
  Description of Artificial Sequence: Synthetic oligonucleotide
uuuaauaaauuugg

SEQ ID NO: 32745 - RNA, 14 nt, Artificial Sequence
  Description of Artificial Sequence: Synthetic oligonucleotide
uuuuaauaaauuug

SEQ ID NO: 32746 - RNA, 14 nt, Artificial Sequence
  Description of Artificial Sequence: Synthetic oligonucleotide
uuuuuaauaaauuu

SEQ ID NO: 32747 - RNA, 14 nt, Artificial Sequence
  Description of Artificial Sequence: Synthetic oligonucleotide
auuuuuaauaaauu

SEQ ID NO: 32748 - RNA, 14 nt, Artificial Sequence
  Description of Artificial Sequence: Synthetic oligonucleotide
cauuuuuaauaaau

(The sequence listing continues in the following parts.)
